United States Patent Application Publication US 2008/0113351 A1 - sequence listing, part 10

SEQ ID NO: 226999 - DNA, 19 bp, Homo sapiens
  siRNA target sequence for KIAA0769 (NM_014824.1,997-1015).
gccgacagttagaatcaga

SEQ ID NO: 227000 - DNA, 19 bp, Homo sapiens
  siRNA target sequence for KIAA0769 (NM_014824.1,998-1016).
ccgacagttagaatcagaa

SEQ ID NO: 227001 - DNA, 19 bp, Homo sapiens
  siRNA target sequence for KIAA0769 (NM_014824.1,999-1017).
cgacagttagaatcagaaa

SEQ ID NO: 227002 - DNA, 19 bp, Homo sapiens
  siRNA target sequence for KIAA0769 (NM_014824.1,1029-1047).
gaggagcacagtctaaata

SEQ ID NO: 227003 - DNA, 19 bp, Homo sapiens
  siRNA target sequence for KIAA0769 (NM_014824.1,1034-1052).
gcacagtctaaataaggaa

SEQ ID NO: 227004 - DNA, 19 bp, Homo sapiens
  siRNA target sequence for KIAA0769 (NM_014824.1,1077-1095).
gcacgtgagcataaaaaca

SEQ ID NO: 227005 - DNA, 19 bp, Homo sapiens
  siRNA target sequence for KIAA0769 (NM_014824.1,1081-1099).
gtgagcataaaaacattgt

SEQ ID NO: 227006 - DNA, 19 bp, Homo sapiens
  siRNA target sequence for KIAA0769 (NM_014824.1,1101-1119).
caccaacaacgggttctaa

SEQ ID NO: 227007 - DNA, 19 bp, Homo sapiens
  siRNA target sequence for KIAA0769 (NM_014824.1,1103-1121).
ccaacaacgggttctaaat

SEQ ID NO: 227008 - DNA, 19 bp, Homo sapiens
  siRNA target sequence for KIAA0769 (NM_014824.1,1159-1177).
gccgagcagagctagaaca

SEQ ID NO: 227009 - DNA, 19 bp, Homo sapiens
  siRNA target sequence for KIAA0769 (NM_014824.1,1191-1209).
gctagagaaaatattcgta

SEQ ID NO: 227010 - DNA, 19 bp, Homo sapiens
  siRNA target sequence for KIAA0769 (NM_014824.1,1240-1258).
cccggttggacctgctaaa

SEQ ID NO: 227011 - DNA, 19 bp, Homo sapiens
  siRNA target sequence for KIAA0769 (NM_014824.1,1243-1261).
ggttggacctgctaaagca

SEQ ID NO: 227012 - DNA, 19 bp, Homo sapiens
  siRNA target sequence for KIAA0769 (NM_014824.1,1275-1293).
gtggacacatggctaaaga

SEQ ID NO: 227013 - DNA, 19 bp, Homo sapiens
  siRNA target sequence for KIAA0769 (NM_014824.1,1277-1295).
ggacacatggctaaagagt

SEQ ID NO: 227014 - DNA, 19 bp, Homo sapiens
  siRNA target sequence for KIAA0769 (NM_014824.1,1294-1312).
gtgccatgaaccaagtaat

SEQ ID NO: 227015 - DNA, 19 bp, Homo sapiens
  siRNA target sequence for KIAA0769 (NM_014824.1,1355-1373).
gaccagtaatggcacttta

SEQ ID NO: 227016 - DNA, 19 bp, Homo sapiens
  siRNA target sequence for KIAA0769 (NM_014824.1,1367-1385).
cactttacactcgcttaat

SEQ ID NO: 227017 - DNA, 19 bp, Homo sapiens
  siRNA target sequence for KIAA0769 (NM_014824.1,1457-1475).
cccttctggcaccttaaga

SEQ ID NO: 227018 - DNA, 19 bp, Homo sapiens
  siRNA target sequence for KIAA0769 (NM_014824.1,1458-1476).
ccttctggcaccttaagaa

SEQ ID NO: 227019 - DNA, 19 bp, Homo sapiens
  siRNA target sequence for KIAA0769 (NM_014824.1,1459-1477).
cttctggcaccttaagaaa

SEQ ID NO: 227020 - DNA, 19 bp, Homo sapiens
  siRNA target sequence for KIAA0769 (NM_014824.1,1589-1607).
ctgggtaaaggctcgaaat

SEQ ID NO: 227021 - DNA, 19 bp, Homo sapiens
  siRNA target sequence for KIAA0769 (NM_014824.1,1591-1609).
gggtaaaggctcgaaataa

SEQ ID NO: 227022 - DNA, 19 bp, Homo sapiens
  siRNA target sequence for KIAA0769 (NM_014824.1,1633-1651).
cagaaaagtacctacagtt

SEQ ID NO: 227023 - DNA, 19 bp, Homo sapiens
  siRNA target sequence for KIAA0769 (NM_014824.1,1713-1731).
cacacgtccagcaattcca

SEQ ID NO: 227024 - DNA, 19 bp, Homo sapiens
  siRNA target sequence for KIAA0769 (NM_014824.1,1763-1781).
cggagatgccagtgtatgt

SEQ ID NO: 227025 - DNA, 19 bp, Homo sapiens
  siRNA target sequence for KIAA0769 (NM_014824.1,1764-1782).
ggagatgccagtgtatgtt

SEQ ID NO: 227026 - DNA, 19 bp, Homo sapiens
  siRNA target sequence for KIAA0769 (NM_014824.1,1765-1783).
gagatgccagtgtatgttt

SEQ ID NO: 227027 - DNA, 19 bp, Homo sapiens
  siRNA target sequence for KIAA0769 (NM_014824.1,1843-1861).
gagcaataatccgtatctt

SEQ ID NO: 227028 - DNA, 19 bp, Homo sapiens
  siRNA target sequence for KIAA0769 (NM_014824.1,1845-1863).
gcaataatccgtatcttga

SEQ ID NO: 227029 - DNA, 19 bp, Homo sapiens
  siRNA target sequence for KIAA0769 (NM_014824.1,1846-1864).
caataatccgtatcttgaa

SEQ ID NO: 227030 - DNA, 19 bp, Homo sapiens
  siRNA target sequence for KIAA0769 (NM_014824.1,1853-1871).
ccgtatcttgaacaaagaa

SEQ ID NO: 227031 - DNA, 19 bp, Homo sapiens
  siRNA target sequence for KIAA0769 (NM_014824.1,1859-1877).
cttgaacaaagaaaaccaa

SEQ ID NO: 227032 - DNA, 19 bp, Homo sapiens
  siRNA target sequence for KIAA0769 (NM_014824.1,1892-1910).
ctgggaaggggaattcaat

SEQ ID NO: 227033 - DNA, 19 bp, Homo sapiens
  siRNA target sequence for KIAA0769 (NM_014824.1,1934-1952).
ggtgctagtggaagaactt

SEQ ID NO: 227034 - DNA, 19 bp, Homo sapiens
  siRNA target sequence for KIAA0769 (NM_014824.1,1935-1953).
gtgctagtggaagaacttt

SEQ ID NO: 227035 - DNA, 19 bp, Homo sapiens
  siRNA target sequence for KIAA0769 (NM_014824.1,2087-2105).
gaggagctccctgtacttt

SEQ ID NO: 227036 - DNA, 19 bp, Homo sapiens
  siRNA target sequence for KIAA0769 (NM_014824.1,2113-2131).
ctccttcagcaaacgaaaa

SEQ ID NO: 227037 - DNA, 19 bp, Homo sapiens
  siRNA target sequence for KREMEN2 (NM_024507.2,928-946).
ggctgggcgtctatgaagt

SEQ ID NO: 227038 - DNA, 19 bp, Homo sapiens
  siRNA target sequence for KREMEN2 (NM_024507.2,979-997).
cgcctcagggcgtcatcta

SEQ ID NO: 227039 - DNA, 19 bp, Homo sapiens
  siRNA target sequence for LISCH7 (NM_015925.3,793-811).
gacagtggtgtgtattact

SEQ ID NO: 227040 - DNA, 19 bp, Homo sapiens
  siRNA target sequence for LISCH7 (NM_015925.3,1689-1707).
caggtctcccacgagtaat

SEQ ID NO: 227041 - DNA, 19 bp, Homo sapiens
  siRNA target sequence for LISCH7 (NM_015925.3,1692-1710).
gtctcccacgagtaatggt

SEQ ID NO: 227042 - DNA, 19 bp, Homo sapiens
  siRNA target sequence for LISCH7 (NM_015925.3,1902-1920).
cggggacctcccctatgat

SEQ ID NO: 227043 - DNA, 19 bp, Homo sapiens
  siRNA target sequence for LISCH7 (NM_015925.3,2080-2098).
gccctgagtcgggaaagtt

SEQ ID NO: 227044 - DNA, 19 bp, Homo sapiens
  siRNA target sequence for LISCH7 (NM_015925.3,2081-2099).
ccctgagtcgggaaagttt

SEQ ID NO: 227045 - DNA, 19 bp, Homo sapiens
  siRNA target sequence for LISCH7 (NM_015925.3,2082-2100).
cctgagtcgggaaagttta

SEQ ID NO: 227046 - DNA, 19 bp, Homo sapiens
  siRNA target sequence for LOC283985 (NM_178128.2,447-465).
gcaagatctggctgctttt

SEQ ID NO: 227047 - DNA, 19 bp, Homo sapiens
  siRNA target sequence for LOC283985 (NM_178128.2,692-710).
cggacgctggccctgattt

SEQ ID NO: 227048 - DNA, 19 bp, Homo sapiens
  siRNA target sequence for LOC283985 (NM_178128.2,819-837).
cctacctccacgtcaacat

SEQ ID NO: 227049 - DNA, 19 bp, Homo sapiens
  siRNA target sequence for LOC283985 (NM_178128.2,882-900).
cccgtcggattcacatgat

SEQ ID NO: 227050 - DNA, 19 bp, Homo sapiens
  siRNA target sequence for LOC283985 (NM_178128.2,884-902).
cgtcggattcacatgatga

SEQ ID NO: 227051 - DNA, 19 bp, Homo sapiens
  siRNA target sequence for LOC283985 (NM_178128.2,1068-1086).
cgtacaacgaggactcata

SEQ ID NO: 227052 - DNA, 19 bp, Homo sapiens
  siRNA target sequence for LOC283985 (NM_178128.2,1112-1130).
cgtcgctatgaggaattca

SEQ ID NO: 227053 - DNA, 19 bp, Homo sapiens
  siRNA target sequence for LOC283985 (NM_178128.2,1113-1131).
gtcgctatgaggaattcat

SEQ ID NO: 227054 - DNA, 19 bp, Homo sapiens
  siRNA target sequence for MAWBP (NM_022129.1,205-223).
ctgcttttatccgaaaact

SEQ ID NO: 227055 - DNA, 19 bp, Homo sapiens
  siRNA target sequence for MAWBP (NM_022129.1,377-395).
cactctgagtggagaacta

SEQ ID NO: 227056 - DNA, 19 bp, Homo sapiens
  siRNA target sequence for MAWBP (NM_022129.1,455-473).
ccaggacttccatgaagta

SEQ ID NO: 227057 - DNA, 19 bp, Homo sapiens
  siRNA target sequence for MAWBP (NM_022129.1,507-525).
ctggtccaggacatctgtt

SEQ ID NO: 227058 - DNA, 19 bp, Homo sapiens
  siRNA target sequence for MAWBP (NM_022129.1,555-573).
cgcctcagtgacgtttaca

SEQ ID NO: 227059 - DNA, 19 bp, Homo sapiens
  siRNA target sequence for MAWBP (NM_022129.1,611-629).
gaatctgctgcaagttgaa

SEQ ID NO: 227060 - DNA, 19 bp, Homo sapiens
  siRNA target sequence for MAWBP (NM_022129.1,642-660).
gtgaaagggcttattctta

SEQ ID NO: 227061 - DNA, 19 bp, Homo sapiens
  siRNA target sequence for MAWBP (NM_022129.1,650-668).
gcttattcttacccttaaa

SEQ ID NO: 227062 - DNA, 19 bp, Homo sapiens
  siRNA target sequence for MAWBP (NM_022129.1,679-697).
gtgggcagacccaagcatt

SEQ ID NO: 227063 - DNA, 19 bp, Homo sapiens
  siRNA target sequence for MAWBP (NM_022129.1,690-708).
caagcatttgacttttact

SEQ ID NO: 227064 - DNA, 19 bp, Homo sapiens
  siRNA target sequence for MAWBP (NM_022129.1,872-890).
cggaagggttgacattaga

SEQ ID NO: 227065 - DNA, 19 bp, Homo sapiens
  siRNA target sequence for MAWBP (NM_022129.1,895-913).
gtgcagctgttgttttaga

SEQ ID NO: 227066 - DNA, 19 bp, Homo sapiens
  siRNA target sequence for MGC10204 (NM_153329.2,192-210).
gcttgggccactatgtgaa

SEQ ID NO: 227067 - DNA, 19 bp, Homo sapiens
  siRNA target sequence for MGC10204 (NM_153329.2,193-211).
cttgggccactatgtgaat

SEQ ID NO: 227068 - DNA, 19 bp, Homo sapiens
  siRNA target sequence for MGC10204 (NM_153329.2,564-582).
gggagcccatgggagtaat

SEQ ID NO: 227069 - DNA, 19 bp, Homo sapiens
  siRNA target sequence for MGC10204 (NM_153329.2,565-583).
ggagcccatgggagtaatt

SEQ ID NO: 227070 - DNA, 19 bp, Homo sapiens
  siRNA target sequence for MGC10204 (NM_153329.2,1197-1215).
cttcggaacgcccattcta

SEQ ID NO: 227071 - DNA, 19 bp, Homo sapiens
  siRNA target sequence for MGC10204 (NM_153329.2,1508-1526).
ccagacgggctgtatgagt

SEQ ID NO: 227072 - DNA, 19 bp, Homo sapiens
  siRNA target sequence for MGC10204 (NM_153329.2,1509-1527).
cagacgggctgtatgagta

SEQ ID NO: 227073 - DNA, 19 bp, Homo sapiens
  siRNA target sequence for MGC10204 (NM_153329.2,1618-1636).
gccggctgggcctgaaata

SEQ ID NO: 227074 - DNA, 19 bp, Homo sapiens
  siRNA target sequence for MGC11335 (NM_030819.2,412-430).
gccggactgatgacatctt

SEQ ID NO: 227075 - DNA, 19 bp, Homo sapiens
  siRNA target sequence for MGC11335 (NM_030819.2,425-443).
catcttgctgcatcaagat

SEQ ID NO: 227076 - DNA, 19 bp, Homo sapiens
  siRNA target sequence for MGC11335 (NM_030819.2,474-492).
ccactcacccggcagatat

SEQ ID NO: 227077 - DNA, 19 bp, Homo sapiens
  siRNA target sequence for MGC11335 (NM_030819.2,493-511).
ccgtgaaggctctaggtat

SEQ ID NO: 227078 - DNA, 19 bp, Homo sapiens
  siRNA target sequence for MGC11335 (NM_030819.2,494-512).
cgtgaaggctctaggtatt

SEQ ID NO: 227079 - DNA, 19 bp, Homo sapiens
  siRNA target sequence for MGC11335 (NM_030819.2,653-671).
gctgatttcggaacactat

SEQ ID NO: 227080 - DNA, 19 bp, Homo sapiens
  siRNA target sequence for MGC11335 (NM_030819.2,672-690).
gtgggagcggtgatgatct

SEQ ID NO: 227081 - DNA, 19 bp, Homo sapiens
  siRNA target sequence for MGC11335 (NM_030819.2,901-919).
ctagcgatgacttctgttt

SEQ ID NO: 227082 - DNA, 19 bp, Homo sapiens
  siRNA target sequence for MGC11335 (NM_030819.2,952-970).
gcacagtgacactcaactt

SEQ ID NO: 227083 - DNA, 19 bp, Homo sapiens
  siRNA target sequence for MGC11335 (NM_030819.2,982-1000).
gcgcctttgtgcatgaagt

SEQ ID NO: 227084 - DNA, 19 bp, Homo sapiens
  siRNA target sequence for MGC11335 (NM_030819.2,1386-1404).
cttcagcggaacaacctat

SEQ ID NO: 227085 - DNA, 19 bp, Homo sapiens
  siRNA target sequence for MGC15763 (NM_138381.1,498-516).
gctgcgtcactgagattga

SEQ ID NO: 227086 - DNA, 19 bp, Homo sapiens
  siRNA target sequence for MGC15763 (NM_138381.1,537-555).
cttactctaaccagcataa

SEQ ID NO: 227087 - DNA, 19 bp, Homo sapiens
  siRNA target sequence for MGC15763 (NM_138381.1,603-621).
cttcgacgggagattgtgt

SEQ ID NO: 227088 - DNA, 19 bp, Homo sapiens
  siRNA target sequence for MGC15763 (NM_138381.1,677-695).
cttgcttgttgctgatcaa

SEQ ID NO: 227089 - DNA, 19 bp, Homo sapiens
  siRNA target sequence for MGC15763 (NM_138381.1,688-706).
ctgatcaagacttttcctt

SEQ ID NO: 227090 - DNA, 19 bp, Homo sapiens
  siRNA target sequence for MGC15763 (NM_138381.1,690-708).
gatcaagacttttccttta

SEQ ID NO: 227091 - DNA, 19 bp, Homo sapiens
  siRNA target sequence for MGC15763 (NM_138381.1,752-770).
ggttggtgggttttcaata

SEQ ID NO: 227092 - DNA, 19 bp, Homo sapiens
  siRNA target sequence for MGC15763 (NM_138381.1,753-771).
gttggtgggttttcaatat

SEQ ID NO: 227093 - DNA, 19 bp, Homo sapiens
  siRNA target sequence for MGC15763 (NM_138381.1,778-796).
gtcccagactgctagaaca

SEQ ID NO: 227094 - DNA, 19 bp, Homo sapiens
  siRNA target sequence for MGC15763 (NM_138381.1,846-864).
ctctgggttcacaatacgt

SEQ ID NO: 227095 - DNA, 19 bp, Homo sapiens
  siRNA target sequence for MGC15763 (NM_138381.1,924-942).
cctgcggatgcctctagaa

SEQ ID NO: 227096 - DNA, 19 bp, Homo sapiens
  siRNA target sequence for MGC15763 (NM_138381.1,925-943).
ctgcggatgcctctagaaa

SEQ ID NO: 227097 - DNA, 19 bp, Homo sapiens
  siRNA target sequence for MGC15763 (NM_138381.1,957-975).
gcaggaggagtcggaatta

SEQ ID NO: 227098 - DNA, 19 bp, Homo sapiens
  siRNA target sequence for MGC15763 (NM_138381.1,958-976).
caggaggagtcggaattaa

SEQ ID NO: 227099 - DNA, 19 bp, Homo sapiens
  siRNA target sequence for MGC15763 (NM_138381.1,1042-1060).
gatatgagataggaacaat

SEQ ID NO: 227100 - DNA, 19 bp, Homo sapiens
  siRNA target sequence for MGC15763 (NM_138381.1,1049-1067).
gataggaacaataaaacta

SEQ ID NO: 227101 - DNA, 19 bp, Homo sapiens
  siRNA target sequence for MGC15763 (NM_138381.1,1087-1105).
ccagcgaactcctgtttaa

SEQ ID NO: 227102 - DNA, 19 bp, Homo sapiens
  siRNA target sequence for MGC15763 (NM_138381.1,1090-1108).
gcgaactcctgtttaagaa

SEQ ID NO: 227103 - DNA, 19 bp, Homo sapiens
  siRNA target sequence for MGC15763 (NM_138381.1,1192-1210).
cggaactcaagccatacat

SEQ ID NO: 227104 - DNA, 19 bp, Homo sapiens
  siRNA target sequence for MGC15763 (NM_138381.1,1194-1212).
gaactcaagccatacatca

SEQ ID NO: 227105 - DNA, 19 bp, Homo sapiens
  siRNA target sequence for MGC15763 (NM_138381.1,1208-1226).
catcacggaaggaagaata

SEQ ID NO: 227106 - DNA, 19 bp, Homo sapiens
  siRNA target sequence for MGC15763 (NM_138381.1,1232-1250).
gaaggagataagagatcat

SEQ ID NO: 227107 - DNA, 19 bp, Homo sapiens
  siRNA target sequence for MGC15763 (NM_138381.1,1235-1253).
ggagataagagatcatatt

SEQ ID NO: 227108 - DNA, 19 bp, Homo sapiens
  siRNA target sequence for MGC15763 (NM_138381.1,1236-1254).
gagataagagatcatattt

SEQ ID NO: 227109 - DNA, 19 bp, Homo sapiens
  siRNA target sequence for MGC15763 (NM_138381.1,1288-1306).
ctccaatgacagacttttt

SEQ ID NO: 227110 - DNA, 19 bp, Homo sapiens
  siRNA target sequence for MGC23280 (NM_144683.2,477-495).
ccacaatgccggtatcagt

SEQ ID NO: 227111 - DNA, 19 bp, Homo sapiens
  siRNA target sequence for MGC23280 (NM_144683.2,506-524).
ggacccgtgaggcgtttaa

SEQ ID NO: 227112 - DNA, 19 bp, Homo sapiens
  siRNA target sequence for MGC23280 (NM_144683.2,509-527).
cccgtgaggcgtttaacct

SEQ ID NO: 227113 - DNA, 19 bp, Homo sapiens
  siRNA target sequence for MGC23280 (NM_144683.2,638-656).
gtcggggacgtcttgactt

SEQ ID NO: 227114 - DNA, 19 bp, Homo sapiens
  siRNA target sequence for MGC23280 (NM_144683.2,693-711).
ggagctgcgggcatatgct

SEQ ID NO: 227115 - DNA, 19 bp, Homo sapiens
  siRNA target sequence for MGC23280 (NM_144683.2,701-719).
gggcatatgctgacactaa

SEQ ID NO: 227116 - DNA, 19 bp, Homo sapiens
  siRNA target sequence for MGC23280 (NM_144683.2,714-732).
cactaagctggctaatgta

SEQ ID NO: 227117 - DNA, 19 bp, Homo sapiens
  siRNA target sequence for MGC23280 (NM_144683.2,839-857).
gatggctgcgcccactttt

SEQ ID NO: 227118 - DNA, 19 bp, Homo sapiens
  siRNA target sequence for MGC23280 (NM_144683.2,903-921).
ccagacacccctgtattgt

SEQ ID NO: 227119 - DNA, 19 bp, Homo sapiens
  siRNA target sequence for MGC23280 (NM_144683.2,943-961).
cccctcagtgggagatatt

SEQ ID NO: 227120 - DNA, 19 bp, Homo sapiens
  siRNA target sequence for MGC23280 (NM_144683.2,944-962).
ccctcagtgggagatattt

SEQ ID NO: 227121 - DNA, 19 bp, Homo sapiens
  siRNA target sequence for MGC23280 (NM_144683.2,1108-1126).
gaggccccatcttctctaa

SEQ ID NO: 227122 - DNA, 19 bp, Homo sapiens
  siRNA target sequence for MGC23280 (NM_144683.2,1175-1193).
ctcagagctcaccagattt

SEQ ID NO: 227123 - DNA, 19 bp, Homo sapiens
  siRNA target sequence for MGC23280 (NM_144683.2,1181-1199).
gctcaccagatttgtctaa

SEQ ID NO: 227124 - DNA, 19 bp, Homo sapiens
  siRNA target sequence for MGC23280 (NM_144683.2,1184-1202).
caccagatttgtctaagat

SEQ ID NO: 227125 - DNA, 19 bp, Homo sapiens
  siRNA target sequence for MGC23280 (NM_144683.2,1209-1227).
ccgaattcaggctaaagtt

SEQ ID NO: 227126 - DNA, 19 bp, Homo sapiens
  siRNA target sequence for MGC23280 (NM_144683.2,1211-1229).
gaattcaggctaaagttga

SEQ ID NO: 227127 - DNA, 19 bp, Homo sapiens
  siRNA target sequence for MGC4172 (NM_024308.2,435-453).
gtggttggaaggacatgtt

SEQ ID NO: 227128 - DNA, 19 bp, Homo sapiens
  siRNA target sequence for MGC4172 (NM_024308.2,437-455).
ggttggaaggacatgttca

SEQ ID NO: 227129 - DNA, 19 bp, Homo sapiens
  siRNA target sequence for MGC4172 (NM_024308.2,438-456).
gttggaaggacatgttcaa

SEQ ID NO: 227130 - DNA, 19 bp, Homo sapiens
  siRNA target sequence for MGC4172 (NM_024308.2,441-459).
ggaaggacatgttcaatgt

SEQ ID NO: 227131 - DNA, 19 bp, Homo sapiens
  siRNA target sequence for MGC4172 (NM_024308.2,523-541).
ggacgatgggcacatcatt

SEQ ID NO: 227132 - DNA, 19 bp, Homo sapiens
  siRNA target sequence for MGC4172 (NM_024308.2,524-542).
gacgatgggcacatcatta

SEQ ID NO: 227133 - DNA, 19 bp, Homo sapiens
  siRNA target sequence for MGC4172 (NM_024308.2,531-549).
ggcacatcattaacatcaa

SEQ ID NO: 227134 - DNA, 19 bp, Homo sapiens
  siRNA target sequence for MGC4172 (NM_024308.2,556-574).
gtctggccaccgagtgtta

SEQ ID NO: 227135 - DNA, 19 bp, Homo sapiens
  siRNA target sequence for MGC4172 (NM_024308.2,580-598).
gtctgtgacccacttctat

SEQ ID NO: 227136 - DNA, 19 bp, Homo sapiens
  siRNA target sequence for MGC4172 (NM_024308.2,695-713).
ggtgtggtggagacacaat

SEQ ID NO: 227137 - DNA, 19 bp, Homo sapiens
  siRNA target sequence for MGC4172 (NM_024308.2,696-714).
gtgtggtggagacacaatt

SEQ ID NO: 227138 - DNA, 19 bp, Homo sapiens
  siRNA target sequence for MGC4172 (NM_024308.2,706-724).
gacacaattcgccttcaaa

SEQ ID NO: 227139 - DNA, 19 bp, Homo sapiens
  siRNA target sequence for MGC4172 (NM_024308.2,708-726).
cacaattcgccttcaaact

SEQ ID NO: 227140 - DNA, 19 bp, Homo sapiens
  siRNA target sequence for MRPS30 (NM_016640.2,72-90).
cgcggtccgaggctttcat

SEQ ID NO: 227141 - DNA, 19 bp, Homo sapiens
  siRNA target sequence for MRPS30 (NM_016640.2,348-366).
cgctggtaccagtacttca

SEQ ID NO: 227142 - DNA, 19 bp, Homo sapiens
  siRNA target sequence for MRPS30 (NM_016640.2,537-555).
gaggagagcgaggtcatat

SEQ ID NO: 227143 - DNA, 19 bp, Homo sapiens
  siRNA target sequence for MRPS30 (NM_016640.2,539-557).
ggagagcgaggtcatatct

SEQ ID NO: 227144 - DNA, 19 bp, Homo sapiens
  siRNA target sequence for MRPS30 (NM_016640.2,540-558).
gagagcgaggtcatatctt

SEQ ID NO: 227145 - DNA, 19 bp, Homo sapiens
  siRNA target sequence for MRPS30 (NM_016640.2,665-683).
ctgggtgcgtggtgaagaa

SEQ ID NO: 227146 - DNA, 19 bp, Homo sapiens
  siRNA target sequence for MRPS30 (NM_016640.2,669-687).
gtgcgtggtgaagaaatta

SEQ ID NO: 227147 - DNA, 19 bp, Homo sapiens
  siRNA target sequence for MRPS30 (NM_016640.2,725-743).
gcgataccagatagatgat

SEQ ID NO: 227148 - DNA, 19 bp, Homo sapiens
  siRNA target sequence for MRPS30 (NM_016640.2,747-765).
ccaaacaaccagattcgaa

SEQ ID NO: 227149 - DNA, 19 bp, Homo sapiens
  siRNA target sequence for MRPS30 (NM_016640.2,748-766).
caaacaaccagattcgaat

SEQ ID NO: 227150 - DNA, 19 bp, Homo sapiens
  siRNA target sequence for MRPS30 (NM_016640.2,770-788).
caagcaactcgcagagttt

SEQ ID NO: 227151 - DNA, 19 bp, Homo sapiens
  siRNA target sequence for MRPS30 (NM_016640.2,791-809).
gccattggattattctgtt

SEQ ID NO: 227152 - DNA, 19 bp, Homo sapiens
  siRNA target sequence for MRPS30 (NM_016640.2,816-834).
gaaatccccactataaaat

SEQ ID NO: 227153 - DNA, 19 bp, Homo sapiens
  siRNA target sequence for MRPS30 (NM_016640.2,840-858).
ccagacaaacttccattat

SEQ ID NO: 227154 - DNA, 19 bp, Homo sapiens
  siRNA target sequence for MRPS30 (NM_016640.2,922-940).
gtcacacccagtttcatct

SEQ ID NO: 227155 - DNA, 19 bp, Homo sapiens
  siRNA target sequence for MRPS30 (NM_016640.2,939-957).
ctgttacctgacaaattaa

SEQ ID NO: 227156 - DNA, 19 bp, Homo sapiens
  siRNA target sequence for MRPS30 (NM_016640.2,941-959).
gttacctgacaaattaaga

SEQ ID NO: 227157 - DNA, 19 bp, Homo sapiens
  siRNA target sequence for MRPS30 (NM_016640.2,968-986).
gcttttgagacaaaactgt

SEQ ID NO: 227158 - DNA, 19 bp, Homo sapiens
  siRNA target sequence for MRPS30 (NM_016640.2,985-1003).
gtgctgatcagatagaagt

SEQ ID NO: 227159 - DNA, 19 bp, Homo sapiens
  siRNA target sequence for MRPS30 (NM_016640.2,1005-1023).
gtttttagagctaatgcta

SEQ ID NO: 227160 - DNA, 19 bp, Homo sapiens
  siRNA target sequence for MRPS30 (NM_016640.2,1048-1066).
gagcacaagctatgtatca

SEQ ID NO: 227161 - DNA, 19 bp, Homo sapiens
  siRNA target sequence for MRPS30 (NM_016640.2,1089-1107).
gttactcgaccttttgtct

SEQ ID NO: 227162 - DNA, 19 bp, Homo sapiens
  siRNA target sequence for MRPS30 (NM_016640.2,1148-1166).
ctgctaccagctaaatact

SEQ ID NO: 227163 - DNA, 19 bp, Homo sapiens
  siRNA target sequence for MRPS30 (NM_016640.2,1175-1193).
gactacacaagctgatcaa

SEQ ID NO: 227164 - DNA, 19 bp, Homo sapiens
  siRNA target sequence for MRPS30 (NM_016640.2,1180-1198).
cacaagctgatcaaaataa

SEQ ID NO: 227165 - DNA, 19 bp, Homo sapiens
  siRNA target sequence for MRPS30 (NM_016640.2,1191-1209).
caaaataaccctcgtaaaa

SEQ ID NO: 227166 - DNA, 19 bp, Homo sapiens
  siRNA target sequence for MRPS30 (NM_016640.2,1216-1234).
gttggggtacacaaagtaa

SEQ ID NO: 227167 - DNA, 19 bp, Homo sapiens
  siRNA target sequence for MRPS30 (NM_016640.2,1225-1243).
cacaaagtaagcctcttta

SEQ ID NO: 227168 - DNA, 19 bp, Homo sapiens
  siRNA target sequence for NOX3 (NM_015718.1,128-146).
gagggtctctccaccatat

SEQ ID NO: 227169 - DNA, 19 bp, Homo sapiens
  siRNA target sequence for NOX3 (NM_015718.1,130-148).
gggtctctccaccatatta

SEQ ID NO: 227170 - DNA, 19 bp, Homo sapiens
  siRNA target sequence for NOX3 (NM_015718.1,132-150).
gtctctccaccatattagt

SEQ ID NO: 227171 - DNA, 19 bp, Homo sapiens
  siRNA target sequence for NOX3 (NM_015718.1,190-208).
cacgttctactggtatgaa

SEQ ID NO: 227172 - DNA, 19 bp, Homo sapiens
  siRNA target sequence for NOX3 (NM_015718.1,223-241).
ccattacacacgagttatt

SEQ ID NO: 227173 - DNA, 19 bp, Homo sapiens
  siRNA target sequence for NOX3 (NM_015718.1,273-291).
ccgcactgtgcctgaattt

SEQ ID NO: 227174 - DNA, 19 bp, Homo sapiens
  siRNA target sequence for NOX3 (NM_015718.1,274-292).
cgcactgtgcctgaatttt

SEQ ID NO: 227175 - DNA, 19 bp, Homo sapiens
  siRNA target sequence for NOX3 (NM_015718.1,275-293).
gcactgtgcctgaatttta

SEQ ID NO: 227176 - DNA, 19 bp, Homo sapiens
  siRNA target sequence for NOX3 (NM_015718.1,319-337).
cagtcgaaaccttatttca

SEQ ID NO: 227177 - DNA, 19 bp, Homo sapiens
  siRNA target sequence for NOX3 (NM_015718.1,372-390).
cgtggaggaggcaattaga

SEQ ID NO: 227178 - DNA, 19 bp, Homo sapiens
  siRNA target sequence for NOX3 (NM_015718.1,425-443).
gggatagctgttaatgcaa

SEQ ID NO: 227179 - DNA, 19 bp, Homo sapiens
  siRNA target sequence for NOX3 (NM_015718.1,449-467).
cacatcgtggcgcatttct

SEQ ID NO: 227180 - DNA, 19 bp, Homo sapiens
  siRNA target sequence for NOX3 (NM_015718.1,592-610).
cacaaccactgaattgcta

SEQ ID NO: 227181 - DNA, 19 bp, Homo sapiens
  siRNA target sequence for NOX3 (NM_015718.1,669-687).
cctcgtcaactgagttcat

SEQ ID NO: 227182 - DNA, 19 bp, Homo sapiens
  siRNA target sequence for NOX3 (NM_015718.1,690-708).
gacaggcctcctatgagtt

SEQ ID NO: 227183 - DNA, 19 bp, Homo sapiens
  siRNA target sequence for NOX3 (NM_015718.1,803-821).
ctctctctgcacaacatca

SEQ ID NO: 227184 - DNA, 19 bp, Homo sapiens
  siRNA target sequence for NOX3 (NM_015718.1,892-910).
ggaaccctcggcttggaaa

SEQ ID NO: 227185 - DNA, 19 bp, Homo sapiens
  siRNA target sequence for NOX3 (NM_015718.1,893-911).
gaaccctcggcttggaaat

SEQ ID NO: 227186 - DNA, 19 bp, Homo sapiens
  siRNA target sequence for NOX3 (NM_015718.1,900-918).
cggcttggaaatggatttt

SEQ ID NO: 227187 - DNA, 19 bp, Homo sapiens
  siRNA target sequence for NOX3 (NM_015718.1,928-946).
ggtcttgtatgcatgtgaa

SEQ ID NO: 227188 - DNA, 19 bp, Homo sapiens
  siRNA target sequence for NOX3 (NM_015718.1,934-952).
gtatgcatgtgaaagaata

SEQ ID NO: 227189 - DNA, 19 bp, Homo sapiens
  siRNA target sequence for NOX3 (NM_015718.1,938-956).
gcatgtgaaagaataatta

SEQ ID NO: 227190 - DNA, 19 bp, Homo sapiens
  siRNA target sequence for NOX3 (NM_015718.1,961-979).
ctggcgatttcaacaagaa

SEQ ID NO: 227191 - DNA, 19 bp, Homo sapiens
  siRNA target sequence for NOX3 (NM_015718.1,1055-1073).
gcgccagggcagtacatct

SEQ ID NO: 227192 - DNA, 19 bp, Homo sapiens
  siRNA target sequence for NOX3 (NM_015718.1,1275-1293).
ctgccctgacagatgtatt

SEQ ID NO: 227193 - DNA, 19 bp, Homo sapiens
  siRNA target sequence for NOX3 (NM_015718.1,1432-1450).
ccgggatgcaagagctttt

SEQ ID NO: 227194 - DNA, 19 bp, Homo sapiens
  siRNA target sequence for NOX3 (NM_015718.1,1436-1454).
gatgcaagagcttttgagt

SEQ ID NO: 227195 - DNA, 19 bp, Homo sapiens
  siRNA target sequence for NOX3 (NM_015718.1,1494-1512).
gtgagcaggggaaaactca

SEQ ID NO: 227196 - DNA, 19 bp, Homo sapiens
  siRNA target sequence for NOX3 (NM_015718.1,1558-1576).
ggctcttcacatagcttta

SEQ ID NO: 227197 - DNA, 19 bp, Homo sapiens
  siRNA target sequence for NOX3 (NM_015718.1,1633-1651).
gaggcccaactggaacaat

SEQ ID NO: 227198 - DNA, 19 bp, Homo sapiens
  siRNA target sequence for NOX3 (NM_015718.1,1637-1655).
cccaactggaacaatgagt

SEQ ID NO: 227199 - DNA, 19 bp, Homo sapiens
  siRNA target sequence for NOX3 (NM_015718.1,1638-1656).
ccaactggaacaatgagtt

SEQ ID NO: 227200 - DNA, 19 bp, Homo sapiens
  siRNA target sequence for NOX3 (NM_015718.1,1657-1675).
caagcagattgcctacaat

SEQ ID NO: 227201 - DNA, 19 bp, Homo sapiens
  siRNA target sequence for NOX3 (NM_015718.1,1686-1704).
gcagtattggcgtgttctt

SEQ ID NO: 227202 - DNA, 19 bp, Homo sapiens
  siRNA target sequence for NOX3 (NM_015718.1,1725-1743).
cgaggacacttcaaaagat

SEQ ID NO: 227203 - DNA, 19 bp, Homo sapiens
  siRNA target sequence for NOX3 (NM_015718.1,1766-1784).
gaccccagaggtgttcatt

SEQ ID NO: 227204 - DNA, 19 bp, Homo sapiens
  siRNA target sequence for NR1 (NM_014434.1,260-278).
gaacttctggaggtttata

SEQ ID NO: 227205 - DNA, 19 bp, Homo sapiens
  siRNA target sequence for NR1 (NM_014434.1,346-364).
cctcatacgccaagttcaa

SEQ ID NO: 227206 - DNA, 19 bp, Homo sapiens
  siRNA target sequence for NR1 (NM_014434.1,349-367).
catacgccaagttcaactt

SEQ ID NO: 227207 - DNA, 19 bp, Homo sapiens
  siRNA target sequence for NR1 (NM_014434.1,726-744).
gacgttcggctgattgagt

SEQ ID NO: 227208 - DNA, 19 bp, Homo sapiens
  siRNA target sequence for NR1 (NM_014434.1,728-746).
cgttcggctgattgagttt

SEQ ID NO: 227209 - DNA, 19 bp, Homo sapiens
  siRNA target sequence for NR1 (NM_014434.1,781-799).
gtgatgtggtgctgattca

SEQ ID NO: 227210 - DNA, 19 bp, Homo sapiens
  siRNA target sequence for NR1 (NM_014434.1,990-1008).
gaactcctggcctgtctat

SEQ ID NO: 227211 - DNA, 19 bp, Homo sapiens
  siRNA target sequence for NR1 (NM_014434.1,1393-1411).
cagacacacctgtgatcat

SEQ ID NO: 227212 - DNA, 19 bp, Homo sapiens
  siRNA target sequence for NR1 (NM_014434.1,1507-1525).
gctggcgggaccaagactt

SEQ ID NO: 227213 - DNA, 19 bp, Homo sapiens
  siRNA target sequence for NR1 (NM_014434.1,1510-1528).
ggcgggaccaagacttcta

SEQ ID NO: 227214 - DNA, 19 bp, Homo sapiens
  siRNA target sequence for NR1 (NM_014434.1,1512-1530).
cgggaccaagacttctact

SEQ ID NO: 227215 - DNA, 19 bp, Homo sapiens
  siRNA target sequence for NR1 (NM_014434.1,1596-1614).
gaacaggagcagaaagtat

SEQ ID NO: 227216 - DNA, 19 bp, Homo sapiens
  siRNA target sequence for NR1 (NM_014434.1,1775-1793).
ggacgcagccgcgtatcta

SEQ ID NO: 227217 - DNA, 19 bp, Homo sapiens
  siRNA target sequence for PECR (NM_018441.2,211-229).
cccgtaagttggagagatt

SEQ ID NO: 227218 - DNA, 19 bp, Homo sapiens
  siRNA target sequence for PECR (NM_018441.2,213-231).
cgtaagttggagagattga

SEQ ID NO: 227219 - DNA, 19 bp, Homo sapiens
  siRNA target sequence for PECR (NM_018441.2,214-232).
gtaagttggagagattgaa

SEQ ID NO: 227220 - DNA, 19 bp, Homo sapiens
  siRNA target sequence for PECR (NM_018441.2,230-248).
gaagtctgcggcagatgaa

SEQ ID NO: 227221 - DNA, 19 bp, Homo sapiens
  siRNA target sequence for PECR (NM_018441.2,282-300).
cgagtcattcccatacaat

SEQ ID NO: 227222 - DNA, 19 bp, Homo sapiens
  siRNA target sequence for PECR (NM_018441.2,335-353).
ggtcaaatctaccttagat

SEQ ID NO: 227223 - DNA, 19 bp, Homo sapiens
  siRNA target sequence for PECR (NM_018441.2,336-354).
gtcaaatctaccttagata

SEQ ID NO: 227224 - DNA, 19 bp, Homo sapiens
  siRNA target sequence for PECR (NM_018441.2,338-356).
caaatctaccttagatact

SEQ ID NO: 227225 - DNA, 19 bp, Homo sapiens
  siRNA target sequence for PECR (NM_018441.2,355-373).
cttttggtaagatcaattt

SEQ ID NO: 227226 - DNA, 19 bp, Homo sapiens
  siRNA target sequence for PECR (NM_018441.2,411-429).
gctgaacacatcagttcta

SEQ ID NO: 227227 - DNA, 19 bp, Homo sapiens
  siRNA target sequence for PECR (NM_018441.2,412-430).
ctgaacacatcagttctaa

SEQ ID NO: 227228 - DNA, 19 bp, Homo sapiens
  siRNA target sequence for PECR (NM_018441.2,459-477).
ctgacgggtaccttctaca

SEQ ID NO: 227229 - DNA, 19 bp, Homo sapiens
  siRNA target sequence for PECR (NM_018441.2,517-535).
gaggatctatcgtcaatat

SEQ ID NO: 227230 - DNA, 19 bp, Homo sapiens
  siRNA target sequence for PECR (NM_018441.2,519-537).
ggatctatcgtcaatatca

SEQ ID NO: 227231 - DNA, 19 bp, Homo sapiens
  siRNA target sequence for PECR (NM_018441.2,520-538).
gatctatcgtcaatatcat

SEQ ID NO: 227232 - DNA, 19 bp, Homo sapiens
  siRNA target sequence for PECR (NM_018441.2,523-541).
ctatcgtcaatatcattgt

SEQ ID NO: 227233 - DNA, 19 bp, Homo sapiens
  siRNA target sequence for PECR (NM_018441.2,536-554).
cattgtccctactaaagct

SEQ ID NO: 227234 - DNA, 19 bp, Homo sapiens
  siRNA target sequence for PECR (NM_018441.2,542-560).
ccctactaaagctggattt

SEQ ID NO: 227235 - DNA, 19 bp, Homo sapiens
  siRNA target sequence for PECR (NM_018441.2,583-601).
ctgcaagagcaggtgttta

SEQ ID NO: 227236 - DNA, 19 bp, Homo sapiens
  siRNA target sequence for PECR (NM_018441.2,605-623).
cctcaccaaatctttagct

SEQ ID NO: 227237 - DNA, 19 bp, Homo sapiens
  siRNA target sequence for PECR (NM_018441.2,606-624).
ctcaccaaatctttagctt

SEQ ID NO: 227238 - DNA, 19 bp, Homo sapiens
  siRNA target sequence for PECR (NM_018441.2,658-676).
gtgttgcccctggagttat

SEQ ID NO: 227239 - DNA, 19 bp, Homo sapiens
  siRNA target sequence for PECR (NM_018441.2,660-678).
gttgcccctggagttattt

SEQ ID NO: 227240 - DNA, 19 bp, Homo sapiens
  siRNA target sequence for PECR (NM_018441.2,686-704).
gactgctgtggagaactat

SEQ ID NO: 227241 - DNA, 19 bp, Homo sapiens
  siRNA target sequence for PECR (NM_018441.2,690-708).
gctgtggagaactatggtt

SEQ ID NO: 227242 - DNA, 19 bp, Homo sapiens
  siRNA target sequence for PECR (NM_018441.2,710-728).
ctggggacaaagcttcttt

SEQ ID NO: 227243 - DNA, 19 bp, Homo sapiens
  siRNA target sequence for PECR (NM_018441.2,713-731).
gggacaaagcttctttgaa

SEQ ID NO: 227244 - DNA, 19 bp, Homo sapiens
  siRNA target sequence for PECR (NM_018441.2,743-761).
gaaaatccccgctaaacga

SEQ ID NO: 227245 - DNA, 19 bp, Homo sapiens
  siRNA target sequence for PECR (NM_018441.2,749-767).
ccccgctaaacgaattggt

SEQ ID NO: 227246 - DNA, 19 bp, Homo sapiens
  siRNA target sequence for PECR (NM_018441.2,919-937).
gggacctttctgttgtcaa

SEQ ID NO: 227247 - DNA, 19 bp, Homo sapiens
  siRNA target sequence for PECR (NM_018441.2,920-938).
ggacctttctgttgtcaaa

SEQ ID NO: 227248 - DNA, 19 bp, Homo sapiens
  siRNA target sequence for PHYH (NM_006214.2,144-162).
cccacttcagggactattt

SEQ ID NO: 227249 - DNA, 19 bp, Homo sapiens
  siRNA target sequence for PHYH (NM_006214.2,172-190).
gtttccatcctcaacaatt

SEQ ID NO: 227250 - DNA, 19 bp, Homo sapiens
  siRNA target sequence for PHYH (NM_006214.2,180-198).
cctcaacaattccagtata

SEQ ID NO: 227251 - DNA, 19 bp, Homo sapiens
  siRNA target sequence for PHYH (NM_006214.2,191-209).
ccagtatactctggataat

SEQ ID NO: 227252 - DNA, 19 bp, Homo sapiens
  siRNA target sequence for PHYH (NM_006214.2,220-238).
ccctggaacagagaaaatt

SEQ ID NO: 227253 - DNA, 19 bp, Homo sapiens
  siRNA target sequence for PHYH (NM_006214.2,294-312).
caacgctttcggaatgagt

SEQ ID NO: 227254 - DNA, 19 bp, Homo sapiens
  siRNA target sequence for PHYH (NM_006214.2,298-316).
gctttcggaatgagtttga

SEQ ID NO: 227255 - DNA, 19 bp, Homo sapiens
  siRNA target sequence for PHYH (NM_006214.2,333-351).
gaggtgaaaccattaggat

SEQ ID NO: 227256 - DNA, 19 bp, Homo sapiens
  siRNA target sequence for PHYH (NM_006214.2,335-353).
ggtgaaaccattaggatta

SEQ ID NO: 227257 - DNA, 19 bp, Homo sapiens
  siRNA target sequence for PHYH (NM_006214.2,336-354).
gtgaaaccattaggattaa

SEQ ID NO: 227258 - DNA, 19 bp, Homo sapiens
  siRNA target sequence for PHYH (NM_006214.2,338-356).
gaaaccattaggattaaca

SEQ ID NO: 227259 - DNA, 19 bp, Homo sapiens
  siRNA target sequence for PHYH (NM_006214.2,342-360).
ccattaggattaacagtaa

SEQ ID NO: 227260 - DNA, 19 bp, Homo sapiens
  siRNA target sequence for PHYH (NM_006214.2,343-361).
cattaggattaacagtaat

SEQ ID NO: 227261 - DNA, 19 bp, Homo sapiens
  siRNA target sequence for PHYH (NM_006214.2,364-382).
gagatgtgaccatttcgaa

SEQ ID NO: 227262 - DNA, 19 bp, Homo sapiens
  siRNA target sequence for PHYH (NM_006214.2,366-384).
gatgtgaccatttcgaaat

SEQ ID NO: 227263 - DNA, 19 bp, Homo sapiens
  siRNA target sequence for PHYH (NM_006214.2,374-392).
catttcgaaatccgaatat

SEQ ID NO: 227264 - DNA, 19 bp, Homo sapiens
  siRNA target sequence for PHYH (NM_006214.2,415-433).
cgaaggtccaggatttcca

SEQ ID NO: 227265 - DNA, 19 bp, Homo sapiens
  siRNA target sequence for PHYH (NM_006214.2,463-481).
ctctccccgagattctgaa

SEQ ID NO: 227266 - DNA, 19 bp, Homo sapiens
  siRNA target sequence for PHYH (NM_006214.2,467-485).
ccccgagattctgaaatat

SEQ ID NO: 227267 - DNA, 19 bp, Homo sapiens
  siRNA target sequence for PHYH (NM_006214.2,469-487).
ccgagattctgaaatatgt

SEQ ID NO: 227268 - DNA, 19 bp, Homo sapiens
  siRNA target sequence for PHYH (NM_006214.2,494-512).
cttcactggacctaatatt

SEQ ID NO: 227269 - DNA, 19 bp, Homo sapiens
  siRNA target sequence for PHYH (NM_006214.2,582-600).
caccaggacctgcactatt

SEQ ID NO: 227270 - DNA, 19 bp, Homo sapiens
  siRNA target sequence for PHYH (NM_006214.2,734-752).
ggaggggggagttaacaaa

SEQ ID NO: 227271 - DNA, 19 bp, Homo sapiens
  siRNA target sequence for PHYH (NM_006214.2,738-756).
gggggagttaacaaaatgt

SEQ ID NO: 227272 - DNA, 19 bp, Homo sapiens
  siRNA target sequence for PHYH (NM_006214.2,739-757).
ggggagttaacaaaatgtt

SEQ ID NO: 227273 - DNA, 19 bp, Homo sapiens
  siRNA target sequence for PHYH (NM_006214.2,848-866).
ccacggatctggtcagaat

SEQ ID NO: 227274 - DNA, 19 bp, Homo sapiens
  siRNA target sequence for PHYH (NM_006214.2,851-869).
cggatctggtcagaataaa

SEQ ID NO: 227275 - DNA, 19 bp, Homo sapiens
  siRNA target sequence for PHYH (NM_006214.2,876-894).
ggattccggaaggcaattt

SEQ ID NO: 227276 - DNA, 19 bp, Homo sapiens
  siRNA target sequence for PHYH (NM_006214.2,910-928).
gtgccgattgccactacat

SEQ ID NO: 227277 - DNA, 19 bp, Homo sapiens
  siRNA target sequence for PHYH (NM_006214.2,913-931).
ccgattgccactacattga

SEQ ID NO: 227278 - DNA, 19 bp, Homo sapiens
  siRNA target sequence for PHYH (NM_006214.2,939-957).
ggcaccagtcaagaaaaca

SEQ ID NO: 227279 - DNA, 19 bp, Homo sapiens
  siRNA target sequence for PHYH (NM_006214.2,956-974).
catcgagaaggaagttgta

SEQ ID NO: 227280 - DNA, 19 bp, Homo sapiens
  siRNA target sequence for PHYH (NM_006214.2,962-980).
gaaggaagttgtaggaata

SEQ ID NO: 227281 - DNA, 19 bp, Homo sapiens
  siRNA target sequence for PHYH (NM_006214.2,972-990).
gtaggaatagcacataaat

SEQ ID NO: 227282 - DNA, 19 bp, Homo sapiens
  siRNA target sequence for PHYH (NM_006214.2,1000-1018).
ctgaaaatagcgtgaactt

SEQ ID NO: 227283 - DNA, 19 bp, Homo sapiens
  siRNA target sequence for PHYH (NM_006214.2,1009-1027).
gcgtgaacttgaaggatat

SEQ ID NO: 227284 - DNA, 19 bp, Homo sapiens
  siRNA target sequence for RDH-E2 (NM_138969.2,650-668).
cctgcaatcatcaaagaaa

SEQ ID NO: 227285 - DNA, 19 bp, Homo sapiens
  siRNA target sequence for RDH-E2 (NM_138969.2,680-698).
cttaggaaaatcactgttt

SEQ ID NO: 227286 - DNA, 19 bp, Homo sapiens
  siRNA target sequence for RDH-E2 (NM_138969.2,746-764).
gaacgttgctggtgaaata

SEQ ID NO: 227287 - DNA, 19 bp, Homo sapiens
  siRNA target sequence for RDH-E2 (NM_138969.2,928-946).
gcgattgcagccaaaagga

SEQ ID NO: 227288 - DNA, 19 bp, Homo sapiens
  siRNA target sequence for RDH-E2 (NM_138969.2,960-978).
gtagccgaccaggttaaaa

SEQ ID NO: 227289 - DNA, 19 bp, Homo sapiens
  siRNA target sequence for RDH-E2 (NM_138969.2,964-982).
ccgaccaggttaaaaaaga

SEQ ID NO: 227290 - DNA, 19 bp, Homo sapiens
  siRNA target sequence for RDH-E2 (NM_138969.2,987-1005).
ggcgatgtttccatcctaa

SEQ ID NO: 227291 - DNA, 19 bp, Homo sapiens
  siRNA target sequence for RDH-E2 (NM_138969.2,988-1006).
gcgatgtttccatcctaat

SEQ ID NO: 227292 - DNA, 19 bp, Homo sapiens
  siRNA target sequence for RDH-E2 (NM_138969.2,990-1008).
gatgtttccatcctaatca

SEQ ID NO: 227293 - DNA, 19 bp, Homo sapiens
  siRNA target sequence for RDH-E2 (NM_138969.2,993-1011).
gtttccatcctaatcaaca

SEQ ID NO: 227294 - DNA, 19 bp, Homo sapiens
  siRNA target sequence for RDH-E2 (NM_138969.2,1007-1025).
caacaatgccggaatcgta

SEQ ID NO: 227295 - DNA, 19 bp, Homo sapiens
  siRNA target sequence for RDH-E2 (NM_138969.2,1018-1036).
gaatcgtaacaggcaaaaa

SEQ ID NO: 227296 - DNA, 19 bp, Homo sapiens
  siRNA target sequence for RDH-E2 (NM_138969.2,1050-1068).
ccagatgagcttatggaaa

SEQ ID NO: 227297 - DNA, 19 bp, Homo sapiens
  siRNA target sequence for RDH-E2 (NM_138969.2,1103-1121).
gacttataaagcctttcta

SEQ ID NO: 227298 - DNA, 19 bp, Homo sapiens
  siRNA target sequence for RDH-E2 (NM_138969.2,1115-1133).
ctttctacctgctatgatt

SEQ ID NO: 227299 - DNA, 19 bp, Homo sapiens
  siRNA target sequence for RDH-E2 (NM_138969.2,1123-1141).
ctgctatgattgctaatga

SEQ ID NO: 227300 - DNA, 19 bp, Homo sapiens
  siRNA target sequence for RDH-E2 (NM_138969.2,1154-1172).
ggtttgcatttcaagttca

SEQ ID NO: 227301 - DNA, 19 bp, Homo sapiens
  siRNA target sequence for RDH-E2 (NM_138969.2,1233-1251).
gggtttgctgaatctgtat

SEQ ID NO: 227302 - DNA, 19 bp, Homo sapiens
  siRNA target sequence for RDH-E2 (NM_138969.2,1294-1312).
cgattgtgtgccccttttt

SEQ ID NO: 227303 - DNA, 19 bp, Homo sapiens
  siRNA target sequence for RDH-E2 (NM_138969.2,1487-1505).
caagacaggactgcttata

SEQ ID NO: 227304 - DNA, 19 bp, Homo sapiens
  siRNA target sequence for RDH-E2 (NM_138969.2,1490-1508).
gacaggactgcttatagct

SEQ ID NO: 227305 - DNA, 19 bp, Homo sapiens
  siRNA target sequence for RDH-E2 (NM_138969.2,1497-1515).
ctgcttatagctgactatt

SEQ ID NO: 227306 - DNA, 19 bp, Homo sapiens
  siRNA target sequence for RDH-E2 (NM_138969.2,1539-1557).
ggctttgttgaccaaaaga

SEQ ID NO: 227307 - DNA, 19 bp, Homo sapiens
  siRNA target sequence for RDH10 (NM_172037.1,784-802).
ggaccactaaggcttttct

SEQ ID NO: 227308 - DNA, 19 bp, Homo sapiens
  siRNA target sequence for RDH10 (NM_172037.1,785-803).
gaccactaaggcttttctt

SEQ ID NO: 227309 - DNA, 19 bp, Homo sapiens
  siRNA target sequence for RDH10 (NM_172037.1,804-822).
cctacgatgctggagatta

SEQ ID NO: 227310 - DNA, 19 bp, Homo sapiens
  siRNA target sequence for RDH10 (NM_172037.1,847-865).
caagttccttgggattgtt

SEQ ID NO: 227311 - DNA, 19 bp, Homo sapiens
  siRNA target sequence for RDH10 (NM_172037.1,873-891).
gccggagttgaggattact

SEQ ID NO: 227312 - DNA, 19 bp, Homo sapiens
  siRNA target sequence for RDH10 (NM_172037.1,980-998).
ggtttgcccttatcttgta

SEQ ID NO: 227313 - DNA, 19 bp, Homo sapiens
  siRNA target sequence for RDH10 (NM_172037.1,1021-1039).
gccgaatcaggaaagaaat

SEQ ID NO: 227314 - DNA, 19 bp, Homo sapiens
  siRNA target sequence for RDH10 (NM_172037.1,1157-1175).
gaagagcatcctaccattt

SEQ ID NO: 227315 - DNA, 19 bp, Homo sapiens
  siRNA target sequence for RDH10 (NM_172037.1,1160-1178).
gagcatcctaccatttgaa

SEQ ID NO: 227316 - DNA, 19 bp, Homo sapiens
  siRNA target sequence for RDH10 (NM_172037.1,1203-1221).
ctaggagcggacaagtgta

SEQ ID NO: 227317 - DNA, 19 bp, Homo sapiens
  siRNA target sequence for RDH10 (NM_172037.1,1217-1235).
gtgtatgtacccctttatt

SEQ ID NO: 227318 - DNA, 19 bp, Homo sapiens
  siRNA target sequence for RDH10 (NM_172037.1,1226-1244).
cccctttattgctcaaaga

SEQ ID NO: 227319 - DNA, 19 bp, Homo sapiens
  siRNA target sequence for RDH10 (NM_172037.1,1247-1265).
gcaagccacaaacaataat

SEQ ID NO: 227320 - DNA, 19 bp, Homo sapiens
  siRNA target sequence for RDH11 (NM_016026.2,105-123).
cccaaatcaggaaaatgct

SEQ ID NO: 227321 - DNA, 19 bp, Homo sapiens
  siRNA target sequence for RDH11 (NM_016026.2,133-151).
ggtgtgtacatcaactgtt

SEQ ID NO: 227322 - DNA, 19 bp, Homo sapiens
  siRNA target sequence for RDH11 (NM_016026.2,229-247).
gagaggagctcgagtatat

SEQ ID NO: 227323 - DNA, 19 bp, Homo sapiens
  siRNA target sequence for RDH11 (NM_016026.2,231-249).
gaggagctcgagtatattt

SEQ ID NO: 227324 - DNA, 19 bp, Homo sapiens
  siRNA target sequence for RDH11 (NM_016026.2,236-254).
gctcgagtatatttagctt

SEQ ID NO: 227325 - DNA, 19 bp, Homo sapiens
  siRNA target sequence for RDH11 (NM_016026.2,252-270).
cttgccgggatgtggaaaa

SEQ ID NO: 227326 - DNA, 19 bp, Homo sapiens
  siRNA target sequence for RDH11 (NM_016026.2,398-416).
cacctccacgttttgatca

SEQ ID NO: 227327 - DNA, 19 bp, Homo sapiens
  siRNA target sequence for RDH11 (NM_016026.2,401-419).
ctccacgttttgatcaaca

SEQ ID NO: 227328 - DNA, 19 bp, Homo sapiens
  siRNA target sequence for RDH11 (NM_016026.2,403-421).
ccacgttttgatcaacaat

SEQ ID NO: 227329 - DNA, 19 bp, Homo sapiens
  siRNA target sequence for RDH11 (NM_016026.2,453-471).
cagcagatggctttgagat

SEQ ID NO: 227330 - DNA, 19 bp, Homo sapiens
  siRNA target sequence for RDH11 (NM_016026.2,543-561).
ccccatcaaggatagtaaa

SEQ ID NO: 227331 - DNA, 19 bp, Homo sapiens
  siRNA target sequence for RDH11 (NM_016026.2,546-564).
catcaaggatagtaaatgt

SEQ ID NO: 227332 - DNA, 19 bp, Homo sapiens
  siRNA target sequence for RDH11 (NM_016026.2,588-606).
gaaggatccacttccataa

SEQ ID NO: 227333 - DNA, 19 bp, Homo sapiens
  siRNA target sequence for RDH11 (NM_016026.2,591-609).
ggatccacttccataacct

SEQ ID NO: 227334 - DNA, 19 bp, Homo sapiens
  siRNA target sequence for RDH11 (NM_016026.2,611-629).
cagggcgagaaattctaca

SEQ ID NO: 227335 - DNA, 19 bp, Homo sapiens
  siRNA target sequence for RDH11 (NM_016026.2,613-631).
gggcgagaaattctacaat

SEQ ID NO: 227336 - DNA, 19 bp, Homo sapiens
  siRNA target sequence for RDH11 (NM_016026.2,711-729).
gcgttacgacgtattctgt

SEQ ID NO: 227337 - DNA, 19 bp, Homo sapiens
  siRNA target sequence for RDH11 (NM_016026.2,712-730).
cgttacgacgtattctgta

SEQ ID NO: 227338 - DNA, 19 bp, Homo sapiens
  siRNA target sequence for RDH11 (NM_016026.2,755-773).
ctggttcggcactcatctt

SEQ ID NO: 227339 - DNA, 19 bp, Homo sapiens
  siRNA target sequence for RDH11 (NM_016026.2,758-776).
gttcggcactcatctttca

SEQ ID NO: 227340 - DNA, 19 bp, Homo sapiens
  siRNA target sequence for RDH11 (NM_016026.2,844-862).
gcactgtgccttaacagaa

SEQ ID NO: 227341 - DNA, 19 bp, Homo sapiens
  siRNA target sequence for RDH11 (NM_016026.2,860-878).
gaaggtcttgagattctaa

SEQ ID NO: 227342 - DNA, 19 bp, Homo sapiens
  siRNA target sequence for RDH11 (NM_016026.2,875-893).
ctaagtgggaatcatttca

SEQ ID NO: 227343 - DNA, 19 bp, Homo sapiens
  siRNA target sequence for RDH12 (NM_152443.1,206-224).
ctcgttcctgtatatggta

SEQ ID NO: 227344 - DNA, 19 bp, Homo sapiens
  siRNA target sequence for RDH12 (NM_152443.1,353-371).
ccgaggagcccgagtctat

SEQ ID NO: 227345 - DNA, 19 bp, Homo sapiens
  siRNA target sequence for RDH12 (NM_152443.1,354-372).
cgaggagcccgagtctata

SEQ ID NO: 227346 - DNA, 19 bp, Homo sapiens
  siRNA target sequence for RDH12 (NM_152443.1,376-394).
cctgcagagatgtactgaa

SEQ ID NO: 227347 - DNA, 19 bp, Homo sapiens
  siRNA target sequence for RDH12 (NM_152443.1,462-480).
gacctatccgacaccaaat

SEQ ID NO: 227348 - DNA, 19 bp, Homo sapiens
  siRNA target sequence for RDH12 (NM_152443.1,464-482).
cctatccgacaccaaatct

SEQ ID NO: 227349 - DNA, 19 bp, Homo sapiens
  siRNA target sequence for RDH12 (NM_152443.1,667-685).
cccctgcacgggtggttaa

SEQ ID NO: 227350 - DNA, 19 bp, Homo sapiens
  siRNA target sequence for RDH12 (NM_152443.1,668-686).
ccctgcacgggtggttaat

SEQ ID NO: 227351 - DNA, 19 bp, Homo sapiens
  siRNA target sequence for RDH12 (NM_152443.1,1066-1084).
cagctgagcgcctatggaa

SEQ ID NO: 227352 - DNA, 19 bp, Homo sapiens
  siRNA target sequence for RDH12 (NM_152443.1,1090-1108).
gctgtgagcttctaggaat

SEQ ID NO: 227353 - DNA, 19 bp, Homo sapiens
  siRNA target sequence for RDH13 (NM_138412.2,564-582).
caagtctatccgagagttt

SEQ ID NO: 227354 - DNA, 19 bp, Homo sapiens
  siRNA target sequence for RDH13 (NM_138412.2,606-624).
ggagcgagtggacattcta

SEQ ID NO: 227355 - DNA, 19 bp, Homo sapiens
  siRNA target sequence for RDH13 (NM_138412.2,610-628).
cgagtggacattctaatca

SEQ ID NO: 227356 - DNA, 19 bp, Homo sapiens
  siRNA target sequence for RDH13 (NM_138412.2,611-629).
gagtggacattctaatcaa

SEQ ID NO: 227357 - DNA, 19 bp, Homo sapiens
  siRNA target sequence for RDH13 (NM_138412.2,700-718).
cacctgggtcactttctct

SEQ ID NO: 227358 - DNA, 19 bp, Homo sapiens
  siRNA target sequence for RDH13 (NM_138412.2,707-725).
gtcactttctcttgacaaa

SEQ ID NO: 227359 - DNA, 19 bp, Homo sapiens
  siRNA target sequence for RDH13 (NM_138412.2,755-773).
ccccttcgcggatcatcaa

SEQ ID NO: 227360 - DNA, 19 bp, Homo sapiens
  siRNA target sequence for RDH13 (NM_138412.2,825-843).
ctggcagacgaggaagtat

SEQ ID NO: 227361 - DNA, 19 bp, Homo sapiens
  siRNA target sequence for RDH13 (NM_138412.2,827-845).
ggcagacgaggaagtataa

SEQ ID NO: 227362 - DNA, 19 bp, Homo sapiens
  siRNA target sequence for RDH13 (NM_138412.2,829-847).
cagacgaggaagtataaca

SEQ ID NO: 227363 - DNA, 19 bp, Homo sapiens
  siRNA target sequence for RDH13 (NM_138412.2,1119-1137).
gtacttcgatggactcaaa

SEQ ID NO: 227364 - DNA, 19 bp, Homo sapiens
  siRNA target sequence for RDH14 (NM_020905.1,377-395).
gggtgggcgagctcatagt

SEQ ID NO: 227365 - DNA, 19 bp, Homo sapiens
  siRNA target sequence for RDH14 (NM_020905.1,468-486).
gctggatgtcttgatcaat

SEQ ID NO: 227366 - DNA, 19 bp, Homo sapiens
  siRNA target sequence for RDH14 (NM_020905.1,469-487).
ctggatgtcttgatcaata

SEQ ID NO: 227367 - DNA, 19 bp, Homo sapiens
  siRNA target sequence for RDH14 (NM_020905.1,618-636).
caggattgtggtagtttct

SEQ ID NO: 227368 - DNA, 19 bp, Homo sapiens
  siRNA target sequence for RDH14 (NM_020905.1,635-653).
cttccaaactttataaata

SEQ ID NO: 227369 - DNA, 19 bp, Homo sapiens
  siRNA target sequence for RDH14 (NM_020905.1,678-696).
gaacagtgaacaaagctat

SEQ ID NO: 227370 - DNA, 19 bp, Homo sapiens
  siRNA target sequence for RDH14 (NM_020905.1,720-738).
gagcaaactggctaacatt

SEQ ID NO: 227371 - DNA, 19 bp, Homo sapiens
  siRNA target sequence for RDH14 (NM_020905.1,722-740).
gcaaactggctaacattct

SEQ ID NO: 227372 - DNA, 19 bp, Homo sapiens
  siRNA target sequence for RDH14 (NM_020905.1,723-741).
caaactggctaacattctt

SEQ ID NO: 227373 - DNA, 19 bp, Homo sapiens
  siRNA target sequence for RDH14 (NM_020905.1,764-782).
gcttagaaggcacaaatgt

SEQ ID NO: 227374 - DNA, 19 bp, Homo sapiens
  siRNA target sequence for RDH14 (NM_020905.1,776-794).
caaatgtcaccgtcaatgt

SEQ ID NO: 227375 - DNA, 19 bp, Homo sapiens
  siRNA target sequence for RDH14 (NM_020905.1,795-813).
gttgcatcctggtattgta

SEQ ID NO: 227376 - DNA, 19 bp, Homo sapiens
  siRNA target sequence for RDH14 (NM_020905.1,806-824).
gtattgtacggacaaatct

SEQ ID NO: 227377 - DNA, 19 bp, Homo sapiens
  siRNA target sequence for RDH14 (NM_020905.1,876-894).
gtcatgggcttttttcaaa

SEQ ID NO: 227378 - DNA, 19 bp, Homo sapiens
  siRNA target sequence for RDH14 (NM_020905.1,965-983).
gatactttggggattgtaa

SEQ ID NO: 227379 - DNA, 19 bp, Homo sapiens
  siRNA target sequence for RDH14 (NM_020905.1,1000-1018).
cccaaagctatggatgaat

SEQ ID NO: 227380 - DNA, 19 bp, Homo sapiens
  siRNA target sequence for RDH14 (NM_020905.1,1002-1020).
caaagctatggatgaatct

SEQ ID NO: 227381 - DNA, 19 bp, Homo sapiens
  siRNA target sequence for RDH14 (NM_020905.1,1053-1071).
gatggttggcctgctaaaa

SEQ ID NO: 227382 - DNA, 19 bp, Homo sapiens
  siRNA target sequence for RODH (NM_003725.2,189-207).
ctccaagacaagtatgtct

SEQ ID NO: 227383 - DNA, 19 bp, Homo sapiens
  siRNA target sequence for RODH (NM_003725.2,195-213).
gacaagtatgtctttatca

SEQ ID NO: 227384 - DNA, 19 bp, Homo sapiens
  siRNA target sequence for RODH (NM_003725.2,450-468).
ggcattcttacaccaatta

SEQ ID NO: 227385 - DNA, 19 bp, Homo sapiens
  siRNA target sequence for RODH (NM_003725.2,569-587).
gagagcacggggaagaatt

SEQ ID NO: 227386 - DNA, 19 bp, Homo sapiens
  siRNA target sequence for RODH (NM_003725.2,599-617).
cagcattctgggaagagtt

SEQ ID NO: 227387 - DNA, 19 bp, Homo sapiens
  siRNA target sequence for RODH (NM_003725.2,680-698).
gaggcgtgagattcaacat

SEQ ID NO: 227388 - DNA, 19 bp, Homo sapiens
  siRNA target sequence for RODH (NM_003725.2,704-722).
ggtgaaaatcagcatagtt

SEQ ID NO: 227389 - DNA, 19 bp, Homo sapiens
  siRNA target sequence for RODH (NM_003725.2,739-757).
gaacgggaatgacaaacat

SEQ ID NO: 227390 - DNA, 19 bp, Homo sapiens
  siRNA target sequence for RODH (NM_003725.2,771-789).
gagcgaatgaagcaaagtt

SEQ ID NO: 227391 - DNA, 19 bp, Homo sapiens
  siRNA target sequence for RODH (NM_003725.2,795-813).
gaagcccccaagcatatta

SEQ ID NO: 227392 - DNA, 19 bp, Homo sapiens
  siRNA target sequence for RODH (NM_003725.2,820-838).
cctatggacagcagtattt

SEQ ID NO: 227393 - DNA, 19 bp, Homo sapiens
  siRNA target sequence for RODH (NM_003725.2,843-861).
gccctttacaatatcatga

SEQ ID NO: 227394 - DNA, 19 bp, Homo sapiens
  siRNA target sequence for RODH (NM_003725.2,860-878).
gaaggaagggctgttgaat

SEQ ID NO: 227395 - DNA, 19 bp, Homo sapiens
  siRNA target sequence for RODH (NM_003725.2,863-881).
ggaagggctgttgaattgt

SEQ ID NO: 227396 - DNA, 19 bp, Homo sapiens
  siRNA target sequence for RODH (NM_003725.2,935-953).
gcatccgcgaactcgatat

SEQ ID NO: 227397 - DNA, 19 bp, Homo sapiens
  siRNA target sequence for RODH (NM_003725.2,936-954).
catccgcgaactcgatatt

SEQ ID NO: 227398 - DNA, 19 bp, Homo sapiens
  siRNA target sequence for RODH (NM_003725.2,957-975).
gctggctgggatgctaaat

SEQ ID NO: 227399 - DNA, 19 bp, Homo sapiens
  siRNA target sequence for RODH (NM_003725.2,958-976).
ctggctgggatgctaaatt

SEQ ID NO: 227400 - DNA, 19 bp, Homo sapiens
  siRNA target sequence for RODH (NM_003725.2,960-978).
ggctgggatgctaaatttt

SEQ ID NO: 227401 - DNA, 19 bp, Homo sapiens
  siRNA target sequence for RODH (NM_003725.2,961-979).
gctgggatgctaaattttt

SEQ ID NO: 227402 - DNA, 19 bp, Homo sapiens
  siRNA target sequence for RODH (NM_003725.2,987-1005).
cctctatcttatttaccta

SEQ ID NO: 227403 - DNA, 19 bp, Homo sapiens
  siRNA target sequence for RODH (NM_003725.2,1013-1031).
ggcagactacattttgact

SEQ ID NO: 227404 - DNA, 19 bp, Homo sapiens
  siRNA target sequence for RODH (NM_003725.2,1014-1032).
gcagactacattttgacta

SEQ ID NO: 227405 - DNA, 19 bp, Homo sapiens
  siRNA target sequence for RODH (NM_003725.2,1017-1035).
gactacattttgactagat

SEQ ID NO: 227406 - DNA, 19 bp, Homo sapiens
  siRNA target sequence for SCDR9 (NM_178135.2,107-125).
cgttggtgaagtttttcat

SEQ ID NO: 227407 - DNA, 19 bp, Homo sapiens
  siRNA target sequence for SCDR9 (NM_178135.2,108-126).
gttggtgaagtttttcatt

SEQ ID NO: 227408 - DNA, 19 bp, Homo sapiens
  siRNA target sequence for SCDR9 (NM_178135.2,192-210).
caggcagactacttatgaa

SEQ ID NO: 227409 - DNA, 19 bp, Homo sapiens
  siRNA target sequence for SCDR9 (NM_178135.2,198-216).
gactacttatgaatttgca

SEQ ID NO: 227410 - DNA, 19 bp, Homo sapiens
  siRNA target sequence for SCDR9 (NM_178135.2,214-232).
gcaaaacgacagagcatat

SEQ ID NO: 227411 - DNA, 19 bp, Homo sapiens
  siRNA target sequence for SCDR9 (NM_178135.2,215-233).
caaaacgacagagcatatt

SEQ ID NO: 227412 - DNA, 19 bp, Homo sapiens
  siRNA target sequence for SCDR9 (NM_178135.2,275-293).
cagctgagtgccgaaaact

SEQ ID NO: 227413 - DNA, 19 bp, Homo sapiens
  siRNA target sequence for SCDR9 (NM_178135.2,342-360).
gatctatcgctctctaaat

SEQ ID NO: 227414 - DNA, 19 bp, Homo sapiens
  siRNA target sequence for SCDR9 (NM_178135.2,373-391).
gaagtgggtgatgtaacaa

SEQ ID NO: 227415 - DNA, 19 bp, Homo sapiens
  siRNA target sequence for SCDR9 (NM_178135.2,385-403).
gtaacaatcgtggtgaata

SEQ ID NO: 227416 - DNA, 19 bp, Homo sapiens
  siRNA target sequence for SCDR9 (NM_178135.2,437-455).
gcaccaaggatgaagagat

SEQ ID NO: 227417 - DNA, 19 bp, Homo sapiens
  siRNA target sequence for SCDR9 (NM_178135.2,474-492).
caacatcctaggacatttt

SEQ ID NO: 227418 - DNA, 19 bp, Homo sapiens
  siRNA target sequence for SCDR9 (NM_178135.2,484-502).
ggacatttttggatcacaa

SEQ ID NO: 227419 - DNA, 19 bp, Homo sapiens
  siRNA target sequence for SCDR9 (NM_178135.2,569-587).
gccacgaagggattcctta

SEQ ID NO: 227420 - DNA, 19 bp, Homo sapiens
  siRNA target sequence for SCDR9 (NM_178135.2,596-614).
catattgttccagcaaatt

SEQ ID NO: 227421 - DNA, 19 bp, Homo sapiens
  siRNA target sequence for SCDR9 (NM_178135.2,616-634).
gccgctgttggctttcaca

SEQ ID NO: 227422 - DNA, 19 bp, Homo sapiens
  siRNA target sequence for SCDR9 (NM_178135.2,633-651).
cagaggtctgacatcagaa

SEQ ID NO: 227423 - DNA, 19 bp, Homo sapiens
  siRNA target sequence for SCDR9 (NM_178135.2,693-711).
ctgcccagtttttgtgaat

SEQ ID NO: 227424 - DNA, 19 bp, Homo sapiens
  siRNA target sequence for SCDR9 (NM_178135.2,737-755).
caagattatggcctgtatt

SEQ ID NO: 227425 - DNA, 19 bp, Homo sapiens
  siRNA target sequence for SCDR9 (NM_178135.2,771-789).
cgtaagaagtctgatagat

SEQ ID NO: 227426 - DNA, 19 bp, Homo sapiens
  siRNA target sequence for SCDR9 (NM_178135.2,776-794).
gaagtctgatagatggaat

SEQ ID NO: 227427 - DNA, 19 bp, Homo sapiens
  siRNA target sequence for SCDR9 (NM_178135.2,779-797).
gtctgatagatggaatact

SEQ ID NO: 227428 - DNA, 19 bp, Homo sapiens
  siRNA target sequence for SCDR9 (NM_178135.2,787-805).
gatggaatacttaccaata

SEQ ID NO: 227429 - DNA, 19 bp, Homo sapiens
  siRNA target sequence for SCDR9 (NM_178135.2,790-808).
ggaatacttaccaataaga

SEQ ID NO: 227430 - DNA, 19 bp, Homo sapiens
  siRNA target sequence for SCDR9 (NM_178135.2,791-809).
gaatacttaccaataagaa

SEQ ID NO: 227431 - DNA, 19 bp, Homo sapiens
  siRNA target sequence for SCDR9 (NM_178135.2,824-842).
catcgtatatcaatatctt

SEQ ID NO: 227432 - DNA, 19 bp, Homo sapiens
  siRNA target sequence for SCDR9 (NM_178135.2,871-889).
cgcgcctcagcgattttaa

SEQ ID NO: 227433 - DNA, 19 bp, Homo sapiens
  siRNA target sequence for SCDR9 (NM_178135.2,872-890).
gcgcctcagcgattttaaa

SEQ ID NO: 227434 - DNA, 19 bp, Homo sapiens
  siRNA target sequence for SCDR9 (NM_178135.2,878-896).
cagcgattttaaatcgtat

SEQ ID NO: 227435 - DNA, 19 bp, Homo sapiens
  siRNA target sequence for SCDR9 (NM_178135.2,922-940).
gttggccacaaaatcaaaa

SEQ ID NO: 227436 - DNA, 19 bp, Homo sapiens
  siRNA target sequence for SDR-O (NM_148897.1,560-578).
ggcgtgagctctactactt

SEQ ID NO: 227437 - DNA, 19 bp, Homo sapiens
  siRNA target sequence for SDR-O (NM_148897.1,561-579).
gcgtgagctctactacttt

SEQ ID NO: 227438 - DNA, 19 bp, Homo sapiens
  siRNA target sequence for SDR-O (NM_148897.1,597-615).
cattgagccagggaactat

SEQ ID NO: 227439 - DNA, 19 bp, Homo sapiens
  siRNA target sequence for SDR-O (NM_148897.1,648-666).
gtcacgcatgcgaaagctt

SEQ ID NO: 227440 - DNA, 19 bp, Homo sapiens
  siRNA target sequence for SDR-O (NM_148897.1,698-716).
gctacggagaggattattt

SEQ ID NO: 227441 - DNA, 19 bp, Homo sapiens
  siRNA target sequence for SDR-O (NM_148897.1,767-785).
gagtcagagatgtcatcaa

SEQ ID NO: 227442 - DNA, 19 bp, Homo sapiens
  siRNA target sequence for SDR-O (NM_148897.1,788-806).
gcatggagcatgctattgt

SEQ ID NO: 227443 - DNA, 19 bp, Homo sapiens
  siRNA target sequence for SDR-O (NM_148897.1,789-807).
catggagcatgctattgtt

SEQ ID NO: 227444 - DNA, 19 bp, Homo sapiens
  siRNA target sequence for SDR-O (NM_148897.1,880-898).
cccacccctgtgacagatt

SEQ ID NO: 227445 - DNA, 19 bp, Homo sapiens
  siRNA target sequence for SELO (NM_031454.1,474-492).
gctactgcggccaccaatt

SEQ ID NO: 227446 - DNA, 19 bp, Homo sapiens
  siRNA target sequence for SELO (NM_031454.1,736-754).
ggtgcgcgacgtgttctat

SEQ ID NO: 227447 - DNA, 19 bp, Homo sapiens
  siRNA target sequence for SELO (NM_031454.1,739-757).
gcgcgacgtgttctatgat

SEQ ID NO: 227448 - DNA, 19 bp, Homo sapiens
  siRNA target sequence for SELO (NM_031454.1,745-763).
cgtgttctatgatggtaat

SEQ ID NO: 227449 - DNA, 19 bp, Homo sapiens
  siRNA target sequence for SELO (NM_031454.1,794-812).
cgtgtagcttccactttca

SEQ ID NO: 227450 - DNA, 19 bp, Homo sapiens
  siRNA target sequence for SELO (NM_031454.1,795-813).
gtgtagcttccactttcat

SEQ ID NO: 227451 - DNA, 19 bp, Homo sapiens
  siRNA target sequence for SELO (NM_031454.1,800-818).
gcttccactttcataaggt

SEQ ID NO: 227452 - DNA, 19 bp, Homo sapiens
  siRNA target sequence for SELO (NM_031454.1,826-844).
ctttgagatttttaagtct

SEQ ID NO: 227453 - DNA, 19 bp, Homo sapiens
  siRNA target sequence for SELO (NM_031454.1,902-920).
cagctgctcgactatgtca

SEQ ID NO: 227454 - DNA, 19 bp, Homo sapiens
  siRNA target sequence for SELO (NM_031454.1,960-978).
gcgacagcgtgcagagaaa

SEQ ID NO: 227455 - DNA, 19 bp, Homo sapiens
  siRNA target sequence for SELO (NM_031454.1,961-979).
cgacagcgtgcagagaaat

SEQ ID NO: 227456 - DNA, 19 bp, Homo sapiens
  siRNA target sequence for SELO (NM_031454.1,1407-1425).
ccggtgccgacttcacaaa

SEQ ID NO: 227457 - DNA, 19 bp, Homo sapiens
  siRNA target sequence for SEPW1 (NM_003009.1,192-210).
ccaccgggttctttgaagt

SEQ ID NO: 227458 - DNA, 19 bp, Homo sapiens
  siRNA target sequence for SEPW1 (NM_003009.1,214-232).
ggtagccgggaagttgatt

SEQ ID NO: 227459 - DNA, 19 bp, Homo sapiens
  siRNA target sequence for SEPW1 (NM_003009.1,218-236).
gccgggaagttgattcact

SEQ ID NO: 227460 - DNA, 19 bp, Homo sapiens
  siRNA target sequence for SEPW1 (NM_003009.1,254-272).
ggctacgtggacacagaaa

SEQ ID NO: 227461 - DNA, 19 bp, Homo sapiens
  siRNA target sequence for SHREW1 (NM_018836.2,449-467).
gccatgcctggatactgat

SEQ ID NO: 227462 - DNA, 19 bp, Homo sapiens
  siRNA target sequence for SHREW1 (NM_018836.2,450-468).
ccatgcctggatactgata

SEQ ID NO: 227463 - DNA, 19 bp, Homo sapiens
  siRNA target sequence for SHREW1 (NM_018836.2,459-477).
gatactgatagccatgttt

SEQ ID NO: 227464 - DNA, 19 bp, Homo sapiens
  siRNA target sequence for SHREW1 (NM_018836.2,1006-1024).
ctacaaacacggaagacaa

SEQ ID NO: 227465 - DNA, 19 bp, Homo sapiens
  siRNA target sequence for SHREW1 (NM_018836.2,1064-1082).
ccatgacgctgcagactaa

SEQ ID NO: 227466 - DNA, 19 bp, Homo sapiens
  siRNA target sequence for SHREW1 (NM_018836.2,1505-1523).
cgacgacgggggagtacaa

SEQ ID NO: 227467 - DNA, 19 bp, Homo sapiens
  siRNA target sequence for SHREW1 (NM_018836.2,1516-1534).
gagtacaaatccacattta

SEQ ID NO: 227468 - DNA, 19 bp, Homo sapiens
  siRNA target sequence for SHREW1 (NM_018836.2,1518-1536).
gtacaaatccacatttaat

SEQ ID NO: 227469 - DNA, 19 bp, Homo sapiens
  siRNA target sequence for SHREW1 (NM_018836.2,1553-1571).
cttctgatcggcatcttat

SEQ ID NO: 227470 - DNA, 19 bp, Homo sapiens
  siRNA target sequence for SLC35C2 (NM_015945.10,326-344).
ccctcgatgtggccttttt

SEQ ID NO: 227471 - DNA, 19 bp, Homo sapiens
  siRNA target sequence for SLC35C2 (NM_015945.10,424-442).
ctgacaaagagcttccatt

SEQ ID NO: 227472 - DNA, 19 bp, Homo sapiens
  siRNA target sequence for SLC35C2 (NM_015945.10,638-656).
ccgtctcgctgtacacaat

SEQ ID NO: 227473 - DNA, 19 bp, Homo sapiens
  siRNA target sequence for SLC35C2 (NM_015945.10,640-658).
gtctcgctgtacacaatga

SEQ ID NO: 227474 - DNA, 19 bp, Homo sapiens
  siRNA target sequence for SLC35C2 (NM_015945.10,1060-1078).
gggattctcgcctttggtt

SEQ ID NO: 227475 - DNA, 19 bp, Homo sapiens
  siRNA target sequence for SLC35C2 (NM_015945.10,1061-1079).
ggattctcgcctttggttt

SEQ ID NO: 227476 - DNA, 19 bp, Homo sapiens
  siRNA target sequence for SLC35C2 (NM_015945.10,1128-1146).
ctccattgccggcattttt

SEQ ID NO: 227477 - DNA, 19 bp, Homo sapiens
  siRNA target sequence for SLC35C2 (NM_015945.10,1130-1148).
ccattgccggcatttttaa

SEQ ID NO: 227478 - DNA, 19 bp, Homo sapiens
  siRNA target sequence for SLC35C2 (NM_015945.10,1225-1243).
ctctgcctctcgggaatat

SEQ ID NO: 227479 - DNA, 19 bp, Homo sapiens
  siRNA target sequence for TM7SF2 (NM_003273.1,351-369).
gctgcagaacggggattta

SEQ ID NO: 227480 - DNA, 19 bp, Homo sapiens
  siRNA target sequence for TM7SF2 (NM_003273.1,352-370).
ctgcagaacggggatttat

SEQ ID NO: 227481 - DNA, 19 bp, Homo sapiens
  siRNA target sequence for TM7SF2 (NM_003273.1,355-373).
cagaacggggatttatggt

SEQ ID NO: 227482 - DNA, 19 bp, Homo sapiens
  siRNA target sequence for TM7SF2 (NM_003273.1,937-955).
gtcgcctgcgctatcctat

SEQ ID NO: 227483 - DNA, 19 bp, Homo sapiens
  siRNA target sequence for TM7SF2 (NM_003273.1,939-957).
cgcctgcgctatcctatta

SEQ ID NO: 227484 - DNA, 19 bp, Homo sapiens
  siRNA target sequence for TM7SF2 (NM_003273.1,940-958).
gcctgcgctatcctattaa

SEQ ID NO: 227485 - DNA, 19 bp, Homo sapiens
  siRNA target sequence for TM7SF2 (NM_003273.1,1190-1208).
gctcaaccctcgtatctgt

SEQ ID NO: 227486 - DNA, 19 bp, Homo sapiens
  siRNA target sequence for TM7SF2 (NM_003273.1,1191-1209).
ctcaaccctcgtatctgtt

SEQ ID NO: 227487 - DNA, 19 bp, Homo sapiens
  siRNA target sequence for TM7SF2 (NM_003273.1,1207-1225).
gtttcttcgacttcaaata

SEQ ID NO: 227488 - DNA, 19 bp, Homo sapiens
  siRNA target sequence for TSTA3 (NM_003313.2,61-79).
gggatccatgcggattcta

SEQ ID NO: 227489 - DNA, 19 bp, Homo sapiens
  siRNA target sequence for TSTA3 (NM_003313.2,63-81).
gatccatgcggattctagt

SEQ ID NO: 227490 - DNA, 19 bp, Homo sapiens
  siRNA target sequence for TSTA3 (NM_003313.2,269-287).
ggcctgttccggaatatca

SEQ ID NO: 227491 - DNA, 19 bp, Homo sapiens
  siRNA target sequence for TSTA3 (NM_003313.2,277-295).
ccggaatatcaaatacaat

SEQ ID NO: 227492 - DNA, 19 bp, Homo sapiens
  siRNA target sequence for TSTA3 (NM_003313.2,278-296).
cggaatatcaaatacaatt

SEQ ID NO: 227493 - DNA, 19 bp, Homo sapiens
  siRNA target sequence for TSTA3 (NM_003313.2,409-427).
gacgacctacccgatagat

SEQ ID NO: 227494 - DNA, 19 bp, Homo sapiens
  siRNA target sequence for TSTA3 (NM_003313.2,411-429).
cgacctacccgatagatga

SEQ ID NO: 227495 - DNA, 19 bp, Homo sapiens
  siRNA target sequence for TSTA3 (NM_003313.2,449-467).
cctccccacaacagcaatt

SEQ ID NO: 227496 - DNA, 19 bp, Homo sapiens
  siRNA target sequence for TSTA3 (NM_003313.2,450-468).
ctccccacaacagcaattt

SEQ ID NO: 227497 - DNA, 19 bp, Homo sapiens
  siRNA target sequence for TSTA3 (NM_003313.2,572-590).
ccccacgacaacttcaaca

SEQ ID NO: 227498 - DNA, 19 bp, Homo sapiens
  siRNA target sequence for TSTA3 (NM_003313.2,573-591).
cccacgacaacttcaacat

SEQ ID NO: 227499 - DNA, 19 bp, Homo sapiens
  siRNA target sequence for TSTA3 (NM_003313.2,683-701).
ccgcggaggcagttcatat

SEQ ID NO: 227500 - DNA, 19 bp, Homo sapiens
  siRNA target sequence for TSTA3 (NM_003313.2,684-702).
cgcggaggcagttcatata

SEQ ID NO: 227501 - DNA, 19 bp, Homo sapiens
  siRNA target sequence for TSTA3 (NM_003313.2,736-754).
cctgcgggagtacaatgaa

SEQ ID NO: 227502 - DNA, 19 bp, Homo sapiens
  siRNA target sequence for TSTA3 (NM_003313.2,774-792).
ccgtgggcgaggaagatga

SEQ ID NO: 227503 - DNA, 19 bp, Homo sapiens
  siRNA target sequence for TSTA3 (NM_003313.2,873-891).
cggatgggcagtttaagaa

SEQ ID NO: 227504 - DNA, 19 bp, Homo sapiens
  siRNA target sequence for ANAPC2 (NM_013366.2,47-65).
ccggacaggagttgttagt

SEQ ID NO: 227505 - DNA, 19 bp, Homo sapiens
  siRNA target sequence for ANAPC2 (NM_013366.2,1188-1206).
catcaccctctatatctct

SEQ ID NO: 227506 - DNA, 19 bp, Homo sapiens
  siRNA target sequence for ANAPC2 (NM_013366.2,1487-1505).
ggcgttcatcggacatcat

SEQ ID NO: 227507 - DNA, 19 bp, Homo sapiens
  siRNA target sequence for ANAPC2 (NM_013366.2,1537-1555).
gacctcttcatcaatgagt

SEQ ID NO: 227508 - DNA, 19 bp, Homo sapiens
  siRNA target sequence for ANAPC2 (NM_013366.2,1982-2000).
cagtacaggcggtgatctt

SEQ ID NO: 227509 - DNA, 19 bp, Homo sapiens
  siRNA target sequence for ANAPC2 (NM_013366.2,1990-2008).
gcggtgatcttgctgtatt

SEQ ID NO: 227510 - DNA, 19 bp, Homo sapiens
  siRNA target sequence for ANAPC2 (NM_013366.2,2306-2324).
cactggatcgtatctacaa

SEQ ID NO: 227511 - DNA, 19 bp, Homo sapiens
  siRNA target sequence for ANAPC2 (NM_013366.2,2308-2326).
ctggatcgtatctacaaca

SEQ ID NO: 227512 - DNA, 19 bp, Homo sapiens
  siRNA target sequence for ANAPC2 (NM_013366.2,2322-2340).
caacatgctccgcatgttt

SEQ ID NO: 227513 - DNA, 19 bp, Homo sapiens
  siRNA target sequence for ANAPC4 (NM_013367.1,86-104).
cgcccaagcgggatctcat

SEQ ID NO: 227514 - DNA, 19 bp, Homo sapiens
  siRNA target sequence for ANAPC4 (NM_013367.1,87-105).
gcccaagcgggatctcatt

SEQ ID NO: 227515 - DNA, 19 bp, Homo sapiens
  siRNA target sequence for ANAPC4 (NM_013367.1,297-315).
gagcttacactctttttct

SEQ ID NO: 227516 - DNA, 19 bp, Homo sapiens
  siRNA target sequence for ANAPC4 (NM_013367.1,368-386).
gtgttctcacatcatttta

SEQ ID NO: 227517 - DNA, 19 bp, Homo sapiens
  siRNA target sequence for ANAPC4 (NM_013367.1,449-467).
gcaacacctcaaaaatatt

SEQ ID NO: 227518 - DNA, 19 bp, Homo sapiens
  siRNA target sequence for ANAPC4 (NM_013367.1,504-522).
gggagacgtcaggcttaat

SEQ ID NO: 227519 - DNA, 19 bp, Homo sapiens
  siRNA target sequence for ANAPC4 (NM_013367.1,505-523).
ggagacgtcaggcttaata

SEQ ID NO: 227520 - DNA, 19 bp, Homo sapiens
  siRNA target sequence for ANAPC4 (NM_013367.1,506-524).
gagacgtcaggcttaatat

SEQ ID NO: 227521 - DNA, 19 bp, Homo sapiens
  siRNA target sequence for ANAPC4 (NM_013367.1,539-557).
gaagctctggatttattga

SEQ ID NO: 227522 - DNA, 19 bp, Homo sapiens
  siRNA target sequence for ANAPC4 (NM_013367.1,556-574).
gagctttatgcttatggaa

SEQ ID NO: 227523 - DNA, 19 bp, Homo sapiens
  siRNA target sequence for ANAPC4 (NM_013367.1,675-693).
caatggtgcttcagaagtt

SEQ ID NO: 227524 - DNA, 19 bp, Homo sapiens
  siRNA target sequence for ANAPC4 (NM_013367.1,699-717).
ctttcagcttgaaactaat

SEQ ID NO: 227525 - DNA, 19 bp, Homo sapiens
  siRNA target sequence for ANAPC4 (NM_013367.1,703-721).
cagcttgaaactaatctgt

SEQ ID NO: 227526 - DNA, 19 bp, Homo sapiens
  siRNA target sequence for ANAPC4 (NM_013367.1,750-768).
gatggccagaaagtttact

SEQ ID NO: 227527 - DNA, 19 bp, Homo sapiens
  siRNA target sequence for ANAPC4 (NM_013367.1,754-772).
gccagaaagtttactcata

SEQ ID NO: 227528 - DNA, 19 bp, Homo sapiens
  siRNA target sequence for ANAPC4 (NM_013367.1,776-794).
cagctctgttacagtatat

SEQ ID NO: 227529 - DNA, 19 bp, Homo sapiens
  siRNA target sequence for ANAPC4 (NM_013367.1,778-796).
gctctgttacagtatataa

SEQ ID NO: 227530 - DNA, 19 bp, Homo sapiens
  siRNA target sequence for ANAPC4 (NM_013367.1,801-819).
gtcactaacatgtatgtgt

SEQ ID NO: 227531 - DNA, 19 bp, Homo sapiens
  siRNA target sequence for ANAPC4 (NM_013367.1,818-836).
gtgaagcatgggaagaaat

SEQ ID NO: 227532 - DNA, 19 bp, Homo sapiens
  siRNA target sequence for ANAPC4 (NM_013367.1,823-841).
gcatgggaagaaatactaa

SEQ ID NO: 227533 - DNA, 19 bp, Homo sapiens
  siRNA target sequence for ANAPC4 (NM_013367.1,922-940).
ctattatgggggaaagcaa

SEQ ID NO: 227534 - DNA, 19 bp, Homo sapiens
  siRNA target sequence for ANAPC4 (NM_013367.1,1014-1032).
gtcatcatactccagtata

SEQ ID NO: 227535 - DNA, 19 bp, Homo sapiens
  siRNA target sequence for ANAPC4 (NM_013367.1,1016-1034).
catcatactccagtataca

SEQ ID NO: 227536 - DNA, 19 bp, Homo sapiens
  siRNA target sequence for ANAPC4 (NM_013367.1,1042-1060).
gtcataagtcatttacaga

SEQ ID NO: 227537 - DNA, 19 bp, Homo sapiens
  siRNA target sequence for ANAPC4 (NM_013367.1,1061-1079).
gtggctcggagtctttatt

SEQ ID NO: 227538 - DNA, 19 bp, Homo sapiens
  siRNA target sequence for ANAPC4 (NM_013367.1,1063-1081).
ggctcggagtctttattat

SEQ ID NO: 227539 - DNA, 19 bp, Homo sapiens
  siRNA target sequence for ANAPC4 (NM_013367.1,1064-1082).
gctcggagtctttattata

SEQ ID NO: 227540 - DNA, 19 bp, Homo sapiens
  siRNA target sequence for ANAPC4 (NM_013367.1,1067-1085).
cggagtctttattatacca

SEQ ID NO: 227541 - DNA, 19 bp, Homo sapiens
  siRNA target sequence for ANAPC4 (NM_013367.1,1068-1086).
ggagtctttattataccat

SEQ ID NO: 227542 - DNA, 19 bp, Homo sapiens
  siRNA target sequence for ANAPC4 (NM_013367.1,1069-1087).
gagtctttattataccatt

SEQ ID NO: 227543 - DNA, 19 bp, Homo sapiens
  siRNA target sequence for ANAPC4 (NM_013367.1,1151-1169).
caggaatcgaagaagctat

SEQ ID NO: 227544 - DNA, 19 bp, Homo sapiens
  siRNA target sequence for ANAPC4 (NM_013367.1,1153-1171).
ggaatcgaagaagctataa

SEQ ID NO: 227545 - DNA, 19 bp, Homo sapiens
  siRNA target sequence for ANAPC4 (NM_013367.1,1172-1190).
ctgctgtgggttcttttat

SEQ ID NO: 227546 - DNA, 19 bp, Homo sapiens
  siRNA target sequence for ANAPC4 (NM_013367.1,1175-1193).
ctgtgggttcttttatact

SEQ ID NO: 227547 - DNA, 19 bp, Homo sapiens
  siRNA target sequence for ANAPC4 (NM_013367.1,1261-1279).
ctttatgtggcaatgttga

SEQ ID NO: 227548 - DNA, 19 bp, Homo sapiens
  siRNA target sequence for ANAPC4 (NM_013367.1,1267-1285).
gtggcaatgttgagaatga

SEQ ID NO: 227549 - DNA, 19 bp, Homo sapiens
  siRNA target sequence for ANAPC4 (NM_013367.1,1303-1321).
cccgagctgaataagatga

SEQ ID NO: 227550 - DNA, 19 bp, Homo sapiens
  siRNA target sequence for ANAPC4 (NM_013367.1,1326-1344).
gaaagatatcacatttgtt

SEQ ID NO: 227551 - DNA, 19 bp, Homo sapiens
  siRNA target sequence for ANAPC4 (NM_013367.1,1372-1390).
gaggctccagacctttata

SEQ ID NO: 227552 - DNA, 19 bp, Homo sapiens
  siRNA target sequence for ANAPC4 (NM_013367.1,1374-1392).
ggctccagacctttataat

SEQ ID NO: 227553 - DNA, 19 bp, Homo sapiens
  siRNA target sequence for ANAPC4 (NM_013367.1,1378-1396).
ccagacctttataatcgaa

SEQ ID NO: 227554 - DNA, 19 bp, Homo sapiens
  siRNA target sequence for ANAPC4 (NM_013367.1,1617-1635).
gccagcagatgtaattgga

SEQ ID NO: 227555 - DNA, 19 bp, Homo sapiens
  siRNA target sequence for ANAPC4 (NM_013367.1,1690-1708).
gattctacacgtagattgt

SEQ ID NO: 227556 - DNA, 19 bp, Homo sapiens
  siRNA target sequence for ANAPC4 (NM_013367.1,1694-1712).
ctacacgtagattgttcaa

SEQ ID NO: 227557 - DNA, 19 bp, Homo sapiens
  siRNA target sequence for ANAPC4 (NM_013367.1,1697-1715).
cacgtagattgttcaaatt

SEQ ID NO: 227558 - DNA, 19 bp, Homo sapiens
  siRNA target sequence for ANAPC4 (NM_013367.1,1723-1741).
ctgtggaataataaaactt

SEQ ID NO: 227559 - DNA, 19 bp, Homo sapiens
  siRNA target sequence for ANAPC4 (NM_013367.1,1766-1784).
ctattctagaagattcact

SEQ ID NO: 227560 - DNA, 19 bp, Homo sapiens
  siRNA target sequence for ANAPC4 (NM_013367.1,1810-1828).
catactgatatttctcaat

SEQ ID NO: 227561 - DNA, 19 bp, Homo sapiens
  siRNA target sequence for ANAPC4 (NM_013367.1,1829-1847).
ctgtgagtaatggactaat

SEQ ID NO: 227562 - DNA, 19 bp, Homo sapiens
  siRNA target sequence for ANAPC4 (NM_013367.1,1833-1851).
gagtaatggactaattgct

SEQ ID NO: 227563 - DNA, 19 bp, Homo sapiens
  siRNA target sequence for ANAPC4 (NM_013367.1,1835-1853).
gtaatggactaattgctat

SEQ ID NO: 227564 - DNA, 19 bp, Homo sapiens
  siRNA target sequence for ANAPC4 (NM_013367.1,1841-1859).
gactaattgctattaaatt

SEQ ID NO: 227565 - DNA, 19 bp, Homo sapiens
  siRNA target sequence for ANAPC4 (NM_013367.1,1871-1889).
catatgccacaacagaaaa

SEQ ID NO: 227566 - DNA, 19 bp, Homo sapiens
  siRNA target sequence for ANAPC4 (NM_013367.1,1901-1919).
gcatctacagttgtttaga

SEQ ID NO: 227567 - DNA, 19 bp, Homo sapiens
  siRNA target sequence for ANAPC4 (NM_013367.1,1943-1961).
ctgtaacagtagttcttaa

SEQ ID NO: 227568 - DNA, 19 bp, Homo sapiens
  siRNA target sequence for ANAPC4 (NM_013367.1,2013-2031).
gtctttagtatataacagt

SEQ ID NO: 227569 - DNA, 19 bp, Homo sapiens
  siRNA target sequence for ANAPC4 (NM_013367.1,2055-2073).
cactgggacttattctaca

SEQ ID NO: 227570 - DNA, 19 bp, Homo sapiens
  siRNA target sequence for ANAPC4 (NM_013367.1,2101-2119).
cccacccgtaccatgcatt

SEQ ID NO: 227571 - DNA, 19 bp, Homo sapiens
  siRNA target sequence for ANAPC4 (NM_013367.1,2103-2121).
cacccgtaccatgcatttt

SEQ ID NO: 227572 - DNA, 19 bp, Homo sapiens
  siRNA target sequence for ANAPC4 (NM_013367.1,2168-2186).
ctgggaatggttttcgaaa

SEQ ID NO: 227573 - DNA, 19 bp, Homo sapiens
  siRNA target sequence for ANAPC4 (NM_013367.1,2193-2211).
ctgtgtgttaagctcaaat

SEQ ID NO: 227574 - DNA, 19 bp, Homo sapiens
  siRNA target sequence for ANAPC4 (NM_013367.1,2195-2213).
gtgtgttaagctcaaatct

SEQ ID NO: 227575 - DNA, 19 bp, Homo sapiens
  siRNA target sequence for ANAPC4 (NM_013367.1,2212-2230).
cttcgtcatgtgagagtat

SEQ ID NO: 227576 - DNA, 19 bp, Homo sapiens
  siRNA target sequence for ANAPC4 (NM_013367.1,2216-2234).
gtcatgtgagagtatttga

SEQ ID NO: 227577 - DNA, 19 bp, Homo sapiens
  siRNA target sequence for ANAPC4 (NM_013367.1,2259-2277).
gctcgatgagtcttcagat

SEQ ID NO: 227578 - DNA, 19 bp, Homo sapiens
  siRNA target sequence for ANAPC4 (NM_013367.1,2291-2309).
ccagtaataagcctgtaaa

SEQ ID NO: 227579 - DNA, 19 bp, Homo sapiens
  siRNA target sequence for ANAPC4 (NM_013367.1,2369-2387).
ctttagctccagagatagt

SEQ ID NO: 227580 - DNA, 19 bp, Homo sapiens
  siRNA target sequence for ANAPC4 (NM_013367.1,2374-2392).
gctccagagatagtcatta

SEQ ID NO: 227581 - DNA, 19 bp, Homo sapiens
  siRNA target sequence for ANAPC4 (NM_013367.1,2375-2393).
ctccagagatagtcattaa

SEQ ID NO: 227582 - DNA, 19 bp, Homo sapiens
  siRNA target sequence for ANAPC4 (NM_013367.1,2378-2396).
cagagatagtcattaaagt

SEQ ID NO: 227583 - DNA, 19 bp, Homo sapiens
  siRNA target sequence for ANAPC5 (NM_016237.3,74-92).
cgagagcctctacttcaat

SEQ ID NO: 227584 - DNA, 19 bp, Homo sapiens
  siRNA target sequence for ANAPC5 (NM_016237.3,111-129).
gttgtgcacgccaatgtgt

SEQ ID NO: 227585 - DNA, 19 bp, Homo sapiens
  siRNA target sequence for ANAPC5 (NM_016237.3,145-163).
gggtgacgccgtacaagat

SEQ ID NO: 227586 - DNA, 19 bp, Homo sapiens
  siRNA target sequence for ANAPC5 (NM_016237.3,261-279).
ctgcagggcccagatatta

SEQ ID NO: 227587 - DNA, 19 bp, Homo sapiens
  siRNA target sequence for ANAPC5 (NM_016237.3,263-281).
gcagggcccagatattaca

SEQ ID NO: 227588 - DNA, 19 bp, Homo sapiens
  siRNA target sequence for ANAPC5 (NM_016237.3,334-352).
cagtgcagatcagaatcaa

SEQ ID NO: 227589 - DNA, 19 bp, Homo sapiens
  siRNA target sequence for ANAPC5 (NM_016237.3,426-444).
gaaccagaggttcacaaaa

SEQ ID NO: 227590 - DNA, 19 bp, Homo sapiens
  siRNA target sequence for ANAPC5 (NM_016237.3,429-447).
ccagaggttcacaaaacaa

SEQ ID NO: 227591 - DNA, 19 bp, Homo sapiens
  siRNA target sequence for ANAPC5 (NM_016237.3,445-463).
caagtgtagtaggtttgtt

SEQ ID NO: 227592 - DNA, 19 bp, Homo sapiens
  siRNA target sequence for ANAPC5 (NM_016237.3,483-501).
gcctacagtaagctttctt

SEQ ID NO: 227593 - DNA, 19 bp, Homo sapiens
  siRNA target sequence for ANAPC5 (NM_016237.3,505-523).
gccaagtgtttaaactgta

SEQ ID NO: 227594 - DNA, 19 bp, Homo sapiens
  siRNA target sequence for ANAPC5 (NM_016237.3,714-732).
caggcttctttgctaaaga

SEQ ID NO: 227595 - DNA, 19 bp, Homo sapiens
  siRNA target sequence for ANAPC5 (NM_016237.3,843-861).
ctccgtgtccaagatgttt

SEQ ID NO: 227596 - DNA, 19 bp, Homo sapiens
  siRNA target sequence for ANAPC5 (NM_016237.3,912-930).
ggagccgaaagcaaaagta

SEQ ID NO: 227597 - DNA, 19 bp, Homo sapiens
  siRNA target sequence for ANAPC5 (NM_016237.3,959-977).
gagatacgccgctctgaat

SEQ ID NO: 227598 - DNA, 19 bp, Homo sapiens
  siRNA target sequence for ANAPC5 (NM_016237.3,961-979).
gatacgccgctctgaatct

SEQ ID NO: 227599 - DNA, 19 bp, Homo sapiens
  siRNA target sequence for ANAPC5 (NM_016237.3,992-1010).
ctgccgcttcggtcactat

SEQ ID NO: 227600 - DNA, 19 bp, Homo sapiens
  siRNA target sequence for ANAPC5 (NM_016237.3,994-1012).
gccgcttcggtcactatca

SEQ ID NO: 227601 - DNA, 19 bp, Homo sapiens
  siRNA target sequence for ANAPC5 (NM_016237.3,995-1013).
ccgcttcggtcactatcaa

SEQ ID NO: 227602 - DNA, 19 bp, Homo sapiens
  siRNA target sequence for ANAPC5 (NM_016237.3,997-1015).
gcttcggtcactatcaaca

SEQ ID NO: 227603 - DNA, 19 bp, Homo sapiens
  siRNA target sequence for ANAPC5 (NM_016237.3,1031-1049).
gcaggaggcaattaggatt

SEQ ID NO: 227604 - DNA, 19 bp, Homo sapiens
  siRNA target sequence for ANAPC5 (NM_016237.3,1085-1103).
ctgtttgagctggctttat

SEQ ID NO: 227605 - DNA, 19 bp, Homo sapiens
  siRNA target sequence for ANAPC5 (NM_016237.3,1115-1133).
gaagagatccgatagctat

SEQ ID NO: 227606 - DNA, 19 bp, Homo sapiens
  siRNA target sequence for ANAPC5 (NM_016237.3,1118-1136).
gagatccgatagctatgtt

SEQ ID NO: 227607 - DNA, 19 bp, Homo sapiens
  siRNA target sequence for ANAPC5 (NM_016237.3,1278-1296).
ctcctgcactggaaacaca

SEQ ID NO: 227608 - DNA, 19 bp, Homo sapiens
  siRNA target sequence for ANAPC5 (NM_016237.3,1299-1317).
ctgtcagagctcatcgata

SEQ ID NO: 227609 - DNA, 19 bp, Homo sapiens
  siRNA target sequence for ANAPC5 (NM_016237.3,1490-1508).
cgcggagcagggctgtttt

SEQ ID NO: 227610 - DNA, 19 bp, Homo sapiens
  siRNA target sequence for ANAPC5 (NM_016237.3,1546-1564).
gatttccgcctaatagtca

SEQ ID NO: 227611 - DNA, 19 bp, Homo sapiens
  siRNA target sequence for ANAPC5 (NM_016237.3,1604-1622).
gtttgacagagcaatgaat

SEQ ID NO: 227612 - DNA, 19 bp, Homo sapiens
  siRNA target sequence for ANAPC5 (NM_016237.3,1615-1633).
caatgaatgatggcaaata

SEQ ID NO: 227613 - DNA, 19 bp, Homo sapiens
  siRNA target sequence for ANAPC5 (NM_016237.3,1619-1637).
gaatgatggcaaatatcat

SEQ ID NO: 227614 - DNA, 19 bp, Homo sapiens
  siRNA target sequence for ANAPC5 (NM_016237.3,1640-1658).
ggctgattcacttgttaca

SEQ ID NO: 227615 - DNA, 19 bp, Homo sapiens
  siRNA target sequence for ANAPC5 (NM_016237.3,1659-1677).
ggaatcacagctctcaata

SEQ ID NO: 227616 - DNA, 19 bp, Homo sapiens
  siRNA target sequence for ANAPC5 (NM_016237.3,1696-1714).
ggaaagcggttgtattaca

SEQ ID NO: 227617 - DNA, 19 bp, Homo sapiens
  siRNA target sequence for ANAPC5 (NM_016237.3,1697-1715).
gaaagcggttgtattacaa

SEQ ID NO: 227618 - DNA, 19 bp, Homo sapiens
  siRNA target sequence for ANAPC5 (NM_016237.3,1730-1748).
gtcagaggcacataagctt

SEQ ID NO: 227619 - DNA, 19 bp, Homo sapiens
  siRNA target sequence for ANAPC5 (NM_016237.3,1736-1754).
ggcacataagcttttacaa

SEQ ID NO: 227620 - DNA, 19 bp, Homo sapiens
  siRNA target sequence for ANAPC5 (NM_016237.3,1737-1755).
gcacataagcttttacaaa

SEQ ID NO: 227621 - DNA, 19 bp, Homo sapiens
  siRNA target sequence for ANAPC5 (NM_016237.3,1752-1770).
caaaaattgttggttcatt

SEQ ID NO: 227622 - DNA, 19 bp, Homo sapiens
  siRNA target sequence for ANAPC5 (NM_016237.3,1910-1928).
gtacttggcctctgaaaca

SEQ ID NO: 227623 - DNA, 19 bp, Homo sapiens
  siRNA target sequence for ANAPC5 (NM_016237.3,1967-1985).
cccagaacaggccttaagt

SEQ ID NO: 227624 - DNA, 19 bp, Homo sapiens
  siRNA target sequence for ANAPC5 (NM_016237.3,2041-2059).
gtcgtgccatgttcttagt

SEQ ID NO: 227625 - DNA, 19 bp, Homo sapiens
  siRNA target sequence for ANAPC5 (NM_016237.3,2090-2108).
ctacgatcagccgaagaaa

SEQ ID NO: 227626 - DNA, 19 bp, Homo sapiens
  siRNA target sequence for ANAPC5 (NM_016237.3,2185-2203).
gcatcagggacgtcgttta

SEQ ID NO: 227627 - DNA, 19 bp, Homo sapiens
  siRNA target sequence for ANAPC5 (NM_016237.3,2298-2316).
catggggtacccttgataa

SEQ ID NO: 227628 - DNA, 19 bp, Homo sapiens
  siRNA target sequence for ANAPC5 (NM_016237.3,2302-2320).
gggtacccttgataaacca

SEQ ID NO: 227629 - DNA, 19 bp, Homo sapiens
  siRNA target sequence for APC10 (NM_014885.1,247-265).
gtttggtcactctcatctt

SEQ ID NO: 227630 - DNA, 19 bp, Homo sapiens
  siRNA target sequence for APC10 (NM_014885.1,252-270).
gtcactctcatcttgcaaa

SEQ ID NO: 227631 - DNA, 19 bp, Homo sapiens
  siRNA target sequence for APC10 (NM_014885.1,343-361).
catttagtgaacatccaat

SEQ ID NO: 227632 - DNA, 19 bp, Homo sapiens
  siRNA target sequence for APC10 (NM_014885.1,506-524).
caagtggctggattcatgt

SEQ ID NO: 227633 - DNA, 19 bp, Homo sapiens
  siRNA target sequence for APC10 (NM_014885.1,527-545).
ccttaactgacaatcataa

SEQ ID NO: 227634 - DNA, 19 bp, Homo sapiens
  siRNA target sequence for APC10 (NM_014885.1,567-585).
gatacagattgctgttcta

SEQ ID NO: 227635 - DNA, 19 bp, Homo sapiens
  siRNA target sequence for APC10 (NM_014885.1,609-627).
cacccatatgagacaaatt

SEQ ID NO: 227636 - DNA, 19 bp, Homo sapiens
  siRNA target sequence for APC10 (NM_014885.1,611-629).
cccatatgagacaaattaa

SEQ ID NO: 227637 - DNA, 19 bp, Homo sapiens
  siRNA target sequence for C14orf130 (NM_018108.2,589-607).
gcatgaaacgttgttcttt

SEQ ID NO: 227638 - DNA, 19 bp, Homo sapiens
  siRNA target sequence for C14orf130 (NM_018108.2,613-631).
gggcttatgctgcacaatt

SEQ ID NO: 227639 - DNA, 19 bp, Homo sapiens
  siRNA target sequence for C14orf130 (NM_018108.2,625-643).
cacaattggcagtaaccaa

SEQ ID NO: 227640 - DNA, 19 bp, Homo sapiens
  siRNA target sequence for C14orf130 (NM_018108.2,664-682).
gattggtgcggaacattga

SEQ ID NO: 227641 - DNA, 19 bp, Homo sapiens
  siRNA target sequence for C14orf130 (NM_018108.2,671-689).
gcggaacattgatggaata

SEQ ID NO: 227642 - DNA, 19 bp, Homo sapiens
  siRNA target sequence for C14orf130 (NM_018108.2,691-709).
gtgatcaggaagttatcaa

SEQ ID NO: 227643 - DNA, 19 bp, Homo sapiens
  siRNA target sequence for C14orf130 (NM_018108.2,720-738).
ggagagcatcaagatagta

SEQ ID NO: 227644 - DNA, 19 bp, Homo sapiens
  siRNA target sequence for C14orf130 (NM_018108.2,810-828).
ccatgtgccggctctagtt

SEQ ID NO: 227645 - DNA, 19 bp, Homo sapiens
  siRNA target sequence for C14orf130 (NM_018108.2,816-834).
gccggctctagttctgaat

SEQ ID NO: 227646 - DNA, 19 bp, Homo sapiens
  siRNA target sequence for C14orf130 (NM_018108.2,837-855).
gatctccagacagtgttta

SEQ ID NO: 227647 - DNA, 19 bp, Homo sapiens
  siRNA target sequence for C14orf130 (NM_018108.2,912-930).
gctaagcagcttataaaga

SEQ ID NO: 227648 - DNA, 19 bp, Homo sapiens
  siRNA target sequence for C14orf130 (NM_018108.2,976-994).
gtacctgccaagactgtat

SEQ ID NO: 227649 - DNA, 19 bp, Homo sapiens
  siRNA target sequence for C14orf130 (NM_018108.2,979-997).
cctgccaagactgtatgaa

SEQ ID NO: 227650 - DNA, 19 bp, Homo sapiens
  siRNA target sequence for C14orf130 (NM_018108.2,995-1013).
gaaaatgtatggagatcta

SEQ ID NO: 227651 - DNA, 19 bp, Homo sapiens
  siRNA target sequence for C14orf130 (NM_018108.2,1005-1023).
ggagatctagatgtcttat

SEQ ID NO: 227652 - DNA, 19 bp, Homo sapiens
  siRNA target sequence for C14orf130 (NM_018108.2,1006-1024).
gagatctagatgtcttatt

SEQ ID NO: 227653 - DNA, 19 bp, Homo sapiens
  siRNA target sequence for C14orf130 (NM_018108.2,1019-1037).
cttattcctgacagatgaa

SEQ ID NO: 227654 - DNA, 19 bp, Homo sapiens
  siRNA target sequence for C14orf130 (NM_018108.2,1043-1061).
cacagttctggcttatgaa

SEQ ID NO: 227655 - DNA, 19 bp, Homo sapiens
  siRNA target sequence for C14orf130 (NM_018108.2,1047-1065).
gttctggcttatgaaaaca

SEQ ID NO: 227656 - DNA, 19 bp, Homo sapiens
  siRNA target sequence for C14orf130 (NM_018108.2,1093-1111).
ggagcgatcccctaatgga

SEQ ID NO: 227657 - DNA, 19 bp, Homo sapiens
  siRNA target sequence for C14orf130 (NM_018108.2,1094-1112).
gagcgatcccctaatggat

SEQ ID NO: 227658 - DNA, 19 bp, Homo sapiens
  siRNA target sequence for C14orf130 (NM_018108.2,1115-1133).
ccttagcagcatgaataga

SEQ ID NO: 227659 - DNA, 19 bp, Homo sapiens
  siRNA target sequence for C14orf130 (NM_018108.2,1139-1157).
gcaagtggaactcatttgt

SEQ ID NO: 227660 - DNA, 19 bp, Homo sapiens
  siRNA target sequence for C14orf130 (NM_018108.2,1175-1193).
gactgaacttaaagactat

SEQ ID NO: 227661 - DNA, 19 bp, Homo sapiens
  siRNA target sequence for C14orf130 (NM_018108.2,1196-1214).
caagagatttgctgatgaa

SEQ ID NO: 227662 - DNA, 19 bp, Homo sapiens
  siRNA target sequence for C14orf130 (NM_018108.2,1209-1227).
gatgaaggcacggttgtta

SEQ ID NO: 227663 - DNA, 19 bp, Homo sapiens
  siRNA target sequence for C14orf130 (NM_018108.2,1212-1230).
gaaggcacggttgttaaga

SEQ ID NO: 227664 - DNA, 19 bp, Homo sapiens
  siRNA target sequence for C14orf130 (NM_018108.2,1257-1275).
gagtttcagtcaaaaaaga

SEQ ID NO: 227665 - DNA, 19 bp, Homo sapiens
  siRNA target sequence for C14orf130 (NM_175748.1,390-408).
gcactatatgcctgtagta

SEQ ID NO: 227666 - DNA, 19 bp, Homo sapiens
  siRNA target sequence for C14orf130 (NM_175748.1,468-486).
catggaagtcacaaactat

SEQ ID NO: 227667 - DNA, 19 bp, Homo sapiens
  siRNA target sequence for C14orf130 (NM_175748.1,586-604).
ctggcaataagtacaatga

SEQ ID NO: 227668 - DNA, 19 bp, Homo sapiens
  siRNA target sequence for C14orf130 (NM_175748.1,588-606).
ggcaataagtacaatgaca

SEQ ID NO: 227669 - DNA, 19 bp, Homo sapiens
  siRNA target sequence for C14orf130 (NM_175748.1,589-607).
gcaataagtacaatgacaa

SEQ ID NO: 227670 - DNA, 19 bp, Homo sapiens
  siRNA target sequence for C6orf133 (NM_015255.1,120-138).
gcatttagcccactatgta

SEQ ID NO: 227671 - DNA, 19 bp, Homo sapiens
  siRNA target sequence for C6orf133 (NM_015255.1,313-331).
gtaggagagcctacatatt

SEQ ID NO: 227672 - DNA, 19 bp, Homo sapiens
  siRNA target sequence for C6orf133 (NM_015255.1,316-334).
ggagagcctacatattctt

SEQ ID NO: 227673 - DNA, 19 bp, Homo sapiens
  siRNA target sequence for C6orf133 (NM_015255.1,352-370).
gatccaacttgtgttttgt

SEQ ID NO: 227674 - DNA, 19 bp, Homo sapiens
  siRNA target sequence for C6orf133 (NM_015255.1,397-415).
cacagagatcatcgatata

SEQ ID NO: 227675 - DNA, 19 bp, Homo sapiens
  siRNA target sequence for C6orf133 (NM_015255.1,406-424).
catcgatataggatgacaa

SEQ ID NO: 227676 - DNA, 19 bp, Homo sapiens
  siRNA target sequence for C6orf133 (NM_015255.1,409-427).
cgatataggatgacaacat

SEQ ID NO: 227677 - DNA, 19 bp, Homo sapiens
  siRNA target sequence for C6orf133 (NM_015255.1,475-493).
gagggtccttactgtcaaa

SEQ ID NO: 227678 - DNA, 19 bp, Homo sapiens
  siRNA target sequence for C6orf133 (NM_015255.1,536-554).
ctcttgttcatttatcaga

SEQ ID NO: 227679 - DNA, 19 bp, Homo sapiens
  siRNA target sequence for C6orf133 (NM_015255.1,556-574).
gatgtgatagcaagaactt

SEQ ID NO: 227680 - DNA, 19 bp, Homo sapiens
  siRNA target sequence for C6orf133 (NM_015255.1,594-612).
gtttcggtatgcagtagaa

SEQ ID NO: 227681 - DNA, 19 bp, Homo sapiens
  siRNA target sequence for C6orf133 (NM_015255.1,598-616).
cggtatgcagtagaaatat

SEQ ID NO: 227682 - DNA, 19 bp, Homo sapiens
  siRNA target sequence for C6orf133 (NM_015255.1,600-618).
gtatgcagtagaaatatta

SEQ ID NO: 227683 - DNA, 19 bp, Homo sapiens
  siRNA target sequence for C6orf133 (NM_015255.1,604-622).
gcagtagaaatattaacct

SEQ ID NO: 227684 - DNA, 19 bp, Homo sapiens
  siRNA target sequence for C6orf133 (NM_015255.1,635-653).
gtgaattgccagcagattt

SEQ ID NO: 227685 - DNA, 19 bp, Homo sapiens
  siRNA target sequence for C6orf133 (NM_015255.1,681-699).
ctattgcatgctgtttaat

SEQ ID NO: 227686 - DNA, 19 bp, Homo sapiens
  siRNA target sequence for C6orf133 (NM_015255.1,705-723).
ggttcacacctatgaacaa

SEQ ID NO: 227687 - DNA, 19 bp, Homo sapiens
  siRNA target sequence for C6orf133 (NM_015255.1,803-821).
ggcgtaggtctgttcgata

SEQ ID NO: 227688 - DNA, 19 bp, Homo sapiens
  siRNA target sequence for C6orf133 (NM_015255.1,804-822).
gcgtaggtctgttcgatat

SEQ ID NO: 227689 - DNA, 19 bp, Homo sapiens
  siRNA target sequence for C6orf133 (NM_015255.1,812-830).
ctgttcgatatggagattt

SEQ ID NO: 227690 - DNA, 19 bp, Homo sapiens
  siRNA target sequence for C6orf133 (NM_015255.1,847-865).
gcaaaatcagtaattgtga

SEQ ID NO: 227691 - DNA, 19 bp, Homo sapiens
  siRNA target sequence for C6orf133 (NM_015255.1,888-906).
gccactcaaagttcaagtt

SEQ ID NO: 227692 - DNA, 19 bp, Homo sapiens
  siRNA target sequence for C6orf133 (NM_015255.1,890-908).
cactcaaagttcaagttat

SEQ ID NO: 227693 - DNA, 19 bp, Homo sapiens
  siRNA target sequence for C6orf133 (NM_015255.1,894-912).
caaagttcaagttatgcat

SEQ ID NO: 227694 - DNA, 19 bp, Homo sapiens
  siRNA target sequence for C6orf133 (NM_015255.1,924-942).
cgcacatcagaattttggt

SEQ ID NO: 227695 - DNA, 19 bp, Homo sapiens
  siRNA target sequence for C6orf133 (NM_015255.1,926-944).
cacatcagaattttggttt

SEQ ID NO: 227696 - DNA, 19 bp, Homo sapiens
  siRNA target sequence for C6orf133 (NM_015255.1,988-1006).
ggccttcgccggattttat

SEQ ID NO: 227697 - DNA, 19 bp, Homo sapiens
  siRNA target sequence for C6orf133 (NM_015255.1,990-1008).
ccttcgccggattttatgt

SEQ ID NO: 227698 - DNA, 19 bp, Homo sapiens
  siRNA target sequence for C6orf133 (NM_015255.1,996-1014).
ccggattttatgtcaagtt

SEQ ID NO: 227699 - DNA, 19 bp, Homo sapiens
  siRNA target sequence for C6orf133 (NM_015255.1,1007-1025).
gtcaagttggtttacaaga

SEQ ID NO: 227700 - DNA, 19 bp, Homo sapiens
  siRNA target sequence for C6orf133 (NM_015255.1,1054-1072).
gtggacagactgatgctta

SEQ ID NO: 227701 - DNA, 19 bp, Homo sapiens
  siRNA target sequence for C6orf133 (NM_015255.1,1065-1083).
gatgcttagtgattccaaa

SEQ ID NO: 227702 - DNA, 19 bp, Homo sapiens
  siRNA target sequence for C6orf133 (NM_015255.1,1068-1086).
gcttagtgattccaaatta

SEQ ID NO: 227703 - DNA, 19 bp, Homo sapiens
  siRNA target sequence for C6orf133 (NM_015255.1,1073-1091).
gtgattccaaattatggaa

SEQ ID NO: 227704 - DNA, 19 bp, Homo sapiens
  siRNA target sequence for C6orf133 (NM_015255.1,1094-1112).
gtgctaggagtgtatatca

SEQ ID NO: 227705 - DNA, 19 bp, Homo sapiens
  siRNA target sequence for C6orf133 (NM_015255.1,1097-1115).
ctaggagtgtatatcatca

SEQ ID NO: 227706 - DNA, 19 bp, Homo sapiens
  siRNA target sequence for C6orf133 (NM_015255.1,1100-1118).
ggagtgtatatcatcagtt

SEQ ID NO: 227707 - DNA, 19 bp, Homo sapiens
  siRNA target sequence for C6orf133 (NM_015255.1,1103-1121).
gtgtatatcatcagttgtt

SEQ ID NO: 227708 - DNA, 19 bp, Homo sapiens
  siRNA target sequence for C6orf133 (NM_015255.1,1165-1183).
gctgttcgatttgcaaaaa

SEQ ID NO: 227709 - DNA, 19 bp, Homo sapiens
  siRNA target sequence for C6orf133 (NM_015255.1,1236-1254).
gtcggtgactgctctatct

SEQ ID NO: 227710 - DNA, 19 bp, Homo sapiens
  siRNA target sequence for C6orf133 (NM_015255.1,1238-1256).
cggtgactgctctatctgt

SEQ ID NO: 227711 - DNA, 19 bp, Homo sapiens
  siRNA target sequence for C6orf133 (NM_015255.1,1314-1332).
gagcattatcattaagact

SEQ ID NO: 227712 - DNA, 19 bp, Homo sapiens
  siRNA target sequence for C6orf133 (NM_015255.1,1323-1341).
cattaagacttttatggat

SEQ ID NO: 227713 - DNA, 19 bp, Homo sapiens
  siRNA target sequence for C6orf133 (NM_015255.1,1399-1417).
caagccttcaaatttagga

SEQ ID NO: 227714 - DNA, 19 bp, Homo sapiens
  siRNA target sequence for C6orf133 (NM_015255.1,1438-1456).
gatctcaagtatgtgttaa

SEQ ID NO: 227715 - DNA, 19 bp, Homo sapiens
  siRNA target sequence for C6orf133 (NM_015255.1,1441-1459).
ctcaagtatgtgttaatta

SEQ ID NO: 227716 - DNA, 19 bp, Homo sapiens
  siRNA target sequence for C6orf133 (NM_015255.1,1446-1464).
gtatgtgttaattagcaaa

SEQ ID NO: 227717 - DNA, 19 bp, Homo sapiens
  siRNA target sequence for C6orf133 (NM_015255.1,1450-1468).
gtgttaattagcaaaccaa

SEQ ID NO: 227718 - DNA, 19 bp, Homo sapiens
  siRNA target sequence for C6orf133 (NM_015255.1,1516-1534).
gcctttttggaattactaa

SEQ ID NO: 227719 - DNA, 19 bp, Homo sapiens
  siRNA target sequence for C6orf133 (NM_015255.1,1564-1582).
cgtcaagtaggacaacata

SEQ ID NO: 227720 - DNA, 19 bp, Homo sapiens
  siRNA target sequence for C6orf133 (NM_015255.1,1606-1624).
gcagccttcacactacaaa

SEQ ID NO: 227721 - DNA, 19 bp, Homo sapiens
  siRNA target sequence for C6orf133 (NM_015255.1,1610-1628).
ccttcacactacaaatgaa

SEQ ID NO: 227722 - DNA, 19 bp, Homo sapiens
  siRNA target sequence for C6orf133 (NM_015255.1,1611-1629).
cttcacactacaaatgaaa

SEQ ID NO: 227723 - DNA, 19 bp, Homo sapiens
  siRNA target sequence for C6orf133 (NM_015255.1,1614-1632).
cacactacaaatgaaatta

SEQ ID NO: 227724 - DNA, 19 bp, Homo sapiens
  siRNA target sequence for C6orf133 (NM_015255.1,1723-1741).
cagtgtcatggtggttata

SEQ ID NO: 227725 - DNA, 19 bp, Homo sapiens
  siRNA target sequence for C6orf133 (NM_015255.1,1727-1745).
gtcatggtggttatactga

SEQ ID NO: 227726 - DNA, 19 bp, Homo sapiens
  siRNA target sequence for C6orf133 (NM_015255.1,1750-1768).
gaacagccaatcacactaa

SEQ ID NO: 227727 - DNA, 19 bp, Homo sapiens
  siRNA target sequence for C6orf133 (NM_015255.1,1778-1796).
gacattcagtggaaactat

SEQ ID NO: 227728 - DNA, 19 bp, Homo sapiens
  siRNA target sequence for C6orf133 (NM_015255.1,1780-1798).
cattcagtggaaactatca

SEQ ID NO: 227729 - DNA, 19 bp, Homo sapiens
  siRNA target sequence for C6orf133 (NM_015255.1,1852-1870).
cttgcaggtttacatgtat

SEQ ID NO: 227730 - DNA, 19 bp, Homo sapiens
  siRNA target sequence for C6orf133 (NM_015255.1,1855-1873).
gcaggtttacatgtattat

SEQ ID NO: 227731 - DNA, 19 bp, Homo sapiens
  siRNA target sequence for C6orf133 (NM_015255.1,1856-1874).
caggtttacatgtattatt

SEQ ID NO: 227732 - DNA, 19 bp, Homo sapiens
  siRNA target sequence for C6orf133 (NM_015255.1,1883-1901).
gtgaagtggcatataaatt

SEQ ID NO: 227733 - DNA, 19 bp, Homo sapiens
  siRNA target sequence for C6orf133 (NM_015255.1,1908-1926).
gctcctacctctaagtgaa

SEQ ID NO: 227734 - DNA, 19 bp, Homo sapiens
  siRNA target sequence for C6orf133 (NM_015255.1,1912-1930).
ctacctctaagtgaactta

SEQ ID NO: 227735 - DNA, 19 bp, Homo sapiens
  siRNA target sequence for C6orf133 (NM_015255.1,1931-1949).
gcccacccatgttgataga

SEQ ID NO: 227736 - DNA, 19 bp, Homo sapiens
  siRNA target sequence for C6orf133 (NM_015255.1,1932-1950).
cccacccatgttgatagaa

SEQ ID NO: 227737 - DNA, 19 bp, Homo sapiens
  siRNA target sequence for C6orf133 (NM_015255.1,1934-1952).
cacccatgttgatagaaca

SEQ ID NO: 227738 - DNA, 19 bp, Homo sapiens
  siRNA target sequence for C6orf133 (NM_015255.1,1944-1962).
gatagaacaccctcttaga

SEQ ID NO: 227739 - DNA, 19 bp, Homo sapiens
  siRNA target sequence for C6orf133 (NM_015255.1,2012-2030).
ggttctctctagtaaacca

SEQ ID NO: 227740 - DNA, 19 bp, Homo sapiens
  siRNA target sequence for C6orf133 (NM_015255.1,2023-2041).
gtaaaccagatttattact

SEQ ID NO: 227741 - DNA, 19 bp, Homo sapiens
  siRNA target sequence for C6orf133 (NM_015255.1,2057-2075).
gcagacgtgagatgtttga

SEQ ID NO: 227742 - DNA, 19 bp, Homo sapiens
  siRNA target sequence for C6orf133 (NM_015255.1,2060-2078).
gacgtgagatgtttgacaa

SEQ ID NO: 227743 - DNA, 19 bp, Homo sapiens
  siRNA target sequence for C6orf133 (NM_015255.1,2070-2088).
gtttgacaaggatgtagta

SEQ ID NO: 227744 - DNA, 19 bp, Homo sapiens
  siRNA target sequence for C6orf133 (NM_015255.1,2076-2094).
caaggatgtagtaatgctt

SEQ ID NO: 227745 - DNA, 19 bp, Homo sapiens
  siRNA target sequence for C6orf133 (NM_015255.1,2120-2138).
caaatcatttcctgatgat

SEQ ID NO: 227746 - DNA, 19 bp, Homo sapiens
  siRNA target sequence for C6orf133 (NM_015255.1,2139-2157).
catgctcagccgctttgaa

SEQ ID NO: 227747 - DNA, 19 bp, Homo sapiens
  siRNA target sequence for C6orf133 (NM_015255.1,2142-2160).
gctcagccgctttgaactt

SEQ ID NO: 227748 - DNA, 19 bp, Homo sapiens
  siRNA target sequence for C6orf133 (NM_015255.1,2213-2231).
cccataaggatgttgttca

SEQ ID NO: 227749 - DNA, 19 bp, Homo sapiens
  siRNA target sequence for C6orf133 (NM_015255.1,2224-2242).
gttgttcagcagaacaata

SEQ ID NO: 227750 - DNA, 19 bp, Homo sapiens
  siRNA target sequence for C6orf133 (NM_015255.1,2235-2253).
gaacaatactctaatagaa

SEQ ID NO: 227751 - DNA, 19 bp, Homo sapiens
  siRNA target sequence for C6orf133 (NM_015255.1,2300-2318).
ctggagttggacaggtaaa

SEQ ID NO: 227752 - DNA, 19 bp, Homo sapiens
  siRNA target sequence for C6orf133 (NM_015255.1,2305-2323).
gttggacaggtaaatgcta

SEQ ID NO: 227753 - DNA, 19 bp, Homo sapiens
  siRNA target sequence for C6orf133 (NM_015255.1,2334-2352).
caagcgagagattatccat

SEQ ID NO: 227754 - DNA, 19 bp, Homo sapiens
  siRNA target sequence for C6orf133 (NM_015255.1,2364-2382).
caagcctatggctcatagt

SEQ ID NO: 227755 - DNA, 19 bp, Homo sapiens
  siRNA target sequence for C6orf133 (NM_015255.1,2367-2385).
gcctatggctcatagtgaa

SEQ ID NO: 227756 - DNA, 19 bp, Homo sapiens
  siRNA target sequence for C6orf133 (NM_015255.1,2368-2386).
cctatggctcatagtgaat

SEQ ID NO: 227757 - DNA, 19 bp, Homo sapiens
  siRNA target sequence for C6orf133 (NM_015255.1,2369-2387).
ctatggctcatagtgaatt

SEQ ID NO: 227758 - DNA, 19 bp, Homo sapiens
  siRNA target sequence for C6orf133 (NM_015255.1,2373-2391).
ggctcatagtgaattggta

SEQ ID NO: 227759 - DNA, 19 bp, Homo sapiens
  siRNA target sequence for C6orf133 (NM_015255.1,2374-2392).
gctcatagtgaattggtaa

SEQ ID NO: 227760 - DNA, 19 bp, Homo sapiens
  siRNA target sequence for C6orf133 (NM_015255.1,2375-2393).
ctcatagtgaattggtaaa

SEQ ID NO: 227761 - DNA, 19 bp, Homo sapiens
  siRNA target sequence for C6orf133 (NM_015255.1,2423-2441).
ctggcatggagagtgtaat

SEQ ID NO: 227762 - DNA, 19 bp, Homo sapiens
  siRNA target sequence for C6orf133 (NM_015255.1,2426-2444).
gcatggagagtgtaatcga

SEQ ID NO: 227763 - DNA, 19 bp, Homo sapiens
  siRNA target sequence for C6orf133 (NM_015255.1,2427-2445).
catggagagtgtaatcgaa

SEQ ID NO: 227764 - DNA, 19 bp, Homo sapiens
  siRNA target sequence for C6orf133 (NM_015255.1,2446-2464).
gcagttgcccatttcaaga

SEQ ID NO: 227765 - DNA, 19 bp, Homo sapiens
  siRNA target sequence for C6orf133 (NM_015255.1,2477-2495).
caggacgaggcatgtatga

SEQ ID NO: 227766 - DNA, 19 bp, Homo sapiens
  siRNA target sequence for C6orf133 (NM_015255.1,2480-2498).
gacgaggcatgtatgaact

SEQ ID NO: 227767 - DNA, 19 bp, Homo sapiens
  siRNA target sequence for C6orf133 (NM_015255.1,2504-2522).
cagaatgtgccaaagagtt

SEQ ID NO: 227768 - DNA, 19 bp, Homo sapiens
  siRNA target sequence for C6orf133 (NM_015255.1,2518-2536).
gagttcaacttgtatttct

SEQ ID NO: 227769 - DNA, 19 bp, Homo sapiens
  siRNA target sequence for C6orf133 (NM_015255.1,2572-2590).
gaagcgcaacggaaattga

SEQ ID NO: 227770 - DNA, 19 bp, Homo sapiens
  siRNA target sequence for C6orf133 (NM_015255.1,2575-2593).
gcgcaacggaaattgaaaa

SEQ ID NO: 227771 - DNA, 19 bp, Homo sapiens
  siRNA target sequence for C6orf133 (NM_015255.1,2764-2782).
caaagggtgttacatttaa

SEQ ID NO: 227772 - DNA, 19 bp, Homo sapiens
  siRNA target sequence for C6orf133 (NM_015255.1,2786-2804).
gcatggcactacaagaaga

SEQ ID NO: 227773 - DNA, 19 bp, Homo sapiens
  siRNA target sequence for C6orf133 (NM_015255.1,2787-2805).
catggcactacaagaagaa

SEQ ID NO: 227774 - DNA, 19 bp, Homo sapiens
  siRNA target sequence for C6orf133 (NM_015255.1,2829-2847).
ggaagagcatgtagtaaca

SEQ ID NO: 227775 - DNA, 19 bp, Homo sapiens
  siRNA target sequence for C6orf133 (NM_015255.1,2830-2848).
gaagagcatgtagtaacat

SEQ ID NO: 227776 - DNA, 19 bp, Homo sapiens
  siRNA target sequence for C6orf133 (NM_015255.1,2833-2851).
gagcatgtagtaacattta

SEQ ID NO: 227777 - DNA, 19 bp, Homo sapiens
  siRNA target sequence for C6orf133 (NM_015255.1,2875-2893).
cctggtgaagcgccaaaaa

SEQ ID NO: 227778 - DNA, 19 bp, Homo sapiens
  siRNA target sequence for C6orf133 (NM_015255.1,2876-2894).
ctggtgaagcgccaaaaaa

SEQ ID NO: 227779 - DNA, 19 bp, Homo sapiens
  siRNA target sequence for C6orf133 (NM_015255.1,2897-2915).
ctcctagcatactagctat

SEQ ID NO: 227780 - DNA, 19 bp, Homo sapiens
  siRNA target sequence for C6orf133 (NM_015255.1,2919-2937).
ggaaacactacaaaatgct

SEQ ID NO: 227781 - DNA, 19 bp, Homo sapiens
  siRNA target sequence for C6orf133 (NM_015255.1,2959-2977).
gacatgattcggtggatat

SEQ ID NO: 227782 - DNA, 19 bp, Homo sapiens
  siRNA target sequence for C6orf133 (NM_015255.1,3250-3268).
gcttcagatatgacactta

SEQ ID NO: 227783 - DNA, 19 bp, Homo sapiens
  siRNA target sequence for C6orf133 (NM_015255.1,3299-3317).
ctgaacaaagacaattcgt

SEQ ID NO: 227784 - DNA, 19 bp, Homo sapiens
  siRNA target sequence for C6orf133 (NM_015255.1,3308-3326).
gacaattcgttacatgtat

SEQ ID NO: 227785 - DNA, 19 bp, Homo sapiens
  siRNA target sequence for C6orf133 (NM_015255.1,3315-3333).
cgttacatgtatattgtgt

SEQ ID NO: 227786 - DNA, 19 bp, Homo sapiens
  siRNA target sequence for C6orf133 (NM_015255.1,3395-3413).
gatcaactgtattatcaaa

SEQ ID NO: 227787 - DNA, 19 bp, Homo sapiens
  siRNA target sequence for C6orf133 (NM_015255.1,3398-3416).
caactgtattatcaaaaaa

SEQ ID NO: 227788 - DNA, 19 bp, Homo sapiens
  siRNA target sequence for C6orf133 (NM_015255.1,3548-3566).
ccgttcaagctaaagaaca

SEQ ID NO: 227789 - DNA, 19 bp, Homo sapiens
  siRNA target sequence for C6orf133 (NM_015255.1,3567-3585).
gcgaaggcaacagagatta

SEQ ID NO: 227790 - DNA, 19 bp, Homo sapiens
  siRNA target sequence for C6orf133 (NM_015255.1,3577-3595).
cagagattacgcttacata

SEQ ID NO: 227791 - DNA, 19 bp, Homo sapiens
  siRNA target sequence for C6orf133 (NM_015255.1,3588-3606).
cttacatacgagctatgat

SEQ ID NO: 227792 - DNA, 19 bp, Homo sapiens
  siRNA target sequence for C6orf133 (NM_015255.1,3596-3614).
cgagctatgatgtagaaaa

SEQ ID NO: 227793 - DNA, 19 bp, Homo sapiens
  siRNA target sequence for C6orf133 (NM_015255.1,3644-3662).
gcttgagtaatactgttat

SEQ ID NO: 227794 - DNA, 19 bp, Homo sapiens
  siRNA target sequence for C6orf133 (NM_015255.1,3645-3663).
cttgagtaatactgttatt

SEQ ID NO: 227795 - DNA, 19 bp, Homo sapiens
  siRNA target sequence for C6orf133 (NM_015255.1,3696-3714).
caacaggttaaatttttca

SEQ ID NO: 227796 - DNA, 19 bp, Homo sapiens
  siRNA target sequence for C6orf133 (NM_015255.1,3752-3770).
ctcagcaaataaaagcatt

SEQ ID NO: 227797 - DNA, 19 bp, Homo sapiens
  siRNA target sequence for C6orf133 (NM_015255.1,3787-3805).
gaagaaagtactcctaata

SEQ ID NO: 227798 - DNA, 19 bp, Homo sapiens
  siRNA target sequence for C6orf133 (NM_015255.1,3799-3817).
cctaataatgcctctacaa

SEQ ID NO: 227799 - DNA, 19 bp, Homo sapiens
  siRNA target sequence for C6orf133 (NM_015255.1,3800-3818).
ctaataatgcctctacaaa

SEQ ID NO: 227800 - DNA, 19 bp, Homo sapiens
  siRNA target sequence for C6orf133 (NM_015255.1,3858-3876).
gttcaggcctgattttcgt

SEQ ID NO: 227801 - DNA, 19 bp, Homo sapiens
  siRNA target sequence for C6orf133 (NM_015255.1,3886-3904).
ccttattctgagagcataa

SEQ ID NO: 227802 - DNA, 19 bp, Homo sapiens
  siRNA target sequence for C6orf133 (NM_015255.1,3887-3905).
cttattctgagagcataaa

SEQ ID NO: 227803 - DNA, 19 bp, Homo sapiens
  siRNA target sequence for C6orf133 (NM_015255.1,3897-3915).
gagcataaaagaaatgcta

SEQ ID NO: 227804 - DNA, 19 bp, Homo sapiens
  siRNA target sequence for C6orf133 (NM_015255.1,3935-3953).
cctacaaggtgggactaaa

SEQ ID NO: 227805 - DNA, 19 bp, Homo sapiens
  siRNA target sequence for C6orf133 (NM_015255.1,3976-3994).
cctcgtgttcccataatgt

SEQ ID NO: 227806 - DNA, 19 bp, Homo sapiens
  siRNA target sequence for C6orf133 (NM_015255.1,3979-3997).
cgtgttcccataatgtgtt

SEQ ID NO: 227807 - DNA, 19 bp, Homo sapiens
  siRNA target sequence for C6orf133 (NM_015255.1,4010-4028).
cgtacaccatccaaagcat

SEQ ID NO: 227808 - DNA, 19 bp, Homo sapiens
  siRNA target sequence for C6orf133 (NM_015255.1,4026-4044).
catagaaagaattttgagt

SEQ ID NO: 227809 - DNA, 19 bp, Homo sapiens
  siRNA target sequence for C6orf133 (NM_015255.1,4090-4108).
gactgtcttaggtcattga

SEQ ID NO: 227810 - DNA, 19 bp, Homo sapiens
  siRNA target sequence for C6orf133 (NM_015255.1,4128-4146).
ctggacagtggcatcagtt

SEQ ID NO: 227811 - DNA, 19 bp, Homo sapiens
  siRNA target sequence for C6orf133 (NM_015255.1,4181-4199).
catcactggtgcctaatga

SEQ ID NO: 227812 - DNA, 19 bp, Homo sapiens
  siRNA target sequence for C6orf133 (NM_015255.1,4207-4225).
gaggaacttccatgcatat

SEQ ID NO: 227813 - DNA, 19 bp, Homo sapiens
  siRNA target sequence for C6orf133 (NM_015255.1,4217-4235).
catgcatattagatattga

SEQ ID NO: 227814 - DNA, 19 bp, Homo sapiens
  siRNA target sequence for C6orf133 (NM_015255.1,4228-4246).
gatattgacatgtttcatt

SEQ ID NO: 227815 - DNA, 19 bp, Homo sapiens
  siRNA target sequence for C6orf133 (NM_015255.1,4277-4295).
cgttgcagtgtcaggattt

SEQ ID NO: 227816 - DNA, 19 bp, Homo sapiens
  siRNA target sequence for C6orf133 (NM_015255.1,4472-4490).
cgggaagtgccttgaaaga

SEQ ID NO: 227817 - DNA, 19 bp, Homo sapiens
  siRNA target sequence for C6orf133 (NM_015255.1,4589-4607).
cttccccacccgacattca

SEQ ID NO: 227818 - DNA, 19 bp, Homo sapiens
  siRNA target sequence for C6orf133 (NM_015255.1,4613-4631).
ctggaacaagccattttga

SEQ ID NO: 227819 - DNA, 19 bp, Homo sapiens
  siRNA target sequence for C6orf133 (NM_015255.1,4633-4651).
catttatgtagctatcttt

SEQ ID NO: 227820 - DNA, 19 bp, Homo sapiens
  siRNA target sequence for C6orf133 (NM_015255.1,4654-4672).
ctaccaaacaacctcattt

SEQ ID NO: 227821 - DNA, 19 bp, Homo sapiens
  siRNA target sequence for C6orf133 (NM_015255.1,4701-4719).
gaattcactgattgaaagt

SEQ ID NO: 227822 - DNA, 19 bp, Homo sapiens
  siRNA target sequence for C6orf133 (NM_015255.1,4722-4740).
gtgccgtaacagtgaagtt

SEQ ID NO: 227823 - DNA, 19 bp, Homo sapiens
  siRNA target sequence for C6orf133 (NM_015255.1,4724-4742).
gccgtaacagtgaagttaa

SEQ ID NO: 227824 - DNA, 19 bp, Homo sapiens
  siRNA target sequence for C6orf133 (NM_015255.1,4725-4743).
ccgtaacagtgaagttaaa

SEQ ID NO: 227825 - DNA, 19 bp, Homo sapiens
  siRNA target sequence for C6orf133 (NM_015255.1,4726-4744).
cgtaacagtgaagttaaaa

SEQ ID NO: 227826 - DNA, 19 bp, Homo sapiens
  siRNA target sequence for C6orf133 (NM_015255.1,4756-4774).
ggtgaaagagatgctataa

SEQ ID NO: 227827 - DNA, 19 bp, Homo sapiens
  siRNA target sequence for C6orf133 (NM_015255.1,4784-4802).
gagaatctaacaaattaat

SEQ ID NO: 227828 - DNA, 19 bp, Homo sapiens
  siRNA target sequence for C6orf133 (NM_015255.1,4918-4936).
ctgtgctcccagagttact

SEQ ID NO: 227829 - DNA, 19 bp, Homo sapiens
  siRNA target sequence for C6orf133 (NM_015255.1,5150-5168).
gcaaagagcgattcaagaa

SEQ ID NO: 227830 - DNA, 19 bp, Homo sapiens
  siRNA target sequence for C6orf133 (NM_015255.1,5158-5176).
cgattcaagaagattcaga

SEQ ID NO: 227831 - DNA, 19 bp, Homo sapiens
  siRNA target sequence for C6orf133 (NM_015255.1,5247-5265).
cattgactggcaacattta

SEQ ID NO: 227832 - DNA, 19 bp, Homo sapiens
  siRNA target sequence for CDC34 (NM_004359.1,296-314).
gtggacgagggcgatctat

SEQ ID NO: 227833 - DNA, 19 bp, Homo sapiens
  siRNA target sequence for CDC34 (NM_004359.1,299-317).
gacgagggcgatctataca

SEQ ID NO: 227834 - DNA, 19 bp, Homo sapiens
  siRNA target sequence for CDC34 (NM_004359.1,302-320).
gagggcgatctatacaact

SEQ ID NO: 227835 - DNA, 19 bp, Homo sapiens
  siRNA target sequence for CDC34 (NM_004359.1,394-412).
catcgactacccatactct

SEQ ID NO: 227836 - DNA, 19 bp, Homo sapiens
  siRNA target sequence for CEB1 (NM_016323.1,368-386).
ccggacgccgaaatgcatt

SEQ ID NO: 227837 - DNA, 19 bp, Homo sapiens
  siRNA target sequence for CEB1 (NM_016323.1,369-387).
cggacgccgaaatgcatta

SEQ ID NO: 227838 - DNA, 19 bp, Homo sapiens
  siRNA target sequence for CEB1 (NM_016323.1,370-388).
ggacgccgaaatgcattaa

SEQ ID NO: 227839 - DNA, 19 bp, Homo sapiens
  siRNA target sequence for CEB1 (NM_016323.1,371-389).
gacgccgaaatgcattaaa

SEQ ID NO: 227840 - DNA, 19 bp, Homo sapiens
  siRNA target sequence for CEB1 (NM_016323.1,373-391).
cgccgaaatgcattaaatt

SEQ ID NO: 227841 - DNA, 19 bp, Homo sapiens
  siRNA target sequence for CEB1 (NM_016323.1,374-392).
gccgaaatgcattaaatta

SEQ ID NO: 227842 - DNA, 19 bp, Homo sapiens
  siRNA target sequence for CEB1 (NM_016323.1,432-450).
gagcacatgctgattctct

SEQ ID NO: 227843 - DNA, 19 bp, Homo sapiens
  siRNA target sequence for CEB1 (NM_016323.1,466-484).
catttgagtatgacaacta

SEQ ID NO: 227844 - DNA, 19 bp, Homo sapiens
  siRNA target sequence for CEB1 (NM_016323.1,471-489).
gagtatgacaactatagca

SEQ ID NO: 227845 - DNA, 19 bp, Homo sapiens
  siRNA target sequence for CEB1 (NM_016323.1,482-500).
ctatagcatgaaacatcta

SEQ ID NO: 227846 - DNA, 19 bp, Homo sapiens
  siRNA target sequence for CEB1 (NM_016323.1,547-565).
gtggagattaccattctct

SEQ ID NO: 227847 - DNA, 19 bp, Homo sapiens
  siRNA target sequence for CEB1 (NM_016323.1,733-751).
ccatgtctggcaacattta

SEQ ID NO: 227848 - DNA, 19 bp, Homo sapiens
  siRNA target sequence for CEB1 (NM_016323.1,734-752).
catgtctggcaacatttat

SEQ ID NO: 227849 - DNA, 19 bp, Homo sapiens
  siRNA target sequence for CEB1 (NM_016323.1,788-806).
gggccacactgagagtaaa

SEQ ID NO: 227850 - DNA, 19 bp, Homo sapiens
  siRNA target sequence for CEB1 (NM_016323.1,893-911).
ggatgggctgctgtttact

SEQ ID NO: 227851 - DNA, 19 bp, Homo sapiens
  siRNA target sequence for CEB1 (NM_016323.1,894-912).
gatgggctgctgtttactt

SEQ ID NO: 227852 - DNA, 19 bp, Homo sapiens
  siRNA target sequence for CEB1 (NM_016323.1,930-948).
gggcaacttggtcataatt

SEQ ID NO: 227853 - DNA, 19 bp, Homo sapiens
  siRNA target sequence for CEB1 (NM_016323.1,995-1013).
gtatagagtgactcagata

SEQ ID NO: 227854 - DNA, 19 bp, Homo sapiens
  siRNA target sequence for CEB1 (NM_016323.1,1029-1047).
cacacacttgcctatgttt

SEQ ID NO: 227855 - DNA, 19 bp, Homo sapiens
  siRNA target sequence for CEB1 (NM_016323.1,1050-1068).
gatttgggaaaggtctttt

SEQ ID NO: 227856 - DNA, 19 bp, Homo sapiens
  siRNA target sequence for CEB1 (NM_016323.1,1127-1145).
gccgcttccagtgaaagta

SEQ ID NO: 227857 - DNA, 19 bp, Homo sapiens
  siRNA target sequence for CEB1 (NM_016323.1,1128-1146).
ccgcttccagtgaaagtat

SEQ ID NO: 227858 - DNA, 19 bp, Homo sapiens
  siRNA target sequence for CEB1 (NM_016323.1,1130-1148).
gcttccagtgaaagtatca

SEQ ID NO: 227859 - DNA, 19 bp, Homo sapiens
  siRNA target sequence for CEB1 (NM_016323.1,1174-1192).
gccatacctcagaaaagga

SEQ ID NO: 227860 - DNA, 19 bp, Homo sapiens
  siRNA target sequence for CEB1 (NM_016323.1,1183-1201).
cagaaaaggagttaataat

SEQ ID NO: 227861 - DNA, 19 bp, Homo sapiens
  siRNA target sequence for CEB1 (NM_016323.1,1202-1220).
gattgctggagggaatcaa

SEQ ID NO: 227862 - DNA, 19 bp, Homo sapiens
  siRNA target sequence for CEB1 (NM_016323.1,1207-1225).
ctggagggaatcaaagcat

SEQ ID NO: 227863 - DNA, 19 bp, Homo sapiens
  siRNA target sequence for CEB1 (NM_016323.1,1213-1231).
ggaatcaaagcattttgct

SEQ ID NO: 227864 - DNA, 19 bp, Homo sapiens
  siRNA target sequence for CEB1 (NM_016323.1,1271-1289).
gacaattcctactctgaat

SEQ ID NO: 227865 - DNA, 19 bp, Homo sapiens
  siRNA target sequence for CEB1 (NM_016323.1,1295-1313).
gactgtaaagagatggatt

SEQ ID NO: 227866 - DNA, 19 bp, Homo sapiens
  siRNA target sequence for CEB1 (NM_016323.1,1351-1369).
gggaaatccaagagatatt

SEQ ID NO: 227867 - DNA, 19 bp, Homo sapiens
  siRNA target sequence for CEB1 (NM_016323.1,1482-1500).
caaaaggactggattacta

SEQ ID NO: 227868 - DNA, 19 bp, Homo sapiens
  siRNA target sequence for CEB1 (NM_016323.1,1490-1508).
ctggattactaacatgata

SEQ ID NO: 227869 - DNA, 19 bp, Homo sapiens
  siRNA target sequence for CEB1 (NM_016323.1,1511-1529).
cacctgcctcaaagataat

SEQ ID NO: 227870 - DNA, 19 bp, Homo sapiens
  siRNA target sequence for CEB1 (NM_016323.1,1513-1531).
cctgcctcaaagataatct

SEQ ID NO: 227871 - DNA, 19 bp, Homo sapiens
  siRNA target sequence for CEB1 (NM_016323.1,1532-1550).
gctcaaaagacttccattt

SEQ ID NO: 227872 - DNA, 19 bp, Homo sapiens
  siRNA target sequence for CEB1 (NM_016323.1,1558-1576).
caccccaagaagctttaga

SEQ ID NO: 227873 - DNA, 19 bp, Homo sapiens
  siRNA target sequence for CEB1 (NM_016323.1,1713-1731).
ctgcaagaatccactttca

SEQ ID NO: 227874 - DNA, 19 bp, Homo sapiens
  siRNA target sequence for CEB1 (NM_016323.1,1737-1755).
ctggtccagatgtttaaaa

SEQ ID NO: 227875 - DNA, 19 bp, Homo sapiens
  siRNA target sequence for CEB1 (NM_016323.1,1792-1810).
gtgctgaggagaatggtaa

SEQ ID NO: 227876 - DNA, 19 bp, Homo sapiens
  siRNA target sequence for CEB1 (NM_016323.1,1795-1813).
ctgaggagaatggtaatgt

SEQ ID NO: 227877 - DNA, 19 bp, Homo sapiens
  siRNA target sequence for CEB1 (NM_016323.1,1799-1817).
ggagaatggtaatgttcaa

SEQ ID NO: 227878 - DNA, 19 bp, Homo sapiens
  siRNA target sequence for CEB1 (NM_016323.1,1812-1830).
gttcaagctctcctagaaa

SEQ ID NO: 227879 - DNA, 19 bp, Homo sapiens
  siRNA target sequence for CEB1 (NM_016323.1,1902-1920).
ctcttgcaccgtctcaatt

SEQ ID NO: 227880 - DNA, 19 bp, Homo sapiens
  siRNA target sequence for CEB1 (NM_016323.1,1907-1925).
gcaccgtctcaattttttt

SEQ ID NO: 227881 - DNA, 19 bp, Homo sapiens
  siRNA target sequence for CEB1 (NM_016323.1,1932-1950).
gtatgcagaaggtacttgt

SEQ ID NO: 227882 - DNA, 19 bp, Homo sapiens
  siRNA target sequence for CEB1 (NM_016323.1,1939-1957).
gaaggtacttgtggaaaat

SEQ ID NO: 227883 - DNA, 19 bp, Homo sapiens
  siRNA target sequence for CEB1 (NM_016323.1,1943-1961).
gtacttgtggaaaatgact

SEQ ID NO: 227884 - DNA, 19 bp, Homo sapiens
  siRNA target sequence for CEB1 (NM_016323.1,1964-1982).
ggacgcttcagaaaatgta

SEQ ID NO: 227885 - DNA, 19 bp, Homo sapiens
  siRNA target sequence for CEB1 (NM_016323.1,1967-1985).
cgcttcagaaaatgtacaa

SEQ ID NO: 227886 - DNA, 19 bp, Homo sapiens
  siRNA target sequence for CEB1 (NM_016323.1,1980-1998).
gtacaatgctgcgtcatat

SEQ ID NO: 227887 - DNA, 19 bp, Homo sapiens
  siRNA target sequence for CEB1 (NM_016323.1,1983-2001).
caatgctgcgtcatattca

SEQ ID NO: 227888 - DNA, 19 bp, Homo sapiens
  siRNA target sequence for CEB1 (NM_016323.1,2030-2048).
gtcgaaaattaaactacta

SEQ ID NO: 227889 - DNA, 19 bp, Homo sapiens
  siRNA target sequence for CEB1 (NM_016323.1,2032-2050).
cgaaaattaaactactaca

SEQ ID NO: 227890 - DNA, 19 bp, Homo sapiens
  siRNA target sequence for CEB1 (NM_016323.1,2033-2051).
gaaaattaaactactacat

SEQ ID NO: 227891 - DNA, 19 bp, Homo sapiens
  siRNA target sequence for CEB1 (NM_016323.1,2077-2095).
gtaaaaaacataaagctta

SEQ ID NO: 227892 - DNA, 19 bp, Homo sapiens
  siRNA target sequence for CEB1 (NM_016323.1,2147-2165).
gcccacgtttgatctaaca

SEQ ID NO: 227893 - DNA, 19 bp, Homo sapiens
  siRNA target sequence for CEB1 (NM_016323.1,2168-2186).
cagaaggaatcacttgatt

SEQ ID NO: 227894 - DNA, 19 bp, Homo sapiens
  siRNA target sequence for CEB1 (NM_016323.1,2202-2220).
cagctaagtcaatttgaga

SEQ ID NO: 227895 - DNA, 19 bp, Homo sapiens
  siRNA target sequence for CEB1 (NM_016323.1,2240-2258).
gttatgggtttcatttagt

SEQ ID NO: 227896 - DNA, 19 bp, Homo sapiens
  siRNA target sequence for CEB1 (NM_016323.1,2321-2339).
gatgatccagccggaatat

SEQ ID NO: 227897 - DNA, 19 bp, Homo sapiens
  siRNA target sequence for CEB1 (NM_016323.1,2385-2403).
gtcaagcctaaatttgaga

SEQ ID NO: 227898 - DNA, 19 bp, Homo sapiens
  siRNA target sequence for CEB1 (NM_016323.1,2434-2452).
gtggactttccctgttcaa

SEQ ID NO: 227899 - DNA, 19 bp, Homo sapiens
  siRNA target sequence for CEB1 (NM_016323.1,2436-2454).
ggactttccctgttcaatt

SEQ ID NO: 227900 - DNA, 19 bp, Homo sapiens
  siRNA target sequence for CEB1 (NM_016323.1,2444-2462).
cctgttcaattgcaatgtt

SEQ ID NO: 227901 - DNA, 19 bp, Homo sapiens
  siRNA target sequence for CEB1 (NM_016323.1,2478-2496).
ccactggcactgtttaaga

SEQ ID NO: 227902 - DNA, 19 bp, Homo sapiens
  siRNA target sequence for CEB1 (NM_016323.1,2479-2497).
cactggcactgtttaagaa

SEQ ID NO: 227903 - DNA, 19 bp, Homo sapiens
  siRNA target sequence for CEB1 (NM_016323.1,2636-2654).
cagaaacgacacaaactta

SEQ ID NO: 227904 - DNA, 19 bp, Homo sapiens
  siRNA target sequence for CEB1 (NM_016323.1,2642-2660).
cgacacaaacttaattcct

SEQ ID NO: 227905 - DNA, 19 bp, Homo sapiens
  siRNA target sequence for CEB1 (NM_016323.1,2645-2663).
cacaaacttaattcctaat

SEQ ID NO: 227906 - DNA, 19 bp, Homo sapiens
  siRNA target sequence for CEB1 (NM_016323.1,2658-2676).
cctaatggaagtagcataa

SEQ ID NO: 227907 - DNA, 19 bp, Homo sapiens
  siRNA target sequence for CEB1 (NM_016323.1,2679-2697).
gtcaaccagactaacaaga

SEQ ID NO: 227908 - DNA, 19 bp, Homo sapiens
  siRNA target sequence for CEB1 (NM_016323.1,2747-2765).
ggcggtttatgaagaattt

SEQ ID NO: 227909 - DNA, 19 bp, Homo sapiens
  siRNA target sequence for CEB1 (NM_016323.1,2766-2784).
cggagaggattttataaaa

SEQ ID NO: 227910 - DNA, 19 bp, Homo sapiens
  siRNA target sequence for CEB1 (NM_016323.1,2788-2806).
gcgacgaagacattatcaa

SEQ ID NO: 227911 - DNA, 19 bp, Homo sapiens
  siRNA target sequence for CEB1 (NM_016323.1,2789-2807).
cgacgaagacattatcaaa

SEQ ID NO: 227912 - DNA, 19 bp, Homo sapiens
  siRNA target sequence for CEB1 (NM_016323.1,2892-2910).
gaaccaggatataacagtt

SEQ ID NO: 227913 - DNA, 19 bp, Homo sapiens
  siRNA target sequence for CEB1 (NM_016323.1,2911-2929).
cacatcccaccatagtgat

SEQ ID NO: 227914 - DNA, 19 bp, Homo sapiens
  siRNA target sequence for CEB1 (NM_016323.1,2916-2934).
cccaccatagtgatgtttt

SEQ ID NO: 227915 - DNA, 19 bp, Homo sapiens
  siRNA target sequence for CEB1 (NM_016323.1,2995-3013).
gaactgacagactacaaat

SEQ ID NO: 227916 - DNA, 19 bp, Homo sapiens
  siRNA target sequence for DD5 (NM_015902.3,93-111).
caggttacgagaagtttct

SEQ ID NO: 227917 - DNA, 19 bp, Homo sapiens
  siRNA target sequence for DD5 (NM_015902.3,95-113).
ggttacgagaagtttctga

SEQ ID NO: 227918 - DNA, 19 bp, Homo sapiens
  siRNA target sequence for DD5 (NM_015902.3,118-136).
ctgaacaaatataatttaa

SEQ ID NO: 227919 - DNA, 19 bp, Homo sapiens
  siRNA target sequence for DD5 (NM_015902.3,138-156).
cagccacccccctttgaat

SEQ ID NO: 227920 - DNA, 19 bp, Homo sapiens
  siRNA target sequence for DD5 (NM_015902.3,140-158).
gccacccccctttgaatgt

SEQ ID NO: 227921 - DNA, 19 bp, Homo sapiens
  siRNA target sequence for DD5 (NM_015902.3,142-160).
cacccccctttgaatgtat

SEQ ID NO: 227922 - DNA, 19 bp, Homo sapiens
  siRNA target sequence for DD5 (NM_015902.3,162-180).
ggaacaggctactattaaa

SEQ ID NO: 227923 - DNA, 19 bp, Homo sapiens
  siRNA target sequence for DD5 (NM_015902.3,166-184).
caggctactattaaacagt

SEQ ID NO: 227924 - DNA, 19 bp, Homo sapiens
  siRNA target sequence for DD5 (NM_015902.3,183-201).
gtgtgtggtgggaccaaat

SEQ ID NO: 227925 - DNA, 19 bp, Homo sapiens
  siRNA target sequence for DD5 (NM_015902.3,185-203).
gtgtggtgggaccaaatca

SEQ ID NO: 227926 - DNA, 19 bp, Homo sapiens
  siRNA target sequence for DD5 (NM_015902.3,217-235).
cttgaggatggtagagttt

SEQ ID NO: 227927 - DNA, 19 bp, Homo sapiens
  siRNA target sequence for DD5 (NM_015902.3,230-248).
gagtttgcaggattggttt

SEQ ID NO: 227928 - DNA, 19 bp, Homo sapiens
  siRNA target sequence for DD5 (NM_015902.3,236-254).
gcaggattggtttttcagt

SEQ ID NO: 227929 - DNA, 19 bp, Homo sapiens
  siRNA target sequence for DD5 (NM_015902.3,278-296).
gtaaacctgataataatga

SEQ ID NO: 227930 - DNA, 19 bp, Homo sapiens
  siRNA target sequence for DD5 (NM_015902.3,295-313).
gatgggtcaaagttgaaca

SEQ ID NO: 227931 - DNA, 19 bp, Homo sapiens
  siRNA target sequence for DD5 (NM_015902.3,403-421).
gcaggcaacaccttaggaa

SEQ ID NO: 227932 - DNA, 19 bp, Homo sapiens
  siRNA target sequence for DD5 (NM_015902.3,558-576).
gccccagccagttattcca

SEQ ID NO: 227933 - DNA, 19 bp, Homo sapiens
  siRNA target sequence for DD5 (NM_015902.3,636-654).
cagaagtgtcattattcga

SEQ ID NO: 227934 - DNA, 19 bp, Homo sapiens
  siRNA target sequence for DD5 (NM_015902.3,739-757).
gatacagccagcgaatctt

SEQ ID NO: 227935 - DNA, 19 bp, Homo sapiens
  siRNA target sequence for DD5 (NM_015902.3,964-982).
cgtgaatccgttttacgtt

SEQ ID NO: 227936 - DNA, 19 bp, Homo sapiens
  siRNA target sequence for DD5 (NM_015902.3,965-983).
gtgaatccgttttacgttt

SEQ ID NO: 227937 - DNA, 19 bp, Homo sapiens
  siRNA target sequence for DD5 (NM_015902.3,1007-1025).
gagcctcatttgataatga

SEQ ID NO: 227938 - DNA, 19 bp, Homo sapiens
  siRNA target sequence for DD5 (NM_015902.3,1009-1027).
gcctcatttgataatgaaa

SEQ ID NO: 227939 - DNA, 19 bp, Homo sapiens
  siRNA target sequence for DD5 (NM_015902.3,1049-1067).
gagagccaaacttggataa

SEQ ID NO: 227940 - DNA, 19 bp, Homo sapiens
  siRNA target sequence for DD5 (NM_015902.3,1068-1086).
gaagaatacacctgttcaa

SEQ ID NO: 227941 - DNA, 19 bp, Homo sapiens
  siRNA target sequence for DD5 (NM_015902.3,1097-1115).
ctctaggagaagatttgca

SEQ ID NO: 227942 - DNA, 19 bp, Homo sapiens
  siRNA target sequence for DD5 (NM_015902.3,1124-1142).
ctgataaggatggaacaaa

SEQ ID NO: 227943 - DNA, 19 bp, Homo sapiens
  siRNA target sequence for DD5 (NM_015902.3,1135-1153).
ggaacaaaattcatctgta

SEQ ID NO: 227944 - DNA, 19 bp, Homo sapiens
  siRNA target sequence for DD5 (NM_015902.3,1149-1167).
ctgtattggggctctgtat

SEQ ID NO: 227945 - DNA, 19 bp, Homo sapiens
  siRNA target sequence for DD5 (NM_015902.3,1201-1219).
ctttatcagtggaaatgga

SEQ ID NO: 227946 - DNA, 19 bp, Homo sapiens
  siRNA target sequence for DD5 (NM_015902.3,1264-1282).
catccacgagcaacatttt

SEQ ID NO: 227947 - DNA, 19 bp, Homo sapiens
  siRNA target sequence for DD5 (NM_015902.3,1277-1295).
catttttggggttaaccaa

SEQ ID NO: 227948 - DNA, 19 bp, Homo sapiens
  siRNA target sequence for DD5 (NM_015902.3,1306-1324).
gtcctcctgtctgcaaata

SEQ ID NO: 227949 - DNA, 19 bp, Homo sapiens
  siRNA target sequence for DD5 (NM_015902.3,1363-1381).
gctacatgggtggatgaaa

SEQ ID NO: 227950 - DNA, 19 bp, Homo sapiens
  siRNA target sequence for DD5 (NM_015902.3,1422-1440).
gacttactctgaacttcaa

SEQ ID NO: 227951 - DNA, 19 bp, Homo sapiens
  siRNA target sequence for DD5 (NM_015902.3,1438-1456).
caaggagagcggatagttt

SEQ ID NO: 227952 - DNA, 19 bp, Homo sapiens
  siRNA target sequence for DD5 (NM_015902.3,1442-1460).
gagagcggatagtttcttt

SEQ ID NO: 227953 - DNA, 19 bp, Homo sapiens
  siRNA target sequence for DD5 (NM_015902.3,1446-1464).
gcggatagtttctttacat

SEQ ID NO: 227954 - DNA, 19 bp, Homo sapiens
  siRNA target sequence for DD5 (NM_015902.3,1462-1480).
cattgctgtgccctttaca

SEQ ID NO: 227955 - DNA, 19 bp, Homo sapiens
  siRNA target sequence for DD5 (NM_015902.3,1481-1499).
cctgcgctcagctggaaaa

SEQ ID NO: 227956 - DNA, 19 bp, Homo sapiens
  siRNA target sequence for DD5 (NM_015902.3,1489-1507).
cagctggaaaacagtttat

SEQ ID NO: 227957 - DNA, 19 bp, Homo sapiens
  siRNA target sequence for DD5 (NM_015902.3,1491-1509).
gctggaaaacagtttatat

SEQ ID NO: 227958 - DNA, 19 bp, Homo sapiens
  siRNA target sequence for DD5 (NM_015902.3,1511-1529).
ggtggggtgtagttccttt

SEQ ID NO: 227959 - DNA, 19 bp, Homo sapiens
  siRNA target sequence for DD5 (NM_015902.3,1512-1530).
gtggggtgtagttcctttt

SEQ ID NO: 227960 - DNA, 19 bp, Homo sapiens
  siRNA target sequence for DD5 (NM_015902.3,1515-1533).
gggtgtagttccttttagt

SEQ ID NO: 227961 - DNA, 19 bp, Homo sapiens
  siRNA target sequence for DD5 (NM_015902.3,1630-1648).
caggtatgcttgagaaata

SEQ ID NO: 227962 - DNA, 19 bp, Homo sapiens
  siRNA target sequence for DD5 (NM_015902.3,1743-1761).
cagctgtagatttcaactt

SEQ ID NO: 227963 - DNA, 19 bp, Homo sapiens
  siRNA target sequence for DD5 (NM_015902.3,1746-1764).
ctgtagatttcaacttaga

SEQ ID NO: 227964 - DNA, 19 bp, Homo sapiens
  siRNA target sequence for DD5 (NM_015902.3,1910-1928).
gtgcatcaatgccatacaa

SEQ ID NO: 227965 - DNA, 19 bp, Homo sapiens
  siRNA target sequence for DD5 (NM_015902.3,1988-2006).
ctcttcgggaagtggtttt

SEQ ID NO: 227966 - DNA, 19 bp, Homo sapiens
  siRNA target sequence for DD5 (NM_015902.3,2084-2102).
gaacctccagtaatactaa

SEQ ID NO: 227967 - DNA, 19 bp, Homo sapiens
  siRNA target sequence for DD5 (NM_015902.3,2145-2163).
cctgcaggattgtaggtta

SEQ ID NO: 227968 - DNA, 19 bp, Homo sapiens
  siRNA target sequence for DD5 (NM_015902.3,2148-2166).
gcaggattgtaggttactt

SEQ ID NO: 227969 - DNA, 19 bp, Homo sapiens
  siRNA target sequence for DD5 (NM_015902.3,2149-2167).
caggattgtaggttactta

SEQ ID NO: 227970 - DNA, 19 bp, Homo sapiens
  siRNA target sequence for DD5 (NM_015902.3,2151-2169).
ggattgtaggttacttaga

SEQ ID NO: 227971 - DNA, 19 bp, Homo sapiens
  siRNA target sequence for DD5 (NM_015902.3,2152-2170).
gattgtaggttacttagaa

SEQ ID NO: 227972 - DNA, 19 bp, Homo sapiens
  siRNA target sequence for DD5 (NM_015902.3,2207-2225).
cgaaggttcccgactgttt

SEQ ID NO: 227973 - DNA, 19 bp, Homo sapiens
  siRNA target sequence for DD5 (NM_015902.3,2333-2351).
gatactgtatctttgatct

SEQ ID NO: 227974 - DNA, 19 bp, Homo sapiens
  siRNA target sequence for DD5 (NM_015902.3,2451-2469).
ggaatctcccattattctt

SEQ ID NO: 227975 - DNA, 19 bp, Homo sapiens
  siRNA target sequence for DD5 (NM_015902.3,2467-2485).
cttcgagatggaaatggta

SEQ ID NO: 227976 - DNA, 19 bp, Homo sapiens
  siRNA target sequence for DD5 (NM_015902.3,2552-2570).
ctattagtagtcttggaat

SEQ ID NO: 227977 - DNA, 19 bp, Homo sapiens
  siRNA target sequence for DD5 (NM_015902.3,2567-2585).
gaatgggtgtgcattcttt

SEQ ID NO: 227978 - DNA, 19 bp, Homo sapiens
  siRNA target sequence for DD5 (NM_015902.3,2571-2589).
gggtgtgcattctttaata

SEQ ID NO: 227979 - DNA, 19 bp, Homo sapiens
  siRNA target sequence for DD5 (NM_015902.3,2593-2611).
cttcctgccaattcaacaa

SEQ ID NO: 227980 - DNA, 19 bp, Homo sapiens
  siRNA target sequence for DD5 (NM_015902.3,2596-2614).
cctgccaattcaacaatca

SEQ ID NO: 227981 - DNA, 19 bp, Homo sapiens
  siRNA target sequence for DD5 (NM_015902.3,2597-2615).
ctgccaattcaacaatcaa

SEQ ID NO: 227982 - DNA, 19 bp, Homo sapiens
  siRNA target sequence for DD5 (NM_015902.3,2642-2660).
ctgtagagaaacaaacctt

SEQ ID NO: 227983 - DNA, 19 bp, Homo sapiens
  siRNA target sequence for DD5 (NM_015902.3,2670-2688).
cattctgcgctgtgactat

SEQ ID NO: 227984 - DNA, 19 bp, Homo sapiens
  siRNA target sequence for DD5 (NM_015902.3,2691-2709).
ggcctgtcgacaatatcta

SEQ ID NO: 227985 - DNA, 19 bp, Homo sapiens
  siRNA target sequence for DD5 (NM_015902.3,2692-2710).
gcctgtcgacaatatctaa

SEQ ID NO: 227986 - DNA, 19 bp, Homo sapiens
  siRNA target sequence for DD5 (NM_015902.3,2693-2711).
cctgtcgacaatatctaat

SEQ ID NO: 227987 - DNA, 19 bp, Homo sapiens
  siRNA target sequence for DD5 (NM_015902.3,2699-2717).
gacaatatctaatgaatct

SEQ ID NO: 227988 - DNA, 19 bp, Homo sapiens
  siRNA target sequence for DD5 (NM_015902.3,2780-2798).
gtgatggaaatcgaaatat

SEQ ID NO: 227989 - DNA, 19 bp, Homo sapiens
  siRNA target sequence for DD5 (NM_015902.3,2782-2800).
gatggaaatcgaaatattt

SEQ ID NO: 227990 - DNA, 19 bp, Homo sapiens
  siRNA target sequence for DD5 (NM_015902.3,2786-2804).
gaaatcgaaatattttgca

SEQ ID NO: 227991 - DNA, 19 bp, Homo sapiens
  siRNA target sequence for DD5 (NM_015902.3,2803-2821).
catgcttgtgtatcagttt

SEQ ID NO: 227992 - DNA, 19 bp, Homo sapiens
  siRNA target sequence for DD5 (NM_015902.3,2822-2840).
gctttccaaccagcaataa

SEQ ID NO: 227993 - DNA, 19 bp, Homo sapiens
  siRNA target sequence for DD5 (NM_015902.3,2823-2841).
ctttccaaccagcaataaa

SEQ ID NO: 227994 - DNA, 19 bp, Homo sapiens
  siRNA target sequence for DD5 (NM_015902.3,2868-2886).
gcgttctgaaagaaataca

SEQ ID NO: 227995 - DNA, 19 bp, Homo sapiens
  siRNA target sequence for DD5 (NM_015902.3,2869-2887).
cgttctgaaagaaatacat

SEQ ID NO: 227996 - DNA, 19 bp, Homo sapiens
  siRNA target sequence for DD5 (NM_015902.3,2905-2923).
gctgttgaggccattgcaa

SEQ ID NO: 227997 - DNA, 19 bp, Homo sapiens
  siRNA target sequence for DD5 (NM_015902.3,2913-2931).
ggccattgcaaatgcaata

SEQ ID NO: 227998 - DNA, 19 bp, Homo sapiens
  siRNA target sequence for DD5 (NM_015902.3,2914-2932).
gccattgcaaatgcaatat

SEQ ID NO: 227999 - DNA, 19 bp, Homo sapiens
  siRNA target sequence for DD5 (NM_015902.3,2972-2990).
catcaagtagccgaagttt

SEQ ID NO: 228000 - DNA, 19 bp, Homo sapiens
  siRNA target sequence for DD5 (NM_015902.3,2978-2996).
gtagccgaagtttgagatt

SEQ ID NO: 228001 - DNA, 19 bp, Homo sapiens
  siRNA target sequence for DD5 (NM_015902.3,3243-3261).
cacagagccatctgtagta

SEQ ID NO: 228002 - DNA, 19 bp, Homo sapiens
  siRNA target sequence for DD5 (NM_015902.3,3275-3293).
gaaaggcgaatgctcattt

SEQ ID NO: 228003 - DNA, 19 bp, Homo sapiens
  siRNA target sequence for DD5 (NM_015902.3,3279-3297).
ggcgaatgctcattttata

SEQ ID NO: 228004 - DNA, 19 bp, Homo sapiens
  siRNA target sequence for DD5 (NM_015902.3,3281-3299).
cgaatgctcattttatatt

SEQ ID NO: 228005 - DNA, 19 bp, Homo sapiens
  siRNA target sequence for DD5 (NM_015902.3,3321-3339).
ggttctccagccctatcta

SEQ ID NO: 228006 - DNA, 19 bp, Homo sapiens
  siRNA target sequence for DD5 (NM_015902.3,3370-3388).
gggatgaccccatttatgt

SEQ ID NO: 228007 - DNA, 19 bp, Homo sapiens
  siRNA target sequence for DD5 (NM_015902.3,3418-3436).
gcaattaccatcttagaaa

SEQ ID NO: 228008 - DNA, 19 bp, Homo sapiens
  siRNA target sequence for DD5 (NM_015902.3,3525-3543).
ccctgatgactctccttta

SEQ ID NO: 228009 - DNA, 19 bp, Homo sapiens
  siRNA target sequence for DD5 (NM_015902.3,3538-3556).
cctttatatgttttatgtt

SEQ ID NO: 228010 - DNA, 19 bp, Homo sapiens
  siRNA target sequence for DD5 (NM_015902.3,3547-3565).
gttttatgttgtaatgaca

SEQ ID NO: 228011 - DNA, 19 bp, Homo sapiens
  siRNA target sequence for DD5 (NM_015902.3,3594-3612).
gcacattaaccaggatatt

SEQ ID NO: 228012 - DNA, 19 bp, Homo sapiens
  siRNA target sequence for DD5 (NM_015902.3,3685-3703).
ggtcatgattgcaaactca

SEQ ID NO: 228013 - DNA, 19 bp, Homo sapiens
  siRNA target sequence for DD5 (NM_015902.3,3774-3792).
gaaatctgctcgtcttgat

SEQ ID NO: 228014 - DNA, 19 bp, Homo sapiens
  siRNA target sequence for DD5 (NM_015902.3,3779-3797).
ctgctcgtcttgatctact

SEQ ID NO: 228015 - DNA, 19 bp, Homo sapiens
  siRNA target sequence for DD5 (NM_015902.3,3781-3799).
gctcgtcttgatctacttt

SEQ ID NO: 228016 - DNA, 19 bp, Homo sapiens
  siRNA target sequence for DD5 (NM_015902.3,3782-3800).
ctcgtcttgatctacttta

SEQ ID NO: 228017 - DNA, 19 bp, Homo sapiens
  siRNA target sequence for DD5 (NM_015902.3,3804-3822).
cctgctcactgctactaat

SEQ ID NO: 228018 - DNA, 19 bp, Homo sapiens
  siRNA target sequence for DD5 (NM_015902.3,3845-3863).
ggggagagcacctcttact

SEQ ID NO: 228019 - DNA, 19 bp, Homo sapiens
  siRNA target sequence for DD5 (NM_015902.3,3847-3865).
ggagagcacctcttactat

SEQ ID NO: 228020 - DNA, 19 bp, Homo sapiens
  siRNA target sequence for DD5 (NM_015902.3,3848-3866).
gagagcacctcttactatt

SEQ ID NO: 228021 - DNA, 19 bp, Homo sapiens
  siRNA target sequence for DD5 (NM_015902.3,3850-3868).
gagcacctcttactattct

SEQ ID NO: 228022 - DNA, 19 bp, Homo sapiens
  siRNA target sequence for DD5 (NM_015902.3,3852-3870).
gcacctcttactattctta

SEQ ID NO: 228023 - DNA, 19 bp, Homo sapiens
  siRNA target sequence for DD5 (NM_015902.3,3891-3909).
gacggtggagcattgtcaa

SEQ ID NO: 228024 - DNA, 19 bp, Homo sapiens
  siRNA target sequence for DD5 (NM_015902.3,3893-3911).
cggtggagcattgtcaata

SEQ ID NO: 228025 - DNA, 19 bp, Homo sapiens
  siRNA target sequence for DD5 (NM_015902.3,3923-3941).
gaatcagggaagatcgtaa

SEQ ID NO: 228026 - DNA, 19 bp, Homo sapiens
  siRNA target sequence for DD5 (NM_015902.3,3931-3949).
gaagatcgtaaccgaaaaa

SEQ ID NO: 228027 - DNA, 19 bp, Homo sapiens
  siRNA target sequence for DD5 (NM_015902.3,3968-3986).
cagatatgccagatcatga

SEQ ID NO: 228028 - DNA, 19 bp, Homo sapiens
  siRNA target sequence for DD5 (NM_015902.3,3970-3988).
gatatgccagatcatgatt

SEQ ID NO: 228029 - DNA, 19 bp, Homo sapiens
  siRNA target sequence for DD5 (NM_015902.3,4016-4034).
cattggagcgtgttctaca

SEQ ID NO: 228030 - DNA, 19 bp, Homo sapiens
  siRNA target sequence for DD5 (NM_015902.3,4070-4088).
ggtcgcaggagaataaaga

SEQ ID NO: 228031 - DNA, 19 bp, Homo sapiens
  siRNA target sequence for DD5 (NM_015902.3,4080-4098).
gaataaagaccctcttagt

SEQ ID NO: 228032 - DNA, 19 bp, Homo sapiens
  siRNA target sequence for DD5 (NM_015902.3,4106-4124).
gtagaataggccatctttt

SEQ ID NO: 228033 - DNA, 19 bp, Homo sapiens
  siRNA target sequence for DD5 (NM_015902.3,4163-4181).
caattcggctggactgttt

SEQ ID NO: 228034 - DNA, 19 bp, Homo sapiens
  siRNA target sequence for DD5 (NM_015902.3,4182-4200).
cactcattgccttatagtt

SEQ ID NO: 228035 - DNA, 19 bp, Homo sapiens
  siRNA target sequence for DD5 (NM_015902.3,4205-4223).
gtacagcagatattttgct

SEQ ID NO: 228036 - DNA, 19 bp, Homo sapiens
  siRNA target sequence for DD5 (NM_015902.3,4221-4239).
gcttttagatactctacta

SEQ ID NO: 228037 - DNA, 19 bp, Homo sapiens
  siRNA target sequence for DD5 (NM_015902.3,4255-4273).
gaactccaaaacaaatata

SEQ ID NO: 228038 - DNA, 19 bp, Homo sapiens
  siRNA target sequence for DD5 (NM_015902.3,4325-4343).
cagtggcaagagtttttgt

SEQ ID NO: 228039 - DNA, 19 bp, Homo sapiens
  siRNA target sequence for DD5 (NM_015902.3,4406-4424).
gaaaatgcaagcgtgtatt

SEQ ID NO: 228040 - DNA, 19 bp, Homo sapiens
  siRNA target sequence for DD5 (NM_015902.3,4439-4457).
cttacgctgtggaagaatt

SEQ ID NO: 228041 - DNA, 19 bp, Homo sapiens
  siRNA target sequence for DD5 (NM_015902.3,4464-4482).
cgtagcagagtcactgatt

SEQ ID NO: 228042 - DNA, 19 bp, Homo sapiens
  siRNA target sequence for DD5 (NM_015902.3,4507-4525).
cgtccaactgcaccattta

SEQ ID NO: 228043 - DNA, 19 bp, Homo sapiens
  siRNA target sequence for DD5 (NM_015902.3,4527-4545).
cctggctagtactagcata

SEQ ID NO: 228044 - DNA, 19 bp, Homo sapiens
  siRNA target sequence for DD5 (NM_015902.3,4530-4548).
ggctagtactagcatagat

SEQ ID NO: 228045 - DNA, 19 bp, Homo sapiens
  siRNA target sequence for DD5 (NM_015902.3,4551-4569).
catgcagggcagtgaagaa

SEQ ID NO: 228046 - DNA, 19 bp, Homo sapiens
  siRNA target sequence for DD5 (NM_015902.3,4554-4572).
gcagggcagtgaagaatta

SEQ ID NO: 228047 - DNA, 19 bp, Homo sapiens
  siRNA target sequence for DD5 (NM_015902.3,4692-4710).
cgttcggggcagagatgaa

SEQ ID NO: 228048 - DNA, 19 bp, Homo sapiens
  siRNA target sequence for DD5 (NM_015902.3,4849-4867).
gatgaagacgggagtgata

SEQ ID NO: 228049 - DNA, 19 bp, Homo sapiens
  siRNA target sequence for DD5 (NM_015902.3,5026-5044).
gattctcaatcgaatgact

SEQ ID NO: 228050 - DNA, 19 bp, Homo sapiens
  siRNA target sequence for DD5 (NM_015902.3,5037-5055).
gaatgactcaagtgattct

SEQ ID NO: 228051 - DNA, 19 bp, Homo sapiens
  siRNA target sequence for DD5 (NM_015902.3,5050-5068).
gattctgatagcagtagta

SEQ ID NO: 228052 - DNA, 19 bp, Homo sapiens
  siRNA target sequence for DD5 (NM_015902.3,5069-5087).
gtcagagtgacgacataga

SEQ ID NO: 228053 - DNA, 19 bp, Homo sapiens
  siRNA target sequence for DD5 (NM_015902.3,5104-5122).
cttgatgagccattagaaa

SEQ ID NO: 228054 - DNA, 19 bp, Homo sapiens
  siRNA target sequence for DD5 (NM_015902.3,5221-5239).
gccccttccagtacatcta

SEQ ID NO: 228055 - DNA, 19 bp, Homo sapiens
  siRNA target sequence for DD5 (NM_015902.3,5252-5270).
gttcagcgggtttgattta

SEQ ID NO: 228056 - DNA, 19 bp, Homo sapiens
  siRNA target sequence for DD5 (NM_015902.3,5255-5273).
cagcgggtttgatttatat

SEQ ID NO: 228057 - DNA, 19 bp, Homo sapiens
  siRNA target sequence for DD5 (NM_015902.3,5258-5276).
cgggtttgatttatattga

SEQ ID NO: 228058 - DNA, 19 bp, Homo sapiens
  siRNA target sequence for DD5 (NM_015902.3,5259-5277).
gggtttgatttatattgat

SEQ ID NO: 228059 - DNA, 19 bp, Homo sapiens
  siRNA target sequence for DD5 (NM_015902.3,5293-5311).
cggagtggtaccatcagta

SEQ ID NO: 228060 - DNA, 19 bp, Homo sapiens
  siRNA target sequence for DD5 (NM_015902.3,5349-5367).
caacgccagcagttaccta

SEQ ID NO: 228061 - DNA, 19 bp, Homo sapiens
  siRNA target sequence for DD5 (NM_015902.3,5353-5371).
gccagcagttacctaacat

SEQ ID NO: 228062 - DNA, 19 bp, Homo sapiens
  siRNA target sequence for DD5 (NM_015902.3,5390-5408).
gggcttacagcattgtcat

SEQ ID NO: 228063 - DNA, 19 bp, Homo sapiens
  siRNA target sequence for DD5 (NM_015902.3,5391-5409).
ggcttacagcattgtcatt

SEQ ID NO: 228064 - DNA, 19 bp, Homo sapiens
  siRNA target sequence for DD5 (NM_015902.3,5392-5410).
gcttacagcattgtcatta

SEQ ID NO: 228065 - DNA, 19 bp, Homo sapiens
  siRNA target sequence for DD5 (NM_015902.3,5411-5429).
gacaaatctcggacttgat

SEQ ID NO: 228066 - DNA, 19 bp, Homo sapiens
  siRNA target sequence for DD5 (NM_015902.3,5421-5439).
ggacttgatgggccttatt

SEQ ID NO: 228067 - DNA, 19 bp, Homo sapiens
  siRNA target sequence for DD5 (NM_015902.3,5430-5448).
gggccttattcctaagtat

SEQ ID NO: 228068 - DNA, 19 bp, Homo sapiens
  siRNA target sequence for DD5 (NM_015902.3,5431-5449).
ggccttattcctaagtata

SEQ ID NO: 228069 - DNA, 19 bp, Homo sapiens
  siRNA target sequence for DD5 (NM_015902.3,5432-5450).
gccttattcctaagtataa

SEQ ID NO: 228070 - DNA, 19 bp, Homo sapiens
  siRNA target sequence for DD5 (NM_015902.3,5477-5495).
cagctgtgaaattgactta

SEQ ID NO: 228071 - DNA, 19 bp, Homo sapiens
  siRNA target sequence for DD5 (NM_015902.3,5511-5529).
cttacagaactatgtagaa

SEQ ID NO: 228072 - DNA, 19 bp, Homo sapiens
  siRNA target sequence for DD5 (NM_015902.3,5560-5578).
gtcagtattatggattcta

SEQ ID NO: 228073 - DNA, 19 bp, Homo sapiens
  siRNA target sequence for DD5 (NM_015902.3,5579-5597).
ctgaagctcaattacgtta

SEQ ID NO: 228074 - DNA, 19 bp, Homo sapiens
  siRNA target sequence for DD5 (NM_015902.3,5691-5709).
gcgagaagaagctagctta

SEQ ID NO: 228075 - DNA, 19 bp, Homo sapiens
  siRNA target sequence for DD5 (NM_015902.3,5695-5713).
gaagaagctagcttacgaa

SEQ ID NO: 228076 - DNA, 19 bp, Homo sapiens
  siRNA target sequence for DD5 (NM_015902.3,5728-5746).
cgacgtgccaccttgctta

SEQ ID NO: 228077 - DNA, 19 bp, Homo sapiens
  siRNA target sequence for DD5 (NM_015902.3,5773-5791).
cgaggagacttcctaaatt

SEQ ID NO: 228078 - DNA, 19 bp, Homo sapiens
  siRNA target sequence for DD5 (NM_015902.3,5774-5792).
gaggagacttcctaaatta

SEQ ID NO: 228079 - DNA, 19 bp, Homo sapiens
  siRNA target sequence for DD5 (NM_015902.3,5801-5819).
ctctaatgcggtctcataa

SEQ ID NO: 228080 - DNA, 19 bp, Homo sapiens
  siRNA target sequence for DD5 (NM_015902.3,5890-5908).
gcacttatatactggatta

SEQ ID NO: 228081 - DNA, 19 bp, Homo sapiens
  siRNA target sequence for DD5 (NM_015902.3,5944-5962).
caactagaacgcaaaagga

SEQ ID NO: 228082 - DNA, 19 bp, Homo sapiens
  siRNA target sequence for DD5 (NM_015902.3,5976-5994).
ggaactgggtattgataat

SEQ ID NO: 228083 - DNA, 19 bp, Homo sapiens
  siRNA target sequence for DD5 (NM_015902.3,6035-6053).
gtgctactttgaatgataa

SEQ ID NO: 228084 - DNA, 19 bp, Homo sapiens
  siRNA target sequence for DD5 (NM_015902.3,6038-6056).
ctactttgaatgataagga

SEQ ID NO: 228085 - DNA, 19 bp, Homo sapiens
  siRNA target sequence for DD5 (NM_015902.3,6106-6124).
cgttcagactccatgacat

SEQ ID NO: 228086 - DNA, 19 bp, Homo sapiens
  siRNA target sequence for DD5 (NM_015902.3,6120-6138).
gacattccttgggtgtata

SEQ ID NO: 228087 - DNA, 19 bp, Homo sapiens
  siRNA target sequence for DD5 (NM_015902.3,6241-6259).
ccaagtcagggtctttatt

SEQ ID NO: 228088 - DNA, 19 bp, Homo sapiens
  siRNA target sequence for DD5 (NM_015902.3,6269-6287).
ccagtagtgggaaatgttt

SEQ ID NO: 228089 - DNA, 19 bp, Homo sapiens
  siRNA target sequence for DD5 (NM_015902.3,6284-6302).
gtttaatggaggttacagt

SEQ ID NO: 228090 - DNA, 19 bp, Homo sapiens
  siRNA target sequence for DD5 (NM_015902.3,6341-6359).
cttatgctgccaatctgaa

SEQ ID NO: 228091 - DNA, 19 bp, Homo sapiens
  siRNA target sequence for DD5 (NM_015902.3,6446-6464).
ggccatctgctcatgatct

SEQ ID NO: 228092 - DNA, 19 bp, Homo sapiens
  siRNA target sequence for DD5 (NM_015902.3,6460-6478).
gatcttgctgcacaattaa

SEQ ID NO: 228093 - DNA, 19 bp, Homo sapiens
  siRNA target sequence for DD5 (NM_015902.3,6482-6500).
gtagcttactagcagaaat

SEQ ID NO: 228094 - DNA, 19 bp, Homo sapiens
  siRNA target sequence for DD5 (NM_015902.3,6486-6504).
cttactagcagaaatagga

SEQ ID NO: 228095 - DNA, 19 bp, Homo sapiens
  siRNA target sequence for DD5 (NM_015902.3,6542-6560).
ggccacagtgtagctttat

SEQ ID NO: 228096 - DNA, 19 bp, Homo sapiens
  siRNA target sequence for DD5 (NM_015902.3,6592-6610).
ggacgttggcgcctttctt

SEQ ID NO: 228097 - DNA, 19 bp, Homo sapiens
  siRNA target sequence for DD5 (NM_015902.3,6593-6611).
gacgttggcgcctttcttt

SEQ ID NO: 228098 - DNA, 19 bp, Homo sapiens
  siRNA target sequence for DD5 (NM_015902.3,6596-6614).
gttggcgcctttctttaga

SEQ ID NO: 228099 - DNA, 19 bp, Homo sapiens
  siRNA target sequence for DD5 (NM_015902.3,6616-6634).
ctgttcggcagggtattca

SEQ ID NO: 228100 - DNA, 19 bp, Homo sapiens
  siRNA target sequence for DD5 (NM_015902.3,6626-6644).
gggtattcatggaagatgt

SEQ ID NO: 228101 - DNA, 19 bp, Homo sapiens
  siRNA target sequence for DD5 (NM_015902.3,6647-6665).
gagcagaacctggatcaat

SEQ ID NO: 228102 - DNA, 19 bp, Homo sapiens
  siRNA target sequence for DD5 (NM_015902.3,6658-6676).
ggatcaatcctaactgaat

SEQ ID NO: 228103 - DNA, 19 bp, Homo sapiens
  siRNA target sequence for DD5 (NM_015902.3,6659-6677).
gatcaatcctaactgaatt

SEQ ID NO: 228104 - DNA, 19 bp, Homo sapiens
  siRNA target sequence for DD5 (NM_015902.3,6680-6698).
gtggttttgaggtaaaaga

SEQ ID NO: 228105 - DNA, 19 bp, Homo sapiens
  siRNA target sequence for DD5 (NM_015902.3,6770-6788).
gggatcgagatcttctcat

SEQ ID NO: 228106 - DNA, 19 bp, Homo sapiens
  siRNA target sequence for DD5 (NM_015902.3,6771-6789).
ggatcgagatcttctcatt

SEQ ID NO: 228107 - DNA, 19 bp, Homo sapiens
  siRNA target sequence for DD5 (NM_015902.3,6849-6867).
ggctgtacacagagtaaaa

SEQ ID NO: 228108 - DNA, 19 bp, Homo sapiens
  siRNA target sequence for DD5 (NM_015902.3,6853-6871).
gtacacagagtaaaagtca

SEQ ID NO: 228109 - DNA, 19 bp, Homo sapiens
  siRNA target sequence for DD5 (NM_015902.3,6901-6919).
ggtgtagcacgaagttttt

SEQ ID NO: 228110 - DNA, 19 bp, Homo sapiens
  siRNA target sequence for DD5 (NM_015902.3,6902-6920).
gtgtagcacgaagttttta

SEQ ID NO: 228111 - DNA, 19 bp, Homo sapiens
  siRNA target sequence for DD5 (NM_015902.3,6904-6922).
gtagcacgaagtttttata

SEQ ID NO: 228112 - DNA, 19 bp, Homo sapiens
  siRNA target sequence for DD5 (NM_015902.3,6995-7013).
gcacccacacaagtttaat

SEQ ID NO: 228113 - DNA, 19 bp, Homo sapiens
  siRNA target sequence for DD5 (NM_015902.3,7233-7251).
gctttatcctcgtgtacaa

SEQ ID NO: 228114 - DNA, 19 bp, Homo sapiens
  siRNA target sequence for DD5 (NM_015902.3,7481-7499).
ctagtcgaagtgtagtaga

SEQ ID NO: 228115 - DNA, 19 bp, Homo sapiens
  siRNA target sequence for DD5 (NM_015902.3,7487-7505).
gaagtgtagtagatatgga

SEQ ID NO: 228116 - DNA, 19 bp, Homo sapiens
  siRNA target sequence for DD5 (NM_015902.3,7503-7521).
ggatttagatgatacagat

SEQ ID NO: 228117 - DNA, 19 bp, Homo sapiens
  siRNA target sequence for DD5 (NM_015902.3,7531-7549).
gacaatgcccctttgtttt

SEQ ID NO: 228118 - DNA, 19 bp, Homo sapiens
  siRNA target sequence for DD5 (NM_015902.3,7556-7574).
ctgggaaaagaggatttta

SEQ ID NO: 228119 - DNA, 19 bp, Homo sapiens
  siRNA target sequence for DD5 (NM_015902.3,7600-7618).
gaagcaaggttgaattgtt

SEQ ID NO: 228120 - DNA, 19 bp, Homo sapiens
  siRNA target sequence for DD5 (NM_015902.3,7632-7650).
caggattcttggactatgt

SEQ ID NO: 228121 - DNA, 19 bp, Homo sapiens
  siRNA target sequence for DD5 (NM_015902.3,7634-7652).
ggattcttggactatgtct

SEQ ID NO: 228122 - DNA, 19 bp, Homo sapiens
  siRNA target sequence for DD5 (NM_015902.3,7708-7726).
cttggtagaaaagtcaatt

SEQ ID NO: 228123 - DNA, 19 bp, Homo sapiens
  siRNA target sequence for DD5 (NM_015902.3,7722-7740).
caattggcatgattttgct

SEQ ID NO: 228124 - DNA, 19 bp, Homo sapiens
  siRNA target sequence for DD5 (NM_015902.3,7751-7769).
ctgtaatgtatgagagttt

SEQ ID NO: 228125 - DNA, 19 bp, Homo sapiens
  siRNA target sequence for DD5 (NM_015902.3,7766-7784).
gtttgcggcaactaatcct

SEQ ID NO: 228126 - DNA, 19 bp, Homo sapiens
  siRNA target sequence for DD5 (NM_015902.3,7841-7859).
caattgacctgtgtaaaga

SEQ ID NO: 228127 - DNA, 19 bp, Homo sapiens
  siRNA target sequence for DD5 (NM_015902.3,7868-7886).
gaggacaggttgaactcat

SEQ ID NO: 228128 - DNA, 19 bp, Homo sapiens
  siRNA target sequence for DD5 (NM_015902.3,7915-7933).
ccacagaatgtatatgagt

SEQ ID NO: 228129 - DNA, 19 bp, Homo sapiens
  siRNA target sequence for DD5 (NM_015902.3,8016-8034).
gcttccaaaaaattcatta

SEQ ID NO: 228130 - DNA, 19 bp, Homo sapiens
  siRNA target sequence for DD5 (NM_015902.3,8075-8093).
gctgcggtgaagtcaatgt

SEQ ID NO: 228131 - DNA, 19 bp, Homo sapiens
  siRNA target sequence for DD5 (NM_015902.3,8081-8099).
gtgaagtcaatgtgcaaat

SEQ ID NO: 228132 - DNA, 19 bp, Homo sapiens
  siRNA target sequence for DD5 (NM_015902.3,8106-8124).
cagttttacctctttcaat

SEQ ID NO: 228133 - DNA, 19 bp, Homo sapiens
  siRNA target sequence for DD5 (NM_015902.3,8108-8126).
gttttacctctttcaatga

SEQ ID NO: 228134 - DNA, 19 bp, Homo sapiens
  siRNA target sequence for DD5 (NM_015902.3,8166-8184).
gcgttggttctggtcaata

SEQ ID NO: 228135 - DNA, 19 bp, Homo sapiens
  siRNA target sequence for DD5 (NM_015902.3,8168-8186).
gttggttctggtcaatagt

SEQ ID NO: 228136 - DNA, 19 bp, Homo sapiens
  siRNA target sequence for DD5 (NM_015902.3,8199-8217).
catgacagaacgacaagat

SEQ ID NO: 228137 - DNA, 19 bp, Homo sapiens
  siRNA target sequence for DD5 (NM_015902.3,8202-8220).
gacagaacgacaagatctt

SEQ ID NO: 228138 - DNA, 19 bp, Homo sapiens
  siRNA target sequence for DD5 (NM_015902.3,8252-8270).
cagccagtgaagaaggatt

SEQ ID NO: 228139 - DNA, 19 bp, Homo sapiens
  siRNA target sequence for DD5 (NM_015902.3,8272-8290).
cagcctatgccctcaatca

SEQ ID NO: 228140 - DNA, 19 bp, Homo sapiens
  siRNA target sequence for DD5 (NM_015902.3,8280-8298).
gccctcaatcacaataaga

SEQ ID NO: 228141 - DNA, 19 bp, Homo sapiens
  siRNA target sequence for DD5 (NM_015902.3,8336-8354).
gcatttctcgactttacgt

SEQ ID NO: 228142 - DNA, 19 bp, Homo sapiens
  siRNA target sequence for DD5 (NM_015902.3,8347-8365).
ctttacgtcccactctatt

SEQ ID NO: 228143 - DNA, 19 bp, Homo sapiens
  siRNA target sequence for DD5 (NM_015902.3,8355-8373).
cccactctattcctctaaa

SEQ ID NO: 228144 - DNA, 19 bp, Homo sapiens
  siRNA target sequence for DD5 (NM_015902.3,8359-8377).
ctctattcctctaaacaga

SEQ ID NO: 228145 - DNA, 19 bp, Homo sapiens
  siRNA target sequence for DD5 (NM_015902.3,8361-8379).
ctattcctctaaacagatt

SEQ ID NO: 228146 - DNA, 19 bp, Homo sapiens
  siRNA target sequence for DD5 (NM_015902.3,8366-8384).
cctctaaacagattctcaa

SEQ ID NO: 228147 - DNA, 19 bp, Homo sapiens
  siRNA target sequence for DD5 (NM_015902.3,8369-8387).
ctaaacagattctcaaaca

SEQ ID NO: 228148 - DNA, 19 bp, Homo sapiens
  siRNA target sequence for DD5 (NM_015902.3,8402-8420).
ccattaagaccaagaattt

SEQ ID NO: 228149 - DNA, 19 bp, Homo sapiens
  siRNA target sequence for DKFZP564G092 (NM_015601.2,254-272).
gctaggtttgggtggaatt

SEQ ID NO: 228150 - DNA, 19 bp, Homo sapiens
  siRNA target sequence for DKFZP564G092 (NM_015601.2,285-303).
gtactagagcccagaaaaa

SEQ ID NO: 228151 - DNA, 19 bp, Homo sapiens
  siRNA target sequence for DKFZP564G092 (NM_015601.2,343-361).
gtggactcagacatactgt

SEQ ID NO: 228152 - DNA, 19 bp, Homo sapiens
  siRNA target sequence for DKFZP564G092 (NM_015601.2,352-370).
gacatactgtgtttgttct

SEQ ID NO: 228153 - DNA, 19 bp, Homo sapiens
  siRNA target sequence for DKFZP564G092 (NM_015601.2,386-404).
gtacacatgtggatgtaat

SEQ ID NO: 228154 - DNA, 19 bp, Homo sapiens
  siRNA target sequence for DKFZP564G092 (NM_015601.2,414-432).
cagctaggtcatgaaaaat

SEQ ID NO: 228155 - DNA, 19 bp, Homo sapiens
  siRNA target sequence for DKFZP564G092 (NM_015601.2,508-526).
cgttagcgctaaatgacaa

SEQ ID NO: 228156 - DNA, 19 bp, Homo sapiens
  siRNA target sequence for DKFZP564G092 (NM_015601.2,509-527).
gttagcgctaaatgacaaa

SEQ ID NO: 228157 - DNA, 19 bp, Homo sapiens
  siRNA target sequence for DKFZP564G092 (NM_015601.2,596-614).
cagagtacccagaaatatt

SEQ ID NO: 228158 - DNA, 19 bp, Homo sapiens
  siRNA target sequence for DKFZP564G092 (NM_015601.2,598-616).
gagtacccagaaatattaa

SEQ ID NO: 228159 - DNA, 19 bp, Homo sapiens
  siRNA target sequence for DKFZP564G092 (NM_015601.2,623-641).
gtcagatatccagattgta

SEQ ID NO: 228160 - DNA, 19 bp, Homo sapiens
  siRNA target sequence for DKFZP564G092 (NM_015601.2,652-670).
gtggttactatcattcact

SEQ ID NO: 228161 - DNA, 19 bp, Homo sapiens
  siRNA target sequence for DKFZP564G092 (NM_015601.2,679-697).
ctaaagcaagtgaagtctt

SEQ ID NO: 228162 - DNA, 19 bp, Homo sapiens
  siRNA target sequence for DKFZP564G092 (NM_015601.2,720-738).
ggccaattgggtttaggta

SEQ ID NO: 228163 - DNA, 19 bp, Homo sapiens
  siRNA target sequence for DKFZP564G092 (NM_015601.2,730-748).
gtttaggtactgactgtaa

SEQ ID NO: 228164 - DNA, 19 bp, Homo sapiens
  siRNA target sequence for DKFZP564G092 (NM_015601.2,736-754).
gtactgactgtaaaaagca

SEQ ID NO: 228165 - DNA, 19 bp, Homo sapiens
  siRNA target sequence for DKFZP564G092 (NM_015601.2,741-759).
gactgtaaaaagcaaactt

SEQ ID NO: 228166 - DNA, 19 bp, Homo sapiens
  siRNA target sequence for DKFZP564G092 (NM_015601.2,762-780).
ccgcagctgcttaagtctt

SEQ ID NO: 228167 - DNA, 19 bp, Homo sapiens
  siRNA target sequence for DKFZP564G092 (NM_015601.2,763-781).
cgcagctgcttaagtcttt

SEQ ID NO: 228168 - DNA, 19 bp, Homo sapiens
  siRNA target sequence for DKFZP564G092 (NM_015601.2,767-785).
gctgcttaagtctttgctt

SEQ ID NO: 228169 - DNA, 19 bp, Homo sapiens
  siRNA target sequence for DKFZP564G092 (NM_015601.2,811-829).
caggaggagcccatagttt

SEQ ID NO: 228170 - DNA, 19 bp, Homo sapiens
  siRNA target sequence for DKFZP564G092 (NM_015601.2,814-832).
gaggagcccatagttttgt

SEQ ID NO: 228171 - DNA, 19 bp, Homo sapiens
  siRNA target sequence for DKFZP564G092 (NM_015601.2,858-876).
ggatggggacgcaacaagt

SEQ ID NO: 228172 - DNA, 19 bp, Homo sapiens
  siRNA target sequence for DKFZP564G092 (NM_015601.2,859-877).
gatggggacgcaacaagtt

SEQ ID NO: 228173 - DNA, 19 bp, Homo sapiens
  siRNA target sequence for DKFZP564G092 (NM_015601.2,885-903).
ctaggtcttaatgatgaaa

SEQ ID NO: 228174 - DNA, 19 bp, Homo sapiens
  siRNA target sequence for DKFZP564G092 (NM_015601.2,906-924).
gataggtatgttcctaatt

SEQ ID NO: 228175 - DNA, 19 bp, Homo sapiens
  siRNA target sequence for DKFZP564G092 (NM_015601.2,910-928).
ggtatgttcctaatttact

SEQ ID NO: 228176 - DNA, 19 bp, Homo sapiens
  siRNA target sequence for DKFZP564G092 (NM_015601.2,911-929).
gtatgttcctaatttacta

SEQ ID NO: 228177 - DNA, 19 bp, Homo sapiens
  siRNA target sequence for DKFZP564G092 (NM_015601.2,998-1016).
ggaaggtggagtgtttact

SEQ ID NO: 228178 - DNA, 19 bp, Homo sapiens
  siRNA target sequence for DKFZP564G092 (NM_015601.2,999-1017).
gaaggtggagtgtttactt

SEQ ID NO: 228179 - DNA, 19 bp, Homo sapiens
  siRNA target sequence for DKFZP564G092 (NM_015601.2,1092-1110).
cttatgggaagcattgtca

SEQ ID NO: 228180 - DNA, 19 bp, Homo sapiens
  siRNA target sequence for DKFZP564G092 (NM_015601.2,1133-1151).
gcacacttctgcttttgtt

SEQ ID NO: 228181 - DNA, 19 bp, Homo sapiens
  siRNA target sequence for DKFZP564G092 (NM_015601.2,1199-1217).
gctgggaaccggttcaaca

SEQ ID NO: 228182 - DNA, 19 bp, Homo sapiens
  siRNA target sequence for DKFZP564G092 (NM_015601.2,1226-1244).
gaaaagcccctttactgta

SEQ ID NO: 228183 - DNA, 19 bp, Homo sapiens
  siRNA target sequence for DKFZP564G092 (NM_015601.2,1249-1267).
gaaattggtacccctataa

SEQ ID NO: 228184 - DNA, 19 bp, Homo sapiens
  siRNA target sequence for DKFZP564G092 (NM_015601.2,1270-1288).
ggcagtgtctaccagatat

SEQ ID NO: 228185 - DNA, 19 bp, Homo sapiens
  siRNA target sequence for DKFZP564G092 (NM_015601.2,1271-1289).
gcagtgtctaccagatatt

SEQ ID NO: 228186 - DNA, 19 bp, Homo sapiens
  siRNA target sequence for DKFZP564G092 (NM_015601.2,1274-1292).
gtgtctaccagatattgat

SEQ ID NO: 228187 - DNA, 19 bp, Homo sapiens
  siRNA target sequence for DKFZP564G092 (NM_015601.2,1327-1345).
cagggggagatcaaagctt

SEQ ID NO: 228188 - DNA, 19 bp, Homo sapiens
  siRNA target sequence for DKFZP564G092 (NM_015601.2,1331-1349).
gggagatcaaagcttttca

SEQ ID NO: 228189 - DNA, 19 bp, Homo sapiens
  siRNA target sequence for DKFZP564G092 (NM_015601.2,1333-1351).
gagatcaaagcttttcaca

SEQ ID NO: 228190 - DNA, 19 bp, Homo sapiens
  siRNA target sequence for DKFZP564G092 (NM_015601.2,1335-1353).
gatcaaagcttttcacatt

SEQ ID NO: 228191 - DNA, 19 bp, Homo sapiens
  siRNA target sequence for DKFZP564G092 (NM_015601.2,1481-1499).
ggagatagccaatgagata

SEQ ID NO: 228192 - DNA, 19 bp, Homo sapiens
  siRNA target sequence for DKFZP564G092 (NM_015601.2,1517-1535).
ctctggttgcctaaatgga

SEQ ID NO: 228193 - DNA, 19 bp, Homo sapiens
  siRNA target sequence for DKFZP564G092 (NM_015601.2,1606-1624).
ctgctaggcttttattcca

SEQ ID NO: 228194 - DNA, 19 bp, Homo sapiens
  siRNA target sequence for DKFZP564G092 (NM_015601.2,1638-1656).
cctgatcatccgcagatat

SEQ ID NO: 228195 - DNA, 19 bp, Homo sapiens
  siRNA target sequence for DKFZP564G092 (NM_015601.2,1664-1682).
ggtggcagctagtttggaa

SEQ ID NO: 228196 - DNA, 19 bp, Homo sapiens
  siRNA target sequence for DKFZP564G092 (NM_015601.2,1665-1683).
gtggcagctagtttggaaa

SEQ ID NO: 228197 - DNA, 19 bp, Homo sapiens
  siRNA target sequence for DKFZP564G092 (NM_015601.2,1728-1746).
gcattgaggttttatctta

SEQ ID NO: 228198 - DNA, 19 bp, Homo sapiens
  siRNA target sequence for DKFZP564G092 (NM_015601.2,1762-1780).
ccctgatgagtgattccaa

SEQ ID NO: 228199 - DNA, 19 bp, Homo sapiens
  siRNA target sequence for DKFZP564G092 (NM_015601.2,1842-1860).
ctgaaagtacttgaaaact

SEQ ID NO: 228200 - DNA, 19 bp, Homo sapiens
  siRNA target sequence for DKFZP564G092 (NM_015601.2,1892-1910).
caagatagtagaacttttt

SEQ ID NO: 228201 - DNA, 19 bp, Homo sapiens
  siRNA target sequence for DKFZP564G092 (NM_015601.2,1917-1935).
gttgtggtacatcttttga

SEQ ID NO: 228202 - DNA, 19 bp, Homo sapiens
  siRNA target sequence for DKFZP564G092 (NM_015601.2,1923-1941).
gtacatcttttgaaactct

SEQ ID NO: 228203 - DNA, 19 bp, Homo sapiens
  siRNA target sequence for DKFZP564G092 (NM_015601.2,1996-2014).
ctgcattaaaggttttaga

SEQ ID NO: 228204 - DNA, 19 bp, Homo sapiens
  siRNA target sequence for DKFZP564G092 (NM_015601.2,2019-2037).
ctacatagggtaaatgaga

SEQ ID NO: 228205 - DNA, 19 bp, Homo sapiens
  siRNA target sequence for DKFZP564G092 (NM_015601.2,2034-2052).
gagaaaatgggacagatta

SEQ ID NO: 228206 - DNA, 19 bp, Homo sapiens
  siRNA target sequence for DKFZP564G092 (NM_015601.2,2046-2064).
cagattatacagtatgata

SEQ ID NO: 228207 - DNA, 19 bp, Homo sapiens
  siRNA target sequence for DKFZP564G092 (NM_015601.2,2127-2145).
caacagcaggcctatggaa

SEQ ID NO: 228208 - DNA, 19 bp, Homo sapiens
  siRNA target sequence for DKFZP564G092 (NM_015601.2,2152-2170).
cagatatccctgttacaat

SEQ ID NO: 228209 - DNA, 19 bp, Homo sapiens
  siRNA target sequence for DKFZP564G092 (NM_015601.2,2160-2178).
cctgttacaatctgtacat

SEQ ID NO: 228210 - DNA, 19 bp, Homo sapiens
  siRNA target sequence for DKFZP564G092 (NM_015601.2,2167-2185).
caatctgtacatatccatt

SEQ ID NO: 228211 - DNA, 19 bp, Homo sapiens
  siRNA target sequence for DKFZP564G092 (NM_015601.2,2171-2189).
ctgtacatatccatttgta

SEQ ID NO: 228212 - DNA, 19 bp, Homo sapiens
  siRNA target sequence for DKFZP564G092 (NM_015601.2,2224-2242).
ccgatgcagtcttacagat

SEQ ID NO: 228213 - DNA, 19 bp, Homo sapiens
  siRNA target sequence for DKFZP564G092 (NM_015601.2,2328-2346).
ctagtggtgcgtagagaaa

SEQ ID NO: 228214 - DNA, 19 bp, Homo sapiens
  siRNA target sequence for DKFZP564G092 (NM_015601.2,2331-2349).
gtggtgcgtagagaaaata

SEQ ID NO: 228215 - DNA, 19 bp, Homo sapiens
  siRNA target sequence for DKFZP564G092 (NM_015601.2,2451-2469).
ggggtgcgcaaagaatttt

SEQ ID NO: 228216 - DNA, 19 bp, Homo sapiens
  siRNA target sequence for DKFZP564G092 (NM_015601.2,2452-2470).
gggtgcgcaaagaattttt

SEQ ID NO: 228217 - DNA, 19 bp, Homo sapiens
  siRNA target sequence for DKFZP564G092 (NM_015601.2,2499-2517).
cctaaatacggcatgttta

SEQ ID NO: 228218 - DNA, 19 bp, Homo sapiens
  siRNA target sequence for DKFZP564G092 (NM_015601.2,2507-2525).
cggcatgtttaggtattat

SEQ ID NO: 228219 - DNA, 19 bp, Homo sapiens
  siRNA target sequence for DKFZP564G092 (NM_015601.2,2509-2527).
gcatgtttaggtattatga

SEQ ID NO: 228220 - DNA, 19 bp, Homo sapiens
  siRNA target sequence for DKFZP564G092 (NM_015601.2,2510-2528).
catgtttaggtattatgaa

SEQ ID NO: 228221 - DNA, 19 bp, Homo sapiens
  siRNA target sequence for DKFZP564G092 (NM_015601.2,2526-2544).
gaagattccaggctcattt

SEQ ID NO: 228222 - DNA, 19 bp, Homo sapiens
  siRNA target sequence for DKFZP564G092 (NM_015601.2,2529-2547).
gattccaggctcatttggt

SEQ ID NO: 228223 - DNA, 19 bp, Homo sapiens
  siRNA target sequence for DKFZP564G092 (NM_015601.2,2534-2552).
caggctcatttggttttct

SEQ ID NO: 228224 - DNA, 19 bp, Homo sapiens
  siRNA target sequence for DKFZP564G092 (NM_015601.2,2536-2554).
ggctcatttggttttctga

SEQ ID NO: 228225 - DNA, 19 bp, Homo sapiens
  siRNA target sequence for DKFZP564G092 (NM_015601.2,2537-2555).
gctcatttggttttctgat

SEQ ID NO: 228226 - DNA, 19 bp, Homo sapiens
  siRNA target sequence for DKFZP564G092 (NM_015601.2,2572-2590).
gtgatttgttccatttgat

SEQ ID NO: 228227 - DNA, 19 bp, Homo sapiens
  siRNA target sequence for DKFZP564G092 (NM_015601.2,2583-2601).
catttgattggtgttatct

SEQ ID NO: 228228 - DNA, 19 bp, Homo sapiens
  siRNA target sequence for DKFZP564G092 (NM_015601.2,2595-2613).
gttatctgtggcttagcaa

SEQ ID NO: 228229 - DNA, 19 bp, Homo sapiens
  siRNA target sequence for DKFZP564G092 (NM_015601.2,2602-2620).
gtggcttagcaatttataa

SEQ ID NO: 228230 - DNA, 19 bp, Homo sapiens
  siRNA target sequence for DKFZP564G092 (NM_015601.2,2631-2649).
gtggacctccattttcctt

SEQ ID NO: 228231 - DNA, 19 bp, Homo sapiens
  siRNA target sequence for DKFZP564G092 (NM_015601.2,2682-2700).
ccatccttggatgatttga

SEQ ID NO: 228232 - DNA, 19 bp, Homo sapiens
  siRNA target sequence for DKFZP564G092 (NM_015601.2,2725-2743).
gaagcatgcaacagttact

SEQ ID NO: 228233 - DNA, 19 bp, Homo sapiens
  siRNA target sequence for DKFZP564G092 (NM_015601.2,2762-2780).
catagaggaaacattttgt

SEQ ID NO: 228234 - DNA, 19 bp, Homo sapiens
  siRNA target sequence for DKFZP564G092 (NM_015601.2,2889-2907).
gatgcttatgtggattaca

SEQ ID NO: 228235 - DNA, 19 bp, Homo sapiens
  siRNA target sequence for DKFZP564G092 (NM_015601.2,2892-2910).
gcttatgtggattacatat

SEQ ID NO: 228236 - DNA, 19 bp, Homo sapiens
  siRNA target sequence for DKFZP564G092 (NM_015601.2,2898-2916).
gtggattacatattcaata

SEQ ID NO: 228237 - DNA, 19 bp, Homo sapiens
  siRNA target sequence for DKFZP564G092 (NM_015601.2,3009-3027).
caagcaatggtcattggaa

SEQ ID NO: 228238 - DNA, 19 bp, Homo sapiens
  siRNA target sequence for DKFZP564G092 (NM_015601.2,3047-3065).
ggaactggaaaagaataca

SEQ ID NO: 228239 - DNA, 19 bp, Homo sapiens
  siRNA target sequence for DKFZP564G092 (NM_015601.2,3077-3095).
ggaatattgggcagaacat

SEQ ID NO: 228240 - DNA, 19 bp, Homo sapiens
  siRNA target sequence for DKFZP564G092 (NM_015601.2,3087-3105).
gcagaacatcctacgataa

SEQ ID NO: 228241 - DNA, 19 bp, Homo sapiens
  siRNA target sequence for DKFZP564G092 (NM_015601.2,3090-3108).
gaacatcctacgataaaaa

SEQ ID NO: 228242 - DNA, 19 bp, Homo sapiens
  siRNA target sequence for DKFZP564G092 (NM_015601.2,3115-3133).
gggaagtatttcacgaatt

SEQ ID NO: 228243 - DNA, 19 bp, Homo sapiens
  siRNA target sequence for DKFZP564G092 (NM_015601.2,3126-3144).
cacgaattaccattggaaa

SEQ ID NO: 228244 - DNA, 19 bp, Homo sapiens
  siRNA target sequence for DKFZP564G092 (NM_015601.2,3146-3164).
gaagaaacagtttctgtta

SEQ ID NO: 228245 - DNA, 19 bp, Homo sapiens
  siRNA target sequence for DKFZP564G092 (NM_015601.2,3174-3192).
ggtagtgatcgcattccta

SEQ ID NO: 228246 - DNA, 19 bp, Homo sapiens
  siRNA target sequence for DKFZP564G092 (NM_015601.2,3175-3193).
gtagtgatcgcattcctat

SEQ ID NO: 228247 - DNA, 19 bp, Homo sapiens
  siRNA target sequence for DKFZP564G092 (NM_015601.2,3178-3196).
gtgatcgcattcctattct

SEQ ID NO: 228248 - DNA, 19 bp, Homo sapiens
  siRNA target sequence for DKFZP564G092 (NM_015601.2,3254-3272).
cccagtttcccatacttgt

SEQ ID NO: 228249 - DNA, 19 bp, Homo sapiens
  siRNA target sequence for DKFZP564G092 (NM_015601.2,3279-3297).
cttctggatcttccaaaat

SEQ ID NO: 228250 - DNA, 19 bp, Homo sapiens
  siRNA target sequence for DKFZP564G092 (NM_015601.2,3282-3300).
ctggatcttccaaaatata

SEQ ID NO: 228251 - DNA, 19 bp, Homo sapiens
  siRNA target sequence for DKFZP564G092 (NM_015601.2,3313-3331).
ctctacgctctaaactgat

SEQ ID NO: 228252 - DNA, 19 bp, Homo sapiens
  siRNA target sequence for DKFZP564G092 (NM_015601.2,3332-3350).
ccaagctattgatcacaat

SEQ ID NO: 228253 - DNA, 19 bp, Homo sapiens
  siRNA target sequence for DKFZP564G092 (NM_015601.2,3347-3365).
caatgaaggcttcagttta

SEQ ID NO: 228254 - DNA, 19 bp, Homo sapiens
  siRNA target sequence for E2-230K (NM_022066.2,454-472).
gcgtcaagcagcatgtgaa

SEQ ID NO: 228255 - DNA, 19 bp, Homo sapiens
  siRNA target sequence for E2-230K (NM_022066.2,559-577).
cggtgatcgacgtcaacat

SEQ ID NO: 228256 - DNA, 19 bp, Homo sapiens
  siRNA target sequence for E2-230K (NM_022066.2,645-663).
cacatctggcccttcatgt

SEQ ID NO: 228257 - DNA, 19 bp, Homo sapiens
  siRNA target sequence for E2-230K (NM_022066.2,697-715).
ggaaggtctacgacttgaa

SEQ ID NO: 228258 - DNA, 19 bp, Homo sapiens
  siRNA target sequence for E2-230K (NM_022066.2,720-738).
cagatcatcctgaagctat

SEQ ID NO: 228259 - DNA, 19 bp, Homo sapiens
  siRNA target sequence for E2-230K (NM_022066.2,808-826).
gcgactcgggtctcttctt

SEQ ID NO: 228260 - DNA, 19 bp, Homo sapiens
  siRNA target sequence for E2-230K (NM_022066.2,816-834).
ggtctcttcttcgatgatt

SEQ ID NO: 228261 - DNA, 19 bp, Homo sapiens
  siRNA target sequence for E2-230K (NM_022066.2,821-839).
cttcttcgatgattcctat

SEQ ID NO: 228262 - DNA, 19 bp, Homo sapiens
  siRNA target sequence for E2-230K (NM_022066.2,1073-1091).
gaagcgtctcggatgcttt

SEQ ID NO: 228263 - DNA, 19 bp, Homo sapiens
  siRNA target sequence for E2-230K (NM_022066.2,1114-1132).
gggagcgctgtctgtatgt

SEQ ID NO: 228264 - DNA, 19 bp, Homo sapiens
  siRNA target sequence for E2-230K (NM_022066.2,1116-1134).
gagcgctgtctgtatgtct

SEQ ID NO: 228265 - DNA, 19 bp, Homo sapiens
  siRNA target sequence for E2-230K (NM_022066.2,1145-1163).
ggtagagccagccaagatt

SEQ ID NO: 228266 - DNA, 19 bp, Homo sapiens
  siRNA target sequence for E2-230K (NM_022066.2,1245-1263).
gttgtgcggatcatgtcat

SEQ ID NO: 228267 - DNA, 19 bp, Homo sapiens
  siRNA target sequence for E2-230K (NM_022066.2,1282-1300).
gttcccgggaccattccat

SEQ ID NO: 228268 - DNA, 19 bp, Homo sapiens
  siRNA target sequence for E2-230K (NM_022066.2,1445-1463).
gcccccattcctgctaaaa

SEQ ID NO: 228269 - DNA, 19 bp, Homo sapiens
  siRNA target sequence for E2-230K (NM_022066.2,1588-1606).
gcggcacgagtcgcaaaaa

SEQ ID NO: 228270 - DNA, 19 bp, Homo sapiens
  siRNA target sequence for E2-230K (NM_022066.2,1590-1608).
ggcacgagtcgcaaaaaga

SEQ ID NO: 228271 - DNA, 19 bp, Homo sapiens
  siRNA target sequence for E2-230K (NM_022066.2,1824-1842).
ggagacttcgtggtagata

SEQ ID NO: 228272 - DNA, 19 bp, Homo sapiens
  siRNA target sequence for E2-230K (NM_022066.2,1825-1843).
gagacttcgtggtagataa

SEQ ID NO: 228273 - DNA, 19 bp, Homo sapiens
  siRNA target sequence for E2-230K (NM_022066.2,2004-2022).
gaccaccctgactttaggt

SEQ ID NO: 228274 - DNA, 19 bp, Homo sapiens
  siRNA target sequence for E2-230K (NM_022066.2,2015-2033).
ctttaggttccgtacaact

SEQ ID NO: 228275 - DNA, 19 bp, Homo sapiens
  siRNA target sequence for E2-230K (NM_022066.2,2042-2060).
catccgcatcggcaatact

SEQ ID NO: 228276 - DNA, 19 bp, Homo sapiens
  siRNA target sequence for E2-230K (NM_022066.2,2176-2194).
cccagcacttgtacaacat

SEQ ID NO: 228277 - DNA, 19 bp, Homo sapiens
  siRNA target sequence for E2-230K (NM_022066.2,2177-2195).
ccagcacttgtacaacata

SEQ ID NO: 228278 - DNA, 19 bp, Homo sapiens
  siRNA target sequence for E2-230K (NM_022066.2,2189-2207).
caacatagagtctgagatt

SEQ ID NO: 228279 - DNA, 19 bp, Homo sapiens
  siRNA target sequence for E2-230K (NM_022066.2,2312-2330).
ggacgagcaccccaagata

SEQ ID NO: 228280 - DNA, 19 bp, Homo sapiens
  siRNA target sequence for E2-230K (NM_022066.2,2604-2622).
ccaactcgggagaagaagt

SEQ ID NO: 228281 - DNA, 19 bp, Homo sapiens
  siRNA target sequence for E2-230K (NM_022066.2,2605-2623).
caactcgggagaagaagtt

SEQ ID NO: 228282 - DNA, 19 bp, Homo sapiens
  siRNA target sequence for E2-230K (NM_022066.2,2669-2687).
ggacaatgtggccattgta

SEQ ID NO: 228283 - DNA, 19 bp, Homo sapiens
  siRNA target sequence for E2-230K (NM_022066.2,2864-2882).
gtttgcaccctcaaatcat

SEQ ID NO: 228284 - DNA, 19 bp, Homo sapiens
  siRNA target sequence for E2-230K (NM_022066.2,2980-2998).
gcatcatggtcaagacttt

SEQ ID NO: 228285 - DNA, 19 bp, Homo sapiens
  siRNA target sequence for E2-230K (NM_022066.2,2981-2999).
catcatggtcaagactttt

SEQ ID NO: 228286 - DNA, 19 bp, Homo sapiens
  siRNA target sequence for E2-230K (NM_022066.2,2990-3008).
caagacttttgaagataga

SEQ ID NO: 228287 - DNA, 19 bp, Homo sapiens
  siRNA target sequence for E2-230K (NM_022066.2,3057-3075).
gaggatggcctctacttgt

SEQ ID NO: 228288 - DNA, 19 bp, Homo sapiens
  siRNA target sequence for E2-230K (NM_022066.2,3063-3081).
ggcctctacttgtttgaca

SEQ ID NO: 228289 - DNA, 19 bp, Homo sapiens
  siRNA target sequence for E2-230K (NM_022066.2,3064-3082).
gcctctacttgtttgacat

SEQ ID NO: 228290 - DNA, 19 bp, Homo sapiens
  siRNA target sequence for E2-230K (NM_022066.2,3274-3292).
gtctgatcctggtaaatga

SEQ ID NO: 228291 - DNA, 19 bp, Homo sapiens
  siRNA target sequence for E2-230K (NM_022066.2,3355-3373).
gtcgctgttacaatgagat

SEQ ID NO: 228292 - DNA, 19 bp, Homo sapiens
  siRNA target sequence for E2-230K (NM_022066.2,3440-3458).
ggagatcaggcaacacttt

SEQ ID NO: 228293 - DNA, 19 bp, Homo sapiens
  siRNA target sequence for E2-230K (NM_022066.2,3782-3800).
gagctaccggagcttctta

SEQ ID NO: 228294 - DNA, 19 bp, Homo sapiens
  siRNA target sequence for FBXL3A (NM_012158.1,316-334).
gatagtgaccgtaattcat

SEQ ID NO: 228295 - DNA, 19 bp, Homo sapiens
  siRNA target sequence for FBXL3A (NM_012158.1,324-342).
ccgtaattcatcagaagaa

SEQ ID NO: 228296 - DNA, 19 bp, Homo sapiens
  siRNA target sequence for FBXL3A (NM_012158.1,344-362).
gaactgcagagaaatccaa

SEQ ID NO: 228297 - DNA, 19 bp, Homo sapiens
  siRNA target sequence for FBXL3A (NM_012158.1,352-370).
gagaaatccaagaaactga

SEQ ID NO: 228298 - DNA, 19 bp, Homo sapiens
  siRNA target sequence for FBXL3A (NM_012158.1,363-381).
gaaactgaggactacaaat

SEQ ID NO: 228299 - DNA, 19 bp, Homo sapiens
  siRNA target sequence for FBXL3A (NM_012158.1,374-392).
ctacaaatgagcattctca

SEQ ID NO: 228300 - DNA, 19 bp, Homo sapiens
  siRNA target sequence for FBXL3A (NM_012158.1,395-413).
cttgtgattggggtaatct

SEQ ID NO: 228301 - DNA, 19 bp, Homo sapiens
  siRNA target sequence for FBXL3A (NM_012158.1,421-439).
gacattattctccaagtat

SEQ ID NO: 228302 - DNA, 19 bp, Homo sapiens
  siRNA target sequence for FBXL3A (NM_012158.1,465-483).
ggctcatgcttcacaagtt

SEQ ID NO: 228303 - DNA, 19 bp, Homo sapiens
  siRNA target sequence for FBXL3A (NM_012158.1,466-484).
gctcatgcttcacaagttt

SEQ ID NO: 228304 - DNA, 19 bp, Homo sapiens
  siRNA target sequence for FBXL3A (NM_012158.1,494-512).
ggaaccaggtatttcacat

SEQ ID NO: 228305 - DNA, 19 bp, Homo sapiens
  siRNA target sequence for FBXL3A (NM_012158.1,546-564).
gaatcagccagctacatct

SEQ ID NO: 228306 - DNA, 19 bp, Homo sapiens
  siRNA target sequence for FBXL3A (NM_012158.1,553-571).
ccagctacatcttatttga

SEQ ID NO: 228307 - DNA, 19 bp, Homo sapiens
  siRNA target sequence for FBXL3A (NM_012158.1,578-596).
cccatccagagctgatcaa

SEQ ID NO: 228308 - DNA, 19 bp, Homo sapiens
  siRNA target sequence for FBXL3A (NM_012158.1,579-597).
ccatccagagctgatcaaa

SEQ ID NO: 228309 - DNA, 19 bp, Homo sapiens
  siRNA target sequence for FBXL3A (NM_012158.1,586-604).
gagctgatcaaacagatta

SEQ ID NO: 228310 - DNA, 19 bp, Homo sapiens
  siRNA target sequence for FBXL3A (NM_012158.1,613-631).
cattcaaaccatctacaat

SEQ ID NO: 228311 - DNA, 19 bp, Homo sapiens
  siRNA target sequence for FBXL3A (NM_012158.1,688-706).
ctatcgcaacttgtgaatt

SEQ ID NO: 228312 - DNA, 19 bp, Homo sapiens
  siRNA target sequence for FBXL3A (NM_012158.1,737-755).
ctgctcgaccaagctttat

SEQ ID NO: 228313 - DNA, 19 bp, Homo sapiens
  siRNA target sequence for FBXL3A (NM_012158.1,740-758).
ctcgaccaagctttatgga

SEQ ID NO: 228314 - DNA, 19 bp, Homo sapiens
  siRNA target sequence for FBXL3A (NM_012158.1,742-760).
cgaccaagctttatggatt

SEQ ID NO: 228315 - DNA, 19 bp, Homo sapiens
  siRNA target sequence for FBXL3A (NM_012158.1,743-761).
gaccaagctttatggattt

SEQ ID NO: 228316 - DNA, 19 bp, Homo sapiens
  siRNA target sequence for FBXL3A (NM_012158.1,749-767).
gctttatggatttaccaaa

SEQ ID NO: 228317 - DNA, 19 bp, Homo sapiens
  siRNA target sequence for FBXL3A (NM_012158.1,787-805).
ctgacagttgtgttcgtaa

SEQ ID NO: 228318 - DNA, 19 bp, Homo sapiens
  siRNA target sequence for FBXL3A (NM_012158.1,815-833).
ccctgtcttcgcttaagat

SEQ ID NO: 228319 - DNA, 19 bp, Homo sapiens
  siRNA target sequence for FBXL3A (NM_012158.1,816-834).
cctgtcttcgcttaagata

SEQ ID NO: 228320 - DNA, 19 bp, Homo sapiens
  siRNA target sequence for FBXL3A (NM_012158.1,819-837).
gtcttcgcttaagatagat

SEQ ID NO: 228321 - DNA, 19 bp, Homo sapiens
  siRNA target sequence for FBXL3A (NM_012158.1,821-839).
cttcgcttaagatagatga

SEQ ID NO: 228322 - DNA, 19 bp, Homo sapiens
  siRNA target sequence for FBXL3A (NM_012158.1,825-843).
gcttaagatagatgatact

SEQ ID NO: 228323 - DNA, 19 bp, Homo sapiens
  siRNA target sequence for FBXL3A (NM_012158.1,857-875).
catctctcaaagtactagt

SEQ ID NO: 228324 - DNA, 19 bp, Homo sapiens
  siRNA target sequence for FBXL3A (NM_012158.1,868-886).
gtactagtggccaacaata

SEQ ID NO: 228325 - DNA, 19 bp, Homo sapiens
  siRNA target sequence for FBXL3A (NM_012158.1,963-981).
gtgtcacggcttaagagaa

SEQ ID NO: 228326 - DNA, 19 bp, Homo sapiens
  siRNA target sequence for FBXL3A (NM_012158.1,977-995).
gagaactagccctgaacta

SEQ ID NO: 228327 - DNA, 19 bp, Homo sapiens
  siRNA target sequence for FBXL3A (NM_012158.1,1005-1023).
gagtgatgagttgttactt

SEQ ID NO: 228328 - DNA, 19 bp, Homo sapiens
  siRNA target sequence for FBXL3A (NM_012158.1,1034-1052).
ctgaaaaacatgttcgatt

SEQ ID NO: 228329 - DNA, 19 bp, Homo sapiens
  siRNA target sequence for FBXL3A (NM_012158.1,1042-1060).
catgttcgattagaacatt

SEQ ID NO: 228330 - DNA, 19 bp, Homo sapiens
  siRNA target sequence for FBXL3A (NM_012158.1,1097-1115).
cacacttccatactattca

SEQ ID NO: 228331 - DNA, 19 bp, Homo sapiens
  siRNA target sequence for FBXL3A (NM_012158.1,1099-1117).
cacttccatactattcaga

SEQ ID NO: 228332 - DNA, 19 bp, Homo sapiens
  siRNA target sequence for FBXL3A (NM_012158.1,1142-1160).
gacattcacccaaagtgaa

SEQ ID NO: 228333 - DNA, 19 bp, Homo sapiens
  siRNA target sequence for FBXL3A (NM_012158.1,1151-1169).
ccaaagtgaacttagtgat

SEQ ID NO: 228334 - DNA, 19 bp, Homo sapiens
  siRNA target sequence for FBXL3A (NM_012158.1,1156-1174).
gtgaacttagtgatgtatt

SEQ ID NO: 228335 - DNA, 19 bp, Homo sapiens
  siRNA target sequence for FBXL3A (NM_012158.1,1206-1224).
ctttcgctatgaaatacct

SEQ ID NO: 228336 - DNA, 19 bp, Homo sapiens
  siRNA target sequence for FBXL3A (NM_012158.1,1223-1241).
ctgccacccatctgtactt

SEQ ID NO: 228337 - DNA, 19 bp, Homo sapiens
  siRNA target sequence for FBXL3A (NM_012158.1,1236-1254).
gtactttgggagatcagta

SEQ ID NO: 228338 - DNA, 19 bp, Homo sapiens
  siRNA target sequence for FBXL3A (NM_012158.1,1289-1307).
gccctagactggttgaact

SEQ ID NO: 228339 - DNA, 19 bp, Homo sapiens
  siRNA target sequence for FBXL3A (NM_012158.1,1290-1308).
ccctagactggttgaacta

SEQ ID NO: 228340 - DNA, 19 bp, Homo sapiens
  siRNA target sequence for FBXL3A (NM_012158.1,1295-1313).
gactggttgaactagtagt

SEQ ID NO: 228341 - DNA, 19 bp, Homo sapiens
  siRNA target sequence for FBXL3A (NM_012158.1,1309-1327).
gtagtgtgtgcaaatggat

SEQ ID NO: 228342 - DNA, 19 bp, Homo sapiens
  siRNA target sequence for FBXL3A (NM_012158.1,1325-1343).
gattacggccacttgatga

SEQ ID NO: 228343 - DNA, 19 bp, Homo sapiens
  siRNA target sequence for FBXL3A (NM_012158.1,1331-1349).
ggccacttgatgaagagtt

SEQ ID NO: 228344 - DNA, 19 bp, Homo sapiens
  siRNA target sequence for FBXL3A (NM_012158.1,1332-1350).
gccacttgatgaagagtta

SEQ ID NO: 228345 - DNA, 19 bp, Homo sapiens
  siRNA target sequence for FBXL3A (NM_012158.1,1334-1352).
cacttgatgaagagttaat

SEQ ID NO: 228346 - DNA, 19 bp, Homo sapiens
  siRNA target sequence for FBXL3A (NM_012158.1,1363-1381).
gaacgttgcaaaaatttgt

SEQ ID NO: 228347 - DNA, 19 bp, Homo sapiens
  siRNA target sequence for FBXL3A (NM_012158.1,1371-1389).
caaaaatttgtcagctatt

SEQ ID NO: 228348 - DNA, 19 bp, Homo sapiens
  siRNA target sequence for FBXL3A (NM_012158.1,1412-1430).
catgtagtgcctttgttga

SEQ ID NO: 228349 - DNA, 19 bp, Homo sapiens
  siRNA target sequence for FBXL3A (NM_012158.1,1415-1433).
gtagtgcctttgttgagtt

SEQ ID NO: 228350 - DNA, 19 bp, Homo sapiens
  siRNA target sequence for FBXL3A (NM_012158.1,1453-1471).
cgcctatctcaattatcca

SEQ ID NO: 228351 - DNA, 19 bp, Homo sapiens
  siRNA target sequence for FBXL3A (NM_012158.1,1476-1494).
ggaagaagtactaattcct

SEQ ID NO: 228352 - DNA, 19 bp, Homo sapiens
  siRNA target sequence for FBXL3A (NM_012158.1,1492-1510).
cctgaccaaaagtatagtt

SEQ ID NO: 228353 - DNA, 19 bp, Homo sapiens
  siRNA target sequence for FBXL3B (NM_012159.1,522-540).
gtcagcacttacagttgtt

SEQ ID NO: 228354 - DNA, 19 bp, Homo sapiens
  siRNA target sequence for FBXL3B (NM_012159.1,587-605).
cagtggatgatccttcatt

SEQ ID NO: 228355 - DNA, 19 bp, Homo sapiens
  siRNA target sequence for FBXL3B (NM_012159.1,677-695).
ctgatggaattctttgtgt

SEQ ID NO: 228356 - DNA, 19 bp, Homo sapiens
  siRNA target sequence for FBXL3B (NM_012159.1,719-737).
gagaactggcgttgaatta

SEQ ID NO: 228357 - DNA, 19 bp, Homo sapiens
  siRNA target sequence for FBXL3B (NM_012159.1,721-739).
gaactggcgttgaattatt

SEQ ID NO: 228358 - DNA, 19 bp, Homo sapiens
  siRNA target sequence for FBXL3B (NM_012159.1,724-742).
ctggcgttgaattattaca

SEQ ID NO: 228359 - DNA, 19 bp, Homo sapiens
  siRNA target sequence for FBXL3B (NM_012159.1,771-789).
ctcaagcgagactcatgtt

SEQ ID NO: 228360 - DNA, 19 bp, Homo sapiens
  siRNA target sequence for FBXL3B (NM_012159.1,773-791).
caagcgagactcatgttaa

SEQ ID NO: 228361 - DNA, 19 bp, Homo sapiens
  siRNA target sequence for FBXL3B (NM_012159.1,776-794).
gcgagactcatgttaacct

SEQ ID NO: 228362 - DNA, 19 bp, Homo sapiens
  siRNA target sequence for FBXL3B (NM_012159.1,777-795).
cgagactcatgttaacctt

SEQ ID NO: 228363 - DNA, 19 bp, Homo sapiens
  siRNA target sequence for FBXL3B (NM_012159.1,864-882).
cagttgggatgcacttatt

SEQ ID NO: 228364 - DNA, 19 bp, Homo sapiens
  siRNA target sequence for FBXL3B (NM_012159.1,866-884).
gttgggatgcacttattaa

SEQ ID NO: 228365 - DNA, 19 bp, Homo sapiens
  siRNA target sequence for FBXL3B (NM_012159.1,870-888).
ggatgcacttattaaacat

SEQ ID NO: 228366 - DNA, 19 bp, Homo sapiens
  siRNA target sequence for FBXL3B (NM_012159.1,871-889).
gatgcacttattaaacatt

SEQ ID NO: 228367 - DNA, 19 bp, Homo sapiens
  siRNA target sequence for FBXL3B (NM_012159.1,890-908).
cccctagagttaatgttgt

SEQ ID NO: 228368 - DNA, 19 bp, Homo sapiens
  siRNA target sequence for FBXL3B (NM_012159.1,892-910).
cctagagttaatgttgtta

SEQ ID NO: 228369 - DNA, 19 bp, Homo sapiens
  siRNA target sequence for FBXL3B (NM_012159.1,907-925).
gttatgcacttctttctat

SEQ ID NO: 228370 - DNA, 19 bp, Homo sapiens
  siRNA target sequence for FBXL3B (NM_012159.1,934-952).
gaattcgagacgttcttca

SEQ ID NO: 228371 - DNA, 19 bp, Homo sapiens
  siRNA target sequence for FBXL3B (NM_012159.1,939-957).
cgagacgttcttcaaagaa

SEQ ID NO: 228372 - DNA, 19 bp, Homo sapiens
  siRNA target sequence for FBXL3B (NM_012159.1,962-980).
cccctgttactcaccttta

SEQ ID NO: 228373 - DNA, 19 bp, Homo sapiens
  siRNA target sequence for FBXL3B (NM_012159.1,963-981).
ccctgttactcacctttat

SEQ ID NO: 228374 - DNA, 19 bp, Homo sapiens
  siRNA target sequence for FBXL3B (NM_012159.1,964-982).
cctgttactcacctttatt

SEQ ID NO: 228375 - DNA, 19 bp, Homo sapiens
  siRNA target sequence for FBXL3B (NM_012159.1,1026-1044).
caactgtcctcgactgatt

SEQ ID NO: 228376 - DNA, 19 bp, Homo sapiens
  siRNA target sequence for FBXL3B (NM_012159.1,1031-1049).
gtcctcgactgattgagtt

SEQ ID NO: 228377 - DNA, 19 bp, Homo sapiens
  siRNA target sequence for FBXL3B (NM_012159.1,1034-1052).
ctcgactgattgagttagt

SEQ ID NO: 228378 - DNA, 19 bp, Homo sapiens
  siRNA target sequence for FBXL3B (NM_012159.1,1105-1123).
gaacactgtacaaacctaa

SEQ ID NO: 228379 - DNA, 19 bp, Homo sapiens
  siRNA target sequence for FBXL3B (NM_012159.1,1131-1149).
gggcctcagcaaatgtgaa

SEQ ID NO: 228380 - DNA, 19 bp, Homo sapiens
  siRNA target sequence for FBXL3B (NM_012159.1,1162-1180).
gccttcatcaggtttgtaa

SEQ ID NO: 228381 - DNA, 19 bp, Homo sapiens
  siRNA target sequence for FBXL5 (NM_012161.2,173-191).
ctctactgcgacaagcttt

SEQ ID NO: 228382 - DNA, 19 bp, Homo sapiens
  siRNA target sequence for FBXL5 (NM_012161.2,178-196).
ctgcgacaagctttctaaa

SEQ ID NO: 228383 - DNA, 19 bp, Homo sapiens
  siRNA target sequence for FBXL5 (NM_012161.2,322-340).
ccagaccatttataatgta

SEQ ID NO: 228384 - DNA, 19 bp, Homo sapiens
  siRNA target sequence for FBXL5 (NM_012161.2,325-343).
gaccatttataatgtacat

SEQ ID NO: 228385 - DNA, 19 bp, Homo sapiens
  siRNA target sequence for FBXL5 (NM_012161.2,364-382).
gatgcttagcctctttgaa

SEQ ID NO: 228386 - DNA, 19 bp, Homo sapiens
  siRNA target sequence for FBXL5 (NM_012161.2,443-461).
gagagattggaggctttta

SEQ ID NO: 228387 - DNA, 19 bp, Homo sapiens
  siRNA target sequence for FBXL5 (NM_012161.2,445-463).
gagattggaggcttttaca

SEQ ID NO: 228388 - DNA, 19 bp, Homo sapiens
  siRNA target sequence for FBXL5 (NM_012161.2,609-627).
gaggtcttagcctatggaa

SEQ ID NO: 228389 - DNA, 19 bp, Homo sapiens
  siRNA target sequence for FBXL5 (NM_012161.2,641-659).
cgacagaagttttttaaat

SEQ ID NO: 228390 - DNA, 19 bp, Homo sapiens
  siRNA target sequence for FBXL5 (NM_012161.2,701-719).
gaacactccacaggtataa

SEQ ID NO: 228391 - DNA, 19 bp, Homo sapiens
  siRNA target sequence for FBXL5 (NM_012161.2,732-750).
ctgaggtaatgctgtcaat

SEQ ID NO: 228392 - DNA, 19 bp, Homo sapiens
  siRNA target sequence for FBXL5 (NM_012161.2,734-752).
gaggtaatgctgtcaattt

SEQ ID NO: 228393 - DNA, 19 bp, Homo sapiens
  siRNA target sequence for FBXL5 (NM_012161.2,737-755).
gtaatgctgtcaattttca

SEQ ID NO: 228394 - DNA, 19 bp, Homo sapiens
  siRNA target sequence for FBXL5 (NM_012161.2,761-779).
cttaatcctcaagagttat

SEQ ID NO: 228395 - DNA, 19 bp, Homo sapiens
  siRNA target sequence for FBXL5 (NM_012161.2,826-844).
gggatcgctttggaaacat

SEQ ID NO: 228396 - DNA, 19 bp, Homo sapiens
  siRNA target sequence for FBXL5 (NM_012161.2,828-846).
gatcgctttggaaacatct

SEQ ID NO: 228397 - DNA, 19 bp, Homo sapiens
  siRNA target sequence for FBXL5 (NM_012161.2,842-860).
catctttaccctgttcatt

SEQ ID NO: 228398 - DNA, 19 bp, Homo sapiens
  siRNA target sequence for FBXL5 (NM_012161.2,885-903).
gtcccgcaactgaacttga

SEQ ID NO: 228399 - DNA, 19 bp, Homo sapiens
  siRNA target sequence for FBXL5 (NM_012161.2,887-905).
cccgcaactgaacttgata

SEQ ID NO: 228400 - DNA, 19 bp, Homo sapiens
  siRNA target sequence for FBXL5 (NM_012161.2,889-907).
cgcaactgaacttgatact

SEQ ID NO: 228401 - DNA, 19 bp, Homo sapiens
  siRNA target sequence for FBXL5 (NM_012161.2,891-909).
caactgaacttgatactga

SEQ ID NO: 228402 - DNA, 19 bp, Homo sapiens
  siRNA target sequence for FBXL5 (NM_012161.2,1000-1018).
gtctgcggaggaatcaatt

SEQ ID NO: 228403 - DNA, 19 bp, Homo sapiens
  siRNA target sequence for FBXL5 (NM_012161.2,1004-1022).
gcggaggaatcaattgcta

SEQ ID NO: 228404 - DNA, 19 bp, Homo sapiens
  siRNA target sequence for FBXL5 (NM_012161.2,1005-1023).
cggaggaatcaattgctat

SEQ ID NO: 228405 - DNA, 19 bp, Homo sapiens
  siRNA target sequence for FBXL5 (NM_012161.2,1024-1042).
cagcattgcacaaatggaa

SEQ ID NO: 228406 - DNA, 19 bp, Homo sapiens
  siRNA target sequence for FBXL5 (NM_012161.2,1089-1107).
gtacttctgtaaaaacctt

SEQ ID NO: 228407 - DNA, 19 bp, Homo sapiens
  siRNA target sequence for FBXL5 (NM_012161.2,1190-1208).
cttacccagactgacattt

SEQ ID NO: 228408 - DNA, 19 bp, Homo sapiens
  siRNA target sequence for FBXL5 (NM_012161.2,1252-1270).
gagtcttcggcatcttgat

SEQ ID NO: 228409 - DNA, 19 bp, Homo sapiens
  siRNA target sequence for FBXL5 (NM_012161.2,1254-1272).
gtcttcggcatcttgatct

SEQ ID NO: 228410 - DNA, 19 bp, Homo sapiens
  siRNA target sequence for FBXL5 (NM_012161.2,1383-1401).
cttcaactgcgtggaaaaa

SEQ ID NO: 228411 - DNA, 19 bp, Homo sapiens
  siRNA target sequence for FBXL5 (NM_012161.2,1389-1407).
ctgcgtggaaaaataaaga

SEQ ID NO: 228412 - DNA, 19 bp, Homo sapiens
  siRNA target sequence for FBXL5 (NM_012161.2,1438-1456).
ctgtttgcacgatttaact

SEQ ID NO: 228413 - DNA, 19 bp, Homo sapiens
  siRNA target sequence for FBXL5 (NM_012161.2,1440-1458).
gtttgcacgatttaactaa

SEQ ID NO: 228414 - DNA, 19 bp, Homo sapiens
  siRNA target sequence for FBXL5 (NM_012161.2,1519-1537).
gaatttcacttctccttat

SEQ ID NO: 228415 - DNA, 19 bp, Homo sapiens
  siRNA target sequence for FBXL5 (NM_012161.2,1590-1608).
ggagacatagaaatgttga

SEQ ID NO: 228416 - DNA, 19 bp, Homo sapiens
  siRNA target sequence for FBXL5 (NM_012161.2,1631-1649).
gcatccaactttagttgtt

SEQ ID NO: 228417 - DNA, 19 bp, Homo sapiens
  siRNA target sequence for FBXL5 (NM_012161.2,1647-1665).
gttccacctctggttgttt

SEQ ID NO: 228418 - DNA, 19 bp, Homo sapiens
  siRNA target sequence for FBXL5 (NM_012161.2,1662-1680).
gttttagtaaggacattgt

SEQ ID NO: 228419 - DNA, 19 bp, Homo sapiens
  siRNA target sequence for FBXL5 (NM_012161.2,1833-1851).
gattgcctaggggaaaaga

SEQ ID NO: 228420 - DNA, 19 bp, Homo sapiens
  siRNA target sequence for FBXL5 (NM_012161.2,1838-1856).
cctaggggaaaagacttaa

SEQ ID NO: 228421 - DNA, 19 bp, Homo sapiens
  siRNA target sequence for FBXL5 (NM_012161.2,1893-1911).
gacgtgtacttctgtttct

SEQ ID NO: 228422 - DNA, 19 bp, Homo sapiens
  siRNA target sequence for FBXL5 (NM_012161.2,2025-2043).
gtgcaggcctgcaggattt

SEQ ID NO: 228423 - DNA, 19 bp, Homo sapiens
  siRNA target sequence for FBXL5 (NM_012161.2,2061-2079).
ctctgaatgatgaatactt

SEQ ID NO: 228424 - DNA, 19 bp, Homo sapiens
  siRNA target sequence for FBXL6 (NM_012162.1,362-380).
gaccgcattcccttggaaa

SEQ ID NO: 228425 - DNA, 19 bp, Homo sapiens
  siRNA target sequence for FBXL6 (NM_012162.1,678-696).
gctgtcctcggctcacttt

SEQ ID NO: 228426 - DNA, 19 bp, Homo sapiens
  siRNA target sequence for FBXL6 (NM_012162.1,948-966).
gcatcaaccgtaatagcat

SEQ ID NO: 228427 - DNA, 19 bp, Homo sapiens
  siRNA target sequence for FBXL6 (NM_012162.1,1117-1135).
gagctcaacctgcaacttt

SEQ ID NO: 228428 - DNA, 19 bp, Homo sapiens
  siRNA target sequence for FBXL7 (NM_012304.3,489-507).
cgaacaatggcaaacagta

SEQ ID NO: 228429 - DNA, 19 bp, Homo sapiens
  siRNA target sequence for FBXL7 (NM_012304.3,524-542).
ggcagctcgagcatctcat

SEQ ID NO: 228430 - DNA, 19 bp, Homo sapiens
  siRNA target sequence for FBXL7 (NM_012304.3,547-565).
cgtgagttcaagtacagat

SEQ ID NO: 228431 - DNA, 19 bp, Homo sapiens
  siRNA target sequence for FBXL7 (NM_012304.3,1133-1151).
gaagtctcaggctgttaca

SEQ ID NO: 228432 - DNA, 19 bp, Homo sapiens
  siRNA target sequence for FBXL7 (NM_012304.3,1136-1154).
gtctcaggctgttacaata

SEQ ID NO: 228433 - DNA, 19 bp, Homo sapiens
  siRNA target sequence for FBXL7 (NM_012304.3,1279-1297).
cttgcatggcaaacagatt

SEQ ID NO: 228434 - DNA, 19 bp, Homo sapiens
  siRNA target sequence for FBXL7 (NM_012304.3,1664-1682).
gagtacctcgccaagaact

SEQ ID NO: 228435 - DNA, 19 bp, Homo sapiens
  siRNA target sequence for FBXL7 (NM_012304.3,1708-1726).
cggcaaatgccctttggta

SEQ ID NO: 228436 - DNA, 19 bp, Homo sapiens
  siRNA target sequence for FBXL7 (NM_012304.3,1709-1727).
ggcaaatgccctttggtat

SEQ ID NO: 228437 - DNA, 19 bp, Homo sapiens
  siRNA target sequence for FBXO11 (NM_012167.1,248-266).
cataccaacttcgtagaaa

SEQ ID NO: 228438 - DNA, 19 bp, Homo sapiens
  siRNA target sequence for FBXO11 (NM_012167.1,256-274).
cttcgtagaaaaactcttt

SEQ ID NO: 228439 - DNA, 19 bp, Homo sapiens
  siRNA target sequence for FBXO11 (NM_012167.1,289-307).
gcgtgtcccacaaagaaca

SEQ ID NO: 228440 - DNA, 19 bp, Homo sapiens
  siRNA target sequence for FBXO11 (NM_012167.1,326-344).
cttcaactacagaaaactt

SEQ ID NO: 228441 - DNA, 19 bp, Homo sapiens
  siRNA target sequence for FBXO11 (NM_012167.1,442-460).
gtggttctaaaaatcttct

SEQ ID NO: 228442 - DNA, 19 bp, Homo sapiens
  siRNA target sequence for FBXO11 (NM_012167.1,471-489).
ggaacaggatctttgtaga

SEQ ID NO: 228443 - DNA, 19 bp, Homo sapiens
  siRNA target sequence for FBXO11 (NM_012167.1,543-561).
gaaacgattatatatggaa

SEQ ID NO: 228444 - DNA, 19 bp, Homo sapiens
  siRNA target sequence for FBXO11 (NM_012167.1,547-565).
cgattatatatggaagtat

SEQ ID NO: 228445 - DNA, 19 bp, Homo sapiens
  siRNA target sequence for FBXO11 (NM_012167.1,657-675).
gagtttccagcagttgtat

SEQ ID NO: 228446 - DNA, 19 bp, Homo sapiens
  siRNA target sequence for FBXO11 (NM_012167.1,659-677).
gtttccagcagttgtataa

SEQ ID NO: 228447 - DNA, 19 bp, Homo sapiens
  siRNA target sequence for FBXO11 (NM_012167.1,663-681).
ccagcagttgtataaaggt

SEQ ID NO: 228448 - DNA, 19 bp, Homo sapiens
  siRNA target sequence for FBXO11 (NM_012167.1,694-712).
ccaggatttgctgaacatt

SEQ ID NO: 228449 - DNA, 19 bp, Homo sapiens
  siRNA target sequence for FBXO11 (NM_012167.1,719-737).
gtaaccctgcaagatataa

SEQ ID NO: 228450 - DNA, 19 bp, Homo sapiens
  siRNA target sequence for FBXO11 (NM_012167.1,743-761).
gagaaaatatgttgtatta

SEQ ID NO: 228451 - DNA, 19 bp, Homo sapiens
  siRNA target sequence for FBXO11 (NM_012167.1,753-771).
gttgtattatgatactatt

SEQ ID NO: 228452 - DNA, 19 bp, Homo sapiens
  siRNA target sequence for FBXO11 (NM_012167.1,779-797).
cccttggtggggtacaaga

SEQ ID NO: 228453 - DNA, 19 bp, Homo sapiens
  siRNA target sequence for FBXO11 (NM_012167.1,802-820).
cattttgatggacttatct

SEQ ID NO: 228454 - DNA, 19 bp, Homo sapiens
  siRNA target sequence for FBXO11 (NM_012167.1,823-841).
gttcattctggaatatata

SEQ ID NO: 228455 - DNA, 19 bp, Homo sapiens
  siRNA target sequence for FBXO11 (NM_012167.1,932-950).
gagattcaaccttcgtttt

SEQ ID NO: 228456 - DNA, 19 bp, Homo sapiens
  siRNA target sequence for FBXO11 (NM_012167.1,934-952).
gattcaaccttcgttttta

SEQ ID NO: 228457 - DNA, 19 bp, Homo sapiens
  siRNA target sequence for FBXO11 (NM_012167.1,970-988).
gcttatgttggatatatga

SEQ ID NO: 228458 - DNA, 19 bp, Homo sapiens
  siRNA target sequence for FBXO11 (NM_012167.1,976-994).
gttggatatatgacaataa

SEQ ID NO: 228459 - DNA, 19 bp, Homo sapiens
  siRNA target sequence for FBXO11 (NM_012167.1,979-997).
ggatatatgacaataaggt

SEQ ID NO: 228460 - DNA, 19 bp, Homo sapiens
  siRNA target sequence for FBXO11 (NM_012167.1,995-1013).
ggtttaaccctgatgacaa

SEQ ID NO: 228461 - DNA, 19 bp, Homo sapiens
  siRNA target sequence for FBXO11 (NM_012167.1,996-1014).
gtttaaccctgatgacaaa

SEQ ID NO: 228462 - DNA, 19 bp, Homo sapiens
  siRNA target sequence for FBXO11 (NM_012167.1,1036-1054).
caccactgcttagagatta

SEQ ID NO: 228463 - DNA, 19 bp, Homo sapiens
  siRNA target sequence for FBXO11 (NM_012167.1,1038-1056).
ccactgcttagagattaca

SEQ ID NO: 228464 - DNA, 19 bp, Homo sapiens
  siRNA target sequence for FBXO11 (NM_012167.1,1041-1059).
ctgcttagagattacagta

SEQ ID NO: 228465 - DNA, 19 bp, Homo sapiens
  siRNA target sequence for FBXO11 (NM_012167.1,1048-1066).
gagattacagtaaattgta

SEQ ID NO: 228466 - DNA, 19 bp, Homo sapiens
  siRNA target sequence for FBXO11 (NM_012167.1,1064-1082).
gtagccctattattgatca

SEQ ID NO: 228467 - DNA, 19 bp, Homo sapiens
  siRNA target sequence for FBXO11 (NM_012167.1,1083-1101).
ctgtatcatccgaagtaca

SEQ ID NO: 228468 - DNA, 19 bp, Homo sapiens
  siRNA target sequence for FBXO11 (NM_012167.1,1215-1233).
gggaatatatgaggataat

SEQ ID NO: 228469 - DNA, 19 bp, Homo sapiens
  siRNA target sequence for FBXO11 (NM_012167.1,1227-1245).
ggataatgaaatttccaat

SEQ ID NO: 228470 - DNA, 19 bp, Homo sapiens
  siRNA target sequence for FBXO11 (NM_012167.1,1255-1273).
gctgggatttgggttaaaa

SEQ ID NO: 228471 - DNA, 19 bp, Homo sapiens
  siRNA target sequence for FBXO11 (NM_012167.1,1348-1366).
ggcatgggttactttgaaa

SEQ ID NO: 228472 - DNA, 19 bp, Homo sapiens
  siRNA target sequence for FBXO11 (NM_012167.1,1350-1368).
catgggttactttgaaagt

SEQ ID NO: 228473 - DNA, 19 bp, Homo sapiens
  siRNA target sequence for FBXO11 (NM_012167.1,1363-1381).
gaaagttgcaatatacaca

SEQ ID NO: 228474 - DNA, 19 bp, Homo sapiens
  siRNA target sequence for FBXO11 (NM_012167.1,1427-1445).
cagtggttcgatgtgaaat

SEQ ID NO: 228475 - DNA, 19 bp, Homo sapiens
  siRNA target sequence for FBXO11 (NM_012167.1,1453-1471).
gggcagactggaggaatat

SEQ ID NO: 228476 - DNA, 19 bp, Homo sapiens
  siRNA target sequence for FBXO11 (NM_012167.1,1487-1505).
gaagaggacaattcataga

SEQ ID NO: 228477 - DNA, 19 bp, Homo sapiens
  siRNA target sequence for FBXO11 (NM_012167.1,1531-1549).
gcaggtgtatggattacct

SEQ ID NO: 228478 - DNA, 19 bp, Homo sapiens
  siRNA target sequence for FBXO11 (NM_012167.1,1537-1555).
gtatggattacctcaaata

SEQ ID NO: 228479 - DNA, 19 bp, Homo sapiens
  siRNA target sequence for FBXO11 (NM_012167.1,1541-1559).
ggattacctcaaatagtga

SEQ ID NO: 228480 - DNA, 19 bp, Homo sapiens
  siRNA target sequence for FBXO11 (NM_012167.1,1648-1666).
gacatttatggcaatgcat

SEQ ID NO: 228481 - DNA, 19 bp, Homo sapiens
  siRNA target sequence for FBXO11 (NM_012167.1,1686-1704).
gacaaacagttgtccaatt

SEQ ID NO: 228482 - DNA, 19 bp, Homo sapiens
  siRNA target sequence for FBXO11 (NM_012167.1,1731-1749).
ccagcatggtgggatttat

SEQ ID NO: 228483 - DNA, 19 bp, Homo sapiens
  siRNA target sequence for FBXO11 (NM_012167.1,1741-1759).
gggatttatgtgcatgaaa

SEQ ID NO: 228484 - DNA, 19 bp, Homo sapiens
  siRNA target sequence for FBXO11 (NM_012167.1,1924-1942).
gatatctataatcatatgt

SEQ ID NO: 228485 - DNA, 19 bp, Homo sapiens
  siRNA target sequence for FBXO11 (NM_012167.1,1929-1947).
ctataatcatatgtattca

SEQ ID NO: 228486 - DNA, 19 bp, Homo sapiens
  siRNA target sequence for FBXO11 (NM_018693.2,2010-2028).
gaatggtggaattctagtt

SEQ ID NO: 228487 - DNA, 19 bp, Homo sapiens
  siRNA target sequence for FBXO11 (NM_018693.2,2036-2054).
ctggtctaggctgtataga

SEQ ID NO: 228488 - DNA, 19 bp, Homo sapiens
  siRNA target sequence for FBXO11 (NM_018693.2,2089-2107).
gtctggattaagacagata

SEQ ID NO: 228489 - DNA, 19 bp, Homo sapiens
  siRNA target sequence for FBXO11 (NM_018693.2,2091-2109).
ctggattaagacagatagt

SEQ ID NO: 228490 - DNA, 19 bp, Homo sapiens
  siRNA target sequence for FBXO11 (NM_018693.2,2094-2112).
gattaagacagatagtaat

SEQ ID NO: 228491 - DNA, 19 bp, Homo sapiens
  siRNA target sequence for FBXO11 (NM_018693.2,2104-2122).
gatagtaatcctacactaa

SEQ ID NO: 228492 - DNA, 19 bp, Homo sapiens
  siRNA target sequence for FBXO11 (NM_018693.2,2153-2171).
gtggcatctgtatatttaa

SEQ ID NO: 228493 - DNA, 19 bp, Homo sapiens
  siRNA target sequence for FBXO11 (NM_018693.2,2174-2192).
ggggtcgaggtattgttgt

SEQ ID NO: 228494 - DNA, 19 bp, Homo sapiens
  siRNA target sequence for FBXO11 (NM_018693.2,2175-2193).
gggtcgaggtattgttgtt

SEQ ID NO: 228495 - DNA, 19 bp, Homo sapiens
  siRNA target sequence for FBXO11 (NM_018693.2,2176-2194).
ggtcgaggtattgttgtta

SEQ ID NO: 228496 - DNA, 19 bp, Homo sapiens
  siRNA target sequence for FBXO11 (NM_018693.2,2177-2195).
gtcgaggtattgttgttaa

SEQ ID NO: 228497 - DNA, 19 bp, Homo sapiens
  siRNA target sequence for FBXO11 (NM_018693.2,2179-2197).
cgaggtattgttgttaatt

SEQ ID NO: 228498 - DNA, 19 bp, Homo sapiens
  siRNA target sequence for FBXO11 (NM_018693.2,2231-2249).
cttccatatctttaatgat

SEQ ID NO: 228499 - DNA, 19 bp, Homo sapiens
  siRNA target sequence for FBXO11 (NM_018693.2,2240-2258).
ctttaatgatcaatgacat

SEQ ID NO: 228500 - DNA, 19 bp, Homo sapiens
  siRNA target sequence for FBXO11 (NM_025133.3,2177-2195).
gtcgaggtctccttgaaga

SEQ ID NO: 228501 - DNA, 19 bp, Homo sapiens
  siRNA target sequence for FBXO11 (NM_025133.3,2216-2234).
ctcaagcaggtgttctcat

SEQ ID NO: 228502 - DNA, 19 bp, Homo sapiens
  siRNA target sequence for FBXO11 (NM_025133.3,2232-2250).
catcagcactaatagtcat

SEQ ID NO: 228503 - DNA, 19 bp, Homo sapiens
  siRNA target sequence for FBXO11 (NM_025133.3,2240-2258).
ctaatagtcatccaatctt

SEQ ID NO: 228504 - DNA, 19 bp, Homo sapiens
  siRNA target sequence for FBXO11 (NM_025133.3,2246-2264).
gtcatccaatcttaaggaa

SEQ ID NO: 228505 - DNA, 19 bp, Homo sapiens
  siRNA target sequence for FBXO11 (NM_025133.3,2282-2300).
gatttgccgcaggtattga

SEQ ID NO: 228506 - DNA, 19 bp, Homo sapiens
  siRNA target sequence for FBXO11 (NM_025133.3,2287-2305).
gccgcaggtattgaaatta

SEQ ID NO: 228507 - DNA, 19 bp, Homo sapiens
  siRNA target sequence for FBXO11 (NM_025133.3,2289-2307).
cgcaggtattgaaattaca

SEQ ID NO: 228508 - DNA, 19 bp, Homo sapiens
  siRNA target sequence for FBXO11 (NM_025133.3,2290-2308).
gcaggtattgaaattacaa

SEQ ID NO: 228509 - DNA, 19 bp, Homo sapiens
  siRNA target sequence for FBXO11 (NM_025133.3,2313-2331).
cgcaactgcaacactagaa

SEQ ID NO: 228510 - DNA, 19 bp, Homo sapiens
  siRNA target sequence for FBXO11 (NM_025133.3,2324-2342).
cactagaaggcaatcagat

SEQ ID NO: 228511 - DNA, 19 bp, Homo sapiens
  siRNA target sequence for FBXO11 (NM_025133.3,2326-2344).
ctagaaggcaatcagattt

SEQ ID NO: 228512 - DNA, 19 bp, Homo sapiens
  siRNA target sequence for FBXO11 (NM_025133.3,2332-2350).
ggcaatcagatttttaaca

SEQ ID NO: 228513 - DNA, 19 bp, Homo sapiens
  siRNA target sequence for FBXO11 (NM_025133.3,2352-2370).
ccggtttggaggcttattt

SEQ ID NO: 228514 - DNA, 19 bp, Homo sapiens
  siRNA target sequence for FBXO11 (NM_025133.3,2353-2371).
cggtttggaggcttatttt

SEQ ID NO: 228515 - DNA, 19 bp, Homo sapiens
  siRNA target sequence for FBXO11 (NM_025133.3,2359-2377).
ggaggcttatttttagcat

SEQ ID NO: 228516 - DNA, 19 bp, Homo sapiens
  siRNA target sequence for FBXO11 (NM_025133.3,2381-2399).
gtgttaatgtgacaatgaa

SEQ ID NO: 228517 - DNA, 19 bp, Homo sapiens
  siRNA target sequence for FBXO11 (NM_025133.3,2430-2448).
catagaaaaggctgttagt

SEQ ID NO: 228518 - DNA, 19 bp, Homo sapiens
  siRNA target sequence for FBXO11 (NM_025133.3,2447-2465).
gtagaggccaatgtttata

SEQ ID NO: 228519 - DNA, 19 bp, Homo sapiens
  siRNA target sequence for FBXO11 (NM_025133.3,2450-2468).
gaggccaatgtttatataa

SEQ ID NO: 228520 - DNA, 19 bp, Homo sapiens
  siRNA target sequence for FBXO11 (NM_025133.3,2522-2540).
gtaacaccacagatcgaaa

SEQ ID NO: 228521 - DNA, 19 bp, Homo sapiens
  siRNA target sequence for FBXO11 (NM_025133.3,2638-2656).
ctgtctaatccttgtacat

SEQ ID NO: 228522 - DNA, 19 bp, Homo sapiens
  siRNA target sequence for FBXO11 (NM_025133.3,2640-2658).
gtctaatccttgtacatta

SEQ ID NO: 228523 - DNA, 19 bp, Homo sapiens
  siRNA target sequence for FBXO11 (NM_025133.3,2662-2680).
ggtgagcctacacatgata

SEQ ID NO: 228524 - DNA, 19 bp, Homo sapiens
  siRNA target sequence for FBXO11 (NM_025133.3,2667-2685).
gcctacacatgatacagat

SEQ ID NO: 228525 - DNA, 19 bp, Homo sapiens
  siRNA target sequence for FBXO11 (NM_025133.3,2672-2690).
cacatgatacagatacact

SEQ ID NO: 228526 - DNA, 19 bp, Homo sapiens
  siRNA target sequence for FBXO11 (NM_025133.3,2674-2692).
catgatacagatacactat

SEQ ID NO: 228527 - DNA, 19 bp, Homo sapiens
  siRNA target sequence for FBXO11 (NM_025133.3,2701-2719).
gctccacctatagaatcta

SEQ ID NO: 228528 - DNA, 19 bp, Homo sapiens
  siRNA target sequence for FBXO11 (NM_025133.3,2702-2720).
ctccacctatagaatctaa

SEQ ID NO: 228529 - DNA, 19 bp, Homo sapiens
  siRNA target sequence for FBXO2 (NM_012168.2,826-844).
gatgagagcgtcaagaagt

SEQ ID NO: 228530 - DNA, 19 bp, Homo sapiens
  siRNA target sequence for FBXO2 (NM_012168.2,993-1011).
cgagctcaccgttaagcta

SEQ ID NO: 228531 - DNA, 19 bp, Homo sapiens
  siRNA target sequence for FBXO21 (NM_015002.1,285-303).
ccgactacgtcaattggtt

SEQ ID NO: 228532 - DNA, 19 bp, Homo sapiens
  siRNA target sequence for FBXO21 (NM_015002.1,295-313).
caattggttggaagagtat

SEQ ID NO: 228533 - DNA, 19 bp, Homo sapiens
  siRNA target sequence for FBXO21 (NM_015002.1,300-318).
ggttggaagagtataaagt

SEQ ID NO: 228534 - DNA, 19 bp, Homo sapiens
  siRNA target sequence for FBXO21 (NM_015002.1,301-319).
gttggaagagtataaagtt

SEQ ID NO: 228535 - DNA, 19 bp, Homo sapiens
  siRNA target sequence for FBXO21 (NM_015002.1,310-328).
gtataaagttcggcaaaaa

SEQ ID NO: 228536 - DNA, 19 bp, Homo sapiens
  siRNA target sequence for FBXO21 (NM_015002.1,334-352).
gttagaagcgcggaagatt

SEQ ID NO: 228537 - DNA, 19 bp, Homo sapiens
  siRNA target sequence for FBXO21 (NM_015002.1,353-371).
gtagcctcgttctcaaaga

SEQ ID NO: 228538 - DNA, 19 bp, Homo sapiens
  siRNA target sequence for FBXO21 (NM_015002.1,401-419).
ggcttcagtgacattgaga

SEQ ID NO: 228539 - DNA, 19 bp, Homo sapiens
  siRNA target sequence for FBXO21 (NM_015002.1,452-470).
gaactggtgtgtatcctaa

SEQ ID NO: 228540 - DNA, 19 bp, Homo sapiens
  siRNA target sequence for FBXO21 (NM_015002.1,455-473).
ctggtgtgtatcctaaata

SEQ ID NO: 228541 - DNA, 19 bp, Homo sapiens
  siRNA target sequence for FBXO21 (NM_015002.1,488-506).
gctttgacctggaaatact

SEQ ID NO: 228542 - DNA, 19 bp, Homo sapiens
  siRNA target sequence for FBXO21 (NM_015002.1,489-507).
ctttgacctggaaatacta

SEQ ID NO: 228543 - DNA, 19 bp, Homo sapiens
  siRNA target sequence for FBXO21 (NM_015002.1,498-516).
ggaaatactacgcaaaaaa

SEQ ID NO: 228544 - DNA, 19 bp, Homo sapiens
  siRNA target sequence for FBXO21 (NM_015002.1,532-550).
gcggcaacagaagatctta

SEQ ID NO: 228545 - DNA, 19 bp, Homo sapiens
  siRNA target sequence for FBXO21 (NM_015002.1,533-551).
cggcaacagaagatcttaa

SEQ ID NO: 228546 - DNA, 19 bp, Homo sapiens
  siRNA target sequence for FBXO21 (NM_015002.1,575-593).
cagccagatgactatgagt

SEQ ID NO: 228547 - DNA, 19 bp, Homo sapiens
  siRNA target sequence for FBXO21 (NM_015002.1,706-724).
ccttcggggcataaacagt

SEQ ID NO: 228548 - DNA, 19 bp, Homo sapiens
  siRNA target sequence for FBXO21 (NM_015002.1,742-760).
cttcaaggcaggtgaatca

SEQ ID NO: 228549 - DNA, 19 bp, Homo sapiens
  siRNA target sequence for FBXO21 (NM_015002.1,752-770).
ggtgaatcatccatgataa

SEQ ID NO: 228550 - DNA, 19 bp, Homo sapiens
  siRNA target sequence for FBXO21 (NM_015002.1,753-771).
gtgaatcatccatgataat

SEQ ID NO: 228551 - DNA, 19 bp, Homo sapiens
  siRNA target sequence for FBXO21 (NM_015002.1,804-822).
ccatgaactatgtccttta

SEQ ID NO: 228552 - DNA, 19 bp, Homo sapiens
  siRNA target sequence for FBXO21 (NM_015002.1,838-856).
caaggggaatcgaatggat

SEQ ID NO: 228553 - DNA, 19 bp, Homo sapiens
  siRNA target sequence for FBXO21 (NM_015002.1,843-861).
ggaatcgaatggattacta

SEQ ID NO: 228554 - DNA, 19 bp, Homo sapiens
  siRNA target sequence for FBXO21 (NM_015002.1,844-862).
gaatcgaatggattactat

SEQ ID NO: 228555 - DNA, 19 bp, Homo sapiens
  siRNA target sequence for FBXO21 (NM_015002.1,859-877).
ctataatgccctcaactta

SEQ ID NO: 228556 - DNA, 19 bp, Homo sapiens
  siRNA target sequence for FBXO21 (NM_015002.1,982-1000).
cttcccaagtcacttctta

SEQ ID NO: 228557 - DNA, 19 bp, Homo sapiens
  siRNA target sequence for FBXO21 (NM_015002.1,1027-1045).
ggcgaccctggacatcttt

SEQ ID NO: 228558 - DNA, 19 bp, Homo sapiens
  siRNA target sequence for FBXO21 (NM_015002.1,1032-1050).
ccctggacatctttgacta

SEQ ID NO: 228559 - DNA, 19 bp, Homo sapiens
  siRNA target sequence for FBXO21 (NM_015002.1,1051-1069).
catctacatagatgctttt

SEQ ID NO: 228560 - DNA, 19 bp, Homo sapiens
  siRNA target sequence for FBXO21 (NM_015002.1,1123-1141).
cgtgactgcagcactgtat

SEQ ID NO: 228561 - DNA, 19 bp, Homo sapiens
  siRNA target sequence for FBXO21 (NM_015002.1,1503-1521).
ccatcgggctcattatgaa

SEQ ID NO: 228562 - DNA, 19 bp, Homo sapiens
  siRNA target sequence for FBXO21 (NM_015002.1,1508-1526).
gggctcattatgaagcata

SEQ ID NO: 228563 - DNA, 19 bp, Homo sapiens
  siRNA target sequence for FBXO21 (NM_015002.1,1509-1527).
ggctcattatgaagcataa

SEQ ID NO: 228564 - DNA, 19 bp, Homo sapiens
  siRNA target sequence for FBXO21 (NM_015002.1,1511-1529).
ctcattatgaagcataaga

SEQ ID NO: 228565 - DNA, 19 bp, Homo sapiens
  siRNA target sequence for FBXO21 (NM_015002.1,1536-1554).
gctataactgtgtgatcta

SEQ ID NO: 228566 - DNA, 19 bp, Homo sapiens
  siRNA target sequence for FBXO21 (NM_015002.1,1673-1691).
cgatacgcagcccaagaaa

SEQ ID NO: 228567 - DNA, 19 bp, Homo sapiens
  siRNA target sequence for FBXO21 (NM_015002.1,1674-1692).
gatacgcagcccaagaaaa

SEQ ID NO: 228568 - DNA, 19 bp, Homo sapiens
  siRNA target sequence for FBXO21 (NM_015002.1,1735-1753).
cgtgggacgctatttctca

SEQ ID NO: 228569 - DNA, 19 bp, Homo sapiens
  siRNA target sequence for FBXO21 (NM_015002.1,1742-1760).
cgctatttctcagagttta

SEQ ID NO: 228570 - DNA, 19 bp, Homo sapiens
  siRNA target sequence for FBXO21 (NM_015002.1,1829-1847).
gaaacggtgcagaatattt

SEQ ID NO: 228571 - DNA, 19 bp, Homo sapiens
  siRNA target sequence for FBXO24 (NM_012172.2,247-265).
gaaggcggtccctttgcta

SEQ ID NO: 228572 - DNA, 19 bp, Homo sapiens
  siRNA target sequence for FBXO24 (NM_012172.2,345-363).
cgatttccatccagttgtt

SEQ ID NO: 228573 - DNA, 19 bp, Homo sapiens
  siRNA target sequence for FBXO24 (NM_012172.2,522-540).
cgaagggcctgtatttcca

SEQ ID NO: 228574 - DNA, 19 bp, Homo sapiens
  siRNA target sequence for FBXO24 (NM_012172.2,767-785).
ccaaggtgtgacacagttt

SEQ ID NO: 228575 - DNA, 19 bp, Homo sapiens
  siRNA target sequence for FBXO24 (NM_012172.2,768-786).
caaggtgtgacacagttta

SEQ ID NO: 228576 - DNA, 19 bp, Homo sapiens
  siRNA target sequence for FBXO24 (NM_012172.2,776-794).
gacacagtttaccgtaaat

SEQ ID NO: 228577 - DNA, 19 bp, Homo sapiens
  siRNA target sequence for FBXO24 (NM_012172.2,780-798).
cagtttaccgtaaatacct

SEQ ID NO: 228578 - DNA, 19 bp, Homo sapiens
  siRNA target sequence for FBXO24 (NM_012172.2,891-909).
ggcagcgggtcttcaagat

SEQ ID NO: 228579 - DNA, 19 bp, Homo sapiens
  siRNA target sequence for FBXO24 (NM_012172.2,893-911).
cagcgggtcttcaagatga

SEQ ID NO: 228580 - DNA, 19 bp, Homo sapiens
  siRNA target sequence for FBXO24 (NM_012172.2,896-914).
cgggtcttcaagatgacat

SEQ ID NO: 228581 - DNA, 19 bp, Homo sapiens
  siRNA target sequence for FBXO24 (NM_012172.2,1003-1021).
ctactctttggtagtgaat

SEQ ID NO: 228582 - DNA, 19 bp, Homo sapiens
  siRNA target sequence for FBXO24 (NM_012172.2,1100-1118).
cgcgtggcctgcatgactt

SEQ ID NO: 228583 - DNA, 19 bp, Homo sapiens
  siRNA target sequence for FBXO24 (NM_012172.2,1138-1156).
ctacgtcacagatcctatt

SEQ ID NO: 228584 - DNA, 19 bp, Homo sapiens
  siRNA target sequence for FBXO24 (NM_033506.1,1190-1208).
gaccaggggggagtgtatt

SEQ ID NO: 228585 - DNA, 19 bp, Homo sapiens
  siRNA target sequence for FBXO24 (NM_033506.1,1192-1210).
ccaggggggagtgtatttt

SEQ ID NO: 228586 - DNA, 19 bp, Homo sapiens
  siRNA target sequence for FBXO24 (NM_033506.1,1227-1245).
gggtgtatcgcgatctctt

SEQ ID NO: 228587 - DNA, 19 bp, Homo sapiens
  siRNA target sequence for FBXO24 (NM_033506.1,1228-1246).
ggtgtatcgcgatctcttt

SEQ ID NO: 228588 - DNA, 19 bp, Homo sapiens
  siRNA target sequence for FBXO24 (NM_033506.1,1358-1376).
gaatttggccgaatcttca

SEQ ID NO: 228589 - DNA, 19 bp, Homo sapiens
  siRNA target sequence for FBXO24 (NM_033506.1,1403-1421).
ctaggaacaggggacaaaa

SEQ ID NO: 228590 - DNA, 19 bp, Homo sapiens
  siRNA target sequence for FBXO24 (NM_033506.1,1647-1665).
ccagggagtgcctatacat

SEQ ID NO: 228591 - DNA, 19 bp, Homo sapiens
  siRNA target sequence for FBXO24 (NM_033506.1,1887-1905).
ccgcacagaaggacttctt

SEQ ID NO: 228592 - DNA, 19 bp, Homo sapiens
  siRNA target sequence for FBXO3 (NM_012175.2,116-134).
gactatcgggatctaatca

SEQ ID NO: 228593 - DNA, 19 bp, Homo sapiens
  siRNA target sequence for FBXO3 (NM_012175.2,122-140).
cgggatctaatcaactgtt

SEQ ID NO: 228594 - DNA, 19 bp, Homo sapiens
  siRNA target sequence for FBXO3 (NM_012175.2,125-143).
gatctaatcaactgttgtt

SEQ ID NO: 228595 - DNA, 19 bp, Homo sapiens
  siRNA target sequence for FBXO3 (NM_012175.2,291-309).
gaagatacattgaccatta

SEQ ID NO: 228596 - DNA, 19 bp, Homo sapiens
  siRNA target sequence for FBXO3 (NM_012175.2,302-320).
gaccattatgctgctatta

SEQ ID NO: 228597 - DNA, 19 bp, Homo sapiens
  siRNA target sequence for FBXO3 (NM_012175.2,332-350).
gatgatctcaagaaatatt

SEQ ID NO: 228598 - DNA, 19 bp, Homo sapiens
  siRNA target sequence for FBXO3 (NM_012175.2,360-378).
ggtgtcctcggatggtttt

SEQ ID NO: 228599 - DNA, 19 bp, Homo sapiens
  siRNA target sequence for FBXO3 (NM_012175.2,361-379).
gtgtcctcggatggtttta

SEQ ID NO: 228600 - DNA, 19 bp, Homo sapiens
  siRNA target sequence for FBXO3 (NM_012175.2,438-456).
gcaagcttcctgacgatta

SEQ ID NO: 228601 - DNA, 19 bp, Homo sapiens
  siRNA target sequence for FBXO3 (NM_012175.2,439-457).
caagcttcctgacgattat

SEQ ID NO: 228602 - DNA, 19 bp, Homo sapiens
  siRNA target sequence for FBXO3 (NM_012175.2,442-460).
gcttcctgacgattatcga

SEQ ID NO: 228603 - DNA, 19 bp, Homo sapiens
  siRNA target sequence for FBXO3 (NM_012175.2,443-461).
cttcctgacgattatcgat

SEQ ID NO: 228604 - DNA, 19 bp, Homo sapiens
  siRNA target sequence for FBXO3 (NM_012175.2,449-467).
gacgattatcgatgttcat

SEQ ID NO: 228605 - DNA, 19 bp, Homo sapiens
  siRNA target sequence for FBXO3 (NM_012175.2,462-480).
gttcataccgaattcacaa

SEQ ID NO: 228606 - DNA, 19 bp, Homo sapiens
  siRNA target sequence for FBXO3 (NM_012175.2,516-534).
gcatggcactgtctaatca

SEQ ID NO: 228607 - DNA, 19 bp, Homo sapiens
  siRNA target sequence for FBXO3 (NM_012175.2,520-538).
ggcactgtctaatcactat

SEQ ID NO: 228608 - DNA, 19 bp, Homo sapiens
  siRNA target sequence for FBXO3 (NM_012175.2,524-542).
ctgtctaatcactatcgtt

SEQ ID NO: 228609 - DNA, 19 bp, Homo sapiens
  siRNA target sequence for FBXO3 (NM_012175.2,533-551).
cactatcgttctgaagatt

SEQ ID NO: 228610 - DNA, 19 bp, Homo sapiens
  siRNA target sequence for FBXO3 (NM_012175.2,731-749).
gctgctattgacatgttta

SEQ ID NO: 228611 - DNA, 19 bp, Homo sapiens
  siRNA target sequence for FBXO3 (NM_012175.2,866-884).
gcaacaactggggatatta

SEQ ID NO: 228612 - DNA, 19 bp, Homo sapiens
  siRNA target sequence for FBXO3 (NM_012175.2,870-888).
caactggggatattactgt

SEQ ID NO: 228613 - DNA, 19 bp, Homo sapiens
  siRNA target sequence for FBXO3 (NM_012175.2,889-907).
gtcagtttccacatcgttt

SEQ ID NO: 228614 - DNA, 19 bp, Homo sapiens
  siRNA target sequence for FBXO3 (NM_012175.2,926-944).
gtacatccaccccactatt

SEQ ID NO: 228615 - DNA, 19 bp, Homo sapiens
  siRNA target sequence for FBXO3 (NM_012175.2,964-982).
gattgaaatgtcaaaagat

SEQ ID NO: 228616 - DNA, 19 bp, Homo sapiens
  siRNA target sequence for FBXO3 (NM_012175.2,1012-1030).
cagtcgctattggagaata

SEQ ID NO: 228617 - DNA, 19 bp, Homo sapiens
  siRNA target sequence for FBXO3 (NM_012175.2,1044-1062).
gtgacgtggaagaagttca

SEQ ID NO: 228618 - DNA, 19 bp, Homo sapiens
  siRNA target sequence for FBXO3 (NM_012175.2,1073-1091).
gtagttggtgaatttccaa

SEQ ID NO: 228619 - DNA, 19 bp, Homo sapiens
  siRNA target sequence for FBXO3 (NM_012175.2,1096-1114).
cagcccaggtcgggtatat

SEQ ID NO: 228620 - DNA, 19 bp, Homo sapiens
  siRNA target sequence for FBXO3 (NM_012175.2,1098-1116).
gcccaggtcgggtatatga

SEQ ID NO: 228621 - DNA, 19 bp, Homo sapiens
  siRNA target sequence for FBXO3 (NM_012175.2,1099-1117).
cccaggtcgggtatatgaa

SEQ ID NO: 228622 - DNA, 19 bp, Homo sapiens
  siRNA target sequence for FBXO3 (NM_012175.2,1100-1118).
ccaggtcgggtatatgaat

SEQ ID NO: 228623 - DNA, 19 bp, Homo sapiens
  siRNA target sequence for FBXO3 (NM_012175.2,1101-1119).
caggtcgggtatatgaata

SEQ ID NO: 228624 - DNA, 19 bp, Homo sapiens
  siRNA target sequence for FBXO3 (NM_012175.2,1103-1121).
ggtcgggtatatgaataca

SEQ ID NO: 228625 - DNA, 19 bp, Homo sapiens
  siRNA target sequence for FBXO3 (NM_012175.2,1149-1167).
caggatacatggaaggata

SEQ ID NO: 228626 - DNA, 19 bp, Homo sapiens
  siRNA target sequence for FBXO3 (NM_012175.2,1152-1170).
gatacatggaaggatatta

SEQ ID NO: 228627 - DNA, 19 bp, Homo sapiens
  siRNA target sequence for FBXO3 (NM_012175.2,1215-1233).
ccattccccgattccatat

SEQ ID NO: 228628 - DNA, 19 bp, Homo sapiens
  siRNA target sequence for FBXO3 (NM_012175.2,1242-1260).
caacattcagggtgtctat

SEQ ID NO: 228629 - DNA, 19 bp, Homo sapiens
  siRNA target sequence for FBXO3 (NM_012175.2,1276-1294).
gggtcctgatgaatatgaa

SEQ ID NO: 228630 - DNA, 19 bp, Homo sapiens
  siRNA target sequence for FBXO4 (NM_012176.1,235-253).
cgcggctgccgattgatgt

SEQ ID NO: 228631 - DNA, 19 bp, Homo sapiens
  siRNA target sequence for FBXO4 (NM_012176.1,244-262).
cgattgatgtacagctata

SEQ ID NO: 228632 - DNA, 19 bp, Homo sapiens
  siRNA target sequence for FBXO4 (NM_012176.1,245-263).
gattgatgtacagctatat

SEQ ID NO: 228633 - DNA, 19 bp, Homo sapiens
  siRNA target sequence for FBXO4 (NM_012176.1,293-311).
gtgtcagttgggaagtaca

SEQ ID NO: 228634 - DNA, 19 bp, Homo sapiens
  siRNA target sequence for FBXO4 (NM_012176.1,299-317).
gttgggaagtacaaatcat

SEQ ID NO: 228635 - DNA, 19 bp, Homo sapiens
  siRNA target sequence for FBXO4 (NM_012176.1,331-349).
ctgtaagagatccaattct

SEQ ID NO: 228636 - DNA, 19 bp, Homo sapiens
  siRNA target sequence for FBXO4 (NM_012176.1,342-360).
ccaattctgtggagatact

SEQ ID NO: 228637 - DNA, 19 bp, Homo sapiens
  siRNA target sequence for FBXO4 (NM_012176.1,412-430).
cagatctagaaatcttaaa

SEQ ID NO: 228638 - DNA, 19 bp, Homo sapiens
  siRNA target sequence for FBXO4 (NM_012176.1,447-465).
gtcactgatggtgcatttt

SEQ ID NO: 228639 - DNA, 19 bp, Homo sapiens
  siRNA target sequence for FBXO4 (NM_012176.1,470-488).
ctacatggcagtctataga

SEQ ID NO: 228640 - DNA, 19 bp, Homo sapiens
  siRNA target sequence for FBXO4 (NM_012176.1,578-596).
gaatgaaccacgatttgct

SEQ ID NO: 228641 - DNA, 19 bp, Homo sapiens
  siRNA target sequence for FBXO4 (NM_012176.1,636-654).
gtgttgagcttgatgtctt

SEQ ID NO: 228642 - DNA, 19 bp, Homo sapiens
  siRNA target sequence for FBXO4 (NM_012176.1,683-701).
gcctcagaggcagattgat

SEQ ID NO: 228643 - DNA, 19 bp, Homo sapiens
  siRNA target sequence for FBXO4 (NM_012176.1,689-707).
gaggcagattgatggtatt

SEQ ID NO: 228644 - DNA, 19 bp, Homo sapiens
  siRNA target sequence for FBXO4 (NM_012176.1,715-733).
gagtcaattttcagttgaa

SEQ ID NO: 228645 - DNA, 19 bp, Homo sapiens
  siRNA target sequence for FBXO4 (NM_012176.1,737-755).
ccaacataaattcaacatt

SEQ ID NO: 228646 - DNA, 19 bp, Homo sapiens
  siRNA target sequence for FBXO4 (NM_012176.1,749-767).
caacattctaatcttatat

SEQ ID NO: 228647 - DNA, 19 bp, Homo sapiens
  siRNA target sequence for FBXO4 (NM_012176.1,807-825).
catacaagtgcagttaaca

SEQ ID NO: 228648 - DNA, 19 bp, Homo sapiens
  siRNA target sequence for FBXO4 (NM_012176.1,811-829).
caagtgcagttaacaagat

SEQ ID NO: 228649 - DNA, 19 bp, Homo sapiens
  siRNA target sequence for FBXO4 (NM_012176.1,814-832).
gtgcagttaacaagatgtt

SEQ ID NO: 228650 - DNA, 19 bp, Homo sapiens
  siRNA target sequence for FBXO4 (NM_012176.1,830-848).
gttcagtcgacacaatgaa

SEQ ID NO: 228651 - DNA, 19 bp, Homo sapiens
  siRNA target sequence for FBXO4 (NM_012176.1,879-897).
gtgattccacagattcaaa

SEQ ID NO: 228652 - DNA, 19 bp, Homo sapiens
  siRNA target sequence for FBXO4 (NM_012176.1,909-927).
gttgtagatgggttcatct

SEQ ID NO: 228653 - DNA, 19 bp, Homo sapiens
  siRNA target sequence for FBXO4 (NM_012176.1,934-952).
caaatgctgaagctcataa

SEQ ID NO: 228654 - DNA, 19 bp, Homo sapiens
  siRNA target sequence for FBXO4 (NM_012176.1,1015-1033).
cttcgggaagaccattgtt

SEQ ID NO: 228655 - DNA, 19 bp, Homo sapiens
  siRNA target sequence for FBXO4 (NM_012176.1,1174-1192).
gcattgagtggattcttga

SEQ ID NO: 228656 - DNA, 19 bp, Homo sapiens
  siRNA target sequence for FBXO4 (NM_012176.1,1188-1206).
cttgaagaagtggaatcta

SEQ ID NO: 228657 - DNA, 19 bp, Homo sapiens
  siRNA target sequence for FBXO4 (NM_033484.1,945-963).
gctcataaaagtaagtact

SEQ ID NO: 228658 - DNA, 19 bp, Homo sapiens
  siRNA target sequence for FBXO4 (NM_033484.1,948-966).
cataaaagtaagtactcat

SEQ ID NO: 228659 - DNA, 19 bp, Homo sapiens
  siRNA target sequence for FBXO4 (NM_033484.1,955-973).
gtaagtactcatatgtaca

SEQ ID NO: 228660 - DNA, 19 bp, Homo sapiens
  siRNA target sequence for FBXO5 (NM_012177.2,169-187).
cctcgaccctcggatagtt

SEQ ID NO: 228661 - DNA, 19 bp, Homo sapiens
  siRNA target sequence for FBXO5 (NM_012177.2,172-190).
cgaccctcggatagttgta

SEQ ID NO: 228662 - DNA, 19 bp, Homo sapiens
  siRNA target sequence for FBXO5 (NM_012177.2,173-191).
gaccctcggatagttgtaa

SEQ ID NO: 228663 - DNA, 19 bp, Homo sapiens
  siRNA target sequence for FBXO5 (NM_012177.2,176-194).
cctcggatagttgtaaaga

SEQ ID NO: 228664 - DNA, 19 bp, Homo sapiens
  siRNA target sequence for FBXO5 (NM_012177.2,177-195).
ctcggatagttgtaaagaa

SEQ ID NO: 228665 - DNA, 19 bp, Homo sapiens
  siRNA target sequence for FBXO5 (NM_012177.2,179-197).
cggatagttgtaaagaaga

SEQ ID NO: 228666 - DNA, 19 bp, Homo sapiens
  siRNA target sequence for FBXO5 (NM_012177.2,280-298).
gacattggaagactagttt

SEQ ID NO: 228667 - DNA, 19 bp, Homo sapiens
  siRNA target sequence for FBXO5 (NM_012177.2,299-317).
cctacacccctgcatattt

SEQ ID NO: 228668 - DNA, 19 bp, Homo sapiens
  siRNA target sequence for FBXO5 (NM_012177.2,378-396).
gattgtgagccctaggatt

SEQ ID NO: 228669 - DNA, 19 bp, Homo sapiens
  siRNA target sequence for FBXO5 (NM_012177.2,386-404).
gccctaggattgtacaact

SEQ ID NO: 228670 - DNA, 19 bp, Homo sapiens
  siRNA target sequence for FBXO5 (NM_012177.2,387-405).
ccctaggattgtacaactt

SEQ ID NO: 228671 - DNA, 19 bp, Homo sapiens
  siRNA target sequence for FBXO5 (NM_012177.2,389-407).
ctaggattgtacaacttga

SEQ ID NO: 228672 - DNA, 19 bp, Homo sapiens
  siRNA target sequence for FBXO5 (NM_012177.2,412-430).
gaaagcaagcgcttgcata

SEQ ID NO: 228673 - DNA, 19 bp, Homo sapiens
  siRNA target sequence for FBXO5 (NM_012177.2,416-434).
gcaagcgcttgcataacaa

SEQ ID NO: 228674 - DNA, 19 bp, Homo sapiens
  siRNA target sequence for FBXO5 (NM_012177.2,421-439).
cgcttgcataacaaggaaa

SEQ ID NO: 228675 - DNA, 19 bp, Homo sapiens
  siRNA target sequence for FBXO5 (NM_012177.2,445-463).
catgtgcaacagacactta

SEQ ID NO: 228676 - DNA, 19 bp, Homo sapiens
  siRNA target sequence for FBXO5 (NM_012177.2,450-468).
gcaacagacacttaatagt

SEQ ID NO: 228677 - DNA, 19 bp, Homo sapiens
  siRNA target sequence for FBXO5 (NM_012177.2,451-469).
caacagacacttaatagta

SEQ ID NO: 228678 - DNA, 19 bp, Homo sapiens
  siRNA target sequence for FBXO5 (NM_012177.2,458-476).
cacttaatagtacaaatga

SEQ ID NO: 228679 - DNA, 19 bp, Homo sapiens
  siRNA target sequence for FBXO5 (NM_012177.2,487-505).
ctagagaccagtagacttt

SEQ ID NO: 228680 - DNA, 19 bp, Homo sapiens
  siRNA target sequence for FBXO5 (NM_012177.2,513-531).
cagtggctattcctcattt

SEQ ID NO: 228681 - DNA, 19 bp, Homo sapiens
  siRNA target sequence for FBXO5 (NM_012177.2,601-619).
caatcctgcctgctacaaa

SEQ ID NO: 228682 - DNA, 19 bp, Homo sapiens
  siRNA target sequence for FBXO5 (NM_012177.2,605-623).
cctgcctgctacaaataca

SEQ ID NO: 228683 - DNA, 19 bp, Homo sapiens
  siRNA target sequence for FBXO5 (NM_012177.2,606-624).
ctgcctgctacaaatacaa

SEQ ID NO: 228684 - DNA, 19 bp, Homo sapiens
  siRNA target sequence for FBXO5 (NM_012177.2,631-649).
gaccaatatcccaacaaaa

SEQ ID NO: 228685 - DNA, 19 bp, Homo sapiens
  siRNA target sequence for FBXO5 (NM_012177.2,634-652).
caatatcccaacaaaaact

SEQ ID NO: 228686 - DNA, 19 bp, Homo sapiens
  siRNA target sequence for FBXO5 (NM_012177.2,927-945).
gaagatcctagaagatgat

SEQ ID NO: 228687 - DNA, 19 bp, Homo sapiens
  siRNA target sequence for FBXO5 (NM_012177.2,957-975).
ccagttgtacagtaaagca

SEQ ID NO: 228688 - DNA, 19 bp, Homo sapiens
  siRNA target sequence for FBXO5 (NM_012177.2,958-976).
cagttgtacagtaaagcaa

SEQ ID NO: 228689 - DNA, 19 bp, Homo sapiens
  siRNA target sequence for FBXO5 (NM_012177.2,963-981).
gtacagtaaagcaatacaa

SEQ ID NO: 228690 - DNA, 19 bp, Homo sapiens
  siRNA target sequence for FBXO5 (NM_012177.2,966-984).
cagtaaagcaatacaaaga

SEQ ID NO: 228691 - DNA, 19 bp, Homo sapiens
  siRNA target sequence for FBXO5 (NM_012177.2,983-1001).
gagttaccgaaaacaacaa

SEQ ID NO: 228692 - DNA, 19 bp, Homo sapiens
  siRNA target sequence for FBXO5 (NM_012177.2,985-1003).
gttaccgaaaacaacaata

SEQ ID NO: 228693 - DNA, 19 bp, Homo sapiens
  siRNA target sequence for FBXO5 (NM_012177.2,989-1007).
ccgaaaacaacaataaatt

SEQ ID NO: 228694 - DNA, 19 bp, Homo sapiens
  siRNA target sequence for FBXO5 (NM_012177.2,1030-1048).
gaatatgttatgttcagaa

SEQ ID NO: 228695 - DNA, 19 bp, Homo sapiens
  siRNA target sequence for FBXO5 (NM_012177.2,1102-1120).
gctcaaaccaagttatcca

SEQ ID NO: 228696 - DNA, 19 bp, Homo sapiens
  siRNA target sequence for FBXO5 (NM_012177.2,1103-1121).
ctcaaaccaagttatccaa

SEQ ID NO: 228697 - DNA, 19 bp, Homo sapiens
  siRNA target sequence for FBXO5 (NM_012177.2,1132-1150).
cagaaaggttctacttata

SEQ ID NO: 228698 - DNA, 19 bp, Homo sapiens
  siRNA target sequence for FBXO5 (NM_012177.2,1145-1163).
cttatagtcgacacaatga

SEQ ID NO: 228699 - DNA, 19 bp, Homo sapiens
  siRNA target sequence for FBXO5 (NM_012177.2,1171-1189).
gaggttgccaagacattga

SEQ ID NO: 228700 - DNA, 19 bp, Homo sapiens
  siRNA target sequence for FBXO5 (NM_012177.2,1212-1230).
ctgtattcgctgtaattca

SEQ ID NO: 228701 - DNA, 19 bp, Homo sapiens
  siRNA target sequence for FBXO5 (NM_012177.2,1232-1250).
ctgcaaaatatgattgcta

SEQ ID NO: 228702 - DNA, 19 bp, Homo sapiens
  siRNA target sequence for FBXO5 (NM_012177.2,1298-1316).
gtacgaagtgtctctgtaa

SEQ ID NO: 228703 - DNA, 19 bp, Homo sapiens
  siRNA target sequence for FBXO5 (NM_012177.2,1309-1327).
ctctgtaattatcatacta

SEQ ID NO: 228704 - DNA, 19 bp, Homo sapiens
  siRNA target sequence for FBXO5 (NM_012177.2,1311-1329).
ctgtaattatcatactact

SEQ ID NO: 228705 - DNA, 19 bp, Homo sapiens
  siRNA target sequence for FBXO7 (NM_012179.2,390-408).
cctgggggtacagttctaa

SEQ ID NO: 228706 - DNA, 19 bp, Homo sapiens
  siRNA target sequence for FBXO7 (NM_012179.2,391-409).
ctgggggtacagttctaat

SEQ ID NO: 228707 - DNA, 19 bp, Homo sapiens
  siRNA target sequence for FBXO7 (NM_012179.2,405-423).
ctaatacccgatttacaat

SEQ ID NO: 228708 - DNA, 19 bp, Homo sapiens
  siRNA target sequence for FBXO7 (NM_012179.2,469-487).
ggcttcatatgggattgtt

SEQ ID NO: 228709 - DNA, 19 bp, Homo sapiens
  siRNA target sequence for FBXO7 (NM_012179.2,470-488).
gcttcatatgggattgttt

SEQ ID NO: 228710 - DNA, 19 bp, Homo sapiens
  siRNA target sequence for FBXO7 (NM_012179.2,485-503).
gtttctggggacttgatat

SEQ ID NO: 228711 - DNA, 19 bp, Homo sapiens
  siRNA target sequence for FBXO7 (NM_012179.2,489-507).
ctggggacttgatatgttt

SEQ ID NO: 228712 - DNA, 19 bp, Homo sapiens
  siRNA target sequence for FBXO7 (NM_012179.2,491-509).
ggggacttgatatgtttga

SEQ ID NO: 228713 - DNA, 19 bp, Homo sapiens
  siRNA target sequence for FBXO7 (NM_012179.2,521-539).
gacattccagcgcctaata

SEQ ID NO: 228714 - DNA, 19 bp, Homo sapiens
  siRNA target sequence for FBXO7 (NM_012179.2,523-541).
cattccagcgcctaatata

SEQ ID NO: 228715 - DNA, 19 bp, Homo sapiens
  siRNA target sequence for FBXO7 (NM_012179.2,527-545).
ccagcgcctaatatacctt

SEQ ID NO: 228716 - DNA, 19 bp, Homo sapiens
  siRNA target sequence for FBXO7 (NM_012179.2,567-585).
cttcactccagaataatga

SEQ ID NO: 228717 - DNA, 19 bp, Homo sapiens
  siRNA target sequence for FBXO7 (NM_012179.2,628-646).
ggatgaacaaccaagtgat

SEQ ID NO: 228718 - DNA, 19 bp, Homo sapiens
  siRNA target sequence for FBXO7 (NM_012179.2,629-647).
gatgaacaaccaagtgatt

SEQ ID NO: 228719 - DNA, 19 bp, Homo sapiens
  siRNA target sequence for FBXO7 (NM_012179.2,632-650).
gaacaaccaagtgattcat

SEQ ID NO: 228720 - DNA, 19 bp, Homo sapiens
  siRNA target sequence for FBXO7 (NM_012179.2,697-715).
gttagggcctagtcaaaat

SEQ ID NO: 228721 - DNA, 19 bp, Homo sapiens
  siRNA target sequence for FBXO7 (NM_012179.2,722-740).
gctgagtcaattcaagata

SEQ ID NO: 228722 - DNA, 19 bp, Homo sapiens
  siRNA target sequence for FBXO7 (NM_012179.2,809-827).
gggcaagtgccacattcat

SEQ ID NO: 228723 - DNA, 19 bp, Homo sapiens
  siRNA target sequence for FBXO7 (NM_012179.2,810-828).
ggcaagtgccacattcatt

SEQ ID NO: 228724 - DNA, 19 bp, Homo sapiens
  siRNA target sequence for FBXO7 (NM_012179.2,811-829).
gcaagtgccacattcatta

SEQ ID NO: 228725 - DNA, 19 bp, Homo sapiens
  siRNA target sequence for FBXO7 (NM_012179.2,815-833).
gtgccacattcattagaga

SEQ ID NO: 228726 - DNA, 19 bp, Homo sapiens
  siRNA target sequence for FBXO7 (NM_012179.2,825-843).
cattagagaccttgtatca

SEQ ID NO: 228727 - DNA, 19 bp, Homo sapiens
  siRNA target sequence for FBXO7 (NM_012179.2,864-882).
ccaatgatgccttgatagt

SEQ ID NO: 228728 - DNA, 19 bp, Homo sapiens
  siRNA target sequence for FBXO7 (NM_012179.2,873-891).
ccttgatagtgttgataca

SEQ ID NO: 228729 - DNA, 19 bp, Homo sapiens
  siRNA target sequence for FBXO7 (NM_012179.2,874-892).
cttgatagtgttgatacat

SEQ ID NO: 228730 - DNA, 19 bp, Homo sapiens
  siRNA target sequence for FBXO7 (NM_012179.2,901-919).
gttggagtcaggttacata

SEQ ID NO: 228731 - DNA, 19 bp, Homo sapiens
  siRNA target sequence for FBXO7 (NM_012179.2,953-971).
ccggagaagtggaagttga

SEQ ID NO: 228732 - DNA, 19 bp, Homo sapiens
  siRNA target sequence for FBXO7 (NM_012179.2,1046-1064).
ggaaacctgattgttgtaa

SEQ ID NO: 228733 - DNA, 19 bp, Homo sapiens
  siRNA target sequence for FBXO7 (NM_012179.2,1067-1085).
gctacactaaaaatcaaca

SEQ ID NO: 228734 - DNA, 19 bp, Homo sapiens
  siRNA target sequence for FBXO7 (NM_012179.2,1252-1270).
gaacctaccagatgtattt

SEQ ID NO: 228735 - DNA, 19 bp, Homo sapiens
  siRNA target sequence for FBXO7 (NM_012179.2,1276-1294).
ggtcgtcctcccattggaa

SEQ ID NO: 228736 - DNA, 19 bp, Homo sapiens
  siRNA target sequence for FBXO7 (NM_012179.2,1325-1343).
gttcgttccgtcttgtctt

SEQ ID NO: 228737 - DNA, 19 bp, Homo sapiens
  siRNA target sequence for FBXO7 (NM_012179.2,1328-1346).
cgttccgtcttgtctttgt

SEQ ID NO: 228738 - DNA, 19 bp, Homo sapiens
  siRNA target sequence for FBXO7 (NM_012179.2,1352-1370).
gtttgtcgtgacctcttta

SEQ ID NO: 228739 - DNA, 19 bp, Homo sapiens
  siRNA target sequence for FBXO7 (NM_012179.2,1363-1381).
cctctttactgcttcaaat

SEQ ID NO: 228740 - DNA, 19 bp, Homo sapiens
  siRNA target sequence for FBXO7 (NM_012179.2,1411-1429).
gcgtgattttcgagacaat

SEQ ID NO: 228741 - DNA, 19 bp, Homo sapiens
  siRNA target sequence for FBXO7 (NM_012179.2,1412-1430).
cgtgattttcgagacaata

SEQ ID NO: 228742 - DNA, 19 bp, Homo sapiens
  siRNA target sequence for FBXO7 (NM_012179.2,1499-1517).
ccgaaagggcggtttgtga

SEQ ID NO: 228743 - DNA, 19 bp, Homo sapiens
  siRNA target sequence for FBXO7 (NM_012179.2,1533-1551).
caactcacaccattccatt

SEQ ID NO: 228744 - DNA, 19 bp, Homo sapiens
  siRNA target sequence for FBXO7 (NM_012179.2,1536-1554).
ctcacaccattccattcta

SEQ ID NO: 228745 - DNA, 19 bp, Homo sapiens
  siRNA target sequence for FBXO7 (NM_012179.2,1568-1586).
caccctaggccatttccta

SEQ ID NO: 228746 - DNA, 19 bp, Homo sapiens
  siRNA target sequence for FBXO7 (NM_012179.2,1605-1623).
gaattatcgggggtgaata

SEQ ID NO: 228747 - DNA, 19 bp, Homo sapiens
  siRNA target sequence for FBXO7 (NM_012179.2,1649-1667).
gttggagacccaatcagtt

SEQ ID NO: 228748 - DNA, 19 bp, Homo sapiens
  siRNA target sequence for FBXO7 (NM_012179.2,1810-1828).
caggggtcggccaactgat

SEQ ID NO: 228749 - DNA, 19 bp, Homo sapiens
  siRNA target sequence for FBXO9 (NM_012347.2,91-109).
gctgaggaagattgtcatt

SEQ ID NO: 228750 - DNA, 19 bp, Homo sapiens
  siRNA target sequence for FBXO9 (NM_012347.2,191-209).
gagctcagtggatgtttga

SEQ ID NO: 228751 - DNA, 19 bp, Homo sapiens
  siRNA target sequence for FBXO9 (NM_012347.2,221-239).
gtgtaagctctagcaattt

SEQ ID NO: 228752 - DNA, 19 bp, Homo sapiens
  siRNA target sequence for FBXO9 (NM_012347.2,227-245).
gctctagcaatttagaaaa

SEQ ID NO: 228753 - DNA, 19 bp, Homo sapiens
  siRNA target sequence for FBXO9 (NM_012347.2,228-246).
ctctagcaatttagaaaat

SEQ ID NO: 228754 - DNA, 19 bp, Homo sapiens
  siRNA target sequence for FBXO9 (NM_012347.2,331-349).
gctcgagaactcttcctaa

SEQ ID NO: 228755 - DNA, 19 bp, Homo sapiens
  siRNA target sequence for FBXO9 (NM_012347.2,332-350).
ctcgagaactcttcctaaa

SEQ ID NO: 228756 - DNA, 19 bp, Homo sapiens
  siRNA target sequence for FBXO9 (NM_012347.2,388-406).
gccatcaagttttatcgta

SEQ ID NO: 228757 - DNA, 19 bp, Homo sapiens
  siRNA target sequence for FBXO9 (NM_012347.2,404-422).
gtagggctatgcaacttgt

SEQ ID NO: 228758 - DNA, 19 bp, Homo sapiens
  siRNA target sequence for FBXO9 (NM_012347.2,424-442).
cctgatatagagttcaaga

SEQ ID NO: 228759 - DNA, 19 bp, Homo sapiens
  siRNA target sequence for FBXO9 (NM_012347.2,433-451).
gagttcaagattacttata

SEQ ID NO: 228760 - DNA, 19 bp, Homo sapiens
  siRNA target sequence for FBXO9 (NM_012347.2,474-492).
cgttggaaacagctacatt

SEQ ID NO: 228761 - DNA, 19 bp, Homo sapiens
  siRNA target sequence for FBXO9 (NM_012347.2,562-580).
gagtctgtgcttaaactgt

SEQ ID NO: 228762 - DNA, 19 bp, Homo sapiens
  siRNA target sequence for FBXO9 (NM_012347.2,591-609).
gcttgagagcagtcagatt

SEQ ID NO: 228763 - DNA, 19 bp, Homo sapiens
  siRNA target sequence for FBXO9 (NM_012347.2,600-618).
cagtcagattcacatatca

SEQ ID NO: 228764 - DNA, 19 bp, Homo sapiens
  siRNA target sequence for FBXO9 (NM_012347.2,602-620).
gtcagattcacatatcagt

SEQ ID NO: 228765 - DNA, 19 bp, Homo sapiens
  siRNA target sequence for FBXO9 (NM_012347.2,626-644).
caatggaggtcctgatgta

SEQ ID NO: 228766 - DNA, 19 bp, Homo sapiens
  siRNA target sequence for FBXO9 (NM_012347.2,631-649).
gaggtcctgatgtacatct

SEQ ID NO: 228767 - DNA, 19 bp, Homo sapiens
  siRNA target sequence for FBXO9 (NM_012347.2,779-797).
gaagctgtattaaacttgt

SEQ ID NO: 228768 - DNA, 19 bp, Homo sapiens
  siRNA target sequence for FBXO9 (NM_012347.2,809-827).
cctggagagagatgttttt

SEQ ID NO: 228769 - DNA, 19 bp, Homo sapiens
  siRNA target sequence for FBXO9 (NM_012347.2,834-852).
gcctcgtgttcggtttgat

SEQ ID NO: 228770 - DNA, 19 bp, Homo sapiens
  siRNA target sequence for FBXO9 (NM_012347.2,844-862).
cggtttgatggcgtgtata

SEQ ID NO: 228771 - DNA, 19 bp, Homo sapiens
  siRNA target sequence for FBXO9 (NM_012347.2,850-868).
gatggcgtgtatatcagta

SEQ ID NO: 228772 - DNA, 19 bp, Homo sapiens
  siRNA target sequence for FBXO9 (NM_012347.2,853-871).
ggcgtgtatatcagtaaaa

SEQ ID NO: 228773 - DNA, 19 bp, Homo sapiens
  siRNA target sequence for FBXO9 (NM_012347.2,856-874).
gtgtatatcagtaaaacca

SEQ ID NO: 228774 - DNA, 19 bp, Homo sapiens
  siRNA target sequence for FBXO9 (NM_012347.2,933-951).
ggaatattacaggtacata

SEQ ID NO: 228775 - DNA, 19 bp, Homo sapiens
  siRNA target sequence for FBXO9 (NM_012347.2,942-960).
caggtacataagattcttt

SEQ ID NO: 228776 - DNA, 19 bp, Homo sapiens
  siRNA target sequence for FBXO9 (NM_012347.2,1012-1030).
gttccacgtttaagaacta

SEQ ID NO: 228777 - DNA, 19 bp, Homo sapiens
  siRNA target sequence for FBXO9 (NM_012347.2,1018-1036).
cgtttaagaactaggaata

SEQ ID NO: 228778 - DNA, 19 bp, Homo sapiens
  siRNA target sequence for FBXO9 (NM_012347.2,1038-1056).
caggactgatgcaattcta

SEQ ID NO: 228779 - DNA, 19 bp, Homo sapiens
  siRNA target sequence for FBXO9 (NM_012347.2,1040-1058).
ggactgatgcaattctact

SEQ ID NO: 228780 - DNA, 19 bp, Homo sapiens
  siRNA target sequence for FBXO9 (NM_012347.2,1074-1092).
gtcacaagacacagacaat

SEQ ID NO: 228781 - DNA, 19 bp, Homo sapiens
  siRNA target sequence for FBXO9 (NM_012347.2,1087-1105).
gacaatcagaccaaagtat

SEQ ID NO: 228782 - DNA, 19 bp, Homo sapiens
  siRNA target sequence for FBXO9 (NM_012347.2,1144-1162).
gactataaatacagatatt

SEQ ID NO: 228783 - DNA, 19 bp, Homo sapiens
  siRNA target sequence for FBXO9 (NM_012347.2,1249-1267).
ctcatctggatacatcatt

SEQ ID NO: 228784 - DNA, 19 bp, Homo sapiens
  siRNA target sequence for FBXO9 (NM_012347.2,1251-1269).
catctggatacatcattct

SEQ ID NO: 228785 - DNA, 19 bp, Homo sapiens
  siRNA target sequence for FBXO9 (NM_012347.2,1299-1317).
gactgcagtcagtgctttt

SEQ ID NO: 228786 - DNA, 19 bp, Homo sapiens
  siRNA target sequence for FBXO9 (NM_012347.2,1301-1319).
ctgcagtcagtgcttttga

SEQ ID NO: 228787 - DNA, 19 bp, Homo sapiens
  siRNA target sequence for FBXO9 (NM_012347.2,1318-1336).
gagattgacaagatgtaca

SEQ ID NO: 228788 - DNA, 19 bp, Homo sapiens
  siRNA target sequence for FBXW1B (NM_012300.1,272-290).
gtcagatgtctccagataa

SEQ ID NO: 228789 - DNA, 19 bp, Homo sapiens
  siRNA target sequence for FBXW1B (NM_012300.1,276-294).
gatgtctccagataagtaa

SEQ ID NO: 228790 - DNA, 19 bp, Homo sapiens
  siRNA target sequence for FBXW1B (NM_012300.1,481-499).
gttgcagcgggactttatt

SEQ ID NO: 228791 - DNA, 19 bp, Homo sapiens
  siRNA target sequence for FBXW1B (NM_012300.1,581-599).
gagctggtatgtaaagaat

SEQ ID NO: 228792 - DNA, 19 bp, Homo sapiens
  siRNA target sequence for FBXW1B (NM_012300.1,657-675).
gcactgatcccctatggaa

SEQ ID NO: 228793 - DNA, 19 bp, Homo sapiens
  siRNA target sequence for FBXW1B (NM_012300.1,727-745).
cacagatggccctccaaat

SEQ ID NO: 228794 - DNA, 19 bp, Homo sapiens
  siRNA target sequence for FBXW1B (NM_012300.1,731-749).
gatggccctccaaattcat

SEQ ID NO: 228795 - DNA, 19 bp, Homo sapiens
  siRNA target sequence for FBXW1B (NM_012300.1,740-758).
ccaaattcattttataggt

SEQ ID NO: 228796 - DNA, 19 bp, Homo sapiens
  siRNA target sequence for FBXW1B (NM_012300.1,747-765).
cattttataggtcattata

SEQ ID NO: 228797 - DNA, 19 bp, Homo sapiens
  siRNA target sequence for FBXW1B (NM_012300.1,756-774).
ggtcattatacccaaagat

SEQ ID NO: 228798 - DNA, 19 bp, Homo sapiens
  siRNA target sequence for FBXW1B (NM_012300.1,759-777).
cattatacccaaagattat

SEQ ID NO: 228799 - DNA, 19 bp, Homo sapiens
  siRNA target sequence for FBXW1B (NM_012300.1,778-796).
ccaggatatagagactata

SEQ ID NO: 228800 - DNA, 19 bp, Homo sapiens
  siRNA target sequence for FBXW1B (NM_012300.1,810-828).
ggtgtggacgacacaactt

SEQ ID NO: 228801 - DNA, 19 bp, Homo sapiens
  siRNA target sequence for FBXW1B (NM_012300.1,841-859).
gtgccgctctgaaaatagt

SEQ ID NO: 228802 - DNA, 19 bp, Homo sapiens
  siRNA target sequence for FBXW1B (NM_012300.1,858-876).
gtaaaggtgtctactgttt

SEQ ID NO: 228803 - DNA, 19 bp, Homo sapiens
  siRNA target sequence for FBXW1B (NM_012300.1,878-896).
cagtacgatgatgaaaaaa

SEQ ID NO: 228804 - DNA, 19 bp, Homo sapiens
  siRNA target sequence for FBXW1B (NM_012300.1,880-898).
gtacgatgatgaaaaaatt

SEQ ID NO: 228805 - DNA, 19 bp, Homo sapiens
  siRNA target sequence for FBXW1B (NM_012300.1,901-919).
cagtggcctacgagataat

SEQ ID NO: 228806 - DNA, 19 bp, Homo sapiens
  siRNA target sequence for FBXW1B (NM_012300.1,905-923).
ggcctacgagataattcta

SEQ ID NO: 228807 - DNA, 19 bp, Homo sapiens
  siRNA target sequence for FBXW1B (NM_012300.1,906-924).
gcctacgagataattctat

SEQ ID NO: 228808 - DNA, 19 bp, Homo sapiens
  siRNA target sequence for FBXW1B (NM_012300.1,907-925).
cctacgagataattctatt

SEQ ID NO: 228809 - DNA, 19 bp, Homo sapiens
  siRNA target sequence for FBXW1B (NM_012300.1,908-926).
ctacgagataattctatta

SEQ ID NO: 228810 - DNA, 19 bp, Homo sapiens
  siRNA target sequence for FBXW1B (NM_012300.1,949-967).
ggaatgtttgaaagtgtta

SEQ ID NO: 228811 - DNA, 19 bp, Homo sapiens
  siRNA target sequence for FBXW1B (NM_012300.1,1000-1018).
gtatgatgagcgtgtcatt

SEQ ID NO: 228812 - DNA, 19 bp, Homo sapiens
  siRNA target sequence for FBXW1B (NM_012300.1,1004-1022).
gatgagcgtgtcattgtaa

SEQ ID NO: 228813 - DNA, 19 bp, Homo sapiens
  siRNA target sequence for FBXW1B (NM_012300.1,1066-1084).
gggtgaagttcttaacaca

SEQ ID NO: 228814 - DNA, 19 bp, Homo sapiens
  siRNA target sequence for FBXW1B (NM_012300.1,1068-1086).
gtgaagttcttaacacatt

SEQ ID NO: 228815 - DNA, 19 bp, Homo sapiens
  siRNA target sequence for FBXW1B (NM_012300.1,1225-1243).
ccgggctgccgtcaatgta

SEQ ID NO: 228816 - DNA, 19 bp, Homo sapiens
  siRNA target sequence for FBXW1B (NM_012300.1,1227-1245).
gggctgccgtcaatgtagt

SEQ ID NO: 228817 - DNA, 19 bp, Homo sapiens
  siRNA target sequence for FBXW1B (NM_012300.1,1375-1393).
ggatcgcctggttgttagt

SEQ ID NO: 228818 - DNA, 19 bp, Homo sapiens
  siRNA target sequence for FBXW1B (NM_012300.1,1384-1402).
ggttgttagtggatcatca

SEQ ID NO: 228819 - DNA, 19 bp, Homo sapiens
  siRNA target sequence for FBXW1B (NM_033644.1,195-213).
gctcatgaacacttcagtt

SEQ ID NO: 228820 - DNA, 19 bp, Homo sapiens
  siRNA target sequence for FBXW1B (NM_033644.1,196-214).
ctcatgaacacttcagtta

SEQ ID NO: 228821 - DNA, 19 bp, Homo sapiens
  siRNA target sequence for FBXW1B (NM_033644.1,232-250).
gatgagtccccaaagaaaa

SEQ ID NO: 228822 - DNA, 19 bp, Homo sapiens
  siRNA target sequence for FBXW1B (NM_033644.1,235-253).
gagtccccaaagaaaaata

SEQ ID NO: 228823 - DNA, 19 bp, Homo sapiens
  siRNA target sequence for FBXW1B (NM_033644.1,237-255).
gtccccaaagaaaaatact

SEQ ID NO: 228824 - DNA, 19 bp, Homo sapiens
  siRNA target sequence for FBXW1B (NM_033645.1,134-152).
catcgagctcatgataagt

SEQ ID NO: 228825 - DNA, 19 bp, Homo sapiens
  siRNA target sequence for FBXW1B (NM_033645.1,140-158).
gctcatgataagtaatgga

SEQ ID NO: 228826 - DNA, 19 bp, Homo sapiens
  siRNA target sequence for FBXW2 (NM_012164.2,304-322).
cccctggagctcagttttt

SEQ ID NO: 228827 - DNA, 19 bp, Homo sapiens
  siRNA target sequence for FBXW2 (NM_012164.2,305-323).
ccctggagctcagttttta

SEQ ID NO: 228828 - DNA, 19 bp, Homo sapiens
  siRNA target sequence for FBXW2 (NM_012164.2,335-353).
ggctcgatcctcagacttt

SEQ ID NO: 228829 - DNA, 19 bp, Homo sapiens
  siRNA target sequence for FBXW2 (NM_012164.2,336-354).
gctcgatcctcagacttta

SEQ ID NO: 228830 - DNA, 19 bp, Homo sapiens
  siRNA target sequence for FBXW2 (NM_012164.2,359-377).
catgctgcctcgtctctaa

SEQ ID NO: 228831 - DNA, 19 bp, Homo sapiens
  siRNA target sequence for FBXW2 (NM_012164.2,374-392).
ctaaacagtggaataaggt

SEQ ID NO: 228832 - DNA, 19 bp, Homo sapiens
  siRNA target sequence for FBXW2 (NM_012164.2,381-399).
gtggaataaggtgataagt

SEQ ID NO: 228833 - DNA, 19 bp, Homo sapiens
  siRNA target sequence for FBXW2 (NM_012164.2,414-432).
gtggcagactgcatgtaaa

SEQ ID NO: 228834 - DNA, 19 bp, Homo sapiens
  siRNA target sequence for FBXW2 (NM_012164.2,416-434).
ggcagactgcatgtaaaaa

SEQ ID NO: 228835 - DNA, 19 bp, Homo sapiens
  siRNA target sequence for FBXW2 (NM_012164.2,443-461).
ggcagatagatgattctgt

SEQ ID NO: 228836 - DNA, 19 bp, Homo sapiens
  siRNA target sequence for FBXW2 (NM_012164.2,474-492).
gcactggaagaaggtttat

SEQ ID NO: 228837 - DNA, 19 bp, Homo sapiens
  siRNA target sequence for FBXW2 (NM_012164.2,537-555).
ctttgaaacctcgtcatta

SEQ ID NO: 228838 - DNA, 19 bp, Homo sapiens
  siRNA target sequence for FBXW2 (NM_012164.2,569-587).
ccagagtgtatgcacttta

SEQ ID NO: 228839 - DNA, 19 bp, Homo sapiens
  siRNA target sequence for FBXW2 (NM_012164.2,572-590).
gagtgtatgcactttacta

SEQ ID NO: 228840 - DNA, 19 bp, Homo sapiens
  siRNA target sequence for FBXW2 (NM_012164.2,574-592).
gtgtatgcactttactaca

SEQ ID NO: 228841 - DNA, 19 bp, Homo sapiens
  siRNA target sequence for FBXW2 (NM_012164.2,651-669).
cacagggcagtgcgtttat

SEQ ID NO: 228842 - DNA, 19 bp, Homo sapiens
  siRNA target sequence for FBXW2 (NM_012164.2,686-704).
cttgtgcagcggtgaagtt

SEQ ID NO: 228843 - DNA, 19 bp, Homo sapiens
  siRNA target sequence for FBXW2 (NM_012164.2,689-707).
gtgcagcggtgaagtttga

SEQ ID NO: 228844 - DNA, 19 bp, Homo sapiens
  siRNA target sequence for FBXW2 (NM_012164.2,815-833).
gcgtggactacaatgatga

SEQ ID NO: 228845 - DNA, 19 bp, Homo sapiens
  siRNA target sequence for FBXW2 (NM_012164.2,816-834).
cgtggactacaatgatgaa

SEQ ID NO: 228846 - DNA, 19 bp, Homo sapiens
  siRNA target sequence for FBXW2 (NM_012164.2,988-1006).
ggagactacatcctcttaa

SEQ ID NO: 228847 - DNA, 19 bp, Homo sapiens
  siRNA target sequence for FBXW2 (NM_012164.2,999-1017).
cctcttaagtgcagacaaa

SEQ ID NO: 228848 - DNA, 19 bp, Homo sapiens
  siRNA target sequence for FBXW2 (NM_012164.2,1042-1060).
gggagagaaatcaactgta

SEQ ID NO: 228849 - DNA, 19 bp, Homo sapiens
  siRNA target sequence for FBXW2 (NM_012164.2,1062-1080).
gtgcttaaagacattgtct

SEQ ID NO: 228850 - DNA, 19 bp, Homo sapiens
  siRNA target sequence for FBXW2 (NM_012164.2,1107-1125).
gcagccaagacttcatttt

SEQ ID NO: 228851 - DNA, 19 bp, Homo sapiens
  siRNA target sequence for FBXW2 (NM_012164.2,1203-1221).
catcaagactcctgagata

SEQ ID NO: 228852 - DNA, 19 bp, Homo sapiens
  siRNA target sequence for FBXW2 (NM_012164.2,1300-1318).
cggacagagagcctgatta

SEQ ID NO: 228853 - DNA, 19 bp, Homo sapiens
  siRNA target sequence for FLJ11011 (NM_018299.1,107-125).
cacagtggattgtagacat

SEQ ID NO: 228854 - DNA, 19 bp, Homo sapiens
  siRNA target sequence for FLJ11011 (NM_018299.1,185-203).
gtagtcgatatccttttga

SEQ ID NO: 228855 - DNA, 19 bp, Homo sapiens
  siRNA target sequence for FLJ11011 (NM_018299.1,204-222).
ctctcctcaggtcatgttt

SEQ ID NO: 228856 - DNA, 19 bp, Homo sapiens
  siRNA target sequence for FLJ11011 (NM_018299.1,241-259).
gttcatcctcatgtttata

SEQ ID NO: 228857 - DNA, 19 bp, Homo sapiens
  siRNA target sequence for FLJ11011 (NM_018299.1,244-262).
catcctcatgtttatagca

SEQ ID NO: 228858 - DNA, 19 bp, Homo sapiens
  siRNA target sequence for FLJ11011 (NM_018299.1,308-326).
cgctctcagtccaatcagt

SEQ ID NO: 228859 - DNA, 19 bp, Homo sapiens
  siRNA target sequence for FLJ11011 (NM_018299.1,309-327).
gctctcagtccaatcagtt

SEQ ID NO: 228860 - DNA, 19 bp, Homo sapiens
  siRNA target sequence for FLJ11011 (NM_018299.1,312-330).
ctcagtccaatcagtttgt

SEQ ID NO: 228861 - DNA, 19 bp, Homo sapiens
  siRNA target sequence for FLJ11011 (NM_018299.1,314-332).
cagtccaatcagtttgtct

SEQ ID NO: 228862 - DNA, 19 bp, Homo sapiens
  siRNA target sequence for FLJ11011 (NM_018299.1,316-334).
gtccaatcagtttgtctta

SEQ ID NO: 228863 - DNA, 19 bp, Homo sapiens
  siRNA target sequence for FLJ11011 (NM_018299.1,369-387).
gagacgaccaccggataat

SEQ ID NO: 228864 - DNA, 19 bp, Homo sapiens
  siRNA target sequence for FLJ11011 (NM_018299.1,374-392).
gaccaccggataattcttt

SEQ ID NO: 228865 - DNA, 19 bp, Homo sapiens
  siRNA target sequence for FLJ11011 (NM_018299.1,377-395).
caccggataattcttttta

SEQ ID NO: 228866 - DNA, 19 bp, Homo sapiens
  siRNA target sequence for FLJ11011 (NM_018299.1,397-415).
gtgcgaacatgtaacaaga

SEQ ID NO: 228867 - DNA, 19 bp, Homo sapiens
  siRNA target sequence for FLJ11011 (NM_018299.1,399-417).
gcgaacatgtaacaagaat

SEQ ID NO: 228868 - DNA, 19 bp, Homo sapiens
  siRNA target sequence for FLJ11011 (NM_018299.1,435-453).
gtggtatcatgatgatact

SEQ ID NO: 228869 - DNA, 19 bp, Homo sapiens
  siRNA target sequence for FLJ11011 (NM_018299.1,438-456).
gtatcatgatgatacttgt

SEQ ID NO: 228870 - DNA, 19 bp, Homo sapiens
  siRNA target sequence for FLJ13855 (NM_023079.2,360-378).
gttcgttgtacctgatact

SEQ ID NO: 228871 - DNA, 19 bp, Homo sapiens
  siRNA target sequence for FLJ13855 (NM_023079.2,363-381).
cgttgtacctgatactgtt

SEQ ID NO: 228872 - DNA, 19 bp, Homo sapiens
  siRNA target sequence for FLJ13855 (NM_023079.2,377-395).
ctgttgacatgactaagat

SEQ ID NO: 228873 - DNA, 19 bp, Homo sapiens
  siRNA target sequence for FLJ13855 (NM_023079.2,414-432).
cccatttgacactccttat

SEQ ID NO: 228874 - DNA, 19 bp, Homo sapiens
  siRNA target sequence for FLJ13855 (NM_023079.2,487-505).
ccacctcgggtcaaactga

SEQ ID NO: 228875 - DNA, 19 bp, Homo sapiens
  siRNA target sequence for FLJ13855 (NM_023079.2,488-506).
cacctcgggtcaaactgat

SEQ ID NO: 228876 - DNA, 19 bp, Homo sapiens
  siRNA target sequence for FLJ13855 (NM_023079.2,493-511).
cgggtcaaactgatgacaa

SEQ ID NO: 228877 - DNA, 19 bp, Homo sapiens
  siRNA target sequence for FLJ13855 (NM_023079.2,556-574).
gggaaagtctgcttgagta

SEQ ID NO: 228878 - DNA, 19 bp, Homo sapiens
  siRNA target sequence for FLJ13855 (NM_023079.2,656-674).
ctgagaacccctatcacaa

SEQ ID NO: 228879 - DNA, 19 bp, Homo sapiens
  siRNA target sequence for FLJ13855 (NM_023079.2,768-786).
catgatggaaggaaagtgt

SEQ ID NO: 228880 - DNA, 19 bp, Homo sapiens
  siRNA target sequence for FLJ13855 (NM_023079.2,874-892).
caccttcaaggccaaacta

SEQ ID NO: 228881 - DNA, 19 bp, Homo sapiens
  siRNA target sequence for FLJ13855 (NM_023079.2,945-963).
gatgcgcctgggactgata

SEQ ID NO: 228882 - DNA, 19 bp, Homo sapiens
  siRNA target sequence for FLJ13855 (NM_023079.2,981-999).
gaggctccataatgagaat

SEQ ID NO: 228883 - DNA, 19 bp, Homo sapiens
  siRNA target sequence for FLJ25157 (NM_152653.1,437-455).
ccccaggatctgtctatga

SEQ ID NO: 228884 - DNA, 19 bp, Homo sapiens
  siRNA target sequence for FLJ25157 (NM_152653.1,463-481).
gtgttctttcttgacatta

SEQ ID NO: 228885 - DNA, 19 bp, Homo sapiens
  siRNA target sequence for FLJ25157 (NM_152653.1,488-506).
caccagactatccgtttaa

SEQ ID NO: 228886 - DNA, 19 bp, Homo sapiens
  siRNA target sequence for FLJ25157 (NM_152653.1,501-519).
gtttaaaccccctaaggtt

SEQ ID NO: 228887 - DNA, 19 bp, Homo sapiens
  siRNA target sequence for FLJ25157 (NM_152653.1,516-534).
ggttaccttccgaacaaga

SEQ ID NO: 228888 - DNA, 19 bp, Homo sapiens
  siRNA target sequence for FLJ25157 (NM_152653.1,517-535).
gttaccttccgaacaagaa

SEQ ID NO: 228889 - DNA, 19 bp, Homo sapiens
  siRNA target sequence for FLJ25157 (NM_152653.1,521-539).
ccttccgaacaagaatcta

SEQ ID NO: 228890 - DNA, 19 bp, Homo sapiens
  siRNA target sequence for FLJ25157 (NM_152653.1,567-585).
gatctgtctggacatctta

SEQ ID NO: 228891 - DNA, 19 bp, Homo sapiens
  siRNA target sequence for FLJ25157 (NM_152653.1,572-590).
gtctggacatcttaaagga

SEQ ID NO: 228892 - DNA, 19 bp, Homo sapiens
  siRNA target sequence for FLJ25157 (NM_152653.1,683-701).
gcatcgccacacagtacat

SEQ ID NO: 228893 - DNA, 19 bp, Homo sapiens
  siRNA target sequence for FTS (NM_022476.1,310-328).
cataactaagcctacatct

SEQ ID NO: 228894 - DNA, 19 bp, Homo sapiens
  siRNA target sequence for FTS (NM_022476.1,394-412).
ctctcttcttgcagaattt

SEQ ID NO: 228895 - DNA, 19 bp, Homo sapiens
  siRNA target sequence for FTS (NM_022476.1,445-463).
ctatgtgcagccatcttat

SEQ ID NO: 228896 - DNA, 19 bp, Homo sapiens
  siRNA target sequence for FTS (NM_022476.1,459-477).
cttatcgctctgcattaat

SEQ ID NO: 228897 - DNA, 19 bp, Homo sapiens
  siRNA target sequence for FTS (NM_022476.1,515-533).
caagatggcgtatttaagt

SEQ ID NO: 228898 - DNA, 19 bp, Homo sapiens
  siRNA target sequence for FTS (NM_022476.1,518-536).
gatggcgtatttaagttta

SEQ ID NO: 228899 - DNA, 19 bp, Homo sapiens
  siRNA target sequence for FTS (NM_022476.1,575-593).
ccacgcttggtgttcgata

SEQ ID NO: 228900 - DNA, 19 bp, Homo sapiens
  siRNA target sequence for FTS (NM_022476.1,576-594).
cacgcttggtgttcgatat

SEQ ID NO: 228901 - DNA, 19 bp, Homo sapiens
  siRNA target sequence for FTS (NM_022476.1,580-598).
cttggtgttcgatattcct

SEQ ID NO: 228902 - DNA, 19 bp, Homo sapiens
  siRNA target sequence for FTS (NM_022476.1,601-619).
ctttcacccgctagttgat

SEQ ID NO: 228903 - DNA, 19 bp, Homo sapiens
  siRNA target sequence for FTS (NM_022476.1,641-659).
gtgaagagagcatttgcaa

SEQ ID NO: 228904 - DNA, 19 bp, Homo sapiens
  siRNA target sequence for FTS (NM_022476.1,663-681).
ggaggcggaaccataatca

SEQ ID NO: 228905 - DNA, 19 bp, Homo sapiens
  siRNA target sequence for FTS (NM_022476.1,664-682).
gaggcggaaccataatcat

SEQ ID NO: 228906 - DNA, 19 bp, Homo sapiens
  siRNA target sequence for FTS (NM_022476.1,666-684).
ggcggaaccataatcatat

SEQ ID NO: 228907 - DNA, 19 bp, Homo sapiens
  siRNA target sequence for FTS (NM_022476.1,667-685).
gcggaaccataatcatatt

SEQ ID NO: 228908 - DNA, 19 bp, Homo sapiens
  siRNA target sequence for FTS (NM_022476.1,668-686).
cggaaccataatcatattt

SEQ ID NO: 228909 - DNA, 19 bp, Homo sapiens
  siRNA target sequence for FTS (NM_022476.1,680-698).
catatttggcaggtattaa

SEQ ID NO: 228910 - DNA, 19 bp, Homo sapiens
  siRNA target sequence for FTS (NM_022476.1,711-729).
gagttttctacaagattga

SEQ ID NO: 228911 - DNA, 19 bp, Homo sapiens
  siRNA target sequence for FTS (NM_022476.1,754-772).
ggctgcagtactgtatgaa

SEQ ID NO: 228912 - DNA, 19 bp, Homo sapiens
  siRNA target sequence for FTS (NM_022476.1,755-773).
gctgcagtactgtatgaaa

SEQ ID NO: 228913 - DNA, 19 bp, Homo sapiens
  siRNA target sequence for FTS (NM_022476.1,756-774).
ctgcagtactgtatgaaaa

SEQ ID NO: 228914 - DNA, 19 bp, Homo sapiens
  siRNA target sequence for FTS (NM_022476.1,820-838).
gtgcactgctcgtttgttt

SEQ ID NO: 228915 - DNA, 19 bp, Homo sapiens
  siRNA target sequence for FTS (NM_022476.1,822-840).
gcactgctcgtttgtttga

SEQ ID NO: 228916 - DNA, 19 bp, Homo sapiens
  siRNA target sequence for FTS (NM_022476.1,835-853).
gtttgaccaacctaaaata

SEQ ID NO: 228917 - DNA, 19 bp, Homo sapiens
  siRNA target sequence for FTS (NM_022476.1,857-875).
gacccctatgcaattagct

SEQ ID NO: 228918 - DNA, 19 bp, Homo sapiens
  siRNA target sequence for FTS (NM_022476.1,859-877).
cccctatgcaattagcttt

SEQ ID NO: 228919 - DNA, 19 bp, Homo sapiens
  siRNA target sequence for HACE1 (NM_020771.2,249-267).
gagcgatggagcaactcaa

SEQ ID NO: 228920 - DNA, 19 bp, Homo sapiens
  siRNA target sequence for HACE1 (NM_020771.2,304-322).
ggagttgcccgaggataat

SEQ ID NO: 228921 - DNA, 19 bp, Homo sapiens
  siRNA target sequence for HACE1 (NM_020771.2,310-328).
gcccgaggataatgaaact

SEQ ID NO: 228922 - DNA, 19 bp, Homo sapiens
  siRNA target sequence for HACE1 (NM_020771.2,370-388).
caggtctgtttctgaacta

SEQ ID NO: 228923 - DNA, 19 bp, Homo sapiens
  siRNA target sequence for HACE1 (NM_020771.2,377-395).
gtttctgaactactatcaa

SEQ ID NO: 228924 - DNA, 19 bp, Homo sapiens
  siRNA target sequence for HACE1 (NM_020771.2,383-401).
gaactactatcaaattcaa

SEQ ID NO: 228925 - DNA, 19 bp, Homo sapiens
  siRNA target sequence for HACE1 (NM_020771.2,386-404).
ctactatcaaattcaaaat

SEQ ID NO: 228926 - DNA, 19 bp, Homo sapiens
  siRNA target sequence for HACE1 (NM_020771.2,419-437).
gcattcggacgtgtgaaaa

SEQ ID NO: 228927 - DNA, 19 bp, Homo sapiens
  siRNA target sequence for HACE1 (NM_020771.2,465-483).
gtggatcggtggaatgctt

SEQ ID NO: 228928 - DNA, 19 bp, Homo sapiens
  siRNA target sequence for HACE1 (NM_020771.2,471-489).
cggtggaatgcttggtttt

SEQ ID NO: 228929 - DNA, 19 bp, Homo sapiens
  siRNA target sequence for HACE1 (NM_020771.2,534-552).
gctgtacaccccttcattt

SEQ ID NO: 228930 - DNA, 19 bp, Homo sapiens
  siRNA target sequence for HACE1 (NM_020771.2,566-584).
gggcagaagaaatgtatga

SEQ ID NO: 228931 - DNA, 19 bp, Homo sapiens
  siRNA target sequence for HACE1 (NM_020771.2,604-622).
cgctgatgtcaacatttgt

SEQ ID NO: 228932 - DNA, 19 bp, Homo sapiens
  siRNA target sequence for HACE1 (NM_020771.2,632-650).
ggccttacagcaatacatt

SEQ ID NO: 228933 - DNA, 19 bp, Homo sapiens
  siRNA target sequence for HACE1 (NM_020771.2,661-679).
gaatgggcggacagaacta

SEQ ID NO: 228934 - DNA, 19 bp, Homo sapiens
  siRNA target sequence for HACE1 (NM_020771.2,828-846).
caggagcaactccattgta

SEQ ID NO: 228935 - DNA, 19 bp, Homo sapiens
  siRNA target sequence for HACE1 (NM_020771.2,830-848).
ggagcaactccattgtact

SEQ ID NO: 228936 - DNA, 19 bp, Homo sapiens
  siRNA target sequence for HACE1 (NM_020771.2,831-849).
gagcaactccattgtactt

SEQ ID NO: 228937 - DNA, 19 bp, Homo sapiens
  siRNA target sequence for HACE1 (NM_020771.2,876-894).
cagcacagatcctactatt

SEQ ID NO: 228938 - DNA, 19 bp, Homo sapiens
  siRNA target sequence for HACE1 (NM_020771.2,927-945).
gagtaactcctctggattt

SEQ ID NO: 228939 - DNA, 19 bp, Homo sapiens
  siRNA target sequence for HACE1 (NM_020771.2,929-947).
gtaactcctctggatttat

SEQ ID NO: 228940 - DNA, 19 bp, Homo sapiens
  siRNA target sequence for HACE1 (NM_020771.2,975-993).
gtgaagtattaattcaata

SEQ ID NO: 228941 - DNA, 19 bp, Homo sapiens
  siRNA target sequence for HACE1 (NM_020771.2,995-1013).
cacccgaggctttttcaga

SEQ ID NO: 228942 - DNA, 19 bp, Homo sapiens
  siRNA target sequence for HACE1 (NM_020771.2,999-1017).
cgaggctttttcagactat

SEQ ID NO: 228943 - DNA, 19 bp, Homo sapiens
  siRNA target sequence for HACE1 (NM_020771.2,1002-1020).
ggctttttcagactattat

SEQ ID NO: 228944 - DNA, 19 bp, Homo sapiens
  siRNA target sequence for HACE1 (NM_020771.2,1003-1021).
gctttttcagactattatt

SEQ ID NO: 228945 - DNA, 19 bp, Homo sapiens
  siRNA target sequence for HACE1 (NM_020771.2,1040-1058).
gacctccgagaaaacatgt

SEQ ID NO: 228946 - DNA, 19 bp, Homo sapiens
  siRNA target sequence for HACE1 (NM_020771.2,1042-1060).
cctccgagaaaacatgtta

SEQ ID NO: 228947 - DNA, 19 bp, Homo sapiens
  siRNA target sequence for HACE1 (NM_020771.2,1098-1116).
gccagtacctaaagattct

SEQ ID NO: 228948 - DNA, 19 bp, Homo sapiens
  siRNA target sequence for HACE1 (NM_020771.2,1102-1120).
gtacctaaagattctaaca

SEQ ID NO: 228949 - DNA, 19 bp, Homo sapiens
  siRNA target sequence for HACE1 (NM_020771.2,1140-1158).
caacaaatggtcataaact

SEQ ID NO: 228950 - DNA, 19 bp, Homo sapiens
  siRNA target sequence for HACE1 (NM_020771.2,1159-1177).
gcttagcctctctagcaat

SEQ ID NO: 228951 - DNA, 19 bp, Homo sapiens
  siRNA target sequence for HACE1 (NM_020771.2,1160-1178).
cttagcctctctagcaatt

SEQ ID NO: 228952 - DNA, 19 bp, Homo sapiens
  siRNA target sequence for HACE1 (NM_020771.2,1164-1182).
gcctctctagcaattatga

SEQ ID NO: 228953 - DNA, 19 bp, Homo sapiens
  siRNA target sequence for HACE1 (NM_020771.2,1165-1183).
cctctctagcaattatgat

SEQ ID NO: 228954 - DNA, 19 bp, Homo sapiens
  siRNA target sequence for HACE1 (NM_020771.2,1252-1270).
ccccagtaatggaattgat

SEQ ID NO: 228955 - DNA, 19 bp, Homo sapiens
  siRNA target sequence for HACE1 (NM_020771.2,1273-1291).
gggctacaatgggaataaa

SEQ ID NO: 228956 - DNA, 19 bp, Homo sapiens
  siRNA target sequence for HACE1 (NM_020771.2,1327-1345).
gctttggcactcgttagat

SEQ ID NO: 228957 - DNA, 19 bp, Homo sapiens
  siRNA target sequence for HACE1 (NM_020771.2,1481-1499).
gggagctatgaaaatctgt

SEQ ID NO: 228958 - DNA, 19 bp, Homo sapiens
  siRNA target sequence for HACE1 (NM_020771.2,1503-1521).
ctggcacaagggaatctaa

SEQ ID NO: 228959 - DNA, 19 bp, Homo sapiens
  siRNA target sequence for HACE1 (NM_020771.2,1556-1574).
gcagattgtcaggatgtta

SEQ ID NO: 228960 - DNA, 19 bp, Homo sapiens
  siRNA target sequence for HACE1 (NM_020771.2,1557-1575).
cagattgtcaggatgttat

SEQ ID NO: 228961 - DNA, 19 bp, Homo sapiens
  siRNA target sequence for HACE1 (NM_020771.2,1567-1585).
ggatgttatttctatgaca

SEQ ID NO: 228962 - DNA, 19 bp, Homo sapiens
  siRNA target sequence for HACE1 (NM_020771.2,1591-1609).
ccggctaagtgctgtcatt

SEQ ID NO: 228963 - DNA, 19 bp, Homo sapiens
  siRNA target sequence for HACE1 (NM_020771.2,1599-1617).
gtgctgtcattcaagcttt

SEQ ID NO: 228964 - DNA, 19 bp, Homo sapiens
  siRNA target sequence for HACE1 (NM_020771.2,1639-1657).
gatgcctccgggaatgact

SEQ ID NO: 228965 - DNA, 19 bp, Homo sapiens
  siRNA target sequence for HACE1 (NM_020771.2,1654-1672).
gacttcacctcgtttcatt

SEQ ID NO: 228966 - DNA, 19 bp, Homo sapiens
  siRNA target sequence for HACE1 (NM_020771.2,1659-1677).
cacctcgtttcattgaatt

SEQ ID NO: 228967 - DNA, 19 bp, Homo sapiens
  siRNA target sequence for HACE1 (NM_020771.2,1662-1680).
ctcgtttcattgaatttgt

SEQ ID NO: 228968 - DNA, 19 bp, Homo sapiens
  siRNA target sequence for HACE1 (NM_020771.2,1664-1682).
cgtttcattgaatttgtct

SEQ ID NO: 228969 - DNA, 19 bp, Homo sapiens
  siRNA target sequence for HACE1 (NM_020771.2,1681-1699).
ctgcaaacatgatgaagtt

SEQ ID NO: 228970 - DNA, 19 bp, Homo sapiens
  siRNA target sequence for HACE1 (NM_020771.2,1766-1784).
cctgagttgatgtcaagat

SEQ ID NO: 228971 - DNA, 19 bp, Homo sapiens
  siRNA target sequence for HACE1 (NM_020771.2,1767-1785).
ctgagttgatgtcaagatt

SEQ ID NO: 228972 - DNA, 19 bp, Homo sapiens
  siRNA target sequence for HACE1 (NM_020771.2,1782-1800).
gattcatgcatatcataaa

SEQ ID NO: 228973 - DNA, 19 bp, Homo sapiens
  siRNA target sequence for HACE1 (NM_020771.2,1824-1842).
gtgaatggttctatgaaca

SEQ ID NO: 228974 - DNA, 19 bp, Homo sapiens
  siRNA target sequence for HACE1 (NM_020771.2,1831-1849).
gttctatgaacatttgcat

SEQ ID NO: 228975 - DNA, 19 bp, Homo sapiens
  siRNA target sequence for HACE1 (NM_020771.2,1853-1871).
ggacagccagattcagata

SEQ ID NO: 228976 - DNA, 19 bp, Homo sapiens
  siRNA target sequence for HACE1 (NM_020771.2,1876-1894).
gcacaggccagtgaatgaa

SEQ ID NO: 228977 - DNA, 19 bp, Homo sapiens
  siRNA target sequence for HACE1 (NM_020771.2,1907-1925).
ctggttcacagagattcta

SEQ ID NO: 228978 - DNA, 19 bp, Homo sapiens
  siRNA target sequence for HACE1 (NM_020771.2,2032-2050).
gcgtgagtggtttgatatt

SEQ ID NO: 228979 - DNA, 19 bp, Homo sapiens
  siRNA target sequence for HACE1 (NM_020771.2,2053-2071).
gtccaatgagatagtcaat

SEQ ID NO: 228980 - DNA, 19 bp, Homo sapiens
  siRNA target sequence for HACE1 (NM_020771.2,2062-2080).
gatagtcaatcctgattat

SEQ ID NO: 228981 - DNA, 19 bp, Homo sapiens
  siRNA target sequence for HACE1 (NM_020771.2,2066-2084).
gtcaatcctgattatgcat

SEQ ID NO: 228982 - DNA, 19 bp, Homo sapiens
  siRNA target sequence for HACE1 (NM_020771.2,2100-2118).
ctgatggaacaacttttca

SEQ ID NO: 228983 - DNA, 19 bp, Homo sapiens
  siRNA target sequence for HACE1 (NM_020771.2,2119-2137).
gcctaatagcaactcttat

SEQ ID NO: 228984 - DNA, 19 bp, Homo sapiens
  siRNA target sequence for HACE1 (NM_020771.2,2121-2139).
ctaatagcaactcttatgt

SEQ ID NO: 228985 - DNA, 19 bp, Homo sapiens
  siRNA target sequence for HACE1 (NM_020771.2,2128-2146).
caactcttatgtaaatcct

SEQ ID NO: 228986 - DNA, 19 bp, Homo sapiens
  siRNA target sequence for HACE1 (NM_020771.2,2262-2280).
ctgtaaattaccaagatgt

SEQ ID NO: 228987 - DNA, 19 bp, Homo sapiens
  siRNA target sequence for HACE1 (NM_020771.2,2294-2312).
ccagaatatgcgaaaaatt

SEQ ID NO: 228988 - DNA, 19 bp, Homo sapiens
  siRNA target sequence for HACE1 (NM_020771.2,2304-2322).
cgaaaaatttgcaatggat

SEQ ID NO: 228989 - DNA, 19 bp, Homo sapiens
  siRNA target sequence for HACE1 (NM_020771.2,2348-2366).
ggtctagaactaacttttt

SEQ ID NO: 228990 - DNA, 19 bp, Homo sapiens
  siRNA target sequence for HACE1 (NM_020771.2,2418-2436).
ggggtgggagtattcttgt

SEQ ID NO: 228991 - DNA, 19 bp, Homo sapiens
  siRNA target sequence for HACE1 (NM_020771.2,2432-2450).
cttgtgacacaaaataata

SEQ ID NO: 228992 - DNA, 19 bp, Homo sapiens
  siRNA target sequence for HACE1 (NM_020771.2,2456-2474).
gagtacgtccagcttgtta

SEQ ID NO: 228993 - DNA, 19 bp, Homo sapiens
  siRNA target sequence for HACE1 (NM_020771.2,2458-2476).
gtacgtccagcttgttact

SEQ ID NO: 228994 - DNA, 19 bp, Homo sapiens
  siRNA target sequence for HACE1 (NM_020771.2,2496-2514).
ccattcagcctcagatcaa

SEQ ID NO: 228995 - DNA, 19 bp, Homo sapiens
  siRNA target sequence for HACE1 (NM_020771.2,2550-2568).
cctccctcatacagctttt

SEQ ID NO: 228996 - DNA, 19 bp, Homo sapiens
  siRNA target sequence for HACE1 (NM_020771.2,2551-2569).
ctccctcatacagcttttt

SEQ ID NO: 228997 - DNA, 19 bp, Homo sapiens
  siRNA target sequence for HACE1 (NM_020771.2,2553-2571).
ccctcatacagctttttga

SEQ ID NO: 228998 - DNA, 19 bp, Homo sapiens
  siRNA target sequence for HACE1 (NM_020771.2,2554-2572).
cctcatacagctttttgat

SEQ ID NO: 228999 - DNA, 19 bp, Homo sapiens
  siRNA target sequence for HACE1 (NM_020771.2,2615-2633).
gatgtgagtgattggataa

SEQ ID NO: 229000 - DNA, 19 bp, Homo sapiens
  siRNA target sequence for HACE1 (NM_020771.2,2719-2737).
ggagagagttcttctctta

SEQ ID NO: 229001 - DNA, 19 bp, Homo sapiens
  siRNA target sequence for HACE1 (NM_020771.2,2765-2783).
ccacatggtgggtttgcta

SEQ ID NO: 229002 - DNA, 19 bp, Homo sapiens
  siRNA target sequence for HACE1 (NM_020771.2,2766-2784).
cacatggtgggtttgctaa

SEQ ID NO: 229003 - DNA, 19 bp, Homo sapiens
  siRNA target sequence for HACE1 (NM_020771.2,2768-2786).
catggtgggtttgctaata

SEQ ID NO: 229004 - DNA, 19 bp, Homo sapiens
  siRNA target sequence for HACE1 (NM_020771.2,2801-2819).
ggattgcaaaactttacaa

SEQ ID NO: 229005 - DNA, 19 bp, Homo sapiens
  siRNA target sequence for HACE1 (NM_020771.2,2802-2820).
gattgcaaaactttacaat

SEQ ID NO: 229006 - DNA, 19 bp, Homo sapiens
  siRNA target sequence for HACE1 (NM_020771.2,2821-2839).
cgctgctgtgccatatact

SEQ ID NO: 229007 - DNA, 19 bp, Homo sapiens
  siRNA target sequence for HACE1 (NM_020771.2,2939-2957).
cattgtggcagctatggtt

SEQ ID NO: 229008 - DNA, 19 bp, Homo sapiens
  siRNA target sequence for HACE1 (NM_020771.2,2945-2963).
ggcagctatggttacacaa

SEQ ID NO: 229009 - DNA, 19 bp, Homo sapiens
  siRNA target sequence for HACE1 (NM_020771.2,2946-2964).
gcagctatggttacacaat

SEQ ID NO: 229010 - DNA, 19 bp, Homo sapiens
  siRNA target sequence for HECTD1 (NM_015382.1,403-421).
cccttgaacagctatgcat

SEQ ID NO: 229011 - DNA, 19 bp, Homo sapiens
  siRNA target sequence for HECTD1 (NM_015382.1,440-458).
caacgtggatcgttgtttt

SEQ ID NO: 229012 - DNA, 19 bp, Homo sapiens
  siRNA target sequence for HECTD1 (NM_015382.1,443-461).
cgtggatcgttgttttgaa

SEQ ID NO: 229013 - DNA, 19 bp, Homo sapiens
  siRNA target sequence for HECTD1 (NM_015382.1,444-462).
gtggatcgttgttttgaaa

SEQ ID NO: 229014 - DNA, 19 bp, Homo sapiens
  siRNA target sequence for HECTD1 (NM_015382.1,446-464).
ggatcgttgttttgaaaca

SEQ ID NO: 229015 - DNA, 19 bp, Homo sapiens
  siRNA target sequence for HECTD1 (NM_015382.1,542-560).
gacagcccgtgccataaca

SEQ ID NO: 229016 - DNA, 19 bp, Homo sapiens
  siRNA target sequence for HECTD1 (NM_015382.1,544-562).
cagcccgtgccataacata

SEQ ID NO: 229017 - DNA, 19 bp, Homo sapiens
  siRNA target sequence for HECTD1 (NM_015382.1,547-565).
cccgtgccataacatacta

SEQ ID NO: 229018 - DNA, 19 bp, Homo sapiens
  siRNA target sequence for HECTD1 (NM_015382.1,570-588).
gatgtatctgcggaatgta

SEQ ID NO: 229019 - DNA, 19 bp, Homo sapiens
  siRNA target sequence for HECTD1 (NM_015382.1,603-621).
ggggtagatggagctataa

SEQ ID NO: 229020 - DNA, 19 bp, Homo sapiens
  siRNA target sequence for HECTD1 (NM_015382.1,604-622).
gggtagatggagctataaa

SEQ ID NO: 229021 - DNA, 19 bp, Homo sapiens
  siRNA target sequence for HECTD1 (NM_015382.1,637-655).
gtttggttgtagttgaact

SEQ ID NO: 229022 - DNA, 19 bp, Homo sapiens
  siRNA target sequence for HECTD1 (NM_015382.1,642-660).
gttgtagttgaacttaaca

SEQ ID NO: 229023 - DNA, 19 bp, Homo sapiens
  siRNA target sequence for HECTD1 (NM_015382.1,662-680).
caggactagcagagactta

SEQ ID NO: 229024 - DNA, 19 bp, Homo sapiens
  siRNA target sequence for HECTD1 (NM_015382.1,684-702).
gaacagtgtgtaaaggtat

SEQ ID NO: 229025 - DNA, 19 bp, Homo sapiens
  siRNA target sequence for HECTD1 (NM_015382.1,741-759).
gaggctggtggtttgaatt

SEQ ID NO: 229026 - DNA, 19 bp, Homo sapiens
  siRNA target sequence for HECTD1 (NM_015382.1,784-802).
gtggacatctagttcataa

SEQ ID NO: 229027 - DNA, 19 bp, Homo sapiens
  siRNA target sequence for HECTD1 (NM_015382.1,885-903).
gtagaatctctgtctagtt

SEQ ID NO: 229028 - DNA, 19 bp, Homo sapiens
  siRNA target sequence for HECTD1 (NM_015382.1,888-906).
gaatctctgtctagtttat

SEQ ID NO: 229029 - DNA, 19 bp, Homo sapiens
  siRNA target sequence for HECTD1 (NM_015382.1,939-957).
gctctgcgatgctttgcat

SEQ ID NO: 229030 - DNA, 19 bp, Homo sapiens
  siRNA target sequence for HECTD1 (NM_015382.1,1000-1018).
cattagccaagcatggatt

SEQ ID NO: 229031 - DNA, 19 bp, Homo sapiens
  siRNA target sequence for HECTD1 (NM_015382.1,1120-1138).
ccactgcagattccaaatt

SEQ ID NO: 229032 - DNA, 19 bp, Homo sapiens
  siRNA target sequence for HECTD1 (NM_015382.1,1190-1208).
ctctccggtagtaacacat

SEQ ID NO: 229033 - DNA, 19 bp, Homo sapiens
  siRNA target sequence for HECTD1 (NM_015382.1,1195-1213).
cggtagtaacacatgatct

SEQ ID NO: 229034 - DNA, 19 bp, Homo sapiens
  siRNA target sequence for HECTD1 (NM_015382.1,1226-1244).
gcttccagattcaattgaa

SEQ ID NO: 229035 - DNA, 19 bp, Homo sapiens
  siRNA target sequence for HECTD1 (NM_015382.1,1248-1266).
gcattgcagggtgatgaaa

SEQ ID NO: 229036 - DNA, 19 bp, Homo sapiens
  siRNA target sequence for HECTD1 (NM_015382.1,1267-1285).
gatgtgtgcttgatactat

SEQ ID NO: 229037 - DNA, 19 bp, Homo sapiens
  siRNA target sequence for HECTD1 (NM_015382.1,1298-1316).
ccttctcttggtgctatta

SEQ ID NO: 229038 - DNA, 19 bp, Homo sapiens
  siRNA target sequence for HECTD1 (NM_015382.1,1343-1361).
gtctagtgctggatctaca

SEQ ID NO: 229039 - DNA, 19 bp, Homo sapiens
  siRNA target sequence for HECTD1 (NM_015382.1,1370-1388).
cccaggactccggagatta

SEQ ID NO: 229040 - DNA, 19 bp, Homo sapiens
  siRNA target sequence for HECTD1 (NM_015382.1,1372-1390).
caggactccggagattaga

SEQ ID NO: 229041 - DNA, 19 bp, Homo sapiens
  siRNA target sequence for HECTD1 (NM_015382.1,1374-1392).
ggactccggagattagata

SEQ ID NO: 229042 - DNA, 19 bp, Homo sapiens
  siRNA target sequence for HECTD1 (NM_015382.1,1377-1395).
ctccggagattagatagtt

SEQ ID NO: 229043 - DNA, 19 bp, Homo sapiens
  siRNA target sequence for HECTD1 (NM_015382.1,1405-1423).
gctcacatcggcagcttat

SEQ ID NO: 229044 - DNA, 19 bp, Homo sapiens
  siRNA target sequence for HECTD1 (NM_015382.1,1406-1424).
ctcacatcggcagcttata

SEQ ID NO: 229045 - DNA, 19 bp, Homo sapiens
  siRNA target sequence for HECTD1 (NM_015382.1,1410-1428).
catcggcagcttatagatt

SEQ ID NO: 229046 - DNA, 19 bp, Homo sapiens
  siRNA target sequence for HECTD1 (NM_015382.1,1413-1431).
cggcagcttatagattgta

SEQ ID NO: 229047 - DNA, 19 bp, Homo sapiens
  siRNA target sequence for HECTD1 (NM_015382.1,1418-1436).
gcttatagattgtattcga

SEQ ID NO: 229048 - DNA, 19 bp, Homo sapiens
  siRNA target sequence for HECTD1 (NM_015382.1,1476-1494).
ggagcctttgaagtaaatt

SEQ ID NO: 229049 - DNA, 19 bp, Homo sapiens
  siRNA target sequence for HECTD1 (NM_015382.1,1477-1495).
gagcctttgaagtaaattt

SEQ ID NO: 229050 - DNA, 19 bp, Homo sapiens
  siRNA target sequence for HECTD1 (NM_015382.1,1503-1521).
gatgtaggtcagactctat

SEQ ID NO: 229051 - DNA, 19 bp, Homo sapiens
  siRNA target sequence for HECTD1 (NM_015382.1,1509-1527).
ggtcagactctattaaact

SEQ ID NO: 229052 - DNA, 19 bp, Homo sapiens
  siRNA target sequence for HECTD1 (NM_015382.1,1597-1615).
gtcaaaggtcatcatcatt

SEQ ID NO: 229053 - DNA, 19 bp, Homo sapiens
  siRNA target sequence for HECTD1 (NM_015382.1,1603-1621).
ggtcatcatcattacatta

SEQ ID NO: 229054 - DNA, 19 bp, Homo sapiens
  siRNA target sequence for HECTD1 (NM_015382.1,1661-1679).
gttacggcatggtgcaaat

SEQ ID NO: 229055 - DNA, 19 bp, Homo sapiens
  siRNA target sequence for HECTD1 (NM_015382.1,1701-1719).
gggaaaactccattagata

SEQ ID NO: 229056 - DNA, 19 bp, Homo sapiens
  siRNA target sequence for HECTD1 (NM_015382.1,1777-1795).
ggatgtgtccagttaataa

SEQ ID NO: 229057 - DNA, 19 bp, Homo sapiens
  siRNA target sequence for HECTD1 (NM_015382.1,1778-1796).
gatgtgtccagttaataaa

SEQ ID NO: 229058 - DNA, 19 bp, Homo sapiens
  siRNA target sequence for HECTD1 (NM_015382.1,1781-1799).
gtgtccagttaataaagga

SEQ ID NO: 229059 - DNA, 19 bp, Homo sapiens
  siRNA target sequence for HECTD1 (NM_015382.1,1866-1884).
gaaatggcacccatatact

SEQ ID NO: 229060 - DNA, 19 bp, Homo sapiens
  siRNA target sequence for HECTD1 (NM_015382.1,1871-1889).
ggcacccatatacttgaaa

SEQ ID NO: 229061 - DNA, 19 bp, Homo sapiens
  siRNA target sequence for HECTD1 (NM_015382.1,1872-1890).
gcacccatatacttgaaaa

SEQ ID NO: 229062 - DNA, 19 bp, Homo sapiens
  siRNA target sequence for HECTD1 (NM_015382.1,1954-1972).
gtcttgctctaattcgaaa

SEQ ID NO: 229063 - DNA, 19 bp, Homo sapiens
  siRNA target sequence for HECTD1 (NM_015382.1,1956-1974).
cttgctctaattcgaaaaa

SEQ ID NO: 229064 - DNA, 19 bp, Homo sapiens
  siRNA target sequence for HECTD1 (NM_015382.1,1960-1978).
ctctaattcgaaaaatgat

SEQ ID NO: 229065 - DNA, 19 bp, Homo sapiens
  siRNA target sequence for HECTD1 (NM_015382.1,2020-2038).
ctgatgttggtcacaattt

SEQ ID NO: 229066 - DNA, 19 bp, Homo sapiens
  siRNA target sequence for HECTD1 (NM_015382.1,2288-2306).
gcaacaaggtaaaccatat

SEQ ID NO: 229067 - DNA, 19 bp, Homo sapiens
  siRNA target sequence for HECTD1 (NM_015382.1,2311-2329).
ggagagactggtcaatcat

SEQ ID NO: 229068 - DNA, 19 bp, Homo sapiens
  siRNA target sequence for HECTD1 (NM_015382.1,2332-2350).
ggggaagggactgcttata

SEQ ID NO: 229069 - DNA, 19 bp, Homo sapiens
  siRNA target sequence for HECTD1 (NM_015382.1,2334-2352).
ggaagggactgcttatata

SEQ ID NO: 229070 - DNA, 19 bp, Homo sapiens
  siRNA target sequence for HECTD1 (NM_015382.1,2364-2382).
gcagcagccttggaattat

SEQ ID NO: 229071 - DNA, 19 bp, Homo sapiens
  siRNA target sequence for HECTD1 (NM_015382.1,2367-2385).
gcagccttggaattatcta

SEQ ID NO: 229072 - DNA, 19 bp, Homo sapiens
  siRNA target sequence for HECTD1 (NM_015382.1,2392-2410).
gtaatggatggttcagatt

SEQ ID NO: 229073 - DNA, 19 bp, Homo sapiens
  siRNA target sequence for HECTD1 (NM_015382.1,2512-2530).
gagctcgaggccaagtaaa

SEQ ID NO: 229074 - DNA, 19 bp, Homo sapiens
  siRNA target sequence for HECTD1 (NM_015382.1,2531-2549).
gccatctacttcaagtcaa

SEQ ID NO: 229075 - DNA, 19 bp, Homo sapiens
  siRNA target sequence for HECTD1 (NM_015382.1,2569-2587).
gacccactaaacttactgt

SEQ ID NO: 229076 - DNA, 19 bp, Homo sapiens
  siRNA target sequence for HECTD1 (NM_015382.1,2580-2598).
cttactgtaggaaattggt

SEQ ID NO: 229077 - DNA, 19 bp, Homo sapiens
  siRNA target sequence for HECTD1 (NM_015382.1,2596-2614).
ggtcactgacatgtttgaa

SEQ ID NO: 229078 - DNA, 19 bp, Homo sapiens
  siRNA target sequence for HECTD1 (NM_015382.1,2649-2667).
cagcaagctacaatattga

SEQ ID NO: 229079 - DNA, 19 bp, Homo sapiens
  siRNA target sequence for HECTD1 (NM_015382.1,2651-2669).
gcaagctacaatattgaaa

SEQ ID NO: 229080 - DNA, 19 bp, Homo sapiens
  siRNA target sequence for HECTD1 (NM_015382.1,2737-2755).
ccctgggttcagaatttgt

SEQ ID NO: 229081 - DNA, 19 bp, Homo sapiens
  siRNA target sequence for HECTD1 (NM_015382.1,2824-2842).
gaactatggctcgagattt

SEQ ID NO: 229082 - DNA, 19 bp, Homo sapiens
  siRNA target sequence for HECTD1 (NM_015382.1,2827-2845).
ctatggctcgagatttata

SEQ ID NO: 229083 - DNA, 19 bp, Homo sapiens
  siRNA target sequence for HECTD1 (NM_015382.1,2831-2849).
ggctcgagatttatacgat

SEQ ID NO: 229084 - DNA, 19 bp, Homo sapiens
  siRNA target sequence for HECTD1 (NM_015382.1,2846-2864).
cgatgaccattttaaagct

SEQ ID NO: 229085 - DNA, 19 bp, Homo sapiens
  siRNA target sequence for HECTD1 (NM_015382.1,3071-3089).
ggtacaagcacttcttact

SEQ ID NO: 229086 - DNA, 19 bp, Homo sapiens
  siRNA target sequence for HECTD1 (NM_015382.1,3078-3096).
gcacttcttactgtgttaa

SEQ ID NO: 229087 - DNA, 19 bp, Homo sapiens
  siRNA target sequence for HECTD1 (NM_015382.1,3205-3223).
gaccagcagttgcgttaat

SEQ ID NO: 229088 - DNA, 19 bp, Homo sapiens
  siRNA target sequence for HECTD1 (NM_015382.1,3210-3228).
gcagttgcgttaattcgaa

SEQ ID NO: 229089 - DNA, 19 bp, Homo sapiens
  siRNA target sequence for HECTD1 (NM_015382.1,3211-3229).
cagttgcgttaattcgaaa

SEQ ID NO: 229090 - DNA, 19 bp, Homo sapiens
  siRNA target sequence for HECTD1 (NM_015382.1,3217-3235).
cgttaattcgaaagttaat

SEQ ID NO: 229091 - DNA, 19 bp, Homo sapiens
  siRNA target sequence for HECTD1 (NM_015382.1,3258-3276).
cgtctacctctccatttgt

SEQ ID NO: 229092 - DNA, 19 bp, Homo sapiens
  siRNA target sequence for HECTD1 (NM_015382.1,3259-3277).
gtctacctctccatttgta

SEQ ID NO: 229093 - DNA, 19 bp, Homo sapiens
  siRNA target sequence for HECTD1 (NM_015382.1,3286-3304).
caggatccacatataacct

SEQ ID NO: 229094 - DNA, 19 bp, Homo sapiens
  siRNA target sequence for HECTD1 (NM_015382.1,3295-3313).
catataacctccagatact

SEQ ID NO: 229095 - DNA, 19 bp, Homo sapiens
  siRNA target sequence for HECTD1 (NM_015382.1,3308-3326).
gatacttacaaggagatta

SEQ ID NO: 229096 - DNA, 19 bp, Homo sapiens
  siRNA target sequence for HECTD1 (NM_015382.1,3312-3330).
cttacaaggagattacgat

SEQ ID NO: 229097 - DNA, 19 bp, Homo sapiens
  siRNA target sequence for HECTD1 (NM_015382.1,3349-3367).
ctggtgaaactgcattgat

SEQ ID NO: 229098 - DNA, 19 bp, Homo sapiens
  siRNA target sequence for HECTD1 (NM_015382.1,3369-3387).
gacaggactggcagaatgt

SEQ ID NO: 229099 - DNA, 19 bp, Homo sapiens
  siRNA target sequence for HECTD1 (NM_015382.1,3447-3465).
gcaaaacagtggtatgatt

SEQ ID NO: 229100 - DNA, 19 bp, Homo sapiens
  siRNA target sequence for HECTD1 (NM_015382.1,3462-3480).
gattttgaccgatcttcat

SEQ ID NO: 229101 - DNA, 19 bp, Homo sapiens
  siRNA target sequence for HECTD1 (NM_015382.1,3478-3496).
catttgtttttgttcgaaa

SEQ ID NO: 229102 - DNA, 19 bp, Homo sapiens
  siRNA target sequence for HECTD1 (NM_015382.1,3483-3501).
gtttttgttcgaaaattaa

SEQ ID NO: 229103 - DNA, 19 bp, Homo sapiens
  siRNA target sequence for HECTD1 (NM_015382.1,3526-3544).
ggcaccagcatgattttga

SEQ ID NO: 229104 - DNA, 19 bp, Homo sapiens
  siRNA target sequence for HECTD1 (NM_015382.1,3613-3631).
cctatggacttgtagtagt

SEQ ID NO: 229105 - DNA, 19 bp, Homo sapiens
  siRNA target sequence for HECTD1 (NM_015382.1,3614-3632).
ctatggacttgtagtagta

SEQ ID NO: 229106 - DNA, 19 bp, Homo sapiens
  siRNA target sequence for HECTD1 (NM_015382.1,3634-3652).
cgtcatcagaaggaagaaa

SEQ ID NO: 229107 - DNA, 19 bp, Homo sapiens
  siRNA target sequence for HECTD1 (NM_015382.1,3658-3676).
cttatggccgcttagaaga

SEQ ID NO: 229108 - DNA, 19 bp, Homo sapiens
  siRNA target sequence for HECTD1 (NM_015382.1,3664-3682).
gccgcttagaagacatact

SEQ ID NO: 229109 - DNA, 19 bp, Homo sapiens
  siRNA target sequence for HECTD1 (NM_015382.1,3665-3683).
ccgcttagaagacatacta

SEQ ID NO: 229110 - DNA, 19 bp, Homo sapiens
  siRNA target sequence for HECTD1 (NM_015382.1,3666-3684).
cgcttagaagacatactaa

SEQ ID NO: 229111 - DNA, 19 bp, Homo sapiens
  siRNA target sequence for HECTD1 (NM_015382.1,3668-3686).
cttagaagacatactaagt

SEQ ID NO: 229112 - DNA, 19 bp, Homo sapiens
  siRNA target sequence for HECTD1 (NM_015382.1,3677-3695).
catactaagtcgtgataat

SEQ ID NO: 229113 - DNA, 19 bp, Homo sapiens
  siRNA target sequence for HECTD1 (NM_015382.1,3711-3729).
catagcaatgatgataaga

SEQ ID NO: 229114 - DNA, 19 bp, Homo sapiens
  siRNA target sequence for HECTD1 (NM_015382.1,3733-3751).
cctggtttgccatagatct

SEQ ID NO: 229115 - DNA, 19 bp, Homo sapiens
  siRNA target sequence for HECTD1 (NM_015382.1,3753-3771).
ggtctctgggtgataccat

SEQ ID NO: 229116 - DNA, 19 bp, Homo sapiens
  siRNA target sequence for HECTD1 (NM_015382.1,3789-3807).
catgctcgtggttatggaa

SEQ ID NO: 229117 - DNA, 19 bp, Homo sapiens
  siRNA target sequence for HECTD1 (NM_015382.1,3827-3845).
ggttttccaggtatccaaa

SEQ ID NO: 229118 - DNA, 19 bp, Homo sapiens
  siRNA target sequence for HECTD1 (NM_015382.1,4275-4293).
gctggtggctcaaactctt

SEQ ID NO: 229119 - DNA, 19 bp, Homo sapiens
  siRNA target sequence for HECTD1 (NM_015382.1,4339-4357).
ggtacgaccctgatacagt

SEQ ID NO: 229120 - DNA, 19 bp, Homo sapiens
  siRNA target sequence for HECTD1 (NM_015382.1,4408-4426).
ggagcagcttggtgaaaaa

SEQ ID NO: 229121 - DNA, 19 bp, Homo sapiens
  siRNA target sequence for HECTD1 (NM_015382.1,4460-4478).
ctcctcaagtagaaaagga

SEQ ID NO: 229122 - DNA, 19 bp, Homo sapiens
  siRNA target sequence for HECTD1 (NM_015382.1,4540-4558).
cggaacggagatcagaaat

SEQ ID NO: 229123 - DNA, 19 bp, Homo sapiens
  siRNA target sequence for HECTD1 (NM_015382.1,4541-4559).
ggaacggagatcagaaatt

SEQ ID NO: 229124 - DNA, 19 bp, Homo sapiens
  siRNA target sequence for HECTD1 (NM_015382.1,4549-4567).
gatcagaaattgtaatgga

SEQ ID NO: 229125 - DNA, 19 bp, Homo sapiens
  siRNA target sequence for HECTD1 (NM_015382.1,4599-4617).
gaaccaattgttgttcttt

SEQ ID NO: 229126 - DNA, 19 bp, Homo sapiens
  siRNA target sequence for HECTD1 (NM_015382.1,4631-4649).
cgtccctcaaacagaagta

SEQ ID NO: 229127 - DNA, 19 bp, Homo sapiens
  siRNA target sequence for HECTD1 (NM_015382.1,4715-4733).
gaagttaggccctgatagt

SEQ ID NO: 229128 - DNA, 19 bp, Homo sapiens
  siRNA target sequence for HECTD1 (NM_015382.1,4718-4736).
gttaggccctgatagttct

SEQ ID NO: 229129 - DNA, 19 bp, Homo sapiens
  siRNA target sequence for HECTD1 (NM_015382.1,4749-4767).
ggggagtctagtgcaatat

SEQ ID NO: 229130 - DNA, 19 bp, Homo sapiens
  siRNA target sequence for HECTD1 (NM_015382.1,4762-4780).
caatatccatgggaattgt

SEQ ID NO: 229131 - DNA, 19 bp, Homo sapiens
  siRNA target sequence for HECTD1 (NM_015382.1,4772-4790).
gggaattgtcagtgttagt

SEQ ID NO: 229132 - DNA, 19 bp, Homo sapiens
  siRNA target sequence for HECTD1 (NM_015382.1,4773-4791).
ggaattgtcagtgttagtt

SEQ ID NO: 229133 - DNA, 19 bp, Homo sapiens
  siRNA target sequence for HECTD1 (NM_015382.1,4856-4874).
ctcttcagcaagtaacaga

SEQ ID NO: 229134 - DNA, 19 bp, Homo sapiens
  siRNA target sequence for HECTD1 (NM_015382.1,4913-4931).
gagctctagtgcaagtgta

SEQ ID NO: 229135 - DNA, 19 bp, Homo sapiens
  siRNA target sequence for HECTD1 (NM_015382.1,4918-4936).
ctagtgcaagtgtacctaa

SEQ ID NO: 229136 - DNA, 19 bp, Homo sapiens
  siRNA target sequence for HECTD1 (NM_015382.1,4940-4958).
gtcctcaagagaaacatct

SEQ ID NO: 229137 - DNA, 19 bp, Homo sapiens
  siRNA target sequence for HECTD1 (NM_015382.1,5002-5020).
ctaatgccacgaacaacat

SEQ ID NO: 229138 - DNA, 19 bp, Homo sapiens
  siRNA target sequence for HECTD1 (NM_015382.1,5008-5026).
ccacgaacaacatgaatct

SEQ ID NO: 229139 - DNA, 19 bp, Homo sapiens
  siRNA target sequence for HECTD1 (NM_015382.1,5009-5027).
cacgaacaacatgaatcta

SEQ ID NO: 229140 - DNA, 19 bp, Homo sapiens
  siRNA target sequence for HECTD1 (NM_015382.1,5038-5056).
gcagtgataacaacactaa

SEQ ID NO: 229141 - DNA, 19 bp, Homo sapiens
  siRNA target sequence for HECTD1 (NM_015382.1,5106-5124).
gctcagagtttccctaatt

SEQ ID NO: 229142 - DNA, 19 bp, Homo sapiens
  siRNA target sequence for HECTD1 (NM_015382.1,5107-5125).
ctcagagtttccctaattt

SEQ ID NO: 229143 - DNA, 19 bp, Homo sapiens
  siRNA target sequence for HECTD1 (NM_015382.1,5126-5144).
gaccacacctggtactaca

SEQ ID NO: 229144 - DNA, 19 bp, Homo sapiens
  siRNA target sequence for HECTD1 (NM_015382.1,5193-5211).
gctacagcaacaacagttt

SEQ ID NO: 229145 - DNA, 19 bp, Homo sapiens
  siRNA target sequence for HECTD1 (NM_015382.1,5194-5212).
ctacagcaacaacagtttt

SEQ ID NO: 229146 - DNA, 19 bp, Homo sapiens
  siRNA target sequence for HECTD1 (NM_015382.1,5217-5235).
gttggtcaatctttaagta

SEQ ID NO: 229147 - DNA, 19 bp, Homo sapiens
  siRNA target sequence for HECTD1 (NM_015382.1,5246-5264).
caccagcctcacatcaact

SEQ ID NO: 229148 - DNA, 19 bp, Homo sapiens
  siRNA target sequence for HECTD1 (NM_015382.1,5289-5307).
gaagcagaatattccttat

SEQ ID NO: 229149 - DNA, 19 bp, Homo sapiens
  siRNA target sequence for HECTD1 (NM_015382.1,5293-5311).
cagaatattccttatatga

SEQ ID NO: 229150 - DNA, 19 bp, Homo sapiens
  siRNA target sequence for HECTD1 (NM_015382.1,5326-5344).
gccgtgccagtactctatt

SEQ ID NO: 229151 - DNA, 19 bp, Homo sapiens
  siRNA target sequence for HECTD1 (NM_015382.1,5478-5496).
ggctcccgctctgatgtaa

SEQ ID NO: 229152 - DNA, 19 bp, Homo sapiens
  siRNA target sequence for HECTD1 (NM_015382.1,5571-5589).
gaagaagagtacgaaacta

SEQ ID NO: 229153 - DNA, 19 bp, Homo sapiens
  siRNA target sequence for HECTD1 (NM_015382.1,5592-5610).
ggaggacgccggagaacat

SEQ ID NO: 229154 - DNA, 19 bp, Homo sapiens
  siRNA target sequence for HECTD1 (NM_015382.1,5627-5645).
gctaaagagacagttttct

SEQ ID NO: 229155 - DNA, 19 bp, Homo sapiens
  siRNA target sequence for HECTD1 (NM_015382.1,5668-5686).
ctagacctggtcgtactaa

SEQ ID NO: 229156 - DNA, 19 bp, Homo sapiens
  siRNA target sequence for HECTD1 (NM_015382.1,5671-5689).
gacctggtcgtactaatgt

SEQ ID NO: 229157 - DNA, 19 bp, Homo sapiens
  siRNA target sequence for HECTD1 (NM_015382.1,5690-5708).
ccagcagacaactgatcta

SEQ ID NO: 229158 - DNA, 19 bp, Homo sapiens
  siRNA target sequence for HECTD1 (NM_015382.1,5693-5711).
gcagacaactgatctagaa

SEQ ID NO: 229159 - DNA, 19 bp, Homo sapiens
  siRNA target sequence for HECTD1 (NM_015382.1,5773-5791).
ctcgattagctctcacttt

SEQ ID NO: 229160 - DNA, 19 bp, Homo sapiens
  siRNA target sequence for HECTD1 (NM_015382.1,5775-5793).
cgattagctctcactttga

SEQ ID NO: 229161 - DNA, 19 bp, Homo sapiens
  siRNA target sequence for HECTD1 (NM_015382.1,5809-5827).
gaacgactcgtgaagttga

SEQ ID NO: 229162 - DNA, 19 bp, Homo sapiens
  siRNA target sequence for HECTD1 (NM_015382.1,5812-5830).
cgactcgtgaagttgaatt

SEQ ID NO: 229163 - DNA, 19 bp, Homo sapiens
  siRNA target sequence for HECTD1 (NM_015382.1,5832-5850).
ccactcaccaatttcagat

SEQ ID NO: 229164 - DNA, 19 bp, Homo sapiens
  siRNA target sequence for HECTD1 (NM_015382.1,5868-5886).
gtacaaaaattgcttcaat

SEQ ID NO: 229165 - DNA, 19 bp, Homo sapiens
  siRNA target sequence for HECTD1 (NM_015382.1,5871-5889).
caaaaattgcttcaattgt

SEQ ID NO: 229166 - DNA, 19 bp, Homo sapiens
  siRNA target sequence for HECTD1 (NM_015382.1,5890-5908).
cctgtaatggcaatgtgaa

SEQ ID NO: 229167 - DNA, 19 bp, Homo sapiens
  siRNA target sequence for HECTD1 (NM_015382.1,5891-5909).
ctgtaatggcaatgtgaaa

SEQ ID NO: 229168 - DNA, 19 bp, Homo sapiens
  siRNA target sequence for HECTD1 (NM_015382.1,5904-5922).
gtgaaatcagataaactta

SEQ ID NO: 229169 - DNA, 19 bp, Homo sapiens
  siRNA target sequence for HECTD1 (NM_015382.1,5913-5931).
gataaacttaggcgtattt

SEQ ID NO: 229170 - DNA, 19 bp, Homo sapiens
  siRNA target sequence for HECTD1 (NM_015382.1,5932-5950).
gggagcccacatacacaat

SEQ ID NO: 229171 - DNA, 19 bp, Homo sapiens
  siRNA target sequence for HECTD1 (NM_015382.1,5934-5952).
gagcccacatacacaatca

SEQ ID NO: 229172 - DNA, 19 bp, Homo sapiens
  siRNA target sequence for HECTD1 (NM_015382.1,5947-5965).
caatcatgtacagagaaat

SEQ ID NO: 229173 - DNA, 19 bp, Homo sapiens
  siRNA target sequence for HECTD1 (NM_015382.1,6032-6050).
gtaccttggcactgatgaa

SEQ ID NO: 229174 - DNA, 19 bp, Homo sapiens
  siRNA target sequence for HECTD1 (NM_015382.1,6104-6122).
cctgcgccactggaaatta

SEQ ID NO: 229175 - DNA, 19 bp, Homo sapiens
  siRNA target sequence for HECTD1 (NM_015382.1,6105-6123).
ctgcgccactggaaattaa

SEQ ID NO: 229176 - DNA, 19 bp, Homo sapiens
  siRNA target sequence for HECTD1 (NM_015382.1,6107-6125).
gcgccactggaaattaact

SEQ ID NO: 229177 - DNA, 19 bp, Homo sapiens
  siRNA target sequence for HECTD1 (NM_015382.1,6165-6183).
cagctcatagctgcatata

SEQ ID NO: 229178 - DNA, 19 bp, Homo sapiens
  siRNA target sequence for HECTD1 (NM_015382.1,6205-6223).
caaagtctgggttaaacca

SEQ ID NO: 229179 - DNA, 19 bp, Homo sapiens
  siRNA target sequence for HECTD1 (NM_015382.1,6238-6256).
ctcttcaaagtagtgatat

SEQ ID NO: 229180 - DNA, 19 bp, Homo sapiens
  siRNA target sequence for HECTD1 (NM_015382.1,6294-6312).
ggcaatggacagaactctt

SEQ ID NO: 229181 - DNA, 19 bp, Homo sapiens
  siRNA target sequence for HECTD1 (NM_015382.1,6308-6326).
ctcttgtggagtagaagat

SEQ ID NO: 229182 - DNA, 19 bp, Homo sapiens
  siRNA target sequence for HECTD1 (NM_015382.1,6335-6353).
gcttctgcgtattctatat

SEQ ID NO: 229183 - DNA, 19 bp, Homo sapiens
  siRNA target sequence for HECTD1 (NM_015382.1,6336-6354).
cttctgcgtattctatata

SEQ ID NO: 229184 - DNA, 19 bp, Homo sapiens
  siRNA target sequence for HECTD1 (NM_015382.1,6397-6415).
gtgatgaacagcttcagtt

SEQ ID NO: 229185 - DNA, 19 bp, Homo sapiens
  siRNA target sequence for HECTD1 (NM_015382.1,6511-6529).
cagactggtgtgaacaatt

SEQ ID NO: 229186 - DNA, 19 bp, Homo sapiens
  siRNA target sequence for HECTD1 (NM_015382.1,6533-6551).
cagcaaatgtccttttcta

SEQ ID NO: 229187 - DNA, 19 bp, Homo sapiens
  siRNA target sequence for HECTD1 (NM_015382.1,6598-6616).
gcgcctcaagagcaatagt

SEQ ID NO: 229188 - DNA, 19 bp, Homo sapiens
  siRNA target sequence for HECTD1 (NM_015382.1,6599-6617).
cgcctcaagagcaatagta

SEQ ID NO: 229189 - DNA, 19 bp, Homo sapiens
  siRNA target sequence for HECTD1 (NM_015382.1,6600-6618).
gcctcaagagcaatagtat

SEQ ID NO: 229190 - DNA, 19 bp, Homo sapiens
  siRNA target sequence for HECTD1 (NM_015382.1,6609-6627).
gcaatagtatggttacaga

SEQ ID NO: 229191 - DNA, 19 bp, Homo sapiens
  siRNA target sequence for HECTD1 (NM_015382.1,6705-6723).
ggtcgtctcaagcatgaaa

SEQ ID NO: 229192 - DNA, 19 bp, Homo sapiens
  siRNA target sequence for HECTD1 (NM_015382.1,7018-7036).
catttccacaggatagtga

SEQ ID NO: 229193 - DNA, 19 bp, Homo sapiens
  siRNA target sequence for HECTD1 (NM_015382.1,7029-7047).
gatagtgatgagcttgaaa

SEQ ID NO: 229194 - DNA, 19 bp, Homo sapiens
  siRNA target sequence for HECTD1 (NM_015382.1,7033-7051).
gtgatgagcttgaaaggat

SEQ ID NO: 229195 - DNA, 19 bp, Homo sapiens
  siRNA target sequence for HECTD1 (NM_015382.1,7044-7062).
gaaaggatcacgaaactgt

SEQ ID NO: 229196 - DNA, 19 bp, Homo sapiens
  siRNA target sequence for HECTD1 (NM_015382.1,7049-7067).
gatcacgaaactgtttcat

SEQ ID NO: 229197 - DNA, 19 bp, Homo sapiens
  siRNA target sequence for HECTD1 (NM_015382.1,7082-7100).
cttggccaaatgcattcaa

SEQ ID NO: 229198 - DNA, 19 bp, Homo sapiens
  siRNA target sequence for HECTD1 (NM_015382.1,7093-7111).
gcattcaagacaatagact

SEQ ID NO: 229199 - DNA, 19 bp, Homo sapiens
  siRNA target sequence for HECTD1 (NM_015382.1,7108-7126).
gacttgtggacttacctat

SEQ ID NO: 229200 - DNA, 19 bp, Homo sapiens
  siRNA target sequence for HECTD1 (NM_015382.1,7115-7133).
ggacttacctatttctaaa

SEQ ID NO: 229201 - DNA, 19 bp, Homo sapiens
  siRNA target sequence for HECTD1 (NM_015382.1,7118-7136).
cttacctatttctaaacct

SEQ ID NO: 229202 - DNA, 19 bp, Homo sapiens
  siRNA target sequence for HECTD1 (NM_015382.1,7201-7219).
gaggtgatagagacttaca

SEQ ID NO: 229203 - DNA, 19 bp, Homo sapiens
  siRNA target sequence for HECTD1 (NM_015382.1,7203-7221).
ggtgatagagacttacact

SEQ ID NO: 229204 - DNA, 19 bp, Homo sapiens
  siRNA target sequence for HECTD1 (NM_015382.1,7271-7289).
ctcggtaggaagctttgaa

SEQ ID NO: 229205 - DNA, 19 bp, Homo sapiens
  siRNA target sequence for HECTD1 (NM_015382.1,7273-7291).
cggtaggaagctttgaaga

SEQ ID NO: 229206 - DNA, 19 bp, Homo sapiens
  siRNA target sequence for HECTD1 (NM_015382.1,7282-7300).
gctttgaagaggattcaaa

SEQ ID NO: 229207 - DNA, 19 bp, Homo sapiens
  siRNA target sequence for HECTD1 (NM_015382.1,7290-7308).
gaggattcaaaatcagaat

SEQ ID NO: 229208 - DNA, 19 bp, Homo sapiens
  siRNA target sequence for HECTD1 (NM_015382.1,7337-7355).
cccagcttggtttaatgga

SEQ ID NO: 229209 - DNA, 19 bp, Homo sapiens
  siRNA target sequence for HECTD1 (NM_015382.1,7338-7356).
ccagcttggtttaatggaa

SEQ ID NO: 229210 - DNA, 19 bp, Homo sapiens
  siRNA target sequence for HECTD1 (NM_015382.1,7433-7451).
caagaggcgccaaatttta

SEQ ID NO: 229211 - DNA, 19 bp, Homo sapiens
  siRNA target sequence for HECTD1 (NM_015382.1,7500-7518).
ctagtgctgaagaatccat

SEQ ID NO: 229212 - DNA, 19 bp, Homo sapiens
  siRNA target sequence for HECTD1 (NM_015382.1,7525-7543).
ctgggcctccacttagcat

SEQ ID NO: 229213 - DNA, 19 bp, Homo sapiens
  siRNA target sequence for HECTD1 (NM_015382.1,7573-7591).
gcccttcctcaagaatata

SEQ ID NO: 229214 - DNA, 19 bp, Homo sapiens
  siRNA target sequence for HECTD1 (NM_015382.1,7632-7650).
gagatgataacaatggata

SEQ ID NO: 229215 - DNA, 19 bp, Homo sapiens
  siRNA target sequence for HECTD1 (NM_015382.1,7667-7685).
ggatttgatgtttgacttt

SEQ ID NO: 229216 - DNA, 19 bp, Homo sapiens
  siRNA target sequence for HECTD1 (NM_015382.1,7676-7694).
gtttgacttttgtatgcat

SEQ ID NO: 229217 - DNA, 19 bp, Homo sapiens
  siRNA target sequence for HECTD1 (NM_015382.1,7687-7705).
gtatgcatacgggtattca

SEQ ID NO: 229218 - DNA, 19 bp, Homo sapiens
  siRNA target sequence for HECTD1 (NM_015382.1,7691-7709).
gcatacgggtattcagaaa

SEQ ID NO: 229219 - DNA, 19 bp, Homo sapiens
  siRNA target sequence for HECTD1 (NM_015382.1,7696-7714).
cgggtattcagaaacaaat

SEQ ID NO: 229220 - DNA, 19 bp, Homo sapiens
  siRNA target sequence for HECTD1 (NM_015382.1,7699-7717).
gtattcagaaacaaatgga

SEQ ID NO: 229221 - DNA, 19 bp, Homo sapiens
  siRNA target sequence for HECTD1 (NM_015382.1,7768-7786).
ccttcagccatgaagaagt

SEQ ID NO: 229222 - DNA, 19 bp, Homo sapiens
  siRNA target sequence for HECTD1 (NM_015382.1,7824-7842).
gcagcagaggatattatca

SEQ ID NO: 229223 - DNA, 19 bp, Homo sapiens
  siRNA target sequence for HECTD1 (NM_015382.1,7827-7845).
gcagaggatattatcaatt

SEQ ID NO: 229224 - DNA, 19 bp, Homo sapiens
  siRNA target sequence for HECTD1 (NM_015382.1,7919-7937).
gtcttctgatgaaaggaaa

SEQ ID NO: 229225 - DNA, 19 bp, Homo sapiens
  siRNA target sequence for HECTD1 (NM_015382.1,7938-7956).
gcattcttgcagtttacca

SEQ ID NO: 229226 - DNA, 19 bp, Homo sapiens
  siRNA target sequence for HECTD1 (NM_015382.1,7955-7973).
cactggttgttcaactcta

SEQ ID NO: 229227 - DNA, 19 bp, Homo sapiens
  siRNA target sequence for HECTD1 (NM_015382.1,8065-8083).
gtgtgcattaccttaagtt

SEQ ID NO: 229228 - DNA, 19 bp, Homo sapiens
  siRNA target sequence for HECTD1 (NM_015382.1,8075-8093).
ccttaagttgcctgaatat

SEQ ID NO: 229229 - DNA, 19 bp, Homo sapiens
  siRNA target sequence for HECTD1 (NM_015382.1,8119-8137).
gcctgctagctgctacaat

SEQ ID NO: 229230 - DNA, 19 bp, Homo sapiens
  siRNA target sequence for HECTD1 (NM_015382.1,8141-8159).
gaaaggctttcatctcaat

SEQ ID NO: 229231 - DNA, 19 bp, Homo sapiens
  siRNA target sequence for HERC1 (NM_003922.1,112-130).
ccaccagtgaagctgaaat

SEQ ID NO: 229232 - DNA, 19 bp, Homo sapiens
  siRNA target sequence for HERC1 (NM_003922.1,166-184).
gacagtgaatctattgcta

SEQ ID NO: 229233 - DNA, 19 bp, Homo sapiens
  siRNA target sequence for HERC1 (NM_003922.1,193-211).
ggagttgctgttctgtatt

SEQ ID NO: 229234 - DNA, 19 bp, Homo sapiens
  siRNA target sequence for HERC1 (NM_003922.1,196-214).
gttgctgttctgtattcta

SEQ ID NO: 229235 - DNA, 19 bp, Homo sapiens
  siRNA target sequence for HERC1 (NM_003922.1,212-230).
ctaaactggttagcaataa

SEQ ID NO: 229236 - DNA, 19 bp, Homo sapiens
  siRNA target sequence for HERC1 (NM_003922.1,275-293).
cacagttgccagactttga

SEQ ID NO: 229237 - DNA, 19 bp, Homo sapiens
  siRNA target sequence for HERC1 (NM_003922.1,292-310).
gaacgtgagtctctttcaa

SEQ ID NO: 229238 - DNA, 19 bp, Homo sapiens
  siRNA target sequence for HERC1 (NM_003922.1,313-331).
gatgagcaggaccactatt

SEQ ID NO: 229239 - DNA, 19 bp, Homo sapiens
  siRNA target sequence for HERC1 (NM_003922.1,551-569).
caagcactgatgcacttat

SEQ ID NO: 229240 - DNA, 19 bp, Homo sapiens
  siRNA target sequence for HERC1 (NM_003922.1,554-572).
gcactgatgcacttataga

SEQ ID NO: 229241 - DNA, 19 bp, Homo sapiens
  siRNA target sequence for HERC1 (NM_003922.1,555-573).
cactgatgcacttatagaa

SEQ ID NO: 229242 - DNA, 19 bp, Homo sapiens
  siRNA target sequence for HERC1 (NM_003922.1,580-598).
gttcgaactggtctaagtt

SEQ ID NO: 229243 - DNA, 19 bp, Homo sapiens
  siRNA target sequence for HERC1 (NM_003922.1,583-601).
cgaactggtctaagtttat

SEQ ID NO: 229244 - DNA, 19 bp, Homo sapiens
  siRNA target sequence for HERC1 (NM_003922.1,587-605).
ctggtctaagtttattatt

SEQ ID NO: 229245 - DNA, 19 bp, Homo sapiens
  siRNA target sequence for HERC1 (NM_003922.1,656-674).
gtctttgcaacgatgtcat

SEQ ID NO: 229246 - DNA, 19 bp, Homo sapiens
  siRNA target sequence for HERC1 (NM_003922.1,663-681).
caacgatgtcattcatact

SEQ ID NO: 229247 - DNA, 19 bp, Homo sapiens
  siRNA target sequence for HERC1 (NM_003922.1,706-724).
ccaccattatcattagcaa

SEQ ID NO: 229248 - DNA, 19 bp, Homo sapiens
  siRNA target sequence for HERC1 (NM_003922.1,754-772).
gactgcttatcgcaagtaa

SEQ ID NO: 229249 - DNA, 19 bp, Homo sapiens
  siRNA target sequence for HERC1 (NM_003922.1,764-782).
cgcaagtaacaacatttct

SEQ ID NO: 229250 - DNA, 19 bp, Homo sapiens
  siRNA target sequence for HERC1 (NM_003922.1,765-783).
gcaagtaacaacatttctt

SEQ ID NO: 229251 - DNA, 19 bp, Homo sapiens
  siRNA target sequence for HERC1 (NM_003922.1,787-805).
ggagtcactattcctaatt

SEQ ID NO: 229252 - DNA, 19 bp, Homo sapiens
  siRNA target sequence for HERC1 (NM_003922.1,816-834).
cactttaggtcgtagatta

SEQ ID NO: 229253 - DNA, 19 bp, Homo sapiens
  siRNA target sequence for HERC1 (NM_003922.1,869-887).
gaggctcattgcgatatct

SEQ ID NO: 229254 - DNA, 19 bp, Homo sapiens
  siRNA target sequence for HERC1 (NM_003922.1,872-890).
gctcattgcgatatcttct

SEQ ID NO: 229255 - DNA, 19 bp, Homo sapiens
  siRNA target sequence for HERC1 (NM_003922.1,873-891).
ctcattgcgatatcttctt

SEQ ID NO: 229256 - DNA, 19 bp, Homo sapiens
  siRNA target sequence for HERC1 (NM_003922.1,875-893).
cattgcgatatcttcttga

SEQ ID NO: 229257 - DNA, 19 bp, Homo sapiens
  siRNA target sequence for HERC1 (NM_003922.1,914-932).
gggcttcggcagttgtaca

SEQ ID NO: 229258 - DNA, 19 bp, Homo sapiens
  siRNA target sequence for HERC1 (NM_003922.1,1079-1097).
gcttgtgctccctttacga

SEQ ID NO: 229259 - DNA, 19 bp, Homo sapiens
  siRNA target sequence for HERC1 (NM_003922.1,1127-1145).
gcagaatggcttctgatta

SEQ ID NO: 229260 - DNA, 19 bp, Homo sapiens
  siRNA target sequence for HERC1 (NM_003922.1,1128-1146).
cagaatggcttctgattat

SEQ ID NO: 229261 - DNA, 19 bp, Homo sapiens
  siRNA target sequence for HERC1 (NM_003922.1,1157-1175).
gtgctagcccagatagcat

SEQ ID NO: 229262 - DNA, 19 bp, Homo sapiens
  siRNA target sequence for HERC1 (NM_003922.1,1202-1220).
ccgaaacctgtgaggttta

SEQ ID NO: 229263 - DNA, 19 bp, Homo sapiens
  siRNA target sequence for HERC1 (NM_003922.1,1203-1221).
cgaaacctgtgaggtttat

SEQ ID NO: 229264 - DNA, 19 bp, Homo sapiens
  siRNA target sequence for HERC1 (NM_003922.1,1232-1250).
gcaatagcagccatcagtt

SEQ ID NO: 229265 - DNA, 19 bp, Homo sapiens
  siRNA target sequence for HERC1 (NM_003922.1,1283-1301).
ccaaactggctcctagttt

SEQ ID NO: 229266 - DNA, 19 bp, Homo sapiens
  siRNA target sequence for HERC1 (NM_003922.1,1328-1346).
gacagtactgcacttttgt

SEQ ID NO: 229267 - DNA, 19 bp, Homo sapiens
  siRNA target sequence for HERC1 (NM_003922.1,1330-1348).
cagtactgcacttttgtca

SEQ ID NO: 229268 - DNA, 19 bp, Homo sapiens
  siRNA target sequence for HERC1 (NM_003922.1,1332-1350).
gtactgcacttttgtcatt

SEQ ID NO: 229269 - DNA, 19 bp, Homo sapiens
  siRNA target sequence for HERC1 (NM_003922.1,1403-1421).
gccttggagactccaataa

SEQ ID NO: 229270 - DNA, 19 bp, Homo sapiens
  siRNA target sequence for HERC1 (NM_003922.1,1408-1426).
ggagactccaataatcagt

SEQ ID NO: 229271 - DNA, 19 bp, Homo sapiens
  siRNA target sequence for HERC1 (NM_003922.1,1415-1433).
ccaataatcagtcaacttt

SEQ ID NO: 229272 - DNA, 19 bp, Homo sapiens
  siRNA target sequence for HERC1 (NM_003922.1,1449-1467).
cgagcctcacagatccatt

SEQ ID NO: 229273 - DNA, 19 bp, Homo sapiens
  siRNA target sequence for HERC1 (NM_003922.1,1452-1470).
gcctcacagatccattaaa

SEQ ID NO: 229274 - DNA, 19 bp, Homo sapiens
  siRNA target sequence for HERC1 (NM_003922.1,1458-1476).
cagatccattaaaaaggtt

SEQ ID NO: 229275 - DNA, 19 bp, Homo sapiens
  siRNA target sequence for HERC1 (NM_003922.1,1474-1492).
gtttcatcttctaaaggat

SEQ ID NO: 229276 - DNA, 19 bp, Homo sapiens
  siRNA target sequence for HERC1 (NM_003922.1,1501-1519).
cacactttagcctttacga

SEQ ID NO: 229277 - DNA, 19 bp, Homo sapiens
  siRNA target sequence for HERC1 (NM_003922.1,1564-1582).
ctggggcatggaaatagtt

SEQ ID NO: 229278 - DNA, 19 bp, Homo sapiens
  siRNA target sequence for HERC1 (NM_003922.1,1588-1606).
cagaaatatcccaagctta

SEQ ID NO: 229279 - DNA, 19 bp, Homo sapiens
  siRNA target sequence for HERC1 (NM_003922.1,1590-1608).
gaaatatcccaagcttatt

SEQ ID NO: 229280 - DNA, 19 bp, Homo sapiens
  siRNA target sequence for HERC1 (NM_003922.1,1678-1696).
gaggatggggaattataca

SEQ ID NO: 229281 - DNA, 19 bp, Homo sapiens
  siRNA target sequence for HERC1 (NM_003922.1,1680-1698).
ggatggggaattatacaca

SEQ ID NO: 229282 - DNA, 19 bp, Homo sapiens
  siRNA target sequence for HERC1 (NM_003922.1,1726-1744).
ggtcatggtgacagcaata

SEQ ID NO: 229283 - DNA, 19 bp, Homo sapiens
  siRNA target sequence for HERC1 (NM_003922.1,1748-1766).
gtaacattccaacattagt

SEQ ID NO: 229284 - DNA, 19 bp, Homo sapiens
  siRNA target sequence for HERC1 (NM_003922.1,1888-1906).
gataccaacagagtgtata

SEQ ID NO: 229285 - DNA, 19 bp, Homo sapiens
  siRNA target sequence for HERC1 (NM_003922.1,1893-1911).
caacagagtgtataaacct

SEQ ID NO: 229286 - DNA, 19 bp, Homo sapiens
  siRNA target sequence for HERC1 (NM_003922.1,1898-1916).
gagtgtataaacctaaagt

SEQ ID NO: 229287 - DNA, 19 bp, Homo sapiens
  siRNA target sequence for HERC1 (NM_003922.1,1910-1928).
ctaaagttattgaagcttt

SEQ ID NO: 229288 - DNA, 19 bp, Homo sapiens
  siRNA target sequence for HERC1 (NM_003922.1,1925-1943).
ctttacaaggaatgttcat

SEQ ID NO: 229289 - DNA, 19 bp, Homo sapiens
  siRNA target sequence for HERC1 (NM_003922.1,1964-1982).
gccagtcttcacttgcttt

SEQ ID NO: 229290 - DNA, 19 bp, Homo sapiens
  siRNA target sequence for HERC1 (NM_003922.1,1968-1986).
gtcttcacttgctttgaca

SEQ ID NO: 229291 - DNA, 19 bp, Homo sapiens
  siRNA target sequence for HERC1 (NM_003922.1,2058-2076).
gagacccaagcttattgaa

SEQ ID NO: 229292 - DNA, 19 bp, Homo sapiens
  siRNA target sequence for HERC1 (NM_003922.1,2060-2078).
gacccaagcttattgaaga

SEQ ID NO: 229293 - DNA, 19 bp, Homo sapiens
  siRNA target sequence for HERC1 (NM_003922.1,2158-2176).
gcctggggcaataactcaa

SEQ ID NO: 229294 - DNA, 19 bp, Homo sapiens
  siRNA target sequence for HERC1 (NM_003922.1,2226-2244).
gaaagtgagtggcttagat

SEQ ID NO: 229295 - DNA, 19 bp, Homo sapiens
  siRNA target sequence for HERC1 (NM_003922.1,2237-2255).
gcttagatggcatagctat

SEQ ID NO: 229296 - DNA, 19 bp, Homo sapiens
  siRNA target sequence for HERC1 (NM_003922.1,2238-2256).
cttagatggcatagctatt

SEQ ID NO: 229297 - DNA, 19 bp, Homo sapiens
  siRNA target sequence for HERC1 (NM_003922.1,2326-2344).
gcatggcaccgaccttatt

SEQ ID NO: 229298 - DNA, 19 bp, Homo sapiens
  siRNA target sequence for HERC1 (NM_003922.1,2330-2348).
ggcaccgaccttattgtgt

SEQ ID NO: 229299 - DNA, 19 bp, Homo sapiens
  siRNA target sequence for HERC1 (NM_003922.1,2331-2349).
gcaccgaccttattgtgta

SEQ ID NO: 229300 - DNA, 19 bp, Homo sapiens
  siRNA target sequence for HERC1 (NM_003922.1,2334-2352).
ccgaccttattgtgtagat

SEQ ID NO: 229301 - DNA, 19 bp, Homo sapiens
  siRNA target sequence for HERC1 (NM_003922.1,2336-2354).
gaccttattgtgtagatct

SEQ ID NO: 229302 - DNA, 19 bp, Homo sapiens
  siRNA target sequence for HERC1 (NM_003922.1,2339-2357).
cttattgtgtagatcttga

SEQ ID NO: 229303 - DNA, 19 bp, Homo sapiens
  siRNA target sequence for HERC1 (NM_003922.1,2370-2388).
ctcacacctgcgttctttt

SEQ ID NO: 229304 - DNA, 19 bp, Homo sapiens
  siRNA target sequence for HERC1 (NM_003922.1,2372-2390).
cacacctgcgttcttttct

SEQ ID NO: 229305 - DNA, 19 bp, Homo sapiens
  siRNA target sequence for HERC1 (NM_003922.1,2433-2451).
ccctttcccttcatcaaga

SEQ ID NO: 229306 - DNA, 19 bp, Homo sapiens
  siRNA target sequence for HERC1 (NM_003922.1,2477-2495).
gcctgaagctactttcaaa

SEQ ID NO: 229307 - DNA, 19 bp, Homo sapiens
  siRNA target sequence for HERC1 (NM_003922.1,2550-2568).
ggcaggtccacttcgaaat

SEQ ID NO: 229308 - DNA, 19 bp, Homo sapiens
  siRNA target sequence for HERC1 (NM_003922.1,2551-2569).
gcaggtccacttcgaaatt

SEQ ID NO: 229309 - DNA, 19 bp, Homo sapiens
  siRNA target sequence for HERC1 (NM_003922.1,2552-2570).
caggtccacttcgaaattt

SEQ ID NO: 229310 - DNA, 19 bp, Homo sapiens
  siRNA target sequence for HERC1 (NM_003922.1,2589-2607).
ctcaactgtcccagatgaa

SEQ ID NO: 229311 - DNA, 19 bp, Homo sapiens
  siRNA target sequence for HERC1 (NM_003922.1,2649-2667).
catgctgttacctccatta

SEQ ID NO: 229312 - DNA, 19 bp, Homo sapiens
  siRNA target sequence for HERC1 (NM_003922.1,2721-2739).
ggaaagcttatctaaagga

SEQ ID NO: 229313 - DNA, 19 bp, Homo sapiens
  siRNA target sequence for HERC1 (NM_003922.1,2744-2762).
gaatgcaactggatatcat

SEQ ID NO: 229314 - DNA, 19 bp, Homo sapiens
  siRNA target sequence for HERC1 (NM_003922.1,2755-2773).
gatatcatcctgacaagtt

SEQ ID NO: 229315 - DNA, 19 bp, Homo sapiens
  siRNA target sequence for HERC1 (NM_003922.1,2766-2784).
gacaagtttgcaagatcat

SEQ ID NO: 229316 - DNA, 19 bp, Homo sapiens
  siRNA target sequence for HERC1 (NM_003922.1,2796-2814).
ctccctacttggctatagt

SEQ ID NO: 229317 - DNA, 19 bp, Homo sapiens
  siRNA target sequence for HERC1 (NM_003922.1,3060-3078).
gctatgttcactacagaaa

SEQ ID NO: 229318 - DNA, 19 bp, Homo sapiens
  siRNA target sequence for HERC1 (NM_003922.1,3089-3107).
cattttgccatatcaataa

SEQ ID NO: 229319 - DNA, 19 bp, Homo sapiens
  siRNA target sequence for HERC1 (NM_003922.1,3128-3146).
gtgtggcattgcttcataa

SEQ ID NO: 229320 - DNA, 19 bp, Homo sapiens
  siRNA target sequence for HERC1 (NM_003922.1,3188-3206).
cacgttctgcaaatttgct

SEQ ID NO: 229321 - DNA, 19 bp, Homo sapiens
  siRNA target sequence for HERC1 (NM_003922.1,3194-3212).
ctgcaaatttgctcaaaga

SEQ ID NO: 229322 - DNA, 19 bp, Homo sapiens
  siRNA target sequence for HERC1 (NM_003922.1,3325-3343).
gtggctcggcctttattga

SEQ ID NO: 229323 - DNA, 19 bp, Homo sapiens
  siRNA target sequence for HERC1 (NM_003922.1,3328-3346).
gctcggcctttattgagtt

SEQ ID NO: 229324 - DNA, 19 bp, Homo sapiens
  siRNA target sequence for HERC1 (NM_003922.1,3344-3362).
gttacctcctcgacttgtt

SEQ ID NO: 229325 - DNA, 19 bp, Homo sapiens
  siRNA target sequence for HERC1 (NM_003922.1,3393-3411).
gccagctgctgatctttta

SEQ ID NO: 229326 - DNA, 19 bp, Homo sapiens
  siRNA target sequence for HERC1 (NM_003922.1,3507-3525).
gcttgtggatctagaaaga

SEQ ID NO: 229327 - DNA, 19 bp, Homo sapiens
  siRNA target sequence for HERC1 (NM_003922.1,3627-3645).
gttcagtgacggtgtagaa

SEQ ID NO: 229328 - DNA, 19 bp, Homo sapiens
  siRNA target sequence for HERC1 (NM_003922.1,3655-3673).
cctcaattggataaatgta

SEQ ID NO: 229329 - DNA, 19 bp, Homo sapiens
  siRNA target sequence for HERC1 (NM_003922.1,3684-3702).
gttagaagtagcactttct

SEQ ID NO: 229330 - DNA, 19 bp, Homo sapiens
  siRNA target sequence for HERC1 (NM_003922.1,3712-3730).
gaacagaagccttttgatt

SEQ ID NO: 229331 - DNA, 19 bp, Homo sapiens
  siRNA target sequence for HERC1 (NM_003922.1,3765-3783).
cttggcattgggttgttct

SEQ ID NO: 229332 - DNA, 19 bp, Homo sapiens
  siRNA target sequence for HERC1 (NM_003922.1,3768-3786).
ggcattgggttgttctaaa

SEQ ID NO: 229333 - DNA, 19 bp, Homo sapiens
  siRNA target sequence for HERC1 (NM_003922.1,3791-3809).
ctgcccgaagcctttggat

SEQ ID NO: 229334 - DNA, 19 bp, Homo sapiens
  siRNA target sequence for HERC1 (NM_003922.1,3918-3936).
cacaaatttacttagtcaa

SEQ ID NO: 229335 - DNA, 19 bp, Homo sapiens
  siRNA target sequence for HERC1 (NM_003922.1,3951-3969).
ccgatatcaacctggtaaa

SEQ ID NO: 229336 - DNA, 19 bp, Homo sapiens
  siRNA target sequence for HERC1 (NM_003922.1,3979-3997).
gaagtgtaccgttgtgtat

SEQ ID NO: 229337 - DNA, 19 bp, Homo sapiens
  siRNA target sequence for HERC1 (NM_003922.1,3982-4000).
gtgtaccgttgtgtataca

SEQ ID NO: 229338 - DNA, 19 bp, Homo sapiens
  siRNA target sequence for HERC1 (NM_003922.1,3984-4002).
gtaccgttgtgtatacaaa

SEQ ID NO: 229339 - DNA, 19 bp, Homo sapiens
  siRNA target sequence for HERC1 (NM_003922.1,4025-4043).
gcaagaaccttgaacttat

SEQ ID NO: 229340 - DNA, 19 bp, Homo sapiens
  siRNA target sequence for HERC1 (NM_003922.1,4026-4044).
caagaaccttgaacttatt

SEQ ID NO: 229341 - DNA, 19 bp, Homo sapiens
  siRNA target sequence for HERC1 (NM_003922.1,4029-4047).
gaaccttgaacttattcaa

SEQ ID NO: 229342 - DNA, 19 bp, Homo sapiens
  siRNA target sequence for HERC1 (NM_003922.1,4032-4050).
ccttgaacttattcaaaca

SEQ ID NO: 229343 - DNA, 19 bp, Homo sapiens
  siRNA target sequence for HERC1 (NM_003922.1,4033-4051).
cttgaacttattcaaacaa

SEQ ID NO: 229344 - DNA, 19 bp, Homo sapiens
  siRNA target sequence for HERC1 (NM_003922.1,4065-4083).
ggacagatggatatcagaa

SEQ ID NO: 229345 - DNA, 19 bp, Homo sapiens
  siRNA target sequence for HERC1 (NM_003922.1,4121-4139).
catttactcgaactattga

SEQ ID NO: 229346 - DNA, 19 bp, Homo sapiens
  siRNA target sequence for HERC1 (NM_003922.1,4238-4256).
cagctggcaaaatctttca

SEQ ID NO: 229347 - DNA, 19 bp, Homo sapiens
  siRNA target sequence for HERC1 (NM_003922.1,4240-4258).
gctggcaaaatctttcagt

SEQ ID NO: 229348 - DNA, 19 bp, Homo sapiens
  siRNA target sequence for HERC1 (NM_003922.1,4263-4281).
cctctcagcccgtgaagta

SEQ ID NO: 229349 - DNA, 19 bp, Homo sapiens
  siRNA target sequence for HERC1 (NM_003922.1,4289-4307).
gccgagaccgagatagaat

SEQ ID NO: 229350 - DNA, 19 bp, Homo sapiens
  siRNA target sequence for HERC1 (NM_003922.1,4291-4309).
cgagaccgagatagaatga

SEQ ID NO: 229351 - DNA, 19 bp, Homo sapiens
  siRNA target sequence for HERC1 (NM_003922.1,4391-4409).
ctgagggtcaggatgtgta

SEQ ID NO: 229352 - DNA, 19 bp, Homo sapiens
  siRNA target sequence for HERC1 (NM_003922.1,4438-4456).
cggtgtgccctgttaatat

SEQ ID NO: 229353 - DNA, 19 bp, Homo sapiens
  siRNA target sequence for HERC1 (NM_003922.1,4460-4478).
gagtaagtcctgtgataga

SEQ ID NO: 229354 - DNA, 19 bp, Homo sapiens
  siRNA target sequence for HERC1 (NM_003922.1,4512-4530).
gcagcaaccttcaacaagt

SEQ ID NO: 229355 - DNA, 19 bp, Homo sapiens
  siRNA target sequence for HERC1 (NM_003922.1,4549-4567).
cttatgaccaggagtgaaa

SEQ ID NO: 229356 - DNA, 19 bp, Homo sapiens
  siRNA target sequence for HERC1 (NM_003922.1,4598-4616).
caagcccaaattatagact

SEQ ID NO: 229357 - DNA, 19 bp, Homo sapiens
  siRNA target sequence for HERC1 (NM_003922.1,4620-4638).
caaatcgaggagtgaatct

SEQ ID NO: 229358 - DNA, 19 bp, Homo sapiens
  siRNA target sequence for HERC1 (NM_003922.1,4625-4643).
cgaggagtgaatctgattt

SEQ ID NO: 229359 - DNA, 19 bp, Homo sapiens
  siRNA target sequence for HERC1 (NM_003922.1,4629-4647).
gagtgaatctgatttgtct

SEQ ID NO: 229360 - DNA, 19 bp, Homo sapiens
  siRNA target sequence for HERC1 (NM_003922.1,4732-4750).
ggtcctatgcacagtcaat

SEQ ID NO: 229361 - DNA, 19 bp, Homo sapiens
  siRNA target sequence for HERC1 (NM_003922.1,4736-4754).
ctatgcacagtcaattgga

SEQ ID NO: 229362 - DNA, 19 bp, Homo sapiens
  siRNA target sequence for HERC1 (NM_003922.1,4769-4787).
cttgggctcgcctgaaaca

SEQ ID NO: 229363 - DNA, 19 bp, Homo sapiens
  siRNA target sequence for HERC1 (NM_003922.1,4854-4872).
gggagttcacactttgatt

SEQ ID NO: 229364 - DNA, 19 bp, Homo sapiens
  siRNA target sequence for HERC1 (NM_003922.1,4856-4874).
gagttcacactttgattga

SEQ ID NO: 229365 - DNA, 19 bp, Homo sapiens
  siRNA target sequence for HERC1 (NM_003922.1,4905-4923).
ggggaatgccccaggtttt

SEQ ID NO: 229366 - DNA, 19 bp, Homo sapiens
  siRNA target sequence for HERC1 (NM_003922.1,4907-4925).
ggaatgccccaggttttaa

SEQ ID NO: 229367 - DNA, 19 bp, Homo sapiens
  siRNA target sequence for HERC1 (NM_003922.1,4908-4926).
gaatgccccaggttttaaa

SEQ ID NO: 229368 - DNA, 19 bp, Homo sapiens
  siRNA target sequence for HERC1 (NM_003922.1,4929-4947).
gccagaggaaagtatgtct

SEQ ID NO: 229369 - DNA, 19 bp, Homo sapiens
  siRNA target sequence for HERC1 (NM_003922.1,4930-4948).
ccagaggaaagtatgtcta

SEQ ID NO: 229370 - DNA, 19 bp, Homo sapiens
  siRNA target sequence for HERC1 (NM_003922.1,4986-5004).
gcagttaagggcagaactt

SEQ ID NO: 229371 - DNA, 19 bp, Homo sapiens
  siRNA target sequence for HERC1 (NM_003922.1,5006-5024).
gtttagaggcacttcatca

SEQ ID NO: 229372 - DNA, 19 bp, Homo sapiens
  siRNA target sequence for HERC1 (NM_003922.1,5020-5038).
catcagatcctcgttctat

SEQ ID NO: 229373 - DNA, 19 bp, Homo sapiens
  siRNA target sequence for HERC1 (NM_003922.1,5023-5041).
cagatcctcgttctattgt

SEQ ID NO: 229374 - DNA, 19 bp, Homo sapiens
  siRNA target sequence for HERC1 (NM_003922.1,5025-5043).
gatcctcgttctattgtct

SEQ ID NO: 229375 - DNA, 19 bp, Homo sapiens
  siRNA target sequence for HERC1 (NM_003922.1,5136-5154).
gttcctagcagggtgtttt

SEQ ID NO: 229376 - DNA, 19 bp, Homo sapiens
  siRNA target sequence for HERC1 (NM_003922.1,5140-5158).
ctagcagggtgttttggtt

SEQ ID NO: 229377 - DNA, 19 bp, Homo sapiens
  siRNA target sequence for HERC1 (NM_003922.1,5231-5249).
cagctaagagaaatattca

SEQ ID NO: 229378 - DNA, 19 bp, Homo sapiens
  siRNA target sequence for HERC1 (NM_003922.1,5321-5339).
caaacaagcatcacattga

SEQ ID NO: 229379 - DNA, 19 bp, Homo sapiens
  siRNA target sequence for HERC1 (NM_003922.1,5375-5393).
ccctaagtgttcattatca

SEQ ID NO: 229380 - DNA, 19 bp, Homo sapiens
  siRNA target sequence for HERC1 (NM_003922.1,5420-5438).
ccactggtctgctaaacgt

SEQ ID NO: 229381 - DNA, 19 bp, Homo sapiens
  siRNA target sequence for HERC1 (NM_003922.1,5421-5439).
cactggtctgctaaacgta

SEQ ID NO: 229382 - DNA, 19 bp, Homo sapiens
  siRNA target sequence for HERC1 (NM_003922.1,5423-5441).
ctggtctgctaaacgtatt

SEQ ID NO: 229383 - DNA, 19 bp, Homo sapiens
  siRNA target sequence for HERC1 (NM_003922.1,5425-5443).
ggtctgctaaacgtattgt

SEQ ID NO: 229384 - DNA, 19 bp, Homo sapiens
  siRNA target sequence for HERC1 (NM_003922.1,5514-5532).
gcttagcacagctttgaaa

SEQ ID NO: 229385 - DNA, 19 bp, Homo sapiens
  siRNA target sequence for HERC1 (NM_003922.1,5573-5591).
ctgggacctatgctgataa

SEQ ID NO: 229386 - DNA, 19 bp, Homo sapiens
  siRNA target sequence for HERC1 (NM_003922.1,5595-5613).
gagtcccaaagtagttcaa

SEQ ID NO: 229387 - DNA, 19 bp, Homo sapiens
  siRNA target sequence for HERC1 (NM_003922.1,5629-5647).
ctctgtagtcagttgaaga

SEQ ID NO: 229388 - DNA, 19 bp, Homo sapiens
  siRNA target sequence for HERC1 (NM_003922.1,5657-5675).
cccaaactggtgtactaca

SEQ ID NO: 229389 - DNA, 19 bp, Homo sapiens
  siRNA target sequence for HERC1 (NM_003922.1,5658-5676).
ccaaactggtgtactacat

SEQ ID NO: 229390 - DNA, 19 bp, Homo sapiens
  siRNA target sequence for HERC1 (NM_003922.1,5659-5677).
caaactggtgtactacata

SEQ ID NO: 229391 - DNA, 19 bp, Homo sapiens
  siRNA target sequence for HERC1 (NM_003922.1,5766-5784).
cagagctgctcttaggaaa

SEQ ID NO: 229392 - DNA, 19 bp, Homo sapiens
  siRNA target sequence for HERC1 (NM_003922.1,5802-5820).
ccatctaggggatttttta

SEQ ID NO: 229393 - DNA, 19 bp, Homo sapiens
  siRNA target sequence for HERC1 (NM_003922.1,5827-5845).
cttcgcagagttgtatctt

SEQ ID NO: 229394 - DNA, 19 bp, Homo sapiens
  siRNA target sequence for HERC1 (NM_003922.1,5883-5901).
gaccgaagtgcttctaaat

SEQ ID NO: 229395 - DNA, 19 bp, Homo sapiens
  siRNA target sequence for HERC1 (NM_003922.1,5885-5903).
ccgaagtgcttctaaatat

SEQ ID NO: 229396 - DNA, 19 bp, Homo sapiens
  siRNA target sequence for HERC1 (NM_003922.1,5886-5904).
cgaagtgcttctaaatata

SEQ ID NO: 229397 - DNA, 19 bp, Homo sapiens
  siRNA target sequence for HERC1 (NM_003922.1,5890-5908).
gtgcttctaaatatagcat

SEQ ID NO: 229398 - DNA, 19 bp, Homo sapiens
  siRNA target sequence for HERC1 (NM_003922.1,5927-5945).
gtatccctctggttggtaa

SEQ ID NO: 229399 - DNA, 19 bp, Homo sapiens
  siRNA target sequence for HERC1 (NM_003922.1,5932-5950).
cctctggttggtaacttaa

SEQ ID NO: 229400 - DNA, 19 bp, Homo sapiens
  siRNA target sequence for HERC1 (NM_003922.1,5986-6004).
gtgctgccagcttgtgaat

SEQ ID NO: 229401 - DNA, 19 bp, Homo sapiens
  siRNA target sequence for HERC1 (NM_003922.1,6005-6023).
ctggtgtagaagatgatca

SEQ ID NO: 229402 - DNA, 19 bp, Homo sapiens
  siRNA target sequence for HERC1 (NM_003922.1,6033-6051).
gattgttgagcgcttattt

SEQ ID NO: 229403 - DNA, 19 bp, Homo sapiens
  siRNA target sequence for HERC1 (NM_003922.1,6089-6107).
ctcaggccaaacatgctat

SEQ ID NO: 229404 - DNA, 19 bp, Homo sapiens
  siRNA target sequence for HERC1 (NM_003922.1,6178-6196).
cttcctatccaagaagtat

SEQ ID NO: 229405 - DNA, 19 bp, Homo sapiens
  siRNA target sequence for HERC1 (NM_003922.1,6282-6300).
ggcatctacaggagtaact

SEQ ID NO: 229406 - DNA, 19 bp, Homo sapiens
  siRNA target sequence for HERC1 (NM_003922.1,6283-6301).
gcatctacaggagtaactt

SEQ ID NO: 229407 - DNA, 19 bp, Homo sapiens
  siRNA target sequence for HERC1 (NM_003922.1,6306-6324).
gtgctatcagtggaagttt

SEQ ID NO: 229408 - DNA, 19 bp, Homo sapiens
  siRNA target sequence for HERC1 (NM_003922.1,6383-6401).
cagtacatgactttaatca

SEQ ID NO: 229409 - DNA, 19 bp, Homo sapiens
  siRNA target sequence for HERC1 (NM_003922.1,6440-6458).
gtggtaacctctatcacaa

SEQ ID NO: 229410 - DNA, 19 bp, Homo sapiens
  siRNA target sequence for HERC1 (NM_003922.1,6476-6494).
cattgtccagctttactca

SEQ ID NO: 229411 - DNA, 19 bp, Homo sapiens
  siRNA target sequence for HERC1 (NM_003922.1,6526-6544).
gaagccaggaccatttctt

SEQ ID NO: 229412 - DNA, 19 bp, Homo sapiens
  siRNA target sequence for HERC1 (NM_003922.1,6559-6577).
gaggaacccaaattagctt

SEQ ID NO: 229413 - DNA, 19 bp, Homo sapiens
  siRNA target sequence for HERC1 (NM_003922.1,6561-6579).
ggaacccaaattagctttt

SEQ ID NO: 229414 - DNA, 19 bp, Homo sapiens
  siRNA target sequence for HERC1 (NM_003922.1,6606-6624).
cccatgtgtgatgttctat

SEQ ID NO: 229415 - DNA, 19 bp, Homo sapiens
  siRNA target sequence for HERC1 (NM_003922.1,6615-6633).
gatgttctatagtagcaat

SEQ ID NO: 229416 - DNA, 19 bp, Homo sapiens
  siRNA target sequence for HERC1 (NM_003922.1,6674-6692).
gcacaccccgagacttact

SEQ ID NO: 229417 - DNA, 19 bp, Homo sapiens
  siRNA target sequence for HERC1 (NM_003922.1,6675-6693).
cacaccccgagacttactt

SEQ ID NO: 229418 - DNA, 19 bp, Homo sapiens
  siRNA target sequence for HERC1 (NM_003922.1,6729-6747).
gctggctgaggccactatt

SEQ ID NO: 229419 - DNA, 19 bp, Homo sapiens
  siRNA target sequence for HERC1 (NM_003922.1,6815-6833).
ggcttcacaaaattaagat

SEQ ID NO: 229420 - DNA, 19 bp, Homo sapiens
  siRNA target sequence for HERC1 (NM_003922.1,6844-6862).
gagtcaggtcagaagctaa

SEQ ID NO: 229421 - DNA, 19 bp, Homo sapiens
  siRNA target sequence for HERC1 (NM_003922.1,6884-6902).
gccgagaggaaaatgaaat

SEQ ID NO: 229422 - DNA, 19 bp, Homo sapiens
  siRNA target sequence for HERC1 (NM_003922.1,6981-6999).
gctgaggactctttgcata

SEQ ID NO: 229423 - DNA, 19 bp, Homo sapiens
  siRNA target sequence for HERC1 (NM_003922.1,7055-7073).
gaggtcggtgtgttcacaa

SEQ ID NO: 229424 - DNA, 19 bp, Homo sapiens
  siRNA target sequence for HERC1 (NM_003922.1,7060-7078).
cggtgtgttcacaagcaaa

SEQ ID NO: 229425 - DNA, 19 bp, Homo sapiens
  siRNA target sequence for HERC1 (NM_003922.1,7187-7205).
ctagtgatactccattgta

SEQ ID NO: 229426 - DNA, 19 bp, Homo sapiens
  siRNA target sequence for HERC1 (NM_003922.1,7270-7288).
gtgctgctggacctaacat

SEQ ID NO: 229427 - DNA, 19 bp, Homo sapiens
  siRNA target sequence for HERC1 (NM_003922.1,7295-7313).
ctggcgttcatgaagacat

SEQ ID NO: 229428 - DNA, 19 bp, Homo sapiens
  siRNA target sequence for HERC1 (NM_003922.1,7325-7343).
gcaccaaacgacatgaaaa

SEQ ID NO: 229429 - DNA, 19 bp, Homo sapiens
  siRNA target sequence for HERC1 (NM_003922.1,7397-7415).
gtgaatccgctttagatat

SEQ ID NO: 229430 - DNA, 19 bp, Homo sapiens
  siRNA target sequence for HERC1 (NM_003922.1,7416-7434).
gcgaacaggcctaacatct

SEQ ID NO: 229431 - DNA, 19 bp, Homo sapiens
  siRNA target sequence for HERC1 (NM_003922.1,7433-7451).
ctgatgacgtcaaaagtca

SEQ ID NO: 229432 - DNA, 19 bp, Homo sapiens
  siRNA target sequence for HERC1 (NM_003922.1,7485-7503).
cgcttcattttctttagat

SEQ ID NO: 229433 - DNA, 19 bp, Homo sapiens
  siRNA target sequence for HERC1 (NM_003922.1,7517-7535).
gtgtggaatcccaacatca

SEQ ID NO: 229434 - DNA, 19 bp, Homo sapiens
  siRNA target sequence for HERC1 (NM_003922.1,7521-7539).
ggaatcccaacatcaaata

SEQ ID NO: 229435 - DNA, 19 bp, Homo sapiens
  siRNA target sequence for HERC1 (NM_003922.1,7522-7540).
gaatcccaacatcaaataa

SEQ ID NO: 229436 - DNA, 19 bp, Homo sapiens
  siRNA target sequence for HERC1 (NM_003922.1,7561-7579).
catgaacacatgtccaaaa

SEQ ID NO: 229437 - DNA, 19 bp, Homo sapiens
  siRNA target sequence for HERC1 (NM_003922.1,7588-7606).
gtagcccagtcagaaatca

SEQ ID NO: 229438 - DNA, 19 bp, Homo sapiens
  siRNA target sequence for HERC1 (NM_003922.1,7684-7702).
gagctgttgctgataccaa

SEQ ID NO: 229439 - DNA, 19 bp, Homo sapiens
  siRNA target sequence for HERC1 (NM_003922.1,7689-7707).
gttgctgataccaaaagtt

SEQ ID NO: 229440 - DNA, 19 bp, Homo sapiens
  siRNA target sequence for HERC1 (NM_003922.1,7700-7718).
caaaagttctggctgaaaa

SEQ ID NO: 229441 - DNA, 19 bp, Homo sapiens
  siRNA target sequence for HERC1 (NM_003922.1,7824-7842).
gcggtcacccataaagaga

SEQ ID NO: 229442 - DNA, 19 bp, Homo sapiens
  siRNA target sequence for HERC1 (NM_003922.1,7839-7857).
gagagcattgggattagct

SEQ ID NO: 229443 - DNA, 19 bp, Homo sapiens
  siRNA target sequence for HERC1 (NM_003922.1,7867-7885).
cgagcgcaagccatgatct

SEQ ID NO: 229444 - DNA, 19 bp, Homo sapiens
  siRNA target sequence for HERC1 (NM_003922.1,7868-7886).
gagcgcaagccatgatcta

SEQ ID NO: 229445 - DNA, 19 bp, Homo sapiens
  siRNA target sequence for HERC1 (NM_003922.1,7870-7888).
gcgcaagccatgatctata

SEQ ID NO: 229446 - DNA, 19 bp, Homo sapiens
  siRNA target sequence for HERC1 (NM_003922.1,7871-7889).
cgcaagccatgatctataa

SEQ ID NO: 229447 - DNA, 19 bp, Homo sapiens
  siRNA target sequence for HERC1 (NM_003922.1,7873-7891).
caagccatgatctataaat

SEQ ID NO: 229448 - DNA, 19 bp, Homo sapiens
  siRNA target sequence for HERC1 (NM_003922.1,7938-7956).
gcaagagattgatcaacaa

SEQ ID NO: 229449 - DNA, 19 bp, Homo sapiens
  siRNA target sequence for HERC1 (NM_003922.1,8117-8135).
gagtgatgcctcttagtct

SEQ ID NO: 229450 - DNA, 19 bp, Homo sapiens
  siRNA target sequence for HERC1 (NM_003922.1,8194-8212).
cagactcctccaatatctt

SEQ ID NO: 229451 - DNA, 19 bp, Homo sapiens
  siRNA target sequence for HERC1 (NM_003922.1,8313-8331).
cccaagcagtagactttca

SEQ ID NO: 229452 - DNA, 19 bp, Homo sapiens
  siRNA target sequence for HERC1 (NM_003922.1,8568-8586).
gtcaaatgatccctgttat

SEQ ID NO: 229453 - DNA, 19 bp, Homo sapiens
  siRNA target sequence for HERC1 (NM_003922.1,8570-8588).
caaatgatccctgttattt

SEQ ID NO: 229454 - DNA, 19 bp, Homo sapiens
  siRNA target sequence for HERC1 (NM_003922.1,8589-8607).
gcagtcacctggagacata

SEQ ID NO: 229455 - DNA, 19 bp, Homo sapiens
  siRNA target sequence for HERC1 (NM_003922.1,8631-8649).
ggaggaaggttttagtgaa

SEQ ID NO: 229456 - DNA, 19 bp, Homo sapiens
  siRNA target sequence for HERC1 (NM_003922.1,8653-8671).
cctgataatttggatcata

SEQ ID NO: 229457 - DNA, 19 bp, Homo sapiens
  siRNA target sequence for HERC1 (NM_003922.1,8710-8728).
ggtcgctcagcggtaacaa

SEQ ID NO: 229458 - DNA, 19 bp, Homo sapiens
  siRNA target sequence for HERC1 (NM_003922.1,8713-8731).
cgctcagcggtaacaagaa

SEQ ID NO: 229459 - DNA, 19 bp, Homo sapiens
  siRNA target sequence for HERC1 (NM_003922.1,8767-8785).
gcaagagcagcgggattat

SEQ ID NO: 229460 - DNA, 19 bp, Homo sapiens
  siRNA target sequence for HERC1 (NM_003922.1,8768-8786).
caagagcagcgggattata

SEQ ID NO: 229461 - DNA, 19 bp, Homo sapiens
  siRNA target sequence for HERC1 (NM_003922.1,8796-8814).
gcaggcccacaggaatcaa

SEQ ID NO: 229462 - DNA, 19 bp, Homo sapiens
  siRNA target sequence for HERC1 (NM_003922.1,8799-8817).
ggcccacaggaatcaaagt

SEQ ID NO: 229463 - DNA, 19 bp, Homo sapiens
  siRNA target sequence for HERC1 (NM_003922.1,8853-8871).
ggcgttgtatgactttaat

SEQ ID NO: 229464 - DNA, 19 bp, Homo sapiens
  siRNA target sequence for HERC1 (NM_003922.1,8854-8872).
gcgttgtatgactttaatt

SEQ ID NO: 229465 - DNA, 19 bp, Homo sapiens
  siRNA target sequence for HERC1 (NM_003922.1,8988-9006).
gcctacctggcatgtttgt

SEQ ID NO: 229466 - DNA, 19 bp, Homo sapiens
  siRNA target sequence for HERC1 (NM_003922.1,9056-9074).
gcgtcgtcagcttcaatca

SEQ ID NO: 229467 - DNA, 19 bp, Homo sapiens
  siRNA target sequence for HERC1 (NM_003922.1,9156-9174).
ctggtttggcggtgaatgt

SEQ ID NO: 229468 - DNA, 19 bp, Homo sapiens
  siRNA target sequence for HERC1 (NM_003922.1,9210-9228).
ctgcagggagaagtactta

SEQ ID NO: 229469 - DNA, 19 bp, Homo sapiens
  siRNA target sequence for HERC1 (NM_003922.1,9234-9252).
gaagaccaaatctaagtca

SEQ ID NO: 229470 - DNA, 19 bp, Homo sapiens
  siRNA target sequence for HERC1 (NM_003922.1,9273-9291).
gggacaagctccagatcta

SEQ ID NO: 229471 - DNA, 19 bp, Homo sapiens
  siRNA target sequence for HERC1 (NM_003922.1,9275-9293).
gacaagctccagatctaat

SEQ ID NO: 229472 - DNA, 19 bp, Homo sapiens
  siRNA target sequence for HERC1 (NM_003922.1,9297-9315).
caagcaagacagtgtgtat

SEQ ID NO: 229473 - DNA, 19 bp, Homo sapiens
  siRNA target sequence for HERC1 (NM_003922.1,9388-9406).
gctggaccgcttggtttaa

SEQ ID NO: 229474 - DNA, 19 bp, Homo sapiens
  siRNA target sequence for HERC1 (NM_003922.1,9389-9407).
ctggaccgcttggtttaaa

SEQ ID NO: 229475 - DNA, 19 bp, Homo sapiens
  siRNA target sequence for HERC1 (NM_003922.1,9392-9410).
gaccgcttggtttaaatga

SEQ ID NO: 229476 - DNA, 19 bp, Homo sapiens
  siRNA target sequence for HERC1 (NM_003922.1,9499-9517).
gaagagactctgatgcaaa

SEQ ID NO: 229477 - DNA, 19 bp, Homo sapiens
  siRNA target sequence for HERC1 (NM_003922.1,9526-9544).
catggctccgtagaaaaga

SEQ ID NO: 229478 - DNA, 19 bp, Homo sapiens
  siRNA target sequence for HERC1 (NM_003922.1,9729-9747).
gtctctggggctaacagat

SEQ ID NO: 229479 - DNA, 19 bp, Homo sapiens
  siRNA target sequence for HERC1 (NM_003922.1,9731-9749).
ctctggggctaacagatat

SEQ ID NO: 229480 - DNA, 19 bp, Homo sapiens
  siRNA target sequence for HERC1 (NM_003922.1,9750-9768).
ccgaacgctagttcgatta

SEQ ID NO: 229481 - DNA, 19 bp, Homo sapiens
  siRNA target sequence for HERC1 (NM_003922.1,9751-9769).
cgaacgctagttcgattaa

SEQ ID NO: 229482 - DNA, 19 bp, Homo sapiens
  siRNA target sequence for HERC1 (NM_003922.1,9752-9770).
gaacgctagttcgattaat

SEQ ID NO: 229483 - DNA, 19 bp, Homo sapiens
  siRNA target sequence for HERC1 (NM_003922.1,9851-9869).
ggcatagcaaggctaacaa

SEQ ID NO: 229484 - DNA, 19 bp, Homo sapiens
  siRNA target sequence for HERC1 (NM_003922.1,9861-9879).
ggctaacaagcctatctct

SEQ ID NO: 229485 - DNA, 19 bp, Homo sapiens
  siRNA target sequence for HERC1 (NM_003922.1,9957-9975).
gtgtacacagaacttgatt

SEQ ID NO: 229486 - DNA, 19 bp, Homo sapiens
  siRNA target sequence for HERC1 (NM_003922.1,9982-10000).
gcaacaggtgtaaatctaa

SEQ ID NO: 229487 - DNA, 19 bp, Homo sapiens
  siRNA target sequence for HERC1 (NM_003922.1,10002-10020).
cacagttgatgactcaatt

SEQ ID NO: 229488 - DNA, 19 bp, Homo sapiens
  siRNA target sequence for HERC1 (NM_003922.1,10004-10022).
cagttgatgactcaattca

SEQ ID NO: 229489 - DNA, 19 bp, Homo sapiens
  siRNA target sequence for HERC1 (NM_003922.1,10014-10032).
ctcaattcagcgaaagttt

SEQ ID NO: 229490 - DNA, 19 bp, Homo sapiens
  siRNA target sequence for HERC1 (NM_003922.1,10041-10059).
ctttctccgaggaattgct

SEQ ID NO: 229491 - DNA, 19 bp, Homo sapiens
  siRNA target sequence for HERC1 (NM_003922.1,10077-10095).
gacctccccaaactttgtt

SEQ ID NO: 229492 - DNA, 19 bp, Homo sapiens
  siRNA target sequence for HERC1 (NM_003922.1,10126-10144).
gacaaaggggccaaactaa

SEQ ID NO: 229493 - DNA, 19 bp, Homo sapiens
  siRNA target sequence for HERC1 (NM_003922.1,10128-10146).
caaaggggccaaactaaga

SEQ ID NO: 229494 - DNA, 19 bp, Homo sapiens
  siRNA target sequence for HERC1 (NM_003922.1,10136-10154).
ccaaactaagacctaacta

SEQ ID NO: 229495 - DNA, 19 bp, Homo sapiens
  siRNA target sequence for HERC1 (NM_003922.1,10137-10155).
caaactaagacctaactat

SEQ ID NO: 229496 - DNA, 19 bp, Homo sapiens
  siRNA target sequence for HERC1 (NM_003922.1,10288-10306).
cacgaccgtgacaaccaaa

SEQ ID NO: 229497 - DNA, 19 bp, Homo sapiens
  siRNA target sequence for HERC1 (NM_003922.1,10291-10309).
gaccgtgacaaccaaacta

SEQ ID NO: 229498 - DNA, 19 bp, Homo sapiens
  siRNA target sequence for HERC1 (NM_003922.1,10332-10350).
gggaggagatcttagaaaa

SEQ ID NO: 229499 - DNA, 19 bp, Homo sapiens
  siRNA target sequence for HERC1 (NM_003922.1,10352-10370).
gctcctttatcaaattgga

SEQ ID NO: 229500 - DNA, 19 bp, Homo sapiens
  siRNA target sequence for HERC1 (NM_003922.1,10372-10390).
gctcatcagaacagagtaa

SEQ ID NO: 229501 - DNA, 19 bp, Homo sapiens
  siRNA target sequence for HERC1 (NM_003922.1,10375-10393).
catcagaacagagtaatga

SEQ ID NO: 229502 - DNA, 19 bp, Homo sapiens
  siRNA target sequence for HERC1 (NM_003922.1,10392-10410).
gacatgtgtttggtgtaat

SEQ ID NO: 229503 - DNA, 19 bp, Homo sapiens
  siRNA target sequence for HERC1 (NM_003922.1,10445-10463).
gcaccatccgcgtatggaa

SEQ ID NO: 229504 - DNA, 19 bp, Homo sapiens
  siRNA target sequence for HERC1 (NM_003922.1,10446-10464).
caccatccgcgtatggaat

SEQ ID NO: 229505 - DNA, 19 bp, Homo sapiens
  siRNA target sequence for HERC1 (NM_003922.1,10449-10467).
catccgcgtatggaatgtt

SEQ ID NO: 229506 - DNA, 19 bp, Homo sapiens
  siRNA target sequence for HERC1 (NM_003922.1,10465-10483).
gttaccaagaagcaatatt

SEQ ID NO: 229507 - DNA, 19 bp, Homo sapiens
  siRNA target sequence for HERC1 (NM_003922.1,10496-10514).
cctgtgtgttcaacagatt

SEQ ID NO: 229508 - DNA, 19 bp, Homo sapiens
  siRNA target sequence for HERC1 (NM_003922.1,10544-10562).
cacccagtgatccaagttt

SEQ ID NO: 229509 - DNA, 19 bp, Homo sapiens
  siRNA target sequence for HERC1 (NM_003922.1,10597-10615).
ctagcaggcgctttggaaa

SEQ ID NO: 229510 - DNA, 19 bp, Homo sapiens
  siRNA target sequence for HERC1 (NM_003922.1,10729-10747).
gagtctccagaattgttgt

SEQ ID NO: 229511 - DNA, 19 bp, Homo sapiens
  siRNA target sequence for HERC1 (NM_003922.1,10775-10793).
gactgattgaagttgttga

SEQ ID NO: 229512 - DNA, 19 bp, Homo sapiens
  siRNA target sequence for HERC1 (NM_003922.1,10802-10820).
ccatgcaccgtcgagaatt

SEQ ID NO: 229513 - DNA, 19 bp, Homo sapiens
  siRNA target sequence for HERC1 (NM_003922.1,10824-10842).
gcattgctatcgaaaggat

SEQ ID NO: 229514 - DNA, 19 bp, Homo sapiens
  siRNA target sequence for HERC1 (NM_003922.1,10914-10932).
gttactgggaacaaaggaa

SEQ ID NO: 229515 - DNA, 19 bp, Homo sapiens
  siRNA target sequence for HERC1 (NM_003922.1,10966-10984).
gcacataaggatactctta

SEQ ID NO: 229516 - DNA, 19 bp, Homo sapiens
  siRNA target sequence for HERC1 (NM_003922.1,10997-11015).
gggaccctacaggtcatat

SEQ ID NO: 229517 - DNA, 19 bp, Homo sapiens
  siRNA target sequence for HERC1 (NM_003922.1,10998-11016).
ggaccctacaggtcatatt

SEQ ID NO: 229518 - DNA, 19 bp, Homo sapiens
  siRNA target sequence for HERC1 (NM_003922.1,11001-11019).
ccctacaggtcatattctt

SEQ ID NO: 229519 - DNA, 19 bp, Homo sapiens
  siRNA target sequence for HERC1 (NM_003922.1,11002-11020).
cctacaggtcatattctta

SEQ ID NO: 229520 - DNA, 19 bp, Homo sapiens
  siRNA target sequence for HERC1 (NM_003922.1,11003-11021).
ctacaggtcatattcttat

SEQ ID NO: 229521 - DNA, 19 bp, Homo sapiens
  siRNA target sequence for HERC1 (NM_003922.1,11046-11064).
gaaactctggggctctatt

SEQ ID NO: 229522 - DNA, 19 bp, Homo sapiens
  siRNA target sequence for HERC1 (NM_003922.1,11075-11093).
ggtgctgtctacattcact

SEQ ID NO: 229523 - DNA, 19 bp, Homo sapiens
  siRNA target sequence for HERC1 (NM_003922.1,11090-11108).
cactctgccatccatctat

SEQ ID NO: 229524 - DNA, 19 bp, Homo sapiens
  siRNA target sequence for HERC1 (NM_003922.1,11094-11112).
ctgccatccatctattgta

SEQ ID NO: 229525 - DNA, 19 bp, Homo sapiens
  siRNA target sequence for HERC1 (NM_003922.1,11096-11114).
gccatccatctattgtaaa

SEQ ID NO: 229526 - DNA, 19 bp, Homo sapiens
  siRNA target sequence for HERC1 (NM_003922.1,11097-11115).
ccatccatctattgtaaat

SEQ ID NO: 229527 - DNA, 19 bp, Homo sapiens
  siRNA target sequence for HERC1 (NM_003922.1,11205-11223).
gcgcattcctcaagatact

SEQ ID NO: 229528 - DNA, 19 bp, Homo sapiens
  siRNA target sequence for HERC1 (NM_003922.1,11206-11224).
cgcattcctcaagatacta

SEQ ID NO: 229529 - DNA, 19 bp, Homo sapiens
  siRNA target sequence for HERC1 (NM_003922.1,11208-11226).
cattcctcaagatactaca

SEQ ID NO: 229530 - DNA, 19 bp, Homo sapiens
  siRNA target sequence for HERC1 (NM_003922.1,11270-11288).
caaattgccaggatggata

SEQ ID NO: 229531 - DNA, 19 bp, Homo sapiens
  siRNA target sequence for HERC1 (NM_003922.1,11277-11295).
ccaggatggatataggaaa

SEQ ID NO: 229532 - DNA, 19 bp, Homo sapiens
  siRNA target sequence for HERC1 (NM_003922.1,11278-11296).
caggatggatataggaaat

SEQ ID NO: 229533 - DNA, 19 bp, Homo sapiens
  siRNA target sequence for HERC1 (NM_003922.1,11280-11298).
ggatggatataggaaatca

SEQ ID NO: 229534 - DNA, 19 bp, Homo sapiens
  siRNA target sequence for HERC1 (NM_003922.1,11281-11299).
gatggatataggaaatcat

SEQ ID NO: 229535 - DNA, 19 bp, Homo sapiens
  siRNA target sequence for HERC1 (NM_003922.1,11347-11365).
cggactgttgcctttagtt

SEQ ID NO: 229536 - DNA, 19 bp, Homo sapiens
  siRNA target sequence for HERC1 (NM_003922.1,11393-11411).
gactaggtgggctcatgaa

SEQ ID NO: 229537 - DNA, 19 bp, Homo sapiens
  siRNA target sequence for HERC1 (NM_003922.1,11395-11413).
ctaggtgggctcatgaaca

SEQ ID NO: 229538 - DNA, 19 bp, Homo sapiens
  siRNA target sequence for HERC1 (NM_003922.1,11401-11419).
gggctcatgaacatttggt

SEQ ID NO: 229539 - DNA, 19 bp, Homo sapiens
  siRNA target sequence for HERC1 (NM_003922.1,11439-11457).
cttgcaaactgttgtgata

SEQ ID NO: 229540 - DNA, 19 bp, Homo sapiens
  siRNA target sequence for HERC1 (NM_003922.1,11503-11521).
gtagctgcttgctcaaata

SEQ ID NO: 229541 - DNA, 19 bp, Homo sapiens
  siRNA target sequence for HERC1 (NM_003922.1,11510-11528).
cttgctcaaatagatcaaa

SEQ ID NO: 229542 - DNA, 19 bp, Homo sapiens
  siRNA target sequence for HERC1 (NM_003922.1,11563-11581).
gcagctgccaatcatgttt

SEQ ID NO: 229543 - DNA, 19 bp, Homo sapiens
  siRNA target sequence for HERC1 (NM_003922.1,11588-11606).
cctgtaggacagcattgaa

SEQ ID NO: 229544 - DNA, 19 bp, Homo sapiens
  siRNA target sequence for HERC1 (NM_003922.1,11682-11700).
ggagcagtatgcctatgaa

SEQ ID NO: 229545 - DNA, 19 bp, Homo sapiens
  siRNA target sequence for HERC1 (NM_003922.1,11683-11701).
gagcagtatgcctatgaaa

SEQ ID NO: 229546 - DNA, 19 bp, Homo sapiens
  siRNA target sequence for HERC1 (NM_003922.1,11734-11752).
catagcccctatatgcaat

SEQ ID NO: 229547 - DNA, 19 bp, Homo sapiens
  siRNA target sequence for HERC1 (NM_003922.1,11738-11756).
gcccctatatgcaatgctt

SEQ ID NO: 229548 - DNA, 19 bp, Homo sapiens
  siRNA target sequence for HERC1 (NM_003922.1,11867-11885).
gggcctggttagaatgttt

SEQ ID NO: 229549 - DNA, 19 bp, Homo sapiens
  siRNA target sequence for HERC1 (NM_003922.1,12018-12036).
cggcatggatgaacaaatt

SEQ ID NO: 229550 - DNA, 19 bp, Homo sapiens
  siRNA target sequence for HERC1 (NM_003922.1,12066-12084).
ctggcacctgggaggtaaa

SEQ ID NO: 229551 - DNA, 19 bp, Homo sapiens
  siRNA target sequence for HERC1 (NM_003922.1,12077-12095).
gaggtaaatgtgatgtcta

SEQ ID NO: 229552 - DNA, 19 bp, Homo sapiens
  siRNA target sequence for HERC1 (NM_003922.1,12178-12196).
caggcccaacaggtcattt

SEQ ID NO: 229553 - DNA, 19 bp, Homo sapiens
  siRNA target sequence for HERC1 (NM_003922.1,12180-12198).
ggcccaacaggtcatttgt

SEQ ID NO: 229554 - DNA, 19 bp, Homo sapiens
  siRNA target sequence for HERC1 (NM_003922.1,12295-12313).
cttcatgtgctgacagtta

SEQ ID NO: 229555 - DNA, 19 bp, Homo sapiens
  siRNA target sequence for HERC1 (NM_003922.1,12362-12380).
gttctgatgggcactctat

SEQ ID NO: 229556 - DNA, 19 bp, Homo sapiens
  siRNA target sequence for HERC1 (NM_003922.1,12474-12492).
gcagatcgaggccttacaa

SEQ ID NO: 229557 - DNA, 19 bp, Homo sapiens
  siRNA target sequence for HERC1 (NM_003922.1,12598-12616).
cttggaaatacctctaaca

SEQ ID NO: 229558 - DNA, 19 bp, Homo sapiens
  siRNA target sequence for HERC1 (NM_003922.1,12664-12682).
caggtggcctgtggattaa

SEQ ID NO: 229559 - DNA, 19 bp, Homo sapiens
  siRNA target sequence for HERC1 (NM_003922.1,12798-12816).
cgtcctttgtggaattgga

SEQ ID NO: 229560 - DNA, 19 bp, Homo sapiens
  siRNA target sequence for HERC1 (NM_003922.1,12833-12851).
gtggaactcagttttctgt

SEQ ID NO: 229561 - DNA, 19 bp, Homo sapiens
  siRNA target sequence for HERC1 (NM_003922.1,12876-12894).
gtatacctttggtcaagat

SEQ ID NO: 229562 - DNA, 19 bp, Homo sapiens
  siRNA target sequence for HERC1 (NM_003922.1,12916-12934).
gggcgtgctcgcaatcaca

SEQ ID NO: 229563 - DNA, 19 bp, Homo sapiens
  siRNA target sequence for HERC1 (NM_003922.1,12917-12935).
ggcgtgctcgcaatcacaa

SEQ ID NO: 229564 - DNA, 19 bp, Homo sapiens
  siRNA target sequence for HERC1 (NM_003922.1,12931-12949).
cacaatcgaccgcaacaaa

SEQ ID NO: 229565 - DNA, 19 bp, Homo sapiens
  siRNA target sequence for HERC1 (NM_003922.1,12955-12973).
gtcctggctggagtaatca

SEQ ID NO: 229566 - DNA, 19 bp, Homo sapiens
  siRNA target sequence for HERC1 (NM_003922.1,13038-13056).
ctgggggagcaattcagaa

SEQ ID NO: 229567 - DNA, 19 bp, Homo sapiens
  siRNA target sequence for HERC1 (NM_003922.1,13397-13415).
gaacttggggcattgtaca

SEQ ID NO: 229568 - DNA, 19 bp, Homo sapiens
  siRNA target sequence for HERC1 (NM_003922.1,13418-13436).
gacaacttcggcctttgtt

SEQ ID NO: 229569 - DNA, 19 bp, Homo sapiens
  siRNA target sequence for HERC1 (NM_003922.1,13464-13482).
ggtgcgctccataggaaaa

SEQ ID NO: 229570 - DNA, 19 bp, Homo sapiens
  siRNA target sequence for HERC1 (NM_003922.1,13465-13483).
gtgcgctccataggaaaaa

SEQ ID NO: 229571 - DNA, 19 bp, Homo sapiens
  siRNA target sequence for HERC1 (NM_003922.1,13468-13486).
cgctccataggaaaaacca

SEQ ID NO: 229572 - DNA, 19 bp, Homo sapiens
  siRNA target sequence for HERC1 (NM_003922.1,13488-13506).
ggttcaaggcaaaaactat

SEQ ID NO: 229573 - DNA, 19 bp, Homo sapiens
  siRNA target sequence for HERC1 (NM_003922.1,13546-13564).
cggaagtgtaagcctattt

SEQ ID NO: 229574 - DNA, 19 bp, Homo sapiens
  siRNA target sequence for HERC1 (NM_003922.1,13548-13566).
gaagtgtaagcctattttt

SEQ ID NO: 229575 - DNA, 19 bp, Homo sapiens
  siRNA target sequence for HERC1 (NM_003922.1,13569-13587).
ccaaatagcgagacaagta

SEQ ID NO: 229576 - DNA, 19 bp, Homo sapiens
  siRNA target sequence for HERC1 (NM_003922.1,13577-13595).
cgagacaagtagttaagct

SEQ ID NO: 229577 - DNA, 19 bp, Homo sapiens
  siRNA target sequence for HERC1 (NM_003922.1,13622-13640).
cccgagcgtggaaggttaa

SEQ ID NO: 229578 - DNA, 19 bp, Homo sapiens
  siRNA target sequence for HERC1 (NM_003922.1,13625-13643).
gagcgtggaaggttaagct

SEQ ID NO: 229579 - DNA, 19 bp, Homo sapiens
  siRNA target sequence for HERC1 (NM_003922.1,13721-13739).
gtattgttgaccttcttat

SEQ ID NO: 229580 - DNA, 19 bp, Homo sapiens
  siRNA target sequence for HERC1 (NM_003922.1,13757-13775).
ccgcagaagtgggttacaa

SEQ ID NO: 229581 - DNA, 19 bp, Homo sapiens
  siRNA target sequence for HERC1 (NM_003922.1,13758-13776).
cgcagaagtgggttacaat

SEQ ID NO: 229582 - DNA, 19 bp, Homo sapiens
  siRNA target sequence for HERC1 (NM_003922.1,13806-13824).
ctgcctcgatgaacactta

SEQ ID NO: 229583 - DNA, 19 bp, Homo sapiens
  siRNA target sequence for HERC1 (NM_003922.1,13808-13826).
gcctcgatgaacacttaat

SEQ ID NO: 229584 - DNA, 19 bp, Homo sapiens
  siRNA target sequence for HERC1 (NM_003922.1,13858-13876).
gttgccattcgcacaaaga

SEQ ID NO: 229585 - DNA, 19 bp, Homo sapiens
  siRNA target sequence for HERC1 (NM_003922.1,13977-13995).
gactctcaacagcattctt

SEQ ID NO: 229586 - DNA, 19 bp, Homo sapiens
  siRNA target sequence for HERC1 (NM_003922.1,14012-14030).
ggattaccgaggagagttt

SEQ ID NO: 229587 - DNA, 19 bp, Homo sapiens
  siRNA target sequence for HERC1 (NM_003922.1,14077-14095).
ggcaaaatggttcctataa

SEQ ID NO: 229588 - DNA, 19 bp, Homo sapiens
  siRNA target sequence for HERC1 (NM_003922.1,14151-14169).
gagggccattgaatatcga

SEQ ID NO: 229589 - DNA, 19 bp, Homo sapiens
  siRNA target sequence for HERC1 (NM_003922.1,14157-14175).
cattgaatatcgacttcat

SEQ ID NO: 229590 - DNA, 19 bp, Homo sapiens
  siRNA target sequence for HERC1 (NM_003922.1,14398-14416).
gagcgggtgcttttcatga

SEQ ID NO: 229591 - DNA, 19 bp, Homo sapiens
  siRNA target sequence for HERC1 (NM_003922.1,14446-14464).
gccaacactgctgacattt

SEQ ID NO: 229592 - DNA, 19 bp, Homo sapiens
  siRNA target sequence for HERC1 (NM_003922.1,14587-14605).
cgctatgccatcaacaact

SEQ ID NO: 229593 - DNA, 19 bp, Homo sapiens
  siRNA target sequence for HERC1 (NM_003922.1,14612-14630).
caatcgacatggacaacta

SEQ ID NO: 229594 - DNA, 19 bp, Homo sapiens
  siRNA target sequence for HERC2 (NM_004667.2,240-258).
ctagaaaagatgatagtgt

SEQ ID NO: 229595 - DNA, 19 bp, Homo sapiens
  siRNA target sequence for HERC2 (NM_004667.2,372-390).
gcaagcaaccagatgtgaa

SEQ ID NO: 229596 - DNA, 19 bp, Homo sapiens
  siRNA target sequence for HERC2 (NM_004667.2,376-394).
gcaaccagatgtgaatgaa

SEQ ID NO: 229597 - DNA, 19 bp, Homo sapiens
  siRNA target sequence for HERC2 (NM_004667.2,405-423).
gtctttctgtgctggttaa

SEQ ID NO: 229598 - DNA, 19 bp, Homo sapiens
  siRNA target sequence for HERC2 (NM_004667.2,499-517).
cttggagcgctatttcatt

SEQ ID NO: 229599 - DNA, 19 bp, Homo sapiens
  siRNA target sequence for HERC2 (NM_004667.2,539-557).
caggagaatgtcaaagtta

SEQ ID NO: 229600 - DNA, 19 bp, Homo sapiens
  siRNA target sequence for HERC2 (NM_004667.2,1308-1326).
catctcataagggatcatt

SEQ ID NO: 229601 - DNA, 19 bp, Homo sapiens
  siRNA target sequence for HERC2 (NM_004667.2,1336-1354).
cataggttgggggttaata

SEQ ID NO: 229602 - DNA, 19 bp, Homo sapiens
  siRNA target sequence for HERC2 (NM_004667.2,1340-1358).
ggttgggggttaataggat

SEQ ID NO: 229603 - DNA, 19 bp, Homo sapiens
  siRNA target sequence for HERC2 (NM_004667.2,1480-1498).
cacacaggcctataatagt

SEQ ID NO: 229604 - DNA, 19 bp, Homo sapiens
  siRNA target sequence for HERC2 (NM_004667.2,1482-1500).
cacaggcctataatagtga

SEQ ID NO: 229605 - DNA, 19 bp, Homo sapiens
  siRNA target sequence for HERC2 (NM_004667.2,1526-1544).
ggccttgcctccagaaaca

SEQ ID NO: 229606 - DNA, 19 bp, Homo sapiens
  siRNA target sequence for HERC2 (NM_004667.2,1532-1550).
gcctccagaaacattgtaa

SEQ ID NO: 229607 - DNA, 19 bp, Homo sapiens
  siRNA target sequence for HERC2 (NM_004667.2,1533-1551).
cctccagaaacattgtaaa

SEQ ID NO: 229608 - DNA, 19 bp, Homo sapiens
  siRNA target sequence for HERC2 (NM_004667.2,1730-1748).
gcttgcgggagcacttaca

SEQ ID NO: 229609 - DNA, 19 bp, Homo sapiens
  siRNA target sequence for HERC2 (NM_004667.2,2068-2086).
cattgctttgacgaaagat

SEQ ID NO: 229610 - DNA, 19 bp, Homo sapiens
  siRNA target sequence for HERC2 (NM_004667.2,2084-2102).
gatggccaagtttattcat

SEQ ID NO: 229611 - DNA, 19 bp, Homo sapiens
  siRNA target sequence for HERC2 (NM_004667.2,2143-2161).
ggaacatgttcgttatcca

SEQ ID NO: 229612 - DNA, 19 bp, Homo sapiens
  siRNA target sequence for HERC2 (NM_004667.2,2144-2162).
gaacatgttcgttatccaa

SEQ ID NO: 229613 - DNA, 19 bp, Homo sapiens
  siRNA target sequence for HERC2 (NM_004667.2,2150-2168).
gttcgttatccaaaactct

SEQ ID NO: 229614 - DNA, 19 bp, Homo sapiens
  siRNA target sequence for HERC2 (NM_004667.2,2832-2850).
gtccaggtcgtcgattcat

SEQ ID NO: 229615 - DNA, 19 bp, Homo sapiens
  siRNA target sequence for HERC2 (NM_004667.2,2835-2853).
caggtcgtcgattcatgat

SEQ ID NO: 229616 - DNA, 19 bp, Homo sapiens
  siRNA target sequence for HERC2 (NM_004667.2,2838-2856).
gtcgtcgattcatgattga

SEQ ID NO: 229617 - DNA, 19 bp, Homo sapiens
  siRNA target sequence for HERC2 (NM_004667.2,2841-2859).
gtcgattcatgattgatct

SEQ ID NO: 229618 - DNA, 19 bp, Homo sapiens
  siRNA target sequence for HERC2 (NM_004667.2,3125-3143).
cagactgtagccagattga

SEQ ID NO: 229619 - DNA, 19 bp, Homo sapiens
  siRNA target sequence for HERC2 (NM_004667.2,3127-3145).
gactgtagccagattgaaa

SEQ ID NO: 229620 - DNA, 19 bp, Homo sapiens
  siRNA target sequence for HERC2 (NM_004667.2,3149-3167).
gttgcccgtcggatttcat

SEQ ID NO: 229621 - DNA, 19 bp, Homo sapiens
  siRNA target sequence for HERC2 (NM_004667.2,3152-3170).
gcccgtcggatttcatcat

SEQ ID NO: 229622 - DNA, 19 bp, Homo sapiens
  siRNA target sequence for HERC2 (NM_004667.2,3154-3172).
ccgtcggatttcatcatgt

SEQ ID NO: 229623 - DNA, 19 bp, Homo sapiens
  siRNA target sequence for HERC2 (NM_004667.2,3165-3183).
catcatgtctggactttga

SEQ ID NO: 229624 - DNA, 19 bp, Homo sapiens
  siRNA target sequence for HERC2 (NM_004667.2,3185-3203).
caacacagtcgtgaaagat

SEQ ID NO: 229625 - DNA, 19 bp, Homo sapiens
  siRNA target sequence for HERC2 (NM_004667.2,3233-3251).
caacgtttgcttattagta

SEQ ID NO: 229626 - DNA, 19 bp, Homo sapiens
  siRNA target sequence for HERC2 (NM_004667.2,3275-3293).
ggtcagacctcagatattt

SEQ ID NO: 229627 - DNA, 19 bp, Homo sapiens
  siRNA target sequence for HERC2 (NM_004667.2,3280-3298).
gacctcagatatttctagt

SEQ ID NO: 229628 - DNA, 19 bp, Homo sapiens
  siRNA target sequence for HERC2 (NM_004667.2,3417-3435).
cggaggtggcttacattgt

SEQ ID NO: 229629 - DNA, 19 bp, Homo sapiens
  siRNA target sequence for HERC2 (NM_004667.2,3465-3483).
cagaactagtagtttctat

SEQ ID NO: 229630 - DNA, 19 bp, Homo sapiens
  siRNA target sequence for HERC2 (NM_004667.2,3546-3564).
gtggcctgttggaacatct

SEQ ID NO: 229631 - DNA, 19 bp, Homo sapiens
  siRNA target sequence for HERC2 (NM_004667.2,3591-3609).
gaaaggaacgggatgatca

SEQ ID NO: 229632 - DNA, 19 bp, Homo sapiens
  siRNA target sequence for HERC2 (NM_004667.2,3627-3645).
ctggcataatggagtcatt

SEQ ID NO: 229633 - DNA, 19 bp, Homo sapiens
  siRNA target sequence for HERC2 (NM_004667.2,6713-6731).
cgcctgggcggtcaagtta

SEQ ID NO: 229634 - DNA, 19 bp, Homo sapiens
  siRNA target sequence for HERC2 (NM_004667.2,7797-7815).
gctgccgagcgtatgaaga

SEQ ID NO: 229635 - DNA, 19 bp, Homo sapiens
  siRNA target sequence for HERC2 (NM_004667.2,7798-7816).
ctgccgagcgtatgaagaa

SEQ ID NO: 229636 - DNA, 19 bp, Homo sapiens
  siRNA target sequence for HERC2 (NM_004667.2,7800-7818).
gccgagcgtatgaagaagt

SEQ ID NO: 229637 - DNA, 19 bp, Homo sapiens
  siRNA target sequence for HERC2 (NM_004667.2,7962-7980).
gttcttcttctcacatcaa

SEQ ID NO: 229638 - DNA, 19 bp, Homo sapiens
  siRNA target sequence for HERC2 (NM_004667.2,8077-8095).
cagtgccaatggaaaagat

SEQ ID NO: 229639 - DNA, 19 bp, Homo sapiens
  siRNA target sequence for HERC2 (NM_004667.2,8127-8145).
ggactgggttgctatcaga

SEQ ID NO: 229640 - DNA, 19 bp, Homo sapiens
  siRNA target sequence for HERC2 (NM_004667.2,8149-8167).
ggagttggtacccagtatt

SEQ ID NO: 229641 - DNA, 19 bp, Homo sapiens
  siRNA target sequence for HERC2 (NM_004667.2,8321-8339).
ggtcagtctgcggtatttt

SEQ ID NO: 229642 - DNA, 19 bp, Homo sapiens
  siRNA target sequence for HERC2 (NM_004667.2,8449-8467).
ccaggcatcccgtctcatt

SEQ ID NO: 229643 - DNA, 19 bp, Homo sapiens
  siRNA target sequence for HERC2 (NM_004667.2,8493-8511).
catcggggtcgcaaggaaa

SEQ ID NO: 229644 - DNA, 19 bp, Homo sapiens
  siRNA target sequence for HERC2 (NM_004667.2,8507-8525).
ggaaagcactggattcgtt

SEQ ID NO: 229645 - DNA, 19 bp, Homo sapiens
  siRNA target sequence for HERC2 (NM_004667.2,8508-8526).
gaaagcactggattcgttt

SEQ ID NO: 229646 - DNA, 19 bp, Homo sapiens
  siRNA target sequence for HERC2 (NM_004667.2,8517-8535).
ggattcgtttggagatttt

SEQ ID NO: 229647 - DNA, 19 bp, Homo sapiens
  siRNA target sequence for HERC2 (NM_004667.2,8537-8555).
ccagatgttcttgttcata

SEQ ID NO: 229648 - DNA, 19 bp, Homo sapiens
  siRNA target sequence for HERC2 (NM_004667.2,8540-8558).
gatgttcttgttcatagat

SEQ ID NO: 229649 - DNA, 19 bp, Homo sapiens
  siRNA target sequence for HERC2 (NM_004667.2,8609-8627).
gtagtgtcaggtggaaatt

SEQ ID NO: 229650 - DNA, 19 bp, Homo sapiens
  siRNA target sequence for HERC2 (NM_004667.2,8619-8637).
gtggaaattccctgaataa

SEQ ID NO: 229651 - DNA, 19 bp, Homo sapiens
  siRNA target sequence for HERC2 (NM_004667.2,8622-8640).
gaaattccctgaataacct

SEQ ID NO: 229652 - DNA, 19 bp, Homo sapiens
  siRNA target sequence for HERC2 (NM_004667.2,8628-8646).
ccctgaataaccttattga

SEQ ID NO: 229653 - DNA, 19 bp, Homo sapiens
  siRNA target sequence for HERC2 (NM_004667.2,8629-8647).
cctgaataaccttattgaa

SEQ ID NO: 229654 - DNA, 19 bp, Homo sapiens
  siRNA target sequence for HERC2 (NM_004667.2,8645-8663).
gaactaaagacaatcaata

SEQ ID NO: 229655 - DNA, 19 bp, Homo sapiens
  siRNA target sequence for HERC2 (NM_004667.2,8706-8724).
cagagtatcacaggtatat

SEQ ID NO: 229656 - DNA, 19 bp, Homo sapiens
  siRNA target sequence for HERC2 (NM_004667.2,8746-8764).
caggagctcaggaatcgat

SEQ ID NO: 229657 - DNA, 19 bp, Homo sapiens
  siRNA target sequence for HERC2 (NM_004667.2,8751-8769).
gctcaggaatcgattgtaa

SEQ ID NO: 229658 - DNA, 19 bp, Homo sapiens
  siRNA target sequence for HERC2 (NM_004667.2,8836-8854).
cttagcttcggataatgaa

SEQ ID NO: 229659 - DNA, 19 bp, Homo sapiens
  siRNA target sequence for HERC2 (NM_004667.2,8878-8896).
cagcggaagcctcattaga

SEQ ID NO: 229660 - DNA, 19 bp, Homo sapiens
  siRNA target sequence for HERC2 (NM_004667.2,8880-8898).
gcggaagcctcattagaaa

SEQ ID NO: 229661 - DNA, 19 bp, Homo sapiens
  siRNA target sequence for HERC2 (NM_004667.2,8882-8900).
ggaagcctcattagaaaga

SEQ ID NO: 229662 - DNA, 19 bp, Homo sapiens
  siRNA target sequence for HERC2 (NM_004667.2,8914-8932).
ggaatcagcagctacgata

SEQ ID NO: 229663 - DNA, 19 bp, Homo sapiens
  siRNA target sequence for HERC2 (NM_004667.2,9022-9040).
gacactgtcagctttgaat

SEQ ID NO: 229664 - DNA, 19 bp, Homo sapiens
  siRNA target sequence for HERC2 (NM_004667.2,9049-9067).
ggtggctggtggatctaaa

SEQ ID NO: 229665 - DNA, 19 bp, Homo sapiens
  siRNA target sequence for HERC2 (NM_004667.2,9050-9068).
gtggctggtggatctaaaa

SEQ ID NO: 229666 - DNA, 19 bp, Homo sapiens
  siRNA target sequence for HERC2 (NM_004667.2,9056-9074).
ggtggatctaaaagtttgt

SEQ ID NO: 229667 - DNA, 19 bp, Homo sapiens
  siRNA target sequence for HERC2 (NM_004667.2,9189-9207).
gcagctacgtggtcaagaa

SEQ ID NO: 229668 - DNA, 19 bp, Homo sapiens
  siRNA target sequence for HERC2 (NM_004667.2,9230-9248).
cggcacgcgacggctttaa

SEQ ID NO: 229669 - DNA, 19 bp, Homo sapiens
  siRNA target sequence for HERC2 (NM_004667.2,9232-9250).
gcacgcgacggctttaact

SEQ ID NO: 229670 - DNA, 19 bp, Homo sapiens
  siRNA target sequence for HERC2 (NM_004667.2,9243-9261).
ctttaactgtcgatggaaa

SEQ ID NO: 229671 - DNA, 19 bp, Homo sapiens
  siRNA target sequence for HERC2 (NM_004667.2,9249-9267).
ctgtcgatggaaaagtgtt

SEQ ID NO: 229672 - DNA, 19 bp, Homo sapiens
  siRNA target sequence for HERC2 (NM_004667.2,9254-9272).
gatggaaaagtgttttcgt

SEQ ID NO: 229673 - DNA, 19 bp, Homo sapiens
  siRNA target sequence for HERC2 (NM_004667.2,9451-9469).
gctgggacatggggataat

SEQ ID NO: 229674 - DNA, 19 bp, Homo sapiens
  siRNA target sequence for HERC2 (NM_004667.2,9455-9473).
ggacatggggataatacga

SEQ ID NO: 229675 - DNA, 19 bp, Homo sapiens
  siRNA target sequence for HERC2 (NM_004667.2,9503-9521).
cttctcggtcacagagtaa

SEQ ID NO: 229676 - DNA, 19 bp, Homo sapiens
  siRNA target sequence for HERC2 (NM_004667.2,9561-9579).
ctctgaccgatgaaggttt

SEQ ID NO: 229677 - DNA, 19 bp, Homo sapiens
  siRNA target sequence for HERC2 (NM_004667.2,9567-9585).
ccgatgaaggtttggtatt

SEQ ID NO: 229678 - DNA, 19 bp, Homo sapiens
  siRNA target sequence for HERC2 (NM_004667.2,9568-9586).
cgatgaaggtttggtattt

SEQ ID NO: 229679 - DNA, 19 bp, Homo sapiens
  siRNA target sequence for HERC2 (NM_004667.2,9569-9587).
gatgaaggtttggtatttt

SEQ ID NO: 229680 - DNA, 19 bp, Homo sapiens
  siRNA target sequence for HERC2 (NM_004667.2,10164-10182).
gtggtgcaagtaattctaa

SEQ ID NO: 229681 - DNA, 19 bp, Homo sapiens
  siRNA target sequence for HERC2 (NM_004667.2,10183-10201).
gccaaatcgcccttctctt

SEQ ID NO: 229682 - DNA, 19 bp, Homo sapiens
  siRNA target sequence for HERC2 (NM_004667.2,10192-10210).
cccttctcttgccaagatt

SEQ ID NO: 229683 - DNA, 19 bp, Homo sapiens
  siRNA target sequence for HERC2 (NM_004667.2,11108-11126).
ccaggggatgagttaaagt

SEQ ID NO: 229684 - DNA, 19 bp, Homo sapiens
  siRNA target sequence for HERC2 (NM_004667.2,11137-11155).
cagcgatgggtctgtgaat

SEQ ID NO: 229685 - DNA, 19 bp, Homo sapiens
  siRNA target sequence for HERC2 (NM_004667.2,11796-11814).
gcgaaaacatggatgttct

SEQ ID NO: 229686 - DNA, 19 bp, Homo sapiens
  siRNA target sequence for HERC2 (NM_004667.2,11927-11945).
ggatggggacataatcaca

SEQ ID NO: 229687 - DNA, 19 bp, Homo sapiens
  siRNA target sequence for HERC2 (NM_004667.2,12014-12032).
ctcagacccgtgcagttaa

SEQ ID NO: 229688 - DNA, 19 bp, Homo sapiens
  siRNA target sequence for HERC2 (NM_004667.2,12144-12162).
caacattgcttgaatccat

SEQ ID NO: 229689 - DNA, 19 bp, Homo sapiens
  siRNA target sequence for HERC2 (NM_004667.2,12166-12184).
gcatgtgtttattaagaaa

SEQ ID NO: 229690 - DNA, 19 bp, Homo sapiens
  siRNA target sequence for HERC2 (NM_004667.2,12230-12248).
gaaggagaagtttactctt

SEQ ID NO: 229691 - DNA, 19 bp, Homo sapiens
  siRNA target sequence for HERC2 (NM_004667.2,12316-12334).
cgagtctctgagaggaatt

SEQ ID NO: 229692 - DNA, 19 bp, Homo sapiens
  siRNA target sequence for HERC2 (NM_004667.2,12612-12630).
gctgtaaagtgcctatgaa

SEQ ID NO: 229693 - DNA, 19 bp, Homo sapiens
  siRNA target sequence for HERC2 (NM_004667.2,12615-12633).
gtaaagtgcctatgaagat

SEQ ID NO: 229694 - DNA, 19 bp, Homo sapiens
  siRNA target sequence for HERC2 (NM_004667.2,12622-12640).
gcctatgaagattgattct

SEQ ID NO: 229695 - DNA, 19 bp, Homo sapiens
  siRNA target sequence for HERC2 (NM_004667.2,12628-12646).
gaagattgattctcttact

SEQ ID NO: 229696 - DNA, 19 bp, Homo sapiens
  siRNA target sequence for HERC2 (NM_004667.2,12673-12691).
cggatcccagttttctgtt

SEQ ID NO: 229697 - DNA, 19 bp, Homo sapiens
  siRNA target sequence for HERC2 (NM_004667.2,12721-12739).
ctggggcaaaggcgattat

SEQ ID NO: 229698 - DNA, 19 bp, Homo sapiens
  siRNA target sequence for HERC2 (NM_004667.2,12725-12743).
ggcaaaggcgattatcaca

SEQ ID NO: 229699 - DNA, 19 bp, Homo sapiens
  siRNA target sequence for HERC2 (NM_004667.2,12745-12763).
gttgggccatggatcagat

SEQ ID NO: 229700 - DNA, 19 bp, Homo sapiens
  siRNA target sequence for HERC2 (NM_004667.2,12855-12873).
cagaggatggtgaggttta

SEQ ID NO: 229701 - DNA, 19 bp, Homo sapiens
  siRNA target sequence for HERC2 (NM_004667.2,12857-12875).
gaggatggtgaggtttata

SEQ ID NO: 229702 - DNA, 19 bp, Homo sapiens
  siRNA target sequence for HERC2 (NM_004667.2,12859-12877).
ggatggtgaggtttataca

SEQ ID NO: 229703 - DNA, 19 bp, Homo sapiens
  siRNA target sequence for HERC2 (NM_004667.2,12860-12878).
gatggtgaggtttatacat

SEQ ID NO: 229704 - DNA, 19 bp, Homo sapiens
  siRNA target sequence for HERC2 (NM_004667.2,12876-12894).
catggggcgacaatgatga

SEQ ID NO: 229705 - DNA, 19 bp, Homo sapiens
  siRNA target sequence for HERC2 (NM_004667.2,13051-13069).
ggtccccatggagtacaat

SEQ ID NO: 229706 - DNA, 19 bp, Homo sapiens
  siRNA target sequence for HERC2 (NM_004667.2,13213-13231).
cgacactctccgaggaatt

SEQ ID NO: 229707 - DNA, 19 bp, Homo sapiens
  siRNA target sequence for HERC2 (NM_004667.2,13252-13270).
ggcggctttccggaaagta

SEQ ID NO: 229708 - DNA, 19 bp, Homo sapiens
  siRNA target sequence for HERC2 (NM_004667.2,13254-13272).
cggctttccggaaagtagt

SEQ ID NO: 229709 - DNA, 19 bp, Homo sapiens
  siRNA target sequence for HERC2 (NM_004667.2,13255-13273).
ggctttccggaaagtagta

SEQ ID NO: 229710 - DNA, 19 bp, Homo sapiens
  siRNA target sequence for HERC2 (NM_004667.2,13325-13343).
cgcatccaggtcaaacgat

SEQ ID NO: 229711 - DNA, 19 bp, Homo sapiens
  siRNA target sequence for HERC2 (NM_004667.2,13397-13415).
cagatgtgtgctaagatga

SEQ ID NO: 229712 - DNA, 19 bp, Homo sapiens
  siRNA target sequence for HERC2 (NM_004667.2,13781-13799).
gaggttgataaggatttta

SEQ ID NO: 229713 - DNA, 19 bp, Homo sapiens
  siRNA target sequence for HERC2 (NM_004667.2,13810-13828).
catgtacatccgagacaat

SEQ ID NO: 229714 - DNA, 19 bp, Homo sapiens
  siRNA target sequence for HERC2 (NM_004667.2,13952-13970).
gtgcggctggcgataaact

SEQ ID NO: 229715 - DNA, 19 bp, Homo sapiens
  siRNA target sequence for HERC2 (NM_004667.2,13954-13972).
gcggctggcgataaactat

SEQ ID NO: 229716 - DNA, 19 bp, Homo sapiens
  siRNA target sequence for HERC2 (NM_004667.2,13957-13975).
gctggcgataaactataga

SEQ ID NO: 229717 - DNA, 19 bp, Homo sapiens
  siRNA target sequence for HERC2 (NM_004667.2,14119-14137).
gtcggtggccacctataaa

SEQ ID NO: 229718 - DNA, 19 bp, Homo sapiens
  siRNA target sequence for HERC2 (NM_004667.2,14449-14467).
cgctcgcatcgcacttaca

SEQ ID NO: 229719 - DNA, 19 bp, Homo sapiens
  siRNA target sequence for HERC2 (NM_004667.2,14488-14506).
cagcagcgacgattcagat

SEQ ID NO: 229720 - DNA, 19 bp, Homo sapiens
  siRNA target sequence for HERC2 (NM_004667.2,14493-14511).
gcgacgattcagataacga

SEQ ID NO: 229721 - DNA, 19 bp, Homo sapiens
  siRNA target sequence for HERC2 (NM_004667.2,14513-14531).
gatgtcgactcctttgctt

SEQ ID NO: 229722 - DNA, 19 bp, Homo sapiens
  siRNA target sequence for HERC2 (NM_004667.2,14532-14550).
cggactctacacaagatta

SEQ ID NO: 229723 - DNA, 19 bp, Homo sapiens
  siRNA target sequence for HERC2 (NM_004667.2,14533-14551).
ggactctacacaagattat

SEQ ID NO: 229724 - DNA, 19 bp, Homo sapiens
  siRNA target sequence for HERC3 (NM_014606.1,213-231).
ccaacctgcagggaattgt

SEQ ID NO: 229725 - DNA, 19 bp, Homo sapiens
  siRNA target sequence for HERC3 (NM_014606.1,405-423).
ctctggcagatcagcatat

SEQ ID NO: 229726 - DNA, 19 bp, Homo sapiens
  siRNA target sequence for HERC3 (NM_014606.1,467-485).
gaccgaggccagctgtttt

SEQ ID NO: 229727 - DNA, 19 bp, Homo sapiens
  siRNA target sequence for HERC3 (NM_014606.1,470-488).
cgaggccagctgttttctt

SEQ ID NO: 229728 - DNA, 19 bp, Homo sapiens
  siRNA target sequence for HERC3 (NM_014606.1,509-527).
cagctaggactcatgacta

SEQ ID NO: 229729 - DNA, 19 bp, Homo sapiens
  siRNA target sequence for HERC3 (NM_014606.1,543-561).
cagtgcccaggttaataca

SEQ ID NO: 229730 - DNA, 19 bp, Homo sapiens
  siRNA target sequence for HERC3 (NM_014606.1,624-642).
cggctgatggccagttctt

SEQ ID NO: 229731 - DNA, 19 bp, Homo sapiens
  siRNA target sequence for HERC3 (NM_014606.1,885-903).
gcacgcaaaaagttgtcta

SEQ ID NO: 229732 - DNA, 19 bp, Homo sapiens
  siRNA target sequence for HERC3 (NM_014606.1,886-904).
cacgcaaaaagttgtctat

SEQ ID NO: 229733 - DNA, 19 bp, Homo sapiens
  siRNA target sequence for HERC3 (NM_014606.1,888-906).
cgcaaaaagttgtctatat

SEQ ID NO: 229734 - DNA, 19 bp, Homo sapiens
  siRNA target sequence for HERC3 (NM_014606.1,990-1008).
gacacgactccatgaatga

SEQ ID NO: 229735 - DNA, 19 bp, Homo sapiens
  siRNA target sequence for HERC3 (NM_014606.1,1037-1055).
ctgatgggtagtgaagtaa

SEQ ID NO: 229736 - DNA, 19 bp, Homo sapiens
  siRNA target sequence for HERC3 (NM_014606.1,1039-1057).
gatgggtagtgaagtaact

SEQ ID NO: 229737 - DNA, 19 bp, Homo sapiens
  siRNA target sequence for HERC3 (NM_014606.1,1043-1061).
ggtagtgaagtaactcaaa

SEQ ID NO: 229738 - DNA, 19 bp, Homo sapiens
  siRNA target sequence for HERC3 (NM_014606.1,1044-1062).
gtagtgaagtaactcaaat

SEQ ID NO: 229739 - DNA, 19 bp, Homo sapiens
  siRNA target sequence for HERC3 (NM_014606.1,1064-1082).
gcttgtggcagacaacata

SEQ ID NO: 229740 - DNA, 19 bp, Homo sapiens
  siRNA target sequence for HERC3 (NM_014606.1,1104-1122).
ctggactcatctatgcatt

SEQ ID NO: 229741 - DNA, 19 bp, Homo sapiens
  siRNA target sequence for HERC3 (NM_014606.1,1128-1146).
gtggagcaagaggtcaatt

SEQ ID NO: 229742 - DNA, 19 bp, Homo sapiens
  siRNA target sequence for HERC3 (NM_014606.1,1148-1166).
ggaactgggcacacttgta

SEQ ID NO: 229743 - DNA, 19 bp, Homo sapiens
  siRNA target sequence for HERC3 (NM_014606.1,1155-1173).
ggcacacttgtaatgttaa

SEQ ID NO: 229744 - DNA, 19 bp, Homo sapiens
  siRNA target sequence for HERC3 (NM_014606.1,1157-1175).
cacacttgtaatgttaagt

SEQ ID NO: 229745 - DNA, 19 bp, Homo sapiens
  siRNA target sequence for HERC3 (NM_014606.1,1227-1245).
cccgagctgatcgctttaa

SEQ ID NO: 229746 - DNA, 19 bp, Homo sapiens
  siRNA target sequence for HERC3 (NM_014606.1,1228-1246).
ccgagctgatcgctttaaa

SEQ ID NO: 229747 - DNA, 19 bp, Homo sapiens
  siRNA target sequence for HERC3 (NM_014606.1,1229-1247).
cgagctgatcgctttaaat

SEQ ID NO: 229748 - DNA, 19 bp, Homo sapiens
  siRNA target sequence for HERC3 (NM_014606.1,1230-1248).
gagctgatcgctttaaata

SEQ ID NO: 229749 - DNA, 19 bp, Homo sapiens
  siRNA target sequence for HERC3 (NM_014606.1,1300-1318).
ctccaaatacgagaattat

SEQ ID NO: 229750 - DNA, 19 bp, Homo sapiens
  siRNA target sequence for HERC3 (NM_014606.1,1341-1359).
ctatgaaccaagcacatta

SEQ ID NO: 229751 - DNA, 19 bp, Homo sapiens
  siRNA target sequence for HERC3 (NM_014606.1,1435-1453).
caatggtgttgttcagata

SEQ ID NO: 229752 - DNA, 19 bp, Homo sapiens
  siRNA target sequence for HERC3 (NM_014606.1,1467-1485).
cctgttggaatggaagttt

SEQ ID NO: 229753 - DNA, 19 bp, Homo sapiens
  siRNA target sequence for HERC3 (NM_014606.1,1535-1553).
gggattgacctgaactcaa

SEQ ID NO: 229754 - DNA, 19 bp, Homo sapiens
  siRNA target sequence for HERC3 (NM_014606.1,1551-1569).
caactagggtgttatttga

SEQ ID NO: 229755 - DNA, 19 bp, Homo sapiens
  siRNA target sequence for HERC3 (NM_014606.1,1554-1572).
ctagggtgttatttgagaa

SEQ ID NO: 229756 - DNA, 19 bp, Homo sapiens
  siRNA target sequence for HERC3 (NM_014606.1,1557-1575).
gggtgttatttgagaagtt

SEQ ID NO: 229757 - DNA, 19 bp, Homo sapiens
  siRNA target sequence for HERC3 (NM_014606.1,1558-1576).
ggtgttatttgagaagtta

SEQ ID NO: 229758 - DNA, 19 bp, Homo sapiens
  siRNA target sequence for HERC3 (NM_014606.1,1582-1600).
ctctcagcactccatgatt

SEQ ID NO: 229759 - DNA, 19 bp, Homo sapiens
  siRNA target sequence for HERC3 (NM_014606.1,1584-1602).
ctcagcactccatgattct

SEQ ID NO: 229760 - DNA, 19 bp, Homo sapiens
  siRNA target sequence for HERC3 (NM_014606.1,1588-1606).
gcactccatgattctagaa

SEQ ID NO: 229761 - DNA, 19 bp, Homo sapiens
  siRNA target sequence for HERC3 (NM_014606.1,1593-1611).
ccatgattctagaacagat

SEQ ID NO: 229762 - DNA, 19 bp, Homo sapiens
  siRNA target sequence for HERC3 (NM_014606.1,1653-1671).
gctcaccaccagatgttga

SEQ ID NO: 229763 - DNA, 19 bp, Homo sapiens
  siRNA target sequence for HERC3 (NM_014606.1,1654-1672).
ctcaccaccagatgttgaa

SEQ ID NO: 229764 - DNA, 19 bp, Homo sapiens
  siRNA target sequence for HERC3 (NM_014606.1,1670-1688).
gaagccatgagaatctatt

SEQ ID NO: 229765 - DNA, 19 bp, Homo sapiens
  siRNA target sequence for HERC3 (NM_014606.1,1673-1691).
gccatgagaatctatttaa

SEQ ID NO: 229766 - DNA, 19 bp, Homo sapiens
  siRNA target sequence for HERC3 (NM_014606.1,1707-1725).
ccctactccaggattccaa

SEQ ID NO: 229767 - DNA, 19 bp, Homo sapiens
  siRNA target sequence for HERC3 (NM_014606.1,1717-1735).
ggattccaagtattatata

SEQ ID NO: 229768 - DNA, 19 bp, Homo sapiens
  siRNA target sequence for HERC3 (NM_014606.1,1718-1736).
gattccaagtattatataa

SEQ ID NO: 229769 - DNA, 19 bp, Homo sapiens
  siRNA target sequence for HERC3 (NM_014606.1,1812-1830).
ctcaggtatgcccgaaata

SEQ ID NO: 229770 - DNA, 19 bp, Homo sapiens
  siRNA target sequence for HERC3 (NM_014606.1,1821-1839).
gcccgaaatatttcatgaa

SEQ ID NO: 229771 - DNA, 19 bp, Homo sapiens
  siRNA target sequence for HERC3 (NM_014606.1,1840-1858).
gctggtaaacctctataaa

SEQ ID NO: 229772 - DNA, 19 bp, Homo sapiens
  siRNA target sequence for HERC3 (NM_014606.1,1843-1861).
ggtaaacctctataaaggt

SEQ ID NO: 229773 - DNA, 19 bp, Homo sapiens
  siRNA target sequence for HERC3 (NM_014606.1,1860-1878).
gtgcagtcctttatctact

SEQ ID NO: 229774 - DNA, 19 bp, Homo sapiens
  siRNA target sequence for HERC3 (NM_014606.1,1904-1922).
cccgtactgtttaacaatt

SEQ ID NO: 229775 - DNA, 19 bp, Homo sapiens
  siRNA target sequence for HERC3 (NM_014606.1,1905-1923).
ccgtactgtttaacaatta

SEQ ID NO: 229776 - DNA, 19 bp, Homo sapiens
  siRNA target sequence for HERC3 (NM_014606.1,1906-1924).
cgtactgtttaacaattat

SEQ ID NO: 229777 - DNA, 19 bp, Homo sapiens
  siRNA target sequence for HERC3 (NM_014606.1,1949-1967).
gagaagttatataaggtaa

SEQ ID NO: 229778 - DNA, 19 bp, Homo sapiens
  siRNA target sequence for HERC3 (NM_014606.1,1954-1972).
gttatataaggtaaatctt

SEQ ID NO: 229779 - DNA, 19 bp, Homo sapiens
  siRNA target sequence for HERC3 (NM_014606.1,2019-2037).
ccaatctcgtggacattca

SEQ ID NO: 229780 - DNA, 19 bp, Homo sapiens
  siRNA target sequence for HERC3 (NM_014606.1,2077-2095).
gaaggctagaccatcaata

SEQ ID NO: 229781 - DNA, 19 bp, Homo sapiens
  siRNA target sequence for HERC3 (NM_014606.1,2080-2098).
ggctagaccatcaataata

SEQ ID NO: 229782 - DNA, 19 bp, Homo sapiens
  siRNA target sequence for HERC3 (NM_014606.1,2091-2109).
caataatacaggatactgt

SEQ ID NO: 229783 - DNA, 19 bp, Homo sapiens
  siRNA target sequence for HERC3 (NM_014606.1,2122-2140).
ctaccctttcatctttgat

SEQ ID NO: 229784 - DNA, 19 bp, Homo sapiens
  siRNA target sequence for HERC3 (NM_014606.1,2144-2162).
caagccaagaccaaaatgt

SEQ ID NO: 229785 - DNA, 19 bp, Homo sapiens
  siRNA target sequence for HERC3 (NM_014606.1,2205-2223).
gagccaacctgcagaatgt

SEQ ID NO: 229786 - DNA, 19 bp, Homo sapiens
  siRNA target sequence for HERC3 (NM_014606.1,2399-2417).
ggtgttacaaaggaatttt

SEQ ID NO: 229787 - DNA, 19 bp, Homo sapiens
  siRNA target sequence for HERC3 (NM_014606.1,2461-2479).
gtttacctactatcaagat

SEQ ID NO: 229788 - DNA, 19 bp, Homo sapiens
  siRNA target sequence for HERC3 (NM_014606.1,2494-2512).
gttttcagacacgtgtttt

SEQ ID NO: 229789 - DNA, 19 bp, Homo sapiens
  siRNA target sequence for HERC3 (NM_014606.1,2516-2534).
gagcacaactggtttcact

SEQ ID NO: 229790 - DNA, 19 bp, Homo sapiens
  siRNA target sequence for HERC3 (NM_014606.1,2531-2549).
cacttgattggtataacct

SEQ ID NO: 229791 - DNA, 19 bp, Homo sapiens
  siRNA target sequence for HERC3 (NM_014606.1,2550-2568).
gtggactagctatctacaa

SEQ ID NO: 229792 - DNA, 19 bp, Homo sapiens
  siRNA target sequence for HERC3 (NM_014606.1,2552-2570).
ggactagctatctacaact

SEQ ID NO: 229793 - DNA, 19 bp, Homo sapiens
  siRNA target sequence for HERC3 (NM_014606.1,2595-2613).
cattggctctctacaagaa

SEQ ID NO: 229794 - DNA, 19 bp, Homo sapiens
  siRNA target sequence for HERC3 (NM_014606.1,2673-2691).
ggagtctccaagagctttt

SEQ ID NO: 229795 - DNA, 19 bp, Homo sapiens
  siRNA target sequence for HERC3 (NM_014606.1,2674-2692).
gagtctccaagagctttta

SEQ ID NO: 229796 - DNA, 19 bp, Homo sapiens
  siRNA target sequence for HERC3 (NM_014606.1,2678-2696).
ctccaagagcttttagatt

SEQ ID NO: 229797 - DNA, 19 bp, Homo sapiens
  siRNA target sequence for HERC3 (NM_014606.1,2739-2757).
cgatctgccgagaaagcta

SEQ ID NO: 229798 - DNA, 19 bp, Homo sapiens
  siRNA target sequence for HERC3 (NM_014606.1,2740-2758).
gatctgccgagaaagctat

SEQ ID NO: 229799 - DNA, 19 bp, Homo sapiens
  siRNA target sequence for HERC3 (NM_014606.1,2754-2772).
gctatggagtgattgaaca

SEQ ID NO: 229800 - DNA, 19 bp, Homo sapiens
  siRNA target sequence for HERC3 (NM_014606.1,2782-2800).
gatacctgggggagataat

SEQ ID NO: 229801 - DNA, 19 bp, Homo sapiens
  siRNA target sequence for HERC3 (NM_014606.1,2790-2808).
ggggagataatgtaactgt

SEQ ID NO: 229802 - DNA, 19 bp, Homo sapiens
  siRNA target sequence for HERC3 (NM_014606.1,2914-2932).
gtgtggtggcaaagtactt

SEQ ID NO: 229803 - DNA, 19 bp, Homo sapiens
  siRNA target sequence for HERC3 (NM_014606.1,3035-3053).
gccacacatcccactgtaa

SEQ ID NO: 229804 - DNA, 19 bp, Homo sapiens
  siRNA target sequence for HERC3 (NM_014606.1,3039-3057).
cacatcccactgtaaaact

SEQ ID NO: 229805 - DNA, 19 bp, Homo sapiens
  siRNA target sequence for HERC3 (NM_014606.1,3041-3059).
catcccactgtaaaactat

SEQ ID NO: 229806 - DNA, 19 bp, Homo sapiens
  siRNA target sequence for HERC3 (NM_014606.1,3044-3062).
cccactgtaaaactatttt

SEQ ID NO: 229807 - DNA, 19 bp, Homo sapiens
  siRNA target sequence for HERC3 (NM_014606.1,3216-3234).
cttgctacaaccttcttga

SEQ ID NO: 229808 - DNA, 19 bp, Homo sapiens
  siRNA target sequence for HERC3 (NM_014606.1,3279-3297).
cccaggcccttgacaacta

SEQ ID NO: 229809 - DNA, 19 bp, Homo sapiens
  siRNA target sequence for HERC3 (NM_014606.1,3280-3298).
ccaggcccttgacaactat

SEQ ID NO: 229810 - DNA, 19 bp, Homo sapiens
  siRNA target sequence for HERC3 (NM_014606.1,3292-3310).
caactatgaagggtttagt

SEQ ID NO: 229811 - DNA, 19 bp, Homo sapiens
  siRNA target sequence for HIP2 (NM_005339.3,133-151).
gcgaggagacgagcaaaaa

SEQ ID NO: 229812 - DNA, 19 bp, Homo sapiens
  siRNA target sequence for HIP2 (NM_005339.3,134-152).
cgaggagacgagcaaaaat

SEQ ID NO: 229813 - DNA, 19 bp, Homo sapiens
  siRNA target sequence for HIP2 (NM_005339.3,137-155).
ggagacgagcaaaaatcaa

SEQ ID NO: 229814 - DNA, 19 bp, Homo sapiens
  siRNA target sequence for HIP2 (NM_005339.3,165-183).
gatcttgtagatgagaatt

SEQ ID NO: 229815 - DNA, 19 bp, Homo sapiens
  siRNA target sequence for HIP2 (NM_005339.3,214-232).
ctccagacacaccatatga

SEQ ID NO: 229816 - DNA, 19 bp, Homo sapiens
  siRNA target sequence for HIP2 (NM_005339.3,238-256).
gaagataccaactagagat

SEQ ID NO: 229817 - DNA, 19 bp, Homo sapiens
  siRNA target sequence for HIP2 (NM_005339.3,286-304).
cccctaaggtccggtttat

SEQ ID NO: 229818 - DNA, 19 bp, Homo sapiens
  siRNA target sequence for HIP2 (NM_005339.3,293-311).
ggtccggtttatcactaaa

SEQ ID NO: 229819 - DNA, 19 bp, Homo sapiens
  siRNA target sequence for HIP2 (NM_005339.3,294-312).
gtccggtttatcactaaaa

SEQ ID NO: 229820 - DNA, 19 bp, Homo sapiens
  siRNA target sequence for HIP2 (NM_005339.3,296-314).
ccggtttatcactaaaata

SEQ ID NO: 229821 - DNA, 19 bp, Homo sapiens
  siRNA target sequence for HIP2 (NM_005339.3,335-353).
cgtcacaggggctatttgt

SEQ ID NO: 229822 - DNA, 19 bp, Homo sapiens
  siRNA target sequence for HIP2 (NM_005339.3,343-361).
gggctatttgtttggatat

SEQ ID NO: 229823 - DNA, 19 bp, Homo sapiens
  siRNA target sequence for HIP2 (NM_005339.3,357-375).
gatatcctgaaagatcaat

SEQ ID NO: 229824 - DNA, 19 bp, Homo sapiens
  siRNA target sequence for HIP2 (NM_005339.3,389-407).
gactctccgcacggtatta

SEQ ID NO: 229825 - DNA, 19 bp, Homo sapiens
  siRNA target sequence for HIP2 (NM_005339.3,391-409).
ctctccgcacggtattatt

SEQ ID NO: 229826 - DNA, 19 bp, Homo sapiens
  siRNA target sequence for HIP2 (NM_005339.3,393-411).
ctccgcacggtattattgt

SEQ ID NO: 229827 - DNA, 19 bp, Homo sapiens
  siRNA target sequence for HIP2 (NM_005339.3,395-413).
ccgcacggtattattgtca

SEQ ID NO: 229828 - DNA, 19 bp, Homo sapiens
  siRNA target sequence for HIP2 (NM_005339.3,396-414).
cgcacggtattattgtcat

SEQ ID NO: 229829 - DNA, 19 bp, Homo sapiens
  siRNA target sequence for HIP2 (NM_005339.3,455-473).
ggatgctgtagtagcaaat

SEQ ID NO: 229830 - DNA, 19 bp, Homo sapiens
  siRNA target sequence for HIP2 (NM_005339.3,459-477).
gctgtagtagcaaatcagt

SEQ ID NO: 229831 - DNA, 19 bp, Homo sapiens
  siRNA target sequence for HIP2 (NM_005339.3,483-501).
caaaatcccgaaatgttca

SEQ ID NO: 229832 - DNA, 19 bp, Homo sapiens
  siRNA target sequence for HIP2 (NM_005339.3,514-532).
gactttgggcacatgtgta

SEQ ID NO: 229833 - DNA, 19 bp, Homo sapiens
  siRNA target sequence for HIP2 (NM_005339.3,534-552).
gctggagcaccagtttcta

SEQ ID NO: 229834 - DNA, 19 bp, Homo sapiens
  siRNA target sequence for HIP2 (NM_005339.3,546-564).
gtttctagtccagaataca

SEQ ID NO: 229835 - DNA, 19 bp, Homo sapiens
  siRNA target sequence for HIP2 (NM_005339.3,589-607).
ctatgggctttgataggaa

SEQ ID NO: 229836 - DNA, 19 bp, Homo sapiens
  siRNA target sequence for HIP2 (NM_005339.3,612-630).
gtaatagtggccttgtctt

SEQ ID NO: 229837 - DNA, 19 bp, Homo sapiens
  siRNA target sequence for HIP2 (NM_005339.3,618-636).
gtggccttgtcttcaaaat

SEQ ID NO: 229838 - DNA, 19 bp, Homo sapiens
  siRNA target sequence for HSPC150 (NM_014176.1,194-212).
catgttggcaagataaaga

SEQ ID NO: 229839 - DNA, 19 bp, Homo sapiens
  siRNA target sequence for HSPC150 (NM_014176.1,200-218).
ggcaagataaagaccaaat

SEQ ID NO: 229840 - DNA, 19 bp, Homo sapiens
  siRNA target sequence for HSPC150 (NM_014176.1,223-241).
gacctgcgagctcaaatat

SEQ ID NO: 229841 - DNA, 19 bp, Homo sapiens
  siRNA target sequence for HSPC150 (NM_014176.1,225-243).
cctgcgagctcaaatatta

SEQ ID NO: 229842 - DNA, 19 bp, Homo sapiens
  siRNA target sequence for HSPC150 (NM_014176.1,228-246).
gcgagctcaaatattaggt

SEQ ID NO: 229843 - DNA, 19 bp, Homo sapiens
  siRNA target sequence for HSPC150 (NM_014176.1,250-268).
gccaacacaccttatgaga

SEQ ID NO: 229844 - DNA, 19 bp, Homo sapiens
  siRNA target sequence for HSPC150 (NM_014176.1,251-269).
ccaacacaccttatgagaa

SEQ ID NO: 229845 - DNA, 19 bp, Homo sapiens
  siRNA target sequence for HSPC150 (NM_014176.1,299-317).
ctgagaggtacccatttga

SEQ ID NO: 229846 - DNA, 19 bp, Homo sapiens
  siRNA target sequence for HSPC150 (NM_014176.1,322-340).
cctcagatccgatttctca

SEQ ID NO: 229847 - DNA, 19 bp, Homo sapiens
  siRNA target sequence for HSPC150 (NM_014176.1,330-348).
ccgatttctcactccaatt

SEQ ID NO: 229848 - DNA, 19 bp, Homo sapiens
  siRNA target sequence for HSPC150 (NM_014176.1,331-349).
cgatttctcactccaattt

SEQ ID NO: 229849 - DNA, 19 bp, Homo sapiens
  siRNA target sequence for HSPC150 (NM_014176.1,419-437).
ggagaccatccctcaacat

SEQ ID NO: 229850 - DNA, 19 bp, Homo sapiens
  siRNA target sequence for HSPC150 (NM_014176.1,443-461).
ctgtgttgacctctattca

SEQ ID NO: 229851 - DNA, 19 bp, Homo sapiens
  siRNA target sequence for HSPC150 (NM_014176.1,492-510).
cccgctcatggctgacata

SEQ ID NO: 229852 - DNA, 19 bp, Homo sapiens
  siRNA target sequence for HSPC150 (NM_014176.1,493-511).
ccgctcatggctgacatat

SEQ ID NO: 229853 - DNA, 19 bp, Homo sapiens
  siRNA target sequence for HSPC150 (NM_014176.1,502-520).
gctgacatatcctcagaat

SEQ ID NO: 229854 - DNA, 19 bp, Homo sapiens
  siRNA target sequence for HSPC150 (NM_014176.1,503-521).
ctgacatatcctcagaatt

SEQ ID NO: 229855 - DNA, 19 bp, Homo sapiens
  siRNA target sequence for HSPC150 (NM_014176.1,573-591).
gcatgcaagacagaaacaa

SEQ ID NO: 229856 - DNA, 19 bp, Homo sapiens
  siRNA target sequence for HSPC150 (NM_014176.1,635-653).
gtgactccagagtacacaa

SEQ ID NO: 229857 - DNA, 19 bp, Homo sapiens
  siRNA target sequence for ITCH (NM_031483.3,203-221).
gggtagcctcaccatgaaa

SEQ ID NO: 229858 - DNA, 19 bp, Homo sapiens
  siRNA target sequence for ITCH (NM_031483.3,204-222).
ggtagcctcaccatgaaat

SEQ ID NO: 229859 - DNA, 19 bp, Homo sapiens
  siRNA target sequence for ITCH (NM_031483.3,238-256).
ctgtcatctcagcaaaact

SEQ ID NO: 229860 - DNA, 19 bp, Homo sapiens
  siRNA target sequence for ITCH (NM_031483.3,296-314).
cgtagaggtcacagtagat

SEQ ID NO: 229861 - DNA, 19 bp, Homo sapiens
  siRNA target sequence for ITCH (NM_031483.3,307-325).
cagtagatggacagtcaaa

SEQ ID NO: 229862 - DNA, 19 bp, Homo sapiens
  siRNA target sequence for ITCH (NM_031483.3,309-327).
gtagatggacagtcaaaga

SEQ ID NO: 229863 - DNA, 19 bp, Homo sapiens
  siRNA target sequence for ITCH (NM_031483.3,364-382).
ggaagcaaccccttacagt

SEQ ID NO: 229864 - DNA, 19 bp, Homo sapiens
  siRNA target sequence for ITCH (NM_031483.3,372-390).
ccccttacagttatcgtta

SEQ ID NO: 229865 - DNA, 19 bp, Homo sapiens
  siRNA target sequence for ITCH (NM_031483.3,386-404).
cgttacccctgtgagtaaa

SEQ ID NO: 229866 - DNA, 19 bp, Homo sapiens
  siRNA target sequence for ITCH (NM_031483.3,391-409).
cccctgtgagtaaattaca

SEQ ID NO: 229867 - DNA, 19 bp, Homo sapiens
  siRNA target sequence for ITCH (NM_031483.3,398-416).
gagtaaattacattttcgt

SEQ ID NO: 229868 - DNA, 19 bp, Homo sapiens
  siRNA target sequence for ITCH (NM_031483.3,456-474).
ggaactgctgcattagata

SEQ ID NO: 229869 - DNA, 19 bp, Homo sapiens
  siRNA target sequence for ITCH (NM_031483.3,457-475).
gaactgctgcattagatat

SEQ ID NO: 229870 - DNA, 19 bp, Homo sapiens
  siRNA target sequence for ITCH (NM_031483.3,460-478).
ctgctgcattagatattta

SEQ ID NO: 229871 - DNA, 19 bp, Homo sapiens
  siRNA target sequence for ITCH (NM_031483.3,530-548).
gcagcttggaggtgacaaa

SEQ ID NO: 229872 - DNA, 19 bp, Homo sapiens
  siRNA target sequence for ITCH (NM_031483.3,572-590).
cttgtcaatttgtcttgat

SEQ ID NO: 229873 - DNA, 19 bp, Homo sapiens
  siRNA target sequence for ITCH (NM_031483.3,620-638).
caatggtgaaactacatgt

SEQ ID NO: 229874 - DNA, 19 bp, Homo sapiens
  siRNA target sequence for ITCH (NM_031483.3,627-645).
gaaactacatgttcagaaa

SEQ ID NO: 229875 - DNA, 19 bp, Homo sapiens
  siRNA target sequence for ITCH (NM_031483.3,746-764).
gagagtcagtgggaataat

SEQ ID NO: 229876 - DNA, 19 bp, Homo sapiens
  siRNA target sequence for ITCH (NM_031483.3,871-889).
ctgccacttctgaaagtga

SEQ ID NO: 229877 - DNA, 19 bp, Homo sapiens
  siRNA target sequence for ITCH (NM_031483.3,916-934).
cgacaaatacaaatacaaa

SEQ ID NO: 229878 - DNA, 19 bp, Homo sapiens
  siRNA target sequence for ITCH (NM_031483.3,991-1009).
caggccctaggccattaaa

SEQ ID NO: 229879 - DNA, 19 bp, Homo sapiens
  siRNA target sequence for ITCH (NM_031483.3,995-1013).
ccctaggccattaaatcct

SEQ ID NO: 229880 - DNA, 19 bp, Homo sapiens
  siRNA target sequence for ITCH (NM_031483.3,1059-1077).
cagcacgggcgagtttact

SEQ ID NO: 229881 - DNA, 19 bp, Homo sapiens
  siRNA target sequence for ITCH (NM_031483.3,1061-1079).
gcacgggcgagtttactat

SEQ ID NO: 229882 - DNA, 19 bp, Homo sapiens
  siRNA target sequence for ITCH (NM_031483.3,1064-1082).
cgggcgagtttactatgta

SEQ ID NO: 229883 - DNA, 19 bp, Homo sapiens
  siRNA target sequence for ITCH (NM_031483.3,1066-1084).
ggcgagtttactatgtaga

SEQ ID NO: 229884 - DNA, 19 bp, Homo sapiens
  siRNA target sequence for ITCH (NM_031483.3,1067-1085).
gcgagtttactatgtagat

SEQ ID NO: 229885 - DNA, 19 bp, Homo sapiens
  siRNA target sequence for ITCH (NM_031483.3,1157-1175).
catgggacgtatttattat

SEQ ID NO: 229886 - DNA, 19 bp, Homo sapiens
  siRNA target sequence for ITCH (NM_031483.3,1160-1178).
gggacgtatttattatgtt

SEQ ID NO: 229887 - DNA, 19 bp, Homo sapiens
  siRNA target sequence for ITCH (NM_031483.3,1220-1238).
ggaatccgtccggaactat

SEQ ID NO: 229888 - DNA, 19 bp, Homo sapiens
  siRNA target sequence for ITCH (NM_031483.3,1225-1243).
ccgtccggaactatgaaca

SEQ ID NO: 229889 - DNA, 19 bp, Homo sapiens
  siRNA target sequence for ITCH (NM_031483.3,1226-1244).
cgtccggaactatgaacaa

SEQ ID NO: 229890 - DNA, 19 bp, Homo sapiens
  siRNA target sequence for ITCH (NM_031483.3,1227-1245).
gtccggaactatgaacaat

SEQ ID NO: 229891 - DNA, 19 bp, Homo sapiens
  siRNA target sequence for ITCH (NM_031483.3,1284-1302).
cagtttaaccagagattca

SEQ ID NO: 229892 - DNA, 19 bp, Homo sapiens
  siRNA target sequence for ITCH (NM_031483.3,1286-1304).
gtttaaccagagattcatt

SEQ ID NO: 229893 - DNA, 19 bp, Homo sapiens
  siRNA target sequence for ITCH (NM_031483.3,1330-1348).
catcacaaagtaaagaatt

SEQ ID NO: 229894 - DNA, 19 bp, Homo sapiens
  siRNA target sequence for ITCH (NM_031483.3,1392-1410).
gacagcaatggcagagtat

SEQ ID NO: 229895 - DNA, 19 bp, Homo sapiens
  siRNA target sequence for ITCH (NM_031483.3,1396-1414).
gcaatggcagagtatattt

SEQ ID NO: 229896 - DNA, 19 bp, Homo sapiens
  siRNA target sequence for ITCH (NM_031483.3,1418-1436).
caaccacaacacacgaatt

SEQ ID NO: 229897 - DNA, 19 bp, Homo sapiens
  siRNA target sequence for ITCH (NM_031483.3,1421-1439).
ccacaacacacgaattaca

SEQ ID NO: 229898 - DNA, 19 bp, Homo sapiens
  siRNA target sequence for ITCH (NM_031483.3,1424-1442).
caacacacgaattacacaa

SEQ ID NO: 229899 - DNA, 19 bp, Homo sapiens
  siRNA target sequence for ITCH (NM_031483.3,1454-1472).
cagaagtcaaggtcaatta

SEQ ID NO: 229900 - DNA, 19 bp, Homo sapiens
  siRNA target sequence for ITCH (NM_031483.3,1456-1474).
gaagtcaaggtcaattaaa

SEQ ID NO: 229901 - DNA, 19 bp, Homo sapiens
  siRNA target sequence for ITCH (NM_031483.3,1459-1477).
gtcaaggtcaattaaatga

SEQ ID NO: 229902 - DNA, 19 bp, Homo sapiens
  siRNA target sequence for ITCH (NM_031483.3,1488-1506).
cctgaaggttgggaaatga

SEQ ID NO: 229903 - DNA, 19 bp, Homo sapiens
  siRNA target sequence for ITCH (NM_031483.3,1549-1567).
gaagaactaccacctatat

SEQ ID NO: 229904 - DNA, 19 bp, Homo sapiens
  siRNA target sequence for ITCH (NM_031483.3,1569-1587).
gatccccgcacaggaaaat

SEQ ID NO: 229905 - DNA, 19 bp, Homo sapiens
  siRNA target sequence for ITCH (NM_031483.3,1582-1600).
gaaaatctgccctagacaa

SEQ ID NO: 229906 - DNA, 19 bp, Homo sapiens
  siRNA target sequence for ITCH (NM_031483.3,1615-1633).
cctatgttcgggacttcaa

SEQ ID NO: 229907 - DNA, 19 bp, Homo sapiens
  siRNA target sequence for ITCH (NM_031483.3,1616-1634).
ctatgttcgggacttcaaa

SEQ ID NO: 229908 - DNA, 19 bp, Homo sapiens
  siRNA target sequence for ITCH (NM_031483.3,1674-1692).
gccatgccacagcacataa

SEQ ID NO: 229909 - DNA, 19 bp, Homo sapiens
  siRNA target sequence for ITCH (NM_031483.3,1680-1698).
ccacagcacataaagatta

SEQ ID NO: 229910 - DNA, 19 bp, Homo sapiens
  siRNA target sequence for ITCH (NM_031483.3,1747-1765).
gcttcagtccccaagatct

SEQ ID NO: 229911 - DNA, 19 bp, Homo sapiens
  siRNA target sequence for ITCH (NM_031483.3,1771-1789).
gacgtttgtgggtgatttt

SEQ ID NO: 229912 - DNA, 19 bp, Homo sapiens
  siRNA target sequence for ITCH (NM_031483.3,1815-1833).
ggaggtgtagcaagagaat

SEQ ID NO: 229913 - DNA, 19 bp, Homo sapiens
  siRNA target sequence for ITCH (NM_031483.3,1890-1908).
gcagggaaggataactact

SEQ ID NO: 229914 - DNA, 19 bp, Homo sapiens
  siRNA target sequence for ITCH (NM_031483.3,1992-2010).
ctgttccatgggaaattca

SEQ ID NO: 229915 - DNA, 19 bp, Homo sapiens
  siRNA target sequence for ITCH (NM_031483.3,1994-2012).
gttccatgggaaattcata

SEQ ID NO: 229916 - DNA, 19 bp, Homo sapiens
  siRNA target sequence for ITCH (NM_031483.3,1998-2016).
catgggaaattcatagaca

SEQ ID NO: 229917 - DNA, 19 bp, Homo sapiens
  siRNA target sequence for ITCH (NM_031483.3,2009-2027).
catagacacgggtttttct

SEQ ID NO: 229918 - DNA, 19 bp, Homo sapiens
  siRNA target sequence for ITCH (NM_031483.3,2015-2033).
cacgggtttttctttacca

SEQ ID NO: 229919 - DNA, 19 bp, Homo sapiens
  siRNA target sequence for ITCH (NM_031483.3,2064-2082).
ggactcaaggatttagaat

SEQ ID NO: 229920 - DNA, 19 bp, Homo sapiens
  siRNA target sequence for ITCH (NM_031483.3,2114-2132).
ctgggttaaggaaaacaat

SEQ ID NO: 229921 - DNA, 19 bp, Homo sapiens
  siRNA target sequence for ITCH (NM_031483.3,2145-2163).
gatttggaaatgtacttct

SEQ ID NO: 229922 - DNA, 19 bp, Homo sapiens
  siRNA target sequence for ITCH (NM_031483.3,2156-2174).
gtacttctccgttgacaaa

SEQ ID NO: 229923 - DNA, 19 bp, Homo sapiens
  siRNA target sequence for ITCH (NM_031483.3,2197-2215).
gtcatgatctgaaacctaa

SEQ ID NO: 229924 - DNA, 19 bp, Homo sapiens
  siRNA target sequence for ITCH (NM_031483.3,2287-2305).
ctcgaggtgttgaagaaca

SEQ ID NO: 229925 - DNA, 19 bp, Homo sapiens
  siRNA target sequence for ITCH (NM_031483.3,2306-2324).
gacacaagctttctttgaa

SEQ ID NO: 229926 - DNA, 19 bp, Homo sapiens
  siRNA target sequence for ITCH (NM_031483.3,2343-2361).
ccccagcaatatttgcaat

SEQ ID NO: 229927 - DNA, 19 bp, Homo sapiens
  siRNA target sequence for ITCH (NM_031483.3,2438-2456).
catctaccgtcattatgca

SEQ ID NO: 229928 - DNA, 19 bp, Homo sapiens
  siRNA target sequence for ITCH (NM_031483.3,2522-2540).
gagacttctgcagtttgtt

SEQ ID NO: 229929 - DNA, 19 bp, Homo sapiens
  siRNA target sequence for ITCH (NM_031483.3,2558-2576).
gccagtaggaggatttgct

SEQ ID NO: 229930 - DNA, 19 bp, Homo sapiens
  siRNA target sequence for ITCH (NM_031483.3,2673-2691).
gacctgccaccatacaaga

SEQ ID NO: 229931 - DNA, 19 bp, Homo sapiens
  siRNA target sequence for ITCH (NM_031483.3,2717-2735).
gttgtttgccatagaagaa

SEQ ID NO: 229932 - DNA, 19 bp, Homo sapiens
  siRNA target sequence for KIAA0010 (NM_014671.1,432-450).
gcgaaggttgaaaaatgca

SEQ ID NO: 229933 - DNA, 19 bp, Homo sapiens
  siRNA target sequence for KIAA0010 (NM_014671.1,433-451).
cgaaggttgaaaaatgcaa

SEQ ID NO: 229934 - DNA, 19 bp, Homo sapiens
  siRNA target sequence for KIAA0010 (NM_014671.1,493-511).
cagcaatattccatccaaa

SEQ ID NO: 229935 - DNA, 19 bp, Homo sapiens
  siRNA target sequence for KIAA0010 (NM_014671.1,579-597).
caaccttacccttttggta

SEQ ID NO: 229936 - DNA, 19 bp, Homo sapiens
  siRNA target sequence for KIAA0010 (NM_014671.1,641-659).
gtttgatatggctgtatca

SEQ ID NO: 229937 - DNA, 19 bp, Homo sapiens
  siRNA target sequence for KIAA0010 (NM_014671.1,654-672).
gtatcagaacttaattaaa

SEQ ID NO: 229938 - DNA, 19 bp, Homo sapiens
  siRNA target sequence for KIAA0010 (NM_014671.1,700-718).
gatggatctgagagactta

SEQ ID NO: 229939 - DNA, 19 bp, Homo sapiens
  siRNA target sequence for KIAA0010 (NM_014671.1,711-729).
gagacttacatgcttattt

SEQ ID NO: 229940 - DNA, 19 bp, Homo sapiens
  siRNA target sequence for KIAA0010 (NM_014671.1,713-731).
gacttacatgcttatttca

SEQ ID NO: 229941 - DNA, 19 bp, Homo sapiens
  siRNA target sequence for KIAA0010 (NM_014671.1,761-779).
ggttgctgcaaaactgtaa

SEQ ID NO: 229942 - DNA, 19 bp, Homo sapiens
  siRNA target sequence for KIAA0010 (NM_014671.1,810-828).
gagaatgcttgaagtattt

SEQ ID NO: 229943 - DNA, 19 bp, Homo sapiens
  siRNA target sequence for KIAA0010 (NM_014671.1,823-841).
gtattttcgtctgagaata

SEQ ID NO: 229944 - DNA, 19 bp, Homo sapiens
  siRNA target sequence for KIAA0010 (NM_014671.1,830-848).
cgtctgagaatacttactt

SEQ ID NO: 229945 - DNA, 19 bp, Homo sapiens
  siRNA target sequence for KIAA0010 (NM_014671.1,870-888).
ctatgtggtgtcagtgatt

SEQ ID NO: 229946 - DNA, 19 bp, Homo sapiens
  siRNA target sequence for KIAA0010 (NM_014671.1,876-894).
ggtgtcagtgattgaacaa

SEQ ID NO: 229947 - DNA, 19 bp, Homo sapiens
  siRNA target sequence for KIAA0010 (NM_014671.1,879-897).
gtcagtgattgaacaaatt

SEQ ID NO: 229948 - DNA, 19 bp, Homo sapiens
  siRNA target sequence for KIAA0010 (NM_014671.1,892-910).
caaattttgcactacatga

SEQ ID NO: 229949 - DNA, 19 bp, Homo sapiens
  siRNA target sequence for KIAA0010 (NM_014671.1,900-918).
gcactacatgattcacaat

SEQ ID NO: 229950 - DNA, 19 bp, Homo sapiens
  siRNA target sequence for KIAA0010 (NM_014671.1,920-938).
ggtattataggtctctata

SEQ ID NO: 229951 - DNA, 19 bp, Homo sapiens
  siRNA target sequence for KIAA0010 (NM_014671.1,957-975).
gcttccatcaagtattgaa

SEQ ID NO: 229952 - DNA, 19 bp, Homo sapiens
  siRNA target sequence for KIAA0010 (NM_014671.1,991-1009).
cgagttcctatagcaaaaa

SEQ ID NO: 229953 - DNA, 19 bp, Homo sapiens
  siRNA target sequence for KIAA0010 (NM_014671.1,998-1016).
ctatagcaaaaattttgct

SEQ ID NO: 229954 - DNA, 19 bp, Homo sapiens
  siRNA target sequence for KIAA0010 (NM_014671.1,1033-1051).
ccattgcactttacttaca

SEQ ID NO: 229955 - DNA, 19 bp, Homo sapiens
  siRNA target sequence for KIAA0010 (NM_014671.1,1066-1084).
ggtgcgaggcaacaagttt

SEQ ID NO: 229956 - DNA, 19 bp, Homo sapiens
  siRNA target sequence for KIAA0010 (NM_014671.1,1067-1085).
gtgcgaggcaacaagtttt

SEQ ID NO: 229957 - DNA, 19 bp, Homo sapiens
  siRNA target sequence for KIAA0010 (NM_014671.1,1069-1087).
gcgaggcaacaagttttta

SEQ ID NO: 229958 - DNA, 19 bp, Homo sapiens
  siRNA target sequence for KIAA0010 (NM_014671.1,1181-1199).
cttacgagccctttctgaa

SEQ ID NO: 229959 - DNA, 19 bp, Homo sapiens
  siRNA target sequence for KIAA0010 (NM_014671.1,1250-1268).
cctggcttttctatttcgt

SEQ ID NO: 229960 - DNA, 19 bp, Homo sapiens
  siRNA target sequence for KIAA0010 (NM_014671.1,1260-1278).
ctatttcgttttaactgtt

SEQ ID NO: 229961 - DNA, 19 bp, Homo sapiens
  siRNA target sequence for KIAA0010 (NM_014671.1,1309-1327).
gaagggctgctggtgtatt

SEQ ID NO: 229962 - DNA, 19 bp, Homo sapiens
  siRNA target sequence for KIAA0010 (NM_014671.1,1453-1471).
ggcagactgtcagtatcat

SEQ ID NO: 229963 - DNA, 19 bp, Homo sapiens
  siRNA target sequence for KIAA0010 (NM_014671.1,1454-1472).
gcagactgtcagtatcata

SEQ ID NO: 229964 - DNA, 19 bp, Homo sapiens
  siRNA target sequence for KIAA0010 (NM_014671.1,1457-1475).
gactgtcagtatcatacat

SEQ ID NO: 229965 - DNA, 19 bp, Homo sapiens
  siRNA target sequence for KIAA0010 (NM_014671.1,1461-1479).
gtcagtatcatacataaca

SEQ ID NO: 229966 - DNA, 19 bp, Homo sapiens
  siRNA target sequence for KIAA0010 (NM_014671.1,1630-1648).
gtcaggcttctctacagtt

SEQ ID NO: 229967 - DNA, 19 bp, Homo sapiens
  siRNA target sequence for KIAA0010 (NM_014671.1,1632-1650).
caggcttctctacagttta

SEQ ID NO: 229968 - DNA, 19 bp, Homo sapiens
  siRNA target sequence for KIAA0010 (NM_014671.1,1713-1731).
gatcacagggtctatggta

SEQ ID NO: 229969 - DNA, 19 bp, Homo sapiens
  siRNA target sequence for KIAA0010 (NM_014671.1,1732-1750).
ccgttgcttcaggtgatat

SEQ ID NO: 229970 - DNA, 19 bp, Homo sapiens
  siRNA target sequence for KIAA0010 (NM_014671.1,1754-1772).
ggggttctcctatgtcttt

SEQ ID NO: 229971 - DNA, 19 bp, Homo sapiens
  siRNA target sequence for KIAA0010 (NM_014671.1,1757-1775).
gttctcctatgtcttttga

SEQ ID NO: 229972 - DNA, 19 bp, Homo sapiens
  siRNA target sequence for KIAA0010 (NM_014671.1,1767-1785).
gtcttttgaagattctagt

SEQ ID NO: 229973 - DNA, 19 bp, Homo sapiens
  siRNA target sequence for KIAA0010 (NM_014671.1,1786-1804).
cgaatcatcccactctttt

SEQ ID NO: 229974 - DNA, 19 bp, Homo sapiens
  siRNA target sequence for KIAA0010 (NM_014671.1,1787-1805).
gaatcatcccactctttta

SEQ ID NO: 229975 - DNA, 19 bp, Homo sapiens
  siRNA target sequence for KIAA0010 (NM_014671.1,1815-1833).
ctccttgtttagtcattca

SEQ ID NO: 229976 - DNA, 19 bp, Homo sapiens
  siRNA target sequence for KIAA0010 (NM_014671.1,1817-1835).
ccttgtttagtcattcact

SEQ ID NO: 229977 - DNA, 19 bp, Homo sapiens
  siRNA target sequence for KIAA0010 (NM_014671.1,1818-1836).
cttgtttagtcattcacta

SEQ ID NO: 229978 - DNA, 19 bp, Homo sapiens
  siRNA target sequence for KIAA0010 (NM_014671.1,1832-1850).
cactaatttccatacatga

SEQ ID NO: 229979 - DNA, 19 bp, Homo sapiens
  siRNA target sequence for KIAA0010 (NM_014671.1,1834-1852).
ctaatttccatacatgata

SEQ ID NO: 229980 - DNA, 19 bp, Homo sapiens
  siRNA target sequence for KIAA0010 (NM_014671.1,1841-1859).
ccatacatgataacgaatt

SEQ ID NO: 229981 - DNA, 19 bp, Homo sapiens
  siRNA target sequence for KIAA0010 (NM_014671.1,1860-1878).
cttcggtgatcccatagaa

SEQ ID NO: 229982 - DNA, 19 bp, Homo sapiens
  siRNA target sequence for KIAA0010 (NM_014671.1,1863-1881).
cggtgatcccatagaagtt

SEQ ID NO: 229983 - DNA, 19 bp, Homo sapiens
  siRNA target sequence for KIAA0010 (NM_014671.1,1865-1883).
gtgatcccatagaagttgt

SEQ ID NO: 229984 - DNA, 19 bp, Homo sapiens
  siRNA target sequence for KIAA0010 (NM_014671.1,1882-1900).
gtaggtcaaagacaatcat

SEQ ID NO: 229985 - DNA, 19 bp, Homo sapiens
  siRNA target sequence for KIAA0010 (NM_014671.1,1885-1903).
ggtcaaagacaatcatcaa

SEQ ID NO: 229986 - DNA, 19 bp, Homo sapiens
  siRNA target sequence for KIAA0010 (NM_014671.1,1886-1904).
gtcaaagacaatcatcaat

SEQ ID NO: 229987 - DNA, 19 bp, Homo sapiens
  siRNA target sequence for KIAA0010 (NM_014671.1,1957-1975).
gcatgcctggggatcatca

SEQ ID NO: 229988 - DNA, 19 bp, Homo sapiens
  siRNA target sequence for KIAA0010 (NM_014671.1,1961-1979).
gcctggggatcatcaagtt

SEQ ID NO: 229989 - DNA, 19 bp, Homo sapiens
  siRNA target sequence for KIAA0010 (NM_014671.1,1999-2017).
ccagaagttcgagaagaat

SEQ ID NO: 229990 - DNA, 19 bp, Homo sapiens
  siRNA target sequence for KIAA0010 (NM_014671.1,2032-2050).
cagagtattggagttacta

SEQ ID NO: 229991 - DNA, 19 bp, Homo sapiens
  siRNA target sequence for KIAA0010 (NM_014671.1,2120-2138).
ccaatctagtgaaaatgtt

SEQ ID NO: 229992 - DNA, 19 bp, Homo sapiens
  siRNA target sequence for KIAA0010 (NM_014671.1,2147-2165).
gagacacgaggagaaattt

SEQ ID NO: 229993 - DNA, 19 bp, Homo sapiens
  siRNA target sequence for KIAA0010 (NM_014671.1,2149-2167).
gacacgaggagaaattttt

SEQ ID NO: 229994 - DNA, 19 bp, Homo sapiens
  siRNA target sequence for KIAA0010 (NM_014671.1,2151-2169).
cacgaggagaaatttttgt

SEQ ID NO: 229995 - DNA, 19 bp, Homo sapiens
  siRNA target sequence for KIAA0010 (NM_014671.1,2178-2196).
ccactggctgtcagaacaa

SEQ ID NO: 229996 - DNA, 19 bp, Homo sapiens
  siRNA target sequence for KIAA0010 (NM_014671.1,2389-2407).
gaggaacgagtaaagatct

SEQ ID NO: 229997 - DNA, 19 bp, Homo sapiens
  siRNA target sequence for KIAA0010 (NM_014671.1,2403-2421).
gatctttcagaggttgatt

SEQ ID NO: 229998 - DNA, 19 bp, Homo sapiens
  siRNA target sequence for KIAA0010 (NM_014671.1,2414-2432).
ggttgatttatgcagataa

SEQ ID NO: 229999 - DNA, 19 bp, Homo sapiens
  siRNA target sequence for KIAA0010 (NM_014671.1,2622-2640).
cagagagtttttaaatgaa

SEQ ID NO: 230000 - DNA, 19 bp, Homo sapiens
  siRNA target sequence for KIAA0010 (NM_014671.1,2661-2679).
ccccaaccaggggttcttt

SEQ ID NO: 230001 - DNA, 19 bp, Homo sapiens
  siRNA target sequence for KIAA0010 (NM_014671.1,2663-2681).
ccaaccaggggttctttaa

SEQ ID NO: 230002 - DNA, 19 bp, Homo sapiens
  siRNA target sequence for KIAA0010 (NM_014671.1,2667-2685).
ccaggggttctttaagact

SEQ ID NO: 230003 - DNA, 19 bp, Homo sapiens
  siRNA target sequence for KIAA0010 (NM_014671.1,2671-2689).
gggttctttaagactacta

SEQ ID NO: 230004 - DNA, 19 bp, Homo sapiens
  siRNA target sequence for KIAA0010 (NM_014671.1,2672-2690).
ggttctttaagactactaa

SEQ ID NO: 230005 - DNA, 19 bp, Homo sapiens
  siRNA target sequence for KIAA0010 (NM_014671.1,2673-2691).
gttctttaagactactaat

SEQ ID NO: 230006 - DNA, 19 bp, Homo sapiens
  siRNA target sequence for KIAA0010 (NM_014671.1,2737-2755).
gattcttttgccagacatt

SEQ ID NO: 230007 - DNA, 19 bp, Homo sapiens
  siRNA target sequence for KIAA0010 (NM_014671.1,2775-2793).
gcttggaaaggctctctat

SEQ ID NO: 230008 - DNA, 19 bp, Homo sapiens
  siRNA target sequence for KIAA0010 (NM_014671.1,2780-2798).
gaaaggctctctatgagaa

SEQ ID NO: 230009 - DNA, 19 bp, Homo sapiens
  siRNA target sequence for KIAA0010 (NM_014671.1,2887-2905).
ctagaccctgaggtgtata

SEQ ID NO: 230010 - DNA, 19 bp, Homo sapiens
  siRNA target sequence for KIAA0010 (NM_014671.1,2890-2908).
gaccctgaggtgtataaga

SEQ ID NO: 230011 - DNA, 19 bp, Homo sapiens
  siRNA target sequence for KIAA0010 (NM_014671.1,2892-2910).
ccctgaggtgtataagaat

SEQ ID NO: 230012 - DNA, 19 bp, Homo sapiens
  siRNA target sequence for KIAA0010 (NM_014671.1,2893-2911).
cctgaggtgtataagaatt

SEQ ID NO: 230013 - DNA, 19 bp, Homo sapiens
  siRNA target sequence for KIAA0010 (NM_014671.1,2987-3005).
gagaggcgcaggtagttga

SEQ ID NO: 230014 - DNA, 19 bp, Homo sapiens
  siRNA target sequence for KIAA0010 (NM_014671.1,2991-3009).
ggcgcaggtagttgaacta

SEQ ID NO: 230015 - DNA, 19 bp, Homo sapiens
  siRNA target sequence for KIAA0010 (NM_014671.1,2992-3010).
gcgcaggtagttgaactaa

SEQ ID NO: 230016 - DNA, 19 bp, Homo sapiens
  siRNA target sequence for KIAA0010 (NM_014671.1,2993-3011).
cgcaggtagttgaactaaa

SEQ ID NO: 230017 - DNA, 19 bp, Homo sapiens
  siRNA target sequence for KIAA0010 (NM_014671.1,3153-3171).
gtggctccgaatgtttgat

SEQ ID NO: 230018 - DNA, 19 bp, Homo sapiens
  siRNA target sequence for KIAA0010 (NM_014671.1,3155-3173).
ggctccgaatgtttgatca

SEQ ID NO: 230019 - DNA, 19 bp, Homo sapiens
  siRNA target sequence for KIAA0010 (NM_014671.1,3220-3238).
ctagaggacctaaaatcct

SEQ ID NO: 230020 - DNA, 19 bp, Homo sapiens
  siRNA target sequence for KIAA0010 (NM_014671.1,3246-3264).
ctattcaggaggctattct

SEQ ID NO: 230021 - DNA, 19 bp, Homo sapiens
  siRNA target sequence for KIAA0010 (NM_014671.1,3327-3345).
gcgcaaactgctgaagttt

SEQ ID NO: 230022 - DNA, 19 bp, Homo sapiens
  siRNA target sequence for KIAA0010 (NM_014671.1,3368-3386).
ctctcttggggtttaagga

SEQ ID NO: 230023 - DNA, 19 bp, Homo sapiens
  siRNA target sequence for KIAA0010 (NM_014671.1,3385-3403).
gagttgtatcccgcatttt

SEQ ID NO: 230024 - DNA, 19 bp, Homo sapiens
  siRNA target sequence for KIAA0010 (NM_014671.1,3387-3405).
gttgtatcccgcattttgt

SEQ ID NO: 230025 - DNA, 19 bp, Homo sapiens
  siRNA target sequence for KIAA0010 (NM_014671.1,3390-3408).
gtatcccgcattttgtatt

SEQ ID NO: 230026 - DNA, 19 bp, Homo sapiens
  siRNA target sequence for KIAA0010 (NM_014671.1,3394-3412).
cccgcattttgtattcaca

SEQ ID NO: 230027 - DNA, 19 bp, Homo sapiens
  siRNA target sequence for KIAA0010 (NM_014671.1,3395-3413).
ccgcattttgtattcacaa

SEQ ID NO: 230028 - DNA, 19 bp, Homo sapiens
  siRNA target sequence for KIAA0010 (NM_014671.1,3468-3486).
gaagctccccgagttctat

SEQ ID NO: 230029 - DNA, 19 bp, Homo sapiens
  siRNA target sequence for KIAA0010 (NM_014671.1,3494-3512).
cacttttgcgaagtaaact

SEQ ID NO: 230030 - DNA, 19 bp, Homo sapiens
  siRNA target sequence for KIAA0317 (NM_014821.1,508-526).
gttgcattcttcttcacaa

SEQ ID NO: 230031 - DNA, 19 bp, Homo sapiens
  siRNA target sequence for KIAA0317 (NM_014821.1,511-529).
gcattcttcttcacaatta

SEQ ID NO: 230032 - DNA, 19 bp, Homo sapiens
  siRNA target sequence for KIAA0317 (NM_014821.1,591-609).
ccgaggggaccggactatt

SEQ ID NO: 230033 - DNA, 19 bp, Homo sapiens
  siRNA target sequence for KIAA0317 (NM_014821.1,592-610).
cgaggggaccggactattt

SEQ ID NO: 230034 - DNA, 19 bp, Homo sapiens
  siRNA target sequence for KIAA0317 (NM_014821.1,593-611).
gaggggaccggactattta

SEQ ID NO: 230035 - DNA, 19 bp, Homo sapiens
  siRNA target sequence for KIAA0317 (NM_014821.1,598-616).
gaccggactatttatgact

SEQ ID NO: 230036 - DNA, 19 bp, Homo sapiens
  siRNA target sequence for KIAA0317 (NM_014821.1,613-631).
gactacgtgcggggaaatt

SEQ ID NO: 230037 - DNA, 19 bp, Homo sapiens
  siRNA target sequence for KIAA0317 (NM_014821.1,640-658).
ccccggtcttgcaaagtct

SEQ ID NO: 230038 - DNA, 19 bp, Homo sapiens
  siRNA target sequence for KIAA0317 (NM_014821.1,701-719).
ccttccgagtgcatttatt

SEQ ID NO: 230039 - DNA, 19 bp, Homo sapiens
  siRNA target sequence for KIAA0317 (NM_014821.1,706-724).
cgagtgcatttattctata

SEQ ID NO: 230040 - DNA, 19 bp, Homo sapiens
  siRNA target sequence for KIAA0317 (NM_014821.1,707-725).
gagtgcatttattctataa

SEQ ID NO: 230041 - DNA, 19 bp, Homo sapiens
  siRNA target sequence for KIAA0317 (NM_014821.1,752-770).
ggcctgtgggactaagagt

SEQ ID NO: 230042 - DNA, 19 bp, Homo sapiens
  siRNA target sequence for KIAA0317 (NM_014821.1,786-804).
cgagctagcagtggaaatt

SEQ ID NO: 230043 - DNA, 19 bp, Homo sapiens
  siRNA target sequence for KIAA0317 (NM_014821.1,832-850).
cccaattccaacgtagtaa

SEQ ID NO: 230044 - DNA, 19 bp, Homo sapiens
  siRNA target sequence for KIAA0317 (NM_014821.1,834-852).
caattccaacgtagtaaaa

SEQ ID NO: 230045 - DNA, 19 bp, Homo sapiens
  siRNA target sequence for KIAA0317 (NM_014821.1,869-887).
gcaaggctgggcgttatga

SEQ ID NO: 230046 - DNA, 19 bp, Homo sapiens
  siRNA target sequence for KIAA0317 (NM_014821.1,870-888).
caaggctgggcgttatgaa

SEQ ID NO: 230047 - DNA, 19 bp, Homo sapiens
  siRNA target sequence for KIAA0317 (NM_014821.1,895-913).
gtgaagcttggtggattaa

SEQ ID NO: 230048 - DNA, 19 bp, Homo sapiens
  siRNA target sequence for KIAA0317 (NM_014821.1,929-947).
cctactacaaaatttttca

SEQ ID NO: 230049 - DNA, 19 bp, Homo sapiens
  siRNA target sequence for KIAA0317 (NM_014821.1,930-948).
ctactacaaaatttttcaa

SEQ ID NO: 230050 - DNA, 19 bp, Homo sapiens
  siRNA target sequence for KIAA0317 (NM_014821.1,965-983).
cttctaagaccaaaattgt

SEQ ID NO: 230051 - DNA, 19 bp, Homo sapiens
  siRNA target sequence for KIAA0317 (NM_014821.1,1022-1040).
cgcacacccttcaaatagt

SEQ ID NO: 230052 - DNA, 19 bp, Homo sapiens
  siRNA target sequence for KIAA0317 (NM_014821.1,1042-1060).
ccccgagatgagtatgata

SEQ ID NO: 230053 - DNA, 19 bp, Homo sapiens
  siRNA target sequence for KIAA0317 (NM_014821.1,1043-1061).
cccgagatgagtatgataa

SEQ ID NO: 230054 - DNA, 19 bp, Homo sapiens
  siRNA target sequence for KIAA0317 (NM_014821.1,1044-1062).
ccgagatgagtatgataat

SEQ ID NO: 230055 - DNA, 19 bp, Homo sapiens
  siRNA target sequence for KIAA0317 (NM_014821.1,1143-1161).
gagtactggtgtctcattt

SEQ ID NO: 230056 - DNA, 19 bp, Homo sapiens
  siRNA target sequence for KIAA0317 (NM_014821.1,1145-1163).
gtactggtgtctcatttga

SEQ ID NO: 230057 - DNA, 19 bp, Homo sapiens
  siRNA target sequence for KIAA0317 (NM_014821.1,1254-1272).
ccaaaatcagccaatcaat

SEQ ID NO: 230058 - DNA, 19 bp, Homo sapiens
  siRNA target sequence for KIAA0317 (NM_014821.1,1265-1283).
caatcaataatggtgaatt

SEQ ID NO: 230059 - DNA, 19 bp, Homo sapiens
  siRNA target sequence for KIAA0317 (NM_014821.1,1340-1358).
cttcaggcgtgagcattta

SEQ ID NO: 230060 - DNA, 19 bp, Homo sapiens
  siRNA target sequence for KIAA0317 (NM_014821.1,1343-1361).
caggcgtgagcatttactt

SEQ ID NO: 230061 - DNA, 19 bp, Homo sapiens
  siRNA target sequence for KIAA0317 (NM_014821.1,1542-1560).
gtcaccaaagcaattctca

SEQ ID NO: 230062 - DNA, 19 bp, Homo sapiens
  siRNA target sequence for KIAA0317 (NM_014821.1,1646-1664).
ctgaccctgtccataagct

SEQ ID NO: 230063 - DNA, 19 bp, Homo sapiens
  siRNA target sequence for KIAA0317 (NM_014821.1,1750-1768).
cgctccctgcataagaaca

SEQ ID NO: 230064 - DNA, 19 bp, Homo sapiens
  siRNA target sequence for KIAA0317 (NM_014821.1,1752-1770).
ctccctgcataagaacata

SEQ ID NO: 230065 - DNA, 19 bp, Homo sapiens
  siRNA target sequence for KIAA0317 (NM_014821.1,1816-1834).
gagcttcggcaggtacata

SEQ ID NO: 230066 - DNA, 19 bp, Homo sapiens
  siRNA target sequence for KIAA0317 (NM_014821.1,1819-1837).
cttcggcaggtacatatga

SEQ ID NO: 230067 - DNA, 19 bp, Homo sapiens
  siRNA target sequence for KIAA0317 (NM_014821.1,2051-2069).
cccggttcagtgacaacaa

SEQ ID NO: 230068 - DNA, 19 bp, Homo sapiens
  siRNA target sequence for KIAA0317 (NM_014821.1,2104-2122).
gctcatctgcgcctgaaaa

SEQ ID NO: 230069 - DNA, 19 bp, Homo sapiens
  siRNA target sequence for KIAA0317 (NM_014821.1,2145-2163).
cgtgggcaagtgtctctat

SEQ ID NO: 230070 - DNA, 19 bp, Homo sapiens
  siRNA target sequence for KIAA0317 (NM_014821.1,2149-2167).
ggcaagtgtctctatgagt

SEQ ID NO: 230071 - DNA, 19 bp, Homo sapiens
  siRNA target sequence for KIAA0317 (NM_014821.1,2235-2253).
cataggactgcgtatgcat

SEQ ID NO: 230072 - DNA, 19 bp, Homo sapiens
  siRNA target sequence for KIAA0317 (NM_014821.1,2239-2257).
ggactgcgtatgcattaca

SEQ ID NO: 230073 - DNA, 19 bp, Homo sapiens
  siRNA target sequence for KIAA0317 (NM_014821.1,2240-2258).
gactgcgtatgcattacaa

SEQ ID NO: 230074 - DNA, 19 bp, Homo sapiens
  siRNA target sequence for KIAA0317 (NM_014821.1,2242-2260).
ctgcgtatgcattacaagt

SEQ ID NO: 230075 - DNA, 19 bp, Homo sapiens
  siRNA target sequence for KIAA0317 (NM_014821.1,2245-2263).
cgtatgcattacaagtact

SEQ ID NO: 230076 - DNA, 19 bp, Homo sapiens
  siRNA target sequence for KIAA0317 (NM_014821.1,2246-2264).
gtatgcattacaagtactt

SEQ ID NO: 230077 - DNA, 19 bp, Homo sapiens
  siRNA target sequence for KIAA0317 (NM_014821.1,2270-2288).
cagatgacccagaattcta

SEQ ID NO: 230078 - DNA, 19 bp, Homo sapiens
  siRNA target sequence for KIAA0317 (NM_014821.1,2303-2321).
gttttatcctcaacaatga

SEQ ID NO: 230079 - DNA, 19 bp, Homo sapiens
  siRNA target sequence for KIAA0317 (NM_014821.1,2369-2387).
caggtcaattggataaggt

SEQ ID NO: 230080 - DNA, 19 bp, Homo sapiens
  siRNA target sequence for KIAA0317 (NM_014821.1,2422-2440).
gtcaccaatgcgaataaaa

SEQ ID NO: 230081 - DNA, 19 bp, Homo sapiens
  siRNA target sequence for KIAA0317 (NM_014821.1,2426-2444).
ccaatgcgaataaaatctt

SEQ ID NO: 230082 - DNA, 19 bp, Homo sapiens
  siRNA target sequence for KIAA0317 (NM_014821.1,2432-2450).
cgaataaaatcttctattt

SEQ ID NO: 230083 - DNA, 19 bp, Homo sapiens
  siRNA target sequence for KIAA0317 (NM_014821.1,2472-2490).
gctggccagtcaagtgaaa

SEQ ID NO: 230084 - DNA, 19 bp, Homo sapiens
  siRNA target sequence for KIAA0317 (NM_014821.1,2494-2512).
gaggtggaacatttcctaa

SEQ ID NO: 230085 - DNA, 19 bp, Homo sapiens
  siRNA target sequence for KIAA0317 (NM_014821.1,2536-2554).
gagaaccttttggctattt

SEQ ID NO: 230086 - DNA, 19 bp, Homo sapiens
  siRNA target sequence for KIAA0317 (NM_014821.1,2616-2634).
caaagcccatgcagtagtt

SEQ ID NO: 230087 - DNA, 19 bp, Homo sapiens
  siRNA target sequence for KIAA0317 (NM_014821.1,2638-2656).
ggtggctcatggcatttca

SEQ ID NO: 230088 - DNA, 19 bp, Homo sapiens
  siRNA target sequence for KIAA0317 (NM_014821.1,2645-2663).
catggcatttcagagaaaa

SEQ ID NO: 230089 - DNA, 19 bp, Homo sapiens
  siRNA target sequence for KIAA0317 (NM_014821.1,2719-2737).
cggctacttcagttcacaa

SEQ ID NO: 230090 - DNA, 19 bp, Homo sapiens
  siRNA target sequence for KIAA0322 (NM_015052.1,208-226).
gcagctcctactattccat

SEQ ID NO: 230091 - DNA, 19 bp, Homo sapiens
  siRNA target sequence for KIAA0322 (NM_015052.1,295-313).
gcatgtacctcattgatga

SEQ ID NO: 230092 - DNA, 19 bp, Homo sapiens
  siRNA target sequence for KIAA0322 (NM_015052.1,314-332).
ggtcttgtccgaaaacttt

SEQ ID NO: 230093 - DNA, 19 bp, Homo sapiens
  siRNA target sequence for KIAA0322 (NM_015052.1,392-410).
cgatgccagctcgtacttt

SEQ ID NO: 230094 - DNA, 19 bp, Homo sapiens
  siRNA target sequence for KIAA0322 (NM_015052.1,480-498).
cccagtgtcacggtcaaaa

SEQ ID NO: 230095 - DNA, 19 bp, Homo sapiens
  siRNA target sequence for KIAA0322 (NM_015052.1,481-499).
ccagtgtcacggtcaaaaa

SEQ ID NO: 230096 - DNA, 19 bp, Homo sapiens
  siRNA target sequence for KIAA0322 (NM_015052.1,752-770).
ggccgagcaattcagtttt

SEQ ID NO: 230097 - DNA, 19 bp, Homo sapiens
  siRNA target sequence for KIAA0322 (NM_015052.1,858-876).
ctgtcgatgcccgttcaaa

SEQ ID NO: 230098 - DNA, 19 bp, Homo sapiens
  siRNA target sequence for KIAA0322 (NM_015052.1,860-878).
gtcgatgcccgttcaaaga

SEQ ID NO: 230099 - DNA, 19 bp, Homo sapiens
  siRNA target sequence for KIAA0322 (NM_015052.1,862-880).
cgatgcccgttcaaagact

SEQ ID NO: 230100 - DNA, 19 bp, Homo sapiens
  siRNA target sequence for KIAA0322 (NM_015052.1,929-947).
ccgcaggcttccaacagat

SEQ ID NO: 230101 - DNA, 19 bp, Homo sapiens
  siRNA target sequence for KIAA0322 (NM_015052.1,932-950).
caggcttccaacagatcat

SEQ ID NO: 230102 - DNA, 19 bp, Homo sapiens
  siRNA target sequence for KIAA0322 (NM_015052.1,963-981).
ctgcaattccgatttgaga

SEQ ID NO: 230103 - DNA, 19 bp, Homo sapiens
  siRNA target sequence for KIAA0322 (NM_015052.1,1031-1049).
gcctgagtcagcccaaatt

SEQ ID NO: 230104 - DNA, 19 bp, Homo sapiens
  siRNA target sequence for KIAA0322 (NM_015052.1,1033-1051).
ctgagtcagcccaaattca

SEQ ID NO: 230105 - DNA, 19 bp, Homo sapiens
  siRNA target sequence for KIAA0322 (NM_015052.1,2410-2428).
ggcctgaacatcatcacta

SEQ ID NO: 230106 - DNA, 19 bp, Homo sapiens
  siRNA target sequence for KIAA0322 (NM_015052.1,2598-2616).
ctcaacaggcggtatcaaa

SEQ ID NO: 230107 - DNA, 19 bp, Homo sapiens
  siRNA target sequence for KIAA0322 (NM_015052.1,2640-2658).
gagaggtccgaagaagatt

SEQ ID NO: 230108 - DNA, 19 bp, Homo sapiens
  siRNA target sequence for KIAA0322 (NM_015052.1,2642-2660).
gaggtccgaagaagattct

SEQ ID NO: 230109 - DNA, 19 bp, Homo sapiens
  siRNA target sequence for KIAA0322 (NM_015052.1,2715-2733).
gactcagaagccgaatctt

SEQ ID NO: 230110 - DNA, 19 bp, Homo sapiens
  siRNA target sequence for KIAA0322 (NM_015052.1,2735-2753).
ccagtccagcttagatcta

SEQ ID NO: 230111 - DNA, 19 bp, Homo sapiens
  siRNA target sequence for KIAA0322 (NM_015052.1,2736-2754).
cagtccagcttagatctaa

SEQ ID NO: 230112 - DNA, 19 bp, Homo sapiens
  siRNA target sequence for KIAA0322 (NM_015052.1,2812-2830).
ccccagcggtcaagttcat

SEQ ID NO: 230113 - DNA, 19 bp, Homo sapiens
  siRNA target sequence for KIAA0322 (NM_015052.1,2851-2869).
ctgtgctacatgccaatta

SEQ ID NO: 230114 - DNA, 19 bp, Homo sapiens
  siRNA target sequence for KIAA0322 (NM_015052.1,2853-2871).
gtgctacatgccaattata

SEQ ID NO: 230115 - DNA, 19 bp, Homo sapiens
  siRNA target sequence for KIAA0322 (NM_015052.1,2902-2920).
gcttaaagcacatgattct

SEQ ID NO: 230116 - DNA, 19 bp, Homo sapiens
  siRNA target sequence for KIAA0322 (NM_015052.1,2932-2950).
gggatgctcgcaattttga

SEQ ID NO: 230117 - DNA, 19 bp, Homo sapiens
  siRNA target sequence for KIAA0322 (NM_015052.1,2933-2951).
ggatgctcgcaattttgaa

SEQ ID NO: 230118 - DNA, 19 bp, Homo sapiens
  siRNA target sequence for KIAA0322 (NM_015052.1,3041-3059).
ggaccagcagggaaagtct

SEQ ID NO: 230119 - DNA, 19 bp, Homo sapiens
  siRNA target sequence for KIAA0322 (NM_015052.1,3045-3063).
cagcagggaaagtcttttt

SEQ ID NO: 230120 - DNA, 19 bp, Homo sapiens
  siRNA target sequence for KIAA0322 (NM_015052.1,3122-3140).
cggtcgtcttcccaatcat

SEQ ID NO: 230121 - DNA, 19 bp, Homo sapiens
  siRNA target sequence for KIAA0322 (NM_015052.1,3124-3142).
gtcgtcttcccaatcatct

SEQ ID NO: 230122 - DNA, 19 bp, Homo sapiens
  siRNA target sequence for KIAA0322 (NM_015052.1,3126-3144).
cgtcttcccaatcatctaa

SEQ ID NO: 230123 - DNA, 19 bp, Homo sapiens
  siRNA target sequence for KIAA0322 (NM_015052.1,3162-3180).
cagaggctccgaagttaca

SEQ ID NO: 230124 - DNA, 19 bp, Homo sapiens
  siRNA target sequence for KIAA0322 (NM_015052.1,3236-3254).
gccaggacacagcttagta

SEQ ID NO: 230125 - DNA, 19 bp, Homo sapiens
  siRNA target sequence for KIAA0322 (NM_015052.1,3245-3263).
cagcttagtagctgctatt

SEQ ID NO: 230126 - DNA, 19 bp, Homo sapiens
  siRNA target sequence for KIAA0322 (NM_015052.1,3248-3266).
cttagtagctgctattcga

SEQ ID NO: 230127 - DNA, 19 bp, Homo sapiens
  siRNA target sequence for KIAA0322 (NM_015052.1,3286-3304).
cattgccactggcatataa

SEQ ID NO: 230128 - DNA, 19 bp, Homo sapiens
  siRNA target sequence for KIAA0322 (NM_015052.1,3292-3310).
cactggcatataatgacaa

SEQ ID NO: 230129 - DNA, 19 bp, Homo sapiens
  siRNA target sequence for KIAA0322 (NM_015052.1,3324-3342).
cttcgccagccaaacattt

SEQ ID NO: 230130 - DNA, 19 bp, Homo sapiens
  siRNA target sequence for KIAA0322 (NM_015052.1,3329-3347).
ccagccaaacatttttgaa

SEQ ID NO: 230131 - DNA, 19 bp, Homo sapiens
  siRNA target sequence for KIAA0322 (NM_015052.1,3360-3378).
cgtcagccaagcttagcaa

SEQ ID NO: 230132 - DNA, 19 bp, Homo sapiens
  siRNA target sequence for KIAA0322 (NM_015052.1,3429-3447).
cacgggcttgagaagttgt

SEQ ID NO: 230133 - DNA, 19 bp, Homo sapiens
  siRNA target sequence for KIAA0322 (NM_015052.1,3453-3471).
gatgcggatctggtcattt

SEQ ID NO: 230134 - DNA, 19 bp, Homo sapiens
  siRNA target sequence for KIAA0322 (NM_015052.1,3620-3638).
cccctaccgaagagacttt

SEQ ID NO: 230135 - DNA, 19 bp, Homo sapiens
  siRNA target sequence for KIAA0322 (NM_015052.1,3642-3660).
gccaagctccgcaatttct

SEQ ID NO: 230136 - DNA, 19 bp, Homo sapiens
  siRNA target sequence for KIAA0322 (NM_015052.1,3643-3661).
ccaagctccgcaatttcta

SEQ ID NO: 230137 - DNA, 19 bp, Homo sapiens
  siRNA target sequence for KIAA0322 (NM_015052.1,3650-3668).
ccgcaatttctacagaaaa

SEQ ID NO: 230138 - DNA, 19 bp, Homo sapiens
  siRNA target sequence for KIAA0322 (NM_015052.1,3688-3706).
gtcagggtccggggaaaat

SEQ ID NO: 230139 - DNA, 19 bp, Homo sapiens
  siRNA target sequence for KIAA0322 (NM_015052.1,3838-3856).
gcccctcgcgggagttctt

SEQ ID NO: 230140 - DNA, 19 bp, Homo sapiens
  siRNA target sequence for KIAA0322 (NM_015052.1,3840-3858).
ccctcgcgggagttcttct

SEQ ID NO: 230141 - DNA, 19 bp, Homo sapiens
  siRNA target sequence for KIAA0322 (NM_015052.1,3886-3904).
cttactatggactctttga

SEQ ID NO: 230142 - DNA, 19 bp, Homo sapiens
  siRNA target sequence for KIAA0322 (NM_015052.1,3903-3921).
gagtactcggcaaatgata

SEQ ID NO: 230143 - DNA, 19 bp, Homo sapiens
  siRNA target sequence for KIAA0322 (NM_015052.1,3905-3923).
gtactcggcaaatgatact

SEQ ID NO: 230144 - DNA, 19 bp, Homo sapiens
  siRNA target sequence for KIAA0322 (NM_015052.1,3940-3958).
gccccatgtccgcatttgt

SEQ ID NO: 230145 - DNA, 19 bp, Homo sapiens
  siRNA target sequence for KIAA0322 (NM_015052.1,3950-3968).
cgcatttgtagaaaaccat

SEQ ID NO: 230146 - DNA, 19 bp, Homo sapiens
  siRNA target sequence for KIAA0322 (NM_015052.1,3969-3987).
cttgagtggttcaggttta

SEQ ID NO: 230147 - DNA, 19 bp, Homo sapiens
  siRNA target sequence for KIAA0322 (NM_015052.1,4342-4360).
gcttctacgaggttgtaga

SEQ ID NO: 230148 - DNA, 19 bp, Homo sapiens
  siRNA target sequence for KIAA0322 (NM_015052.1,4417-4435).
ccgcggaaatcgacctaaa

SEQ ID NO: 230149 - DNA, 19 bp, Homo sapiens
  siRNA target sequence for KIAA0322 (NM_015052.1,4418-4436).
cgcggaaatcgacctaaat

SEQ ID NO: 230150 - DNA, 19 bp, Homo sapiens
  siRNA target sequence for KIAA0322 (NM_015052.1,4420-4438).
cggaaatcgacctaaatga

SEQ ID NO: 230151 - DNA, 19 bp, Homo sapiens
  siRNA target sequence for KIAA0322 (NM_015052.1,4509-4527).
gcggtggagcgcttcaata

SEQ ID NO: 230152 - DNA, 19 bp, Homo sapiens
  siRNA target sequence for KIAA0322 (NM_015052.1,4510-4528).
cggtggagcgcttcaataa

SEQ ID NO: 230153 - DNA, 19 bp, Homo sapiens
  siRNA target sequence for KIAA0322 (NM_015052.1,4511-4529).
ggtggagcgcttcaataat

SEQ ID NO: 230154 - DNA, 19 bp, Homo sapiens
  siRNA target sequence for KIAA0322 (NM_015052.1,4620-4638).
cggcgcttctgcatagaga

SEQ ID NO: 230155 - DNA, 19 bp, Homo sapiens
  siRNA target sequence for KIAA0322 (NM_015052.1,4621-4639).
ggcgcttctgcatagagaa

SEQ ID NO: 230156 - DNA, 19 bp, Homo sapiens
  siRNA target sequence for KIAA0322 (NM_015052.1,4623-4641).
cgcttctgcatagagaaat

SEQ ID NO: 230157 - DNA, 19 bp, Homo sapiens
  siRNA target sequence for KIAA0322 (NM_015052.1,4707-4725).
ccctcgtactccatgttgt

SEQ ID NO: 230158 - DNA, 19 bp, Homo sapiens
  siRNA target sequence for KIAA0322 (NM_015052.1,4711-4729).
cgtactccatgttgtatga

SEQ ID NO: 230159 - DNA, 19 bp, Homo sapiens
  siRNA target sequence for KIAA0322 (NM_015052.1,4712-4730).
gtactccatgttgtatgaa

SEQ ID NO: 230160 - DNA, 19 bp, Homo sapiens
  siRNA target sequence for LOC51619 (NM_015983.2,372-390).
cgttgactgtgtcaaaagt

SEQ ID NO: 230161 - DNA, 19 bp, Homo sapiens
  siRNA target sequence for LOC51619 (NM_015983.2,470-488).
gccgacagagagaagtaca

SEQ ID NO: 230162 - DNA, 19 bp, Homo sapiens
  siRNA target sequence for LOC51619 (NM_015983.2,505-523).
gtggacacaaaaatatgct

SEQ ID NO: 230163 - DNA, 19 bp, Homo sapiens
  siRNA target sequence for LOC92912 (NM_173469.1,249-267).
cgtccatcttcgacaagaa

SEQ ID NO: 230164 - DNA, 19 bp, Homo sapiens
  siRNA target sequence for LOC92912 (NM_173469.1,379-397).
caacatcacggaatcctat

SEQ ID NO: 230165 - DNA, 19 bp, Homo sapiens
  siRNA target sequence for LOC92912 (NM_173469.1,811-829).
gtcagtgcaagcttcagat

SEQ ID NO: 230166 - DNA, 19 bp, Homo sapiens
  siRNA target sequence for LOC92912 (NM_173469.1,822-840).
cttcagatagacttatgaa

SEQ ID NO: 230167 - DNA, 19 bp, Homo sapiens
  siRNA target sequence for LOC92912 (NM_173469.1,893-911).
gtggaactcataaatgaca

SEQ ID NO: 230168 - DNA, 19 bp, Homo sapiens
  siRNA target sequence for LOC92912 (NM_173469.1,1033-1051).
ggataactttccatttgat

SEQ ID NO: 230169 - DNA, 19 bp, Homo sapiens
  siRNA target sequence for LOC92912 (NM_173469.1,1226-1244).
ggagcaaataagaatcaat

SEQ ID NO: 230170 - DNA, 19 bp, Homo sapiens
  siRNA target sequence for LOC92912 (NM_173469.1,1227-1245).
gagcaaataagaatcaata

SEQ ID NO: 230171 - DNA, 19 bp, Homo sapiens
  siRNA target sequence for LOC92912 (NM_173469.1,1254-1272).
caagagcccaacaatccta

SEQ ID NO: 230172 - DNA, 19 bp, Homo sapiens
  siRNA target sequence for LOC92912 (NM_173469.1,1257-1275).
gagcccaacaatcctataa

SEQ ID NO: 230173 - DNA, 19 bp, Homo sapiens
  siRNA target sequence for LOC92912 (NM_173469.1,1259-1277).
gcccaacaatcctataatt

SEQ ID NO: 230174 - DNA, 19 bp, Homo sapiens
  siRNA target sequence for LOC92912 (NM_173469.1,1309-1327).
gtacacccctccaaaggaa

SEQ ID NO: 230175 - DNA, 19 bp, Homo sapiens
  siRNA target sequence for MGC35130 (NM_152489.1,276-294).
gagacttctgtgatctcaa

SEQ ID NO: 230176 - DNA, 19 bp, Homo sapiens
  siRNA target sequence for MGC35130 (NM_152489.1,290-308).
ctcaaggagaacaattata

SEQ ID NO: 230177 - DNA, 19 bp, Homo sapiens
  siRNA target sequence for MGC35130 (NM_152489.1,301-319).
caattataagggtatcact

SEQ ID NO: 230178 - DNA, 19 bp, Homo sapiens
  siRNA target sequence for MGC35130 (NM_152489.1,318-336).
ctgctaagcctgtaagtga

SEQ ID NO: 230179 - DNA, 19 bp, Homo sapiens
  siRNA target sequence for MGC35130 (NM_152489.1,381-399).
cagtttggcagggtttagt

SEQ ID NO: 230180 - DNA, 19 bp, Homo sapiens
  siRNA target sequence for MGC35130 (NM_152489.1,383-401).
gtttggcagggtttagtct

SEQ ID NO: 230181 - DNA, 19 bp, Homo sapiens
  siRNA target sequence for MGC35130 (NM_152489.1,400-418).
cttccaactgacaatacat

SEQ ID NO: 230182 - DNA, 19 bp, Homo sapiens
  siRNA target sequence for MGC35130 (NM_152489.1,496-514).
cactggtcagccctgtata

SEQ ID NO: 230183 - DNA, 19 bp, Homo sapiens
  siRNA target sequence for MGC35130 (NM_152489.1,498-516).
ctggtcagccctgtataga

SEQ ID NO: 230184 - DNA, 19 bp, Homo sapiens
  siRNA target sequence for MGC35130 (NM_152489.1,501-519).
gtcagccctgtatagactt

SEQ ID NO: 230185 - DNA, 19 bp, Homo sapiens
  siRNA target sequence for MGC35130 (NM_152489.1,540-558).
ggaatacaaactatacatt

SEQ ID NO: 230186 - DNA, 19 bp, Homo sapiens
  siRNA target sequence for MGC35130 (NM_152489.1,555-573).
cattgagcagcatcttact

SEQ ID NO: 230187 - DNA, 19 bp, Homo sapiens
  siRNA target sequence for MGC35130 (NM_152489.1,594-612).
ctaatccagtgctagagaa

SEQ ID NO: 230188 - DNA, 19 bp, Homo sapiens
  siRNA target sequence for MGC35130 (NM_152489.1,633-651).
ccagaatactggttaaaga

SEQ ID NO: 230189 - DNA, 19 bp, Homo sapiens
  siRNA target sequence for MGC35130 (NM_152489.1,657-675).
ctctgtacagaacaattct

SEQ ID NO: 230190 - DNA, 19 bp, Homo sapiens
  siRNA target sequence for MGC35130 (NM_152489.1,690-708).
ggccattacaaatgaaaga

SEQ ID NO: 230191 - DNA, 19 bp, Homo sapiens
  siRNA target sequence for MGC35130 (NM_152489.1,725-743).
cctaaagacccacgtaaat

SEQ ID NO: 230192 - DNA, 19 bp, Homo sapiens
  siRNA target sequence for MGC35130 (NM_152489.1,731-749).
gacccacgtaaatgtatca

SEQ ID NO: 230193 - DNA, 19 bp, Homo sapiens
  siRNA target sequence for MGC35130 (NM_152489.1,765-783).
cctcatttagtgattacta

SEQ ID NO: 230194 - DNA, 19 bp, Homo sapiens
  siRNA target sequence for MGC35130 (NM_152489.1,831-849).
gaactccattgctcaaagt

SEQ ID NO: 230195 - DNA, 19 bp, Homo sapiens
  siRNA target sequence for NCE2 (NM_080678.1,94-112).
gctaacgctagcaagtaaa

SEQ ID NO: 230196 - DNA, 19 bp, Homo sapiens
  siRNA target sequence for NCE2 (NM_080678.1,99-117).
cgctagcaagtaaactgaa

SEQ ID NO: 230197 - DNA, 19 bp, Homo sapiens
  siRNA target sequence for NCE2 (NM_080678.1,215-233).
gcagaacttgaagctaatt

SEQ ID NO: 230198 - DNA, 19 bp, Homo sapiens
  siRNA target sequence for NCE2 (NM_080678.1,227-245).
gctaatttaccttgtacat

SEQ ID NO: 230199 - DNA, 19 bp, Homo sapiens
  siRNA target sequence for NCE2 (NM_080678.1,266-284).
ccaaacaagcttcattgtt

SEQ ID NO: 230200 - DNA, 19 bp, Homo sapiens
  siRNA target sequence for NCE2 (NM_080678.1,267-285).
caaacaagcttcattgttt

SEQ ID NO: 230201 - DNA, 19 bp, Homo sapiens
  siRNA target sequence for NCE2 (NM_080678.1,300-318).
ccccagatgagggttacta

SEQ ID NO: 230202 - DNA, 19 bp, Homo sapiens
  siRNA target sequence for NCE2 (NM_080678.1,350-368).
gttcccgatgcgtacaaca

SEQ ID NO: 230203 - DNA, 19 bp, Homo sapiens
  siRNA target sequence for NCE2 (NM_080678.1,370-388).
ggtgcctcccaaagtgaaa

SEQ ID NO: 230204 - DNA, 19 bp, Homo sapiens
  siRNA target sequence for NCE2 (NM_080678.1,442-460).
gagtttattgagagaacat

SEQ ID NO: 230205 - DNA, 19 bp, Homo sapiens
  siRNA target sequence for NCE2 (NM_080678.1,451-469).
gagagaacattcaattgat

SEQ ID NO: 230206 - DNA, 19 bp, Homo sapiens
  siRNA target sequence for NCE2 (NM_080678.1,481-499).
ggctcccacaagaacatta

SEQ ID NO: 230207 - DNA, 19 bp, Homo sapiens
  siRNA target sequence for NCE2 (NM_080678.1,487-505).
cacaagaacattaaaggat

SEQ ID NO: 230208 - DNA, 19 bp, Homo sapiens
  siRNA target sequence for NCE2 (NM_080678.1,506-524).
gtcgtttggggattaaact

SEQ ID NO: 230209 - DNA, 19 bp, Homo sapiens
  siRNA target sequence for NCE2 (NM_080678.1,508-526).
cgtttggggattaaactct

SEQ ID NO: 230210 - DNA, 19 bp, Homo sapiens
  siRNA target sequence for NCE2 (NM_080678.1,509-527).
gtttggggattaaactctt

SEQ ID NO: 230211 - DNA, 19 bp, Homo sapiens
  siRNA target sequence for NCE2 (NM_080678.1,620-638).
gatgactacatcaaacgtt

SEQ ID NO: 230212 - DNA, 19 bp, Homo sapiens
  siRNA target sequence for NEDD4 (NM_006154.1,124-142).
cgaggaaaattcacgaatt

SEQ ID NO: 230213 - DNA, 19 bp, Homo sapiens
  siRNA target sequence for NEDD4 (NM_006154.1,128-146).
gaaaattcacgaattgtga

SEQ ID NO: 230214 - DNA, 19 bp, Homo sapiens
  siRNA target sequence for NEDD4 (NM_006154.1,171-189).
gccttgccaagaaggatat

SEQ ID NO: 230215 - DNA, 19 bp, Homo sapiens
  siRNA target sequence for NEDD4 (NM_006154.1,172-190).
ccttgccaagaaggatata

SEQ ID NO: 230216 - DNA, 19 bp, Homo sapiens
  siRNA target sequence for NEDD4 (NM_006154.1,173-191).
cttgccaagaaggatatat

SEQ ID NO: 230217 - DNA, 19 bp, Homo sapiens
  siRNA target sequence for NEDD4 (NM_006154.1,211-229).
cgtgagagtgacgttatat

SEQ ID NO: 230218 - DNA, 19 bp, Homo sapiens
  siRNA target sequence for NEDD4 (NM_006154.1,222-240).
cgttatatgacccaatgaa

SEQ ID NO: 230219 - DNA, 19 bp, Homo sapiens
  siRNA target sequence for NEDD4 (NM_006154.1,238-256).
gaatggagttcttacaagt

SEQ ID NO: 230220 - DNA, 19 bp, Homo sapiens
  siRNA target sequence for NEDD4 (NM_006154.1,248-266).
cttacaagtgtgcaaacaa

SEQ ID NO: 230221 - DNA, 19 bp, Homo sapiens
  siRNA target sequence for NEDD4 (NM_006154.1,334-352).
gcaccggcttctttttgaa

SEQ ID NO: 230222 - DNA, 19 bp, Homo sapiens
  siRNA target sequence for NEDD4 (NM_006154.1,359-377).
gacgaaaaccgattgacaa

SEQ ID NO: 230223 - DNA, 19 bp, Homo sapiens
  siRNA target sequence for NEDD4 (NM_006154.1,367-385).
ccgattgacaagagatgat

SEQ ID NO: 230224 - DNA, 19 bp, Homo sapiens
  siRNA target sequence for NEDD4 (NM_006154.1,423-441).
cgacagaaaatccaagatt

SEQ ID NO: 230225 - DNA, 19 bp, Homo sapiens
  siRNA target sequence for NEDD4 (NM_006154.1,476-494).
catccaagaagtcacaaat

SEQ ID NO: 230226 - DNA, 19 bp, Homo sapiens
  siRNA target sequence for NEDD4 (NM_006154.1,486-504).
gtcacaaatcaagagttaa

SEQ ID NO: 230227 - DNA, 19 bp, Homo sapiens
  siRNA target sequence for NEDD4 (NM_006154.1,490-508).
caaatcaagagttaaaggt

SEQ ID NO: 230228 - DNA, 19 bp, Homo sapiens
  siRNA target sequence for NEDD4 (NM_006154.1,506-524).
ggttatctgagactaaaaa

SEQ ID NO: 230229 - DNA, 19 bp, Homo sapiens
  siRNA target sequence for NEDD4 (NM_006154.1,516-534).
gactaaaaatgacttattt

SEQ ID NO: 230230 - DNA, 19 bp, Homo sapiens
  siRNA target sequence for NEDD4 (NM_006154.1,691-709).
ccttggaaggacctattat

SEQ ID NO: 230231 - DNA, 19 bp, Homo sapiens
  siRNA target sequence for NEDD4 (NM_006154.1,695-713).
ggaaggacctattatgtaa

SEQ ID NO: 230232 - DNA, 19 bp, Homo sapiens
  siRNA target sequence for NEDD4 (NM_006154.1,696-714).
gaaggacctattatgtaaa

SEQ ID NO: 230233 - DNA, 19 bp, Homo sapiens
  siRNA target sequence for NEDD4 (NM_006154.1,700-718).
gacctattatgtaaaccat

SEQ ID NO: 230234 - DNA, 19 bp, Homo sapiens
  siRNA target sequence for NEDD4 (NM_006154.1,800-818).
gcacaacgtgcatttacca

SEQ ID NO: 230235 - DNA, 19 bp, Homo sapiens
  siRNA target sequence for NEDD4 (NM_006154.1,834-852).
ccgaggaaacagaaagtgt

SEQ ID NO: 230236 - DNA, 19 bp, Homo sapiens
  siRNA target sequence for NEDD4 (NM_006154.1,835-853).
cgaggaaacagaaagtgtt

SEQ ID NO: 230237 - DNA, 19 bp, Homo sapiens
  siRNA target sequence for NEDD4 (NM_006154.1,871-889).
cgagaactgggaaattata

SEQ ID NO: 230238 - DNA, 19 bp, Homo sapiens
  siRNA target sequence for NEDD4 (NM_006154.1,872-890).
gagaactgggaaattataa

SEQ ID NO: 230239 - DNA, 19 bp, Homo sapiens
  siRNA target sequence for NEDD4 (NM_006154.1,874-892).
gaactgggaaattataaga

SEQ ID NO: 230240 - DNA, 19 bp, Homo sapiens
  siRNA target sequence for NEDD4 (NM_006154.1,896-914).
gatgaagccaccatgtata

SEQ ID NO: 230241 - DNA, 19 bp, Homo sapiens
  siRNA target sequence for NEDD4 (NM_006154.1,955-973).
ggatgttccaactcatctt

SEQ ID NO: 230242 - DNA, 19 bp, Homo sapiens
  siRNA target sequence for NEDD4 (NM_006154.1,1027-1045).
gccagcatcgagctcaaat

SEQ ID NO: 230243 - DNA, 19 bp, Homo sapiens
  siRNA target sequence for NEDD4 (NM_006154.1,1029-1047).
cagcatcgagctcaaatca

SEQ ID NO: 230244 - DNA, 19 bp, Homo sapiens
  siRNA target sequence for NEDD4 (NM_006154.1,1054-1072).
cagaagaggcagcttacaa

SEQ ID NO: 230245 - DNA, 19 bp, Homo sapiens
  siRNA target sequence for NEDD4 (NM_006154.1,1063-1081).
cagcttacaagcctatact

SEQ ID NO: 230246 - DNA, 19 bp, Homo sapiens
  siRNA target sequence for NEDD4 (NM_006154.1,1167-1185).
gaagatcatattatgtaga

SEQ ID NO: 230247 - DNA, 19 bp, Homo sapiens
  siRNA target sequence for NEDD4 (NM_006154.1,1315-1333).
ggtgacccagccatctgaa

SEQ ID NO: 230248 - DNA, 19 bp, Homo sapiens
  siRNA target sequence for NEDD4 (NM_006154.1,1329-1347).
ctgaaattgagcaaggatt

SEQ ID NO: 230249 - DNA, 19 bp, Homo sapiens
  siRNA target sequence for NEDD4 (NM_006154.1,1549-1567).
cttctacataaatcacaat

SEQ ID NO: 230250 - DNA, 19 bp, Homo sapiens
  siRNA target sequence for NEDD4 (NM_006154.1,1632-1650).
cctactccagggattacaa

SEQ ID NO: 230251 - DNA, 19 bp, Homo sapiens
  siRNA target sequence for NEDD4 (NM_006154.1,1642-1660).
ggattacaaaagaaagtat

SEQ ID NO: 230252 - DNA, 19 bp, Homo sapiens
  siRNA target sequence for NEDD4 (NM_006154.1,1661-1679).
gagttcttccgaagaaagt

SEQ ID NO: 230253 - DNA, 19 bp, Homo sapiens
  siRNA target sequence for NEDD4 (NM_006154.1,1725-1743).
gccgagcaactgttcttga

SEQ ID NO: 230254 - DNA, 19 bp, Homo sapiens
  siRNA target sequence for NEDD4 (NM_006154.1,1734-1752).
ctgttcttgaagactctta

SEQ ID NO: 230255 - DNA, 19 bp, Homo sapiens
  siRNA target sequence for NEDD4 (NM_006154.1,1745-1763).
gactcttaccggagaatta

SEQ ID NO: 230256 - DNA, 19 bp, Homo sapiens
  siRNA target sequence for NEDD4 (NM_006154.1,1818-1836).
gtgaaaagggattggatta

SEQ ID NO: 230257 - DNA, 19 bp, Homo sapiens
  siRNA target sequence for NEDD4 (NM_006154.1,1888-1906).
cccttattatgggttgttt

SEQ ID NO: 230258 - DNA, 19 bp, Homo sapiens
  siRNA target sequence for NEDD4 (NM_006154.1,1924-1942).
caattataccctacagata

SEQ ID NO: 230259 - DNA, 19 bp, Homo sapiens
  siRNA target sequence for NEDD4 (NM_006154.1,1946-1964).
ccaaactctggattgtgta

SEQ ID NO: 230260 - DNA, 19 bp, Homo sapiens
  siRNA target sequence for NEDD4 (NM_006154.1,1967-1985).
gaagatcacctctcttact

SEQ ID NO: 230261 - DNA, 19 bp, Homo sapiens
  siRNA target sequence for NEDD4 (NM_006154.1,1976-1994).
ctctcttacttcaagttta

SEQ ID NO: 230262 - DNA, 19 bp, Homo sapiens
  siRNA target sequence for NEDD4 (NM_006154.1,2007-2025).
ctggaatggcagtttatca

SEQ ID NO: 230263 - DNA, 19 bp, Homo sapiens
  siRNA target sequence for NEDD4 (NM_006154.1,2085-2103).
caataacccttcatgatat

SEQ ID NO: 230264 - DNA, 19 bp, Homo sapiens
  siRNA target sequence for NEDD4 (NM_006154.1,2128-2146).
caattccctaagatggatt

SEQ ID NO: 230265 - DNA, 19 bp, Homo sapiens
  siRNA target sequence for NEDD4 (NM_006154.1,2135-2153).
ctaagatggattcttgaaa

SEQ ID NO: 230266 - DNA, 19 bp, Homo sapiens
  siRNA target sequence for NEDD4 (NM_006154.1,2150-2168).
gaaaatgacccaacagaat

SEQ ID NO: 230267 - DNA, 19 bp, Homo sapiens
  siRNA target sequence for NEDD4 (NM_006154.1,2165-2183).
gaattggacctcaggttta

SEQ ID NO: 230268 - DNA, 19 bp, Homo sapiens
  siRNA target sequence for NEDD4 (NM_006154.1,2176-2194).
caggtttatcatagatgaa

SEQ ID NO: 230269 - DNA, 19 bp, Homo sapiens
  siRNA target sequence for NEDD4 (NM_006154.1,2334-2352).
cttttaaagagggattctt

SEQ ID NO: 230270 - DNA, 19 bp, Homo sapiens
  siRNA target sequence for NEDD4 (NM_006154.1,2342-2360).
gagggattctttgaactaa

SEQ ID NO: 230271 - DNA, 19 bp, Homo sapiens
  siRNA target sequence for NEDD4 (NM_006154.1,2396-2414).
gaactagagcttcttatgt

SEQ ID NO: 230272 - DNA, 19 bp, Homo sapiens
  siRNA target sequence for NEDD4 (NM_006154.1,2478-2496).
gtgcaaatcatcaggttat

SEQ ID NO: 230273 - DNA, 19 bp, Homo sapiens
  siRNA target sequence for NEDD4 (NM_006154.1,2481-2499).
caaatcatcaggttataca

SEQ ID NO: 230274 - DNA, 19 bp, Homo sapiens
  siRNA target sequence for NEDD4 (NM_006154.1,2492-2510).
gttatacagtggttttgga

SEQ ID NO: 230275 - DNA, 19 bp, Homo sapiens
  siRNA target sequence for NEDD4 (NM_006154.1,2571-2589).
catctcgggtgcctatgaa

SEQ ID NO: 230276 - DNA, 19 bp, Homo sapiens
  siRNA target sequence for NEDD4 (NM_006154.1,2598-2616).
ctgaactatacggttcaaa

SEQ ID NO: 230277 - DNA, 19 bp, Homo sapiens
  siRNA target sequence for NEDD4 (NM_006154.1,2619-2637).
gaccacagtcatttacagt

SEQ ID NO: 230278 - DNA, 19 bp, Homo sapiens
  siRNA target sequence for NEDD4 (NM_006154.1,2695-2713).
ggacttgccaccttatgaa

SEQ ID NO: 230279 - DNA, 19 bp, Homo sapiens
  siRNA target sequence for NEDD4 (NM_006154.1,2696-2714).
gacttgccaccttatgaat

SEQ ID NO: 230280 - DNA, 19 bp, Homo sapiens
  siRNA target sequence for NEDD4 (NM_006154.1,2698-2716).
cttgccaccttatgaatca

SEQ ID NO: 230281 - DNA, 19 bp, Homo sapiens
  siRNA target sequence for NEDD4 (NM_006154.1,2701-2719).
gccaccttatgaatcattt

SEQ ID NO: 230282 - DNA, 19 bp, Homo sapiens
  siRNA target sequence for NEDD4 (NM_006154.1,2741-2759).
cagatggcaattgaaaaca

SEQ ID NO: 230283 - DNA, 19 bp, Homo sapiens
  siRNA target sequence for NEDD4 (NM_198400.1,421-439).
gatttcaacgtctaacgtt

SEQ ID NO: 230284 - DNA, 19 bp, Homo sapiens
  siRNA target sequence for NEDD4 (NM_198400.1,426-444).
caacgtctaacgttgttca

SEQ ID NO: 230285 - DNA, 19 bp, Homo sapiens
  siRNA target sequence for NEDD4 (NM_198400.1,429-447).
cgtctaacgttgttcaaat

SEQ ID NO: 230286 - DNA, 19 bp, Homo sapiens
  siRNA target sequence for NEDD4 (NM_198400.1,432-450).
ctaacgttgttcaaatgaa

SEQ ID NO: 230287 - DNA, 19 bp, Homo sapiens
  siRNA target sequence for NEDD4 (NM_198400.1,480-498).
cgttaataaaggaaaacgt

SEQ ID NO: 230288 - DNA, 19 bp, Homo sapiens
  siRNA target sequence for NEDD4 (NM_198400.1,582-600).
caaggtacagtggatatct

SEQ ID NO: 230289 - DNA, 19 bp, Homo sapiens
  siRNA target sequence for NEDD4 (NM_198400.1,585-603).
ggtacagtggatatcttca

SEQ ID NO: 230290 - DNA, 19 bp, Homo sapiens
  siRNA target sequence for NEDD4 (NM_198400.1,610-628).
caatgtcttagctgatagt

SEQ ID NO: 230291 - DNA, 19 bp, Homo sapiens
  siRNA target sequence for NEDD4 (NM_198400.1,616-634).
cttagctgatagtgatgat

SEQ ID NO: 230292 - DNA, 19 bp, Homo sapiens
  siRNA target sequence for NEDD4 (NM_198400.1,632-650).
gatgcttcgtttacttgta

SEQ ID NO: 230293 - DNA, 19 bp, Homo sapiens
  siRNA target sequence for NEDD4 (NM_198400.1,639-657).
cgtttacttgtatcttgaa

SEQ ID NO: 230294 - DNA, 19 bp, Homo sapiens
  siRNA target sequence for NEDD4 (NM_198400.1,648-666).
gtatcttgaaggatggtat

SEQ ID NO: 230295 - DNA, 19 bp, Homo sapiens
  siRNA target sequence for NEDD4 (NM_198400.1,675-693).
gtgctgtggtcgataatga

SEQ ID NO: 230296 - DNA, 19 bp, Homo sapiens
  siRNA target sequence for NEDD4 (NM_198400.1,677-695).
gctgtggtcgataatgaat

SEQ ID NO: 230297 - DNA, 19 bp, Homo sapiens
  siRNA target sequence for NEDD4 (NM_198400.1,680-698).
gtggtcgataatgaattga

SEQ ID NO: 230298 - DNA, 19 bp, Homo sapiens
  siRNA target sequence for NEDD4 (NM_198400.1,727-745).
cagtccagccatttgtagt

SEQ ID NO: 230299 - DNA, 19 bp, Homo sapiens
  siRNA target sequence for NEDD4 (NM_198400.1,741-759).
gtagtggtagccttagtaa

SEQ ID NO: 230300 - DNA, 19 bp, Homo sapiens
  siRNA target sequence for NEDD4 (NM_198400.1,744-762).
gtggtagccttagtaactt

SEQ ID NO: 230301 - DNA, 19 bp, Homo sapiens
  siRNA target sequence for NEDD4 (NM_198400.1,746-764).
ggtagccttagtaactttt

SEQ ID NO: 230302 - DNA, 19 bp, Homo sapiens
  siRNA target sequence for NEDD4 (NM_198400.1,809-827).
gggtcatgtgcaagtatca

SEQ ID NO: 230303 - DNA, 19 bp, Homo sapiens
  siRNA target sequence for NEDD4 (NM_198400.1,811-829).
gtcatgtgcaagtatcaca

SEQ ID NO: 230304 - DNA, 19 bp, Homo sapiens
  siRNA target sequence for NEDD4 (NM_198400.1,833-851).
ggaggttcatatactaaca

SEQ ID NO: 230305 - DNA, 19 bp, Homo sapiens
  siRNA target sequence for NEDD4 (NM_198400.1,854-872).
gtcatcagtgacagtagta

SEQ ID NO: 230306 - DNA, 19 bp, Homo sapiens
  siRNA target sequence for NEDD4 (NM_198400.1,856-874).
catcagtgacagtagtagt

SEQ ID NO: 230307 - DNA, 19 bp, Homo sapiens
  siRNA target sequence for NEDD4 (NM_198400.1,859-877).
cagtgacagtagtagttat

SEQ ID NO: 230308 - DNA, 19 bp, Homo sapiens
  siRNA target sequence for NEDD4 (NM_198400.1,884-902).
ccaccaagtgatgatactt

SEQ ID NO: 230309 - DNA, 19 bp, Homo sapiens
  siRNA target sequence for NEDD4 (NM_198400.1,885-903).
caccaagtgatgatacttt

SEQ ID NO: 230310 - DNA, 19 bp, Homo sapiens
  siRNA target sequence for NEDD4 (NM_198400.1,958-976).
gaatactactccttgtgaa

SEQ ID NO: 230311 - DNA, 19 bp, Homo sapiens
  siRNA target sequence for NEDD4 (NM_198400.1,1005-1023).
cttttgtccaggatgactt

SEQ ID NO: 230312 - DNA, 19 bp, Homo sapiens
  siRNA target sequence for NEDD4 (NM_198400.1,1025-1043).
gaacatggattagagatta

SEQ ID NO: 230313 - DNA, 19 bp, Homo sapiens
  siRNA target sequence for NEDD4 (NM_198400.1,1031-1049).
ggattagagattatgaaat

SEQ ID NO: 230314 - DNA, 19 bp, Homo sapiens
  siRNA target sequence for NEDD4 (NM_198400.1,1052-1070).
ccagtgagcaggaacacaa

SEQ ID NO: 230315 - DNA, 19 bp, Homo sapiens
  siRNA target sequence for NEDD4 (NM_198400.1,1057-1075).
gagcaggaacacaaaaatt

SEQ ID NO: 230316 - DNA, 19 bp, Homo sapiens
  siRNA target sequence for NEDD4 (NM_198400.1,1109-1127).
cctaggagtccttcaacta

SEQ ID NO: 230317 - DNA, 19 bp, Homo sapiens
  siRNA target sequence for NEDD4 (NM_198400.1,1168-1186).
caaaggatcctatcaaact

SEQ ID NO: 230318 - DNA, 19 bp, Homo sapiens
  siRNA target sequence for NEDD4 (NM_198400.1,1181-1199).
caaacttcacaccagttta

SEQ ID NO: 230319 - DNA, 19 bp, Homo sapiens
  siRNA target sequence for NEDD4 (NM_198400.1,1231-1249).
ggatggcactagtgctaaa

SEQ ID NO: 230320 - DNA, 19 bp, Homo sapiens
  siRNA target sequence for NEDD4 (NM_198400.1,1236-1254).
gcactagtgctaaaggatt

SEQ ID NO: 230321 - DNA, 19 bp, Homo sapiens
  siRNA target sequence for NEDD4 (NM_198400.1,1274-1292).
ggacttcggttatctaaaa

SEQ ID NO: 230322 - DNA, 19 bp, Homo sapiens
  siRNA target sequence for NEDD4 (NM_198400.1,1277-1295).
cttcggttatctaaaacaa

SEQ ID NO: 230323 - DNA, 19 bp, Homo sapiens
  siRNA target sequence for NEDD4 (NM_198400.1,1338-1356).
ggaagggctcgttacagaa

SEQ ID NO: 230324 - DNA, 19 bp, Homo sapiens
  siRNA target sequence for NEDD4 (NM_198400.1,1342-1360).
gggctcgttacagaagaaa

SEQ ID NO: 230325 - DNA, 19 bp, Homo sapiens
  siRNA target sequence for NEDD4 (NM_198400.1,1343-1361).
ggctcgttacagaagaaaa

SEQ ID NO: 230326 - DNA, 19 bp, Homo sapiens
  siRNA target sequence for NEDD4 (NM_198400.1,1390-1408).
gactgtctgtgaaaagtca

SEQ ID NO: 230327 - DNA, 19 bp, Homo sapiens
  siRNA target sequence for NEDD4 (NM_198400.1,1524-1542).
ctgattcagagtatattaa

SEQ ID NO: 230328 - DNA, 19 bp, Homo sapiens
  siRNA target sequence for NEDD4 (NM_198400.1,1579-1597).
ccaaaatgtagattgtcaa

SEQ ID NO: 230329 - DNA, 19 bp, Homo sapiens
  siRNA target sequence for NEDD4 (NM_198400.1,1580-1598).
caaaatgtagattgtcaaa

SEQ ID NO: 230330 - DNA, 19 bp, Homo sapiens
  siRNA target sequence for NEDD4 (NM_198400.1,1589-1607).
gattgtcaaataaatatca

SEQ ID NO: 230331 - DNA, 19 bp, Homo sapiens
  siRNA target sequence for NEDD4 (NM_198400.1,1639-1657).
gaacaaaaaccatggtatt

SEQ ID NO: 230332 - DNA, 19 bp, Homo sapiens
  siRNA target sequence for NEDD4 (NM_198400.1,1678-1696).
gggaggagcttatccaaat

SEQ ID NO: 230333 - DNA, 19 bp, Homo sapiens
  siRNA target sequence for NEDD4 (NM_198400.1,1679-1697).
ggaggagcttatccaaata

SEQ ID NO: 230334 - DNA, 19 bp, Homo sapiens
  siRNA target sequence for NEDD4 (NM_198400.1,1682-1700).
ggagcttatccaaatattt

SEQ ID NO: 230335 - DNA, 19 bp, Homo sapiens
  siRNA target sequence for NEDD4 (NM_198400.1,1685-1703).
gcttatccaaatatttcct

SEQ ID NO: 230336 - DNA, 19 bp, Homo sapiens
  siRNA target sequence for NEDD4 (NM_198400.1,1704-1722).
gtctatccagccttaagca

SEQ ID NO: 230337 - DNA, 19 bp, Homo sapiens
  siRNA target sequence for NEDD4 (NM_198400.1,1711-1729).
cagccttaagcacaattgt

SEQ ID NO: 230338 - DNA, 19 bp, Homo sapiens
  siRNA target sequence for NEDD4 (NM_198400.1,1737-1755).
ggggaccatctcagttact

SEQ ID NO: 230339 - DNA, 19 bp, Homo sapiens
  siRNA target sequence for NEDD4 (NM_198400.1,1742-1760).
ccatctcagttactcataa

SEQ ID NO: 230340 - DNA, 19 bp, Homo sapiens
  siRNA target sequence for NEDD4 (NM_198400.1,1743-1761).
catctcagttactcataaa

SEQ ID NO: 230341 - DNA, 19 bp, Homo sapiens
  siRNA target sequence for NEDD4 (NM_198400.1,1813-1831).
cagagattgcacaaatgaa

SEQ ID NO: 230342 - DNA, 19 bp, Homo sapiens
  siRNA target sequence for NEDD4 (NM_198400.1,3906-3924).
ggggtactcctgaaaagct

SEQ ID NO: 230343 - DNA, 19 bp, Homo sapiens
  siRNA target sequence for NEDD4L (NM_015277.2,163-181).
ggagagtcccgtattctca

SEQ ID NO: 230344 - DNA, 19 bp, Homo sapiens
  siRNA target sequence for NEDD4L (NM_015277.2,170-188).
cccgtattctcagagtaaa

SEQ ID NO: 230345 - DNA, 19 bp, Homo sapiens
  siRNA target sequence for NEDD4L (NM_015277.2,178-196).
ctcagagtaaaagttgttt

SEQ ID NO: 230346 - DNA, 19 bp, Homo sapiens
  siRNA target sequence for NEDD4L (NM_015277.2,200-218).
gaattgatctcgccaaaaa

SEQ ID NO: 230347 - DNA, 19 bp, Homo sapiens
  siRNA target sequence for NEDD4L (NM_015277.2,210-228).
cgccaaaaaggacatcttt

SEQ ID NO: 230348 - DNA, 19 bp, Homo sapiens
  siRNA target sequence for NEDD4L (NM_015277.2,241-259).
ccgtatgtgaaactttcat

SEQ ID NO: 230349 - DNA, 19 bp, Homo sapiens
  siRNA target sequence for NEDD4L (NM_015277.2,242-260).
cgtatgtgaaactttcatt

SEQ ID NO: 230350 - DNA, 19 bp, Homo sapiens
  siRNA target sequence for NEDD4L (NM_015277.2,261-279).
gtacgtagcggatgagaat

SEQ ID NO: 230351 - DNA, 19 bp, Homo sapiens
  siRNA target sequence for NEDD4L (NM_015277.2,264-282).
cgtagcggatgagaataga

SEQ ID NO: 230352 - DNA, 19 bp, Homo sapiens
  siRNA target sequence for NEDD4L (NM_015277.2,295-313).
gtccagacaaaaacaatta

SEQ ID NO: 230353 - DNA, 19 bp, Homo sapiens
  siRNA target sequence for NEDD4L (NM_015277.2,320-338).
cactgaacccaaaatggaa

SEQ ID NO: 230354 - DNA, 19 bp, Homo sapiens
  siRNA target sequence for NEDD4L (NM_015277.2,356-374).
gggtaaacccatctaatca

SEQ ID NO: 230355 - DNA, 19 bp, Homo sapiens
  siRNA target sequence for NEDD4L (NM_015277.2,375-393).
cagactcctatttgaagta

SEQ ID NO: 230356 - DNA, 19 bp, Homo sapiens
  siRNA target sequence for NEDD4L (NM_015277.2,377-395).
gactcctatttgaagtatt

SEQ ID NO: 230357 - DNA, 19 bp, Homo sapiens
  siRNA target sequence for NEDD4L (NM_015277.2,477-495).
catggagcgaccctataca

SEQ ID NO: 230358 - DNA, 19 bp, Homo sapiens
  siRNA target sequence for NEDD4L (NM_015277.2,511-529).
ctcagaccaagaagtcata

SEQ ID NO: 230359 - DNA, 19 bp, Homo sapiens
  siRNA target sequence for NEDD4L (NM_015277.2,543-561).
gggatttttgcgattgaaa

SEQ ID NO: 230360 - DNA, 19 bp, Homo sapiens
  siRNA target sequence for NEDD4L (NM_015277.2,564-582).
ggcctatatgccaaaaaat

SEQ ID NO: 230361 - DNA, 19 bp, Homo sapiens
  siRNA target sequence for NEDD4L (NM_015277.2,640-658).
gttgttgactcaaatgact

SEQ ID NO: 230362 - DNA, 19 bp, Homo sapiens
  siRNA target sequence for NEDD4L (NM_015277.2,704-722).
ccgggtgggaagaaaaagt

SEQ ID NO: 230363 - DNA, 19 bp, Homo sapiens
  siRNA target sequence for NEDD4L (NM_015277.2,733-751).
ggccgaacttactatgtca

SEQ ID NO: 230364 - DNA, 19 bp, Homo sapiens
  siRNA target sequence for NEDD4L (NM_015277.2,734-752).
gccgaacttactatgtcaa

SEQ ID NO: 230365 - DNA, 19 bp, Homo sapiens
  siRNA target sequence for NEDD4L (NM_015277.2,803-821).
cctcggagtcggacaataa

SEQ ID NO: 230366 - DNA, 19 bp, Homo sapiens
  siRNA target sequence for NEDD4L (NM_015277.2,806-824).
cggagtcggacaataacat

SEQ ID NO: 230367 - DNA, 19 bp, Homo sapiens
  siRNA target sequence for NEDD4L (NM_015277.2,872-890).
ggcacatcagcgaagactt

SEQ ID NO: 230368 - DNA, 19 bp, Homo sapiens
  siRNA target sequence for NEDD4L (NM_015277.2,1030-1048).
gagctgtcagaggaactaa

SEQ ID NO: 230369 - DNA, 19 bp, Homo sapiens
  siRNA target sequence for NEDD4L (NM_015277.2,1179-1197).
gccatcagtggcctatgta

SEQ ID NO: 230370 - DNA, 19 bp, Homo sapiens
  siRNA target sequence for NEDD4L (NM_015277.2,1181-1199).
catcagtggcctatgtaca

SEQ ID NO: 230371 - DNA, 19 bp, Homo sapiens
  siRNA target sequence for NEDD4L (NM_015277.2,1254-1272).
cacatactatgtcaatcat

SEQ ID NO: 230372 - DNA, 19 bp, Homo sapiens
  siRNA target sequence for NEDD4L (NM_015277.2,1256-1274).
catactatgtcaatcataa

SEQ ID NO: 230373 - DNA, 19 bp, Homo sapiens
  siRNA target sequence for NEDD4L (NM_015277.2,1289-1307).
cttggactcgacctatcat

SEQ ID NO: 230374 - DNA, 19 bp, Homo sapiens
  siRNA target sequence for NEDD4L (NM_015277.2,1332-1350).
cggatcagccacaaacagt

SEQ ID NO: 230375 - DNA, 19 bp, Homo sapiens
  siRNA target sequence for NEDD4L (NM_015277.2,1393-1411).
ctcagctcgccaacagtaa

SEQ ID NO: 230376 - DNA, 19 bp, Homo sapiens
  siRNA target sequence for NEDD4L (NM_015277.2,1395-1413).
cagctcgccaacagtaact

SEQ ID NO: 230377 - DNA, 19 bp, Homo sapiens
  siRNA target sequence for NEDD4L (NM_015277.2,1397-1415).
gctcgccaacagtaacttt

SEQ ID NO: 230378 - DNA, 19 bp, Homo sapiens
  siRNA target sequence for NEDD4L (NM_015277.2,1398-1416).
ctcgccaacagtaacttta

SEQ ID NO: 230379 - DNA, 19 bp, Homo sapiens
  siRNA target sequence for NEDD4L (NM_015277.2,1401-1419).
gccaacagtaactttatct

SEQ ID NO: 230380 - DNA, 19 bp, Homo sapiens
  siRNA target sequence for NEDD4L (NM_015277.2,1453-1471).
cgtcgggctgtgaaagaca

SEQ ID NO: 230381 - DNA, 19 bp, Homo sapiens
  siRNA target sequence for NEDD4L (NM_015277.2,1514-1532).
cccccaaaccacaacacaa

SEQ ID NO: 230382 - DNA, 19 bp, Homo sapiens
  siRNA target sequence for NEDD4L (NM_015277.2,1517-1535).
ccaaaccacaacacaaagt

SEQ ID NO: 230383 - DNA, 19 bp, Homo sapiens
  siRNA target sequence for NEDD4L (NM_015277.2,1590-1608).
gcccttcttcattgatcat

SEQ ID NO: 230384 - DNA, 19 bp, Homo sapiens
  siRNA target sequence for NEDD4L (NM_015277.2,1591-1609).
cccttcttcattgatcata

SEQ ID NO: 230385 - DNA, 19 bp, Homo sapiens
  siRNA target sequence for NEDD4L (NM_015277.2,1592-1610).
ccttcttcattgatcataa

SEQ ID NO: 230386 - DNA, 19 bp, Homo sapiens
  siRNA target sequence for NEDD4L (NM_015277.2,1654-1672).
gtacatatgcggtcaaaga

SEQ ID NO: 230387 - DNA, 19 bp, Homo sapiens
  siRNA target sequence for NEDD4L (NM_015277.2,1657-1675).
catatgcggtcaaagacat

SEQ ID NO: 230388 - DNA, 19 bp, Homo sapiens
  siRNA target sequence for NEDD4L (NM_015277.2,1731-1749).
cttggatggccgaacgttt

SEQ ID NO: 230389 - DNA, 19 bp, Homo sapiens
  siRNA target sequence for NEDD4L (NM_015277.2,1734-1752).
ggatggccgaacgttttat

SEQ ID NO: 230390 - DNA, 19 bp, Homo sapiens
  siRNA target sequence for NEDD4L (NM_015277.2,1735-1753).
gatggccgaacgttttata

SEQ ID NO: 230391 - DNA, 19 bp, Homo sapiens
  siRNA target sequence for NEDD4L (NM_015277.2,1739-1757).
gccgaacgttttatattga

SEQ ID NO: 230392 - DNA, 19 bp, Homo sapiens
  siRNA target sequence for NEDD4L (NM_015277.2,1745-1763).
cgttttatattgatcataa

SEQ ID NO: 230393 - DNA, 19 bp, Homo sapiens
  siRNA target sequence for NEDD4L (NM_015277.2,1795-1813).
ctgcagaacccagctatta

SEQ ID NO: 230394 - DNA, 19 bp, Homo sapiens
  siRNA target sequence for NEDD4L (NM_015277.2,1889-1907).
ctgatatccccaataggtt

SEQ ID NO: 230395 - DNA, 19 bp, Homo sapiens
  siRNA target sequence for NEDD4L (NM_015277.2,1918-1936).
cttcacagaaataacatat

SEQ ID NO: 230396 - DNA, 19 bp, Homo sapiens
  siRNA target sequence for NEDD4L (NM_015277.2,1942-1960).
gagtcctatcggagaatta

SEQ ID NO: 230397 - DNA, 19 bp, Homo sapiens
  siRNA target sequence for NEDD4L (NM_015277.2,1998-2016).
gtggattgagtttgaatca

SEQ ID NO: 230398 - DNA, 19 bp, Homo sapiens
  siRNA target sequence for NEDD4L (NM_015277.2,2000-2018).
ggattgagtttgaatcaga

SEQ ID NO: 230399 - DNA, 19 bp, Homo sapiens
  siRNA target sequence for NEDD4L (NM_015277.2,2015-2033).
cagagaaaggtcttgacta

SEQ ID NO: 230400 - DNA, 19 bp, Homo sapiens
  siRNA target sequence for NEDD4L (NM_015277.2,2131-2149).
cttcagatcaaccctaatt

SEQ ID NO: 230401 - DNA, 19 bp, Homo sapiens
  siRNA target sequence for NEDD4L (NM_015277.2,2144-2162).
ctaattcaggcctctgtaa

SEQ ID NO: 230402 - DNA, 19 bp, Homo sapiens
  siRNA target sequence for NEDD4L (NM_015277.2,2170-2188).
catttgtcctacttcactt

SEQ ID NO: 230403 - DNA, 19 bp, Homo sapiens
  siRNA target sequence for NEDD4L (NM_015277.2,2204-2222).
ctggtctggccgtatttca

SEQ ID NO: 230404 - DNA, 19 bp, Homo sapiens
  siRNA target sequence for NEDD4L (NM_015277.2,2281-2299).
cagataaccctgaatgaca

SEQ ID NO: 230405 - DNA, 19 bp, Homo sapiens
  siRNA target sequence for NEDD4L (NM_015277.2,2381-2399).
gcatagacgaagaaaactt

SEQ ID NO: 230406 - DNA, 19 bp, Homo sapiens
  siRNA target sequence for NEDD4L (NM_015277.2,2382-2400).
catagacgaagaaaacttt

SEQ ID NO: 230407 - DNA, 19 bp, Homo sapiens
  siRNA target sequence for NEDD4L (NM_015277.2,2427-2445).
gcccaatgggtcagaaata

SEQ ID NO: 230408 - DNA, 19 bp, Homo sapiens
  siRNA target sequence for NEDD4L (NM_015277.2,2429-2447).
ccaatgggtcagaaataat

SEQ ID NO: 230409 - DNA, 19 bp, Homo sapiens
  siRNA target sequence for NEDD4L (NM_015277.2,2470-2488).
gaatatatcgacttagtca

SEQ ID NO: 230410 - DNA, 19 bp, Homo sapiens
  siRNA target sequence for NEDD4L (NM_015277.2,2541-2559).
gggattcacagaactactt

SEQ ID NO: 230411 - DNA, 19 bp, Homo sapiens
  siRNA target sequence for NEDD4L (NM_015277.2,2619-2637).
cggtgatgtggatgtgaat

SEQ ID NO: 230412 - DNA, 19 bp, Homo sapiens
  siRNA target sequence for NEDD4L (NM_015277.2,2678-2696).
caaaccaccccgtcattca

SEQ ID NO: 230413 - DNA, 19 bp, Homo sapiens
  siRNA target sequence for NEDD4L (NM_015277.2,2705-2723).
ggaaggctgtgctactcat

SEQ ID NO: 230414 - DNA, 19 bp, Homo sapiens
  siRNA target sequence for NEDD4L (NM_015277.2,2765-2783).
ggacatcgcgagtacctat

SEQ ID NO: 230415 - DNA, 19 bp, Homo sapiens
  siRNA target sequence for NEDD4L (NM_015277.2,2867-2885).
gagctcacacatgctttaa

SEQ ID NO: 230416 - DNA, 19 bp, Homo sapiens
  siRNA target sequence for NEDD4L (NM_015277.2,2880-2898).
ctttaatcgccttgactta

SEQ ID NO: 230417 - DNA, 19 bp, Homo sapiens
  siRNA target sequence for NEDD4L (NM_015277.2,2889-2907).
ccttgacttacctccatat

SEQ ID NO: 230418 - DNA, 19 bp, Homo sapiens
  siRNA target sequence for NEDD4L (NM_015277.2,2893-2911).
gacttacctccatatgaaa

SEQ ID NO: 230419 - DNA, 19 bp, Homo sapiens
  siRNA target sequence for NEDD4L (NM_015277.2,2903-2921).
catatgaaacctttgaaga

SEQ ID NO: 230420 - DNA, 19 bp, Homo sapiens
  siRNA target sequence for NEDD4L (NM_015277.2,2940-2958).
catggccgtggaaaatgct

SEQ ID NO: 230421 - DNA, 19 bp, Homo sapiens
  siRNA target sequence for RBAF600 (NM_020765.1,168-186).
catcgagagtgaatcagaa

SEQ ID NO: 230422 - DNA, 19 bp, Homo sapiens
  siRNA target sequence for RBAF600 (NM_020765.1,205-223).
cagtacgagccattctact

SEQ ID NO: 230423 - DNA, 19 bp, Homo sapiens
  siRNA target sequence for RBAF600 (NM_020765.1,211-229).
gagccattctactcatctt

SEQ ID NO: 230424 - DNA, 19 bp, Homo sapiens
  siRNA target sequence for RBAF600 (NM_020765.1,302-320).
cagcagcctgtaaagttct

SEQ ID NO: 230425 - DNA, 19 bp, Homo sapiens
  siRNA target sequence for RBAF600 (NM_020765.1,304-322).
gcagcctgtaaagttctaa

SEQ ID NO: 230426 - DNA, 19 bp, Homo sapiens
  siRNA target sequence for RBAF600 (NM_020765.1,305-323).
cagcctgtaaagttctaat

SEQ ID NO: 230427 - DNA, 19 bp, Homo sapiens
  siRNA target sequence for RBAF600 (NM_020765.1,311-329).
gtaaagttctaattgagtt

SEQ ID NO: 230428 - DNA, 19 bp, Homo sapiens
  siRNA target sequence for RBAF600 (NM_020765.1,415-433).
ggctgtagccgactagata

SEQ ID NO: 230429 - DNA, 19 bp, Homo sapiens
  siRNA target sequence for RBAF600 (NM_020765.1,417-435).
ctgtagccgactagataga

SEQ ID NO: 230430 - DNA, 19 bp, Homo sapiens
  siRNA target sequence for RBAF600 (NM_020765.1,423-441).
ccgactagatagaactgaa

SEQ ID NO: 230431 - DNA, 19 bp, Homo sapiens
  siRNA target sequence for RBAF600 (NM_020765.1,424-442).
cgactagatagaactgaaa

SEQ ID NO: 230432 - DNA, 19 bp, Homo sapiens
  siRNA target sequence for RBAF600 (NM_020765.1,425-443).
gactagatagaactgaaat

SEQ ID NO: 230433 - DNA, 19 bp, Homo sapiens
  siRNA target sequence for RBAF600 (NM_020765.1,427-445).
ctagatagaactgaaatta

SEQ ID NO: 230434 - DNA, 19 bp, Homo sapiens
  siRNA target sequence for RBAF600 (NM_020765.1,430-448).
gatagaactgaaattatca

SEQ ID NO: 230435 - DNA, 19 bp, Homo sapiens
  siRNA target sequence for RBAF600 (NM_020765.1,554-572).
ggcaaaaggaggtacagat

SEQ ID NO: 230436 - DNA, 19 bp, Homo sapiens
  siRNA target sequence for RBAF600 (NM_020765.1,614-632).
ctgtagcatcacaacctat

SEQ ID NO: 230437 - DNA, 19 bp, Homo sapiens
  siRNA target sequence for RBAF600 (NM_020765.1,619-637).
gcatcacaacctatcagta

SEQ ID NO: 230438 - DNA, 19 bp, Homo sapiens
  siRNA target sequence for RBAF600 (NM_020765.1,669-687).
gcagtcatctacagatcaa

SEQ ID NO: 230439 - DNA, 19 bp, Homo sapiens
  siRNA target sequence for RBAF600 (NM_020765.1,726-744).
gaacgtggctagtcttcaa

SEQ ID NO: 230440 - DNA, 19 bp, Homo sapiens
  siRNA target sequence for RBAF600 (NM_020765.1,766-784).
ctactgcgtgtatgtttga

SEQ ID NO: 230441 - DNA, 19 bp, Homo sapiens
  siRNA target sequence for RBAF600 (NM_020765.1,835-853).
gctaattccttcttcataa

SEQ ID NO: 230442 - DNA, 19 bp, Homo sapiens
  siRNA target sequence for RBAF600 (NM_020765.1,886-904).
cgtaatggctttcattcat

SEQ ID NO: 230443 - DNA, 19 bp, Homo sapiens
  siRNA target sequence for RBAF600 (NM_020765.1,887-905).
gtaatggctttcattcatt

SEQ ID NO: 230444 - DNA, 19 bp, Homo sapiens
  siRNA target sequence for RBAF600 (NM_020765.1,963-981).
caatccttctcgtctacaa

SEQ ID NO: 230445 - DNA, 19 bp, Homo sapiens
  siRNA target sequence for RBAF600 (NM_020765.1,968-986).
cttctcgtctacaagatgt

SEQ ID NO: 230446 - DNA, 19 bp, Homo sapiens
  siRNA target sequence for RBAF600 (NM_020765.1,996-1014).
cagcctaagttgtctgtat

SEQ ID NO: 230447 - DNA, 19 bp, Homo sapiens
  siRNA target sequence for RBAF600 (NM_020765.1,1083-1101).
gtccacgagctccaaagaa

SEQ ID NO: 230448 - DNA, 19 bp, Homo sapiens
  siRNA target sequence for RBAF600 (NM_020765.1,1088-1106).
cgagctccaaagaagatga

SEQ ID NO: 230449 - DNA, 19 bp, Homo sapiens
  siRNA target sequence for RBAF600 (NM_020765.1,1092-1110).
ctccaaagaagatgactat

SEQ ID NO: 230450 - DNA, 19 bp, Homo sapiens
  siRNA target sequence for RBAF600 (NM_020765.1,1115-1133).
gtgacgcagctacaattgt

SEQ ID NO: 230451 - DNA, 19 bp, Homo sapiens
  siRNA target sequence for RBAF600 (NM_020765.1,1123-1141).
gctacaattgtccagaaat

SEQ ID NO: 230452 - DNA, 19 bp, Homo sapiens
  siRNA target sequence for RBAF600 (NM_020765.1,1196-1214).
gtggtgagcactatcagaa

SEQ ID NO: 230453 - DNA, 19 bp, Homo sapiens
  siRNA target sequence for RBAF600 (NM_020765.1,1203-1221).
gcactatcagaatttccaa

SEQ ID NO: 230454 - DNA, 19 bp, Homo sapiens
  siRNA target sequence for RBAF600 (NM_020765.1,1277-1295).
ctactgcgttggctgataa

SEQ ID NO: 230455 - DNA, 19 bp, Homo sapiens
  siRNA target sequence for RBAF600 (NM_020765.1,1327-1345).
cgagtcagagacatccttt

SEQ ID NO: 230456 - DNA, 19 bp, Homo sapiens
  siRNA target sequence for RBAF600 (NM_020765.1,1338-1356).
catcctttctcgtactaaa

SEQ ID NO: 230457 - DNA, 19 bp, Homo sapiens
  siRNA target sequence for RBAF600 (NM_020765.1,1361-1379).
gagtgggctcccctaaact

SEQ ID NO: 230458 - DNA, 19 bp, Homo sapiens
  siRNA target sequence for RBAF600 (NM_020765.1,1408-1426).
ggggtactctcagtaatat

SEQ ID NO: 230459 - DNA, 19 bp, Homo sapiens
  siRNA target sequence for RBAF600 (NM_020765.1,1409-1427).
gggtactctcagtaatatt

SEQ ID NO: 230460 - DNA, 19 bp, Homo sapiens
  siRNA target sequence for RBAF600 (NM_020765.1,1449-1467).
gctaacgtctctctttcaa

SEQ ID NO: 230461 - DNA, 19 bp, Homo sapiens
  siRNA target sequence for RBAF600 (NM_020765.1,1516-1534).
cctgcagccttgagcatta

SEQ ID NO: 230462 - DNA, 19 bp, Homo sapiens
  siRNA target sequence for RBAF600 (NM_020765.1,1517-1535).
ctgcagccttgagcattat

SEQ ID NO: 230463 - DNA, 19 bp, Homo sapiens
  siRNA target sequence for RBAF600 (NM_020765.1,1540-1558).
cagagcacctccatacaga

SEQ ID NO: 230464 - DNA, 19 bp, Homo sapiens
  siRNA target sequence for RBAF600 (NM_020765.1,1548-1566).
ctccatacagaggattcaa

SEQ ID NO: 230465 - DNA, 19 bp, Homo sapiens
  siRNA target sequence for RBAF600 (NM_020765.1,1559-1577).
ggattcaacggctgattga

SEQ ID NO: 230466 - DNA, 19 bp, Homo sapiens
  siRNA target sequence for RBAF600 (NM_020765.1,1596-1614).
cctgctcttgacgttactt

SEQ ID NO: 230467 - DNA, 19 bp, Homo sapiens
  siRNA target sequence for RBAF600 (NM_020765.1,1597-1615).
ctgctcttgacgttacttt

SEQ ID NO: 230468 - DNA, 19 bp, Homo sapiens
  siRNA target sequence for RBAF600 (NM_020765.1,1599-1617).
gctcttgacgttactttca

SEQ ID NO: 230469 - DNA, 19 bp, Homo sapiens
  siRNA target sequence for RBAF600 (NM_020765.1,1600-1618).
ctcttgacgttactttcaa

SEQ ID NO: 230470 - DNA, 19 bp, Homo sapiens
  siRNA target sequence for RBAF600 (NM_020765.1,1684-1702).
gcctccaccgactccaata

SEQ ID NO: 230471 - DNA, 19 bp, Homo sapiens
  siRNA target sequence for RBAF600 (NM_020765.1,1686-1704).
ctccaccgactccaatact

SEQ ID NO: 230472 - DNA, 19 bp, Homo sapiens
  siRNA target sequence for RBAF600 (NM_020765.1,1691-1709).
ccgactccaatacttacta

SEQ ID NO: 230473 - DNA, 19 bp, Homo sapiens
  siRNA target sequence for RBAF600 (NM_020765.1,1692-1710).
cgactccaatacttactat

SEQ ID NO: 230474 - DNA, 19 bp, Homo sapiens
  siRNA target sequence for RBAF600 (NM_020765.1,1766-1784).
ctattttggggcaatggtt

SEQ ID NO: 230475 - DNA, 19 bp, Homo sapiens
  siRNA target sequence for RBAF600 (NM_020765.1,1791-1809).
gactatttctcccagtaaa

SEQ ID NO: 230476 - DNA, 19 bp, Homo sapiens
  siRNA target sequence for RBAF600 (NM_020765.1,1986-2004).
gctgaactctcggaacaat

SEQ ID NO: 230477 - DNA, 19 bp, Homo sapiens
  siRNA target sequence for RBAF600 (NM_020765.1,1987-2005).
ctgaactctcggaacaatt

SEQ ID NO: 230478 - DNA, 19 bp, Homo sapiens
  siRNA target sequence for RBAF600 (NM_020765.1,2011-2029).
cgaaactatctgagtgtat

SEQ ID NO: 230479 - DNA, 19 bp, Homo sapiens
  siRNA target sequence for RBAF600 (NM_020765.1,2050-2068).
gccaccctagccagtatca

SEQ ID NO: 230480 - DNA, 19 bp, Homo sapiens
  siRNA target sequence for RBAF600 (NM_020765.1,2094-2112).
caagggttcatcagatgaa

SEQ ID NO: 230481 - DNA, 19 bp, Homo sapiens
  siRNA target sequence for RBAF600 (NM_020765.1,2207-2225).
gagtggctcctttttctga

SEQ ID NO: 230482 - DNA, 19 bp, Homo sapiens
  siRNA target sequence for RBAF600 (NM_020765.1,2229-2247).
cccttggcccttgtacatt

SEQ ID NO: 230483 - DNA, 19 bp, Homo sapiens
  siRNA target sequence for RBAF600 (NM_020765.1,2231-2249).
cttggcccttgtacattca

SEQ ID NO: 230484 - DNA, 19 bp, Homo sapiens
  siRNA target sequence for RBAF600 (NM_020765.1,2325-2343).
cgtcccagaatgccttaaa

SEQ ID NO: 230485 - DNA, 19 bp, Homo sapiens
  siRNA target sequence for RBAF600 (NM_020765.1,2350-2368).
gacaggtttttgtctacaa

SEQ ID NO: 230486 - DNA, 19 bp, Homo sapiens
  siRNA target sequence for RBAF600 (NM_020765.1,2545-2563).
cgcttcgtgccgcttatct

SEQ ID NO: 230487 - DNA, 19 bp, Homo sapiens
  siRNA target sequence for RBAF600 (NM_020765.1,2546-2564).
gcttcgtgccgcttatctt

SEQ ID NO: 230488 - DNA, 19 bp, Homo sapiens
  siRNA target sequence for RBAF600 (NM_020765.1,2609-2627).
ccaaagcccctgtgtatct

SEQ ID NO: 230489 - DNA, 19 bp, Homo sapiens
  siRNA target sequence for RBAF600 (NM_020765.1,2610-2628).
caaagcccctgtgtatcta

SEQ ID NO: 230490 - DNA, 19 bp, Homo sapiens
  siRNA target sequence for RBAF600 (NM_020765.1,2615-2633).
cccctgtgtatctatttga

SEQ ID NO: 230491 - DNA, 19 bp, Homo sapiens
  siRNA target sequence for RBAF600 (NM_020765.1,2717-2735).
ctctctatcatggattcaa

SEQ ID NO: 230492 - DNA, 19 bp, Homo sapiens
  siRNA target sequence for RBAF600 (NM_020765.1,2779-2797).
gtcccacaccccagattct

SEQ ID NO: 230493 - DNA, 19 bp, Homo sapiens
  siRNA target sequence for RBAF600 (NM_020765.1,2782-2800).
ccacaccccagattctact

SEQ ID NO: 230494 - DNA, 19 bp, Homo sapiens
  siRNA target sequence for RBAF600 (NM_020765.1,2818-2836).
gcctcagaggatgatttga

SEQ ID NO: 230495 - DNA, 19 bp, Homo sapiens
  siRNA target sequence for RBAF600 (NM_020765.1,2830-2848).
gatttgaaccgacttgatt

SEQ ID NO: 230496 - DNA, 19 bp, Homo sapiens
  siRNA target sequence for RBAF600 (NM_020765.1,2871-2889).
ctccaagcttgtcaagtat

SEQ ID NO: 230497 - DNA, 19 bp, Homo sapiens
  siRNA target sequence for RBAF600 (NM_020765.1,2873-2891).
ccaagcttgtcaagtatga

SEQ ID NO: 230498 - DNA, 19 bp, Homo sapiens
  siRNA target sequence for RBAF600 (NM_020765.1,2874-2892).
caagcttgtcaagtatgat

SEQ ID NO: 230499 - DNA, 19 bp, Homo sapiens
  siRNA target sequence for RBAF600 (NM_020765.1,2883-2901).
caagtatgatgagctttat

SEQ ID NO: 230500 - DNA, 19 bp, Homo sapiens
  siRNA target sequence for RBAF600 (NM_020765.1,2930-2948).
ggtcccagcttgatacagt

SEQ ID NO: 230501 - DNA, 19 bp, Homo sapiens
  siRNA target sequence for RBAF600 (NM_020765.1,2931-2949).
gtcccagcttgatacagtt

SEQ ID NO: 230502 - DNA, 19 bp, Homo sapiens
  siRNA target sequence for RBAF600 (NM_020765.1,2987-3005).
cctgtgcccttcaatatta

SEQ ID NO: 230503 - DNA, 19 bp, Homo sapiens
  siRNA target sequence for RBAF600 (NM_020765.1,2990-3008).
gtgcccttcaatattactt

SEQ ID NO: 230504 - DNA, 19 bp, Homo sapiens
  siRNA target sequence for RBAF600 (NM_020765.1,3024-3042).
gatcctaggaattttacca

SEQ ID NO: 230505 - DNA, 19 bp, Homo sapiens
  siRNA target sequence for RBAF600 (NM_020765.1,3043-3061).
ccatcaaagacttacatta

SEQ ID NO: 230506 - DNA, 19 bp, Homo sapiens
  siRNA target sequence for RBAF600 (NM_020765.1,3044-3062).
catcaaagacttacattaa

SEQ ID NO: 230507 - DNA, 19 bp, Homo sapiens
  siRNA target sequence for RBAF600 (NM_020765.1,3083-3101).
ctgagatgagcgaatgtga

SEQ ID NO: 230508 - DNA, 19 bp, Homo sapiens
  siRNA target sequence for RBAF600 (NM_020765.1,3136-3154).
cggatcagctcctatgtca

SEQ ID NO: 230509 - DNA, 19 bp, Homo sapiens
  siRNA target sequence for RBAF600 (NM_020765.1,3158-3176).
ggataaaggatcaccttat

SEQ ID NO: 230510 - DNA, 19 bp, Homo sapiens
  siRNA target sequence for RBAF600 (NM_020765.1,3203-3221).
ctagctcgcttctagaact

SEQ ID NO: 230511 - DNA, 19 bp, Homo sapiens
  siRNA target sequence for RBAF600 (NM_020765.1,3223-3241).
gcatccaccactaagtgta

SEQ ID NO: 230512 - DNA, 19 bp, Homo sapiens
  siRNA target sequence for RBAF600 (NM_020765.1,3237-3255).
gtgtagctcagtgaaatat

SEQ ID NO: 230513 - DNA, 19 bp, Homo sapiens
  siRNA target sequence for RBAF600 (NM_020765.1,3239-3257).
gtagctcagtgaaatatga

SEQ ID NO: 230514 - DNA, 19 bp, Homo sapiens
  siRNA target sequence for RBAF600 (NM_020765.1,3262-3280).
gaaatagtagaggaatact

SEQ ID NO: 230515 - DNA, 19 bp, Homo sapiens
  siRNA target sequence for RBAF600 (NM_020765.1,3370-3388).
cttgatgccgcgatctcaa

SEQ ID NO: 230516 - DNA, 19 bp, Homo sapiens
  siRNA target sequence for RBAF600 (NM_020765.1,3445-3463).
cataagtcgtctgagatta

SEQ ID NO: 230517 - DNA, 19 bp, Homo sapiens
  siRNA target sequence for RBAF600 (NM_020765.1,3479-3497).
cagccacgctgcaactcat

SEQ ID NO: 230518 - DNA, 19 bp, Homo sapiens
  siRNA target sequence for RBAF600 (NM_020765.1,3482-3500).
ccacgctgcaactcattga

SEQ ID NO: 230519 - DNA, 19 bp, Homo sapiens
  siRNA target sequence for RBAF600 (NM_020765.1,3493-3511).
ctcattgacacctatgcat

SEQ ID NO: 230520 - DNA, 19 bp, Homo sapiens
  siRNA target sequence for RBAF600 (NM_020765.1,3512-3530).
cgttcaccagagcctattt

SEQ ID NO: 230521 - DNA, 19 bp, Homo sapiens
  siRNA target sequence for RBAF600 (NM_020765.1,3523-3541).
gcctatttgctgcaaaact

SEQ ID NO: 230522 - DNA, 19 bp, Homo sapiens
  siRNA target sequence for RBAF600 (NM_020765.1,3525-3543).
ctatttgctgcaaaacttt

SEQ ID NO: 230523 - DNA, 19 bp, Homo sapiens
  siRNA target sequence for RBAF600 (NM_020765.1,3623-3641).
ggtgcaaggcaaatactct

SEQ ID NO: 230524 - DNA, 19 bp, Homo sapiens
  siRNA target sequence for RBAF600 (NM_020765.1,3644-3662).
gtccgacactggttcagaa

SEQ ID NO: 230525 - DNA, 19 bp, Homo sapiens
  siRNA target sequence for RBAF600 (NM_020765.1,3646-3664).
ccgacactggttcagaatt

SEQ ID NO: 230526 - DNA, 19 bp, Homo sapiens
  siRNA target sequence for RBAF600 (NM_020765.1,3647-3665).
cgacactggttcagaattt

SEQ ID NO: 230527 - DNA, 19 bp, Homo sapiens
  siRNA target sequence for RBAF600 (NM_020765.1,3699-3717).
gaacaacatcaataccaat

SEQ ID NO: 230528 - DNA, 19 bp, Homo sapiens
  siRNA target sequence for RBAF600 (NM_020765.1,3714-3732).
caatgaatttcccaatatt

SEQ ID NO: 230529 - DNA, 19 bp, Homo sapiens
  siRNA target sequence for RBAF600 (NM_020765.1,3768-3786).
cccttcagagagttatatt

SEQ ID NO: 230530 - DNA, 19 bp, Homo sapiens
  siRNA target sequence for RBAF600 (NM_020765.1,3878-3896).
ggttgactggagatcttat

SEQ ID NO: 230531 - DNA, 19 bp, Homo sapiens
  siRNA target sequence for RBAF600 (NM_020765.1,3879-3897).
gttgactggagatcttatt

SEQ ID NO: 230532 - DNA, 19 bp, Homo sapiens
  siRNA target sequence for RBAF600 (NM_020765.1,3882-3900).
gactggagatcttattgtt

SEQ ID NO: 230533 - DNA, 19 bp, Homo sapiens
  siRNA target sequence for RBAF600 (NM_020765.1,3936-3954).
gacactgctacctcttctt

SEQ ID NO: 230534 - DNA, 19 bp, Homo sapiens
  siRNA target sequence for RBAF600 (NM_020765.1,4060-4078).
ctgatcactggttgttaca

SEQ ID NO: 230535 - DNA, 19 bp, Homo sapiens
  siRNA target sequence for RBAF600 (NM_020765.1,4077-4095).
caacattctggccaatcat

SEQ ID NO: 230536 - DNA, 19 bp, Homo sapiens
  siRNA target sequence for RBAF600 (NM_020765.1,4088-4106).
ccaatcatgcagatcctaa

SEQ ID NO: 230537 - DNA, 19 bp, Homo sapiens
  siRNA target sequence for RBAF600 (NM_020765.1,4249-4267).
gagaacctctctgctaaat

SEQ ID NO: 230538 - DNA, 19 bp, Homo sapiens
  siRNA target sequence for RBAF600 (NM_020765.1,4269-4287).
ctgtaaccgagttttgaaa

SEQ ID NO: 230539 - DNA, 19 bp, Homo sapiens
  siRNA target sequence for RBAF600 (NM_020765.1,4271-4289).
gtaaccgagttttgaaatt

SEQ ID NO: 230540 - DNA, 19 bp, Homo sapiens
  siRNA target sequence for RBAF600 (NM_020765.1,4402-4420).
ctcacccgcatgactacat

SEQ ID NO: 230541 - DNA, 19 bp, Homo sapiens
  siRNA target sequence for RBAF600 (NM_020765.1,4479-4497).
gttactgaccacatacatt

SEQ ID NO: 230542 - DNA, 19 bp, Homo sapiens
  siRNA target sequence for RBAF600 (NM_020765.1,4593-4611).
gactggcttccctgaactt

SEQ ID NO: 230543 - DNA, 19 bp, Homo sapiens
  siRNA target sequence for RBAF600 (NM_020765.1,4598-4616).
gcttccctgaacttatggt

SEQ ID NO: 230544 - DNA, 19 bp, Homo sapiens
  siRNA target sequence for RBAF600 (NM_020765.1,4654-4672).
ggtcaccttcagcttcata

SEQ ID NO: 230545 - DNA, 19 bp, Homo sapiens
  siRNA target sequence for RBAF600 (NM_020765.1,4710-4728).
cctgtcacagaagaatgta

SEQ ID NO: 230546 - DNA, 19 bp, Homo sapiens
  siRNA target sequence for RBAF600 (NM_020765.1,4740-4758).
gaatgccaatgtaatgcat

SEQ ID NO: 230547 - DNA, 19 bp, Homo sapiens
  siRNA target sequence for RBAF600 (NM_020765.1,4787-4805).
catgccatatcatgtctta

SEQ ID NO: 230548 - DNA, 19 bp, Homo sapiens
  siRNA target sequence for RBAF600 (NM_020765.1,4790-4808).
gccatatcatgtcttactt

SEQ ID NO: 230549 - DNA, 19 bp, Homo sapiens
  siRNA target sequence for RBAF600 (NM_020765.1,4921-4939).
gcggtggaagaggaagatt

SEQ ID NO: 230550 - DNA, 19 bp, Homo sapiens
  siRNA target sequence for RBAF600 (NM_020765.1,5000-5018).
cacagaaagaattcatgaa

SEQ ID NO: 230551 - DNA, 19 bp, Homo sapiens
  siRNA target sequence for RBAF600 (NM_020765.1,5093-5111).
gccacaaggatcatgagat

SEQ ID NO: 230552 - DNA, 19 bp, Homo sapiens
  siRNA target sequence for RBAF600 (NM_020765.1,5094-5112).
ccacaaggatcatgagatt

SEQ ID NO: 230553 - DNA, 19 bp, Homo sapiens
  siRNA target sequence for RBAF600 (NM_020765.1,5100-5118).
ggatcatgagatttcctat

SEQ ID NO: 230554 - DNA, 19 bp, Homo sapiens
  siRNA target sequence for RBAF600 (NM_020765.1,5283-5301).
ctcctcgccagctgacaaa

SEQ ID NO: 230555 - DNA, 19 bp, Homo sapiens
  siRNA target sequence for RBAF600 (NM_020765.1,5379-5397).
gggctgccgggaggaatta

SEQ ID NO: 230556 - DNA, 19 bp, Homo sapiens
  siRNA target sequence for RBAF600 (NM_020765.1,5381-5399).
gctgccgggaggaattaca

SEQ ID NO: 230557 - DNA, 19 bp, Homo sapiens
  siRNA target sequence for RBAF600 (NM_020765.1,5384-5402).
gccgggaggaattacagaa

SEQ ID NO: 230558 - DNA, 19 bp, Homo sapiens
  siRNA target sequence for RBAF600 (NM_020765.1,5422-5440).
gctcctctcgtgttagaca

SEQ ID NO: 230559 - DNA, 19 bp, Homo sapiens
  siRNA target sequence for RBAF600 (NM_020765.1,5423-5441).
ctcctctcgtgttagacat

SEQ ID NO: 230560 - DNA, 19 bp, Homo sapiens
  siRNA target sequence for RBAF600 (NM_020765.1,5428-5446).
ctcgtgttagacatgctta

SEQ ID NO: 230561 - DNA, 19 bp, Homo sapiens
  siRNA target sequence for RBAF600 (NM_020765.1,5430-5448).
cgtgttagacatgcttaat

SEQ ID NO: 230562 - DNA, 19 bp, Homo sapiens
  siRNA target sequence for RBAF600 (NM_020765.1,5437-5455).
gacatgcttaatttcctta

SEQ ID NO: 230563 - DNA, 19 bp, Homo sapiens
  siRNA target sequence for RBAF600 (NM_020765.1,5442-5460).
gcttaatttccttatggat

SEQ ID NO: 230564 - DNA, 19 bp, Homo sapiens
  siRNA target sequence for RBAF600 (NM_020765.1,5611-5629).
gagaatgtgcggatgaatt

SEQ ID NO: 230565 - DNA, 19 bp, Homo sapiens
  siRNA target sequence for RBAF600 (NM_020765.1,5862-5880).
gttgagcctcacaggaaat

SEQ ID NO: 230566 - DNA, 19 bp, Homo sapiens
  siRNA target sequence for RBAF600 (NM_020765.1,5956-5974).
gtttcggatcacttggttt

SEQ ID NO: 230567 - DNA, 19 bp, Homo sapiens
  siRNA target sequence for RBAF600 (NM_020765.1,5960-5978).
cggatcacttggttttgca

SEQ ID NO: 230568 - DNA, 19 bp, Homo sapiens
  siRNA target sequence for RBAF600 (NM_020765.1,5989-6007).
gcaacggggaacttcatca

SEQ ID NO: 230569 - DNA, 19 bp, Homo sapiens
  siRNA target sequence for RBAF600 (NM_020765.1,6052-6070).
gtcaccgcagactttgtta

SEQ ID NO: 230570 - DNA, 19 bp, Homo sapiens
  siRNA target sequence for RBAF600 (NM_020765.1,6056-6074).
ccgcagactttgttaagat

SEQ ID NO: 230571 - DNA, 19 bp, Homo sapiens
  siRNA target sequence for RBAF600 (NM_020765.1,6057-6075).
cgcagactttgttaagatt

SEQ ID NO: 230572 - DNA, 19 bp, Homo sapiens
  siRNA target sequence for RBAF600 (NM_020765.1,6058-6076).
gcagactttgttaagattt

SEQ ID NO: 230573 - DNA, 19 bp, Homo sapiens
  siRNA target sequence for RBAF600 (NM_020765.1,6096-6114).
cttgagtccaaccttctat

SEQ ID NO: 230574 - DNA, 19 bp, Homo sapiens
  siRNA target sequence for RBAF600 (NM_020765.1,6101-6119).
gtccaaccttctattttct

SEQ ID NO: 230575 - DNA, 19 bp, Homo sapiens
  siRNA target sequence for RBAF600 (NM_020765.1,6121-6139).
ctgccaagctcaaagataa

SEQ ID NO: 230576 - DNA, 19 bp, Homo sapiens
  siRNA target sequence for RBAF600 (NM_020765.1,6142-6160).
gatgttaccttccttttca

SEQ ID NO: 230577 - DNA, 19 bp, Homo sapiens
  siRNA target sequence for RBAF600 (NM_020765.1,6168-6186).
gggaaagaacatcattgtt

SEQ ID NO: 230578 - DNA, 19 bp, Homo sapiens
  siRNA target sequence for RBAF600 (NM_020765.1,6194-6212).
cttcggctgggtacatcta

SEQ ID NO: 230579 - DNA, 19 bp, Homo sapiens
  siRNA target sequence for RBAF600 (NM_020765.1,6198-6216).
ggctgggtacatctatact

SEQ ID NO: 230580 - DNA, 19 bp, Homo sapiens
  siRNA target sequence for RBAF600 (NM_020765.1,6200-6218).
ctgggtacatctatactca

SEQ ID NO: 230581 - DNA, 19 bp, Homo sapiens
  siRNA target sequence for RBAF600 (NM_020765.1,6210-6228).
ctatactcagcttatggaa

SEQ ID NO: 230582 - DNA, 19 bp, Homo sapiens
  siRNA target sequence for RBAF600 (NM_020765.1,6247-6265).
cagggacccttctatgtca

SEQ ID NO: 230583 - DNA, 19 bp, Homo sapiens
  siRNA target sequence for RBAF600 (NM_020765.1,6326-6344).
gtggtgtgtccgtgtacta

SEQ ID NO: 230584 - DNA, 19 bp, Homo sapiens
  siRNA target sequence for RBAF600 (NM_020765.1,6328-6346).
ggtgtgtccgtgtactact

SEQ ID NO: 230585 - DNA, 19 bp, Homo sapiens
  siRNA target sequence for RBAF600 (NM_020765.1,6349-6367).
cacgtgttgcagatgttgt

SEQ ID NO: 230586 - DNA, 19 bp, Homo sapiens
  siRNA target sequence for RBAF600 (NM_020765.1,6363-6381).
gttgttcttcagctattgt

SEQ ID NO: 230587 - DNA, 19 bp, Homo sapiens
  siRNA target sequence for RBAF600 (NM_020765.1,6375-6393).
ctattgtcaaggcaaatca

SEQ ID NO: 230588 - DNA, 19 bp, Homo sapiens
  siRNA target sequence for RBAF600 (NM_020765.1,6441-6459).
ccccatcaacatcaaaagt

SEQ ID NO: 230589 - DNA, 19 bp, Homo sapiens
  siRNA target sequence for RBAF600 (NM_020765.1,6442-6460).
cccatcaacatcaaaagtt

SEQ ID NO: 230590 - DNA, 19 bp, Homo sapiens
  siRNA target sequence for RBAF600 (NM_020765.1,6462-6480).
caatggtggcagtaagact

SEQ ID NO: 230591 - DNA, 19 bp, Homo sapiens
  siRNA target sequence for RBAF600 (NM_020765.1,6553-6571).
ggggtgccgctggtagtta

SEQ ID NO: 230592 - DNA, 19 bp, Homo sapiens
  siRNA target sequence for RBAF600 (NM_020765.1,6592-6610).
cttatccaggagattaaga

SEQ ID NO: 230593 - DNA, 19 bp, Homo sapiens
  siRNA target sequence for RBAF600 (NM_020765.1,6670-6688).
gagcagcagcggacaacaa

SEQ ID NO: 230594 - DNA, 19 bp, Homo sapiens
  siRNA target sequence for RBAF600 (NM_020765.1,6673-6691).
cagcagcggacaacaatga

SEQ ID NO: 230595 - DNA, 19 bp, Homo sapiens
  siRNA target sequence for RBAF600 (NM_020765.1,6675-6693).
gcagcggacaacaatgatt

SEQ ID NO: 230596 - DNA, 19 bp, Homo sapiens
  siRNA target sequence for RBAF600 (NM_020765.1,6709-6727).
ggcagcctgcgcatttaca

SEQ ID NO: 230597 - DNA, 19 bp, Homo sapiens
  siRNA target sequence for RBAF600 (NM_020765.1,6710-6728).
gcagcctgcgcatttacat

SEQ ID NO: 230598 - DNA, 19 bp, Homo sapiens
  siRNA target sequence for RBAF600 (NM_020765.1,6814-6832).
cgcaaaacagctacaatca

SEQ ID NO: 230599 - DNA, 19 bp, Homo sapiens
  siRNA target sequence for RBAF600 (NM_020765.1,6816-6834).
caaaacagctacaatcaca

SEQ ID NO: 230600 - DNA, 19 bp, Homo sapiens
  siRNA target sequence for RBAF600 (NM_020765.1,6842-6860).
cgtctagccaggtgacttt

SEQ ID NO: 230601 - DNA, 19 bp, Homo sapiens
  siRNA target sequence for RBAF600 (NM_020765.1,6855-6873).
gactttccccattgacttt

SEQ ID NO: 230602 - DNA, 19 bp, Homo sapiens
  siRNA target sequence for RBAF600 (NM_020765.1,6863-6881).
ccattgacttttttgaaca

SEQ ID NO: 230603 - DNA, 19 bp, Homo sapiens
  siRNA target sequence for RBAF600 (NM_020765.1,6919-6937).
gacctcctacaggtctata

SEQ ID NO: 230604 - DNA, 19 bp, Homo sapiens
  siRNA target sequence for RBAF600 (NM_020765.1,6924-6942).
cctacaggtctataatgca

SEQ ID NO: 230605 - DNA, 19 bp, Homo sapiens
  siRNA target sequence for RBAF600 (NM_020765.1,6963-6981).
gaattccactggcatgtat

SEQ ID NO: 230606 - DNA, 19 bp, Homo sapiens
  siRNA target sequence for RBAF600 (NM_020765.1,7065-7083).
gattgggactcaagcaata

SEQ ID NO: 230607 - DNA, 19 bp, Homo sapiens
  siRNA target sequence for RBAF600 (NM_020765.1,7094-7112).
cgtcatatatcgagatctt

SEQ ID NO: 230608 - DNA, 19 bp, Homo sapiens
  siRNA target sequence for RBAF600 (NM_020765.1,7142-7160).
gctcacgctggtttgactt

SEQ ID NO: 230609 - DNA, 19 bp, Homo sapiens
  siRNA target sequence for RBAF600 (NM_020765.1,7244-7262).
ccatgatagatgctgtaaa

SEQ ID NO: 230610 - DNA, 19 bp, Homo sapiens
  siRNA target sequence for RBAF600 (NM_020765.1,7654-7672).
gtgcagtgtctcaacacat

SEQ ID NO: 230611 - DNA, 19 bp, Homo sapiens
  siRNA target sequence for RBAF600 (NM_020765.1,7657-7675).
cagtgtctcaacacatcta

SEQ ID NO: 230612 - DNA, 19 bp, Homo sapiens
  siRNA target sequence for RBAF600 (NM_020765.1,7890-7908).
gaaactccatgcatccaaa

SEQ ID NO: 230613 - DNA, 19 bp, Homo sapiens
  siRNA target sequence for RBAF600 (NM_020765.1,8030-8048).
cagcatccaagatctacat

SEQ ID NO: 230614 - DNA, 19 bp, Homo sapiens
  siRNA target sequence for RBAF600 (NM_020765.1,8074-8092).
gctgtgagcttctcttgta

SEQ ID NO: 230615 - DNA, 19 bp, Homo sapiens
  siRNA target sequence for RBAF600 (NM_020765.1,8075-8093).
ctgtgagcttctcttgtaa

SEQ ID NO: 230616 - DNA, 19 bp, Homo sapiens
  siRNA target sequence for RBAF600 (NM_020765.1,8436-8454).
cgagaccatggttgaacta

SEQ ID NO: 230617 - DNA, 19 bp, Homo sapiens
  siRNA target sequence for RBAF600 (NM_020765.1,8716-8734).
gctggcgagcacagtgtat

SEQ ID NO: 230618 - DNA, 19 bp, Homo sapiens
  siRNA target sequence for RBAF600 (NM_020765.1,8946-8964).
gcagaccctgcctcaatta

SEQ ID NO: 230619 - DNA, 19 bp, Homo sapiens
  siRNA target sequence for RBAF600 (NM_020765.1,8949-8967).
gaccctgcctcaattacga

SEQ ID NO: 230620 - DNA, 19 bp, Homo sapiens
  siRNA target sequence for RBAF600 (NM_020765.1,8951-8969).
ccctgcctcaattacgaaa

SEQ ID NO: 230621 - DNA, 19 bp, Homo sapiens
  siRNA target sequence for RBAF600 (NM_020765.1,8955-8973).
gcctcaattacgaaacgtt

SEQ ID NO: 230622 - DNA, 19 bp, Homo sapiens
  siRNA target sequence for RBAF600 (NM_020765.1,9088-9106).
gctgagttgggtatggata

SEQ ID NO: 230623 - DNA, 19 bp, Homo sapiens
  siRNA target sequence for RBAF600 (NM_020765.1,9089-9107).
ctgagttgggtatggataa

SEQ ID NO: 230624 - DNA, 19 bp, Homo sapiens
  siRNA target sequence for RBAF600 (NM_020765.1,9132-9150).
gcgcagcgccctgaatgaa

SEQ ID NO: 230625 - DNA, 19 bp, Homo sapiens
  siRNA target sequence for RBAF600 (NM_020765.1,9151-9169).
gtccatctggtagtaatga

SEQ ID NO: 230626 - DNA, 19 bp, Homo sapiens
  siRNA target sequence for RBAF600 (NM_020765.1,9186-9204).
catgtcccgcaccaaatct

SEQ ID NO: 230627 - DNA, 19 bp, Homo sapiens
  siRNA target sequence for RBAF600 (NM_020765.1,9294-9312).
cctgcacgtgctcaaatca

SEQ ID NO: 230628 - DNA, 19 bp, Homo sapiens
  siRNA target sequence for RBAF600 (NM_020765.1,9401-9419).
ctgacatgagcccattctt

SEQ ID NO: 230629 - DNA, 19 bp, Homo sapiens
  siRNA target sequence for RBAF600 (NM_020765.1,9463-9481).
gcctatactcagcttctaa

SEQ ID NO: 230630 - DNA, 19 bp, Homo sapiens
  siRNA target sequence for RBAF600 (NM_020765.1,9465-9483).
ctatactcagcttctaaca

SEQ ID NO: 230631 - DNA, 19 bp, Homo sapiens
  siRNA target sequence for RBAF600 (NM_020765.1,9498-9516).
gcttccttaccaaatcaaa

SEQ ID NO: 230632 - DNA, 19 bp, Homo sapiens
  siRNA target sequence for RBAF600 (NM_020765.1,9502-9520).
ccttaccaaatcaaaaaga

SEQ ID NO: 230633 - DNA, 19 bp, Homo sapiens
  siRNA target sequence for RBAF600 (NM_020765.1,9507-9525).
ccaaatcaaaaagattact

SEQ ID NO: 230634 - DNA, 19 bp, Homo sapiens
  siRNA target sequence for RBAF600 (NM_020765.1,9559-9577).
gaccactcgtggttttact

SEQ ID NO: 230635 - DNA, 19 bp, Homo sapiens
  siRNA target sequence for RBAF600 (NM_020765.1,9561-9579).
ccactcgtggttttacttt

SEQ ID NO: 230636 - DNA, 19 bp, Homo sapiens
  siRNA target sequence for RBAF600 (NM_020765.1,9597-9615).
gatccagcagactccattt

SEQ ID NO: 230637 - DNA, 19 bp, Homo sapiens
  siRNA target sequence for RBAF600 (NM_020765.1,9621-9639).
ccgtcaagtccgcaaactt

SEQ ID NO: 230638 - DNA, 19 bp, Homo sapiens
  siRNA target sequence for RBAF600 (NM_020765.1,9623-9641).
gtcaagtccgcaaacttct

SEQ ID NO: 230639 - DNA, 19 bp, Homo sapiens
  siRNA target sequence for RBAF600 (NM_020765.1,9653-9671).
gtggatccaaagagaagta

SEQ ID NO: 230640 - DNA, 19 bp, Homo sapiens
  siRNA target sequence for RBAF600 (NM_020765.1,9674-9692).
gccagctccgggatttgca

SEQ ID NO: 230641 - DNA, 19 bp, Homo sapiens
  siRNA target sequence for RBAF600 (NM_020765.1,9706-9724).
cacgtgcgtgggatcaaga

SEQ ID NO: 230642 - DNA, 19 bp, Homo sapiens
  siRNA target sequence for RBAF600 (NM_020765.1,9779-9797).
caggctccgccttgcaata

SEQ ID NO: 230643 - DNA, 19 bp, Homo sapiens
  siRNA target sequence for RBAF600 (NM_020765.1,9782-9800).
gctccgccttgcaatatga

SEQ ID NO: 230644 - DNA, 19 bp, Homo sapiens
  siRNA target sequence for RBAF600 (NM_020765.1,9850-9868).
gcccagcgaaccatcaact

SEQ ID NO: 230645 - DNA, 19 bp, Homo sapiens
  siRNA target sequence for RBAF600 (NM_020765.1,10200-10218).
caaatttgccgataaggaa

SEQ ID NO: 230646 - DNA, 19 bp, Homo sapiens
  siRNA target sequence for RBAF600 (NM_020765.1,10245-10263).
cctgttagagtccaattct

SEQ ID NO: 230647 - DNA, 19 bp, Homo sapiens
  siRNA target sequence for RBAF600 (NM_020765.1,10289-10307).
gtctgacactgcacatcta

SEQ ID NO: 230648 - DNA, 19 bp, Homo sapiens
  siRNA target sequence for RBAF600 (NM_020765.1,10408-10426).
gacctactaggatatttct

SEQ ID NO: 230649 - DNA, 19 bp, Homo sapiens
  siRNA target sequence for RBAF600 (NM_020765.1,10483-10501).
gagattctgcggactcaaa

SEQ ID NO: 230650 - DNA, 19 bp, Homo sapiens
  siRNA target sequence for RBAF600 (NM_020765.1,10489-10507).
ctgcggactcaaaaccata

SEQ ID NO: 230651 - DNA, 19 bp, Homo sapiens
  siRNA target sequence for RBAF600 (NM_020765.1,10491-10509).
gcggactcaaaaccatatt

SEQ ID NO: 230652 - DNA, 19 bp, Homo sapiens
  siRNA target sequence for RBAF600 (NM_020765.1,10518-10536).
ccaccccaactcgaacatt

SEQ ID NO: 230653 - DNA, 19 bp, Homo sapiens
  siRNA target sequence for RBAF600 (NM_020765.1,10519-10537).
caccccaactcgaacattt

SEQ ID NO: 230654 - DNA, 19 bp, Homo sapiens
  siRNA target sequence for RBAF600 (NM_020765.1,10521-10539).
ccccaactcgaacatttat

SEQ ID NO: 230655 - DNA, 19 bp, Homo sapiens
  siRNA target sequence for RBAF600 (NM_020765.1,10522-10540).
cccaactcgaacatttata

SEQ ID NO: 230656 - DNA, 19 bp, Homo sapiens
  siRNA target sequence for RBAF600 (NM_020765.1,10591-10609).
ccctgcctggtgtgtaata

SEQ ID NO: 230657 - DNA, 19 bp, Homo sapiens
  siRNA target sequence for RBAF600 (NM_020765.1,10612-10630).
ccggaagtaccgttctgtt

SEQ ID NO: 230658 - DNA, 19 bp, Homo sapiens
  siRNA target sequence for RBAF600 (NM_020765.1,10613-10631).
cggaagtaccgttctgtta

SEQ ID NO: 230659 - DNA, 19 bp, Homo sapiens
  siRNA target sequence for RBAF600 (NM_020765.1,10614-10632).
ggaagtaccgttctgttat

SEQ ID NO: 230660 - DNA, 19 bp, Homo sapiens
  siRNA target sequence for RBAF600 (NM_020765.1,10615-10633).
gaagtaccgttctgttata

SEQ ID NO: 230661 - DNA, 19 bp, Homo sapiens
  siRNA target sequence for RBAF600 (NM_020765.1,10618-10636).
gtaccgttctgttatatca

SEQ ID NO: 230662 - DNA, 19 bp, Homo sapiens
  siRNA target sequence for RBAF600 (NM_020765.1,10635-10653).
caagctgtcttccattaaa

SEQ ID NO: 230663 - DNA, 19 bp, Homo sapiens
  siRNA target sequence for RBAF600 (NM_020765.1,10728-10746).
gaaaatcggggatctgaaa

SEQ ID NO: 230664 - DNA, 19 bp, Homo sapiens
  siRNA target sequence for RBAF600 (NM_020765.1,10764-10782).
gaccatcaacctgtattat

SEQ ID NO: 230665 - DNA, 19 bp, Homo sapiens
  siRNA target sequence for RBAF600 (NM_020765.1,10908-10926).
ggcctccaatctgatgatt

SEQ ID NO: 230666 - DNA, 19 bp, Homo sapiens
  siRNA target sequence for RBAF600 (NM_020765.1,10910-10928).
cctccaatctgatgattga

SEQ ID NO: 230667 - DNA, 19 bp, Homo sapiens
  siRNA target sequence for RBAF600 (NM_020765.1,10913-10931).
ccaatctgatgattgagtt

SEQ ID NO: 230668 - DNA, 19 bp, Homo sapiens
  siRNA target sequence for RBAF600 (NM_020765.1,11041-11059).
gtgtaccagtgtcacaaat

SEQ ID NO: 230669 - DNA, 19 bp, Homo sapiens
  siRNA target sequence for RBAF600 (NM_020765.1,11169-11187).
ggatcccattgagaatgaa

SEQ ID NO: 230670 - DNA, 19 bp, Homo sapiens
  siRNA target sequence for RBAF600 (NM_020765.1,11203-11221).
gctgtatccaacatcaata

SEQ ID NO: 230671 - DNA, 19 bp, Homo sapiens
  siRNA target sequence for RBAF600 (NM_020765.1,11232-11250).
caaagctgatcgagtgtat

SEQ ID NO: 230672 - DNA, 19 bp, Homo sapiens
  siRNA target sequence for RBAF600 (NM_020765.1,11366-11384).
ctgccagtgtgaatcgtta

SEQ ID NO: 230673 - DNA, 19 bp, Homo sapiens
  siRNA target sequence for RBAF600 (NM_020765.1,11369-11387).
ccagtgtgaatcgttacat

SEQ ID NO: 230674 - DNA, 19 bp, Homo sapiens
  siRNA target sequence for RBAF600 (NM_020765.1,11394-11412).
gttggctcaggagtattgt

SEQ ID NO: 230675 - DNA, 19 bp, Homo sapiens
  siRNA target sequence for RBAF600 (NM_020765.1,11418-11436).
ctgcaagaactcttttgat

SEQ ID NO: 230676 - DNA, 19 bp, Homo sapiens
  siRNA target sequence for RBAF600 (NM_020765.1,11420-11438).
gcaagaactcttttgatga

SEQ ID NO: 230677 - DNA, 19 bp, Homo sapiens
  siRNA target sequence for RBAF600 (NM_020765.1,11468-11486).
cttcgcgcaaagagttgtt

SEQ ID NO: 230678 - DNA, 19 bp, Homo sapiens
  siRNA target sequence for RBAF600 (NM_020765.1,11473-11491).
cgcaaagagttgttggaat

SEQ ID NO: 230679 - DNA, 19 bp, Homo sapiens
  siRNA target sequence for RBAF600 (NM_020765.1,11628-11646).
ctcggctgtcacagaacat

SEQ ID NO: 230680 - DNA, 19 bp, Homo sapiens
  siRNA target sequence for RBAF600 (NM_020765.1,11631-11649).
ggctgtcacagaacattgt

SEQ ID NO: 230681 - DNA, 19 bp, Homo sapiens
  siRNA target sequence for RBAF600 (NM_020765.1,11720-11738).
gggagctctttgattataa

SEQ ID NO: 230682 - DNA, 19 bp, Homo sapiens
  siRNA target sequence for RBAF600 (NM_020765.1,11724-11742).
gctctttgattataatctt

SEQ ID NO: 230683 - DNA, 19 bp, Homo sapiens
  siRNA target sequence for RBAF600 (NM_020765.1,11810-11828).
cagaagccacccaacagat

SEQ ID NO: 230684 - DNA, 19 bp, Homo sapiens
  siRNA target sequence for RBAF600 (NM_020765.1,11897-11915).
gtagcctgcagtatgaaat

SEQ ID NO: 230685 - DNA, 19 bp, Homo sapiens
  siRNA target sequence for RBAF600 (NM_020765.1,11900-11918).
gcctgcagtatgaaatgct

SEQ ID NO: 230686 - DNA, 19 bp, Homo sapiens
  siRNA target sequence for RBAF600 (NM_020765.1,11992-12010).
ctcatggctgtgaacatta

SEQ ID NO: 230687 - DNA, 19 bp, Homo sapiens
  siRNA target sequence for RBAF600 (NM_020765.1,12014-12032).
ctcctgtggtggttgaaaa

SEQ ID NO: 230688 - DNA, 19 bp, Homo sapiens
  siRNA target sequence for RBAF600 (NM_020765.1,12017-12035).
ctgtggtggttgaaaacat

SEQ ID NO: 230689 - DNA, 19 bp, Homo sapiens
  siRNA target sequence for RBAF600 (NM_020765.1,12216-12234).
gaagtgtcttcctatcaga

SEQ ID NO: 230690 - DNA, 19 bp, Homo sapiens
  siRNA target sequence for RBAF600 (NM_020765.1,12271-12289).
gagctccgccatctctatt

SEQ ID NO: 230691 - DNA, 19 bp, Homo sapiens
  siRNA target sequence for RBAF600 (NM_020765.1,12274-12292).
ctccgccatctctatttga

SEQ ID NO: 230692 - DNA, 19 bp, Homo sapiens
  siRNA target sequence for RBAF600 (NM_020765.1,12276-12294).
ccgccatctctatttgact

SEQ ID NO: 230693 - DNA, 19 bp, Homo sapiens
  siRNA target sequence for RBAF600 (NM_020765.1,12285-12303).
ctatttgactgagaagtat

SEQ ID NO: 230694 - DNA, 19 bp, Homo sapiens
  siRNA target sequence for RBAF600 (NM_020765.1,12350-12368).
cccccttggatctcaaact

SEQ ID NO: 230695 - DNA, 19 bp, Homo sapiens
  siRNA target sequence for RBAF600 (NM_020765.1,12387-12405).
gcgacaagtgcttttcact

SEQ ID NO: 230696 - DNA, 19 bp, Homo sapiens
  siRNA target sequence for RBAF600 (NM_020765.1,12578-12596).
ctgcgcactggaaagtcta

SEQ ID NO: 230697 - DNA, 19 bp, Homo sapiens
  siRNA target sequence for RBAF600 (NM_020765.1,12636-12654).
catcaccaaggaaatagct

SEQ ID NO: 230698 - DNA, 19 bp, Homo sapiens
  siRNA target sequence for RBAF600 (NM_020765.1,12699-12717).
gcagggttatgcccttaaa

SEQ ID NO: 230699 - DNA, 19 bp, Homo sapiens
  siRNA target sequence for RBAF600 (NM_020765.1,12700-12718).
cagggttatgcccttaaaa

SEQ ID NO: 230700 - DNA, 19 bp, Homo sapiens
  siRNA target sequence for RBAF600 (NM_020765.1,12702-12720).
gggttatgcccttaaaagt

SEQ ID NO: 230701 - DNA, 19 bp, Homo sapiens
  siRNA target sequence for RBAF600 (NM_020765.1,12704-12722).
gttatgcccttaaaagtct

SEQ ID NO: 230702 - DNA, 19 bp, Homo sapiens
  siRNA target sequence for RBAF600 (NM_020765.1,12753-12771).
ggaatccatcaaaagacat

SEQ ID NO: 230703 - DNA, 19 bp, Homo sapiens
  siRNA target sequence for RBAF600 (NM_020765.1,12947-12965).
cagccaagcgctacaatct

SEQ ID NO: 230704 - DNA, 19 bp, Homo sapiens
  siRNA target sequence for RBAF600 (NM_020765.1,12956-12974).
gctacaatctggatgacta

SEQ ID NO: 230705 - DNA, 19 bp, Homo sapiens
  siRNA target sequence for RBAF600 (NM_020765.1,13005-13023).
ctgcagcatcatttatcct

SEQ ID NO: 230706 - DNA, 19 bp, Homo sapiens
  siRNA target sequence for RBAF600 (NM_020765.1,13071-13089).
ccaacaagaagacttctta

SEQ ID NO: 230707 - DNA, 19 bp, Homo sapiens
  siRNA target sequence for RBAF600 (NM_020765.1,13141-13159).
ccgctgatgagggatataa

SEQ ID NO: 230708 - DNA, 19 bp, Homo sapiens
  siRNA target sequence for RBAF600 (NM_020765.1,13211-13229).
gtggcatggagcttctagt

SEQ ID NO: 230709 - DNA, 19 bp, Homo sapiens
  siRNA target sequence for RBAF600 (NM_020765.1,13219-13237).
gagcttctagtgaacaata

SEQ ID NO: 230710 - DNA, 19 bp, Homo sapiens
  siRNA target sequence for RBAF600 (NM_020765.1,13221-13239).
gcttctagtgaacaataaa

SEQ ID NO: 230711 - DNA, 19 bp, Homo sapiens
  siRNA target sequence for RBAF600 (NM_020765.1,13222-13240).
cttctagtgaacaataaaa

SEQ ID NO: 230712 - DNA, 19 bp, Homo sapiens
  siRNA target sequence for RBAF600 (NM_020765.1,13308-13326).
gcccatgaggattgtttat

SEQ ID NO: 230713 - DNA, 19 bp, Homo sapiens
  siRNA target sequence for RBAF600 (NM_020765.1,13311-13329).
catgaggattgtttatcgt

SEQ ID NO: 230714 - DNA, 19 bp, Homo sapiens
  siRNA target sequence for RBAF600 (NM_020765.1,13477-13495).
gcagggatcagagatttca

SEQ ID NO: 230715 - DNA, 19 bp, Homo sapiens
  siRNA target sequence for RBAF600 (NM_020765.1,13478-13496).
cagggatcagagatttcaa

SEQ ID NO: 230716 - DNA, 19 bp, Homo sapiens
  siRNA target sequence for RBAF600 (NM_020765.1,13498-13516).
cagggacgccaccttctaa

SEQ ID NO: 230717 - DNA, 19 bp, Homo sapiens
  siRNA target sequence for RBAF600 (NM_020765.1,13500-13518).
gggacgccaccttctaaca

SEQ ID NO: 230718 - DNA, 19 bp, Homo sapiens
  siRNA target sequence for RBAF600 (NM_020765.1,13513-13531).
ctaacagtgctactgaaat

SEQ ID NO: 230719 - DNA, 19 bp, Homo sapiens
  siRNA target sequence for RBAF600 (NM_020765.1,13519-13537).
gtgctactgaaattgttca

SEQ ID NO: 230720 - DNA, 19 bp, Homo sapiens
  siRNA target sequence for RBAF600 (NM_020765.1,13565-13583).
ggcagcaactggtcaaact

SEQ ID NO: 230721 - DNA, 19 bp, Homo sapiens
  siRNA target sequence for RBAF600 (NM_020765.1,13695-13713).
catggagatcattctagat

SEQ ID NO: 230722 - DNA, 19 bp, Homo sapiens
  siRNA target sequence for RBAF600 (NM_020765.1,13852-13870).
cgcatcatcccgtaccttt

SEQ ID NO: 230723 - DNA, 19 bp, Homo sapiens
  siRNA target sequence for RBAF600 (NM_020765.1,13899-13917).
cttggtggagcgattcaaa

SEQ ID NO: 230724 - DNA, 19 bp, Homo sapiens
  siRNA target sequence for RBAF600 (NM_020765.1,13903-13921).
gtggagcgattcaaaccat

SEQ ID NO: 230725 - DNA, 19 bp, Homo sapiens
  siRNA target sequence for RBAF600 (NM_020765.1,13914-13932).
caaaccatactgcaacttt

SEQ ID NO: 230726 - DNA, 19 bp, Homo sapiens
  siRNA target sequence for RBAF600 (NM_020765.1,13919-13937).
catactgcaactttgataa

SEQ ID NO: 230727 - DNA, 19 bp, Homo sapiens
  siRNA target sequence for RBAF600 (NM_020765.1,14094-14112).
catccctagcgccaagaat

SEQ ID NO: 230728 - DNA, 19 bp, Homo sapiens
  siRNA target sequence for RBAF600 (NM_020765.1,14119-14137).
gccgacatctggaaaaagt

SEQ ID NO: 230729 - DNA, 19 bp, Homo sapiens
  siRNA target sequence for RBAF600 (NM_020765.1,14120-14138).
ccgacatctggaaaaagtt

SEQ ID NO: 230730 - DNA, 19 bp, Homo sapiens
  siRNA target sequence for RBAF600 (NM_020765.1,14152-14170).
gccttgccatttatcctaa

SEQ ID NO: 230731 - DNA, 19 bp, Homo sapiens
  siRNA target sequence for RBAF600 (NM_020765.1,14201-14219).
ctggcacccaggttctgat

SEQ ID NO: 230732 - DNA, 19 bp, Homo sapiens
  siRNA target sequence for RBAF600 (NM_020765.1,14231-14249).
ccatcccgaacctgcataa

SEQ ID NO: 230733 - DNA, 19 bp, Homo sapiens
  siRNA target sequence for RBAF600 (NM_020765.1,14315-14333).
gggaacaccctgacgtaaa

SEQ ID NO: 230734 - DNA, 19 bp, Homo sapiens
  siRNA target sequence for RBAF600 (NM_020765.1,14317-14335).
gaacaccctgacgtaaaca

SEQ ID NO: 230735 - DNA, 19 bp, Homo sapiens
  siRNA target sequence for RBAF600 (NM_020765.1,14324-14342).
ctgacgtaaacaagaagat

SEQ ID NO: 230736 - DNA, 19 bp, Homo sapiens
  siRNA target sequence for RBAF600 (NM_020765.1,14418-14436).
cctgggcatgacgacaaat

SEQ ID NO: 230737 - DNA, 19 bp, Homo sapiens
  siRNA target sequence for RBAF600 (NM_020765.1,14549-14567).
caaaggtcctgggcattta

SEQ ID NO: 230738 - DNA, 19 bp, Homo sapiens
  siRNA target sequence for RBAF600 (NM_020765.1,14554-14572).
gtcctgggcatttatacct

SEQ ID NO: 230739 - DNA, 19 bp, Homo sapiens
  siRNA target sequence for RBAF600 (NM_020765.1,14637-14655).
cgtgtcccacttcaacatt

SEQ ID NO: 230740 - DNA, 19 bp, Homo sapiens
  siRNA target sequence for RBAF600 (NM_020765.1,14855-14873).
ccacgtatcagctcaacat

SEQ ID NO: 230741 - DNA, 19 bp, Homo sapiens
  siRNA target sequence for RBAF600 (NM_020765.1,14962-14980).
cacctgatcccgtacatca

SEQ ID NO: 230742 - DNA, 19 bp, Homo sapiens
  siRNA target sequence for RBAF600 (NM_020765.1,15017-15035).
caacttcccgagaagagaa

SEQ ID NO: 230743 - DNA, 19 bp, Homo sapiens
  siRNA target sequence for RBAF600 (NM_020765.1,15227-15245).
ccaccaggctgacagataa

SEQ ID NO: 230744 - DNA, 19 bp, Homo sapiens
  siRNA target sequence for RBAF600 (NM_020765.1,15290-15308).
gggccctcgtcgatctcat

SEQ ID NO: 230745 - DNA, 19 bp, Homo sapiens
  siRNA target sequence for RBAF600 (NM_020765.1,15291-15309).
ggccctcgtcgatctcatt

SEQ ID NO: 230746 - DNA, 19 bp, Homo sapiens
  siRNA target sequence for RBAF600 (NM_020765.1,15292-15310).
gccctcgtcgatctcattt

SEQ ID NO: 230747 - DNA, 19 bp, Homo sapiens
  siRNA target sequence for RBAF600 (NM_020765.1,15293-15311).
ccctcgtcgatctcattta

SEQ ID NO: 230748 - DNA, 19 bp, Homo sapiens
  siRNA target sequence for RBAF600 (NM_020765.1,15295-15313).
ctcgtcgatctcatttaca

SEQ ID NO: 230749 - DNA, 19 bp, Homo sapiens
  siRNA target sequence for RBAF600 (NM_020765.1,15298-15316).
gtcgatctcatttacaaca

SEQ ID NO: 230750 - DNA, 19 bp, Homo sapiens
  siRNA target sequence for RBAF600 (NM_020765.1,15304-15322).
ctcatttacaacatgttta

SEQ ID NO: 230751 - DNA, 19 bp, Homo sapiens
  siRNA target sequence for RBAF600 (NM_020765.1,15327-15345).
ggtgcctaccagtaacaca

SEQ ID NO: 230752 - DNA, 19 bp, Homo sapiens
  siRNA target sequence for RBAF600 (NM_020765.1,15412-15430).
gccgacaaagccctgaaaa

SEQ ID NO: 230753 - DNA, 19 bp, Homo sapiens
  siRNA target sequence for RBAF600 (NM_020765.1,15477-15495).
cgatgtggccggtctttta

SEQ ID NO: 230754 - DNA, 19 bp, Homo sapiens
  siRNA target sequence for RBAF600 (NM_020765.1,15478-15496).
gatgtggccggtcttttat

SEQ ID NO: 230755 - DNA, 19 bp, Homo sapiens
  siRNA target sequence for RBAF600 (NM_020765.1,15483-15501).
ggccggtcttttatcagaa

SEQ ID NO: 230756 - DNA, 19 bp, Homo sapiens
  siRNA target sequence for RBAF600 (NM_020765.1,15484-15502).
gccggtcttttatcagaaa

SEQ ID NO: 230757 - DNA, 19 bp, Homo sapiens
  siRNA target sequence for RBAF600 (NM_020765.1,15485-15503).
ccggtcttttatcagaaat

SEQ ID NO: 230758 - DNA, 19 bp, Homo sapiens
  siRNA target sequence for RBAF600 (NM_020765.1,15523-15541).
ctgaaggacctgttgaact

SEQ ID NO: 230759 - DNA, 19 bp, Homo sapiens
  siRNA target sequence for SMURF1 (NM_020429.1,362-380).
gatccgtctgacagtgtta

SEQ ID NO: 230760 - DNA, 19 bp, Homo sapiens
  siRNA target sequence for SMURF1 (NM_020429.1,365-383).
ccgtctgacagtgttatgt

SEQ ID NO: 230761 - DNA, 19 bp, Homo sapiens
  siRNA target sequence for SMURF1 (NM_020429.1,421-439).
ctgacccttttgcaaagat

SEQ ID NO: 230762 - DNA, 19 bp, Homo sapiens
  siRNA target sequence for SMURF1 (NM_020429.1,505-523).
ggaaccagcactatgatct

SEQ ID NO: 230763 - DNA, 19 bp, Homo sapiens
  siRNA target sequence for SMURF1 (NM_020429.1,506-524).
gaaccagcactatgatcta

SEQ ID NO: 230764 - DNA, 19 bp, Homo sapiens
  siRNA target sequence for SMURF1 (NM_020429.1,509-527).
ccagcactatgatctatat

SEQ ID NO: 230765 - DNA, 19 bp, Homo sapiens
  siRNA target sequence for SMURF1 (NM_020429.1,512-530).
gcactatgatctatatgtt

SEQ ID NO: 230766 - DNA, 19 bp, Homo sapiens
  siRNA target sequence for SMURF1 (NM_020429.1,531-549).
gggaaaacggattcgataa

SEQ ID NO: 230767 - DNA, 19 bp, Homo sapiens
  siRNA target sequence for SMURF1 (NM_020429.1,557-575).
cgtgtggaaccataagaaa

SEQ ID NO: 230768 - DNA, 19 bp, Homo sapiens
  siRNA target sequence for SMURF1 (NM_020429.1,653-671).
cggataccagcgtttggat

SEQ ID NO: 230769 - DNA, 19 bp, Homo sapiens
  siRNA target sequence for SMURF1 (NM_020429.1,703-721).
cagttcgtggccagatagt

SEQ ID NO: 230770 - DNA, 19 bp, Homo sapiens
  siRNA target sequence for SMURF1 (NM_020429.1,712-730).
gccagatagtggtcagttt

SEQ ID NO: 230771 - DNA, 19 bp, Homo sapiens
  siRNA target sequence for SMURF1 (NM_020429.1,713-731).
ccagatagtggtcagttta

SEQ ID NO: 230772 - DNA, 19 bp, Homo sapiens
  siRNA target sequence for SMURF1 (NM_020429.1,911-929).
cgtggagtccccaagtcaa

SEQ ID NO: 230773 - DNA, 19 bp, Homo sapiens
  siRNA target sequence for SMURF1 (NM_020429.1,1029-1047).
cccgaaggctacgaacaaa

SEQ ID NO: 230774 - DNA, 19 bp, Homo sapiens
  siRNA target sequence for SMURF1 (NM_020429.1,1031-1049).
cgaaggctacgaacaaaga

SEQ ID NO: 230775 - DNA, 19 bp, Homo sapiens
  siRNA target sequence for SMURF1 (NM_020429.1,1107-1125).
cacgaccccaggataccaa

SEQ ID NO: 230776 - DNA, 19 bp, Homo sapiens
  siRNA target sequence for SMURF1 (NM_020429.1,1156-1174).
cagcttttctatacgaatt

SEQ ID NO: 230777 - DNA, 19 bp, Homo sapiens
  siRNA target sequence for SMURF1 (NM_020429.1,1159-1177).
cttttctatacgaattcct

SEQ ID NO: 230778 - DNA, 19 bp, Homo sapiens
  siRNA target sequence for SMURF1 (NM_020429.1,1282-1300).
ggatatattttgtagatca

SEQ ID NO: 230779 - DNA, 19 bp, Homo sapiens
  siRNA target sequence for SMURF1 (NM_020429.1,1319-1337).
gtttacagacccaaggtta

SEQ ID NO: 230780 - DNA, 19 bp, Homo sapiens
  siRNA target sequence for SMURF1 (NM_020429.1,1330-1348).
caaggttacaccacatcat

SEQ ID NO: 230781 - DNA, 19 bp, Homo sapiens
  siRNA target sequence for SMURF1 (NM_020429.1,1428-1446).
cctgcccagagatacgaaa

SEQ ID NO: 230782 - DNA, 19 bp, Homo sapiens
  siRNA target sequence for SMURF1 (NM_020429.1,1432-1450).
cccagagatacgaaagaga

SEQ ID NO: 230783 - DNA, 19 bp, Homo sapiens
  siRNA target sequence for SMURF1 (NM_020429.1,1433-1451).
ccagagatacgaaagagat

SEQ ID NO: 230784 - DNA, 19 bp, Homo sapiens
  siRNA target sequence for SMURF1 (NM_020429.1,1436-1454).
gagatacgaaagagatcta

SEQ ID NO: 230785 - DNA, 19 bp, Homo sapiens
  siRNA target sequence for SMURF1 (NM_020429.1,1438-1456).
gatacgaaagagatctagt

SEQ ID NO: 230786 - DNA, 19 bp, Homo sapiens
  siRNA target sequence for SMURF1 (NM_020429.1,1551-1569).
gagtcttaccgccagataa

SEQ ID NO: 230787 - DNA, 19 bp, Homo sapiens
  siRNA target sequence for SMURF1 (NM_020429.1,1555-1573).
cttaccgccagataatgaa

SEQ ID NO: 230788 - DNA, 19 bp, Homo sapiens
  siRNA target sequence for SMURF1 (NM_020429.1,1577-1595).
gcgaccgaaagacttgaaa

SEQ ID NO: 230789 - DNA, 19 bp, Homo sapiens
  siRNA target sequence for SMURF1 (NM_020429.1,1578-1596).
cgaccgaaagacttgaaaa

SEQ ID NO: 230790 - DNA, 19 bp, Homo sapiens
  siRNA target sequence for SMURF1 (NM_020429.1,1579-1597).
gaccgaaagacttgaaaaa

SEQ ID NO: 230791 - DNA, 19 bp, Homo sapiens
  siRNA target sequence for SMURF1 (NM_020429.1,1680-1698).
gaaatgctgaatccttatt

SEQ ID NO: 230792 - DNA, 19 bp, Homo sapiens
  siRNA target sequence for SMURF1 (NM_020429.1,1712-1730).
gtattctacggacaatatt

SEQ ID NO: 230793 - DNA, 19 bp, Homo sapiens
  siRNA target sequence for SMURF1 (NM_020429.1,1720-1738).
cggacaatatttacatgtt

SEQ ID NO: 230794 - DNA, 19 bp, Homo sapiens
  siRNA target sequence for SMURF1 (NM_020429.1,1766-1784).
ccccgaccacttgtcttat

SEQ ID NO: 230795 - DNA, 19 bp, Homo sapiens
  siRNA target sequence for SMURF1 (NM_020429.1,1767-1785).
cccgaccacttgtcttatt

SEQ ID NO: 230796 - DNA, 19 bp, Homo sapiens
  siRNA target sequence for SMURF1 (NM_020429.1,1768-1786).
ccgaccacttgtcttattt

SEQ ID NO: 230797 - DNA, 19 bp, Homo sapiens
  siRNA target sequence for SMURF1 (NM_020429.1,1914-1932).
gacccagagctgcataaga

SEQ ID NO: 230798 - DNA, 19 bp, Homo sapiens
  siRNA target sequence for SMURF1 (NM_020429.1,2105-2123).
gtttatgagaggaatcgaa

SEQ ID NO: 230799 - DNA, 19 bp, Homo sapiens
  siRNA target sequence for SMURF1 (NM_020429.1,2116-2134).
gaatcgaagcccagttctt

SEQ ID NO: 230800 - DNA, 19 bp, Homo sapiens
  siRNA target sequence for SMURF1 (NM_020429.1,2220-2238).
ggcctggataaaatagact

SEQ ID NO: 230801 - DNA, 19 bp, Homo sapiens
  siRNA target sequence for SMURF1 (NM_020429.1,2318-2336).
ggagacgttcgatgaagaa

SEQ ID NO: 230802 - DNA, 19 bp, Homo sapiens
  siRNA target sequence for SMURF1 (NM_020429.1,2504-2522).
gatcgacattccaccatat

SEQ ID NO: 230803 - DNA, 19 bp, Homo sapiens
  siRNA target sequence for SMURF1 (NM_020429.1,2508-2526).
gacattccaccatatgagt

SEQ ID NO: 230804 - DNA, 19 bp, Homo sapiens
  siRNA target sequence for SMURF1 (NM_181349.1,1117-1135).
ggataccaagagaccttaa

SEQ ID NO: 230805 - DNA, 19 bp, Homo sapiens
  siRNA target sequence for SMURF2 (NM_022739.2,236-254).
gacagtactctgtgcaaaa

SEQ ID NO: 230806 - DNA, 19 bp, Homo sapiens
  siRNA target sequence for SMURF2 (NM_022739.2,541-559).
gcaaactcgggccaaatga

SEQ ID NO: 230807 - DNA, 19 bp, Homo sapiens
  siRNA target sequence for SMURF2 (NM_022739.2,549-567).
gggccaaatgacaatgata

SEQ ID NO: 230808 - DNA, 19 bp, Homo sapiens
  siRNA target sequence for SMURF2 (NM_022739.2,568-586).
cagttagaggacagatagt

SEQ ID NO: 230809 - DNA, 19 bp, Homo sapiens
  siRNA target sequence for SMURF2 (NM_022739.2,577-595).
gacagatagtagtaagtct

SEQ ID NO: 230810 - DNA, 19 bp, Homo sapiens
  siRNA target sequence for SMURF2 (NM_022739.2,633-651).
gtggactgcagtcgtttat

SEQ ID NO: 230811 - DNA, 19 bp, Homo sapiens
  siRNA target sequence for SMURF2 (NM_022739.2,640-658).
gcagtcgtttatttgataa

SEQ ID NO: 230812 - DNA, 19 bp, Homo sapiens
  siRNA target sequence for SMURF2 (NM_022739.2,643-661).
gtcgtttatttgataacga

SEQ ID NO: 230813 - DNA, 19 bp, Homo sapiens
  siRNA target sequence for SMURF2 (NM_022739.2,645-663).
cgtttatttgataacgatt

SEQ ID NO: 230814 - DNA, 19 bp, Homo sapiens
  siRNA target sequence for SMURF2 (NM_022739.2,646-664).
gtttatttgataacgattt

SEQ ID NO: 230815 - DNA, 19 bp, Homo sapiens
  siRNA target sequence for SMURF2 (NM_022739.2,707-725).
ccagtatctaaaccatata

SEQ ID NO: 230816 - DNA, 19 bp, Homo sapiens
  siRNA target sequence for SMURF2 (NM_022739.2,714-732).
ctaaaccatataacaagaa

SEQ ID NO: 230817 - DNA, 19 bp, Homo sapiens
  siRNA target sequence for SMURF2 (NM_022739.2,756-774).
cgaccggcatccgaatatt

SEQ ID NO: 230818 - DNA, 19 bp, Homo sapiens
  siRNA target sequence for SMURF2 (NM_022739.2,759-777).
ccggcatccgaatattcta

SEQ ID NO: 230819 - DNA, 19 bp, Homo sapiens
  siRNA target sequence for SMURF2 (NM_022739.2,887-905).
caggtcacaacgacataga

SEQ ID NO: 230820 - DNA, 19 bp, Homo sapiens
  siRNA target sequence for SMURF2 (NM_022739.2,889-907).
ggtcacaacgacatagaaa

SEQ ID NO: 230821 - DNA, 19 bp, Homo sapiens
  siRNA target sequence for SMURF2 (NM_022739.2,890-908).
gtcacaacgacatagaaat

SEQ ID NO: 230822 - DNA, 19 bp, Homo sapiens
  siRNA target sequence for SMURF2 (NM_022739.2,897-915).
cgacatagaaattacatga

SEQ ID NO: 230823 - DNA, 19 bp, Homo sapiens
  siRNA target sequence for SMURF2 (NM_022739.2,975-993).
caacaaggccaggtgtatt

SEQ ID NO: 230824 - DNA, 19 bp, Homo sapiens
  siRNA target sequence for SMURF2 (NM_022739.2,1045-1063).
gggatcttagcaacatcaa

SEQ ID NO: 230825 - DNA, 19 bp, Homo sapiens
  siRNA target sequence for SMURF2 (NM_022739.2,1092-1110).
ggatgggagatccgtaata

SEQ ID NO: 230826 - DNA, 19 bp, Homo sapiens
  siRNA target sequence for SMURF2 (NM_022739.2,1111-1129).
cggcaacaggcagagttta

SEQ ID NO: 230827 - DNA, 19 bp, Homo sapiens
  siRNA target sequence for SMURF2 (NM_022739.2,1171-1189).
ctcggctgtctgctaactt

SEQ ID NO: 230828 - DNA, 19 bp, Homo sapiens
  siRNA target sequence for SMURF2 (NM_022739.2,1176-1194).
ctgtctgctaacttgcatt

SEQ ID NO: 230829 - DNA, 19 bp, Homo sapiens
  siRNA target sequence for SMURF2 (NM_022739.2,1180-1198).
ctgctaacttgcatttagt

SEQ ID NO: 230830 - DNA, 19 bp, Homo sapiens
  siRNA target sequence for SMURF2 (NM_022739.2,1182-1200).
gctaacttgcatttagttt

SEQ ID NO: 230831 - DNA, 19 bp, Homo sapiens
  siRNA target sequence for SMURF2 (NM_022739.2,1183-1201).
ctaacttgcatttagtttt

SEQ ID NO: 230832 - DNA, 19 bp, Homo sapiens
  siRNA target sequence for SMURF2 (NM_022739.2,1236-1254).
cagcaagtggtatcgttat

SEQ ID NO: 230833 - DNA, 19 bp, Homo sapiens
  siRNA target sequence for SMURF2 (NM_022739.2,1376-1394).
ggtttccagggaagagatt

SEQ ID NO: 230834 - DNA, 19 bp, Homo sapiens
  siRNA target sequence for SMURF2 (NM_022739.2,1377-1395).
gtttccagggaagagattt

SEQ ID NO: 230835 - DNA, 19 bp, Homo sapiens
  siRNA target sequence for SMURF2 (NM_022739.2,1501-1519).
ccagggaatggttgtatct

SEQ ID NO: 230836 - DNA, 19 bp, Homo sapiens
  siRNA target sequence for SMURF2 (NM_022739.2,1504-1522).
gggaatggttgtatctctt

SEQ ID NO: 230837 - DNA, 19 bp, Homo sapiens
  siRNA target sequence for SMURF2 (NM_022739.2,1608-1626).
gcagttaatccggaacatt

SEQ ID NO: 230838 - DNA, 19 bp, Homo sapiens
  siRNA target sequence for SMURF2 (NM_022739.2,1609-1627).
cagttaatccggaacattt

SEQ ID NO: 230839 - DNA, 19 bp, Homo sapiens
  siRNA target sequence for SMURF2 (NM_022739.2,1611-1629).
gttaatccggaacatttat

SEQ ID NO: 230840 - DNA, 19 bp, Homo sapiens
  siRNA target sequence for SMURF2 (NM_022739.2,1637-1655).
ccactttgttggacgaata

SEQ ID NO: 230841 - DNA, 19 bp, Homo sapiens
  siRNA target sequence for SMURF2 (NM_022739.2,1638-1656).
cactttgttggacgaataa

SEQ ID NO: 230842 - DNA, 19 bp, Homo sapiens
  siRNA target sequence for SMURF2 (NM_022739.2,1658-1676).
gggaatggctgtgtttcat

SEQ ID NO: 230843 - DNA, 19 bp, Homo sapiens
  siRNA target sequence for SMURF2 (NM_022739.2,1668-1686).
gtgtttcatggacattata

SEQ ID NO: 230844 - DNA, 19 bp, Homo sapiens
  siRNA target sequence for SMURF2 (NM_022739.2,1725-1743).
cttgggaagtcaattacct

SEQ ID NO: 230845 - DNA, 19 bp, Homo sapiens
  siRNA target sequence for SMURF2 (NM_022739.2,1767-1785).
ccggatcttcacaacagtt

SEQ ID NO: 230846 - DNA, 19 bp, Homo sapiens
  siRNA target sequence for SMURF2 (NM_022739.2,1781-1799).
cagtttagtgtggatactt

SEQ ID NO: 230847 - DNA, 19 bp, Homo sapiens
  siRNA target sequence for SMURF2 (NM_022739.2,1790-1808).
gtggatacttgagaatgat

SEQ ID NO: 230848 - DNA, 19 bp, Homo sapiens
  siRNA target sequence for SMURF2 (NM_022739.2,1793-1811).
gatacttgagaatgatatt

SEQ ID NO: 230849 - DNA, 19 bp, Homo sapiens
  siRNA target sequence for SMURF2 (NM_022739.2,1837-1855).
gtgttgaacataatgcata

SEQ ID NO: 230850 - DNA, 19 bp, Homo sapiens
  siRNA target sequence for SMURF2 (NM_022739.2,1891-1909).
gcaaaagtatccctgttaa

SEQ ID NO: 230851 - DNA, 19 bp, Homo sapiens
  siRNA target sequence for SMURF2 (NM_022739.2,1892-1910).
caaaagtatccctgttaat

SEQ ID NO: 230852 - DNA, 19 bp, Homo sapiens
  siRNA target sequence for SMURF2 (NM_022739.2,1963-1981).
gaggcattgaggctcaatt

SEQ ID NO: 230853 - DNA, 19 bp, Homo sapiens
  siRNA target sequence for SMURF2 (NM_022739.2,2049-2067).
gagttagagctcattattt

SEQ ID NO: 230854 - DNA, 19 bp, Homo sapiens
  siRNA target sequence for SMURF2 (NM_022739.2,2051-2069).
gttagagctcattatttgt

SEQ ID NO: 230855 - DNA, 19 bp, Homo sapiens
  siRNA target sequence for SMURF2 (NM_022739.2,2088-2106).
gttaatgactggaaggtaa

SEQ ID NO: 230856 - DNA, 19 bp, Homo sapiens
  siRNA target sequence for SMURF2 (NM_022739.2,2102-2120).
ggtaaacacccggttaaaa

SEQ ID NO: 230857 - DNA, 19 bp, Homo sapiens
  siRNA target sequence for SMURF2 (NM_022739.2,2186-2204).
gcgacgagcaagattgctt

SEQ ID NO: 230858 - DNA, 19 bp, Homo sapiens
  siRNA target sequence for SMURF2 (NM_022739.2,2191-2209).
gagcaagattgcttcagtt

SEQ ID NO: 230859 - DNA, 19 bp, Homo sapiens
  siRNA target sequence for SMURF2 (NM_022739.2,2231-2249).
gcctctgcagggcttcaaa

SEQ ID NO: 230860 - DNA, 19 bp, Homo sapiens
  siRNA target sequence for SMURF2 (NM_022739.2,2235-2253).
ctgcagggcttcaaagcat

SEQ ID NO: 230861 - DNA, 19 bp, Homo sapiens
  siRNA target sequence for SMURF2 (NM_022739.2,2265-2283).
gcaggcccgagactcttta

SEQ ID NO: 230862 - DNA, 19 bp, Homo sapiens
  siRNA target sequence for SMURF2 (NM_022739.2,2268-2286).
ggcccgagactctttacca

SEQ ID NO: 230863 - DNA, 19 bp, Homo sapiens
  siRNA target sequence for SMURF2 (NM_022739.2,2269-2287).
gcccgagactctttaccat

SEQ ID NO: 230864 - DNA, 19 bp, Homo sapiens
  siRNA target sequence for SMURF2 (NM_022739.2,2270-2288).
cccgagactctttaccata

SEQ ID NO: 230865 - DNA, 19 bp, Homo sapiens
  siRNA target sequence for SMURF2 (NM_022739.2,2328-2346).
cacacttgcttcaatcgaa

SEQ ID NO: 230866 - DNA, 19 bp, Homo sapiens
  siRNA target sequence for SMURF2 (NM_022739.2,2332-2350).
cttgcttcaatcgaataga

SEQ ID NO: 230867 - DNA, 19 bp, Homo sapiens
  siRNA target sequence for SMURF2 (NM_022739.2,2335-2353).
gcttcaatcgaatagacat

SEQ ID NO: 230868 - DNA, 19 bp, Homo sapiens
  siRNA target sequence for SMURF2 (NM_022739.2,2349-2367).
gacattccaccctatgaaa

SEQ ID NO: 230869 - DNA, 19 bp, Homo sapiens
  siRNA target sequence for SMURF2 (NM_022739.2,2359-2377).
cctatgaaagctatgaaaa

SEQ ID NO: 230870 - DNA, 19 bp, Homo sapiens
  siRNA target sequence for SMURF2 (NM_022739.2,2390-2408).
gctgctaacagccattgaa

SEQ ID NO: 230871 - DNA, 19 bp, Homo sapiens
  siRNA target sequence for SMURF2 (NM_022739.2,2393-2411).
gctaacagccattgaagaa

SEQ ID NO: 230872 - DNA, 19 bp, Homo sapiens
  siRNA target sequence for SMURF2 (NM_022739.2,2394-2412).
ctaacagccattgaagaaa

SEQ ID NO: 230873 - DNA, 19 bp, Homo sapiens
  siRNA target sequence for TRIP12 (NM_004238.1,114-132).
ccaaccggcctaataacaa

SEQ ID NO: 230874 - DNA, 19 bp, Homo sapiens
  siRNA target sequence for TRIP12 (NM_004238.1,115-133).
caaccggcctaataacaat

SEQ ID NO: 230875 - DNA, 19 bp, Homo sapiens
  siRNA target sequence for TRIP12 (NM_004238.1,254-272).
ccagacagagccaatactt

SEQ ID NO: 230876 - DNA, 19 bp, Homo sapiens
  siRNA target sequence for TRIP12 (NM_004238.1,259-277).
cagagccaatacttcagaa

SEQ ID NO: 230877 - DNA, 19 bp, Homo sapiens
  siRNA target sequence for TRIP12 (NM_004238.1,295-313).
ggtgcctaagaaagacaat

SEQ ID NO: 230878 - DNA, 19 bp, Homo sapiens
  siRNA target sequence for TRIP12 (NM_004238.1,298-316).
gcctaagaaagacaattct

SEQ ID NO: 230879 - DNA, 19 bp, Homo sapiens
  siRNA target sequence for TRIP12 (NM_004238.1,335-353).
gctagtccagactacaaca

SEQ ID NO: 230880 - DNA, 19 bp, Homo sapiens
  siRNA target sequence for TRIP12 (NM_004238.1,346-364).
ctacaacaggaccaattct

SEQ ID NO: 230881 - DNA, 19 bp, Homo sapiens
  siRNA target sequence for TRIP12 (NM_004238.1,389-407).
gcacttcagcatactgaat

SEQ ID NO: 230882 - DNA, 19 bp, Homo sapiens
  siRNA target sequence for TRIP12 (NM_004238.1,420-438).
caaataagccacatagtaa

SEQ ID NO: 230883 - DNA, 19 bp, Homo sapiens
  siRNA target sequence for TRIP12 (NM_004238.1,428-446).
ccacatagtaagtcaaaga

SEQ ID NO: 230884 - DNA, 19 bp, Homo sapiens
  siRNA target sequence for TRIP12 (NM_004238.1,535-553).
cggttcacggagtcagaaa

SEQ ID NO: 230885 - DNA, 19 bp, Homo sapiens
  siRNA target sequence for TRIP12 (NM_004238.1,536-554).
ggttcacggagtcagaaaa

SEQ ID NO: 230886 - DNA, 19 bp, Homo sapiens
  siRNA target sequence for TRIP12 (NM_004238.1,587-605).
ggctccgggtctgaatcaa

SEQ ID NO: 230887 - DNA, 19 bp, Homo sapiens
  siRNA target sequence for TRIP12 (NM_004238.1,589-607).
ctccgggtctgaatcaact

SEQ ID NO: 230888 - DNA, 19 bp, Homo sapiens
  siRNA target sequence for TRIP12 (NM_004238.1,617-635).
gagagatctgcgaaaccta

SEQ ID NO: 230889 - DNA, 19 bp, Homo sapiens
  siRNA target sequence for TRIP12 (NM_004238.1,870-888).
ctggtggctcttcaaaatt

SEQ ID NO: 230890 - DNA, 19 bp, Homo sapiens
  siRNA target sequence for TRIP12 (NM_004238.1,875-893).
ggctcttcaaaatttgatt

SEQ ID NO: 230891 - DNA, 19 bp, Homo sapiens
  siRNA target sequence for TRIP12 (NM_004238.1,900-918).
ctcgtttcagccctaaagt

SEQ ID NO: 230892 - DNA, 19 bp, Homo sapiens
  siRNA target sequence for TRIP12 (NM_004238.1,912-930).
ctaaagttagccttcctaa

SEQ ID NO: 230893 - DNA, 19 bp, Homo sapiens
  siRNA target sequence for TRIP12 (NM_004238.1,997-1015).
ggccaaattagcaagttta

SEQ ID NO: 230894 - DNA, 19 bp, Homo sapiens
  siRNA target sequence for TRIP12 (NM_004238.1,998-1016).
gccaaattagcaagtttaa

SEQ ID NO: 230895 - DNA, 19 bp, Homo sapiens
  siRNA target sequence for TRIP12 (NM_004238.1,1052-1070).
gctgagctccccagtttga

SEQ ID NO: 230896 - DNA, 19 bp, Homo sapiens
  siRNA target sequence for TRIP12 (NM_004238.1,1073-1091).
cggagcacacgccaaaaga

SEQ ID NO: 230897 - DNA, 19 bp, Homo sapiens
  siRNA target sequence for TRIP12 (NM_004238.1,1195-1213).
ccaggaggcagtaaattct

SEQ ID NO: 230898 - DNA, 19 bp, Homo sapiens
  siRNA target sequence for TRIP12 (NM_004238.1,1196-1214).
caggaggcagtaaattctt

SEQ ID NO: 230899 - DNA, 19 bp, Homo sapiens
  siRNA target sequence for TRIP12 (NM_004238.1,1300-1318).
cgagatgggacgtttgcaa

SEQ ID NO: 230900 - DNA, 19 bp, Homo sapiens
  siRNA target sequence for TRIP12 (NM_004238.1,1308-1326).
gacgtttgcaagctttgtt

SEQ ID NO: 230901 - DNA, 19 bp, Homo sapiens
  siRNA target sequence for TRIP12 (NM_004238.1,1371-1389).
ctcggatgtcacagctttt

SEQ ID NO: 230902 - DNA, 19 bp, Homo sapiens
  siRNA target sequence for TRIP12 (NM_004238.1,1560-1578).
ctttgattacgttacttca

SEQ ID NO: 230903 - DNA, 19 bp, Homo sapiens
  siRNA target sequence for TRIP12 (NM_004238.1,1574-1592).
cttcagatggagcacaatt

SEQ ID NO: 230904 - DNA, 19 bp, Homo sapiens
  siRNA target sequence for TRIP12 (NM_004238.1,1583-1601).
gagcacaattttgatatta

SEQ ID NO: 230905 - DNA, 19 bp, Homo sapiens
  siRNA target sequence for TRIP12 (NM_004238.1,1610-1628).
gcttgtcgagccttaacat

SEQ ID NO: 230906 - DNA, 19 bp, Homo sapiens
  siRNA target sequence for TRIP12 (NM_004238.1,1611-1629).
cttgtcgagccttaacata

SEQ ID NO: 230907 - DNA, 19 bp, Homo sapiens
  siRNA target sequence for TRIP12 (NM_004238.1,1614-1632).
gtcgagccttaacatacat

SEQ ID NO: 230908 - DNA, 19 bp, Homo sapiens
  siRNA target sequence for TRIP12 (NM_004238.1,1616-1634).
cgagccttaacatacatga

SEQ ID NO: 230909 - DNA, 19 bp, Homo sapiens
  siRNA target sequence for TRIP12 (NM_004238.1,1753-1771).
gttgtcacggagacatagt

SEQ ID NO: 230910 - DNA, 19 bp, Homo sapiens
  siRNA target sequence for TRIP12 (NM_004238.1,1756-1774).
gtcacggagacatagtaaa

SEQ ID NO: 230911 - DNA, 19 bp, Homo sapiens
  siRNA target sequence for TRIP12 (NM_004238.1,1866-1884).
ctaattgctgccagagtat

SEQ ID NO: 230912 - DNA, 19 bp, Homo sapiens
  siRNA target sequence for TRIP12 (NM_004238.1,1879-1897).
gagtatcacgccagatgaa

SEQ ID NO: 230913 - DNA, 19 bp, Homo sapiens
  siRNA target sequence for TRIP12 (NM_004238.1,1881-1899).
gtatcacgccagatgaatt

SEQ ID NO: 230914 - DNA, 19 bp, Homo sapiens
  siRNA target sequence for TRIP12 (NM_004238.1,1913-1931).
gattcactcccattgctaa

SEQ ID NO: 230915 - DNA, 19 bp, Homo sapiens
  siRNA target sequence for TRIP12 (NM_004238.1,1938-1956).
ggctaacacatcaggataa

SEQ ID NO: 230916 - DNA, 19 bp, Homo sapiens
  siRNA target sequence for TRIP12 (NM_004238.1,1939-1957).
gctaacacatcaggataaa

SEQ ID NO: 230917 - DNA, 19 bp, Homo sapiens
  siRNA target sequence for TRIP12 (NM_004238.1,1989-2007).
cacgcctagtggacaactt

SEQ ID NO: 230918 - DNA, 19 bp, Homo sapiens
  siRNA target sequence for TRIP12 (NM_004238.1,2103-2121).
ctgggatgtttataatggt

SEQ ID NO: 230919 - DNA, 19 bp, Homo sapiens
  siRNA target sequence for TRIP12 (NM_004238.1,2145-2163).
gttccaactgtccaacttt

SEQ ID NO: 230920 - DNA, 19 bp, Homo sapiens
  siRNA target sequence for TRIP12 (NM_004238.1,2157-2175).
caactttagctgttcaact

SEQ ID NO: 230921 - DNA, 19 bp, Homo sapiens
  siRNA target sequence for TRIP12 (NM_004238.1,2238-2256).
gtcaggaacagattgatct

SEQ ID NO: 230922 - DNA, 19 bp, Homo sapiens
  siRNA target sequence for TRIP12 (NM_004238.1,2271-2289).
ctcaagagttgtatgaact

SEQ ID NO: 230923 - DNA, 19 bp, Homo sapiens
  siRNA target sequence for TRIP12 (NM_004238.1,2295-2313).
ctctgatttgtgaacttat

SEQ ID NO: 230924 - DNA, 19 bp, Homo sapiens
  siRNA target sequence for TRIP12 (NM_004238.1,2304-2322).
gtgaacttatgccatgttt

SEQ ID NO: 230925 - DNA, 19 bp, Homo sapiens
  siRNA target sequence for TRIP12 (NM_004238.1,2333-2351).
ggcatttttgcagttgata

SEQ ID NO: 230926 - DNA, 19 bp, Homo sapiens
  siRNA target sequence for TRIP12 (NM_004238.1,2417-2435).
ggcctctggcatccatata

SEQ ID NO: 230927 - DNA, 19 bp, Homo sapiens
  siRNA target sequence for TRIP12 (NM_004238.1,2429-2447).
ccatataacaggattgaca

SEQ ID NO: 230928 - DNA, 19 bp, Homo sapiens
  siRNA target sequence for TRIP12 (NM_004238.1,2448-2466).
gccggatcattgagcaaat

SEQ ID NO: 230929 - DNA, 19 bp, Homo sapiens
  siRNA target sequence for TRIP12 (NM_004238.1,2450-2468).
cggatcattgagcaaatca

SEQ ID NO: 230930 - DNA, 19 bp, Homo sapiens
  siRNA target sequence for TRIP12 (NM_004238.1,2452-2470).
gatcattgagcaaatcaat

SEQ ID NO: 230931 - DNA, 19 bp, Homo sapiens
  siRNA target sequence for TRIP12 (NM_004238.1,2492-2510).
gccattcagagaaaaccta

SEQ ID NO: 230932 - DNA, 19 bp, Homo sapiens
  siRNA target sequence for TRIP12 (NM_004238.1,2513-2531).
ccgttagccaatagtaaca

SEQ ID NO: 230933 - DNA, 19 bp, Homo sapiens
  siRNA target sequence for TRIP12 (NM_004238.1,2515-2533).
gttagccaatagtaacact

SEQ ID NO: 230934 - DNA, 19 bp, Homo sapiens
  siRNA target sequence for TRIP12 (NM_004238.1,2535-2553).
gtggatattcagagtcaaa

SEQ ID NO: 230935 - DNA, 19 bp, Homo sapiens
  siRNA target sequence for TRIP12 (NM_004238.1,2564-2582).
gctcgagcacagcttatga

SEQ ID NO: 230936 - DNA, 19 bp, Homo sapiens
  siRNA target sequence for TRIP12 (NM_004238.1,2565-2583).
ctcgagcacagcttatgaa

SEQ ID NO: 230937 - DNA, 19 bp, Homo sapiens
  siRNA target sequence for TRIP12 (NM_004238.1,2593-2611).
ggaactggctaagtctttt

SEQ ID NO: 230938 - DNA, 19 bp, Homo sapiens
  siRNA target sequence for TRIP12 (NM_004238.1,2663-2681).
cctgcggtcagacataagt

SEQ ID NO: 230939 - DNA, 19 bp, Homo sapiens
  siRNA target sequence for TRIP12 (NM_004238.1,2680-2698).
gtgccttagagcaattctt

SEQ ID NO: 230940 - DNA, 19 bp, Homo sapiens
  siRNA target sequence for TRIP12 (NM_004238.1,2688-2706).
gagcaattcttaggataat

SEQ ID NO: 230941 - DNA, 19 bp, Homo sapiens
  siRNA target sequence for TRIP12 (NM_004238.1,2715-2733).
cggatgctgaacttctgaa

SEQ ID NO: 230942 - DNA, 19 bp, Homo sapiens
  siRNA target sequence for TRIP12 (NM_004238.1,2756-2774).
gtttcaagtcacattgctt

SEQ ID NO: 230943 - DNA, 19 bp, Homo sapiens
  siRNA target sequence for TRIP12 (NM_004238.1,2787-2805).
gccaagacctgaagatagt

SEQ ID NO: 230944 - DNA, 19 bp, Homo sapiens
  siRNA target sequence for TRIP12 (NM_004238.1,2788-2806).
ccaagacctgaagatagta

SEQ ID NO: 230945 - DNA, 19 bp, Homo sapiens
  siRNA target sequence for TRIP12 (NM_004238.1,2839-2857).
gcagaagttacctgatatt

SEQ ID NO: 230946 - DNA, 19 bp, Homo sapiens
  siRNA target sequence for TRIP12 (NM_004238.1,2845-2863).
gttacctgatatttttagt

SEQ ID NO: 230947 - DNA, 19 bp, Homo sapiens
  siRNA target sequence for TRIP12 (NM_004238.1,2910-2928).
cagaatcagagtctttgtt

SEQ ID NO: 230948 - DNA, 19 bp, Homo sapiens
  siRNA target sequence for TRIP12 (NM_004238.1,3053-3071).
cacagcagggatgattctt

SEQ ID NO: 230949 - DNA, 19 bp, Homo sapiens
  siRNA target sequence for TRIP12 (NM_004238.1,3055-3073).
cagcagggatgattcttta

SEQ ID NO: 230950 - DNA, 19 bp, Homo sapiens
  siRNA target sequence for TRIP12 (NM_004238.1,3057-3075).
gcagggatgattctttaga

SEQ ID NO: 230951 - DNA, 19 bp, Homo sapiens
  siRNA target sequence for TRIP12 (NM_004238.1,3079-3097).
cagccctcaaggtcgatta

SEQ ID NO: 230952 - DNA, 19 bp, Homo sapiens
  siRNA target sequence for TRIP12 (NM_004238.1,3082-3100).
ccctcaaggtcgattaagt

SEQ ID NO: 230953 - DNA, 19 bp, Homo sapiens
  siRNA target sequence for TRIP12 (NM_004238.1,3084-3102).
ctcaaggtcgattaagtga

SEQ ID NO: 230954 - DNA, 19 bp, Homo sapiens
  siRNA target sequence for TRIP12 (NM_004238.1,3090-3108).
gtcgattaagtgatgttct

SEQ ID NO: 230955 - DNA, 19 bp, Homo sapiens
  siRNA target sequence for TRIP12 (NM_004238.1,3205-3223).
cactactcagtcacctaaa

SEQ ID NO: 230956 - DNA, 19 bp, Homo sapiens
  siRNA target sequence for TRIP12 (NM_004238.1,3346-3364).
ggataccatctccaataat

SEQ ID NO: 230957 - DNA, 19 bp, Homo sapiens
  siRNA target sequence for TRIP12 (NM_004238.1,3347-3365).
gataccatctccaataata

SEQ ID NO: 230958 - DNA, 19 bp, Homo sapiens
  siRNA target sequence for TRIP12 (NM_004238.1,3394-3412).
gcaggcacataaatttgta

SEQ ID NO: 230959 - DNA, 19 bp, Homo sapiens
  siRNA target sequence for TRIP12 (NM_004238.1,3410-3428).
gtagaacgttatttcagtt

SEQ ID NO: 230960 - DNA, 19 bp, Homo sapiens
  siRNA target sequence for TRIP12 (NM_004238.1,3480-3498).
gtgctgcaaccgaacaact

SEQ ID NO: 230961 - DNA, 19 bp, Homo sapiens
  siRNA target sequence for TRIP12 (NM_004238.1,3483-3501).
ctgcaaccgaacaactcaa

SEQ ID NO: 230962 - DNA, 19 bp, Homo sapiens
  siRNA target sequence for TRIP12 (NM_004238.1,3519-3537).
gagctgagtgccttgtaga

SEQ ID NO: 230963 - DNA, 19 bp, Homo sapiens
  siRNA target sequence for TRIP12 (NM_004238.1,3521-3539).
gctgagtgccttgtagaaa

SEQ ID NO: 230964 - DNA, 19 bp, Homo sapiens
  siRNA target sequence for TRIP12 (NM_004238.1,3536-3554).
gaaatccgtagcatagtct

SEQ ID NO: 230965 - DNA, 19 bp, Homo sapiens
  siRNA target sequence for TRIP12 (NM_004238.1,3561-3579).
cagatgtttcatcatttga

SEQ ID NO: 230966 - DNA, 19 bp, Homo sapiens
  siRNA target sequence for TRIP12 (NM_004238.1,3584-3602).
caacatagtggatttgtga

SEQ ID NO: 230967 - DNA, 19 bp, Homo sapiens
  siRNA target sequence for TRIP12 (NM_004238.1,3670-3688).
gcgatttcttcatgtattt

SEQ ID NO: 230968 - DNA, 19 bp, Homo sapiens
  siRNA target sequence for TRIP12 (NM_004238.1,3730-3748).
ggaaccagtgggtaatgca

SEQ ID NO: 230969 - DNA, 19 bp, Homo sapiens
  siRNA target sequence for TRIP12 (NM_004238.1,3764-3782).
gttcacaagatgaacaact

SEQ ID NO: 230970 - DNA, 19 bp, Homo sapiens
  siRNA target sequence for TRIP12 (NM_004238.1,3785-3803).
ctcagccagatggaacaat

SEQ ID NO: 230971 - DNA, 19 bp, Homo sapiens
  siRNA target sequence for TRIP12 (NM_004238.1,3806-3824).
ccagtcaaagtacatgatt

SEQ ID NO: 230972 - DNA, 19 bp, Homo sapiens
  siRNA target sequence for TRIP12 (NM_004238.1,3867-3885).
gaggatcacaggctttaaa

SEQ ID NO: 230973 - DNA, 19 bp, Homo sapiens
  siRNA target sequence for TRIP12 (NM_004238.1,3958-3976).
gggtggacctgtcaagatt

SEQ ID NO: 230974 - DNA, 19 bp, Homo sapiens
  siRNA target sequence for TRIP12 (NM_004238.1,3960-3978).
gtggacctgtcaagattga

SEQ ID NO: 230975 - DNA, 19 bp, Homo sapiens
  siRNA target sequence for TRIP12 (NM_004238.1,4016-4034).
gtagttagagggtatggaa

SEQ ID NO: 230976 - DNA, 19 bp, Homo sapiens
  siRNA target sequence for TRIP12 (NM_004238.1,4060-4078).
cgatgacgatggatcagat

SEQ ID NO: 230977 - DNA, 19 bp, Homo sapiens
  siRNA target sequence for TRIP12 (NM_004238.1,4108-4126).
gttcctaaattcaggaaat

SEQ ID NO: 230978 - DNA, 19 bp, Homo sapiens
  siRNA target sequence for TRIP12 (NM_004238.1,4160-4178).
catttgctgccgtataaca

SEQ ID NO: 230979 - DNA, 19 bp, Homo sapiens
  siRNA target sequence for TRIP12 (NM_004238.1,4190-4208).
caggcagtacggcagttta

SEQ ID NO: 230980 - DNA, 19 bp, Homo sapiens
  siRNA target sequence for TRIP12 (NM_004238.1,4192-4210).
ggcagtacggcagtttagt

SEQ ID NO: 230981 - DNA, 19 bp, Homo sapiens
  siRNA target sequence for TRIP12 (NM_004238.1,4194-4212).
cagtacggcagtttagtat

SEQ ID NO: 230982 - DNA, 19 bp, Homo sapiens
  siRNA target sequence for TRIP12 (NM_004238.1,4230-4248).
gagaatccacagatgatga

SEQ ID NO: 230983 - DNA, 19 bp, Homo sapiens
  siRNA target sequence for TRIP12 (NM_004238.1,4278-4296).
ggacaaagactcatacaat

SEQ ID NO: 230984 - DNA, 19 bp, Homo sapiens
  siRNA target sequence for TRIP12 (NM_004238.1,4279-4297).
gacaaagactcatacaata

SEQ ID NO: 230985 - DNA, 19 bp, Homo sapiens
  siRNA target sequence for TRIP12 (NM_004238.1,4285-4303).
gactcatacaatatggtat

SEQ ID NO: 230986 - DNA, 19 bp, Homo sapiens
  siRNA target sequence for TRIP12 (NM_004238.1,4367-4385).
caaacagctccaacgaaaa

SEQ ID NO: 230987 - DNA, 19 bp, Homo sapiens
  siRNA target sequence for TRIP12 (NM_004238.1,4386-4404).
cttcccctagaaatgcaaa

SEQ ID NO: 230988 - DNA, 19 bp, Homo sapiens
  siRNA target sequence for TRIP12 (NM_004238.1,4433-4451).
gtgtgcccatcagtatcaa

SEQ ID NO: 230989 - DNA, 19 bp, Homo sapiens
  siRNA target sequence for TRIP12 (NM_004238.1,4439-4457).
ccatcagtatcaaatcctt

SEQ ID NO: 230990 - DNA, 19 bp, Homo sapiens
  siRNA target sequence for TRIP12 (NM_004238.1,4443-4461).
cagtatcaaatcctttaga

SEQ ID NO: 230991 - DNA, 19 bp, Homo sapiens
  siRNA target sequence for TRIP12 (NM_004238.1,4476-4494).
ccacaccacctgaaaatat

SEQ ID NO: 230992 - DNA, 19 bp, Homo sapiens
  siRNA target sequence for TRIP12 (NM_004238.1,4477-4495).
cacaccacctgaaaatata

SEQ ID NO: 230993 - DNA, 19 bp, Homo sapiens
  siRNA target sequence for TRIP12 (NM_004238.1,4522-4540).
gatccttcttttaagagtt

SEQ ID NO: 230994 - DNA, 19 bp, Homo sapiens
  siRNA target sequence for TRIP12 (NM_004238.1,4554-4572).
gtcgatactggtattactt

SEQ ID NO: 230995 - DNA, 19 bp, Homo sapiens
  siRNA target sequence for TRIP12 (NM_004238.1,4556-4574).
cgatactggtattacttgt

SEQ ID NO: 230996 - DNA, 19 bp, Homo sapiens
  siRNA target sequence for TRIP12 (NM_004238.1,4561-4579).
ctggtattacttgtatgat

SEQ ID NO: 230997 - DNA, 19 bp, Homo sapiens
  siRNA target sequence for TRIP12 (NM_004238.1,4563-4581).
ggtattacttgtatgataa

SEQ ID NO: 230998 - DNA, 19 bp, Homo sapiens
  siRNA target sequence for TRIP12 (NM_004238.1,4564-4582).
gtattacttgtatgataat

SEQ ID NO: 230999 - DNA, 19 bp, Homo sapiens
  siRNA target sequence for TRIP12 (NM_004238.1,4604-4622).
ccaactagtgaatttatta

SEQ ID NO: 231000 - DNA, 19 bp, Homo sapiens
  siRNA target sequence for TRIP12 (NM_004238.1,4611-4629).
gtgaatttattaacagtaa

SEQ ID NO: 231001 - DNA, 19 bp, Homo sapiens
  siRNA target sequence for TRIP12 (NM_004238.1,4613-4631).
gaatttattaacagtaagt

SEQ ID NO: 231002 - DNA, 19 bp, Homo sapiens
  siRNA target sequence for TRIP12 (NM_004238.1,4630-4648).
gttaacagcaaaagcaaat

SEQ ID NO: 231003 - DNA, 19 bp, Homo sapiens
  siRNA target sequence for TRIP12 (NM_004238.1,4651-4669).
gcaacttcaagatccttta

SEQ ID NO: 231004 - DNA, 19 bp, Homo sapiens
  siRNA target sequence for TRIP12 (NM_004238.1,4658-4676).
caagatcctttagtaatca

SEQ ID NO: 231005 - DNA, 19 bp, Homo sapiens
  siRNA target sequence for TRIP12 (NM_004238.1,4699-4717).
gcttactgagctaggaaaa

SEQ ID NO: 231006 - DNA, 19 bp, Homo sapiens
  siRNA target sequence for TRIP12 (NM_004238.1,4747-4765).
ccggcaaatgcttttttat

SEQ ID NO: 231007 - DNA, 19 bp, Homo sapiens
  siRNA target sequence for TRIP12 (NM_004238.1,4784-4802).
gaccgagcaatgcaaagat

SEQ ID NO: 231008 - DNA, 19 bp, Homo sapiens
  siRNA target sequence for TRIP12 (NM_004238.1,4786-4804).
ccgagcaatgcaaagatta

SEQ ID NO: 231009 - DNA, 19 bp, Homo sapiens
  siRNA target sequence for TRIP12 (NM_004238.1,4825-4843).
caaccagtctgattctcaa

SEQ ID NO: 231010 - DNA, 19 bp, Homo sapiens
  siRNA target sequence for TRIP12 (NM_004238.1,4848-4866).
gcagagttgcacctagatt

SEQ ID NO: 231011 - DNA, 19 bp, Homo sapiens
  siRNA target sequence for TRIP12 (NM_004238.1,4853-4871).
gttgcacctagattggata

SEQ ID NO: 231012 - DNA, 19 bp, Homo sapiens
  siRNA target sequence for TRIP12 (NM_004238.1,4856-4874).
gcacctagattggatagaa

SEQ ID NO: 231013 - DNA, 19 bp, Homo sapiens
  siRNA target sequence for TRIP12 (NM_004238.1,4857-4875).
cacctagattggatagaaa

SEQ ID NO: 231014 - DNA, 19 bp, Homo sapiens
  siRNA target sequence for TRIP12 (NM_004238.1,4941-4959).
gctcacgggccatgttaga

SEQ ID NO: 231015 - DNA, 19 bp, Homo sapiens
  siRNA target sequence for TRIP12 (NM_004238.1,4942-4960).
ctcacgggccatgttagaa

SEQ ID NO: 231016 - DNA, 19 bp, Homo sapiens
  siRNA target sequence for TRIP12 (NM_004238.1,4994-5012).
gggcctacactggagtttt

SEQ ID NO: 231017 - DNA, 19 bp, Homo sapiens
  siRNA target sequence for TRIP12 (NM_004238.1,4995-5013).
ggcctacactggagtttta

SEQ ID NO: 231018 - DNA, 19 bp, Homo sapiens
  siRNA target sequence for TRIP12 (NM_004238.1,5006-5024).
gagttttatgcgcttgtat

SEQ ID NO: 231019 - DNA, 19 bp, Homo sapiens
  siRNA target sequence for TRIP12 (NM_004238.1,5063-5081).
ggtgaagaagtaactctta

SEQ ID NO: 231020 - DNA, 19 bp, Homo sapiens
  siRNA target sequence for TRIP12 (NM_004238.1,5072-5090).
gtaactcttagcaatccaa

SEQ ID NO: 231021 - DNA, 19 bp, Homo sapiens
  siRNA target sequence for TRIP12 (NM_004238.1,5099-5117).
caagaagggaccaagtata

SEQ ID NO: 231022 - DNA, 19 bp, Homo sapiens
  siRNA target sequence for TRIP12 (NM_004238.1,5171-5189).
gctcatatcgcaaaggtta

SEQ ID NO: 231023 - DNA, 19 bp, Homo sapiens
  siRNA target sequence for TRIP12 (NM_004238.1,5172-5190).
ctcatatcgcaaaggttaa

SEQ ID NO: 231024 - DNA, 19 bp, Homo sapiens
  siRNA target sequence for TRIP12 (NM_004238.1,5174-5192).
catatcgcaaaggttaaga

SEQ ID NO: 231025 - DNA, 19 bp, Homo sapiens
  siRNA target sequence for TRIP12 (NM_004238.1,5180-5198).
gcaaaggttaagatgaagt

SEQ ID NO: 231026 - DNA, 19 bp, Homo sapiens
  siRNA target sequence for TRIP12 (NM_004238.1,5197-5215).
gtttcgcttcttaggaaaa

SEQ ID NO: 231027 - DNA, 19 bp, Homo sapiens
  siRNA target sequence for TRIP12 (NM_004238.1,5223-5241).
ccaaggctatcatggattt

SEQ ID NO: 231028 - DNA, 19 bp, Homo sapiens
  siRNA target sequence for TRIP12 (NM_004238.1,5227-5245).
ggctatcatggatttcaga

SEQ ID NO: 231029 - DNA, 19 bp, Homo sapiens
  siRNA target sequence for TRIP12 (NM_004238.1,5228-5246).
gctatcatggatttcagat

SEQ ID NO: 231030 - DNA, 19 bp, Homo sapiens
  siRNA target sequence for TRIP12 (NM_004238.1,5229-5247).
ctatcatggatttcagatt

SEQ ID NO: 231031 - DNA, 19 bp, Homo sapiens
  siRNA target sequence for TRIP12 (NM_004238.1,5287-5305).
gctacggcaagaaacttca

SEQ ID NO: 231032 - DNA, 19 bp, Homo sapiens
  siRNA target sequence for TRIP12 (NM_004238.1,5304-5322).
cactgacatcacacgattt

SEQ ID NO: 231033 - DNA, 19 bp, Homo sapiens
  siRNA target sequence for TRIP12 (NM_004238.1,5308-5326).
gacatcacacgatttgttt

SEQ ID NO: 231034 - DNA, 19 bp, Homo sapiens
  siRNA target sequence for TRIP12 (NM_004238.1,5310-5328).
catcacacgatttgtttga

SEQ ID NO: 231035 - DNA, 19 bp, Homo sapiens
  siRNA target sequence for TRIP12 (NM_004238.1,5313-5331).
cacacgatttgtttgacat

SEQ ID NO: 231036 - DNA, 19 bp, Homo sapiens
  siRNA target sequence for TRIP12 (NM_004238.1,5339-5357).
gttgtagccagatcagttt

SEQ ID NO: 231037 - DNA, 19 bp, Homo sapiens
  siRNA target sequence for TRIP12 (NM_004238.1,5352-5370).
cagtttatcacctagaaga

SEQ ID NO: 231038 - DNA, 19 bp, Homo sapiens
  siRNA target sequence for TRIP12 (NM_004238.1,5416-5434).
caaagagagtctacagtat

SEQ ID NO: 231039 - DNA, 19 bp, Homo sapiens
  siRNA target sequence for TRIP12 (NM_004238.1,5420-5438).
gagagtctacagtatgcat

SEQ ID NO: 231040 - DNA, 19 bp, Homo sapiens
  siRNA target sequence for TRIP12 (NM_004238.1,5422-5440).
gagtctacagtatgcatta

SEQ ID NO: 231041 - DNA, 19 bp, Homo sapiens
  siRNA target sequence for TRIP12 (NM_004238.1,5424-5442).
gtctacagtatgcattaga

SEQ ID NO: 231042 - DNA, 19 bp, Homo sapiens
  siRNA target sequence for TRIP12 (NM_004238.1,5426-5444).
ctacagtatgcattagaaa

SEQ ID NO: 231043 - DNA, 19 bp, Homo sapiens
  siRNA target sequence for TRIP12 (NM_004238.1,5455-5473).
gaatggctgctcagttgaa

SEQ ID NO: 231044 - DNA, 19 bp, Homo sapiens
  siRNA target sequence for TRIP12 (NM_004238.1,5460-5478).
gctgctcagttgaagatct

SEQ ID NO: 231045 - DNA, 19 bp, Homo sapiens
  siRNA target sequence for TRIP12 (NM_004238.1,5461-5479).
ctgctcagttgaagatcta

SEQ ID NO: 231046 - DNA, 19 bp, Homo sapiens
  siRNA target sequence for TRIP12 (NM_004238.1,5597-5615).
ctaaatgaaggcgtttcta

SEQ ID NO: 231047 - DNA, 19 bp, Homo sapiens
  siRNA target sequence for TRIP12 (NM_004238.1,5607-5625).
gcgtttctaggcaatttga

SEQ ID NO: 231048 - DNA, 19 bp, Homo sapiens
  siRNA target sequence for TRIP12 (NM_004238.1,5608-5626).
cgtttctaggcaatttgat

SEQ ID NO: 231049 - DNA, 19 bp, Homo sapiens
  siRNA target sequence for TRIP12 (NM_004238.1,5613-5631).
ctaggcaatttgattcgtt

SEQ ID NO: 231050 - DNA, 19 bp, Homo sapiens
  siRNA target sequence for TRIP12 (NM_004238.1,5704-5722).
cctttgtggcagtaaagca

SEQ ID NO: 231051 - DNA, 19 bp, Homo sapiens
  siRNA target sequence for TRIP12 (NM_004238.1,5761-5779).
gcctgatcatggttatact

SEQ ID NO: 231052 - DNA, 19 bp, Homo sapiens
  siRNA target sequence for TRIP12 (NM_004238.1,5787-5805).
gtcgggctgtgaagttttt

SEQ ID NO: 231053 - DNA, 19 bp, Homo sapiens
  siRNA target sequence for TRIP12 (NM_004238.1,5924-5942).
gtccgaaagacgtttgaat

SEQ ID NO: 231054 - DNA, 19 bp, Homo sapiens
  siRNA target sequence for TRIP12 (NM_004238.1,5926-5944).
ccgaaagacgtttgaatca

SEQ ID NO: 231055 - DNA, 19 bp, Homo sapiens
  siRNA target sequence for TRIP12 (NM_004238.1,5927-5945).
cgaaagacgtttgaatcaa

SEQ ID NO: 231056 - DNA, 19 bp, Homo sapiens
  siRNA target sequence for TRIP12 (NM_004238.1,5985-6003).
gtgtgaactatcttaagtt

SEQ ID NO: 231057 - DNA, 19 bp, Homo sapiens
  siRNA target sequence for TRIP12 (NM_004238.1,6004-6022).
gccggactattcaagcatt

SEQ ID NO: 231058 - DNA, 19 bp, Homo sapiens
  siRNA target sequence for TRIP12 (NM_004238.1,6010-6028).
ctattcaagcattgagata

SEQ ID NO: 231059 - DNA, 19 bp, Homo sapiens
  siRNA target sequence for TRIP12 (NM_004238.1,6031-6049).
gcgtgaaaaactgttgata

SEQ ID NO: 231060 - DNA, 19 bp, Homo sapiens
  siRNA target sequence for TRIP12 (NM_004238.1,6043-6061).
gttgatagcagcaagagaa

SEQ ID NO: 231061 - DNA, 19 bp, Homo sapiens
  siRNA target sequence for TRIP12 (NM_004238.1,6065-6083).
cagcagtcgttccatcttt

SEQ ID NO: 231062 - DNA, 19 bp, Homo sapiens
  siRNA target sequence for UBE2A (NM_003336.2,253-271).
gggctccgtccgagaacaa

SEQ ID NO: 231063 - DNA, 19 bp, Homo sapiens
  siRNA target sequence for UBE2A (NM_003336.2,255-273).
gctccgtccgagaacaaca

SEQ ID NO: 231064 - DNA, 19 bp, Homo sapiens
  siRNA target sequence for UBE2A (NM_003336.2,256-274).
ctccgtccgagaacaacat

SEQ ID NO: 231065 - DNA, 19 bp, Homo sapiens
  siRNA target sequence for UBE2A (NM_003336.2,258-276).
ccgtccgagaacaacataa

SEQ ID NO: 231066 - DNA, 19 bp, Homo sapiens
  siRNA target sequence for UBE2A (NM_003336.2,316-334).
cgtttgaggatggaacatt

SEQ ID NO: 231067 - DNA, 19 bp, Homo sapiens
  siRNA target sequence for UBE2A (NM_003336.2,317-335).
gtttgaggatggaacattt

SEQ ID NO: 231068 - DNA, 19 bp, Homo sapiens
  siRNA target sequence for UBE2A (NM_003336.2,376-394).
cacctacagttagatttgt

SEQ ID NO: 231069 - DNA, 19 bp, Homo sapiens
  siRNA target sequence for UBE2A (NM_003336.2,378-396).
cctacagttagatttgtct

SEQ ID NO: 231070 - DNA, 19 bp, Homo sapiens
  siRNA target sequence for UBE2A (NM_003336.2,384-402).
gttagatttgtctctaaga

SEQ ID NO: 231071 - DNA, 19 bp, Homo sapiens
  siRNA target sequence for UBE2A (NM_003336.2,424-442).
cagatggtagtatatgtct

SEQ ID NO: 231072 - DNA, 19 bp, Homo sapiens
  siRNA target sequence for UBE2A (NM_003336.2,433-451).
gtatatgtctggacatact

SEQ ID NO: 231073 - DNA, 19 bp, Homo sapiens
  siRNA target sequence for UBE2A (NM_003336.2,477-495).
gatgtgtcttccattctaa

SEQ ID NO: 231074 - DNA, 19 bp, Homo sapiens
  siRNA target sequence for UBE2A (NM_003336.2,480-498).
gtgtcttccattctaacat

SEQ ID NO: 231075 - DNA, 19 bp, Homo sapiens
  siRNA target sequence for UBE2A (NM_003336.2,593-611).
gcgtgtttctgcaatagta

SEQ ID NO: 231076 - DNA, 19 bp, Homo sapiens
  siRNA target sequence for UBE2A (NM_181762.1,313-331).
ccccgtttgaggatgtcta

SEQ ID NO: 231077 - DNA, 19 bp, Homo sapiens
  siRNA target sequence for UBE2A (NM_181762.1,314-332).
cccgtttgaggatgtctat

SEQ ID NO: 231078 - DNA, 19 bp, Homo sapiens
  siRNA target sequence for UBE2B (NM_003337.2,450-468).
ggatttcaagcggttacaa

SEQ ID NO: 231079 - DNA, 19 bp, Homo sapiens
  siRNA target sequence for UBE2B (NM_003337.2,489-507).
cagtggcgcaccatctgaa

SEQ ID NO: 231080 - DNA, 19 bp, Homo sapiens
  siRNA target sequence for UBE2B (NM_003337.2,491-509).
gtggcgcaccatctgaaaa

SEQ ID NO: 231081 - DNA, 19 bp, Homo sapiens
  siRNA target sequence for UBE2B (NM_003337.2,493-511).
ggcgcaccatctgaaaaca

SEQ ID NO: 231082 - DNA, 19 bp, Homo sapiens
  siRNA target sequence for UBE2B (NM_003337.2,494-512).
gcgcaccatctgaaaacaa

SEQ ID NO: 231083 - DNA, 19 bp, Homo sapiens
  siRNA target sequence for UBE2B (NM_003337.2,572-590).
cttttaaactagtaataga

SEQ ID NO: 231084 - DNA, 19 bp, Homo sapiens
  siRNA target sequence for UBE2B (NM_003337.2,616-634).
ccaccaactgttaggtttt

SEQ ID NO: 231085 - DNA, 19 bp, Homo sapiens
  siRNA target sequence for UBE2B (NM_003337.2,617-635).
caccaactgttaggttttt

SEQ ID NO: 231086 - DNA, 19 bp, Homo sapiens
  siRNA target sequence for UBE2B (NM_003337.2,685-703).
gatatccttcagaatcgat

SEQ ID NO: 231087 - DNA, 19 bp, Homo sapiens
  siRNA target sequence for UBE2B (NM_003337.2,718-736).
gatgtatcttctatcttaa

SEQ ID NO: 231088 - DNA, 19 bp, Homo sapiens
  siRNA target sequence for UBE2B (NM_003337.2,721-739).
gtatcttctatcttaacat

SEQ ID NO: 231089 - DNA, 19 bp, Homo sapiens
  siRNA target sequence for UBE2B (NM_003337.2,728-746).
ctatcttaacatcaattca

SEQ ID NO: 231090 - DNA, 19 bp, Homo sapiens
  siRNA target sequence for UBE2B (NM_003337.2,754-772).
ctggatgaaccgaatccta

SEQ ID NO: 231091 - DNA, 19 bp, Homo sapiens
  siRNA target sequence for UBE2B (NM_003337.2,836-854).
gagtttcggccattgttga

SEQ ID NO: 231092 - DNA, 19 bp, Homo sapiens
  siRNA target sequence for UBE2C (NM_007019.2,206-224).
catgatgtctggcgataaa

SEQ ID NO: 231093 - DNA, 19 bp, Homo sapiens
  siRNA target sequence for UBE2C (NM_007019.2,240-258).
cctgaatcagacaaccttt

SEQ ID NO: 231094 - DNA, 19 bp, Homo sapiens
  siRNA target sequence for UBE2C (NM_007019.2,243-261).
gaatcagacaaccttttca

SEQ ID NO: 231095 - DNA, 19 bp, Homo sapiens
  siRNA target sequence for UBE2C (NM_007019.2,283-301).
gagcagctggaacagtata

SEQ ID NO: 231096 - DNA, 19 bp, Homo sapiens
  siRNA target sequence for UBE2C (NM_007019.2,338-356).
cagtggctacccttacaat

SEQ ID NO: 231097 - DNA, 19 bp, Homo sapiens
  siRNA target sequence for UBE2C (NM_007019.2,534-552).
gctgccgagctctggaaaa

SEQ ID NO: 231098 - DNA, 19 bp, Homo sapiens
  siRNA target sequence for UBE2C (NM_181799.1,311-329).
cagaaccagctcaacagtt

SEQ ID NO: 231099 - DNA, 19 bp, Homo sapiens
  siRNA target sequence for UBE2C (NM_181799.1,316-334).
ccagctcaacagtttgtct

SEQ ID NO: 231100 - DNA, 19 bp, Homo sapiens
  siRNA target sequence for UBE2C (NM_181799.1,336-354).
ctgtccggtcccagagaaa

SEQ ID NO: 231101 - DNA, 19 bp, Homo sapiens
  siRNA target sequence for UBE2C (NM_181799.1,338-356).
gtccggtcccagagaaact

SEQ ID NO: 231102 - DNA, 19 bp, Homo sapiens
  siRNA target sequence for UBE2C (NM_181800.1,197-215).
gatgaccctcatggtatat

SEQ ID NO: 231103 - DNA, 19 bp, Homo sapiens
  siRNA target sequence for UBE2C (NM_181800.1,200-218).
gaccctcatggtatatgaa

SEQ ID NO: 231104 - DNA, 19 bp, Homo sapiens
  siRNA target sequence for UBE2C (NM_181803.1,204-222).
ctcatgaacccaacattga

SEQ ID NO: 231105 - DNA, 19 bp, Homo sapiens
  siRNA target sequence for UBE2D1 (NM_003338.3,228-246).
cgctgaagaggattcagaa

SEQ ID NO: 231106 - DNA, 19 bp, Homo sapiens
  siRNA target sequence for UBE2D1 (NM_003338.3,383-401).
gtacattttccgacagatt

SEQ ID NO: 231107 - DNA, 19 bp, Homo sapiens
  siRNA target sequence for UBE2D1 (NM_003338.3,393-411).
cgacagattatccttttaa

SEQ ID NO: 231108 - DNA, 19 bp, Homo sapiens
  siRNA target sequence for UBE2D1 (NM_003338.3,510-528).
ctctgactgtatcaaaagt

SEQ ID NO: 231109 - DNA, 19 bp, Homo sapiens
  siRNA target sequence for UBE2D1 (NM_003338.3,535-553).
gtccatatgttctctactt

SEQ ID NO: 231110 - DNA, 19 bp, Homo sapiens
  siRNA target sequence for UBE2D1 (NM_003338.3,574-592).
ccccttagtaccagatatt

SEQ ID NO: 231111 - DNA, 19 bp, Homo sapiens
  siRNA target sequence for UBE2D1 (NM_003338.3,577-595).
cttagtaccagatattgca

SEQ ID NO: 231112 - DNA, 19 bp, Homo sapiens
  siRNA target sequence for UBE2D1 (NM_003338.3,584-602).
ccagatattgcacaaatct

SEQ ID NO: 231113 - DNA, 19 bp, Homo sapiens
  siRNA target sequence for UBE2D1 (NM_003338.3,587-605).
gatattgcacaaatctata

SEQ ID NO: 231114 - DNA, 19 bp, Homo sapiens
  siRNA target sequence for UBE2D1 (NM_003338.3,625-643).
caacagacatgcaagagaa

SEQ ID NO: 231115 - DNA, 19 bp, Homo sapiens
  siRNA target sequence for UBE2D2 (NM_003339.2,719-737).
ccattggcaagctacaata

SEQ ID NO: 231116 - DNA, 19 bp, Homo sapiens
  siRNA target sequence for UBE2D2 (NM_003339.2,757-775).
cctatcagggtggagtatt

SEQ ID NO: 231117 - DNA, 19 bp, Homo sapiens
  siRNA target sequence for UBE2D2 (NM_003339.2,758-776).
ctatcagggtggagtattt

SEQ ID NO: 231118 - DNA, 19 bp, Homo sapiens
  siRNA target sequence for UBE2D2 (NM_003339.2,902-920).
gtggtctccagcactaact

SEQ ID NO: 231119 - DNA, 19 bp, Homo sapiens
  siRNA target sequence for UBE2D2 (NM_003339.2,905-923).
gtctccagcactaactatt

SEQ ID NO: 231120 - DNA, 19 bp, Homo sapiens
  siRNA target sequence for UBE2D3 (NM_181892.1,1055-1073).
gagaaatacgctatgttgt

SEQ ID NO: 231121 - DNA, 19 bp, Homo sapiens
  siRNA target sequence for UBE2D3 (NM_181893.1,114-132).
ccgaaagtgcctttcaaaa

SEQ ID NO: 231122 - DNA, 19 bp, Homo sapiens
  siRNA target sequence for UBE2E1 (NM_003341.3,234-252).
gcaaaccgagaaagaaaca

SEQ ID NO: 231123 - DNA, 19 bp, Homo sapiens
  siRNA target sequence for UBE2E1 (NM_003341.3,312-330).
caccagcgccaagagaatt

SEQ ID NO: 231124 - DNA, 19 bp, Homo sapiens
  siRNA target sequence for UBE2E1 (NM_003341.3,317-335).
gcgccaagagaattcagaa

SEQ ID NO: 231125 - DNA, 19 bp, Homo sapiens
  siRNA target sequence for UBE2E1 (NM_003341.3,337-355).
gagctggcggacatcactt

SEQ ID NO: 231126 - DNA, 19 bp, Homo sapiens
  siRNA target sequence for UBE2E1 (NM_003341.3,339-357).
gctggcggacatcacttta

SEQ ID NO: 231127 - DNA, 19 bp, Homo sapiens
  siRNA target sequence for UBE2E1 (NM_003341.3,382-400).
ggtcccaaaggcgataaca

SEQ ID NO: 231128 - DNA, 19 bp, Homo sapiens
  siRNA target sequence for UBE2E1 (NM_003341.3,383-401).
gtcccaaaggcgataacat

SEQ ID NO: 231129 - DNA, 19 bp, Homo sapiens
  siRNA target sequence for UBE2E1 (NM_003341.3,385-403).
cccaaaggcgataacatct

SEQ ID NO: 231130 - DNA, 19 bp, Homo sapiens
  siRNA target sequence for UBE2E1 (NM_003341.3,386-404).
ccaaaggcgataacatcta

SEQ ID NO: 231131 - DNA, 19 bp, Homo sapiens
  siRNA target sequence for UBE2E1 (NM_003341.3,387-405).
caaaggcgataacatctat

SEQ ID NO: 231132 - DNA, 19 bp, Homo sapiens
  siRNA target sequence for UBE2E1 (NM_003341.3,455-473).
gtgtattctttctcgatat

SEQ ID NO: 231133 - DNA, 19 bp, Homo sapiens
  siRNA target sequence for UBE2E1 (NM_003341.3,474-492).
cacttttacaccagaatat

SEQ ID NO: 231134 - DNA, 19 bp, Homo sapiens
  siRNA target sequence for UBE2E1 (NM_003341.3,511-529).
gttacatttcggacaagaa

SEQ ID NO: 231135 - DNA, 19 bp, Homo sapiens
  siRNA target sequence for UBE2E1 (NM_003341.3,515-533).
catttcggacaagaatcta

SEQ ID NO: 231136 - DNA, 19 bp, Homo sapiens
  siRNA target sequence for UBE2E1 (NM_003341.3,551-569).
gtcaaggtgttatttgctt

SEQ ID NO: 231137 - DNA, 19 bp, Homo sapiens
  siRNA target sequence for UBE2E1 (NM_003341.3,559-577).
gttatttgcttggacatat

SEQ ID NO: 231138 - DNA, 19 bp, Homo sapiens
  siRNA target sequence for UBE2E1 (NM_003341.3,611-629).
ctaaagtcctcctttctat

SEQ ID NO: 231139 - DNA, 19 bp, Homo sapiens
  siRNA target sequence for UBE2E1 (NM_003341.3,663-681).
ccccttggtgggaagtatt

SEQ ID NO: 231140 - DNA, 19 bp, Homo sapiens
  siRNA target sequence for UBE2G1 (NM_003342.3,397-415).
gacagctggcagaactcaa

SEQ ID NO: 231141 - DNA, 19 bp, Homo sapiens
  siRNA target sequence for UBE2G1 (NM_003342.3,442-460).
caggtttaatagatgacaa

SEQ ID NO: 231142 - DNA, 19 bp, Homo sapiens
  siRNA target sequence for UBE2G1 (NM_003342.3,470-488).
ccgatgggaagtccttatt

SEQ ID NO: 231143 - DNA, 19 bp, Homo sapiens
  siRNA target sequence for UBE2G1 (NM_003342.3,471-489).
cgatgggaagtccttatta

SEQ ID NO: 231144 - DNA, 19 bp, Homo sapiens
  siRNA target sequence for UBE2G1 (NM_003342.3,472-490).
gatgggaagtccttattat

SEQ ID NO: 231145 - DNA, 19 bp, Homo sapiens
  siRNA target sequence for UBE2G1 (NM_003342.3,522-540).
gtttttaaggctcatctta

SEQ ID NO: 231146 - DNA, 19 bp, Homo sapiens
  siRNA target sequence for UBE2G1 (NM_003342.3,598-616).
ggcacccaaatgttgataa

SEQ ID NO: 231147 - DNA, 19 bp, Homo sapiens
  siRNA target sequence for UBE2G1 (NM_003342.3,650-668).
gcctggggaagataagtat

SEQ ID NO: 231148 - DNA, 19 bp, Homo sapiens
  siRNA target sequence for UBE2G1 (NM_003342.3,654-672).
ggggaagataagtatggtt

SEQ ID NO: 231149 - DNA, 19 bp, Homo sapiens
  siRNA target sequence for UBE2G1 (NM_003342.3,655-673).
gggaagataagtatggtta

SEQ ID NO: 231150 - DNA, 19 bp, Homo sapiens
  siRNA target sequence for UBE2G1 (NM_003342.3,743-761).
gctggcagaccctaatgga

SEQ ID NO: 231151 - DNA, 19 bp, Homo sapiens
  siRNA target sequence for UBE2G1 (NM_003342.3,764-782).
ctcacctgctaatgttgat

SEQ ID NO: 231152 - DNA, 19 bp, Homo sapiens
  siRNA target sequence for UBE2G1 (NM_003342.3,777-795).
gttgatgctgcgaaagaat

SEQ ID NO: 231153 - DNA, 19 bp, Homo sapiens
  siRNA target sequence for UBE2G1 (NM_003342.3,831-849).
gttgcccgctgtgtaagaa

SEQ ID NO: 231154 - DNA, 19 bp, Homo sapiens
  siRNA target sequence for UBE2G1 (NM_003342.3,834-852).
gcccgctgtgtaagaaaaa

SEQ ID NO: 231155 - DNA, 19 bp, Homo sapiens
  siRNA target sequence for UBE2G1 (NM_003342.3,853-871).
gccaagagactgcttttga

SEQ ID NO: 231156 - DNA, 19 bp, Homo sapiens
  siRNA target sequence for UBE2G1 (NM_003342.3,855-873).
caagagactgcttttgagt

SEQ ID NO: 231157 - DNA, 19 bp, Homo sapiens
  siRNA target sequence for UBE2G2 (NM_003343.4,158-176).
ccatgaatgaagagaactt

SEQ ID NO: 231158 - DNA, 19 bp, Homo sapiens
  siRNA target sequence for UBE2G2 (NM_003343.4,218-236).
gctttgagtttggtgtttt

SEQ ID NO: 231159 - DNA, 19 bp, Homo sapiens
  siRNA target sequence for UBE2G2 (NM_003343.4,269-287).
cgttaagtcccccaaagat

SEQ ID NO: 231160 - DNA, 19 bp, Homo sapiens
  siRNA target sequence for UBE2G2 (NM_003343.4,331-349).
gggagagtctgcatttcca

SEQ ID NO: 231161 - DNA, 19 bp, Homo sapiens
  siRNA target sequence for UBE2H (NM_003344.2,445-463).
gctcatcgagagtaaacat

SEQ ID NO: 231162 - DNA, 19 bp, Homo sapiens
  siRNA target sequence for UBE2H (NM_003344.2,456-474).
gtaaacatgaggttacgat

SEQ ID NO: 231163 - DNA, 19 bp, Homo sapiens
  siRNA target sequence for UBE2H (NM_003344.2,471-489).
cgatcctgggaggacttaa

SEQ ID NO: 231164 - DNA, 19 bp, Homo sapiens
  siRNA target sequence for UBE2H (NM_003344.2,472-490).
gatcctgggaggacttaat

SEQ ID NO: 231165 - DNA, 19 bp, Homo sapiens
  siRNA target sequence for UBE2H (NM_003344.2,478-496).
gggaggacttaatgaattt

SEQ ID NO: 231166 - DNA, 19 bp, Homo sapiens
  siRNA target sequence for UBE2H (NM_003344.2,536-554).
ggcggagtatggaaagtta

SEQ ID NO: 231167 - DNA, 19 bp, Homo sapiens
  siRNA target sequence for UBE2H (NM_003344.2,538-556).
cggagtatggaaagttaga

SEQ ID NO: 231168 - DNA, 19 bp, Homo sapiens
  siRNA target sequence for UBE2H (NM_003344.2,555-573).
gagtggacctacctgataa

SEQ ID NO: 231169 - DNA, 19 bp, Homo sapiens
  siRNA target sequence for UBE2H (NM_003344.2,557-575).
gtggacctacctgataaat

SEQ ID NO: 231170 - DNA, 19 bp, Homo sapiens
  siRNA target sequence for UBE2H (NM_003344.2,567-585).
ctgataaataccctttcaa

SEQ ID NO: 231171 - DNA, 19 bp, Homo sapiens
  siRNA target sequence for UBE2H (NM_003344.2,588-606).
ctccatctataggattcat

SEQ ID NO: 231172 - DNA, 19 bp, Homo sapiens
  siRNA target sequence for UBE2H (NM_003344.2,590-608).
ccatctataggattcatga

SEQ ID NO: 231173 - DNA, 19 bp, Homo sapiens
  siRNA target sequence for UBE2H (NM_003344.2,591-609).
catctataggattcatgaa

SEQ ID NO: 231174 - DNA, 19 bp, Homo sapiens
  siRNA target sequence for UBE2H (NM_003344.2,594-612).
ctataggattcatgaataa

SEQ ID NO: 231175 - DNA, 19 bp, Homo sapiens
  siRNA target sequence for UBE2H (NM_003344.2,619-637).
ccatcccaacattgatgaa

SEQ ID NO: 231176 - DNA, 19 bp, Homo sapiens
  siRNA target sequence for UBE2H (NM_003344.2,650-668).
gtgtgtctagatgtaatta

SEQ ID NO: 231177 - DNA, 19 bp, Homo sapiens
  siRNA target sequence for UBE2H (NM_003344.2,654-672).
gtctagatgtaattaatca

SEQ ID NO: 231178 - DNA, 19 bp, Homo sapiens
  siRNA target sequence for UBE2H (NM_003344.2,675-693).
cttggacagctctctatga

SEQ ID NO: 231179 - DNA, 19 bp, Homo sapiens
  siRNA target sequence for UBE2H (NM_003344.2,686-704).
ctctatgatcttaccaata

SEQ ID NO: 231180 - DNA, 19 bp, Homo sapiens
  siRNA target sequence for UBE2H (NM_003344.2,695-713).
cttaccaatatatttgagt

SEQ ID NO: 231181 - DNA, 19 bp, Homo sapiens
  siRNA target sequence for UBE2H (NM_003344.2,725-743).
cagttattggcctatccta

SEQ ID NO: 231182 - DNA, 19 bp, Homo sapiens
  siRNA target sequence for UBE2H (NM_003344.2,736-754).
ctatcctaaccccatagat

SEQ ID NO: 231183 - DNA, 19 bp, Homo sapiens
  siRNA target sequence for UBE2H (NM_003344.2,745-763).
ccccatagatcctctcaat

SEQ ID NO: 231184 - DNA, 19 bp, Homo sapiens
  siRNA target sequence for UBE2H (NM_003344.2,785-803).
ctccaccgaccagaagaat

SEQ ID NO: 231185 - DNA, 19 bp, Homo sapiens
  siRNA target sequence for UBE2H (NM_003344.2,788-806).
caccgaccagaagaataca

SEQ ID NO: 231186 - DNA, 19 bp, Homo sapiens
  siRNA target sequence for UBE2H (NM_003344.2,895-913).
gagctctatgtctgacttt

SEQ ID NO: 231187 - DNA, 19 bp, Homo sapiens
  siRNA target sequence for UBE2I (NM_003345.3,459-477).
ggccagccatcacaatcaa

SEQ ID NO: 231188 - DNA, 19 bp, Homo sapiens
  siRNA target sequence for UBE2I (NM_003345.3,462-480).
cagccatcacaatcaaaca

SEQ ID NO: 231189 - DNA, 19 bp, Homo sapiens
  siRNA target sequence for UBE2I (NM_003345.3,471-489).
caatcaaacagatcctatt

SEQ ID NO: 231190 - DNA, 19 bp, Homo sapiens
  siRNA target sequence for UBE2I (NM_003345.3,475-493).
caaacagatcctattagga

SEQ ID NO: 231191 - DNA, 19 bp, Homo sapiens
  siRNA target sequence for UBE2I (NM_003345.3,539-557).
gcagaggcctacacgattt

SEQ ID NO: 231192 - DNA, 19 bp, Homo sapiens
  siRNA target sequence for UBE2I (NM_003345.3,540-558).
cagaggcctacacgattta

SEQ ID NO: 231193 - DNA, 19 bp, Homo sapiens
  siRNA target sequence for UBE2I (NM_003345.3,542-560).
gaggcctacacgatttact

SEQ ID NO: 231194 - DNA, 19 bp, Homo sapiens
  siRNA target sequence for UBE2J1 (NM_016021.2,352-370).
gaagagtccggctgttaaa

SEQ ID NO: 231195 - DNA, 19 bp, Homo sapiens
  siRNA target sequence for UBE2J1 (NM_016021.2,355-373).
gagtccggctgttaaacgt

SEQ ID NO: 231196 - DNA, 19 bp, Homo sapiens
  siRNA target sequence for UBE2J1 (NM_016021.2,360-378).
cggctgttaaacgtttaat

SEQ ID NO: 231197 - DNA, 19 bp, Homo sapiens
  siRNA target sequence for UBE2J1 (NM_016021.2,423-441).
cgcagcctttagaggataa

SEQ ID NO: 231198 - DNA, 19 bp, Homo sapiens
  siRNA target sequence for UBE2J1 (NM_016021.2,428-446).
cctttagaggataaccttt

SEQ ID NO: 231199 - DNA, 19 bp, Homo sapiens
  siRNA target sequence for UBE2J1 (NM_016021.2,429-447).
ctttagaggataacctttt

SEQ ID NO: 231200 - DNA, 19 bp, Homo sapiens
  siRNA target sequence for UBE2J1 (NM_016021.2,434-452).
gaggataacctttttgaat

SEQ ID NO: 231201 - DNA, 19 bp, Homo sapiens
  siRNA target sequence for UBE2J1 (NM_016021.2,541-559).
gaaaccaccaagcattatt

SEQ ID NO: 231202 - DNA, 19 bp, Homo sapiens
  siRNA target sequence for UBE2J1 (NM_016021.2,567-585).
cggctaatggtcgatttga

SEQ ID NO: 231203 - DNA, 19 bp, Homo sapiens
  siRNA target sequence for UBE2J1 (NM_016021.2,568-586).
ggctaatggtcgatttgaa

SEQ ID NO: 231204 - DNA, 19 bp, Homo sapiens
  siRNA target sequence for UBE2J1 (NM_016021.2,570-588).
ctaatggtcgatttgaagt

SEQ ID NO: 231205 - DNA, 19 bp, Homo sapiens
  siRNA target sequence for UBE2J1 (NM_016021.2,584-602).
gaagtgggcaagaaaatct

SEQ ID NO: 231206 - DNA, 19 bp, Homo sapiens
  siRNA target sequence for UBE2J1 (NM_016021.2,587-605).
gtgggcaagaaaatctgtt

SEQ ID NO: 231207 - DNA, 19 bp, Homo sapiens
  siRNA target sequence for UBE2J1 (NM_016021.2,637-655).
gcagccttcgtggagtata

SEQ ID NO: 231208 - DNA, 19 bp, Homo sapiens
  siRNA target sequence for UBE2J1 (NM_016021.2,638-656).
cagccttcgtggagtataa

SEQ ID NO: 231209 - DNA, 19 bp, Homo sapiens
  siRNA target sequence for UBE2J1 (NM_016021.2,649-667).
gagtataaggacagcatta

SEQ ID NO: 231210 - DNA, 19 bp, Homo sapiens
  siRNA target sequence for UBE2J1 (NM_016021.2,651-669).
gtataaggacagcattatt

SEQ ID NO: 231211 - DNA, 19 bp, Homo sapiens
  siRNA target sequence for UBE2J1 (NM_016021.2,698-716).
ggagagggagccataggtt

SEQ ID NO: 231212 - DNA, 19 bp, Homo sapiens
  siRNA target sequence for UBE2J1 (NM_016021.2,707-725).
gccataggttctctagatt

SEQ ID NO: 231213 - DNA, 19 bp, Homo sapiens
  siRNA target sequence for UBE2J1 (NM_016021.2,708-726).
ccataggttctctagatta

SEQ ID NO: 231214 - DNA, 19 bp, Homo sapiens
  siRNA target sequence for UBE2J1 (NM_016021.2,741-759).
gaagagcacttgccaaaaa

SEQ ID NO: 231215 - DNA, 19 bp, Homo sapiens
  siRNA target sequence for UBE2J1 (NM_016021.2,806-824).
gtcctgttgcctttaaaat

SEQ ID NO: 231216 - DNA, 19 bp, Homo sapiens
  siRNA target sequence for UBE2J1 (NM_016021.2,866-884).
ctggctaggcaaataagct

SEQ ID NO: 231217 - DNA, 19 bp, Homo sapiens
  siRNA target sequence for UBE2J1 (NM_016021.2,921-939).
ctgagtcagacttaaacca

SEQ ID NO: 231218 - DNA, 19 bp, Homo sapiens
  siRNA target sequence for UBE2J1 (NM_016021.2,927-945).
cagacttaaaccactcttt

SEQ ID NO: 231219 - DNA, 19 bp, Homo sapiens
  siRNA target sequence for UBE2J1 (NM_016021.2,948-966).
cactaactgatttacaaga

SEQ ID NO: 231220 - DNA, 19 bp, Homo sapiens
  siRNA target sequence for UBE2J1 (NM_016021.2,989-1007).
ggtgctacggccagtacat

SEQ ID NO: 231221 - DNA, 19 bp, Homo sapiens
  siRNA target sequence for UBE2J1 (NM_016021.2,1050-1068).
ctacccaacctgtagctaa

SEQ ID NO: 231222 - DNA, 19 bp, Homo sapiens
  siRNA target sequence for UBE2J1 (NM_016021.2,1053-1071).
cccaacctgtagctaagaa

SEQ ID NO: 231223 - DNA, 19 bp, Homo sapiens
  siRNA target sequence for UBE2J1 (NM_016021.2,1055-1073).
caacctgtagctaagaata

SEQ ID NO: 231224 - DNA, 19 bp, Homo sapiens
  siRNA target sequence for UBE2J1 (NM_016021.2,1126-1144).
gtctacttcaccagatgta

SEQ ID NO: 231225 - DNA, 19 bp, Homo sapiens
  siRNA target sequence for UBE2J1 (NM_016021.2,1128-1146).
ctacttcaccagatgtaat

SEQ ID NO: 231226 - DNA, 19 bp, Homo sapiens
  siRNA target sequence for UBE2J1 (NM_016021.2,1219-1237).
ggcattggcagctcttata

SEQ ID NO: 231227 - DNA, 19 bp, Homo sapiens
  siRNA target sequence for UBE2J1 (NM_016021.2,1220-1238).
gcattggcagctcttatat

SEQ ID NO: 231228 - DNA, 19 bp, Homo sapiens
  siRNA target sequence for UBE2J1 (NM_016021.2,1221-1239).
cattggcagctcttatatt

SEQ ID NO: 231229 - DNA, 19 bp, Homo sapiens
  siRNA target sequence for UBE2J1 (NM_016021.2,1232-1250).
cttatattccgacgaatat

SEQ ID NO: 231230 - DNA, 19 bp, Homo sapiens
  siRNA target sequence for UBE2J1 (NM_016021.2,1261-1279).
cgaatacatatttgacttt

SEQ ID NO: 231231 - DNA, 19 bp, Homo sapiens
  siRNA target sequence for UBE2J2 (NM_058167.2,268-286).
gacccggtgccttacatct

SEQ ID NO: 231232 - DNA, 19 bp, Homo sapiens
  siRNA target sequence for UBE2J2 (NM_058167.2,291-309).
cgagcccctcccttcgaat

SEQ ID NO: 231233 - DNA, 19 bp, Homo sapiens
  siRNA target sequence for UBE2J2 (NM_058167.2,292-310).
gagcccctcccttcgaata

SEQ ID NO: 231234 - DNA, 19 bp, Homo sapiens
  siRNA target sequence for UBE2J2 (NM_058167.2,294-312).
gcccctcccttcgaatatt

SEQ ID NO: 231235 - DNA, 19 bp, Homo sapiens
  siRNA target sequence for UBE2J2 (NM_058167.2,353-371).
cttatgaaggtggctatta

SEQ ID NO: 231236 - DNA, 19 bp, Homo sapiens
  siRNA target sequence for UBE2J2 (NM_058167.2,408-426).
caaacctcccagtatctat

SEQ ID NO: 231237 - DNA, 19 bp, Homo sapiens
  siRNA target sequence for UBE2J2 (NM_058167.2,412-430).
cctcccagtatctatatga

SEQ ID NO: 231238 - DNA, 19 bp, Homo sapiens
  siRNA target sequence for UBE2J2 (NM_058167.2,415-433).
cccagtatctatatgatca

SEQ ID NO: 231239 - DNA, 19 bp, Homo sapiens
  siRNA target sequence for UBE2J2 (NM_058167.2,591-609).
gtcggacttcacgaaaaga

SEQ ID NO: 231240 - DNA, 19 bp, Homo sapiens
  siRNA target sequence for UBE2J2 (NM_058167.2,593-611).
cggacttcacgaaaagaca

SEQ ID NO: 231241 - DNA, 19 bp, Homo sapiens
  siRNA target sequence for UBE2J2 (NM_058167.2,594-612).
ggacttcacgaaaagacaa

SEQ ID NO: 231242 - DNA, 19 bp, Homo sapiens
  siRNA target sequence for UBE2J2 (NM_058167.2,673-691).
gaagtcgtggaggagatta

SEQ ID NO: 231243 - DNA, 19 bp, Homo sapiens
  siRNA target sequence for UBE2J2 (NM_058167.2,890-908).
cgaacttgtttgtgatagt

SEQ ID NO: 231244 - DNA, 19 bp, Homo sapiens
  siRNA target sequence for UBE2J2 (NM_194316.1,402-420).
gtgcgggagtacatctgta

SEQ ID NO: 231245 - DNA, 19 bp, Homo sapiens
  siRNA target sequence for UBE2J2 (NM_194316.1,429-447).
cctccatcatcgtgtcatt

SEQ ID NO: 231246 - DNA, 19 bp, Homo sapiens
  siRNA target sequence for UBE2J2 (NM_194316.1,478-496).
gccgtggtggctattatca

SEQ ID NO: 231247 - DNA, 19 bp, Homo sapiens
  siRNA target sequence for UBE2J2 (NM_194316.1,479-497).
ccgtggtggctattatcat

SEQ ID NO: 231248 - DNA, 19 bp, Homo sapiens
  siRNA target sequence for UBE2L6 (NM_004223.3,285-303).
caagcctcccatgatcaaa

SEQ ID NO: 231249 - DNA, 19 bp, Homo sapiens
  siRNA target sequence for UBE2L6 (NM_004223.3,333-351).
ggacgagaacggacagatt

SEQ ID NO: 231250 - DNA, 19 bp, Homo sapiens
  siRNA target sequence for UBE2M (NM_003969.2,714-732).
ctgcccaagacgtgtgata

SEQ ID NO: 231251 - DNA, 19 bp, Homo sapiens
  siRNA target sequence for UBE2M (NM_003969.2,750-768).
gacgacctcctcaacttca

SEQ ID NO: 231252 - DNA, 19 bp, Homo sapiens
  siRNA target sequence for UBE2M (NM_003969.2,784-802).
ctgatgagggcttctacaa

SEQ ID NO: 231253 - DNA, 19 bp, Homo sapiens
  siRNA target sequence for UBE2M (NM_003969.2,786-804).
gatgagggcttctacaaga

SEQ ID NO: 231254 - DNA, 19 bp, Homo sapiens
  siRNA target sequence for UBE2M (NM_003969.2,871-889).
gtgagacaatggtctatca

SEQ ID NO: 231255 - DNA, 19 bp, Homo sapiens
  siRNA target sequence for UBE2M (NM_003969.2,881-899).
ggtctatcaccccaacatt

SEQ ID NO: 231256 - DNA, 19 bp, Homo sapiens
  siRNA target sequence for UBE2M (NM_003969.2,943-961).
ggaagccagtccttacgat

SEQ ID NO: 231257 - DNA, 19 bp, Homo sapiens
  siRNA target sequence for UBE2M (NM_003969.2,944-962).
gaagccagtccttacgata

SEQ ID NO: 231258 - DNA, 19 bp, Homo sapiens
  siRNA target sequence for UBE2M (NM_003969.2,948-966).
ccagtccttacgataaact

SEQ ID NO: 231259 - DNA, 19 bp, Homo sapiens
  siRNA target sequence for UBE2M (NM_003969.2,958-976).
cgataaactccataattta

SEQ ID NO: 231260 - DNA, 19 bp, Homo sapiens
  siRNA target sequence for UBE2M (NM_003969.2,1009-1027).
ccgaggacccactgaacaa

SEQ ID NO: 231261 - DNA, 19 bp, Homo sapiens
  siRNA target sequence for UBE2Q (NM_017582.5,513-531).
ggaatactctgctattgca

SEQ ID NO: 231262 - DNA, 19 bp, Homo sapiens
  siRNA target sequence for UBE2Q (NM_017582.5,547-565).
catctccgacctgtgtaaa

SEQ ID NO: 231263 - DNA, 19 bp, Homo sapiens
  siRNA target sequence for UBE2Q (NM_017582.5,552-570).
ccgacctgtgtaaactcta

SEQ ID NO: 231264 - DNA, 19 bp, Homo sapiens
  siRNA target sequence for UBE2Q (NM_017582.5,553-571).
cgacctgtgtaaactctat

SEQ ID NO: 231265 - DNA, 19 bp, Homo sapiens
  siRNA target sequence for UBE2Q (NM_017582.5,554-572).
gacctgtgtaaactctata

SEQ ID NO: 231266 - DNA, 19 bp, Homo sapiens
  siRNA target sequence for UBE2Q (NM_017582.5,774-792).
ccatcctagagaaaattaa

SEQ ID NO: 231267 - DNA, 19 bp, Homo sapiens
  siRNA target sequence for UBE2Q (NM_017582.5,802-820).
gaggcaagattacttaaat

SEQ ID NO: 231268 - DNA, 19 bp, Homo sapiens
  siRNA target sequence for UBE2Q (NM_017582.5,846-864).
ccactgaccggctgatgaa

SEQ ID NO: 231269 - DNA, 19 bp, Homo sapiens
  siRNA target sequence for UBE2Q (NM_017582.5,883-901).
ccgatcacagagtttcaaa

SEQ ID NO: 231270 - DNA, 19 bp, Homo sapiens
  siRNA target sequence for UBE2Q (NM_017582.5,894-912).
gtttcaaaggcggaaacta

SEQ ID NO: 231271 - DNA, 19 bp, Homo sapiens
  siRNA target sequence for UBE2Q (NM_017582.5,915-933).
cagtcgaactcgtgaatga

SEQ ID NO: 231272 - DNA, 19 bp, Homo sapiens
  siRNA target sequence for UBE2Q (NM_017582.5,917-935).
gtcgaactcgtgaatgaca

SEQ ID NO: 231273 - DNA, 19 bp, Homo sapiens
  siRNA target sequence for UBE2Q (NM_017582.5,934-952).
cagtctgtatgattggaat

SEQ ID NO: 231274 - DNA, 19 bp, Homo sapiens
  siRNA target sequence for UBE2Q (NM_017582.5,1025-1043).
gccgacttcattctactta

SEQ ID NO: 231275 - DNA, 19 bp, Homo sapiens
  siRNA target sequence for UBE2Q (NM_017582.5,1026-1044).
ccgacttcattctacttaa

SEQ ID NO: 231276 - DNA, 19 bp, Homo sapiens
  siRNA target sequence for UBE2Q (NM_017582.5,1105-1123).
cctctctggagggtatgtt

SEQ ID NO: 231277 - DNA, 19 bp, Homo sapiens
  siRNA target sequence for UBE2Q (NM_017582.5,1250-1268).
ggagccaacaaatctcaat

SEQ ID NO: 231278 - DNA, 19 bp, Homo sapiens
  siRNA target sequence for UBE2Q (NM_017582.5,1251-1269).
gagccaacaaatctcaata

SEQ ID NO: 231279 - DNA, 19 bp, Homo sapiens
  siRNA target sequence for UBE2Q (NM_017582.5,1283-1301).
gcacagcagtcctacaagt

SEQ ID NO: 231280 - DNA, 19 bp, Homo sapiens
  siRNA target sequence for UBE2Q (NM_017582.5,1306-1324).
ggtgcagatccacgaaaaa

SEQ ID NO: 231281 - DNA, 19 bp, Homo sapiens
  siRNA target sequence for UBE2Q (NM_017582.5,1307-1325).
gtgcagatccacgaaaaaa

SEQ ID NO: 231282 - DNA, 19 bp, Homo sapiens
  siRNA target sequence for UBE2Q (NM_017582.5,1332-1350).
ggtacacacccccaaaaga

SEQ ID NO: 231283 - DNA, 19 bp, Homo sapiens
  siRNA target sequence for UBE2R2 (NM_017811.2,228-246).
ctgatgctcgagctgaaat

SEQ ID NO: 231284 - DNA, 19 bp, Homo sapiens
  siRNA target sequence for UBE2R2 (NM_017811.2,359-377).
ctacttcaaggcgcatatt

SEQ ID NO: 231285 - DNA, 19 bp, Homo sapiens
  siRNA target sequence for UBE2R2 (NM_017811.2,362-380).
cttcaaggcgcatattaaa

SEQ ID NO: 231286 - DNA, 19 bp, Homo sapiens
  siRNA target sequence for UBE2R2 (NM_017811.2,368-386).
ggcgcatattaaatttcct

SEQ ID NO: 231287 - DNA, 19 bp, Homo sapiens
  siRNA target sequence for UBE2R2 (NM_017811.2,369-387).
gcgcatattaaatttccta

SEQ ID NO: 231288 - DNA, 19 bp, Homo sapiens
  siRNA target sequence for UBE2R2 (NM_017811.2,370-388).
cgcatattaaatttcctat

SEQ ID NO: 231289 - DNA, 19 bp, Homo sapiens
  siRNA target sequence for UBE2R2 (NM_017811.2,403-421).
caccacctaccttcagatt

SEQ ID NO: 231290 - DNA, 19 bp, Homo sapiens
  siRNA target sequence for UBE2R2 (NM_017811.2,405-423).
ccacctaccttcagattct

SEQ ID NO: 231291 - DNA, 19 bp, Homo sapiens
  siRNA target sequence for UBE2R2 (NM_017811.2,436-454).
ggcaccccaacatttatga

SEQ ID NO: 231292 - DNA, 19 bp, Homo sapiens
  siRNA target sequence for UBE2R2 (NM_017811.2,532-550).
ggaatcctactcagaatgt

SEQ ID NO: 231293 - DNA, 19 bp, Homo sapiens
  siRNA target sequence for UBE2R2 (NM_017811.2,545-563).
gaatgtgaggactatccta

SEQ ID NO: 231294 - DNA, 19 bp, Homo sapiens
  siRNA target sequence for UBE2R2 (NM_017811.2,549-567).
gtgaggactatcctattaa

SEQ ID NO: 231295 - DNA, 19 bp, Homo sapiens
  siRNA target sequence for UBE2R2 (NM_017811.2,551-569).
gaggactatcctattaagt

SEQ ID NO: 231296 - DNA, 19 bp, Homo sapiens
  siRNA target sequence for UBE2R2 (NM_017811.2,553-571).
ggactatcctattaagtgt

SEQ ID NO: 231297 - DNA, 19 bp, Homo sapiens
  siRNA target sequence for UBE2R2 (NM_017811.2,554-572).
gactatcctattaagtgta

SEQ ID NO: 231298 - DNA, 19 bp, Homo sapiens
  siRNA target sequence for UBE2R2 (NM_017811.2,556-574).
ctatcctattaagtgtaat

SEQ ID NO: 231299 - DNA, 19 bp, Homo sapiens
  siRNA target sequence for UBE2R2 (NM_017811.2,560-578).
cctattaagtgtaatctca

SEQ ID NO: 231300 - DNA, 19 bp, Homo sapiens
  siRNA target sequence for UBE2R2 (NM_017811.2,615-633).
gtcgatgcttcagttatgt

SEQ ID NO: 231301 - DNA, 19 bp, Homo sapiens
  siRNA target sequence for UBE2R2 (NM_017811.2,618-636).
gatgcttcagttatgttca

SEQ ID NO: 231302 - DNA, 19 bp, Homo sapiens
  siRNA target sequence for UBE2R2 (NM_017811.2,706-724).
ctaaggccgaagcagaaaa

SEQ ID NO: 231303 - DNA, 19 bp, Homo sapiens
  siRNA target sequence for UBE2R2 (NM_017811.2,752-770).
ggcggaatactgcatcaaa

SEQ ID NO: 231304 - DNA, 19 bp, Homo sapiens
  siRNA target sequence for UBE2R2 (NM_017811.2,753-771).
gcggaatactgcatcaaaa

SEQ ID NO: 231305 - DNA, 19 bp, Homo sapiens
  siRNA target sequence for UBE2R2 (NM_017811.2,756-774).
gaatactgcatcaaaacta

SEQ ID NO: 231306 - DNA, 19 bp, Homo sapiens
  siRNA target sequence for UBE2R2 (NM_017811.2,791-809).
caacagctcagatttgctt

SEQ ID NO: 231307 - DNA, 19 bp, Homo sapiens
  siRNA target sequence for UBE2R2 (NM_017811.2,796-814).
gctcagatttgctttacga

SEQ ID NO: 231308 - DNA, 19 bp, Homo sapiens
  siRNA target sequence for UBE2R2 (NM_017811.2,806-824).
gctttacgacgacttgtat

SEQ ID NO: 231309 - DNA, 19 bp, Homo sapiens
  siRNA target sequence for UBE2R2 (NM_017811.2,821-839).
gtatgatgacgacattgat

SEQ ID NO: 231310 - DNA, 19 bp, Homo sapiens
  siRNA target sequence for UBE2R2 (NM_017811.2,865-883).
ccgactgttatgatgatga

SEQ ID NO: 231311 - DNA, 19 bp, Homo sapiens
  siRNA target sequence for UBE2V2 (NM_003350.2,30-48).
ctccacaggagttaaagtt

SEQ ID NO: 231312 - DNA, 19 bp, Homo sapiens
  siRNA target sequence for UBE2V2 (NM_003350.2,40-58).
gttaaagttcctcgtaatt

SEQ ID NO: 231313 - DNA, 19 bp, Homo sapiens
  siRNA target sequence for UBE2V2 (NM_003350.2,97-115).
gtaggcgacggtacagtta

SEQ ID NO: 231314 - DNA, 19 bp, Homo sapiens
  siRNA target sequence for UBE2V2 (NM_003350.2,177-195).
gccaccaaggacaaattat

SEQ ID NO: 231315 - DNA, 19 bp, Homo sapiens
  siRNA target sequence for UBE2V2 (NM_003350.2,179-197).
caccaaggacaaattatga

SEQ ID NO: 231316 - DNA, 19 bp, Homo sapiens
  siRNA target sequence for UBE2V2 (NM_003350.2,244-262).
gaagctcctccgtcagtta

SEQ ID NO: 231317 - DNA, 19 bp, Homo sapiens
  siRNA target sequence for UBE2V2 (NM_003350.2,247-265).
gctcctccgtcagttagat

SEQ ID NO: 231318 - DNA, 19 bp, Homo sapiens
  siRNA target sequence for UBE2V2 (NM_003350.2,248-266).
ctcctccgtcagttagatt

SEQ ID NO: 231319 - DNA, 19 bp, Homo sapiens
  siRNA target sequence for UBE2V2 (NM_003350.2,321-339).
ccggagcataccagtgtta

SEQ ID NO: 231320 - DNA, 19 bp, Homo sapiens
  siRNA target sequence for UBE2V2 (NM_003350.2,382-400).
gagctaagacgtctaatga

SEQ ID NO: 231321 - DNA, 19 bp, Homo sapiens
  siRNA target sequence for UBE2V2 (NM_003350.2,385-403).
ctaagacgtctaatgatgt

SEQ ID NO: 231322 - DNA, 19 bp, Homo sapiens
  siRNA target sequence for UBE3A (NM_000462.2,15-33).
ccagtgttattggaaatca

SEQ ID NO: 231323 - DNA, 19 bp, Homo sapiens
  siRNA target sequence for UBE3A (NM_000462.2,80-98).
cagctgcaaagcatctaat

SEQ ID NO: 231324 - DNA, 19 bp, Homo sapiens
  siRNA target sequence for UBE3A (NM_000462.2,103-121).
cgctactaccaccagttaa

SEQ ID NO: 231325 - DNA, 19 bp, Homo sapiens
  siRNA target sequence for UBE3A (NM_000462.2,170-188).
gtccaacttttcttcgtat

SEQ ID NO: 231326 - DNA, 19 bp, Homo sapiens
  siRNA target sequence for UBE3A (NM_000462.2,176-194).
cttttcttcgtatggataa

SEQ ID NO: 231327 - DNA, 19 bp, Homo sapiens
  siRNA target sequence for UBE3A (NM_000462.2,215-233).
ccctcgagctttataagat

SEQ ID NO: 231328 - DNA, 19 bp, Homo sapiens
  siRNA target sequence for UBE3A (NM_000462.2,216-234).
cctcgagctttataagatt

SEQ ID NO: 231329 - DNA, 19 bp, Homo sapiens
  siRNA target sequence for UBE3A (NM_000462.2,217-235).
ctcgagctttataagatta

SEQ ID NO: 231330 - DNA, 19 bp, Homo sapiens
  siRNA target sequence for UBE3A (NM_000462.2,219-237).
cgagctttataagattaat

SEQ ID NO: 231331 - DNA, 19 bp, Homo sapiens
  siRNA target sequence for UBE3A (NM_000462.2,345-363).
gaaaggcgctagaattgat

SEQ ID NO: 231332 - DNA, 19 bp, Homo sapiens
  siRNA target sequence for UBE3A (NM_000462.2,349-367).
ggcgctagaattgatttta

SEQ ID NO: 231333 - DNA, 19 bp, Homo sapiens
  siRNA target sequence for UBE3A (NM_000462.2,396-414).
ggtatatgaaattcttgaa

SEQ ID NO: 231334 - DNA, 19 bp, Homo sapiens
  siRNA target sequence for UBE3A (NM_000462.2,440-458).
cccctttaatccgtgttat

SEQ ID NO: 231335 - DNA, 19 bp, Homo sapiens
  siRNA target sequence for UBE3A (NM_000462.2,441-459).
ccctttaatccgtgttatt

SEQ ID NO: 231336 - DNA, 19 bp, Homo sapiens
  siRNA target sequence for UBE3A (NM_000462.2,493-511).
cagagcttccggaaagtta

SEQ ID NO: 231337 - DNA, 19 bp, Homo sapiens
  siRNA target sequence for UBE3A (NM_000462.2,657-675).
gggagacaacaatttgcaa

SEQ ID NO: 231338 - DNA, 19 bp, Homo sapiens
  siRNA target sequence for UBE3A (NM_000462.2,731-749).
ccagattgctctctaatga

SEQ ID NO: 231339 - DNA, 19 bp, Homo sapiens
  siRNA target sequence for UBE3A (NM_000462.2,738-756).
gctctctaatgaaaaaatt

SEQ ID NO: 231340 - DNA, 19 bp, Homo sapiens
  siRNA target sequence for UBE3A (NM_000462.2,769-787).
ctcaatgcacttgtatatt

SEQ ID NO: 231341 - DNA, 19 bp, Homo sapiens
  siRNA target sequence for UBE3A (NM_000462.2,791-809).
cacctaacgtggaatgtga

SEQ ID NO: 231342 - DNA, 19 bp, Homo sapiens
  siRNA target sequence for UBE3A (NM_000462.2,810-828).
cttgacgtatcacaatgta

SEQ ID NO: 231343 - DNA, 19 bp, Homo sapiens
  siRNA target sequence for UBE3A (NM_000462.2,831-849).
ctctcgagatcctaattat

SEQ ID NO: 231344 - DNA, 19 bp, Homo sapiens
  siRNA target sequence for UBE3A (NM_000462.2,833-851).
ctcgagatcctaattatct

SEQ ID NO: 231345 - DNA, 19 bp, Homo sapiens
  siRNA target sequence for UBE3A (NM_000462.2,835-853).
cgagatcctaattatctga

SEQ ID NO: 231346 - DNA, 19 bp, Homo sapiens
  siRNA target sequence for UBE3A (NM_000462.2,836-854).
gagatcctaattatctgaa

SEQ ID NO: 231347 - DNA, 19 bp, Homo sapiens
  siRNA target sequence for UBE3A (NM_000462.2,838-856).
gatcctaattatctgaatt

SEQ ID NO: 231348 - DNA, 19 bp, Homo sapiens
  siRNA target sequence for UBE3A (NM_000462.2,972-990).
gatcagactgtggtctaaa

SEQ ID NO: 231349 - DNA, 19 bp, Homo sapiens
  siRNA target sequence for UBE3A (NM_000462.2,1036-1054).
cttattacttataaagtca

SEQ ID NO: 231350 - DNA, 19 bp, Homo sapiens
  siRNA target sequence for UBE3A (NM_000462.2,1073-1091).
gtcgaaatctagtgaatga

SEQ ID NO: 231351 - DNA, 19 bp, Homo sapiens
  siRNA target sequence for UBE3A (NM_000462.2,1111-1129).
gcttcgaagtgcttgaaaa

SEQ ID NO: 231352 - DNA, 19 bp, Homo sapiens
  siRNA target sequence for UBE3A (NM_000462.2,1159-1177).
gaagtggacacaaatcaca

SEQ ID NO: 231353 - DNA, 19 bp, Homo sapiens
  siRNA target sequence for UBE3A (NM_000462.2,1308-1326).
cctggattgtcgaaaacca

SEQ ID NO: 231354 - DNA, 19 bp, Homo sapiens
  siRNA target sequence for UBE3A (NM_000462.2,1366-1384).
gaggttctagaaatggata

SEQ ID NO: 231355 - DNA, 19 bp, Homo sapiens
  siRNA target sequence for UBE3A (NM_000462.2,1368-1386).
ggttctagaaatggataaa

SEQ ID NO: 231356 - DNA, 19 bp, Homo sapiens
  siRNA target sequence for UBE3A (NM_000462.2,1372-1390).
ctagaaatggataaagatt

SEQ ID NO: 231357 - DNA, 19 bp, Homo sapiens
  siRNA target sequence for UBE3A (NM_000462.2,1380-1398).
ggataaagattatactttt

SEQ ID NO: 231358 - DNA, 19 bp, Homo sapiens
  siRNA target sequence for UBE3A (NM_000462.2,1452-1470).
gaatgctgtcacaaagaat

SEQ ID NO: 231359 - DNA, 19 bp, Homo sapiens
  siRNA target sequence for UBE3A (NM_000462.2,1463-1481).
caaagaatttgggattata

SEQ ID NO: 231360 - DNA, 19 bp, Homo sapiens
  siRNA target sequence for UBE3A (NM_000462.2,1474-1492).
ggattatattatgacaata

SEQ ID NO: 231361 - DNA, 19 bp, Homo sapiens
  siRNA target sequence for UBE3A (NM_000462.2,1506-1524).
cagtgaacgaagaatcact

SEQ ID NO: 231362 - DNA, 19 bp, Homo sapiens
  siRNA target sequence for UBE3A (NM_000462.2,1554-1572).
gttgaatccatatttgaga

SEQ ID NO: 231363 - DNA, 19 bp, Homo sapiens
  siRNA target sequence for UBE3A (NM_000462.2,1579-1597).
gttagacgtgaccatatca

SEQ ID NO: 231364 - DNA, 19 bp, Homo sapiens
  siRNA target sequence for UBE3A (NM_000462.2,1583-1601).
gacgtgaccatatcataga

SEQ ID NO: 231365 - DNA, 19 bp, Homo sapiens
  siRNA target sequence for UBE3A (NM_000462.2,1586-1604).
gtgaccatatcatagatga

SEQ ID NO: 231366 - DNA, 19 bp, Homo sapiens
  siRNA target sequence for UBE3A (NM_000462.2,1607-1625).
cacttgtccggctagagat

SEQ ID NO: 231367 - DNA, 19 bp, Homo sapiens
  siRNA target sequence for UBE3A (NM_000462.2,1621-1639).
gagatgatcgctatggaaa

SEQ ID NO: 231368 - DNA, 19 bp, Homo sapiens
  siRNA target sequence for UBE3A (NM_000462.2,1659-1677).
gcagttgtatgtggaattt

SEQ ID NO: 231369 - DNA, 19 bp, Homo sapiens
  siRNA target sequence for UBE3A (NM_000462.2,1753-1771).
ccagatattggtatgttca

SEQ ID NO: 231370 - DNA, 19 bp, Homo sapiens
  siRNA target sequence for UBE3A (NM_000462.2,1767-1785).
gttcacatacgatgaatct

SEQ ID NO: 231371 - DNA, 19 bp, Homo sapiens
  siRNA target sequence for UBE3A (NM_000462.2,1772-1790).
catacgatgaatctacaaa

SEQ ID NO: 231372 - DNA, 19 bp, Homo sapiens
  siRNA target sequence for UBE3A (NM_000462.2,1827-1845).
gggtcagtttactctgatt

SEQ ID NO: 231373 - DNA, 19 bp, Homo sapiens
  siRNA target sequence for UBE3A (NM_000462.2,1857-1875).
gggtctggctatttacaat

SEQ ID NO: 231374 - DNA, 19 bp, Homo sapiens
  siRNA target sequence for UBE3A (NM_000462.2,1863-1881).
ggctatttacaataactgt

SEQ ID NO: 231375 - DNA, 19 bp, Homo sapiens
  siRNA target sequence for UBE3A (NM_000462.2,1864-1882).
gctatttacaataactgta

SEQ ID NO: 231376 - DNA, 19 bp, Homo sapiens
  siRNA target sequence for UBE3A (NM_000462.2,1957-1975).
gactctcacccagttctat

SEQ ID NO: 231377 - DNA, 19 bp, Homo sapiens
  siRNA target sequence for UBE3A (NM_000462.2,1959-1977).
ctctcacccagttctatat

SEQ ID NO: 231378 - DNA, 19 bp, Homo sapiens
  siRNA target sequence for UBE3A (NM_000462.2,1967-1985).
cagttctatatcagagttt

SEQ ID NO: 231379 - DNA, 19 bp, Homo sapiens
  siRNA target sequence for UBE3A (NM_000462.2,2020-2038).
gatgacatgatgatcactt

SEQ ID NO: 231380 - DNA, 19 bp, Homo sapiens
  siRNA target sequence for UBE3A (NM_000462.2,2031-2049).
gatcactttccagatatca

SEQ ID NO: 231381 - DNA, 19 bp, Homo sapiens
  siRNA target sequence for UBE3A (NM_000462.2,2043-2061).
gatatcacagacagatctt

SEQ ID NO: 231382 - DNA, 19 bp, Homo sapiens
  siRNA target sequence for UBE3A (NM_000462.2,2070-2088).
cccaatgatgtatgatcta

SEQ ID NO: 231383 - DNA, 19 bp, Homo sapiens
  siRNA target sequence for UBE3A (NM_000462.2,2071-2089).
ccaatgatgtatgatctaa

SEQ ID NO: 231384 - DNA, 19 bp, Homo sapiens
  siRNA target sequence for UBE3A (NM_000462.2,2076-2094).
gatgtatgatctaaaggaa

SEQ ID NO: 231385 - DNA, 19 bp, Homo sapiens
  siRNA target sequence for UBE3A (NM_000462.2,2129-2147).
ggaaggaatttgtcaatct

SEQ ID NO: 231386 - DNA, 19 bp, Homo sapiens
  siRNA target sequence for UBE3A (NM_000462.2,2212-2230).
catatggtgaccaatgaat

SEQ ID NO: 231387 - DNA, 19 bp, Homo sapiens
  siRNA target sequence for UBE3A (NM_000462.2,2222-2240).
ccaatgaatctcccttaaa

SEQ ID NO: 231388 - DNA, 19 bp, Homo sapiens
  siRNA target sequence for UBE3A (NM_000462.2,2233-2251).
cccttaaagtacttattca

SEQ ID NO: 231389 - DNA, 19 bp, Homo sapiens
  siRNA target sequence for UBE3A (NM_000462.2,2235-2253).
cttaaagtacttattcaga

SEQ ID NO: 231390 - DNA, 19 bp, Homo sapiens
  siRNA target sequence for UBE3A (NM_000462.2,2279-2297).
gtggaagccggaatctaga

SEQ ID NO: 231391 - DNA, 19 bp, Homo sapiens
  siRNA target sequence for UBE3A (NM_000462.2,2282-2300).
gaagccggaatctagattt

SEQ ID NO: 231392 - DNA, 19 bp, Homo sapiens
  siRNA target sequence for UBE3A (NM_000462.2,2285-2303).
gccggaatctagatttcca

SEQ ID NO: 231393 - DNA, 19 bp, Homo sapiens
  siRNA target sequence for UBE3A (NM_000462.2,2302-2320).
caagcactagaagaaacta

SEQ ID NO: 231394 - DNA, 19 bp, Homo sapiens
  siRNA target sequence for UBE3A (NM_000462.2,2449-2467).
gtgggaggactaggaaaat

SEQ ID NO: 231395 - DNA, 19 bp, Homo sapiens
  siRNA target sequence for UBE3A (NM_000462.2,2455-2473).
ggactaggaaaattaaaga

SEQ ID NO: 231396 - DNA, 19 bp, Homo sapiens
  siRNA target sequence for UBE3A (NM_000462.2,2456-2474).
gactaggaaaattaaagat

SEQ ID NO: 231397 - DNA, 19 bp, Homo sapiens
  siRNA target sequence for UBE3A (NM_000462.2,2528-2546).
gctttaatgtgcttttact

SEQ ID NO: 231398 - DNA, 19 bp, Homo sapiens
  siRNA target sequence for UBE3A (NM_000462.2,2556-2574).
ctcaagcaaagaaaaactt

SEQ ID NO: 231399 - DNA, 19 bp, Homo sapiens
  siRNA target sequence for UBE3A (NM_130839.1,660-678).
ggccacagcttgtaaaaga

SEQ ID NO: 231400 - DNA, 19 bp, Homo sapiens
  siRNA target sequence for UBE3B (NM_130466.2,652-670).
cgtcaggcacgagaagaaa

SEQ ID NO: 231401 - DNA, 19 bp, Homo sapiens
  siRNA target sequence for UBE3B (NM_130466.2,714-732).
ggcccatgtccggagtttt

SEQ ID NO: 231402 - DNA, 19 bp, Homo sapiens
  siRNA target sequence for UBE3B (NM_130466.2,716-734).
cccatgtccggagttttct

SEQ ID NO: 231403 - DNA, 19 bp, Homo sapiens
  siRNA target sequence for UBE3B (NM_130466.2,718-736).
catgtccggagttttctct

SEQ ID NO: 231404 - DNA, 19 bp, Homo sapiens
  siRNA target sequence for UBE3B (NM_130466.2,743-761).
gtcgactgcagagagatat

SEQ ID NO: 231405 - DNA, 19 bp, Homo sapiens
  siRNA target sequence for UBE3B (NM_130466.2,745-763).
cgactgcagagagatatca

SEQ ID NO: 231406 - DNA, 19 bp, Homo sapiens
  siRNA target sequence for UBE3B (NM_130466.2,765-783).
gagagagattgatgacttt

SEQ ID NO: 231407 - DNA, 19 bp, Homo sapiens
  siRNA target sequence for UBE3B (NM_130466.2,815-833).
gaagtgcactttgtatttt

SEQ ID NO: 231408 - DNA, 19 bp, Homo sapiens
  siRNA target sequence for UBE3B (NM_130466.2,845-863).
ggaaactgctgttcctatt

SEQ ID NO: 231409 - DNA, 19 bp, Homo sapiens
  siRNA target sequence for UBE3B (NM_130466.2,918-936).
cagcatggatgctgagaat

SEQ ID NO: 231410 - DNA, 19 bp, Homo sapiens
  siRNA target sequence for UBE3B (NM_130466.2,940-958).
cctaaggtgtggtatgtgt

SEQ ID NO: 231411 - DNA, 19 bp, Homo sapiens
  siRNA target sequence for UBE3B (NM_130466.2,955-973).
gtgtccctggcttgttcta

SEQ ID NO: 231412 - DNA, 19 bp, Homo sapiens
  siRNA target sequence for UBE3B (NM_130466.2,992-1010).
ggattcaacagatcaagaa

SEQ ID NO: 231413 - DNA, 19 bp, Homo sapiens
  siRNA target sequence for UBE3B (NM_130466.2,1000-1018).
cagatcaagaacattttgt

SEQ ID NO: 231414 - DNA, 19 bp, Homo sapiens
  siRNA target sequence for UBE3B (NM_130466.2,1116-1134).
cacttcaacgtggaaaatt

SEQ ID NO: 231415 - DNA, 19 bp, Homo sapiens
  siRNA target sequence for UBE3B (NM_130466.2,1263-1281).
ccgtccttgtctatccaaa

SEQ ID NO: 231416 - DNA, 19 bp, Homo sapiens
  siRNA target sequence for UBE3B (NM_130466.2,1331-1349).
cacagttctcagacaatct

SEQ ID NO: 231417 - DNA, 19 bp, Homo sapiens
  siRNA target sequence for UBE3B (NM_130466.2,1335-1353).
gttctcagacaatctgatt

SEQ ID NO: 231418 - DNA, 19 bp, Homo sapiens
  siRNA target sequence for UBE3B (NM_130466.2,1358-1376).
cgttcctcatccacatcat

SEQ ID NO: 231419 - DNA, 19 bp, Homo sapiens
  siRNA target sequence for UBE3B (NM_130466.2,1418-1436).
ctgagcgcctcactgtttt

SEQ ID NO: 231420 - DNA, 19 bp, Homo sapiens
  siRNA target sequence for UBE3B (NM_130466.2,1423-1441).
cgcctcactgttttagaat

SEQ ID NO: 231421 - DNA, 19 bp, Homo sapiens
  siRNA target sequence for UBE3B (NM_130466.2,1443-1461).
ccatgacatgcttcgtaaa

SEQ ID NO: 231422 - DNA, 19 bp, Homo sapiens
  siRNA target sequence for UBE3B (NM_130466.2,1447-1465).
gacatgcttcgtaaattca

SEQ ID NO: 231423 - DNA, 19 bp, Homo sapiens
  siRNA target sequence for UBE3B (NM_130466.2,1452-1470).
gcttcgtaaattcatcata

SEQ ID NO: 231424 - DNA, 19 bp, Homo sapiens
  siRNA target sequence for UBE3B (NM_130466.2,1486-1504).
gatcgatgccgtgatgtat

SEQ ID NO: 231425 - DNA, 19 bp, Homo sapiens
  siRNA target sequence for UBE3B (NM_130466.2,1495-1513).
cgtgatgtatgtgaaagtt

SEQ ID NO: 231426 - DNA, 19 bp, Homo sapiens
  siRNA target sequence for UBE3B (NM_130466.2,1523-1541).
gccatacgctttgtctaat

SEQ ID NO: 231427 - DNA, 19 bp, Homo sapiens
  siRNA target sequence for UBE3B (NM_130466.2,1595-1613).
cagatgggttcgtgagttt

SEQ ID NO: 231428 - DNA, 19 bp, Homo sapiens
  siRNA target sequence for UBE3B (NM_130466.2,1631-1649).
gctactgtcggaagtatgt

SEQ ID NO: 231429 - DNA, 19 bp, Homo sapiens
  siRNA target sequence for UBE3B (NM_130466.2,1694-1712).
gctggttctcccaatctgt

SEQ ID NO: 231430 - DNA, 19 bp, Homo sapiens
  siRNA target sequence for UBE3B (NM_130466.2,1729-1747).
gagtcaatgcacttgatca

SEQ ID NO: 231431 - DNA, 19 bp, Homo sapiens
  siRNA target sequence for UBE3B (NM_130466.2,1778-1796).
ctctgatccggatcttctt

SEQ ID NO: 231432 - DNA, 19 bp, Homo sapiens
  siRNA target sequence for UBE3B (NM_130466.2,1890-1908).
cctaaagcgtgcttttcaa

SEQ ID NO: 231433 - DNA, 19 bp, Homo sapiens
  siRNA target sequence for UBE3B (NM_130466.2,1891-1909).
ctaaagcgtgcttttcaaa

SEQ ID NO: 231434 - DNA, 19 bp, Homo sapiens
  siRNA target sequence for UBE3B (NM_130466.2,1913-1931).
cggcatcagtccggaatat

SEQ ID NO: 231435 - DNA, 19 bp, Homo sapiens
  siRNA target sequence for UBE3B (NM_130466.2,1975-1993).
cagaaggtttgcaacatct

SEQ ID NO: 231436 - DNA, 19 bp, Homo sapiens
  siRNA target sequence for UBE3B (NM_130466.2,2016-2034).
gacaactctcacacagatt

SEQ ID NO: 231437 - DNA, 19 bp, Homo sapiens
  siRNA target sequence for UBE3B (NM_130466.2,2049-2067).
cacaggtctcacttacctt

SEQ ID NO: 231438 - DNA, 19 bp, Homo sapiens
  siRNA target sequence for UBE3B (NM_130466.2,2054-2072).
gtctcacttaccttgatga

SEQ ID NO: 231439 - DNA, 19 bp, Homo sapiens
  siRNA target sequence for UBE3B (NM_130466.2,2071-2089).
gacctgcttcccaaactgt

SEQ ID NO: 231440 - DNA, 19 bp, Homo sapiens
  siRNA target sequence for UBE3B (NM_130466.2,2114-2132).
cccacggagggttaaagct

SEQ ID NO: 231441 - DNA, 19 bp, Homo sapiens
  siRNA target sequence for UBE3B (NM_130466.2,2136-2154).
cttggaatgcctgaacaat

SEQ ID NO: 231442 - DNA, 19 bp, Homo sapiens
  siRNA target sequence for UBE3B (NM_130466.2,2210-2228).
cgcggcacctcatcacaat

SEQ ID NO: 231443 - DNA, 19 bp, Homo sapiens
  siRNA target sequence for UBE3B (NM_130466.2,2229-2247).
ccttgatgacattgaagtt

SEQ ID NO: 231444 - DNA, 19 bp, Homo sapiens
  siRNA target sequence for UBE3B (NM_130466.2,2275-2293).
gaagagctggtcactatct

SEQ ID NO: 231445 - DNA, 19 bp, Homo sapiens
  siRNA target sequence for UBE3B (NM_130466.2,2445-2463).
ccactggctgcgaaaggat

SEQ ID NO: 231446 - DNA, 19 bp, Homo sapiens
  siRNA target sequence for UBE3B (NM_130466.2,2455-2473).
cgaaaggatctcaaaccta

SEQ ID NO: 231447 - DNA, 19 bp, Homo sapiens
  siRNA target sequence for UBE3B (NM_130466.2,2474-2492).
gcgtgctcttccaagaact

SEQ ID NO: 231448 - DNA, 19 bp, Homo sapiens
  siRNA target sequence for UBE3B (NM_130466.2,2504-2522).
gaaaacgggcacagttgat

SEQ ID NO: 231449 - DNA, 19 bp, Homo sapiens
  siRNA target sequence for UBE3B (NM_130466.2,2539-2557).
catgtcatccctcacaaaa

SEQ ID NO: 231450 - DNA, 19 bp, Homo sapiens
  siRNA target sequence for UBE3B (NM_130466.2,2542-2560).
gtcatccctcacaaaaaca

SEQ ID NO: 231451 - DNA, 19 bp, Homo sapiens
  siRNA target sequence for UBE3B (NM_130466.2,2544-2562).
catccctcacaaaaacaga

SEQ ID NO: 231452 - DNA, 19 bp, Homo sapiens
  siRNA target sequence for UBE3B (NM_130466.2,2569-2587).
ctgtttcgaaccatggtta

SEQ ID NO: 231453 - DNA, 19 bp, Homo sapiens
  siRNA target sequence for UBE3B (NM_130466.2,2726-2744).
gggtcatccgtgtgaagtt

SEQ ID NO: 231454 - DNA, 19 bp, Homo sapiens
  siRNA target sequence for UBE3B (NM_130466.2,2727-2745).
ggtcatccgtgtgaagttt

SEQ ID NO: 231455 - DNA, 19 bp, Homo sapiens
  siRNA target sequence for UBE3B (NM_130466.2,2733-2751).
ccgtgtgaagtttgtcaat

SEQ ID NO: 231456 - DNA, 19 bp, Homo sapiens
  siRNA target sequence for UBE3B (NM_130466.2,2763-2781).
ggacgaagcagggattgat

SEQ ID NO: 231457 - DNA, 19 bp, Homo sapiens
  siRNA target sequence for UBE3B (NM_130466.2,2779-2797).
gatcaagacggtgttttta

SEQ ID NO: 231458 - DNA, 19 bp, Homo sapiens
  siRNA target sequence for UBE3B (NM_130466.2,2839-2857).
gcactcaatctgttcaaga

SEQ ID NO: 231459 - DNA, 19 bp, Homo sapiens
  siRNA target sequence for UBE3B (NM_130466.2,2897-2915).
cctacatccatgagaatta

SEQ ID NO: 231460 - DNA, 19 bp, Homo sapiens
  siRNA target sequence for UBE3B (NM_130466.2,3028-3046).
cacagcgtcttctatagct

SEQ ID NO: 231461 - DNA, 19 bp, Homo sapiens
  siRNA target sequence for UBE3B (NM_130466.2,3065-3083).
ctctggactccgagttcta

SEQ ID NO: 231462 - DNA, 19 bp, Homo sapiens
  siRNA target sequence for UBE3B (NM_130466.2,3096-3114).
ctccatcaagcgctatgat

SEQ ID NO: 231463 - DNA, 19 bp, Homo sapiens
  siRNA target sequence for UBE3B (NM_130466.2,3160-3178).
gtcatgggtcagcttgttt

SEQ ID NO: 231464 - DNA, 19 bp, Homo sapiens
  siRNA target sequence for UBE3B (NM_130466.2,3247-3265).
ctgatggcacattttcgaa

SEQ ID NO: 231465 - DNA, 19 bp, Homo sapiens
  siRNA target sequence for UBE3B (NM_130466.2,3262-3280).
cgaatgcacactcaaataa

SEQ ID NO: 231466 - DNA, 19 bp, Homo sapiens
  siRNA target sequence for UBE3B (NM_130466.2,3305-3323).
gcggattccgttccattat

SEQ ID NO: 231467 - DNA, 19 bp, Homo sapiens
  siRNA target sequence for UBE3B (NM_130466.2,3331-3349).
gagtggatccgaatgttct

SEQ ID NO: 231468 - DNA, 19 bp, Homo sapiens
  siRNA target sequence for UBE3B (NM_130466.2,3426-3444).
ctactacggtggtttccat

SEQ ID NO: 231469 - DNA, 19 bp, Homo sapiens
  siRNA target sequence for UBE3B (NM_130466.2,3500-3518).
cggatgagagagctatgtt

SEQ ID NO: 231470 - DNA, 19 bp, Homo sapiens
  siRNA target sequence for UBE3B (NM_130466.2,3509-3527).
gagctatgtttctgaagtt

SEQ ID NO: 231471 - DNA, 19 bp, Homo sapiens
  siRNA target sequence for UBE3B (NM_130466.2,3783-3801).
catgaacacgggctttgaa

SEQ ID NO: 231472 - DNA, 19 bp, Homo sapiens
  siRNA target sequence for UBE3B (NM_183414.1,2696-2714).
cctggccactggtgatcaa

SEQ ID NO: 231473 - DNA, 19 bp, Homo sapiens
  siRNA target sequence for UBR1 (NM_174916.1,86-104).
gggatcagcaagttgattt

SEQ ID NO: 231474 - DNA, 19 bp, Homo sapiens
  siRNA target sequence for UBR1 (NM_174916.1,217-235).
ccactggaatggtacttat

SEQ ID NO: 231475 - DNA, 19 bp, Homo sapiens
  siRNA target sequence for UBR1 (NM_174916.1,218-236).
cactggaatggtacttatt

SEQ ID NO: 231476 - DNA, 19 bp, Homo sapiens
  siRNA target sequence for UBR1 (NM_174916.1,222-240).
ggaatggtacttatttgga

SEQ ID NO: 231477 - DNA, 19 bp, Homo sapiens
  siRNA target sequence for UBR1 (NM_174916.1,247-265).
ccagatatttgcttagaga

SEQ ID NO: 231478 - DNA, 19 bp, Homo sapiens
  siRNA target sequence for UBR1 (NM_174916.1,316-334).
ggagagacaacctattctt

SEQ ID NO: 231479 - DNA, 19 bp, Homo sapiens
  siRNA target sequence for UBR1 (NM_174916.1,356-374).
caacatgtgtactctgtat

SEQ ID NO: 231480 - DNA, 19 bp, Homo sapiens
  siRNA target sequence for UBR1 (NM_174916.1,381-399).
cttccaggacagtgttcat

SEQ ID NO: 231481 - DNA, 19 bp, Homo sapiens
  siRNA target sequence for UBR1 (NM_174916.1,384-402).
ccaggacagtgttcataaa

SEQ ID NO: 231482 - DNA, 19 bp, Homo sapiens
  siRNA target sequence for UBR1 (NM_174916.1,406-424).
catcgttacaagatgcata

SEQ ID NO: 231483 - DNA, 19 bp, Homo sapiens
  siRNA target sequence for UBR1 (NM_174916.1,414-432).
caagatgcatacttctact

SEQ ID NO: 231484 - DNA, 19 bp, Homo sapiens
  siRNA target sequence for UBR1 (NM_174916.1,459-477).
cacagaggcatggaaaact

SEQ ID NO: 231485 - DNA, 19 bp, Homo sapiens
  siRNA target sequence for UBR1 (NM_174916.1,533-551).
cacgctgtccgttgaatga

SEQ ID NO: 231486 - DNA, 19 bp, Homo sapiens
  siRNA target sequence for UBR1 (NM_174916.1,536-554).
gctgtccgttgaatgaaga

SEQ ID NO: 231487 - DNA, 19 bp, Homo sapiens
  siRNA target sequence for UBR1 (NM_174916.1,542-560).
cgttgaatgaagaggtaat

SEQ ID NO: 231488 - DNA, 19 bp, Homo sapiens
  siRNA target sequence for UBR1 (NM_174916.1,543-561).
gttgaatgaagaggtaatt

SEQ ID NO: 231489 - DNA, 19 bp, Homo sapiens
  siRNA target sequence for UBR1 (NM_174916.1,562-580).
gtccaagccaggaaaatat

SEQ ID NO: 231490 - DNA, 19 bp, Homo sapiens
  siRNA target sequence for UBR1 (NM_174916.1,601-619).
gtcgtagaaatgactatat

SEQ ID NO: 231491 - DNA, 19 bp, Homo sapiens
  siRNA target sequence for UBR1 (NM_174916.1,640-658).
cctcctgaactccagataa

SEQ ID NO: 231492 - DNA, 19 bp, Homo sapiens
  siRNA target sequence for UBR1 (NM_174916.1,674-692).
gatactattgtgtcctttt

SEQ ID NO: 231493 - DNA, 19 bp, Homo sapiens
  siRNA target sequence for UBR1 (NM_174916.1,710-728).
catatgaccacgtcatata

SEQ ID NO: 231494 - DNA, 19 bp, Homo sapiens
  siRNA target sequence for UBR1 (NM_174916.1,779-797).
ccactgccattgacaaaga

SEQ ID NO: 231495 - DNA, 19 bp, Homo sapiens
  siRNA target sequence for UBR1 (NM_174916.1,879-897).
ctctcaacatccacttcat

SEQ ID NO: 231496 - DNA, 19 bp, Homo sapiens
  siRNA target sequence for UBR1 (NM_174916.1,889-907).
ccacttcatgtagaagtat

SEQ ID NO: 231497 - DNA, 19 bp, Homo sapiens
  siRNA target sequence for UBR1 (NM_174916.1,890-908).
cacttcatgtagaagtatt

SEQ ID NO: 231498 - DNA, 19 bp, Homo sapiens
  siRNA target sequence for UBR1 (NM_174916.1,895-913).
catgtagaagtattacact

SEQ ID NO: 231499 - DNA, 19 bp, Homo sapiens
  siRNA target sequence for UBR1 (NM_174916.1,1039-1057).
gagaatccctgtctcataa

SEQ ID NO: 231500 - DNA, 19 bp, Homo sapiens
  siRNA target sequence for UBR1 (NM_174916.1,1049-1067).
gtctcataagcaggttaat

SEQ ID NO: 231501 - DNA, 19 bp, Homo sapiens
  siRNA target sequence for UBR1 (NM_174916.1,1097-1115).
cccgtaagatccttcatga

SEQ ID NO: 231502 - DNA, 19 bp, Homo sapiens
  siRNA target sequence for UBR1 (NM_174916.1,1108-1126).
cttcatgaattgatcttca

SEQ ID NO: 231503 - DNA, 19 bp, Homo sapiens
  siRNA target sequence for UBR1 (NM_174916.1,1197-1215).
gcagaaagaatatatcagt

SEQ ID NO: 231504 - DNA, 19 bp, Homo sapiens
  siRNA target sequence for UBR1 (NM_174916.1,1219-1237).
gatcatgacagaagtatct

SEQ ID NO: 231505 - DNA, 19 bp, Homo sapiens
  siRNA target sequence for UBR1 (NM_174916.1,1225-1243).
gacagaagtatctctataa

SEQ ID NO: 231506 - DNA, 19 bp, Homo sapiens
  siRNA target sequence for UBR1 (NM_174916.1,1227-1245).
cagaagtatctctataact

SEQ ID NO: 231507 - DNA, 19 bp, Homo sapiens
  siRNA target sequence for UBR1 (NM_174916.1,1244-1262).
ctgcactttcagttcagat

SEQ ID NO: 231508 - DNA, 19 bp, Homo sapiens
  siRNA target sequence for UBR1 (NM_174916.1,1281-1299).
ggctcgacatcttattgaa

SEQ ID NO: 231509 - DNA, 19 bp, Homo sapiens
  siRNA target sequence for UBR1 (NM_174916.1,1421-1439).
cagtaatatgtgacctaaa

SEQ ID NO: 231510 - DNA, 19 bp, Homo sapiens
  siRNA target sequence for UBR1 (NM_174916.1,1423-1441).
gtaatatgtgacctaaagt

SEQ ID NO: 231511 - DNA, 19 bp, Homo sapiens
  siRNA target sequence for UBR1 (NM_174916.1,1501-1519).
ggttttcgatcttttttga

SEQ ID NO: 231512 - DNA, 19 bp, Homo sapiens
  siRNA target sequence for UBR1 (NM_174916.1,1502-1520).
gttttcgatcttttttgaa

SEQ ID NO: 231513 - DNA, 19 bp, Homo sapiens
  siRNA target sequence for UBR1 (NM_174916.1,1508-1526).
gatcttttttgaagattct

SEQ ID NO: 231514 - DNA, 19 bp, Homo sapiens
  siRNA target sequence for UBR1 (NM_174916.1,1595-1613).
gggaggctgccattgctat

SEQ ID NO: 231515 - DNA, 19 bp, Homo sapiens
  siRNA target sequence for UBR1 (NM_174916.1,1596-1614).
ggaggctgccattgctata

SEQ ID NO: 231516 - DNA, 19 bp, Homo sapiens
  siRNA target sequence for UBR1 (NM_174916.1,1718-1736).
ggtgcagtaccagtttcat

SEQ ID NO: 231517 - DNA, 19 bp, Homo sapiens
  siRNA target sequence for UBR1 (NM_174916.1,1719-1737).
gtgcagtaccagtttcata

SEQ ID NO: 231518 - DNA, 19 bp, Homo sapiens
  siRNA target sequence for UBR1 (NM_174916.1,1742-1760).
gtagcaagacagtagtaca

SEQ ID NO: 231519 - DNA, 19 bp, Homo sapiens
  siRNA target sequence for UBR1 (NM_174916.1,1798-1816).
gtatctgaggatcttgtaa

SEQ ID NO: 231520 - DNA, 19 bp, Homo sapiens
  siRNA target sequence for UBR1 (NM_174916.1,1806-1824).
ggatcttgtaagcatacat

SEQ ID NO: 231521 - DNA, 19 bp, Homo sapiens
  siRNA target sequence for UBR1 (NM_174916.1,1842-1860).
ccttgctggtcttcatgta

SEQ ID NO: 231522 - DNA, 19 bp, Homo sapiens
  siRNA target sequence for UBR1 (NM_174916.1,1849-1867).
ggtcttcatgtacgtttaa

SEQ ID NO: 231523 - DNA, 19 bp, Homo sapiens
  siRNA target sequence for UBR1 (NM_174916.1,1929-1947).
ggtactagtggaatatcct

SEQ ID NO: 231524 - DNA, 19 bp, Homo sapiens
  siRNA target sequence for UBR1 (NM_174916.1,2011-2029).
cttattagccaggtgtttt

SEQ ID NO: 231525 - DNA, 19 bp, Homo sapiens
  siRNA target sequence for UBR1 (NM_174916.1,2018-2036).
gccaggtgttttattacca

SEQ ID NO: 231526 - DNA, 19 bp, Homo sapiens
  siRNA target sequence for UBR1 (NM_174916.1,2019-2037).
ccaggtgttttattaccaa

SEQ ID NO: 231527 - DNA, 19 bp, Homo sapiens
  siRNA target sequence for UBR1 (NM_174916.1,2107-2125).
gatcccaataagttcttgt

SEQ ID NO: 231528 - DNA, 19 bp, Homo sapiens
  siRNA target sequence for UBR1 (NM_174916.1,2130-2148).
ggtacttcagaggtatgaa

SEQ ID NO: 231529 - DNA, 19 bp, Homo sapiens
  siRNA target sequence for UBR1 (NM_174916.1,2146-2164).
gaacttgccgaggctttta

SEQ ID NO: 231530 - DNA, 19 bp, Homo sapiens
  siRNA target sequence for UBR1 (NM_174916.1,2296-2314).
gaggtcacaatgagagaaa

SEQ ID NO: 231531 - DNA, 19 bp, Homo sapiens
  siRNA target sequence for UBR1 (NM_174916.1,2311-2329).
gaaatcattcacttgcttt

SEQ ID NO: 231532 - DNA, 19 bp, Homo sapiens
  siRNA target sequence for UBR1 (NM_174916.1,2351-2369).
gtgccattgccaaaaattt

SEQ ID NO: 231533 - DNA, 19 bp, Homo sapiens
  siRNA target sequence for UBR1 (NM_174916.1,2395-2413).
ggcttagagaatgtcataa

SEQ ID NO: 231534 - DNA, 19 bp, Homo sapiens
  siRNA target sequence for UBR1 (NM_174916.1,2447-2465).
caggccatggagtttatga

SEQ ID NO: 231535 - DNA, 19 bp, Homo sapiens
  siRNA target sequence for UBR1 (NM_174916.1,2450-2468).
gccatggagtttatgaact

SEQ ID NO: 231536 - DNA, 19 bp, Homo sapiens
  siRNA target sequence for UBR1 (NM_174916.1,2482-2500).
ctgaaagacttcaatatgt

SEQ ID NO: 231537 - DNA, 19 bp, Homo sapiens
  siRNA target sequence for UBR1 (NM_174916.1,2526-2544).
gcatagcaaggctgaacat

SEQ ID NO: 231538 - DNA, 19 bp, Homo sapiens
  siRNA target sequence for UBR1 (NM_174916.1,2625-2643).
cagcaaagtgattaacctt

SEQ ID NO: 231539 - DNA, 19 bp, Homo sapiens
  siRNA target sequence for UBR1 (NM_174916.1,2644-2662).
ctcaactgtgatatcatga

SEQ ID NO: 231540 - DNA, 19 bp, Homo sapiens
  siRNA target sequence for UBR1 (NM_174916.1,2667-2685).
cattctcaggaccgtattt

SEQ ID NO: 231541 - DNA, 19 bp, Homo sapiens
  siRNA target sequence for UBR1 (NM_174916.1,2698-2716).
gacacagattctaacttgt

SEQ ID NO: 231542 - DNA, 19 bp, Homo sapiens
  siRNA target sequence for UBR1 (NM_174916.1,2720-2738).
ccgaagggatgctccaaat

SEQ ID NO: 231543 - DNA, 19 bp, Homo sapiens
  siRNA target sequence for UBR1 (NM_174916.1,2803-2821).
gaagaagtaacatttgact

SEQ ID NO: 231544 - DNA, 19 bp, Homo sapiens
  siRNA target sequence for UBR1 (NM_174916.1,2813-2831).
catttgacttttatcataa

SEQ ID NO: 231545 - DNA, 19 bp, Homo sapiens
  siRNA target sequence for UBR1 (NM_174916.1,2849-2867).
gttcagccatgaatataca

SEQ ID NO: 231546 - DNA, 19 bp, Homo sapiens
  siRNA target sequence for UBR1 (NM_174916.1,2908-2926).
ggccagaaggacatgataa

SEQ ID NO: 231547 - DNA, 19 bp, Homo sapiens
  siRNA target sequence for UBR1 (NM_174916.1,2919-2937).
catgataacgtggatactt

SEQ ID NO: 231548 - DNA, 19 bp, Homo sapiens
  siRNA target sequence for UBR1 (NM_174916.1,2927-2945).
cgtggatacttcagatgtt

SEQ ID NO: 231549 - DNA, 19 bp, Homo sapiens
  siRNA target sequence for UBR1 (NM_174916.1,2928-2946).
gtggatacttcagatgttt

SEQ ID NO: 231550 - DNA, 19 bp, Homo sapiens
  siRNA target sequence for UBR1 (NM_174916.1,2930-2948).
ggatacttcagatgtttga

SEQ ID NO: 231551 - DNA, 19 bp, Homo sapiens
  siRNA target sequence for UBR1 (NM_174916.1,2949-2967).
cacagtgaagcgattaaga

SEQ ID NO: 231552 - DNA, 19 bp, Homo sapiens
  siRNA target sequence for UBR1 (NM_174916.1,2951-2969).
cagtgaagcgattaagaga

SEQ ID NO: 231553 - DNA, 19 bp, Homo sapiens
  siRNA target sequence for UBR1 (NM_174916.1,2959-2977).
cgattaagagaaaaatctt

SEQ ID NO: 231554 - DNA, 19 bp, Homo sapiens
  siRNA target sequence for UBR1 (NM_174916.1,2996-3014).
catcaggatcggaatctat

SEQ ID NO: 231555 - DNA, 19 bp, Homo sapiens
  siRNA target sequence for UBR1 (NM_174916.1,2999-3017).
caggatcggaatctattaa

SEQ ID NO: 231556 - DNA, 19 bp, Homo sapiens
  siRNA target sequence for UBR1 (NM_174916.1,3001-3019).
ggatcggaatctattaaga

SEQ ID NO: 231557 - DNA, 19 bp, Homo sapiens
  siRNA target sequence for UBR1 (NM_174916.1,3002-3020).
gatcggaatctattaagaa

SEQ ID NO: 231558 - DNA, 19 bp, Homo sapiens
  siRNA target sequence for UBR1 (NM_174916.1,3018-3036).
gaatgatgagattactcat

SEQ ID NO: 231559 - DNA, 19 bp, Homo sapiens
  siRNA target sequence for UBR1 (NM_174916.1,3022-3040).
gatgagattactcatgata

SEQ ID NO: 231560 - DNA, 19 bp, Homo sapiens
  siRNA target sequence for UBR1 (NM_174916.1,3080-3098).
ggctacatcgccagaagat

SEQ ID NO: 231561 - DNA, 19 bp, Homo sapiens
  siRNA target sequence for UBR1 (NM_174916.1,3082-3100).
ctacatcgccagaagatca

SEQ ID NO: 231562 - DNA, 19 bp, Homo sapiens
  siRNA target sequence for UBR1 (NM_174916.1,3140-3158).
ctcataaactcatgtatga

SEQ ID NO: 231563 - DNA, 19 bp, Homo sapiens
  siRNA target sequence for UBR1 (NM_174916.1,3153-3171).
gtatgacaatacatcagaa

SEQ ID NO: 231564 - DNA, 19 bp, Homo sapiens
  siRNA target sequence for UBR1 (NM_174916.1,3226-3244).
gactactctagaattgctt

SEQ ID NO: 231565 - DNA, 19 bp, Homo sapiens
  siRNA target sequence for UBR1 (NM_174916.1,3257-3275).
ggggtccatctgttactga

SEQ ID NO: 231566 - DNA, 19 bp, Homo sapiens
  siRNA target sequence for UBR1 (NM_174916.1,3293-3311).
gcatcctttgccaagaaga

SEQ ID NO: 231567 - DNA, 19 bp, Homo sapiens
  siRNA target sequence for UBR1 (NM_174916.1,3419-3437).
ccctagacccacttttcat

SEQ ID NO: 231568 - DNA, 19 bp, Homo sapiens
  siRNA target sequence for UBR1 (NM_174916.1,3442-3460).
ccagacttggcatatggaa

SEQ ID NO: 231569 - DNA, 19 bp, Homo sapiens
  siRNA target sequence for UBR1 (NM_174916.1,3469-3487).
ggaagctgtggtcatgtaa

SEQ ID NO: 231570 - DNA, 19 bp, Homo sapiens
  siRNA target sequence for UBR1 (NM_174916.1,3494-3512).
cagtgtgctggcagaagta

SEQ ID NO: 231571 - DNA, 19 bp, Homo sapiens
  siRNA target sequence for UBR1 (NM_174916.1,3536-3554).
ctcagcagcgcattcatgt

SEQ ID NO: 231572 - DNA, 19 bp, Homo sapiens
  siRNA target sequence for UBR1 (NM_174916.1,3545-3563).
gcattcatgttgacctttt

SEQ ID NO: 231573 - DNA, 19 bp, Homo sapiens
  siRNA target sequence for UBR1 (NM_174916.1,3546-3564).
cattcatgttgaccttttt

SEQ ID NO: 231574 - DNA, 19 bp, Homo sapiens
  siRNA target sequence for UBR1 (NM_174916.1,3550-3568).
catgttgacctttttgact

SEQ ID NO: 231575 - DNA, 19 bp, Homo sapiens
  siRNA target sequence for UBR1 (NM_174916.1,3694-3712).
ctggcacggtggatacaga

SEQ ID NO: 231576 - DNA, 19 bp, Homo sapiens
  siRNA target sequence for UBR1 (NM_174916.1,3711-3729).
gactgttctggccagaata

SEQ ID NO: 231577 - DNA, 19 bp, Homo sapiens
  siRNA target sequence for UBR1 (NM_174916.1,3720-3738).
ggccagaatatcaggttat

SEQ ID NO: 231578 - DNA, 19 bp, Homo sapiens
  siRNA target sequence for UBR1 (NM_174916.1,3721-3739).
gccagaatatcaggttata

SEQ ID NO: 231579 - DNA, 19 bp, Homo sapiens
  siRNA target sequence for UBR1 (NM_174916.1,3722-3740).
ccagaatatcaggttataa

SEQ ID NO: 231580 - DNA, 19 bp, Homo sapiens
  siRNA target sequence for UBR1 (NM_174916.1,3760-3778).
gaaaacccaattcctattt

SEQ ID NO: 231581 - DNA, 19 bp, Homo sapiens
  siRNA target sequence for UBR1 (NM_174916.1,3790-3808).
ggaatgggagattctactt

SEQ ID NO: 231582 - DNA, 19 bp, Homo sapiens
  siRNA target sequence for UBR1 (NM_174916.1,3835-3853).
ggcgttgagtcttcgatta

SEQ ID NO: 231583 - DNA, 19 bp, Homo sapiens
  siRNA target sequence for UBR1 (NM_174916.1,3836-3854).
gcgttgagtcttcgattaa

SEQ ID NO: 231584 - DNA, 19 bp, Homo sapiens
  siRNA target sequence for UBR1 (NM_174916.1,3837-3855).
cgttgagtcttcgattaaa

SEQ ID NO: 231585 - DNA, 19 bp, Homo sapiens
  siRNA target sequence for UBR1 (NM_174916.1,3838-3856).
gttgagtcttcgattaaat

SEQ ID NO: 231586 - DNA, 19 bp, Homo sapiens
  siRNA target sequence for UBR1 (NM_174916.1,3841-3859).
gagtcttcgattaaatatt

SEQ ID NO: 231587 - DNA, 19 bp, Homo sapiens
  siRNA target sequence for UBR1 (NM_174916.1,3843-3861).
gtcttcgattaaatattca

SEQ ID NO: 231588 - DNA, 19 bp, Homo sapiens
  siRNA target sequence for UBR1 (NM_174916.1,3845-3863).
cttcgattaaatattcaaa

SEQ ID NO: 231589 - DNA, 19 bp, Homo sapiens
  siRNA target sequence for UBR1 (NM_174916.1,3860-3878).
caaatagcatcaaggaaat

SEQ ID NO: 231590 - DNA, 19 bp, Homo sapiens
  siRNA target sequence for UBR1 (NM_174916.1,3968-3986).
gcacctgcgctttcactat

SEQ ID NO: 231591 - DNA, 19 bp, Homo sapiens
  siRNA target sequence for UBR1 (NM_174916.1,4084-4102).
gcagttgcacagaggatta

SEQ ID NO: 231592 - DNA, 19 bp, Homo sapiens
  siRNA target sequence for UBR1 (NM_174916.1,4106-4124).
gtcctcaggtcctgataca

SEQ ID NO: 231593 - DNA, 19 bp, Homo sapiens
  siRNA target sequence for UBR1 (NM_174916.1,4108-4126).
cctcaggtcctgatacaga

SEQ ID NO: 231594 - DNA, 19 bp, Homo sapiens
  siRNA target sequence for UBR1 (NM_174916.1,4129-4147).
catctggttcgtcttctat

SEQ ID NO: 231595 - DNA, 19 bp, Homo sapiens
  siRNA target sequence for UBR1 (NM_174916.1,4134-4152).
ggttcgtcttctatcagtt

SEQ ID NO: 231596 - DNA, 19 bp, Homo sapiens
  siRNA target sequence for UBR1 (NM_174916.1,4139-4157).
gtcttctatcagttgttct

SEQ ID NO: 231597 - DNA, 19 bp, Homo sapiens
  siRNA target sequence for UBR1 (NM_174916.1,4181-4199).
caccatgccttctgtctat

SEQ ID NO: 231598 - DNA, 19 bp, Homo sapiens
  siRNA target sequence for UBR1 (NM_174916.1,4187-4205).
gccttctgtctatagatct

SEQ ID NO: 231599 - DNA, 19 bp, Homo sapiens
  siRNA target sequence for UBR1 (NM_174916.1,4194-4212).
gtctatagatctgtttcat

SEQ ID NO: 231600 - DNA, 19 bp, Homo sapiens
  siRNA target sequence for UBR1 (NM_174916.1,4234-4252).
gcattcccatccttgtatt

SEQ ID NO: 231601 - DNA, 19 bp, Homo sapiens
  siRNA target sequence for UBR1 (NM_174916.1,4275-4293).
gccttcttcagttagttct

SEQ ID NO: 231602 - DNA, 19 bp, Homo sapiens
  siRNA target sequence for UBR1 (NM_174916.1,4283-4301).
cagttagttcttcctataa

SEQ ID NO: 231603 - DNA, 19 bp, Homo sapiens
  siRNA target sequence for UBR1 (NM_174916.1,4292-4310).
cttcctataaccaccttta

SEQ ID NO: 231604 - DNA, 19 bp, Homo sapiens
  siRNA target sequence for UBR1 (NM_174916.1,4295-4313).
cctataaccacctttatct

SEQ ID NO: 231605 - DNA, 19 bp, Homo sapiens
  siRNA target sequence for UBR1 (NM_174916.1,4408-4426).
gctcattccgcatcttctt

SEQ ID NO: 231606 - DNA, 19 bp, Homo sapiens
  siRNA target sequence for UBR1 (NM_174916.1,4409-4427).
ctcattccgcatcttcttt

SEQ ID NO: 231607 - DNA, 19 bp, Homo sapiens
  siRNA target sequence for UBR1 (NM_174916.1,4432-4450).
gcagaaatttctcaatata

SEQ ID NO: 231608 - DNA, 19 bp, Homo sapiens
  siRNA target sequence for UBR1 (NM_174916.1,4456-4474).
ggctccattgggtgtgata

SEQ ID NO: 231609 - DNA, 19 bp, Homo sapiens
  siRNA target sequence for UBR1 (NM_174916.1,4457-4475).
gctccattgggtgtgatat

SEQ ID NO: 231610 - DNA, 19 bp, Homo sapiens
  siRNA target sequence for UBR1 (NM_174916.1,4491-4509).
gtgggtctcactgaagaat

SEQ ID NO: 231611 - DNA, 19 bp, Homo sapiens
  siRNA target sequence for UBR1 (NM_174916.1,4528-4546).
cgctgtgctgcattgtttt

SEQ ID NO: 231612 - DNA, 19 bp, Homo sapiens
  siRNA target sequence for UBR1 (NM_174916.1,4574-4592).
ctgaggaactgcataccaa

SEQ ID NO: 231613 - DNA, 19 bp, Homo sapiens
  siRNA target sequence for UBR1 (NM_174916.1,4615-4633).
gcactctgtagctatctat

SEQ ID NO: 231614 - DNA, 19 bp, Homo sapiens
  siRNA target sequence for UBR1 (NM_174916.1,4618-4636).
ctctgtagctatctatctt

SEQ ID NO: 231615 - DNA, 19 bp, Homo sapiens
  siRNA target sequence for UBR1 (NM_174916.1,4630-4648).
ctatctttacctacaaatt

SEQ ID NO: 231616 - DNA, 19 bp, Homo sapiens
  siRNA target sequence for UBR1 (NM_174916.1,4634-4652).
ctttacctacaaatttgtt

SEQ ID NO: 231617 - DNA, 19 bp, Homo sapiens
  siRNA target sequence for UBR1 (NM_174916.1,4665-4683).
ggaatattgggatactgta

SEQ ID NO: 231618 - DNA, 19 bp, Homo sapiens
  siRNA target sequence for UBR1 (NM_174916.1,4708-4726).
gcagatcctgccttactaa

SEQ ID NO: 231619 - DNA, 19 bp, Homo sapiens
  siRNA target sequence for UBR1 (NM_174916.1,4714-4732).
cctgccttactaaactgtt

SEQ ID NO: 231620 - DNA, 19 bp, Homo sapiens
  siRNA target sequence for UBR1 (NM_174916.1,4752-4770).
ggtcaggtaccctagaaaa

SEQ ID NO: 231621 - DNA, 19 bp, Homo sapiens
  siRNA target sequence for UBR1 (NM_174916.1,4753-4771).
gtcaggtaccctagaaaaa

SEQ ID NO: 231622 - DNA, 19 bp, Homo sapiens
  siRNA target sequence for UBR1 (NM_174916.1,4757-4775).
ggtaccctagaaaaagaaa

SEQ ID NO: 231623 - DNA, 19 bp, Homo sapiens
  siRNA target sequence for UBR1 (NM_174916.1,4786-4804).
gagcttcctgatgactata

SEQ ID NO: 231624 - DNA, 19 bp, Homo sapiens
  siRNA target sequence for UBR1 (NM_174916.1,4841-4859).
cacggtctgcagatgatga

SEQ ID NO: 231625 - DNA, 19 bp, Homo sapiens
  siRNA target sequence for UBR1 (NM_174916.1,4887-4905).
ctgtggggctatactatgt

SEQ ID NO: 231626 - DNA, 19 bp, Homo sapiens
  siRNA target sequence for UBR1 (NM_174916.1,4947-4965).
ggttggagcttgcattttt

SEQ ID NO: 231627 - DNA, 19 bp, Homo sapiens
  siRNA target sequence for UBR1 (NM_174916.1,5057-5075).
cctatccagctccttactt

SEQ ID NO: 231628 - DNA, 19 bp, Homo sapiens
  siRNA target sequence for UBR1 (NM_174916.1,5112-5130).
gggcaacccccttcattta

SEQ ID NO: 231629 - DNA, 19 bp, Homo sapiens
  siRNA target sequence for UBR1 (NM_174916.1,5141-5159).
ggtatcggaagctccattt

SEQ ID NO: 231630 - DNA, 19 bp, Homo sapiens
  siRNA target sequence for UBR1 (NM_174916.1,5165-5183).
ggcaacaacactgcattat

SEQ ID NO: 231631 - DNA, 19 bp, Homo sapiens
  siRNA target sequence for UBR1 (NM_174916.1,5166-5184).
gcaacaacactgcattata

SEQ ID NO: 231632 - DNA, 19 bp, Homo sapiens
  siRNA target sequence for UBR1 (NM_174916.1,5198-5216).
ggagccaagagactaatca

SEQ ID NO: 231633 - DNA, 19 bp, Homo sapiens
  siRNA target sequence for UBR1 (NM_174916.1,5208-5226).
gactaatcagatgttattt

SEQ ID NO: 231634 - DNA, 19 bp, Homo sapiens
  siRNA target sequence for C6orf104 (NM_031949.2,101-119).
gccaggcgctgggatcttt

SEQ ID NO: 231635 - DNA, 19 bp, Homo sapiens
  siRNA target sequence for C6orf104 (NM_031949.2,103-121).
caggcgctgggatctttga

SEQ ID NO: 231636 - DNA, 19 bp, Homo sapiens
  siRNA target sequence for C6orf104 (NM_031949.2,134-152).
cagcctttacccttaacat

SEQ ID NO: 231637 - DNA, 19 bp, Homo sapiens
  siRNA target sequence for C6orf104 (NM_031949.2,383-401).
gggggtggaataagtttga

SEQ ID NO: 231638 - DNA, 19 bp, Homo sapiens
  siRNA target sequence for C6orf104 (NM_031949.2,384-402).
ggggtggaataagtttgat

SEQ ID NO: 231639 - DNA, 19 bp, Homo sapiens
  siRNA target sequence for C6orf104 (NM_031949.2,386-404).
ggtggaataagtttgataa

SEQ ID NO: 231640 - DNA, 19 bp, Homo sapiens
  siRNA target sequence for C6orf104 (NM_031949.2,465-483).
cgaacacaacagtgttaaa

SEQ ID NO: 231641 - DNA, 19 bp, Homo sapiens
  siRNA target sequence for C6orf104 (NM_031949.2,485-503).
cgtggcagcagctaaacca

SEQ ID NO: 231642 - DNA, 19 bp, Homo sapiens
  siRNA target sequence for C6orf104 (NM_031949.2,612-630).
cgtcatgcccaatgactat

SEQ ID NO: 231643 - DNA, 19 bp, Homo sapiens
  siRNA target sequence for C6orf104 (NM_031949.2,613-631).
gtcatgcccaatgactata

SEQ ID NO: 231644 - DNA, 19 bp, Homo sapiens
  siRNA target sequence for C6orf104 (NM_031949.2,632-650).
ccaagttcgtggctgaata

SEQ ID NO: 231645 - DNA, 19 bp, Homo sapiens
  siRNA target sequence for C6orf104 (NM_031949.2,672-690).
gggcaccaagcatagctat

SEQ ID NO: 231646 - DNA, 19 bp, Homo sapiens
  siRNA target sequence for C6orf104 (NM_031949.2,673-691).
ggcaccaagcatagctatt

SEQ ID NO: 231647 - DNA, 19 bp, Homo sapiens
  siRNA target sequence for C6orf104 (NM_031949.2,677-695).
ccaagcatagctattggat

SEQ ID NO: 231648 - DNA, 19 bp, Homo sapiens
  siRNA target sequence for C6orf104 (NM_031949.2,718-736).
cgtgggagggggatactaa

SEQ ID NO: 231649 - DNA, 19 bp, Homo sapiens
  siRNA target sequence for C6orf104 (NM_031949.2,719-737).
gtgggagggggatactaat

SEQ ID NO: 231650 - DNA, 19 bp, Homo sapiens
  siRNA target sequence for C6orf104 (NM_031949.2,726-744).
ggggatactaattttcagt

SEQ ID NO: 231651 - DNA, 19 bp, Homo sapiens
  siRNA target sequence for C6orf104 (NM_031949.2,827-845).
gtgatctccgcatctatgt

SEQ ID NO: 231652 - DNA, 19 bp, Homo sapiens
  siRNA target sequence for C6orf104 (NM_031949.2,829-847).
gatctccgcatctatgttt

SEQ ID NO: 231653 - DNA, 19 bp, Homo sapiens
  siRNA target sequence for C6orf104 (NM_031949.2,834-852).
ccgcatctatgtttgtgtt

SEQ ID NO: 231654 - DNA, 19 bp, Homo sapiens
  siRNA target sequence for C6orf104 (NM_031949.2,901-919).
cggtttgccacggaaaagt

SEQ ID NO: 231655 - DNA, 19 bp, Homo sapiens
  siRNA target sequence for C6orf104 (NM_031949.2,902-920).
ggtttgccacggaaaagtt

SEQ ID NO: 231656 - DNA, 19 bp, Homo sapiens
  siRNA target sequence for C6orf104 (NM_031949.2,985-1003).
gcctcttatgagaagatca

SEQ ID NO: 231657 - DNA, 19 bp, Homo sapiens
  siRNA target sequence for C6orf104 (NM_031949.2,986-1004).
cctcttatgagaagatcaa

SEQ ID NO: 231658 - DNA, 19 bp, Homo sapiens
  siRNA target sequence for C6orf104 (NM_031949.2,987-1005).
ctcttatgagaagatcaaa

SEQ ID NO: 231659 - DNA, 19 bp, Homo sapiens
  siRNA target sequence for C6orf104 (NM_031949.2,1011-1029).
gattggtcatggttgtaaa

SEQ ID NO: 231660 - DNA, 19 bp, Homo sapiens
  siRNA target sequence for C6orf104 (NM_031949.2,1031-1049).
ggacgctcagcagattttt

SEQ ID NO: 231661 - DNA, 19 bp, Homo sapiens
  siRNA target sequence for C6orf104 (NM_031949.2,1102-1120).
caccgcatggttattctca

SEQ ID NO: 231662 - DNA, 19 bp, Homo sapiens
  siRNA target sequence for C6orf104 (NM_031949.2,1148-1166).
cctttgctgccaattgctt

SEQ ID NO: 231663 - DNA, 19 bp, Homo sapiens
  siRNA target sequence for C6orf104 (NM_031949.2,1168-1186).
gagctctttgggtttgata

SEQ ID NO: 231664 - DNA, 19 bp, Homo sapiens
  siRNA target sequence for C6orf104 (NM_031949.2,1214-1232).
ggcttttagaggtcaacta

SEQ ID NO: 231665 - DNA, 19 bp, Homo sapiens
  siRNA target sequence for C6orf104 (NM_031949.2,1216-1234).
cttttagaggtcaactaca

SEQ ID NO: 231666 - DNA, 19 bp, Homo sapiens
  siRNA target sequence for C6orf104 (NM_031949.2,1240-1258).
gccttgaccttggattgtt

SEQ ID NO: 231667 - DNA, 19 bp, Homo sapiens
  siRNA target sequence for C6orf104 (NM_031949.2,1248-1266).
cttggattgttcaacagat

SEQ ID NO: 231668 - DNA, 19 bp, Homo sapiens
  siRNA target sequence for C6orf104 (NM_031949.2,1280-1298).
gaaaacttgtccatgatat

SEQ ID NO: 231669 - DNA, 19 bp, Homo sapiens
  siRNA target sequence for C6orf104 (NM_031949.2,1349-1367).
gtaatgccacacatggaaa

SEQ ID NO: 231670 - DNA, 19 bp, Homo sapiens
  siRNA target sequence for C6orf104 (NM_031949.2,1354-1372).
gccacacatggaaattcca

SEQ ID NO: 231671 - DNA, 19 bp, Homo sapiens
  siRNA target sequence for C6orf104 (NM_031949.2,1419-1437).
ctgtcttccttatgattct

SEQ ID NO: 231672 - DNA, 19 bp, Homo sapiens
  siRNA target sequence for C6orf104 (NM_031949.2,1432-1450).
gattctctttcgttcacaa

SEQ ID NO: 231673 - DNA, 19 bp, Homo sapiens
  siRNA target sequence for C6orf104 (NM_031949.2,1442-1460).
cgttcacaagcagaatgta

SEQ ID NO: 231674 - DNA, 19 bp, Homo sapiens
  siRNA target sequence for C6orf104 (NM_031949.2,1539-1557).
gatgagtgggcaggatttt

SEQ ID NO: 231675 - DNA, 19 bp, Homo sapiens
  siRNA target sequence for FLJ35808 (NM_173623.1,131-149).
ccaccttcagtgcatactt

SEQ ID NO: 231676 - DNA, 19 bp, Homo sapiens
  siRNA target sequence for FLJ35808 (NM_173623.1,229-247).
cccatcatcaggcataact

SEQ ID NO: 231677 - DNA, 19 bp, Homo sapiens
  siRNA target sequence for FLJ35808 (NM_173623.1,315-333).
gttggaccacaaactcaaa

SEQ ID NO: 231678 - DNA, 19 bp, Homo sapiens
  siRNA target sequence for FLJ35808 (NM_173623.1,374-392).
ccgactctcggttggataa

SEQ ID NO: 231679 - DNA, 19 bp, Homo sapiens
  siRNA target sequence for FLJ35808 (NM_173623.1,375-393).
cgactctcggttggataaa

SEQ ID NO: 231680 - DNA, 19 bp, Homo sapiens
  siRNA target sequence for FLJ35808 (NM_173623.1,495-513).
cctgcagcagtgttgttct

SEQ ID NO: 231681 - DNA, 19 bp, Homo sapiens
  siRNA target sequence for FLJ35808 (NM_173623.1,550-568).
gccgtgcagttaaagaaaa

SEQ ID NO: 231682 - DNA, 19 bp, Homo sapiens
  siRNA target sequence for FLJ35808 (NM_173623.1,595-613).
ggagggttccgactgattt

SEQ ID NO: 231683 - DNA, 19 bp, Homo sapiens
  siRNA target sequence for FLJ35808 (NM_173623.1,596-614).
gagggttccgactgattta

SEQ ID NO: 231684 - DNA, 19 bp, Homo sapiens
  siRNA target sequence for FLJ35808 (NM_173623.1,609-627).
gatttatcccagtctgaat

SEQ ID NO: 231685 - DNA, 19 bp, Homo sapiens
  siRNA target sequence for FLJ35808 (NM_173623.1,620-638).
gtctgaattcggagaagta

SEQ ID NO: 231686 - DNA, 19 bp, Homo sapiens
  siRNA target sequence for FLJ35808 (NM_173623.1,888-906).
catccagccattgacatta

SEQ ID NO: 231687 - DNA, 19 bp, Homo sapiens
  siRNA target sequence for FLJ35808 (NM_173623.1,896-914).
cattgacattagtatccta

SEQ ID NO: 231688 - DNA, 19 bp, Homo sapiens
  siRNA target sequence for FLJ35808 (NM_173623.1,994-1012).
gaggaggccagctctgttt

SEQ ID NO: 231689 - DNA, 19 bp, Homo sapiens
  siRNA target sequence for FLJ35808 (NM_173623.1,1032-1050).
gaagcccttcagttctcta

SEQ ID NO: 231690 - DNA, 19 bp, Homo sapiens
  siRNA target sequence for FLJ35808 (NM_173623.1,1048-1066).
ctacccgatctgaggaata

SEQ ID NO: 231691 - DNA, 19 bp, Homo sapiens
  siRNA target sequence for FLJ35808 (NM_173623.1,1051-1069).
cccgatctgaggaatatca

SEQ ID NO: 231692 - DNA, 19 bp, Homo sapiens
  siRNA target sequence for FLJ35808 (NM_173623.1,1052-1070).
ccgatctgaggaatatcaa

SEQ ID NO: 231693 - DNA, 19 bp, Homo sapiens
  siRNA target sequence for FLJ35808 (NM_173623.1,1053-1071).
cgatctgaggaatatcaat

SEQ ID NO: 231694 - DNA, 19 bp, Homo sapiens
  siRNA target sequence for FLJ35808 (NM_173623.1,1057-1075).
ctgaggaatatcaatctca

SEQ ID NO: 231695 - DNA, 19 bp, Homo sapiens
  siRNA target sequence for FLJ35808 (NM_173623.1,1132-1150).
gcctctgcagtgaacgtat

SEQ ID NO: 231696 - DNA, 19 bp, Homo sapiens
  siRNA target sequence for FLJ35808 (NM_173623.1,1133-1151).
cctctgcagtgaacgtatt

SEQ ID NO: 231697 - DNA, 19 bp, Homo sapiens
  siRNA target sequence for FLJ35808 (NM_173623.1,1156-1174).
ggcactgtgcacttaacct

SEQ ID NO: 231698 - DNA, 19 bp, Homo sapiens
  siRNA target sequence for FLJ35808 (NM_173623.1,1165-1183).
cacttaacctccgtagaaa

SEQ ID NO: 231699 - DNA, 19 bp, Homo sapiens
  siRNA target sequence for FLJ35808 (NM_173623.1,1277-1295).
cggacagggtggtatcctt

SEQ ID NO: 231700 - DNA, 19 bp, Homo sapiens
  siRNA target sequence for FLJ35808 (NM_173623.1,1278-1296).
ggacagggtggtatccttt

SEQ ID NO: 231701 - DNA, 19 bp, Homo sapiens
  siRNA target sequence for FLJ35808 (NM_173623.1,1279-1297).
gacagggtggtatccttta

SEQ ID NO: 231702 - DNA, 19 bp, Homo sapiens
  siRNA target sequence for FLJ35808 (NM_173623.1,1281-1299).
cagggtggtatcctttaaa

SEQ ID NO: 231703 - DNA, 19 bp, Homo sapiens
  siRNA target sequence for FLJ35808 (NM_173623.1,1401-1419).
ctggactttgctaaagagt

SEQ ID NO: 231704 - DNA, 19 bp, Homo sapiens
  siRNA target sequence for FLJ35808 (NM_173623.1,1425-1443).
gaacaagccacatttgata

SEQ ID NO: 231705 - DNA, 19 bp, Homo sapiens
  siRNA target sequence for FLJ35808 (NM_173623.1,1507-1525).
cccaagctggggatgaata

SEQ ID NO: 231706 - DNA, 19 bp, Homo sapiens
  siRNA target sequence for FLJ35808 (NM_173623.1,1623-1641).
gagtcctcagagctataat

SEQ ID NO: 231707 - DNA, 19 bp, Homo sapiens
  siRNA target sequence for FLJ35808 (NM_173623.1,1625-1643).
gtcctcagagctataatgt

SEQ ID NO: 231708 - DNA, 19 bp, Homo sapiens
  siRNA target sequence for FLJ36119 (NM_153254.1,326-344).
cagactcggatgacactaa

SEQ ID NO: 231709 - DNA, 19 bp, Homo sapiens
  siRNA target sequence for FLJ36119 (NM_153254.1,871-889).
gatgaaacccagatatgga

SEQ ID NO: 231710 - DNA, 19 bp, Homo sapiens
  siRNA target sequence for FLJ36119 (NM_153254.1,1118-1136).
ccacaccctacatgatctt

SEQ ID NO: 231711 - DNA, 19 bp, Homo sapiens
  siRNA target sequence for KIAA0153 (NM_015140.1,125-143).
cgggggtccccgaacgtta

SEQ ID NO: 231712 - DNA, 19 bp, Homo sapiens
  siRNA target sequence for KIAA0153 (NM_015140.1,183-201).
cgacgctggggaagtgttt

SEQ ID NO: 231713 - DNA, 19 bp, Homo sapiens
  siRNA target sequence for KIAA0153 (NM_015140.1,629-647).
ccacggcacccttcttcta

SEQ ID NO: 231714 - DNA, 19 bp, Homo sapiens
  siRNA target sequence for KIAA0153 (NM_015140.1,994-1012).
gccgacatcctcttcaact

SEQ ID NO: 231715 - DNA, 19 bp, Homo sapiens
  siRNA target sequence for KIAA0153 (NM_015140.1,1451-1469).
ggttgttcgtgtatgatgt

SEQ ID NO: 231716 - DNA, 19 bp, Homo sapiens
  siRNA target sequence for KIAA0153 (NM_015140.1,1531-1549).
cacttcacggtcatgaact

SEQ ID NO: 231717 - DNA, 19 bp, Homo sapiens
  siRNA target sequence for KIAA0153 (NM_015140.1,1533-1551).
cttcacggtcatgaactat

SEQ ID NO: 231718 - DNA, 19 bp, Homo sapiens
  siRNA target sequence for KIAA0153 (NM_015140.1,1608-1626).
gaagcaatacccagaattt

SEQ ID NO: 231719 - DNA, 19 bp, Homo sapiens
  siRNA target sequence for KIAA0173 (NM_014640.1,217-235).
gcaggaacacagcactata

SEQ ID NO: 231720 - DNA, 19 bp, Homo sapiens
  siRNA target sequence for KIAA0173 (NM_014640.1,220-238).
ggaacacagcactatagta

SEQ ID NO: 231721 - DNA, 19 bp, Homo sapiens
  siRNA target sequence for KIAA0173 (NM_014640.1,221-239).
gaacacagcactatagtat

SEQ ID NO: 231722 - DNA, 19 bp, Homo sapiens
  siRNA target sequence for KIAA0173 (NM_014640.1,450-468).
cttttgccccagcacttta

SEQ ID NO: 231723 - DNA, 19 bp, Homo sapiens
  siRNA target sequence for KIAA0173 (NM_014640.1,504-522).
cagcagttcctgttaccta

SEQ ID NO: 231724 - DNA, 19 bp, Homo sapiens
  siRNA target sequence for KIAA0173 (NM_014640.1,567-585).
ctccagctataggcaaaaa

SEQ ID NO: 231725 - DNA, 19 bp, Homo sapiens
  siRNA target sequence for KIAA0173 (NM_014640.1,849-867).
gcccatgctgaataataat

SEQ ID NO: 231726 - DNA, 19 bp, Homo sapiens
  siRNA target sequence for KIAA0173 (NM_014640.1,887-905).
gcacgccagtgcctttatt

SEQ ID NO: 231727 - DNA, 19 bp, Homo sapiens
  siRNA target sequence for KIAA0173 (NM_014640.1,890-908).
cgccagtgcctttattgca

SEQ ID NO: 231728 - DNA, 19 bp, Homo sapiens
  siRNA target sequence for KIAA0173 (NM_014640.1,952-970).
cctgtctcctggcatcatt

SEQ ID NO: 231729 - DNA, 19 bp, Homo sapiens
  siRNA target sequence for KIAA0173 (NM_014640.1,995-1013).
cgcagcctgttgaccataa

SEQ ID NO: 231730 - DNA, 19 bp, Homo sapiens
  siRNA target sequence for KIAA0173 (NM_014640.1,1054-1072).
gcccatatcgccttgtcta

SEQ ID NO: 231731 - DNA, 19 bp, Homo sapiens
  siRNA target sequence for KIAA0173 (NM_014640.1,1115-1133).
cctggtataaccggaataa

SEQ ID NO: 231732 - DNA, 19 bp, Homo sapiens
  siRNA target sequence for KIAA0173 (NM_014640.1,1118-1136).
ggtataaccggaataactt

SEQ ID NO: 231733 - DNA, 19 bp, Homo sapiens
  siRNA target sequence for KIAA0173 (NM_014640.1,1119-1137).
gtataaccggaataactta

SEQ ID NO: 231734 - DNA, 19 bp, Homo sapiens
  siRNA target sequence for KIAA0173 (NM_014640.1,1344-1362).
gaaacctcctgcggtaaat

SEQ ID NO: 231735 - DNA, 19 bp, Homo sapiens
  siRNA target sequence for KIAA0173 (NM_014640.1,1409-1427).
ctggtgcctcagatacctt

SEQ ID NO: 231736 - DNA, 19 bp, Homo sapiens
  siRNA target sequence for KIAA0173 (NM_014640.1,1489-1507).
gccagtgggctcaatcaca

SEQ ID NO: 231737 - DNA, 19 bp, Homo sapiens
  siRNA target sequence for KIAA0173 (NM_014640.1,1665-1683).
ggagctggactcatctgat

SEQ ID NO: 231738 - DNA, 19 bp, Homo sapiens
  siRNA target sequence for KIAA0173 (NM_014640.1,1772-1790).
gttgtagccgtgatgagaa

SEQ ID NO: 231739 - DNA, 19 bp, Homo sapiens
  siRNA target sequence for KIAA0173 (NM_014640.1,1775-1793).
gtagccgtgatgagaatga

SEQ ID NO: 231740 - DNA, 19 bp, Homo sapiens
  siRNA target sequence for KIAA0173 (NM_014640.1,1846-1864).
gaatcggtggccatgatct

SEQ ID NO: 231741 - DNA, 19 bp, Homo sapiens
  siRNA target sequence for KIAA0173 (NM_014640.1,1863-1881).
ctctagaagctgtatggaa

SEQ ID NO: 231742 - DNA, 19 bp, Homo sapiens
  siRNA target sequence for KIAA0173 (NM_014640.1,1901-1919).
ccaatcatgagaaagttgt

SEQ ID NO: 231743 - DNA, 19 bp, Homo sapiens
  siRNA target sequence for KIAA0173 (NM_014640.1,1953-1971).
cgttccccctaccatctat

SEQ ID NO: 231744 - DNA, 19 bp, Homo sapiens
  siRNA target sequence for KIAA0173 (NM_014640.1,2077-2095).
ggacggtcccacttcaaaa

SEQ ID NO: 231745 - DNA, 19 bp, Homo sapiens
  siRNA target sequence for KIAA0173 (NM_014640.1,2078-2096).
gacggtcccacttcaaaat

SEQ ID NO: 231746 - DNA, 19 bp, Homo sapiens
  siRNA target sequence for KIAA0173 (NM_014640.1,2080-2098).
cggtcccacttcaaaatca

SEQ ID NO: 231747 - DNA, 19 bp, Homo sapiens
  siRNA target sequence for KIAA0173 (NM_014640.1,2172-2190).
gcatcagaagctaaaccat

SEQ ID NO: 231748 - DNA, 19 bp, Homo sapiens
  siRNA target sequence for KIAA0173 (NM_014640.1,2173-2191).
catcagaagctaaaccatt

SEQ ID NO: 231749 - DNA, 19 bp, Homo sapiens
  siRNA target sequence for KIAA0173 (NM_014640.1,2499-2517).
cctgcggatctatgtttat

SEQ ID NO: 231750 - DNA, 19 bp, Homo sapiens
  siRNA target sequence for KIAA0173 (NM_014640.1,2538-2556).
gcggatttacctcttttca

SEQ ID NO: 231751 - DNA, 19 bp, Homo sapiens
  siRNA target sequence for KIAA0173 (NM_014640.1,2606-2624).
gccttggcaataagttcat

SEQ ID NO: 231752 - DNA, 19 bp, Homo sapiens
  siRNA target sequence for KIAA0173 (NM_014640.1,2631-2649).
gaccaactacagtgtcaat

SEQ ID NO: 231753 - DNA, 19 bp, Homo sapiens
  siRNA target sequence for KIAA0173 (NM_014640.1,2689-2707).
gcttgccagggccacaaat

SEQ ID NO: 231754 - DNA, 19 bp, Homo sapiens
  siRNA target sequence for KIAA0173 (NM_014640.1,2781-2799).
ggatgttgttgtcaaaact

SEQ ID NO: 231755 - DNA, 19 bp, Homo sapiens
  siRNA target sequence for KIAA0173 (NM_014640.1,2782-2800).
gatgttgttgtcaaaacta

SEQ ID NO: 231756 - DNA, 19 bp, Homo sapiens
  siRNA target sequence for KIAA0173 (NM_014640.1,2788-2806).
gttgtcaaaactatcatct

SEQ ID NO: 231757 - DNA, 19 bp, Homo sapiens
  siRNA target sequence for KIAA0173 (NM_014640.1,2828-2846).
gcctgctcaagatgtatgt

SEQ ID NO: 231758 - DNA, 19 bp, Homo sapiens
  siRNA target sequence for KIAA0173 (NM_014640.1,2845-2863).
gtgcgacggccctatagct

SEQ ID NO: 231759 - DNA, 19 bp, Homo sapiens
  siRNA target sequence for KIAA0173 (NM_014640.1,2855-2873).
cctatagctgccatgaact

SEQ ID NO: 231760 - DNA, 19 bp, Homo sapiens
  siRNA target sequence for KIAA0173 (NM_014640.1,2864-2882).
gccatgaactctttggttt

SEQ ID NO: 231761 - DNA, 19 bp, Homo sapiens
  siRNA target sequence for KIAA0173 (NM_014640.1,2869-2887).
gaactctttggttttgaca

SEQ ID NO: 231762 - DNA, 19 bp, Homo sapiens
  siRNA target sequence for KIAA0173 (NM_014640.1,2915-2933).
gggtcctggaagtcaacat

SEQ ID NO: 231763 - DNA, 19 bp, Homo sapiens
  siRNA target sequence for KIAA0173 (NM_014640.1,3025-3043).
cccaatgcagaggatatca

SEQ ID NO: 231764 - DNA, 19 bp, Homo sapiens
  siRNA target sequence for KIAA0173 (NM_014640.1,3026-3044).
ccaatgcagaggatatcat

SEQ ID NO: 231765 - DNA, 19 bp, Homo sapiens
  siRNA target sequence for KIAA0173 (NM_014640.1,3027-3045).
caatgcagaggatatcatt

SEQ ID NO: 231766 - DNA, 19 bp, Homo sapiens
  siRNA target sequence for KIAA0173 (NM_014640.1,3178-3196).
gatcaggacttctatgcat

SEQ ID NO: 231767 - DNA, 19 bp, Homo sapiens
  siRNA target sequence for KIAA0173 (NM_014640.1,3268-3286).
ggtcagtttgaacgaattt

SEQ ID NO: 231768 - DNA, 19 bp, Homo sapiens
  siRNA target sequence for KIAA0173 (NM_014640.1,3269-3287).
gtcagtttgaacgaatttt

SEQ ID NO: 231769 - DNA, 19 bp, Homo sapiens
  siRNA target sequence for KIAA0173 (NM_014640.1,3305-3323).
ctcgctatctccgcttttt

SEQ ID NO: 231770 - DNA, 19 bp, Homo sapiens
  siRNA target sequence for KIAA0173 (NM_014640.1,3308-3326).
gctatctccgcttttttga

SEQ ID NO: 231771 - DNA, 19 bp, Homo sapiens
  siRNA target sequence for KIAA0173 (NM_014640.1,3325-3343).
gagcagccacgatatttca

SEQ ID NO: 231772 - DNA, 19 bp, Homo sapiens
  siRNA target sequence for KIAA0173 (NM_014640.1,3328-3346).
cagccacgatatttcaaca

SEQ ID NO: 231773 - DNA, 19 bp, Homo sapiens
  siRNA target sequence for KIAA0173 (NM_014640.1,3330-3348).
gccacgatatttcaacatt

SEQ ID NO: 231774 - DNA, 19 bp, Homo sapiens
  siRNA target sequence for KIAA0173 (NM_014640.1,3332-3350).
cacgatatttcaacattct

SEQ ID NO: 231775 - DNA, 19 bp, Homo sapiens
  siRNA target sequence for KIAA0173 (NM_014640.1,3384-3402).
caagcttaaaggagtagat

SEQ ID NO: 231776 - DNA, 19 bp, Homo sapiens
  siRNA target sequence for KIAA0173 (NM_014640.1,3468-3486).
gtctctcccgacatcactt

SEQ ID NO: 231777 - DNA, 19 bp, Homo sapiens
  siRNA target sequence for KIAA0173 (NM_014640.1,3497-3515).
caaaggatgacgtgatact

SEQ ID NO: 231778 - DNA, 19 bp, Homo sapiens
  siRNA target sequence for KIAA0173 (NM_014640.1,3501-3519).
ggatgacgtgatactcaat

SEQ ID NO: 231779 - DNA, 19 bp, Homo sapiens
  siRNA target sequence for KIAA0173 (NM_014640.1,3539-3557).
ctagcaagctgggaaaaca

SEQ ID NO: 231780 - DNA, 19 bp, Homo sapiens
  siRNA target sequence for KIAA0173 (NM_014640.1,3566-3584).
gtgaggttagcctactact

SEQ ID NO: 231781 - DNA, 19 bp, Homo sapiens
  siRNA target sequence for KIAA0173 (NM_014640.1,3595-3613).
gggaccacgcccaaatcca

SEQ ID NO: 231782 - DNA, 19 bp, Homo sapiens
  siRNA target sequence for KIAA0173 (NM_014640.1,3596-3614).
ggaccacgcccaaatccaa

SEQ ID NO: 231783 - DNA, 19 bp, Homo sapiens
  siRNA target sequence for KIAA0173 (NM_014640.1,3733-3751).
gggcagacttcaagacttt

SEQ ID NO: 231784 - DNA, 19 bp, Homo sapiens
  siRNA target sequence for KIAA0998 (NM_015072.2,76-94).
ggagatcaaagttttacga

SEQ ID NO: 231785 - DNA, 19 bp, Homo sapiens
  siRNA target sequence for KIAA0998 (NM_015072.2,77-95).
gagatcaaagttttacgaa

SEQ ID NO: 231786 - DNA, 19 bp, Homo sapiens
  siRNA target sequence for KIAA0998 (NM_015072.2,113-131).
gatcggcgaggtggattta

SEQ ID NO: 231787 - DNA, 19 bp, Homo sapiens
  siRNA target sequence for KIAA0998 (NM_015072.2,123-141).
gtggatttattcgcatatt

SEQ ID NO: 231788 - DNA, 19 bp, Homo sapiens
  siRNA target sequence for KIAA0998 (NM_015072.2,171-189).
ggtcctacctcgagcataa

SEQ ID NO: 231789 - DNA, 19 bp, Homo sapiens
  siRNA target sequence for KIAA0998 (NM_015072.2,182-200).
gagcataagacctcaatga

SEQ ID NO: 231790 - DNA, 19 bp, Homo sapiens
  siRNA target sequence for KIAA0998 (NM_015072.2,185-203).
cataagacctcaatgaact

SEQ ID NO: 231791 - DNA, 19 bp, Homo sapiens
  siRNA target sequence for KIAA0998 (NM_015072.2,288-306).
gagcgccagaattgaagat

SEQ ID NO: 231792 - DNA, 19 bp, Homo sapiens
  siRNA target sequence for KIAA0998 (NM_015072.2,291-309).
cgccagaattgaagataga

SEQ ID NO: 231793 - DNA, 19 bp, Homo sapiens
  siRNA target sequence for KIAA0998 (NM_015072.2,389-407).
cgacggagtagcagattga

SEQ ID NO: 231794 - DNA, 19 bp, Homo sapiens
  siRNA target sequence for KIAA0998 (NM_015072.2,408-426).
gggcaatgaggccaaaata

SEQ ID NO: 231795 - DNA, 19 bp, Homo sapiens
  siRNA target sequence for KIAA0998 (NM_015072.2,541-559).
gtctgcaggatttcttaga

SEQ ID NO: 231796 - DNA, 19 bp, Homo sapiens
  siRNA target sequence for KIAA0998 (NM_015072.2,545-563).
gcaggatttcttagagaaa

SEQ ID NO: 231797 - DNA, 19 bp, Homo sapiens
  siRNA target sequence for KIAA0998 (NM_015072.2,628-646).
gaaagttcgtgaatggaat

SEQ ID NO: 231798 - DNA, 19 bp, Homo sapiens
  siRNA target sequence for KIAA0998 (NM_015072.2,632-650).
gttcgtgaatggaataata

SEQ ID NO: 231799 - DNA, 19 bp, Homo sapiens
  siRNA target sequence for KIAA0998 (NM_015072.2,703-721).
cctgatgcagattcttcaa

SEQ ID NO: 231800 - DNA, 19 bp, Homo sapiens
  siRNA target sequence for KIAA0998 (NM_015072.2,719-737).
caagataatggcaatctta

SEQ ID NO: 231801 - DNA, 19 bp, Homo sapiens
  siRNA target sequence for KIAA0998 (NM_015072.2,769-787).
ctatctccagcatgttcaa

SEQ ID NO: 231802 - DNA, 19 bp, Homo sapiens
  siRNA target sequence for KIAA0998 (NM_015072.2,877-895).
cctcaagcgagcatcaaat

SEQ ID NO: 231803 - DNA, 19 bp, Homo sapiens
  siRNA target sequence for KIAA0998 (NM_015072.2,878-896).
ctcaagcgagcatcaaata

SEQ ID NO: 231804 - DNA, 19 bp, Homo sapiens
  siRNA target sequence for KIAA0998 (NM_015072.2,905-923).
cattcactgaggatggtat

SEQ ID NO: 231805 - DNA, 19 bp, Homo sapiens
  siRNA target sequence for KIAA0998 (NM_015072.2,979-997).
gggtgactttatcattgta

SEQ ID NO: 231806 - DNA, 19 bp, Homo sapiens
  siRNA target sequence for KIAA0998 (NM_015072.2,1236-1254).
gtgatcaccctgagactat

SEQ ID NO: 231807 - DNA, 19 bp, Homo sapiens
  siRNA target sequence for KIAA0998 (NM_015072.2,1243-1261).
ccctgagactataatggaa

SEQ ID NO: 231808 - DNA, 19 bp, Homo sapiens
  siRNA target sequence for KIAA0998 (NM_015072.2,1313-1331).
gataaattatctcgattta

SEQ ID NO: 231809 - DNA, 19 bp, Homo sapiens
  siRNA target sequence for KIAA0998 (NM_015072.2,1352-1370).
gcaaaattagtttatagca

SEQ ID NO: 231810 - DNA, 19 bp, Homo sapiens
  siRNA target sequence for KIAA0998 (NM_015072.2,1462-1480).
ccaccattcttctttatct

SEQ ID NO: 231811 - DNA, 19 bp, Homo sapiens
  siRNA target sequence for KIAA0998 (NM_015072.2,1466-1484).
cattcttctttatctcaaa

SEQ ID NO: 231812 - DNA, 19 bp, Homo sapiens
  siRNA target sequence for KIAA0998 (NM_015072.2,1507-1525).
gcctcaccagccaacaatt

SEQ ID NO: 231813 - DNA, 19 bp, Homo sapiens
  siRNA target sequence for KIAA0998 (NM_015072.2,1509-1527).
ctcaccagccaacaatttt

SEQ ID NO: 231814 - DNA, 19 bp, Homo sapiens
  siRNA target sequence for KIAA0998 (NM_015072.2,1627-1645).
caccattggtcccttttct

SEQ ID NO: 231815 - DNA, 19 bp, Homo sapiens
  siRNA target sequence for KIAA0998 (NM_015072.2,1705-1723).
ggcaggatcgtgctatcta

SEQ ID NO: 231816 - DNA, 19 bp, Homo sapiens
  siRNA target sequence for KIAA0998 (NM_015072.2,1706-1724).
gcaggatcgtgctatctaa

SEQ ID NO: 231817 - DNA, 19 bp, Homo sapiens
  siRNA target sequence for KIAA0998 (NM_015072.2,1707-1725).
caggatcgtgctatctaaa

SEQ ID NO: 231818 - DNA, 19 bp, Homo sapiens
  siRNA target sequence for KIAA0998 (NM_015072.2,1709-1727).
ggatcgtgctatctaaaca

SEQ ID NO: 231819 - DNA, 19 bp, Homo sapiens
  siRNA target sequence for KIAA0998 (NM_015072.2,1710-1728).
gatcgtgctatctaaacaa

SEQ ID NO: 231820 - DNA, 19 bp, Homo sapiens
  siRNA target sequence for KIAA0998 (NM_015072.2,1769-1787).
gatgcttctttatatagca

SEQ ID NO: 231821 - DNA, 19 bp, Homo sapiens
  siRNA target sequence for KIAA0998 (NM_015072.2,1792-1810).
gtacaaccaaagtatggtt

SEQ ID NO: 231822 - DNA, 19 bp, Homo sapiens
  siRNA target sequence for KIAA0998 (NM_015072.2,1840-1858).
gcaggcagcgagacagtat

SEQ ID NO: 231823 - DNA, 19 bp, Homo sapiens
  siRNA target sequence for KIAA0998 (NM_015072.2,1841-1859).
caggcagcgagacagtatt

SEQ ID NO: 231824 - DNA, 19 bp, Homo sapiens
  siRNA target sequence for KIAA0998 (NM_015072.2,1843-1861).
ggcagcgagacagtattct

SEQ ID NO: 231825 - DNA, 19 bp, Homo sapiens
  siRNA target sequence for KIAA0998 (NM_015072.2,2012-2030).
caagctcccgagaatcact

SEQ ID NO: 231826 - DNA, 19 bp, Homo sapiens
  siRNA target sequence for KIAA0998 (NM_015072.2,2256-2274).
gcagccagacactacctaa

SEQ ID NO: 231827 - DNA, 19 bp, Homo sapiens
  siRNA target sequence for KIAA0998 (NM_015072.2,2277-2295).
ccaatttatggacaatgaa

SEQ ID NO: 231828 - DNA, 19 bp, Homo sapiens
  siRNA target sequence for KIAA0998 (NM_015072.2,2412-2430).
cacccaaccacgaacaagt

SEQ ID NO: 231829 - DNA, 19 bp, Homo sapiens
  siRNA target sequence for KIAA0998 (NM_015072.2,2475-2493).
gatcctcctttcaaaacta

SEQ ID NO: 231830 - DNA, 19 bp, Homo sapiens
  siRNA target sequence for LOC158135 (NM_194252.1,722-740).
ctcctggaagcccactttt

SEQ ID NO: 231831 - DNA, 19 bp, Homo sapiens
  siRNA target sequence for LOC158135 (NM_194252.1,727-745).
ggaagcccacttttatcgt

SEQ ID NO: 231832 - DNA, 19 bp, Homo sapiens
  siRNA target sequence for LOC158135 (NM_194252.1,771-789).
gatggaatctacctcatta

SEQ ID NO: 231833 - DNA, 19 bp, Homo sapiens
  siRNA target sequence for LOC158135 (NM_194252.1,859-877).
gcaaacctctccttatcga

SEQ ID NO: 231834 - DNA, 19 bp, Homo sapiens
  siRNA target sequence for LOC158135 (NM_194252.1,875-893).
cgacaagctcaagtttgat

SEQ ID NO: 231835 - DNA, 19 bp, Homo sapiens
  siRNA target sequence for LOC158135 (NM_194252.1,891-909).
gatattcgtctgtatgtct

SEQ ID NO: 231836 - DNA, 19 bp, Homo sapiens
  siRNA target sequence for LOC158135 (NM_194252.1,897-915).
cgtctgtatgtcttactca

SEQ ID NO: 231837 - DNA, 19 bp, Homo sapiens
  siRNA target sequence for LOC158135 (NM_194252.1,898-916).
gtctgtatgtcttactcaa

SEQ ID NO: 231838 - DNA, 19 bp, Homo sapiens
  siRNA target sequence for LOC158135 (NM_194252.1,919-937).
ccttagaccccttagagat

SEQ ID NO: 231839 - DNA, 19 bp, Homo sapiens
  siRNA target sequence for LOC158135 (NM_194252.1,920-938).
cttagaccccttagagatt

SEQ ID NO: 231840 - DNA, 19 bp, Homo sapiens
  siRNA target sequence for LOC158135 (NM_194252.1,926-944).
ccccttagagatttatata

SEQ ID NO: 231841 - DNA, 19 bp, Homo sapiens
  siRNA target sequence for LOC158135 (NM_194252.1,951-969).
gacggactctctaggtttt

SEQ ID NO: 231842 - DNA, 19 bp, Homo sapiens
  siRNA target sequence for LOC158135 (NM_194252.1,953-971).
cggactctctaggttttgt

SEQ ID NO: 231843 - DNA, 19 bp, Homo sapiens
  siRNA target sequence for LOC158135 (NM_194252.1,954-972).
ggactctctaggttttgta

SEQ ID NO: 231844 - DNA, 19 bp, Homo sapiens
  siRNA target sequence for LOC158135 (NM_194252.1,1011-1029).
cgcatctttatgcacttaa

SEQ ID NO: 231845 - DNA, 19 bp, Homo sapiens
  siRNA target sequence for LOC158135 (NM_194252.1,1022-1040).
gcacttaaccaactattca

SEQ ID NO: 231846 - DNA, 19 bp, Homo sapiens
  siRNA target sequence for LOC158135 (NM_194252.1,1129-1147).
cttccaaaggcgttgacat

SEQ ID NO: 231847 - DNA, 19 bp, Homo sapiens
  siRNA target sequence for LOC158135 (NM_194252.1,1132-1150).
ccaaaggcgttgacatcaa

SEQ ID NO: 231848 - DNA, 19 bp, Homo sapiens
  siRNA target sequence for LOC158135 (NM_194252.1,1258-1276).
ccacgtgcttccagatttt

SEQ ID NO: 231849 - DNA, 19 bp, Homo sapiens
  siRNA target sequence for LOC158135 (NM_194252.1,1271-1289).
gattttaggctttgacatt

SEQ ID NO: 231850 - DNA, 19 bp, Homo sapiens
  siRNA target sequence for LOC158135 (NM_194252.1,1279-1297).
gctttgacattcttctaat

SEQ ID NO: 231851 - DNA, 19 bp, Homo sapiens
  siRNA target sequence for LOC158135 (NM_194252.1,1307-1325).
gaagcctatactacttgaa

SEQ ID NO: 231852 - DNA, 19 bp, Homo sapiens
  siRNA target sequence for LOC158135 (NM_194252.1,1310-1328).
gcctatactacttgaagta

SEQ ID NO: 231853 - DNA, 19 bp, Homo sapiens
  siRNA target sequence for LOC158135 (NM_194252.1,1311-1329).
cctatactacttgaagtaa

SEQ ID NO: 231854 - DNA, 19 bp, Homo sapiens
  siRNA target sequence for LOC158135 (NM_194252.1,1342-1360).
gtatgagaatcgaacatga

SEQ ID NO: 231855 - DNA, 19 bp, Homo sapiens
  siRNA target sequence for LOC158135 (NM_194252.1,1359-1377).
gagcacgaagggtgtttga

SEQ ID NO: 231856 - DNA, 19 bp, Homo sapiens
  siRNA target sequence for LOC158135 (NM_194252.1,1361-1379).
gcacgaagggtgtttgaaa

SEQ ID NO: 231857 - DNA, 19 bp, Homo sapiens
  siRNA target sequence for LOC158135 (NM_194252.1,1362-1380).
cacgaagggtgtttgaaaa

SEQ ID NO: 231858 - DNA, 19 bp, Homo sapiens
  siRNA target sequence for LOC158135 (NM_194252.1,1387-1405).
cagcctcgttgatgaagaa

SEQ ID NO: 231859 - DNA, 19 bp, Homo sapiens
  siRNA target sequence for TTL (NM_153712.2,363-381).
ctggtacagttggtgaatt

SEQ ID NO: 231860 - DNA, 19 bp, Homo sapiens
  siRNA target sequence for TTL (NM_153712.2,383-401).
ctacaggggtgctgacaaa

SEQ ID NO: 231861 - DNA, 19 bp, Homo sapiens
  siRNA target sequence for TTL (NM_153712.2,404-422).
gtgtcgcaaagcttcttta

SEQ ID NO: 231862 - DNA, 19 bp, Homo sapiens
  siRNA target sequence for TTL (NM_153712.2,408-426).
cgcaaagcttctttagtga

SEQ ID NO: 231863 - DNA, 19 bp, Homo sapiens
  siRNA target sequence for TTL (NM_153712.2,414-432).
gcttctttagtgaagctaa

SEQ ID NO: 231864 - DNA, 19 bp, Homo sapiens
  siRNA target sequence for TTL (NM_153712.2,415-433).
cttctttagtgaagctaat

SEQ ID NO: 231865 - DNA, 19 bp, Homo sapiens
  siRNA target sequence for TTL (NM_153712.2,418-436).
ctttagtgaagctaatcaa

SEQ ID NO: 231866 - DNA, 19 bp, Homo sapiens
  siRNA target sequence for TTL (NM_153712.2,475-493).
ctgaatcttatgtgattta

SEQ ID NO: 231867 - DNA, 19 bp, Homo sapiens
  siRNA target sequence for TTL (NM_153712.2,520-538).
ctccagcacagaatggaat

SEQ ID NO: 231868 - DNA, 19 bp, Homo sapiens
  siRNA target sequence for TTL (NM_153712.2,585-603).
ctcgcctcttataacagaa

SEQ ID NO: 231869 - DNA, 19 bp, Homo sapiens
  siRNA target sequence for TTL (NM_153712.2,588-606).
gcctcttataacagaaaga

SEQ ID NO: 231870 - DNA, 19 bp, Homo sapiens
  siRNA target sequence for TTL (NM_153712.2,621-639).
ggcaacgtttggattgcaa

SEQ ID NO: 231871 - DNA, 19 bp, Homo sapiens
  siRNA target sequence for TTL (NM_153712.2,622-640).
gcaacgtttggattgcaaa

SEQ ID NO: 231872 - DNA, 19 bp, Homo sapiens
  siRNA target sequence for TTL (NM_153712.2,626-644).
cgtttggattgcaaagtca

SEQ ID NO: 231873 - DNA, 19 bp, Homo sapiens
  siRNA target sequence for TTL (NM_153712.2,627-645).
gtttggattgcaaagtcat

SEQ ID NO: 231874 - DNA, 19 bp, Homo sapiens
  siRNA target sequence for TTL (NM_153712.2,728-746).
gcacgtgatccagaaatat

SEQ ID NO: 231875 - DNA, 19 bp, Homo sapiens
  siRNA target sequence for TTL (NM_153712.2,731-749).
cgtgatccagaaatatctt

SEQ ID NO: 231876 - DNA, 19 bp, Homo sapiens
  siRNA target sequence for TTL (NM_153712.2,806-824).
cttggtggatcatcagtat

SEQ ID NO: 231877 - DNA, 19 bp, Homo sapiens
  siRNA target sequence for TTL (NM_153712.2,809-827).
ggtggatcatcagtataat

SEQ ID NO: 231878 - DNA, 19 bp, Homo sapiens
  siRNA target sequence for TTL (NM_153712.2,810-828).
gtggatcatcagtataata

SEQ ID NO: 231879 - DNA, 19 bp, Homo sapiens
  siRNA target sequence for TTL (NM_153712.2,813-831).
gatcatcagtataatatct

SEQ ID NO: 231880 - DNA, 19 bp, Homo sapiens
  siRNA target sequence for TTL (NM_153712.2,865-883).
cagaaccatatcatgttga

SEQ ID NO: 231881 - DNA, 19 bp, Homo sapiens
  siRNA target sequence for TTL (NM_153712.2,911-929).
gaccaatcactgcattcaa

SEQ ID NO: 231882 - DNA, 19 bp, Homo sapiens
  siRNA target sequence for TTL (NM_153712.2,987-1005).
gagttcaatcagtacctaa

SEQ ID NO: 231883 - DNA, 19 bp, Homo sapiens
  siRNA target sequence for TTL (NM_153712.2,992-1010).
caatcagtacctaacaagt

SEQ ID NO: 231884 - DNA, 19 bp, Homo sapiens
  siRNA target sequence for TTL (NM_153712.2,1002-1020).
ctaacaagtgctttgaaca

SEQ ID NO: 231885 - DNA, 19 bp, Homo sapiens
  siRNA target sequence for TTL (NM_153712.2,1019-1037).
cattaccctagaaagtagt

SEQ ID NO: 231886 - DNA, 19 bp, Homo sapiens
  siRNA target sequence for TTL (NM_153712.2,1024-1042).
ccctagaaagtagtatctt

SEQ ID NO: 231887 - DNA, 19 bp, Homo sapiens
  siRNA target sequence for TTLL1 (NM_012263.2,269-287).
cagtgctgatcaataactt

SEQ ID NO: 231888 - DNA, 19 bp, Homo sapiens
  siRNA target sequence for TTLL1 (NM_012263.2,372-390).
cagcgttgaagctggatat

SEQ ID NO: 231889 - DNA, 19 bp, Homo sapiens
  siRNA target sequence for TTLL1 (NM_012263.2,392-410).
ggctctcagatgaccaaat

SEQ ID NO: 231890 - DNA, 19 bp, Homo sapiens
  siRNA target sequence for TTLL1 (NM_012263.2,393-411).
gctctcagatgaccaaata

SEQ ID NO: 231891 - DNA, 19 bp, Homo sapiens
  siRNA target sequence for TTLL1 (NM_012263.2,661-679).
ggaaagggcatcttcctta

SEQ ID NO: 231892 - DNA, 19 bp, Homo sapiens
  siRNA target sequence for TTLL1 (NM_012263.2,662-680).
gaaagggcatcttccttat

SEQ ID NO: 231893 - DNA, 19 bp, Homo sapiens
  siRNA target sequence for TTLL1 (NM_012263.2,731-749).
cgtttgtgtctcaatctaa

SEQ ID NO: 231894 - DNA, 19 bp, Homo sapiens
  siRNA target sequence for TTLL1 (NM_012263.2,732-750).
gtttgtgtctcaatctaat

SEQ ID NO: 231895 - DNA, 19 bp, Homo sapiens
  siRNA target sequence for TTLL1 (NM_012263.2,762-780).
cgtgatctctctctatatt

SEQ ID NO: 231896 - DNA, 19 bp, Homo sapiens
  siRNA target sequence for TTLL1 (NM_012263.2,847-865).
cgtccactgcgctgttaca

SEQ ID NO: 231897 - DNA, 19 bp, Homo sapiens
  siRNA target sequence for TTLL1 (NM_012263.2,848-866).
gtccactgcgctgttacat

SEQ ID NO: 231898 - DNA, 19 bp, Homo sapiens
  siRNA target sequence for TTLL1 (NM_012263.2,850-868).
ccactgcgctgttacatgt

SEQ ID NO: 231899 - DNA, 19 bp, Homo sapiens
  siRNA target sequence for TTLL1 (NM_012263.2,885-903).
ccggttctgcacagtgaaa

SEQ ID NO: 231900 - DNA, 19 bp, Homo sapiens
  siRNA target sequence for TTLL1 (NM_012263.2,887-905).
ggttctgcacagtgaaata

SEQ ID NO: 231901 - DNA, 19 bp, Homo sapiens
  siRNA target sequence for TTLL1 (NM_012263.2,1001-1019).
gcaagtggacagtgagtaa

SEQ ID NO: 231902 - DNA, 19 bp, Homo sapiens
  siRNA target sequence for TTLL1 (NM_012263.2,1121-1139).
cggtgatgaacaatgacaa

SEQ ID NO: 231903 - DNA, 19 bp, Homo sapiens
  siRNA target sequence for TTLL1 (NM_012263.2,1154-1172).
gctatggctacgacatcat

SEQ ID NO: 231904 - DNA, 19 bp, Homo sapiens
  siRNA target sequence for TTLL1 (NM_012263.2,1246-1264).
gaccgaatcctcaagtaca

SEQ ID NO: 231905 - DNA, 19 bp, Homo sapiens
  siRNA target sequence for TTLL1 (NM_012263.2,1292-1310).
ccgtcccgaatggtgaaat

SEQ ID NO: 231906 - DNA, 19 bp, Homo sapiens
  siRNA target sequence for TTLL1 (NM_012263.2,1329-1347).
caagtcgccacctaaggaa

SEQ ID NO: 231907 - DNA, 19 bp, Homo sapiens
  siRNA target sequence for TTLL1 (NM_012263.2,1354-1372).
ggcaattacgagattctgt

SEQ ID NO: 231908 - DNA, 19 bp, Homo sapiens
  siRNA target sequence for TTLL1 (NM_012263.2,1356-1374).
caattacgagattctgtat

SEQ ID NO: 231909 - DNA, 19 bp, Homo sapiens
  siRNA target sequence for TTLL1 (NM_012263.2,1362-1380).
cgagattctgtatgatgaa

SEQ ID NO: 231910 - DNA, 19 bp, Homo sapiens
  siRNA target sequence for GCLC (NM_001498.1,211-229).
ggcacaaggacgttctcaa

SEQ ID NO: 231911 - DNA, 19 bp, Homo sapiens
  siRNA target sequence for GCLC (NM_001498.1,235-253).
gcgatgaggtggaatacat

SEQ ID NO: 231912 - DNA, 19 bp, Homo sapiens
  siRNA target sequence for GCLC (NM_001498.1,243-261).
gtggaatacatgttggtat

SEQ ID NO: 231913 - DNA, 19 bp, Homo sapiens
  siRNA target sequence for GCLC (NM_001498.1,246-264).
gaatacatgttggtatctt

SEQ ID NO: 231914 - DNA, 19 bp, Homo sapiens
  siRNA target sequence for GCLC (NM_001498.1,375-393).
ccagagtatgggagttaca

SEQ ID NO: 231915 - DNA, 19 bp, Homo sapiens
  siRNA target sequence for GCLC (NM_001498.1,378-396).
gagtatgggagttacatga

SEQ ID NO: 231916 - DNA, 19 bp, Homo sapiens
  siRNA target sequence for GCLC (NM_001498.1,380-398).
gtatgggagttacatgatt

SEQ ID NO: 231917 - DNA, 19 bp, Homo sapiens
  siRNA target sequence for GCLC (NM_001498.1,417-435).
ccctacggaggaacaatgt

SEQ ID NO: 231918 - DNA, 19 bp, Homo sapiens
  siRNA target sequence for GCLC (NM_001498.1,427-445).
gaacaatgtccgagttcaa

SEQ ID NO: 231919 - DNA, 19 bp, Homo sapiens
  siRNA target sequence for GCLC (NM_001498.1,434-452).
gtccgagttcaatacagtt

SEQ ID NO: 231920 - DNA, 19 bp, Homo sapiens
  siRNA target sequence for GCLC (NM_001498.1,474-492).
cggaaggaggctacttcta

SEQ ID NO: 231921 - DNA, 19 bp, Homo sapiens
  siRNA target sequence for GCLC (NM_001498.1,475-493).
ggaaggaggctacttctat

SEQ ID NO: 231922 - DNA, 19 bp, Homo sapiens
  siRNA target sequence for GCLC (NM_001498.1,479-497).
ggaggctacttctatatta

SEQ ID NO: 231923 - DNA, 19 bp, Homo sapiens
  siRNA target sequence for GCLC (NM_001498.1,509-527).
ggctctttgcacaataact

SEQ ID NO: 231924 - DNA, 19 bp, Homo sapiens
  siRNA target sequence for GCLC (NM_001498.1,641-659).
ccctcgcttcagtacctta

SEQ ID NO: 231925 - DNA, 19 bp, Homo sapiens
  siRNA target sequence for GCLC (NM_001498.1,642-660).
cctcgcttcagtaccttaa

SEQ ID NO: 231926 - DNA, 19 bp, Homo sapiens
  siRNA target sequence for GCLC (NM_001498.1,645-663).
cgcttcagtaccttaacaa

SEQ ID NO: 231927 - DNA, 19 bp, Homo sapiens
  siRNA target sequence for GCLC (NM_001498.1,696-714).
gtcatcaatgtaccaatat

SEQ ID NO: 231928 - DNA, 19 bp, Homo sapiens
  siRNA target sequence for GCLC (NM_001498.1,698-716).
catcaatgtaccaatattt

SEQ ID NO: 231929 - DNA, 19 bp, Homo sapiens
  siRNA target sequence for GCLC (NM_001498.1,730-748).
caccatctccatttataga

SEQ ID NO: 231930 - DNA, 19 bp, Homo sapiens
  siRNA target sequence for GCLC (NM_001498.1,780-798).
gcttctaagccggatcata

SEQ ID NO: 231931 - DNA, 19 bp, Homo sapiens
  siRNA target sequence for GCLC (NM_001498.1,781-799).
cttctaagccggatcatat

SEQ ID NO: 231932 - DNA, 19 bp, Homo sapiens
  siRNA target sequence for GCLC (NM_001498.1,784-802).
ctaagccggatcatattta

SEQ ID NO: 231933 - DNA, 19 bp, Homo sapiens
  siRNA target sequence for GCLC (NM_001498.1,835-853).
gctgtctccaggtgacatt

SEQ ID NO: 231934 - DNA, 19 bp, Homo sapiens
  siRNA target sequence for GCLC (NM_001498.1,854-872).
ccaagcctgcagtatatct

SEQ ID NO: 231935 - DNA, 19 bp, Homo sapiens
  siRNA target sequence for GCLC (NM_001498.1,875-893).
ggccagatacctttatgat

SEQ ID NO: 231936 - DNA, 19 bp, Homo sapiens
  siRNA target sequence for GCLC (NM_001498.1,877-895).
ccagatacctttatgatca

SEQ ID NO: 231937 - DNA, 19 bp, Homo sapiens
  siRNA target sequence for GCLC (NM_001498.1,880-898).
gatacctttatgatcagtt

SEQ ID NO: 231938 - DNA, 19 bp, Homo sapiens
  siRNA target sequence for GCLC (NM_001498.1,931-949).
gtgctgcatctccctttta

SEQ ID NO: 231939 - DNA, 19 bp, Homo sapiens
  siRNA target sequence for GCLC (NM_001498.1,1072-1090).
cccgatatgactcaataga

SEQ ID NO: 231940 - DNA, 19 bp, Homo sapiens
  siRNA target sequence for GCLC (NM_001498.1,1082-1100).
ctcaatagacagctattta

SEQ ID NO: 231941 - DNA, 19 bp, Homo sapiens
  siRNA target sequence for GCLC (NM_001498.1,1089-1107).
gacagctatttatctaagt

SEQ ID NO: 231942 - DNA, 19 bp, Homo sapiens
  siRNA target sequence for GCLC (NM_001498.1,1091-1109).
cagctatttatctaagtgt

SEQ ID NO: 231943 - DNA, 19 bp, Homo sapiens
  siRNA target sequence for GCLC (NM_001498.1,1127-1145).
catcgacttgacgatagat

SEQ ID NO: 231944 - DNA, 19 bp, Homo sapiens
  siRNA target sequence for GCLC (NM_001498.1,1130-1148).
cgacttgacgatagataaa

SEQ ID NO: 231945 - DNA, 19 bp, Homo sapiens
  siRNA target sequence for GCLC (NM_001498.1,1138-1156).
cgatagataaagagatcta

SEQ ID NO: 231946 - DNA, 19 bp, Homo sapiens
  siRNA target sequence for GCLC (NM_001498.1,1166-1184).
gttgcaggaaggcattgat

SEQ ID NO: 231947 - DNA, 19 bp, Homo sapiens
  siRNA target sequence for GCLC (NM_001498.1,1207-1225).
ctcatctctttattagaga

SEQ ID NO: 231948 - DNA, 19 bp, Homo sapiens
  siRNA target sequence for GCLC (NM_001498.1,1276-1294).
ctgaccattttgagaatat

SEQ ID NO: 231949 - DNA, 19 bp, Homo sapiens
  siRNA target sequence for GCLC (NM_001498.1,1438-1456).
ccagagtgatcctttccta

SEQ ID NO: 231950 - DNA, 19 bp, Homo sapiens
  siRNA target sequence for GCLC (NM_001498.1,1472-1490).
cattccactgtcaaaggtt

SEQ ID NO: 231951 - DNA, 19 bp, Homo sapiens
  siRNA target sequence for GCLC (NM_001498.1,1687-1705).
ctggactgatcccaattct

SEQ ID NO: 231952 - DNA, 19 bp, Homo sapiens
  siRNA target sequence for GCLC (NM_001498.1,1739-1757).
ggacaccagatgtagtatt

SEQ ID NO: 231953 - DNA, 19 bp, Homo sapiens
  siRNA target sequence for GCLC (NM_001498.1,1744-1762).
ccagatgtagtattctgaa

SEQ ID NO: 231954 - DNA, 19 bp, Homo sapiens
  siRNA target sequence for GCLC (NM_001498.1,1747-1765).
gatgtagtattctgaacta

SEQ ID NO: 231955 - DNA, 19 bp, Homo sapiens
  siRNA target sequence for GCLC (NM_001498.1,1760-1778).
gaactacctaaagctaatt

SEQ ID NO: 231956 - DNA, 19 bp, Homo sapiens
  siRNA target sequence for GCLC (NM_001498.1,1786-1804).
gagcatctggagaactaat

SEQ ID NO: 231957 - DNA, 19 bp, Homo sapiens
  siRNA target sequence for GCLC (NM_001498.1,1816-1834).
gatggatgagggagtttat

SEQ ID NO: 231958 - DNA, 19 bp, Homo sapiens
  siRNA target sequence for GCLC (NM_001498.1,1826-1844).
ggagtttatcgcaaaccat

SEQ ID NO: 231959 - DNA, 19 bp, Homo sapiens
  siRNA target sequence for GCLC (NM_001498.1,1853-1871).
caagcaagacagtgtcata

SEQ ID NO: 231960 - DNA, 19 bp, Homo sapiens
  siRNA target sequence for GCLC (NM_001498.1,1864-1882).
gtgtcataactgatgaaat

SEQ ID NO: 231961 - DNA, 19 bp, Homo sapiens
  siRNA target sequence for GCLC (NM_001498.1,1901-1919).
gaagtgtaaccaaattgca

SEQ ID NO: 231962 - DNA, 19 bp, Homo sapiens
  siRNA target sequence for GCLC (NM_001498.1,1947-1965).
cttggatcagcatttagga

SEQ ID NO: 231963 - DNA, 19 bp, Homo sapiens
  siRNA target sequence for GCLM (NM_002061.1,373-391).
cgaggagcttcatgattgt

SEQ ID NO: 231964 - DNA, 19 bp, Homo sapiens
  siRNA target sequence for GCLM (NM_002061.1,374-392).
gaggagcttcatgattgta

SEQ ID NO: 231965 - DNA, 19 bp, Homo sapiens
  siRNA target sequence for GCLM (NM_002061.1,386-404).
gattgtatccaaaaaacct

SEQ ID NO: 231966 - DNA, 19 bp, Homo sapiens
  siRNA target sequence for GCLM (NM_002061.1,460-478).
cttggaatgcactgtatct

SEQ ID NO: 231967 - DNA, 19 bp, Homo sapiens
  siRNA target sequence for GCLM (NM_002061.1,477-495).
ctcatgcagtagaaaagat

SEQ ID NO: 231968 - DNA, 19 bp, Homo sapiens
  siRNA target sequence for GCLM (NM_002061.1,541-559).
cattgtagaatcaaactct

SEQ ID NO: 231969 - DNA, 19 bp, Homo sapiens
  siRNA target sequence for GCLM (NM_002061.1,570-588).
ctagaagtgcagttgacat

SEQ ID NO: 231970 - DNA, 19 bp, Homo sapiens
  siRNA target sequence for GCLM (NM_002061.1,631-649).
cattgcttcacctcctatt

SEQ ID NO: 231971 - DNA, 19 bp, Homo sapiens
  siRNA target sequence for GCLM (NM_002061.1,636-654).
cttcacctcctattgaaga

SEQ ID NO: 231972 - DNA, 19 bp, Homo sapiens
  siRNA target sequence for GCLM (NM_002061.1,736-754).
cataggtacctctgatcta

SEQ ID NO: 231973 - DNA, 19 bp, Homo sapiens
  siRNA target sequence for GCLM (NM_002061.1,747-765).
ctgatctagacaaaacaca

SEQ ID NO: 231974 - DNA, 19 bp, Homo sapiens
  siRNA target sequence for GCLM (NM_002061.1,787-805).
ggcacaggtaaaaccaaat

SEQ ID NO: 231975 - DNA, 19 bp, Homo sapiens
  siRNA target sequence for GCLM (NM_002061.1,788-806).
gcacaggtaaaaccaaata

SEQ ID NO: 231976 - DNA, 19 bp, Homo sapiens
  siRNA target sequence for GCLM (NM_002061.1,800-818).
ccaaatagtaaccaagtta

SEQ ID NO: 231977 - DNA, 19 bp, Homo sapiens
  siRNA target sequence for GCLM (NM_002061.1,836-854).
gtgatgccaccagatttga

SEQ ID NO: 231978 - DNA, 19 bp, Homo sapiens
  siRNA target sequence for GCLM (NM_002061.1,883-901).
gctgttgactcacaatgat

SEQ ID NO: 231979 - DNA, 19 bp, Homo sapiens
  siRNA target sequence for GCLM (NM_002061.1,998-1016).
cggtattcggtcattgtga

SEQ ID NO: 231980 - DNA, 19 bp, Homo sapiens
  siRNA target sequence for GCLM (NM_002061.1,1044-1062).
gctacattttacaagctaa

SEQ ID NO: 231981 - DNA, 19 bp, Homo sapiens
  siRNA target sequence for GCLM (NM_002061.1,1045-1063).
ctacattttacaagctaaa

SEQ ID NO: 231982 - DNA, 19 bp, Homo sapiens
  siRNA target sequence for PAICS (NM_006452.2,210-228).
cgacagctgaggtactgaa

SEQ ID NO: 231983 - DNA, 19 bp, Homo sapiens
  siRNA target sequence for PAICS (NM_006452.2,213-231).
cagctgaggtactgaacat

SEQ ID NO: 231984 - DNA, 19 bp, Homo sapiens
  siRNA target sequence for PAICS (NM_006452.2,218-236).
gaggtactgaacattggta

SEQ ID NO: 231985 - DNA, 19 bp, Homo sapiens
  siRNA target sequence for PAICS (NM_006452.2,266-284).
gtctacgaattgttagaca

SEQ ID NO: 231986 - DNA, 19 bp, Homo sapiens
  siRNA target sequence for PAICS (NM_006452.2,365-383).
gctgcaatctcaaataaaa

SEQ ID NO: 231987 - DNA, 19 bp, Homo sapiens
  siRNA target sequence for PAICS (NM_006452.2,368-386).
gcaatctcaaataaaatca

SEQ ID NO: 231988 - DNA, 19 bp, Homo sapiens
  siRNA target sequence for PAICS (NM_006452.2,477-495).
gtgaaatgattccaattga

SEQ ID NO: 231989 - DNA, 19 bp, Homo sapiens
  siRNA target sequence for PAICS (NM_006452.2,479-497).
gaaatgattccaattgaat

SEQ ID NO: 231990 - DNA, 19 bp, Homo sapiens
  siRNA target sequence for PAICS (NM_006452.2,510-528).
gaatagcaactggttcttt

SEQ ID NO: 231991 - DNA, 19 bp, Homo sapiens
  siRNA target sequence for PAICS (NM_006452.2,516-534).
caactggttcttttctcaa

SEQ ID NO: 231992 - DNA, 19 bp, Homo sapiens
  siRNA target sequence for PAICS (NM_006452.2,543-561).
ctggtgtcaaggaaggata

SEQ ID NO: 231993 - DNA, 19 bp, Homo sapiens
  siRNA target sequence for PAICS (NM_006452.2,573-591).
cacctaaagtggagttgtt

SEQ ID NO: 231994 - DNA, 19 bp, Homo sapiens
  siRNA target sequence for PAICS (NM_006452.2,635-653).
cagctgattgctgcaaaat

SEQ ID NO: 231995 - DNA, 19 bp, Homo sapiens
  siRNA target sequence for PAICS (NM_006452.2,680-698).
cagactgaagtggatatca

SEQ ID NO: 231996 - DNA, 19 bp, Homo sapiens
  siRNA target sequence for PAICS (NM_006452.2,742-760).
ctggttgccccagaattgt

SEQ ID NO: 231997 - DNA, 19 bp, Homo sapiens
  siRNA target sequence for PAICS (NM_006452.2,745-763).
gttgccccagaattgtaca

SEQ ID NO: 231998 - DNA, 19 bp, Homo sapiens
  siRNA target sequence for PAICS (NM_006452.2,759-777).
gtacactggttgatatgaa

SEQ ID NO: 231999 - DNA, 19 bp, Homo sapiens
  siRNA target sequence for PAICS (NM_006452.2,762-780).
cactggttgatatgaagat

SEQ ID NO: 232000 - DNA, 19 bp, Homo sapiens
  siRNA target sequence for PAICS (NM_006452.2,778-796).
gattgaatttggtgttgat

SEQ ID NO: 232001 - DNA, 19 bp, Homo sapiens
  siRNA target sequence for PAICS (NM_006452.2,864-882).
gagatcgaagccaacagaa

SEQ ID NO: 232002 - DNA, 19 bp, Homo sapiens
  siRNA target sequence for PAICS (NM_006452.2,894-912).
cttatcgggacctcaaaga

SEQ ID NO: 232003 - DNA, 19 bp, Homo sapiens
  siRNA target sequence for MCCC2 (NM_022132.3,271-289).
gaacgagtggagcatataa

SEQ ID NO: 232004 - DNA, 19 bp, Homo sapiens
  siRNA target sequence for MCCC2 (NM_022132.3,310-328).
gcccgagcacttcacatat

SEQ ID NO: 232005 - DNA, 19 bp, Homo sapiens
  siRNA target sequence for MCCC2 (NM_022132.3,312-330).
ccgagcacttcacatatca

SEQ ID NO: 232006 - DNA, 19 bp, Homo sapiens
  siRNA target sequence for MCCC2 (NM_022132.3,313-331).
cgagcacttcacatatcaa

SEQ ID NO: 232007 - DNA, 19 bp, Homo sapiens
  siRNA target sequence for MCCC2 (NM_022132.3,442-460).
ccaggaggtggcattatta

SEQ ID NO: 232008 - DNA, 19 bp, Homo sapiens
  siRNA target sequence for MCCC2 (NM_022132.3,482-500).
gagtagaatgcatgattat

SEQ ID NO: 232009 - DNA, 19 bp, Homo sapiens
  siRNA target sequence for MCCC2 (NM_022132.3,590-608).
ggctcccctgcatctactt

SEQ ID NO: 232010 - DNA, 19 bp, Homo sapiens
  siRNA target sequence for MCCC2 (NM_022132.3,591-609).
gctcccctgcatctactta

SEQ ID NO: 232011 - DNA, 19 bp, Homo sapiens
  siRNA target sequence for MCCC2 (NM_022132.3,594-612).
cccctgcatctacttagtt

SEQ ID NO: 232012 - DNA, 19 bp, Homo sapiens
  siRNA target sequence for MCCC2 (NM_022132.3,635-653).
ctcgacaagcagatgtgtt

SEQ ID NO: 232013 - DNA, 19 bp, Homo sapiens
  siRNA target sequence for MCCC2 (NM_022132.3,669-687).
ctttggccgtacattctat

SEQ ID NO: 232014 - DNA, 19 bp, Homo sapiens
  siRNA target sequence for MCCC2 (NM_022132.3,674-692).
gccgtacattctataatca

SEQ ID NO: 232015 - DNA, 19 bp, Homo sapiens
  siRNA target sequence for MCCC2 (NM_022132.3,693-711).
ggcaattatgtcttctaaa

SEQ ID NO: 232016 - DNA, 19 bp, Homo sapiens
  siRNA target sequence for MCCC2 (NM_022132.3,799-817).
cgcaagcagggtaccattt

SEQ ID NO: 232017 - DNA, 19 bp, Homo sapiens
  siRNA target sequence for MCCC2 (NM_022132.3,800-818).
gcaagcagggtaccatttt

SEQ ID NO: 232018 - DNA, 19 bp, Homo sapiens
  siRNA target sequence for MCCC2 (NM_022132.3,823-841).
gcaggaccccccttggtta

SEQ ID NO: 232019 - DNA, 19 bp, Homo sapiens
  siRNA target sequence for MCCC2 (NM_022132.3,845-863).
cggcaactggggaagaagt

SEQ ID NO: 232020 - DNA, 19 bp, Homo sapiens
  siRNA target sequence for MCCC2 (NM_022132.3,926-944).
gggctttggatgatcatca

SEQ ID NO: 232021 - DNA, 19 bp, Homo sapiens
  siRNA target sequence for MCCC2 (NM_022132.3,940-958).
catcatgcccttcacttaa

SEQ ID NO: 232022 - DNA, 19 bp, Homo sapiens
  siRNA target sequence for MCCC2 (NM_022132.3,1015-1033).
ccttctgaagagcctttat

SEQ ID NO: 232023 - DNA, 19 bp, Homo sapiens
  siRNA target sequence for MCCC2 (NM_022132.3,1016-1034).
cttctgaagagcctttatt

SEQ ID NO: 232024 - DNA, 19 bp, Homo sapiens
  siRNA target sequence for MCCC2 (NM_022132.3,1090-1108).
gtccgagaggtcattgcta

SEQ ID NO: 232025 - DNA, 19 bp, Homo sapiens
  siRNA target sequence for MCCC2 (NM_022132.3,1146-1164).
cttttatggagacacatta

SEQ ID NO: 232026 - DNA, 19 bp, Homo sapiens
  siRNA target sequence for MCCC2 (NM_022132.3,1169-1187).
caggatttgctcgaatatt

SEQ ID NO: 232027 - DNA, 19 bp, Homo sapiens
  siRNA target sequence for MCCC2 (NM_022132.3,1191-1209).
gtacccagtaggtatcgtt

SEQ ID NO: 232028 - DNA, 19 bp, Homo sapiens
  siRNA target sequence for MCCC2 (NM_022132.3,1196-1214).
cagtaggtatcgttggaaa

SEQ ID NO: 232029 - DNA, 19 bp, Homo sapiens
  siRNA target sequence for MCCC2 (NM_022132.3,1323-1341).
ggttggtagagagtatgaa

SEQ ID NO: 232030 - DNA, 19 bp, Homo sapiens
  siRNA target sequence for MCCC2 (NM_022132.3,1391-1409).
gtgcccaagtgcctaagat

SEQ ID NO: 232031 - DNA, 19 bp, Homo sapiens
  siRNA target sequence for MCCC2 (NM_022132.3,1403-1421).
ctaagataaccctcatcat

SEQ ID NO: 232032 - DNA, 19 bp, Homo sapiens
  siRNA target sequence for MCCC2 (NM_022132.3,1430-1448).
cctatggagccggaaacta

SEQ ID NO: 232033 - DNA, 19 bp, Homo sapiens
  siRNA target sequence for MCCC2 (NM_022132.3,1431-1449).
ctatggagccggaaactat

SEQ ID NO: 232034 - DNA, 19 bp, Homo sapiens
  siRNA target sequence for MCCC2 (NM_022132.3,1472-1490).
gcccaagatttctctacat

SEQ ID NO: 232035 - DNA, 19 bp, Homo sapiens
  siRNA target sequence for MCCC2 (NM_022132.3,1494-1512).
gccaaatgctcgtatctca

SEQ ID NO: 232036 - DNA, 19 bp, Homo sapiens
  siRNA target sequence for MCCC2 (NM_022132.3,1525-1543).
gagcaggcagccaatgtgt

SEQ ID NO: 232037 - DNA, 19 bp, Homo sapiens
  siRNA target sequence for MCCC2 (NM_022132.3,1597-1615).
gctgatgaagcggctttaa

SEQ ID NO: 232038 - DNA, 19 bp, Homo sapiens
  siRNA target sequence for MCCC2 (NM_022132.3,1620-1638).
gcccatcattaagaagttt

SEQ ID NO: 232039 - DNA, 19 bp, Homo sapiens
  siRNA target sequence for MCCC2 (NM_022132.3,1648-1666).
ggaaacccttactattcca

SEQ ID NO: 232040 - DNA, 19 bp, Homo sapiens
  siRNA target sequence for MCCC2 (NM_022132.3,1717-1735).
gtcttgggtctcagtttta

SEQ ID NO: 232041 - DNA, 19 bp, Homo sapiens
  siRNA target sequence for MCCC2 (NM_022132.3,1742-1760).
ccctcaacgcaccaataga

SEQ ID NO: 232042 - DNA, 19 bp, Homo sapiens
  siRNA target sequence for PCCB (NM_000532.2,163-181).
ggccacctctgttaacgaa

SEQ ID NO: 232043 - DNA, 19 bp, Homo sapiens
  siRNA target sequence for PCCB (NM_000532.2,173-191).
gttaacgaacgcatcgaaa

SEQ ID NO: 232044 - DNA, 19 bp, Homo sapiens
  siRNA target sequence for PCCB (NM_000532.2,244-262).
gcacaagcgaggaaagcta

SEQ ID NO: 232045 - DNA, 19 bp, Homo sapiens
  siRNA target sequence for PCCB (NM_000532.2,396-414).
ctggacgaggccgaatcaa

SEQ ID NO: 232046 - DNA, 19 bp, Homo sapiens
  siRNA target sequence for PCCB (NM_000532.2,401-419).
cgaggccgaatcaatggaa

SEQ ID NO: 232047 - DNA, 19 bp, Homo sapiens
  siRNA target sequence for PCCB (NM_000532.2,405-423).
gccgaatcaatggaagatt

SEQ ID NO: 232048 - DNA, 19 bp, Homo sapiens
  siRNA target sequence for PCCB (NM_000532.2,412-430).
caatggaagattggtttat

SEQ ID NO: 232049 - DNA, 19 bp, Homo sapiens
  siRNA target sequence for PCCB (NM_000532.2,431-449).
gtcttcagtcaggatttta

SEQ ID NO: 232050 - DNA, 19 bp, Homo sapiens
  siRNA target sequence for PCCB (NM_000532.2,433-451).
cttcagtcaggattttaca

SEQ ID NO: 232051 - DNA, 19 bp, Homo sapiens
  siRNA target sequence for PCCB (NM_000532.2,631-649).
cggagtcatccctcagatt

SEQ ID NO: 232052 - DNA, 19 bp, Homo sapiens
  siRNA target sequence for PCCB (NM_000532.2,742-760).
catcactggccctgatgtt

SEQ ID NO: 232053 - DNA, 19 bp, Homo sapiens
  siRNA target sequence for PCCB (NM_000532.2,770-788).
gtcaccaatgaggatgtta

SEQ ID NO: 232054 - DNA, 19 bp, Homo sapiens
  siRNA target sequence for PCCB (NM_000532.2,860-878).
gatgttgatgccttgtgta

SEQ ID NO: 232055 - DNA, 19 bp, Homo sapiens
  siRNA target sequence for PCCB (NM_000532.2,876-894).
gtaatctccgggatttctt

SEQ ID NO: 232056 - DNA, 19 bp, Homo sapiens
  siRNA target sequence for PCCB (NM_000532.2,969-987).
ctgagcttgacacaattgt

SEQ ID NO: 232057 - DNA, 19 bp, Homo sapiens
  siRNA target sequence for PCCB (NM_000532.2,979-997).
cacaattgtccctttggaa

SEQ ID NO: 232058 - DNA, 19 bp, Homo sapiens
  siRNA target sequence for PCCB (NM_000532.2,999-1017).
caaccaaagcctacaacat

SEQ ID NO: 232059 - DNA, 19 bp, Homo sapiens
  siRNA target sequence for PCCB (NM_000532.2,1024-1042).
catcatacactctgttgtt

SEQ ID NO: 232060 - DNA, 19 bp, Homo sapiens
  siRNA target sequence for PCCB (NM_000532.2,1040-1058).
gttgatgagcgtgaatttt

SEQ ID NO: 232061 - DNA, 19 bp, Homo sapiens
  siRNA target sequence for PCCB (NM_000532.2,1070-1088).
cccaattatgccaagaaca

SEQ ID NO: 232062 - DNA, 19 bp, Homo sapiens
  siRNA target sequence for PCCB (NM_000532.2,1117-1135).
gaggactgttggaattgtt

SEQ ID NO: 232063 - DNA, 19 bp, Homo sapiens
  siRNA target sequence for PCCB (NM_000532.2,1154-1172).
gcctcaggatgcttggata

SEQ ID NO: 232064 - DNA, 19 bp, Homo sapiens
  siRNA target sequence for PCCB (NM_000532.2,1165-1183).
cttggatattaattcatct

SEQ ID NO: 232065 - DNA, 19 bp, Homo sapiens
  siRNA target sequence for PCCB (NM_000532.2,1266-1284).
ctggcacagcacaggaata

SEQ ID NO: 232066 - DNA, 19 bp, Homo sapiens
  siRNA target sequence for PCCB (NM_000532.2,1334-1352).
gcaactgtacccaaagtca

SEQ ID NO: 232067 - DNA, 19 bp, Homo sapiens
  siRNA target sequence for PCCB (NM_000532.2,1372-1390).
ctatggaggtgcctatgat

SEQ ID NO: 232068 - DNA, 19 bp, Homo sapiens
  siRNA target sequence for PCCB (NM_000532.2,1432-1450).
ctggcccaccgcagagatt

SEQ ID NO: 232069 - DNA, 19 bp, Homo sapiens
  siRNA target sequence for CTPS (NM_001905.1,103-121).
gttatatcaggaattggaa

SEQ ID NO: 232070 - DNA, 19 bp, Homo sapiens
  siRNA target sequence for CTPS (NM_001905.1,140-158).
gtgtgggcacaatactcaa

SEQ ID NO: 232071 - DNA, 19 bp, Homo sapiens
  siRNA target sequence for CTPS (NM_001905.1,145-163).
ggcacaatactcaagtcat

SEQ ID NO: 232072 - DNA, 19 bp, Homo sapiens
  siRNA target sequence for CTPS (NM_001905.1,156-174).
caagtcatgtggtttacat

SEQ ID NO: 232073 - DNA, 19 bp, Homo sapiens
  siRNA target sequence for CTPS (NM_001905.1,218-236).
gaacattctctccttatga

SEQ ID NO: 232074 - DNA, 19 bp, Homo sapiens
  siRNA target sequence for CTPS (NM_001905.1,279-297).
ccttgacctgggtaactat

SEQ ID NO: 232075 - DNA, 19 bp, Homo sapiens
  siRNA target sequence for CTPS (NM_001905.1,316-334).
cgcctcaccaaggacaata

SEQ ID NO: 232076 - DNA, 19 bp, Homo sapiens
  siRNA target sequence for CTPS (NM_001905.1,341-359).
ccactggaaagatatacca

SEQ ID NO: 232077 - DNA, 19 bp, Homo sapiens
  siRNA target sequence for CTPS (NM_001905.1,347-365).
gaaagatataccagtatgt

SEQ ID NO: 232078 - DNA, 19 bp, Homo sapiens
  siRNA target sequence for CTPS (NM_001905.1,351-369).
gatataccagtatgtcatt

SEQ ID NO: 232079 - DNA, 19 bp, Homo sapiens
  siRNA target sequence for CTPS (NM_001905.1,376-394).
gaacggaaaggagattact

SEQ ID NO: 232080 - DNA, 19 bp, Homo sapiens
  siRNA target sequence for CTPS (NM_001905.1,419-437).
ctcatatcacagatgcaat

SEQ ID NO: 232081 - DNA, 19 bp, Homo sapiens
  siRNA target sequence for CTPS (NM_001905.1,453-471).
gagacaggcgttaatacct

SEQ ID NO: 232082 - DNA, 19 bp, Homo sapiens
  siRNA target sequence for CTPS (NM_001905.1,459-477).
ggcgttaatacctgtagat

SEQ ID NO: 232083 - DNA, 19 bp, Homo sapiens
  siRNA target sequence for CTPS (NM_001905.1,461-479).
cgttaatacctgtagatga

SEQ ID NO: 232084 - DNA, 19 bp, Homo sapiens
  siRNA target sequence for CTPS (NM_001905.1,490-508).
gaacctcaagtgtgtgtta

SEQ ID NO: 232085 - DNA, 19 bp, Homo sapiens
  siRNA target sequence for CTPS (NM_001905.1,494-512).
ctcaagtgtgtgttattga

SEQ ID NO: 232086 - DNA, 19 bp, Homo sapiens
  siRNA target sequence for CTPS (NM_001905.1,573-591).
ccaattcaaggtcaaaaga

SEQ ID NO: 232087 - DNA, 19 bp, Homo sapiens
  siRNA target sequence for CTPS (NM_001905.1,646-664).
gaacagaagactaaaccta

SEQ ID NO: 232088 - DNA, 19 bp, Homo sapiens
  siRNA target sequence for CTPS (NM_001905.1,1056-1074).
catcaaccacaaattggaa

SEQ ID NO: 232089 - DNA, 19 bp, Homo sapiens
  siRNA target sequence for CTPS (NM_001905.1,1106-1124).
ccatcacctcgcaagaaga

SEQ ID NO: 232090 - DNA, 19 bp, Homo sapiens
  siRNA target sequence for CTPS (NM_001905.1,1176-1194).
gctggttccaggaggattt

SEQ ID NO: 232091 - DNA, 19 bp, Homo sapiens
  siRNA target sequence for CTPS (NM_001905.1,1205-1223).
gaacagaaggaaaaatcca

SEQ ID NO: 232092 - DNA, 19 bp, Homo sapiens
  siRNA target sequence for CTPS (NM_001905.1,1287-1305).
ggcagtggttgaattctca

SEQ ID NO: 232093 - DNA, 19 bp, Homo sapiens
  siRNA target sequence for CTPS (NM_001905.1,1331-1349).
ccaattctacagagtttga

SEQ ID NO: 232094 - DNA, 19 bp, Homo sapiens
  siRNA target sequence for CTPS (NM_001905.1,1531-1549).
ccagtctggaaaaagtgtt

SEQ ID NO: 232095 - DNA, 19 bp, Homo sapiens
  siRNA target sequence for CTPS (NM_001905.1,1532-1550).
cagtctggaaaaagtgttt

SEQ ID NO: 232096 - DNA, 19 bp, Homo sapiens
  siRNA target sequence for CTPS (NM_001905.1,1552-1570).
gaagaacaaggcttgaagt

SEQ ID NO: 232097 - DNA, 19 bp, Homo sapiens
  siRNA target sequence for CTPS (NM_001905.1,1569-1587).
gtttgttggccaagatgtt

SEQ ID NO: 232098 - DNA, 19 bp, Homo sapiens
  siRNA target sequence for CTPS (NM_001905.1,1680-1698).
gccctccccaccatacttt

SEQ ID NO: 232099 - DNA, 19 bp, Homo sapiens
  siRNA target sequence for CTPS (NM_001905.1,1808-1826).
ctgaaatcaccgaactgaa

SEQ ID NO: 232100 - DNA, 19 bp, Homo sapiens
  siRNA target sequence for CTPS2 (NM_019857.3,293-311).
cattggtaaagggatcatt

SEQ ID NO: 232101 - DNA, 19 bp, Homo sapiens
  siRNA target sequence for CTPS2 (NM_019857.3,317-335).
cagcattggaacgattcta

SEQ ID NO: 232102 - DNA, 19 bp, Homo sapiens
  siRNA target sequence for CTPS2 (NM_019857.3,319-337).
gcattggaacgattctaaa

SEQ ID NO: 232103 - DNA, 19 bp, Homo sapiens
  siRNA target sequence for CTPS2 (NM_019857.3,350-368).
ccgagttactgccataaaa

SEQ ID NO: 232104 - DNA, 19 bp, Homo sapiens
  siRNA target sequence for CTPS2 (NM_019857.3,352-370).
gagttactgccataaaaat

SEQ ID NO: 232105 - DNA, 19 bp, Homo sapiens
  siRNA target sequence for CTPS2 (NM_019857.3,386-404).
catcgatgctggcactttt

SEQ ID NO: 232106 - DNA, 19 bp, Homo sapiens
  siRNA target sequence for CTPS2 (NM_019857.3,421-439).
gtgaagtcttcgtcttaaa

SEQ ID NO: 232107 - DNA, 19 bp, Homo sapiens
  siRNA target sequence for CTPS2 (NM_019857.3,456-474).
gatttagaccttggaaatt

SEQ ID NO: 232108 - DNA, 19 bp, Homo sapiens
  siRNA target sequence for CTPS2 (NM_019857.3,518-536).
caccacggggaagatatat

SEQ ID NO: 232109 - DNA, 19 bp, Homo sapiens
  siRNA target sequence for CTPS2 (NM_019857.3,520-538).
ccacggggaagatatatca

SEQ ID NO: 232110 - DNA, 19 bp, Homo sapiens
  siRNA target sequence for CTPS2 (NM_019857.3,587-605).
gcaagttgtccctcacatt

SEQ ID NO: 232111 - DNA, 19 bp, Homo sapiens
  siRNA target sequence for CTPS2 (NM_019857.3,617-635).
ccaggagtgggttatgaat

SEQ ID NO: 232112 - DNA, 19 bp, Homo sapiens
  siRNA target sequence for CTPS2 (NM_019857.3,620-638).
ggagtgggttatgaatcaa

SEQ ID NO: 232113 - DNA, 19 bp, Homo sapiens
  siRNA target sequence for CTPS2 (NM_019857.3,644-662).
ggtgccggtggatggtaat

SEQ ID NO: 232114 - DNA, 19 bp, Homo sapiens
  siRNA target sequence for CTPS2 (NM_019857.3,645-663).
gtgccggtggatggtaata

SEQ ID NO: 232115 - DNA, 19 bp, Homo sapiens
  siRNA target sequence for CTPS2 (NM_019857.3,649-667).
cggtggatggtaataagga

SEQ ID NO: 232116 - DNA, 19 bp, Homo sapiens
  siRNA target sequence for CTPS2 (NM_019857.3,671-689).
gccccaaatatgcgttatt

SEQ ID NO: 232117 - DNA, 19 bp, Homo sapiens
  siRNA target sequence for CTPS2 (NM_019857.3,673-691).
cccaaatatgcgttattga

SEQ ID NO: 232118 - DNA, 19 bp, Homo sapiens
  siRNA target sequence for CTPS2 (NM_019857.3,728-746).
gtttgtggaggcgtttaga

SEQ ID NO: 232119 - DNA, 19 bp, Homo sapiens
  siRNA target sequence for CTPS2 (NM_019857.3,732-750).
gtggaggcgtttagacaat

SEQ ID NO: 232120 - DNA, 19 bp, Homo sapiens
  siRNA target sequence for CTPS2 (NM_019857.3,752-770).
ccagtttaaggcgaaaaga

SEQ ID NO: 232121 - DNA, 19 bp, Homo sapiens
  siRNA target sequence for CTPS2 (NM_019857.3,907-925).
gttcaacgcccattgagat

SEQ ID NO: 232122 - DNA, 19 bp, Homo sapiens
  siRNA target sequence for CTPS2 (NM_019857.3,965-983).
ccctgaacaggtcatatgt

SEQ ID NO: 232123 - DNA, 19 bp, Homo sapiens
  siRNA target sequence for CTPS2 (NM_019857.3,967-985).
ctgaacaggtcatatgtat

SEQ ID NO: 232124 - DNA, 19 bp, Homo sapiens
  siRNA target sequence for CTPS2 (NM_019857.3,1007-1025).
ccgagttcctgtgctttta

SEQ ID NO: 232125 - DNA, 19 bp, Homo sapiens
  siRNA target sequence for CTPS2 (NM_019857.3,1009-1027).
gagttcctgtgcttttaga

SEQ ID NO: 232126 - DNA, 19 bp, Homo sapiens
  siRNA target sequence for CTPS2 (NM_019857.3,1067-1085).
cctgcccatcggtgattct

SEQ ID NO: 232127 - DNA, 19 bp, Homo sapiens
  siRNA target sequence for CTPS2 (NM_019857.3,1076-1094).
cggtgattctgcaagtaat

SEQ ID NO: 232128 - DNA, 19 bp, Homo sapiens
  siRNA target sequence for CTPS2 (NM_019857.3,1120-1138).
ctgacaggtatgaaaggtt

SEQ ID NO: 232129 - DNA, 19 bp, Homo sapiens
  siRNA target sequence for CTPS2 (NM_019857.3,1192-1210).
gctacgcctctgtgttcaa

SEQ ID NO: 232130 - DNA, 19 bp, Homo sapiens
  siRNA target sequence for CTPS2 (NM_019857.3,1193-1211).
ctacgcctctgtgttcaaa

SEQ ID NO: 232131 - DNA, 19 bp, Homo sapiens
  siRNA target sequence for CTPS2 (NM_019857.3,1297-1315).
ccgaggaccctgtgaaatt

SEQ ID NO: 232132 - DNA, 19 bp, Homo sapiens
  siRNA target sequence for CTPS2 (NM_019857.3,1298-1316).
cgaggaccctgtgaaattt

SEQ ID NO: 232133 - DNA, 19 bp, Homo sapiens
  siRNA target sequence for CTPS2 (NM_019857.3,1301-1319).
ggaccctgtgaaatttcat

SEQ ID NO: 232134 - DNA, 19 bp, Homo sapiens
  siRNA target sequence for CTPS2 (NM_019857.3,1457-1475).
gatgcaactagcagtgata

SEQ ID NO: 232135 - DNA, 19 bp, Homo sapiens
  siRNA target sequence for CTPS2 (NM_019857.3,1461-1479).
caactagcagtgatagagt

SEQ ID NO: 232136 - DNA, 19 bp, Homo sapiens
  siRNA target sequence for CTPS2 (NM_019857.3,1486-1504).
gaaactgccttaacttgaa

SEQ ID NO: 232137 - DNA, 19 bp, Homo sapiens
  siRNA target sequence for CTPS2 (NM_019857.3,1509-1527).
gctgattccacagagttta

SEQ ID NO: 232138 - DNA, 19 bp, Homo sapiens
  siRNA target sequence for CTPS2 (NM_019857.3,1542-1560).
gttcctctggtgattgata

SEQ ID NO: 232139 - DNA, 19 bp, Homo sapiens
  siRNA target sequence for CTPS2 (NM_019857.3,1660-1678).
gtgatgttccttttataga

SEQ ID NO: 232140 - DNA, 19 bp, Homo sapiens
  siRNA target sequence for CTPS2 (NM_019857.3,1690-1708).
gacatcggttcgaggtaaa

SEQ ID NO: 232141 - DNA, 19 bp, Homo sapiens
  siRNA target sequence for CTPS2 (NM_019857.3,1771-1789).
gagacaggatggaaatcat

SEQ ID NO: 232142 - DNA, 19 bp, Homo sapiens
  siRNA target sequence for CTPS2 (NM_019857.3,1777-1795).
ggatggaaatcattgaact

SEQ ID NO: 232143 - DNA, 19 bp, Homo sapiens
  siRNA target sequence for CTPS2 (NM_019857.3,1794-1812).
ctggcaaatcatccttatt

SEQ ID NO: 232144 - DNA, 19 bp, Homo sapiens
  siRNA target sequence for CTPS2 (NM_019857.3,1830-1848).
catcctgagttttcttcta

SEQ ID NO: 232145 - DNA, 19 bp, Homo sapiens
  siRNA target sequence for CTPS2 (NM_019857.3,1920-1938).
caacagggttgcaaactgt

SEQ ID NO: 232146 - DNA, 19 bp, Homo sapiens
  siRNA target sequence for CTPS2 (NM_019857.3,1964-1982).
cagtgatgacagcttttca

SEQ ID NO: 232147 - DNA, 19 bp, Homo sapiens
  siRNA target sequence for HLCS (NM_000411.3,1238-1256).
gatagactccacatggata

SEQ ID NO: 232148 - DNA, 19 bp, Homo sapiens
  siRNA target sequence for HLCS (NM_000411.3,1265-1283).
gtaccccaaaagattgtgt

SEQ ID NO: 232149 - DNA, 19 bp, Homo sapiens
  siRNA target sequence for HLCS (NM_000411.3,1568-1586).
gagaacagcaccattgagt

SEQ ID NO: 232150 - DNA, 19 bp, Homo sapiens
  siRNA target sequence for HLCS (NM_000411.3,1578-1596).
ccattgagtcagtcaagtt

SEQ ID NO: 232151 - DNA, 19 bp, Homo sapiens
  siRNA target sequence for HLCS (NM_000411.3,1617-1635).
cagaccttccctacgatta

SEQ ID NO: 232152 - DNA, 19 bp, Homo sapiens
  siRNA target sequence for HLCS (NM_000411.3,1619-1637).
gaccttccctacgattata

SEQ ID NO: 232153 - DNA, 19 bp, Homo sapiens
  siRNA target sequence for HLCS (NM_000411.3,1622-1640).
cttccctacgattatagca

SEQ ID NO: 232154 - DNA, 19 bp, Homo sapiens
  siRNA target sequence for HLCS (NM_000411.3,1799-1817).
gtggacattgacagttata

SEQ ID NO: 232155 - DNA, 19 bp, Homo sapiens
  siRNA target sequence for HLCS (NM_000411.3,1924-1942).
gaagttcatggcctatctt

SEQ ID NO: 232156 - DNA, 19 bp, Homo sapiens
  siRNA target sequence for HLCS (NM_000411.3,1958-1976).
gtgttgggcctgtcttcat

SEQ ID NO: 232157 - DNA, 19 bp, Homo sapiens
  siRNA target sequence for HLCS (NM_000411.3,2161-2179).
ggacaaggacaggatgatt

SEQ ID NO: 232158 - DNA, 19 bp, Homo sapiens
  siRNA target sequence for HLCS (NM_000411.3,2224-2242).
ccaggtgcacttagaacta

SEQ ID NO: 232159 - DNA, 19 bp, Homo sapiens
  siRNA target sequence for HLCS (NM_000411.3,2261-2279).
gtgcaaactccagaagatt

SEQ ID NO: 232160 - DNA, 19 bp, Homo sapiens
  siRNA target sequence for HLCS (NM_000411.3,2284-2302).
cttgctcaagtcaagcaat

SEQ ID NO: 232161 - DNA, 19 bp, Homo sapiens
  siRNA target sequence for HLCS (NM_000411.3,2288-2306).
ctcaagtcaagcaatttta

SEQ ID NO: 232162 - DNA, 19 bp, Homo sapiens
  siRNA target sequence for HLCS (NM_000411.3,2293-2311).
gtcaagcaattttagaaga

SEQ ID NO: 232163 - DNA, 19 bp, Homo sapiens
  siRNA target sequence for HLCS (NM_000411.3,2299-2317).
caattttagaagatacgaa

SEQ ID NO: 232164 - DNA, 19 bp, Homo sapiens
  siRNA target sequence for HLCS (NM_000411.3,2314-2332).
cgaagtccttagagagatt

SEQ ID NO: 232165 - DNA, 19 bp, Homo sapiens
  siRNA target sequence for HLCS (NM_000411.3,2373-2391).
ctgccttaactcctcttta

SEQ ID NO: 232166 - DNA, 19 bp, Homo sapiens
  siRNA target sequence for HLCS (NM_000411.3,2375-2393).
gccttaactcctctttact

SEQ ID NO: 232167 - DNA, 19 bp, Homo sapiens
  siRNA target sequence for HLCS (NM_000411.3,2452-2470).
ggactccgagggagaaata

SEQ ID NO: 232168 - DNA, 19 bp, Homo sapiens
  siRNA target sequence for HLCS (NM_000411.3,2453-2471).
gactccgagggagaaataa

SEQ ID NO: 232169 - DNA, 19 bp, Homo sapiens
  siRNA target sequence for HLCS (NM_000411.3,2476-2494).
cggccagctctctcttaga

SEQ ID NO: 232170 - DNA, 19 bp, Homo sapiens
  siRNA target sequence for HLCS (NM_000411.3,2478-2496).
gccagctctctcttagatt

SEQ ID NO: 232171 - DNA, 19 bp, Homo sapiens
  siRNA target sequence for HLCS (NM_000411.3,2482-2500).
gctctctcttagatttgtt

SEQ ID NO: 232172 - DNA, 19 bp, Homo sapiens
  siRNA target sequence for HLCS (NM_000411.3,2505-2523).
cctacgtgtctgaagtaga

SEQ ID NO: 232173 - DNA, 19 bp, Homo sapiens
  siRNA target sequence for HLCS (NM_000411.3,2506-2524).
ctacgtgtctgaagtagaa

SEQ ID NO: 232174 - DNA, 19 bp, Homo sapiens
  siRNA target sequence for HLCS (NM_000411.3,2617-2635).
caagcagttggggaaagta

SEQ ID NO: 232175 - DNA, 19 bp, Homo sapiens
  siRNA target sequence for HLCS (NM_000411.3,2700-2718).
cgcaggaaatgggcttaat

SEQ ID NO: 232176 - DNA, 19 bp, Homo sapiens
  siRNA target sequence for HLCS (NM_000411.3,2705-2723).
gaaatgggcttaatagtga

SEQ ID NO: 232177 - DNA, 19 bp, Homo sapiens
  siRNA target sequence for HLCS (NM_000411.3,2847-2865).
cgtttgtccagcatctgat

SEQ ID NO: 232178 - DNA, 19 bp, Homo sapiens
  siRNA target sequence for HLCS (NM_000411.3,2927-2945).
gtgaagtggcccaacgata

SEQ ID NO: 232179 - DNA, 19 bp, Homo sapiens
  siRNA target sequence for HLCS (NM_000411.3,2929-2947).
gaagtggcccaacgatatt

SEQ ID NO: 232180 - DNA, 19 bp, Homo sapiens
  siRNA target sequence for HLCS (NM_000411.3,2932-2950).
gtggcccaacgatatttat

SEQ ID NO: 232181 - DNA, 19 bp, Homo sapiens
  siRNA target sequence for HLCS (NM_000411.3,2936-2954).
cccaacgatatttattaca

SEQ ID NO: 232182 - DNA, 19 bp, Homo sapiens
  siRNA target sequence for HLCS (NM_000411.3,2975-2993).
ggagttctggttaactcaa

SEQ ID NO: 232183 - DNA, 19 bp, Homo sapiens
  siRNA target sequence for HLCS (NM_000411.3,3030-3048).
gtggatttaatgtgactaa

SEQ ID NO: 232184 - DNA, 19 bp, Homo sapiens
  siRNA target sequence for HLCS (NM_000411.3,3077-3095).
ctcatcacagaatacaata

SEQ ID NO: 232185 - DNA, 19 bp, Homo sapiens
  siRNA target sequence for HLCS (NM_000411.3,3120-3138).
ccttaagagccgattatct

SEQ ID NO: 232186 - DNA, 19 bp, Homo sapiens
  siRNA target sequence for HLCS (NM_000411.3,3204-3222).
gcgtccttcccctttatta

SEQ ID NO: 232187 - DNA, 19 bp, Homo sapiens
  siRNA target sequence for ASNS (NM_001673.2,687-705).
ctccgcgactcccttttta

SEQ ID NO: 232188 - DNA, 19 bp, Homo sapiens
  siRNA target sequence for ASNS (NM_001673.2,689-707).
ccgcgactccctttttaaa

SEQ ID NO: 232189 - DNA, 19 bp, Homo sapiens
  siRNA target sequence for ASNS (NM_001673.2,812-830).
ccctgcacgccctctatga

SEQ ID NO: 232190 - DNA, 19 bp, Homo sapiens
  siRNA target sequence for ASNS (NM_001673.2,816-834).
gcacgccctctatgacaat

SEQ ID NO: 232191 - DNA, 19 bp, Homo sapiens
  siRNA target sequence for ASNS (NM_001673.2,907-925).
gtaaagaaacgtttgatga

SEQ ID NO: 232192 - DNA, 19 bp, Homo sapiens
  siRNA target sequence for ASNS (NM_001673.2,921-939).
gatgacagacagaaggatt

SEQ ID NO: 232193 - DNA, 19 bp, Homo sapiens
  siRNA target sequence for ASNS (NM_001673.2,1389-1407).
ccgcgcagatcgaactact

SEQ ID NO: 232194 - DNA, 19 bp, Homo sapiens
  siRNA target sequence for ASNS (NM_001673.2,1731-1749).
ctaccgtcaagtctttgaa

SEQ ID NO: 232195 - DNA, 19 bp, Homo sapiens
  siRNA target sequence for LIAS (NM_006859.2,143-161).
ccagtcagaccgttaagct

SEQ ID NO: 232196 - DNA, 19 bp, Homo sapiens
  siRNA target sequence for LIAS (NM_006859.2,160-178).
ctccttgccagataaaaaa

SEQ ID NO: 232197 - DNA, 19 bp, Homo sapiens
  siRNA target sequence for LIAS (NM_006859.2,198-216).
gaccagaccttcaagattt

SEQ ID NO: 232198 - DNA, 19 bp, Homo sapiens
  siRNA target sequence for LIAS (NM_006859.2,299-317).
ctacctccatggctaaaga

SEQ ID NO: 232199 - DNA, 19 bp, Homo sapiens
  siRNA target sequence for LIAS (NM_006859.2,453-471).
cagccacgatcatgttgat

SEQ ID NO: 232200 - DNA, 19 bp, Homo sapiens
  siRNA target sequence for LIAS (NM_006859.2,469-487).
gatgggtgacacatgtaca

SEQ ID NO: 232201 - DNA, 19 bp, Homo sapiens
  siRNA target sequence for LIAS (NM_006859.2,495-513).
gcagattttgttctgttaa

SEQ ID NO: 232202 - DNA, 19 bp, Homo sapiens
  siRNA target sequence for LIAS (NM_006859.2,542-560).
gccagtgagccctacaata

SEQ ID NO: 232203 - DNA, 19 bp, Homo sapiens
  siRNA target sequence for LIAS (NM_006859.2,582-600).
ggggtctggattatgttgt

SEQ ID NO: 232204 - DNA, 19 bp, Homo sapiens
  siRNA target sequence for LIAS (NM_006859.2,638-656).
ggagctgaacacattgcaa

SEQ ID NO: 232205 - DNA, 19 bp, Homo sapiens
  siRNA target sequence for LIAS (NM_006859.2,653-671).
gcaaagaccgtatcatatt

SEQ ID NO: 232206 - DNA, 19 bp, Homo sapiens
  siRNA target sequence for LIAS (NM_006859.2,654-672).
caaagaccgtatcatattt

SEQ ID NO: 232207 - DNA, 19 bp, Homo sapiens
  siRNA target sequence for LIAS (NM_006859.2,703-721).
gtgtcttactcctgatttt

SEQ ID NO: 232208 - DNA, 19 bp, Homo sapiens
  siRNA target sequence for LIAS (NM_006859.2,722-740).
cgaggtgatctcaaagcaa

SEQ ID NO: 232209 - DNA, 19 bp, Homo sapiens
  siRNA target sequence for LIAS (NM_006859.2,726-744).
gtgatctcaaagcaataga

SEQ ID NO: 232210 - DNA, 19 bp, Homo sapiens
  siRNA target sequence for LIAS (NM_006859.2,772-790).
gtatgcacataatgtagaa

SEQ ID NO: 232211 - DNA, 19 bp, Homo sapiens
  siRNA target sequence for LIAS (NM_006859.2,799-817).
ggaattacagagtaaggtt

SEQ ID NO: 232212 - DNA, 19 bp, Homo sapiens
  siRNA target sequence for LIAS (NM_006859.2,819-837).
gtgatcctcgggccaattt

SEQ ID NO: 232213 - DNA, 19 bp, Homo sapiens
  siRNA target sequence for LIAS (NM_006859.2,844-862).
gtccctacgtgtactgaaa

SEQ ID NO: 232214 - DNA, 19 bp, Homo sapiens
  siRNA target sequence for LIAS (NM_006859.2,846-864).
ccctacgtgtactgaaaca

SEQ ID NO: 232215 - DNA, 19 bp, Homo sapiens
  siRNA target sequence for LIAS (NM_006859.2,847-865).
cctacgtgtactgaaacat

SEQ ID NO: 232216 - DNA, 19 bp, Homo sapiens
  siRNA target sequence for LIAS (NM_006859.2,871-889).
gaaggttcagcctgatgtt

SEQ ID NO: 232217 - DNA, 19 bp, Homo sapiens
  siRNA target sequence for LIAS (NM_006859.2,971-989).
gatgtagactgcttgactt

SEQ ID NO: 232218 - DNA, 19 bp, Homo sapiens
  siRNA target sequence for LIAS (NM_006859.2,981-999).
gcttgactttaggacaata

SEQ ID NO: 232219 - DNA, 19 bp, Homo sapiens
  siRNA target sequence for LIAS (NM_006859.2,982-1000).
cttgactttaggacaatat

SEQ ID NO: 232220 - DNA, 19 bp, Homo sapiens
  siRNA target sequence for LIAS (NM_006859.2,1017-1035).
gtcaccttaaggttgaaga

SEQ ID NO: 232221 - DNA, 19 bp, Homo sapiens
  siRNA target sequence for LIAS (NM_006859.2,1021-1039).
ccttaaggttgaagaatat

SEQ ID NO: 232222 - DNA, 19 bp, Homo sapiens
  siRNA target sequence for LIAS (NM_006859.2,1022-1040).
cttaaggttgaagaatata

SEQ ID NO: 232223 - DNA, 19 bp, Homo sapiens
  siRNA target sequence for LIAS (NM_006859.2,1077-1095).
gaaatgaacttggatttca

SEQ ID NO: 232224 - DNA, 19 bp, Homo sapiens
  siRNA target sequence for LIAS (NM_006859.2,1111-1129).
ccctttggtgcgttcttca

SEQ ID NO: 232225 - DNA, 19 bp, Homo sapiens
  siRNA target sequence for LIAS (NM_006859.2,1113-1131).
ctttggtgcgttcttcata

SEQ ID NO: 232226 - DNA, 19 bp, Homo sapiens
  siRNA target sequence for LIAS (NM_006859.2,1117-1135).
ggtgcgttcttcatataaa

SEQ ID NO: 232227 - DNA, 19 bp, Homo sapiens
  siRNA target sequence for LIAS (NM_006859.2,1120-1138).
gcgttcttcatataaagca

SEQ ID NO: 232228 - DNA, 19 bp, Homo sapiens
  siRNA target sequence for LIAS (NM_194451.1,1016-1034).
cgtcaccttaaggtgaatt

SEQ ID NO: 232229 - DNA, 19 bp, Homo sapiens
  siRNA target sequence for LIAS (NM_194451.1,1017-1035).
gtcaccttaaggtgaattt

SEQ ID NO: 232230 - DNA, 19 bp, Homo sapiens
  siRNA target sequence for GLUL (NM_002065.3,474-492).
caagttcccacttaaataa

SEQ ID NO: 232231 - DNA, 19 bp, Homo sapiens
  siRNA target sequence for GLUL (NM_002065.3,517-535).
cctgcctcagggtgagaaa

SEQ ID NO: 232232 - DNA, 19 bp, Homo sapiens
  siRNA target sequence for GLUL (NM_002065.3,536-554).
gtccaggccatgtatatct

SEQ ID NO: 232233 - DNA, 19 bp, Homo sapiens
  siRNA target sequence for GLUL (NM_002065.3,631-649).
gcctgagtggaatttcgat

SEQ ID NO: 232234 - DNA, 19 bp, Homo sapiens
  siRNA target sequence for GLUL (NM_002065.3,737-755).
cctaacaagctggtgttat

SEQ ID NO: 232235 - DNA, 19 bp, Homo sapiens
  siRNA target sequence for GLUL (NM_002065.3,761-779).
gttttcaagtacaatcgaa

SEQ ID NO: 232236 - DNA, 19 bp, Homo sapiens
  siRNA target sequence for GLUL (NM_002065.3,780-798).
ggcctgcagagaccaattt

SEQ ID NO: 232237 - DNA, 19 bp, Homo sapiens
  siRNA target sequence for GLUL (NM_002065.3,807-825).
cctgtaaacggataatgga

SEQ ID NO: 232238 - DNA, 19 bp, Homo sapiens
  siRNA target sequence for GLUL (NM_002065.3,887-905).
gatgggcacccctttggtt

SEQ ID NO: 232239 - DNA, 19 bp, Homo sapiens
  siRNA target sequence for GLUL (NM_002065.3,1012-1030).
gtatgctggagtcaagatt

SEQ ID NO: 232240 - DNA, 19 bp, Homo sapiens
  siRNA target sequence for GLUL (NM_002065.3,1024-1042).
caagattgcggggactaat

SEQ ID NO: 232241 - DNA, 19 bp, Homo sapiens
  siRNA target sequence for GLUL (NM_002065.3,1054-1072).
gcctgcccagtgggaattt

SEQ ID NO: 232242 - DNA, 19 bp, Homo sapiens
  siRNA target sequence for GLUL (NM_002065.3,1206-1224).
gtgcaggctgccataccaa

SEQ ID NO: 232243 - DNA, 19 bp, Homo sapiens
  siRNA target sequence for GLUL (NM_002065.3,1309-1327).
ccacatccgtgcctatgat

SEQ ID NO: 232244 - DNA, 19 bp, Homo sapiens
  siRNA target sequence for GLUL (NM_002065.3,1345-1363).
caatgcccgacgtctaact

SEQ ID NO: 232245 - DNA, 19 bp, Homo sapiens
  siRNA target sequence for GLUL (NM_002065.3,1370-1388).
catgaaacctccaacatca

SEQ ID NO: 232246 - DNA, 19 bp, Homo sapiens
  siRNA target sequence for GLUL (NM_002065.3,1456-1474).
gaagaagggttactttgaa

SEQ ID NO: 232247 - DNA, 19 bp, Homo sapiens
  siRNA target sequence for GLUL (NM_002065.3,1528-1546).
ccgcacgtgtcttctcaat

SEQ ID NO: 232248 - DNA, 19 bp, Homo sapiens
  siRNA target sequence for GLULD1 (NM_016571.1,64-82).
ggactcaacaagagatgaa

SEQ ID NO: 232249 - DNA, 19 bp, Homo sapiens
  siRNA target sequence for GLULD1 (NM_016571.1,103-121).
cagcatgaacacattaaga

SEQ ID NO: 232250 - DNA, 19 bp, Homo sapiens
  siRNA target sequence for GLULD1 (NM_016571.1,133-151).
gaaagtcactaaaccatat

SEQ ID NO: 232251 - DNA, 19 bp, Homo sapiens
  siRNA target sequence for GLULD1 (NM_016571.1,173-191).
gaaacggatatgtccaatt

SEQ ID NO: 232252 - DNA, 19 bp, Homo sapiens
  siRNA target sequence for GLULD1 (NM_016571.1,177-195).
cggatatgtccaattcaaa

SEQ ID NO: 232253 - DNA, 19 bp, Homo sapiens
  siRNA target sequence for GLULD1 (NM_016571.1,178-196).
ggatatgtccaattcaaat

SEQ ID NO: 232254 - DNA, 19 bp, Homo sapiens
  siRNA target sequence for GLULD1 (NM_016571.1,205-223).
gagggacagcagtcaaatt

SEQ ID NO: 232255 - DNA, 19 bp, Homo sapiens
  siRNA target sequence for GLULD1 (NM_016571.1,249-267).
gaatgaaacacattagaca

SEQ ID NO: 232256 - DNA, 19 bp, Homo sapiens
  siRNA target sequence for GLULD1 (NM_016571.1,285-303).
gcctccagtttgtacgatt

SEQ ID NO: 232257 - DNA, 19 bp, Homo sapiens
  siRNA target sequence for GLULD1 (NM_016571.1,323-341).
ggcgtgtccaggtctaaga

SEQ ID NO: 232258 - DNA, 19 bp, Homo sapiens
  siRNA target sequence for GLULD1 (NM_016571.1,351-369).
cacacttttttcaagagaa

SEQ ID NO: 232259 - DNA, 19 bp, Homo sapiens
  siRNA target sequence for GLULD1 (NM_016571.1,387-405).
gcatgccccgaggttatct

SEQ ID NO: 232260 - DNA, 19 bp, Homo sapiens
  siRNA target sequence for GLULD1 (NM_016571.1,391-409).
gccccgaggttatcttgaa

SEQ ID NO: 232261 - DNA, 19 bp, Homo sapiens
  siRNA target sequence for GLULD1 (NM_016571.1,396-414).
gaggttatcttgaagtgat

SEQ ID NO: 232262 - DNA, 19 bp, Homo sapiens
  siRNA target sequence for GLULD1 (NM_016571.1,476-494).
gtcctaatgccagagttat

SEQ ID NO: 232263 - DNA, 19 bp, Homo sapiens
  siRNA target sequence for GLULD1 (NM_016571.1,484-502).
gccagagttatcaaccttt

SEQ ID NO: 232264 - DNA, 19 bp, Homo sapiens
  siRNA target sequence for GLULD1 (NM_016571.1,490-508).
gttatcaacctttagagtt

SEQ ID NO: 232265 - DNA, 19 bp, Homo sapiens
  siRNA target sequence for GLULD1 (NM_016571.1,563-581).
ggtgagcctcttttgactt

SEQ ID NO: 232266 - DNA, 19 bp, Homo sapiens
  siRNA target sequence for GLULD1 (NM_016571.1,577-595).
gacttccccaaggtacatt

SEQ ID NO: 232267 - DNA, 19 bp, Homo sapiens
  siRNA target sequence for GLULD1 (NM_016571.1,677-695).
gtgcccgaaattttaaatt

SEQ ID NO: 232268 - DNA, 19 bp, Homo sapiens
  siRNA target sequence for GLULD1 (NM_016571.1,679-697).
gcccgaaattttaaattca

SEQ ID NO: 232269 - DNA, 19 bp, Homo sapiens
  siRNA target sequence for GLULD1 (NM_016571.1,786-804).
gagccaatgtcgagagttt

SEQ ID NO: 232270 - DNA, 19 bp, Homo sapiens
  siRNA target sequence for GLULD1 (NM_016571.1,819-837).
ggcctggtcagatggaaat

SEQ ID NO: 232271 - DNA, 19 bp, Homo sapiens
  siRNA target sequence for GLULD1 (NM_016571.1,821-839).
cctggtcagatggaaatct

SEQ ID NO: 232272 - DNA, 19 bp, Homo sapiens
  siRNA target sequence for GLULD1 (NM_016571.1,858-876).
gcattagctcagctgataa

SEQ ID NO: 232273 - DNA, 19 bp, Homo sapiens
  siRNA target sequence for GLULD1 (NM_016571.1,940-958).
cttcattgagactggattt

SEQ ID NO: 232274 - DNA, 19 bp, Homo sapiens
  siRNA target sequence for GLULD1 (NM_016571.1,949-967).
gactggattttgtgattca

SEQ ID NO: 232275 - DNA, 19 bp, Homo sapiens
  siRNA target sequence for GLULD1 (NM_016571.1,969-987).
ggattttgtctcatagtct

SEQ ID NO: 232276 - DNA, 19 bp, Homo sapiens
  siRNA target sequence for GLULD1 (NM_016571.1,991-1009).
ggatgtcgataggaagaaa

SEQ ID NO: 232277 - DNA, 19 bp, Homo sapiens
  siRNA target sequence for GLULD1 (NM_016571.1,992-1010).
gatgtcgataggaagaaaa

SEQ ID NO: 232278 - DNA, 19 bp, Homo sapiens
  siRNA target sequence for GLULD1 (NM_016571.1,995-1013).
gtcgataggaagaaaaaca

SEQ ID NO: 232279 - DNA, 19 bp, Homo sapiens
  siRNA target sequence for GLULD1 (NM_016571.1,1045-1063).
cacgatcactgggaaaaaa

SEQ ID NO: 232280 - DNA, 19 bp, Homo sapiens
  siRNA target sequence for GLULD1 (NM_016571.1,1065-1083).
ggttggcaggactcttgaa

SEQ ID NO: 232281 - DNA, 19 bp, Homo sapiens
  siRNA target sequence for GLULD1 (NM_016571.1,1128-1146).
gccgaaagcgttattccaa

SEQ ID NO: 232282 - DNA, 19 bp, Homo sapiens
  siRNA target sequence for GLULD1 (NM_016571.1,1176-1194).
ctacaacatggggatacaa

SEQ ID NO: 232283 - DNA, 19 bp, Homo sapiens
  siRNA target sequence for GLULD1 (NM_016571.1,1179-1197).
caacatggggatacaatga

SEQ ID NO: 232284 - DNA, 19 bp, Homo sapiens
  siRNA target sequence for GLULD1 (NM_016571.1,1196-1214).
gacaacagctgtatattta

SEQ ID NO: 232285 - DNA, 19 bp, Homo sapiens
  siRNA target sequence for GLULD1 (NM_016571.1,1238-1256).
ggcacccggatagaaaata

SEQ ID NO: 232286 - DNA, 19 bp, Homo sapiens
  siRNA target sequence for GLULD1 (NM_016571.1,1239-1257).
gcacccggatagaaaataa

SEQ ID NO: 232287 - DNA, 19 bp, Homo sapiens
  siRNA target sequence for GLULD1 (NM_016571.1,1240-1258).
cacccggatagaaaataaa

SEQ ID NO: 232288 - DNA, 19 bp, Homo sapiens
  siRNA target sequence for GLULD1 (NM_016571.1,1242-1260).
cccggatagaaaataaact

SEQ ID NO: 232289 - DNA, 19 bp, Homo sapiens
  siRNA target sequence for GLULD1 (NM_016571.1,1313-1331).
ggcttagatggacttcata

SEQ ID NO: 232290 - DNA, 19 bp, Homo sapiens
  siRNA target sequence for GLULD1 (NM_016571.1,1363-1381).
gagcacagacttttaccaa

SEQ ID NO: 232291 - DNA, 19 bp, Homo sapiens
  siRNA target sequence for GLULD1 (NM_016571.1,1389-1407).
cttctgagatccctttaaa

SEQ ID NO: 232292 - DNA, 19 bp, Homo sapiens
  siRNA target sequence for GLULD1 (NM_016571.1,1392-1410).
ctgagatccctttaaaact

SEQ ID NO: 232293 - DNA, 19 bp, Homo sapiens
  siRNA target sequence for GLULD1 (NM_016571.1,1456-1474).
ggctctaggagaaaccttt

SEQ ID NO: 232294 - DNA, 19 bp, Homo sapiens
  siRNA target sequence for GLULD1 (NM_016571.1,1464-1482).
gagaaacctttattcgata

SEQ ID NO: 232295 - DNA, 19 bp, Homo sapiens
  siRNA target sequence for GLULD1 (NM_016571.1,1536-1554).
gaaataaattcttagagta

SEQ ID NO: 232296 - DNA, 19 bp, Homo sapiens
  siRNA target sequence for HAL (NM_002108.2,388-406).
gccgtgaggcgctatatca

SEQ ID NO: 232297 - DNA, 19 bp, Homo sapiens
  siRNA target sequence for HAL (NM_002108.2,389-407).
ccgtgaggcgctatatcaa

SEQ ID NO: 232298 - DNA, 19 bp, Homo sapiens
  siRNA target sequence for HAL (NM_002108.2,395-413).
ggcgctatatcaagaataa

SEQ ID NO: 232299 - DNA, 19 bp, Homo sapiens
  siRNA target sequence for HAL (NM_002108.2,531-549).
gttcgtggaagtggttata

SEQ ID NO: 232300 - DNA, 19 bp, Homo sapiens
  siRNA target sequence for HAL (NM_002108.2,561-579).
catgtctcctgacttcatt

SEQ ID NO: 232301 - DNA, 19 bp, Homo sapiens
  siRNA target sequence for HAL (NM_002108.2,589-607).
ccagaaggagtttatctat

SEQ ID NO: 232302 - DNA, 19 bp, Homo sapiens
  siRNA target sequence for HAL (NM_002108.2,592-610).
gaaggagtttatctataca

SEQ ID NO: 232303 - DNA, 19 bp, Homo sapiens
  siRNA target sequence for HAL (NM_002108.2,619-637).
cgggagcctgaaaagtaca

SEQ ID NO: 232304 - DNA, 19 bp, Homo sapiens
  siRNA target sequence for HAL (NM_002108.2,620-638).
gggagcctgaaaagtacat

SEQ ID NO: 232305 - DNA, 19 bp, Homo sapiens
  siRNA target sequence for HAL (NM_002108.2,665-683).
cggaggatctggtcaactt

SEQ ID NO: 232306 - DNA, 19 bp, Homo sapiens
  siRNA target sequence for HAL (NM_002108.2,684-702).
gggaaagggacgctacaaa

SEQ ID NO: 232307 - DNA, 19 bp, Homo sapiens
  siRNA target sequence for HAL (NM_002108.2,685-703).
ggaaagggacgctacaaaa

SEQ ID NO: 232308 - DNA, 19 bp, Homo sapiens
  siRNA target sequence for HAL (NM_002108.2,746-764).
gggaggtcatagatagcat

SEQ ID NO: 232309 - DNA, 19 bp, Homo sapiens
  siRNA target sequence for HAL (NM_002108.2,789-807).
cggtattactacaggtttt

SEQ ID NO: 232310 - DNA, 19 bp, Homo sapiens
  siRNA target sequence for HAL (NM_002108.2,817-835).
gccagaactgtaattccta

SEQ ID NO: 232311 - DNA, 19 bp, Homo sapiens
  siRNA target sequence for HAL (NM_002108.2,849-867).
ggagcttcaggtcaactta

SEQ ID NO: 232312 - DNA, 19 bp, Homo sapiens
  siRNA target sequence for HAL (NM_002108.2,852-870).
gcttcaggtcaacttagta

SEQ ID NO: 232313 - DNA, 19 bp, Homo sapiens
  siRNA target sequence for HAL (NM_002108.2,864-882).
cttagtacgctcacattct

SEQ ID NO: 232314 - DNA, 19 bp, Homo sapiens
  siRNA target sequence for HAL (NM_002108.2,919-937).
cggatgctcttggctttaa

SEQ ID NO: 232315 - DNA, 19 bp, Homo sapiens
  siRNA target sequence for HAL (NM_002108.2,981-999).
gaccctcaaacaagtcata

SEQ ID NO: 232316 - DNA, 19 bp, Homo sapiens
  siRNA target sequence for HAL (NM_002108.2,983-1001).
ccctcaaacaagtcataga

SEQ ID NO: 232317 - DNA, 19 bp, Homo sapiens
  siRNA target sequence for HAL (NM_002108.2,1132-1150).
ggctgggctgatgctaaat

SEQ ID NO: 232318 - DNA, 19 bp, Homo sapiens
  siRNA target sequence for HAL (NM_002108.2,1133-1151).
gctgggctgatgctaaata

SEQ ID NO: 232319 - DNA, 19 bp, Homo sapiens
  siRNA target sequence for HAL (NM_002108.2,1136-1154).
gggctgatgctaaatacgt

SEQ ID NO: 232320 - DNA, 19 bp, Homo sapiens
  siRNA target sequence for HAL (NM_002108.2,1219-1237).
gggacgcagatgatcacat

SEQ ID NO: 232321 - DNA, 19 bp, Homo sapiens
  siRNA target sequence for HAL (NM_002108.2,1277-1295).
cacggcaggctgacattgt

SEQ ID NO: 232322 - DNA, 19 bp, Homo sapiens
  siRNA target sequence for HAL (NM_002108.2,1515-1533).
ggtgaatgatacaatagca

SEQ ID NO: 232323 - DNA, 19 bp, Homo sapiens
  siRNA target sequence for HAL (NM_002108.2,1516-1534).
gtgaatgatacaatagcat

SEQ ID NO: 232324 - DNA, 19 bp, Homo sapiens
  siRNA target sequence for HAL (NM_002108.2,1537-1555).
gtgaagaacatcattacca

SEQ ID NO: 232325 - DNA, 19 bp, Homo sapiens
  siRNA target sequence for HAL (NM_002108.2,1561-1579).
ctgaacagcgcaacagata

SEQ ID NO: 232326 - DNA, 19 bp, Homo sapiens
  siRNA target sequence for HAL (NM_002108.2,1563-1581).
gaacagcgcaacagataat

SEQ ID NO: 232327 - DNA, 19 bp, Homo sapiens
  siRNA target sequence for HAL (NM_002108.2,1566-1584).
cagcgcaacagataatcct

SEQ ID NO: 232328 - DNA, 19 bp, Homo sapiens
  siRNA target sequence for HAL (NM_002108.2,1568-1586).
gcgcaacagataatcctat

SEQ ID NO: 232329 - DNA, 19 bp, Homo sapiens
  siRNA target sequence for HAL (NM_002108.2,1622-1640).
gaaacttccatggtgaata

SEQ ID NO: 232330 - DNA, 19 bp, Homo sapiens
  siRNA target sequence for HAL (NM_002108.2,1643-1661).
cagccaaagccctagacta

SEQ ID NO: 232331 - DNA, 19 bp, Homo sapiens
  siRNA target sequence for HAL (NM_002108.2,1646-1664).
ccaaagccctagactactt

SEQ ID NO: 232332 - DNA, 19 bp, Homo sapiens
  siRNA target sequence for HAL (NM_002108.2,2021-2039).
cgctggagaaggtctatga

SEQ ID NO: 232333 - DNA, 19 bp, Homo sapiens
  siRNA target sequence for HAL (NM_002108.2,2040-2058).
cctggtgcgctctgttgta

SEQ ID NO: 232334 - DNA, 19 bp, Homo sapiens
  siRNA target sequence for HAL (NM_002108.2,2041-2059).
ctggtgcgctctgttgtaa

SEQ ID NO: 232335 - DNA, 19 bp, Homo sapiens
  siRNA target sequence for HAL (NM_002108.2,2053-2071).
gttgtaaggccctggataa

SEQ ID NO: 232336 - DNA, 19 bp, Homo sapiens
  siRNA target sequence for HAL (NM_002108.2,2143-2161).
gctgctccatacattgaaa

SEQ ID NO: 232337 - DNA, 19 bp, Homo sapiens
  siRNA target sequence for HAL (NM_002108.2,2173-2191).
gagcatattccagaatcaa

SEQ ID NO: 232338 - DNA, 19 bp, Homo sapiens
  siRNA target sequence for HAL (NM_002108.2,2210-2228).
ccttttcactgcaatttct

SEQ ID NO: 232339 - DNA, 19 bp, Homo sapiens
  siRNA target sequence for HAL (NM_002108.2,2230-2248).
cacaagaaatccaccaaaa

SEQ ID NO: 232340 - DNA, 19 bp, Homo sapiens
  siRNA target sequence for BCL7C (NM_004765.2,250-268).
gcgacacttcccttcgtat

SEQ ID NO: 232341 - DNA, 19 bp, Homo sapiens
  siRNA target sequence for BCL7C (NM_004765.2,393-411).
ctcatcctgctggatctta

SEQ ID NO: 232342 - DNA, 19 bp, Homo sapiens
  siRNA target sequence for BCL7C (NM_004765.2,398-416).
cctgctggatcttaatgat

SEQ ID NO: 232343 - DNA, 19 bp, Homo sapiens
  siRNA target sequence for BCL7C (NM_004765.2,668-686).
cgaagcttaccctgtcttt

SEQ ID NO: 232344 - DNA, 19 bp, Homo sapiens
  siRNA target sequence for RCL1 (NM_005772.2,241-259).
ccgtcaaaatccgaaagat

SEQ ID NO: 232345 - DNA, 19 bp, Homo sapiens
  siRNA target sequence for RCL1 (NM_005772.2,242-260).
cgtcaaaatccgaaagatt

SEQ ID NO: 232346 - DNA, 19 bp, Homo sapiens
  siRNA target sequence for RCL1 (NM_005772.2,304-322).
gcttcataaggctattgga

SEQ ID NO: 232347 - DNA, 19 bp, Homo sapiens
  siRNA target sequence for RCL1 (NM_005772.2,315-333).
ctattggacaaaataacga

SEQ ID NO: 232348 - DNA, 19 bp, Homo sapiens
  siRNA target sequence for RCL1 (NM_005772.2,331-349).
cgaatggttctcgaattga

SEQ ID NO: 232349 - DNA, 19 bp, Homo sapiens
  siRNA target sequence for RCL1 (NM_005772.2,332-350).
gaatggttctcgaattgaa

SEQ ID NO: 232350 - DNA, 19 bp, Homo sapiens
  siRNA target sequence for RCL1 (NM_005772.2,340-358).
ctcgaattgaaataaacca

SEQ ID NO: 232351 - DNA, 19 bp, Homo sapiens
  siRNA target sequence for RCL1 (NM_005772.2,361-379).
caggaacaaccttatatta

SEQ ID NO: 232352 - DNA, 19 bp, Homo sapiens
  siRNA target sequence for RCL1 (NM_005772.2,364-382).
gaacaaccttatattatca

SEQ ID NO: 232353 - DNA, 19 bp, Homo sapiens
  siRNA target sequence for RCL1 (NM_005772.2,433-451).
gtggcattgggtattacct

SEQ ID NO: 232354 - DNA, 19 bp, Homo sapiens
  siRNA target sequence for RCL1 (NM_005772.2,462-480).
ctttgcttggctccattta

SEQ ID NO: 232355 - DNA, 19 bp, Homo sapiens
  siRNA target sequence for RCL1 (NM_005772.2,482-500).
gaagcacccgttaaaaata

SEQ ID NO: 232356 - DNA, 19 bp, Homo sapiens
  siRNA target sequence for RCL1 (NM_005772.2,488-506).
cccgttaaaaatagttcta

SEQ ID NO: 232357 - DNA, 19 bp, Homo sapiens
  siRNA target sequence for RCL1 (NM_005772.2,562-580).
cactccctttgttgaaaca

SEQ ID NO: 232358 - DNA, 19 bp, Homo sapiens
  siRNA target sequence for RCL1 (NM_005772.2,585-603).
gggattgatggtgaatcat

SEQ ID NO: 232359 - DNA, 19 bp, Homo sapiens
  siRNA target sequence for RCL1 (NM_005772.2,645-663).
ggaggcgaagtggttttct

SEQ ID NO: 232360 - DNA, 19 bp, Homo sapiens
  siRNA target sequence for RCL1 (NM_005772.2,680-698).
ggtcttgaagcccattcaa

SEQ ID NO: 232361 - DNA, 19 bp, Homo sapiens
  siRNA target sequence for RCL1 (NM_005772.2,708-726).
ccaggaaaaatcaaacgta

SEQ ID NO: 232362 - DNA, 19 bp, Homo sapiens
  siRNA target sequence for RCL1 (NM_005772.2,711-729).
ggaaaaatcaaacgtatta

SEQ ID NO: 232363 - DNA, 19 bp, Homo sapiens
  siRNA target sequence for RCL1 (NM_005772.2,812-830).
catacctgatatctatatt

SEQ ID NO: 232364 - DNA, 19 bp, Homo sapiens
  siRNA target sequence for RCL1 (NM_005772.2,1032-1050).
gtagactcgaccaaccaaa

SEQ ID NO: 232365 - DNA, 19 bp, Homo sapiens
  siRNA target sequence for RCL1 (NM_005772.2,1074-1092).
cttggacagcaggatgttt

SEQ ID NO: 232366 - DNA, 19 bp, Homo sapiens
  siRNA target sequence for RCL1 (NM_005772.2,1120-1138).
cctacacgatagaattttt

SEQ ID NO: 232367 - DNA, 19 bp, Homo sapiens
  siRNA target sequence for RCL1 (NM_005772.2,1153-1171).
gctttttccagattatgtt

SEQ ID NO: 232368 - DNA, 19 bp, Homo sapiens
  siRNA target sequence for RCL1 (NM_005772.2,1231-1249).
cctgtgttggcattggttt

SEQ ID NO: 232369 - DNA, 19 bp, Homo sapiens
  siRNA target sequence for RCL1 (NM_005772.2,1246-1264).
gtttctccaaccttagcaa

SEQ ID NO: 232370 - DNA, 19 bp, Homo sapiens
  siRNA target sequence for SLC27A2 (NM_003645.2,591-609).
gccatggcgtgcctcaatt

SEQ ID NO: 232371 - DNA, 19 bp, Homo sapiens
  siRNA target sequence for SLC27A2 (NM_003645.2,592-610).
ccatggcgtgcctcaatta

SEQ ID NO: 232372 - DNA, 19 bp, Homo sapiens
  siRNA target sequence for SLC27A2 (NM_003645.2,597-615).
gcgtgcctcaattacaaca

SEQ ID NO: 232373 - DNA, 19 bp, Homo sapiens
  siRNA target sequence for SLC27A2 (NM_003645.2,598-616).
cgtgcctcaattacaacat

SEQ ID NO: 232374 - DNA, 19 bp, Homo sapiens
  siRNA target sequence for SLC27A2 (NM_003645.2,668-686).
gctggtgtcgccagaacta

SEQ ID NO: 232375 - DNA, 19 bp, Homo sapiens
  siRNA target sequence for SLC27A2 (NM_003645.2,671-689).
ggtgtcgccagaactacaa

SEQ ID NO: 232376 - DNA, 19 bp, Homo sapiens
  siRNA target sequence for SLC27A2 (NM_003645.2,691-709).
cagctgtcgaagagatact

SEQ ID NO: 232377 - DNA, 19 bp, Homo sapiens
  siRNA target sequence for SLC27A2 (NM_003645.2,704-722).
gatactgccaagccttaaa

SEQ ID NO: 232378 - DNA, 19 bp, Homo sapiens
  siRNA target sequence for SLC27A2 (NM_003645.2,710-728).
gccaagccttaaaaaagat

SEQ ID NO: 232379 - DNA, 19 bp, Homo sapiens
  siRNA target sequence for SLC27A2 (NM_003645.2,712-730).
caagccttaaaaaagatga

SEQ ID NO: 232380 - DNA, 19 bp, Homo sapiens
  siRNA target sequence for SLC27A2 (NM_003645.2,732-750).
gtgtccatctattatgtga

SEQ ID NO: 232381 - DNA, 19 bp, Homo sapiens
  siRNA target sequence for SLC27A2 (NM_003645.2,766-784).
cagatgggattgactcttt

SEQ ID NO: 232382 - DNA, 19 bp, Homo sapiens
  siRNA target sequence for SLC27A2 (NM_003645.2,858-876).
cctgccttatacatttata

SEQ ID NO: 232383 - DNA, 19 bp, Homo sapiens
  siRNA target sequence for SLC27A2 (NM_003645.2,863-881).
cttatacatttatacttct

SEQ ID NO: 232384 - DNA, 19 bp, Homo sapiens
  siRNA target sequence for SLC27A2 (NM_003645.2,916-934).
ctcatcagcgcatatggta

SEQ ID NO: 232385 - DNA, 19 bp, Homo sapiens
  siRNA target sequence for SLC27A2 (NM_003645.2,921-939).
cagcgcatatggtatggaa

SEQ ID NO: 232386 - DNA, 19 bp, Homo sapiens
  siRNA target sequence for SLC27A2 (NM_003645.2,949-967).
cttttgtaagcggattgaa

SEQ ID NO: 232387 - DNA, 19 bp, Homo sapiens
  siRNA target sequence for SLC27A2 (NM_003645.2,959-977).
cggattgaaggcagatgat

SEQ ID NO: 232388 - DNA, 19 bp, Homo sapiens
  siRNA target sequence for SLC27A2 (NM_003645.2,961-979).
gattgaaggcagatgatgt

SEQ ID NO: 232389 - DNA, 19 bp, Homo sapiens
  siRNA target sequence for SLC27A2 (NM_003645.2,969-987).
gcagatgatgtcatctata

SEQ ID NO: 232390 - DNA, 19 bp, Homo sapiens
  siRNA target sequence for SLC27A2 (NM_003645.2,1027-1045).
gcattcacggatgtattgt

SEQ ID NO: 232391 - DNA, 19 bp, Homo sapiens
  siRNA target sequence for SLC27A2 (NM_003645.2,1059-1077).
cttgccttgcggactaaat

SEQ ID NO: 232392 - DNA, 19 bp, Homo sapiens
  siRNA target sequence for SLC27A2 (NM_003645.2,1062-1080).
gccttgcggactaaatttt

SEQ ID NO: 232393 - DNA, 19 bp, Homo sapiens
  siRNA target sequence for SLC27A2 (NM_003645.2,1064-1082).
cttgcggactaaattttca

SEQ ID NO: 232394 - DNA, 19 bp, Homo sapiens
  siRNA target sequence for SLC27A2 (NM_003645.2,1118-1136).
cgtcactgtcattcagtat

SEQ ID NO: 232395 - DNA, 19 bp, Homo sapiens
  siRNA target sequence for SLC27A2 (NM_003645.2,1141-1159).
gtgaactgcttcggtattt

SEQ ID NO: 232396 - DNA, 19 bp, Homo sapiens
  siRNA target sequence for SLC27A2 (NM_003645.2,1143-1161).
gaactgcttcggtatttat

SEQ ID NO: 232397 - DNA, 19 bp, Homo sapiens
  siRNA target sequence for SLC27A2 (NM_003645.2,1146-1164).
ctgcttcggtatttatgca

SEQ ID NO: 232398 - DNA, 19 bp, Homo sapiens
  siRNA target sequence for SLC27A2 (NM_003645.2,1179-1197).
ccaaatgaccgtgatcata

SEQ ID NO: 232399 - DNA, 19 bp, Homo sapiens
  siRNA target sequence for SLC27A2 (NM_003645.2,1185-1203).
gaccgtgatcataaagtga

SEQ ID NO: 232400 - DNA, 19 bp, Homo sapiens
  siRNA target sequence for SLC27A2 (NM_003645.2,1230-1248).
ggagatgtgtggagacaat

SEQ ID NO: 232401 - DNA, 19 bp, Homo sapiens
  siRNA target sequence for SLC27A2 (NM_003645.2,1231-1249).
gagatgtgtggagacaatt

SEQ ID NO: 232402 - DNA, 19 bp, Homo sapiens
  siRNA target sequence for SLC27A2 (NM_003645.2,1342-1360).
ctgttggaagagtaaacta

SEQ ID NO: 232403 - DNA, 19 bp, Homo sapiens
  siRNA target sequence for SLC27A2 (NM_003645.2,1353-1371).
gtaaactacctacagaaaa

SEQ ID NO: 232404 - DNA, 19 bp, Homo sapiens
  siRNA target sequence for SLC27A2 (NM_003645.2,1381-1399).
cttatgacctgattaaata

SEQ ID NO: 232405 - DNA, 19 bp, Homo sapiens
  siRNA target sequence for SLC27A2 (NM_003645.2,1416-1434).
gaacctgtccgtgatgaaa

SEQ ID NO: 232406 - DNA, 19 bp, Homo sapiens
  siRNA target sequence for SLC27A2 (NM_003645.2,1424-1442).
ccgtgatgaaaatggatat

SEQ ID NO: 232407 - DNA, 19 bp, Homo sapiens
  siRNA target sequence for SLC27A2 (NM_003645.2,1490-1508).
cacacaacttacaccattt

SEQ ID NO: 232408 - DNA, 19 bp, Homo sapiens
  siRNA target sequence for SLC27A2 (NM_003645.2,1551-1569).
ctgagagatgtctttaaga

SEQ ID NO: 232409 - DNA, 19 bp, Homo sapiens
  siRNA target sequence for SLC27A2 (NM_003645.2,1591-1609).
gtggagatctcttaatggt

SEQ ID NO: 232410 - DNA, 19 bp, Homo sapiens
  siRNA target sequence for SLC27A2 (NM_003645.2,1637-1655).
cgacagagttggagataca

SEQ ID NO: 232411 - DNA, 19 bp, Homo sapiens
  siRNA target sequence for SLC27A2 (NM_003645.2,1638-1656).
gacagagttggagatacat

SEQ ID NO: 232412 - DNA, 19 bp, Homo sapiens
  siRNA target sequence for SLC27A2 (NM_003645.2,1658-1676).
ccggtggaaaggggaaaat

SEQ ID NO: 232413 - DNA, 19 bp, Homo sapiens
  siRNA target sequence for SLC27A2 (NM_003645.2,1687-1705).
ctgaagttgctgatacagt

SEQ ID NO: 232414 - DNA, 19 bp, Homo sapiens
  siRNA target sequence for SLC27A2 (NM_003645.2,1702-1720).
cagttggactggttgattt

SEQ ID NO: 232415 - DNA, 19 bp, Homo sapiens
  siRNA target sequence for SLC27A2 (NM_003645.2,1843-1861).
ctgattacctacctagtta

SEQ ID NO: 232416 - DNA, 19 bp, Homo sapiens
  siRNA target sequence for SLC27A2 (NM_003645.2,1901-1919).
gatcactggaacttttaaa

SEQ ID NO: 232417 - DNA, 19 bp, Homo sapiens
  siRNA target sequence for SLC27A2 (NM_003645.2,1912-1930).
cttttaaacaccgcaaaat

SEQ ID NO: 232418 - DNA, 19 bp, Homo sapiens
  siRNA target sequence for SLC27A2 (NM_003645.2,2014-2032).
ctatgactgaggacatcta

SEQ ID NO: 232419 - DNA, 19 bp, Homo sapiens
  siRNA target sequence for SLC27A2 (NM_003645.2,2018-2036).
gactgaggacatctataat

SEQ ID NO: 232420 - DNA, 19 bp, Homo sapiens
  siRNA target sequence for SLC27A5 (NM_012254.1,405-423).
cgcctgacacctttgtaga

SEQ ID NO: 232421 - DNA, 19 bp, Homo sapiens
  siRNA target sequence for SLC27A5 (NM_012254.1,621-639).
ccgttccagccctgtgtat

SEQ ID NO: 232422 - DNA, 19 bp, Homo sapiens
  siRNA target sequence for SLC27A5 (NM_012254.1,935-953).
cctgccctcttcatctata

SEQ ID NO: 232423 - DNA, 19 bp, Homo sapiens
  siRNA target sequence for SLC27A5 (NM_012254.1,938-956).
gccctcttcatctatacct

SEQ ID NO: 232424 - DNA, 19 bp, Homo sapiens
  siRNA target sequence for SLC27A5 (NM_012254.1,1046-1064).
gctgatgatgtggtttaca

SEQ ID NO: 232425 - DNA, 19 bp, Homo sapiens
  siRNA target sequence for SLC27A5 (NM_012254.1,1105-1123).
gatcctcggctgcttagat

SEQ ID NO: 232426 - DNA, 19 bp, Homo sapiens
  siRNA target sequence for SLC27A5 (NM_012254.1,1220-1238).
gagctcctgcggtacttgt

SEQ ID NO: 232427 - DNA, 19 bp, Homo sapiens
  siRNA target sequence for SLC27A5 (NM_012254.1,1223-1241).
ctcctgcggtacttgtgta

SEQ ID NO: 232428 - DNA, 19 bp, Homo sapiens
  siRNA target sequence for SLC27A5 (NM_012254.1,1226-1244).
ctgcggtacttgtgtaaca

SEQ ID NO: 232429 - DNA, 19 bp, Homo sapiens
  siRNA target sequence for SLC27A5 (NM_012254.1,1228-1246).
gcggtacttgtgtaacatt

SEQ ID NO: 232430 - DNA, 19 bp, Homo sapiens
  siRNA target sequence for SLC27A5 (NM_012254.1,1256-1274).
ccagaggaccggacacata

SEQ ID NO: 232431 - DNA, 19 bp, Homo sapiens
  siRNA target sequence for SLC27A5 (NM_012254.1,1330-1348).
gcagcgcttcggtcctatt

SEQ ID NO: 232432 - DNA, 19 bp, Homo sapiens
  siRNA target sequence for SLC27A5 (NM_012254.1,1641-1659).
ggcaatcgggcgacgttta

SEQ ID NO: 232433 - DNA, 19 bp, Homo sapiens
  siRNA target sequence for SLC27A5 (NM_012254.1,1643-1661).
caatcgggcgacgtttact

SEQ ID NO: 232434 - DNA, 19 bp, Homo sapiens
  siRNA target sequence for SLC27A5 (NM_012254.1,1647-1665).
cgggcgacgtttactacaa

SEQ ID NO: 232435 - DNA, 19 bp, Homo sapiens
  siRNA target sequence for SLC27A5 (NM_012254.1,1649-1667).
ggcgacgtttactacaaca

SEQ ID NO: 232436 - DNA, 19 bp, Homo sapiens
  siRNA target sequence for SLC27A5 (NM_012254.1,1887-1905).
ctttcgacggggagaagtt

SEQ ID NO: 232437 - DNA, 19 bp, Homo sapiens
  siRNA target sequence for SLC27A5 (NM_012254.1,1986-2004).
gcacgttcaaactgatgaa

SEQ ID NO: 232438 - DNA, 19 bp, Homo sapiens
  siRNA target sequence for SLC27A5 (NM_012254.1,2014-2032).
ggtgcgtgagggcttcaat

SEQ ID NO: 232439 - DNA, 19 bp, Homo sapiens
  siRNA target sequence for SLC27A5 (NM_012254.1,2041-2059).
cgtggttgaccctctgttt

SEQ ID NO: 232440 - DNA, 19 bp, Homo sapiens
  siRNA target sequence for SLC27A5 (NM_012254.1,2091-2109).
ccctgacggcagaaatgta

SEQ ID NO: 232441 - DNA, 19 bp, Homo sapiens
  siRNA target sequence for SLC27A6 (NM_014031.1,162-180).
gtcatggctaacagttcta

SEQ ID NO: 232442 - DNA, 19 bp, Homo sapiens
  siRNA target sequence for SLC27A6 (NM_014031.1,227-245).
cttacttttgggatgactt

SEQ ID NO: 232443 - DNA, 19 bp, Homo sapiens
  siRNA target sequence for SLC27A6 (NM_014031.1,333-351).
cttgagtcatgccaaaaga

SEQ ID NO: 232444 - DNA, 19 bp, Homo sapiens
  siRNA target sequence for SLC27A6 (NM_014031.1,355-373).
cctcggaaacctttcatca

SEQ ID NO: 232445 - DNA, 19 bp, Homo sapiens
  siRNA target sequence for SLC27A6 (NM_014031.1,356-374).
ctcggaaacctttcatcat

SEQ ID NO: 232446 - DNA, 19 bp, Homo sapiens
  siRNA target sequence for SLC27A6 (NM_014031.1,358-376).
cggaaacctttcatcatct

SEQ ID NO: 232447 - DNA, 19 bp, Homo sapiens
  siRNA target sequence for SLC27A6 (NM_014031.1,395-413).
cctatcaggatgtagacaa

SEQ ID NO: 232448 - DNA, 19 bp, Homo sapiens
  siRNA target sequence for SLC27A6 (NM_014031.1,692-710).
gggggatgaaagattctgt

SEQ ID NO: 232449 - DNA, 19 bp, Homo sapiens
  siRNA target sequence for SLC27A6 (NM_014031.1,914-932).
ctgctcatgacattgttta

SEQ ID NO: 232450 - DNA, 19 bp, Homo sapiens
  siRNA target sequence for SLC27A6 (NM_014031.1,919-937).
catgacattgtttatataa

SEQ ID NO: 232451 - DNA, 19 bp, Homo sapiens
  siRNA target sequence for SLC27A6 (NM_014031.1,940-958).
cttcctctgtatcatagtt

SEQ ID NO: 232452 - DNA, 19 bp, Homo sapiens
  siRNA target sequence for SLC27A6 (NM_014031.1,972-990).
gggaatttctggatgtgtt

SEQ ID NO: 232453 - DNA, 19 bp, Homo sapiens
  siRNA target sequence for SLC27A6 (NM_014031.1,1000-1018).
gccacttgtgtgttaaaga

SEQ ID NO: 232454 - DNA, 19 bp, Homo sapiens
  siRNA target sequence for SLC27A6 (NM_014031.1,1001-1019).
ccacttgtgtgttaaagaa

SEQ ID NO: 232455 - DNA, 19 bp, Homo sapiens
  siRNA target sequence for SLC27A6 (NM_014031.1,1044-1062).
gagtgactgcaagaagtat

SEQ ID NO: 232456 - DNA, 19 bp, Homo sapiens
  siRNA target sequence for SLC27A6 (NM_014031.1,1078-1096).
cagtatattggagaacttt

SEQ ID NO: 232457 - DNA, 19 bp, Homo sapiens
  siRNA target sequence for SLC27A6 (NM_014031.1,1090-1108).
gaactttgtcgctaccttt

SEQ ID NO: 232458 - DNA, 19 bp, Homo sapiens
  siRNA target sequence for SLC27A6 (NM_014031.1,1099-1117).
cgctacctttgcaaacaat

SEQ ID NO: 232459 - DNA, 19 bp, Homo sapiens
  siRNA target sequence for SLC27A6 (NM_014031.1,1130-1148).
gagaaaaggatcataaggt

SEQ ID NO: 232460 - DNA, 19 bp, Homo sapiens
  siRNA target sequence for SLC27A6 (NM_014031.1,1146-1164).
ggtgcgtttggcaattgga

SEQ ID NO: 232461 - DNA, 19 bp, Homo sapiens
  siRNA target sequence for SLC27A6 (NM_014031.1,1149-1167).
gcgtttggcaattggaaat

SEQ ID NO: 232462 - DNA, 19 bp, Homo sapiens
  siRNA target sequence for SLC27A6 (NM_014031.1,1205-1223).
gatttggaaatataaaggt

SEQ ID NO: 232463 - DNA, 19 bp, Homo sapiens
  siRNA target sequence for SLC27A6 (NM_014031.1,1240-1258).
gctaccgaatcaagcatat

SEQ ID NO: 232464 - DNA, 19 bp, Homo sapiens
  siRNA target sequence for SLC27A6 (NM_014031.1,1244-1262).
ccgaatcaagcatatcttt

SEQ ID NO: 232465 - DNA, 19 bp, Homo sapiens
  siRNA target sequence for SLC27A6 (NM_014031.1,1380-1398).
gcagggttggtgtattcat

SEQ ID NO: 232466 - DNA, 19 bp, Homo sapiens
  siRNA target sequence for SLC27A6 (NM_014031.1,1411-1429).
gaacctggacttctcattt

SEQ ID NO: 232467 - DNA, 19 bp, Homo sapiens
  siRNA target sequence for SLC27A6 (NM_014031.1,1459-1477).
ggctatgctgggccttata

SEQ ID NO: 232468 - DNA, 19 bp, Homo sapiens
  siRNA target sequence for SLC27A6 (NM_014031.1,1460-1478).
gctatgctgggccttataa

SEQ ID NO: 232469 - DNA, 19 bp, Homo sapiens
  siRNA target sequence for SLC27A6 (NM_014031.1,1519-1537).
ggagatgtttaccttaata

SEQ ID NO: 232470 - DNA, 19 bp, Homo sapiens
  siRNA target sequence for SLC27A6 (NM_014031.1,1530-1548).
ccttaatactggagactta

SEQ ID NO: 232471 - DNA, 19 bp, Homo sapiens
  siRNA target sequence for SLC27A6 (NM_014031.1,1655-1673).
gaatgttggatttcataca

SEQ ID NO: 232472 - DNA, 19 bp, Homo sapiens
  siRNA target sequence for SLC27A6 (NM_014031.1,1684-1702).
gtctatggtgtggctatat

SEQ ID NO: 232473 - DNA, 19 bp, Homo sapiens
  siRNA target sequence for SLC27A6 (NM_014031.1,1686-1704).
ctatggtgtggctatatca

SEQ ID NO: 232474 - DNA, 19 bp, Homo sapiens
  siRNA target sequence for SLC27A6 (NM_014031.1,1695-1713).
ggctatatcaggttatgaa

SEQ ID NO: 232475 - DNA, 19 bp, Homo sapiens
  siRNA target sequence for SLC27A6 (NM_014031.1,1718-1736).
gagcaggaatggcttctat

SEQ ID NO: 232476 - DNA, 19 bp, Homo sapiens
  siRNA target sequence for SLC27A6 (NM_014031.1,1720-1738).
gcaggaatggcttctatta

SEQ ID NO: 232477 - DNA, 19 bp, Homo sapiens
  siRNA target sequence for SLC27A6 (NM_014031.1,1767-1785).
ggaaaaagtttatgaacaa

SEQ ID NO: 232478 - DNA, 19 bp, Homo sapiens
  siRNA target sequence for SLC27A6 (NM_014031.1,1810-1828).
gcttgtccacgatttttaa

SEQ ID NO: 232479 - DNA, 19 bp, Homo sapiens
  siRNA target sequence for SLC27A6 (NM_014031.1,1814-1832).
gtccacgatttttaagaat

SEQ ID NO: 232480 - DNA, 19 bp, Homo sapiens
  siRNA target sequence for SLC27A6 (NM_014031.1,1895-1913).
gatttaatccactgaaaat

SEQ ID NO: 232481 - DNA, 19 bp, Homo sapiens
  siRNA target sequence for SLC27A6 (NM_014031.1,1935-1953).
ggataacttgaaaaagtct

SEQ ID NO: 232482 - DNA, 19 bp, Homo sapiens
  siRNA target sequence for SLC27A6 (NM_014031.1,1960-1978).
ctactgaccagggaacttt

SEQ ID NO: 232483 - DNA, 19 bp, Homo sapiens
  siRNA target sequence for SLC27A6 (NM_014031.1,1967-1985).
ccagggaactttatgatca

SEQ ID NO: 232484 - DNA, 19 bp, Homo sapiens
  siRNA target sequence for SUCLG2 (NM_003848.1,151-169).
caacggagtgagagttcaa

SEQ ID NO: 232485 - DNA, 19 bp, Homo sapiens
  siRNA target sequence for SUCLA2 (NM_003850.1,154-172).
ggaagttctggattgttta

SEQ ID NO: 232486 - DNA, 19 bp, Homo sapiens
  siRNA target sequence for SUCLA2 (NM_003850.1,158-176).
gttctggattgtttaataa

SEQ ID NO: 232487 - DNA, 19 bp, Homo sapiens
  siRNA target sequence for SUCLA2 (NM_003850.1,161-179).
ctggattgtttaataacca

SEQ ID NO: 232488 - DNA, 19 bp, Homo sapiens
  siRNA target sequence for SUCLA2 (NM_003850.1,209-227).
ggaatctctcactacatga

SEQ ID NO: 232489 - DNA, 19 bp, Homo sapiens
  siRNA target sequence for SUCLA2 (NM_003850.1,210-228).
gaatctctcactacatgaa

SEQ ID NO: 232490 - DNA, 19 bp, Homo sapiens
  siRNA target sequence for SUCLA2 (NM_003850.1,220-238).
ctacatgaatacatgagta

SEQ ID NO: 232491 - DNA, 19 bp, Homo sapiens
  siRNA target sequence for SUCLA2 (NM_003850.1,262-280).
gtctccgttcccaaaggat

SEQ ID NO: 232492 - DNA, 19 bp, Homo sapiens
  siRNA target sequence for SUCLA2 (NM_003850.1,264-282).
ctccgttcccaaaggatat

SEQ ID NO: 232493 - DNA, 19 bp, Homo sapiens
  siRNA target sequence for SUCLA2 (NM_003850.1,266-284).
ccgttcccaaaggatatgt

SEQ ID NO: 232494 - DNA, 19 bp, Homo sapiens
  siRNA target sequence for SUCLA2 (NM_003850.1,291-309).
gtcaccagatgaagcttat

SEQ ID NO: 232495 - DNA, 19 bp, Homo sapiens
  siRNA target sequence for SUCLA2 (NM_003850.1,295-313).
ccagatgaagcttatgcaa

SEQ ID NO: 232496 - DNA, 19 bp, Homo sapiens
  siRNA target sequence for SUCLA2 (NM_003850.1,332-350).
caaaagatgtcgtgataaa

SEQ ID NO: 232497 - DNA, 19 bp, Homo sapiens
  siRNA target sequence for SUCLA2 (NM_003850.1,455-473).
cacaaatgattgggaaaaa

SEQ ID NO: 232498 - DNA, 19 bp, Homo sapiens
  siRNA target sequence for SUCLA2 (NM_003850.1,501-519).
gggcagaatatgcaatcaa

SEQ ID NO: 232499 - DNA, 19 bp, Homo sapiens
  siRNA target sequence for SUCLA2 (NM_003850.1,525-543).
ggtctgtgagcgaaaatat

SEQ ID NO: 232500 - DNA, 19 bp, Homo sapiens
  siRNA target sequence for SUCLA2 (NM_003850.1,544-562).
cccaggagagaatactact

SEQ ID NO: 232501 - DNA, 19 bp, Homo sapiens
  siRNA target sequence for SUCLA2 (NM_003850.1,545-563).
ccaggagagaatactactt

SEQ ID NO: 232502 - DNA, 19 bp, Homo sapiens
  siRNA target sequence for SUCLA2 (NM_003850.1,561-579).
ctttgcaataacaatggaa

SEQ ID NO: 232503 - DNA, 19 bp, Homo sapiens
  siRNA target sequence for SUCLA2 (NM_003850.1,592-610).
ggtcctgtattaataggaa

SEQ ID NO: 232504 - DNA, 19 bp, Homo sapiens
  siRNA target sequence for SUCLA2 (NM_003850.1,647-665).
ctgagtctcctgaagcaat

SEQ ID NO: 232505 - DNA, 19 bp, Homo sapiens
  siRNA target sequence for SUCLA2 (NM_003850.1,653-671).
ctcctgaagcaataattaa

SEQ ID NO: 232506 - DNA, 19 bp, Homo sapiens
  siRNA target sequence for SUCLA2 (NM_003850.1,791-809).
gcctttttctgaaatacga

SEQ ID NO: 232507 - DNA, 19 bp, Homo sapiens
  siRNA target sequence for SUCLA2 (NM_003850.1,792-810).
cctttttctgaaatacgat

SEQ ID NO: 232508 - DNA, 19 bp, Homo sapiens
  siRNA target sequence for SUCLA2 (NM_003850.1,807-825).
cgatgcaaccatgatagaa

SEQ ID NO: 232509 - DNA, 19 bp, Homo sapiens
  siRNA target sequence for SUCLA2 (NM_003850.1,899-917).
cagcctatcgccaaaagaa

SEQ ID NO: 232510 - DNA, 19 bp, Homo sapiens
  siRNA target sequence for SUCLA2 (NM_003850.1,901-919).
gcctatcgccaaaagaaaa

SEQ ID NO: 232511 - DNA, 19 bp, Homo sapiens
  siRNA target sequence for SUCLA2 (NM_003850.1,967-985).
gctgctaaggcaaatctca

SEQ ID NO: 232512 - DNA, 19 bp, Homo sapiens
  siRNA target sequence for SUCLA2 (NM_003850.1,971-989).
ctaaggcaaatctcaacta

SEQ ID NO: 232513 - DNA, 19 bp, Homo sapiens
  siRNA target sequence for SUCLA2 (NM_003850.1,975-993).
ggcaaatctcaactacatt

SEQ ID NO: 232514 - DNA, 19 bp, Homo sapiens
  siRNA target sequence for SUCLA2 (NM_003850.1,990-1008).
cattggcctcgatggaaat

SEQ ID NO: 232515 - DNA, 19 bp, Homo sapiens
  siRNA target sequence for SUCLA2 (NM_003850.1,1044-1062).
ggccacaatggatataata

SEQ ID NO: 232516 - DNA, 19 bp, Homo sapiens
  siRNA target sequence for SUCLA2 (NM_003850.1,1109-1127).
gtgctacagtccatcaagt

SEQ ID NO: 232517 - DNA, 19 bp, Homo sapiens
  siRNA target sequence for SUCLA2 (NM_003850.1,1111-1129).
gctacagtccatcaagtaa

SEQ ID NO: 232518 - DNA, 19 bp, Homo sapiens
  siRNA target sequence for SUCLA2 (NM_003850.1,1135-1153).
gcatttaagcttatcactt

SEQ ID NO: 232519 - DNA, 19 bp, Homo sapiens
  siRNA target sequence for SUCLA2 (NM_003850.1,1363-1381).
gctgctagaatggttgtaa

SEQ ID NO: 232520 - DNA, 19 bp, Homo sapiens
  siRNA target sequence for SUCLA2 (NM_003850.1,1364-1382).
ctgctagaatggttgtaaa

SEQ ID NO: 232521 - DNA, 19 bp, Homo sapiens
  siRNA target sequence for SUCLA2 (NM_003850.1,1414-1432).
gcacatgtggatgtgaaat

SEQ ID NO: 232522 - DNA, 19 bp, Homo sapiens
  siRNA target sequence for SUCLA2 (NM_003850.1,1415-1433).
cacatgtggatgtgaaatt

SEQ ID NO: 232523 - DNA, 19 bp, Homo sapiens
  siRNA target sequence for SUCLA2 (NM_003850.1,1420-1438).
gtggatgtgaaatttcagt

SEQ ID NO: 232524 - DNA, 19 bp, Homo sapiens
  siRNA target sequence for ACAS2L (NM_032501.2,1191-1209).
ggaggccagttaaatgtct

SEQ ID NO: 232525 - DNA, 19 bp, Homo sapiens
  siRNA target sequence for ACAS2L (NM_032501.2,1243-1261).
cccccgagagcgttgcttt

SEQ ID NO: 232526 - DNA, 19 bp, Homo sapiens
  siRNA target sequence for ACAS2L (NM_032501.2,1246-1264).
ccgagagcgttgctttgat

SEQ ID NO: 232527 - DNA, 19 bp, Homo sapiens
  siRNA target sequence for ACAS2L (NM_032501.2,1248-1266).
gagagcgttgctttgatct

SEQ ID NO: 232528 - DNA, 19 bp, Homo sapiens
  siRNA target sequence for ACAS2L (NM_032501.2,1487-1505).
cttggctgggaggatcaat

SEQ ID NO: 232529 - DNA, 19 bp, Homo sapiens
  siRNA target sequence for ACAS2L (NM_032501.2,1510-1528).
ccaagtgcaaggtggttat

SEQ ID NO: 232530 - DNA, 19 bp, Homo sapiens
  siRNA target sequence for ACAS2L (NM_032501.2,1829-1847).
gactcacaagcttgtgttt

SEQ ID NO: 232531 - DNA, 19 bp, Homo sapiens
  siRNA target sequence for ACAS2L (NM_032501.2,1880-1898).
ggccgacatcggttggatt

SEQ ID NO: 232532 - DNA, 19 bp, Homo sapiens
  siRNA target sequence for ACAS2L (NM_032501.2,1881-1899).
gccgacatcggttggatta

SEQ ID NO: 232533 - DNA, 19 bp, Homo sapiens
  siRNA target sequence for ACAS2L (NM_032501.2,1883-1901).
cgacatcggttggattaca

SEQ ID NO: 232534 - DNA, 19 bp, Homo sapiens
  siRNA target sequence for ACAS2L (NM_032501.2,2282-2300).
ggcgatgaggcccttcttt

SEQ ID NO: 232535 - DNA, 19 bp, Homo sapiens
  siRNA target sequence for ACAS2L (NM_032501.2,2413-2431).
gcgaccaccagcgatttgt

SEQ ID NO: 232536 - DNA, 19 bp, Homo sapiens
  siRNA target sequence for ACAS2L (NM_032501.2,2448-2466).
gcctacccaggctattact

SEQ ID NO: 232537 - DNA, 19 bp, Homo sapiens
  siRNA target sequence for ACAS2L (NM_032501.2,2449-2467).
cctacccaggctattactt

SEQ ID NO: 232538 - DNA, 19 bp, Homo sapiens
  siRNA target sequence for ACAS2L (NM_032501.2,2515-2533).
cagggcggatggatgatgt

SEQ ID NO: 232539 - DNA, 19 bp, Homo sapiens
  siRNA target sequence for ACAS2L (NM_032501.2,2518-2536).
ggcggatggatgatgtcat

SEQ ID NO: 232540 - DNA, 19 bp, Homo sapiens
  siRNA target sequence for ACAS2L (NM_032501.2,2624-2642).
ctacccccacgacatcaaa

SEQ ID NO: 232541 - DNA, 19 bp, Homo sapiens
  siRNA target sequence for ACAS2L (NM_032501.2,2729-2747).
caccaagatcgccaaatat

SEQ ID NO: 232542 - DNA, 19 bp, Homo sapiens
  siRNA target sequence for ACAS2L (NM_032501.2,2732-2750).
caagatcgccaaatatgct

SEQ ID NO: 232543 - DNA, 19 bp, Homo sapiens
  siRNA target sequence for ACAS2L (NM_032501.2,2772-2790).
gtgaaacgtcttccaaaaa

SEQ ID NO: 232544 - DNA, 19 bp, Homo sapiens
  siRNA target sequence for AACS (NM_023928.2,247-265).
cctggcgctggagagttat

SEQ ID NO: 232545 - DNA, 19 bp, Homo sapiens
  siRNA target sequence for AACS (NM_023928.2,250-268).
ggcgctggagagttatgat

SEQ ID NO: 232546 - DNA, 19 bp, Homo sapiens
  siRNA target sequence for AACS (NM_023928.2,283-301).
gtccgttgagtcatattca

SEQ ID NO: 232547 - DNA, 19 bp, Homo sapiens
  siRNA target sequence for AACS (NM_023928.2,285-303).
ccgttgagtcatattcaga

SEQ ID NO: 232548 - DNA, 19 bp, Homo sapiens
  siRNA target sequence for AACS (NM_023928.2,340-358).
cttctcacgtgtgtatgat

SEQ ID NO: 232549 - DNA, 19 bp, Homo sapiens
  siRNA target sequence for AACS (NM_023928.2,365-383).
gtggacacatcgaaaggaa

SEQ ID NO: 232550 - DNA, 19 bp, Homo sapiens
  siRNA target sequence for AACS (NM_023928.2,443-461).
cggcacaaagagaatgaca

SEQ ID NO: 232551 - DNA, 19 bp, Homo sapiens
  siRNA target sequence for AACS (NM_023928.2,464-482).
gttgccctttacattgcaa

SEQ ID NO: 232552 - DNA, 19 bp, Homo sapiens
  siRNA target sequence for AACS (NM_023928.2,582-600).
gagatcgggttgttggtta

SEQ ID NO: 232553 - DNA, 19 bp, Homo sapiens
  siRNA target sequence for AACS (NM_023928.2,584-602).
gatcgggttgttggttatt

SEQ ID NO: 232554 - DNA, 19 bp, Homo sapiens
  siRNA target sequence for AACS (NM_023928.2,676-694).
cccggacttcggtgtgaat

SEQ ID NO: 232555 - DNA, 19 bp, Homo sapiens
  siRNA target sequence for AACS (NM_023928.2,701-719).
ctggaccggttttctcaaa

SEQ ID NO: 232556 - DNA, 19 bp, Homo sapiens
  siRNA target sequence for AACS (NM_023928.2,745-763).
ggaggctgttgtctataat

SEQ ID NO: 232557 - DNA, 19 bp, Homo sapiens
  siRNA target sequence for AACS (NM_023928.2,790-808).
gctgcagcaggtggttaaa

SEQ ID NO: 232558 - DNA, 19 bp, Homo sapiens
  siRNA target sequence for AACS (NM_023928.2,809-827).
ggcctaccagacttgaaga

SEQ ID NO: 232559 - DNA, 19 bp, Homo sapiens
  siRNA target sequence for AACS (NM_023928.2,810-828).
gcctaccagacttgaagaa

SEQ ID NO: 232560 - DNA, 19 bp, Homo sapiens
  siRNA target sequence for AACS (NM_023928.2,865-883).
catagacctttcaaagatt

SEQ ID NO: 232561 - DNA, 19 bp, Homo sapiens
  siRNA target sequence for AACS (NM_023928.2,880-898).
gattccaaacagtgtgttt

SEQ ID NO: 232562 - DNA, 19 bp, Homo sapiens
  siRNA target sequence for AACS (NM_023928.2,891-909).
gtgtgtttctggatgactt

SEQ ID NO: 232563 - DNA, 19 bp, Homo sapiens
  siRNA target sequence for AACS (NM_023928.2,974-992).
ccactgttcatcatgttct

SEQ ID NO: 232564 - DNA, 19 bp, Homo sapiens
  siRNA target sequence for AACS (NM_023928.2,1431-1449).
caggaggcaccgacatcat

SEQ ID NO: 232565 - DNA, 19 bp, Homo sapiens
  siRNA target sequence for AACS (NM_023928.2,1455-1473).
gcttcatgggccacaattt

SEQ ID NO: 232566 - DNA, 19 bp, Homo sapiens
  siRNA target sequence for AACS (NM_023928.2,1571-1589).
ggcgagctggtgtgtacta

SEQ ID NO: 232567 - DNA, 19 bp, Homo sapiens
  siRNA target sequence for AACS (NM_023928.2,1572-1590).
gcgagctggtgtgtactaa

SEQ ID NO: 232568 - DNA, 19 bp, Homo sapiens
  siRNA target sequence for AACS (NM_023928.2,1628-1646).
gagaacggcaacaagtaca

SEQ ID NO: 232569 - DNA, 19 bp, Homo sapiens
  siRNA target sequence for AACS (NM_023928.2,1777-1795).
cggcagctcggaaatctat

SEQ ID NO: 232570 - DNA, 19 bp, Homo sapiens
  siRNA target sequence for AACS (NM_023928.2,1778-1796).
ggcagctcggaaatctata

SEQ ID NO: 232571 - DNA, 19 bp, Homo sapiens
  siRNA target sequence for AACS (NM_023928.2,1779-1797).
gcagctcggaaatctataa

SEQ ID NO: 232572 - DNA, 19 bp, Homo sapiens
  siRNA target sequence for AACS (NM_023928.2,1785-1803).
cggaaatctataacattgt

SEQ ID NO: 232573 - DNA, 19 bp, Homo sapiens
  siRNA target sequence for AACS (NM_023928.2,2010-2028).
cgctcaacggcaagaaagt

SEQ ID NO: 232574 - DNA, 19 bp, Homo sapiens
  siRNA target sequence for BIRC6 (NM_016252.1,228-246).
ctccgcgctcagtgctaaa

SEQ ID NO: 232575 - DNA, 19 bp, Homo sapiens
  siRNA target sequence for BIRC6 (NM_016252.1,231-249).
cgcgctcagtgctaaacca

SEQ ID NO: 232576 - DNA, 19 bp, Homo sapiens
  siRNA target sequence for BIRC6 (NM_016252.1,251-269).
gtggacaggtgaaatgtca

SEQ ID NO: 232577 - DNA, 19 bp, Homo sapiens
  siRNA target sequence for BIRC6 (NM_016252.1,280-298).
gctgtggataaagttatat

SEQ ID NO: 232578 - DNA, 19 bp, Homo sapiens
  siRNA target sequence for BIRC6 (NM_016252.1,281-299).
ctgtggataaagttatatt

SEQ ID NO: 232579 - DNA, 19 bp, Homo sapiens
  siRNA target sequence for BIRC6 (NM_016252.1,321-339).
gtgtaggaaggaccttaat

SEQ ID NO: 232580 - DNA, 19 bp, Homo sapiens
  siRNA target sequence for BIRC6 (NM_016252.1,334-352).
cttaatggaatcttgttgt

SEQ ID NO: 232581 - DNA, 19 bp, Homo sapiens
  siRNA target sequence for BIRC6 (NM_016252.1,391-409).
gatgtggttcagcttgaat

SEQ ID NO: 232582 - DNA, 19 bp, Homo sapiens
  siRNA target sequence for BIRC6 (NM_016252.1,451-469).
gaaaaggtagatatttcta

SEQ ID NO: 232583 - DNA, 19 bp, Homo sapiens
  siRNA target sequence for BIRC6 (NM_016252.1,456-474).
ggtagatatttctagtaca

SEQ ID NO: 232584 - DNA, 19 bp, Homo sapiens
  siRNA target sequence for BIRC6 (NM_016252.1,467-485).
ctagtacagagggttatga

SEQ ID NO: 232585 - DNA, 19 bp, Homo sapiens
  siRNA target sequence for BIRC6 (NM_016252.1,475-493).
gagggttatgatttgttca

SEQ ID NO: 232586 - DNA, 19 bp, Homo sapiens
  siRNA target sequence for BIRC6 (NM_016252.1,478-496).
ggttatgatttgttcatca

SEQ ID NO: 232587 - DNA, 19 bp, Homo sapiens
  siRNA target sequence for BIRC6 (NM_016252.1,542-560).
caaaccacaaagttgctaa

SEQ ID NO: 232588 - DNA, 19 bp, Homo sapiens
  siRNA target sequence for BIRC6 (NM_016252.1,586-604).
cctcatcatgtgttgaagt

SEQ ID NO: 232589 - DNA, 19 bp, Homo sapiens
  siRNA target sequence for BIRC6 (NM_016252.1,612-630).
cagtgccattgtaaatgaa

SEQ ID NO: 232590 - DNA, 19 bp, Homo sapiens
  siRNA target sequence for BIRC6 (NM_016252.1,732-750).
ggggccaggccgttctgta

SEQ ID NO: 232591 - DNA, 19 bp, Homo sapiens
  siRNA target sequence for BIRC6 (NM_016252.1,751-769).
gacagatcactgatgtata

SEQ ID NO: 232592 - DNA, 19 bp, Homo sapiens
  siRNA target sequence for BIRC6 (NM_016252.1,755-773).
gatcactgatgtatagtga

SEQ ID NO: 232593 - DNA, 19 bp, Homo sapiens
  siRNA target sequence for BIRC6 (NM_016252.1,776-794).
ctaacagacgggagacatt

SEQ ID NO: 232594 - DNA, 19 bp, Homo sapiens
  siRNA target sequence for BIRC6 (NM_016252.1,840-858).
catggctcaagctggattt

SEQ ID NO: 232595 - DNA, 19 bp, Homo sapiens
  siRNA target sequence for BIRC6 (NM_016252.1,843-861).
ggctcaagctggattttat

SEQ ID NO: 232596 - DNA, 19 bp, Homo sapiens
  siRNA target sequence for BIRC6 (NM_016252.1,845-863).
ctcaagctggattttatca

SEQ ID NO: 232597 - DNA, 19 bp, Homo sapiens
  siRNA target sequence for BIRC6 (NM_016252.1,971-989).
ccccaaactgcccatttgt

SEQ ID NO: 232598 - DNA, 19 bp, Homo sapiens
  siRNA target sequence for BIRC6 (NM_016252.1,1061-1079).
cggatggaactgacagaat

SEQ ID NO: 232599 - DNA, 19 bp, Homo sapiens
  siRNA target sequence for BIRC6 (NM_016252.1,1094-1112).
cggggagctgccctcattt

SEQ ID NO: 232600 - DNA, 19 bp, Homo sapiens
  siRNA target sequence for BIRC6 (NM_016252.1,1095-1113).
ggggagctgccctcatttt

SEQ ID NO: 232601 - DNA, 19 bp, Homo sapiens
  siRNA target sequence for BIRC6 (NM_016252.1,1124-1142).
caactaaacgaggaaagat

SEQ ID NO: 232602 - DNA, 19 bp, Homo sapiens
  siRNA target sequence for BIRC6 (NM_016252.1,1170-1188).
gaaggtgcacttaaagttt

SEQ ID NO: 232603 - DNA, 19 bp, Homo sapiens
  siRNA target sequence for BIRC6 (NM_016252.1,1173-1191).
ggtgcacttaaagtttgaa

SEQ ID NO: 232604 - DNA, 19 bp, Homo sapiens
  siRNA target sequence for BIRC6 (NM_016252.1,1211-1229).
caattgtacaacagcttat

SEQ ID NO: 232605 - DNA, 19 bp, Homo sapiens
  siRNA target sequence for BIRC6 (NM_016252.1,1216-1234).
gtacaacagcttattctat

SEQ ID NO: 232606 - DNA, 19 bp, Homo sapiens
  siRNA target sequence for BIRC6 (NM_016252.1,1285-1303).
ctggaggactcctctagtt

SEQ ID NO: 232607 - DNA, 19 bp, Homo sapiens
  siRNA target sequence for BIRC6 (NM_016252.1,1295-1313).
cctctagttgctcagatat

SEQ ID NO: 232608 - DNA, 19 bp, Homo sapiens
  siRNA target sequence for BIRC6 (NM_016252.1,1328-1346).
gagatagtgatgatttact

SEQ ID NO: 232609 - DNA, 19 bp, Homo sapiens
  siRNA target sequence for BIRC6 (NM_016252.1,1420-1438).
gaagtaagccttgatataa

SEQ ID NO: 232610 - DNA, 19 bp, Homo sapiens
  siRNA target sequence for BIRC6 (NM_016252.1,1489-1507).
gcaaatgtgcttgaagata

SEQ ID NO: 232611 - DNA, 19 bp, Homo sapiens
  siRNA target sequence for BIRC6 (NM_016252.1,1495-1513).
gtgcttgaagatactgtta

SEQ ID NO: 232612 - DNA, 19 bp, Homo sapiens
  siRNA target sequence for BIRC6 (NM_016252.1,1533-1551).
ggcaaatccttgtttaaca

SEQ ID NO: 232613 - DNA, 19 bp, Homo sapiens
  siRNA target sequence for BIRC6 (NM_016252.1,1534-1552).
gcaaatccttgtttaacaa

SEQ ID NO: 232614 - DNA, 19 bp, Homo sapiens
  siRNA target sequence for BIRC6 (NM_016252.1,1540-1558).
ccttgtttaacaaactcta

SEQ ID NO: 232615 - DNA, 19 bp, Homo sapiens
  siRNA target sequence for BIRC6 (NM_016252.1,1588-1606).
gagcaacacaacattcctt

SEQ ID NO: 232616 - DNA, 19 bp, Homo sapiens
  siRNA target sequence for BIRC6 (NM_016252.1,1621-1639).
gctggaggtttattaacat

SEQ ID NO: 232617 - DNA, 19 bp, Homo sapiens
  siRNA target sequence for BIRC6 (NM_016252.1,1624-1642).
ggaggtttattaacatata

SEQ ID NO: 232618 - DNA, 19 bp, Homo sapiens
  siRNA target sequence for BIRC6 (NM_016252.1,1651-1669).
gctacctcacccattagta

SEQ ID NO: 232619 - DNA, 19 bp, Homo sapiens
  siRNA target sequence for BIRC6 (NM_016252.1,1656-1674).
ctcacccattagtagtaat

SEQ ID NO: 232620 - DNA, 19 bp, Homo sapiens
  siRNA target sequence for BIRC6 (NM_016252.1,1703-1721).
gaactcagggtgaaagtat

SEQ ID NO: 232621 - DNA, 19 bp, Homo sapiens
  siRNA target sequence for BIRC6 (NM_016252.1,1743-1761).
caatgaatcctgcactaat

SEQ ID NO: 232622 - DNA, 19 bp, Homo sapiens
  siRNA target sequence for BIRC6 (NM_016252.1,1863-1881).
gaacaatattatgagtaaa

SEQ ID NO: 232623 - DNA, 19 bp, Homo sapiens
  siRNA target sequence for BIRC6 (NM_016252.1,1866-1884).
caatattatgagtaaaagt

SEQ ID NO: 232624 - DNA, 19 bp, Homo sapiens
  siRNA target sequence for BIRC6 (NM_016252.1,1937-1955).
gtcaggagcagttgttatt

SEQ ID NO: 232625 - DNA, 19 bp, Homo sapiens
  siRNA target sequence for BIRC6 (NM_016252.1,2028-2046).
gaagtggaactctgtgttt

SEQ ID NO: 232626 - DNA, 19 bp, Homo sapiens
  siRNA target sequence for BIRC6 (NM_016252.1,2049-2067).
caagcctgggactttggtt

SEQ ID NO: 232627 - DNA, 19 bp, Homo sapiens
  siRNA target sequence for BIRC6 (NM_016252.1,2073-2091).
cttgaggctgccaaagttt

SEQ ID NO: 232628 - DNA, 19 bp, Homo sapiens
  siRNA target sequence for BIRC6 (NM_016252.1,2107-2125).
ctttgtatagactcaataa

SEQ ID NO: 232629 - DNA, 19 bp, Homo sapiens
  siRNA target sequence for BIRC6 (NM_016252.1,2132-2150).
gtgctgacggaattcattt

SEQ ID NO: 232630 - DNA, 19 bp, Homo sapiens
  siRNA target sequence for BIRC6 (NM_016252.1,2134-2152).
gctgacggaattcatttgt

SEQ ID NO: 232631 - DNA, 19 bp, Homo sapiens
  siRNA target sequence for BIRC6 (NM_016252.1,2163-2181).
gcggacatgccctgttgaa

SEQ ID NO: 232632 - DNA, 19 bp, Homo sapiens
  siRNA target sequence for BIRC6 (NM_016252.1,2164-2182).
cggacatgccctgttgaat

SEQ ID NO: 232633 - DNA, 19 bp, Homo sapiens
  siRNA target sequence for BIRC6 (NM_016252.1,2183-2201).
ccttgagtgcaataaatca

SEQ ID NO: 232634 - DNA, 19 bp, Homo sapiens
  siRNA target sequence for BIRC6 (NM_016252.1,2184-2202).
cttgagtgcaataaatcaa

SEQ ID NO: 232635 - DNA, 19 bp, Homo sapiens
  siRNA target sequence for BIRC6 (NM_016252.1,2200-2218).
caagtagaggccttgaata

SEQ ID NO: 232636 - DNA, 19 bp, Homo sapiens
  siRNA target sequence for BIRC6 (NM_016252.1,2203-2221).
gtagaggccttgaataatt

SEQ ID NO: 232637 - DNA, 19 bp, Homo sapiens
  siRNA target sequence for BIRC6 (NM_016252.1,2206-2224).
gaggccttgaataatttaa

SEQ ID NO: 232638 - DNA, 19 bp, Homo sapiens
  siRNA target sequence for BIRC6 (NM_016252.1,2261-2279).
gtgagctggaatcaaatct

SEQ ID NO: 232639 - DNA, 19 bp, Homo sapiens
  siRNA target sequence for BIRC6 (NM_016252.1,2273-2291).
caaatcttgctgtagtgaa

SEQ ID NO: 232640 - DNA, 19 bp, Homo sapiens
  siRNA target sequence for BIRC6 (NM_016252.1,2284-2302).
gtagtgaatggtgcaaata

SEQ ID NO: 232641 - DNA, 19 bp, Homo sapiens
  siRNA target sequence for BIRC6 (NM_016252.1,2297-2315).
caaatattagtgtaatcca

SEQ ID NO: 232642 - DNA, 19 bp, Homo sapiens
  siRNA target sequence for BIRC6 (NM_016252.1,2332-2350).
gatgtacagactcctttaa

SEQ ID NO: 232643 - DNA, 19 bp, Homo sapiens
  siRNA target sequence for BIRC6 (NM_016252.1,2414-2432).
ccactcggatagtgacttt

SEQ ID NO: 232644 - DNA, 19 bp, Homo sapiens
  siRNA target sequence for BIRC6 (NM_016252.1,2417-2435).
ctcggatagtgactttaga

SEQ ID NO: 232645 - DNA, 19 bp, Homo sapiens
  siRNA target sequence for BIRC6 (NM_016252.1,2503-2521).
ccacccgatatattggata

SEQ ID NO: 232646 - DNA, 19 bp, Homo sapiens
  siRNA target sequence for BIRC6 (NM_016252.1,2504-2522).
cacccgatatattggataa

SEQ ID NO: 232647 - DNA, 19 bp, Homo sapiens
  siRNA target sequence for BIRC6 (NM_016252.1,2508-2526).
cgatatattggataatcga

SEQ ID NO: 232648 - DNA, 19 bp, Homo sapiens
  siRNA target sequence for BIRC6 (NM_016252.1,2559-2577).
gcagttaacctcaaagaat

SEQ ID NO: 232649 - DNA, 19 bp, Homo sapiens
  siRNA target sequence for BIRC6 (NM_016252.1,2617-2635).
ggacacctggtaataacca

SEQ ID NO: 232650 - DNA, 19 bp, Homo sapiens
  siRNA target sequence for BIRC6 (NM_016252.1,2896-2914).
ggttccaaacctttatcaa

SEQ ID NO: 232651 - DNA, 19 bp, Homo sapiens
  siRNA target sequence for BIRC6 (NM_016252.1,2936-2954).
caggagttgatttattggt

SEQ ID NO: 232652 - DNA, 19 bp, Homo sapiens
  siRNA target sequence for BIRC6 (NM_016252.1,3132-3150).
gcatactcgaacttggaaa

SEQ ID NO: 232653 - DNA, 19 bp, Homo sapiens
  siRNA target sequence for BIRC6 (NM_016252.1,3137-3155).
ctcgaacttggaaactaca

SEQ ID NO: 232654 - DNA, 19 bp, Homo sapiens
  siRNA target sequence for BIRC6 (NM_016252.1,3164-3182).
gcaacagctgggatgaaca

SEQ ID NO: 232655 - DNA, 19 bp, Homo sapiens
  siRNA target sequence for BIRC6 (NM_016252.1,3168-3186).
cagctgggatgaacatgta

SEQ ID NO: 232656 - DNA, 19 bp, Homo sapiens
  siRNA target sequence for BIRC6 (NM_016252.1,3226-3244).
gtggacttcaaattcgttt

SEQ ID NO: 232657 - DNA, 19 bp, Homo sapiens
  siRNA target sequence for BIRC6 (NM_016252.1,3229-3247).
gacttcaaattcgttttga

SEQ ID NO: 232658 - DNA, 19 bp, Homo sapiens
  siRNA target sequence for BIRC6 (NM_016252.1,3258-3276).
caccaatattccacagata

SEQ ID NO: 232659 - DNA, 19 bp, Homo sapiens
  siRNA target sequence for BIRC6 (NM_016252.1,3305-3323).
caggattagggaaagtcaa

SEQ ID NO: 232660 - DNA, 19 bp, Homo sapiens
  siRNA target sequence for BIRC6 (NM_016252.1,3314-3332).
ggaaagtcaatgctcttaa

SEQ ID NO: 232661 - DNA, 19 bp, Homo sapiens
  siRNA target sequence for BIRC6 (NM_016252.1,3362-3380).
ccctggttgatttgaatga

SEQ ID NO: 232662 - DNA, 19 bp, Homo sapiens
  siRNA target sequence for BIRC6 (NM_016252.1,3430-3448).
ccatttttggaggatcata

SEQ ID NO: 232663 - DNA, 19 bp, Homo sapiens
  siRNA target sequence for BIRC6 (NM_016252.1,3431-3449).
catttttggaggatcataa

SEQ ID NO: 232664 - DNA, 19 bp, Homo sapiens
  siRNA target sequence for BIRC6 (NM_016252.1,3481-3499).
gctagtggccttgatctat

SEQ ID NO: 232665 - DNA, 19 bp, Homo sapiens
  siRNA target sequence for BIRC6 (NM_016252.1,3508-3526).
gctggaatgttgacgttaa

SEQ ID NO: 232666 - DNA, 19 bp, Homo sapiens
  siRNA target sequence for BIRC6 (NM_016252.1,3522-3540).
gttaacaagccccaaactt

SEQ ID NO: 232667 - DNA, 19 bp, Homo sapiens
  siRNA target sequence for BIRC6 (NM_016252.1,3527-3545).
caagccccaaacttgttaa

SEQ ID NO: 232668 - DNA, 19 bp, Homo sapiens
  siRNA target sequence for BIRC6 (NM_016252.1,3531-3549).
ccccaaacttgttaaaggt

SEQ ID NO: 232669 - DNA, 19 bp, Homo sapiens
  siRNA target sequence for BIRC6 (NM_016252.1,3532-3550).
cccaaacttgttaaaggta

SEQ ID NO: 232670 - DNA, 19 bp, Homo sapiens
  siRNA target sequence for BIRC6 (NM_016252.1,3533-3551).
ccaaacttgttaaaggtat

SEQ ID NO: 232671 - DNA, 19 bp, Homo sapiens
  siRNA target sequence for BIRC6 (NM_016252.1,3547-3565).
ggtatggcaggaggaaaat

SEQ ID NO: 232672 - DNA, 19 bp, Homo sapiens
  siRNA target sequence for BIRC6 (NM_016252.1,3548-3566).
gtatggcaggaggaaaata

SEQ ID NO: 232673 - DNA, 19 bp, Homo sapiens
  siRNA target sequence for BIRC6 (NM_016252.1,3552-3570).
ggcaggaggaaaatatcgt

SEQ ID NO: 232674 - DNA, 19 bp, Homo sapiens
  siRNA target sequence for BIRC6 (NM_016252.1,3553-3571).
gcaggaggaaaatatcgtt

SEQ ID NO: 232675 - DNA, 19 bp, Homo sapiens
  siRNA target sequence for BIRC6 (NM_016252.1,3559-3577).
ggaaaatatcgttcgtttt

SEQ ID NO: 232676 - DNA, 19 bp, Homo sapiens
  siRNA target sequence for BIRC6 (NM_016252.1,3560-3578).
gaaaatatcgttcgttttt

SEQ ID NO: 232677 - DNA, 19 bp, Homo sapiens
  siRNA target sequence for BIRC6 (NM_016252.1,3572-3590).
cgtttttaatccatgtcaa

SEQ ID NO: 232678 - DNA, 19 bp, Homo sapiens
  siRNA target sequence for BIRC6 (NM_016252.1,3631-3649).
ggtatgcgtcctgtagtaa

SEQ ID NO: 232679 - DNA, 19 bp, Homo sapiens
  siRNA target sequence for BIRC6 (NM_016252.1,3670-3688).
cagagtaacaagggttatt

SEQ ID NO: 232680 - DNA, 19 bp, Homo sapiens
  siRNA target sequence for BIRC6 (NM_016252.1,3674-3692).
gtaacaagggttattcact

SEQ ID NO: 232681 - DNA, 19 bp, Homo sapiens
  siRNA target sequence for BIRC6 (NM_016252.1,3718-3736).
gcaggcaaggaaaaatcat

SEQ ID NO: 232682 - DNA, 19 bp, Homo sapiens
  siRNA target sequence for BIRC6 (NM_016252.1,3734-3752).
catctaatgttaagaatga

SEQ ID NO: 232683 - DNA, 19 bp, Homo sapiens
  siRNA target sequence for BIRC6 (NM_016252.1,3742-3760).
gttaagaatgaaaatacaa

SEQ ID NO: 232684 - DNA, 19 bp, Homo sapiens
  siRNA target sequence for BIRC6 (NM_016252.1,3761-3779).
gtggcacccgtaaatctga

SEQ ID NO: 232685 - DNA, 19 bp, Homo sapiens
  siRNA target sequence for BIRC6 (NM_016252.1,3763-3781).
ggcacccgtaaatctgaaa

SEQ ID NO: 232686 - DNA, 19 bp, Homo sapiens
  siRNA target sequence for BIRC6 (NM_016252.1,3764-3782).
gcacccgtaaatctgaaaa

SEQ ID NO: 232687 - DNA, 19 bp, Homo sapiens
  siRNA target sequence for BIRC6 (NM_016252.1,3767-3785).
cccgtaaatctgaaaacct

SEQ ID NO: 232688 - DNA, 19 bp, Homo sapiens
  siRNA target sequence for BIRC6 (NM_016252.1,3811-3829).
gtctcagtcaccattcgaa

SEQ ID NO: 232689 - DNA, 19 bp, Homo sapiens
  siRNA target sequence for BIRC6 (NM_016252.1,3815-3833).
cagtcaccattcgaagatt

SEQ ID NO: 232690 - DNA, 19 bp, Homo sapiens
  siRNA target sequence for BIRC6 (NM_016252.1,3822-3840).
cattcgaagatttaagaaa

SEQ ID NO: 232691 - DNA, 19 bp, Homo sapiens
  siRNA target sequence for BIRC6 (NM_016252.1,3826-3844).
cgaagatttaagaaaacct

SEQ ID NO: 232692 - DNA, 19 bp, Homo sapiens
  siRNA target sequence for BIRC6 (NM_016252.1,3845-3863).
caatttctaaggaaagagt

SEQ ID NO: 232693 - DNA, 19 bp, Homo sapiens
  siRNA target sequence for BIRC6 (NM_016252.1,3864-3882).
gcaacgatgtgccatgtta

SEQ ID NO: 232694 - DNA, 19 bp, Homo sapiens
  siRNA target sequence for BIRC6 (NM_016252.1,3875-3893).
ccatgttacagttttcaga

SEQ ID NO: 232695 - DNA, 19 bp, Homo sapiens
  siRNA target sequence for BIRC6 (NM_016252.1,3975-3993).
ggatactctctgttggtta

SEQ ID NO: 232696 - DNA, 19 bp, Homo sapiens
  siRNA target sequence for BIRC6 (NM_016252.1,3990-4008).
gttagctggagttcattca

SEQ ID NO: 232697 - DNA, 19 bp, Homo sapiens
  siRNA target sequence for BIRC6 (NM_016252.1,4052-4070).
caaaaacacgaaaatttct

SEQ ID NO: 232698 - DNA, 19 bp, Homo sapiens
  siRNA target sequence for BIRC6 (NM_016252.1,4108-4126).
cgaagtatagcccataagt

SEQ ID NO: 232699 - DNA, 19 bp, Homo sapiens
  siRNA target sequence for BIRC6 (NM_016252.1,4138-4156).
ctagccttgtgcattagta

SEQ ID NO: 232700 - DNA, 19 bp, Homo sapiens
  siRNA target sequence for BIRC6 (NM_016252.1,4200-4218).
gttgaaggctttacttgat

SEQ ID NO: 232701 - DNA, 19 bp, Homo sapiens
  siRNA target sequence for BIRC6 (NM_016252.1,4249-4267).
ggtggttctgtctattggt

SEQ ID NO: 232702 - DNA, 19 bp, Homo sapiens
  siRNA target sequence for BIRC6 (NM_016252.1,4250-4268).
gtggttctgtctattggta

SEQ ID NO: 232703 - DNA, 19 bp, Homo sapiens
  siRNA target sequence for BIRC6 (NM_016252.1,4252-4270).
ggttctgtctattggtatt

SEQ ID NO: 232704 - DNA, 19 bp, Homo sapiens
  siRNA target sequence for BIRC6 (NM_016252.1,4316-4334).
gtacagcttgtgcatcttt

SEQ ID NO: 232705 - DNA, 19 bp, Homo sapiens
  siRNA target sequence for BIRC6 (NM_016252.1,4373-4391).
caccaatggaggctttact

SEQ ID NO: 232706 - DNA, 19 bp, Homo sapiens
  siRNA target sequence for BIRC6 (NM_016252.1,4393-4411).
cagacaagatatggattat

SEQ ID NO: 232707 - DNA, 19 bp, Homo sapiens
  siRNA target sequence for BIRC6 (NM_016252.1,4447-4465).
gagatgagtggctcttctt

SEQ ID NO: 232708 - DNA, 19 bp, Homo sapiens
  siRNA target sequence for BIRC6 (NM_016252.1,4449-4467).
gatgagtggctcttcttgt

SEQ ID NO: 232709 - DNA, 19 bp, Homo sapiens
  siRNA target sequence for BIRC6 (NM_016252.1,4561-4579).
gctgctgagggtagtttca

SEQ ID NO: 232710 - DNA, 19 bp, Homo sapiens
  siRNA target sequence for BIRC6 (NM_016252.1,4583-4601).
ctctcactggacttttgga

SEQ ID NO: 232711 - DNA, 19 bp, Homo sapiens
  siRNA target sequence for BIRC6 (NM_016252.1,4637-4655).
gtgatggaaccagaataga

SEQ ID NO: 232712 - DNA, 19 bp, Homo sapiens
  siRNA target sequence for BIRC6 (NM_016252.1,4919-4937).
cagtaggtcctgttcacaa

SEQ ID NO: 232713 - DNA, 19 bp, Homo sapiens
  siRNA target sequence for BIRC6 (NM_016252.1,4977-4995).
cattcatccatctgatgtt

SEQ ID NO: 232714 - DNA, 19 bp, Homo sapiens
  siRNA target sequence for BIRC6 (NM_016252.1,5060-5078).
cagtttccgttgtgattaa

SEQ ID NO: 232715 - DNA, 19 bp, Homo sapiens
  siRNA target sequence for BIRC6 (NM_016252.1,5081-5099).
ccgaacttgcacagctttt

SEQ ID NO: 232716 - DNA, 19 bp, Homo sapiens
  siRNA target sequence for BIRC6 (NM_016252.1,5156-5174).
ccaacaagtccagaatgaa

SEQ ID NO: 232717 - DNA, 19 bp, Homo sapiens
  siRNA target sequence for BIRC6 (NM_016252.1,5157-5175).
caacaagtccagaatgaat

SEQ ID NO: 232718 - DNA, 19 bp, Homo sapiens
  siRNA target sequence for BIRC6 (NM_016252.1,5186-5204).
ctggtctagcccttgcaat

SEQ ID NO: 232719 - DNA, 19 bp, Homo sapiens
  siRNA target sequence for BIRC6 (NM_016252.1,5188-5206).
ggtctagcccttgcaattt

SEQ ID NO: 232720 - DNA, 19 bp, Homo sapiens
  siRNA target sequence for BIRC6 (NM_016252.1,5233-5251).
ccgcctcaccagtccatta

SEQ ID NO: 232721 - DNA, 19 bp, Homo sapiens
  siRNA target sequence for BIRC6 (NM_016252.1,5234-5252).
cgcctcaccagtccattat

SEQ ID NO: 232722 - DNA, 19 bp, Homo sapiens
  siRNA target sequence for BIRC6 (NM_016252.1,5235-5253).
gcctcaccagtccattatt

SEQ ID NO: 232723 - DNA, 19 bp, Homo sapiens
  siRNA target sequence for BIRC6 (NM_016252.1,5236-5254).
cctcaccagtccattatta

SEQ ID NO: 232724 - DNA, 19 bp, Homo sapiens
  siRNA target sequence for BIRC6 (NM_016252.1,5296-5314).
gattttgggaggcctatat

SEQ ID NO: 232725 - DNA, 19 bp, Homo sapiens
  siRNA target sequence for BIRC6 (NM_016252.1,5354-5372).
cctctttgtcaattgacat

SEQ ID NO: 232726 - DNA, 19 bp, Homo sapiens
  siRNA target sequence for BIRC6 (NM_016252.1,5406-5424).
gttggtagtggcaactgat

SEQ ID NO: 232727 - DNA, 19 bp, Homo sapiens
  siRNA target sequence for BIRC6 (NM_016252.1,5430-5448).
cactcattcactaattctt

SEQ ID NO: 232728 - DNA, 19 bp, Homo sapiens
  siRNA target sequence for BIRC6 (NM_016252.1,5432-5450).
ctcattcactaattcttca

SEQ ID NO: 232729 - DNA, 19 bp, Homo sapiens
  siRNA target sequence for BIRC6 (NM_016252.1,5468-5486).
ccgtgtgcagattcatgaa

SEQ ID NO: 232730 - DNA, 19 bp, Homo sapiens
  siRNA target sequence for BIRC6 (NM_016252.1,5500-5518).
ggacgttacgggagtacaa

SEQ ID NO: 232731 - DNA, 19 bp, Homo sapiens
  siRNA target sequence for BIRC6 (NM_016252.1,5501-5519).
gacgttacgggagtacaaa

SEQ ID NO: 232732 - DNA, 19 bp, Homo sapiens
  siRNA target sequence for BIRC6 (NM_016252.1,5527-5545).
gccaaaatcccattaggat

SEQ ID NO: 232733 - DNA, 19 bp, Homo sapiens
  siRNA target sequence for BIRC6 (NM_016252.1,5535-5553).
cccattaggattttactat

SEQ ID NO: 232734 - DNA, 19 bp, Homo sapiens
  siRNA target sequence for BIRC6 (NM_016252.1,5672-5690).
ctttgcaggaggatataca

SEQ ID NO: 232735 - DNA, 19 bp, Homo sapiens
  siRNA target sequence for BIRC6 (NM_016252.1,5683-5701).
gatatacagtgcaggtata

SEQ ID NO: 232736 - DNA, 19 bp, Homo sapiens
  siRNA target sequence for BIRC6 (NM_016252.1,5719-5737).
ctggaaacccttttgcaaa

SEQ ID NO: 232737 - DNA, 19 bp, Homo sapiens
  siRNA target sequence for BIRC6 (NM_016252.1,5727-5745).
ccttttgcaaagtattgat

SEQ ID NO: 232738 - DNA, 19 bp, Homo sapiens
  siRNA target sequence for BIRC6 (NM_016252.1,5765-5783).
ctaacaatgcacagtactt

SEQ ID NO: 232739 - DNA, 19 bp, Homo sapiens
  siRNA target sequence for BIRC6 (NM_016252.1,5778-5796).
gtactttttacgaaaacca

SEQ ID NO: 232740 - DNA, 19 bp, Homo sapiens
  siRNA target sequence for BIRC6 (NM_016252.1,5831-5849).
ctgcttatcaagattgtat

SEQ ID NO: 232741 - DNA, 19 bp, Homo sapiens
  siRNA target sequence for BIRC6 (NM_016252.1,5912-5930).
gtgcaagccggaagatgtt

SEQ ID NO: 232742 - DNA, 19 bp, Homo sapiens
  siRNA target sequence for BIRC6 (NM_016252.1,5914-5932).
gcaagccggaagatgttga

SEQ ID NO: 232743 - DNA, 19 bp, Homo sapiens
  siRNA target sequence for BIRC6 (NM_016252.1,5920-5938).
cggaagatgttgagtgaaa

SEQ ID NO: 232744 - DNA, 19 bp, Homo sapiens
  siRNA target sequence for BIRC6 (NM_016252.1,5925-5943).
gatgttgagtgaaacatca

SEQ ID NO: 232745 - DNA, 19 bp, Homo sapiens
  siRNA target sequence for BIRC6 (NM_016252.1,5931-5949).
gagtgaaacatcaaatcca

SEQ ID NO: 232746 - DNA, 19 bp, Homo sapiens
  siRNA target sequence for BIRC6 (NM_016252.1,5975-5993).
cagagcagttacgtactat

SEQ ID NO: 232747 - DNA, 19 bp, Homo sapiens
  siRNA target sequence for BIRC6 (NM_016252.1,5980-5998).
cagttacgtactatcatca

SEQ ID NO: 232748 - DNA, 19 bp, Homo sapiens
  siRNA target sequence for BIRC6 (NM_016252.1,5986-6004).
cgtactatcatcagatatt

SEQ ID NO: 232749 - DNA, 19 bp, Homo sapiens
  siRNA target sequence for BIRC6 (NM_016252.1,6024-6042).
cctgcttcatgcttctaat

SEQ ID NO: 232750 - DNA, 19 bp, Homo sapiens
  siRNA target sequence for BIRC6 (NM_016252.1,6027-6045).
gcttcatgcttctaatgga

SEQ ID NO: 232751 - DNA, 19 bp, Homo sapiens
  siRNA target sequence for BIRC6 (NM_016252.1,6129-6147).
cccaaagatacggttacat

SEQ ID NO: 232752 - DNA, 19 bp, Homo sapiens
  siRNA target sequence for BIRC6 (NM_016252.1,6130-6148).
ccaaagatacggttacata

SEQ ID NO: 232753 - DNA, 19 bp, Homo sapiens
  siRNA target sequence for BIRC6 (NM_016252.1,6141-6159).
gttacatactggtcttctt

SEQ ID NO: 232754 - DNA, 19 bp, Homo sapiens
  siRNA target sequence for BIRC6 (NM_016252.1,6152-6170).
gtcttcttcttgttcaact

SEQ ID NO: 232755 - DNA, 19 bp, Homo sapiens
  siRNA target sequence for BIRC6 (NM_016252.1,6211-6229).
gtccttcaggaattgtaca

SEQ ID NO: 232756 - DNA, 19 bp, Homo sapiens
  siRNA target sequence for BIRC6 (NM_016252.1,6254-6272).
cacaggatagggtcttcat

SEQ ID NO: 232757 - DNA, 19 bp, Homo sapiens
  siRNA target sequence for BIRC6 (NM_016252.1,6285-6303).
cattggtcaaagatcactt

SEQ ID NO: 232758 - DNA, 19 bp, Homo sapiens
  siRNA target sequence for BIRC6 (NM_016252.1,6305-6323).
gtaatagtggagtattaga

SEQ ID NO: 232759 - DNA, 19 bp, Homo sapiens
  siRNA target sequence for BIRC6 (NM_016252.1,6331-6349).
cttaatctcttggataatt

SEQ ID NO: 232760 - DNA, 19 bp, Homo sapiens
  siRNA target sequence for BIRC6 (NM_016252.1,6403-6421).
ctagatattcccatgatca

SEQ ID NO: 232761 - DNA, 19 bp, Homo sapiens
  siRNA target sequence for BIRC6 (NM_016252.1,6406-6424).
gatattcccatgatcagtt

SEQ ID NO: 232762 - DNA, 19 bp, Homo sapiens
  siRNA target sequence for BIRC6 (NM_016252.1,6441-6459).
gtccaggttgctggattat

SEQ ID NO: 232763 - DNA, 19 bp, Homo sapiens
  siRNA target sequence for BIRC6 (NM_016252.1,6453-6471).
ggattatgtggcaactgtt

SEQ ID NO: 232764 - DNA, 19 bp, Homo sapiens
  siRNA target sequence for BIRC6 (NM_016252.1,6508-6526).
ggtaatcagtggagtttta

SEQ ID NO: 232765 - DNA, 19 bp, Homo sapiens
  siRNA target sequence for BIRC6 (NM_016252.1,6573-6591).
cagcagtagccttgataga

SEQ ID NO: 232766 - DNA, 19 bp, Homo sapiens
  siRNA target sequence for BIRC6 (NM_016252.1,6575-6593).
gcagtagccttgatagatt

SEQ ID NO: 232767 - DNA, 19 bp, Homo sapiens
  siRNA target sequence for BIRC6 (NM_016252.1,6576-6594).
cagtagccttgatagatta

SEQ ID NO: 232768 - DNA, 19 bp, Homo sapiens
  siRNA target sequence for BIRC6 (NM_016252.1,6578-6596).
gtagccttgatagattata

SEQ ID NO: 232769 - DNA, 19 bp, Homo sapiens
  siRNA target sequence for BIRC6 (NM_016252.1,6611-6629).
gaaagcagcttgttcatca

SEQ ID NO: 232770 - DNA, 19 bp, Homo sapiens
  siRNA target sequence for BIRC6 (NM_016252.1,6625-6643).
catcataaacagcaactta

SEQ ID NO: 232771 - DNA, 19 bp, Homo sapiens
  siRNA target sequence for BIRC6 (NM_016252.1,6634-6652).
cagcaacttaacctactaa

SEQ ID NO: 232772 - DNA, 19 bp, Homo sapiens
  siRNA target sequence for BIRC6 (NM_016252.1,6636-6654).
gcaacttaacctactaaaa

SEQ ID NO: 232773 - DNA, 19 bp, Homo sapiens
  siRNA target sequence for BIRC6 (NM_016252.1,6761-6779).
cttcaaagcactttaagga

SEQ ID NO: 232774 - DNA, 19 bp, Homo sapiens
  siRNA target sequence for BIRC6 (NM_016252.1,6771-6789).
ctttaaggatttaattcgt

SEQ ID NO: 232775 - DNA, 19 bp, Homo sapiens
  siRNA target sequence for BIRC6 (NM_016252.1,6777-6795).
ggatttaattcgtttacgt

SEQ ID NO: 232776 - DNA, 19 bp, Homo sapiens
  siRNA target sequence for BIRC6 (NM_016252.1,6803-6821).
cagaatggtcccgttctaa

SEQ ID NO: 232777 - DNA, 19 bp, Homo sapiens
  siRNA target sequence for BIRC6 (NM_016252.1,6805-6823).
gaatggtcccgttctaatt

SEQ ID NO: 232778 - DNA, 19 bp, Homo sapiens
  siRNA target sequence for BIRC6 (NM_016252.1,6861-6879).
gatagaaccacttccattt

SEQ ID NO: 232779 - DNA, 19 bp, Homo sapiens
  siRNA target sequence for BIRC6 (NM_016252.1,6886-6904).
gcccatgagcgttgtatct

SEQ ID NO: 232780 - DNA, 19 bp, Homo sapiens
  siRNA target sequence for BIRC6 (NM_016252.1,6888-6906).
ccatgagcgttgtatctca

SEQ ID NO: 232781 - DNA, 19 bp, Homo sapiens
  siRNA target sequence for BIRC6 (NM_016252.1,6950-6968).
catgtcatgcagatctctt

SEQ ID NO: 232782 - DNA, 19 bp, Homo sapiens
  siRNA target sequence for BIRC6 (NM_016252.1,6955-6973).
catgcagatctcttattgt

SEQ ID NO: 232783 - DNA, 19 bp, Homo sapiens
  siRNA target sequence for BIRC6 (NM_016252.1,6985-7003).
gttcttgcacgcattgcaa

SEQ ID NO: 232784 - DNA, 19 bp, Homo sapiens
  siRNA target sequence for BIRC6 (NM_016252.1,7007-7025).
ccacgaggccaactattca

SEQ ID NO: 232785 - DNA, 19 bp, Homo sapiens
  siRNA target sequence for BIRC6 (NM_016252.1,7010-7028).
cgaggccaactattcatct

SEQ ID NO: 232786 - DNA, 19 bp, Homo sapiens
  siRNA target sequence for BIRC6 (NM_016252.1,7056-7074).
ggaaagactgctgttactt

SEQ ID NO: 232787 - DNA, 19 bp, Homo sapiens
  siRNA target sequence for BIRC6 (NM_016252.1,7057-7075).
gaaagactgctgttacttt

SEQ ID NO: 232788 - DNA, 19 bp, Homo sapiens
  siRNA target sequence for BIRC6 (NM_016252.1,7061-7079).
gactgctgttacttttggt

SEQ ID NO: 232789 - DNA, 19 bp, Homo sapiens
  siRNA target sequence for BIRC6 (NM_016252.1,7089-7107).
cttcaatagaggagatata

SEQ ID NO: 232790 - DNA, 19 bp, Homo sapiens
  siRNA target sequence for BIRC6 (NM_016252.1,7126-7144).
gctcagtattccttaactt

SEQ ID NO: 232791 - DNA, 19 bp, Homo sapiens
  siRNA target sequence for BIRC6 (NM_016252.1,7372-7390).
gagttacttcaggatctaa

SEQ ID NO: 232792 - DNA, 19 bp, Homo sapiens
  siRNA target sequence for BIRC6 (NM_016252.1,7399-7417).
gacattgatcctttagata

SEQ ID NO: 232793 - DNA, 19 bp, Homo sapiens
  siRNA target sequence for BIRC6 (NM_016252.1,7435-7453).
cctcttgcagccaaggttt

SEQ ID NO: 232794 - DNA, 19 bp, Homo sapiens
  siRNA target sequence for BIRC6 (NM_016252.1,7466-7484).
gcagtacatggtatgatta

SEQ ID NO: 232795 - DNA, 19 bp, Homo sapiens
  siRNA target sequence for BIRC6 (NM_016252.1,7467-7485).
cagtacatggtatgattat

SEQ ID NO: 232796 - DNA, 19 bp, Homo sapiens
  siRNA target sequence for BIRC6 (NM_016252.1,7617-7635).
ggatgctcgcctagaagtt

SEQ ID NO: 232797 - DNA, 19 bp, Homo sapiens
  siRNA target sequence for BIRC6 (NM_016252.1,7626-7644).
cctagaagttggacttgaa

SEQ ID NO: 232798 - DNA, 19 bp, Homo sapiens
  siRNA target sequence for BIRC6 (NM_016252.1,7702-7720).
caggcattaacaaatacat

SEQ ID NO: 232799 - DNA, 19 bp, Homo sapiens
  siRNA target sequence for BIRC6 (NM_016252.1,7704-7722).
ggcattaacaaatacatct

SEQ ID NO: 232800 - DNA, 19 bp, Homo sapiens
  siRNA target sequence for BIRC6 (NM_016252.1,7741-7759).
cccactggaacagatgatt

SEQ ID NO: 232801 - DNA, 19 bp, Homo sapiens
  siRNA target sequence for BIRC6 (NM_016252.1,7743-7761).
cactggaacagatgattca

SEQ ID NO: 232802 - DNA, 19 bp, Homo sapiens
  siRNA target sequence for BIRC6 (NM_016252.1,7745-7763).
ctggaacagatgattcact

SEQ ID NO: 232803 - DNA, 19 bp, Homo sapiens
  siRNA target sequence for BIRC6 (NM_016252.1,7797-7815).
ccagcttattatacagtta

SEQ ID NO: 232804 - DNA, 19 bp, Homo sapiens
  siRNA target sequence for BIRC6 (NM_016252.1,7800-7818).
gcttattatacagttatca

SEQ ID NO: 232805 - DNA, 19 bp, Homo sapiens
  siRNA target sequence for BIRC6 (NM_016252.1,7801-7819).
cttattatacagttatcat

SEQ ID NO: 232806 - DNA, 19 bp, Homo sapiens
  siRNA target sequence for BIRC6 (NM_016252.1,7822-7840).
gtcccaatgttaaatgttt

SEQ ID NO: 232807 - DNA, 19 bp, Homo sapiens
  siRNA target sequence for BIRC6 (NM_016252.1,7824-7842).
cccaatgttaaatgtttgt

SEQ ID NO: 232808 - DNA, 19 bp, Homo sapiens
  siRNA target sequence for BIRC6 (NM_016252.1,7979-7997).
ctaataggatacctgttat

SEQ ID NO: 232809 - DNA, 19 bp, Homo sapiens
  siRNA target sequence for BIRC6 (NM_016252.1,7986-8004).
gatacctgttatttcatta

SEQ ID NO: 232810 - DNA, 19 bp, Homo sapiens
  siRNA target sequence for BIRC6 (NM_016252.1,7991-8009).
ctgttatttcattaaatca

SEQ ID NO: 232811 - DNA, 19 bp, Homo sapiens
  siRNA target sequence for BIRC6 (NM_016252.1,8031-8049).
cacagtgttagcttggtat

SEQ ID NO: 232812 - DNA, 19 bp, Homo sapiens
  siRNA target sequence for BIRC6 (NM_016252.1,8041-8059).
gcttggtatcccaatactt

SEQ ID NO: 232813 - DNA, 19 bp, Homo sapiens
  siRNA target sequence for BIRC6 (NM_016252.1,8092-8110).
ctaacactcatgacaaaca

SEQ ID NO: 232814 - DNA, 19 bp, Homo sapiens
  siRNA target sequence for BIRC6 (NM_016252.1,8152-8170).
gagagtactgctcatttgt

SEQ ID NO: 232815 - DNA, 19 bp, Homo sapiens
  siRNA target sequence for BIRC6 (NM_016252.1,8228-8246).
cacatggaacaaatcaaca

SEQ ID NO: 232816 - DNA, 19 bp, Homo sapiens
  siRNA target sequence for BIRC6 (NM_016252.1,8299-8317).
cgattacaagtgcatcttt

SEQ ID NO: 232817 - DNA, 19 bp, Homo sapiens
  siRNA target sequence for BIRC6 (NM_016252.1,8321-8339).
caacatgtcctcagatatt

SEQ ID NO: 232818 - DNA, 19 bp, Homo sapiens
  siRNA target sequence for BIRC6 (NM_016252.1,8330-8348).
ctcagatattcagtgaatt

SEQ ID NO: 232819 - DNA, 19 bp, Homo sapiens
  siRNA target sequence for BIRC6 (NM_016252.1,8352-8370).
gctcaagctaattcatata

SEQ ID NO: 232820 - DNA, 19 bp, Homo sapiens
  siRNA target sequence for BIRC6 (NM_016252.1,8411-8429).
ctctcgatgcccaagtgaa

SEQ ID NO: 232821 - DNA, 19 bp, Homo sapiens
  siRNA target sequence for BIRC6 (NM_016252.1,8425-8443).
gtgaagctcttagaattca

SEQ ID NO: 232822 - DNA, 19 bp, Homo sapiens
  siRNA target sequence for BIRC6 (NM_016252.1,8464-8482).
gtcgtttcagttagtacta

SEQ ID NO: 232823 - DNA, 19 bp, Homo sapiens
  siRNA target sequence for BIRC6 (NM_016252.1,8466-8484).
cgtttcagttagtactatt

SEQ ID NO: 232824 - DNA, 19 bp, Homo sapiens
  siRNA target sequence for BIRC6 (NM_016252.1,8491-8509).
gtgatagaatcggttacat

SEQ ID NO: 232825 - DNA, 19 bp, Homo sapiens
  siRNA target sequence for BIRC6 (NM_016252.1,8493-8511).
gatagaatcggttacattt

SEQ ID NO: 232826 - DNA, 19 bp, Homo sapiens
  siRNA target sequence for BIRC6 (NM_016252.1,8515-8533).
gtgcaccactatatcactt

SEQ ID NO: 232827 - DNA, 19 bp, Homo sapiens
  siRNA target sequence for BIRC6 (NM_016252.1,8529-8547).
cacttgctcagacaaagta

SEQ ID NO: 232828 - DNA, 19 bp, Homo sapiens
  siRNA target sequence for BIRC6 (NM_016252.1,8531-8549).
cttgctcagacaaagtaat

SEQ ID NO: 232829 - DNA, 19 bp, Homo sapiens
  siRNA target sequence for BIRC6 (NM_016252.1,8599-8617).
ggactctttgccaatctta

SEQ ID NO: 232830 - DNA, 19 bp, Homo sapiens
  siRNA target sequence for BIRC6 (NM_016252.1,8600-8618).
gactctttgccaatcttat

SEQ ID NO: 232831 - DNA, 19 bp, Homo sapiens
  siRNA target sequence for BIRC6 (NM_016252.1,8604-8622).
ctttgccaatcttattcgt

SEQ ID NO: 232832 - DNA, 19 bp, Homo sapiens
  siRNA target sequence for BIRC6 (NM_016252.1,8662-8680).
gatcaactcatgtttgatt

SEQ ID NO: 232833 - DNA, 19 bp, Homo sapiens
  siRNA target sequence for BIRC6 (NM_016252.1,8748-8766).
gtctgtgaccacaaataca

SEQ ID NO: 232834 - DNA, 19 bp, Homo sapiens
  siRNA target sequence for BIRC6 (NM_016252.1,8866-8884).
gtcttagccaaccaacaaa

SEQ ID NO: 232835 - DNA, 19 bp, Homo sapiens
  siRNA target sequence for BIRC6 (NM_016252.1,8905-8923).
gctctgggcctgtgtaata

SEQ ID NO: 232836 - DNA, 19 bp, Homo sapiens
  siRNA target sequence for BIRC6 (NM_016252.1,8927-8945).
gtgccatggcaatgataat

SEQ ID NO: 232837 - DNA, 19 bp, Homo sapiens
  siRNA target sequence for BIRC6 (NM_016252.1,8948-8966).
gagcaagtggattacatct

SEQ ID NO: 232838 - DNA, 19 bp, Homo sapiens
  siRNA target sequence for BIRC6 (NM_016252.1,8993-9011).
ggttggatgccatatcagt

SEQ ID NO: 232839 - DNA, 19 bp, Homo sapiens
  siRNA target sequence for BIRC6 (NM_016252.1,8994-9012).
gttggatgccatatcagtt

SEQ ID NO: 232840 - DNA, 19 bp, Homo sapiens
  siRNA target sequence for BIRC6 (NM_016252.1,9008-9026).
cagttggggatggattatt

SEQ ID NO: 232841 - DNA, 19 bp, Homo sapiens
  siRNA target sequence for BIRC6 (NM_016252.1,9034-9052).
ctgacaacccttagtaaaa

SEQ ID NO: 232842 - DNA, 19 bp, Homo sapiens
  siRNA target sequence for BIRC6 (NM_016252.1,9056-9074).
cttctacagtccacatgat

SEQ ID NO: 232843 - DNA, 19 bp, Homo sapiens
  siRNA target sequence for BIRC6 (NM_016252.1,9075-9093).
gctgcagccaattttaaca

SEQ ID NO: 232844 - DNA, 19 bp, Homo sapiens
  siRNA target sequence for BIRC6 (NM_016252.1,9076-9094).
ctgcagccaattttaacat

SEQ ID NO: 232845 - DNA, 19 bp, Homo sapiens
  siRNA target sequence for BIRC6 (NM_016252.1,9134-9152).
ctacttgccagttatctga

SEQ ID NO: 232846 - DNA, 19 bp, Homo sapiens
  siRNA target sequence for BIRC6 (NM_016252.1,9142-9160).
cagttatctgagccattat

SEQ ID NO: 232847 - DNA, 19 bp, Homo sapiens
  siRNA target sequence for BIRC6 (NM_016252.1,9220-9238).
ggtggtgttcagctcatat

SEQ ID NO: 232848 - DNA, 19 bp, Homo sapiens
  siRNA target sequence for BIRC6 (NM_016252.1,9223-9241).
ggtgttcagctcatatgca

SEQ ID NO: 232849 - DNA, 19 bp, Homo sapiens
  siRNA target sequence for BIRC6 (NM_016252.1,9226-9244).
gttcagctcatatgcaata

SEQ ID NO: 232850 - DNA, 19 bp, Homo sapiens
  siRNA target sequence for BIRC6 (NM_016252.1,9254-9272).
ctagtacaagggctattgt

SEQ ID NO: 232851 - DNA, 19 bp, Homo sapiens
  siRNA target sequence for BIRC6 (NM_016252.1,9271-9289).
gtgaacactgcaagaagta

SEQ ID NO: 232852 - DNA, 19 bp, Homo sapiens
  siRNA target sequence for BIRC6 (NM_016252.1,9276-9294).
cactgcaagaagtatggta

SEQ ID NO: 232853 - DNA, 19 bp, Homo sapiens
  siRNA target sequence for BIRC6 (NM_016252.1,9344-9362).
gcacattgaaaacaagaat

SEQ ID NO: 232854 - DNA, 19 bp, Homo sapiens
  siRNA target sequence for BIRC6 (NM_016252.1,9385-9403).
gctgaagggattcataact

SEQ ID NO: 232855 - DNA, 19 bp, Homo sapiens
  siRNA target sequence for BIRC6 (NM_016252.1,9386-9404).
ctgaagggattcataactt

SEQ ID NO: 232856 - DNA, 19 bp, Homo sapiens
  siRNA target sequence for BIRC6 (NM_016252.1,9406-9424).
gcacccctcggtacaatca

SEQ ID NO: 232857 - DNA, 19 bp, Homo sapiens
  siRNA target sequence for BIRC6 (NM_016252.1,9409-9427).
cccctcggtacaatcacat

SEQ ID NO: 232858 - DNA, 19 bp, Homo sapiens
  siRNA target sequence for BIRC6 (NM_016252.1,9449-9467).
cagctgaagtgctattgca

SEQ ID NO: 232859 - DNA, 19 bp, Homo sapiens
  siRNA target sequence for BIRC6 (NM_016252.1,9500-9518).
ctgcttggtcctacatctt

SEQ ID NO: 232860 - DNA, 19 bp, Homo sapiens
  siRNA target sequence for BIRC6 (NM_016252.1,9533-9551).
cttggtgtgaccttaccat

SEQ ID NO: 232861 - DNA, 19 bp, Homo sapiens
  siRNA target sequence for BIRC6 (NM_016252.1,9560-9578).
ctgcagcagtgctgcttaa

SEQ ID NO: 232862 - DNA, 19 bp, Homo sapiens
  siRNA target sequence for BIRC6 (NM_016252.1,9626-9644).
cctcagtgtctgttgaagt

SEQ ID NO: 232863 - DNA, 19 bp, Homo sapiens
  siRNA target sequence for BIRC6 (NM_016252.1,9695-9713).
gtggcctcacctacataaa

SEQ ID NO: 232864 - DNA, 19 bp, Homo sapiens
  siRNA target sequence for BIRC6 (NM_016252.1,9697-9715).
ggcctcacctacataaaaa

SEQ ID NO: 232865 - DNA, 19 bp, Homo sapiens
  siRNA target sequence for BIRC6 (NM_016252.1,9698-9716).
gcctcacctacataaaaat

SEQ ID NO: 232866 - DNA, 19 bp, Homo sapiens
  siRNA target sequence for BIRC6 (NM_016252.1,9782-9800).
gcacattaggcctttcaca

SEQ ID NO: 232867 - DNA, 19 bp, Homo sapiens
  siRNA target sequence for BIRC6 (NM_016252.1,9836-9854).
cctcttctgcaacagttaa

SEQ ID NO: 232868 - DNA, 19 bp, Homo sapiens
  siRNA target sequence for BIRC6 (NM_016252.1,9839-9857).
cttctgcaacagttaataa

SEQ ID NO: 232869 - DNA, 19 bp, Homo sapiens
  siRNA target sequence for BIRC6 (NM_016252.1,9844-9862).
gcaacagttaataatccat

SEQ ID NO: 232870 - DNA, 19 bp, Homo sapiens
  siRNA target sequence for BIRC6 (NM_016252.1,9902-9920).
gatggttacggttattaca

SEQ ID NO: 232871 - DNA, 19 bp, Homo sapiens
  siRNA target sequence for BIRC6 (NM_016252.1,9922-9940).
cattgccttactcacataa

SEQ ID NO: 232872 - DNA, 19 bp, Homo sapiens
  siRNA target sequence for BIRC6 (NM_016252.1,9926-9944).
gccttactcacataagtga

SEQ ID NO: 232873 - DNA, 19 bp, Homo sapiens
  siRNA target sequence for BIRC6 (NM_016252.1,9927-9945).
ccttactcacataagtgat

SEQ ID NO: 232874 - DNA, 19 bp, Homo sapiens
  siRNA target sequence for BIRC6 (NM_016252.1,9932-9950).
ctcacataagtgatctaga

SEQ ID NO: 232875 - DNA, 19 bp, Homo sapiens
  siRNA target sequence for BIRC6 (NM_016252.1,9941-9959).
gtgatctagaaggaatgat

SEQ ID NO: 232876 - DNA, 19 bp, Homo sapiens
  siRNA target sequence for BIRC6 (NM_016252.1,9998-10016).
cttgtgcggccttattgat

SEQ ID NO: 232877 - DNA, 19 bp, Homo sapiens
  siRNA target sequence for BIRC6 (NM_016252.1,10051-10069).
gaggttgtgcttgtaaaga

SEQ ID NO: 232878 - DNA, 19 bp, Homo sapiens
  siRNA target sequence for BIRC6 (NM_016252.1,10053-10071).
ggttgtgcttgtaaagata

SEQ ID NO: 232879 - DNA, 19 bp, Homo sapiens
  siRNA target sequence for BIRC6 (NM_016252.1,10072-10090).
ggactgcagtctactagaa

SEQ ID NO: 232880 - DNA, 19 bp, Homo sapiens
  siRNA target sequence for BIRC6 (NM_016252.1,10073-10091).
gactgcagtctactagaat

SEQ ID NO: 232881 - DNA, 19 bp, Homo sapiens
  siRNA target sequence for BIRC6 (NM_016252.1,10110-10128).
cattctcctgagaaattgt

SEQ ID NO: 232882 - DNA, 19 bp, Homo sapiens
  siRNA target sequence for BIRC6 (NM_016252.1,10194-10212).
ctcttctgactctacgata

SEQ ID NO: 232883 - DNA, 19 bp, Homo sapiens
  siRNA target sequence for BIRC6 (NM_016252.1,10199-10217).
ctgactctacgatagatat

SEQ ID NO: 232884 - DNA, 19 bp, Homo sapiens
  siRNA target sequence for BIRC6 (NM_016252.1,10203-10221).
ctctacgatagatattctt

SEQ ID NO: 232885 - DNA, 19 bp, Homo sapiens
  siRNA target sequence for BIRC6 (NM_016252.1,10205-10223).
ctacgatagatattcttta

SEQ ID NO: 232886 - DNA, 19 bp, Homo sapiens
  siRNA target sequence for BIRC6 (NM_016252.1,10208-10226).
cgatagatattctttacca

SEQ ID NO: 232887 - DNA, 19 bp, Homo sapiens
  siRNA target sequence for BIRC6 (NM_016252.1,10319-10337).
gaagtggcaggatgaacta

SEQ ID NO: 232888 - DNA, 19 bp, Homo sapiens
  siRNA target sequence for BIRC6 (NM_016252.1,10322-10340).
gtggcaggatgaactacat

SEQ ID NO: 232889 - DNA, 19 bp, Homo sapiens
  siRNA target sequence for BIRC6 (NM_016252.1,10324-10342).
ggcaggatgaactacatgt

SEQ ID NO: 232890 - DNA, 19 bp, Homo sapiens
  siRNA target sequence for BIRC6 (NM_016252.1,10412-10430).
ccattctgtggcatagtta

SEQ ID NO: 232891 - DNA, 19 bp, Homo sapiens
  siRNA target sequence for BIRC6 (NM_016252.1,10413-10431).
cattctgtggcatagttat

SEQ ID NO: 232892 - DNA, 19 bp, Homo sapiens
  siRNA target sequence for BIRC6 (NM_016252.1,10427-10445).
gttatgagctgcttgtaga

SEQ ID NO: 232893 - DNA, 19 bp, Homo sapiens
  siRNA target sequence for BIRC6 (NM_016252.1,10437-10455).
gcttgtagaatatgactta

SEQ ID NO: 232894 - DNA, 19 bp, Homo sapiens
  siRNA target sequence for BIRC6 (NM_016252.1,10510-10528).
cttccctgcaatatggttt

SEQ ID NO: 232895 - DNA, 19 bp, Homo sapiens
  siRNA target sequence for BIRC6 (NM_016252.1,10517-10535).
gcaatatggttttgaagaa

SEQ ID NO: 232896 - DNA, 19 bp, Homo sapiens
  siRNA target sequence for BIRC6 (NM_016252.1,10565-10583).
gtcacgtacacccaaacta

SEQ ID NO: 232897 - DNA, 19 bp, Homo sapiens
  siRNA target sequence for BIRC6 (NM_016252.1,10649-10667).
ccatgacagatgatagcaa

SEQ ID NO: 232898 - DNA, 19 bp, Homo sapiens
  siRNA target sequence for BIRC6 (NM_016252.1,10714-10732).
caagcacctctcgcattaa

SEQ ID NO: 232899 - DNA, 19 bp, Homo sapiens
  siRNA target sequence for BIRC6 (NM_016252.1,10725-10743).
cgcattaactgaatcacat

SEQ ID NO: 232900 - DNA, 19 bp, Homo sapiens
  siRNA target sequence for BIRC6 (NM_016252.1,10726-10744).
gcattaactgaatcacatt

SEQ ID NO: 232901 - DNA, 19 bp, Homo sapiens
  siRNA target sequence for BIRC6 (NM_016252.1,10842-10860).
ctgctttagccacatttct

SEQ ID NO: 232902 - DNA, 19 bp, Homo sapiens
  siRNA target sequence for BIRC6 (NM_016252.1,10871-10889).
gcattgcccagtcaataga

SEQ ID NO: 232903 - DNA, 19 bp, Homo sapiens
  siRNA target sequence for BIRC6 (NM_016252.1,10876-10894).
gcccagtcaatagatattt

SEQ ID NO: 232904 - DNA, 19 bp, Homo sapiens
  siRNA target sequence for BIRC6 (NM_016252.1,10918-10936).
catgtcccacaacaatgta

SEQ ID NO: 232905 - DNA, 19 bp, Homo sapiens
  siRNA target sequence for BIRC6 (NM_016252.1,10956-10974).
cgacctagttgctcctatt

SEQ ID NO: 232906 - DNA, 19 bp, Homo sapiens
  siRNA target sequence for BIRC6 (NM_016252.1,10960-10978).
ctagttgctcctattctta

SEQ ID NO: 232907 - DNA, 19 bp, Homo sapiens
  siRNA target sequence for BIRC6 (NM_016252.1,10966-10984).
gctcctattcttaggtttt

SEQ ID NO: 232908 - DNA, 19 bp, Homo sapiens
  siRNA target sequence for BIRC6 (NM_016252.1,10993-11011).
gttggcaatagccatatta

SEQ ID NO: 232909 - DNA, 19 bp, Homo sapiens
  siRNA target sequence for BIRC6 (NM_016252.1,10996-11014).
ggcaatagccatattatga

SEQ ID NO: 232910 - DNA, 19 bp, Homo sapiens
  siRNA target sequence for BIRC6 (NM_016252.1,10997-11015).
gcaatagccatattatgaa

SEQ ID NO: 232911 - DNA, 19 bp, Homo sapiens
  siRNA target sequence for BIRC6 (NM_016252.1,10998-11016).
caatagccatattatgaaa

SEQ ID NO: 232912 - DNA, 19 bp, Homo sapiens
  siRNA target sequence for BIRC6 (NM_016252.1,11179-11197).
cagcgcacagcaattgaga

SEQ ID NO: 232913 - DNA, 19 bp, Homo sapiens
  siRNA target sequence for BIRC6 (NM_016252.1,11234-11252).
gccatcctaataatcaaaa

SEQ ID NO: 232914 - DNA, 19 bp, Homo sapiens
  siRNA target sequence for BIRC6 (NM_016252.1,11259-11277).
ggcacaggttctttgtgaa

SEQ ID NO: 232915 - DNA, 19 bp, Homo sapiens
  siRNA target sequence for BIRC6 (NM_016252.1,11325-11343).
catttcagggtttatacga

SEQ ID NO: 232916 - DNA, 19 bp, Homo sapiens
  siRNA target sequence for BIRC6 (NM_016252.1,11332-11350).
gggtttatacgaagattat

SEQ ID NO: 232917 - DNA, 19 bp, Homo sapiens
  siRNA target sequence for BIRC6 (NM_016252.1,11341-11359).
cgaagattatttttacagt

SEQ ID NO: 232918 - DNA, 19 bp, Homo sapiens
  siRNA target sequence for BIRC6 (NM_016252.1,11408-11426).
cactgtacaaaggtagaat

SEQ ID NO: 232919 - DNA, 19 bp, Homo sapiens
  siRNA target sequence for BIRC6 (NM_016252.1,11496-11514).
gccagtctcaacaacatta

SEQ ID NO: 232920 - DNA, 19 bp, Homo sapiens
  siRNA target sequence for BIRC6 (NM_016252.1,11497-11515).
ccagtctcaacaacattat

SEQ ID NO: 232921 - DNA, 19 bp, Homo sapiens
  siRNA target sequence for BIRC6 (NM_016252.1,11502-11520).
ctcaacaacattatcagat

SEQ ID NO: 232922 - DNA, 19 bp, Homo sapiens
  siRNA target sequence for BIRC6 (NM_016252.1,11524-11542).
cttgacagagtgtcagata

SEQ ID NO: 232923 - DNA, 19 bp, Homo sapiens
  siRNA target sequence for BIRC6 (NM_016252.1,11549-11567).
gtatcacagctaaattaat

SEQ ID NO: 232924 - DNA, 19 bp, Homo sapiens
  siRNA target sequence for BIRC6 (NM_016252.1,11555-11573).
cagctaaattaattagtga

SEQ ID NO: 232925 - DNA, 19 bp, Homo sapiens
  siRNA target sequence for BIRC6 (NM_016252.1,11671-11689).
gggctgaagtctcaatcta

SEQ ID NO: 232926 - DNA, 19 bp, Homo sapiens
  siRNA target sequence for BIRC6 (NM_016252.1,11672-11690).
ggctgaagtctcaatctaa

SEQ ID NO: 232927 - DNA, 19 bp, Homo sapiens
  siRNA target sequence for BIRC6 (NM_016252.1,11673-11691).
gctgaagtctcaatctaaa

SEQ ID NO: 232928 - DNA, 19 bp, Homo sapiens
  siRNA target sequence for BIRC6 (NM_016252.1,11676-11694).
gaagtctcaatctaaacgt

SEQ ID NO: 232929 - DNA, 19 bp, Homo sapiens
  siRNA target sequence for BIRC6 (NM_016252.1,11778-11796).
ggctgccaacaaaataatt

SEQ ID NO: 232930 - DNA, 19 bp, Homo sapiens
  siRNA target sequence for BIRC6 (NM_016252.1,11842-11860).
ccattgccagctgaaatga

SEQ ID NO: 232931 - DNA, 19 bp, Homo sapiens
  siRNA target sequence for BIRC6 (NM_016252.1,11883-11901).
cctatatgaccgaaaactt

SEQ ID NO: 232932 - DNA, 19 bp, Homo sapiens
  siRNA target sequence for BIRC6 (NM_016252.1,11907-11925).
gggttaccgctcaatagat

SEQ ID NO: 232933 - DNA, 19 bp, Homo sapiens
  siRNA target sequence for BIRC6 (NM_016252.1,11909-11927).
gttaccgctcaatagatct

SEQ ID NO: 232934 - DNA, 19 bp, Homo sapiens
  siRNA target sequence for BIRC6 (NM_016252.1,11918-11936).
caatagatctgactgttaa

SEQ ID NO: 232935 - DNA, 19 bp, Homo sapiens
  siRNA target sequence for BIRC6 (NM_016252.1,11940-11958).
gggatcaagagttataaca

SEQ ID NO: 232936 - DNA, 19 bp, Homo sapiens
  siRNA target sequence for BIRC6 (NM_016252.1,11957-11975).
cagaccccagtctatcaaa

SEQ ID NO: 232937 - DNA, 19 bp, Homo sapiens
  siRNA target sequence for BIRC6 (NM_016252.1,11961-11979).
ccccagtctatcaaaaaca

SEQ ID NO: 232938 - DNA, 19 bp, Homo sapiens
  siRNA target sequence for BIRC6 (NM_016252.1,11963-11981).
ccagtctatcaaaaacaga

SEQ ID NO: 232939 - DNA, 19 bp, Homo sapiens
  siRNA target sequence for BIRC6 (NM_016252.1,11993-12011).
gactacaccctgaaaaaga

SEQ ID NO: 232940 - DNA, 19 bp, Homo sapiens
  siRNA target sequence for BIRC6 (NM_016252.1,12052-12070).
ctcactccaggtgatgaat

SEQ ID NO: 232941 - DNA, 19 bp, Homo sapiens
  siRNA target sequence for BIRC6 (NM_016252.1,12079-12097).
gggatactggatgaatctt

SEQ ID NO: 232942 - DNA, 19 bp, Homo sapiens
  siRNA target sequence for BIRC6 (NM_016252.1,12113-12131).
caattcagtcaccattaca

SEQ ID NO: 232943 - DNA, 19 bp, Homo sapiens
  siRNA target sequence for BIRC6 (NM_016252.1,12147-12165).
gggtggactggctcttatt

SEQ ID NO: 232944 - DNA, 19 bp, Homo sapiens
  siRNA target sequence for BIRC6 (NM_016252.1,12156-12174).
ggctcttattgctgaaaga

SEQ ID NO: 232945 - DNA, 19 bp, Homo sapiens
  siRNA target sequence for BIRC6 (NM_016252.1,12180-12198).
catgctatatccagaagta

SEQ ID NO: 232946 - DNA, 19 bp, Homo sapiens
  siRNA target sequence for BIRC6 (NM_016252.1,12207-12225).
ggtgagtgctccagttgta

SEQ ID NO: 232947 - DNA, 19 bp, Homo sapiens
  siRNA target sequence for BIRC6 (NM_016252.1,12208-12226).
gtgagtgctccagttgtaa

SEQ ID NO: 232948 - DNA, 19 bp, Homo sapiens
  siRNA target sequence for BIRC6 (NM_016252.1,12210-12228).
gagtgctccagttgtaaca

SEQ ID NO: 232949 - DNA, 19 bp, Homo sapiens
  siRNA target sequence for BIRC6 (NM_016252.1,12248-12266).
cgaaggatagcgatcagtt

SEQ ID NO: 232950 - DNA, 19 bp, Homo sapiens
  siRNA target sequence for BIRC6 (NM_016252.1,12252-12270).
ggatagcgatcagtttgaa

SEQ ID NO: 232951 - DNA, 19 bp, Homo sapiens
  siRNA target sequence for BIRC6 (NM_016252.1,12286-12304).
cagtcaggggagttagttt

SEQ ID NO: 232952 - DNA, 19 bp, Homo sapiens
  siRNA target sequence for BIRC6 (NM_016252.1,12290-12308).
caggggagttagtttatga

SEQ ID NO: 232953 - DNA, 19 bp, Homo sapiens
  siRNA target sequence for BIRC6 (NM_016252.1,12329-12347).
ctgaacctccacctatcaa

SEQ ID NO: 232954 - DNA, 19 bp, Homo sapiens
  siRNA target sequence for BIRC6 (NM_016252.1,12386-12404).
ctttggctgcttttggatt

SEQ ID NO: 232955 - DNA, 19 bp, Homo sapiens
  siRNA target sequence for BIRC6 (NM_016252.1,12458-12476).
cccagtgccttcttcgatt

SEQ ID NO: 232956 - DNA, 19 bp, Homo sapiens
  siRNA target sequence for BIRC6 (NM_016252.1,12462-12480).
gtgccttcttcgattggta

SEQ ID NO: 232957 - DNA, 19 bp, Homo sapiens
  siRNA target sequence for BIRC6 (NM_016252.1,12561-12579).
cgtccttcgtagcttgttt

SEQ ID NO: 232958 - DNA, 19 bp, Homo sapiens
  siRNA target sequence for BIRC6 (NM_016252.1,12562-12580).
gtccttcgtagcttgttta

SEQ ID NO: 232959 - DNA, 19 bp, Homo sapiens
  siRNA target sequence for BIRC6 (NM_016252.1,12565-12583).
cttcgtagcttgtttagca

SEQ ID NO: 232960 - DNA, 19 bp, Homo sapiens
  siRNA target sequence for BIRC6 (NM_016252.1,12620-12638).
ggcggatggcattggaaat

SEQ ID NO: 232961 - DNA, 19 bp, Homo sapiens
  siRNA target sequence for BIRC6 (NM_016252.1,12621-12639).
gcggatggcattggaaatt

SEQ ID NO: 232962 - DNA, 19 bp, Homo sapiens
  siRNA target sequence for BIRC6 (NM_016252.1,12624-12642).
gatggcattggaaattgga

SEQ ID NO: 232963 - DNA, 19 bp, Homo sapiens
  siRNA target sequence for BIRC6 (NM_016252.1,12701-12719).
caaactctagcgtgaatca

SEQ ID NO: 232964 - DNA, 19 bp, Homo sapiens
  siRNA target sequence for BIRC6 (NM_016252.1,12705-12723).
ctctagcgtgaatcaaact

SEQ ID NO: 232965 - DNA, 19 bp, Homo sapiens
  siRNA target sequence for BIRC6 (NM_016252.1,12707-12725).
ctagcgtgaatcaaactga

SEQ ID NO: 232966 - DNA, 19 bp, Homo sapiens
  siRNA target sequence for BIRC6 (NM_016252.1,12741-12759).
ctctcataaccctacatca

SEQ ID NO: 232967 - DNA, 19 bp, Homo sapiens
  siRNA target sequence for BIRC6 (NM_016252.1,12832-12850).
gtggaacaagccttaacta

SEQ ID NO: 232968 - DNA, 19 bp, Homo sapiens
  siRNA target sequence for BIRC6 (NM_016252.1,12892-12910).
gttcttgccagttacataa

SEQ ID NO: 232969 - DNA, 19 bp, Homo sapiens
  siRNA target sequence for BIRC6 (NM_016252.1,12915-12933).
cgtcagtagtgcggtaaat

SEQ ID NO: 232970 - DNA, 19 bp, Homo sapiens
  siRNA target sequence for BIRC6 (NM_016252.1,13035-13053).
gtcatcttatctacgaaat

SEQ ID NO: 232971 - DNA, 19 bp, Homo sapiens
  siRNA target sequence for BIRC6 (NM_016252.1,13037-13055).
catcttatctacgaaatga

SEQ ID NO: 232972 - DNA, 19 bp, Homo sapiens
  siRNA target sequence for BIRC6 (NM_016252.1,13147-13165).
ctattgttgcccctttcta

SEQ ID NO: 232973 - DNA, 19 bp, Homo sapiens
  siRNA target sequence for BIRC6 (NM_016252.1,13192-13210).
cagtcagaatgtcaaactt

SEQ ID NO: 232974 - DNA, 19 bp, Homo sapiens
  siRNA target sequence for BIRC6 (NM_016252.1,13217-13235).
gtacattgttagccaaaat

SEQ ID NO: 232975 - DNA, 19 bp, Homo sapiens
  siRNA target sequence for BIRC6 (NM_016252.1,13220-13238).
cattgttagccaaaatgaa

SEQ ID NO: 232976 - DNA, 19 bp, Homo sapiens
  siRNA target sequence for BIRC6 (NM_016252.1,13239-13257).
gacctgtgttgatacctat

SEQ ID NO: 232977 - DNA, 19 bp, Homo sapiens
  siRNA target sequence for BIRC6 (NM_016252.1,13254-13272).
ctataccaaccgtttaaga

SEQ ID NO: 232978 - DNA, 19 bp, Homo sapiens
  siRNA target sequence for BIRC6 (NM_016252.1,13259-13277).
ccaaccgtttaagatctaa

SEQ ID NO: 232979 - DNA, 19 bp, Homo sapiens
  siRNA target sequence for BIRC6 (NM_016252.1,13394-13412).
ccagtttgcggcaagcaaa

SEQ ID NO: 232980 - DNA, 19 bp, Homo sapiens
  siRNA target sequence for BIRC6 (NM_016252.1,13395-13413).
cagtttgcggcaagcaaat

SEQ ID NO: 232981 - DNA, 19 bp, Homo sapiens
  siRNA target sequence for BIRC6 (NM_016252.1,13397-13415).
gtttgcggcaagcaaatca

SEQ ID NO: 232982 - DNA, 19 bp, Homo sapiens
  siRNA target sequence for BIRC6 (NM_016252.1,13439-13457).
ccaagaaggcggctatgaa

SEQ ID NO: 232983 - DNA, 19 bp, Homo sapiens
  siRNA target sequence for BIRC6 (NM_016252.1,13459-13477).
cccaaacctttgtcagtat

SEQ ID NO: 232984 - DNA, 19 bp, Homo sapiens
  siRNA target sequence for BIRC6 (NM_016252.1,13465-13483).
cctttgtcagtattaaagt

SEQ ID NO: 232985 - DNA, 19 bp, Homo sapiens
  siRNA target sequence for BIRC6 (NM_016252.1,13528-13546).
gatacgtttgaaatggttt

SEQ ID NO: 232986 - DNA, 19 bp, Homo sapiens
  siRNA target sequence for BIRC6 (NM_016252.1,13532-13550).
cgtttgaaatggtttctga

SEQ ID NO: 232987 - DNA, 19 bp, Homo sapiens
  siRNA target sequence for BIRC6 (NM_016252.1,13720-13738).
gatgaggagcgacttgata

SEQ ID NO: 232988 - DNA, 19 bp, Homo sapiens
  siRNA target sequence for BIRC6 (NM_016252.1,13765-13783).
gcggacaccccttatgcaa

SEQ ID NO: 232989 - DNA, 19 bp, Homo sapiens
  siRNA target sequence for BIRC6 (NM_016252.1,13766-13784).
cggacaccccttatgcaaa

SEQ ID NO: 232990 - DNA, 19 bp, Homo sapiens
  siRNA target sequence for BIRC6 (NM_016252.1,13767-13785).
ggacaccccttatgcaaat

SEQ ID NO: 232991 - DNA, 19 bp, Homo sapiens
  siRNA target sequence for BIRC6 (NM_016252.1,13780-13798).
gcaaatggctgctttgagt

SEQ ID NO: 232992 - DNA, 19 bp, Homo sapiens
  siRNA target sequence for BIRC6 (NM_016252.1,13790-13808).
gctttgagtttgatgtgta

SEQ ID NO: 232993 - DNA, 19 bp, Homo sapiens
  siRNA target sequence for BIRC6 (NM_016252.1,13829-13847).
gttcaccccctcttgtgaa

SEQ ID NO: 232994 - DNA, 19 bp, Homo sapiens
  siRNA target sequence for BIRC6 (NM_016252.1,13835-13853).
cccctcttgtgaatctaga

SEQ ID NO: 232995 - DNA, 19 bp, Homo sapiens
  siRNA target sequence for BIRC6 (NM_016252.1,13865-13883).
gtcatagcgtgcgattcaa

SEQ ID NO: 232996 - DNA, 19 bp, Homo sapiens
  siRNA target sequence for BIRC6 (NM_016252.1,13871-13889).
gcgtgcgattcaatccaaa

SEQ ID NO: 232997 - DNA, 19 bp, Homo sapiens
  siRNA target sequence for BIRC6 (NM_016252.1,13875-13893).
gcgattcaatccaaacctt

SEQ ID NO: 232998 - DNA, 19 bp, Homo sapiens
  siRNA target sequence for BIRC6 (NM_016252.1,13876-13894).
cgattcaatccaaaccttt

SEQ ID NO: 232999 - DNA, 19 bp, Homo sapiens
  siRNA target sequence for BIRC6 (NM_016252.1,13908-13926).
ggtttgtttaagcatctta

SEQ ID NO: 233000 - DNA, 19 bp, Homo sapiens
  siRNA target sequence for BIRC6 (NM_016252.1,13995-14013).
gtctgtccagtcccttata

SEQ ID NO: 233001 - DNA, 19 bp, Homo sapiens
  siRNA target sequence for BIRC6 (NM_016252.1,14001-14019).
ccagtcccttatattagta

SEQ ID NO: 233002 - DNA, 19 bp, Homo sapiens
  siRNA target sequence for BIRC6 (NM_016252.1,14078-14096).
cacagagttctcgagaata

SEQ ID NO: 233003 - DNA, 19 bp, Homo sapiens
  siRNA target sequence for BIRC6 (NM_016252.1,14082-14100).
gagttctcgagaatatgat

SEQ ID NO: 233004 - DNA, 19 bp, Homo sapiens
  siRNA target sequence for BIRC6 (NM_016252.1,14127-14145).
gtgggcaatgctagaacaa

SEQ ID NO: 233005 - DNA, 19 bp, Homo sapiens
  siRNA target sequence for BIRC6 (NM_016252.1,14131-14149).
gcaatgctagaacaaatca

SEQ ID NO: 233006 - DNA, 19 bp, Homo sapiens
  siRNA target sequence for BIRC6 (NM_016252.1,14154-14172).
cccttcaccatgttttaaa

SEQ ID NO: 233007 - DNA, 19 bp, Homo sapiens
  siRNA target sequence for BIRC6 (NM_016252.1,14321-14339).
ctcagctccgcgaagagtt

SEQ ID NO: 233008 - DNA, 19 bp, Homo sapiens
  siRNA target sequence for BIRC6 (NM_016252.1,14330-14348).
gcgaagagttgctgaaact

SEQ ID NO: 233009 - DNA, 19 bp, Homo sapiens
  siRNA target sequence for BTRC (NM_003939.2,146-164).
ggcactcaagtttatgaat

SEQ ID NO: 233010 - DNA, 19 bp, Homo sapiens
  siRNA target sequence for BTRC (NM_003939.2,147-165).
gcactcaagtttatgaatt

SEQ ID NO: 233011 - DNA, 19 bp, Homo sapiens
  siRNA target sequence for BTRC (NM_003939.2,195-213).
gaaccccctaggaagataa

SEQ ID NO: 233012 - DNA, 19 bp, Homo sapiens
  siRNA target sequence for BTRC (NM_003939.2,209-227).
gataataccagagaagaat

SEQ ID NO: 233013 - DNA, 19 bp, Homo sapiens
  siRNA target sequence for BTRC (NM_003939.2,229-247).
cacttagacagacatacaa

SEQ ID NO: 233014 - DNA, 19 bp, Homo sapiens
  siRNA target sequence for BTRC (NM_003939.2,231-249).
cttagacagacatacaaca

SEQ ID NO: 233015 - DNA, 19 bp, Homo sapiens
  siRNA target sequence for BTRC (NM_003939.2,261-279).
ctctgcttaaaccaagaaa

SEQ ID NO: 233016 - DNA, 19 bp, Homo sapiens
  siRNA target sequence for BTRC (NM_003939.2,276-294).
gaaacagtatgtttagcaa

SEQ ID NO: 233017 - DNA, 19 bp, Homo sapiens
  siRNA target sequence for BTRC (NM_003939.2,291-309).
gcaagcactgctatgaaga

SEQ ID NO: 233018 - DNA, 19 bp, Homo sapiens
  siRNA target sequence for BTRC (NM_003939.2,319-337).
gtgtggccaaaacaaaact

SEQ ID NO: 233019 - DNA, 19 bp, Homo sapiens
  siRNA target sequence for BTRC (NM_003939.2,346-364).
gcacttccagtatgattgt

SEQ ID NO: 233020 - DNA, 19 bp, Homo sapiens
  siRNA target sequence for BTRC (NM_003939.2,377-395).
gaaactctcagcaagctat

SEQ ID NO: 233021 - DNA, 19 bp, Homo sapiens
  siRNA target sequence for BTRC (NM_003939.2,478-496).
cccaaatgtgtcattacca

SEQ ID NO: 233022 - DNA, 19 bp, Homo sapiens
  siRNA target sequence for BTRC (NM_003939.2,479-497).
ccaaatgtgtcattaccaa

SEQ ID NO: 233023 - DNA, 19 bp, Homo sapiens
  siRNA target sequence for BTRC (NM_003939.2,504-522).
cacataaactcgtatctta

SEQ ID NO: 233024 - DNA, 19 bp, Homo sapiens
  siRNA target sequence for BTRC (NM_003939.2,506-524).
cataaactcgtatcttaaa

SEQ ID NO: 233025 - DNA, 19 bp, Homo sapiens
  siRNA target sequence for BTRC (NM_003939.2,514-532).
cgtatcttaaacctatgtt

SEQ ID NO: 233026 - DNA, 19 bp, Homo sapiens
  siRNA target sequence for BTRC (NM_003939.2,525-543).
cctatgttgcagagagatt

SEQ ID NO: 233027 - DNA, 19 bp, Homo sapiens
  siRNA target sequence for BTRC (NM_003939.2,526-544).
ctatgttgcagagagattt

SEQ ID NO: 233028 - DNA, 19 bp, Homo sapiens
  siRNA target sequence for BTRC (NM_003939.2,605-623).
ggatgccaaatcactatgt

SEQ ID NO: 233029 - DNA, 19 bp, Homo sapiens
  siRNA target sequence for BTRC (NM_003939.2,630-648).
gaacttgtgtgcaaggaat

SEQ ID NO: 233030 - DNA, 19 bp, Homo sapiens
  siRNA target sequence for BTRC (NM_003939.2,748-766).
ggggacagtatttattcaa

SEQ ID NO: 233031 - DNA, 19 bp, Homo sapiens
  siRNA target sequence for BTRC (NM_003939.2,749-767).
gggacagtatttattcaaa

SEQ ID NO: 233032 - DNA, 19 bp, Homo sapiens
  siRNA target sequence for BTRC (NM_003939.2,789-807).
gctcctcccaactcttttt

SEQ ID NO: 233033 - DNA, 19 bp, Homo sapiens
  siRNA target sequence for BTRC (NM_003939.2,813-831).
gcactttatcctaaaatta

SEQ ID NO: 233034 - DNA, 19 bp, Homo sapiens
  siRNA target sequence for BTRC (NM_003939.2,865-883).
gatgtggaagacatagttt

SEQ ID NO: 233035 - DNA, 19 bp, Homo sapiens
  siRNA target sequence for BTRC (NM_003939.2,870-888).
ggaagacatagtttacaga

SEQ ID NO: 233036 - DNA, 19 bp, Homo sapiens
  siRNA target sequence for BTRC (NM_003939.2,899-917).
ccgaagtgaaacaagcaaa

SEQ ID NO: 233037 - DNA, 19 bp, Homo sapiens
  siRNA target sequence for BTRC (NM_003939.2,913-931).
gcaaaggagtttactgttt

SEQ ID NO: 233038 - DNA, 19 bp, Homo sapiens
  siRNA target sequence for BTRC (NM_003939.2,960-978).
ggccttcgagacaacacaa

SEQ ID NO: 233039 - DNA, 19 bp, Homo sapiens
  siRNA target sequence for BTRC (NM_003939.2,961-979).
gccttcgagacaacacaat

SEQ ID NO: 233040 - DNA, 19 bp, Homo sapiens
  siRNA target sequence for BTRC (NM_003939.2,963-981).
cttcgagacaacacaatca

SEQ ID NO: 233041 - DNA, 19 bp, Homo sapiens
  siRNA target sequence for BTRC (NM_003939.2,969-987).
gacaacacaatcaagatct

SEQ ID NO: 233042 - DNA, 19 bp, Homo sapiens
  siRNA target sequence for BTRC (NM_003939.2,1100-1118).
cagagtgtgggatgtaaat

SEQ ID NO: 233043 - DNA, 19 bp, Homo sapiens
  siRNA target sequence for BTRC (NM_003939.2,1138-1156).
cgttgattcaccattgtga

SEQ ID NO: 233044 - DNA, 19 bp, Homo sapiens
  siRNA target sequence for BTRC (NM_003939.2,1166-1184).
gcacttgcgtttcaataat

SEQ ID NO: 233045 - DNA, 19 bp, Homo sapiens
  siRNA target sequence for BTRC (NM_003939.2,1342-1360).
gaactataaaggtatggaa

SEQ ID NO: 233046 - DNA, 19 bp, Homo sapiens
  siRNA target sequence for BTRC (NM_003939.2,1352-1370).
ggtatggaacacaagtact

SEQ ID NO: 233047 - DNA, 19 bp, Homo sapiens
  siRNA target sequence for BTRC (NM_003939.2,1353-1371).
gtatggaacacaagtactt

SEQ ID NO: 233048 - DNA, 19 bp, Homo sapiens
  siRNA target sequence for BTRC (NM_003939.2,1358-1376).
gaacacaagtacttgtgaa

SEQ ID NO: 233049 - DNA, 19 bp, Homo sapiens
  siRNA target sequence for BTRC (NM_003939.2,1449-1467).
ggctcatctgacaacacta

SEQ ID NO: 233050 - DNA, 19 bp, Homo sapiens
  siRNA target sequence for BTRC (NM_003939.2,1456-1474).
ctgacaacactatcagatt

SEQ ID NO: 233051 - DNA, 19 bp, Homo sapiens
  siRNA target sequence for BTRC (NM_003939.2,1458-1476).
gacaacactatcagattat

SEQ ID NO: 233052 - DNA, 19 bp, Homo sapiens
  siRNA target sequence for BTRC (NM_003939.2,1529-1547).
ggtgcgttgtattcgattt

SEQ ID NO: 233053 - DNA, 19 bp, Homo sapiens
  siRNA target sequence for BTRC (NM_003939.2,1537-1555).
gtattcgatttgataacaa

SEQ ID NO: 233054 - DNA, 19 bp, Homo sapiens
  siRNA target sequence for BTRC (NM_003939.2,1662-1680).
gagcattccggaagagttt

SEQ ID NO: 233055 - DNA, 19 bp, Homo sapiens
  siRNA target sequence for BTRC (NM_003939.2,1664-1682).
gcattccggaagagttttt

SEQ ID NO: 233056 - DNA, 19 bp, Homo sapiens
  siRNA target sequence for BTRC (NM_003939.2,1683-1701).
cgactacagtttgatgaat

SEQ ID NO: 233057 - DNA, 19 bp, Homo sapiens
  siRNA target sequence for BTRC (NM_003939.2,1706-1724).
gattgtcagtagttcacat

SEQ ID NO: 233058 - DNA, 19 bp, Homo sapiens
  siRNA target sequence for BTRC (NM_003939.2,1717-1735).
gttcacatgatgacacaat

SEQ ID NO: 233059 - DNA, 19 bp, Homo sapiens
  siRNA target sequence for BTRC (NM_003939.2,1739-1757).
catctgggacttcctaaat

SEQ ID NO: 233060 - DNA, 19 bp, Homo sapiens
  siRNA target sequence for BTRC (NM_033637.2,220-238).
cgctgcgatgcctgtataa

SEQ ID NO: 233061 - DNA, 19 bp, Homo sapiens
  siRNA target sequence for C20orf18 (NM_006462.2,1102-1120).
gggtgcaccttcatcaaca

SEQ ID NO: 233062 - DNA, 19 bp, Homo sapiens
  siRNA target sequence for C20orf18 (NM_006462.2,1466-1484).
cctgccccttcattgacaa

SEQ ID NO: 233063 - DNA, 19 bp, Homo sapiens
  siRNA target sequence for C20orf18 (NM_006462.2,1545-1563).
ggattaccagcgatttcta

SEQ ID NO: 233064 - DNA, 19 bp, Homo sapiens
  siRNA target sequence for C20orf18 (NM_006462.2,1613-1631).
gcaagaccccagattgcaa

SEQ ID NO: 233065 - DNA, 19 bp, Homo sapiens
  siRNA target sequence for CUL1 (NM_003592.2,463-481).
ccaagtccagatatatgga

SEQ ID NO: 233066 - DNA, 19 bp, Homo sapiens
  siRNA target sequence for CUL1 (NM_003592.2,479-497).
ggagctctacactcatgtt

SEQ ID NO: 233067 - DNA, 19 bp, Homo sapiens
  siRNA target sequence for CUL1 (NM_003592.2,480-498).
gagctctacactcatgttt

SEQ ID NO: 233068 - DNA, 19 bp, Homo sapiens
  siRNA target sequence for CUL1 (NM_003592.2,511-529).
ctagtgttcaccagtcaaa

SEQ ID NO: 233069 - DNA, 19 bp, Homo sapiens
  siRNA target sequence for CUL1 (NM_003592.2,544-562).
ctggagttcctccttctaa

SEQ ID NO: 233070 - DNA, 19 bp, Homo sapiens
  siRNA target sequence for CUL1 (NM_003592.2,552-570).
cctccttctaagtcgaaaa

SEQ ID NO: 233071 - DNA, 19 bp, Homo sapiens
  siRNA target sequence for CUL1 (NM_003592.2,600-618).
gttggcctggaattatata

SEQ ID NO: 233072 - DNA, 19 bp, Homo sapiens
  siRNA target sequence for CUL1 (NM_003592.2,605-623).
cctggaattatataaacga

SEQ ID NO: 233073 - DNA, 19 bp, Homo sapiens
  siRNA target sequence for CUL1 (NM_003592.2,624-642).
cttaaggaatttttgaaga

SEQ ID NO: 233074 - DNA, 19 bp, Homo sapiens
  siRNA target sequence for CUL1 (NM_003592.2,650-668).
gacaaatcttcttaaggat

SEQ ID NO: 233075 - DNA, 19 bp, Homo sapiens
  siRNA target sequence for CUL1 (NM_003592.2,683-701).
ggatgagagtgtactgaaa

SEQ ID NO: 233076 - DNA, 19 bp, Homo sapiens
  siRNA target sequence for CUL1 (NM_003592.2,684-702).
gatgagagtgtactgaaat

SEQ ID NO: 233077 - DNA, 19 bp, Homo sapiens
  siRNA target sequence for CUL1 (NM_003592.2,687-705).
gagagtgtactgaaattct

SEQ ID NO: 233078 - DNA, 19 bp, Homo sapiens
  siRNA target sequence for CUL1 (NM_003592.2,714-732).
caatgggaagattatcgat

SEQ ID NO: 233079 - DNA, 19 bp, Homo sapiens
  siRNA target sequence for CUL1 (NM_003592.2,760-778).
gtgcctacctcaatagaca

SEQ ID NO: 233080 - DNA, 19 bp, Homo sapiens
  siRNA target sequence for CUL1 (NM_003592.2,762-780).
gcctacctcaatagacatt

SEQ ID NO: 233081 - DNA, 19 bp, Homo sapiens
  siRNA target sequence for CUL1 (NM_003592.2,781-799).
gggttcgccgtgaatgtga

SEQ ID NO: 233082 - DNA, 19 bp, Homo sapiens
  siRNA target sequence for CUL1 (NM_003592.2,800-818).
cgaaggacgaaaaggaata

SEQ ID NO: 233083 - DNA, 19 bp, Homo sapiens
  siRNA target sequence for CUL1 (NM_003592.2,873-891).
ctgaataaacaggtaacaa

SEQ ID NO: 233084 - DNA, 19 bp, Homo sapiens
  siRNA target sequence for CUL1 (NM_003592.2,884-902).
ggtaacaaatgctgtttta

SEQ ID NO: 233085 - DNA, 19 bp, Homo sapiens
  siRNA target sequence for CUL1 (NM_003592.2,895-913).
ctgttttaaagctgattga

SEQ ID NO: 233086 - DNA, 19 bp, Homo sapiens
  siRNA target sequence for CUL1 (NM_003592.2,934-952).
ccatcaatacaagattgat

SEQ ID NO: 233087 - DNA, 19 bp, Homo sapiens
  siRNA target sequence for CUL1 (NM_003592.2,935-953).
catcaatacaagattgatt

SEQ ID NO: 233088 - DNA, 19 bp, Homo sapiens
  siRNA target sequence for CUL1 (NM_003592.2,1008-1026).
gcaaagggccctacgttaa

SEQ ID NO: 233089 - DNA, 19 bp, Homo sapiens
  siRNA target sequence for CUL1 (NM_003592.2,1016-1034).
ccctacgttaacagtgtat

SEQ ID NO: 233090 - DNA, 19 bp, Homo sapiens
  siRNA target sequence for CUL1 (NM_003592.2,1021-1039).
cgttaacagtgtataaaga

SEQ ID NO: 233091 - DNA, 19 bp, Homo sapiens
  siRNA target sequence for CUL1 (NM_003592.2,1022-1040).
gttaacagtgtataaagaa

SEQ ID NO: 233092 - DNA, 19 bp, Homo sapiens
  siRNA target sequence for CUL1 (NM_003592.2,1061-1079).
ggctgacacagagagattt

SEQ ID NO: 233093 - DNA, 19 bp, Homo sapiens
  siRNA target sequence for CUL1 (NM_003592.2,1063-1081).
ctgacacagagagatttta

SEQ ID NO: 233094 - DNA, 19 bp, Homo sapiens
  siRNA target sequence for CUL1 (NM_003592.2,1087-1105).
gagagagtactgaattctt

SEQ ID NO: 233095 - DNA, 19 bp, Homo sapiens
  siRNA target sequence for CUL1 (NM_003592.2,1106-1124).
gcagcagaacccagttact

SEQ ID NO: 233096 - DNA, 19 bp, Homo sapiens
  siRNA target sequence for CUL1 (NM_003592.2,1112-1130).
gaacccagttactgaatat

SEQ ID NO: 233097 - DNA, 19 bp, Homo sapiens
  siRNA target sequence for CUL1 (NM_003592.2,1176-1194).
caggtttaccttcatgaaa

SEQ ID NO: 233098 - DNA, 19 bp, Homo sapiens
  siRNA target sequence for CUL1 (NM_003592.2,1222-1240).
gtgaacaagtcctcattga

SEQ ID NO: 233099 - DNA, 19 bp, Homo sapiens
  siRNA target sequence for CUL1 (NM_003592.2,1230-1248).
gtcctcattgaaaaacact

SEQ ID NO: 233100 - DNA, 19 bp, Homo sapiens
  siRNA target sequence for CUL1 (NM_003592.2,1302-1320).
gatttgggacgcatgtata

SEQ ID NO: 233101 - DNA, 19 bp, Homo sapiens
  siRNA target sequence for CUL1 (NM_003592.2,1307-1325).
gggacgcatgtataatctt

SEQ ID NO: 233102 - DNA, 19 bp, Homo sapiens
  siRNA target sequence for CUL1 (NM_003592.2,1309-1327).
gacgcatgtataatcttgt

SEQ ID NO: 233103 - DNA, 19 bp, Homo sapiens
  siRNA target sequence for CUL1 (NM_003592.2,1311-1329).
cgcatgtataatcttgtat

SEQ ID NO: 233104 - DNA, 19 bp, Homo sapiens
  siRNA target sequence for CUL1 (NM_003592.2,1341-1359).
gatggcctaggagaattga

SEQ ID NO: 233105 - DNA, 19 bp, Homo sapiens
  siRNA target sequence for CUL1 (NM_003592.2,1350-1368).
ggagaattgaaaaaactgt

SEQ ID NO: 233106 - DNA, 19 bp, Homo sapiens
  siRNA target sequence for CUL1 (NM_003592.2,1426-1444).
ctttaaatgaccccaaaat

SEQ ID NO: 233107 - DNA, 19 bp, Homo sapiens
  siRNA target sequence for CUL1 (NM_003592.2,1541-1559).
ggcttgtggtcgcttcata

SEQ ID NO: 233108 - DNA, 19 bp, Homo sapiens
  siRNA target sequence for CUL1 (NM_003592.2,1542-1560).
gcttgtggtcgcttcataa

SEQ ID NO: 233109 - DNA, 19 bp, Homo sapiens
  siRNA target sequence for CUL1 (NM_003592.2,1543-1561).
cttgtggtcgcttcataaa

SEQ ID NO: 233110 - DNA, 19 bp, Homo sapiens
  siRNA target sequence for CUL1 (NM_003592.2,1546-1564).
gtggtcgcttcataaacaa

SEQ ID NO: 233111 - DNA, 19 bp, Homo sapiens
  siRNA target sequence for CUL1 (NM_003592.2,1548-1566).
ggtcgcttcataaacaaca

SEQ ID NO: 233112 - DNA, 19 bp, Homo sapiens
  siRNA target sequence for CUL1 (NM_003592.2,1583-1601).
ggcccaatcatccagtaaa

SEQ ID NO: 233113 - DNA, 19 bp, Homo sapiens
  siRNA target sequence for CUL1 (NM_003592.2,1610-1628).
gttgctggctcgatactgt

SEQ ID NO: 233114 - DNA, 19 bp, Homo sapiens
  siRNA target sequence for CUL1 (NM_003592.2,1722-1740).
gacaaagacgtatttcaga

SEQ ID NO: 233115 - DNA, 19 bp, Homo sapiens
  siRNA target sequence for CUL1 (NM_003592.2,1730-1748).
cgtatttcagaagttctat

SEQ ID NO: 233116 - DNA, 19 bp, Homo sapiens
  siRNA target sequence for CUL1 (NM_003592.2,1800-1818).
gccgaagccagcatgatct

SEQ ID NO: 233117 - DNA, 19 bp, Homo sapiens
  siRNA target sequence for CUL1 (NM_003592.2,1841-1859).
gttcgagtacacctctaaa

SEQ ID NO: 233118 - DNA, 19 bp, Homo sapiens
  siRNA target sequence for CUL1 (NM_003592.2,1885-1903).
gcgtgagcaaagatctgaa

SEQ ID NO: 233119 - DNA, 19 bp, Homo sapiens
  siRNA target sequence for CUL1 (NM_003592.2,1896-1914).
gatctgaacgagcaattca

SEQ ID NO: 233120 - DNA, 19 bp, Homo sapiens
  siRNA target sequence for CUL1 (NM_003592.2,1899-1917).
ctgaacgagcaattcaaaa

SEQ ID NO: 233121 - DNA, 19 bp, Homo sapiens
  siRNA target sequence for CUL1 (NM_003592.2,1986-2004).
cccttccagcagtcttgta

SEQ ID NO: 233122 - DNA, 19 bp, Homo sapiens
  siRNA target sequence for CUL1 (NM_003592.2,1991-2009).
ccagcagtcttgtacattt

SEQ ID NO: 233123 - DNA, 19 bp, Homo sapiens
  siRNA target sequence for CUL1 (NM_003592.2,2020-2038).
cagagttggaacgtagtta

SEQ ID NO: 233124 - DNA, 19 bp, Homo sapiens
  siRNA target sequence for CUL1 (NM_003592.2,2067-2085).
cgccacagtggccgaaaat

SEQ ID NO: 233125 - DNA, 19 bp, Homo sapiens
  siRNA target sequence for CUL1 (NM_003592.2,2068-2086).
gccacagtggccgaaaatt

SEQ ID NO: 233126 - DNA, 19 bp, Homo sapiens
  siRNA target sequence for CUL1 (NM_003592.2,2079-2097).
cgaaaattgacgtggttat

SEQ ID NO: 233127 - DNA, 19 bp, Homo sapiens
  siRNA target sequence for CUL1 (NM_003592.2,2080-2098).
gaaaattgacgtggttata

SEQ ID NO: 233128 - DNA, 19 bp, Homo sapiens
  siRNA target sequence for CUL1 (NM_003592.2,2092-2110).
ggttatatcagttgtctaa

SEQ ID NO: 233129 - DNA, 19 bp, Homo sapiens
  siRNA target sequence for CUL1 (NM_003592.2,2223-2241).
ctgaccgacagcactcaaa

SEQ ID NO: 233130 - DNA, 19 bp, Homo sapiens
  siRNA target sequence for CUL1 (NM_003592.2,2225-2243).
gaccgacagcactcaaatt

SEQ ID NO: 233131 - DNA, 19 bp, Homo sapiens
  siRNA target sequence for CUL1 (NM_003592.2,2227-2245).
ccgacagcactcaaattaa

SEQ ID NO: 233132 - DNA, 19 bp, Homo sapiens
  siRNA target sequence for CUL1 (NM_003592.2,2228-2246).
cgacagcactcaaattaaa

SEQ ID NO: 233133 - DNA, 19 bp, Homo sapiens
  siRNA target sequence for CUL1 (NM_003592.2,2252-2270).
cattttggcgcaagtttta

SEQ ID NO: 233134 - DNA, 19 bp, Homo sapiens
  siRNA target sequence for CUL1 (NM_003592.2,2258-2276).
ggcgcaagttttacagatt

SEQ ID NO: 233135 - DNA, 19 bp, Homo sapiens
  siRNA target sequence for CUL1 (NM_003592.2,2259-2277).
gcgcaagttttacagattt

SEQ ID NO: 233136 - DNA, 19 bp, Homo sapiens
  siRNA target sequence for CUL1 (NM_003592.2,2260-2278).
cgcaagttttacagatttt

SEQ ID NO: 233137 - DNA, 19 bp, Homo sapiens
  siRNA target sequence for CUL1 (NM_003592.2,2343-2361).
ccagataccttaataaaat

SEQ ID NO: 233138 - DNA, 19 bp, Homo sapiens
  siRNA target sequence for CUL1 (NM_003592.2,2399-2417).
catcaatgtgccaatgaaa

SEQ ID NO: 233139 - DNA, 19 bp, Homo sapiens
  siRNA target sequence for CUL1 (NM_003592.2,2459-2477).
cgaggaagaccgcaaacta

SEQ ID NO: 233140 - DNA, 19 bp, Homo sapiens
  siRNA target sequence for CUL1 (NM_003592.2,2583-2601).
cgagtccctgtgatcaaga

SEQ ID NO: 233141 - DNA, 19 bp, Homo sapiens
  siRNA target sequence for CUL1 (NM_003592.2,2589-2607).
cctgtgatcaagaaatgca

SEQ ID NO: 233142 - DNA, 19 bp, Homo sapiens
  siRNA target sequence for GGCX (NM_000821.2,66-84).
cctcgcccagctcagataa

SEQ ID NO: 233143 - DNA, 19 bp, Homo sapiens
  siRNA target sequence for GGCX (NM_000821.2,67-85).
ctcgcccagctcagataaa

SEQ ID NO: 233144 - DNA, 19 bp, Homo sapiens
  siRNA target sequence for GGCX (NM_000821.2,69-87).
cgcccagctcagataaagt

SEQ ID NO: 233145 - DNA, 19 bp, Homo sapiens
  siRNA target sequence for GGCX (NM_000821.2,70-88).
gcccagctcagataaagta

SEQ ID NO: 233146 - DNA, 19 bp, Homo sapiens
  siRNA target sequence for GGCX (NM_000821.2,76-94).
ctcagataaagtacagaaa

SEQ ID NO: 233147 - DNA, 19 bp, Homo sapiens
  siRNA target sequence for GGCX (NM_000821.2,132-150).
gccgaatagggaaactctt

SEQ ID NO: 233148 - DNA, 19 bp, Homo sapiens
  siRNA target sequence for GGCX (NM_000821.2,256-274).
cttgatggtgctagacatt

SEQ ID NO: 233149 - DNA, 19 bp, Homo sapiens
  siRNA target sequence for GGCX (NM_000821.2,367-385).
gccacttgactggatgtat

SEQ ID NO: 233150 - DNA, 19 bp, Homo sapiens
  siRNA target sequence for GGCX (NM_000821.2,442-460).
ccggataagctgtgtgtta

SEQ ID NO: 233151 - DNA, 19 bp, Homo sapiens
  siRNA target sequence for GGCX (NM_000821.2,443-461).
cggataagctgtgtgttat

SEQ ID NO: 233152 - DNA, 19 bp, Homo sapiens
  siRNA target sequence for GGCX (NM_000821.2,471-489).
catactggtatgtgtttct

SEQ ID NO: 233153 - DNA, 19 bp, Homo sapiens
  siRNA target sequence for GGCX (NM_000821.2,539-557).
gcctttcagctaacattca

SEQ ID NO: 233154 - DNA, 19 bp, Homo sapiens
  siRNA target sequence for GGCX (NM_000821.2,619-637).
cgtgcccctttggaactat

SEQ ID NO: 233155 - DNA, 19 bp, Homo sapiens
  siRNA target sequence for GGCX (NM_000821.2,648-666).
gtggccagatcttcattgt

SEQ ID NO: 233156 - DNA, 19 bp, Homo sapiens
  siRNA target sequence for GGCX (NM_000821.2,705-723).
gggttgaaggctattccat

SEQ ID NO: 233157 - DNA, 19 bp, Homo sapiens
  siRNA target sequence for GGCX (NM_000821.2,745-763).
gctcttcagtcccttcaaa

SEQ ID NO: 233158 - DNA, 19 bp, Homo sapiens
  siRNA target sequence for GGCX (NM_000821.2,1008-1026).
cccgaaggttgcaacaact

SEQ ID NO: 233159 - DNA, 19 bp, Homo sapiens
  siRNA target sequence for GGCX (NM_000821.2,1159-1177).
gctattcctgccctattct

SEQ ID NO: 233160 - DNA, 19 bp, Homo sapiens
  siRNA target sequence for GGCX (NM_000821.2,1224-1242).
gctattcctgggacatgat

SEQ ID NO: 233161 - DNA, 19 bp, Homo sapiens
  siRNA target sequence for GGCX (NM_000821.2,1298-1316).
ggcgaactgggctacctta

SEQ ID NO: 233162 - DNA, 19 bp, Homo sapiens
  siRNA target sequence for GGCX (NM_000821.2,1299-1317).
gcgaactgggctaccttaa

SEQ ID NO: 233163 - DNA, 19 bp, Homo sapiens
  siRNA target sequence for GGCX (NM_000821.2,1393-1411).
ccgcctgcttcccaagtat

SEQ ID NO: 233164 - DNA, 19 bp, Homo sapiens
  siRNA target sequence for GGCX (NM_000821.2,1394-1412).
cgcctgcttcccaagtata

SEQ ID NO: 233165 - DNA, 19 bp, Homo sapiens
  siRNA target sequence for GGCX (NM_000821.2,1395-1413).
gcctgcttcccaagtataa

SEQ ID NO: 233166 - DNA, 19 bp, Homo sapiens
  siRNA target sequence for GGCX (NM_000821.2,1396-1414).
cctgcttcccaagtataat

SEQ ID NO: 233167 - DNA, 19 bp, Homo sapiens
  siRNA target sequence for GGCX (NM_000821.2,1400-1418).
cttcccaagtataatgtca

SEQ ID NO: 233168 - DNA, 19 bp, Homo sapiens
  siRNA target sequence for GGCX (NM_000821.2,1425-1443).
cccagatctactttgatat

SEQ ID NO: 233169 - DNA, 19 bp, Homo sapiens
  siRNA target sequence for GGCX (NM_000821.2,1539-1557).
gggtgcaaccactcttgat

SEQ ID NO: 233170 - DNA, 19 bp, Homo sapiens
  siRNA target sequence for GGCX (NM_000821.2,1569-1587).
cctggagggccaagttaca

SEQ ID NO: 233171 - DNA, 19 bp, Homo sapiens
  siRNA target sequence for GGCX (NM_000821.2,1781-1799).
cctgctggtgagtaccata

SEQ ID NO: 233172 - DNA, 19 bp, Homo sapiens
  siRNA target sequence for GGCX (NM_000821.2,1782-1800).
ctgctggtgagtaccataa

SEQ ID NO: 233173 - DNA, 19 bp, Homo sapiens
  siRNA target sequence for GGCX (NM_000821.2,1785-1803).
ctggtgagtaccataaggt

SEQ ID NO: 233174 - DNA, 19 bp, Homo sapiens
  siRNA target sequence for GGCX (NM_000821.2,1830-1848).
gctacatgtacgtctatgt

SEQ ID NO: 233175 - DNA, 19 bp, Homo sapiens
  siRNA target sequence for GGCX (NM_000821.2,1882-1900).
ggcatatctgcaagaatta

SEQ ID NO: 233176 - DNA, 19 bp, Homo sapiens
  siRNA target sequence for GGCX (NM_000821.2,2002-2020).
ggttcagacctttcttaga

SEQ ID NO: 233177 - DNA, 19 bp, Homo sapiens
  siRNA target sequence for GGCX (NM_000821.2,2053-2071).
gcgaaatactcctttccat

SEQ ID NO: 233178 - DNA, 19 bp, Homo sapiens
  siRNA target sequence for GGCX (NM_000821.2,2075-2093).
cgattcttccgcttcttgt

SEQ ID NO: 233179 - DNA, 19 bp, Homo sapiens
  siRNA target sequence for GGCX (NM_000821.2,2076-2094).
gattcttccgcttcttgtt

SEQ ID NO: 233180 - DNA, 19 bp, Homo sapiens
  siRNA target sequence for GGCX (NM_000821.2,2095-2113).
gcgaaagctctatgtcttt

SEQ ID NO: 233181 - DNA, 19 bp, Homo sapiens
  siRNA target sequence for GGCX (NM_000821.2,2140-2158).
ctcacttcgaaatctgata

SEQ ID NO: 233182 - DNA, 19 bp, Homo sapiens
  siRNA target sequence for GGCX (NM_000821.2,2142-2160).
cacttcgaaatctgatatt

SEQ ID NO: 233183 - DNA, 19 bp, Homo sapiens
  siRNA target sequence for GGCX (NM_000821.2,2195-2213).
gtgacttatgcaaacttga

SEQ ID NO: 233184 - DNA, 19 bp, Homo sapiens
  siRNA target sequence for GGCX (NM_000821.2,2243-2261).
ccctcaaacacggattctt

SEQ ID NO: 233185 - DNA, 19 bp, Homo sapiens
  siRNA target sequence for GGCX (NM_000821.2,2251-2269).
cacggattcttcacattct

SEQ ID NO: 233186 - DNA, 19 bp, Homo sapiens
  siRNA target sequence for GGCX (NM_000821.2,2253-2271).
cggattcttcacattctaa

SEQ ID NO: 233187 - DNA, 19 bp, Homo sapiens
  siRNA target sequence for GGCX (NM_000821.2,2254-2272).
ggattcttcacattctaat

SEQ ID NO: 233188 - DNA, 19 bp, Homo sapiens
  siRNA target sequence for GGCX (NM_000821.2,2268-2286).
ctaatcctcctgagtcaaa

SEQ ID NO: 233189 - DNA, 19 bp, Homo sapiens
  siRNA target sequence for LIPT1 (NM_015929.2,248-266).
gaattgcttccagttactt

SEQ ID NO: 233190 - DNA, 19 bp, Homo sapiens
  siRNA target sequence for LIPT1 (NM_015929.2,283-301).
cagcagctggctttaaaaa

SEQ ID NO: 233191 - DNA, 19 bp, Homo sapiens
  siRNA target sequence for LIPT1 (NM_015929.2,318-336).
ctcattttacagtcaattt

SEQ ID NO: 233192 - DNA, 19 bp, Homo sapiens
  siRNA target sequence for LIPT1 (NM_015929.2,373-391).
ggatccatgaccatatgaa

SEQ ID NO: 233193 - DNA, 19 bp, Homo sapiens
  siRNA target sequence for LIPT1 (NM_015929.2,374-392).
gatccatgaccatatgaat

SEQ ID NO: 233194 - DNA, 19 bp, Homo sapiens
  siRNA target sequence for LIPT1 (NM_015929.2,425-443).
gaattctccctctgttgta

SEQ ID NO: 233195 - DNA, 19 bp, Homo sapiens
  siRNA target sequence for LIPT1 (NM_015929.2,441-459).
gtaattggtaggcatcaaa

SEQ ID NO: 233196 - DNA, 19 bp, Homo sapiens
  siRNA target sequence for LIPT1 (NM_015929.2,447-465).
ggtaggcatcaaaatcctt

SEQ ID NO: 233197 - DNA, 19 bp, Homo sapiens
  siRNA target sequence for LIPT1 (NM_015929.2,470-488).
ggaatgtaacctgaatcta

SEQ ID NO: 233198 - DNA, 19 bp, Homo sapiens
  siRNA target sequence for LIPT1 (NM_015929.2,534-552).
ggaacagtctaccatgata

SEQ ID NO: 233199 - DNA, 19 bp, Homo sapiens
  siRNA target sequence for LIPT1 (NM_015929.2,535-553).
gaacagtctaccatgatat

SEQ ID NO: 233200 - DNA, 19 bp, Homo sapiens
  siRNA target sequence for LIPT1 (NM_015929.2,546-564).
catgatatgggtaatatca

SEQ ID NO: 233201 - DNA, 19 bp, Homo sapiens
  siRNA target sequence for LIPT1 (NM_015929.2,563-581).
caatttgactttctttaca

SEQ ID NO: 233202 - DNA, 19 bp, Homo sapiens
  siRNA target sequence for LIPT1 (NM_015929.2,593-611).
gtatgatagaatggaaaat

SEQ ID NO: 233203 - DNA, 19 bp, Homo sapiens
  siRNA target sequence for LIPT1 (NM_015929.2,660-678).
gtgcaggctaccaaaagat

SEQ ID NO: 233204 - DNA, 19 bp, Homo sapiens
  siRNA target sequence for LIPT1 (NM_015929.2,712-730).
caggaacagcttctaagat

SEQ ID NO: 233205 - DNA, 19 bp, Homo sapiens
  siRNA target sequence for LIPT1 (NM_015929.2,750-768).
caccattgcactttattat

SEQ ID NO: 233206 - DNA, 19 bp, Homo sapiens
  siRNA target sequence for LIPT1 (NM_015929.2,758-776).
cactttattatgtagtact

SEQ ID NO: 233207 - DNA, 19 bp, Homo sapiens
  siRNA target sequence for LIPT1 (NM_015929.2,777-795).
gatgggacgttcttgtctt

SEQ ID NO: 233208 - DNA, 19 bp, Homo sapiens
  siRNA target sequence for LIPT1 (NM_015929.2,780-798).
gggacgttcttgtcttctt

SEQ ID NO: 233209 - DNA, 19 bp, Homo sapiens
  siRNA target sequence for LIPT1 (NM_015929.2,781-799).
ggacgttcttgtcttcttt

SEQ ID NO: 233210 - DNA, 19 bp, Homo sapiens
  siRNA target sequence for LIPT1 (NM_015929.2,830-848).
caatgccactgctagcata

SEQ ID NO: 233211 - DNA, 19 bp, Homo sapiens
  siRNA target sequence for LIPT1 (NM_015929.2,892-910).
cctgtgaagtactaatgaa

SEQ ID NO: 233212 - DNA, 19 bp, Homo sapiens
  siRNA target sequence for LIPT1 (NM_015929.2,931-949).
ctgcttatcatcaaattga

SEQ ID NO: 233213 - DNA, 19 bp, Homo sapiens
  siRNA target sequence for LIPT1 (NM_015929.2,933-951).
gcttatcatcaaattgata

SEQ ID NO: 233214 - DNA, 19 bp, Homo sapiens
  siRNA target sequence for LIPT1 (NM_015929.2,1023-1041).
caaacttgggagtggatat

SEQ ID NO: 233215 - DNA, 19 bp, Homo sapiens
  siRNA target sequence for LIPT1 (NM_015929.2,1044-1062).
ggcaaaactccaaagttta

SEQ ID NO: 233216 - DNA, 19 bp, Homo sapiens
  siRNA target sequence for LIPT1 (NM_015929.2,1046-1064).
caaaactccaaagtttagt

SEQ ID NO: 233217 - DNA, 19 bp, Homo sapiens
  siRNA target sequence for LIPT1 (NM_015929.2,1053-1071).
ccaaagtttagtataaata

SEQ ID NO: 233218 - DNA, 19 bp, Homo sapiens
  siRNA target sequence for LIPT1 (NM_015929.2,1178-1196).
gttgccattggaaatacgt

SEQ ID NO: 233219 - DNA, 19 bp, Homo sapiens
  siRNA target sequence for LIPT1 (NM_015929.2,1229-1247).
gttttgcccaactgaaact

SEQ ID NO: 233220 - DNA, 19 bp, Homo sapiens
  siRNA target sequence for LIPT1 (NM_015929.2,1279-1297).
gtccacaagaccacaaact

SEQ ID NO: 233221 - DNA, 19 bp, Homo sapiens
  siRNA target sequence for MDM2 (NM_002392.1,428-446).
gtctgttggtgcacaaaaa

SEQ ID NO: 233222 - DNA, 19 bp, Homo sapiens
  siRNA target sequence for MDM2 (NM_002392.1,483-501).
ggccagtatattatgacta

SEQ ID NO: 233223 - DNA, 19 bp, Homo sapiens
  siRNA target sequence for MDM2 (NM_002392.1,484-502).
gccagtatattatgactaa

SEQ ID NO: 233224 - DNA, 19 bp, Homo sapiens
  siRNA target sequence for MDM2 (NM_002392.1,488-506).
gtatattatgactaaacga

SEQ ID NO: 233225 - DNA, 19 bp, Homo sapiens
  siRNA target sequence for MDM2 (NM_002392.1,497-515).
gactaaacgattatatgat

SEQ ID NO: 233226 - DNA, 19 bp, Homo sapiens
  siRNA target sequence for MDM2 (NM_002392.1,513-531).
gatgagaagcaacaacata

SEQ ID NO: 233227 - DNA, 19 bp, Homo sapiens
  siRNA target sequence for MDM2 (NM_002392.1,626-644).
gaacttggtagtagtcaat

SEQ ID NO: 233228 - DNA, 19 bp, Homo sapiens
  siRNA target sequence for MDM2 (NM_002392.1,838-856).
ctggtgaacgacaaagaaa

SEQ ID NO: 233229 - DNA, 19 bp, Homo sapiens
  siRNA target sequence for MDM2 (NM_002392.1,858-876).
cgccacaaatctgatagta

SEQ ID NO: 233230 - DNA, 19 bp, Homo sapiens
  siRNA target sequence for MDM2 (NM_002392.1,1069-1087).
ctctcgactcagaagatta

SEQ ID NO: 233231 - DNA, 19 bp, Homo sapiens
  siRNA target sequence for MDM2 (NM_002392.1,1164-1182).
gagagtgatacagattcat

SEQ ID NO: 233232 - DNA, 19 bp, Homo sapiens
  siRNA target sequence for MDM2 (NM_002392.1,1204-1222).
ccttagctgactattggaa

SEQ ID NO: 233233 - DNA, 19 bp, Homo sapiens
  siRNA target sequence for MDM2 (NM_002392.1,1209-1227).
gctgactattggaaatgca

SEQ ID NO: 233234 - DNA, 19 bp, Homo sapiens
  siRNA target sequence for MDM2 (NM_002392.1,1220-1238).
gaaatgcacttcatgcaat

SEQ ID NO: 233235 - DNA, 19 bp, Homo sapiens
  siRNA target sequence for MDM2 (NM_002392.1,1257-1275).
ccatcacattgcaacagat

SEQ ID NO: 233236 - DNA, 19 bp, Homo sapiens
  siRNA target sequence for MDM2 (NM_002392.1,1490-1508).
ctattctcagccatcaact

SEQ ID NO: 233237 - DNA, 19 bp, Homo sapiens
  siRNA target sequence for MDM2 (NM_002392.1,1497-1515).
cagccatcaacttctagta

SEQ ID NO: 233238 - DNA, 19 bp, Homo sapiens
  siRNA target sequence for MDM2 (NM_002392.1,1504-1522).
caacttctagtagcattat

SEQ ID NO: 233239 - DNA, 19 bp, Homo sapiens
  siRNA target sequence for MDM2 (NM_002392.1,1507-1525).
cttctagtagcattattta

SEQ ID NO: 233240 - DNA, 19 bp, Homo sapiens
  siRNA target sequence for MDM2 (NM_002392.1,1578-1596).
gaagagagtgtggaatcta

SEQ ID NO: 233241 - DNA, 19 bp, Homo sapiens
  siRNA target sequence for MDM2 (NM_002392.1,1581-1599).
gagagtgtggaatctagtt

SEQ ID NO: 233242 - DNA, 19 bp, Homo sapiens
  siRNA target sequence for MDM2 (NM_002392.1,1633-1651).
gtcaaggtcgacctaaaaa

SEQ ID NO: 233243 - DNA, 19 bp, Homo sapiens
  siRNA target sequence for MDM2 (NM_002392.1,1638-1656).
ggtcgacctaaaaatggtt

SEQ ID NO: 233244 - DNA, 19 bp, Homo sapiens
  siRNA target sequence for MDM2 (NM_002392.1,1658-1676).
cattgtccatggcaaaaca

SEQ ID NO: 233245 - DNA, 19 bp, Homo sapiens
  siRNA target sequence for MDM2 (NM_002392.1,1669-1687).
gcaaaacaggacatcttat

SEQ ID NO: 233246 - DNA, 19 bp, Homo sapiens
  siRNA target sequence for MDM2 (NM_002392.1,1683-1701).
cttatggcctgctttacat

SEQ ID NO: 233247 - DNA, 19 bp, Homo sapiens
  siRNA target sequence for MDM2 (NM_002392.1,1738-1756).
cagtatgtagacaaccaat

SEQ ID NO: 233248 - DNA, 19 bp, Homo sapiens
  siRNA target sequence for MDM2 (NM_002392.1,1744-1762).
gtagacaaccaattcaaat

SEQ ID NO: 233249 - DNA, 19 bp, Homo sapiens
  siRNA target sequence for MDM2 (NM_006879.1,381-399).
caagagaccctggactatt

SEQ ID NO: 233250 - DNA, 19 bp, Homo sapiens
  siRNA target sequence for MDM2 (NM_006879.1,390-408).
ctggactattggaaatgca

SEQ ID NO: 233251 - DNA, 19 bp, Homo sapiens
  siRNA target sequence for MDM2 (NM_006882.1,560-578).
cctagttgacctgtctata

SEQ ID NO: 233252 - DNA, 19 bp, Homo sapiens
  siRNA target sequence for MDM2 (NM_006882.1,561-579).
ctagttgacctgtctataa

SEQ ID NO: 233253 - DNA, 19 bp, Homo sapiens
  siRNA target sequence for MDM2 (NM_006882.1,567-585).
gacctgtctataagagaat

SEQ ID NO: 233254 - DNA, 19 bp, Homo sapiens
  siRNA target sequence for MDM2 (NM_006882.1,599-617).
ctatataaccctaggaatt

SEQ ID NO: 233255 - DNA, 19 bp, Homo sapiens
  siRNA target sequence for MOCS3 (NM_014484.3,61-79).
cccaacgtgaggaggaatt

SEQ ID NO: 233256 - DNA, 19 bp, Homo sapiens
  siRNA target sequence for MOCS3 (NM_014484.3,63-81).
caacgtgaggaggaattga

SEQ ID NO: 233257 - DNA, 19 bp, Homo sapiens
  siRNA target sequence for MOCS3 (NM_014484.3,259-277).
ggaccgcgtgcgtgctaat

SEQ ID NO: 233258 - DNA, 19 bp, Homo sapiens
  siRNA target sequence for MOCS3 (NM_014484.3,262-280).
ccgcgtgcgtgctaatcgt

SEQ ID NO: 233259 - DNA, 19 bp, Homo sapiens
  siRNA target sequence for MOCS3 (NM_014484.3,301-319).
gtccactagcgcagtactt

SEQ ID NO: 233260 - DNA, 19 bp, Homo sapiens
  siRNA target sequence for MOCS3 (NM_014484.3,521-539).
cctggtccgccgatatgat

SEQ ID NO: 233261 - DNA, 19 bp, Homo sapiens
  siRNA target sequence for MOCS3 (NM_014484.3,568-586).
ccactcgctacctggttaa

SEQ ID NO: 233262 - DNA, 19 bp, Homo sapiens
  siRNA target sequence for MOCS3 (NM_014484.3,571-589).
ctcgctacctggttaatga

SEQ ID NO: 233263 - DNA, 19 bp, Homo sapiens
  siRNA target sequence for MOCS3 (NM_014484.3,636-654).
cgcttcgagggccaaatca

SEQ ID NO: 233264 - DNA, 19 bp, Homo sapiens
  siRNA target sequence for MOCS3 (NM_014484.3,638-656).
cttcgagggccaaatcaca

SEQ ID NO: 233265 - DNA, 19 bp, Homo sapiens
  siRNA target sequence for MOCS3 (NM_014484.3,648-666).
caaatcacagtctaccatt

SEQ ID NO: 233266 - DNA, 19 bp, Homo sapiens
  siRNA target sequence for MOCS3 (NM_014484.3,678-696).
ccttgctatcgctgcatat

SEQ ID NO: 233267 - DNA, 19 bp, Homo sapiens
  siRNA target sequence for MOCS3 (NM_014484.3,679-697).
cttgctatcgctgcatatt

SEQ ID NO: 233268 - DNA, 19 bp, Homo sapiens
  siRNA target sequence for MOCS3 (NM_014484.3,835-853).
gcagcttgttgctctttga

SEQ ID NO: 233269 - DNA, 19 bp, Homo sapiens
  siRNA target sequence for MOCS3 (NM_014484.3,967-985).
gctcctcagccactgataa

SEQ ID NO: 233270 - DNA, 19 bp, Homo sapiens
  siRNA target sequence for MOCS3 (NM_014484.3,988-1006).
gccgctccctgcaactact

SEQ ID NO: 233271 - DNA, 19 bp, Homo sapiens
  siRNA target sequence for MOCS3 (NM_014484.3,1131-1149).
cacatccctctgaaacatt

SEQ ID NO: 233272 - DNA, 19 bp, Homo sapiens
  siRNA target sequence for MOCS3 (NM_014484.3,1164-1182).
gcggagagcctgaaactct

SEQ ID NO: 233273 - DNA, 19 bp, Homo sapiens
  siRNA target sequence for MOCS3 (NM_014484.3,1167-1185).
gagagcctgaaactcttaa

SEQ ID NO: 233274 - DNA, 19 bp, Homo sapiens
  siRNA target sequence for MOCS3 (NM_014484.3,1303-1321).
cagcagctcaagagttaga

SEQ ID NO: 233275 - DNA, 19 bp, Homo sapiens
  siRNA target sequence for MOCS3 (NM_014484.3,1316-1334).
gttagaccctttaacagtt

SEQ ID NO: 233276 - DNA, 19 bp, Homo sapiens
  siRNA target sequence for MOCS3 (NM_014484.3,1360-1378).
cctgggctgccaaaatcga

SEQ ID NO: 233277 - DNA, 19 bp, Homo sapiens
  siRNA target sequence for MOCS3 (NM_014484.3,1369-1387).
ccaaaatcgatggaacatt

SEQ ID NO: 233278 - DNA, 19 bp, Homo sapiens
  siRNA target sequence for PARC (NM_015089.1,242-260).
gtgagcgggcactatctaa

SEQ ID NO: 233279 - DNA, 19 bp, Homo sapiens
  siRNA target sequence for PARC (NM_015089.1,508-526).
ctgctcatgcacatgttat

SEQ ID NO: 233280 - DNA, 19 bp, Homo sapiens
  siRNA target sequence for PARC (NM_015089.1,511-529).
ctcatgcacatgttatgca

SEQ ID NO: 233281 - DNA, 19 bp, Homo sapiens
  siRNA target sequence for PARC (NM_015089.1,551-569).
ggagtgcaggcaaaatgct

SEQ ID NO: 233282 - DNA, 19 bp, Homo sapiens
  siRNA target sequence for PARC (NM_015089.1,601-619).
cgggctcacgtccttctat

SEQ ID NO: 233283 - DNA, 19 bp, Homo sapiens
  siRNA target sequence for PARC (NM_015089.1,603-621).
ggctcacgtccttctatca

SEQ ID NO: 233284 - DNA, 19 bp, Homo sapiens
  siRNA target sequence for PARC (NM_015089.1,605-623).
ctcacgtccttctatcact

SEQ ID NO: 233285 - DNA, 19 bp, Homo sapiens
  siRNA target sequence for PARC (NM_015089.1,723-741).
ggcctttgagggcattcat

SEQ ID NO: 233286 - DNA, 19 bp, Homo sapiens
  siRNA target sequence for PARC (NM_015089.1,998-1016).
caacccggtccatctttca

SEQ ID NO: 233287 - DNA, 19 bp, Homo sapiens
  siRNA target sequence for PARC (NM_015089.1,1011-1029).
ctttcagccctacatttca

SEQ ID NO: 233288 - DNA, 19 bp, Homo sapiens
  siRNA target sequence for PARC (NM_015089.1,1090-1108).
cgccagcgctctgaattct

SEQ ID NO: 233289 - DNA, 19 bp, Homo sapiens
  siRNA target sequence for PARC (NM_015089.1,1397-1415).
cctgggactggaatcctat

SEQ ID NO: 233290 - DNA, 19 bp, Homo sapiens
  siRNA target sequence for PARC (NM_015089.1,1401-1419).
ggactggaatcctatggat

SEQ ID NO: 233291 - DNA, 19 bp, Homo sapiens
  siRNA target sequence for PARC (NM_015089.1,1448-1466).
ccgaacctcagaagaatga

SEQ ID NO: 233292 - DNA, 19 bp, Homo sapiens
  siRNA target sequence for PARC (NM_015089.1,1465-1483).
gagagagtgggatatctga

SEQ ID NO: 233293 - DNA, 19 bp, Homo sapiens
  siRNA target sequence for PARC (NM_015089.1,1501-1519).
gagctgcttttctttatca

SEQ ID NO: 233294 - DNA, 19 bp, Homo sapiens
  siRNA target sequence for PARC (NM_015089.1,1535-1553).
gtgagcagcagccaatttt

SEQ ID NO: 233295 - DNA, 19 bp, Homo sapiens
  siRNA target sequence for PARC (NM_015089.1,1647-1665).
ggttctcagtagtcgattt

SEQ ID NO: 233296 - DNA, 19 bp, Homo sapiens
  siRNA target sequence for PARC (NM_015089.1,1713-1731).
gtatgggctgctgtctaat

SEQ ID NO: 233297 - DNA, 19 bp, Homo sapiens
  siRNA target sequence for PARC (NM_015089.1,1745-1763).
cgtctacttcacgaaatca

SEQ ID NO: 233298 - DNA, 19 bp, Homo sapiens
  siRNA target sequence for PARC (NM_015089.1,1845-1863).
ggccgaggcccctaagaca

SEQ ID NO: 233299 - DNA, 19 bp, Homo sapiens
  siRNA target sequence for PARC (NM_015089.1,2307-2325).
cagggagggtggcatctat

SEQ ID NO: 233300 - DNA, 19 bp, Homo sapiens
  siRNA target sequence for PARC (NM_015089.1,2418-2436).
ctcggagatccccactttt

SEQ ID NO: 233301 - DNA, 19 bp, Homo sapiens
  siRNA target sequence for PARC (NM_015089.1,2420-2438).
cggagatccccacttttgt

SEQ ID NO: 233302 - DNA, 19 bp, Homo sapiens
  siRNA target sequence for PARC (NM_015089.1,2422-2440).
gagatccccacttttgtta

SEQ ID NO: 233303 - DNA, 19 bp, Homo sapiens
  siRNA target sequence for PARC (NM_015089.1,2437-2455).
gttactggccgagattcta

SEQ ID NO: 233304 - DNA, 19 bp, Homo sapiens
  siRNA target sequence for PARC (NM_015089.1,2449-2467).
gattctatccactctttgt

SEQ ID NO: 233305 - DNA, 19 bp, Homo sapiens
  siRNA target sequence for PARC (NM_015089.1,2453-2471).
ctatccactctttgtttga

SEQ ID NO: 233306 - DNA, 19 bp, Homo sapiens
  siRNA target sequence for PARC (NM_015089.1,2562-2580).
gatcctgatgctgaatact

SEQ ID NO: 233307 - DNA, 19 bp, Homo sapiens
  siRNA target sequence for PARC (NM_015089.1,2617-2635).
ctgctcaacctacttttgt

SEQ ID NO: 233308 - DNA, 19 bp, Homo sapiens
  siRNA target sequence for PARC (NM_015089.1,2676-2694).
gctgagagacacgttgttt

SEQ ID NO: 233309 - DNA, 19 bp, Homo sapiens
  siRNA target sequence for PARC (NM_015089.1,2738-2756).
cacgcaccatcctcatgat

SEQ ID NO: 233310 - DNA, 19 bp, Homo sapiens
  siRNA target sequence for PARC (NM_015089.1,2838-2856).
gtcccctgagctactgatt

SEQ ID NO: 233311 - DNA, 19 bp, Homo sapiens
  siRNA target sequence for PARC (NM_015089.1,3144-3162).
cagtgactccgagattgtt

SEQ ID NO: 233312 - DNA, 19 bp, Homo sapiens
  siRNA target sequence for PARC (NM_015089.1,3146-3164).
gtgactccgagattgttca

SEQ ID NO: 233313 - DNA, 19 bp, Homo sapiens
  siRNA target sequence for PARC (NM_015089.1,3187-3205).
cgcctggcctcgatgcata

SEQ ID NO: 233314 - DNA, 19 bp, Homo sapiens
  siRNA target sequence for PARC (NM_015089.1,3624-3642).
catgcaccgtggtgttctt

SEQ ID NO: 233315 - DNA, 19 bp, Homo sapiens
  siRNA target sequence for PARC (NM_015089.1,3628-3646).
caccgtggtgttcttgtta

SEQ ID NO: 233316 - DNA, 19 bp, Homo sapiens
  siRNA target sequence for PARC (NM_015089.1,3927-3945).
gctgtgtcgccgaacatgt

SEQ ID NO: 233317 - DNA, 19 bp, Homo sapiens
  siRNA target sequence for PARC (NM_015089.1,3935-3953).
gccgaacatgtctcttcta

SEQ ID NO: 233318 - DNA, 19 bp, Homo sapiens
  siRNA target sequence for PARC (NM_015089.1,3937-3955).
cgaacatgtctcttctaca

SEQ ID NO: 233319 - DNA, 19 bp, Homo sapiens
  siRNA target sequence for PARC (NM_015089.1,4188-4206).
gctgctggatcagtactta

SEQ ID NO: 233320 - DNA, 19 bp, Homo sapiens
  siRNA target sequence for PARC (NM_015089.1,4496-4514).
ctcgttactgtaaactcta

SEQ ID NO: 233321 - DNA, 19 bp, Homo sapiens
  siRNA target sequence for PARC (NM_015089.1,4727-4745).
ggcacctggaacccattat

SEQ ID NO: 233322 - DNA, 19 bp, Homo sapiens
  siRNA target sequence for PARC (NM_015089.1,4772-4790).
caacttttgagcacttcta

SEQ ID NO: 233323 - DNA, 19 bp, Homo sapiens
  siRNA target sequence for PARC (NM_015089.1,4783-4801).
cacttctatcagcattata

SEQ ID NO: 233324 - DNA, 19 bp, Homo sapiens
  siRNA target sequence for PARC (NM_015089.1,4957-4975).
cagcggctcgacaagttgt

SEQ ID NO: 233325 - DNA, 19 bp, Homo sapiens
  siRNA target sequence for PARC (NM_015089.1,4960-4978).
cggctcgacaagttgttct

SEQ ID NO: 233326 - DNA, 19 bp, Homo sapiens
  siRNA target sequence for PARC (NM_015089.1,5072-5090).
caagtccagccatttctat

SEQ ID NO: 233327 - DNA, 19 bp, Homo sapiens
  siRNA target sequence for PARC (NM_015089.1,5075-5093).
gtccagccatttctatact

SEQ ID NO: 233328 - DNA, 19 bp, Homo sapiens
  siRNA target sequence for PARC (NM_015089.1,5188-5206).
cgtttctccagtttctaca

SEQ ID NO: 233329 - DNA, 19 bp, Homo sapiens
  siRNA target sequence for PARC (NM_015089.1,5335-5353).
ctgctgaaattcaatcaga

SEQ ID NO: 233330 - DNA, 19 bp, Homo sapiens
  siRNA target sequence for PARC (NM_015089.1,5558-5576).
catacctgaacgtagagaa

SEQ ID NO: 233331 - DNA, 19 bp, Homo sapiens
  siRNA target sequence for PARC (NM_015089.1,5585-5603).
gccgaaccctggaacagaa

SEQ ID NO: 233332 - DNA, 19 bp, Homo sapiens
  siRNA target sequence for PARC (NM_015089.1,5618-5636).
gctgtcttcttgttcgtat

SEQ ID NO: 233333 - DNA, 19 bp, Homo sapiens
  siRNA target sequence for PARC (NM_015089.1,5623-5641).
cttcttgttcgtattctca

SEQ ID NO: 233334 - DNA, 19 bp, Homo sapiens
  siRNA target sequence for PARC (NM_015089.1,5700-5718).
ctggcagaagggtccaaat

SEQ ID NO: 233335 - DNA, 19 bp, Homo sapiens
  siRNA target sequence for PARC (NM_015089.1,5757-5775).
ggcctgtaccagtacagat

SEQ ID NO: 233336 - DNA, 19 bp, Homo sapiens
  siRNA target sequence for PARC (NM_015089.1,5889-5907).
ggcagatgtccctttctgt

SEQ ID NO: 233337 - DNA, 19 bp, Homo sapiens
  siRNA target sequence for PARC (NM_015089.1,6001-6019).
gaagtagaagggttgatga

SEQ ID NO: 233338 - DNA, 19 bp, Homo sapiens
  siRNA target sequence for PARC (NM_015089.1,6256-6274).
ctctgctgcatgcactatt

SEQ ID NO: 233339 - DNA, 19 bp, Homo sapiens
  siRNA target sequence for PARC (NM_015089.1,6267-6285).
gcactattgctgtaagtct

SEQ ID NO: 233340 - DNA, 19 bp, Homo sapiens
  siRNA target sequence for PARC (NM_015089.1,6268-6286).
cactattgctgtaagtctt

SEQ ID NO: 233341 - DNA, 19 bp, Homo sapiens
  siRNA target sequence for PARC (NM_015089.1,6601-6619).
gctagctgtggccatatgt

SEQ ID NO: 233342 - DNA, 19 bp, Homo sapiens
  siRNA target sequence for PARC (NM_015089.1,6810-6828).
gccaaatcacaaagactat

SEQ ID NO: 233343 - DNA, 19 bp, Homo sapiens
  siRNA target sequence for PARC (NM_015089.1,6836-6854).
gctctgccatggtaagcaa

SEQ ID NO: 233344 - DNA, 19 bp, Homo sapiens
  siRNA target sequence for PARC (NM_015089.1,6873-6891).
gcggtttcaggactataat

SEQ ID NO: 233345 - DNA, 19 bp, Homo sapiens
  siRNA target sequence for PARC (NM_015089.1,6875-6893).
ggtttcaggactataatga

SEQ ID NO: 233346 - DNA, 19 bp, Homo sapiens
  siRNA target sequence for RNF25 (NM_022453.2,141-159).
ctgaagttgaagtattgga

SEQ ID NO: 233347 - DNA, 19 bp, Homo sapiens
  siRNA target sequence for RNF25 (NM_022453.2,157-175).
ggagtccatctatctagat

SEQ ID NO: 233348 - DNA, 19 bp, Homo sapiens
  siRNA target sequence for RNF25 (NM_022453.2,160-178).
gtccatctatctagatgaa

SEQ ID NO: 233349 - DNA, 19 bp, Homo sapiens
  siRNA target sequence for RNF25 (NM_022453.2,207-225).
cttcaccatgggagatcta

SEQ ID NO: 233350 - DNA, 19 bp, Homo sapiens
  siRNA target sequence for RNF25 (NM_022453.2,212-230).
ccatgggagatctacatca

SEQ ID NO: 233351 - DNA, 19 bp, Homo sapiens
  siRNA target sequence for RNF25 (NM_022453.2,253-271).
ggaccaggattcacagtat

SEQ ID NO: 233352 - DNA, 19 bp, Homo sapiens
  siRNA target sequence for RNF25 (NM_022453.2,257-275).
caggattcacagtatgtct

SEQ ID NO: 233353 - DNA, 19 bp, Homo sapiens
  siRNA target sequence for RNF25 (NM_022453.2,494-512).
gtcatctgcctctatggtt

SEQ ID NO: 233354 - DNA, 19 bp, Homo sapiens
  siRNA target sequence for RNF25 (NM_022453.2,540-558).
caccctgttaccactactt

SEQ ID NO: 233355 - DNA, 19 bp, Homo sapiens
  siRNA target sequence for RNF25 (NM_022453.2,640-658).
gcagcatgctacaaccaaa

SEQ ID NO: 233356 - DNA, 19 bp, Homo sapiens
  siRNA target sequence for RNF25 (NM_022453.2,693-711).
gagagcccctcgtgtatga

SEQ ID NO: 233357 - DNA, 19 bp, Homo sapiens
  siRNA target sequence for RNF25 (NM_022453.2,781-799).
cttgcgccagcaagaagaa

SEQ ID NO: 233358 - DNA, 19 bp, Homo sapiens
  siRNA target sequence for RNF25 (NM_022453.2,855-873).
ctgagcgaaaccgatactt

SEQ ID NO: 233359 - DNA, 19 bp, Homo sapiens
  siRNA target sequence for RNF25 (NM_022453.2,857-875).
gagcgaaaccgatacttca

SEQ ID NO: 233360 - DNA, 19 bp, Homo sapiens
  siRNA target sequence for RNF25 (NM_022453.2,860-878).
cgaaaccgatacttcatca

SEQ ID NO: 233361 - DNA, 19 bp, Homo sapiens
  siRNA target sequence for RNF25 (NM_022453.2,1027-1045).
gcacatatgtgagaagatt

SEQ ID NO: 233362 - DNA, 19 bp, Homo sapiens
  siRNA target sequence for RNF25 (NM_022453.2,1047-1065).
cagggaccaggtcaaatca

SEQ ID NO: 233363 - DNA, 19 bp, Homo sapiens
  siRNA target sequence for RNF25 (NM_022453.2,1056-1074).
ggtcaaatcagcaaaggtt

SEQ ID NO: 233364 - DNA, 19 bp, Homo sapiens
  siRNA target sequence for RNF25 (NM_022453.2,1076-1094).
ggcgaaacccagaaagcta

SEQ ID NO: 233365 - DNA, 19 bp, Homo sapiens
  siRNA target sequence for RNF25 (NM_022453.2,1077-1095).
gcgaaacccagaaagctat

SEQ ID NO: 233366 - DNA, 19 bp, Homo sapiens
  siRNA target sequence for RNF25 (NM_022453.2,1441-1459).
gggcctggaatctaaggat

SEQ ID NO: 233367 - DNA, 19 bp, Homo sapiens
  siRNA target sequence for UBE1 (NM_003334.2,261-279).
cggcagtgaagcagacata

SEQ ID NO: 233368 - DNA, 19 bp, Homo sapiens
  siRNA target sequence for UBE1 (NM_003334.2,296-314).
cccggcagctgtatgtgtt

SEQ ID NO: 233369 - DNA, 19 bp, Homo sapiens
  siRNA target sequence for UBE1 (NM_003334.2,380-398).
gcgtggagatcgctaagaa

SEQ ID NO: 233370 - DNA, 19 bp, Homo sapiens
  siRNA target sequence for UBE1 (NM_003334.2,382-400).
gtggagatcgctaagaaca

SEQ ID NO: 233371 - DNA, 19 bp, Homo sapiens
  siRNA target sequence for UBE1 (NM_003334.2,580-598).
ctcgttgaggacttcctta

SEQ ID NO: 233372 - DNA, 19 bp, Homo sapiens
  siRNA target sequence for UBE1 (NM_003334.2,747-765).
gatcctcacagattccaat

SEQ ID NO: 233373 - DNA, 19 bp, Homo sapiens
  siRNA target sequence for UBE1 (NM_003334.2,774-792).
gccactcagtgctatggtt

SEQ ID NO: 233374 - DNA, 19 bp, Homo sapiens
  siRNA target sequence for UBE1 (NM_003334.2,778-796).
ctcagtgctatggtttcta

SEQ ID NO: 233375 - DNA, 19 bp, Homo sapiens
  siRNA target sequence for UBE1 (NM_003334.2,784-802).
gctatggtttctatggtta

SEQ ID NO: 233376 - DNA, 19 bp, Homo sapiens
  siRNA target sequence for UBE1 (NM_003334.2,841-859).
gcccgacacgggtttgaga

SEQ ID NO: 233377 - DNA, 19 bp, Homo sapiens
  siRNA target sequence for UBE1 (NM_003334.2,934-952).
gtcctgggtccttatacct

SEQ ID NO: 233378 - DNA, 19 bp, Homo sapiens
  siRNA target sequence for UBE1 (NM_003334.2,937-955).
ctgggtccttataccttta

SEQ ID NO: 233379 - DNA, 19 bp, Homo sapiens
  siRNA target sequence for UBE1 (NM_003334.2,940-958).
ggtccttatacctttagca

SEQ ID NO: 233380 - DNA, 19 bp, Homo sapiens
  siRNA target sequence for UBE1 (NM_003334.2,941-959).
gtccttatacctttagcat

SEQ ID NO: 233381 - DNA, 19 bp, Homo sapiens
  siRNA target sequence for UBE1 (NM_003334.2,1007-1025).
gtcaggtcaaagtacctaa

SEQ ID NO: 233382 - DNA, 19 bp, Homo sapiens
  siRNA target sequence for UBE1 (NM_003334.2,1018-1036).
gtacctaagaagattagct

SEQ ID NO: 233383 - DNA, 19 bp, Homo sapiens
  siRNA target sequence for UBE1 (NM_003334.2,1080-1098).
gacggacttcgccaagttt

SEQ ID NO: 233384 - DNA, 19 bp, Homo sapiens
  siRNA target sequence for UBE1 (NM_003334.2,1083-1101).
ggacttcgccaagttttct

SEQ ID NO: 233385 - DNA, 19 bp, Homo sapiens
  siRNA target sequence for UBE1 (NM_003334.2,1244-1262).
cagtgcagcaaaataacct

SEQ ID NO: 233386 - DNA, 19 bp, Homo sapiens
  siRNA target sequence for UBE1 (NM_003334.2,1304-1322).
gggatctggcacccataaa

SEQ ID NO: 233387 - DNA, 19 bp, Homo sapiens
  siRNA target sequence for UBE1 (NM_003334.2,1485-1503).
cgggcaagtggctgtgttt

SEQ ID NO: 233388 - DNA, 19 bp, Homo sapiens
  siRNA target sequence for UBE1 (NM_003334.2,1505-1523).
gctcagacctgcaagagaa

SEQ ID NO: 233389 - DNA, 19 bp, Homo sapiens
  siRNA target sequence for UBE1 (NM_003334.2,1581-1599).
caagaactttgccatgatt

SEQ ID NO: 233390 - DNA, 19 bp, Homo sapiens
  siRNA target sequence for UBE1 (NM_003334.2,1622-1640).
gagaaatcatcgttacaga

SEQ ID NO: 233391 - DNA, 19 bp, Homo sapiens
  siRNA target sequence for UBE1 (NM_003334.2,1861-1879).
gtggatgcccgcatgtaca

SEQ ID NO: 233392 - DNA, 19 bp, Homo sapiens
  siRNA target sequence for UBE1 (NM_003334.2,1969-1987).
ctgacagagtcgtacagtt

SEQ ID NO: 233393 - DNA, 19 bp, Homo sapiens
  siRNA target sequence for UBE1 (NM_003334.2,2018-2036).
ccatctgtaccctgaagaa

SEQ ID NO: 233394 - DNA, 19 bp, Homo sapiens
  siRNA target sequence for UBE1 (NM_003334.2,2276-2294).
cccagtactcgaacaacat

SEQ ID NO: 233395 - DNA, 19 bp, Homo sapiens
  siRNA target sequence for UBE1 (NM_003334.2,2381-2399).
cgctcacctttgatgtcaa

SEQ ID NO: 233396 - DNA, 19 bp, Homo sapiens
  siRNA target sequence for UBE1 (NM_003334.2,2509-2527).
gtgcaggtccccgaattca

SEQ ID NO: 233397 - DNA, 19 bp, Homo sapiens
  siRNA target sequence for UBE1 (NM_003334.2,2539-2557).
ggcgtcaagatccatgttt

SEQ ID NO: 233398 - DNA, 19 bp, Homo sapiens
  siRNA target sequence for UBE1 (NM_003334.2,2541-2559).
cgtcaagatccatgtttct

SEQ ID NO: 233399 - DNA, 19 bp, Homo sapiens
  siRNA target sequence for UBE1 (NM_003334.2,2577-2595).
cgccaatgcctctgttgat

SEQ ID NO: 233400 - DNA, 19 bp, Homo sapiens
  siRNA target sequence for UBE1 (NM_003334.2,2730-2748).
cctccgggcagaaaactat

SEQ ID NO: 233401 - DNA, 19 bp, Homo sapiens
  siRNA target sequence for UBE1 (NM_003334.2,2740-2758).
gaaaactatgacattcctt

SEQ ID NO: 233402 - DNA, 19 bp, Homo sapiens
  siRNA target sequence for UBE1 (NM_003334.2,2881-2899).
cagcttgactcctacaaga

SEQ ID NO: 233403 - DNA, 19 bp, Homo sapiens
  siRNA target sequence for UBE1 (NM_003334.2,2887-2905).
gactcctacaagaatggtt

SEQ ID NO: 233404 - DNA, 19 bp, Homo sapiens
  siRNA target sequence for UBE1 (NM_003334.2,2954-2972).
caccacgtcaccagtacta

SEQ ID NO: 233405 - DNA, 19 bp, Homo sapiens
  siRNA target sequence for UBE1 (NM_003334.2,2956-2974).
ccacgtcaccagtactata

SEQ ID NO: 233406 - DNA, 19 bp, Homo sapiens
  siRNA target sequence for UBE1 (NM_003334.2,2957-2975).
cacgtcaccagtactataa

SEQ ID NO: 233407 - DNA, 19 bp, Homo sapiens
  siRNA target sequence for UBE1 (NM_003334.2,3049-3067).
cagttcctcgactatttta

SEQ ID NO: 233408 - DNA, 19 bp, Homo sapiens
  siRNA target sequence for UBE1 (NM_003334.2,3106-3124).
ggcgtgtccatgctctatt

SEQ ID NO: 233409 - DNA, 19 bp, Homo sapiens
  siRNA target sequence for UBE1 (NM_003334.2,3169-3187).
ccgatgacagagattgtga

SEQ ID NO: 233410 - DNA, 19 bp, Homo sapiens
  siRNA target sequence for UBE1L (NM_003335.2,574-592).
gtgggcaccttgtgtcata

SEQ ID NO: 233411 - DNA, 19 bp, Homo sapiens
  siRNA target sequence for UBE1L (NM_003335.2,578-596).
gcaccttgtgtcataagca

SEQ ID NO: 233412 - DNA, 19 bp, Homo sapiens
  siRNA target sequence for UBE1L (NM_003335.2,579-597).
caccttgtgtcataagcat

SEQ ID NO: 233413 - DNA, 19 bp, Homo sapiens
  siRNA target sequence for UBE1L (NM_003335.2,915-933).
gcgtggtggggctatcact

SEQ ID NO: 233414 - DNA, 19 bp, Homo sapiens
  siRNA target sequence for UBE1L (NM_003335.2,1295-1313).
caatctccaggaagttcat

SEQ ID NO: 233415 - DNA, 19 bp, Homo sapiens
  siRNA target sequence for UBE1L (NM_003335.2,1401-1419).
gagaggcagccgctatgat

SEQ ID NO: 233416 - DNA, 19 bp, Homo sapiens
  siRNA target sequence for UBE1L (NM_003335.2,1410-1428).
ccgctatgatgggcaaatt

SEQ ID NO: 233417 - DNA, 19 bp, Homo sapiens
  siRNA target sequence for UBE1L (NM_003335.2,1442-1460).
ctggttttcaggagaaact

SEQ ID NO: 233418 - DNA, 19 bp, Homo sapiens
  siRNA target sequence for UBE1L (NM_003335.2,1486-1504).
ggcgctggtgccattggtt

SEQ ID NO: 233419 - DNA, 19 bp, Homo sapiens
  siRNA target sequence for UBE1L (NM_003335.2,1502-1520).
gttgtgagctgctcaaagt

SEQ ID NO: 233420 - DNA, 19 bp, Homo sapiens
  siRNA target sequence for UBE1L (NM_003335.2,1505-1523).
gtgagctgctcaaagtctt

SEQ ID NO: 233421 - DNA, 19 bp, Homo sapiens
  siRNA target sequence for UBE1L (NM_003335.2,1676-1694).
gcctgaacccagacttaca

SEQ ID NO: 233422 - DNA, 19 bp, Homo sapiens
  siRNA target sequence for UBE1L (NM_003335.2,1823-1841).
gttgcacccactatctgaa

SEQ ID NO: 233423 - DNA, 19 bp, Homo sapiens
  siRNA target sequence for UBE1L (NM_003335.2,2110-2128).
cagacactcaccttactga

SEQ ID NO: 233424 - DNA, 19 bp, Homo sapiens
  siRNA target sequence for UBE1L (NM_003335.2,2241-2259).
gcacttcccacctaataaa

SEQ ID NO: 233425 - DNA, 19 bp, Homo sapiens
  siRNA target sequence for UBE1L (NM_003335.2,2471-2489).
ccatctttgctagtaatct

SEQ ID NO: 233426 - DNA, 19 bp, Homo sapiens
  siRNA target sequence for UBE1L (NM_003335.2,2576-2594).
ccctgaagcctctgatgtt

SEQ ID NO: 233427 - DNA, 19 bp, Homo sapiens
  siRNA target sequence for UBE1L (NM_003335.2,2577-2595).
cctgaagcctctgatgttt

SEQ ID NO: 233428 - DNA, 19 bp, Homo sapiens
  siRNA target sequence for UBE1L (NM_003335.2,2690-2708).
cccagagcaagcgaattgt

SEQ ID NO: 233429 - DNA, 19 bp, Homo sapiens
  siRNA target sequence for UBE1L (NM_003335.2,2958-2976).
gtcgctgctggctcatctt

SEQ ID NO: 233430 - DNA, 19 bp, Homo sapiens
  siRNA target sequence for UBE1L (NM_003335.2,3038-3056).
ccggatggtcacctgaaaa

SEQ ID NO: 233431 - DNA, 19 bp, Homo sapiens
  siRNA target sequence for C18B11 (NM_152260.1,149-167).
gggcttcgcatcagcaaaa

SEQ ID NO: 233432 - DNA, 19 bp, Homo sapiens
  siRNA target sequence for C18B11 (NM_152260.1,381-399).
ctttgcagaaaccagttat

SEQ ID NO: 233433 - DNA, 19 bp, Homo sapiens
  siRNA target sequence for C18B11 (NM_152260.1,776-794).
gcaaggagcaccaactcaa

SEQ ID NO: 233434 - DNA, 19 bp, Homo sapiens
  siRNA target sequence for C18B11 (NM_152260.1,830-848).
cctcaggggtgcttatgtt

SEQ ID NO: 233435 - DNA, 19 bp, Homo sapiens
  siRNA target sequence for C18B11 (NM_152260.1,831-849).
ctcaggggtgcttatgttt

SEQ ID NO: 233436 - DNA, 19 bp, Homo sapiens
  siRNA target sequence for C18B11 (NM_152260.1,863-881).
cagtctctgagagaattca

SEQ ID NO: 233437 - DNA, 19 bp, Homo sapiens
  siRNA target sequence for C18B11 (NM_152260.1,960-978).
ctgtaaagaacccatctta

SEQ ID NO: 233438 - DNA, 19 bp, Homo sapiens
  siRNA target sequence for C18B11 (NM_152260.1,962-980).
gtaaagaacccatcttagt

SEQ ID NO: 233439 - DNA, 19 bp, Homo sapiens
  siRNA target sequence for C18B11 (NM_152260.1,971-989).
ccatcttagtggtgtctta

SEQ ID NO: 233440 - DNA, 19 bp, Homo sapiens
  siRNA target sequence for C18B11 (NM_152260.1,1044-1062).
ccagaggctaagctacaat

SEQ ID NO: 233441 - DNA, 19 bp, Homo sapiens
  siRNA target sequence for C18B11 (NM_152260.1,1150-1168).
ctcaacgaccccatctaca

SEQ ID NO: 233442 - DNA, 19 bp, Homo sapiens
  siRNA target sequence for C18B11 (NM_152260.1,1532-1550).
cccaagaccttgtgatgtt

SEQ ID NO: 233443 - DNA, 19 bp, Homo sapiens
  siRNA target sequence for C18B11 (NM_152260.1,1575-1593).
gccaggctttgagtacttt

SEQ ID NO: 233444 - DNA, 19 bp, Homo sapiens
  siRNA target sequence for C18B11 (NM_152260.1,1576-1594).
ccaggctttgagtactttt

SEQ ID NO: 233445 - DNA, 19 bp, Homo sapiens
  siRNA target sequence for CLONE24922 (NM_015679.1,41-59).
gggcttttcgcggtctata

SEQ ID NO: 233446 - DNA, 19 bp, Homo sapiens
  siRNA target sequence for CLONE24922 (NM_015679.1,42-60).
ggcttttcgcggtctataa

SEQ ID NO: 233447 - DNA, 19 bp, Homo sapiens
  siRNA target sequence for CLONE24922 (NM_015679.1,133-151).
gaagcctcccgctcctaaa

SEQ ID NO: 233448 - DNA, 19 bp, Homo sapiens
  siRNA target sequence for CLONE24922 (NM_015679.1,219-237).
ccagcgtaccctctttcat

SEQ ID NO: 233449 - DNA, 19 bp, Homo sapiens
  siRNA target sequence for CLONE24922 (NM_015679.1,222-240).
gcgtaccctctttcatcaa

SEQ ID NO: 233450 - DNA, 19 bp, Homo sapiens
  siRNA target sequence for CLONE24922 (NM_015679.1,261-279).
cagcattcgcccatctcaa

SEQ ID NO: 233451 - DNA, 19 bp, Homo sapiens
  siRNA target sequence for CLONE24922 (NM_015679.1,351-369).
ggctcctcaccgatatgta

SEQ ID NO: 233452 - DNA, 19 bp, Homo sapiens
  siRNA target sequence for CLONE24922 (NM_015679.1,353-371).
ctcctcaccgatatgtaca

SEQ ID NO: 233453 - DNA, 19 bp, Homo sapiens
  siRNA target sequence for CLONE24922 (NM_015679.1,355-373).
cctcaccgatatgtacaat

SEQ ID NO: 233454 - DNA, 19 bp, Homo sapiens
  siRNA target sequence for CLONE24922 (NM_015679.1,375-393).
ctcatcttaccaaggatta

SEQ ID NO: 233455 - DNA, 19 bp, Homo sapiens
  siRNA target sequence for CLONE24922 (NM_015679.1,377-395).
catcttaccaaggattaca

SEQ ID NO: 233456 - DNA, 19 bp, Homo sapiens
  siRNA target sequence for CLONE24922 (NM_015679.1,404-422).
ggcctcctgggcaaagcta

SEQ ID NO: 233457 - DNA, 19 bp, Homo sapiens
  siRNA target sequence for CLONE24922 (NM_015679.1,498-516).
gcattctggccgttatcca

SEQ ID NO: 233458 - DNA, 19 bp, Homo sapiens
  siRNA target sequence for CLONE24922 (NM_015679.1,499-517).
cattctggccgttatccaa

SEQ ID NO: 233459 - DNA, 19 bp, Homo sapiens
  siRNA target sequence for CLONE24922 (NM_015679.1,619-637).
gtccccgatgctgataact

SEQ ID NO: 233460 - DNA, 19 bp, Homo sapiens
  siRNA target sequence for CLONE24922 (NM_015679.1,716-734).
cggaagttggttcatgaaa

SEQ ID NO: 233461 - DNA, 19 bp, Homo sapiens
  siRNA target sequence for CLONE24922 (NM_015679.1,731-749).
gaaatcggcctggaactaa

SEQ ID NO: 233462 - DNA, 19 bp, Homo sapiens
  siRNA target sequence for FLJ14494 (NM_032795.1,163-181).
cccagaaacgggaacaaga

SEQ ID NO: 233463 - DNA, 19 bp, Homo sapiens
  siRNA target sequence for FLJ14494 (NM_032795.1,218-236).
gcggagagtgcaagaaata

SEQ ID NO: 233464 - DNA, 19 bp, Homo sapiens
  siRNA target sequence for FLJ14494 (NM_032795.1,287-305).
ggcactgacccgaggaatt

SEQ ID NO: 233465 - DNA, 19 bp, Homo sapiens
  siRNA target sequence for FLJ14494 (NM_032795.1,320-338).
gaaccttgtggtcatcaat

SEQ ID NO: 233466 - DNA, 19 bp, Homo sapiens
  siRNA target sequence for FLJ14494 (NM_032795.1,645-663).
cagcaacaccacaagatga

SEQ ID NO: 233467 - DNA, 19 bp, Homo sapiens
  siRNA target sequence for FLJ14494 (NM_032795.1,648-666).
caacaccacaagatgacat

SEQ ID NO: 233468 - DNA, 19 bp, Homo sapiens
  siRNA target sequence for FLJ14494 (NM_032795.1,727-745).
cgcaagttgctgtaactca

SEQ ID NO: 233469 - DNA, 19 bp, Homo sapiens
  siRNA target sequence for FLJ14494 (NM_032795.1,791-809).
ccagcccatcactggaata

SEQ ID NO: 233470 - DNA, 19 bp, Homo sapiens
  siRNA target sequence for FLJ14494 (NM_032795.1,794-812).
gcccatcactggaataaaa

SEQ ID NO: 233471 - DNA, 19 bp, Homo sapiens
  siRNA target sequence for FLJ14494 (NM_032795.1,1068-1086).
caccgcctgcgtttagaga

SEQ ID NO: 233472 - DNA, 19 bp, Homo sapiens
  siRNA target sequence for PUS1 (NM_025215.3,536-554).
gtcgggtcctcacaattca

SEQ ID NO: 233473 - DNA, 19 bp, Homo sapiens
  siRNA target sequence for PUS1 (NM_025215.3,538-556).
cgggtcctcacaattcaaa

SEQ ID NO: 233474 - DNA, 19 bp, Homo sapiens
  siRNA target sequence for PUS1 (NM_025215.3,543-561).
cctcacaattcaaaacaat

SEQ ID NO: 233475 - DNA, 19 bp, Homo sapiens
  siRNA target sequence for PUS1 (NM_025215.3,586-604).
cgtccggtcaggctgtatt

SEQ ID NO: 233476 - DNA, 19 bp, Homo sapiens
  siRNA target sequence for PUS1 (NM_025215.3,589-607).
ccggtcaggctgtattcct

SEQ ID NO: 233477 - DNA, 19 bp, Homo sapiens
  siRNA target sequence for PUS1 (NM_025215.3,594-612).
caggctgtattcctgaaaa

SEQ ID NO: 233478 - DNA, 19 bp, Homo sapiens
  siRNA target sequence for PUS1 (NM_025215.3,597-615).
gctgtattcctgaaaatca

SEQ ID NO: 233479 - DNA, 19 bp, Homo sapiens
  siRNA target sequence for PUS1 (NM_025215.3,1238-1256).
gtgcacttcgagaagtaca

SEQ ID NO: 233480 - DNA, 19 bp, Homo sapiens
  siRNA target sequence for RLUCL (NM_058192.1,839-857).
ctgtgcgtggccctaaaca

SEQ ID NO: 233481 - DNA, 19 bp, Homo sapiens
  siRNA target sequence for TRUB1 (NM_139169.3,86-104).
gtgtcttcgccgtctttga

SEQ ID NO: 233482 - DNA, 19 bp, Homo sapiens
  siRNA target sequence for TRUB1 (NM_139169.3,88-106).
gtcttcgccgtctttgaaa

SEQ ID NO: 233483 - DNA, 19 bp, Homo sapiens
  siRNA target sequence for TRUB1 (NM_139169.3,93-111).
cgccgtctttgaaaacaga

SEQ ID NO: 233484 - DNA, 19 bp, Homo sapiens
  siRNA target sequence for TRUB1 (NM_139169.3,528-546).
ggaaagctactgatacact

SEQ ID NO: 233485 - DNA, 19 bp, Homo sapiens
  siRNA target sequence for TRUB1 (NM_139169.3,529-547).
gaaagctactgatacacta

SEQ ID NO: 233486 - DNA, 19 bp, Homo sapiens
  siRNA target sequence for TRUB1 (NM_139169.3,533-551).
gctactgatacactagatt

SEQ ID NO: 233487 - DNA, 19 bp, Homo sapiens
  siRNA target sequence for TRUB1 (NM_139169.3,552-570).
ctacggggagggtaacaga

SEQ ID NO: 233488 - DNA, 19 bp, Homo sapiens
  siRNA target sequence for TRUB1 (NM_139169.3,579-597).
cttacgataaaataacaca

SEQ ID NO: 233489 - DNA, 19 bp, Homo sapiens
  siRNA target sequence for TRUB1 (NM_139169.3,583-601).
cgataaaataacacaagaa

SEQ ID NO: 233490 - DNA, 19 bp, Homo sapiens
  siRNA target sequence for TRUB1 (NM_139169.3,608-626).
gaaggcattctacagaaat

SEQ ID NO: 233491 - DNA, 19 bp, Homo sapiens
  siRNA target sequence for TRUB1 (NM_139169.3,656-674).
ctctattctgcattaaaga

SEQ ID NO: 233492 - DNA, 19 bp, Homo sapiens
  siRNA target sequence for TRUB1 (NM_139169.3,734-752).
gccaggccagtgactgtat

SEQ ID NO: 233493 - DNA, 19 bp, Homo sapiens
  siRNA target sequence for TRUB1 (NM_139169.3,739-757).
gccagtgactgtatacagt

SEQ ID NO: 233494 - DNA, 19 bp, Homo sapiens
  siRNA target sequence for TRUB1 (NM_139169.3,754-772).
cagtatctcccttcaaaaa

SEQ ID NO: 233495 - DNA, 19 bp, Homo sapiens
  siRNA target sequence for TRUB1 (NM_139169.3,776-794).
cagccaccatttttcacat

SEQ ID NO: 233496 - DNA, 19 bp, Homo sapiens
  siRNA target sequence for TRUB1 (NM_139169.3,790-808).
cacattagatgttgaatgt

SEQ ID NO: 233497 - DNA, 19 bp, Homo sapiens
  siRNA target sequence for TRUB1 (NM_139169.3,809-827).
ggaggaggtttttatatca

SEQ ID NO: 233498 - DNA, 19 bp, Homo sapiens
  siRNA target sequence for TRUB1 (NM_139169.3,812-830).
ggaggtttttatatcagaa

SEQ ID NO: 233499 - DNA, 19 bp, Homo sapiens
  siRNA target sequence for TRUB1 (NM_139169.3,835-853).
ggtcagtgacattggaaaa

SEQ ID NO: 233500 - DNA, 19 bp, Homo sapiens
  siRNA target sequence for TRUB1 (NM_139169.3,903-921).
gaccatttacgctagaaga

SEQ ID NO: 233501 - DNA, 19 bp, Homo sapiens
  siRNA target sequence for TRUB1 (NM_139169.3,906-924).
catttacgctagaagaaca

SEQ ID NO: 233502 - DNA, 19 bp, Homo sapiens
  siRNA target sequence for TRUB1 (NM_139169.3,1043-1061).
gttttgagctgtgaatata

SEQ ID NO: 233503 - DNA, 19 bp, Homo sapiens
  siRNA target sequence for TRUB1 (NM_139169.3,1048-1066).
gagctgtgaatatataact

SEQ ID NO: 233504 - DNA, 19 bp, Homo sapiens
  siRNA target sequence for TRUB1 (NM_139169.3,1050-1068).
gctgtgaatatataactct

SEQ ID NO: 233505 - DNA, 19 bp, Homo sapiens
  siRNA target sequence for TRUB1 (NM_139169.3,1051-1069).
ctgtgaatatataactcta

SEQ ID NO: 233506 - DNA, 19 bp, Homo sapiens
  siRNA target sequence for ECH1 (NM_001398.1,178-196).
ccagaccacagctatgagt

SEQ ID NO: 233507 - DNA, 19 bp, Homo sapiens
  siRNA target sequence for ECH1 (NM_001398.1,207-225).
gacgtctgcgcagaaacat

SEQ ID NO: 233508 - DNA, 19 bp, Homo sapiens
  siRNA target sequence for ECH1 (NM_001398.1,209-227).
cgtctgcgcagaaacatgt

SEQ ID NO: 233509 - DNA, 19 bp, Homo sapiens
  siRNA target sequence for ECH1 (NM_001398.1,210-228).
gtctgcgcagaaacatgtt

SEQ ID NO: 233510 - DNA, 19 bp, Homo sapiens
  siRNA target sequence for ECH1 (NM_001398.1,295-313).
gtagagtgcttcaacaaga

SEQ ID NO: 233511 - DNA, 19 bp, Homo sapiens
  siRNA target sequence for ECH1 (NM_001398.1,298-316).
gagtgcttcaacaagattt

SEQ ID NO: 233512 - DNA, 19 bp, Homo sapiens
  siRNA target sequence for ECH1 (NM_001398.1,759-777).
ccgggtgttcccagacaaa

SEQ ID NO: 233513 - DNA, 19 bp, Homo sapiens
  siRNA target sequence for ECHS1 (NM_004092.2,152-170).
cgcctcgggtgctaacttt

SEQ ID NO: 233514 - DNA, 19 bp, Homo sapiens
  siRNA target sequence for ECHS1 (NM_004092.2,154-172).
cctcgggtgctaactttga

SEQ ID NO: 233515 - DNA, 19 bp, Homo sapiens
  siRNA target sequence for ECHS1 (NM_004092.2,157-175).
cgggtgctaactttgagta

SEQ ID NO: 233516 - DNA, 19 bp, Homo sapiens
  siRNA target sequence for ECHS1 (NM_004092.2,162-180).
gctaactttgagtacatca

SEQ ID NO: 233517 - DNA, 19 bp, Homo sapiens
  siRNA target sequence for ECHS1 (NM_004092.2,163-181).
ctaactttgagtacatcat

SEQ ID NO: 233518 - DNA, 19 bp, Homo sapiens
  siRNA target sequence for ECHS1 (NM_004092.2,403-421).
gttactccagcaagttctt

SEQ ID NO: 233519 - DNA, 19 bp, Homo sapiens
  siRNA target sequence for ECHS1 (NM_004092.2,504-522).
cttgccatgatgtgtgata

SEQ ID NO: 233520 - DNA, 19 bp, Homo sapiens
  siRNA target sequence for ECHS1 (NM_004092.2,552-570).
gcacagccggagatcttaa

SEQ ID NO: 233521 - DNA, 19 bp, Homo sapiens
  siRNA target sequence for ECHS1 (NM_004092.2,553-571).
cacagccggagatcttaat

SEQ ID NO: 233522 - DNA, 19 bp, Homo sapiens
  siRNA target sequence for ECHS1 (NM_004092.2,557-575).
gccggagatcttaatagga

SEQ ID NO: 233523 - DNA, 19 bp, Homo sapiens
  siRNA target sequence for ECHS1 (NM_004092.2,558-576).
ccggagatcttaataggaa

SEQ ID NO: 233524 - DNA, 19 bp, Homo sapiens
  siRNA target sequence for ECHS1 (NM_004092.2,842-860).
gttggagaagaaactcttt

SEQ ID NO: 233525 - DNA, 19 bp, Homo sapiens
  siRNA target sequence for ECHS1 (NM_004092.2,902-920).
cgcgtttgtggaaaagaga

SEQ ID NO: 233526 - DNA, 19 bp, Homo sapiens
  siRNA target sequence for UROS (NM_000375.1,237-255).
gtggccaggatccgtatat

SEQ ID NO: 233527 - DNA, 19 bp, Homo sapiens
  siRNA target sequence for UROS (NM_000375.1,296-314).
cctgttttatcgtttgagt

SEQ ID NO: 233528 - DNA, 19 bp, Homo sapiens
  siRNA target sequence for UROS (NM_000375.1,365-383).
gggggactcatttttacca

SEQ ID NO: 233529 - DNA, 19 bp, Homo sapiens
  siRNA target sequence for UROS (NM_000375.1,398-416).
gaagcagcagagttatgtt

SEQ ID NO: 233530 - DNA, 19 bp, Homo sapiens
  siRNA target sequence for UROS (NM_000375.1,418-436).
ggagcaaaacaataaaact

SEQ ID NO: 233531 - DNA, 19 bp, Homo sapiens
  siRNA target sequence for UROS (NM_000375.1,506-524).
gcttctctagtgagtaaaa

SEQ ID NO: 233532 - DNA, 19 bp, Homo sapiens
  siRNA target sequence for UROS (NM_000375.1,600-618).
cagcactgcctcttctatt

SEQ ID NO: 233533 - DNA, 19 bp, Homo sapiens
  siRNA target sequence for UROS (NM_000375.1,786-804).
gtccctctggcctcacata

SEQ ID NO: 233534 - DNA, 19 bp, Homo sapiens
  siRNA target sequence for UROS (NM_000375.1,823-841).
ggagttatctggtgacaat

SEQ ID NO: 233535 - DNA, 19 bp, Homo sapiens
  siRNA target sequence for UROS (NM_000375.1,824-842).
gagttatctggtgacaata

SEQ ID NO: 233536 - DNA, 19 bp, Homo sapiens
  siRNA target sequence for UROS (NM_000375.1,833-851).
ggtgacaatatcgatcaaa

SEQ ID NO: 233537 - DNA, 19 bp, Homo sapiens
  siRNA target sequence for UROS (NM_000375.1,834-852).
gtgacaatatcgatcaaat

SEQ ID NO: 233538 - DNA, 19 bp, Homo sapiens
  siRNA target sequence for ALAD (NM_000031.3,181-199).
ctacttccacccactactt

SEQ ID NO: 233539 - DNA, 19 bp, Homo sapiens
  siRNA target sequence for ALAD (NM_000031.3,368-386).
ctacgctgtgtcttgatct

SEQ ID NO: 233540 - DNA, 19 bp, Homo sapiens
  siRNA target sequence for ALAD (NM_000031.3,546-564).
gcgggctcctgagtgaaaa

SEQ ID NO: 233541 - DNA, 19 bp, Homo sapiens
  siRNA target sequence for ALAD (NM_000031.3,733-751).
gagctacagtgccaaattt

SEQ ID NO: 233542 - DNA, 19 bp, Homo sapiens
  siRNA target sequence for ALAD (NM_000031.3,736-754).
ctacagtgccaaatttgct

SEQ ID NO: 233543 - DNA, 19 bp, Homo sapiens
  siRNA target sequence for ALAD (NM_000031.3,775-793).
ccgggatgcagctaagtca

SEQ ID NO: 233544 - DNA, 19 bp, Homo sapiens
  siRNA target sequence for ALAD (NM_000031.3,776-794).
cgggatgcagctaagtcaa

SEQ ID NO: 233545 - DNA, 19 bp, Homo sapiens
  siRNA target sequence for FH (NM_000143.2,159-177).
cgaatggcaagccaaaatt

SEQ ID NO: 233546 - DNA, 19 bp, Homo sapiens
  siRNA target sequence for FH (NM_000143.2,178-196).
ccttccggatagaatatga

SEQ ID NO: 233547 - DNA, 19 bp, Homo sapiens
  siRNA target sequence for FH (NM_000143.2,179-197).
cttccggatagaatatgat

SEQ ID NO: 233548 - DNA, 19 bp, Homo sapiens
  siRNA target sequence for FH (NM_000143.2,195-213).
gatacctttggtgaactaa

SEQ ID NO: 233549 - DNA, 19 bp, Homo sapiens
  siRNA target sequence for FH (NM_000143.2,210-228).
ctaaaggtgccaaatgata

SEQ ID NO: 233550 - DNA, 19 bp, Homo sapiens
  siRNA target sequence for FH (NM_000143.2,215-233).
ggtgccaaatgataagtat

SEQ ID NO: 233551 - DNA, 19 bp, Homo sapiens
  siRNA target sequence for FH (NM_000143.2,216-234).
gtgccaaatgataagtatt

SEQ ID NO: 233552 - DNA, 19 bp, Homo sapiens
  siRNA target sequence for FH (NM_000143.2,240-258).
gcccagaccgtgagatcta

SEQ ID NO: 233553 - DNA, 19 bp, Homo sapiens
  siRNA target sequence for FH (NM_000143.2,251-269).
gagatctacgatgaacttt

SEQ ID NO: 233554 - DNA, 19 bp, Homo sapiens
  siRNA target sequence for FH (NM_000143.2,253-271).
gatctacgatgaactttaa

SEQ ID NO: 233555 - DNA, 19 bp, Homo sapiens
  siRNA target sequence for FH (NM_000143.2,256-274).
ctacgatgaactttaagat

SEQ ID NO: 233556 - DNA, 19 bp, Homo sapiens
  siRNA target sequence for FH (NM_000143.2,296-314).
gccaaccccagttattaaa

SEQ ID NO: 233557 - DNA, 19 bp, Homo sapiens
  siRNA target sequence for FH (NM_000143.2,301-319).
ccccagttattaaagcttt

SEQ ID NO: 233558 - DNA, 19 bp, Homo sapiens
  siRNA target sequence for FH (NM_000143.2,343-361).
ctgaagtaaaccaggatta

SEQ ID NO: 233559 - DNA, 19 bp, Homo sapiens
  siRNA target sequence for FH (NM_000143.2,353-371).
ccaggattatggtcttgat

SEQ ID NO: 233560 - DNA, 19 bp, Homo sapiens
  siRNA target sequence for FH (NM_000143.2,408-426).
gaggtagctgaaggtaaat

SEQ ID NO: 233561 - DNA, 19 bp, Homo sapiens
  siRNA target sequence for FH (NM_000143.2,558-576).
catcccaacgatcatgtta

SEQ ID NO: 233562 - DNA, 19 bp, Homo sapiens
  siRNA target sequence for FH (NM_000143.2,561-579).
cccaacgatcatgttaata

SEQ ID NO: 233563 - DNA, 19 bp, Homo sapiens
  siRNA target sequence for FH (NM_000143.2,562-580).
ccaacgatcatgttaataa

SEQ ID NO: 233564 - DNA, 19 bp, Homo sapiens
  siRNA target sequence for FH (NM_000143.2,585-603).
cagagctcaaatgatactt

SEQ ID NO: 233565 - DNA, 19 bp, Homo sapiens
  siRNA target sequence for FH (NM_000143.2,617-635).
gcacattgctgctgcaata

SEQ ID NO: 233566 - DNA, 19 bp, Homo sapiens
  siRNA target sequence for FH (NM_000143.2,719-737).
caagattggacgtactcat

SEQ ID NO: 233567 - DNA, 19 bp, Homo sapiens
  siRNA target sequence for FH (NM_000143.2,722-740).
gattggacgtactcatact

SEQ ID NO: 233568 - DNA, 19 bp, Homo sapiens
  siRNA target sequence for FH (NM_000143.2,743-761).
ggatgctgttccacttact

SEQ ID NO: 233569 - DNA, 19 bp, Homo sapiens
  siRNA target sequence for FH (NM_000143.2,770-788).
ggaatttagtggttatgtt

SEQ ID NO: 233570 - DNA, 19 bp, Homo sapiens
  siRNA target sequence for FH (NM_000143.2,778-796).
gtggttatgttcaacaagt

SEQ ID NO: 233571 - DNA, 19 bp, Homo sapiens
  siRNA target sequence for FH (NM_000143.2,780-798).
ggttatgttcaacaagtaa

SEQ ID NO: 233572 - DNA, 19 bp, Homo sapiens
  siRNA target sequence for FH (NM_000143.2,867-885).
gttggtacaggtttaaata

SEQ ID NO: 233573 - DNA, 19 bp, Homo sapiens
  siRNA target sequence for FH (NM_000143.2,870-888).
ggtacaggtttaaatacta

SEQ ID NO: 233574 - DNA, 19 bp, Homo sapiens
  siRNA target sequence for FH (NM_000143.2,874-892).
caggtttaaatactagaat

SEQ ID NO: 233575 - DNA, 19 bp, Homo sapiens
  siRNA target sequence for FH (NM_000143.2,1047-1065).
gcaaatgatattcgatttt

SEQ ID NO: 233576 - DNA, 19 bp, Homo sapiens
  siRNA target sequence for FH (NM_000143.2,1524-1542).
gacgaatgggtaaaaccta

SEQ ID NO: 233577 - DNA, 19 bp, Homo sapiens
  siRNA target sequence for CBS (NM_000071.1,441-459).
cccctatggtcagaatcaa

SEQ ID NO: 233578 - DNA, 19 bp, Homo sapiens
  siRNA target sequence for CBS (NM_000071.1,443-461).
cctatggtcagaatcaaca

SEQ ID NO: 233579 - DNA, 19 bp, Homo sapiens
  siRNA target sequence for CBS (NM_000071.1,444-462).
ctatggtcagaatcaacaa

SEQ ID NO: 233580 - DNA, 19 bp, Homo sapiens
  siRNA target sequence for CBS (NM_000071.1,804-822).
ggcggctgaagaacgaaat

SEQ ID NO: 233581 - DNA, 19 bp, Homo sapiens
  siRNA target sequence for CBS (NM_000071.1,814-832).
gaacgaaatccccaattct

SEQ ID NO: 233582 - DNA, 19 bp, Homo sapiens
  siRNA target sequence for CBS (NM_000071.1,1095-1113).
ggatcggctacgacttcat

SEQ ID NO: 233583 - DNA, 19 bp, Homo sapiens
  siRNA target sequence for CBS (NM_000071.1,1778-1796).
gtggtcaccgccattgact

SEQ ID NO: 233584 - DNA, 19 bp, Homo sapiens
  siRNA target sequence for CBS (NM_000071.1,1788-1806).
ccattgacttgctgaactt

SEQ ID NO: 233585 - DNA, 19 bp, Homo sapiens
  siRNA target sequence for TGDS (NM_014305.1,177-195).
cattgcatcacatatgatt

SEQ ID NO: 233586 - DNA, 19 bp, Homo sapiens
  siRNA target sequence for TGDS (NM_014305.1,218-236).
caaactatatgatcataaa

SEQ ID NO: 233587 - DNA, 19 bp, Homo sapiens
  siRNA target sequence for TGDS (NM_014305.1,222-240).
ctatatgatcataaatcta

SEQ ID NO: 233588 - DNA, 19 bp, Homo sapiens
  siRNA target sequence for TGDS (NM_014305.1,255-273).
ctgtgcaagcttgaagaat

SEQ ID NO: 233589 - DNA, 19 bp, Homo sapiens
  siRNA target sequence for TGDS (NM_014305.1,281-299).
ccatttctaacaaacagaa

SEQ ID NO: 233590 - DNA, 19 bp, Homo sapiens
  siRNA target sequence for TGDS (NM_014305.1,315-333).
gggtgacatatgtgattct

SEQ ID NO: 233591 - DNA, 19 bp, Homo sapiens
  siRNA target sequence for TGDS (NM_014305.1,363-381).
gaaaatagatatagtacta

SEQ ID NO: 233592 - DNA, 19 bp, Homo sapiens
  siRNA target sequence for TGDS (NM_014305.1,389-407).
ccgcacaaacacatgtaga

SEQ ID NO: 233593 - DNA, 19 bp, Homo sapiens
  siRNA target sequence for TGDS (NM_014305.1,390-408).
cgcacaaacacatgtagat

SEQ ID NO: 233594 - DNA, 19 bp, Homo sapiens
  siRNA target sequence for TGDS (NM_014305.1,417-435).
cgtacgtgcctttgagttt

SEQ ID NO: 233595 - DNA, 19 bp, Homo sapiens
  siRNA target sequence for TGDS (NM_014305.1,421-439).
cgtgcctttgagtttacct

SEQ ID NO: 233596 - DNA, 19 bp, Homo sapiens
  siRNA target sequence for TGDS (NM_014305.1,426-444).
ctttgagtttacctatgtt

SEQ ID NO: 233597 - DNA, 19 bp, Homo sapiens
  siRNA target sequence for TGDS (NM_014305.1,432-450).
gtttacctatgttaatgtt

SEQ ID NO: 233598 - DNA, 19 bp, Homo sapiens
  siRNA target sequence for TGDS (NM_014305.1,454-472).
ggcactcacgttttggtaa

SEQ ID NO: 233599 - DNA, 19 bp, Homo sapiens
  siRNA target sequence for TGDS (NM_014305.1,468-486).
ggtaagtgctgctcatgaa

SEQ ID NO: 233600 - DNA, 19 bp, Homo sapiens
  siRNA target sequence for TGDS (NM_014305.1,577-595).
cctacaaatccttatgcat

SEQ ID NO: 233601 - DNA, 19 bp, Homo sapiens
  siRNA target sequence for TGDS (NM_014305.1,625-643).
cagtcttactgggaacaat

SEQ ID NO: 233602 - DNA, 19 bp, Homo sapiens
  siRNA target sequence for TGDS (NM_014305.1,627-645).
gtcttactgggaacaatat

SEQ ID NO: 233603 - DNA, 19 bp, Homo sapiens
  siRNA target sequence for TGDS (NM_014305.1,633-651).
ctgggaacaatataagttt

SEQ ID NO: 233604 - DNA, 19 bp, Homo sapiens
  siRNA target sequence for TGDS (NM_014305.1,652-670).
ccagttgtcatcacaagaa

SEQ ID NO: 233605 - DNA, 19 bp, Homo sapiens
  siRNA target sequence for TGDS (NM_014305.1,708-726).
ggttattccaaaatttata

SEQ ID NO: 233606 - DNA, 19 bp, Homo sapiens
  siRNA target sequence for TGDS (NM_014305.1,763-781).
gggtcagggcttcaaacaa

SEQ ID NO: 233607 - DNA, 19 bp, Homo sapiens
  siRNA target sequence for TGDS (NM_014305.1,894-912).
gcttgccaaagaactaata

SEQ ID NO: 233608 - DNA, 19 bp, Homo sapiens
  siRNA target sequence for TGDS (NM_014305.1,918-936).
gatcaaagagaccaattca

SEQ ID NO: 233609 - DNA, 19 bp, Homo sapiens
  siRNA target sequence for TGDS (NM_014305.1,957-975).
ggttgattatgttaatgat

SEQ ID NO: 233610 - DNA, 19 bp, Homo sapiens
  siRNA target sequence for TGDS (NM_014305.1,973-991).
gatagacccaccaatgaca

SEQ ID NO: 233611 - DNA, 19 bp, Homo sapiens
  siRNA target sequence for TGDS (NM_014305.1,980-998).
ccaccaatgacatgagata

SEQ ID NO: 233612 - DNA, 19 bp, Homo sapiens
  siRNA target sequence for TGDS (NM_014305.1,1026-1044).
cttaggatggagacctaaa

SEQ ID NO: 233613 - DNA, 19 bp, Homo sapiens
  siRNA target sequence for GMDS (NM_001500.1,153-171).
gctcatcaccggtatcaca

SEQ ID NO: 233614 - DNA, 19 bp, Homo sapiens
  siRNA target sequence for GMDS (NM_001500.1,216-234).
ctatgaggtccatggaatt

SEQ ID NO: 233615 - DNA, 19 bp, Homo sapiens
  siRNA target sequence for GMDS (NM_001500.1,235-253).
gtacggcggtccagttcat

SEQ ID NO: 233616 - DNA, 19 bp, Homo sapiens
  siRNA target sequence for GMDS (NM_001500.1,238-256).
cggcggtccagttcattta

SEQ ID NO: 233617 - DNA, 19 bp, Homo sapiens
  siRNA target sequence for GMDS (NM_001500.1,239-257).
ggcggtccagttcatttaa

SEQ ID NO: 233618 - DNA, 19 bp, Homo sapiens
  siRNA target sequence for GMDS (NM_001500.1,240-258).
gcggtccagttcatttaat

SEQ ID NO: 233619 - DNA, 19 bp, Homo sapiens
  siRNA target sequence for GMDS (NM_001500.1,265-283).
cgaattgagcatctgtata

SEQ ID NO: 233620 - DNA, 19 bp, Homo sapiens
  siRNA target sequence for GMDS (NM_001500.1,285-303).
gaatccccaggctcacatt

SEQ ID NO: 233621 - DNA, 19 bp, Homo sapiens
  siRNA target sequence for GMDS (NM_001500.1,344-362).
gtacctgccttgtgaagat

SEQ ID NO: 233622 - DNA, 19 bp, Homo sapiens
  siRNA target sequence for GMDS (NM_001500.1,403-421).
gcccagagccacgtcaaaa

SEQ ID NO: 233623 - DNA, 19 bp, Homo sapiens
  siRNA target sequence for GMDS (NM_001500.1,404-422).
cccagagccacgtcaaaat

SEQ ID NO: 233624 - DNA, 19 bp, Homo sapiens
  siRNA target sequence for GMDS (NM_001500.1,467-485).
gcactctacgacttctaga

SEQ ID NO: 233625 - DNA, 19 bp, Homo sapiens
  siRNA target sequence for GMDS (NM_001500.1,468-486).
cactctacgacttctagat

SEQ ID NO: 233626 - DNA, 19 bp, Homo sapiens
  siRNA target sequence for GMDS (NM_001500.1,476-494).
gacttctagatgcagttaa

SEQ ID NO: 233627 - DNA, 19 bp, Homo sapiens
  siRNA target sequence for GMDS (NM_001500.1,481-499).
ctagatgcagttaagactt

SEQ ID NO: 233628 - DNA, 19 bp, Homo sapiens
  siRNA target sequence for GMDS (NM_001500.1,608-626).
cctatggggcagcaaaact

SEQ ID NO: 233629 - DNA, 19 bp, Homo sapiens
  siRNA target sequence for GMDS (NM_001500.1,651-669).
cttccgtgaggcgtataat

SEQ ID NO: 233630 - DNA, 19 bp, Homo sapiens
  siRNA target sequence for GMDS (NM_001500.1,655-673).
cgtgaggcgtataatctct

SEQ ID NO: 233631 - DNA, 19 bp, Homo sapiens
  siRNA target sequence for GMDS (NM_001500.1,656-674).
gtgaggcgtataatctctt

SEQ ID NO: 233632 - DNA, 19 bp, Homo sapiens
  siRNA target sequence for GMDS (NM_001500.1,684-702).
cggcattctcttcaatcat

SEQ ID NO: 233633 - DNA, 19 bp, Homo sapiens
  siRNA target sequence for GMDS (NM_001500.1,746-764).
gccggtcagtagctaagat

SEQ ID NO: 233634 - DNA, 19 bp, Homo sapiens
  siRNA target sequence for GMDS (NM_001500.1,747-765).
ccggtcagtagctaagatt

SEQ ID NO: 233635 - DNA, 19 bp, Homo sapiens
  siRNA target sequence for GMDS (NM_001500.1,748-766).
cggtcagtagctaagattt

SEQ ID NO: 233636 - DNA, 19 bp, Homo sapiens
  siRNA target sequence for GMDS (NM_001500.1,752-770).
cagtagctaagatttacct

SEQ ID NO: 233637 - DNA, 19 bp, Homo sapiens
  siRNA target sequence for GMDS (NM_001500.1,772-790).
ggacaactggaatgtttca

SEQ ID NO: 233638 - DNA, 19 bp, Homo sapiens
  siRNA target sequence for GMDS (NM_001500.1,854-872).
ggttgatgttgcagaatga

SEQ ID NO: 233639 - DNA, 19 bp, Homo sapiens
  siRNA target sequence for GMDS (NM_001500.1,855-873).
gttgatgttgcagaatgat

SEQ ID NO: 233640 - DNA, 19 bp, Homo sapiens
  siRNA target sequence for GMDS (NM_001500.1,874-892).
gagccggaggacttcgtta

SEQ ID NO: 233641 - DNA, 19 bp, Homo sapiens
  siRNA target sequence for GMDS (NM_001500.1,876-894).
gccggaggacttcgttata

SEQ ID NO: 233642 - DNA, 19 bp, Homo sapiens
  siRNA target sequence for GMDS (NM_001500.1,879-897).
ggaggacttcgttatagct

SEQ ID NO: 233643 - DNA, 19 bp, Homo sapiens
  siRNA target sequence for GMDS (NM_001500.1,880-898).
gaggacttcgttatagcta

SEQ ID NO: 233644 - DNA, 19 bp, Homo sapiens
  siRNA target sequence for GMDS (NM_001500.1,899-917).
ctggggaggtccatagtgt

SEQ ID NO: 233645 - DNA, 19 bp, Homo sapiens
  siRNA target sequence for GMDS (NM_001500.1,919-937).
cgggaatttgtcgagaaat

SEQ ID NO: 233646 - DNA, 19 bp, Homo sapiens
  siRNA target sequence for GMDS (NM_001500.1,921-939).
ggaatttgtcgagaaatca

SEQ ID NO: 233647 - DNA, 19 bp, Homo sapiens
  siRNA target sequence for GMDS (NM_001500.1,1028-1046).
ctgtggatctcaagtacta

SEQ ID NO: 233648 - DNA, 19 bp, Homo sapiens
  siRNA target sequence for GMDS (NM_001500.1,1041-1059).
gtactaccggccaactgaa

SEQ ID NO: 233649 - DNA, 19 bp, Homo sapiens
  siRNA target sequence for FLJ31300 (NM_144639.1,240-258).
ctgtacggacacatctaca

SEQ ID NO: 233650 - DNA, 19 bp, Homo sapiens
  siRNA target sequence for FLJ31300 (NM_144639.1,265-283).
ggttttgccccgacattga

SEQ ID NO: 233651 - DNA, 19 bp, Homo sapiens
  siRNA target sequence for FLJ31300 (NM_144639.1,266-284).
gttttgccccgacattgaa

SEQ ID NO: 233652 - DNA, 19 bp, Homo sapiens
  siRNA target sequence for FLJ31300 (NM_144639.1,334-352).
ccgccatcatgcacatgat

SEQ ID NO: 233653 - DNA, 19 bp, Homo sapiens
  siRNA target sequence for FLJ31300 (NM_144639.1,335-353).
cgccatcatgcacatgatt

SEQ ID NO: 233654 - DNA, 19 bp, Homo sapiens
  siRNA target sequence for FLJ31300 (NM_144639.1,336-354).
gccatcatgcacatgatta

SEQ ID NO: 233655 - DNA, 19 bp, Homo sapiens
  siRNA target sequence for FLJ31300 (NM_144639.1,448-466).
ggctgaccatgttctactt

SEQ ID NO: 233656 - DNA, 19 bp, Homo sapiens
  siRNA target sequence for FLJ31300 (NM_144639.1,589-607).
cctcccggacggagtatga

SEQ ID NO: 233657 - DNA, 19 bp, Homo sapiens
  siRNA target sequence for FLJ31300 (NM_144639.1,592-610).
cccggacggagtatgagaa

SEQ ID NO: 233658 - DNA, 19 bp, Homo sapiens
  siRNA target sequence for FLJ31300 (NM_144639.1,618-636).
gccttgggggttacaatgt

SEQ ID NO: 233659 - DNA, 19 bp, Homo sapiens
  siRNA target sequence for FLJ31300 (NM_144639.1,619-637).
ccttgggggttacaatgta

SEQ ID NO: 233660 - DNA, 19 bp, Homo sapiens
  siRNA target sequence for FLJ31300 (NM_144639.1,697-715).
ctgtgctcaccgtgttgaa

SEQ ID NO: 233661 - DNA, 19 bp, Homo sapiens
  siRNA target sequence for FLJ31300 (NM_144639.1,821-839).
ggggtgcatcggtgtgata

SEQ ID NO: 233662 - DNA, 19 bp, Homo sapiens
  siRNA target sequence for FLJ31300 (NM_144639.1,959-977).
gctcagccttggttaccat

SEQ ID NO: 233663 - DNA, 19 bp, Homo sapiens
  siRNA target sequence for FLJ31300 (NM_144639.1,1067-1085).
ctgccacaacccgttcaat

SEQ ID NO: 233664 - DNA, 19 bp, Homo sapiens
  siRNA target sequence for FLJ31300 (NM_144639.1,1141-1159).
ccaaccctgctgtgttcaa

SEQ ID NO: 233665 - DNA, 19 bp, Homo sapiens
  siRNA target sequence for FLJ31300 (NM_144639.1,1213-1231).
ccgaggagaagttcttctt

SEQ ID NO: 233666 - DNA, 19 bp, Homo sapiens
  siRNA target sequence for FLJ31300 (NM_144639.1,1313-1331).
gttccgctacccttcctat

SEQ ID NO: 233667 - DNA, 19 bp, Homo sapiens
  siRNA target sequence for FLJ31300 (NM_144639.1,1699-1717).
gggagacctccaacattta

SEQ ID NO: 233668 - DNA, 19 bp, Homo sapiens
  siRNA target sequence for FLJ31300 (NM_144639.1,1786-1804).
cctgggtcgcccttcacaa

SEQ ID NO: 233669 - DNA, 19 bp, Homo sapiens
  siRNA target sequence for FLJ31300 (NM_144639.1,1819-1837).
gctggggtgaggtgatcaa

SEQ ID NO: 233670 - DNA, 19 bp, Homo sapiens
  siRNA target sequence for PTS (NM_000317.1,130-148).
gcgcgagccaccgattgta

SEQ ID NO: 233671 - DNA, 19 bp, Homo sapiens
  siRNA target sequence for PTS (NM_000317.1,132-150).
gcgagccaccgattgtaca

SEQ ID NO: 233672 - DNA, 19 bp, Homo sapiens
  siRNA target sequence for PTS (NM_000317.1,136-154).
gccaccgattgtacagtaa

SEQ ID NO: 233673 - DNA, 19 bp, Homo sapiens
  siRNA target sequence for PTS (NM_000317.1,137-155).
ccaccgattgtacagtaaa

SEQ ID NO: 233674 - DNA, 19 bp, Homo sapiens
  siRNA target sequence for PTS (NM_000317.1,138-156).
caccgattgtacagtaaat

SEQ ID NO: 233675 - DNA, 19 bp, Homo sapiens
  siRNA target sequence for PTS (NM_000317.1,140-158).
ccgattgtacagtaaattt

SEQ ID NO: 233676 - DNA, 19 bp, Homo sapiens
  siRNA target sequence for PTS (NM_000317.1,189-207).
gggaaatgcaacaatccaa

SEQ ID NO: 233677 - DNA, 19 bp, Homo sapiens
  siRNA target sequence for PTS (NM_000317.1,239-257).
gacagtacatggagagatt

SEQ ID NO: 233678 - DNA, 19 bp, Homo sapiens
  siRNA target sequence for PTS (NM_000317.1,241-259).
cagtacatggagagattga

SEQ ID NO: 233679 - DNA, 19 bp, Homo sapiens
  siRNA target sequence for PTS (NM_000317.1,260-278).
ccctgctacgggaatggtt

SEQ ID NO: 233680 - DNA, 19 bp, Homo sapiens
  siRNA target sequence for PTS (NM_000317.1,261-279).
cctgctacgggaatggtta

SEQ ID NO: 233681 - DNA, 19 bp, Homo sapiens
  siRNA target sequence for PTS (NM_000317.1,262-280).
ctgctacgggaatggttat

SEQ ID NO: 233682 - DNA, 19 bp, Homo sapiens
  siRNA target sequence for PTS (NM_000317.1,264-282).
gctacgggaatggttatga

SEQ ID NO: 233683 - DNA, 19 bp, Homo sapiens
  siRNA target sequence for PTS (NM_000317.1,265-283).
ctacgggaatggttatgaa

SEQ ID NO: 233684 - DNA, 19 bp, Homo sapiens
  siRNA target sequence for PTS (NM_000317.1,324-342).
cagccccttgatcataaga

SEQ ID NO: 233685 - DNA, 19 bp, Homo sapiens
  siRNA target sequence for PTS (NM_000317.1,328-346).
cccttgatcataagaatct

SEQ ID NO: 233686 - DNA, 19 bp, Homo sapiens
  siRNA target sequence for PTS (NM_000317.1,375-393).
gtggtgagcacgactgaaa

SEQ ID NO: 233687 - DNA, 19 bp, Homo sapiens
  siRNA target sequence for PTS (NM_000317.1,377-395).
ggtgagcacgactgaaaat

SEQ ID NO: 233688 - DNA, 19 bp, Homo sapiens
  siRNA target sequence for PTS (NM_000317.1,462-480).
gtatacgaaactgacaata

SEQ ID NO: 233689 - DNA, 19 bp, Homo sapiens
  siRNA target sequence for PTS (NM_000317.1,467-485).
cgaaactgacaataatatt

SEQ ID NO: 233690 - DNA, 19 bp, Homo sapiens
  siRNA target sequence for PTS (NM_000317.1,476-494).
caataatattgtggtttat

SEQ ID NO: 233691 - DNA, 19 bp, Homo sapiens
  siRNA target sequence for ODC-p (NM_052998.2,923-941).
caacccctgtaagcaaatt

SEQ ID NO: 233692 - DNA, 19 bp, Homo sapiens
  siRNA target sequence for ODC-p (NM_052998.2,926-944).
cccctgtaagcaaattgca

SEQ ID NO: 233693 - DNA, 19 bp, Homo sapiens
  siRNA target sequence for ODC-p (NM_052998.2,981-999).
ctgagctttgacaatgaga

SEQ ID NO: 233694 - DNA, 19 bp, Homo sapiens
  siRNA target sequence for ODC-p (NM_052998.2,1097-1115).
gtttggagtgtcactgaaa

SEQ ID NO: 233695 - DNA, 19 bp, Homo sapiens
  siRNA target sequence for ODC-p (NM_052998.2,1121-1139).
cagacacctgcttgaaaat

SEQ ID NO: 233696 - DNA, 19 bp, Homo sapiens
  siRNA target sequence for ODC-p (NM_052998.2,1258-1276).
ccgagctgggtcacaagat

SEQ ID NO: 233697 - DNA, 19 bp, Homo sapiens
  siRNA target sequence for ODC-p (NM_052998.2,1551-1569).
ggcgtgtatgggatcttca

SEQ ID NO: 233698 - DNA, 19 bp, Homo sapiens
  siRNA target sequence for ODC-p (NM_052998.2,1552-1570).
gcgtgtatgggatcttcaa

SEQ ID NO: 233699 - DNA, 19 bp, Homo sapiens
  siRNA target sequence for ODC-p (NM_052998.2,1665-1683).
gcggttgatggctgtgatt

SEQ ID NO: 233700 - DNA, 19 bp, Homo sapiens
  siRNA target sequence for ODC1 (NM_002539.1,538-556).
caaatgtaatgatagcaaa

SEQ ID NO: 233701 - DNA, 19 bp, Homo sapiens
  siRNA target sequence for ODC1 (NM_002539.1,579-597).
ctaccgggacaggatttga

SEQ ID NO: 233702 - DNA, 19 bp, Homo sapiens
  siRNA target sequence for ODC1 (NM_002539.1,600-618).
gtgctagcaagactgaaat

SEQ ID NO: 233703 - DNA, 19 bp, Homo sapiens
  siRNA target sequence for ODC1 (NM_002539.1,603-621).
ctagcaagactgaaataca

SEQ ID NO: 233704 - DNA, 19 bp, Homo sapiens
  siRNA target sequence for ODC1 (NM_002539.1,644-662).
cctccagagaggattatct

SEQ ID NO: 233705 - DNA, 19 bp, Homo sapiens
  siRNA target sequence for ODC1 (NM_002539.1,652-670).
gaggattatctatgcaaat

SEQ ID NO: 233706 - DNA, 19 bp, Homo sapiens
  siRNA target sequence for ODC1 (NM_002539.1,655-673).
gattatctatgcaaatcct

SEQ ID NO: 233707 - DNA, 19 bp, Homo sapiens
  siRNA target sequence for ODC1 (NM_002539.1,661-679).
ctatgcaaatccttgtaaa

SEQ ID NO: 233708 - DNA, 19 bp, Homo sapiens
  siRNA target sequence for ODC1 (NM_002539.1,675-693).
gtaaacaagtatctcaaat

SEQ ID NO: 233709 - DNA, 19 bp, Homo sapiens
  siRNA target sequence for ODC1 (NM_002539.1,680-698).
caagtatctcaaattaagt

SEQ ID NO: 233710 - DNA, 19 bp, Homo sapiens
  siRNA target sequence for ODC1 (NM_002539.1,697-715).
gtatgctgctaataatgga

SEQ ID NO: 233711 - DNA, 19 bp, Homo sapiens
  siRNA target sequence for ODC1 (NM_002539.1,713-731).
ggagtccagatgatgactt

SEQ ID NO: 233712 - DNA, 19 bp, Homo sapiens
  siRNA target sequence for ODC1 (NM_002539.1,714-732).
gagtccagatgatgacttt

SEQ ID NO: 233713 - DNA, 19 bp, Homo sapiens
  siRNA target sequence for ODC1 (NM_002539.1,718-736).
ccagatgatgacttttgat

SEQ ID NO: 233714 - DNA, 19 bp, Homo sapiens
  siRNA target sequence for ODC1 (NM_002539.1,793-811).
gcggattgccactgatgat

SEQ ID NO: 233715 - DNA, 19 bp, Homo sapiens
  siRNA target sequence for ODC1 (NM_002539.1,862-880).
cagcaggctccttttggaa

SEQ ID NO: 233716 - DNA, 19 bp, Homo sapiens
  siRNA target sequence for ODC1 (NM_002539.1,881-899).
cgggcgaaagagctaaata

SEQ ID NO: 233717 - DNA, 19 bp, Homo sapiens
  siRNA target sequence for ODC1 (NM_002539.1,885-903).
cgaaagagctaaatatcga

SEQ ID NO: 233718 - DNA, 19 bp, Homo sapiens
  siRNA target sequence for ODC1 (NM_002539.1,886-904).
gaaagagctaaatatcgat

SEQ ID NO: 233719 - DNA, 19 bp, Homo sapiens
  siRNA target sequence for ODC1 (NM_002539.1,955-973).
cttcgtgcaggcaatctct

SEQ ID NO: 233720 - DNA, 19 bp, Homo sapiens
  siRNA target sequence for ODC1 (NM_002539.1,1006-1024).
ggttggtttcagcatgtat

SEQ ID NO: 233721 - DNA, 19 bp, Homo sapiens
  siRNA target sequence for ODC1 (NM_002539.1,1017-1035).
gcatgtatctgcttgatat

SEQ ID NO: 233722 - DNA, 19 bp, Homo sapiens
  siRNA target sequence for ODC1 (NM_002539.1,1053-1071).
gatctgaggatgtgaaact

SEQ ID NO: 233723 - DNA, 19 bp, Homo sapiens
  siRNA target sequence for ODC1 (NM_002539.1,1082-1100).
gagatcaccggcgtaatca

SEQ ID NO: 233724 - DNA, 19 bp, Homo sapiens
  siRNA target sequence for ODC1 (NM_002539.1,1103-1121).
ccagcgttggacaaatact

SEQ ID NO: 233725 - DNA, 19 bp, Homo sapiens
  siRNA target sequence for ODC1 (NM_002539.1,1104-1122).
cagcgttggacaaatactt

SEQ ID NO: 233726 - DNA, 19 bp, Homo sapiens
  siRNA target sequence for ODC1 (NM_002539.1,1130-1148).
gactctggagtgagaatca

SEQ ID NO: 233727 - DNA, 19 bp, Homo sapiens
  siRNA target sequence for ODC1 (NM_002539.1,1132-1150).
ctctggagtgagaatcata

SEQ ID NO: 233728 - DNA, 19 bp, Homo sapiens
  siRNA target sequence for ODC1 (NM_002539.1,1182-1200).
ctttcacgcttgcagttaa

SEQ ID NO: 233729 - DNA, 19 bp, Homo sapiens
  siRNA target sequence for ODC1 (NM_002539.1,1189-1207).
gcttgcagttaatatcatt

SEQ ID NO: 233730 - DNA, 19 bp, Homo sapiens
  siRNA target sequence for ODC1 (NM_002539.1,1260-1278).
cgagtgagcagacctttat

SEQ ID NO: 233731 - DNA, 19 bp, Homo sapiens
  siRNA target sequence for ODC1 (NM_002539.1,1295-1313).
ggcgtctatggatcattta

SEQ ID NO: 233732 - DNA, 19 bp, Homo sapiens
  siRNA target sequence for ODC1 (NM_002539.1,1296-1314).
gcgtctatggatcatttaa

SEQ ID NO: 233733 - DNA, 19 bp, Homo sapiens
  siRNA target sequence for ODC1 (NM_002539.1,1324-1342).
ctatgaccacgcacatgta

SEQ ID NO: 233734 - DNA, 19 bp, Homo sapiens
  siRNA target sequence for ODC1 (NM_002539.1,1535-1553).
cagaggccgacgatctact

SEQ ID NO: 233735 - DNA, 19 bp, Homo sapiens
  siRNA target sequence for ODC1 (NM_002539.1,1537-1555).
gaggccgacgatctactat

SEQ ID NO: 233736 - DNA, 19 bp, Homo sapiens
  siRNA target sequence for ODC1 (NM_002539.1,1539-1557).
ggccgacgatctactatgt

SEQ ID NO: 233737 - DNA, 19 bp, Homo sapiens
  siRNA target sequence for ODC1 (NM_002539.1,1541-1559).
ccgacgatctactatgtga

SEQ ID NO: 233738 - DNA, 19 bp, Homo sapiens
  siRNA target sequence for ODC1 (NM_002539.1,1542-1560).
cgacgatctactatgtgat

SEQ ID NO: 233739 - DNA, 19 bp, Homo sapiens
  siRNA target sequence for ODC1 (NM_002539.1,1566-1584).
ggcctgcgtggcaactcat

SEQ ID NO: 233740 - DNA, 19 bp, Homo sapiens
  siRNA target sequence for ODC1 (NM_002539.1,1695-1713).
gtgcttcggctagtattaa

SEQ ID NO: 233741 - DNA, 19 bp, Homo sapiens
  siRNA target sequence for ODC1 (NM_002539.1,1698-1716).
cttcggctagtattaatgt

SEQ ID NO: 233742 - DNA, 19 bp, Homo sapiens
  siRNA target sequence for GAD1 (NM_000817.1,658-676).
ccatggatgcaccagaaaa

SEQ ID NO: 233743 - DNA, 19 bp, Homo sapiens
  siRNA target sequence for GAD1 (NM_000817.1,928-946).
ctatgtccgcaagacattt

SEQ ID NO: 233744 - DNA, 19 bp, Homo sapiens
  siRNA target sequence for GAD1 (NM_000817.1,999-1017).
gcatggagggcttcaactt

SEQ ID NO: 233745 - DNA, 19 bp, Homo sapiens
  siRNA target sequence for GAD1 (NM_000817.1,1065-1083).
gcagagacaccttgaagta

SEQ ID NO: 233746 - DNA, 19 bp, Homo sapiens
  siRNA target sequence for GAD1 (NM_000817.1,1093-1111).
cacaggtcatcctcgattt

SEQ ID NO: 233747 - DNA, 19 bp, Homo sapiens
  siRNA target sequence for GAD1 (NM_000817.1,1095-1113).
caggtcatcctcgattttt

SEQ ID NO: 233748 - DNA, 19 bp, Homo sapiens
  siRNA target sequence for GAD1 (NM_000817.1,1097-1115).
ggtcatcctcgatttttca

SEQ ID NO: 233749 - DNA, 19 bp, Homo sapiens
  siRNA target sequence for GAD1 (NM_000817.1,1120-1138).
gctctccactggattggat

SEQ ID NO: 233750 - DNA, 19 bp, Homo sapiens
  siRNA target sequence for GAD1 (NM_000817.1,1123-1141).
ctccactggattggatatt

SEQ ID NO: 233751 - DNA, 19 bp, Homo sapiens
  siRNA target sequence for GAD1 (NM_000817.1,1177-1195).
caataccaacatgtttaca

SEQ ID NO: 233752 - DNA, 19 bp, Homo sapiens
  siRNA target sequence for GAD1 (NM_000817.1,1226-1244).
gaacaaataacacttaaga

SEQ ID NO: 233753 - DNA, 19 bp, Homo sapiens
  siRNA target sequence for GAD1 (NM_000817.1,1243-1261).
gaagatgagagagatagtt

SEQ ID NO: 233754 - DNA, 19 bp, Homo sapiens
  siRNA target sequence for GAD1 (NM_000817.1,1277-1295).
gatggtgatgggatatttt

SEQ ID NO: 233755 - DNA, 19 bp, Homo sapiens
  siRNA target sequence for GAD1 (NM_000817.1,1307-1325).
gccatatccaacatgtaca

SEQ ID NO: 233756 - DNA, 19 bp, Homo sapiens
  siRNA target sequence for GAD1 (NM_000817.1,1351-1369).
cttcccggaagttaagaca

SEQ ID NO: 233757 - DNA, 19 bp, Homo sapiens
  siRNA target sequence for GAD1 (NM_000817.1,1408-1426).
ctcagaacagagtcactat

SEQ ID NO: 233758 - DNA, 19 bp, Homo sapiens
  siRNA target sequence for GAD1 (NM_000817.1,1412-1430).
gaacagagtcactattcca

SEQ ID NO: 233759 - DNA, 19 bp, Homo sapiens
  siRNA target sequence for GAD1 (NM_000817.1,1415-1433).
cagagtcactattccataa

SEQ ID NO: 233760 - DNA, 19 bp, Homo sapiens
  siRNA target sequence for GAD1 (NM_000817.1,1455-1473).
gctttggaactgacaatgt

SEQ ID NO: 233761 - DNA, 19 bp, Homo sapiens
  siRNA target sequence for GAD1 (NM_000817.1,1591-1609).
gactgtttatggagctttt

SEQ ID NO: 233762 - DNA, 19 bp, Homo sapiens
  siRNA target sequence for GAD1 (NM_000817.1,1605-1623).
cttttgatccgatacaaga

SEQ ID NO: 233763 - DNA, 19 bp, Homo sapiens
  siRNA target sequence for GAD1 (NM_000817.1,1701-1719).
ggaagcaccgccataaact

SEQ ID NO: 233764 - DNA, 19 bp, Homo sapiens
  siRNA target sequence for GAD1 (NM_000817.1,1893-1911).
ccggggacaaggcaattca

SEQ ID NO: 233765 - DNA, 19 bp, Homo sapiens
  siRNA target sequence for GAD1 (NM_000817.1,1895-1913).
ggggacaaggcaattcagt

SEQ ID NO: 233766 - DNA, 19 bp, Homo sapiens
  siRNA target sequence for GAD1 (NM_000817.1,1919-1937).
cgccacgtggatatcttca

SEQ ID NO: 233767 - DNA, 19 bp, Homo sapiens
  siRNA target sequence for GAD1 (NM_000817.1,1920-1938).
gccacgtggatatcttcaa

SEQ ID NO: 233768 - DNA, 19 bp, Homo sapiens
  siRNA target sequence for GAD1 (NM_000817.1,1998-2016).
gcctggaactggctgaata

SEQ ID NO: 233769 - DNA, 19 bp, Homo sapiens
  siRNA target sequence for GAD1 (NM_000817.1,2018-2036).
ctctatgccaagattaaaa

SEQ ID NO: 233770 - DNA, 19 bp, Homo sapiens
  siRNA target sequence for GAD1 (NM_000817.1,2082-2100).
caaacgtctgtttttggta

SEQ ID NO: 233771 - DNA, 19 bp, Homo sapiens
  siRNA target sequence for GAD1 (NM_000817.1,2136-2154).
ctcaacgacgggaaaagct

SEQ ID NO: 233772 - DNA, 19 bp, Homo sapiens
  siRNA target sequence for GAD1 (NM_000817.1,2272-2290).
cgctacccagtctgacatt

SEQ ID NO: 233773 - DNA, 19 bp, Homo sapiens
  siRNA target sequence for GAD2 (NM_000818.1,256-274).
ggcatcggaaacaaactgt

SEQ ID NO: 233774 - DNA, 19 bp, Homo sapiens
  siRNA target sequence for GAD2 (NM_000818.1,467-485).
cgtttctgcaagatgttat

SEQ ID NO: 233775 - DNA, 19 bp, Homo sapiens
  siRNA target sequence for GAD2 (NM_000818.1,496-514).
cttcagtatgtggtgaaaa

SEQ ID NO: 233776 - DNA, 19 bp, Homo sapiens
  siRNA target sequence for GAD2 (NM_000818.1,505-523).
gtggtgaaaagtttcgata

SEQ ID NO: 233777 - DNA, 19 bp, Homo sapiens
  siRNA target sequence for GAD2 (NM_000818.1,508-526).
gtgaaaagtttcgatagat

SEQ ID NO: 233778 - DNA, 19 bp, Homo sapiens
  siRNA target sequence for GAD2 (NM_000818.1,510-528).
gaaaagtttcgatagatca

SEQ ID NO: 233779 - DNA, 19 bp, Homo sapiens
  siRNA target sequence for GAD2 (NM_000818.1,537-555).
gattgatttccattatcct

SEQ ID NO: 233780 - DNA, 19 bp, Homo sapiens
  siRNA target sequence for GAD2 (NM_000818.1,589-607).
gcagaccaaccacaaaatt

SEQ ID NO: 233781 - DNA, 19 bp, Homo sapiens
  siRNA target sequence for GAD2 (NM_000818.1,624-642).
gcattgccaaacaactcta

SEQ ID NO: 233782 - DNA, 19 bp, Homo sapiens
  siRNA target sequence for GAD2 (NM_000818.1,625-643).
cattgccaaacaactctaa

SEQ ID NO: 233783 - DNA, 19 bp, Homo sapiens
  siRNA target sequence for GAD2 (NM_000818.1,659-677).
cagggcatcctagatactt

SEQ ID NO: 233784 - DNA, 19 bp, Homo sapiens
  siRNA target sequence for GAD2 (NM_000818.1,663-681).
gcatcctagatacttcaat

SEQ ID NO: 233785 - DNA, 19 bp, Homo sapiens
  siRNA target sequence for GAD2 (NM_000818.1,689-707).
ctactggtttggatatggt

SEQ ID NO: 233786 - DNA, 19 bp, Homo sapiens
  siRNA target sequence for GAD2 (NM_000818.1,839-857).
gctctggcgatgggatatt

SEQ ID NO: 233787 - DNA, 19 bp, Homo sapiens
  siRNA target sequence for GAD2 (NM_000818.1,840-858).
ctctggcgatgggatattt

SEQ ID NO: 233788 - DNA, 19 bp, Homo sapiens
  siRNA target sequence for GAD2 (NM_000818.1,862-880).
cccggtggcgccatatcta

SEQ ID NO: 233789 - DNA, 19 bp, Homo sapiens
  siRNA target sequence for GAD2 (NM_000818.1,863-881).
ccggtggcgccatatctaa

SEQ ID NO: 233790 - DNA, 19 bp, Homo sapiens
  siRNA target sequence for GAD2 (NM_000818.1,964-982).
gccttcacgtctgaacata

SEQ ID NO: 233791 - DNA, 19 bp, Homo sapiens
  siRNA target sequence for GAD2 (NM_000818.1,966-984).
cttcacgtctgaacatagt

SEQ ID NO: 233792 - DNA, 19 bp, Homo sapiens
  siRNA target sequence for GAD2 (NM_000818.1,969-987).
cacgtctgaacatagtcat

SEQ ID NO: 233793 - DNA, 19 bp, Homo sapiens
  siRNA target sequence for GAD2 (NM_000818.1,971-989).
cgtctgaacatagtcattt

SEQ ID NO: 233794 - DNA, 19 bp, Homo sapiens
  siRNA target sequence for GAD2 (NM_000818.1,1030-1048).
gacagcgtgattctgatta

SEQ ID NO: 233795 - DNA, 19 bp, Homo sapiens
  siRNA target sequence for GAD2 (NM_000818.1,1035-1053).
cgtgattctgattaaatgt

SEQ ID NO: 233796 - DNA, 19 bp, Homo sapiens
  siRNA target sequence for GAD2 (NM_000818.1,1107-1125).
caaacagaaagggtttgtt

SEQ ID NO: 233797 - DNA, 19 bp, Homo sapiens
  siRNA target sequence for GAD2 (NM_000818.1,1155-1173).
caccgtgtacggagcattt

SEQ ID NO: 233798 - DNA, 19 bp, Homo sapiens
  siRNA target sequence for GAD2 (NM_000818.1,1157-1175).
ccgtgtacggagcatttga

SEQ ID NO: 233799 - DNA, 19 bp, Homo sapiens
  siRNA target sequence for GAD2 (NM_000818.1,1182-1200).
cttagctgtcgctgacatt

SEQ ID NO: 233800 - DNA, 19 bp, Homo sapiens
  siRNA target sequence for GAD2 (NM_000818.1,1186-1204).
gctgtcgctgacatttgca

SEQ ID NO: 233801 - DNA, 19 bp, Homo sapiens
  siRNA target sequence for GAD2 (NM_000818.1,1187-1205).
ctgtcgctgacatttgcaa

SEQ ID NO: 233802 - DNA, 19 bp, Homo sapiens
  siRNA target sequence for GAD2 (NM_000818.1,1193-1211).
ctgacatttgcaaaaagta

SEQ ID NO: 233803 - DNA, 19 bp, Homo sapiens
  siRNA target sequence for GAD2 (NM_000818.1,1238-1256).
cttggggtgggggattact

SEQ ID NO: 233804 - DNA, 19 bp, Homo sapiens
  siRNA target sequence for GAD2 (NM_000818.1,1255-1273).
ctgatgtcccgaaaacaca

SEQ ID NO: 233805 - DNA, 19 bp, Homo sapiens
  siRNA target sequence for GAD2 (NM_000818.1,1378-1396).
ggattgatgcagaattgca

SEQ ID NO: 233806 - DNA, 19 bp, Homo sapiens
  siRNA target sequence for GAD2 (NM_000818.1,1389-1407).
gaattgcaaccaaatgcat

SEQ ID NO: 233807 - DNA, 19 bp, Homo sapiens
  siRNA target sequence for GAD2 (NM_000818.1,1478-1496).
gcggacgccacgttgatgt

SEQ ID NO: 233808 - DNA, 19 bp, Homo sapiens
  siRNA target sequence for GAD2 (NM_000818.1,1479-1497).
cggacgccacgttgatgtt

SEQ ID NO: 233809 - DNA, 19 bp, Homo sapiens
  siRNA target sequence for GAD2 (NM_000818.1,1480-1498).
ggacgccacgttgatgttt

SEQ ID NO: 233810 - DNA, 19 bp, Homo sapiens
  siRNA target sequence for GAD2 (NM_000818.1,1481-1499).
gacgccacgttgatgtttt

SEQ ID NO: 233811 - DNA, 19 bp, Homo sapiens
  siRNA target sequence for GAD2 (NM_000818.1,1484-1502).
gccacgttgatgtttttaa

SEQ ID NO: 233812 - DNA, 19 bp, Homo sapiens
  siRNA target sequence for GAD2 (NM_000818.1,1527-1545).
ggggactaccgggtttgaa

SEQ ID NO: 233813 - DNA, 19 bp, Homo sapiens
  siRNA target sequence for GAD2 (NM_000818.1,1546-1564).
gcgcatgttgataaatgtt

SEQ ID NO: 233814 - DNA, 19 bp, Homo sapiens
  siRNA target sequence for GAD2 (NM_000818.1,1547-1565).
cgcatgttgataaatgttt

SEQ ID NO: 233815 - DNA, 19 bp, Homo sapiens
  siRNA target sequence for GAD2 (NM_000818.1,1567-1585).
gagttggcagagtatttat

SEQ ID NO: 233816 - DNA, 19 bp, Homo sapiens
  siRNA target sequence for GAD2 (NM_000818.1,1680-1698).
gcgtactctggaagacaat

SEQ ID NO: 233817 - DNA, 19 bp, Homo sapiens
  siRNA target sequence for GAD2 (NM_000818.1,1793-1811).
gagacaaggtcaatttctt

SEQ ID NO: 233818 - DNA, 19 bp, Homo sapiens
  siRNA target sequence for GAD2 (NM_000818.1,1879-1897).
cgccttggacaagatttat

SEQ ID NO: 233819 - DNA, 19 bp, Homo sapiens
  siRNA target sequence for UROD (NM_000374.2,47-65).
gttttccggagctgaagaa

SEQ ID NO: 233820 - DNA, 19 bp, Homo sapiens
  siRNA target sequence for UROD (NM_000374.2,138-156).
ccgttacttaccagagttt

SEQ ID NO: 233821 - DNA, 19 bp, Homo sapiens
  siRNA target sequence for UROD (NM_000374.2,139-157).
cgttacttaccagagttta

SEQ ID NO: 233822 - DNA, 19 bp, Homo sapiens
  siRNA target sequence for UROD (NM_000374.2,270-288).
ctccgacatccttgttgta

SEQ ID NO: 233823 - DNA, 19 bp, Homo sapiens
  siRNA target sequence for UROD (NM_000374.2,548-566).
ccaagcgctggctctatca

SEQ ID NO: 233824 - DNA, 19 bp, Homo sapiens
  siRNA target sequence for UROD (NM_000374.2,655-673).
gcattgcagctgtttgagt

SEQ ID NO: 233825 - DNA, 19 bp, Homo sapiens
  siRNA target sequence for UROD (NM_000374.2,692-710).
gcccacagctcttcaacaa

SEQ ID NO: 233826 - DNA, 19 bp, Homo sapiens
  siRNA target sequence for UROD (NM_000374.2,778-796).
gcaccagtgcccatgatca

SEQ ID NO: 233827 - DNA, 19 bp, Homo sapiens
  siRNA target sequence for UROD (NM_000374.2,787-805).
cccatgatcatctttgcta

SEQ ID NO: 233828 - DNA, 19 bp, Homo sapiens
  siRNA target sequence for UROD (NM_000374.2,792-810).
gatcatctttgctaaggat

SEQ ID NO: 233829 - DNA, 19 bp, Homo sapiens
  siRNA target sequence for HDC (NM_002112.1,680-698).
ctcactcctctgtggaaaa

SEQ ID NO: 233830 - DNA, 19 bp, Homo sapiens
  siRNA target sequence for HDC (NM_002112.1,819-837).
ctttgtctgtgcaacacta

SEQ ID NO: 233831 - DNA, 19 bp, Homo sapiens
  siRNA target sequence for HDC (NM_002112.1,847-865).
ggggtctgtgcatttgact

SEQ ID NO: 233832 - DNA, 19 bp, Homo sapiens
  siRNA target sequence for HDC (NM_002112.1,912-930).
ccacatcgatgctgcttat

SEQ ID NO: 233833 - DNA, 19 bp, Homo sapiens
  siRNA target sequence for HDC (NM_002112.1,990-1008).
cgactccttcacctttaat

SEQ ID NO: 233834 - DNA, 19 bp, Homo sapiens
  siRNA target sequence for HDC (NM_002112.1,1165-1183).
cgacggtttcgctctgtta

SEQ ID NO: 233835 - DNA, 19 bp, Homo sapiens
  siRNA target sequence for HDC (NM_002112.1,1166-1184).
gacggtttcgctctgttaa

SEQ ID NO: 233836 - DNA, 19 bp, Homo sapiens
  siRNA target sequence for HDC (NM_002112.1,1202-1220).
ggtccttcggggtgaagaa

SEQ ID NO: 233837 - DNA, 19 bp, Homo sapiens
  siRNA target sequence for HDC (NM_002112.1,1203-1221).
gtccttcggggtgaagaat

SEQ ID NO: 233838 - DNA, 19 bp, Homo sapiens
  siRNA target sequence for HDC (NM_002112.1,1209-1227).
cggggtgaagaatcttcaa

SEQ ID NO: 233839 - DNA, 19 bp, Homo sapiens
  siRNA target sequence for HDC (NM_002112.1,1247-1265).
ctgaaatggctaaatattt

SEQ ID NO: 233840 - DNA, 19 bp, Homo sapiens
  siRNA target sequence for HDC (NM_002112.1,1256-1274).
ctaaatattttgaatctct

SEQ ID NO: 233841 - DNA, 19 bp, Homo sapiens
  siRNA target sequence for HDC (NM_002112.1,1278-1296).
cagaaacgacccttccttt

SEQ ID NO: 233842 - DNA, 19 bp, Homo sapiens
  siRNA target sequence for HDC (NM_002112.1,1336-1354).
cgtctaaagggtcctaatt

SEQ ID NO: 233843 - DNA, 19 bp, Homo sapiens
  siRNA target sequence for HDC (NM_002112.1,1369-1387).
gtgttaaaggaaatagcta

SEQ ID NO: 233844 - DNA, 19 bp, Homo sapiens
  siRNA target sequence for HDC (NM_002112.1,1415-1433).
ccactatccaggacaagtt

SEQ ID NO: 233845 - DNA, 19 bp, Homo sapiens
  siRNA target sequence for HDC (NM_002112.1,1416-1434).
cactatccaggacaagtta

SEQ ID NO: 233846 - DNA, 19 bp, Homo sapiens
  siRNA target sequence for HDC (NM_002112.1,1431-1449).
gttaatcatccgtttcact

SEQ ID NO: 233847 - DNA, 19 bp, Homo sapiens
  siRNA target sequence for HDC (NM_002112.1,1689-1707).
gggagccggtcccatgaaa

SEQ ID NO: 233848 - DNA, 19 bp, Homo sapiens
  siRNA target sequence for HDC (NM_002112.1,1690-1708).
ggagccggtcccatgaaaa

SEQ ID NO: 233849 - DNA, 19 bp, Homo sapiens
  siRNA target sequence for HDC (NM_002112.1,1925-1943).
gctcctccagggtcagaat

SEQ ID NO: 233850 - DNA, 19 bp, Homo sapiens
  siRNA target sequence for HDC (NM_002112.1,1988-2006).
ccttcaaaaaactcatcaa

SEQ ID NO: 233851 - DNA, 19 bp, Homo sapiens
  siRNA target sequence for DDC (NM_000790.1,240-258).
caacgacgttgagaagata

SEQ ID NO: 233852 - DNA, 19 bp, Homo sapiens
  siRNA target sequence for DDC (NM_000790.1,244-262).
gacgttgagaagataatca

SEQ ID NO: 233853 - DNA, 19 bp, Homo sapiens
  siRNA target sequence for DDC (NM_000790.1,541-559).
gccgctcggaccaaagtga

SEQ ID NO: 233854 - DNA, 19 bp, Homo sapiens
  siRNA target sequence for DDC (NM_000790.1,654-672).
ggaaagagctgggttaatt

SEQ ID NO: 233855 - DNA, 19 bp, Homo sapiens
  siRNA target sequence for DDC (NM_000790.1,666-684).
gttaattggtggagtgaaa

SEQ ID NO: 233856 - DNA, 19 bp, Homo sapiens
  siRNA target sequence for DDC (NM_000790.1,760-778).
gcggctggcctgattcctt

SEQ ID NO: 233857 - DNA, 19 bp, Homo sapiens
  siRNA target sequence for DDC (NM_000790.1,949-967).
gcagattcattcaacttta

SEQ ID NO: 233858 - DNA, 19 bp, Homo sapiens
  siRNA target sequence for DDC (NM_000790.1,1252-1270).
gatccccgctttgaaatct

SEQ ID NO: 233859 - DNA, 19 bp, Homo sapiens
  siRNA target sequence for DDC (NM_000790.1,1305-1323).
gctaaagggttccaacaaa

SEQ ID NO: 233860 - DNA, 19 bp, Homo sapiens
  siRNA target sequence for DDC (NM_000790.1,1311-1329).
gggttccaacaaagtgaat

SEQ ID NO: 233861 - DNA, 19 bp, Homo sapiens
  siRNA target sequence for DDC (NM_000790.1,1382-1400).
gtcacctcagggacaagtt

SEQ ID NO: 233862 - DNA, 19 bp, Homo sapiens
  siRNA target sequence for DDC (NM_000790.1,1405-1423).
ctgcgctttgccatctgtt

SEQ ID NO: 233863 - DNA, 19 bp, Homo sapiens
  siRNA target sequence for DDC (NM_000790.1,1455-1473).
ggcctgggaacacatcaaa

SEQ ID NO: 233864 - DNA, 19 bp, Homo sapiens
  siRNA target sequence for AMD1 (NM_001634.3,383-401).
gcagcccgacgcaaaccaa

SEQ ID NO: 233865 - DNA, 19 bp, Homo sapiens
  siRNA target sequence for AMD1 (NM_001634.3,430-448).
gatctgagtgggacatact

SEQ ID NO: 233866 - DNA, 19 bp, Homo sapiens
  siRNA target sequence for AMD1 (NM_001634.3,456-474).
gatgtgcaatgttcaatca

SEQ ID NO: 233867 - DNA, 19 bp, Homo sapiens
  siRNA target sequence for AMD1 (NM_001634.3,459-477).
gtgcaatgttcaatcataa

SEQ ID NO: 233868 - DNA, 19 bp, Homo sapiens
  siRNA target sequence for AMD1 (NM_001634.3,469-487).
caatcataagtgtgacaaa

SEQ ID NO: 233869 - DNA, 19 bp, Homo sapiens
  siRNA target sequence for AMD1 (NM_001634.3,536-554).
ctccaagagacgtttcatt

SEQ ID NO: 233870 - DNA, 19 bp, Homo sapiens
  siRNA target sequence for AMD1 (NM_001634.3,625-643).
gtgggtttgactcaattca

SEQ ID NO: 233871 - DNA, 19 bp, Homo sapiens
  siRNA target sequence for AMD1 (NM_001634.3,627-645).
gggtttgactcaattcaaa

SEQ ID NO: 233872 - DNA, 19 bp, Homo sapiens
  siRNA target sequence for AMD1 (NM_001634.3,658-676).
ctcgtaagaatttcatgaa

SEQ ID NO: 233873 - DNA, 19 bp, Homo sapiens
  siRNA target sequence for AMD1 (NM_001634.3,691-709).
ggtacccacaccggaattt

SEQ ID NO: 233874 - DNA, 19 bp, Homo sapiens
  siRNA target sequence for AMD1 (NM_001634.3,813-831).
ccagagagtcgggtaatca

SEQ ID NO: 233875 - DNA, 19 bp, Homo sapiens
  siRNA target sequence for AMD1 (NM_001634.3,1126-1144).
ggaaagttgtagaagtctt

SEQ ID NO: 233876 - DNA, 19 bp, Homo sapiens
  siRNA target sequence for AMD1 (NM_001634.3,1163-1181).
gaccaccttgtttgttaat

SEQ ID NO: 233877 - DNA, 19 bp, Homo sapiens
  siRNA target sequence for AMD1 (NM_001634.3,1165-1183).
ccaccttgtttgttaatca

SEQ ID NO: 233878 - DNA, 19 bp, Homo sapiens
  siRNA target sequence for KIAA0251 (NM_015027.1,379-397).
caactctggacaaagagaa

SEQ ID NO: 233879 - DNA, 19 bp, Homo sapiens
  siRNA target sequence for KIAA0251 (NM_015027.1,1457-1475).
gatgaccgcagcagtttta

SEQ ID NO: 233880 - DNA, 19 bp, Homo sapiens
  siRNA target sequence for KIAA0251 (NM_015027.1,1460-1478).
gaccgcagcagttttagga

SEQ ID NO: 233881 - DNA, 19 bp, Homo sapiens
  siRNA target sequence for KIAA0251 (NM_015027.1,1502-1520).
gctcgtagcctgcatagaa

SEQ ID NO: 233882 - DNA, 19 bp, Homo sapiens
  siRNA target sequence for KIAA0251 (NM_015027.1,1503-1521).
ctcgtagcctgcatagaaa

SEQ ID NO: 233883 - DNA, 19 bp, Homo sapiens
  siRNA target sequence for KIAA0251 (NM_015027.1,1585-1603).
caacagcaggtctcctata

SEQ ID NO: 233884 - DNA, 19 bp, Homo sapiens
  siRNA target sequence for KIAA0251 (NM_015027.1,1640-1658).
caggtatgaacatgctaat

SEQ ID NO: 233885 - DNA, 19 bp, Homo sapiens
  siRNA target sequence for KIAA0251 (NM_015027.1,1642-1660).
ggtatgaacatgctaatga

SEQ ID NO: 233886 - DNA, 19 bp, Homo sapiens
  siRNA target sequence for KIAA0251 (NM_015027.1,1662-1680).
gataagagcagtttgaaat

SEQ ID NO: 233887 - DNA, 19 bp, Homo sapiens
  siRNA target sequence for KIAA0251 (NM_015027.1,1683-1701).
gatcccgaaggggaaaaca

SEQ ID NO: 233888 - DNA, 19 bp, Homo sapiens
  siRNA target sequence for KIAA0251 (NM_015027.1,1879-1897).
cgaggcttctggaaaacat

SEQ ID NO: 233889 - DNA, 19 bp, Homo sapiens
  siRNA target sequence for KIAA0251 (NM_015027.1,2004-2022).
ggctccgtgctgaattggt

SEQ ID NO: 233890 - DNA, 19 bp, Homo sapiens
  siRNA target sequence for KIAA0251 (NM_015027.1,2005-2023).
gctccgtgctgaattggtt

SEQ ID NO: 233891 - DNA, 19 bp, Homo sapiens
  siRNA target sequence for KIAA0251 (NM_015027.1,2006-2024).
ctccgtgctgaattggttt

SEQ ID NO: 233892 - DNA, 19 bp, Homo sapiens
  siRNA target sequence for KIAA0251 (NM_015027.1,2009-2027).
cgtgctgaattggttttct

SEQ ID NO: 233893 - DNA, 19 bp, Homo sapiens
  siRNA target sequence for KIAA0251 (NM_015027.1,2026-2044).
ctccggtccaggctttaca

SEQ ID NO: 233894 - DNA, 19 bp, Homo sapiens
  siRNA target sequence for KIAA0251 (NM_015027.1,2029-2047).
cggtccaggctttacagaa

SEQ ID NO: 233895 - DNA, 19 bp, Homo sapiens
  siRNA target sequence for KIAA0251 (NM_015027.1,2049-2067).
ggaagaacttttaacttga

SEQ ID NO: 233896 - DNA, 19 bp, Homo sapiens
  siRNA target sequence for KIAA0251 (NM_015027.1,2231-2249).
cagctcagtcagtcacatt

SEQ ID NO: 233897 - DNA, 19 bp, Homo sapiens
  siRNA target sequence for KIAA0251 (NM_015027.1,2233-2251).
gctcagtcagtcacattga

SEQ ID NO: 233898 - DNA, 19 bp, Homo sapiens
  siRNA target sequence for KIAA0251 (NM_015027.1,2381-2399).
ggtcccacacccagaagat

SEQ ID NO: 233899 - DNA, 19 bp, Homo sapiens
  siRNA target sequence for SGPL1 (NM_003901.2,215-233).
ctagcacagaccttctgat

SEQ ID NO: 233900 - DNA, 19 bp, Homo sapiens
  siRNA target sequence for SGPL1 (NM_003901.2,221-239).
cagaccttctgatgttgaa

SEQ ID NO: 233901 - DNA, 19 bp, Homo sapiens
  siRNA target sequence for SGPL1 (NM_003901.2,242-260).
cctttgagccctacttaga

SEQ ID NO: 233902 - DNA, 19 bp, Homo sapiens
  siRNA target sequence for SGPL1 (NM_003901.2,247-265).
gagccctacttagagattt

SEQ ID NO: 233903 - DNA, 19 bp, Homo sapiens
  siRNA target sequence for SGPL1 (NM_003901.2,267-285).
ggaagtatactccacaaaa

SEQ ID NO: 233904 - DNA, 19 bp, Homo sapiens
  siRNA target sequence for SGPL1 (NM_003901.2,276-294).
ctccacaaaagccaagaat

SEQ ID NO: 233905 - DNA, 19 bp, Homo sapiens
  siRNA target sequence for SGPL1 (NM_003901.2,305-323).
gacattgcaccaagtatga

SEQ ID NO: 233906 - DNA, 19 bp, Homo sapiens
  siRNA target sequence for SGPL1 (NM_003901.2,325-343).
ccctggcagctaattgcat

SEQ ID NO: 233907 - DNA, 19 bp, Homo sapiens
  siRNA target sequence for SGPL1 (NM_003901.2,390-408).
cttccagccagagagttta

SEQ ID NO: 233908 - DNA, 19 bp, Homo sapiens
  siRNA target sequence for SGPL1 (NM_003901.2,394-412).
cagccagagagtttatggt

SEQ ID NO: 233909 - DNA, 19 bp, Homo sapiens
  siRNA target sequence for SGPL1 (NM_003901.2,443-461).
ccaggaagatgcccattat

SEQ ID NO: 233910 - DNA, 19 bp, Homo sapiens
  siRNA target sequence for SGPL1 (NM_003901.2,455-473).
ccattattggtcgtaagat

SEQ ID NO: 233911 - DNA, 19 bp, Homo sapiens
  siRNA target sequence for SGPL1 (NM_003901.2,456-474).
cattattggtcgtaagatt

SEQ ID NO: 233912 - DNA, 19 bp, Homo sapiens
  siRNA target sequence for SGPL1 (NM_003901.2,464-482).
gtcgtaagattcaagacaa

SEQ ID NO: 233913 - DNA, 19 bp, Homo sapiens
  siRNA target sequence for SGPL1 (NM_003901.2,499-517).
gatgatattagcaagaaca

SEQ ID NO: 233914 - DNA, 19 bp, Homo sapiens
  siRNA target sequence for SGPL1 (NM_003901.2,502-520).
gatattagcaagaacatgt

SEQ ID NO: 233915 - DNA, 19 bp, Homo sapiens
  siRNA target sequence for SGPL1 (NM_003901.2,693-711).
gaaggcttatggagatttt

SEQ ID NO: 233916 - DNA, 19 bp, Homo sapiens
  siRNA target sequence for SGPL1 (NM_003901.2,696-714).
ggcttatggagattttgca

SEQ ID NO: 233917 - DNA, 19 bp, Homo sapiens
  siRNA target sequence for SGPL1 (NM_003901.2,744-762).
cccaggactacgcaagata

SEQ ID NO: 233918 - DNA, 19 bp, Homo sapiens
  siRNA target sequence for SGPL1 (NM_003901.2,746-764).
caggactacgcaagataga

SEQ ID NO: 233919 - DNA, 19 bp, Homo sapiens
  siRNA target sequence for SGPL1 (NM_003901.2,833-851).
ctgggggaacagaaagcat

SEQ ID NO: 233920 - DNA, 19 bp, Homo sapiens
  siRNA target sequence for SGPL1 (NM_003901.2,959-977).
gttactttgggatgaagat

SEQ ID NO: 233921 - DNA, 19 bp, Homo sapiens
  siRNA target sequence for SGPL1 (NM_003901.2,985-1003).
gtcccattgacgaagatga

SEQ ID NO: 233922 - DNA, 19 bp, Homo sapiens
  siRNA target sequence for SGPL1 (NM_003901.2,1051-1069).
gccatgctcgtctgttcta

SEQ ID NO: 233923 - DNA, 19 bp, Homo sapiens
  siRNA target sequence for SGPL1 (NM_003901.2,1062-1080).
ctgttctaccccacagttt

SEQ ID NO: 233924 - DNA, 19 bp, Homo sapiens
  siRNA target sequence for SGPL1 (NM_003901.2,1077-1095).
gtttcctcatggtgtaata

SEQ ID NO: 233925 - DNA, 19 bp, Homo sapiens
  siRNA target sequence for SGPL1 (NM_003901.2,1253-1271).
cagctgacacccataagta

SEQ ID NO: 233926 - DNA, 19 bp, Homo sapiens
  siRNA target sequence for SGPL1 (NM_003901.2,1289-1307).
gctcatcattggtgttgta

SEQ ID NO: 233927 - DNA, 19 bp, Homo sapiens
  siRNA target sequence for SGPL1 (NM_003901.2,1290-1308).
ctcatcattggtgttgtat

SEQ ID NO: 233928 - DNA, 19 bp, Homo sapiens
  siRNA target sequence for SGPL1 (NM_003901.2,1335-1353).
gttcttcgtcgatacagat

SEQ ID NO: 233929 - DNA, 19 bp, Homo sapiens
  siRNA target sequence for SGPL1 (NM_003901.2,1443-1461).
cggtgagaacggctatgtt

SEQ ID NO: 233930 - DNA, 19 bp, Homo sapiens
  siRNA target sequence for SGPL1 (NM_003901.2,1570-1588).
ggatcccgtgattttgaca

SEQ ID NO: 233931 - DNA, 19 bp, Homo sapiens
  siRNA target sequence for SGPL1 (NM_003901.2,1571-1589).
gatcccgtgattttgacat

SEQ ID NO: 233932 - DNA, 19 bp, Homo sapiens
  siRNA target sequence for SGPL1 (NM_003901.2,1574-1592).
cccgtgattttgacatcta

SEQ ID NO: 233933 - DNA, 19 bp, Homo sapiens
  siRNA target sequence for SGPL1 (NM_003901.2,1616-1634).
ctaaggggtggaacttgaa

SEQ ID NO: 233934 - DNA, 19 bp, Homo sapiens
  siRNA target sequence for SGPL1 (NM_003901.2,1644-1662).
gttcccacccagtattcat

SEQ ID NO: 233935 - DNA, 19 bp, Homo sapiens
  siRNA target sequence for SGPL1 (NM_003901.2,1686-1704).
ccggaaacgagtagctata

SEQ ID NO: 233936 - DNA, 19 bp, Homo sapiens
  siRNA target sequence for SGPL1 (NM_003901.2,1688-1706).
ggaaacgagtagctataca

SEQ ID NO: 233937 - DNA, 19 bp, Homo sapiens
  siRNA target sequence for SGPL1 (NM_003901.2,1689-1707).
gaaacgagtagctatacaa

SEQ ID NO: 233938 - DNA, 19 bp, Homo sapiens
  siRNA target sequence for SGPL1 (NM_003901.2,1696-1714).
gtagctatacaattcctaa

SEQ ID NO: 233939 - DNA, 19 bp, Homo sapiens
  siRNA target sequence for SGPL1 (NM_003901.2,1730-1748).
ctgtcactcaaatcatgaa

SEQ ID NO: 233940 - DNA, 19 bp, Homo sapiens
  siRNA target sequence for SGPL1 (NM_003901.2,1732-1750).
gtcactcaaatcatgaaga

SEQ ID NO: 233941 - DNA, 19 bp, Homo sapiens
  siRNA target sequence for SGPL1 (NM_003901.2,1738-1756).
caaatcatgaagaatccta

SEQ ID NO: 233942 - DNA, 19 bp, Homo sapiens
  siRNA target sequence for SGPL1 (NM_003901.2,1890-1908).
gatgaatggttctccaaaa

SEQ ID NO: 233943 - DNA, 19 bp, Homo sapiens
  siRNA target sequence for ALDOA (NM_000034.2,1722-1740).
gcttgcactcagaagtttt

SEQ ID NO: 233944 - DNA, 19 bp, Homo sapiens
  siRNA target sequence for ALDOA (NM_000034.2,1977-1995).
gcgcaggaggagtatgtca

SEQ ID NO: 233945 - DNA, 19 bp, Homo sapiens
  siRNA target sequence for ALDOA (NM_000034.2,1978-1996).
cgcaggaggagtatgtcaa

SEQ ID NO: 233946 - DNA, 19 bp, Homo sapiens
  siRNA target sequence for ALDOB (NM_000035.2,295-313).
ggcagttccgagaaatcct

SEQ ID NO: 233947 - DNA, 19 bp, Homo sapiens
  siRNA target sequence for ALDOB (NM_000035.2,434-452).
cgtggtgggaatcaagtta

SEQ ID NO: 233948 - DNA, 19 bp, Homo sapiens
  siRNA target sequence for ALDOB (NM_000035.2,466-484).
ctcctcttgcaggaacaaa

SEQ ID NO: 233949 - DNA, 19 bp, Homo sapiens
  siRNA target sequence for ALDOB (NM_000035.2,607-625).
gcctcgctatccaggaaaa

SEQ ID NO: 233950 - DNA, 19 bp, Homo sapiens
  siRNA target sequence for ALDOB (NM_000035.2,670-688).
gactggtacctattgttga

SEQ ID NO: 233951 - DNA, 19 bp, Homo sapiens
  siRNA target sequence for ALDOB (NM_000035.2,722-740).
ggaacactgccagtatgtt

SEQ ID NO: 233952 - DNA, 19 bp, Homo sapiens
  siRNA target sequence for ALDOB (NM_000035.2,723-741).
gaacactgccagtatgtta

SEQ ID NO: 233953 - DNA, 19 bp, Homo sapiens
  siRNA target sequence for ALDOB (NM_000035.2,837-855).
catgcctgcaccaagaagt

SEQ ID NO: 233954 - DNA, 19 bp, Homo sapiens
  siRNA target sequence for ALDOB (NM_000035.2,840-858).
gcctgcaccaagaagtata

SEQ ID NO: 233955 - DNA, 19 bp, Homo sapiens
  siRNA target sequence for ALDOB (NM_000035.2,842-860).
ctgcaccaagaagtatact

SEQ ID NO: 233956 - DNA, 19 bp, Homo sapiens
  siRNA target sequence for ALDOB (NM_000035.2,854-872).
gtatactccagaacaagta

SEQ ID NO: 233957 - DNA, 19 bp, Homo sapiens
  siRNA target sequence for ALDOB (NM_000035.2,859-877).
ctccagaacaagtagctat

SEQ ID NO: 233958 - DNA, 19 bp, Homo sapiens
  siRNA target sequence for ALDOB (NM_000035.2,967-985).
ctctcaacctcaatgctat

SEQ ID NO: 233959 - DNA, 19 bp, Homo sapiens
  siRNA target sequence for ALDOB (NM_000035.2,1002-1020).
ccaaagccctggaaactaa

SEQ ID NO: 233960 - DNA, 19 bp, Homo sapiens
  siRNA target sequence for ALDOB (NM_000035.2,1008-1026).
ccctggaaactaagtttct

SEQ ID NO: 233961 - DNA, 19 bp, Homo sapiens
  siRNA target sequence for ALDOB (NM_000035.2,1139-1157).
ggccaaaggacagtatgtt

SEQ ID NO: 233962 - DNA, 19 bp, Homo sapiens
  siRNA target sequence for ALDOB (NM_000035.2,1194-1212).
ctcttcacagcctgctata

SEQ ID NO: 233963 - DNA, 19 bp, Homo sapiens
  siRNA target sequence for ALDOC (NM_005165.1,192-210).
caaattggggtggaaaaca

SEQ ID NO: 233964 - DNA, 19 bp, Homo sapiens
  siRNA target sequence for ALDOC (NM_005165.1,255-273).
gatgaccgtgtgaaaaagt

SEQ ID NO: 233965 - DNA, 19 bp, Homo sapiens
  siRNA target sequence for ALDOC (NM_005165.1,274-292).
gcattggaggcgtcatttt

SEQ ID NO: 233966 - DNA, 19 bp, Homo sapiens
  siRNA target sequence for ALDOC (NM_005165.1,501-519).
cgctgtgtgctgaaaatca

SEQ ID NO: 233967 - DNA, 19 bp, Homo sapiens
  siRNA target sequence for ALDOC (NM_005165.1,503-521).
ctgtgtgctgaaaatcagt

SEQ ID NO: 233968 - DNA, 19 bp, Homo sapiens
  siRNA target sequence for ALDOC (NM_005165.1,642-660).
gaccacgacctcaaacgtt

SEQ ID NO: 233969 - DNA, 19 bp, Homo sapiens
  siRNA target sequence for ALDOC (NM_005165.1,771-789).
gcctgtcccatcaagtata

SEQ ID NO: 233970 - DNA, 19 bp, Homo sapiens
  siRNA target sequence for ALDOC (NM_005165.1,883-901).
gcgaagaagaggcatcatt

SEQ ID NO: 233971 - DNA, 19 bp, Homo sapiens
  siRNA target sequence for ALDOC (NM_005165.1,937-955).
gaccctgggcgcttacctt

SEQ ID NO: 233972 - DNA, 19 bp, Homo sapiens
  siRNA target sequence for ALDOC (NM_005165.1,974-992).
gcaagcctctgcactcaat

SEQ ID NO: 233973 - DNA, 19 bp, Homo sapiens
  siRNA target sequence for ALDOC (NM_005165.1,1114-1132).
cagcacagtcactctacat

SEQ ID NO: 233974 - DNA, 19 bp, Homo sapiens
  siRNA target sequence for CGI-26 (NM_015954.1,107-125).
cttagctggatctccaaaa

SEQ ID NO: 233975 - DNA, 19 bp, Homo sapiens
  siRNA target sequence for CGI-26 (NM_015954.1,306-324).
caatccgggaagatctctt

SEQ ID NO: 233976 - DNA, 19 bp, Homo sapiens
  siRNA target sequence for CGI-26 (NM_015954.1,310-328).
ccgggaagatctcttaaaa

SEQ ID NO: 233977 - DNA, 19 bp, Homo sapiens
  siRNA target sequence for CGI-26 (NM_015954.1,340-358).
gcatgataaaggcattact

SEQ ID NO: 233978 - DNA, 19 bp, Homo sapiens
  siRNA target sequence for CGI-26 (NM_015954.1,465-483).
ctggacagactcatttgaa

SEQ ID NO: 233979 - DNA, 19 bp, Homo sapiens
  siRNA target sequence for CGI-26 (NM_015954.1,488-506).
cgattagaagagatcagat

SEQ ID NO: 233980 - DNA, 19 bp, Homo sapiens
  siRNA target sequence for CGI-26 (NM_015954.1,528-546).
cagaaatcgacgtggtaat

SEQ ID NO: 233981 - DNA, 19 bp, Homo sapiens
  siRNA target sequence for CGI-26 (NM_015954.1,530-548).
gaaatcgacgtggtaatta

SEQ ID NO: 233982 - DNA, 19 bp, Homo sapiens
  siRNA target sequence for CGI-26 (NM_015954.1,535-553).
cgacgtggtaattaacaga

SEQ ID NO: 233983 - DNA, 19 bp, Homo sapiens
  siRNA target sequence for CGI-26 (NM_015954.1,616-634).
ctgtggggaggctcatctt

SEQ ID NO: 233984 - DNA, 19 bp, Homo sapiens
  siRNA target sequence for CGI-26 (NM_015954.1,618-636).
gtggggaggctcatcttaa

SEQ ID NO: 233985 - DNA, 19 bp, Homo sapiens
  siRNA target sequence for CGI-26 (NM_015954.1,662-680).
ggaactcttactaatgtct

SEQ ID NO: 233986 - DNA, 19 bp, Homo sapiens
  siRNA target sequence for CGI-26 (NM_015954.1,663-681).
gaactcttactaatgtcta

SEQ ID NO: 233987 - DNA, 19 bp, Homo sapiens
  siRNA target sequence for CGI-26 (NM_015954.1,706-724).
ggcaggatcagattttatt

SEQ ID NO: 233988 - DNA, 19 bp, Homo sapiens
  siRNA target sequence for CGI-26 (NM_015954.1,707-725).
gcaggatcagattttatta

SEQ ID NO: 233989 - DNA, 19 bp, Homo sapiens
  siRNA target sequence for CGI-26 (NM_015954.1,710-728).
ggatcagattttattaaga

SEQ ID NO: 233990 - DNA, 19 bp, Homo sapiens
  siRNA target sequence for CGI-26 (NM_015954.1,756-774).
ccaccttcccggtagctat

SEQ ID NO: 233991 - DNA, 19 bp, Homo sapiens
  siRNA target sequence for CGI-26 (NM_015954.1,757-775).
caccttcccggtagctata

SEQ ID NO: 233992 - DNA, 19 bp, Homo sapiens
  siRNA target sequence for CGI-26 (NM_015954.1,788-806).
gccattagagatttcttct

SEQ ID NO: 233993 - DNA, 19 bp, Homo sapiens
  siRNA target sequence for CGI-26 (NM_015954.1,820-838).
caagatagggtttaaacca

SEQ ID NO: 233994 - DNA, 19 bp, Homo sapiens
  siRNA target sequence for CGI-26 (NM_015954.1,872-890).
gcttggctctctcttgtaa

SEQ ID NO: 233995 - DNA, 19 bp, Homo sapiens
  siRNA target sequence for CGI-26 (NM_015954.1,876-894).
ggctctctcttgtaaagga

SEQ ID NO: 233996 - DNA, 19 bp, Homo sapiens
  siRNA target sequence for CGI-26 (NM_015954.1,919-937).
gccagaactctttcgaata

SEQ ID NO: 233997 - DNA, 19 bp, Homo sapiens
  siRNA target sequence for CGI-26 (NM_015954.1,948-966).
ctctgctctcggacattga

SEQ ID NO: 233998 - DNA, 19 bp, Homo sapiens
  siRNA target sequence for CGI-26 (NM_015954.1,996-1014).
gatatgcagcttatcatga

SEQ ID NO: 233999 - DNA, 19 bp, Homo sapiens
  siRNA target sequence for CGI-26 (NM_015954.1,1005-1023).
cttatcatgatcttccaat

SEQ ID NO: 234000 - DNA, 19 bp, Homo sapiens
  siRNA target sequence for CGI-26 (NM_015954.1,1010-1028).
catgatcttccaatgtctt

SEQ ID NO: 234001 - DNA, 19 bp, Homo sapiens
  siRNA target sequence for CRY2 (NM_021117.1,159-177).
gcgtgcgctgcgtttacat

SEQ ID NO: 234002 - DNA, 19 bp, Homo sapiens
  siRNA target sequence for CRY2 (NM_021117.1,160-178).
cgtgcgctgcgtttacatt

SEQ ID NO: 234003 - DNA, 19 bp, Homo sapiens
  siRNA target sequence for CRY2 (NM_021117.1,248-266).
gaagatttggacacaagtt

SEQ ID NO: 234004 - DNA, 19 bp, Homo sapiens
  siRNA target sequence for CRY2 (NM_021117.1,277-295).
gaactcccgcctgtttgta

SEQ ID NO: 234005 - DNA, 19 bp, Homo sapiens
  siRNA target sequence for CRY2 (NM_021117.1,349-367).
gacccgcttgacctttgaa

SEQ ID NO: 234006 - DNA, 19 bp, Homo sapiens
  siRNA target sequence for CRY2 (NM_021117.1,443-461).
gtgacggagaattctcata

SEQ ID NO: 234007 - DNA, 19 bp, Homo sapiens
  siRNA target sequence for CRY2 (NM_021117.1,524-542).
cgctttcaggccatcatca

SEQ ID NO: 234008 - DNA, 19 bp, Homo sapiens
  siRNA target sequence for CRY2 (NM_021117.1,756-774).
cctgggttgccaactatga

SEQ ID NO: 234009 - DNA, 19 bp, Homo sapiens
  siRNA target sequence for CRY2 (NM_021117.1,827-845).
ccctacctgcgctttggtt

SEQ ID NO: 234010 - DNA, 19 bp, Homo sapiens
  siRNA target sequence for CRY2 (NM_021117.1,873-891).
gcctgtgggacctgtataa

SEQ ID NO: 234011 - DNA, 19 bp, Homo sapiens
  siRNA target sequence for CRY2 (NM_021117.1,875-893).
ctgtgggacctgtataaaa

SEQ ID NO: 234012 - DNA, 19 bp, Homo sapiens
  siRNA target sequence for CRY2 (NM_021117.1,1195-1213).
gagcggggtccgggtattt

SEQ ID NO: 234013 - DNA, 19 bp, Homo sapiens
  siRNA target sequence for CRY2 (NM_021117.1,1197-1215).
gcggggtccgggtatttga

SEQ ID NO: 234014 - DNA, 19 bp, Homo sapiens
  siRNA target sequence for CRY2 (NM_021117.1,1223-1241).
ctcctggatgcagatttca

SEQ ID NO: 234015 - DNA, 19 bp, Homo sapiens
  siRNA target sequence for CRY2 (NM_021117.1,1340-1358).
cccagtggggactacatca

SEQ ID NO: 234016 - DNA, 19 bp, Homo sapiens
  siRNA target sequence for CRY2 (NM_021117.1,1359-1377).
ggcgatacctgcccaaatt

SEQ ID NO: 234017 - DNA, 19 bp, Homo sapiens
  siRNA target sequence for CRY2 (NM_021117.1,1383-1401).
cgttcccctctcgatacat

SEQ ID NO: 234018 - DNA, 19 bp, Homo sapiens
  siRNA target sequence for CRY2 (NM_021117.1,1387-1405).
cccctctcgatacatctat

SEQ ID NO: 234019 - DNA, 19 bp, Homo sapiens
  siRNA target sequence for CRY2 (NM_021117.1,1389-1407).
cctctcgatacatctatga

SEQ ID NO: 234020 - DNA, 19 bp, Homo sapiens
  siRNA target sequence for CRY2 (NM_021117.1,1413-1431).
ggaatgccccagagtcaat

SEQ ID NO: 234021 - DNA, 19 bp, Homo sapiens
  siRNA target sequence for CRY2 (NM_021117.1,1418-1436).
gccccagagtcaattcaga

SEQ ID NO: 234022 - DNA, 19 bp, Homo sapiens
  siRNA target sequence for CRY2 (NM_021117.1,1438-1456).
ggcagccaagtgcatcatt

SEQ ID NO: 234023 - DNA, 19 bp, Homo sapiens
  siRNA target sequence for CRY2 (NM_021117.1,1498-1516).
cagccggcttaacattgaa

SEQ ID NO: 234024 - DNA, 19 bp, Homo sapiens
  siRNA target sequence for CRY2 (NM_021117.1,1514-1532).
gaacgaatgaagcagattt

SEQ ID NO: 234025 - DNA, 19 bp, Homo sapiens
  siRNA target sequence for HMGCL (NM_000191.1,132-150).
ccccgagatggactacaaa

SEQ ID NO: 234026 - DNA, 19 bp, Homo sapiens
  siRNA target sequence for HMGCL (NM_000191.1,133-151).
cccgagatggactacaaaa

SEQ ID NO: 234027 - DNA, 19 bp, Homo sapiens
  siRNA target sequence for HMGCL (NM_000191.1,153-171).
gaaaagaatatcgtatcta

SEQ ID NO: 234028 - DNA, 19 bp, Homo sapiens
  siRNA target sequence for HMGCL (NM_000191.1,169-187).
ctactccagtgaaaatcaa

SEQ ID NO: 234029 - DNA, 19 bp, Homo sapiens
  siRNA target sequence for HMGCL (NM_000191.1,213-231).
ggactctctgttatagaaa

SEQ ID NO: 234030 - DNA, 19 bp, Homo sapiens
  siRNA target sequence for HMGCL (NM_000191.1,285-303).
gtcttgaagggcattcaga

SEQ ID NO: 234031 - DNA, 19 bp, Homo sapiens
  siRNA target sequence for HMGCL (NM_000191.1,325-343).
cagtcctgaccccaaattt

SEQ ID NO: 234032 - DNA, 19 bp, Homo sapiens
  siRNA target sequence for HMGCL (NM_000191.1,327-345).
gtcctgaccccaaatttga

SEQ ID NO: 234033 - DNA, 19 bp, Homo sapiens
  siRNA target sequence for HMGCL (NM_000191.1,376-394).
ccaaggaagtagtcatctt

SEQ ID NO: 234034 - DNA, 19 bp, Homo sapiens
  siRNA target sequence for HMGCL (NM_000191.1,377-395).
caaggaagtagtcatcttt

SEQ ID NO: 234035 - DNA, 19 bp, Homo sapiens
  siRNA target sequence for HMGCL (NM_000191.1,419-437).
caagaagaacatcaattgt

SEQ ID NO: 234036 - DNA, 19 bp, Homo sapiens
  siRNA target sequence for HMGCL (NM_000191.1,436-454).
gttccatagaggagagttt

SEQ ID NO: 234037 - DNA, 19 bp, Homo sapiens
  siRNA target sequence for HMGCL (NM_000191.1,483-501).
gcgcagtcagccaatattt

SEQ ID NO: 234038 - DNA, 19 bp, Homo sapiens
  siRNA target sequence for HMGCL (NM_000191.1,551-569).
gatctccccagctaaagta

SEQ ID NO: 234039 - DNA, 19 bp, Homo sapiens
  siRNA target sequence for GUCY1A2 (NM_000855.1,722-740).
ggacactgcagtattatga

SEQ ID NO: 234040 - DNA, 19 bp, Homo sapiens
  siRNA target sequence for GUCY1A2 (NM_000855.1,723-741).
gacactgcagtattatgaa

SEQ ID NO: 234041 - DNA, 19 bp, Homo sapiens
  siRNA target sequence for GUCY1A2 (NM_000855.1,725-743).
cactgcagtattatgaaca

SEQ ID NO: 234042 - DNA, 19 bp, Homo sapiens
  siRNA target sequence for GUCY1A2 (NM_000855.1,739-757).
gaacatcaagttattggtt

SEQ ID NO: 234043 - DNA, 19 bp, Homo sapiens
  siRNA target sequence for GUCY1A2 (NM_000855.1,781-799).
cacaatatctctaacagat

SEQ ID NO: 234044 - DNA, 19 bp, Homo sapiens
  siRNA target sequence for GUCY1A2 (NM_000855.1,853-871).
cttcagtgtactgctaata

SEQ ID NO: 234045 - DNA, 19 bp, Homo sapiens
  siRNA target sequence for GUCY1A2 (NM_000855.1,905-923).
gatttggtgaagagttctt

SEQ ID NO: 234046 - DNA, 19 bp, Homo sapiens
  siRNA target sequence for GUCY1A2 (NM_000855.1,970-988).
ggcactttgcaggactttt

SEQ ID NO: 234047 - DNA, 19 bp, Homo sapiens
  siRNA target sequence for GUCY1A2 (NM_000855.1,1017-1035).
cattagaacttcttttgga

SEQ ID NO: 234048 - DNA, 19 bp, Homo sapiens
  siRNA target sequence for GUCY1A2 (NM_000855.1,1051-1069).
gagtcaccatctttcctat

SEQ ID NO: 234049 - DNA, 19 bp, Homo sapiens
  siRNA target sequence for GUCY1A2 (NM_000855.1,1120-1138).
catattgtggggtttgcaa

SEQ ID NO: 234050 - DNA, 19 bp, Homo sapiens
  siRNA target sequence for GUCY1A2 (NM_000855.1,1136-1154).
caatgctggggatgattaa

SEQ ID NO: 234051 - DNA, 19 bp, Homo sapiens
  siRNA target sequence for GUCY1A2 (NM_000855.1,1240-1258).
ggcaattgtagctgtctta

SEQ ID NO: 234052 - DNA, 19 bp, Homo sapiens
  siRNA target sequence for GUCY1A2 (NM_000855.1,1242-1260).
caattgtagctgtcttact

SEQ ID NO: 234053 - DNA, 19 bp, Homo sapiens
  siRNA target sequence for GUCY1A2 (NM_000855.1,1330-1348).
gcggacctcagaattagca

SEQ ID NO: 234054 - DNA, 19 bp, Homo sapiens
  siRNA target sequence for GUCY1A2 (NM_000855.1,1331-1349).
cggacctcagaattagcat

SEQ ID NO: 234055 - DNA, 19 bp, Homo sapiens
  siRNA target sequence for GUCY1A2 (NM_000855.1,1336-1354).
ctcagaattagcatcaaca

SEQ ID NO: 234056 - DNA, 19 bp, Homo sapiens
  siRNA target sequence for GUCY1A2 (NM_000855.1,1373-1391).
ctttccacttgatgtttga

SEQ ID NO: 234057 - DNA, 19 bp, Homo sapiens
  siRNA target sequence for GUCY1A2 (NM_000855.1,1442-1460).
gatgtgacactcacaaagt

SEQ ID NO: 234058 - DNA, 19 bp, Homo sapiens
  siRNA target sequence for GUCY1A2 (NM_000855.1,1473-1491).
ggactgcttcgagattgta

SEQ ID NO: 234059 - DNA, 19 bp, Homo sapiens
  siRNA target sequence for GUCY1A2 (NM_000855.1,1474-1492).
gactgcttcgagattgtat

SEQ ID NO: 234060 - DNA, 19 bp, Homo sapiens
  siRNA target sequence for GUCY1A2 (NM_000855.1,1476-1494).
ctgcttcgagattgtatct

SEQ ID NO: 234061 - DNA, 19 bp, Homo sapiens
  siRNA target sequence for GUCY1A2 (NM_000855.1,1500-1518).
ggttaatgccacctttgaa

SEQ ID NO: 234062 - DNA, 19 bp, Homo sapiens
  siRNA target sequence for GUCY1A2 (NM_000855.1,1536-1554).
gtctaccccgtttgtgatt

SEQ ID NO: 234063 - DNA, 19 bp, Homo sapiens
  siRNA target sequence for GUCY1A2 (NM_000855.1,1620-1638).
gatccatgttccagaatca

SEQ ID NO: 234064 - DNA, 19 bp, Homo sapiens
  siRNA target sequence for GUCY1A2 (NM_000855.1,1661-1679).
ctccatgtgtggacaagtt

SEQ ID NO: 234065 - DNA, 19 bp, Homo sapiens
  siRNA target sequence for GUCY1A2 (NM_000855.1,1736-1754).
cccgagatgtcattttggt

SEQ ID NO: 234066 - DNA, 19 bp, Homo sapiens
  siRNA target sequence for GUCY1A2 (NM_000855.1,1737-1755).
ccgagatgtcattttggtt

SEQ ID NO: 234067 - DNA, 19 bp, Homo sapiens
  siRNA target sequence for GUCY1A2 (NM_000855.1,1857-1875).
gacagtggatcttctatat

SEQ ID NO: 234068 - DNA, 19 bp, Homo sapiens
  siRNA target sequence for GUCY1A2 (NM_000855.1,1910-1928).
ggcaagggcagcaagtaca

SEQ ID NO: 234069 - DNA, 19 bp, Homo sapiens
  siRNA target sequence for GUCY1A2 (NM_000855.1,2000-2018).
gtactcccatgcaagtaat

SEQ ID NO: 234070 - DNA, 19 bp, Homo sapiens
  siRNA target sequence for GUCY1A2 (NM_000855.1,2058-2076).
gtgtggatttttggatatt

SEQ ID NO: 234071 - DNA, 19 bp, Homo sapiens
  siRNA target sequence for GUCY1A2 (NM_000855.1,2209-2227).
gatggaagaccgattcaga

SEQ ID NO: 234072 - DNA, 19 bp, Homo sapiens
  siRNA target sequence for GUCY1A2 (NM_000855.1,2274-2292).
ggtgcgaatgccacgttat

SEQ ID NO: 234073 - DNA, 19 bp, Homo sapiens
  siRNA target sequence for GUCY1A2 (NM_000855.1,2275-2293).
gtgcgaatgccacgttatt

SEQ ID NO: 234074 - DNA, 19 bp, Homo sapiens
  siRNA target sequence for GUCY1A2 (NM_000855.1,2287-2305).
cgttattgcctgtttggaa

SEQ ID NO: 234075 - DNA, 19 bp, Homo sapiens
  siRNA target sequence for GUCY1A2 (NM_000855.1,2311-2329).
gtcacactggcaagcaaat

SEQ ID NO: 234076 - DNA, 19 bp, Homo sapiens
  siRNA target sequence for GUCY1A2 (NM_000855.1,2315-2333).
cactggcaagcaaattcga

SEQ ID NO: 234077 - DNA, 19 bp, Homo sapiens
  siRNA target sequence for GUCY1A2 (NM_000855.1,2367-2385).
cccaaccacttaccaatta

SEQ ID NO: 234078 - DNA, 19 bp, Homo sapiens
  siRNA target sequence for GUCY1A2 (NM_000855.1,2368-2386).
ccaaccacttaccaattat

SEQ ID NO: 234079 - DNA, 19 bp, Homo sapiens
  siRNA target sequence for GUCY1A2 (NM_000855.1,2518-2536).
ctttcttcgtcgagaataa

SEQ ID NO: 234080 - DNA, 19 bp, Homo sapiens
  siRNA target sequence for GUCY1A2 (NM_000855.1,2522-2540).
cttcgtcgagaataaaaaa

SEQ ID NO: 234081 - DNA, 19 bp, Homo sapiens
  siRNA target sequence for GUCY1A3 (NM_000856.1,714-732).
cagtcggagccgagtctat

SEQ ID NO: 234082 - DNA, 19 bp, Homo sapiens
  siRNA target sequence for GUCY1A3 (NM_000856.1,716-734).
gtcggagccgagtctatct

SEQ ID NO: 234083 - DNA, 19 bp, Homo sapiens
  siRNA target sequence for GUCY1A3 (NM_000856.1,725-743).
gagtctatcttcacacttt

SEQ ID NO: 234084 - DNA, 19 bp, Homo sapiens
  siRNA target sequence for GUCY1A3 (NM_000856.1,748-766).
gagagtatttgcaaactga

SEQ ID NO: 234085 - DNA, 19 bp, Homo sapiens
  siRNA target sequence for GUCY1A3 (NM_000856.1,750-768).
gagtatttgcaaactgatt

SEQ ID NO: 234086 - DNA, 19 bp, Homo sapiens
  siRNA target sequence for GUCY1A3 (NM_000856.1,809-827).
cattggcaaagcacaaaat

SEQ ID NO: 234087 - DNA, 19 bp, Homo sapiens
  siRNA target sequence for GUCY1A3 (NM_000856.1,980-998).
ggttggaggcacccttaaa

SEQ ID NO: 234088 - DNA, 19 bp, Homo sapiens
  siRNA target sequence for GUCY1A3 (NM_000856.1,984-1002).
ggaggcacccttaaagatt

SEQ ID NO: 234089 - DNA, 19 bp, Homo sapiens
  siRNA target sequence for GUCY1A3 (NM_000856.1,985-1003).
gaggcacccttaaagattt

SEQ ID NO: 234090 - DNA, 19 bp, Homo sapiens
  siRNA target sequence for GUCY1A3 (NM_000856.1,1072-1090).
gaggacgcctccattctat

SEQ ID NO: 234091 - DNA, 19 bp, Homo sapiens
  siRNA target sequence for GUCY1A3 (NM_000856.1,1082-1100).
ccattctatgcctggataa

SEQ ID NO: 234092 - DNA, 19 bp, Homo sapiens
  siRNA target sequence for GUCY1A3 (NM_000856.1,1093-1111).
ctggataaggaggatgatt

SEQ ID NO: 234093 - DNA, 19 bp, Homo sapiens
  siRNA target sequence for GUCY1A3 (NM_000856.1,1155-1173).
gattcttcccggcatcata

SEQ ID NO: 234094 - DNA, 19 bp, Homo sapiens
  siRNA target sequence for GUCY1A3 (NM_000856.1,1178-1196).
cagctgctcacgtattata

SEQ ID NO: 234095 - DNA, 19 bp, Homo sapiens
  siRNA target sequence for GUCY1A3 (NM_000856.1,1204-1222).
gaagtggaagtgtcgttaa

SEQ ID NO: 234096 - DNA, 19 bp, Homo sapiens
  siRNA target sequence for GUCY1A3 (NM_000856.1,1224-1242).
gcctccctgcttccataat

SEQ ID NO: 234097 - DNA, 19 bp, Homo sapiens
  siRNA target sequence for GUCY1A3 (NM_000856.1,1226-1244).
ctccctgcttccataatga

SEQ ID NO: 234098 - DNA, 19 bp, Homo sapiens
  siRNA target sequence for GUCY1A3 (NM_000856.1,1258-1276).
gtgaatcagccctacttgt

SEQ ID NO: 234099 - DNA, 19 bp, Homo sapiens
  siRNA target sequence for GUCY1A3 (NM_000856.1,1278-1296).
gtactccgttcacatgaaa

SEQ ID NO: 234100 - DNA, 19 bp, Homo sapiens
  siRNA target sequence for GUCY1A3 (NM_000856.1,1389-1407).
gtttgacaaagatatgaca

SEQ ID NO: 234101 - DNA, 19 bp, Homo sapiens
  siRNA target sequence for GUCY1A3 (NM_000856.1,1520-1538).
gcgggatcatgactatgtt

SEQ ID NO: 234102 - DNA, 19 bp, Homo sapiens
  siRNA target sequence for GUCY1A3 (NM_000856.1,1616-1634).
gccaaatgatctacattgt

SEQ ID NO: 234103 - DNA, 19 bp, Homo sapiens
  siRNA target sequence for GUCY1A3 (NM_000856.1,1640-1658).
ccagtgcaatcttgttttt

SEQ ID NO: 234104 - DNA, 19 bp, Homo sapiens
  siRNA target sequence for GUCY1A3 (NM_000856.1,1677-1695).
cagattagaagattttaca

SEQ ID NO: 234105 - DNA, 19 bp, Homo sapiens
  siRNA target sequence for GUCY1A3 (NM_000856.1,1867-1885).
gaccttctgtgctccatat

SEQ ID NO: 234106 - DNA, 19 bp, Homo sapiens
  siRNA target sequence for GUCY1A3 (NM_000856.1,1927-1945).
gtgcaagccaagaagttca

SEQ ID NO: 234107 - DNA, 19 bp, Homo sapiens
  siRNA target sequence for GUCY1A3 (NM_000856.1,2119-2137).
gggggattacacaaagaga

SEQ ID NO: 234108 - DNA, 19 bp, Homo sapiens
  siRNA target sequence for GUCY1A3 (NM_000856.1,2207-2225).
ctccccatggagaacctat

SEQ ID NO: 234109 - DNA, 19 bp, Homo sapiens
  siRNA target sequence for GUCY1A3 (NM_000856.1,2242-2260).
ctgcactctggatcagttt

SEQ ID NO: 234110 - DNA, 19 bp, Homo sapiens
  siRNA target sequence for GUCY1A3 (NM_000856.1,2264-2282).
ctggcgtcgttggagttaa

SEQ ID NO: 234111 - DNA, 19 bp, Homo sapiens
  siRNA target sequence for GUCY1A3 (NM_000856.1,2266-2284).
ggcgtcgttggagttaaaa

SEQ ID NO: 234112 - DNA, 19 bp, Homo sapiens
  siRNA target sequence for GUCY1A3 (NM_000856.1,2267-2285).
gcgtcgttggagttaaaat

SEQ ID NO: 234113 - DNA, 19 bp, Homo sapiens
  siRNA target sequence for GUCY1A3 (NM_000856.1,2340-2358).
ctgcagtgtaccacgaaaa

SEQ ID NO: 234114 - DNA, 19 bp, Homo sapiens
  siRNA target sequence for GUCY1A3 (NM_000856.1,2350-2368).
ccacgaaaaatcaatgtca

SEQ ID NO: 234115 - DNA, 19 bp, Homo sapiens
  siRNA target sequence for GUCY1A3 (NM_000856.1,2369-2387).
gcccaacaacttacagatt

SEQ ID NO: 234116 - DNA, 19 bp, Homo sapiens
  siRNA target sequence for GUCY1A3 (NM_000856.1,2375-2393).
caacttacagattactcaa

SEQ ID NO: 234117 - DNA, 19 bp, Homo sapiens
  siRNA target sequence for GUCY1A3 (NM_000856.1,2463-2481).
ccccggaatctgccatttt

SEQ ID NO: 234118 - DNA, 19 bp, Homo sapiens
  siRNA target sequence for GUCY1A3 (NM_000856.1,2493-2511).
ccaacaaggaacaaactca

SEQ ID NO: 234119 - DNA, 19 bp, Homo sapiens
  siRNA target sequence for GUCY1A3 (NM_000856.1,2494-2512).
caacaaggaacaaactcaa

SEQ ID NO: 234120 - DNA, 19 bp, Homo sapiens
  siRNA target sequence for GUCY1A3 (NM_000856.1,2510-2528).
caaaaccatgcttccaaaa

SEQ ID NO: 234121 - DNA, 19 bp, Homo sapiens
  siRNA target sequence for GUCY1A3 (NM_000856.1,2574-2592).
gaatagattagcaacctat

SEQ ID NO: 234122 - DNA, 19 bp, Homo sapiens
  siRNA target sequence for GUCY1A3 (NM_000856.1,2584-2602).
gcaacctatatacctattt

SEQ ID NO: 234123 - DNA, 19 bp, Homo sapiens
  siRNA target sequence for GUCY1A3 (NM_000856.1,2585-2603).
caacctatatacctattta

SEQ ID NO: 234124 - DNA, 19 bp, Homo sapiens
  siRNA target sequence for GUCY1A3 (NM_000856.1,2615-2633).
ggtttgactcattgaagat

SEQ ID NO: 234125 - DNA, 19 bp, Homo sapiens
  siRNA target sequence for GUCY1B2 (NM_004129.1,360-378).
gttacctggcactctctta

SEQ ID NO: 234126 - DNA, 19 bp, Homo sapiens
  siRNA target sequence for GUCY1B2 (NM_004129.1,385-403).
gatgaatgcaccatcgttt

SEQ ID NO: 234127 - DNA, 19 bp, Homo sapiens
  siRNA target sequence for GUCY1B2 (NM_004129.1,472-490).
cattgtaccaggtatcatt

SEQ ID NO: 234128 - DNA, 19 bp, Homo sapiens
  siRNA target sequence for GUCY1B2 (NM_004129.1,532-550).
ggacattcttgacatgaat

SEQ ID NO: 234129 - DNA, 19 bp, Homo sapiens
  siRNA target sequence for GUCY1B2 (NM_004129.1,731-749).
gcttgtcctgtgaaaaaat

SEQ ID NO: 234130 - DNA, 19 bp, Homo sapiens
  siRNA target sequence for GUCY1B2 (NM_004129.1,757-775).
ggatgttgtgagaagcata

SEQ ID NO: 234131 - DNA, 19 bp, Homo sapiens
  siRNA target sequence for GUCY1B2 (NM_004129.1,877-895).
cattgtattcgatgaatca

SEQ ID NO: 234132 - DNA, 19 bp, Homo sapiens
  siRNA target sequence for GUCY1B2 (NM_004129.1,941-959).
ggactccaaacccagaata

SEQ ID NO: 234133 - DNA, 19 bp, Homo sapiens
  siRNA target sequence for GUCY1B2 (NM_004129.1,942-960).
gactccaaacccagaatat

SEQ ID NO: 234134 - DNA, 19 bp, Homo sapiens
  siRNA target sequence for GUCY1B2 (NM_004129.1,946-964).
ccaaacccagaatattcaa

SEQ ID NO: 234135 - DNA, 19 bp, Homo sapiens
  siRNA target sequence for GUCY1B2 (NM_004129.1,973-991).
gtatttctccatcattcat

SEQ ID NO: 234136 - DNA, 19 bp, Homo sapiens
  siRNA target sequence for GUCY1B2 (NM_004129.1,992-1010).
cctcaagttaccttcaaca

SEQ ID NO: 234137 - DNA, 19 bp, Homo sapiens
  siRNA target sequence for GUCY1B2 (NM_004129.1,993-1011).
ctcaagttaccttcaacat

SEQ ID NO: 234138 - DNA, 19 bp, Homo sapiens
  siRNA target sequence for GUCY1B2 (NM_004129.1,1017-1035).
gcatccgcagatttatcaa

SEQ ID NO: 234139 - DNA, 19 bp, Homo sapiens
  siRNA target sequence for GUCY1B2 (NM_004129.1,1026-1044).
gatttatcaacagtcaatt

SEQ ID NO: 234140 - DNA, 19 bp, Homo sapiens
  siRNA target sequence for GUCY1B2 (NM_004129.1,1048-1066).
cctgaagacacgaagagaa

SEQ ID NO: 234141 - DNA, 19 bp, Homo sapiens
  siRNA target sequence for GUCY1B2 (NM_004129.1,1089-1107).
gtcggactacactcaaact

SEQ ID NO: 234142 - DNA, 19 bp, Homo sapiens
  siRNA target sequence for GUCY1B2 (NM_004129.1,1193-1211).
gaactcaatatgcatcttt

SEQ ID NO: 234143 - DNA, 19 bp, Homo sapiens
  siRNA target sequence for GUCY1B2 (NM_004129.1,1462-1480).
cagcgatgtagtgacattt

SEQ ID NO: 234144 - DNA, 19 bp, Homo sapiens
  siRNA target sequence for GUCY1B2 (NM_004129.1,1465-1483).
cgatgtagtgacatttact

SEQ ID NO: 234145 - DNA, 19 bp, Homo sapiens
  siRNA target sequence for GUCY1B2 (NM_004129.1,1466-1484).
gatgtagtgacatttacta

SEQ ID NO: 234146 - DNA, 19 bp, Homo sapiens
  siRNA target sequence for GUCY1B2 (NM_004129.1,1491-1509).
gtactgcctgtgaacctat

SEQ ID NO: 234147 - DNA, 19 bp, Homo sapiens
  siRNA target sequence for GUCY1B2 (NM_004129.1,1494-1512).
ctgcctgtgaacctataca

SEQ ID NO: 234148 - DNA, 19 bp, Homo sapiens
  siRNA target sequence for GUCY1B2 (NM_004129.1,1496-1514).
gcctgtgaacctatacaaa

SEQ ID NO: 234149 - DNA, 19 bp, Homo sapiens
  siRNA target sequence for GUCY1B2 (NM_004129.1,1497-1515).
cctgtgaacctatacaaat

SEQ ID NO: 234150 - DNA, 19 bp, Homo sapiens
  siRNA target sequence for GUCY1B2 (NM_004129.1,1498-1516).
ctgtgaacctatacaaata

SEQ ID NO: 234151 - DNA, 19 bp, Homo sapiens
  siRNA target sequence for GUCY1B2 (NM_004129.1,1540-1558).
ctccaagtttgacagatta

SEQ ID NO: 234152 - DNA, 19 bp, Homo sapiens
  siRNA target sequence for GUCY1B2 (NM_004129.1,1563-1581).
gtgtgcacgcagtctataa

SEQ ID NO: 234153 - DNA, 19 bp, Homo sapiens
  siRNA target sequence for GUCY1B2 (NM_004129.1,1567-1585).
gcacgcagtctataaagta

SEQ ID NO: 234154 - DNA, 19 bp, Homo sapiens
  siRNA target sequence for GUCY1B2 (NM_004129.1,1570-1588).
cgcagtctataaagtagaa

SEQ ID NO: 234155 - DNA, 19 bp, Homo sapiens
  siRNA target sequence for GUCY1B2 (NM_004129.1,1638-1656).
gaaaccatgctcaaagagt

SEQ ID NO: 234156 - DNA, 19 bp, Homo sapiens
  siRNA target sequence for GUCY1B2 (NM_004129.1,1647-1665).
ctcaaagagtggctaattt

SEQ ID NO: 234157 - DNA, 19 bp, Homo sapiens
  siRNA target sequence for GUCY1B2 (NM_004129.1,1667-1685).
gccttggggatgagaattt

SEQ ID NO: 234158 - DNA, 19 bp, Homo sapiens
  siRNA target sequence for GUCY1B2 (NM_004129.1,1744-1762).
ccatactggaccagtctta

SEQ ID NO: 234159 - DNA, 19 bp, Homo sapiens
  siRNA target sequence for GUCY1B2 (NM_004129.1,1901-1919).
gggtttaaaatcattgaga

SEQ ID NO: 234160 - DNA, 19 bp, Homo sapiens
  siRNA target sequence for GUCY1B2 (NM_004129.1,1946-1964).
gggagaatgaccacatact

SEQ ID NO: 234161 - DNA, 19 bp, Homo sapiens
  siRNA target sequence for GUCY1B2 (NM_004129.1,1947-1965).
ggagaatgaccacatactt

SEQ ID NO: 234162 - DNA, 19 bp, Homo sapiens
  siRNA target sequence for GUCY1B2 (NM_004129.1,1948-1966).
gagaatgaccacatacttt

SEQ ID NO: 234163 - DNA, 19 bp, Homo sapiens
  siRNA target sequence for GUCY1B2 (NM_004129.1,1999-2017).
gatcatggggagatctaaa

SEQ ID NO: 234164 - DNA, 19 bp, Homo sapiens
  siRNA target sequence for GUCY1B2 (NM_004129.1,2013-2031).
ctaaaaccccagttgatca

SEQ ID NO: 234165 - DNA, 19 bp, Homo sapiens
  siRNA target sequence for GUCY1B2 (NM_004129.1,2114-2132).
cttgcatcctggttattat

SEQ ID NO: 234166 - DNA, 19 bp, Homo sapiens
  siRNA target sequence for GUCY1B3 (NM_000857.1,144-162).
ccgaggtgtgggaagacat

SEQ ID NO: 234167 - DNA, 19 bp, Homo sapiens
  siRNA target sequence for GUCY1B3 (NM_000857.1,148-166).
ggtgtgggaagacatcaaa

SEQ ID NO: 234168 - DNA, 19 bp, Homo sapiens
  siRNA target sequence for GUCY1B3 (NM_000857.1,192-210).
gacagtttcttgtcagaat

SEQ ID NO: 234169 - DNA, 19 bp, Homo sapiens
  siRNA target sequence for GUCY1B3 (NM_000857.1,256-274).
caaagtcctcaatctcaat

SEQ ID NO: 234170 - DNA, 19 bp, Homo sapiens
  siRNA target sequence for GUCY1B3 (NM_000857.1,313-331).
cgtcttttgccaagaatct

SEQ ID NO: 234171 - DNA, 19 bp, Homo sapiens
  siRNA target sequence for GUCY1B3 (NM_000857.1,321-339).
gccaagaatctggttatga

SEQ ID NO: 234172 - DNA, 19 bp, Homo sapiens
  siRNA target sequence for GUCY1B3 (NM_000857.1,326-344).
gaatctggttatgatacaa

SEQ ID NO: 234173 - DNA, 19 bp, Homo sapiens
  siRNA target sequence for GUCY1B3 (NM_000857.1,349-367).
gcgtgtcctgggctctaat

SEQ ID NO: 234174 - DNA, 19 bp, Homo sapiens
  siRNA target sequence for GUCY1B3 (NM_000857.1,359-377).
ggctctaatgtcagagaat

SEQ ID NO: 234175 - DNA, 19 bp, Homo sapiens
  siRNA target sequence for GUCY1B3 (NM_000857.1,360-378).
gctctaatgtcagagaatt

SEQ ID NO: 234176 - DNA, 19 bp, Homo sapiens
  siRNA target sequence for GUCY1B3 (NM_000857.1,361-379).
ctctaatgtcagagaattt

SEQ ID NO: 234177 - DNA, 19 bp, Homo sapiens
  siRNA target sequence for GUCY1B3 (NM_000857.1,434-452).
cgtgcaccttcctttaggt

SEQ ID NO: 234178 - DNA, 19 bp, Homo sapiens
  siRNA target sequence for GUCY1B3 (NM_000857.1,509-527).
ggacttcaggatattgtca

SEQ ID NO: 234179 - DNA, 19 bp, Homo sapiens
  siRNA target sequence for GUCY1B3 (NM_000857.1,554-572).
caaatccatggcactgaaa

SEQ ID NO: 234180 - DNA, 19 bp, Homo sapiens
  siRNA target sequence for GUCY1B3 (NM_000857.1,605-623).
gaatgtgatcatactcaat

SEQ ID NO: 234181 - DNA, 19 bp, Homo sapiens
  siRNA target sequence for GUCY1B3 (NM_000857.1,609-627).
gtgatcatactcaattttt

SEQ ID NO: 234182 - DNA, 19 bp, Homo sapiens
  siRNA target sequence for GUCY1B3 (NM_000857.1,707-725).
cgcatcagcccatatacat

SEQ ID NO: 234183 - DNA, 19 bp, Homo sapiens
  siRNA target sequence for GUCY1B3 (NM_000857.1,708-726).
gcatcagcccatatacatt

SEQ ID NO: 234184 - DNA, 19 bp, Homo sapiens
  siRNA target sequence for GUCY1B3 (NM_000857.1,777-795).
ctcagtgtggcaatgctat

SEQ ID NO: 234185 - DNA, 19 bp, Homo sapiens
  siRNA target sequence for GUCY1B3 (NM_000857.1,779-797).
cagtgtggcaatgctatat

SEQ ID NO: 234186 - DNA, 19 bp, Homo sapiens
  siRNA target sequence for GUCY1B3 (NM_000857.1,852-870).
cgctggttcgtcctcatat

SEQ ID NO: 234187 - DNA, 19 bp, Homo sapiens
  siRNA target sequence for GUCY1B3 (NM_000857.1,853-871).
gctggttcgtcctcatatt

SEQ ID NO: 234188 - DNA, 19 bp, Homo sapiens
  siRNA target sequence for GUCY1B3 (NM_000857.1,860-878).
cgtcctcatattgatatta

SEQ ID NO: 234189 - DNA, 19 bp, Homo sapiens
  siRNA target sequence for GUCY1B3 (NM_000857.1,888-906).
ggatcctttctcacatcaa

SEQ ID NO: 234190 - DNA, 19 bp, Homo sapiens
  siRNA target sequence for GUCY1B3 (NM_000857.1,897-915).
ctcacatcaatactgtttt

SEQ ID NO: 234191 - DNA, 19 bp, Homo sapiens
  siRNA target sequence for GUCY1B3 (NM_000857.1,1001-1019).
cgtctcaagggtcaaatga

SEQ ID NO: 234192 - DNA, 19 bp, Homo sapiens
  siRNA target sequence for GUCY1B3 (NM_000857.1,1009-1027).
gggtcaaatgatctactta

SEQ ID NO: 234193 - DNA, 19 bp, Homo sapiens
  siRNA target sequence for GUCY1B3 (NM_000857.1,1072-1090).
gaacctggacgatttgaca

SEQ ID NO: 234194 - DNA, 19 bp, Homo sapiens
  siRNA target sequence for GUCY1B3 (NM_000857.1,1131-1149).
ccacgcgcgatcttgttct

SEQ ID NO: 234195 - DNA, 19 bp, Homo sapiens
  siRNA target sequence for GUCY1B3 (NM_000857.1,1132-1150).
cacgcgcgatcttgttctt

SEQ ID NO: 234196 - DNA, 19 bp, Homo sapiens
  siRNA target sequence for GUCY1B3 (NM_000857.1,1213-1231).
gctacagctcacgttaaga

SEQ ID NO: 234197 - DNA, 19 bp, Homo sapiens
  siRNA target sequence for GUCY1B3 (NM_000857.1,1319-1337).
ccagtgcctgccaaaagat

SEQ ID NO: 234198 - DNA, 19 bp, Homo sapiens
  siRNA target sequence for GUCY1B3 (NM_000857.1,1441-1459).
cgacctctacaccagattt

SEQ ID NO: 234199 - DNA, 19 bp, Homo sapiens
  siRNA target sequence for GUCY1B3 (NM_000857.1,1511-1529).
gttggtgacaagtatatga

SEQ ID NO: 234200 - DNA, 19 bp, Homo sapiens
  siRNA target sequence for GUCY1B3 (NM_000857.1,1586-1604).
gccttggacatgatggaaa

SEQ ID NO: 234201 - DNA, 19 bp, Homo sapiens
  siRNA target sequence for GUCY1B3 (NM_000857.1,1608-1626).
ctggccaggttcaagtaga

SEQ ID NO: 234202 - DNA, 19 bp, Homo sapiens
  siRNA target sequence for GUCY1B3 (NM_000857.1,1669-1687).
ggtagttacaggtgtcata

SEQ ID NO: 234203 - DNA, 19 bp, Homo sapiens
  siRNA target sequence for GUCY1B3 (NM_000857.1,1693-1711).
gcggatgcctcgatactgt

SEQ ID NO: 234204 - DNA, 19 bp, Homo sapiens
  siRNA target sequence for GUCY1B3 (NM_000857.1,1710-1728).
gtctttttgggaatactgt

SEQ ID NO: 234205 - DNA, 19 bp, Homo sapiens
  siRNA target sequence for GUCY1B3 (NM_000857.1,1733-1751).
ctcacaagccgaacagaaa

SEQ ID NO: 234206 - DNA, 19 bp, Homo sapiens
  siRNA target sequence for SAC (NM_018417.2,215-233).
ctggcccatagtcagaata

SEQ ID NO: 234207 - DNA, 19 bp, Homo sapiens
  siRNA target sequence for SAC (NM_018417.2,227-245).
cagaatagcagctcattta

SEQ ID NO: 234208 - DNA, 19 bp, Homo sapiens
  siRNA target sequence for SAC (NM_018417.2,279-297).
gagcgaccctttatggatt

SEQ ID NO: 234209 - DNA, 19 bp, Homo sapiens
  siRNA target sequence for SAC (NM_018417.2,282-300).
cgaccctttatggattatt

SEQ ID NO: 234210 - DNA, 19 bp, Homo sapiens
  siRNA target sequence for SAC (NM_018417.2,305-323).
cggagtcctgatgtttgtt

SEQ ID NO: 234211 - DNA, 19 bp, Homo sapiens
  siRNA target sequence for SAC (NM_018417.2,307-325).
gagtcctgatgtttgttga

SEQ ID NO: 234212 - DNA, 19 bp, Homo sapiens
  siRNA target sequence for SAC (NM_018417.2,321-339).
gttgatatttcaggtttta

SEQ ID NO: 234213 - DNA, 19 bp, Homo sapiens
  siRNA target sequence for SAC (NM_018417.2,342-360).
gcaatgactgagaagttca

SEQ ID NO: 234214 - DNA, 19 bp, Homo sapiens
  siRNA target sequence for SAC (NM_018417.2,413-431).
ctaccacataagtgcaata

SEQ ID NO: 234215 - DNA, 19 bp, Homo sapiens
  siRNA target sequence for SAC (NM_018417.2,453-471).
ggaggagacatcctgaaat

SEQ ID NO: 234216 - DNA, 19 bp, Homo sapiens
  siRNA target sequence for SAC (NM_018417.2,507-525).
gagcgaaagcagctgaaaa

SEQ ID NO: 234217 - DNA, 19 bp, Homo sapiens
  siRNA target sequence for SAC (NM_018417.2,527-545).
cattatcacagtggtaatt

SEQ ID NO: 234218 - DNA, 19 bp, Homo sapiens
  siRNA target sequence for SAC (NM_018417.2,553-571).
gcctggagatccatggatt

SEQ ID NO: 234219 - DNA, 19 bp, Homo sapiens
  siRNA target sequence for SAC (NM_018417.2,729-747).
gctcagatgaatgatgtta

SEQ ID NO: 234220 - DNA, 19 bp, Homo sapiens
  siRNA target sequence for SAC (NM_018417.2,773-791).
ctgtgaccggagcatgatt

SEQ ID NO: 234221 - DNA, 19 bp, Homo sapiens
  siRNA target sequence for SAC (NM_018417.2,775-793).
gtgaccggagcatgattga

SEQ ID NO: 234222 - DNA, 19 bp, Homo sapiens
  siRNA target sequence for SAC (NM_018417.2,777-795).
gaccggagcatgattgaaa

SEQ ID NO: 234223 - DNA, 19 bp, Homo sapiens
  siRNA target sequence for SAC (NM_018417.2,779-797).
ccggagcatgattgaaatt

SEQ ID NO: 234224 - DNA, 19 bp, Homo sapiens
  siRNA target sequence for SAC (NM_018417.2,817-835).
gagcagttaaggttaactt

SEQ ID NO: 234225 - DNA, 19 bp, Homo sapiens
  siRNA target sequence for SAC (NM_018417.2,819-837).
gcagttaaggttaacttct

SEQ ID NO: 234226 - DNA, 19 bp, Homo sapiens
  siRNA target sequence for SAC (NM_018417.2,820-838).
cagttaaggttaacttctt

SEQ ID NO: 234227 - DNA, 19 bp, Homo sapiens
  siRNA target sequence for SAC (NM_018417.2,822-840).
gttaaggttaacttcttaa

SEQ ID NO: 234228 - DNA, 19 bp, Homo sapiens
  siRNA target sequence for SAC (NM_018417.2,827-845).
ggttaacttcttaaaacca

SEQ ID NO: 234229 - DNA, 19 bp, Homo sapiens
  siRNA target sequence for SAC (NM_018417.2,847-865).
cccccaattttaattttga

SEQ ID NO: 234230 - DNA, 19 bp, Homo sapiens
  siRNA target sequence for SAC (NM_018417.2,883-901).
gtacgaccttcatgcatta

SEQ ID NO: 234231 - DNA, 19 bp, Homo sapiens
  siRNA target sequence for SAC (NM_018417.2,886-904).
cgaccttcatgcattatta

SEQ ID NO: 234232 - DNA, 19 bp, Homo sapiens
  siRNA target sequence for SAC (NM_018417.2,887-905).
gaccttcatgcattattat

SEQ ID NO: 234233 - DNA, 19 bp, Homo sapiens
  siRNA target sequence for SAC (NM_018417.2,890-908).
cttcatgcattattatcct

SEQ ID NO: 234234 - DNA, 19 bp, Homo sapiens
  siRNA target sequence for SAC (NM_018417.2,910-928).
ctggtgagcacaaaaacct

SEQ ID NO: 234235 - DNA, 19 bp, Homo sapiens
  siRNA target sequence for SAC (NM_018417.2,966-984).
ctggagatgtccctacaaa

SEQ ID NO: 234236 - DNA, 19 bp, Homo sapiens
  siRNA target sequence for SAC (NM_018417.2,969-987).
gagatgtccctacaaaagt

SEQ ID NO: 234237 - DNA, 19 bp, Homo sapiens
  siRNA target sequence for SAC (NM_018417.2,971-989).
gatgtccctacaaaagtat

SEQ ID NO: 234238 - DNA, 19 bp, Homo sapiens
  siRNA target sequence for SAC (NM_018417.2,976-994).
ccctacaaaagtatgtgat

SEQ ID NO: 234239 - DNA, 19 bp, Homo sapiens
  siRNA target sequence for SAC (NM_018417.2,1070-1088).
gtttgtgaacctgatgttt

SEQ ID NO: 234240 - DNA, 19 bp, Homo sapiens
  siRNA target sequence for SAC (NM_018417.2,1123-1141).
ccatccaggatgcctatat

SEQ ID NO: 234241 - DNA, 19 bp, Homo sapiens
  siRNA target sequence for SAC (NM_018417.2,1341-1359).
gttgccagtgggattgtct

SEQ ID NO: 234242 - DNA, 19 bp, Homo sapiens
  siRNA target sequence for SAC (NM_018417.2,1425-1443).
gctgccaggatgatgatgt

SEQ ID NO: 234243 - DNA, 19 bp, Homo sapiens
  siRNA target sequence for SAC (NM_018417.2,1439-1457).
gatgtactacccaggaatt

SEQ ID NO: 234244 - DNA, 19 bp, Homo sapiens
  siRNA target sequence for SAC (NM_018417.2,1466-1484).
cgactctgtcacctacaat

SEQ ID NO: 234245 - DNA, 19 bp, Homo sapiens
  siRNA target sequence for SAC (NM_018417.2,1490-1508).
caacctaccagcgtacttt

SEQ ID NO: 234246 - DNA, 19 bp, Homo sapiens
  siRNA target sequence for SAC (NM_018417.2,1546-1564).
cagattctggaccattgta

SEQ ID NO: 234247 - DNA, 19 bp, Homo sapiens
  siRNA target sequence for SAC (NM_018417.2,1552-1570).
ctggaccattgtatcagta

SEQ ID NO: 234248 - DNA, 19 bp, Homo sapiens
  siRNA target sequence for SAC (NM_018417.2,1554-1572).
ggaccattgtatcagtatt

SEQ ID NO: 234249 - DNA, 19 bp, Homo sapiens
  siRNA target sequence for SAC (NM_018417.2,1576-1594).
gccgtactgagaaagtcat

SEQ ID NO: 234250 - DNA, 19 bp, Homo sapiens
  siRNA target sequence for SAC (NM_018417.2,1638-1656).
cctttgctgggacgtaata

SEQ ID NO: 234251 - DNA, 19 bp, Homo sapiens
  siRNA target sequence for SAC (NM_018417.2,1659-1677).
gagatcaactacttcatgt

SEQ ID NO: 234252 - DNA, 19 bp, Homo sapiens
  siRNA target sequence for SAC (NM_018417.2,1664-1682).
caactacttcatgtatact

SEQ ID NO: 234253 - DNA, 19 bp, Homo sapiens
  siRNA target sequence for SAC (NM_018417.2,1708-1726).
gcagccaagtcttaatgta

SEQ ID NO: 234254 - DNA, 19 bp, Homo sapiens
  siRNA target sequence for SAC (NM_018417.2,1732-1750).
gattaccaggatatggaaa

SEQ ID NO: 234255 - DNA, 19 bp, Homo sapiens
  siRNA target sequence for SAC (NM_018417.2,1746-1764).
ggaaaaagccagatactta

SEQ ID NO: 234256 - DNA, 19 bp, Homo sapiens
  siRNA target sequence for SAC (NM_018417.2,1788-1806).
ggtaagaatcacaggatta

SEQ ID NO: 234257 - DNA, 19 bp, Homo sapiens
  siRNA target sequence for SAC (NM_018417.2,1826-1844).
gatcagcttccatcaaact

SEQ ID NO: 234258 - DNA, 19 bp, Homo sapiens
  siRNA target sequence for SAC (NM_018417.2,1836-1854).
catcaaactttctatacca

SEQ ID NO: 234259 - DNA, 19 bp, Homo sapiens
  siRNA target sequence for SAC (NM_018417.2,1878-1896).
ctaggcctagacacttgta

SEQ ID NO: 234260 - DNA, 19 bp, Homo sapiens
  siRNA target sequence for SAC (NM_018417.2,1882-1900).
gcctagacacttgtaaaca

SEQ ID NO: 234261 - DNA, 19 bp, Homo sapiens
  siRNA target sequence for SAC (NM_018417.2,1891-1909).
cttgtaaacattataaaga

SEQ ID NO: 234262 - DNA, 19 bp, Homo sapiens
  siRNA target sequence for SAC (NM_018417.2,1912-1930).
gacagaccaaccttcgaaa

SEQ ID NO: 234263 - DNA, 19 bp, Homo sapiens
  siRNA target sequence for SAC (NM_018417.2,1914-1932).
cagaccaaccttcgaaata

SEQ ID NO: 234264 - DNA, 19 bp, Homo sapiens
  siRNA target sequence for SAC (NM_018417.2,1918-1936).
ccaaccttcgaaataaagt

SEQ ID NO: 234265 - DNA, 19 bp, Homo sapiens
  siRNA target sequence for SAC (NM_018417.2,1958-1976).
gttctactgtcttcttaat

SEQ ID NO: 234266 - DNA, 19 bp, Homo sapiens
  siRNA target sequence for SAC (NM_018417.2,1998-2016).
cctatttctcgggagattt

SEQ ID NO: 234267 - DNA, 19 bp, Homo sapiens
  siRNA target sequence for SAC (NM_018417.2,2137-2155).
cgacctcctggagatttat

SEQ ID NO: 234268 - DNA, 19 bp, Homo sapiens
  siRNA target sequence for SAC (NM_018417.2,2169-2187).
cggactcttcctatcttca

SEQ ID NO: 234269 - DNA, 19 bp, Homo sapiens
  siRNA target sequence for SAC (NM_018417.2,2199-2217).
ctgtgtcccttcgttaaca

SEQ ID NO: 234270 - DNA, 19 bp, Homo sapiens
  siRNA target sequence for SAC (NM_018417.2,2201-2219).
gtgtcccttcgttaacatt

SEQ ID NO: 234271 - DNA, 19 bp, Homo sapiens
  siRNA target sequence for SAC (NM_018417.2,2229-2247).
gctgccagggccgtaataa

SEQ ID NO: 234272 - DNA, 19 bp, Homo sapiens
  siRNA target sequence for SAC (NM_018417.2,2230-2248).
ctgccagggccgtaataaa

SEQ ID NO: 234273 - DNA, 19 bp, Homo sapiens
  siRNA target sequence for SAC (NM_018417.2,2232-2250).
gccagggccgtaataaaga

SEQ ID NO: 234274 - DNA, 19 bp, Homo sapiens
  siRNA target sequence for SAC (NM_018417.2,2233-2251).
ccagggccgtaataaagaa

SEQ ID NO: 234275 - DNA, 19 bp, Homo sapiens
  siRNA target sequence for SAC (NM_018417.2,2252-2270).
caggaacaccacctacatt

SEQ ID NO: 234276 - DNA, 19 bp, Homo sapiens
  siRNA target sequence for SAC (NM_018417.2,2254-2272).
ggaacaccacctacattgt

SEQ ID NO: 234277 - DNA, 19 bp, Homo sapiens
  siRNA target sequence for SAC (NM_018417.2,2370-2388).
ggaagctgtgggattccat

SEQ ID NO: 234278 - DNA, 19 bp, Homo sapiens
  siRNA target sequence for SAC (NM_018417.2,2371-2389).
gaagctgtgggattccatt

SEQ ID NO: 234279 - DNA, 19 bp, Homo sapiens
  siRNA target sequence for SAC (NM_018417.2,2374-2392).
gctgtgggattccatttta

SEQ ID NO: 234280 - DNA, 19 bp, Homo sapiens
  siRNA target sequence for SAC (NM_018417.2,2479-2497).
ggaataacctgttcaagta

SEQ ID NO: 234281 - DNA, 19 bp, Homo sapiens
  siRNA target sequence for SAC (NM_018417.2,2480-2498).
gaataacctgttcaagtat

SEQ ID NO: 234282 - DNA, 19 bp, Homo sapiens
  siRNA target sequence for SAC (NM_018417.2,2486-2504).
cctgttcaagtattccatt

SEQ ID NO: 234283 - DNA, 19 bp, Homo sapiens
  siRNA target sequence for SAC (NM_018417.2,2529-2547).
gttactctccatagtgata

SEQ ID NO: 234284 - DNA, 19 bp, Homo sapiens
  siRNA target sequence for SAC (NM_018417.2,2578-2596).
gtggtgtcagactgaaaaa

SEQ ID NO: 234285 - DNA, 19 bp, Homo sapiens
  siRNA target sequence for SAC (NM_018417.2,2605-2623).
ctccaacgtcattaaaaga

SEQ ID NO: 234286 - DNA, 19 bp, Homo sapiens
  siRNA target sequence for SAC (NM_018417.2,2726-2744).
gattctcccctgttggaat

SEQ ID NO: 234287 - DNA, 19 bp, Homo sapiens
  siRNA target sequence for SAC (NM_018417.2,2769-2787).
gcaaccctagtggaatcta

SEQ ID NO: 234288 - DNA, 19 bp, Homo sapiens
  siRNA target sequence for SAC (NM_018417.2,2770-2788).
caaccctagtggaatctaa

SEQ ID NO: 234289 - DNA, 19 bp, Homo sapiens
  siRNA target sequence for SAC (NM_018417.2,2773-2791).
ccctagtggaatctaacat

SEQ ID NO: 234290 - DNA, 19 bp, Homo sapiens
  siRNA target sequence for SAC (NM_018417.2,2774-2792).
cctagtggaatctaacatt

SEQ ID NO: 234291 - DNA, 19 bp, Homo sapiens
  siRNA target sequence for SAC (NM_018417.2,2775-2793).
ctagtggaatctaacattt

SEQ ID NO: 234292 - DNA, 19 bp, Homo sapiens
  siRNA target sequence for SAC (NM_018417.2,2778-2796).
gtggaatctaacatttttt

SEQ ID NO: 234293 - DNA, 19 bp, Homo sapiens
  siRNA target sequence for SAC (NM_018417.2,2954-2972).
ccacaggattcgattctgt

SEQ ID NO: 234294 - DNA, 19 bp, Homo sapiens
  siRNA target sequence for SAC (NM_018417.2,2965-2983).
gattctgtaaccctatgat

SEQ ID NO: 234295 - DNA, 19 bp, Homo sapiens
  siRNA target sequence for SAC (NM_018417.2,3043-3061).
gtgcccgctttttagaaga

SEQ ID NO: 234296 - DNA, 19 bp, Homo sapiens
  siRNA target sequence for SAC (NM_018417.2,3132-3150).
cggctcaacgctttagaca

SEQ ID NO: 234297 - DNA, 19 bp, Homo sapiens
  siRNA target sequence for SAC (NM_018417.2,3133-3151).
ggctcaacgctttagacat

SEQ ID NO: 234298 - DNA, 19 bp, Homo sapiens
  siRNA target sequence for SAC (NM_018417.2,3176-3194).
gtctcatggatttaaaact

SEQ ID NO: 234299 - DNA, 19 bp, Homo sapiens
  siRNA target sequence for SAC (NM_018417.2,3323-3341).
gacatctgacgaagacatt

SEQ ID NO: 234300 - DNA, 19 bp, Homo sapiens
  siRNA target sequence for SAC (NM_018417.2,3325-3343).
catctgacgaagacattat

SEQ ID NO: 234301 - DNA, 19 bp, Homo sapiens
  siRNA target sequence for SAC (NM_018417.2,3429-3447).
gacaaagccttatattact

SEQ ID NO: 234302 - DNA, 19 bp, Homo sapiens
  siRNA target sequence for SAC (NM_018417.2,3597-3615).
ggtgaggtctgtttcaata

SEQ ID NO: 234303 - DNA, 19 bp, Homo sapiens
  siRNA target sequence for SAC (NM_018417.2,3598-3616).
gtgaggtctgtttcaatat

SEQ ID NO: 234304 - DNA, 19 bp, Homo sapiens
  siRNA target sequence for SAC (NM_018417.2,3623-3641).
gatagtgcttgccaagaaa

SEQ ID NO: 234305 - DNA, 19 bp, Homo sapiens
  siRNA target sequence for SAC (NM_018417.2,3662-3680).
gctcctcaaccgaatcttt

SEQ ID NO: 234306 - DNA, 19 bp, Homo sapiens
  siRNA target sequence for SAC (NM_018417.2,3672-3690).
cgaatctttccttacaact

SEQ ID NO: 234307 - DNA, 19 bp, Homo sapiens
  siRNA target sequence for SAC (NM_018417.2,3697-3715).
ccttgtttctccatatcca

SEQ ID NO: 234308 - DNA, 19 bp, Homo sapiens
  siRNA target sequence for SAC (NM_018417.2,3708-3726).
catatccatgtcgagaaaa

SEQ ID NO: 234309 - DNA, 19 bp, Homo sapiens
  siRNA target sequence for SAC (NM_018417.2,3730-3748).
gacactttcattatgtgaa

SEQ ID NO: 234310 - DNA, 19 bp, Homo sapiens
  siRNA target sequence for SAC (NM_018417.2,3824-3842).
cttgctgtggcgcatctat

SEQ ID NO: 234311 - DNA, 19 bp, Homo sapiens
  siRNA target sequence for SAC (NM_018417.2,3834-3852).
cgcatctatagctacagtt

SEQ ID NO: 234312 - DNA, 19 bp, Homo sapiens
  siRNA target sequence for SAC (NM_018417.2,3836-3854).
catctatagctacagttat

SEQ ID NO: 234313 - DNA, 19 bp, Homo sapiens
  siRNA target sequence for SAC (NM_018417.2,3839-3857).
ctatagctacagttatctt

SEQ ID NO: 234314 - DNA, 19 bp, Homo sapiens
  siRNA target sequence for SAC (NM_018417.2,3876-3894).
gcccacctggcagttatga

SEQ ID NO: 234315 - DNA, 19 bp, Homo sapiens
  siRNA target sequence for SAC (NM_018417.2,3877-3895).
cccacctggcagttatgat

SEQ ID NO: 234316 - DNA, 19 bp, Homo sapiens
  siRNA target sequence for SAC (NM_018417.2,3882-3900).
ctggcagttatgatgcaaa

SEQ ID NO: 234317 - DNA, 19 bp, Homo sapiens
  siRNA target sequence for SAC (NM_018417.2,3971-3989).
ccacctggctggctacaaa

SEQ ID NO: 234318 - DNA, 19 bp, Homo sapiens
  siRNA target sequence for SAC (NM_018417.2,3997-4015).
ggttcaaatatgaagtcat

SEQ ID NO: 234319 - DNA, 19 bp, Homo sapiens
  siRNA target sequence for SAC (NM_018417.2,4051-4069).
gcgagggcattgaaatcgt

SEQ ID NO: 234320 - DNA, 19 bp, Homo sapiens
  siRNA target sequence for SAC (NM_018417.2,4081-4099).
ctgagacactggtcttcaa

SEQ ID NO: 234321 - DNA, 19 bp, Homo sapiens
  siRNA target sequence for SAC (NM_018417.2,4194-4212).
cagtccctctgcagactta

SEQ ID NO: 234322 - DNA, 19 bp, Homo sapiens
  siRNA target sequence for SAC (NM_018417.2,4234-4252).
gcagatacccgcaattgat

SEQ ID NO: 234323 - DNA, 19 bp, Homo sapiens
  siRNA target sequence for SAC (NM_018417.2,4304-4322).
cagcaaggcatttttctat

SEQ ID NO: 234324 - DNA, 19 bp, Homo sapiens
  siRNA target sequence for SAC (NM_018417.2,4488-4506).
gaatgggacaacttttaca

SEQ ID NO: 234325 - DNA, 19 bp, Homo sapiens
  siRNA target sequence for SAC (NM_018417.2,4543-4561).
gaaccatgacacttactta

SEQ ID NO: 234326 - DNA, 19 bp, Homo sapiens
  siRNA target sequence for SAC (NM_018417.2,4619-4637).
caaagaacagtcagagaat

SEQ ID NO: 234327 - DNA, 19 bp, Homo sapiens
  siRNA target sequence for SAC (NM_018417.2,4653-4671).
gaggagctactcaagaact

SEQ ID NO: 234328 - DNA, 19 bp, Homo sapiens
  siRNA target sequence for SAC (NM_018417.2,4733-4751).
gatggcttacgtctgtata

SEQ ID NO: 234329 - DNA, 19 bp, Homo sapiens
  siRNA target sequence for SAC (NM_018417.2,4736-4754).
ggcttacgtctgtatatta

SEQ ID NO: 234330 - DNA, 19 bp, Homo sapiens
  siRNA target sequence for SAC (NM_018417.2,4794-4812).
gccttgcggctctctgaaa

SEQ ID NO: 234331 - DNA, 19 bp, Homo sapiens
  siRNA target sequence for SAC (NM_018417.2,4796-4814).
cttgcggctctctgaaaca

SEQ ID NO: 234332 - DNA, 19 bp, Homo sapiens
  siRNA target sequence for SAC (NM_018417.2,4870-4888).
caacctctgagttaaaaga

SEQ ID NO: 234333 - DNA, 19 bp, Homo sapiens
  siRNA target sequence for SAC (NM_018417.2,4938-4956).
gtagcaggcagggtaaaca

SEQ ID NO: 234334 - DNA, 19 bp, Homo sapiens
  siRNA target sequence for SAC (NM_018417.2,4955-4973).
cattcaggatcttcaaaaa

SEQ ID NO: 234335 - DNA, 19 bp, Homo sapiens
  siRNA target sequence for SAC (NM_018417.2,4993-5011).
ctaataccgtggacaatca

SEQ ID NO: 234336 - DNA, 19 bp, Homo sapiens
  siRNA target sequence for CGI-150 (NM_016080.2,66-84).
gagctctgcacttcgtatt

SEQ ID NO: 234337 - DNA, 19 bp, Homo sapiens
  siRNA target sequence for CGI-150 (NM_016080.2,148-166).
gcggcatgaggaatttgaa

SEQ ID NO: 234338 - DNA, 19 bp, Homo sapiens
  siRNA target sequence for CGI-150 (NM_016080.2,257-275).
gcagaactgacttacaatt

SEQ ID NO: 234339 - DNA, 19 bp, Homo sapiens
  siRNA target sequence for CGI-150 (NM_016080.2,258-276).
cagaactgacttacaatta

SEQ ID NO: 234340 - DNA, 19 bp, Homo sapiens
  siRNA target sequence for CGI-150 (NM_016080.2,292-310).
caagcttggcaatgacttt

SEQ ID NO: 234341 - DNA, 19 bp, Homo sapiens
  siRNA target sequence for CGI-150 (NM_016080.2,411-429).
cgggaggatataagttcta

SEQ ID NO: 234342 - DNA, 19 bp, Homo sapiens
  siRNA target sequence for CGI-150 (NM_016080.2,412-430).
gggaggatataagttctat

SEQ ID NO: 234343 - DNA, 19 bp, Homo sapiens
  siRNA target sequence for CGI-150 (NM_016080.2,413-431).
ggaggatataagttctatt

SEQ ID NO: 234344 - DNA, 19 bp, Homo sapiens
  siRNA target sequence for CGI-150 (NM_016080.2,414-432).
gaggatataagttctattt

SEQ ID NO: 234345 - DNA, 19 bp, Homo sapiens
  siRNA target sequence for CGI-150 (NM_016080.2,494-512).
cttcaaaagtccttgaact

SEQ ID NO: 234346 - DNA, 19 bp, Homo sapiens
  siRNA target sequence for CGI-150 (NM_016080.2,505-523).
cttgaactactggtgtaat

SEQ ID NO: 234347 - DNA, 19 bp, Homo sapiens
  siRNA target sequence for CGI-150 (NM_016080.2,508-526).
gaactactggtgtaatcta

SEQ ID NO: 234348 - DNA, 19 bp, Homo sapiens
  siRNA target sequence for CGI-150 (NM_016080.2,666-684).
cttgcccccagaaagagtt

SEQ ID NO: 234349 - DNA, 19 bp, Homo sapiens
  siRNA target sequence for CGI-150 (NM_016080.2,754-772).
cccagggaaagcaacagta

SEQ ID NO: 234350 - DNA, 19 bp, Homo sapiens
  siRNA target sequence for CGI-150 (NM_016080.2,790-808).
cgaccctgacggacatgaa

SEQ ID NO: 234351 - DNA, 19 bp, Homo sapiens
  siRNA target sequence for CGI-150 (NM_016080.2,793-811).
ccctgacggacatgaaatt

SEQ ID NO: 234352 - DNA, 19 bp, Homo sapiens
  siRNA target sequence for CGI-150 (NM_016080.2,799-817).
cggacatgaaatttgcttt

SEQ ID NO: 234353 - DNA, 19 bp, Homo sapiens
  siRNA target sequence for CGI-150 (NM_016080.2,820-838).
cggggatgaagcatttcga

SEQ ID NO: 234354 - DNA, 19 bp, Homo sapiens
  siRNA target sequence for CGI-150 (NM_016080.2,912-930).
ggtttgccaaacacaataa

SEQ ID NO: 234355 - DNA, 19 bp, Homo sapiens
  siRNA target sequence for GLO1 (NM_006708.1,157-175).
gaccccagtaccaaggatt

SEQ ID NO: 234356 - DNA, 19 bp, Homo sapiens
  siRNA target sequence for GLO1 (NM_006708.1,162-180).
cagtaccaaggattttcta

SEQ ID NO: 234357 - DNA, 19 bp, Homo sapiens
  siRNA target sequence for GLO1 (NM_006708.1,164-182).
gtaccaaggattttctatt

SEQ ID NO: 234358 - DNA, 19 bp, Homo sapiens
  siRNA target sequence for GLO1 (NM_006708.1,167-185).
ccaaggattttctattgca

SEQ ID NO: 234359 - DNA, 19 bp, Homo sapiens
  siRNA target sequence for GLO1 (NM_006708.1,200-218).
gagtgaaggatcctaagaa

SEQ ID NO: 234360 - DNA, 19 bp, Homo sapiens
  siRNA target sequence for GLO1 (NM_006708.1,219-237).
gtcactggatttttatact

SEQ ID NO: 234361 - DNA, 19 bp, Homo sapiens
  siRNA target sequence for GLO1 (NM_006708.1,225-243).
ggatttttatactagagtt

SEQ ID NO: 234362 - DNA, 19 bp, Homo sapiens
  siRNA target sequence for GLO1 (NM_006708.1,248-266).
gaatgacgctaatccaaaa

SEQ ID NO: 234363 - DNA, 19 bp, Homo sapiens
  siRNA target sequence for GLO1 (NM_006708.1,252-270).
gacgctaatccaaaaatgt

SEQ ID NO: 234364 - DNA, 19 bp, Homo sapiens
  siRNA target sequence for GLO1 (NM_006708.1,357-375).
ctgggcgctctccagaaaa

SEQ ID NO: 234365 - DNA, 19 bp, Homo sapiens
  siRNA target sequence for GLO1 (NM_006708.1,361-379).
gcgctctccagaaaagcta

SEQ ID NO: 234366 - DNA, 19 bp, Homo sapiens
  siRNA target sequence for GLO1 (NM_006708.1,366-384).
ctccagaaaagctacactt

SEQ ID NO: 234367 - DNA, 19 bp, Homo sapiens
  siRNA target sequence for GLO1 (NM_006708.1,396-414).
caattggggcactgaagat

SEQ ID NO: 234368 - DNA, 19 bp, Homo sapiens
  siRNA target sequence for GLO1 (NM_006708.1,452-470).
ctcgaggattcggtcatat

SEQ ID NO: 234369 - DNA, 19 bp, Homo sapiens
  siRNA target sequence for GLO1 (NM_006708.1,457-475).
ggattcggtcatattggaa

SEQ ID NO: 234370 - DNA, 19 bp, Homo sapiens
  siRNA target sequence for GLO1 (NM_006708.1,458-476).
gattcggtcatattggaat

SEQ ID NO: 234371 - DNA, 19 bp, Homo sapiens
  siRNA target sequence for GLO1 (NM_006708.1,520-538).
ctgggagtcaaatttgtga

SEQ ID NO: 234372 - DNA, 19 bp, Homo sapiens
  siRNA target sequence for HCCS (NM_005333.1,276-294).
cgatgcatgaagggaaaat

SEQ ID NO: 234373 - DNA, 19 bp, Homo sapiens
  siRNA target sequence for HCCS (NM_005333.1,327-345).
gcccaacctgtgagaagaa

SEQ ID NO: 234374 - DNA, 19 bp, Homo sapiens
  siRNA target sequence for HCCS (NM_005333.1,329-347).
ccaacctgtgagaagaaaa

SEQ ID NO: 234375 - DNA, 19 bp, Homo sapiens
  siRNA target sequence for HCCS (NM_005333.1,368-386).
caggaacgcgcctatgagt

SEQ ID NO: 234376 - DNA, 19 bp, Homo sapiens
  siRNA target sequence for HCCS (NM_005333.1,485-503).
cagccatttgcattgtcta

SEQ ID NO: 234377 - DNA, 19 bp, Homo sapiens
  siRNA target sequence for HCCS (NM_005333.1,579-597).
ggaatgcaatgttaaagaa

SEQ ID NO: 234378 - DNA, 19 bp, Homo sapiens
  siRNA target sequence for HCCS (NM_005333.1,580-598).
gaatgcaatgttaaagaaa

SEQ ID NO: 234379 - DNA, 19 bp, Homo sapiens
  siRNA target sequence for HCCS (NM_005333.1,726-744).
gtccttgtggtccatcatt

SEQ ID NO: 234380 - DNA, 19 bp, Homo sapiens
  siRNA target sequence for HCCS (NM_005333.1,728-746).
ccttgtggtccatcattga

SEQ ID NO: 234381 - DNA, 19 bp, Homo sapiens
  siRNA target sequence for HCCS (NM_005333.1,749-767).
cggtttggagggaaagcaa

SEQ ID NO: 234382 - DNA, 19 bp, Homo sapiens
  siRNA target sequence for HCCS (NM_005333.1,779-797).
ccaagggcacgaattcgtt

SEQ ID NO: 234383 - DNA, 19 bp, Homo sapiens
  siRNA target sequence for HCCS (NM_005333.1,828-846).
ggcacgattggatcataaa

SEQ ID NO: 234384 - DNA, 19 bp, Homo sapiens
  siRNA target sequence for HCCS (NM_005333.1,847-865).
ccgttgcgggacagaagtt

SEQ ID NO: 234385 - DNA, 19 bp, Homo sapiens
  siRNA target sequence for HCCS (NM_005333.1,848-866).
cgttgcgggacagaagtta

SEQ ID NO: 234386 - DNA, 19 bp, Homo sapiens
  siRNA target sequence for HCCS (NM_005333.1,852-870).
gcgggacagaagttagata

SEQ ID NO: 234387 - DNA, 19 bp, Homo sapiens
  siRNA target sequence for HCCS (NM_005333.1,853-871).
cgggacagaagttagatat

SEQ ID NO: 234388 - DNA, 19 bp, Homo sapiens
  siRNA target sequence for HCCS (NM_005333.1,855-873).
ggacagaagttagatatgt

SEQ ID NO: 234389 - DNA, 19 bp, Homo sapiens
  siRNA target sequence for HCCS (NM_005333.1,867-885).
gatatgtgattgattatta

SEQ ID NO: 234390 - DNA, 19 bp, Homo sapiens
  siRNA target sequence for HCCS (NM_005333.1,931-949).
cgtccgtcctgccttagat

SEQ ID NO: 234391 - DNA, 19 bp, Homo sapiens
  siRNA target sequence for HCCS (NM_005333.1,932-950).
gtccgtcctgccttagatt

SEQ ID NO: 234392 - DNA, 19 bp, Homo sapiens
  siRNA target sequence for HCCS (NM_005333.1,934-952).
ccgtcctgccttagattca

SEQ ID NO: 234393 - DNA, 19 bp, Homo sapiens
  siRNA target sequence for HCCS (NM_005333.1,957-975).
cggcagtatgggacagaat

SEQ ID NO: 234394 - DNA, 19 bp, Homo sapiens
  siRNA target sequence for HCCS (NM_005333.1,959-977).
gcagtatgggacagaatga

SEQ ID NO: 234395 - DNA, 19 bp, Homo sapiens
  siRNA target sequence for HCCS (NM_005333.1,960-978).
cagtatgggacagaatgaa

SEQ ID NO: 234396 - DNA, 19 bp, Homo sapiens
  siRNA target sequence for CTH (NM_001902.4,178-196).
ctgccacacttccaacatt

SEQ ID NO: 234397 - DNA, 19 bp, Homo sapiens
  siRNA target sequence for CTH (NM_001902.4,302-320).
gccagcactcgggttttga

SEQ ID NO: 234398 - DNA, 19 bp, Homo sapiens
  siRNA target sequence for CTH (NM_001902.4,303-321).
ccagcactcgggttttgaa

SEQ ID NO: 234399 - DNA, 19 bp, Homo sapiens
  siRNA target sequence for CTH (NM_001902.4,304-322).
cagcactcgggttttgaat

SEQ ID NO: 234400 - DNA, 19 bp, Homo sapiens
  siRNA target sequence for CTH (NM_001902.4,306-324).
gcactcgggttttgaatat

SEQ ID NO: 234401 - DNA, 19 bp, Homo sapiens
  siRNA target sequence for CTH (NM_001902.4,307-325).
cactcgggttttgaatata

SEQ ID NO: 234402 - DNA, 19 bp, Homo sapiens
  siRNA target sequence for CTH (NM_001902.4,374-392).
cactggatggggctaagta

SEQ ID NO: 234403 - DNA, 19 bp, Homo sapiens
  siRNA target sequence for CTH (NM_001902.4,402-420).
ctttgcttcaggtttagca

SEQ ID NO: 234404 - DNA, 19 bp, Homo sapiens
  siRNA target sequence for CTH (NM_001902.4,547-565).
gttgattgttccaaaatca

SEQ ID NO: 234405 - DNA, 19 bp, Homo sapiens
  siRNA target sequence for CTH (NM_001902.4,581-599).
caattacaccagaaaccaa

SEQ ID NO: 234406 - DNA, 19 bp, Homo sapiens
  siRNA target sequence for CTH (NM_001902.4,633-651).
ccagaaggtgattgacatt

SEQ ID NO: 234407 - DNA, 19 bp, Homo sapiens
  siRNA target sequence for CTH (NM_001902.4,659-677).
gtgcacatattgtccataa

SEQ ID NO: 234408 - DNA, 19 bp, Homo sapiens
  siRNA target sequence for CTH (NM_001902.4,672-690).
ccataagcatggagacatt

SEQ ID NO: 234409 - DNA, 19 bp, Homo sapiens
  siRNA target sequence for CTH (NM_001902.4,673-691).
cataagcatggagacatta

SEQ ID NO: 234410 - DNA, 19 bp, Homo sapiens
  siRNA target sequence for CTH (NM_001902.4,696-714).
ggtcgtggataacactttt

SEQ ID NO: 234411 - DNA, 19 bp, Homo sapiens
  siRNA target sequence for CTH (NM_001902.4,697-715).
gtcgtggataacactttta

SEQ ID NO: 234412 - DNA, 19 bp, Homo sapiens
  siRNA target sequence for CTH (NM_001902.4,700-718).
gtggataacacttttatgt

SEQ ID NO: 234413 - DNA, 19 bp, Homo sapiens
  siRNA target sequence for CTH (NM_001902.4,702-720).
ggataacacttttatgtca

SEQ ID NO: 234414 - DNA, 19 bp, Homo sapiens
  siRNA target sequence for CTH (NM_001902.4,708-726).
cacttttatgtcaccatat

SEQ ID NO: 234415 - DNA, 19 bp, Homo sapiens
  siRNA target sequence for CTH (NM_001902.4,749-767).
gagctgatatttctatgta

SEQ ID NO: 234416 - DNA, 19 bp, Homo sapiens
  siRNA target sequence for CTH (NM_001902.4,790-808).
ggccacagtgatgttgtaa

SEQ ID NO: 234417 - DNA, 19 bp, Homo sapiens
  siRNA target sequence for CTH (NM_001902.4,810-828).
gggcctggtgtctgttaat

SEQ ID NO: 234418 - DNA, 19 bp, Homo sapiens
  siRNA target sequence for CTH (NM_001902.4,811-829).
ggcctggtgtctgttaatt

SEQ ID NO: 234419 - DNA, 19 bp, Homo sapiens
  siRNA target sequence for CTH (NM_001902.4,813-831).
cctggtgtctgttaattgt

SEQ ID NO: 234420 - DNA, 19 bp, Homo sapiens
  siRNA target sequence for CTH (NM_001902.4,817-835).
gtgtctgttaattgtgaaa

SEQ ID NO: 234421 - DNA, 19 bp, Homo sapiens
  siRNA target sequence for CTH (NM_001902.4,848-866).
gacttcgtttcttgcaaaa

SEQ ID NO: 234422 - DNA, 19 bp, Homo sapiens
  siRNA target sequence for CTH (NM_001902.4,878-896).
cagttccatctcctattga

SEQ ID NO: 234423 - DNA, 19 bp, Homo sapiens
  siRNA target sequence for CTH (NM_001902.4,883-901).
ccatctcctattgattgtt

SEQ ID NO: 234424 - DNA, 19 bp, Homo sapiens
  siRNA target sequence for CTH (NM_001902.4,884-902).
catctcctattgattgtta

SEQ ID NO: 234425 - DNA, 19 bp, Homo sapiens
  siRNA target sequence for CTH (NM_001902.4,917-935).
gtctgaagactctacatgt

SEQ ID NO: 234426 - DNA, 19 bp, Homo sapiens
  siRNA target sequence for CTH (NM_001902.4,928-946).
ctacatgtccgaatggaaa

SEQ ID NO: 234427 - DNA, 19 bp, Homo sapiens
  siRNA target sequence for CTH (NM_001902.4,978-996).
gttcctggaatctaatcct

SEQ ID NO: 234428 - DNA, 19 bp, Homo sapiens
  siRNA target sequence for CTH (NM_001902.4,994-1012).
ccttgggtagaaaaggtta

SEQ ID NO: 234429 - DNA, 19 bp, Homo sapiens
  siRNA target sequence for CTH (NM_001902.4,995-1013).
cttgggtagaaaaggttat

SEQ ID NO: 234430 - DNA, 19 bp, Homo sapiens
  siRNA target sequence for CTH (NM_001902.4,1131-1149).
caagaacctaaagctattt

SEQ ID NO: 234431 - DNA, 19 bp, Homo sapiens
  siRNA target sequence for CTH (NM_001902.4,1161-1179).
gagcttgggaggattcgaa

SEQ ID NO: 234432 - DNA, 19 bp, Homo sapiens
  siRNA target sequence for CTH (NM_001902.4,1187-1205).
ctgagcttccggcaatcat

SEQ ID NO: 234433 - DNA, 19 bp, Homo sapiens
  siRNA target sequence for CTH (NM_001902.4,1189-1207).
gagcttccggcaatcatga

SEQ ID NO: 234434 - DNA, 19 bp, Homo sapiens
  siRNA target sequence for CTH (NM_001902.4,1210-1228).
catgcatcagttcttaaga

SEQ ID NO: 234435 - DNA, 19 bp, Homo sapiens
  siRNA target sequence for CTH (NM_001902.4,1259-1277).
cactgattcgactttctgt

SEQ ID NO: 234436 - DNA, 19 bp, Homo sapiens
  siRNA target sequence for SDS (NM_006843.2,196-214).
ccagcgtctacctcaagat

SEQ ID NO: 234437 - DNA, 19 bp, Homo sapiens
  siRNA target sequence for SDS (NM_006843.2,284-302).
gcaaggctgtgcacatttt

SEQ ID NO: 234438 - DNA, 19 bp, Homo sapiens
  siRNA target sequence for SDS (NM_006843.2,440-458).
caaggtggtgggtgagtta

SEQ ID NO: 234439 - DNA, 19 bp, Homo sapiens
  siRNA target sequence for SDS (NM_006843.2,503-521).
cccgggttgggtctacatt

SEQ ID NO: 234440 - DNA, 19 bp, Homo sapiens
  siRNA target sequence for SDS (NM_006843.2,695-713).
cgccatggagacttttggt

SEQ ID NO: 234441 - DNA, 19 bp, Homo sapiens
  siRNA target sequence for SDS (NM_006843.2,839-857).
ccccattttctctgaagtt

SEQ ID NO: 234442 - DNA, 19 bp, Homo sapiens
  siRNA target sequence for SDS (NM_006843.2,939-957).
gccctggccgctgtctata

SEQ ID NO: 234443 - DNA, 19 bp, Homo sapiens
  siRNA target sequence for SDS (NM_006843.2,1077-1095).
cagctgggcatgacaaata

SEQ ID NO: 234444 - DNA, 19 bp, Homo sapiens
  siRNA target sequence for CRYM (NM_001888.1,404-422).
ccattgccaccaagtttct

SEQ ID NO: 234445 - DNA, 19 bp, Homo sapiens
  siRNA target sequence for CRYM (NM_001888.1,531-549).
gaaccgcaccaaagaaaat

SEQ ID NO: 234446 - DNA, 19 bp, Homo sapiens
  siRNA target sequence for ASL (NM_000048.2,479-497).
ctctgggagctcattagga

SEQ ID NO: 234447 - DNA, 19 bp, Homo sapiens
  siRNA target sequence for ASL (NM_000048.2,519-537).
cggaacgtgatgttctctt

SEQ ID NO: 234448 - DNA, 19 bp, Homo sapiens
  siRNA target sequence for ASL (NM_000048.2,640-658).
ggtgcggaagcggatcaat

SEQ ID NO: 234449 - DNA, 19 bp, Homo sapiens
  siRNA target sequence for ASL (NM_000048.2,721-739).
ccgagcagaactcaacttt

SEQ ID NO: 234450 - DNA, 19 bp, Homo sapiens
  siRNA target sequence for ASL (NM_000048.2,771-789).
ctagtgagcgggactttgt

SEQ ID NO: 234451 - DNA, 19 bp, Homo sapiens
  siRNA target sequence for ASL (NM_000048.2,967-985).
caaggctgggcgtgtgttt

SEQ ID NO: 234452 - DNA, 19 bp, Homo sapiens
  siRNA target sequence for ASL (NM_000048.2,1109-1127).
gccactggcgtcatctcta

SEQ ID NO: 234453 - DNA, 19 bp, Homo sapiens
  siRNA target sequence for ADSL (NM_000026.1,75-93).
gagatgtgcttcgtgttta

SEQ ID NO: 234454 - DNA, 19 bp, Homo sapiens
  siRNA target sequence for ADSL (NM_000026.1,89-107).
gtttagcgacaggtataaa

SEQ ID NO: 234455 - DNA, 19 bp, Homo sapiens
  siRNA target sequence for ADSL (NM_000026.1,142-160).
cggaggccgagcagacatt

SEQ ID NO: 234456 - DNA, 19 bp, Homo sapiens
  siRNA target sequence for ADSL (NM_000026.1,167-185).
gcctatcacagatgaacaa

SEQ ID NO: 234457 - DNA, 19 bp, Homo sapiens
  siRNA target sequence for ADSL (NM_000026.1,239-257).
ggaagagaaacgtttacga

SEQ ID NO: 234458 - DNA, 19 bp, Homo sapiens
  siRNA target sequence for ADSL (NM_000026.1,269-287).
ggctcacgtgcacacattt

SEQ ID NO: 234459 - DNA, 19 bp, Homo sapiens
  siRNA target sequence for ADSL (NM_000026.1,341-359).
ctatgttggagacaatact

SEQ ID NO: 234460 - DNA, 19 bp, Homo sapiens
  siRNA target sequence for ADSL (NM_000026.1,349-367).
gagacaatactgacttgat

SEQ ID NO: 234461 - DNA, 19 bp, Homo sapiens
  siRNA target sequence for ADSL (NM_000026.1,423-441).
cggcttgccgactttgcta

SEQ ID NO: 234462 - DNA, 19 bp, Homo sapiens
  siRNA target sequence for ADSL (NM_000026.1,424-442).
ggcttgccgactttgctaa

SEQ ID NO: 234463 - DNA, 19 bp, Homo sapiens
  siRNA target sequence for ADSL (NM_000026.1,452-470).
cagtctacccacattaggt

SEQ ID NO: 234464 - DNA, 19 bp, Homo sapiens
  siRNA target sequence for ADSL (NM_000026.1,463-481).
cattaggtttcacacattt

SEQ ID NO: 234465 - DNA, 19 bp, Homo sapiens
  siRNA target sequence for ADSL (NM_000026.1,694-712).
gatttaagagagctttcat

SEQ ID NO: 234466 - DNA, 19 bp, Homo sapiens
  siRNA target sequence for ADSL (NM_000026.1,713-731).
catcacagggcagacatat

SEQ ID NO: 234467 - DNA, 19 bp, Homo sapiens
  siRNA target sequence for ADSL (NM_000026.1,778-796).
gggcatcagtgcacaagat

SEQ ID NO: 234468 - DNA, 19 bp, Homo sapiens
  siRNA target sequence for ADSL (NM_000026.1,984-1002).
gaacgcacactggatgata

SEQ ID NO: 234469 - DNA, 19 bp, Homo sapiens
  siRNA target sequence for ADSL (NM_000026.1,1021-1039).
gtttggccgaggcatttct

SEQ ID NO: 234470 - DNA, 19 bp, Homo sapiens
  siRNA target sequence for ADSL (NM_000026.1,1038-1056).
cttaccgcagatactatat

SEQ ID NO: 234471 - DNA, 19 bp, Homo sapiens
  siRNA target sequence for ADSL (NM_000026.1,1063-1081).
cgctgcagaacatttctga

SEQ ID NO: 234472 - DNA, 19 bp, Homo sapiens
  siRNA target sequence for ADSL (NM_000026.1,1088-1106).
ggtcgtgtaccccaaagta

SEQ ID NO: 234473 - DNA, 19 bp, Homo sapiens
  siRNA target sequence for ADSL (NM_000026.1,1089-1107).
gtcgtgtaccccaaagtaa

SEQ ID NO: 234474 - DNA, 19 bp, Homo sapiens
  siRNA target sequence for ADSL (NM_000026.1,1091-1109).
cgtgtaccccaaagtaatt

SEQ ID NO: 234475 - DNA, 19 bp, Homo sapiens
  siRNA target sequence for ADSL (NM_000026.1,1194-1212).
gattgccatgagaaaatca

SEQ ID NO: 234476 - DNA, 19 bp, Homo sapiens
  siRNA target sequence for ADSL (NM_000026.1,1247-1265).
gcaggaagggggtgacaat

SEQ ID NO: 234477 - DNA, 19 bp, Homo sapiens
  siRNA target sequence for ADSL (NM_000026.1,1284-1302).
caggttgatgcctacttca

SEQ ID NO: 234478 - DNA, 19 bp, Homo sapiens
  siRNA target sequence for ADSL (NM_000026.1,1311-1329).
cactcccagttggatcatt

SEQ ID NO: 234479 - DNA, 19 bp, Homo sapiens
  siRNA target sequence for ADSL (NM_000026.1,1313-1331).
ctcccagttggatcattta

SEQ ID NO: 234480 - DNA, 19 bp, Homo sapiens
  siRNA target sequence for ADSL (NM_000026.1,1392-1410).
gaggtgtatcccctgttaa

SEQ ID NO: 234481 - DNA, 19 bp, Homo sapiens
  siRNA target sequence for ADSL (NM_000026.1,1394-1412).
ggtgtatcccctgttaaaa

SEQ ID NO: 234482 - DNA, 19 bp, Homo sapiens
  siRNA target sequence for ADSL (NM_000026.1,1397-1415).
gtatcccctgttaaaacca

SEQ ID NO: 234483 - DNA, 19 bp, Homo sapiens
  siRNA target sequence for ADSL (NM_000026.1,1414-1432).
catatgaaagcgtgatgaa

SEQ ID NO: 234484 - DNA, 19 bp, Homo sapiens
  siRNA target sequence for C20orf3 (NM_020531.1,330-348).
cggagtccatagcacatat

SEQ ID NO: 234485 - DNA, 19 bp, Homo sapiens
  siRNA target sequence for C20orf3 (NM_020531.1,331-349).
ggagtccatagcacatatt

SEQ ID NO: 234486 - DNA, 19 bp, Homo sapiens
  siRNA target sequence for C20orf3 (NM_020531.1,532-550).
caagggactatttgaagta

SEQ ID NO: 234487 - DNA, 19 bp, Homo sapiens
  siRNA target sequence for FLJ10916 (NM_018271.2,100-118).
ccccacgggtcaactttga

SEQ ID NO: 234488 - DNA, 19 bp, Homo sapiens
  siRNA target sequence for FLJ10916 (NM_018271.2,272-290).
ccttccaaaagatgaatta

SEQ ID NO: 234489 - DNA, 19 bp, Homo sapiens
  siRNA target sequence for FLJ10916 (NM_018271.2,383-401).
gtggcatggcgtcacatat

SEQ ID NO: 234490 - DNA, 19 bp, Homo sapiens
  siRNA target sequence for FLJ10916 (NM_018271.2,386-404).
gcatggcgtcacatatgca

SEQ ID NO: 234491 - DNA, 19 bp, Homo sapiens
  siRNA target sequence for FLJ10916 (NM_018271.2,387-405).
catggcgtcacatatgcat

SEQ ID NO: 234492 - DNA, 19 bp, Homo sapiens
  siRNA target sequence for FLJ10916 (NM_018271.2,390-408).
ggcgtcacatatgcattta

SEQ ID NO: 234493 - DNA, 19 bp, Homo sapiens
  siRNA target sequence for FLJ10916 (NM_018271.2,542-560).
gaacatggacattatcgtt

SEQ ID NO: 234494 - DNA, 19 bp, Homo sapiens
  siRNA target sequence for FLJ10916 (NM_018271.2,574-592).
gtcactgcacaaagattca

SEQ ID NO: 234495 - DNA, 19 bp, Homo sapiens
  siRNA target sequence for FLJ10916 (NM_018271.2,591-609).
caggagctccagatgacaa

SEQ ID NO: 234496 - DNA, 19 bp, Homo sapiens
  siRNA target sequence for FLJ10916 (NM_018271.2,663-681).
ctcgatgagccgatcaaga

SEQ ID NO: 234497 - DNA, 19 bp, Homo sapiens
  siRNA target sequence for FLJ10916 (NM_018271.2,671-689).
gccgatcaagactgtgttt

SEQ ID NO: 234498 - DNA, 19 bp, Homo sapiens
  siRNA target sequence for FLJ10916 (NM_018271.2,690-708).
gccgatgtggcttttgtca

SEQ ID NO: 234499 - DNA, 19 bp, Homo sapiens
  siRNA target sequence for FLJ10916 (NM_018271.2,720-738).
ctgatgagcctgaattcga

SEQ ID NO: 234500 - DNA, 19 bp, Homo sapiens
  siRNA target sequence for FLJ10916 (NM_018271.2,764-782).
gatggcccatcacttcttt

SEQ ID NO: 234501 - DNA, 19 bp, Homo sapiens
  siRNA target sequence for FLJ10916 (NM_018271.2,866-884).
ccttgcagctgggtacatt

SEQ ID NO: 234502 - DNA, 19 bp, Homo sapiens
  siRNA target sequence for FLJ10916 (NM_018271.2,921-939).
gcagtgaaccgcaatgaca

SEQ ID NO: 234503 - DNA, 19 bp, Homo sapiens
  siRNA target sequence for FLJ10916 (NM_018271.2,973-991).
ctctctctgaggctgttaa

SEQ ID NO: 234504 - DNA, 19 bp, Homo sapiens
  siRNA target sequence for FLJ10916 (NM_018271.2,1156-1174).
gacaggactacgaaaaaat

SEQ ID NO: 234505 - DNA, 19 bp, Homo sapiens
  siRNA target sequence for LSS (NM_002340.2,216-234).
ggacaccaagaattacttt

SEQ ID NO: 234506 - DNA, 19 bp, Homo sapiens
  siRNA target sequence for LSS (NM_002340.2,217-235).
gacaccaagaattacttta

SEQ ID NO: 234507 - DNA, 19 bp, Homo sapiens
  siRNA target sequence for LSS (NM_002340.2,317-335).
ggcactggacgggtgatta

SEQ ID NO: 234508 - DNA, 19 bp, Homo sapiens
  siRNA target sequence for LSS (NM_002340.2,318-336).
gcactggacgggtgattat

SEQ ID NO: 234509 - DNA, 19 bp, Homo sapiens
  siRNA target sequence for LSS (NM_002340.2,321-339).
ctggacgggtgattatggt

SEQ ID NO: 234510 - DNA, 19 bp, Homo sapiens
  siRNA target sequence for LSS (NM_002340.2,358-376).
ccaggcctcctgatcactt

SEQ ID NO: 234511 - DNA, 19 bp, Homo sapiens
  siRNA target sequence for LSS (NM_002340.2,404-422).
ccggatacagagaagagat

SEQ ID NO: 234512 - DNA, 19 bp, Homo sapiens
  siRNA target sequence for LSS (NM_002340.2,467-485).
gcctgcacattgaggataa

SEQ ID NO: 234513 - DNA, 19 bp, Homo sapiens
  siRNA target sequence for LSS (NM_002340.2,500-518).
ggactgcgctcaactatgt

SEQ ID NO: 234514 - DNA, 19 bp, Homo sapiens
  siRNA target sequence for LSS (NM_002340.2,561-579).
ggtacgagcccggaacatt

SEQ ID NO: 234515 - DNA, 19 bp, Homo sapiens
  siRNA target sequence for LSS (NM_002340.2,841-859).
gacttcgccagcattgact

SEQ ID NO: 234516 - DNA, 19 bp, Homo sapiens
  siRNA target sequence for LSS (NM_002340.2,915-933).
gctgctccgcgtggtatat

SEQ ID NO: 234517 - DNA, 19 bp, Homo sapiens
  siRNA target sequence for LSS (NM_002340.2,935-953).
cgctcctcaacctgtatga

SEQ ID NO: 234518 - DNA, 19 bp, Homo sapiens
  siRNA target sequence for LSS (NM_002340.2,1130-1148).
ccagaatcccggactatct

SEQ ID NO: 234519 - DNA, 19 bp, Homo sapiens
  siRNA target sequence for LSS (NM_002340.2,1155-1173).
gggccttgacggcatgaaa

SEQ ID NO: 234520 - DNA, 19 bp, Homo sapiens
  siRNA target sequence for LSS (NM_002340.2,1156-1174).
ggccttgacggcatgaaaa

SEQ ID NO: 234521 - DNA, 19 bp, Homo sapiens
  siRNA target sequence for LSS (NM_002340.2,1157-1175).
gccttgacggcatgaaaat

SEQ ID NO: 234522 - DNA, 19 bp, Homo sapiens
  siRNA target sequence for LSS (NM_002340.2,1249-1267).
cacaggcccgagttttcgt

SEQ ID NO: 234523 - DNA, 19 bp, Homo sapiens
  siRNA target sequence for LSS (NM_002340.2,1322-1340).
ctcccgactaccagaagta

SEQ ID NO: 234524 - DNA, 19 bp, Homo sapiens
  siRNA target sequence for LSS (NM_002340.2,1324-1342).
cccgactaccagaagtact

SEQ ID NO: 234525 - DNA, 19 bp, Homo sapiens
  siRNA target sequence for LSS (NM_002340.2,1325-1343).
ccgactaccagaagtacta

SEQ ID NO: 234526 - DNA, 19 bp, Homo sapiens
  siRNA target sequence for LSS (NM_002340.2,1360-1378).
ggtggcttctccttcagta

SEQ ID NO: 234527 - DNA, 19 bp, Homo sapiens
  siRNA target sequence for LSS (NM_002340.2,1384-1402).
gactgcggctggatcgttt

SEQ ID NO: 234528 - DNA, 19 bp, Homo sapiens
  siRNA target sequence for LSS (NM_002340.2,1388-1406).
gcggctggatcgtttctga

SEQ ID NO: 234529 - DNA, 19 bp, Homo sapiens
  siRNA target sequence for LSS (NM_002340.2,1600-1618).
gtcttcggggacatcatga

SEQ ID NO: 234530 - DNA, 19 bp, Homo sapiens
  siRNA target sequence for LSS (NM_002340.2,1651-1669).
gtgatgcaggcgcttaagt

SEQ ID NO: 234531 - DNA, 19 bp, Homo sapiens
  siRNA target sequence for LSS (NM_002340.2,1653-1671).
gatgcaggcgcttaagtat

SEQ ID NO: 234532 - DNA, 19 bp, Homo sapiens
  siRNA target sequence for LSS (NM_002340.2,1720-1738).
ctcacgcagggcttagagt

SEQ ID NO: 234533 - DNA, 19 bp, Homo sapiens
  siRNA target sequence for LSS (NM_002340.2,1975-1993).
gcccagtcccagatccata

SEQ ID NO: 234534 - DNA, 19 bp, Homo sapiens
  siRNA target sequence for LSS (NM_002340.2,1976-1994).
cccagtcccagatccataa

SEQ ID NO: 234535 - DNA, 19 bp, Homo sapiens
  siRNA target sequence for LSS (NM_002340.2,1978-1996).
cagtcccagatccataaca

SEQ ID NO: 234536 - DNA, 19 bp, Homo sapiens
  siRNA target sequence for SDS-RS1 (NM_138432.2,633-651).
gtttgaccaccccctaata

SEQ ID NO: 234537 - DNA, 19 bp, Homo sapiens
  siRNA target sequence for SDS-RS1 (NM_138432.2,937-955).
caggtgtgcaagattcact

SEQ ID NO: 234538 - DNA, 19 bp, Homo sapiens
  siRNA target sequence for SDS-RS1 (NM_138432.2,1045-1063).
gccttagcagccatctact

SEQ ID NO: 234539 - DNA, 19 bp, Homo sapiens
  siRNA target sequence for SRR (NM_021947.1,102-120).
gttgaaaaagctcatatca

SEQ ID NO: 234540 - DNA, 19 bp, Homo sapiens
  siRNA target sequence for SRR (NM_021947.1,157-175).
caagctccattttgaatca

SEQ ID NO: 234541 - DNA, 19 bp, Homo sapiens
  siRNA target sequence for SRR (NM_021947.1,181-199).
cagggcgcaatcttttctt

SEQ ID NO: 234542 - DNA, 19 bp, Homo sapiens
  siRNA target sequence for SRR (NM_021947.1,236-254).
gattcgtggtgctctcaat

SEQ ID NO: 234543 - DNA, 19 bp, Homo sapiens
  siRNA target sequence for SRR (NM_021947.1,293-311).
gccgaaagctgttgttact

SEQ ID NO: 234544 - DNA, 19 bp, Homo sapiens
  siRNA target sequence for SRR (NM_021947.1,295-313).
cgaaagctgttgttactca

SEQ ID NO: 234545 - DNA, 19 bp, Homo sapiens
  siRNA target sequence for SRR (NM_021947.1,343-361).
cctatgctgccaaattgga

SEQ ID NO: 234546 - DNA, 19 bp, Homo sapiens
  siRNA target sequence for SRR (NM_021947.1,427-445).
cctacggagcgtcaattgt

SEQ ID NO: 234547 - DNA, 19 bp, Homo sapiens
  siRNA target sequence for SRR (NM_021947.1,428-446).
ctacggagcgtcaattgta

SEQ ID NO: 234548 - DNA, 19 bp, Homo sapiens
  siRNA target sequence for SRR (NM_021947.1,432-450).
ggagcgtcaattgtatact

SEQ ID NO: 234549 - DNA, 19 bp, Homo sapiens
  siRNA target sequence for SRR (NM_021947.1,635-653).
gcttgctggaatagcaatt

SEQ ID NO: 234550 - DNA, 19 bp, Homo sapiens
  siRNA target sequence for SRR (NM_021947.1,636-654).
cttgctggaatagcaatta

SEQ ID NO: 234551 - DNA, 19 bp, Homo sapiens
  siRNA target sequence for SRR (NM_021947.1,642-660).
ggaatagcaattacagtta

SEQ ID NO: 234552 - DNA, 19 bp, Homo sapiens
  siRNA target sequence for SRR (NM_021947.1,657-675).
gttaaggctctgaaaccta

SEQ ID NO: 234553 - DNA, 19 bp, Homo sapiens
  siRNA target sequence for SRR (NM_021947.1,740-758).
gaaactgatgcccaatctt

SEQ ID NO: 234554 - DNA, 19 bp, Homo sapiens
  siRNA target sequence for SRR (NM_021947.1,773-791).
catagcagatggtgtcaaa

SEQ ID NO: 234555 - DNA, 19 bp, Homo sapiens
  siRNA target sequence for SRR (NM_021947.1,896-914).
gaggatgaaactactcatt

SEQ ID NO: 234556 - DNA, 19 bp, Homo sapiens
  siRNA target sequence for SRR (NM_021947.1,899-917).
gatgaaactactcattgaa

SEQ ID NO: 234557 - DNA, 19 bp, Homo sapiens
  siRNA target sequence for SRR (NM_021947.1,942-960).
gctgtgctgtctcaacatt

SEQ ID NO: 234558 - DNA, 19 bp, Homo sapiens
  siRNA target sequence for SRR (NM_021947.1,950-968).
gtctcaacattttcaaact

SEQ ID NO: 234559 - DNA, 19 bp, Homo sapiens
  siRNA target sequence for SRR (NM_021947.1,973-991).
ccccagaagtaaagaacat

SEQ ID NO: 234560 - DNA, 19 bp, Homo sapiens
  siRNA target sequence for SRR (NM_021947.1,1008-1026).
ggtggaaatgtagacttaa

SEQ ID NO: 234561 - DNA, 19 bp, Homo sapiens
  siRNA target sequence for SRR (NM_021947.1,1022-1040).
cttaacctcctccataact

SEQ ID NO: 234562 - DNA, 19 bp, Homo sapiens
  siRNA target sequence for SRR (NM_021947.1,1054-1072).
ctgaaaggccagcttctta

SEQ ID NO: 234563 - DNA, 19 bp, Homo sapiens
  siRNA target sequence for FBXO18 (NM_032807.3,253-271).
ctgaaatgagacggtttaa

SEQ ID NO: 234564 - DNA, 19 bp, Homo sapiens
  siRNA target sequence for FBXO18 (NM_032807.3,289-307).
ccattgactgccagcattt

SEQ ID NO: 234565 - DNA, 19 bp, Homo sapiens
  siRNA target sequence for FBXO18 (NM_032807.3,332-350).
ccagcccttcggtcaaaga

SEQ ID NO: 234566 - DNA, 19 bp, Homo sapiens
  siRNA target sequence for FBXO18 (NM_032807.3,333-351).
cagcccttcggtcaaagat

SEQ ID NO: 234567 - DNA, 19 bp, Homo sapiens
  siRNA target sequence for FBXO18 (NM_032807.3,371-389).
ccatggtctctatcctaaa

SEQ ID NO: 234568 - DNA, 19 bp, Homo sapiens
  siRNA target sequence for FBXO18 (NM_032807.3,414-432).
ggtcagggaagtcaaagat

SEQ ID NO: 234569 - DNA, 19 bp, Homo sapiens
  siRNA target sequence for FBXO18 (NM_032807.3,430-448).
gatgcatccctgagttctt

SEQ ID NO: 234570 - DNA, 19 bp, Homo sapiens
  siRNA target sequence for FBXO18 (NM_032807.3,462-480).
cagccgtgcaccaatgaca

SEQ ID NO: 234571 - DNA, 19 bp, Homo sapiens
  siRNA target sequence for FBXO18 (NM_032807.3,477-495).
gacatggccaaaagcaatt

SEQ ID NO: 234572 - DNA, 19 bp, Homo sapiens
  siRNA target sequence for FBXO18 (NM_032807.3,671-689).
ccggtgggatggagtttct

SEQ ID NO: 234573 - DNA, 19 bp, Homo sapiens
  siRNA target sequence for FBXO18 (NM_032807.3,672-690).
cggtgggatggagtttcta

SEQ ID NO: 234574 - DNA, 19 bp, Homo sapiens
  siRNA target sequence for FBXO18 (NM_032807.3,696-714).
gctccacggcaccatttgt

SEQ ID NO: 234575 - DNA, 19 bp, Homo sapiens
  siRNA target sequence for FBXO18 (NM_032807.3,939-957).
ccggtggaagacctctatt

SEQ ID NO: 234576 - DNA, 19 bp, Homo sapiens
  siRNA target sequence for FBXO18 (NM_032807.3,998-1016).
cagtgacccgctgttcatt

SEQ ID NO: 234577 - DNA, 19 bp, Homo sapiens
  siRNA target sequence for FBXO18 (NM_032807.3,1034-1052).
ccatcgatacctgatgaat

SEQ ID NO: 234578 - DNA, 19 bp, Homo sapiens
  siRNA target sequence for FBXO18 (NM_032807.3,1079-1097).
cggcatcctgtctaactgt

SEQ ID NO: 234579 - DNA, 19 bp, Homo sapiens
  siRNA target sequence for FBXO18 (NM_032807.3,1125-1143).
gtgctgaacctcatacgat

SEQ ID NO: 234580 - DNA, 19 bp, Homo sapiens
  siRNA target sequence for FBXO18 (NM_032807.3,1414-1432).
gcatagccgtgcttctcta

SEQ ID NO: 234581 - DNA, 19 bp, Homo sapiens
  siRNA target sequence for FBXO18 (NM_032807.3,1449-1467).
gggattaacatcagcaata

SEQ ID NO: 234582 - DNA, 19 bp, Homo sapiens
  siRNA target sequence for FBXO18 (NM_032807.3,1468-1486).
ggattcactacaacatttt

SEQ ID NO: 234583 - DNA, 19 bp, Homo sapiens
  siRNA target sequence for FBXO18 (NM_032807.3,1494-1512).
ctatatcttcaggagaatt

SEQ ID NO: 234584 - DNA, 19 bp, Homo sapiens
  siRNA target sequence for FBXO18 (NM_032807.3,1517-1535).
cactcaggccacaaaagtt

SEQ ID NO: 234585 - DNA, 19 bp, Homo sapiens
  siRNA target sequence for FBXO18 (NM_032807.3,1551-1569).
gtctggccaggcaagaaaa

SEQ ID NO: 234586 - DNA, 19 bp, Homo sapiens
  siRNA target sequence for FBXO18 (NM_032807.3,1571-1589).
catccaacttacacatgaa

SEQ ID NO: 234587 - DNA, 19 bp, Homo sapiens
  siRNA target sequence for FBXO18 (NM_032807.3,1587-1605).
gaacaacagctgattctga

SEQ ID NO: 234588 - DNA, 19 bp, Homo sapiens
  siRNA target sequence for FBXO18 (NM_032807.3,1666-1684).
cctcaacgctggtcaagta

SEQ ID NO: 234589 - DNA, 19 bp, Homo sapiens
  siRNA target sequence for FBXO18 (NM_032807.3,1667-1685).
ctcaacgctggtcaagtat

SEQ ID NO: 234590 - DNA, 19 bp, Homo sapiens
  siRNA target sequence for FBXO18 (NM_032807.3,1713-1731).
ctgtatgtgacattcaaca

SEQ ID NO: 234591 - DNA, 19 bp, Homo sapiens
  siRNA target sequence for FBXO18 (NM_032807.3,1818-1836).
cggaagtaccagtcaaaga

SEQ ID NO: 234592 - DNA, 19 bp, Homo sapiens
  siRNA target sequence for FBXO18 (NM_032807.3,1893-1911).
gggaagggtggattcataa

SEQ ID NO: 234593 - DNA, 19 bp, Homo sapiens
  siRNA target sequence for FBXO18 (NM_032807.3,1912-1930).
gagccaagcttgtgtgtaa

SEQ ID NO: 234594 - DNA, 19 bp, Homo sapiens
  siRNA target sequence for FBXO18 (NM_032807.3,1927-1945).
gtaagactctagaaaactt

SEQ ID NO: 234595 - DNA, 19 bp, Homo sapiens
  siRNA target sequence for FBXO18 (NM_032807.3,1931-1949).
gactctagaaaacttcttt

SEQ ID NO: 234596 - DNA, 19 bp, Homo sapiens
  siRNA target sequence for FBXO18 (NM_032807.3,1977-1995).
gatcacgtgcctatttggt

SEQ ID NO: 234597 - DNA, 19 bp, Homo sapiens
  siRNA target sequence for FBXO18 (NM_032807.3,1986-2004).
cctatttggtgtaagaaca

SEQ ID NO: 234598 - DNA, 19 bp, Homo sapiens
  siRNA target sequence for FBXO18 (NM_032807.3,2024-2042).
ggttgagcagagtgaaaaa

SEQ ID NO: 234599 - DNA, 19 bp, Homo sapiens
  siRNA target sequence for FBXO18 (NM_032807.3,2125-2143).
ctcatgacggctacttgaa

SEQ ID NO: 234600 - DNA, 19 bp, Homo sapiens
  siRNA target sequence for FBXO18 (NM_032807.3,2130-2148).
gacggctacttgaaactct

SEQ ID NO: 234601 - DNA, 19 bp, Homo sapiens
  siRNA target sequence for FBXO18 (NM_032807.3,2176-2194).
cttttgacgccatctttgt

SEQ ID NO: 234602 - DNA, 19 bp, Homo sapiens
  siRNA target sequence for FBXO18 (NM_032807.3,2212-2230).
gcacaccagctatcatgaa

SEQ ID NO: 234603 - DNA, 19 bp, Homo sapiens
  siRNA target sequence for FBXO18 (NM_032807.3,2274-2292).
ccgcaccagcagatctata

SEQ ID NO: 234604 - DNA, 19 bp, Homo sapiens
  siRNA target sequence for FBXO18 (NM_032807.3,2277-2295).
caccagcagatctatacct

SEQ ID NO: 234605 - DNA, 19 bp, Homo sapiens
  siRNA target sequence for FBXO18 (NM_032807.3,2345-2363).
ctatctcacgcagagtttt

SEQ ID NO: 234606 - DNA, 19 bp, Homo sapiens
  siRNA target sequence for FBXO18 (NM_032807.3,2579-2597).
ggggattaaatcatttgga

SEQ ID NO: 234607 - DNA, 19 bp, Homo sapiens
  siRNA target sequence for FBXO18 (NM_032807.3,2580-2598).
gggattaaatcatttggat

SEQ ID NO: 234608 - DNA, 19 bp, Homo sapiens
  siRNA target sequence for FBXO18 (NM_032807.3,2663-2681).
cgtcattaaagacaaattt

SEQ ID NO: 234609 - DNA, 19 bp, Homo sapiens
  siRNA target sequence for FBXO18 (NM_032807.3,2696-2714).
gcacaaagaaggctttagt

SEQ ID NO: 234610 - DNA, 19 bp, Homo sapiens
  siRNA target sequence for FBXO18 (NM_032807.3,2706-2724).
ggctttagtggcttcaaga

SEQ ID NO: 234611 - DNA, 19 bp, Homo sapiens
  siRNA target sequence for FBXO18 (NM_032807.3,2761-2779).
ccaagatcgcagttgttga

SEQ ID NO: 234612 - DNA, 19 bp, Homo sapiens
  siRNA target sequence for FBXO18 (NM_032807.3,2762-2780).
caagatcgcagttgttgaa

SEQ ID NO: 234613 - DNA, 19 bp, Homo sapiens
  siRNA target sequence for FBXO18 (NM_032807.3,2768-2786).
cgcagttgttgaaaagtat

SEQ ID NO: 234614 - DNA, 19 bp, Homo sapiens
  siRNA target sequence for FBXO18 (NM_032807.3,2827-2845).
gccatatagaagatttgga

SEQ ID NO: 234615 - DNA, 19 bp, Homo sapiens
  siRNA target sequence for FBXO18 (NM_032807.3,2969-2987).
cttcagagttgagtcattt

SEQ ID NO: 234616 - DNA, 19 bp, Homo sapiens
  siRNA target sequence for FBXO18 (NM_032807.3,3039-3057).
cgtctcatcatgaccaaat

SEQ ID NO: 234617 - DNA, 19 bp, Homo sapiens
  siRNA target sequence for FBXO18 (NM_032807.3,3042-3060).
ctcatcatgaccaaatcat

SEQ ID NO: 234618 - DNA, 19 bp, Homo sapiens
  siRNA target sequence for FBXO18 (NM_032807.3,3108-3126).
ctgacaagcaacgtcttaa

SEQ ID NO: 234619 - DNA, 19 bp, Homo sapiens
  siRNA target sequence for FBXO18 (NM_032807.3,3110-3128).
gacaagcaacgtcttaaaa

SEQ ID NO: 234620 - DNA, 19 bp, Homo sapiens
  siRNA target sequence for FBXO18 (NM_032807.3,3184-3202).
ccgtccttaccatgaagaa

SEQ ID NO: 234621 - DNA, 19 bp, Homo sapiens
  siRNA target sequence for LOC150678 (NM_138336.1,183-201).
ggacttggcagccaatgaa

SEQ ID NO: 234622 - DNA, 19 bp, Homo sapiens
  siRNA target sequence for LOC150678 (NM_138336.1,206-224).
ccgttcatgcagacttttt

SEQ ID NO: 234623 - DNA, 19 bp, Homo sapiens
  siRNA target sequence for LOC150678 (NM_138336.1,214-232).
gcagacttttttaacgatt

SEQ ID NO: 234624 - DNA, 19 bp, Homo sapiens
  siRNA target sequence for LOC150678 (NM_138336.1,215-233).
cagacttttttaacgattt

SEQ ID NO: 234625 - DNA, 19 bp, Homo sapiens
  siRNA target sequence for LOC150678 (NM_138336.1,228-246).
cgattttgaagatcttttt

SEQ ID NO: 234626 - DNA, 19 bp, Homo sapiens
  siRNA target sequence for LOC150678 (NM_138336.1,454-472).
gcggaggcgctaatgttta

SEQ ID NO: 234627 - DNA, 19 bp, Homo sapiens
  siRNA target sequence for LOC150678 (NM_138336.1,457-475).
gaggcgctaatgtttacca

SEQ ID NO: 234628 - DNA, 19 bp, Homo sapiens
  siRNA target sequence for LOC150678 (NM_138336.1,512-530).
caacaagtgaggggaaaat

SEQ ID NO: 234629 - DNA, 19 bp, Homo sapiens
  siRNA target sequence for LOC150678 (NM_138336.1,531-549).
gggcacaggacgcttaaga

SEQ ID NO: 234630 - DNA, 19 bp, Homo sapiens
  siRNA target sequence for LOC150678 (NM_138336.1,532-550).
ggcacaggacgcttaagaa

SEQ ID NO: 234631 - DNA, 19 bp, Homo sapiens
  siRNA target sequence for LOC150678 (NM_138336.1,533-551).
gcacaggacgcttaagaaa

SEQ ID NO: 234632 - DNA, 19 bp, Homo sapiens
  siRNA target sequence for LOC150678 (NM_138336.1,573-591).
caagtggctgggaagttat

SEQ ID NO: 234633 - DNA, 19 bp, Homo sapiens
  siRNA target sequence for LOC150678 (NM_138336.1,576-594).
gtggctgggaagttatcta

SEQ ID NO: 234634 - DNA, 19 bp, Homo sapiens
  siRNA target sequence for LOC150678 (NM_138336.1,578-596).
ggctgggaagttatctaga

SEQ ID NO: 234635 - DNA, 19 bp, Homo sapiens
  siRNA target sequence for LOC150678 (NM_138336.1,630-648).
cagcgaagacagcacaata

SEQ ID NO: 234636 - DNA, 19 bp, Homo sapiens
  siRNA target sequence for LOC150678 (NM_138336.1,633-651).
cgaagacagcacaatatca

SEQ ID NO: 234637 - DNA, 19 bp, Homo sapiens
  siRNA target sequence for LOC150678 (NM_138336.1,642-660).
cacaatatcagtttctact

SEQ ID NO: 234638 - DNA, 19 bp, Homo sapiens
  siRNA target sequence for LOC150678 (NM_138336.1,661-679).
cactggaggggtaaatgtt

SEQ ID NO: 234639 - DNA, 19 bp, Homo sapiens
  siRNA target sequence for LOC150678 (NM_138336.1,669-687).
gggtaaatgttttaagagt

SEQ ID NO: 234640 - DNA, 19 bp, Homo sapiens
  siRNA target sequence for LOC150678 (NM_138336.1,729-747).
gaccacacagccatgcata

SEQ ID NO: 234641 - DNA, 19 bp, Homo sapiens
  siRNA target sequence for LOC150678 (NM_138336.1,732-750).
cacacagccatgcatagat

SEQ ID NO: 234642 - DNA, 19 bp, Homo sapiens
  siRNA target sequence for PEO1 (NM_021830.3,679-697).
ggtaccccctccgtatctt

SEQ ID NO: 234643 - DNA, 19 bp, Homo sapiens
  siRNA target sequence for PEO1 (NM_021830.3,806-824).
gccagtgttgcctgtaact

SEQ ID NO: 234644 - DNA, 19 bp, Homo sapiens
  siRNA target sequence for PEO1 (NM_021830.3,815-833).
gcctgtaactgcaactgaa

SEQ ID NO: 234645 - DNA, 19 bp, Homo sapiens
  siRNA target sequence for PEO1 (NM_021830.3,829-847).
ctgaaatccgccagtattt

SEQ ID NO: 234646 - DNA, 19 bp, Homo sapiens
  siRNA target sequence for PEO1 (NM_021830.3,1084-1102).
gcaaggcaccagaatttga

SEQ ID NO: 234647 - DNA, 19 bp, Homo sapiens
  siRNA target sequence for PEO1 (NM_021830.3,1124-1142).
gatctggaaccgagcaata

SEQ ID NO: 234648 - DNA, 19 bp, Homo sapiens
  siRNA target sequence for PEO1 (NM_021830.3,1127-1145).
ctggaaccgagcaatacct

SEQ ID NO: 234649 - DNA, 19 bp, Homo sapiens
  siRNA target sequence for PEO1 (NM_021830.3,1176-1194).
cagctggctgatacaatgt

SEQ ID NO: 234650 - DNA, 19 bp, Homo sapiens
  siRNA target sequence for PEO1 (NM_021830.3,1178-1196).
gctggctgatacaatgttt

SEQ ID NO: 234651 - DNA, 19 bp, Homo sapiens
  siRNA target sequence for PEO1 (NM_021830.3,1198-1216).
gccttaccaaggttacaga

SEQ ID NO: 234652 - DNA, 19 bp, Homo sapiens
  siRNA target sequence for PEO1 (NM_021830.3,1199-1217).
ccttaccaaggttacagat

SEQ ID NO: 234653 - DNA, 19 bp, Homo sapiens
  siRNA target sequence for PEO1 (NM_021830.3,1352-1370).
ctacgaggaaaccactatt

SEQ ID NO: 234654 - DNA, 19 bp, Homo sapiens
  siRNA target sequence for PEO1 (NM_021830.3,1382-1400).
cgcctaccacaatctgttt

SEQ ID NO: 234655 - DNA, 19 bp, Homo sapiens
  siRNA target sequence for PEO1 (NM_021830.3,1391-1409).
caatctgtttggattacca

SEQ ID NO: 234656 - DNA, 19 bp, Homo sapiens
  siRNA target sequence for PEO1 (NM_021830.3,1487-1505).
gctgcctacccttactcta

SEQ ID NO: 234657 - DNA, 19 bp, Homo sapiens
  siRNA target sequence for PEO1 (NM_021830.3,1610-1628).
caagttgtttgcacgaaaa

SEQ ID NO: 234658 - DNA, 19 bp, Homo sapiens
  siRNA target sequence for PEO1 (NM_021830.3,1697-1715).
cggaggcttcaatctttct

SEQ ID NO: 234659 - DNA, 19 bp, Homo sapiens
  siRNA target sequence for PEO1 (NM_021830.3,1706-1724).
caatctttctcgtattctt

SEQ ID NO: 234660 - DNA, 19 bp, Homo sapiens
  siRNA target sequence for PEO1 (NM_021830.3,1746-1764).
cacaagtccatcgtatctt

SEQ ID NO: 234661 - DNA, 19 bp, Homo sapiens
  siRNA target sequence for PEO1 (NM_021830.3,1787-1805).
gctaggagaactgtcaaat

SEQ ID NO: 234662 - DNA, 19 bp, Homo sapiens
  siRNA target sequence for PEO1 (NM_021830.3,1843-1861).
cagacctcaatcgtatctt

SEQ ID NO: 234663 - DNA, 19 bp, Homo sapiens
  siRNA target sequence for PEO1 (NM_021830.3,1845-1863).
gacctcaatcgtatcttga

SEQ ID NO: 234664 - DNA, 19 bp, Homo sapiens
  siRNA target sequence for PEO1 (NM_021830.3,1937-1955).
gtatgccctggatttgtgt

SEQ ID NO: 234665 - DNA, 19 bp, Homo sapiens
  siRNA target sequence for PEO1 (NM_021830.3,2277-2295).
gtctttcggaagtttgcaa

SEQ ID NO: 234666 - DNA, 19 bp, Homo sapiens
  siRNA target sequence for PEO1 (NM_021830.3,2285-2303).
gaagtttgcaacagacaat

SEQ ID NO: 234667 - DNA, 19 bp, Homo sapiens
  siRNA target sequence for PEO1 (NM_021830.3,2471-2489).
gtccaagaaccgctttgat

SEQ ID NO: 234668 - DNA, 19 bp, Homo sapiens
  siRNA target sequence for PEO1 (NM_021830.3,2500-2518).
gtgtcttcccgcttgagtt

SEQ ID NO: 234669 - DNA, 19 bp, Homo sapiens
  siRNA target sequence for PEO1 (NM_021830.3,2509-2527).
cgcttgagttcaacaagaa

SEQ ID NO: 234670 - DNA, 19 bp, Homo sapiens
  siRNA target sequence for PEO1 (NM_021830.3,2640-2658).
cagaactctgagatttgct

SEQ ID NO: 234671 - DNA, 19 bp, Homo sapiens
  siRNA target sequence for FKBP11 (NM_016594.1,244-262).
gacacgcttcacatacact

SEQ ID NO: 234672 - DNA, 19 bp, Homo sapiens
  siRNA target sequence for FKBP11 (NM_016594.1,311-329).
gagaccctctggttataga

SEQ ID NO: 234673 - DNA, 19 bp, Homo sapiens
  siRNA target sequence for FKBP11 (NM_016594.1,393-411).
gaagcgaagggcaatcatt

SEQ ID NO: 234674 - DNA, 19 bp, Homo sapiens
  siRNA target sequence for FKBP11 (NM_016594.1,397-415).
cgaagggcaatcattcctt

SEQ ID NO: 234675 - DNA, 19 bp, Homo sapiens
  siRNA target sequence for FKBP11 (NM_016594.1,499-517).
ctaatccgagccaactact

SEQ ID NO: 234676 - DNA, 19 bp, Homo sapiens
  siRNA target sequence for FKBP11 (NM_016594.1,509-527).
ccaactactggctaaagct

SEQ ID NO: 234677 - DNA, 19 bp, Homo sapiens
  siRNA target sequence for FKBP11 (NM_016594.1,589-607).
gggtatcacctatacagaa

SEQ ID NO: 234678 - DNA, 19 bp, Homo sapiens
  siRNA target sequence for FKBP11 (NM_016594.1,610-628).
gccaatagacccaaagtct

SEQ ID NO: 234679 - DNA, 19 bp, Homo sapiens
  siRNA target sequence for KIAA0073 (NM_015342.1,63-81).
ggaaccggaaaaaacagaa

SEQ ID NO: 234680 - DNA, 19 bp, Homo sapiens
  siRNA target sequence for KIAA0073 (NM_015342.1,147-165).
gcgctgggttggaccttta

SEQ ID NO: 234681 - DNA, 19 bp, Homo sapiens
  siRNA target sequence for KIAA0073 (NM_015342.1,211-229).
gaaagagtctatcttgata

SEQ ID NO: 234682 - DNA, 19 bp, Homo sapiens
  siRNA target sequence for KIAA0073 (NM_015342.1,215-233).
gagtctatcttgataatct

SEQ ID NO: 234683 - DNA, 19 bp, Homo sapiens
  siRNA target sequence for KIAA0073 (NM_015342.1,234-252).
ccccagtgcatccatgtat

SEQ ID NO: 234684 - DNA, 19 bp, Homo sapiens
  siRNA target sequence for KIAA0073 (NM_015342.1,286-304).
catgtggtatgcaccaaaa

SEQ ID NO: 234685 - DNA, 19 bp, Homo sapiens
  siRNA target sequence for KIAA0073 (NM_015342.1,291-309).
ggtatgcaccaaaacagat

SEQ ID NO: 234686 - DNA, 19 bp, Homo sapiens
  siRNA target sequence for KIAA0073 (NM_015342.1,292-310).
gtatgcaccaaaacagatt

SEQ ID NO: 234687 - DNA, 19 bp, Homo sapiens
  siRNA target sequence for KIAA0073 (NM_015342.1,326-344).
gtcatgatggacatgtcaa

SEQ ID NO: 234688 - DNA, 19 bp, Homo sapiens
  siRNA target sequence for KIAA0073 (NM_015342.1,364-382).
gagggaattgaatttgtta

SEQ ID NO: 234689 - DNA, 19 bp, Homo sapiens
  siRNA target sequence for KIAA0073 (NM_015342.1,392-410).
gtagtcacctgggagttat

SEQ ID NO: 234690 - DNA, 19 bp, Homo sapiens
  siRNA target sequence for KIAA0073 (NM_015342.1,449-467).
gttctgtgggtgatgataa

SEQ ID NO: 234691 - DNA, 19 bp, Homo sapiens
  siRNA target sequence for KIAA0073 (NM_015342.1,454-472).
gtgggtgatgataaagcaa

SEQ ID NO: 234692 - DNA, 19 bp, Homo sapiens
  siRNA target sequence for KIAA0073 (NM_015342.1,643-661).
ccacttcatatttttgaca

SEQ ID NO: 234693 - DNA, 19 bp, Homo sapiens
  siRNA target sequence for KIAA0073 (NM_015342.1,666-684).
ccatacatcacctcttact

SEQ ID NO: 234694 - DNA, 19 bp, Homo sapiens
  siRNA target sequence for KIAA0073 (NM_015342.1,691-709).
cggctaaacccagtttaca

SEQ ID NO: 234695 - DNA, 19 bp, Homo sapiens
  siRNA target sequence for KIAA0073 (NM_015342.1,692-710).
ggctaaacccagtttacaa

SEQ ID NO: 234696 - DNA, 19 bp, Homo sapiens
  siRNA target sequence for KIAA0073 (NM_015342.1,715-733).
gtagtgtcttctgacaaat

SEQ ID NO: 234697 - DNA, 19 bp, Homo sapiens
  siRNA target sequence for KIAA0073 (NM_015342.1,729-747).
caaatctgggatgattgaa

SEQ ID NO: 234698 - DNA, 19 bp, Homo sapiens
  siRNA target sequence for KIAA0073 (NM_015342.1,753-771).
gactgggcctcctcatgaa

SEQ ID NO: 234699 - DNA, 19 bp, Homo sapiens
  siRNA target sequence for KIAA0073 (NM_015342.1,755-773).
ctgggcctcctcatgaata

SEQ ID NO: 234700 - DNA, 19 bp, Homo sapiens
  siRNA target sequence for KIAA0073 (NM_015342.1,757-775).
gggcctcctcatgaatata

SEQ ID NO: 234701 - DNA, 19 bp, Homo sapiens
  siRNA target sequence for KIAA0073 (NM_015342.1,834-852).
caagtgtaaggcttatcca

SEQ ID NO: 234702 - DNA, 19 bp, Homo sapiens
  siRNA target sequence for KIAA0073 (NM_015342.1,850-868).
ccaaccagcgtatgttttt

SEQ ID NO: 234703 - DNA, 19 bp, Homo sapiens
  siRNA target sequence for KIAA0073 (NM_015342.1,889-907).
gctactattggttctgata

SEQ ID NO: 234704 - DNA, 19 bp, Homo sapiens
  siRNA target sequence for KIAA0073 (NM_015342.1,893-911).
ctattggttctgatagaaa

SEQ ID NO: 234705 - DNA, 19 bp, Homo sapiens
  siRNA target sequence for KIAA0073 (NM_015342.1,898-916).
ggttctgatagaaaagtta

SEQ ID NO: 234706 - DNA, 19 bp, Homo sapiens
  siRNA target sequence for KIAA0073 (NM_015342.1,950-968).
gagtctttgatgaatcact

SEQ ID NO: 234707 - DNA, 19 bp, Homo sapiens
  siRNA target sequence for KIAA0073 (NM_015342.1,961-979).
gaatcactaagcatgttta

SEQ ID NO: 234708 - DNA, 19 bp, Homo sapiens
  siRNA target sequence for KIAA0073 (NM_015342.1,1003-1021).
cagttaccagacatggaat

SEQ ID NO: 234709 - DNA, 19 bp, Homo sapiens
  siRNA target sequence for KIAA0073 (NM_015342.1,1073-1091).
gattaattaatatagtttt

SEQ ID NO: 234710 - DNA, 19 bp, Homo sapiens
  siRNA target sequence for KIAA0073 (NM_015342.1,1105-1123).
cacttcgtgctgtatggaa

SEQ ID NO: 234711 - DNA, 19 bp, Homo sapiens
  siRNA target sequence for KIAA0073 (NM_015342.1,1121-1139).
gaacaatgctgggcattaa

SEQ ID NO: 234712 - DNA, 19 bp, Homo sapiens
  siRNA target sequence for KIAA0073 (NM_015342.1,1161-1179).
ccggtgtgtgcggatttta

SEQ ID NO: 234713 - DNA, 19 bp, Homo sapiens
  siRNA target sequence for KIAA0073 (NM_015342.1,1170-1188).
gcggattttaggcaaacaa

SEQ ID NO: 234714 - DNA, 19 bp, Homo sapiens
  siRNA target sequence for KIAA0073 (NM_015342.1,1240-1258).
catcgtgctgcaactacta

SEQ ID NO: 234715 - DNA, 19 bp, Homo sapiens
  siRNA target sequence for KIAA0073 (NM_015342.1,1249-1267).
gcaactactatagaaatga

SEQ ID NO: 234716 - DNA, 19 bp, Homo sapiens
  siRNA target sequence for KIAA0073 (NM_015342.1,1364-1382).
gagaaccagaagatacgaa

SEQ ID NO: 234717 - DNA, 19 bp, Homo sapiens
  siRNA target sequence for KIAA0073 (NM_015342.1,1390-1408).
gattctgatcgagatgttt

SEQ ID NO: 234718 - DNA, 19 bp, Homo sapiens
  siRNA target sequence for KIAA0073 (NM_015342.1,1394-1412).
ctgatcgagatgtttttaa

SEQ ID NO: 234719 - DNA, 19 bp, Homo sapiens
  siRNA target sequence for KIAA0073 (NM_015342.1,1475-1493).
cggacagtgccattatcca

SEQ ID NO: 234720 - DNA, 19 bp, Homo sapiens
  siRNA target sequence for KIAA0073 (NM_015342.1,1538-1556).
gccctaagacagtggaaaa

SEQ ID NO: 234721 - DNA, 19 bp, Homo sapiens
  siRNA target sequence for KIAA0073 (NM_015342.1,1743-1761).
ggctaacgcgggatcaaat

SEQ ID NO: 234722 - DNA, 19 bp, Homo sapiens
  siRNA target sequence for KIAA0073 (NM_015342.1,1744-1762).
gctaacgcgggatcaaata

SEQ ID NO: 234723 - DNA, 19 bp, Homo sapiens
  siRNA target sequence for KIAA0073 (NM_015342.1,1795-1813).
ccaacgccttggcttgata

SEQ ID NO: 234724 - DNA, 19 bp, Homo sapiens
  siRNA target sequence for KIAA0073 (NM_015342.1,1796-1814).
caacgccttggcttgataa

SEQ ID NO: 234725 - DNA, 19 bp, Homo sapiens
  siRNA target sequence for KIAA0073 (NM_015342.1,1799-1817).
cgccttggcttgataataa

SEQ ID NO: 234726 - DNA, 19 bp, Homo sapiens
  siRNA target sequence for KIAA0073 (NM_015342.1,1802-1820).
cttggcttgataataagca

SEQ ID NO: 234727 - DNA, 19 bp, Homo sapiens
  siRNA target sequence for KIAA0073 (NM_015342.1,1810-1828).
gataataagcatacagtat

SEQ ID NO: 234728 - DNA, 19 bp, Homo sapiens
  siRNA target sequence for KIAA0073 (NM_015342.1,1832-1850).
gacgagtgactaaaggaat

SEQ ID NO: 234729 - DNA, 19 bp, Homo sapiens
  siRNA target sequence for KIAA0073 (NM_015342.1,1865-1883).
ggatctccaacgtcaaagt

SEQ ID NO: 234730 - DNA, 19 bp, Homo sapiens
  siRNA target sequence for KIAA0073 (NM_015342.1,1869-1887).
ctccaacgtcaaagtcaat

SEQ ID NO: 234731 - DNA, 19 bp, Homo sapiens
  siRNA target sequence for KIAA0073 (NM_015342.1,1911-1929).
ggatgtcagcatcataaat

SEQ ID NO: 234732 - DNA, 19 bp, Homo sapiens
  siRNA target sequence for KIAA0073 (NM_015342.1,1915-1933).
gtcagcatcataaatatta

SEQ ID NO: 234733 - DNA, 19 bp, Homo sapiens
  siRNA target sequence for PIN4 (NM_006223.2,80-98).
gcggttcagcgttcaacaa

SEQ ID NO: 234734 - DNA, 19 bp, Homo sapiens
  siRNA target sequence for PPIB (NM_000942.3,150-168).
ctctccgaacgcaacatga

SEQ ID NO: 234735 - DNA, 19 bp, Homo sapiens
  siRNA target sequence for PPIB (NM_000942.3,266-284).
caccgtcaaggtgtatttt

SEQ ID NO: 234736 - DNA, 19 bp, Homo sapiens
  siRNA target sequence for PPIB (NM_000942.3,268-286).
ccgtcaaggtgtattttga

SEQ ID NO: 234737 - DNA, 19 bp, Homo sapiens
  siRNA target sequence for PPIB (NM_000942.3,287-305).
cctacgaattggagatgaa

SEQ ID NO: 234738 - DNA, 19 bp, Homo sapiens
  siRNA target sequence for PPIB (NM_000942.3,335-353).
cggaaagactgttccaaaa

SEQ ID NO: 234739 - DNA, 19 bp, Homo sapiens
  siRNA target sequence for PPIB (NM_000942.3,412-430).
gcaaattccatcgtgtaat

SEQ ID NO: 234740 - DNA, 19 bp, Homo sapiens
  siRNA target sequence for PPIF (NM_005729.2,326-344).
gaagggcttcggctacaaa

SEQ ID NO: 234741 - DNA, 19 bp, Homo sapiens
  siRNA target sequence for PPIF (NM_005729.2,448-466).
ctgacgagaactttacact

SEQ ID NO: 234742 - DNA, 19 bp, Homo sapiens
  siRNA target sequence for PPIF (NM_005729.2,605-623).
ggacgtcgtgaagaaaata

SEQ ID NO: 234743 - DNA, 19 bp, Homo sapiens
  siRNA target sequence for PPIF (NM_005729.2,611-629).
cgtgaagaaaatagaatct

SEQ ID NO: 234744 - DNA, 19 bp, Homo sapiens
  siRNA target sequence for PPIL1 (NM_016059.3,319-337).
caaagacctgtaagaactt

SEQ ID NO: 234745 - DNA, 19 bp, Homo sapiens
  siRNA target sequence for PPIL1 (NM_016059.3,348-366).
gctcgtcgaggttactaca

SEQ ID NO: 234746 - DNA, 19 bp, Homo sapiens
  siRNA target sequence for PPIL1 (NM_016059.3,349-367).
ctcgtcgaggttactacaa

SEQ ID NO: 234747 - DNA, 19 bp, Homo sapiens
  siRNA target sequence for PPIL1 (NM_016059.3,433-451).
gtcgaggtggtgcatctat

SEQ ID NO: 234748 - DNA, 19 bp, Homo sapiens
  siRNA target sequence for PPIL1 (NM_016059.3,435-453).
cgaggtggtgcatctatct

SEQ ID NO: 234749 - DNA, 19 bp, Homo sapiens
  siRNA target sequence for PPIL1 (NM_016059.3,436-454).
gaggtggtgcatctatcta

SEQ ID NO: 234750 - DNA, 19 bp, Homo sapiens
  siRNA target sequence for PPIL1 (NM_016059.3,477-495).
cttcatccagacttgaaat

SEQ ID NO: 234751 - DNA, 19 bp, Homo sapiens
  siRNA target sequence for PPIL1 (NM_016059.3,638-656).
gaatcgcgtgggaatggta

SEQ ID NO: 234752 - DNA, 19 bp, Homo sapiens
  siRNA target sequence for PPIL1 (NM_016059.3,642-660).
cgcgtgggaatggtagaaa

SEQ ID NO: 234753 - DNA, 19 bp, Homo sapiens
  siRNA target sequence for PPIL1 (NM_016059.3,644-662).
cgtgggaatggtagaaaca

SEQ ID NO: 234754 - DNA, 19 bp, Homo sapiens
  siRNA target sequence for PPIL1 (NM_016059.3,645-663).
gtgggaatggtagaaacaa

SEQ ID NO: 234755 - DNA, 19 bp, Homo sapiens
  siRNA target sequence for PPIL1 (NM_016059.3,684-702).
gacgacgtgaagatcatta

SEQ ID NO: 234756 - DNA, 19 bp, Homo sapiens
  siRNA target sequence for PPIL2 (NM_014337.2,138-156).
gacaaaatgtacattacct

SEQ ID NO: 234757 - DNA, 19 bp, Homo sapiens
  siRNA target sequence for PPIL2 (NM_014337.2,159-177).
gctgaatacactcactttt

SEQ ID NO: 234758 - DNA, 19 bp, Homo sapiens
  siRNA target sequence for PPIL2 (NM_014337.2,195-213).
gatctcccacaaacaaatt

SEQ ID NO: 234759 - DNA, 19 bp, Homo sapiens
  siRNA target sequence for PPIL2 (NM_014337.2,200-218).
cccacaaacaaattttcgt

SEQ ID NO: 234760 - DNA, 19 bp, Homo sapiens
  siRNA target sequence for PPIL2 (NM_014337.2,280-298).
ccgatggcatcgtctttga

SEQ ID NO: 234761 - DNA, 19 bp, Homo sapiens
  siRNA target sequence for PPIL2 (NM_014337.2,286-304).
gcatcgtctttgacttact

SEQ ID NO: 234762 - DNA, 19 bp, Homo sapiens
  siRNA target sequence for PPIL2 (NM_014337.2,500-518).
ggcagtggaacagctaaat

SEQ ID NO: 234763 - DNA, 19 bp, Homo sapiens
  siRNA target sequence for PPIL2 (NM_014337.2,598-616).
ccaatttggacaagttcaa

SEQ ID NO: 234764 - DNA, 19 bp, Homo sapiens
  siRNA target sequence for PPIL2 (NM_014337.2,680-698).
caaacaggacccgtcttat

SEQ ID NO: 234765 - DNA, 19 bp, Homo sapiens
  siRNA target sequence for PPIL2 (NM_014337.2,687-705).
gacccgtcttattatctga

SEQ ID NO: 234766 - DNA, 19 bp, Homo sapiens
  siRNA target sequence for PPIL2 (NM_014337.2,689-707).
cccgtcttattatctgaaa

SEQ ID NO: 234767 - DNA, 19 bp, Homo sapiens
  siRNA target sequence for PPIL2 (NM_014337.2,690-708).
ccgtcttattatctgaaaa

SEQ ID NO: 234768 - DNA, 19 bp, Homo sapiens
  siRNA target sequence for PPIL2 (NM_014337.2,691-709).
cgtcttattatctgaaaaa

SEQ ID NO: 234769 - DNA, 19 bp, Homo sapiens
  siRNA target sequence for PPIL2 (NM_014337.2,1005-1023).
gacctgacaccaaaaacct

SEQ ID NO: 234770 - DNA, 19 bp, Homo sapiens
  siRNA target sequence for PPIL2 (NM_014337.2,1045-1063).
gcaagaagcattattacga

SEQ ID NO: 234771 - DNA, 19 bp, Homo sapiens
  siRNA target sequence for PPIL2 (NM_014337.2,1046-1064).
caagaagcattattacgat

SEQ ID NO: 234772 - DNA, 19 bp, Homo sapiens
  siRNA target sequence for PPIL2 (NM_014337.2,1081-1099).
gatccatccggaactttgt

SEQ ID NO: 234773 - DNA, 19 bp, Homo sapiens
  siRNA target sequence for PPIL2 (NM_014337.2,1129-1147).
gcacgggtggggagtcata

SEQ ID NO: 234774 - DNA, 19 bp, Homo sapiens
  siRNA target sequence for PPIL3 (NM_032472.3,263-281).
gatgtaggtgatattaaaa

SEQ ID NO: 234775 - DNA, 19 bp, Homo sapiens
  siRNA target sequence for PPIL3 (NM_032472.3,296-314).
gagaggacacccaaaacat

SEQ ID NO: 234776 - DNA, 19 bp, Homo sapiens
  siRNA target sequence for PPIL3 (NM_032472.3,298-316).
gaggacacccaaaacatgt

SEQ ID NO: 234777 - DNA, 19 bp, Homo sapiens
  siRNA target sequence for PPIL3 (NM_032472.3,496-514).
caatgttagaggtgttgta

SEQ ID NO: 234778 - DNA, 19 bp, Homo sapiens
  siRNA target sequence for PPIL3 (NM_032472.3,500-518).
gttagaggtgttgtatcta

SEQ ID NO: 234779 - DNA, 19 bp, Homo sapiens
  siRNA target sequence for PPIL3 (NM_032472.3,509-527).
gttgtatctatggctaata

SEQ ID NO: 234780 - DNA, 19 bp, Homo sapiens
  siRNA target sequence for PPIL3 (NM_032472.3,589-607).
catgaaatacaccgtattt

SEQ ID NO: 234781 - DNA, 19 bp, Homo sapiens
  siRNA target sequence for PPIL3 (NM_032472.3,592-610).
gaaatacaccgtatttgga

SEQ ID NO: 234782 - DNA, 19 bp, Homo sapiens
  siRNA target sequence for PPIL3 (NM_032472.3,600-618).
ccgtatttggaaaggtaat

SEQ ID NO: 234783 - DNA, 19 bp, Homo sapiens
  siRNA target sequence for PPIL3 (NM_032472.3,672-690).
cataccgacctcttaatga

SEQ ID NO: 234784 - DNA, 19 bp, Homo sapiens
  siRNA target sequence for PPIL3 (NM_032472.3,678-696).
gacctcttaatgatgtaca

SEQ ID NO: 234785 - DNA, 19 bp, Homo sapiens
  siRNA target sequence for PPIL3 (NM_032472.3,695-713).
cacattaaggacataacta

SEQ ID NO: 234786 - DNA, 19 bp, Homo sapiens
  siRNA target sequence for PPIL3 (NM_130906.1,264-282).
gctctttgtgccagtaatt

SEQ ID NO: 234787 - DNA, 19 bp, Homo sapiens
  siRNA target sequence for PPIL3 (NM_130906.1,265-283).
ctctttgtgccagtaatta

SEQ ID NO: 234788 - DNA, 19 bp, Homo sapiens
  siRNA target sequence for PPIL3 (NM_130906.1,271-289).
gtgccagtaattactacaa

SEQ ID NO: 234789 - DNA, 19 bp, Homo sapiens
  siRNA target sequence for PPIL3 (NM_130906.1,293-311).
ctgtatatttcataggaat

SEQ ID NO: 234790 - DNA, 19 bp, Homo sapiens
  siRNA target sequence for PPIL3 (NM_130906.1,295-313).
gtatatttcataggaatat

SEQ ID NO: 234791 - DNA, 19 bp, Homo sapiens
  siRNA target sequence for PPIL3 (NM_130906.1,317-335).
gggtttcatggttcaaaca

SEQ ID NO: 234792 - DNA, 19 bp, Homo sapiens
  siRNA target sequence for SDCCAG10 (NM_005869.1,532-550).
gggtcgagcagatgaactt

SEQ ID NO: 234793 - DNA, 19 bp, Homo sapiens
  siRNA target sequence for SDCCAG10 (NM_005869.1,533-551).
ggtcgagcagatgaactta

SEQ ID NO: 234794 - DNA, 19 bp, Homo sapiens
  siRNA target sequence for SDCCAG10 (NM_005869.1,534-552).
gtcgagcagatgaacttaa

SEQ ID NO: 234795 - DNA, 19 bp, Homo sapiens
  siRNA target sequence for SDCCAG10 (NM_005869.1,545-563).
gaacttaacaataagcata

SEQ ID NO: 234796 - DNA, 19 bp, Homo sapiens
  siRNA target sequence for SDCCAG10 (NM_005869.1,577-595).
ggttacaggggatacagta

SEQ ID NO: 234797 - DNA, 19 bp, Homo sapiens
  siRNA target sequence for SDCCAG10 (NM_005869.1,578-596).
gttacaggggatacagtat

SEQ ID NO: 234798 - DNA, 19 bp, Homo sapiens
  siRNA target sequence for SDCCAG10 (NM_005869.1,584-602).
ggggatacagtatataaca

SEQ ID NO: 234799 - DNA, 19 bp, Homo sapiens
  siRNA target sequence for SDCCAG10 (NM_005869.1,585-603).
gggatacagtatataacat

SEQ ID NO: 234800 - DNA, 19 bp, Homo sapiens
  siRNA target sequence for SDCCAG10 (NM_005869.1,604-622).
gttgcgactgtcagaagta

SEQ ID NO: 234801 - DNA, 19 bp, Homo sapiens
  siRNA target sequence for SDCCAG10 (NM_005869.1,637-655).
cgaaagaccacataatcca

SEQ ID NO: 234802 - DNA, 19 bp, Homo sapiens
  siRNA target sequence for SDCCAG10 (NM_005869.1,644-662).
ccacataatccacacaaaa

SEQ ID NO: 234803 - DNA, 19 bp, Homo sapiens
  siRNA target sequence for SDCCAG10 (NM_005869.1,829-847).
ggaagtaaatcgagttagt

SEQ ID NO: 234804 - DNA, 19 bp, Homo sapiens
  siRNA target sequence for SDCCAG10 (NM_005869.1,873-891).
gtagtcatgacttgcttaa

SEQ ID NO: 234805 - DNA, 19 bp, Homo sapiens
  siRNA target sequence for SDCCAG10 (NM_005869.1,876-894).
gtcatgacttgcttaagga

SEQ ID NO: 234806 - DNA, 19 bp, Homo sapiens
  siRNA target sequence for SDCCAG10 (NM_005869.1,945-963).
caccagatttagttgatga

SEQ ID NO: 234807 - DNA, 19 bp, Homo sapiens
  siRNA target sequence for SDCCAG10 (NM_005869.1,1057-1075).
cacaagtgcgaatgttaaa

SEQ ID NO: 234808 - DNA, 19 bp, Homo sapiens
  siRNA target sequence for SDCCAG10 (NM_005869.1,1253-1271).
gccgaatacagaagagaaa

SEQ ID NO: 234809 - DNA, 19 bp, Homo sapiens
  siRNA target sequence for SDCCAG10 (NM_005869.1,1266-1284).
gagaaaagcaaaagtatga

SEQ ID NO: 234810 - DNA, 19 bp, Homo sapiens
  siRNA target sequence for SDCCAG10 (NM_005869.1,1341-1359).
cactgctgaaccagtttaa

SEQ ID NO: 234811 - DNA, 19 bp, Homo sapiens
  siRNA target sequence for SDCCAG10 (NM_005869.1,1348-1366).
gaaccagtttaaatctaaa

SEQ ID NO: 234812 - DNA, 19 bp, Homo sapiens
  siRNA target sequence for SDCCAG10 (NM_005869.1,1443-1461).
cacatgtacttcagtttga

SEQ ID NO: 234813 - DNA, 19 bp, Homo sapiens
  siRNA target sequence for SDCCAG10 (NM_005869.1,1492-1510).
catgcaagactcagataca

SEQ ID NO: 234814 - DNA, 19 bp, Homo sapiens
  siRNA target sequence for SDCCAG10 (NM_005869.1,1495-1513).
gcaagactcagatacattt

SEQ ID NO: 234815 - DNA, 19 bp, Homo sapiens
  siRNA target sequence for SDCCAG10 (NM_005869.1,1503-1521).
cagatacatttgaaatcta

SEQ ID NO: 234816 - DNA, 19 bp, Homo sapiens
  siRNA target sequence for EBP (NM_006579.1,156-174).
cctaagactggacaacttt

SEQ ID NO: 234817 - DNA, 19 bp, Homo sapiens
  siRNA target sequence for EBP (NM_006579.1,221-239).
ctgtcacaggggtcttagt

SEQ ID NO: 234818 - DNA, 19 bp, Homo sapiens
  siRNA target sequence for EBP (NM_006579.1,353-371).
gctggttcgttctctacta

SEQ ID NO: 234819 - DNA, 19 bp, Homo sapiens
  siRNA target sequence for EBP (NM_006579.1,404-422).
ctcaactctggaaagagta

SEQ ID NO: 234820 - DNA, 19 bp, Homo sapiens
  siRNA target sequence for EBP (NM_006579.1,540-558).
gcatcccctccgcttcatt

SEQ ID NO: 234821 - DNA, 19 bp, Homo sapiens
  siRNA target sequence for DCI (NM_001919.1,172-190).
caggggtcgctgtgatgaa

SEQ ID NO: 234822 - DNA, 19 bp, Homo sapiens
  siRNA target sequence for DCI (NM_001919.1,174-192).
ggggtcgctgtgatgaaat

SEQ ID NO: 234823 - DNA, 19 bp, Homo sapiens
  siRNA target sequence for DCI (NM_001919.1,177-195).
gtcgctgtgatgaaattca

SEQ ID NO: 234824 - DNA, 19 bp, Homo sapiens
  siRNA target sequence for DCI (NM_001919.1,275-293).
gagcttccgcggtgtcatt

SEQ ID NO: 234825 - DNA, 19 bp, Homo sapiens
  siRNA target sequence for DCI (NM_001919.1,277-295).
gcttccgcggtgtcattct

SEQ ID NO: 234826 - DNA, 19 bp, Homo sapiens
  siRNA target sequence for DCI (NM_001919.1,564-582).
cctttctggttgaaagaca

SEQ ID NO: 234827 - DNA, 19 bp, Homo sapiens
  siRNA target sequence for JPH2 (NM_020433.3,1081-1099).
catgggctgggcatagaga

SEQ ID NO: 234828 - DNA, 19 bp, Homo sapiens
  siRNA target sequence for JPH2 (NM_020433.3,1175-1193).
gcagcggtgccaagtatga

SEQ ID NO: 234829 - DNA, 19 bp, Homo sapiens
  siRNA target sequence for JPH2 (NM_020433.3,1604-1622).
gccgtgtcagcttccttaa

SEQ ID NO: 234830 - DNA, 19 bp, Homo sapiens
  siRNA target sequence for JPH2 (NM_020433.3,1706-1724).
ccttcgaggccgatatcga

SEQ ID NO: 234831 - DNA, 19 bp, Homo sapiens
  siRNA target sequence for JPH2 (NM_020433.3,2158-2176).
ccaggtccggaatatcaga

SEQ ID NO: 234832 - DNA, 19 bp, Homo sapiens
  siRNA target sequence for JPH2 (NM_020433.3,2159-2177).
caggtccggaatatcagaa

SEQ ID NO: 234833 - DNA, 19 bp, Homo sapiens
  siRNA target sequence for GNPDA2 (NM_138335.1,162-180).
ggcttgtaattcttgataa

SEQ ID NO: 234834 - DNA, 19 bp, Homo sapiens
  siRNA target sequence for GNPDA2 (NM_138335.1,164-182).
cttgtaattcttgataact

SEQ ID NO: 234835 - DNA, 19 bp, Homo sapiens
  siRNA target sequence for GNPDA2 (NM_138335.1,181-199).
ctatgacttggctagtgaa

SEQ ID NO: 234836 - DNA, 19 bp, Homo sapiens
  siRNA target sequence for GNPDA2 (NM_138335.1,219-237).
gtaatcgcatcattcagtt

SEQ ID NO: 234837 - DNA, 19 bp, Homo sapiens
  siRNA target sequence for GNPDA2 (NM_138335.1,242-260).
cctggacaggacagatatt

SEQ ID NO: 234838 - DNA, 19 bp, Homo sapiens
  siRNA target sequence for GNPDA2 (NM_138335.1,245-263).
ggacaggacagatatttta

SEQ ID NO: 234839 - DNA, 19 bp, Homo sapiens
  siRNA target sequence for GNPDA2 (NM_138335.1,281-299).
gggagtacacctttaggat

SEQ ID NO: 234840 - DNA, 19 bp, Homo sapiens
  siRNA target sequence for GNPDA2 (NM_138335.1,401-419).
cctgaaagctaccattctt

SEQ ID NO: 234841 - DNA, 19 bp, Homo sapiens
  siRNA target sequence for GNPDA2 (NM_138335.1,448-466).
cgatatagatcctaataat

SEQ ID NO: 234842 - DNA, 19 bp, Homo sapiens
  siRNA target sequence for GNPDA2 (NM_138335.1,481-499).
cgggaatgctgcagattta

SEQ ID NO: 234843 - DNA, 19 bp, Homo sapiens
  siRNA target sequence for GNPDA2 (NM_138335.1,483-501).
ggaatgctgcagatttaca

SEQ ID NO: 234844 - DNA, 19 bp, Homo sapiens
  siRNA target sequence for GNPDA2 (NM_138335.1,484-502).
gaatgctgcagatttacaa

SEQ ID NO: 234845 - DNA, 19 bp, Homo sapiens
  siRNA target sequence for GNPDA2 (NM_138335.1,582-600).
gtcatatcgctttcaatga

SEQ ID NO: 234846 - DNA, 19 bp, Homo sapiens
  siRNA target sequence for GNPDA2 (NM_138335.1,602-620).
cctggatccagtttagtgt

SEQ ID NO: 234847 - DNA, 19 bp, Homo sapiens
  siRNA target sequence for GNPDA2 (NM_138335.1,630-648).
gattaaagactctagcaat

SEQ ID NO: 234848 - DNA, 19 bp, Homo sapiens
  siRNA target sequence for GNPDA2 (NM_138335.1,639-657).
ctctagcaatggataccat

SEQ ID NO: 234849 - DNA, 19 bp, Homo sapiens
  siRNA target sequence for GNPDA2 (NM_138335.1,658-676).
cttggcaaatgccaaatat

SEQ ID NO: 234850 - DNA, 19 bp, Homo sapiens
  siRNA target sequence for GNPDA2 (NM_138335.1,700-718).
gccaactatggctctaact

SEQ ID NO: 234851 - DNA, 19 bp, Homo sapiens
  siRNA target sequence for GNPDA2 (NM_138335.1,702-720).
caactatggctctaactgt

SEQ ID NO: 234852 - DNA, 19 bp, Homo sapiens
  siRNA target sequence for GNPDA2 (NM_138335.1,749-767).
gaagtaatgatccttataa

SEQ ID NO: 234853 - DNA, 19 bp, Homo sapiens
  siRNA target sequence for GNPDA2 (NM_138335.1,789-807).
ccctgtacaaagcaataga

SEQ ID NO: 234854 - DNA, 19 bp, Homo sapiens
  siRNA target sequence for GNPDA2 (NM_138335.1,850-868).
gcatccccggactattttt

SEQ ID NO: 234855 - DNA, 19 bp, Homo sapiens
  siRNA target sequence for GNPDA2 (NM_138335.1,854-872).
ccccggactatttttgtat

SEQ ID NO: 234856 - DNA, 19 bp, Homo sapiens
  siRNA target sequence for GNPDA2 (NM_138335.1,874-892).
cgatgaagatgctacttta

SEQ ID NO: 234857 - DNA, 19 bp, Homo sapiens
  siRNA target sequence for GNPDA2 (NM_138335.1,919-937).
ctttaaaggtctaatgcat

SEQ ID NO: 234858 - DNA, 19 bp, Homo sapiens
  siRNA target sequence for GNPDA2 (NM_138335.1,929-947).
ctaatgcatgtgcacaata

SEQ ID NO: 234859 - DNA, 19 bp, Homo sapiens
  siRNA target sequence for GNPDA2 (NM_138335.1,950-968).
cttgtggatccactattca

SEQ ID NO: 234860 - DNA, 19 bp, Homo sapiens
  siRNA target sequence for GNPDA2 (NM_138335.1,953-971).
gtggatccactattcagta

SEQ ID NO: 234861 - DNA, 19 bp, Homo sapiens
  siRNA target sequence for GNPDA2 (NM_138335.1,956-974).
gatccactattcagtatga

SEQ ID NO: 234862 - DNA, 19 bp, Homo sapiens
  siRNA target sequence for RPIA (NM_144563.1,284-302).
gagaaccacgtgaggaata

SEQ ID NO: 234863 - DNA, 19 bp, Homo sapiens
  siRNA target sequence for RPIA (NM_144563.1,289-307).
ccacgtgaggaataaccaa

SEQ ID NO: 234864 - DNA, 19 bp, Homo sapiens
  siRNA target sequence for RPIA (NM_144563.1,509-527).
gatgctgatctcaatctca

SEQ ID NO: 234865 - DNA, 19 bp, Homo sapiens
  siRNA target sequence for RPIA (NM_144563.1,513-531).
ctgatctcaatctcatcaa

SEQ ID NO: 234866 - DNA, 19 bp, Homo sapiens
  siRNA target sequence for RPIA (NM_144563.1,598-616).
cgctgatttcaggaaagat

SEQ ID NO: 234867 - DNA, 19 bp, Homo sapiens
  siRNA target sequence for RPIA (NM_144563.1,607-625).
caggaaagattcgaagaat

SEQ ID NO: 234868 - DNA, 19 bp, Homo sapiens
  siRNA target sequence for RPIA (NM_144563.1,609-627).
ggaaagattcgaagaatct

SEQ ID NO: 234869 - DNA, 19 bp, Homo sapiens
  siRNA target sequence for RPIA (NM_144563.1,717-735).
gcgtggttgaacttcgaat

SEQ ID NO: 234870 - DNA, 19 bp, Homo sapiens
  siRNA target sequence for RPIA (NM_144563.1,767-785).
gataatgggaattttatct

SEQ ID NO: 234871 - DNA, 19 bp, Homo sapiens
  siRNA target sequence for RPIA (NM_144563.1,800-818).
gaccgggtacacaaatgga

SEQ ID NO: 234872 - DNA, 19 bp, Homo sapiens
  siRNA target sequence for RPIA (NM_144563.1,860-878).
gacacaggcctattcatca

SEQ ID NO: 234873 - DNA, 19 bp, Homo sapiens
  siRNA target sequence for RPIA (NM_144563.1,864-882).
caggcctattcatcaacat

SEQ ID NO: 234874 - DNA, 19 bp, Homo sapiens
  siRNA target sequence for RPIA (NM_144563.1,883-901).
ggctgagagagtctacttt

SEQ ID NO: 234875 - DNA, 19 bp, Homo sapiens
  siRNA target sequence for RPIA (NM_144563.1,911-929).
gatggctcagtgaacatga

SEQ ID NO: 234876 - DNA, 19 bp, Homo sapiens
  siRNA target sequence for PGDS (NM_014485.1,15-33).
caaactacaaactcactta

SEQ ID NO: 234877 - DNA, 19 bp, Homo sapiens
  siRNA target sequence for PGDS (NM_014485.1,22-40).
caaactcacttattttaat

SEQ ID NO: 234878 - DNA, 19 bp, Homo sapiens
  siRNA target sequence for PGDS (NM_014485.1,54-72).
cagaaattattcgttacat

SEQ ID NO: 234879 - DNA, 19 bp, Homo sapiens
  siRNA target sequence for PGDS (NM_014485.1,65-83).
cgttacatatttgcttatt

SEQ ID NO: 234880 - DNA, 19 bp, Homo sapiens
  siRNA target sequence for PGDS (NM_014485.1,78-96).
cttatttggacatacagta

SEQ ID NO: 234881 - DNA, 19 bp, Homo sapiens
  siRNA target sequence for PGDS (NM_014485.1,119-137).
gctgactggcctgaaatca

SEQ ID NO: 234882 - DNA, 19 bp, Homo sapiens
  siRNA target sequence for PGDS (NM_014485.1,122-140).
gactggcctgaaatcaaat

SEQ ID NO: 234883 - DNA, 19 bp, Homo sapiens
  siRNA target sequence for PGDS (NM_014485.1,163-181).
ccccattttggaagttgat

SEQ ID NO: 234884 - DNA, 19 bp, Homo sapiens
  siRNA target sequence for PGDS (NM_014485.1,196-214).
ccagagcctagcaatagca

SEQ ID NO: 234885 - DNA, 19 bp, Homo sapiens
  siRNA target sequence for PGDS (NM_014485.1,197-215).
cagagcctagcaatagcaa

SEQ ID NO: 234886 - DNA, 19 bp, Homo sapiens
  siRNA target sequence for PGDS (NM_014485.1,259-277).
ggaacaatgtcatgttgat

SEQ ID NO: 234887 - DNA, 19 bp, Homo sapiens
  siRNA target sequence for PGDS (NM_014485.1,394-412).
gcaagacttggacacatat

SEQ ID NO: 234888 - DNA, 19 bp, Homo sapiens
  siRNA target sequence for PGDS (NM_014485.1,395-413).
caagacttggacacatatt

SEQ ID NO: 234889 - DNA, 19 bp, Homo sapiens
  siRNA target sequence for PGDS (NM_014485.1,421-439).
gagagaatggcttattggt

SEQ ID NO: 234890 - DNA, 19 bp, Homo sapiens
  siRNA target sequence for PGDS (NM_014485.1,423-441).
gagaatggcttattggtaa

SEQ ID NO: 234891 - DNA, 19 bp, Homo sapiens
  siRNA target sequence for PGDS (NM_014485.1,458-476).
gacttctactgggagattt

SEQ ID NO: 234892 - DNA, 19 bp, Homo sapiens
  siRNA target sequence for PGDS (NM_014485.1,566-584).
gccgtcgctaactggataa

SEQ ID NO: 234893 - DNA, 19 bp, Homo sapiens
  siRNA target sequence for PGDS (NM_014485.1,567-585).
ccgtcgctaactggataaa

SEQ ID NO: 234894 - DNA, 19 bp, Homo sapiens
  siRNA target sequence for PGDS (NM_014485.1,568-586).
cgtcgctaactggataaaa

SEQ ID NO: 234895 - DNA, 19 bp, Homo sapiens
  siRNA target sequence for PTGIS (NM_000961.2,234-252).
gcacggtgacatctttact

SEQ ID NO: 234896 - DNA, 19 bp, Homo sapiens
  siRNA target sequence for PTGIS (NM_000961.2,235-253).
cacggtgacatctttacta

SEQ ID NO: 234897 - DNA, 19 bp, Homo sapiens
  siRNA target sequence for PTGIS (NM_000961.2,498-516).
gttgggcgatgctacagaa

SEQ ID NO: 234898 - DNA, 19 bp, Homo sapiens
  siRNA target sequence for PTGIS (NM_000961.2,610-628).
ctgccacgcacccatgaaa

SEQ ID NO: 234899 - DNA, 19 bp, Homo sapiens
  siRNA target sequence for PTGIS (NM_000961.2,988-1006).
gagctcgagagtatccttt

SEQ ID NO: 234900 - DNA, 19 bp, Homo sapiens
  siRNA target sequence for PTGIS (NM_000961.2,1163-1181).
cagacgggcgagaattcaa

SEQ ID NO: 234901 - DNA, 19 bp, Homo sapiens
  siRNA target sequence for PTGIS (NM_000961.2,1256-1274).
cagaggtatttaaatacaa

SEQ ID NO: 234902 - DNA, 19 bp, Homo sapiens
  siRNA target sequence for PTGIS (NM_000961.2,1289-1307).
ctgacggatcagagaagaa

SEQ ID NO: 234903 - DNA, 19 bp, Homo sapiens
  siRNA target sequence for PTGIS (NM_000961.2,1325-1343).
ggaaacggctgaagaatta

SEQ ID NO: 234904 - DNA, 19 bp, Homo sapiens
  siRNA target sequence for PTGIS (NM_000961.2,1395-1413).
ggtcaacagcatcaaacaa

SEQ ID NO: 234905 - DNA, 19 bp, Homo sapiens
  siRNA target sequence for PTGIS (NM_000961.2,1396-1414).
gtcaacagcatcaaacaat

SEQ ID NO: 234906 - DNA, 19 bp, Homo sapiens
  siRNA target sequence for PMM1 (NM_002676.1,42-60).
gcgtcctctgcctgtttga

SEQ ID NO: 234907 - DNA, 19 bp, Homo sapiens
  siRNA target sequence for PMM1 (NM_002676.1,81-99).
cggctcgccagaaaattga

SEQ ID NO: 234908 - DNA, 19 bp, Homo sapiens
  siRNA target sequence for PMM1 (NM_002676.1,121-139).
gcagaagctacgaagtaga

SEQ ID NO: 234909 - DNA, 19 bp, Homo sapiens
  siRNA target sequence for PMM1 (NM_002676.1,161-179).
ggctctgactactgtaaga

SEQ ID NO: 234910 - DNA, 19 bp, Homo sapiens
  siRNA target sequence for PMM1 (NM_002676.1,162-180).
gctctgactactgtaagat

SEQ ID NO: 234911 - DNA, 19 bp, Homo sapiens
  siRNA target sequence for PMM1 (NM_002676.1,209-227).
gtcattgagaagtttgatt

SEQ ID NO: 234912 - DNA, 19 bp, Homo sapiens
  siRNA target sequence for PMM1 (NM_002676.1,246-264).
ggacggtgcagtataagca

SEQ ID NO: 234913 - DNA, 19 bp, Homo sapiens
  siRNA target sequence for PMM1 (NM_002676.1,317-335).
ctgcaggacttgatcaact

SEQ ID NO: 234914 - DNA, 19 bp, Homo sapiens
  siRNA target sequence for PMM1 (NM_002676.1,669-687).
ctggtgggaacgactttga

SEQ ID NO: 234915 - DNA, 19 bp, Homo sapiens
  siRNA target sequence for PMM1 (NM_002676.1,746-764).
cagcgatgccgggagattt

SEQ ID NO: 234916 - DNA, 19 bp, Homo sapiens
  siRNA target sequence for PMM1 (NM_002676.1,749-767).
cgatgccgggagattttct

SEQ ID NO: 234917 - DNA, 19 bp, Homo sapiens
  siRNA target sequence for PMM1 (NM_002676.1,750-768).
gatgccgggagattttctt

SEQ ID NO: 234918 - DNA, 19 bp, Homo sapiens
  siRNA target sequence for PMM2 (NM_000303.1,136-154).
gacttcctacaaaaattga

SEQ ID NO: 234919 - DNA, 19 bp, Homo sapiens
  siRNA target sequence for PMM2 (NM_000303.1,182-200).
gcggatcggactttgagaa

SEQ ID NO: 234920 - DNA, 19 bp, Homo sapiens
  siRNA target sequence for PMM2 (NM_000303.1,226-244).
gtggttgaaaaatacgatt

SEQ ID NO: 234921 - DNA, 19 bp, Homo sapiens
  siRNA target sequence for PMM2 (NM_000303.1,228-246).
ggttgaaaaatacgattat

SEQ ID NO: 234922 - DNA, 19 bp, Homo sapiens
  siRNA target sequence for PMM2 (NM_000303.1,232-250).
gaaaaatacgattatgtgt

SEQ ID NO: 234923 - DNA, 19 bp, Homo sapiens
  siRNA target sequence for PMM2 (NM_000303.1,263-281).
gcttggtagcatacaaaga

SEQ ID NO: 234924 - DNA, 19 bp, Homo sapiens
  siRNA target sequence for PMM2 (NM_000303.1,289-307).
ctcttgtgtagacagaata

SEQ ID NO: 234925 - DNA, 19 bp, Homo sapiens
  siRNA target sequence for PMM2 (NM_000303.1,329-347).
ccctaatccaagatttaat

SEQ ID NO: 234926 - DNA, 19 bp, Homo sapiens
  siRNA target sequence for PMM2 (NM_000303.1,331-349).
ctaatccaagatttaatca

SEQ ID NO: 234927 - DNA, 19 bp, Homo sapiens
  siRNA target sequence for PMM2 (NM_000303.1,351-369).
ctactgtctgagctacatt

SEQ ID NO: 234928 - DNA, 19 bp, Homo sapiens
  siRNA target sequence for PMM2 (NM_000303.1,360-378).
gagctacattgcgaaaatt

SEQ ID NO: 234929 - DNA, 19 bp, Homo sapiens
  siRNA target sequence for PMM2 (NM_000303.1,386-404).
cgaagaagaggggtacttt

SEQ ID NO: 234930 - DNA, 19 bp, Homo sapiens
  siRNA target sequence for PMM2 (NM_000303.1,390-408).
gaagaggggtactttcatt

SEQ ID NO: 234931 - DNA, 19 bp, Homo sapiens
  siRNA target sequence for PMM2 (NM_000303.1,393-411).
gaggggtactttcattgaa

SEQ ID NO: 234932 - DNA, 19 bp, Homo sapiens
  siRNA target sequence for PMM2 (NM_000303.1,395-413).
ggggtactttcattgaatt

SEQ ID NO: 234933 - DNA, 19 bp, Homo sapiens
  siRNA target sequence for PMM2 (NM_000303.1,416-434).
gaaatgggatgttaaacgt

SEQ ID NO: 234934 - DNA, 19 bp, Homo sapiens
  siRNA target sequence for PMM2 (NM_000303.1,477-495).
gttctacgaactcgataaa

SEQ ID NO: 234935 - DNA, 19 bp, Homo sapiens
  siRNA target sequence for PMM2 (NM_000303.1,480-498).
ctacgaactcgataaaaaa

SEQ ID NO: 234936 - DNA, 19 bp, Homo sapiens
  siRNA target sequence for PMM2 (NM_000303.1,623-641).
gtctgcgacatgtggaaaa

SEQ ID NO: 234937 - DNA, 19 bp, Homo sapiens
  siRNA target sequence for PMM2 (NM_000303.1,643-661).
gacggttataagaccattt

SEQ ID NO: 234938 - DNA, 19 bp, Homo sapiens
  siRNA target sequence for PMM2 (NM_000303.1,689-707).
gtggcaatgaccatgagat

SEQ ID NO: 234939 - DNA, 19 bp, Homo sapiens
  siRNA target sequence for PGM3 (NM_015599.1,43-61).
ggatttaggtgctattaca

SEQ ID NO: 234940 - DNA, 19 bp, Homo sapiens
  siRNA target sequence for PGM3 (NM_015599.1,44-62).
gatttaggtgctattacaa

SEQ ID NO: 234941 - DNA, 19 bp, Homo sapiens
  siRNA target sequence for PGM3 (NM_015599.1,126-144).
gaacgaaggcagaacatct

SEQ ID NO: 234942 - DNA, 19 bp, Homo sapiens
  siRNA target sequence for PGM3 (NM_015599.1,129-147).
cgaaggcagaacatcttga

SEQ ID NO: 234943 - DNA, 19 bp, Homo sapiens
  siRNA target sequence for PGM3 (NM_015599.1,196-214).
gacaaaatccactatagga

SEQ ID NO: 234944 - DNA, 19 bp, Homo sapiens
  siRNA target sequence for PGM3 (NM_015599.1,304-322).
ggaacatgccacctgttta

SEQ ID NO: 234945 - DNA, 19 bp, Homo sapiens
  siRNA target sequence for PGM3 (NM_015599.1,347-365).
cagagagtgcttattgaca

SEQ ID NO: 234946 - DNA, 19 bp, Homo sapiens
  siRNA target sequence for PGM3 (NM_015599.1,401-419).
gcctttgtagttattggta

SEQ ID NO: 234947 - DNA, 19 bp, Homo sapiens
  siRNA target sequence for PGM3 (NM_015599.1,429-447).
ggcccagcagtgagaaact

SEQ ID NO: 234948 - DNA, 19 bp, Homo sapiens
  siRNA target sequence for PGM3 (NM_015599.1,435-453).
gcagtgagaaactttcaca

SEQ ID NO: 234949 - DNA, 19 bp, Homo sapiens
  siRNA target sequence for PGM3 (NM_015599.1,436-454).
cagtgagaaactttcacaa

SEQ ID NO: 234950 - DNA, 19 bp, Homo sapiens
  siRNA target sequence for PGM3 (NM_015599.1,474-492).
ctgttctaggaggtcaatt

SEQ ID NO: 234951 - DNA, 19 bp, Homo sapiens
  siRNA target sequence for PGM3 (NM_015599.1,493-511).
ccatgattatggcttgtta

SEQ ID NO: 234952 - DNA, 19 bp, Homo sapiens
  siRNA target sequence for PGM3 (NM_015599.1,494-512).
catgattatggcttgttaa

SEQ ID NO: 234953 - DNA, 19 bp, Homo sapiens
  siRNA target sequence for PGM3 (NM_015599.1,497-515).
gattatggcttgttaacaa

SEQ ID NO: 234954 - DNA, 19 bp, Homo sapiens
  siRNA target sequence for PGM3 (NM_015599.1,524-542).
ctgcactacatggtgtatt

SEQ ID NO: 234955 - DNA, 19 bp, Homo sapiens
  siRNA target sequence for PGM3 (NM_015599.1,526-544).
gcactacatggtgtattgt

SEQ ID NO: 234956 - DNA, 19 bp, Homo sapiens
  siRNA target sequence for PGM3 (NM_015599.1,550-568).
cacgggtggccgatatgga

SEQ ID NO: 234957 - DNA, 19 bp, Homo sapiens
  siRNA target sequence for PGM3 (NM_015599.1,552-570).
cgggtggccgatatggaaa

SEQ ID NO: 234958 - DNA, 19 bp, Homo sapiens
  siRNA target sequence for PGM3 (NM_015599.1,573-591).
caactatagaaggttacta

SEQ ID NO: 234959 - DNA, 19 bp, Homo sapiens
  siRNA target sequence for PGM3 (NM_015599.1,636-654).
cttgcagtggagatgaata

SEQ ID NO: 234960 - DNA, 19 bp, Homo sapiens
  siRNA target sequence for PGM3 (NM_015599.1,758-776).
gggtccaagggcaaactca

SEQ ID NO: 234961 - DNA, 19 bp, Homo sapiens
  siRNA target sequence for PGM3 (NM_015599.1,759-777).
ggtccaagggcaaactcaa

SEQ ID NO: 234962 - DNA, 19 bp, Homo sapiens
  siRNA target sequence for PGM3 (NM_015599.1,760-778).
gtccaagggcaaactcaat

SEQ ID NO: 234963 - DNA, 19 bp, Homo sapiens
  siRNA target sequence for PGM3 (NM_015599.1,762-780).
ccaagggcaaactcaatca

SEQ ID NO: 234964 - DNA, 19 bp, Homo sapiens
  siRNA target sequence for PGM3 (NM_015599.1,763-781).
caagggcaaactcaatcat

SEQ ID NO: 234965 - DNA, 19 bp, Homo sapiens
  siRNA target sequence for PGM3 (NM_015599.1,766-784).
gggcaaactcaatcattta

SEQ ID NO: 234966 - DNA, 19 bp, Homo sapiens
  siRNA target sequence for PGM3 (NM_015599.1,767-785).
ggcaaactcaatcatttat

SEQ ID NO: 234967 - DNA, 19 bp, Homo sapiens
  siRNA target sequence for PGM3 (NM_015599.1,786-804).
gtggagctgactttgtgaa

SEQ ID NO: 234968 - DNA, 19 bp, Homo sapiens
  siRNA target sequence for PGM3 (NM_015599.1,792-810).
ctgactttgtgaaaagtca

SEQ ID NO: 234969 - DNA, 19 bp, Homo sapiens
  siRNA target sequence for PGM3 (NM_015599.1,821-839).
ccacagggaatggaaatta

SEQ ID NO: 234970 - DNA, 19 bp, Homo sapiens
  siRNA target sequence for PGM3 (NM_015599.1,870-888).
gagatgcagacagaattgt

SEQ ID NO: 234971 - DNA, 19 bp, Homo sapiens
  siRNA target sequence for PGM3 (NM_015599.1,935-953).
gacaagatagcaacgttaa

SEQ ID NO: 234972 - DNA, 19 bp, Homo sapiens
  siRNA target sequence for PGM3 (NM_015599.1,949-967).
gttaattagcagtttcctt

SEQ ID NO: 234973 - DNA, 19 bp, Homo sapiens
  siRNA target sequence for PGM3 (NM_015599.1,980-998).
gtggagattggagaaagtt

SEQ ID NO: 234974 - DNA, 19 bp, Homo sapiens
  siRNA target sequence for PGM3 (NM_015599.1,1013-1031).
gtacaaactgcatatgcaa

SEQ ID NO: 234975 - DNA, 19 bp, Homo sapiens
  siRNA target sequence for PGM3 (NM_015599.1,1038-1056).
gttcaacacggtatcttga

SEQ ID NO: 234976 - DNA, 19 bp, Homo sapiens
  siRNA target sequence for PGM3 (NM_015599.1,1041-1059).
caacacggtatcttgaaga

SEQ ID NO: 234977 - DNA, 19 bp, Homo sapiens
  siRNA target sequence for PGM3 (NM_015599.1,1073-1091).
cctgtctattgcactaaga

SEQ ID NO: 234978 - DNA, 19 bp, Homo sapiens
  siRNA target sequence for PGM3 (NM_015599.1,1084-1102).
cactaagactggtgtaaaa

SEQ ID NO: 234979 - DNA, 19 bp, Homo sapiens
  siRNA target sequence for PGM3 (NM_015599.1,1086-1104).
ctaagactggtgtaaaaca

SEQ ID NO: 234980 - DNA, 19 bp, Homo sapiens
  siRNA target sequence for PGM3 (NM_015599.1,1092-1110).
ctggtgtaaaacatttgca

SEQ ID NO: 234981 - DNA, 19 bp, Homo sapiens
  siRNA target sequence for PGM3 (NM_015599.1,1163-1181).
ggcactgcactgtttagta

SEQ ID NO: 234982 - DNA, 19 bp, Homo sapiens
  siRNA target sequence for PGM3 (NM_015599.1,1165-1183).
cactgcactgtttagtaca

SEQ ID NO: 234983 - DNA, 19 bp, Homo sapiens
  siRNA target sequence for PGM3 (NM_015599.1,1174-1192).
gtttagtacagctgttgaa

SEQ ID NO: 234984 - DNA, 19 bp, Homo sapiens
  siRNA target sequence for PGM3 (NM_015599.1,1179-1197).
gtacagctgttgaaatgaa

SEQ ID NO: 234985 - DNA, 19 bp, Homo sapiens
  siRNA target sequence for PGM3 (NM_015599.1,1182-1200).
cagctgttgaaatgaagat

SEQ ID NO: 234986 - DNA, 19 bp, Homo sapiens
  siRNA target sequence for PGM3 (NM_015599.1,1282-1300).
ggcagctggtgatgctatt

SEQ ID NO: 234987 - DNA, 19 bp, Homo sapiens
  siRNA target sequence for PGM3 (NM_015599.1,1283-1301).
gcagctggtgatgctattt

SEQ ID NO: 234988 - DNA, 19 bp, Homo sapiens
  siRNA target sequence for PGM3 (NM_015599.1,1336-1354).
gaagggcttgactgtacaa

SEQ ID NO: 234989 - DNA, 19 bp, Homo sapiens
  siRNA target sequence for PGM3 (NM_015599.1,1357-1375).
gtgggatgctctctataca

SEQ ID NO: 234990 - DNA, 19 bp, Homo sapiens
  siRNA target sequence for PGM3 (NM_015599.1,1360-1378).
ggatgctctctatacagat

SEQ ID NO: 234991 - DNA, 19 bp, Homo sapiens
  siRNA target sequence for PGM3 (NM_015599.1,1383-1401).
caaacagacaacttaaagt

SEQ ID NO: 234992 - DNA, 19 bp, Homo sapiens
  siRNA target sequence for PGM3 (NM_015599.1,1409-1427).
gcagacaggagagttatta

SEQ ID NO: 234993 - DNA, 19 bp, Homo sapiens
  siRNA target sequence for PGM3 (NM_015599.1,1412-1430).
gacaggagagttattagca

SEQ ID NO: 234994 - DNA, 19 bp, Homo sapiens
  siRNA target sequence for PGM3 (NM_015599.1,1429-1447).
cactaccgatgctgaaaga

SEQ ID NO: 234995 - DNA, 19 bp, Homo sapiens
  siRNA target sequence for PGM3 (NM_015599.1,1504-1522).
caagctttctcgagctttt

SEQ ID NO: 234996 - DNA, 19 bp, Homo sapiens
  siRNA target sequence for PGM3 (NM_015599.1,1627-1645).
gctggctggaggaattgga

SEQ ID NO: 234997 - DNA, 19 bp, Homo sapiens
  siRNA target sequence for FLJ32029 (NM_173582.2,423-441).
gctgcgagatcgtctttgt

SEQ ID NO: 234998 - DNA, 19 bp, Homo sapiens
  siRNA target sequence for FLJ32029 (NM_173582.2,424-442).
ctgcgagatcgtctttgtt

SEQ ID NO: 234999 - DNA, 19 bp, Homo sapiens
  siRNA target sequence for FLJ32029 (NM_173582.2,436-454).
ctttgttgccgaatgactt

SEQ ID NO: 235000 - DNA, 19 bp, Homo sapiens
  siRNA target sequence for FLJ32029 (NM_173582.2,530-548).
cacaggggatgtacaaata

SEQ ID NO: 235001 - DNA, 19 bp, Homo sapiens
  siRNA target sequence for FLJ32029 (NM_173582.2,534-552).
ggggatgtacaaatacctt

SEQ ID NO: 235002 - DNA, 19 bp, Homo sapiens
  siRNA target sequence for FLJ32029 (NM_173582.2,601-619).
gacactcggggtcaagtaa

SEQ ID NO: 235003 - DNA, 19 bp, Homo sapiens
  siRNA target sequence for FLJ32029 (NM_173582.2,603-621).
cactcggggtcaagtaact

SEQ ID NO: 235004 - DNA, 19 bp, Homo sapiens
  siRNA target sequence for FLJ32029 (NM_173582.2,635-653).
gccagaggcttgctaaact

SEQ ID NO: 235005 - DNA, 19 bp, Homo sapiens
  siRNA target sequence for FLJ32029 (NM_173582.2,688-706).
gtgtaccttttttcaagat

SEQ ID NO: 235006 - DNA, 19 bp, Homo sapiens
  siRNA target sequence for FLJ32029 (NM_173582.2,754-772).
gttgcaggtgtgatgatta

SEQ ID NO: 235007 - DNA, 19 bp, Homo sapiens
  siRNA target sequence for FLJ32029 (NM_173582.2,834-852).
gatcacatctcctcatgat

SEQ ID NO: 235008 - DNA, 19 bp, Homo sapiens
  siRNA target sequence for FLJ32029 (NM_173582.2,837-855).
cacatctcctcatgataaa

SEQ ID NO: 235009 - DNA, 19 bp, Homo sapiens
  siRNA target sequence for FLJ32029 (NM_173582.2,902-920).
cctggaatgataatttagt

SEQ ID NO: 235010 - DNA, 19 bp, Homo sapiens
  siRNA target sequence for FLJ32029 (NM_173582.2,1014-1032).
ctcgaagaccaccttgaaa

SEQ ID NO: 235011 - DNA, 19 bp, Homo sapiens
  siRNA target sequence for FLJ32029 (NM_173582.2,1016-1034).
cgaagaccaccttgaaatt

SEQ ID NO: 235012 - DNA, 19 bp, Homo sapiens
  siRNA target sequence for FLJ32029 (NM_173582.2,1055-1073).
gggtcggacatgactatgt

SEQ ID NO: 235013 - DNA, 19 bp, Homo sapiens
  siRNA target sequence for FLJ32029 (NM_173582.2,1075-1093).
cagttggcttttaaagtgt

SEQ ID NO: 235014 - DNA, 19 bp, Homo sapiens
  siRNA target sequence for FLJ32029 (NM_173582.2,1144-1162).
gacttttctaccgttaaat

SEQ ID NO: 235015 - DNA, 19 bp, Homo sapiens
  siRNA target sequence for FLJ32029 (NM_173582.2,1155-1173).
cgttaaatgtccaaatcct

SEQ ID NO: 235016 - DNA, 19 bp, Homo sapiens
  siRNA target sequence for FLJ32029 (NM_173582.2,1287-1305).
ggagaatggttgttggaaa

SEQ ID NO: 235017 - DNA, 19 bp, Homo sapiens
  siRNA target sequence for FLJ32029 (NM_173582.2,1294-1312).
ggttgttggaaagttttca

SEQ ID NO: 235018 - DNA, 19 bp, Homo sapiens
  siRNA target sequence for FLJ32029 (NM_173582.2,1387-1405).
gatgtgaagaacgtttata

SEQ ID NO: 235019 - DNA, 19 bp, Homo sapiens
  siRNA target sequence for FLJ32029 (NM_173582.2,1450-1468).
cttaaagaaggatttcatt

SEQ ID NO: 235020 - DNA, 19 bp, Homo sapiens
  siRNA target sequence for FLJ32029 (NM_173582.2,1486-1504).
ggttttaaatggattggaa

SEQ ID NO: 235021 - DNA, 19 bp, Homo sapiens
  siRNA target sequence for FLJ32029 (NM_173582.2,1497-1515).
gattggaagtaggataata

SEQ ID NO: 235022 - DNA, 19 bp, Homo sapiens
  siRNA target sequence for FLJ32029 (NM_173582.2,1580-1598).
gaacttcagttttggataa

SEQ ID NO: 235023 - DNA, 19 bp, Homo sapiens
  siRNA target sequence for FLJ32029 (NM_173582.2,1678-1696).
ctggttaaggtttatgaaa

SEQ ID NO: 235024 - DNA, 19 bp, Homo sapiens
  siRNA target sequence for FLJ32029 (NM_173582.2,1744-1762).
ccacctaccatcaaaagta

SEQ ID NO: 235025 - DNA, 19 bp, Homo sapiens
  siRNA target sequence for FLJ32029 (NM_173582.2,1745-1763).
cacctaccatcaaaagtat

SEQ ID NO: 235026 - DNA, 19 bp, Homo sapiens
  siRNA target sequence for FLJ32029 (NM_173582.2,1790-1808).
ctccaaaagaatatccaaa

SEQ ID NO: 235027 - DNA, 19 bp, Homo sapiens
  siRNA target sequence for FLJ32029 (NM_173582.2,1842-1860).
ggacgttaccactggatat

SEQ ID NO: 235028 - DNA, 19 bp, Homo sapiens
  siRNA target sequence for FLJ32029 (NM_173582.2,1846-1864).
gttaccactggatatgaca

SEQ ID NO: 235029 - DNA, 19 bp, Homo sapiens
  siRNA target sequence for FLJ32029 (NM_173582.2,1861-1879).
gacagtagccagcctaata

SEQ ID NO: 235030 - DNA, 19 bp, Homo sapiens
  siRNA target sequence for FLJ32029 (NM_173582.2,1865-1883).
gtagccagcctaataagaa

SEQ ID NO: 235031 - DNA, 19 bp, Homo sapiens
  siRNA target sequence for FLJ32029 (NM_173582.2,1966-1984).
ggaacagaaccaaagataa

SEQ ID NO: 235032 - DNA, 19 bp, Homo sapiens
  siRNA target sequence for PGM2 (NM_018290.1,83-101).
ctgcgctgggacaagaatt

SEQ ID NO: 235033 - DNA, 19 bp, Homo sapiens
  siRNA target sequence for PGM2 (NM_018290.1,86-104).
cgctgggacaagaattcct

SEQ ID NO: 235034 - DNA, 19 bp, Homo sapiens
  siRNA target sequence for PGM2 (NM_018290.1,115-133).
ggcagtgaaacgactaata

SEQ ID NO: 235035 - DNA, 19 bp, Homo sapiens
  siRNA target sequence for PGM2 (NM_018290.1,126-144).
gactaatagcagaaggtaa

SEQ ID NO: 235036 - DNA, 19 bp, Homo sapiens
  siRNA target sequence for PGM2 (NM_018290.1,209-227).
gctatgggacctggaattt

SEQ ID NO: 235037 - DNA, 19 bp, Homo sapiens
  siRNA target sequence for PGM2 (NM_018290.1,219-237).
ctggaatttctcgtatgaa

SEQ ID NO: 235038 - DNA, 19 bp, Homo sapiens
  siRNA target sequence for PGM2 (NM_018290.1,315-333).
gcatcgtgatcagttttga

SEQ ID NO: 235039 - DNA, 19 bp, Homo sapiens
  siRNA target sequence for PGM2 (NM_018290.1,358-376).
gggtagcagcagaaggttt

SEQ ID NO: 235040 - DNA, 19 bp, Homo sapiens
  siRNA target sequence for PGM2 (NM_018290.1,386-404).
gctgcaaccacatttatca

SEQ ID NO: 235041 - DNA, 19 bp, Homo sapiens
  siRNA target sequence for PGM2 (NM_018290.1,457-475).
gcccttcacagtatcacat

SEQ ID NO: 235042 - DNA, 19 bp, Homo sapiens
  siRNA target sequence for PGM2 (NM_018290.1,519-537).
caaagcaggataatggtta

SEQ ID NO: 235043 - DNA, 19 bp, Homo sapiens
  siRNA target sequence for PGM2 (NM_018290.1,541-559).
ggtctattgggataatgga

SEQ ID NO: 235044 - DNA, 19 bp, Homo sapiens
  siRNA target sequence for PGM2 (NM_018290.1,580-598).
cgataaagggatttctcaa

SEQ ID NO: 235045 - DNA, 19 bp, Homo sapiens
  siRNA target sequence for PGM2 (NM_018290.1,588-606).
ggatttctcaagctattga

SEQ ID NO: 235046 - DNA, 19 bp, Homo sapiens
  siRNA target sequence for PGM2 (NM_018290.1,629-647).
caagcttgggacgattctt

SEQ ID NO: 235047 - DNA, 19 bp, Homo sapiens
  siRNA target sequence for PGM2 (NM_018290.1,632-650).
gcttgggacgattctttaa

SEQ ID NO: 235048 - DNA, 19 bp, Homo sapiens
  siRNA target sequence for PGM2 (NM_018290.1,636-654).
gggacgattctttaattga

SEQ ID NO: 235049 - DNA, 19 bp, Homo sapiens
  siRNA target sequence for PGM2 (NM_018290.1,637-655).
ggacgattctttaattgat

SEQ ID NO: 235050 - DNA, 19 bp, Homo sapiens
  siRNA target sequence for PGM2 (NM_018290.1,638-656).
gacgattctttaattgata

SEQ ID NO: 235051 - DNA, 19 bp, Homo sapiens
  siRNA target sequence for PGM2 (NM_018290.1,677-695).
ccgagtgcttccatcaata

SEQ ID NO: 235052 - DNA, 19 bp, Homo sapiens
  siRNA target sequence for PGM2 (NM_018290.1,678-696).
cgagtgcttccatcaataa

SEQ ID NO: 235053 - DNA, 19 bp, Homo sapiens
  siRNA target sequence for PGM2 (NM_018290.1,679-697).
gagtgcttccatcaataat

SEQ ID NO: 235054 - DNA, 19 bp, Homo sapiens
  siRNA target sequence for PGM2 (NM_018290.1,688-706).
catcaataatgactacttt

SEQ ID NO: 235055 - DNA, 19 bp, Homo sapiens
  siRNA target sequence for PGM2 (NM_018290.1,738-756).
gcgtgaacagggagacaaa

SEQ ID NO: 235056 - DNA, 19 bp, Homo sapiens
  siRNA target sequence for PGM2 (NM_018290.1,748-766).
ggagacaaaggtgaagttt

SEQ ID NO: 235057 - DNA, 19 bp, Homo sapiens
  siRNA target sequence for PGM2 (NM_018290.1,912-930).
ggaaaggtgtcttgacttt

SEQ ID NO: 235058 - DNA, 19 bp, Homo sapiens
  siRNA target sequence for PGM2 (NM_018290.1,939-957).
ctttggctgacaaaaccaa

SEQ ID NO: 235059 - DNA, 19 bp, Homo sapiens
  siRNA target sequence for PGM2 (NM_018290.1,979-997).
cgacccggatgctgataga

SEQ ID NO: 235060 - DNA, 19 bp, Homo sapiens
  siRNA target sequence for PGM2 (NM_018290.1,982-1000).
cccggatgctgatagactt

SEQ ID NO: 235061 - DNA, 19 bp, Homo sapiens
  siRNA target sequence for PGM2 (NM_018290.1,1069-1087).
gggctggtggctttttaca

SEQ ID NO: 235062 - DNA, 19 bp, Homo sapiens
  siRNA target sequence for PGM2 (NM_018290.1,1112-1130).
cgcagtgctctcaaagaca

SEQ ID NO: 235063 - DNA, 19 bp, Homo sapiens
  siRNA target sequence for PGM2 (NM_018290.1,1121-1139).
ctcaaagacacgtacatgt

SEQ ID NO: 235064 - DNA, 19 bp, Homo sapiens
  siRNA target sequence for PGM2 (NM_018290.1,1239-1257).
gagccaaacagctaataga

SEQ ID NO: 235065 - DNA, 19 bp, Homo sapiens
  siRNA target sequence for PGM2 (NM_018290.1,1289-1307).
gaagctattggatacatgt

SEQ ID NO: 235066 - DNA, 19 bp, Homo sapiens
  siRNA target sequence for PGM2 (NM_018290.1,1337-1355).
gtcagtgccgctgtcataa

SEQ ID NO: 235067 - DNA, 19 bp, Homo sapiens
  siRNA target sequence for PGM2 (NM_018290.1,1339-1357).
cagtgccgctgtcataagt

SEQ ID NO: 235068 - DNA, 19 bp, Homo sapiens
  siRNA target sequence for PGM2 (NM_018290.1,1405-1423).
gcaactaaaggccatttat

SEQ ID NO: 235069 - DNA, 19 bp, Homo sapiens
  siRNA target sequence for PGM2 (NM_018290.1,1427-1445).
gagtatggctaccatatta

SEQ ID NO: 235070 - DNA, 19 bp, Homo sapiens
  siRNA target sequence for PGM2 (NM_018290.1,1429-1447).
gtatggctaccatattact

SEQ ID NO: 235071 - DNA, 19 bp, Homo sapiens
  siRNA target sequence for PGM2 (NM_018290.1,1435-1453).
ctaccatattactaaagct

SEQ ID NO: 235072 - DNA, 19 bp, Homo sapiens
  siRNA target sequence for PGM2 (NM_018290.1,1469-1487).
catgatcaagaaaccatta

SEQ ID NO: 235073 - DNA, 19 bp, Homo sapiens
  siRNA target sequence for PGM2 (NM_018290.1,1472-1490).
gatcaagaaaccattaaga

SEQ ID NO: 235074 - DNA, 19 bp, Homo sapiens
  siRNA target sequence for PGM2 (NM_018290.1,1565-1583).
gccattagggaccttacaa

SEQ ID NO: 235075 - DNA, 19 bp, Homo sapiens
  siRNA target sequence for PGM2 (NM_018290.1,1567-1585).
cattagggaccttacaact

SEQ ID NO: 235076 - DNA, 19 bp, Homo sapiens
  siRNA target sequence for PGM2 (NM_018290.1,1595-1613).
gatagccaacctgataaaa

SEQ ID NO: 235077 - DNA, 19 bp, Homo sapiens
  siRNA target sequence for PGM2 (NM_018290.1,1616-1634).
gctgttcttcccactagta

SEQ ID NO: 235078 - DNA, 19 bp, Homo sapiens
  siRNA target sequence for PGM2 (NM_018290.1,1617-1635).
ctgttcttcccactagtaa

SEQ ID NO: 235079 - DNA, 19 bp, Homo sapiens
  siRNA target sequence for PGM2 (NM_018290.1,1622-1640).
cttcccactagtaaaagca

SEQ ID NO: 235080 - DNA, 19 bp, Homo sapiens
  siRNA target sequence for PGM2 (NM_018290.1,1697-1715).
gggacagagcccaaaatca

SEQ ID NO: 235081 - DNA, 19 bp, Homo sapiens
  siRNA target sequence for PGM2 (NM_018290.1,1789-1807).
ggtcagtgctattgaagaa

SEQ ID NO: 235082 - DNA, 19 bp, Homo sapiens
  siRNA target sequence for PGM5 (NM_021965.2,1267-1285).
ggacagagtggccaaatca

SEQ ID NO: 235083 - DNA, 19 bp, Homo sapiens
  siRNA target sequence for PGM5 (NM_021965.2,1268-1286).
gacagagtggccaaatcaa

SEQ ID NO: 235084 - DNA, 19 bp, Homo sapiens
  siRNA target sequence for PGM5 (NM_021965.2,1284-1302).
caatgaaggtccctgtata

SEQ ID NO: 235085 - DNA, 19 bp, Homo sapiens
  siRNA target sequence for PGM5 (NM_021965.2,1311-1329).
cagctggatggagattctt

SEQ ID NO: 235086 - DNA, 19 bp, Homo sapiens
  siRNA target sequence for PGM5 (NM_021965.2,1316-1334).
ggatggagattcttctcaa

SEQ ID NO: 235087 - DNA, 19 bp, Homo sapiens
  siRNA target sequence for PGM5 (NM_021965.2,1432-1450).
ggtctggctctccattatt

SEQ ID NO: 235088 - DNA, 19 bp, Homo sapiens
  siRNA target sequence for PGM5 (NM_021965.2,1485-1503).
gagatcactgggccaaatt

SEQ ID NO: 235089 - DNA, 19 bp, Homo sapiens
  siRNA target sequence for PGM5 (NM_021965.2,1516-1534).
ctattgcaggtttgactat

SEQ ID NO: 235090 - DNA, 19 bp, Homo sapiens
  siRNA target sequence for PGM5 (NM_021965.2,1543-1561).
ggatcccaagacgacatat

SEQ ID NO: 235091 - DNA, 19 bp, Homo sapiens
  siRNA target sequence for PGM5 (NM_021965.2,1544-1562).
gatcccaagacgacatatt

SEQ ID NO: 235092 - DNA, 19 bp, Homo sapiens
  siRNA target sequence for PGM5 (NM_021965.2,1547-1565).
cccaagacgacatattata

SEQ ID NO: 235093 - DNA, 19 bp, Homo sapiens
  siRNA target sequence for PGM5 (NM_021965.2,1548-1566).
ccaagacgacatattatat

SEQ ID NO: 235094 - DNA, 19 bp, Homo sapiens
  siRNA target sequence for PGM5 (NM_021965.2,1646-1664).
gtggcgaagacggatagtt

SEQ ID NO: 235095 - DNA, 19 bp, Homo sapiens
  siRNA target sequence for PGM5 (NM_021965.2,1648-1666).
ggcgaagacggatagtttt

SEQ ID NO: 235096 - DNA, 19 bp, Homo sapiens
  siRNA target sequence for PGM5 (NM_021965.2,1650-1668).
cgaagacggatagttttga

SEQ ID NO: 235097 - DNA, 19 bp, Homo sapiens
  siRNA target sequence for PGM5 (NM_021965.2,1651-1669).
gaagacggatagttttgaa

SEQ ID NO: 235098 - DNA, 19 bp, Homo sapiens
  siRNA target sequence for PGM5 (NM_021965.2,1656-1674).
cggatagttttgaatacgt

SEQ ID NO: 235099 - DNA, 19 bp, Homo sapiens
  siRNA target sequence for PGM5 (NM_021965.2,1861-1879).
catagccatcgcactgaaa

SEQ ID NO: 235100 - DNA, 19 bp, Homo sapiens
  siRNA target sequence for PGM5 (NM_021965.2,1865-1883).
gccatcgcactgaaaatat

SEQ ID NO: 235101 - DNA, 19 bp, Homo sapiens
  siRNA target sequence for MUT (NM_000255.1,86-104).
gctaagaatcagctttttt

SEQ ID NO: 235102 - DNA, 19 bp, Homo sapiens
  siRNA target sequence for MUT (NM_000255.1,144-162).
caggctccaggctcataca

SEQ ID NO: 235103 - DNA, 19 bp, Homo sapiens
  siRNA target sequence for MUT (NM_000255.1,157-175).
catacagcaacgacttcta

SEQ ID NO: 235104 - DNA, 19 bp, Homo sapiens
  siRNA target sequence for MUT (NM_000255.1,264-282).
ccccggaagggatctctat

SEQ ID NO: 235105 - DNA, 19 bp, Homo sapiens
  siRNA target sequence for MUT (NM_000255.1,265-283).
cccggaagggatctctata

SEQ ID NO: 235106 - DNA, 19 bp, Homo sapiens
  siRNA target sequence for MUT (NM_000255.1,266-284).
ccggaagggatctctataa

SEQ ID NO: 235107 - DNA, 19 bp, Homo sapiens
  siRNA target sequence for MUT (NM_000255.1,267-285).
cggaagggatctctataaa

SEQ ID NO: 235108 - DNA, 19 bp, Homo sapiens
  siRNA target sequence for MUT (NM_000255.1,277-295).
ctctataaaacccttgtat

SEQ ID NO: 235109 - DNA, 19 bp, Homo sapiens
  siRNA target sequence for MUT (NM_000255.1,349-367).
cacacgtggaccatatcct

SEQ ID NO: 235110 - DNA, 19 bp, Homo sapiens
  siRNA target sequence for MUT (NM_000255.1,359-377).
ccatatcctaccatgtata

SEQ ID NO: 235111 - DNA, 19 bp, Homo sapiens
  siRNA target sequence for MUT (NM_000255.1,397-415).
ccgccagtatgctggtttt

SEQ ID NO: 235112 - DNA, 19 bp, Homo sapiens
  siRNA target sequence for MUT (NM_000255.1,398-416).
cgccagtatgctggtttta

SEQ ID NO: 235113 - DNA, 19 bp, Homo sapiens
  siRNA target sequence for MUT (NM_000255.1,400-418).
ccagtatgctggttttagt

SEQ ID NO: 235114 - DNA, 19 bp, Homo sapiens
  siRNA target sequence for MUT (NM_000255.1,425-443).
gaagaaagcaataagttct

SEQ ID NO: 235115 - DNA, 19 bp, Homo sapiens
  siRNA target sequence for MUT (NM_000255.1,499-517).
gacacatcgtggctatgat

SEQ ID NO: 235116 - DNA, 19 bp, Homo sapiens
  siRNA target sequence for MUT (NM_000255.1,549-567).
gaatggctggagttgctat

SEQ ID NO: 235117 - DNA, 19 bp, Homo sapiens
  siRNA target sequence for MUT (NM_000255.1,554-572).
gctggagttgctattgaca

SEQ ID NO: 235118 - DNA, 19 bp, Homo sapiens
  siRNA target sequence for MUT (NM_000255.1,636-654).
ctatgaatggagcagttat

SEQ ID NO: 235119 - DNA, 19 bp, Homo sapiens
  siRNA target sequence for MUT (NM_000255.1,717-735).
ctggtaccatccaaaatga

SEQ ID NO: 235120 - DNA, 19 bp, Homo sapiens
  siRNA target sequence for MUT (NM_000255.1,720-738).
gtaccatccaaaatgatat

SEQ ID NO: 235121 - DNA, 19 bp, Homo sapiens
  siRNA target sequence for MUT (NM_000255.1,754-772).
ggttcgaaatacatacatt

SEQ ID NO: 235122 - DNA, 19 bp, Homo sapiens
  siRNA target sequence for MUT (NM_000255.1,755-773).
gttcgaaatacatacattt

SEQ ID NO: 235123 - DNA, 19 bp, Homo sapiens
  siRNA target sequence for MUT (NM_000255.1,824-842).
gcaaagcacatgccaaaat

SEQ ID NO: 235124 - DNA, 19 bp, Homo sapiens
  siRNA target sequence for MUT (NM_000255.1,855-873).
caattagtggataccatat

SEQ ID NO: 235125 - DNA, 19 bp, Homo sapiens
  siRNA target sequence for MUT (NM_000255.1,904-922).
gctggcctatactttagca

SEQ ID NO: 235126 - DNA, 19 bp, Homo sapiens
  siRNA target sequence for MUT (NM_000255.1,923-941).
gatggattggagtactcta

SEQ ID NO: 235127 - DNA, 19 bp, Homo sapiens
  siRNA target sequence for MUT (NM_000255.1,926-944).
ggattggagtactctagaa

SEQ ID NO: 235128 - DNA, 19 bp, Homo sapiens
  siRNA target sequence for MUT (NM_000255.1,959-977).
ggcctgacaattgatgaat

SEQ ID NO: 235129 - DNA, 19 bp, Homo sapiens
  siRNA target sequence for MUT (NM_000255.1,1004-1022).
ggaattggaatgaatttct

SEQ ID NO: 235130 - DNA, 19 bp, Homo sapiens
  siRNA target sequence for MUT (NM_000255.1,1063-1081).
ggctcacttaatagagaaa

SEQ ID NO: 235131 - DNA, 19 bp, Homo sapiens
  siRNA target sequence for MUT (NM_000255.1,1064-1082).
gctcacttaatagagaaaa

SEQ ID NO: 235132 - DNA, 19 bp, Homo sapiens
  siRNA target sequence for MUT (NM_000255.1,1137-1155).
ctggatggtcacttactga

SEQ ID NO: 235133 - DNA, 19 bp, Homo sapiens
  siRNA target sequence for MUT (NM_000255.1,1154-1172).
gagcaggatccctacaata

SEQ ID NO: 235134 - DNA, 19 bp, Homo sapiens
  siRNA target sequence for MUT (NM_000255.1,1182-1200).
gtactgcaatagaagcaat

SEQ ID NO: 235135 - DNA, 19 bp, Homo sapiens
  siRNA target sequence for MUT (NM_000255.1,1294-1312).
gaacacacaaatcatcatt

SEQ ID NO: 235136 - DNA, 19 bp, Homo sapiens
  siRNA target sequence for MUT (NM_000255.1,1297-1315).
cacacaaatcatcattcaa

SEQ ID NO: 235137 - DNA, 19 bp, Homo sapiens
  siRNA target sequence for MUT (NM_000255.1,1346-1364).
ccttggggaggttcttaca

SEQ ID NO: 235138 - DNA, 19 bp, Homo sapiens
  siRNA target sequence for MUT (NM_000255.1,1355-1373).
ggttcttacatgatggaat

SEQ ID NO: 235139 - DNA, 19 bp, Homo sapiens
  siRNA target sequence for MUT (NM_000255.1,1366-1384).
gatggaatgtctcacaaat

SEQ ID NO: 235140 - DNA, 19 bp, Homo sapiens
  siRNA target sequence for MUT (NM_000255.1,1397-1415).
gctgctttaaagctcatta

SEQ ID NO: 235141 - DNA, 19 bp, Homo sapiens
  siRNA target sequence for MUT (NM_000255.1,1455-1473).
ctgagggaatacctaaact

SEQ ID NO: 235142 - DNA, 19 bp, Homo sapiens
  siRNA target sequence for MUT (NM_000255.1,1461-1479).
gaatacctaaacttcgaat

SEQ ID NO: 235143 - DNA, 19 bp, Homo sapiens
  siRNA target sequence for MUT (NM_000255.1,1529-1547).
gtaattgttggagtaaata

SEQ ID NO: 235144 - DNA, 19 bp, Homo sapiens
  siRNA target sequence for MUT (NM_000255.1,1577-1595).
gaagttctggcaattgata

SEQ ID NO: 235145 - DNA, 19 bp, Homo sapiens
  siRNA target sequence for MUT (NM_000255.1,1580-1598).
gttctggcaattgataata

SEQ ID NO: 235146 - DNA, 19 bp, Homo sapiens
  siRNA target sequence for MUT (NM_000255.1,1585-1603).
ggcaattgataatacttca

SEQ ID NO: 235147 - DNA, 19 bp, Homo sapiens
  siRNA target sequence for MUT (NM_000255.1,1606-1624).
gcgaaacaggcagattgaa

SEQ ID NO: 235148 - DNA, 19 bp, Homo sapiens
  siRNA target sequence for MUT (NM_000255.1,1698-1716).
ctgctagcggagatggaaa

SEQ ID NO: 235149 - DNA, 19 bp, Homo sapiens
  siRNA target sequence for MUT (NM_000255.1,1700-1718).
gctagcggagatggaaata

SEQ ID NO: 235150 - DNA, 19 bp, Homo sapiens
  siRNA target sequence for MUT (NM_000255.1,1701-1719).
ctagcggagatggaaatat

SEQ ID NO: 235151 - DNA, 19 bp, Homo sapiens
  siRNA target sequence for MUT (NM_000255.1,1780-1798).
cctgaaaaaggtatttggt

SEQ ID NO: 235152 - DNA, 19 bp, Homo sapiens
  siRNA target sequence for MUT (NM_000255.1,1874-1892).
gctatcaagagggttcata

SEQ ID NO: 235153 - DNA, 19 bp, Homo sapiens
  siRNA target sequence for MUT (NM_000255.1,1875-1893).
ctatcaagagggttcataa

SEQ ID NO: 235154 - DNA, 19 bp, Homo sapiens
  siRNA target sequence for MUT (NM_000255.1,1920-1938).
ctcgtcttcttgtagcaaa

SEQ ID NO: 235155 - DNA, 19 bp, Homo sapiens
  siRNA target sequence for MUT (NM_000255.1,1960-1978).
cagaggagcaaaagttatt

SEQ ID NO: 235156 - DNA, 19 bp, Homo sapiens
  siRNA target sequence for MUT (NM_000255.1,1992-2010).
ctgatcttggttttgatgt

SEQ ID NO: 235157 - DNA, 19 bp, Homo sapiens
  siRNA target sequence for MUT (NM_000255.1,2095-2113).
cctcgctgctggtcataaa

SEQ ID NO: 235158 - DNA, 19 bp, Homo sapiens
  siRNA target sequence for MUT (NM_000255.1,2096-2114).
ctcgctgctggtcataaaa

SEQ ID NO: 235159 - DNA, 19 bp, Homo sapiens
  siRNA target sequence for MUT (NM_000255.1,2115-2133).
ccctagttcctgaactcat

SEQ ID NO: 235160 - DNA, 19 bp, Homo sapiens
  siRNA target sequence for MUT (NM_000255.1,2124-2142).
ctgaactcatcaaagaact

SEQ ID NO: 235161 - DNA, 19 bp, Homo sapiens
  siRNA target sequence for MUT (NM_000255.1,2148-2166).
cccttggacggccagatat

SEQ ID NO: 235162 - DNA, 19 bp, Homo sapiens
  siRNA target sequence for MUT (NM_000255.1,2149-2167).
ccttggacggccagatatt

SEQ ID NO: 235163 - DNA, 19 bp, Homo sapiens
  siRNA target sequence for MUT (NM_000255.1,2193-2211).
cacctcaggattatgaatt

SEQ ID NO: 235164 - DNA, 19 bp, Homo sapiens
  siRNA target sequence for MUT (NM_000255.1,2246-2264).
cctgggactcgaattccaa

SEQ ID NO: 235165 - DNA, 19 bp, Homo sapiens
  siRNA target sequence for MUT (NM_000255.1,2247-2265).
ctgggactcgaattccaaa

SEQ ID NO: 235166 - DNA, 19 bp, Homo sapiens
  siRNA target sequence for MUT (NM_000255.1,2272-2290).
cgttcaggtgcttgatgat

SEQ ID NO: 235167 - DNA, 19 bp, Homo sapiens
  siRNA target sequence for MUT (NM_000255.1,2285-2303).
gatgatattgagaagtgtt

SEQ ID NO: 235168 - DNA, 19 bp, Homo sapiens
  siRNA target sequence for GALE (NM_000403.2,162-180).
ctgtggtcatcgataactt

SEQ ID NO: 235169 - DNA, 19 bp, Homo sapiens
  siRNA target sequence for GALE (NM_000403.2,167-185).
gtcatcgataacttccata

SEQ ID NO: 235170 - DNA, 19 bp, Homo sapiens
  siRNA target sequence for GALE (NM_000403.2,169-187).
catcgataacttccataat

SEQ ID NO: 235171 - DNA, 19 bp, Homo sapiens
  siRNA target sequence for GALE (NM_000403.2,291-309).
ccctacagcgtctcttcaa

SEQ ID NO: 235172 - DNA, 19 bp, Homo sapiens
  siRNA target sequence for GALE (NM_000403.2,292-310).
cctacagcgtctcttcaaa

SEQ ID NO: 235173 - DNA, 19 bp, Homo sapiens
  siRNA target sequence for GALE (NM_000403.2,293-311).
ctacagcgtctcttcaaaa

SEQ ID NO: 235174 - DNA, 19 bp, Homo sapiens
  siRNA target sequence for GALE (NM_000403.2,376-394).
gcctctggattattacaga

SEQ ID NO: 235175 - DNA, 19 bp, Homo sapiens
  siRNA target sequence for GALE (NM_000403.2,380-398).
ctggattattacagagtta

SEQ ID NO: 235176 - DNA, 19 bp, Homo sapiens
  siRNA target sequence for GALE (NM_000403.2,783-801).
caggtgtccgggattacat

SEQ ID NO: 235177 - DNA, 19 bp, Homo sapiens
  siRNA target sequence for GALE (NM_000403.2,886-904).
cacgggcacaggctattca

SEQ ID NO: 235178 - DNA, 19 bp, Homo sapiens
  siRNA target sequence for GALE (NM_000403.2,888-906).
cgggcacaggctattcagt

SEQ ID NO: 235179 - DNA, 19 bp, Homo sapiens
  siRNA target sequence for MCEE (NM_032601.2,44-62).
gccgtagggcttttttcca

SEQ ID NO: 235180 - DNA, 19 bp, Homo sapiens
  siRNA target sequence for MCEE (NM_032601.2,52-70).
gcttttttccagacttcaa

SEQ ID NO: 235181 - DNA, 19 bp, Homo sapiens
  siRNA target sequence for MCEE (NM_032601.2,105-123).
cacagcccttggatcaagt

SEQ ID NO: 235182 - DNA, 19 bp, Homo sapiens
  siRNA target sequence for MCEE (NM_032601.2,165-183).
ccatagcagtgccagattt

SEQ ID NO: 235183 - DNA, 19 bp, Homo sapiens
  siRNA target sequence for MCEE (NM_032601.2,185-203).
gaaaaggctgcagcatttt

SEQ ID NO: 235184 - DNA, 19 bp, Homo sapiens
  siRNA target sequence for MCEE (NM_032601.2,238-256).
ggtccctcttcctgaacat

SEQ ID NO: 235185 - DNA, 19 bp, Homo sapiens
  siRNA target sequence for MCEE (NM_032601.2,325-343).
cagtccaattgcaggtttt

SEQ ID NO: 235186 - DNA, 19 bp, Homo sapiens
  siRNA target sequence for MCEE (NM_032601.2,327-345).
gtccaattgcaggttttct

SEQ ID NO: 235187 - DNA, 19 bp, Homo sapiens
  siRNA target sequence for MCEE (NM_032601.2,379-397).
ctgcatcgaggtggataat

SEQ ID NO: 235188 - DNA, 19 bp, Homo sapiens
  siRNA target sequence for MCEE (NM_032601.2,385-403).
cgaggtggataatattaat

SEQ ID NO: 235189 - DNA, 19 bp, Homo sapiens
  siRNA target sequence for MCEE (NM_032601.2,388-406).
ggtggataatattaatgca

SEQ ID NO: 235190 - DNA, 19 bp, Homo sapiens
  siRNA target sequence for MCEE (NM_032601.2,443-461).
ctaagtgaagaggtcaaaa

SEQ ID NO: 235191 - DNA, 19 bp, Homo sapiens
  siRNA target sequence for ISYNA1 (NM_016368.3,109-127).
ccatcgaggcgcaatacga

SEQ ID NO: 235192 - DNA, 19 bp, Homo sapiens
  siRNA target sequence for ISYNA1 (NM_016368.3,582-600).
gtttacatccccgaattca

SEQ ID NO: 235193 - DNA, 19 bp, Homo sapiens
  siRNA target sequence for ISYNA1 (NM_016368.3,1185-1203).
cactgcgtggtcatcaagt

SEQ ID NO: 235194 - DNA, 19 bp, Homo sapiens
  siRNA target sequence for ISYNA1 (NM_016368.3,1187-1205).
ctgcgtggtcatcaagtat

SEQ ID NO: 235195 - DNA, 19 bp, Homo sapiens
  siRNA target sequence for ISYNA1 (NM_016368.3,1189-1207).
gcgtggtcatcaagtatgt

SEQ ID NO: 235196 - DNA, 19 bp, Homo sapiens
  siRNA target sequence for ISYNA1 (NM_016368.3,1233-1251).
gcgctggatgagtatacct

SEQ ID NO: 235197 - DNA, 19 bp, Homo sapiens
  siRNA target sequence for ISYNA1 (NM_016368.3,1498-1516).
gcagctgcatcgagaacat

SEQ ID NO: 235198 - DNA, 19 bp, Homo sapiens
  siRNA target sequence for ISYNA1 (NM_016368.3,1617-1635).
gccacctaccctatgttga

SEQ ID NO: 235199 - DNA, 19 bp, Homo sapiens
  siRNA target sequence for ISYNA1 (NM_016368.3,1621-1639).
cctaccctatgttgaacaa

SEQ ID NO: 235200 - DNA, 19 bp, Homo sapiens
  siRNA target sequence for EBRP (NM_032565.1,227-245).
ggcccttttgtctacttgt

SEQ ID NO: 235201 - DNA, 19 bp, Homo sapiens
  siRNA target sequence for EBRP (NM_032565.1,251-269).
gtaggaaacgttgcaaatt

SEQ ID NO: 235202 - DNA, 19 bp, Homo sapiens
  siRNA target sequence for EBRP (NM_032565.1,275-293).
ggcttgattgcttctttat

SEQ ID NO: 235203 - DNA, 19 bp, Homo sapiens
  siRNA target sequence for EBRP (NM_032565.1,648-666).
ccagttcagtgaagaagtt

SEQ ID NO: 235204 - DNA, 19 bp, Homo sapiens
  siRNA target sequence for EBRP (NM_032565.1,649-667).
cagttcagtgaagaagttt

SEQ ID NO: 235205 - DNA, 19 bp, Homo sapiens
  siRNA target sequence for RENBP (NM_002910.4,439-457).
gcttctggacgcagcaaaa

SEQ ID NO: 235206 - DNA, 19 bp, Homo sapiens
  siRNA target sequence for RENBP (NM_002910.4,551-569).
gtgcagcgaaccatcttca

SEQ ID NO: 235207 - DNA, 19 bp, Homo sapiens
  siRNA target sequence for RENBP (NM_002910.4,1007-1025).
cgagcccacgtgattgaca

SEQ ID NO: 235208 - DNA, 19 bp, Homo sapiens
  siRNA target sequence for RENBP (NM_002910.4,1016-1034).
gtgattgacaagttcctat

SEQ ID NO: 235209 - DNA, 19 bp, Homo sapiens
  siRNA target sequence for RENBP (NM_002910.4,1260-1278).
ccgagtacggggaatggtt

SEQ ID NO: 235210 - DNA, 19 bp, Homo sapiens
  siRNA target sequence for RENBP (NM_002910.4,1318-1336).
caagggaggtcctttcaaa

SEQ ID NO: 235211 - DNA, 19 bp, Homo sapiens
  siRNA target sequence for TOPORS (NM_005802.2,287-305).
ccgacaccgacctagcttt

SEQ ID NO: 235212 - DNA, 19 bp, Homo sapiens
  siRNA target sequence for TOPORS (NM_005802.2,352-370).
cggcatcctccgagataat

SEQ ID NO: 235213 - DNA, 19 bp, Homo sapiens
  siRNA target sequence for TOPORS (NM_005802.2,373-391).
catcagctgctaaggaatt

SEQ ID NO: 235214 - DNA, 19 bp, Homo sapiens
  siRNA target sequence for TOPORS (NM_005802.2,401-419).
caacttttcacctaaagct

SEQ ID NO: 235215 - DNA, 19 bp, Homo sapiens
  siRNA target sequence for TOPORS (NM_005802.2,453-471).
gatgcatctcctgattcta

SEQ ID NO: 235216 - DNA, 19 bp, Homo sapiens
  siRNA target sequence for TOPORS (NM_005802.2,456-474).
gcatctcctgattctaagt

SEQ ID NO: 235217 - DNA, 19 bp, Homo sapiens
  siRNA target sequence for TOPORS (NM_005802.2,465-483).
gattctaagtgtcctatat

SEQ ID NO: 235218 - DNA, 19 bp, Homo sapiens
  siRNA target sequence for TOPORS (NM_005802.2,477-495).
cctatatgcttggatagat

SEQ ID NO: 235219 - DNA, 19 bp, Homo sapiens
  siRNA target sequence for TOPORS (NM_005802.2,478-496).
ctatatgcttggatagatt

SEQ ID NO: 235220 - DNA, 19 bp, Homo sapiens
  siRNA target sequence for TOPORS (NM_005802.2,512-530).
cttagatcgctgcttacat

SEQ ID NO: 235221 - DNA, 19 bp, Homo sapiens
  siRNA target sequence for TOPORS (NM_005802.2,549-567).
gtacaggagtggtcaaaaa

SEQ ID NO: 235222 - DNA, 19 bp, Homo sapiens
  siRNA target sequence for TOPORS (NM_005802.2,573-591).
gctgaatgcccactatgta

SEQ ID NO: 235223 - DNA, 19 bp, Homo sapiens
  siRNA target sequence for TOPORS (NM_005802.2,574-592).
ctgaatgcccactatgtaa

SEQ ID NO: 235224 - DNA, 19 bp, Homo sapiens
  siRNA target sequence for TOPORS (NM_005802.2,651-669).
gtcctaaggccttcgtata

SEQ ID NO: 235225 - DNA, 19 bp, Homo sapiens
  siRNA target sequence for TOPORS (NM_005802.2,653-671).
cctaaggccttcgtataat

SEQ ID NO: 235226 - DNA, 19 bp, Homo sapiens
  siRNA target sequence for TOPORS (NM_005802.2,661-679).
cttcgtataatggttcttt

SEQ ID NO: 235227 - DNA, 19 bp, Homo sapiens
  siRNA target sequence for TOPORS (NM_005802.2,683-701).
cacccctgatcgacgattt

SEQ ID NO: 235228 - DNA, 19 bp, Homo sapiens
  siRNA target sequence for TOPORS (NM_005802.2,719-737).
gacaagggaacgaaatgct

SEQ ID NO: 235229 - DNA, 19 bp, Homo sapiens
  siRNA target sequence for TOPORS (NM_005802.2,787-805).
cggatagtggagtactgtt

SEQ ID NO: 235230 - DNA, 19 bp, Homo sapiens
  siRNA target sequence for TOPORS (NM_005802.2,788-806).
ggatagtggagtactgttt

SEQ ID NO: 235231 - DNA, 19 bp, Homo sapiens
  siRNA target sequence for TOPORS (NM_005802.2,807-825).
gaagggttaggcatttcaa

SEQ ID NO: 235232 - DNA, 19 bp, Homo sapiens
  siRNA target sequence for TOPORS (NM_005802.2,812-830).
gttaggcatttcaacaaga

SEQ ID NO: 235233 - DNA, 19 bp, Homo sapiens
  siRNA target sequence for TOPORS (NM_005802.2,826-844).
caagacctagagatgttga

SEQ ID NO: 235234 - DNA, 19 bp, Homo sapiens
  siRNA target sequence for TOPORS (NM_005802.2,840-858).
gttgaaattcctcagttta

SEQ ID NO: 235235 - DNA, 19 bp, Homo sapiens
  siRNA target sequence for TOPORS (NM_005802.2,881-899).
gccaactacggcagatgaa

SEQ ID NO: 235236 - DNA, 19 bp, Homo sapiens
  siRNA target sequence for TOPORS (NM_005802.2,882-900).
ccaactacggcagatgaaa

SEQ ID NO: 235237 - DNA, 19 bp, Homo sapiens
  siRNA target sequence for TOPORS (NM_005802.2,901-919).
gatctttgcggaaaattca

SEQ ID NO: 235238 - DNA, 19 bp, Homo sapiens
  siRNA target sequence for TOPORS (NM_005802.2,908-926).
gcggaaaattcaagaacaa

SEQ ID NO: 235239 - DNA, 19 bp, Homo sapiens
  siRNA target sequence for TOPORS (NM_005802.2,960-978).
gctggtgctcgagttagaa

SEQ ID NO: 235240 - DNA, 19 bp, Homo sapiens
  siRNA target sequence for TOPORS (NM_005802.2,963-981).
ggtgctcgagttagaaata

SEQ ID NO: 235241 - DNA, 19 bp, Homo sapiens
  siRNA target sequence for TOPORS (NM_005802.2,964-982).
gtgctcgagttagaaatat

SEQ ID NO: 235242 - DNA, 19 bp, Homo sapiens
  siRNA target sequence for TOPORS (NM_005802.2,1061-1079).
ctggttaaaacgtgaactt

SEQ ID NO: 235243 - DNA, 19 bp, Homo sapiens
  siRNA target sequence for TOPORS (NM_005802.2,1064-1082).
gttaaaacgtgaacttaca

SEQ ID NO: 235244 - DNA, 19 bp, Homo sapiens
  siRNA target sequence for TOPORS (NM_005802.2,1071-1089).
cgtgaacttacagttcttt

SEQ ID NO: 235245 - DNA, 19 bp, Homo sapiens
  siRNA target sequence for TOPORS (NM_005802.2,1072-1090).
gtgaacttacagttctttt

SEQ ID NO: 235246 - DNA, 19 bp, Homo sapiens
  siRNA target sequence for TOPORS (NM_005802.2,1096-1114).
ctcatggatctttagtgaa

SEQ ID NO: 235247 - DNA, 19 bp, Homo sapiens
  siRNA target sequence for TOPORS (NM_005802.2,1098-1116).
catggatctttagtgaata

SEQ ID NO: 235248 - DNA, 19 bp, Homo sapiens
  siRNA target sequence for TOPORS (NM_005802.2,1119-1137).
gtccagcatattatcatga

SEQ ID NO: 235249 - DNA, 19 bp, Homo sapiens
  siRNA target sequence for TOPORS (NM_005802.2,1161-1179).
gagagtcaggcatttgtgt

SEQ ID NO: 235250 - DNA, 19 bp, Homo sapiens
  siRNA target sequence for TOPORS (NM_005802.2,1169-1187).
ggcatttgtgtctgattta

SEQ ID NO: 235251 - DNA, 19 bp, Homo sapiens
  siRNA target sequence for TOPORS (NM_005802.2,1180-1198).
ctgatttaagaccattttt

SEQ ID NO: 235252 - DNA, 19 bp, Homo sapiens
  siRNA target sequence for TOPORS (NM_005802.2,1274-1292).
ccagcatgccaattatgat

SEQ ID NO: 235253 - DNA, 19 bp, Homo sapiens
  siRNA target sequence for TOPORS (NM_005802.2,1275-1293).
cagcatgccaattatgatt

SEQ ID NO: 235254 - DNA, 19 bp, Homo sapiens
  siRNA target sequence for TOPORS (NM_005802.2,1295-1313).
ccctgctccttcatacgaa

SEQ ID NO: 235255 - DNA, 19 bp, Homo sapiens
  siRNA target sequence for TOPORS (NM_005802.2,1319-1337).
cagccattctgattcttca

SEQ ID NO: 235256 - DNA, 19 bp, Homo sapiens
  siRNA target sequence for TOPORS (NM_005802.2,1452-1470).
gagcaggtacacgttacta

SEQ ID NO: 235257 - DNA, 19 bp, Homo sapiens
  siRNA target sequence for TOPORS (NM_005802.2,1455-1473).
caggtacacgttactatgt

SEQ ID NO: 235258 - DNA, 19 bp, Homo sapiens
  siRNA target sequence for TOPORS (NM_005802.2,1457-1475).
ggtacacgttactatgtct

SEQ ID NO: 235259 - DNA, 19 bp, Homo sapiens
  siRNA target sequence for TOPORS (NM_005802.2,1458-1476).
gtacacgttactatgtctt

SEQ ID NO: 235260 - DNA, 19 bp, Homo sapiens
  siRNA target sequence for TOPORS (NM_005802.2,1463-1481).
cgttactatgtcttctctt

SEQ ID NO: 235261 - DNA, 19 bp, Homo sapiens
  siRNA target sequence for TOPORS (NM_005802.2,1525-1543).
gagccacgtctcagataca

SEQ ID NO: 235262 - DNA, 19 bp, Homo sapiens
  siRNA target sequence for TOPORS (NM_005802.2,1555-1573).
ccaatgacgacctaaataa

SEQ ID NO: 235263 - DNA, 19 bp, Homo sapiens
  siRNA target sequence for TOPORS (NM_005802.2,1556-1574).
caatgacgacctaaataat

SEQ ID NO: 235264 - DNA, 19 bp, Homo sapiens
  siRNA target sequence for TOPORS (NM_005802.2,1560-1578).
gacgacctaaataatgaca

SEQ ID NO: 235265 - DNA, 19 bp, Homo sapiens
  siRNA target sequence for TOPORS (NM_005802.2,1604-1622).
cattgttgggtttgttaaa

SEQ ID NO: 235266 - DNA, 19 bp, Homo sapiens
  siRNA target sequence for TOPORS (NM_005802.2,1636-1654).
ggaccccagaacttgttga

SEQ ID NO: 235267 - DNA, 19 bp, Homo sapiens
  siRNA target sequence for TOPORS (NM_005802.2,1637-1655).
gaccccagaacttgttgaa

SEQ ID NO: 235268 - DNA, 19 bp, Homo sapiens
  siRNA target sequence for TOPORS (NM_005802.2,1669-1687).
ctgaggacttaggttctta

SEQ ID NO: 235269 - DNA, 19 bp, Homo sapiens
  siRNA target sequence for TOPORS (NM_005802.2,1719-1737).
caggagcaatcttacagtt

SEQ ID NO: 235270 - DNA, 19 bp, Homo sapiens
  siRNA target sequence for TOPORS (NM_005802.2,1740-1758).
ggtgatagcgatgttagta

SEQ ID NO: 235271 - DNA, 19 bp, Homo sapiens
  siRNA target sequence for TOPORS (NM_005802.2,1743-1761).
gatagcgatgttagtagat

SEQ ID NO: 235272 - DNA, 19 bp, Homo sapiens
  siRNA target sequence for TOPORS (NM_005802.2,1775-1793).
ctctgtccttggaaaggat

SEQ ID NO: 235273 - DNA, 19 bp, Homo sapiens
  siRNA target sequence for TOPORS (NM_005802.2,1809-1827).
ggtcattgtgattctagta

SEQ ID NO: 235274 - DNA, 19 bp, Homo sapiens
  siRNA target sequence for TOPORS (NM_005802.2,1812-1830).
cattgtgattctagtacaa

SEQ ID NO: 235275 - DNA, 19 bp, Homo sapiens
  siRNA target sequence for TOPORS (NM_005802.2,1816-1834).
gtgattctagtacaagaat

SEQ ID NO: 235276 - DNA, 19 bp, Homo sapiens
  siRNA target sequence for TOPORS (NM_005802.2,1851-1869).
gagaaacgatctacatcat

SEQ ID NO: 235277 - DNA, 19 bp, Homo sapiens
  siRNA target sequence for TOPORS (NM_005802.2,1857-1875).
cgatctacatcattgtcat

SEQ ID NO: 235278 - DNA, 19 bp, Homo sapiens
  siRNA target sequence for TOPORS (NM_005802.2,1886-1904).
cctgaactcatctgtaaga

SEQ ID NO: 235279 - DNA, 19 bp, Homo sapiens
  siRNA target sequence for TOPORS (NM_005802.2,1921-1939).
ctccatataaccatagaca

SEQ ID NO: 235280 - DNA, 19 bp, Homo sapiens
  siRNA target sequence for TOPORS (NM_005802.2,1993-2011).
ggcatgatcagaagaatca

SEQ ID NO: 235281 - DNA, 19 bp, Homo sapiens
  siRNA target sequence for TOPORS (NM_005802.2,2180-2198).
gtctcgtagcagtgatcat

SEQ ID NO: 235282 - DNA, 19 bp, Homo sapiens
  siRNA target sequence for TOPORS (NM_005802.2,2267-2285).
caaatgggagtatacttat

SEQ ID NO: 235283 - DNA, 19 bp, Homo sapiens
  siRNA target sequence for TOPORS (NM_005802.2,2301-2319).
gacagggatgggtacgaat

SEQ ID NO: 235284 - DNA, 19 bp, Homo sapiens
  siRNA target sequence for TOPORS (NM_005802.2,2306-2324).
ggatgggtacgaatcatct

SEQ ID NO: 235285 - DNA, 19 bp, Homo sapiens
  siRNA target sequence for TOPORS (NM_005802.2,2307-2325).
gatgggtacgaatcatctt

SEQ ID NO: 235286 - DNA, 19 bp, Homo sapiens
  siRNA target sequence for TOPORS (NM_005802.2,2310-2328).
gggtacgaatcatcttaca

SEQ ID NO: 235287 - DNA, 19 bp, Homo sapiens
  siRNA target sequence for TOPORS (NM_005802.2,2433-2451).
cacagtgagaggaagtatt

SEQ ID NO: 235288 - DNA, 19 bp, Homo sapiens
  siRNA target sequence for TOPORS (NM_005802.2,2439-2457).
gagaggaagtattactact

SEQ ID NO: 235289 - DNA, 19 bp, Homo sapiens
  siRNA target sequence for TOPORS (NM_005802.2,2443-2461).
ggaagtattactactatga

SEQ ID NO: 235290 - DNA, 19 bp, Homo sapiens
  siRNA target sequence for TOPORS (NM_005802.2,2477-2495).
gagcctgtctagtaacaga

SEQ ID NO: 235291 - DNA, 19 bp, Homo sapiens
  siRNA target sequence for TOPORS (NM_005802.2,2481-2499).
ctgtctagtaacagatcaa

SEQ ID NO: 235292 - DNA, 19 bp, Homo sapiens
  siRNA target sequence for TOPORS (NM_005802.2,2515-2533).
ggactgaccgggtgagaaa

SEQ ID NO: 235293 - DNA, 19 bp, Homo sapiens
  siRNA target sequence for TOPORS (NM_005802.2,2516-2534).
gactgaccgggtgagaaat

SEQ ID NO: 235294 - DNA, 19 bp, Homo sapiens
  siRNA target sequence for TOPORS (NM_005802.2,2520-2538).
gaccgggtgagaaatgaaa

SEQ ID NO: 235295 - DNA, 19 bp, Homo sapiens
  siRNA target sequence for TOPORS (NM_005802.2,2569-2587).
ggcatttggagggtactaa

SEQ ID NO: 235296 - DNA, 19 bp, Homo sapiens
  siRNA target sequence for TOPORS (NM_005802.2,2596-2614).
ctcagccatctcgtgaatt

SEQ ID NO: 235297 - DNA, 19 bp, Homo sapiens
  siRNA target sequence for TOPORS (NM_005802.2,2601-2619).
ccatctcgtgaatttgctt

SEQ ID NO: 235298 - DNA, 19 bp, Homo sapiens
  siRNA target sequence for TOPORS (NM_005802.2,2610-2628).
gaatttgcttctaaagcaa

SEQ ID NO: 235299 - DNA, 19 bp, Homo sapiens
  siRNA target sequence for TOPORS (NM_005802.2,2637-2655).
cattaccaaaaatcttcat

SEQ ID NO: 235300 - DNA, 19 bp, Homo sapiens
  siRNA target sequence for TOPORS (NM_005802.2,2750-2768).
gacccggagcctaagtgta

SEQ ID NO: 235301 - DNA, 19 bp, Homo sapiens
  siRNA target sequence for TOPORS (NM_005802.2,2755-2773).
ggagcctaagtgtagagat

SEQ ID NO: 235302 - DNA, 19 bp, Homo sapiens
  siRNA target sequence for TOPORS (NM_005802.2,2756-2774).
gagcctaagtgtagagata

SEQ ID NO: 235303 - DNA, 19 bp, Homo sapiens
  siRNA target sequence for TOPORS (NM_005802.2,2758-2776).
gcctaagtgtagagatagt

SEQ ID NO: 235304 - DNA, 19 bp, Homo sapiens
  siRNA target sequence for TOPORS (NM_005802.2,2791-2809).
ctactgatacaactaaaca

SEQ ID NO: 235305 - DNA, 19 bp, Homo sapiens
  siRNA target sequence for TOPORS (NM_005802.2,2853-2871).
caccatggagataatgctt

SEQ ID NO: 235306 - DNA, 19 bp, Homo sapiens
  siRNA target sequence for TOPORS (NM_005802.2,2872-2890).
cacgttccccagttgtaat

SEQ ID NO: 235307 - DNA, 19 bp, Homo sapiens
  siRNA target sequence for TOPORS (NM_005802.2,2874-2892).
cgttccccagttgtaatta

SEQ ID NO: 235308 - DNA, 19 bp, Homo sapiens
  siRNA target sequence for TOPORS (NM_005802.2,2883-2901).
gttgtaattaccattgaca

SEQ ID NO: 235309 - DNA, 19 bp, Homo sapiens
  siRNA target sequence for TOPORS (NM_005802.2,2964-2982).
gaccctctacaaaatgagt

SEQ ID NO: 235310 - DNA, 19 bp, Homo sapiens
  siRNA target sequence for TOPORS (NM_005802.2,3073-3091).
ccacacttagtaacaactt

SEQ ID NO: 235311 - DNA, 19 bp, Homo sapiens
  siRNA target sequence for TOPORS (NM_005802.2,3100-3118).
ccaacaaaactgtagataa

SEQ ID NO: 235312 - DNA, 19 bp, Homo sapiens
  siRNA target sequence for TOPORS (NM_005802.2,3131-3149).
ggcagcttcagttgaacaa

SEQ ID NO: 235313 - DNA, 19 bp, Homo sapiens
  siRNA target sequence for TOPORS (NM_005802.2,3144-3162).
gaacaaactctcgatgtaa

SEQ ID NO: 235314 - DNA, 19 bp, Homo sapiens
  siRNA target sequence for TOPORS (NM_005802.2,3170-3188).
gagcacctttgtttctgat

SEQ ID NO: 235315 - DNA, 19 bp, Homo sapiens
  siRNA target sequence for TOPORS (NM_005802.2,3250-3268).
cgccacggacatcattaat

SEQ ID NO: 235316 - DNA, 19 bp, Homo sapiens
  siRNA target sequence for TXNDC5 (NM_022085.2,509-527).
cgaggataccccaccttaa

SEQ ID NO: 235317 - DNA, 19 bp, Homo sapiens
  siRNA target sequence for TXNDC5 (NM_022085.2,510-528).
gaggataccccaccttaaa

SEQ ID NO: 235318 - DNA, 19 bp, Homo sapiens
  siRNA target sequence for TXNDC5 (NM_022085.2,518-536).
cccaccttaaagcttttca

SEQ ID NO: 235319 - DNA, 19 bp, Homo sapiens
  siRNA target sequence for TXNDC5 (NM_022085.2,688-706).
gctctcagcaagcaacttt

SEQ ID NO: 235320 - DNA, 19 bp, Homo sapiens
  siRNA target sequence for TXNDC5 (NM_022085.2,719-737).
gcacaaggcgaccacttta

SEQ ID NO: 235321 - DNA, 19 bp, Homo sapiens
  siRNA target sequence for TXNDC5 (NM_022085.2,720-738).
cacaaggcgaccactttat

SEQ ID NO: 235322 - DNA, 19 bp, Homo sapiens
  siRNA target sequence for TXNDC5 (NM_022085.2,726-744).
gcgaccactttatcaagtt

SEQ ID NO: 235323 - DNA, 19 bp, Homo sapiens
  siRNA target sequence for TXNDC5 (NM_022085.2,728-746).
gaccactttatcaagttct

SEQ ID NO: 235324 - DNA, 19 bp, Homo sapiens
  siRNA target sequence for TXNDC5 (NM_022085.2,1185-1203).
cttgggaggaactctctaa

SEQ ID NO: 235325 - DNA, 19 bp, Homo sapiens
  siRNA target sequence for TXNDC5 (NM_022085.2,1289-1307).
cgaggctaccccacgttat

SEQ ID NO: 235326 - DNA, 19 bp, Homo sapiens
  siRNA target sequence for TXNDC5 (NM_022085.2,1290-1308).
gaggctaccccacgttatt

SEQ ID NO: 235327 - DNA, 19 bp, Homo sapiens
  siRNA target sequence for TXNDC5 (NM_022085.2,1293-1311).
gctaccccacgttattgct

SEQ ID NO: 235328 - DNA, 19 bp, Homo sapiens
  siRNA target sequence for TXNDC5 (NM_022085.2,1294-1312).
ctaccccacgttattgctt

SEQ ID NO: 235329 - DNA, 19 bp, Homo sapiens
  siRNA target sequence for TXNDC5 (NM_030810.1,1036-1054).
caagcgaaagacgaacttt

SEQ ID NO: 235330 - DNA, 19 bp, Homo sapiens
  siRNA target sequence for 101F6 (NM_007022.3,351-369).
gcacccggtgcttatgtct

SEQ ID NO: 235331 - DNA, 19 bp, Homo sapiens
  siRNA target sequence for 101F6 (NM_007022.3,352-370).
cacccggtgcttatgtctt

SEQ ID NO: 235332 - DNA, 19 bp, Homo sapiens
  siRNA target sequence for 101F6 (NM_007022.3,394-412).
gaggcactactggtgtttt

SEQ ID NO: 235333 - DNA, 19 bp, Homo sapiens
  siRNA target sequence for 101F6 (NM_007022.3,664-682).
ctggcgaagctcaagctat

SEQ ID NO: 235334 - DNA, 19 bp, Homo sapiens
  siRNA target sequence for BRE (NM_004899.3,190-208).
gtggccttgaaccgaatat

SEQ ID NO: 235335 - DNA, 19 bp, Homo sapiens
  siRNA target sequence for BRE (NM_004899.3,192-210).
ggccttgaaccgaatatct

SEQ ID NO: 235336 - DNA, 19 bp, Homo sapiens
  siRNA target sequence for BRE (NM_004899.3,236-254).
gcgtggtccggaatggaaa

SEQ ID NO: 235337 - DNA, 19 bp, Homo sapiens
  siRNA target sequence for BRE (NM_004899.3,237-255).
cgtggtccggaatggaaaa

SEQ ID NO: 235338 - DNA, 19 bp, Homo sapiens
  siRNA target sequence for BRE (NM_004899.3,259-277).
ggactggatgctacaaact

SEQ ID NO: 235339 - DNA, 19 bp, Homo sapiens
  siRNA target sequence for BRE (NM_004899.3,265-283).
gatgctacaaactgtttga

SEQ ID NO: 235340 - DNA, 19 bp, Homo sapiens
  siRNA target sequence for BRE (NM_004899.3,282-300).
gaggataactgacttaaaa

SEQ ID NO: 235341 - DNA, 19 bp, Homo sapiens
  siRNA target sequence for BRE (NM_004899.3,285-303).
gataactgacttaaaatct

SEQ ID NO: 235342 - DNA, 19 bp, Homo sapiens
  siRNA target sequence for BRE (NM_004899.3,359-377).
catatgctggagagacatt

SEQ ID NO: 235343 - DNA, 19 bp, Homo sapiens
  siRNA target sequence for BRE (NM_004899.3,374-392).
cattaaagtgggatatcat

SEQ ID NO: 235344 - DNA, 19 bp, Homo sapiens
  siRNA target sequence for BRE (NM_004899.3,381-399).
gtgggatatcattttcaat

SEQ ID NO: 235345 - DNA, 19 bp, Homo sapiens
  siRNA target sequence for BRE (NM_004899.3,412-430).
gaactgcctcccgatttta

SEQ ID NO: 235346 - DNA, 19 bp, Homo sapiens
  siRNA target sequence for BRE (NM_004899.3,415-433).
ctgcctcccgattttatct

SEQ ID NO: 235347 - DNA, 19 bp, Homo sapiens
  siRNA target sequence for BRE (NM_004899.3,417-435).
gcctcccgattttatcttt

SEQ ID NO: 235348 - DNA, 19 bp, Homo sapiens
  siRNA target sequence for BRE (NM_004899.3,531-549).
ggaacttgtgcaacaatat

SEQ ID NO: 235349 - DNA, 19 bp, Homo sapiens
  siRNA target sequence for BRE (NM_004899.3,581-599).
gctcccgcctcatgtttga

SEQ ID NO: 235350 - DNA, 19 bp, Homo sapiens
  siRNA target sequence for BRE (NM_004899.3,582-600).
ctcccgcctcatgtttgaa

SEQ ID NO: 235351 - DNA, 19 bp, Homo sapiens
  siRNA target sequence for BRE (NM_004899.3,584-602).
cccgcctcatgtttgaata

SEQ ID NO: 235352 - DNA, 19 bp, Homo sapiens
  siRNA target sequence for BRE (NM_004899.3,666-684).
caactggactggtgaattt

SEQ ID NO: 235353 - DNA, 19 bp, Homo sapiens
  siRNA target sequence for BRE (NM_004899.3,686-704).
cagctcgtttccttttgaa

SEQ ID NO: 235354 - DNA, 19 bp, Homo sapiens
  siRNA target sequence for BRE (NM_004899.3,709-727).
cccgtagatttcagcaata

SEQ ID NO: 235355 - DNA, 19 bp, Homo sapiens
  siRNA target sequence for BRE (NM_004899.3,710-728).
ccgtagatttcagcaatat

SEQ ID NO: 235356 - DNA, 19 bp, Homo sapiens
  siRNA target sequence for BRE (NM_004899.3,778-796).
gccctcctctctgttagtt

SEQ ID NO: 235357 - DNA, 19 bp, Homo sapiens
  siRNA target sequence for BRE (NM_004899.3,834-852).
gtacttgtcacctcgaatt

SEQ ID NO: 235358 - DNA, 19 bp, Homo sapiens
  siRNA target sequence for BRE (NM_004899.3,908-926).
gatgtctcattgattacgt

SEQ ID NO: 235359 - DNA, 19 bp, Homo sapiens
  siRNA target sequence for BRE (NM_004899.3,919-937).
gattacgttcctcaagtat

SEQ ID NO: 235360 - DNA, 19 bp, Homo sapiens
  siRNA target sequence for BRE (NM_004899.3,957-975).
ggtgcagtacgtgattcaa

SEQ ID NO: 235361 - DNA, 19 bp, Homo sapiens
  siRNA target sequence for BRE (NM_004899.3,969-987).
gattcaagggtatcacaaa

SEQ ID NO: 235362 - DNA, 19 bp, Homo sapiens
  siRNA target sequence for BRE (NM_004899.3,973-991).
caagggtatcacaaaagaa

SEQ ID NO: 235363 - DNA, 19 bp, Homo sapiens
  siRNA target sequence for BRE (NM_004899.3,1025-1043).
gcacaggtgtcgtggaata

SEQ ID NO: 235364 - DNA, 19 bp, Homo sapiens
  siRNA target sequence for BRE (NM_004899.3,1026-1044).
cacaggtgtcgtggaatat

SEQ ID NO: 235365 - DNA, 19 bp, Homo sapiens
  siRNA target sequence for BRE (NM_004899.3,1028-1046).
caggtgtcgtggaatatga

SEQ ID NO: 235366 - DNA, 19 bp, Homo sapiens
  siRNA target sequence for BRE (NM_004899.3,1045-1063).
gatgcagaaggctttacaa

SEQ ID NO: 235367 - DNA, 19 bp, Homo sapiens
  siRNA target sequence for BRE (NM_004899.3,1074-1092).
gctgctgatgtggaaagat

SEQ ID NO: 235368 - DNA, 19 bp, Homo sapiens
  siRNA target sequence for BRE (NM_004899.3,1097-1115).
gttttcttgtacacattga

SEQ ID NO: 235369 - DNA, 19 bp, Homo sapiens
  siRNA target sequence for BRE (NM_004899.3,1152-1170).
cacatttcagtccgtttat

SEQ ID NO: 235370 - DNA, 19 bp, Homo sapiens
  siRNA target sequence for BRE (NM_004899.3,1154-1172).
catttcagtccgtttatca

SEQ ID NO: 235371 - DNA, 19 bp, Homo sapiens
  siRNA target sequence for BRE (NM_004899.3,1159-1177).
cagtccgtttatcacttta

SEQ ID NO: 235372 - DNA, 19 bp, Homo sapiens
  siRNA target sequence for BRE (NM_004899.3,1178-1196).
ccaacagtggacagcttta

SEQ ID NO: 235373 - DNA, 19 bp, Homo sapiens
  siRNA target sequence for BRE (NM_004899.3,1200-1218).
ccaggcccaaaaaaattat

SEQ ID NO: 235374 - DNA, 19 bp, Homo sapiens
  siRNA target sequence for BRE (NM_004899.3,1314-1332).
ggcctttgcagttgcaaaa

SEQ ID NO: 235375 - DNA, 19 bp, Homo sapiens
  siRNA target sequence for HSPC155 (NM_016406.1,424-442).
ggaactcggtggtttggaa

SEQ ID NO: 235376 - DNA, 19 bp, Homo sapiens
  siRNA target sequence for HSPC155 (NM_016406.1,425-443).
gaactcggtggtttggaaa

SEQ ID NO: 235377 - DNA, 19 bp, Homo sapiens
  siRNA target sequence for HSPC155 (NM_016406.1,440-458).
gaaaatgctggtatatcca

SEQ ID NO: 235378 - DNA, 19 bp, Homo sapiens
  siRNA target sequence for HSPC155 (NM_016406.1,456-474).
ccatgacctcctgaaatat

SEQ ID NO: 235379 - DNA, 19 bp, Homo sapiens
  siRNA target sequence for HSPC155 (NM_016406.1,489-507).
gtttgacattcctatcaca

SEQ ID NO: 235380 - DNA, 19 bp, Homo sapiens
  siRNA target sequence for HSPC155 (NM_016406.1,587-605).
gcctgacggatcatttcaa

SEQ ID NO: 235381 - DNA, 19 bp, Homo sapiens
  siRNA target sequence for HSPC155 (NM_016406.1,593-611).
cggatcatttcaaaccttt

SEQ ID NO: 235382 - DNA, 19 bp, Homo sapiens
  siRNA target sequence for MGC42638 (NM_178567.2,576-594).
cccaagatcaaatttacca

SEQ ID NO: 235383 - DNA, 19 bp, Homo sapiens
  siRNA target sequence for NEDD8 (NM_006156.1,125-143).
ccggaaaggagattgagat

SEQ ID NO: 235384 - DNA, 19 bp, Homo sapiens
  siRNA target sequence for NEDD8 (NM_006156.1,126-144).
cggaaaggagattgagatt

SEQ ID NO: 235385 - DNA, 19 bp, Homo sapiens
  siRNA target sequence for NEDD8 (NM_006156.1,132-150).
ggagattgagattgacatt

SEQ ID NO: 235386 - DNA, 19 bp, Homo sapiens
  siRNA target sequence for NEDD8 (NM_006156.1,265-283).
gcagctgattacaagattt

SEQ ID NO: 235387 - DNA, 19 bp, Homo sapiens
  siRNA target sequence for NEDD8 (NM_006156.1,266-284).
cagctgattacaagatttt

SEQ ID NO: 235388 - DNA, 19 bp, Homo sapiens
  siRNA target sequence for UBE1C (NM_003968.3,126-144).
ggtcgctggaaccatgtaa

SEQ ID NO: 235389 - DNA, 19 bp, Homo sapiens
  siRNA target sequence for UBE1C (NM_003968.3,127-145).
gtcgctggaaccatgtaaa

SEQ ID NO: 235390 - DNA, 19 bp, Homo sapiens
  siRNA target sequence for UBE1C (NM_003968.3,129-147).
cgctggaaccatgtaaaga

SEQ ID NO: 235391 - DNA, 19 bp, Homo sapiens
  siRNA target sequence for UBE1C (NM_003968.3,173-191).
cacacaccctgatttcgaa

SEQ ID NO: 235392 - DNA, 19 bp, Homo sapiens
  siRNA target sequence for UBE1C (NM_003968.3,188-206).
cgaaccgagcactgaatct

SEQ ID NO: 235393 - DNA, 19 bp, Homo sapiens
  siRNA target sequence for UBE1C (NM_003968.3,207-225).
ctccagttcttgttagata

SEQ ID NO: 235394 - DNA, 19 bp, Homo sapiens
  siRNA target sequence for UBE1C (NM_003968.3,209-227).
ccagttcttgttagataca

SEQ ID NO: 235395 - DNA, 19 bp, Homo sapiens
  siRNA target sequence for UBE1C (NM_003968.3,212-230).
gttcttgttagatacatgt

SEQ ID NO: 235396 - DNA, 19 bp, Homo sapiens
  siRNA target sequence for UBE1C (NM_003968.3,215-233).
cttgttagatacatgtaaa

SEQ ID NO: 235397 - DNA, 19 bp, Homo sapiens
  siRNA target sequence for UBE1C (NM_003968.3,284-302).
ggccttgtctggttttaga

SEQ ID NO: 235398 - DNA, 19 bp, Homo sapiens
  siRNA target sequence for UBE1C (NM_003968.3,333-351).
gatgtttccaatctaaata

SEQ ID NO: 235399 - DNA, 19 bp, Homo sapiens
  siRNA target sequence for UBE1C (NM_003968.3,441-459).
gtagttccacatttcaaca

SEQ ID NO: 235400 - DNA, 19 bp, Homo sapiens
  siRNA target sequence for UBE1C (NM_003968.3,479-497).
cactttctatcgacaattt

SEQ ID NO: 235401 - DNA, 19 bp, Homo sapiens
  siRNA target sequence for UBE1C (NM_003968.3,481-499).
ctttctatcgacaatttca

SEQ ID NO: 235402 - DNA, 19 bp, Homo sapiens
  siRNA target sequence for UBE1C (NM_003968.3,511-529).
gtggactggactctatcat

SEQ ID NO: 235403 - DNA, 19 bp, Homo sapiens
  siRNA target sequence for UBE1C (NM_003968.3,527-545).
catcgccagaagatggata

SEQ ID NO: 235404 - DNA, 19 bp, Homo sapiens
  siRNA target sequence for UBE1C (NM_003968.3,530-548).
cgccagaagatggataaat

SEQ ID NO: 235405 - DNA, 19 bp, Homo sapiens
  siRNA target sequence for UBE1C (NM_003968.3,598-616).
gctccattgtccctttgat

SEQ ID NO: 235406 - DNA, 19 bp, Homo sapiens
  siRNA target sequence for UBE1C (NM_003968.3,684-702).
gaatgcacgctggaacttt

SEQ ID NO: 235407 - DNA, 19 bp, Homo sapiens
  siRNA target sequence for UBE1C (NM_003968.3,689-707).
cacgctggaactttatcca

SEQ ID NO: 235408 - DNA, 19 bp, Homo sapiens
  siRNA target sequence for UBE1C (NM_003968.3,751-769).
ggctaccagaacactgtat

SEQ ID NO: 235409 - DNA, 19 bp, Homo sapiens
  siRNA target sequence for UBE1C (NM_003968.3,752-770).
gctaccagaacactgtatt

SEQ ID NO: 235410 - DNA, 19 bp, Homo sapiens
  siRNA target sequence for UBE1C (NM_003968.3,814-832).
gagaaggggttccattaga

SEQ ID NO: 235411 - DNA, 19 bp, Homo sapiens
  siRNA target sequence for UBE1C (NM_003968.3,834-852).
ggagatgatcctgaacata

SEQ ID NO: 235412 - DNA, 19 bp, Homo sapiens
  siRNA target sequence for UBE1C (NM_003968.3,835-853).
gagatgatcctgaacatat

SEQ ID NO: 235413 - DNA, 19 bp, Homo sapiens
  siRNA target sequence for UBE1C (NM_003968.3,844-862).
ctgaacatatacaatggat

SEQ ID NO: 235414 - DNA, 19 bp, Homo sapiens
  siRNA target sequence for UBE1C (NM_003968.3,846-864).
gaacatatacaatggattt

SEQ ID NO: 235415 - DNA, 19 bp, Homo sapiens
  siRNA target sequence for UBE1C (NM_003968.3,879-897).
gagagagcatcacaatata

SEQ ID NO: 235416 - DNA, 19 bp, Homo sapiens
  siRNA target sequence for UBE1C (NM_003968.3,881-899).
gagagcatcacaatataat

SEQ ID NO: 235417 - DNA, 19 bp, Homo sapiens
  siRNA target sequence for UBE1C (NM_003968.3,883-901).
gagcatcacaatataatat

SEQ ID NO: 235418 - DNA, 19 bp, Homo sapiens
  siRNA target sequence for UBE1C (NM_003968.3,923-941).
cactcaaggggtagtaaaa

SEQ ID NO: 235419 - DNA, 19 bp, Homo sapiens
  siRNA target sequence for UBE1C (NM_003968.3,930-948).
ggggtagtaaaaagaatca

SEQ ID NO: 235420 - DNA, 19 bp, Homo sapiens
  siRNA target sequence for UBE1C (NM_003968.3,931-949).
gggtagtaaaaagaatcat

SEQ ID NO: 235421 - DNA, 19 bp, Homo sapiens
  siRNA target sequence for UBE1C (NM_003968.3,932-950).
ggtagtaaaaagaatcatt

SEQ ID NO: 235422 - DNA, 19 bp, Homo sapiens
  siRNA target sequence for UBE1C (NM_003968.3,989-1007).
gtgtgccactgaggttttt

SEQ ID NO: 235423 - DNA, 19 bp, Homo sapiens
  siRNA target sequence for UBE1C (NM_003968.3,1046-1064).
cttggtgtttaatgatgta

SEQ ID NO: 235424 - DNA, 19 bp, Homo sapiens
  siRNA target sequence for UBE1C (NM_003968.3,1049-1067).
ggtgtttaatgatgtagat

SEQ ID NO: 235425 - DNA, 19 bp, Homo sapiens
  siRNA target sequence for UBE1C (NM_003968.3,1059-1077).
gatgtagatgggctgtata

SEQ ID NO: 235426 - DNA, 19 bp, Homo sapiens
  siRNA target sequence for UBE1C (NM_003968.3,1062-1080).
gtagatgggctgtatacat

SEQ ID NO: 235427 - DNA, 19 bp, Homo sapiens
  siRNA target sequence for UBE1C (NM_003968.3,1065-1083).
gatgggctgtatacataca

SEQ ID NO: 235428 - DNA, 19 bp, Homo sapiens
  siRNA target sequence for UBE1C (NM_003968.3,1068-1086).
gggctgtatacatacacat

SEQ ID NO: 235429 - DNA, 19 bp, Homo sapiens
  siRNA target sequence for UBE1C (NM_003968.3,1159-1177).
ctaaactacaggaggtttt

SEQ ID NO: 235430 - DNA, 19 bp, Homo sapiens
  siRNA target sequence for UBE1C (NM_003968.3,1195-1213).
gtgcttctctgcaaatgaa

SEQ ID NO: 235431 - DNA, 19 bp, Homo sapiens
  siRNA target sequence for UBE1C (NM_003968.3,1230-1248).
gccaccctagagggaaaaa

SEQ ID NO: 235432 - DNA, 19 bp, Homo sapiens
  siRNA target sequence for UBE1C (NM_003968.3,1231-1249).
ccaccctagagggaaaaaa

SEQ ID NO: 235433 - DNA, 19 bp, Homo sapiens
  siRNA target sequence for UBE1C (NM_003968.3,1268-1286).
gtcggtaacctctattgaa

SEQ ID NO: 235434 - DNA, 19 bp, Homo sapiens
  siRNA target sequence for UBE1C (NM_003968.3,1270-1288).
cggtaacctctattgaaga

SEQ ID NO: 235435 - DNA, 19 bp, Homo sapiens
  siRNA target sequence for UBE1C (NM_003968.3,1271-1289).
ggtaacctctattgaagaa

SEQ ID NO: 235436 - DNA, 19 bp, Homo sapiens
  siRNA target sequence for UBE1C (NM_003968.3,1290-1308).
cgaacaaggccaaatctct

SEQ ID NO: 235437 - DNA, 19 bp, Homo sapiens
  siRNA target sequence for UBE1C (NM_003968.3,1370-1388).
caccccacagactgtacta

SEQ ID NO: 235438 - DNA, 19 bp, Homo sapiens
  siRNA target sequence for UBE1C (NM_003968.3,1372-1390).
ccccacagactgtactatt

SEQ ID NO: 235439 - DNA, 19 bp, Homo sapiens
  siRNA target sequence for UBE1C (NM_003968.3,1374-1392).
ccacagactgtactattca

SEQ ID NO: 235440 - DNA, 19 bp, Homo sapiens
  siRNA target sequence for UBE1C (NM_003968.3,1375-1393).
cacagactgtactattcaa

SEQ ID NO: 235441 - DNA, 19 bp, Homo sapiens
  siRNA target sequence for UBE1C (NM_198195.1,35-53).
ggagccaatggctgttgat

SEQ ID NO: 235442 - DNA, 19 bp, Homo sapiens
  siRNA target sequence for UBE4A (NM_004788.2,210-228).
gtttgcggcaatccaaaaa

SEQ ID NO: 235443 - DNA, 19 bp, Homo sapiens
  siRNA target sequence for UBE4A (NM_004788.2,234-252).
gctgaagcaacaatctgat

SEQ ID NO: 235444 - DNA, 19 bp, Homo sapiens
  siRNA target sequence for UBE4A (NM_004788.2,297-315).
gagcctggatgaattcgat

SEQ ID NO: 235445 - DNA, 19 bp, Homo sapiens
  siRNA target sequence for UBE4A (NM_004788.2,299-317).
gcctggatgaattcgatta

SEQ ID NO: 235446 - DNA, 19 bp, Homo sapiens
  siRNA target sequence for UBE4A (NM_004788.2,301-319).
ctggatgaattcgattact

SEQ ID NO: 235447 - DNA, 19 bp, Homo sapiens
  siRNA target sequence for UBE4A (NM_004788.2,303-321).
ggatgaattcgattactct

SEQ ID NO: 235448 - DNA, 19 bp, Homo sapiens
  siRNA target sequence for UBE4A (NM_004788.2,345-363).
ccgatcacagcaggaaata

SEQ ID NO: 235449 - DNA, 19 bp, Homo sapiens
  siRNA target sequence for UBE4A (NM_004788.2,346-364).
cgatcacagcaggaaatat

SEQ ID NO: 235450 - DNA, 19 bp, Homo sapiens
  siRNA target sequence for UBE4A (NM_004788.2,350-368).
cacagcaggaaatatgtga

SEQ ID NO: 235451 - DNA, 19 bp, Homo sapiens
  siRNA target sequence for UBE4A (NM_004788.2,365-383).
gtgagcaactcaacatcaa

SEQ ID NO: 235452 - DNA, 19 bp, Homo sapiens
  siRNA target sequence for UBE4A (NM_004788.2,456-474).
ccctagccgttgtgtgtat

SEQ ID NO: 235453 - DNA, 19 bp, Homo sapiens
  siRNA target sequence for UBE4A (NM_004788.2,457-475).
cctagccgttgtgtgtatt

SEQ ID NO: 235454 - DNA, 19 bp, Homo sapiens
  siRNA target sequence for UBE4A (NM_004788.2,486-504).
ggcagtagagctagaagat

SEQ ID NO: 235455 - DNA, 19 bp, Homo sapiens
  siRNA target sequence for UBE4A (NM_004788.2,505-523).
caagactggcttgatatga

SEQ ID NO: 235456 - DNA, 19 bp, Homo sapiens
  siRNA target sequence for UBE4A (NM_004788.2,539-557).
ccctcttcgctcgcttatt

SEQ ID NO: 235457 - DNA, 19 bp, Homo sapiens
  siRNA target sequence for UBE4A (NM_004788.2,540-558).
cctcttcgctcgcttatta

SEQ ID NO: 235458 - DNA, 19 bp, Homo sapiens
  siRNA target sequence for UBE4A (NM_004788.2,543-561).
cttcgctcgcttattactt

SEQ ID NO: 235459 - DNA, 19 bp, Homo sapiens
  siRNA target sequence for UBE4A (NM_004788.2,546-564).
cgctcgcttattacttcaa

SEQ ID NO: 235460 - DNA, 19 bp, Homo sapiens
  siRNA target sequence for UBE4A (NM_004788.2,548-566).
ctcgcttattacttcaaga

SEQ ID NO: 235461 - DNA, 19 bp, Homo sapiens
  siRNA target sequence for UBE4A (NM_004788.2,568-586).
ccaggcaaccacttaatta

SEQ ID NO: 235462 - DNA, 19 bp, Homo sapiens
  siRNA target sequence for UBE4A (NM_004788.2,569-587).
caggcaaccacttaattaa

SEQ ID NO: 235463 - DNA, 19 bp, Homo sapiens
  siRNA target sequence for UBE4A (NM_004788.2,571-589).
ggcaaccacttaattaaca

SEQ ID NO: 235464 - DNA, 19 bp, Homo sapiens
  siRNA target sequence for UBE4A (NM_004788.2,572-590).
gcaaccacttaattaacat

SEQ ID NO: 235465 - DNA, 19 bp, Homo sapiens
  siRNA target sequence for UBE4A (NM_004788.2,596-614).
cttctacaacgctaaatct

SEQ ID NO: 235466 - DNA, 19 bp, Homo sapiens
  siRNA target sequence for UBE4A (NM_004788.2,637-655).
gagaggcacattttttgtt

SEQ ID NO: 235467 - DNA, 19 bp, Homo sapiens
  siRNA target sequence for UBE4A (NM_004788.2,684-702).
ggaagagattaccaaagtt

SEQ ID NO: 235468 - DNA, 19 bp, Homo sapiens
  siRNA target sequence for UBE4A (NM_004788.2,753-771).
caatacccgaacagttctt

SEQ ID NO: 235469 - DNA, 19 bp, Homo sapiens
  siRNA target sequence for UBE4A (NM_004788.2,776-794).
ccccagagatctatgttga

SEQ ID NO: 235470 - DNA, 19 bp, Homo sapiens
  siRNA target sequence for UBE4A (NM_004788.2,811-829).
caactggtagatttgatgt

SEQ ID NO: 235471 - DNA, 19 bp, Homo sapiens
  siRNA target sequence for UBE4A (NM_004788.2,844-862).
ggagcccgtgagtacatga

SEQ ID NO: 235472 - DNA, 19 bp, Homo sapiens
  siRNA target sequence for UBE4A (NM_004788.2,847-865).
gcccgtgagtacatgaaca

SEQ ID NO: 235473 - DNA, 19 bp, Homo sapiens
  siRNA target sequence for UBE4A (NM_004788.2,848-866).
cccgtgagtacatgaacaa

SEQ ID NO: 235474 - DNA, 19 bp, Homo sapiens
  siRNA target sequence for UBE4A (NM_004788.2,850-868).
cgtgagtacatgaacaaga

SEQ ID NO: 235475 - DNA, 19 bp, Homo sapiens
  siRNA target sequence for UBE4A (NM_004788.2,930-948).
ggaagttagaacatttcca

SEQ ID NO: 235476 - DNA, 19 bp, Homo sapiens
  siRNA target sequence for UBE4A (NM_004788.2,938-956).
gaacatttccagaagtcat

SEQ ID NO: 235477 - DNA, 19 bp, Homo sapiens
  siRNA target sequence for UBE4A (NM_004788.2,1011-1029).
gatccttttgtatgcatat

SEQ ID NO: 235478 - DNA, 19 bp, Homo sapiens
  siRNA target sequence for UBE4A (NM_004788.2,1020-1038).
gtatgcatatctggatatt

SEQ ID NO: 235479 - DNA, 19 bp, Homo sapiens
  siRNA target sequence for UBE4A (NM_004788.2,1044-1062).
ctatttcactaggcaaaaa

SEQ ID NO: 235480 - DNA, 19 bp, Homo sapiens
  siRNA target sequence for UBE4A (NM_004788.2,1069-1087).
gcaaaggtttttgtagaat

SEQ ID NO: 235481 - DNA, 19 bp, Homo sapiens
  siRNA target sequence for UBE4A (NM_004788.2,1105-1123).
cctaccaatgggcaaatgt

SEQ ID NO: 235482 - DNA, 19 bp, Homo sapiens
  siRNA target sequence for UBE4A (NM_004788.2,1106-1124).
ctaccaatgggcaaatgta

SEQ ID NO: 235483 - DNA, 19 bp, Homo sapiens
  siRNA target sequence for UBE4A (NM_004788.2,1131-1149).
gaccttgctgggagtaatt

SEQ ID NO: 235484 - DNA, 19 bp, Homo sapiens
  siRNA target sequence for UBE4A (NM_004788.2,1133-1151).
ccttgctgggagtaattct

SEQ ID NO: 235485 - DNA, 19 bp, Homo sapiens
  siRNA target sequence for UBE4A (NM_004788.2,1150-1168).
ctgagtatctcctgcttat

SEQ ID NO: 235486 - DNA, 19 bp, Homo sapiens
  siRNA target sequence for UBE4A (NM_004788.2,1152-1170).
gagtatctcctgcttatta

SEQ ID NO: 235487 - DNA, 19 bp, Homo sapiens
  siRNA target sequence for UBE4A (NM_004788.2,1154-1172).
gtatctcctgcttattaaa

SEQ ID NO: 235488 - DNA, 19 bp, Homo sapiens
  siRNA target sequence for UBE4A (NM_004788.2,1158-1176).
ctcctgcttattaaagact

SEQ ID NO: 235489 - DNA, 19 bp, Homo sapiens
  siRNA target sequence for UBE4A (NM_004788.2,1173-1191).
gactccgggtgttgtagaa

SEQ ID NO: 235490 - DNA, 19 bp, Homo sapiens
  siRNA target sequence for UBE4A (NM_004788.2,1175-1193).
ctccgggtgttgtagaaaa

SEQ ID NO: 235491 - DNA, 19 bp, Homo sapiens
  siRNA target sequence for UBE4A (NM_004788.2,1198-1216).
ggctactttttgaatccat

SEQ ID NO: 235492 - DNA, 19 bp, Homo sapiens
  siRNA target sequence for UBE4A (NM_004788.2,1226-1244).
gcccccaggagatcaaagt

SEQ ID NO: 235493 - DNA, 19 bp, Homo sapiens
  siRNA target sequence for UBE4A (NM_004788.2,1273-1291).
gctcagttccacgaaaaga

SEQ ID NO: 235494 - DNA, 19 bp, Homo sapiens
  siRNA target sequence for UBE4A (NM_004788.2,1356-1374).
gcttggaaactgtttgcat

SEQ ID NO: 235495 - DNA, 19 bp, Homo sapiens
  siRNA target sequence for UBE4A (NM_004788.2,1381-1399).
gcaggccgcaccaagattt

SEQ ID NO: 235496 - DNA, 19 bp, Homo sapiens
  siRNA target sequence for UBE4A (NM_004788.2,1468-1486).
gctgctctcctgaagctat

SEQ ID NO: 235497 - DNA, 19 bp, Homo sapiens
  siRNA target sequence for UBE4A (NM_004788.2,1527-1545).
ctttaatcccacatactgt

SEQ ID NO: 235498 - DNA, 19 bp, Homo sapiens
  siRNA target sequence for UBE4A (NM_004788.2,1654-1672).
cagaactacaaccttgtaa

SEQ ID NO: 235499 - DNA, 19 bp, Homo sapiens
  siRNA target sequence for UBE4A (NM_004788.2,1656-1674).
gaactacaaccttgtaaca

SEQ ID NO: 235500 - DNA, 19 bp, Homo sapiens
  siRNA target sequence for UBE4A (NM_004788.2,1700-1718).
ccttgtacttgggatttca

SEQ ID NO: 235501 - DNA, 19 bp, Homo sapiens
  siRNA target sequence for UBE4A (NM_004788.2,1780-1798).
cgggatgctcagcaaagtt

SEQ ID NO: 235502 - DNA, 19 bp, Homo sapiens
  siRNA target sequence for UBE4A (NM_004788.2,1875-1893).
gacagagccacaaatgcta

SEQ ID NO: 235503 - DNA, 19 bp, Homo sapiens
  siRNA target sequence for UBE4A (NM_004788.2,1968-1986).
gccaatagagctaaccttt

SEQ ID NO: 235504 - DNA, 19 bp, Homo sapiens
  siRNA target sequence for UBE4A (NM_004788.2,2014-2032).
gcttatgtgccagaatttt

SEQ ID NO: 235505 - DNA, 19 bp, Homo sapiens
  siRNA target sequence for UBE4A (NM_004788.2,2015-2033).
cttatgtgccagaattttt

SEQ ID NO: 235506 - DNA, 19 bp, Homo sapiens
  siRNA target sequence for UBE4A (NM_004788.2,2070-2088).
ccgctttgccgatgacatt

SEQ ID NO: 235507 - DNA, 19 bp, Homo sapiens
  siRNA target sequence for UBE4A (NM_004788.2,2071-2089).
cgctttgccgatgacattt

SEQ ID NO: 235508 - DNA, 19 bp, Homo sapiens
  siRNA target sequence for UBE4A (NM_004788.2,2113-2131).
gagcatgtccttcacttta

SEQ ID NO: 235509 - DNA, 19 bp, Homo sapiens
  siRNA target sequence for UBE4A (NM_004788.2,2136-2154).
cattttcactggaagcata

SEQ ID NO: 235510 - DNA, 19 bp, Homo sapiens
  siRNA target sequence for UBE4A (NM_004788.2,2144-2162).
ctggaagcatagaaagaat

SEQ ID NO: 235511 - DNA, 19 bp, Homo sapiens
  siRNA target sequence for UBE4A (NM_004788.2,2272-2290).
gtgttctgcaactttcagt

SEQ ID NO: 235512 - DNA, 19 bp, Homo sapiens
  siRNA target sequence for UBE4A (NM_004788.2,2308-2326).
gaggctctaatcaaggttt

SEQ ID NO: 235513 - DNA, 19 bp, Homo sapiens
  siRNA target sequence for UBE4A (NM_004788.2,2310-2328).
ggctctaatcaaggttttt

SEQ ID NO: 235514 - DNA, 19 bp, Homo sapiens
  siRNA target sequence for UBE4A (NM_004788.2,2383-2401).
cgccgtcccatgtatccta

SEQ ID NO: 235515 - DNA, 19 bp, Homo sapiens
  siRNA target sequence for UBE4A (NM_004788.2,2384-2402).
gccgtcccatgtatcctat

SEQ ID NO: 235516 - DNA, 19 bp, Homo sapiens
  siRNA target sequence for UBE4A (NM_004788.2,2389-2407).
cccatgtatcctatcctaa

SEQ ID NO: 235517 - DNA, 19 bp, Homo sapiens
  siRNA target sequence for UBE4A (NM_004788.2,2398-2416).
cctatcctaagatacatgt

SEQ ID NO: 235518 - DNA, 19 bp, Homo sapiens
  siRNA target sequence for UBE4A (NM_004788.2,2429-2447).
cctatcgggagagcattaa

SEQ ID NO: 235519 - DNA, 19 bp, Homo sapiens
  siRNA target sequence for UBE4A (NM_004788.2,2434-2452).
cgggagagcattaaggatt

SEQ ID NO: 235520 - DNA, 19 bp, Homo sapiens
  siRNA target sequence for UBE4A (NM_004788.2,2435-2453).
gggagagcattaaggattt

SEQ ID NO: 235521 - DNA, 19 bp, Homo sapiens
  siRNA target sequence for UBE4A (NM_004788.2,2458-2476).
gactatgcctctaagaatt

SEQ ID NO: 235522 - DNA, 19 bp, Homo sapiens
  siRNA target sequence for UBE4A (NM_004788.2,2460-2478).
ctatgcctctaagaattta

SEQ ID NO: 235523 - DNA, 19 bp, Homo sapiens
  siRNA target sequence for UBE4A (NM_004788.2,2472-2490).
gaatttagaagccatgaat

SEQ ID NO: 235524 - DNA, 19 bp, Homo sapiens
  siRNA target sequence for UBE4A (NM_004788.2,2674-2692).
ctggcacgtttccataaca

SEQ ID NO: 235525 - DNA, 19 bp, Homo sapiens
  siRNA target sequence for UBE4A (NM_004788.2,2677-2695).
gcacgtttccataacatca

SEQ ID NO: 235526 - DNA, 19 bp, Homo sapiens
  siRNA target sequence for UBE4A (NM_004788.2,2678-2696).
cacgtttccataacatcat

SEQ ID NO: 235527 - DNA, 19 bp, Homo sapiens
  siRNA target sequence for UBE4A (NM_004788.2,2728-2746).
ctcacatcagagatcaagt

SEQ ID NO: 235528 - DNA, 19 bp, Homo sapiens
  siRNA target sequence for UBE4A (NM_004788.2,2776-2794).
cgcatcatctccatgttga

SEQ ID NO: 235529 - DNA, 19 bp, Homo sapiens
  siRNA target sequence for UBE4A (NM_004788.2,2822-2840).
ccaagatgggtgccttaaa

SEQ ID NO: 235530 - DNA, 19 bp, Homo sapiens
  siRNA target sequence for UBE4A (NM_004788.2,2844-2862).
caaggacttcagcgaattt

SEQ ID NO: 235531 - DNA, 19 bp, Homo sapiens
  siRNA target sequence for UBE4A (NM_004788.2,2848-2866).
gacttcagcgaatttgact

SEQ ID NO: 235532 - DNA, 19 bp, Homo sapiens
  siRNA target sequence for UBE4A (NM_004788.2,2874-2892).
ccagcagcttgtatcagat

SEQ ID NO: 235533 - DNA, 19 bp, Homo sapiens
  siRNA target sequence for UBE4A (NM_004788.2,2898-2916).
cactatctacttaaatctt

SEQ ID NO: 235534 - DNA, 19 bp, Homo sapiens
  siRNA target sequence for UBE4A (NM_004788.2,2949-2967).
caaggatggacgttcctat

SEQ ID NO: 235535 - DNA, 19 bp, Homo sapiens
  siRNA target sequence for UBE4A (NM_004788.2,2992-3010).
gttcgagtcttgaagaaaa

SEQ ID NO: 235536 - DNA, 19 bp, Homo sapiens
  siRNA target sequence for UBE4A (NM_004788.2,3219-3237).
gctcagtgaccaaacagat

SEQ ID NO: 235537 - DNA, 19 bp, Homo sapiens
  siRNA target sequence for UBE4A (NM_004788.2,3267-3285).
ccagatccggccaaacaca

SEQ ID NO: 235538 - DNA, 19 bp, Homo sapiens
  siRNA target sequence for UBE4A (NM_004788.2,3273-3291).
ccggccaaacacagaacta

SEQ ID NO: 235539 - DNA, 19 bp, Homo sapiens
  siRNA target sequence for UBE4A (NM_004788.2,3274-3292).
cggccaaacacagaactaa

SEQ ID NO: 235540 - DNA, 19 bp, Homo sapiens
  siRNA target sequence for SAE1 (NM_005500.1,189-207).
ggctgaaattgccaagaat

SEQ ID NO: 235541 - DNA, 19 bp, Homo sapiens
  siRNA target sequence for SAE1 (NM_005500.1,272-290).
ccggagctcagttcttgat

SEQ ID NO: 235542 - DNA, 19 bp, Homo sapiens
  siRNA target sequence for SAE1 (NM_005500.1,273-291).
cggagctcagttcttgatt

SEQ ID NO: 235543 - DNA, 19 bp, Homo sapiens
  siRNA target sequence for SAE1 (NM_005500.1,277-295).
gctcagttcttgattcgta

SEQ ID NO: 235544 - DNA, 19 bp, Homo sapiens
  siRNA target sequence for SAE1 (NM_005500.1,298-316).
gggtctgttggccgaaata

SEQ ID NO: 235545 - DNA, 19 bp, Homo sapiens
  siRNA target sequence for SAE1 (NM_005500.1,450-468).
cagggatgtcatagttaaa

SEQ ID NO: 235546 - DNA, 19 bp, Homo sapiens
  siRNA target sequence for SAE1 (NM_005500.1,621-639).
cgacaccaagagagcaaaa

SEQ ID NO: 235547 - DNA, 19 bp, Homo sapiens
  siRNA target sequence for SAE1 (NM_005500.1,681-699).
cttctgccctgttaaagaa

SEQ ID NO: 235548 - DNA, 19 bp, Homo sapiens
  siRNA target sequence for SAE1 (NM_005500.1,749-767).
gcacgacctccgactactt

SEQ ID NO: 235549 - DNA, 19 bp, Homo sapiens
  siRNA target sequence for SAE1 (NM_005500.1,750-768).
cacgacctccgactacttt

SEQ ID NO: 235550 - DNA, 19 bp, Homo sapiens
  siRNA target sequence for SAE1 (NM_005500.1,752-770).
cgacctccgactactttct

SEQ ID NO: 235551 - DNA, 19 bp, Homo sapiens
  siRNA target sequence for SAE1 (NM_005500.1,769-787).
ctccttcaagtgctcttaa

SEQ ID NO: 235552 - DNA, 19 bp, Homo sapiens
  siRNA target sequence for SAE1 (NM_005500.1,772-790).
cttcaagtgctcttaaagt

SEQ ID NO: 235553 - DNA, 19 bp, Homo sapiens
  siRNA target sequence for SAE1 (NM_005500.1,789-807).
gttccgtacagataaagga

SEQ ID NO: 235554 - DNA, 19 bp, Homo sapiens
  siRNA target sequence for SAE1 (NM_005500.1,815-833).
ccagttctgatacatatga

SEQ ID NO: 235555 - DNA, 19 bp, Homo sapiens
  siRNA target sequence for SAE1 (NM_005500.1,849-867).
gttgctccagatacgaaat

SEQ ID NO: 235556 - DNA, 19 bp, Homo sapiens
  siRNA target sequence for SAE1 (NM_005500.1,852-870).
gctccagatacgaaatgat

SEQ ID NO: 235557 - DNA, 19 bp, Homo sapiens
  siRNA target sequence for SAE1 (NM_005500.1,956-974).
cggtggttggagggatttt

SEQ ID NO: 235558 - DNA, 19 bp, Homo sapiens
  siRNA target sequence for SAE1 (NM_005500.1,1009-1027).
gaccctcctcacaacaact

SEQ ID NO: 235559 - DNA, 19 bp, Homo sapiens
  siRNA target sequence for APG7L (NM_006395.1,64-82).
gcagtttgccccttttagt

SEQ ID NO: 235560 - DNA, 19 bp, Homo sapiens
  siRNA target sequence for APG7L (NM_006395.1,65-83).
cagtttgccccttttagta

SEQ ID NO: 235561 - DNA, 19 bp, Homo sapiens
  siRNA target sequence for APG7L (NM_006395.1,67-85).
gtttgccccttttagtagt

SEQ ID NO: 235562 - DNA, 19 bp, Homo sapiens
  siRNA target sequence for APG7L (NM_006395.1,149-167).
gaagctcccaaggacatta

SEQ ID NO: 235563 - DNA, 19 bp, Homo sapiens
  siRNA target sequence for APG7L (NM_006395.1,161-179).
gacattaagggttattact

SEQ ID NO: 235564 - DNA, 19 bp, Homo sapiens
  siRNA target sequence for APG7L (NM_006395.1,199-217).
gctgccagctcgcttaaca

SEQ ID NO: 235565 - DNA, 19 bp, Homo sapiens
  siRNA target sequence for APG7L (NM_006395.1,200-218).
ctgccagctcgcttaacat

SEQ ID NO: 235566 - DNA, 19 bp, Homo sapiens
  siRNA target sequence for APG7L (NM_006395.1,221-239).
gagttcagtgcttttgaca

SEQ ID NO: 235567 - DNA, 19 bp, Homo sapiens
  siRNA target sequence for APG7L (NM_006395.1,259-277).
ccgttgctgcccagctatt

SEQ ID NO: 235568 - DNA, 19 bp, Homo sapiens
  siRNA target sequence for APG7L (NM_006395.1,272-290).
gctattggaacactgtata

SEQ ID NO: 235569 - DNA, 19 bp, Homo sapiens
  siRNA target sequence for APG7L (NM_006395.1,321-339).
cagataagaagctcctttt

SEQ ID NO: 235570 - DNA, 19 bp, Homo sapiens
  siRNA target sequence for APG7L (NM_006395.1,356-374).
gagatatgggaatccataa

SEQ ID NO: 235571 - DNA, 19 bp, Homo sapiens
  siRNA target sequence for APG7L (NM_006395.1,358-376).
gatatgggaatccataaaa

SEQ ID NO: 235572 - DNA, 19 bp, Homo sapiens
  siRNA target sequence for APG7L (NM_006395.1,398-416).
cctgtactcctcaacaagt

SEQ ID NO: 235573 - DNA, 19 bp, Homo sapiens
  siRNA target sequence for APG7L (NM_006395.1,399-417).
ctgtactcctcaacaagtt

SEQ ID NO: 235574 - DNA, 19 bp, Homo sapiens
  siRNA target sequence for APG7L (NM_006395.1,424-442).
cttgacatttgcagatcta

SEQ ID NO: 235575 - DNA, 19 bp, Homo sapiens
  siRNA target sequence for APG7L (NM_006395.1,429-447).
catttgcagatctaaagaa

SEQ ID NO: 235576 - DNA, 19 bp, Homo sapiens
  siRNA target sequence for APG7L (NM_006395.1,445-463).
gaagtaccacttctactat

SEQ ID NO: 235577 - DNA, 19 bp, Homo sapiens
  siRNA target sequence for APG7L (NM_006395.1,529-547).
ggatcaaaggttttcacta

SEQ ID NO: 235578 - DNA, 19 bp, Homo sapiens
  siRNA target sequence for APG7L (NM_006395.1,561-579).
cactagagtgtgcatatga

SEQ ID NO: 235579 - DNA, 19 bp, Homo sapiens
  siRNA target sequence for APG7L (NM_006395.1,563-581).
ctagagtgtgcatatgata

SEQ ID NO: 235580 - DNA, 19 bp, Homo sapiens
  siRNA target sequence for APG7L (NM_006395.1,649-667).
gctggtttccttgcttaaa

SEQ ID NO: 235581 - DNA, 19 bp, Homo sapiens
  siRNA target sequence for APG7L (NM_006395.1,653-671).
gtttccttgcttaaacact

SEQ ID NO: 235582 - DNA, 19 bp, Homo sapiens
  siRNA target sequence for APG7L (NM_006395.1,689-707).
ggtcaaaggacgaagataa

SEQ ID NO: 235583 - DNA, 19 bp, Homo sapiens
  siRNA target sequence for APG7L (NM_006395.1,716-734).
gtatatgatccctgtaact

SEQ ID NO: 235584 - DNA, 19 bp, Homo sapiens
  siRNA target sequence for APG7L (NM_006395.1,986-1004).
gaatgtatggaccctaaaa

SEQ ID NO: 235585 - DNA, 19 bp, Homo sapiens
  siRNA target sequence for APG7L (NM_006395.1,1015-1033).
gtcatcagtggatctaaat

SEQ ID NO: 235586 - DNA, 19 bp, Homo sapiens
  siRNA target sequence for APG7L (NM_006395.1,1042-1060).
gatgtgttggagattggtt

SEQ ID NO: 235587 - DNA, 19 bp, Homo sapiens
  siRNA target sequence for APG7L (NM_006395.1,1078-1096).
caaggttgtgtctgtcaaa

SEQ ID NO: 235588 - DNA, 19 bp, Homo sapiens
  siRNA target sequence for APG7L (NM_006395.1,1114-1132).
cggcaccttgggttgcaat

SEQ ID NO: 235589 - DNA, 19 bp, Homo sapiens
  siRNA target sequence for APG7L (NM_006395.1,1117-1135).
caccttgggttgcaatgta

SEQ ID NO: 235590 - DNA, 19 bp, Homo sapiens
  siRNA target sequence for APG7L (NM_006395.1,1157-1175).
ggcgtgagacacatcacat

SEQ ID NO: 235591 - DNA, 19 bp, Homo sapiens
  siRNA target sequence for APG7L (NM_006395.1,1158-1176).
gcgtgagacacatcacatt

SEQ ID NO: 235592 - DNA, 19 bp, Homo sapiens
  siRNA target sequence for APG7L (NM_006395.1,1215-1233).
ggcagcctctctatgagtt

SEQ ID NO: 235593 - DNA, 19 bp, Homo sapiens
  siRNA target sequence for APG7L (NM_006395.1,1216-1234).
gcagcctctctatgagttt

SEQ ID NO: 235594 - DNA, 19 bp, Homo sapiens
  siRNA target sequence for APG7L (NM_006395.1,1277-1295).
gcggaccggctccagaaaa

SEQ ID NO: 235595 - DNA, 19 bp, Homo sapiens
  siRNA target sequence for APG7L (NM_006395.1,1278-1296).
cggaccggctccagaaaat

SEQ ID NO: 235596 - DNA, 19 bp, Homo sapiens
  siRNA target sequence for APG7L (NM_006395.1,1279-1297).
ggaccggctccagaaaata

SEQ ID NO: 235597 - DNA, 19 bp, Homo sapiens
  siRNA target sequence for APG7L (NM_006395.1,1427-1445).
catgatgtcgtcttcctat

SEQ ID NO: 235598 - DNA, 19 bp, Homo sapiens
  siRNA target sequence for APG7L (NM_006395.1,1430-1448).
gatgtcgtcttcctattga

SEQ ID NO: 235599 - DNA, 19 bp, Homo sapiens
  siRNA target sequence for APG7L (NM_006395.1,1498-1516).
gagaaagctggtcatcaat

SEQ ID NO: 235600 - DNA, 19 bp, Homo sapiens
  siRNA target sequence for APG7L (NM_006395.1,1525-1543).
gggatttgacacatttgtt

SEQ ID NO: 235601 - DNA, 19 bp, Homo sapiens
  siRNA target sequence for APG7L (NM_006395.1,1553-1571).
catggtctgaagaaaccaa

SEQ ID NO: 235602 - DNA, 19 bp, Homo sapiens
  siRNA target sequence for APG7L (NM_006395.1,1627-1645).
cctgggctcatcgcttttt

SEQ ID NO: 235603 - DNA, 19 bp, Homo sapiens
  siRNA target sequence for APG7L (NM_006395.1,1694-1712).
gtggccccaggagattcaa

SEQ ID NO: 235604 - DNA, 19 bp, Homo sapiens
  siRNA target sequence for APG7L (NM_006395.1,1779-1797).
ccctggccgtggaattgat

SEQ ID NO: 235605 - DNA, 19 bp, Homo sapiens
  siRNA target sequence for APG7L (NM_006395.1,1784-1802).
gccgtggaattgatggtat

SEQ ID NO: 235606 - DNA, 19 bp, Homo sapiens
  siRNA target sequence for APG7L (NM_006395.1,1789-1807).
ggaattgatggtatctgtt

SEQ ID NO: 235607 - DNA, 19 bp, Homo sapiens
  siRNA target sequence for APG7L (NM_006395.1,1790-1808).
gaattgatggtatctgttt

SEQ ID NO: 235608 - DNA, 19 bp, Homo sapiens
  siRNA target sequence for APG7L (NM_006395.1,1846-1864).
cagtgacgatcggatgaat

SEQ ID NO: 235609 - DNA, 19 bp, Homo sapiens
  siRNA target sequence for APG7L (NM_006395.1,1848-1866).
gtgacgatcggatgaatga

SEQ ID NO: 235610 - DNA, 19 bp, Homo sapiens
  siRNA target sequence for APG7L (NM_006395.1,1897-1915).
ccagatccggggatttctt

SEQ ID NO: 235611 - DNA, 19 bp, Homo sapiens
  siRNA target sequence for APG7L (NM_006395.1,1898-1916).
cagatccggggatttcttt

SEQ ID NO: 235612 - DNA, 19 bp, Homo sapiens
  siRNA target sequence for APG7L (NM_006395.1,1900-1918).
gatccggggatttctttca

SEQ ID NO: 235613 - DNA, 19 bp, Homo sapiens
  siRNA target sequence for APG7L (NM_006395.1,1938-1956).
ccgtcagcctggcatttga

SEQ ID NO: 235614 - DNA, 19 bp, Homo sapiens
  siRNA target sequence for APG7L (NM_006395.1,1977-1995).
ccaaagttcttgatcaata

SEQ ID NO: 235615 - DNA, 19 bp, Homo sapiens
  siRNA target sequence for APG7L (NM_006395.1,1978-1996).
caaagttcttgatcaatat

SEQ ID NO: 235616 - DNA, 19 bp, Homo sapiens
  siRNA target sequence for APG7L (NM_006395.1,2021-2039).
gccaaggtgtttaattctt

SEQ ID NO: 235617 - DNA, 19 bp, Homo sapiens
  siRNA target sequence for APG7L (NM_006395.1,2023-2041).
caaggtgtttaattcttca

SEQ ID NO: 235618 - DNA, 19 bp, Homo sapiens
  siRNA target sequence for APG7L (NM_006395.1,2057-2075).
gacttgactggtcttacat

SEQ ID NO: 235619 - DNA, 19 bp, Homo sapiens
  siRNA target sequence for UBA2 (NM_005499.1,114-132).
gcgagctcctcaagaatct

SEQ ID NO: 235620 - DNA, 19 bp, Homo sapiens
  siRNA target sequence for UBA2 (NM_005499.1,150-168).
cccacatcgacctgattga

SEQ ID NO: 235621 - DNA, 19 bp, Homo sapiens
  siRNA target sequence for UBA2 (NM_005499.1,151-169).
ccacatcgacctgattgat

SEQ ID NO: 235622 - DNA, 19 bp, Homo sapiens
  siRNA target sequence for UBA2 (NM_005499.1,161-179).
ctgattgatctggatacta

SEQ ID NO: 235623 - DNA, 19 bp, Homo sapiens
  siRNA target sequence for UBA2 (NM_005499.1,170-188).
ctggatactattgatgtaa

SEQ ID NO: 235624 - DNA, 19 bp, Homo sapiens
  siRNA target sequence for UBA2 (NM_005499.1,247-265).
ggttgccaaggaaagtgta

SEQ ID NO: 235625 - DNA, 19 bp, Homo sapiens
  siRNA target sequence for UBA2 (NM_005499.1,269-287).
cagttttacccgaaagcta

SEQ ID NO: 235626 - DNA, 19 bp, Homo sapiens
  siRNA target sequence for UBA2 (NM_005499.1,277-295).
cccgaaagctaatatcgtt

SEQ ID NO: 235627 - DNA, 19 bp, Homo sapiens
  siRNA target sequence for UBA2 (NM_005499.1,310-328).
catcatgaaccctgactat

SEQ ID NO: 235628 - DNA, 19 bp, Homo sapiens
  siRNA target sequence for UBA2 (NM_005499.1,313-331).
catgaaccctgactataat

SEQ ID NO: 235629 - DNA, 19 bp, Homo sapiens
  siRNA target sequence for UBA2 (NM_005499.1,334-352).
ggaatttttccgacagttt

SEQ ID NO: 235630 - DNA, 19 bp, Homo sapiens
  siRNA target sequence for UBA2 (NM_005499.1,364-382).
gaatgctttagataacaga

SEQ ID NO: 235631 - DNA, 19 bp, Homo sapiens
  siRNA target sequence for UBA2 (NM_005499.1,386-404).
gcccgaaaccatgttaata

SEQ ID NO: 235632 - DNA, 19 bp, Homo sapiens
  siRNA target sequence for UBA2 (NM_005499.1,389-407).
cgaaaccatgttaatagaa

SEQ ID NO: 235633 - DNA, 19 bp, Homo sapiens
  siRNA target sequence for UBA2 (NM_005499.1,454-472).
gtatcttggacaagtaact

SEQ ID NO: 235634 - DNA, 19 bp, Homo sapiens
  siRNA target sequence for UBA2 (NM_005499.1,458-476).
cttggacaagtaactacta

SEQ ID NO: 235635 - DNA, 19 bp, Homo sapiens
  siRNA target sequence for UBA2 (NM_005499.1,461-479).
ggacaagtaactactatca

SEQ ID NO: 235636 - DNA, 19 bp, Homo sapiens
  siRNA target sequence for UBA2 (NM_005499.1,484-502).
gggtgtgaccgagtgttat

SEQ ID NO: 235637 - DNA, 19 bp, Homo sapiens
  siRNA target sequence for UBA2 (NM_005499.1,486-504).
gtgtgaccgagtgttatga

SEQ ID NO: 235638 - DNA, 19 bp, Homo sapiens
  siRNA target sequence for UBA2 (NM_005499.1,488-506).
gtgaccgagtgttatgagt

SEQ ID NO: 235639 - DNA, 19 bp, Homo sapiens
  siRNA target sequence for UBA2 (NM_005499.1,517-535).
gccgacccagagaaccttt

SEQ ID NO: 235640 - DNA, 19 bp, Homo sapiens
  siRNA target sequence for UBA2 (NM_005499.1,536-554).
cctggctgtacaattcgta

SEQ ID NO: 235641 - DNA, 19 bp, Homo sapiens
  siRNA target sequence for UBA2 (NM_005499.1,537-555).
ctggctgtacaattcgtaa

SEQ ID NO: 235642 - DNA, 19 bp, Homo sapiens
  siRNA target sequence for UBA2 (NM_005499.1,541-559).
ctgtacaattcgtaacaca

SEQ ID NO: 235643 - DNA, 19 bp, Homo sapiens
  siRNA target sequence for UBA2 (NM_005499.1,564-582).
cagaacctatacattgcat

SEQ ID NO: 235644 - DNA, 19 bp, Homo sapiens
  siRNA target sequence for UBA2 (NM_005499.1,569-587).
cctatacattgcatcgttt

SEQ ID NO: 235645 - DNA, 19 bp, Homo sapiens
  siRNA target sequence for UBA2 (NM_005499.1,579-597).
gcatcgtttgggcaaagta

SEQ ID NO: 235646 - DNA, 19 bp, Homo sapiens
  siRNA target sequence for UBA2 (NM_005499.1,584-602).
gtttgggcaaagtacttgt

SEQ ID NO: 235647 - DNA, 19 bp, Homo sapiens
  siRNA target sequence for UBA2 (NM_005499.1,697-715).
cagagctagagcatctaat

SEQ ID NO: 235648 - DNA, 19 bp, Homo sapiens
  siRNA target sequence for UBA2 (NM_005499.1,699-717).
gagctagagcatctaatga

SEQ ID NO: 235649 - DNA, 19 bp, Homo sapiens
  siRNA target sequence for UBA2 (NM_005499.1,719-737).
gatggtgacattaaacgta

SEQ ID NO: 235650 - DNA, 19 bp, Homo sapiens
  siRNA target sequence for UBA2 (NM_005499.1,722-740).
ggtgacattaaacgtattt

SEQ ID NO: 235651 - DNA, 19 bp, Homo sapiens
  siRNA target sequence for UBA2 (NM_005499.1,754-772).
ggctaaatcaactggatat

SEQ ID NO: 235652 - DNA, 19 bp, Homo sapiens
  siRNA target sequence for UBA2 (NM_005499.1,765-783).
ctggatatgatccagttaa

SEQ ID NO: 235653 - DNA, 19 bp, Homo sapiens
  siRNA target sequence for UBA2 (NM_005499.1,776-794).
ccagttaaactttttacca

SEQ ID NO: 235654 - DNA, 19 bp, Homo sapiens
  siRNA target sequence for UBA2 (NM_005499.1,806-824).
gatgacatcaggtatctgt

SEQ ID NO: 235655 - DNA, 19 bp, Homo sapiens
  siRNA target sequence for UBA2 (NM_005499.1,868-886).
gttggactgggctgaagta

SEQ ID NO: 235656 - DNA, 19 bp, Homo sapiens
  siRNA target sequence for UBA2 (NM_005499.1,871-889).
ggactgggctgaagtacaa

SEQ ID NO: 235657 - DNA, 19 bp, Homo sapiens
  siRNA target sequence for UBA2 (NM_005499.1,906-924).
cgaatgcatcagatcaaca

SEQ ID NO: 235658 - DNA, 19 bp, Homo sapiens
  siRNA target sequence for UBA2 (NM_005499.1,952-970).
ccagcaggttctagatgta

SEQ ID NO: 235659 - DNA, 19 bp, Homo sapiens
  siRNA target sequence for UBA2 (NM_005499.1,973-991).
gagctatgcacgtcttttt

SEQ ID NO: 235660 - DNA, 19 bp, Homo sapiens
  siRNA target sequence for UBA2 (NM_005499.1,976-994).
ctatgcacgtcttttttca

SEQ ID NO: 235661 - DNA, 19 bp, Homo sapiens
  siRNA target sequence for UBA2 (NM_005499.1,980-998).
gcacgtcttttttcaaaga

SEQ ID NO: 235662 - DNA, 19 bp, Homo sapiens
  siRNA target sequence for UBA2 (NM_005499.1,993-1011).
caaagagcatcgagacttt

SEQ ID NO: 235663 - DNA, 19 bp, Homo sapiens
  siRNA target sequence for UBA2 (NM_005499.1,1004-1022).
gagactttgagagttcatt

SEQ ID NO: 235664 - DNA, 19 bp, Homo sapiens
  siRNA target sequence for UBA2 (NM_005499.1,1006-1024).
gactttgagagttcattta

SEQ ID NO: 235665 - DNA, 19 bp, Homo sapiens
  siRNA target sequence for UBA2 (NM_005499.1,1014-1032).
gagttcatttagcagaaaa

SEQ ID NO: 235666 - DNA, 19 bp, Homo sapiens
  siRNA target sequence for UBA2 (NM_005499.1,1037-1055).
gatggagctgagctcatat

SEQ ID NO: 235667 - DNA, 19 bp, Homo sapiens
  siRNA target sequence for UBA2 (NM_005499.1,1067-1085).
gacccatctgcaatggatt

SEQ ID NO: 235668 - DNA, 19 bp, Homo sapiens
  siRNA target sequence for UBA2 (NM_005499.1,1100-1118).
gcaaacctcaggatgcata

SEQ ID NO: 235669 - DNA, 19 bp, Homo sapiens
  siRNA target sequence for UBA2 (NM_005499.1,1108-1126).
caggatgcatattttcagt

SEQ ID NO: 235670 - DNA, 19 bp, Homo sapiens
  siRNA target sequence for UBA2 (NM_005499.1,1138-1156).
gagtagatttgatatcaaa

SEQ ID NO: 235671 - DNA, 19 bp, Homo sapiens
  siRNA target sequence for UBA2 (NM_005499.1,1158-1176).
caatggcagggaacattat

SEQ ID NO: 235672 - DNA, 19 bp, Homo sapiens
  siRNA target sequence for UBA2 (NM_005499.1,1162-1180).
ggcagggaacattattcct

SEQ ID NO: 235673 - DNA, 19 bp, Homo sapiens
  siRNA target sequence for UBA2 (NM_005499.1,1335-1353).
ccaaccccaattgttatgt

SEQ ID NO: 235674 - DNA, 19 bp, Homo sapiens
  siRNA target sequence for UBA2 (NM_005499.1,1336-1354).
caaccccaattgttatgta

SEQ ID NO: 235675 - DNA, 19 bp, Homo sapiens
  siRNA target sequence for UBA2 (NM_005499.1,1339-1357).
ccccaattgttatgtatgt

SEQ ID NO: 235676 - DNA, 19 bp, Homo sapiens
  siRNA target sequence for UBA2 (NM_005499.1,1381-1399).
gcggctgaatgtccataaa

SEQ ID NO: 235677 - DNA, 19 bp, Homo sapiens
  siRNA target sequence for UBA2 (NM_005499.1,1413-1431).
ccttacaagacaagatagt

SEQ ID NO: 235678 - DNA, 19 bp, Homo sapiens
  siRNA target sequence for UBA2 (NM_005499.1,1484-1502).
ggaacaatcctaatatctt

SEQ ID NO: 235679 - DNA, 19 bp, Homo sapiens
  siRNA target sequence for UBA2 (NM_005499.1,1510-1528).
gggagagacggaagctaat

SEQ ID NO: 235680 - DNA, 19 bp, Homo sapiens
  siRNA target sequence for UBA2 (NM_005499.1,1511-1529).
ggagagacggaagctaata

SEQ ID NO: 235681 - DNA, 19 bp, Homo sapiens
  siRNA target sequence for UBA2 (NM_005499.1,1512-1530).
gagagacggaagctaataa

SEQ ID NO: 235682 - DNA, 19 bp, Homo sapiens
  siRNA target sequence for UBA2 (NM_005499.1,1518-1536).
cggaagctaataatcacaa

SEQ ID NO: 235683 - DNA, 19 bp, Homo sapiens
  siRNA target sequence for UBA2 (NM_005499.1,1523-1541).
gctaataatcacaagaagt

SEQ ID NO: 235684 - DNA, 19 bp, Homo sapiens
  siRNA target sequence for UBA2 (NM_005499.1,1543-1561).
gtcagaatttggaattaga

SEQ ID NO: 235685 - DNA, 19 bp, Homo sapiens
  siRNA target sequence for UBA2 (NM_005499.1,1588-1606).
cttcctccaggactatact

SEQ ID NO: 235686 - DNA, 19 bp, Homo sapiens
  siRNA target sequence for UBA2 (NM_005499.1,1591-1609).
cctccaggactatacttta

SEQ ID NO: 235687 - DNA, 19 bp, Homo sapiens
  siRNA target sequence for UBA2 (NM_005499.1,1592-1610).
ctccaggactatactttat

SEQ ID NO: 235688 - DNA, 19 bp, Homo sapiens
  siRNA target sequence for UBA2 (NM_005499.1,1598-1616).
gactatactttattgatca

SEQ ID NO: 235689 - DNA, 19 bp, Homo sapiens
  siRNA target sequence for UBA2 (NM_005499.1,1612-1630).
gatcaacatccttcatagt

SEQ ID NO: 235690 - DNA, 19 bp, Homo sapiens
  siRNA target sequence for UBA2 (NM_005499.1,1615-1633).
caacatccttcatagtgaa

SEQ ID NO: 235691 - DNA, 19 bp, Homo sapiens
  siRNA target sequence for UBA2 (NM_005499.1,1645-1663).
ggacgttgaatttgaagtt

SEQ ID NO: 235692 - DNA, 19 bp, Homo sapiens
  siRNA target sequence for UBA2 (NM_005499.1,1774-1792).
gcaagatgacgttctcata

SEQ ID NO: 235693 - DNA, 19 bp, Homo sapiens
  siRNA target sequence for UBA2 (NM_005499.1,1781-1799).
gacgttctcatagttgatt

SEQ ID NO: 235694 - DNA, 19 bp, Homo sapiens
  siRNA target sequence for UBA2 (NM_005499.1,1848-1866).
gaagccgcaagaggaaatt

SEQ ID NO: 235695 - DNA, 19 bp, Homo sapiens
  siRNA target sequence for UBA2 (NM_005499.1,1890-1908).
caaagaggtcacgtataga

SEQ ID NO: 235696 - DNA, 19 bp, Homo sapiens
  siRNA target sequence for UBA2 (NM_005499.1,1896-1914).
ggtcacgtatagaacagaa

SEQ ID NO: 235697 - DNA, 19 bp, Homo sapiens
  siRNA target sequence for UBA2 (NM_005499.1,1922-1940).
cttgatgatgtcatagcat

SEQ ID NO: 235698 - DNA, 19 bp, Homo sapiens
  siRNA target sequence for ABHD2 (NM_007011.4,757-775).
gtgatcgtccggtgtttga

SEQ ID NO: 235699 - DNA, 19 bp, Homo sapiens
  siRNA target sequence for ABHD2 (NM_007011.4,882-900).
gttgatctgggggaaaagt

SEQ ID NO: 235700 - DNA, 19 bp, Homo sapiens
  siRNA target sequence for ABHD2 (NM_007011.4,942-960).
gaggtcgccacatccttat

SEQ ID NO: 235701 - DNA, 19 bp, Homo sapiens
  siRNA target sequence for ABHD2 (NM_007011.4,964-982).
caccggaagttcatcacta

SEQ ID NO: 235702 - DNA, 19 bp, Homo sapiens
  siRNA target sequence for ABHD2 (NM_007011.4,967-985).
cggaagttcatcactatgt

SEQ ID NO: 235703 - DNA, 19 bp, Homo sapiens
  siRNA target sequence for ABHD2 (NM_007011.4,969-987).
gaagttcatcactatgtct

SEQ ID NO: 235704 - DNA, 19 bp, Homo sapiens
  siRNA target sequence for ABHD2 (NM_007011.4,1033-1051).
cactgtgttggagatgata

SEQ ID NO: 235705 - DNA, 19 bp, Homo sapiens
  siRNA target sequence for ABHD2 (NM_007011.4,1084-1102).
cacagcgagaagcaataca

SEQ ID NO: 235706 - DNA, 19 bp, Homo sapiens
  siRNA target sequence for ABHD2 (NM_007011.4,1114-1132).
gttgactacgcccagaaaa

SEQ ID NO: 235707 - DNA, 19 bp, Homo sapiens
  siRNA target sequence for ABHD2 (NM_007011.4,1168-1186).
gccctgcccaacattgaat

SEQ ID NO: 235708 - DNA, 19 bp, Homo sapiens
  siRNA target sequence for ABHD2 (NM_007011.4,1169-1187).
ccctgcccaacattgaatt

SEQ ID NO: 235709 - DNA, 19 bp, Homo sapiens
  siRNA target sequence for ABHD2 (NM_007011.4,1171-1189).
ctgcccaacattgaattga

SEQ ID NO: 235710 - DNA, 19 bp, Homo sapiens
  siRNA target sequence for ABHD2 (NM_007011.4,1293-1311).
cagcctgggtggtaacatt

SEQ ID NO: 235711 - DNA, 19 bp, Homo sapiens
  siRNA target sequence for ABHD2 (NM_007011.4,1295-1313).
gcctgggtggtaacattgt

SEQ ID NO: 235712 - DNA, 19 bp, Homo sapiens
  siRNA target sequence for ABHD2 (NM_007011.4,1297-1315).
ctgggtggtaacattgtgt

SEQ ID NO: 235713 - DNA, 19 bp, Homo sapiens
  siRNA target sequence for ABHD2 (NM_007011.4,1334-1352).
ctcaggcaaaccaagagaa

SEQ ID NO: 235714 - DNA, 19 bp, Homo sapiens
  siRNA target sequence for ABHD2 (NM_007011.4,1498-1516).
ctttttggagaccatgtta

SEQ ID NO: 235715 - DNA, 19 bp, Homo sapiens
  siRNA target sequence for ABHD2 (NM_007011.4,1568-1586).
catccctgatgcagattga

SEQ ID NO: 235716 - DNA, 19 bp, Homo sapiens
  siRNA target sequence for ABHD2 (NM_007011.4,1657-1675).
cggtacctgcacaggattt

SEQ ID NO: 235717 - DNA, 19 bp, Homo sapiens
  siRNA target sequence for ABHD2 (NM_007011.4,1658-1676).
ggtacctgcacaggattta

SEQ ID NO: 235718 - DNA, 19 bp, Homo sapiens
  siRNA target sequence for ABHD2 (NM_007011.4,1659-1677).
gtacctgcacaggatttat

SEQ ID NO: 235719 - DNA, 19 bp, Homo sapiens
  siRNA target sequence for ABHD2 (NM_007011.4,1708-1726).
gatccgttggtgcatgaaa

SEQ ID NO: 235720 - DNA, 19 bp, Homo sapiens
  siRNA target sequence for ABHD2 (NM_007011.4,1712-1730).
cgttggtgcatgaaagtct

SEQ ID NO: 235721 - DNA, 19 bp, Homo sapiens
  siRNA target sequence for ABHD2 (NM_007011.4,1713-1731).
gttggtgcatgaaagtctt

SEQ ID NO: 235722 - DNA, 19 bp, Homo sapiens
  siRNA target sequence for ABHD2 (NM_007011.4,1716-1734).
ggtgcatgaaagtcttcta

SEQ ID NO: 235723 - DNA, 19 bp, Homo sapiens
  siRNA target sequence for ABHD2 (NM_007011.4,1889-1907).
gccaatgggagcgtaacaa

SEQ ID NO: 235724 - DNA, 19 bp, Homo sapiens
  siRNA target sequence for ABHD2 (NM_007011.4,1891-1909).
caatgggagcgtaacaagt

SEQ ID NO: 235725 - DNA, 19 bp, Homo sapiens
  siRNA target sequence for ABHD3 (NM_138340.3,224-242).
gtcgcttatgccttctact

SEQ ID NO: 235726 - DNA, 19 bp, Homo sapiens
  siRNA target sequence for ABHD3 (NM_138340.3,258-276).
ccaagaaaccccagttagt

SEQ ID NO: 235727 - DNA, 19 bp, Homo sapiens
  siRNA target sequence for ABHD3 (NM_138340.3,316-334).
ctgtcccgtggttacagaa

SEQ ID NO: 235728 - DNA, 19 bp, Homo sapiens
  siRNA target sequence for ABHD3 (NM_138340.3,416-434).
cagtacaggaatgaactta

SEQ ID NO: 235729 - DNA, 19 bp, Homo sapiens
  siRNA target sequence for ABHD3 (NM_138340.3,418-436).
gtacaggaatgaacttatt

SEQ ID NO: 235730 - DNA, 19 bp, Homo sapiens
  siRNA target sequence for ABHD3 (NM_138340.3,462-480).
cactggactggtttgataa

SEQ ID NO: 235731 - DNA, 19 bp, Homo sapiens
  siRNA target sequence for ABHD3 (NM_138340.3,466-484).
ggactggtttgataatgat

SEQ ID NO: 235732 - DNA, 19 bp, Homo sapiens
  siRNA target sequence for ABHD3 (NM_138340.3,467-485).
gactggtttgataatgata

SEQ ID NO: 235733 - DNA, 19 bp, Homo sapiens
  siRNA target sequence for ABHD3 (NM_138340.3,472-490).
gtttgataatgataacagt

SEQ ID NO: 235734 - DNA, 19 bp, Homo sapiens
  siRNA target sequence for ABHD3 (NM_138340.3,507-525).
ccagcaccagacctactat

SEQ ID NO: 235735 - DNA, 19 bp, Homo sapiens
  siRNA target sequence for ABHD3 (NM_138340.3,510-528).
gcaccagacctactatctt

SEQ ID NO: 235736 - DNA, 19 bp, Homo sapiens
  siRNA target sequence for ABHD3 (NM_138340.3,511-529).
caccagacctactatctta

SEQ ID NO: 235737 - DNA, 19 bp, Homo sapiens
  siRNA target sequence for ABHD3 (NM_138340.3,516-534).
gacctactatcttattgtt

SEQ ID NO: 235738 - DNA, 19 bp, Homo sapiens
  siRNA target sequence for ABHD3 (NM_138340.3,552-570).
caagcaaggagtcatatat

SEQ ID NO: 235739 - DNA, 19 bp, Homo sapiens
  siRNA target sequence for ABHD3 (NM_138340.3,555-573).
gcaaggagtcatatatcct

SEQ ID NO: 235740 - DNA, 19 bp, Homo sapiens
  siRNA target sequence for ABHD3 (NM_138340.3,652-670).
cttgacgccaaggacttat

SEQ ID NO: 235741 - DNA, 19 bp, Homo sapiens
  siRNA target sequence for ABHD3 (NM_138340.3,655-673).
gacgccaaggacttattgt

SEQ ID NO: 235742 - DNA, 19 bp, Homo sapiens
  siRNA target sequence for ABHD3 (NM_138340.3,658-676).
gccaaggacttattgttgt

SEQ ID NO: 235743 - DNA, 19 bp, Homo sapiens
  siRNA target sequence for ABHD3 (NM_138340.3,699-717).
cagttattcaccatgtaca

SEQ ID NO: 235744 - DNA, 19 bp, Homo sapiens
  siRNA target sequence for ABHD3 (NM_138340.3,791-809).
ggcaaaattgggtccaaaa

SEQ ID NO: 235745 - DNA, 19 bp, Homo sapiens
  siRNA target sequence for ABHD3 (NM_138340.3,943-961).
gcaccgacatatgtttgta

SEQ ID NO: 235746 - DNA, 19 bp, Homo sapiens
  siRNA target sequence for ABHD3 (NM_138340.3,944-962).
caccgacatatgtttgtaa

SEQ ID NO: 235747 - DNA, 19 bp, Homo sapiens
  siRNA target sequence for ABHD3 (NM_138340.3,983-1001).
gtcatgaaggctaaatcca

SEQ ID NO: 235748 - DNA, 19 bp, Homo sapiens
  siRNA target sequence for ABHD3 (NM_138340.3,1009-1027).
gtttgataagcgattcact

SEQ ID NO: 235749 - DNA, 19 bp, Homo sapiens
  siRNA target sequence for ABHD3 (NM_138340.3,1020-1038).
gattcacttcagtcatgtt

SEQ ID NO: 235750 - DNA, 19 bp, Homo sapiens
  siRNA target sequence for ABHD3 (NM_138340.3,1041-1059).
gataccaaacaattgatga

SEQ ID NO: 235751 - DNA, 19 bp, Homo sapiens
  siRNA target sequence for ABHD3 (NM_138340.3,1093-1111).
gaagtcagtaggaattcca

SEQ ID NO: 235752 - DNA, 19 bp, Homo sapiens
  siRNA target sequence for ABHD3 (NM_138340.3,1150-1168).
cagtcatgctattccaata

SEQ ID NO: 235753 - DNA, 19 bp, Homo sapiens
  siRNA target sequence for ABHD3 (NM_138340.3,1193-1211).
gttgctttggtccttactt

SEQ ID NO: 235754 - DNA, 19 bp, Homo sapiens
  siRNA target sequence for ABHD3 (NM_138340.3,1196-1214).
gctttggtccttacttctt

SEQ ID NO: 235755 - DNA, 19 bp, Homo sapiens
  siRNA target sequence for ABHD3 (NM_138340.3,1218-1236).
gaggccatattggttttct

SEQ ID NO: 235756 - DNA, 19 bp, Homo sapiens
  siRNA target sequence for ABHD3 (NM_138340.3,1250-1268).
ccaagacagtccacttaca

SEQ ID NO: 235757 - DNA, 19 bp, Homo sapiens
  siRNA target sequence for ABHD3 (NM_138340.3,1271-1289).
gatcgtgtcttcaagcaat

SEQ ID NO: 235758 - DNA, 19 bp, Homo sapiens
  siRNA target sequence for ABHD3 (NM_138340.3,1275-1293).
gtgtcttcaagcaatttgt

SEQ ID NO: 235759 - DNA, 19 bp, Homo sapiens
  siRNA target sequence for ABHD3 (NM_138340.3,1303-1321).
ggttgagcatggacatgaa

SEQ ID NO: 235760 - DNA, 19 bp, Homo sapiens
  siRNA target sequence for ACP33 (NM_016630.2,209-227).
ctggtttagaggtacagtt

SEQ ID NO: 235761 - DNA, 19 bp, Homo sapiens
  siRNA target sequence for ACP33 (NM_016630.2,219-237).
ggtacagttccccttaaaa

SEQ ID NO: 235762 - DNA, 19 bp, Homo sapiens
  siRNA target sequence for ACP33 (NM_016630.2,220-238).
gtacagttccccttaaaaa

SEQ ID NO: 235763 - DNA, 19 bp, Homo sapiens
  siRNA target sequence for ACP33 (NM_016630.2,255-273).
gatgacagtaagatatggt

SEQ ID NO: 235764 - DNA, 19 bp, Homo sapiens
  siRNA target sequence for ACP33 (NM_016630.2,462-480).
gaccatttacaattggata

SEQ ID NO: 235765 - DNA, 19 bp, Homo sapiens
  siRNA target sequence for ACP33 (NM_016630.2,520-538).
cccagaaatttgctgaata

SEQ ID NO: 235766 - DNA, 19 bp, Homo sapiens
  siRNA target sequence for ACP33 (NM_016630.2,522-540).
cagaaatttgctgaataca

SEQ ID NO: 235767 - DNA, 19 bp, Homo sapiens
  siRNA target sequence for ACP33 (NM_016630.2,524-542).
gaaatttgctgaatacact

SEQ ID NO: 235768 - DNA, 19 bp, Homo sapiens
  siRNA target sequence for ACP33 (NM_016630.2,556-574).
gagtccattccctaatcct

SEQ ID NO: 235769 - DNA, 19 bp, Homo sapiens
  siRNA target sequence for ACP33 (NM_016630.2,642-660).
cctgcatttatgctcaaaa

SEQ ID NO: 235770 - DNA, 19 bp, Homo sapiens
  siRNA target sequence for ACP33 (NM_016630.2,708-726).
gctgatgccattgatttca

SEQ ID NO: 235771 - DNA, 19 bp, Homo sapiens
  siRNA target sequence for ACP33 (NM_016630.2,728-746).
ggtagacaggctagaaagt

SEQ ID NO: 235772 - DNA, 19 bp, Homo sapiens
  siRNA target sequence for ACP33 (NM_016630.2,759-777).
gaactggcttcaagactta

SEQ ID NO: 235773 - DNA, 19 bp, Homo sapiens
  siRNA target sequence for ACP33 (NM_016630.2,774-792).
cttaccttgaattgtcaaa

SEQ ID NO: 235774 - DNA, 19 bp, Homo sapiens
  siRNA target sequence for ACP33 (NM_016630.2,819-837).
cgggacatacctgtaacta

SEQ ID NO: 235775 - DNA, 19 bp, Homo sapiens
  siRNA target sequence for ACP33 (NM_016630.2,820-838).
gggacatacctgtaactat

SEQ ID NO: 235776 - DNA, 19 bp, Homo sapiens
  siRNA target sequence for ACP33 (NM_016630.2,822-840).
gacatacctgtaactatta

SEQ ID NO: 235777 - DNA, 19 bp, Homo sapiens
  siRNA target sequence for ACP33 (NM_016630.2,852-870).
gatcagagtgcgctttcaa

SEQ ID NO: 235778 - DNA, 19 bp, Homo sapiens
  siRNA target sequence for ACP33 (NM_016630.2,863-881).
gctttcaactgaagctaaa

SEQ ID NO: 235779 - DNA, 19 bp, Homo sapiens
  siRNA target sequence for ACP33 (NM_016630.2,890-908).
gtacaagctgtatcctaat

SEQ ID NO: 235780 - DNA, 19 bp, Homo sapiens
  siRNA target sequence for APPBP1 (NM_003905.2,158-176).
gctcatgtttgcctaataa

SEQ ID NO: 235781 - DNA, 19 bp, Homo sapiens
  siRNA target sequence for APPBP1 (NM_003905.2,215-233).
gtactaccaggtattggtt

SEQ ID NO: 235782 - DNA, 19 bp, Homo sapiens
  siRNA target sequence for APPBP1 (NM_003905.2,330-348).
ctgccatggaattcttaca

SEQ ID NO: 235783 - DNA, 19 bp, Homo sapiens
  siRNA target sequence for APPBP1 (NM_003905.2,361-379).
cgatgtctctggaagtttt

SEQ ID NO: 235784 - DNA, 19 bp, Homo sapiens
  siRNA target sequence for APPBP1 (NM_003905.2,427-445).
ctgtaggtttactgttgta

SEQ ID NO: 235785 - DNA, 19 bp, Homo sapiens
  siRNA target sequence for APPBP1 (NM_003905.2,608-626).
gaggatctacgactagata

SEQ ID NO: 235786 - DNA, 19 bp, Homo sapiens
  siRNA target sequence for APPBP1 (NM_003905.2,650-668).
cattttcagtcctatgatt

SEQ ID NO: 235787 - DNA, 19 bp, Homo sapiens
  siRNA target sequence for APPBP1 (NM_003905.2,660-678).
cctatgatttggatcatat

SEQ ID NO: 235788 - DNA, 19 bp, Homo sapiens
  siRNA target sequence for APPBP1 (NM_003905.2,694-712).
cagtcatactccatggatt

SEQ ID NO: 235789 - DNA, 19 bp, Homo sapiens
  siRNA target sequence for APPBP1 (NM_003905.2,698-716).
catactccatggattgtga

SEQ ID NO: 235790 - DNA, 19 bp, Homo sapiens
  siRNA target sequence for APPBP1 (NM_003905.2,708-726).
ggattgtgatcatagctaa

SEQ ID NO: 235791 - DNA, 19 bp, Homo sapiens
  siRNA target sequence for APPBP1 (NM_003905.2,709-727).
gattgtgatcatagctaaa

SEQ ID NO: 235792 - DNA, 19 bp, Homo sapiens
  siRNA target sequence for APPBP1 (NM_003905.2,713-731).
gtgatcatagctaaatatt

SEQ ID NO: 235793 - DNA, 19 bp, Homo sapiens
  siRNA target sequence for APPBP1 (NM_003905.2,742-760).
gtatagtgaaacaaatgga

SEQ ID NO: 235794 - DNA, 19 bp, Homo sapiens
  siRNA target sequence for APPBP1 (NM_003905.2,753-771).
caaatggacgaatacctaa

SEQ ID NO: 235795 - DNA, 19 bp, Homo sapiens
  siRNA target sequence for APPBP1 (NM_003905.2,758-776).
ggacgaatacctaaaacgt

SEQ ID NO: 235796 - DNA, 19 bp, Homo sapiens
  siRNA target sequence for APPBP1 (NM_003905.2,759-777).
gacgaatacctaaaacgta

SEQ ID NO: 235797 - DNA, 19 bp, Homo sapiens
  siRNA target sequence for APPBP1 (NM_003905.2,761-779).
cgaatacctaaaacgtata

SEQ ID NO: 235798 - DNA, 19 bp, Homo sapiens
  siRNA target sequence for APPBP1 (NM_003905.2,788-806).
gaggacttcagagatttga

SEQ ID NO: 235799 - DNA, 19 bp, Homo sapiens
  siRNA target sequence for APPBP1 (NM_003905.2,907-925).
gatcccaagcagtattgaa

SEQ ID NO: 235800 - DNA, 19 bp, Homo sapiens
  siRNA target sequence for APPBP1 (NM_003905.2,910-928).
cccaagcagtattgaagat

SEQ ID NO: 235801 - DNA, 19 bp, Homo sapiens
  siRNA target sequence for APPBP1 (NM_003905.2,938-956).
gatgatcgctgcataaata

SEQ ID NO: 235802 - DNA, 19 bp, Homo sapiens
  siRNA target sequence for APPBP1 (NM_003905.2,941-959).
gatcgctgcataaatatca

SEQ ID NO: 235803 - DNA, 19 bp, Homo sapiens
  siRNA target sequence for APPBP1 (NM_003905.2,989-1007).
gctcgtgccttaaaggaat

SEQ ID NO: 235804 - DNA, 19 bp, Homo sapiens
  siRNA target sequence for APPBP1 (NM_003905.2,1021-1039).
gggtcaaggaaatttacct

SEQ ID NO: 235805 - DNA, 19 bp, Homo sapiens
  siRNA target sequence for APPBP1 (NM_003905.2,1044-1062).
gaggcacaattcctgatat

SEQ ID NO: 235806 - DNA, 19 bp, Homo sapiens
  siRNA target sequence for APPBP1 (NM_003905.2,1067-1085).
gcagattcaggcaaatata

SEQ ID NO: 235807 - DNA, 19 bp, Homo sapiens
  siRNA target sequence for APPBP1 (NM_003905.2,1099-1117).
cgtttaccgtgaaaaagca

SEQ ID NO: 235808 - DNA, 19 bp, Homo sapiens
  siRNA target sequence for APPBP1 (NM_003905.2,1100-1118).
gtttaccgtgaaaaagcaa

SEQ ID NO: 235809 - DNA, 19 bp, Homo sapiens
  siRNA target sequence for APPBP1 (NM_003905.2,1128-1146).
ctgccgctgtgggtaatca

SEQ ID NO: 235810 - DNA, 19 bp, Homo sapiens
  siRNA target sequence for APPBP1 (NM_003905.2,1131-1149).
ccgctgtgggtaatcatgt

SEQ ID NO: 235811 - DNA, 19 bp, Homo sapiens
  siRNA target sequence for APPBP1 (NM_003905.2,1140-1158).
gtaatcatgttgccaaatt

SEQ ID NO: 235812 - DNA, 19 bp, Homo sapiens
  siRNA target sequence for APPBP1 (NM_003905.2,1243-1261).
ggtaagatgtcgatcctta

SEQ ID NO: 235813 - DNA, 19 bp, Homo sapiens
  siRNA target sequence for APPBP1 (NM_003905.2,1274-1292).
ggtttggatacaattaaca

SEQ ID NO: 235814 - DNA, 19 bp, Homo sapiens
  siRNA target sequence for APPBP1 (NM_003905.2,1312-1330).
catggacaatccagataat

SEQ ID NO: 235815 - DNA, 19 bp, Homo sapiens
  siRNA target sequence for APPBP1 (NM_003905.2,1315-1333).
ggacaatccagataatgaa

SEQ ID NO: 235816 - DNA, 19 bp, Homo sapiens
  siRNA target sequence for APPBP1 (NM_003905.2,1351-1369).
gttacgggctgttgataga

SEQ ID NO: 235817 - DNA, 19 bp, Homo sapiens
  siRNA target sequence for APPBP1 (NM_003905.2,1357-1375).
ggctgttgatagatttcat

SEQ ID NO: 235818 - DNA, 19 bp, Homo sapiens
  siRNA target sequence for APPBP1 (NM_003905.2,1358-1376).
gctgttgatagatttcata

SEQ ID NO: 235819 - DNA, 19 bp, Homo sapiens
  siRNA target sequence for APPBP1 (NM_003905.2,1424-1442).
gatataggaaagttgaagt

SEQ ID NO: 235820 - DNA, 19 bp, Homo sapiens
  siRNA target sequence for APPBP1 (NM_003905.2,1456-1474).
cttccttcaggaatatggt

SEQ ID NO: 235821 - DNA, 19 bp, Homo sapiens
  siRNA target sequence for APPBP1 (NM_003905.2,1460-1478).
cttcaggaatatggtttat

SEQ ID NO: 235822 - DNA, 19 bp, Homo sapiens
  siRNA target sequence for APPBP1 (NM_003905.2,1507-1525).
cgaattttgccgatatgga

SEQ ID NO: 235823 - DNA, 19 bp, Homo sapiens
  siRNA target sequence for APPBP1 (NM_003905.2,1571-1589).
gctcaagaggtcatcaaaa

SEQ ID NO: 235824 - DNA, 19 bp, Homo sapiens
  siRNA target sequence for APPBP1 (NM_003905.2,1572-1590).
ctcaagaggtcatcaaaat

SEQ ID NO: 235825 - DNA, 19 bp, Homo sapiens
  siRNA target sequence for APPBP1 (NM_003905.2,1644-1662).
cacaaacttcagcaacttt

SEQ ID NO: 235826 - DNA, 19 bp, Homo sapiens
  siRNA target sequence for BAT5 (NM_021160.1,82-100).
cgggagagggactctgaaa

SEQ ID NO: 235827 - DNA, 19 bp, Homo sapiens
  siRNA target sequence for BAT5 (NM_021160.1,152-170).
ccagctcctgggatacgta

SEQ ID NO: 235828 - DNA, 19 bp, Homo sapiens
  siRNA target sequence for BAT5 (NM_021160.1,158-176).
cctgggatacgtactatca

SEQ ID NO: 235829 - DNA, 19 bp, Homo sapiens
  siRNA target sequence for BAT5 (NM_021160.1,226-244).
gtattctggtccatctctt

SEQ ID NO: 235830 - DNA, 19 bp, Homo sapiens
  siRNA target sequence for BAT5 (NM_021160.1,309-327).
ggtgccgttttctcactat

SEQ ID NO: 235831 - DNA, 19 bp, Homo sapiens
  siRNA target sequence for BAT5 (NM_021160.1,436-454).
cggaaccagtcttcagaaa

SEQ ID NO: 235832 - DNA, 19 bp, Homo sapiens
  siRNA target sequence for BAT5 (NM_021160.1,461-479).
ggcagcttgccaactacaa

SEQ ID NO: 235833 - DNA, 19 bp, Homo sapiens
  siRNA target sequence for BAT5 (NM_021160.1,469-487).
gccaactacaactttgact

SEQ ID NO: 235834 - DNA, 19 bp, Homo sapiens
  siRNA target sequence for BAT5 (NM_021160.1,928-946).
cccctggaagctggatatt

SEQ ID NO: 235835 - DNA, 19 bp, Homo sapiens
  siRNA target sequence for BAT5 (NM_021160.1,1128-1146).
gtcctacccagatgttagt

SEQ ID NO: 235836 - DNA, 19 bp, Homo sapiens
  siRNA target sequence for BAT5 (NM_021160.1,1155-1173).
cctggatgcctcctttgat

SEQ ID NO: 235837 - DNA, 19 bp, Homo sapiens
  siRNA target sequence for BAT5 (NM_021160.1,1236-1254).
cgtgaggcagcatctcaat

SEQ ID NO: 235838 - DNA, 19 bp, Homo sapiens
  siRNA target sequence for BAT5 (NM_021160.1,1241-1259).
ggcagcatctcaatctaaa

SEQ ID NO: 235839 - DNA, 19 bp, Homo sapiens
  siRNA target sequence for BAT5 (NM_021160.1,1468-1486).
ctggaggaagcctcaattt

SEQ ID NO: 235840 - DNA, 19 bp, Homo sapiens
  siRNA target sequence for BG1 (NM_015162.3,137-155).
gagccggcaggacatgatt

SEQ ID NO: 235841 - DNA, 19 bp, Homo sapiens
  siRNA target sequence for BG1 (NM_015162.3,139-157).
gccggcaggacatgattgt

SEQ ID NO: 235842 - DNA, 19 bp, Homo sapiens
  siRNA target sequence for BG1 (NM_015162.3,141-159).
cggcaggacatgattgtga

SEQ ID NO: 235843 - DNA, 19 bp, Homo sapiens
  siRNA target sequence for BG1 (NM_015162.3,367-385).
ctgtgcatcggatgttcta

SEQ ID NO: 235844 - DNA, 19 bp, Homo sapiens
  siRNA target sequence for BG1 (NM_015162.3,386-404).
cgaggccctggataagtat

SEQ ID NO: 235845 - DNA, 19 bp, Homo sapiens
  siRNA target sequence for BG1 (NM_015162.3,643-661).
gccagtacatcgcttatga

SEQ ID NO: 235846 - DNA, 19 bp, Homo sapiens
  siRNA target sequence for BG1 (NM_015162.3,645-663).
cagtacatcgcttatgact

SEQ ID NO: 235847 - DNA, 19 bp, Homo sapiens
  siRNA target sequence for BG1 (NM_015162.3,660-678).
gactgctgcgccaatgtca

SEQ ID NO: 235848 - DNA, 19 bp, Homo sapiens
  siRNA target sequence for BG1 (NM_015162.3,741-759).
ctaaaggcagtcgtgatat

SEQ ID NO: 235849 - DNA, 19 bp, Homo sapiens
  siRNA target sequence for BG1 (NM_015162.3,748-766).
cagtcgtgatatataaaga

SEQ ID NO: 235850 - DNA, 19 bp, Homo sapiens
  siRNA target sequence for BG1 (NM_015162.3,1185-1203).
cgggtatgggagaagatca

SEQ ID NO: 235851 - DNA, 19 bp, Homo sapiens
  siRNA target sequence for BG1 (NM_015162.3,1186-1204).
gggtatgggagaagatcat

SEQ ID NO: 235852 - DNA, 19 bp, Homo sapiens
  siRNA target sequence for BG1 (NM_015162.3,1237-1255).
gcttcatccggcgaaagat

SEQ ID NO: 235853 - DNA, 19 bp, Homo sapiens
  siRNA target sequence for BG1 (NM_015162.3,1749-1767).
cgcctcaaagaattaatca

SEQ ID NO: 235854 - DNA, 19 bp, Homo sapiens
  siRNA target sequence for BG1 (NM_015162.3,1918-1936).
cctctgaccagactgataa

SEQ ID NO: 235855 - DNA, 19 bp, Homo sapiens
  siRNA target sequence for BG1 (NM_015162.3,1919-1937).
ctctgaccagactgataat

SEQ ID NO: 235856 - DNA, 19 bp, Homo sapiens
  siRNA target sequence for BG1 (NM_015162.3,1921-1939).
ctgaccagactgataatct

SEQ ID NO: 235857 - DNA, 19 bp, Homo sapiens
  siRNA target sequence for BG1 (NM_015162.3,1988-2006).
cacagtgtccgagatcata

SEQ ID NO: 235858 - DNA, 19 bp, Homo sapiens
  siRNA target sequence for BG1 (NM_015162.3,1996-2014).
ccgagatcatagagaagaa

SEQ ID NO: 235859 - DNA, 19 bp, Homo sapiens
  siRNA target sequence for BG1 (NM_015162.3,2047-2065).
ggatccggagggtcaacat

SEQ ID NO: 235860 - DNA, 19 bp, Homo sapiens
  siRNA target sequence for BG1 (NM_015162.3,2141-2159).
gttgggtcccacgatgaaa

SEQ ID NO: 235861 - DNA, 19 bp, Homo sapiens
  siRNA target sequence for BG1 (NM_015162.3,2145-2163).
ggtcccacgatgaaactga

SEQ ID NO: 235862 - DNA, 19 bp, Homo sapiens
  siRNA target sequence for BG1 (NM_015162.3,2146-2164).
gtcccacgatgaaactgaa

SEQ ID NO: 235863 - DNA, 19 bp, Homo sapiens
  siRNA target sequence for BG1 (NM_015162.3,2194-2212).
gtatcattgactcctttta

SEQ ID NO: 235864 - DNA, 19 bp, Homo sapiens
  siRNA target sequence for BGR (NM_030924.2,257-275).
gactcaagaaggagctaaa

SEQ ID NO: 235865 - DNA, 19 bp, Homo sapiens
  siRNA target sequence for BGR (NM_030924.2,279-297).
cttgaagtagacatgaata

SEQ ID NO: 235866 - DNA, 19 bp, Homo sapiens
  siRNA target sequence for BGR (NM_030924.2,347-365).
ccttctgaggctatccaaa

SEQ ID NO: 235867 - DNA, 19 bp, Homo sapiens
  siRNA target sequence for BGR (NM_030924.2,422-440).
caaccgatttggaacttat

SEQ ID NO: 235868 - DNA, 19 bp, Homo sapiens
  siRNA target sequence for BGR (NM_030924.2,425-443).
ccgatttggaacttatcca

SEQ ID NO: 235869 - DNA, 19 bp, Homo sapiens
  siRNA target sequence for BGR (NM_030924.2,510-528).
cggaaggctgcaaaatcct

SEQ ID NO: 235870 - DNA, 19 bp, Homo sapiens
  siRNA target sequence for BGR (NM_030924.2,511-529).
ggaaggctgcaaaatcctt

SEQ ID NO: 235871 - DNA, 19 bp, Homo sapiens
  siRNA target sequence for BGR (NM_030924.2,550-568).
gtttccacggagttggtat

SEQ ID NO: 235872 - DNA, 19 bp, Homo sapiens
  siRNA target sequence for BGR (NM_030924.2,625-643).
ggggtctttgtgttggtat

SEQ ID NO: 235873 - DNA, 19 bp, Homo sapiens
  siRNA target sequence for BGR (NM_030924.2,626-644).
gggtctttgtgttggtatt

SEQ ID NO: 235874 - DNA, 19 bp, Homo sapiens
  siRNA target sequence for BGR (NM_030924.2,628-646).
gtctttgtgttggtattta

SEQ ID NO: 235875 - DNA, 19 bp, Homo sapiens
  siRNA target sequence for BGR (NM_030924.2,1052-1070).
cccactcagccatattgca

SEQ ID NO: 235876 - DNA, 19 bp, Homo sapiens
  siRNA target sequence for BGR (NM_030924.2,1088-1106).
ctgggtacccataaagatt

SEQ ID NO: 235877 - DNA, 19 bp, Homo sapiens
  siRNA target sequence for BGR (NM_030924.2,1148-1166).
caccttggtaagtactcta

SEQ ID NO: 235878 - DNA, 19 bp, Homo sapiens
  siRNA target sequence for BGR (NM_030924.2,1150-1168).
ccttggtaagtactctaaa

SEQ ID NO: 235879 - DNA, 19 bp, Homo sapiens
  siRNA target sequence for BGR (NM_030924.2,1296-1314).
ggcttcaaggtcaactcaa

SEQ ID NO: 235880 - DNA, 19 bp, Homo sapiens
  siRNA target sequence for BGR (NM_030924.2,1349-1367).
ctaccgcatggctaagact

SEQ ID NO: 235881 - DNA, 19 bp, Homo sapiens
  siRNA target sequence for BGR (NM_030924.2,1451-1469).
gactgccgagttctttcta

SEQ ID NO: 235882 - DNA, 19 bp, Homo sapiens
  siRNA target sequence for BGR (NM_030924.2,1467-1485).
ctaagcttggacataccta

SEQ ID NO: 235883 - DNA, 19 bp, Homo sapiens
  siRNA target sequence for BGR (NM_030924.2,1518-1536).
ggaccccacacgatatcca

SEQ ID NO: 235884 - DNA, 19 bp, Homo sapiens
  siRNA target sequence for BGR (NM_030924.2,1528-1546).
cgatatccaaccagaataa

SEQ ID NO: 235885 - DNA, 19 bp, Homo sapiens
  siRNA target sequence for BGR (NM_030924.2,1574-1592).
cttgactgggtgtaagaat

SEQ ID NO: 235886 - DNA, 19 bp, Homo sapiens
  siRNA target sequence for BGR (NM_030924.2,1579-1597).
ctgggtgtaagaatatgct

SEQ ID NO: 235887 - DNA, 19 bp, Homo sapiens
  siRNA target sequence for BGR (NM_030924.2,1744-1762).
gtctgggtttcctctatgt

SEQ ID NO: 235888 - DNA, 19 bp, Homo sapiens
  siRNA target sequence for BGR (NM_030924.2,1763-1781).
caccggccacatcaaagaa

SEQ ID NO: 235889 - DNA, 19 bp, Homo sapiens
  siRNA target sequence for BGR (NM_030924.2,1821-1839).
cctgttgagaccttggtta

SEQ ID NO: 235890 - DNA, 19 bp, Homo sapiens
  siRNA target sequence for BGR (NM_030924.2,1822-1840).
ctgttgagaccttggttaa

SEQ ID NO: 235891 - DNA, 19 bp, Homo sapiens
  siRNA target sequence for BGR (NM_030924.2,1856-1874).
catcagtaacgccatgtta

SEQ ID NO: 235892 - DNA, 19 bp, Homo sapiens
  siRNA target sequence for BGR (NM_030924.2,1859-1877).
cagtaacgccatgttagta

SEQ ID NO: 235893 - DNA, 19 bp, Homo sapiens
  siRNA target sequence for BGR (NM_030924.2,1867-1885).
ccatgttagtaggagataa

SEQ ID NO: 235894 - DNA, 19 bp, Homo sapiens
  siRNA target sequence for BGR (NM_030924.2,1913-1931).
gctgaagtgtgagatgaat

SEQ ID NO: 235895 - DNA, 19 bp, Homo sapiens
  siRNA target sequence for BGR (NM_030924.2,2008-2026).
ccaccgtgactgagattgt

SEQ ID NO: 235896 - DNA, 19 bp, Homo sapiens
  siRNA target sequence for BGR (NM_030924.2,2011-2029).
ccgtgactgagattgtgaa

SEQ ID NO: 235897 - DNA, 19 bp, Homo sapiens
  siRNA target sequence for BGR (NM_030924.2,2158-2176).
gagagctaggtccaatgat

SEQ ID NO: 235898 - DNA, 19 bp, Homo sapiens
  siRNA target sequence for BGR (NM_030924.2,2162-2180).
gctaggtccaatgatgaaa

SEQ ID NO: 235899 - DNA, 19 bp, Homo sapiens
  siRNA target sequence for BGR (NM_030924.2,2167-2185).
gtccaatgatgaaacttaa

SEQ ID NO: 235900 - DNA, 19 bp, Homo sapiens
  siRNA target sequence for BUCS1 (NM_052956.1,96-114).
ctctggggcatccacaaat

SEQ ID NO: 235901 - DNA, 19 bp, Homo sapiens
  siRNA target sequence for BUCS1 (NM_052956.1,146-164).
gctgcgctgccggtcttta

SEQ ID NO: 235902 - DNA, 19 bp, Homo sapiens
  siRNA target sequence for BUCS1 (NM_052956.1,147-165).
ctgcgctgccggtctttat

SEQ ID NO: 235903 - DNA, 19 bp, Homo sapiens
  siRNA target sequence for BUCS1 (NM_052956.1,154-172).
gccggtctttatcagaatt

SEQ ID NO: 235904 - DNA, 19 bp, Homo sapiens
  siRNA target sequence for BUCS1 (NM_052956.1,155-173).
ccggtctttatcagaattt

SEQ ID NO: 235905 - DNA, 19 bp, Homo sapiens
  siRNA target sequence for BUCS1 (NM_052956.1,178-196).
ccccaagatggaatgacta

SEQ ID NO: 235906 - DNA, 19 bp, Homo sapiens
  siRNA target sequence for BUCS1 (NM_052956.1,179-197).
cccaagatggaatgactat

SEQ ID NO: 235907 - DNA, 19 bp, Homo sapiens
  siRNA target sequence for BUCS1 (NM_052956.1,181-199).
caagatggaatgactatga

SEQ ID NO: 235908 - DNA, 19 bp, Homo sapiens
  siRNA target sequence for BUCS1 (NM_052956.1,184-202).
gatggaatgactatgaagt

SEQ ID NO: 235909 - DNA, 19 bp, Homo sapiens
  siRNA target sequence for BUCS1 (NM_052956.1,198-216).
gaagtaccggaggaattta

SEQ ID NO: 235910 - DNA, 19 bp, Homo sapiens
  siRNA target sequence for BUCS1 (NM_052956.1,201-219).
gtaccggaggaatttaact

SEQ ID NO: 235911 - DNA, 19 bp, Homo sapiens
  siRNA target sequence for BUCS1 (NM_052956.1,207-225).
gaggaatttaactttgcaa

SEQ ID NO: 235912 - DNA, 19 bp, Homo sapiens
  siRNA target sequence for BUCS1 (NM_052956.1,276-294).
ccaaatccagctttttggt

SEQ ID NO: 235913 - DNA, 19 bp, Homo sapiens
  siRNA target sequence for BUCS1 (NM_052956.1,487-505).
ctgcgaccatcctgttgaa

SEQ ID NO: 235914 - DNA, 19 bp, Homo sapiens
  siRNA target sequence for BUCS1 (NM_052956.1,548-566).
gggcattgtgaccatagat

SEQ ID NO: 235915 - DNA, 19 bp, Homo sapiens
  siRNA target sequence for BUCS1 (NM_052956.1,662-680).
cttccgatcgctggttaaa

SEQ ID NO: 235916 - DNA, 19 bp, Homo sapiens
  siRNA target sequence for BUCS1 (NM_052956.1,665-683).
ccgatcgctggttaaatca

SEQ ID NO: 235917 - DNA, 19 bp, Homo sapiens
  siRNA target sequence for BUCS1 (NM_052956.1,723-741).
gacccaatggtcatcttct

SEQ ID NO: 235918 - DNA, 19 bp, Homo sapiens
  siRNA target sequence for BUCS1 (NM_052956.1,785-803).
ccatgggttggccttacaa

SEQ ID NO: 235919 - DNA, 19 bp, Homo sapiens
  siRNA target sequence for BUCS1 (NM_052956.1,809-827).
cttcccaggaagtaggaaa

SEQ ID NO: 235920 - DNA, 19 bp, Homo sapiens
  siRNA target sequence for BUCS1 (NM_052956.1,866-884).
gtcggactcaggatggatt

SEQ ID NO: 235921 - DNA, 19 bp, Homo sapiens
  siRNA target sequence for BUCS1 (NM_052956.1,921-939).
gcgggttgtacagtcttta

SEQ ID NO: 235922 - DNA, 19 bp, Homo sapiens
  siRNA target sequence for BUCS1 (NM_052956.1,922-940).
cgggttgtacagtctttat

SEQ ID NO: 235923 - DNA, 19 bp, Homo sapiens
  siRNA target sequence for BUCS1 (NM_052956.1,945-963).
catctgccacagtttgaca

SEQ ID NO: 235924 - DNA, 19 bp, Homo sapiens
  siRNA target sequence for BUCS1 (NM_052956.1,969-987).
gtcatcatacagacattgt

SEQ ID NO: 235925 - DNA, 19 bp, Homo sapiens
  siRNA target sequence for BUCS1 (NM_052956.1,1005-1023).
cacttttggggggtatcat

SEQ ID NO: 235926 - DNA, 19 bp, Homo sapiens
  siRNA target sequence for BUCS1 (NM_052956.1,1007-1025).
cttttggggggtatcatct

SEQ ID NO: 235927 - DNA, 19 bp, Homo sapiens
  siRNA target sequence for BUCS1 (NM_052956.1,1012-1030).
ggggggtatcatctatata

SEQ ID NO: 235928 - DNA, 19 bp, Homo sapiens
  siRNA target sequence for BUCS1 (NM_052956.1,1013-1031).
gggggtatcatctatatat

SEQ ID NO: 235929 - DNA, 19 bp, Homo sapiens
  siRNA target sequence for BUCS1 (NM_052956.1,1017-1035).
gtatcatctatatatcgaa

SEQ ID NO: 235930 - DNA, 19 bp, Homo sapiens
  siRNA target sequence for BUCS1 (NM_052956.1,1175-1193).
gtcggaaacgggactaatt

SEQ ID NO: 235931 - DNA, 19 bp, Homo sapiens
  siRNA target sequence for BUCS1 (NM_052956.1,1339-1357).
ggcctgtgagcctcttcat

SEQ ID NO: 235932 - DNA, 19 bp, Homo sapiens
  siRNA target sequence for BUCS1 (NM_052956.1,1465-1483).
ggaggagtgatgacatcat

SEQ ID NO: 235933 - DNA, 19 bp, Homo sapiens
  siRNA target sequence for BUCS1 (NM_052956.1,1469-1487).
gagtgatgacatcattaat

SEQ ID NO: 235934 - DNA, 19 bp, Homo sapiens
  siRNA target sequence for BUCS1 (NM_052956.1,1506-1524).
gggcctgcagaggttgaaa

SEQ ID NO: 235935 - DNA, 19 bp, Homo sapiens
  siRNA target sequence for C12orf5 (NM_020375.1,92-110).
gtccggcatggagaaacaa

SEQ ID NO: 235936 - DNA, 19 bp, Homo sapiens
  siRNA target sequence for C12orf5 (NM_020375.1,94-112).
ccggcatggagaaacaaga

SEQ ID NO: 235937 - DNA, 19 bp, Homo sapiens
  siRNA target sequence for C12orf5 (NM_020375.1,321-339).
caagacttcgggaaaggaa

SEQ ID NO: 235938 - DNA, 19 bp, Homo sapiens
  siRNA target sequence for C12orf5 (NM_020375.1,324-342).
gacttcgggaaaggaaata

SEQ ID NO: 235939 - DNA, 19 bp, Homo sapiens
  siRNA target sequence for C12orf5 (NM_020375.1,336-354).
ggaaatacggggttgtaga

SEQ ID NO: 235940 - DNA, 19 bp, Homo sapiens
  siRNA target sequence for C12orf5 (NM_020375.1,401-419).
gaagagtgccctgtgttta

SEQ ID NO: 235941 - DNA, 19 bp, Homo sapiens
  siRNA target sequence for C12orf5 (NM_020375.1,448-466).
ggtgaaaatgcgtggaata

SEQ ID NO: 235942 - DNA, 19 bp, Homo sapiens
  siRNA target sequence for C12orf5 (NM_020375.1,507-525).
cggatcaaaaagaacagtt

SEQ ID NO: 235943 - DNA, 19 bp, Homo sapiens
  siRNA target sequence for C12orf5 (NM_020375.1,595-613).
cagctctaaagttaattca

SEQ ID NO: 235944 - DNA, 19 bp, Homo sapiens
  siRNA target sequence for C12orf5 (NM_020375.1,597-615).
gctctaaagttaattcaga

SEQ ID NO: 235945 - DNA, 19 bp, Homo sapiens
  siRNA target sequence for C12orf5 (NM_020375.1,616-634).
cagcggtattccaggatta

SEQ ID NO: 235946 - DNA, 19 bp, Homo sapiens
  siRNA target sequence for C12orf5 (NM_020375.1,619-637).
cggtattccaggattagca

SEQ ID NO: 235947 - DNA, 19 bp, Homo sapiens
  siRNA target sequence for C12orf5 (NM_020375.1,659-677).
cacggtgcttacatgagaa

SEQ ID NO: 235948 - DNA, 19 bp, Homo sapiens
  siRNA target sequence for C12orf5 (NM_020375.1,673-691).
gagaagtctgtttgattat

SEQ ID NO: 235949 - DNA, 19 bp, Homo sapiens
  siRNA target sequence for C12orf5 (NM_020375.1,819-837).
cggttcagtgtatttgtat

SEQ ID NO: 235950 - DNA, 19 bp, Homo sapiens
  siRNA target sequence for C12orf5 (NM_020375.1,838-856).
gaacctacaggatcatcta

SEQ ID NO: 235951 - DNA, 19 bp, Homo sapiens
  siRNA target sequence for C12orf5 (NM_020375.1,841-859).
cctacaggatcatctaaat

SEQ ID NO: 235952 - DNA, 19 bp, Homo sapiens
  siRNA target sequence for C20orf135 (NM_080622.1,31-49).
gtgcgcgtgttcaagatct

SEQ ID NO: 235953 - DNA, 19 bp, Homo sapiens
  siRNA target sequence for C20orf135 (NM_080622.1,449-467).
gcaacgagatcgacactat

SEQ ID NO: 235954 - DNA, 19 bp, Homo sapiens
  siRNA target sequence for C20orf135 (NM_080622.1,454-472).
gagatcgacactatgttca

SEQ ID NO: 235955 - DNA, 19 bp, Homo sapiens
  siRNA target sequence for C20orf135 (NM_080622.1,881-899).
ccgtgcgcgagcacttcaa

SEQ ID NO: 235956 - DNA, 19 bp, Homo sapiens
  siRNA target sequence for C20orf22 (NM_015600.2,282-300).
cagccgacgcgggaatgaa

SEQ ID NO: 235957 - DNA, 19 bp, Homo sapiens
  siRNA target sequence for C20orf22 (NM_015600.2,334-352).
gcgcctgaggaagatactt

SEQ ID NO: 235958 - DNA, 19 bp, Homo sapiens
  siRNA target sequence for C20orf22 (NM_015600.2,383-401).
ccatttctcatcaaactat

SEQ ID NO: 235959 - DNA, 19 bp, Homo sapiens
  siRNA target sequence for C20orf22 (NM_015600.2,394-412).
caaactatgtcctggaata

SEQ ID NO: 235960 - DNA, 19 bp, Homo sapiens
  siRNA target sequence for C20orf22 (NM_015600.2,440-458).
gtaagagttccctatttca

SEQ ID NO: 235961 - DNA, 19 bp, Homo sapiens
  siRNA target sequence for C20orf22 (NM_015600.2,444-462).
gagttccctatttcattga

SEQ ID NO: 235962 - DNA, 19 bp, Homo sapiens
  siRNA target sequence for C20orf22 (NM_015600.2,446-464).
gttccctatttcattgatt

SEQ ID NO: 235963 - DNA, 19 bp, Homo sapiens
  siRNA target sequence for C20orf22 (NM_015600.2,449-467).
ccctatttcattgatttga

SEQ ID NO: 235964 - DNA, 19 bp, Homo sapiens
  siRNA target sequence for C20orf22 (NM_015600.2,794-812).
gcactccacgtttttgact

SEQ ID NO: 235965 - DNA, 19 bp, Homo sapiens
  siRNA target sequence for C20orf22 (NM_015600.2,802-820).
cgtttttgactggatcaaa

SEQ ID NO: 235966 - DNA, 19 bp, Homo sapiens
  siRNA target sequence for C20orf22 (NM_015600.2,868-886).
cactggcgtggcgacaaat

SEQ ID NO: 235967 - DNA, 19 bp, Homo sapiens
  siRNA target sequence for C20orf22 (NM_015600.2,870-888).
ctggcgtggcgacaaatct

SEQ ID NO: 235968 - DNA, 19 bp, Homo sapiens
  siRNA target sequence for C20orf22 (NM_015600.2,917-935).
cctccagatgcccttatat

SEQ ID NO: 235969 - DNA, 19 bp, Homo sapiens
  siRNA target sequence for C20orf22 (NM_015600.2,918-936).
ctccagatgcccttatatt

SEQ ID NO: 235970 - DNA, 19 bp, Homo sapiens
  siRNA target sequence for C20orf22 (NM_015600.2,921-939).
cagatgcccttatattgga

SEQ ID NO: 235971 - DNA, 19 bp, Homo sapiens
  siRNA target sequence for C20orf22 (NM_015600.2,923-941).
gatgcccttatattggaat

SEQ ID NO: 235972 - DNA, 19 bp, Homo sapiens
  siRNA target sequence for C20orf22 (NM_015600.2,937-955).
ggaatctccattcactaat

SEQ ID NO: 235973 - DNA, 19 bp, Homo sapiens
  siRNA target sequence for C20orf22 (NM_015600.2,938-956).
gaatctccattcactaata

SEQ ID NO: 235974 - DNA, 19 bp, Homo sapiens
  siRNA target sequence for C20orf22 (NM_015600.2,968-986).
gctaagagccatccatttt

SEQ ID NO: 235975 - DNA, 19 bp, Homo sapiens
  siRNA target sequence for C20orf22 (NM_015600.2,987-1005).
cagtgatatatcgatactt

SEQ ID NO: 235976 - DNA, 19 bp, Homo sapiens
  siRNA target sequence for C20orf22 (NM_015600.2,1027-1045).
ccttgatcctattacaagt

SEQ ID NO: 235977 - DNA, 19 bp, Homo sapiens
  siRNA target sequence for C20orf22 (NM_015600.2,1028-1046).
cttgatcctattacaagta

SEQ ID NO: 235978 - DNA, 19 bp, Homo sapiens
  siRNA target sequence for C20orf22 (NM_015600.2,1041-1059).
caagtagtggaattaaatt

SEQ ID NO: 235979 - DNA, 19 bp, Homo sapiens
  siRNA target sequence for C20orf22 (NM_015600.2,1178-1196).
cgaagcttccgagatttca

SEQ ID NO: 235980 - DNA, 19 bp, Homo sapiens
  siRNA target sequence for C20orf22 (NM_015600.2,1179-1197).
gaagcttccgagatttcaa

SEQ ID NO: 235981 - DNA, 19 bp, Homo sapiens
  siRNA target sequence for C20orf22 (NM_015600.2,1183-1201).
cttccgagatttcaaagtt

SEQ ID NO: 235982 - DNA, 19 bp, Homo sapiens
  siRNA target sequence for C20orf22 (NM_015600.2,1226-1244).
cttggctacaggcacaaat

SEQ ID NO: 235983 - DNA, 19 bp, Homo sapiens
  siRNA target sequence for C20orf22 (NM_015600.2,1229-1247).
ggctacaggcacaaataca

SEQ ID NO: 235984 - DNA, 19 bp, Homo sapiens
  siRNA target sequence for C20orf22 (NM_015600.2,1230-1248).
gctacaggcacaaatacat

SEQ ID NO: 235985 - DNA, 19 bp, Homo sapiens
  siRNA target sequence for C20orf22 (NM_015600.2,1231-1249).
ctacaggcacaaatacatt

SEQ ID NO: 235986 - DNA, 19 bp, Homo sapiens
  siRNA target sequence for C20orf22 (NM_015600.2,1262-1280).
gagctgccacggatactga

SEQ ID NO: 235987 - DNA, 19 bp, Homo sapiens
  siRNA target sequence for C21orf106 (NM_015151.1,220-238).
gctgcttgcacgttatata

SEQ ID NO: 235988 - DNA, 19 bp, Homo sapiens
  siRNA target sequence for C21orf106 (NM_015151.1,231-249).
gttatataccgcttattca

SEQ ID NO: 235989 - DNA, 19 bp, Homo sapiens
  siRNA target sequence for C21orf106 (NM_015151.1,240-258).
cgcttattcaaggaataga

SEQ ID NO: 235990 - DNA, 19 bp, Homo sapiens
  siRNA target sequence for C21orf106 (NM_015151.1,496-514).
gtcgtctgcctcagaagat

SEQ ID NO: 235991 - DNA, 19 bp, Homo sapiens
  siRNA target sequence for C21orf106 (NM_015151.1,585-603).
ggctcgaccgggtcattca

SEQ ID NO: 235992 - DNA, 19 bp, Homo sapiens
  siRNA target sequence for C21orf106 (NM_015151.1,777-795).
gcctcgtggagcattcgta

SEQ ID NO: 235993 - DNA, 19 bp, Homo sapiens
  siRNA target sequence for C21orf106 (NM_015151.1,781-799).
cgtggagcattcgtacttt

SEQ ID NO: 235994 - DNA, 19 bp, Homo sapiens
  siRNA target sequence for C21orf106 (NM_015151.1,1189-1207).
gagtcggagtttaaaacta

SEQ ID NO: 235995 - DNA, 19 bp, Homo sapiens
  siRNA target sequence for C21orf106 (NM_015151.1,1208-1226).
gcttatactctacttaata

SEQ ID NO: 235996 - DNA, 19 bp, Homo sapiens
  siRNA target sequence for C21orf106 (NM_015151.1,1293-1311).
gtgaccctgtgatgttcat

SEQ ID NO: 235997 - DNA, 19 bp, Homo sapiens
  siRNA target sequence for C21orf106 (NM_015151.1,1303-1321).
gatgttcatggttgcattt

SEQ ID NO: 235998 - DNA, 19 bp, Homo sapiens
  siRNA target sequence for C21orf106 (NM_015151.1,1355-1373).
cccatagaagtgccattaa

SEQ ID NO: 235999 - DNA, 19 bp, Homo sapiens
  siRNA target sequence for C21orf106 (NM_015151.1,1357-1375).
catagaagtgccattaaca

SEQ ID NO: 236000 - DNA, 19 bp, Homo sapiens
  siRNA target sequence for C21orf106 (NM_015151.1,1594-1612).
gactgggactgcctacatt

SEQ ID NO: 236001 - DNA, 19 bp, Homo sapiens
  siRNA target sequence for C21orf106 (NM_015151.1,1596-1614).
ctgggactgcctacattga

SEQ ID NO: 236002 - DNA, 19 bp, Homo sapiens
  siRNA target sequence for C21orf106 (NM_015151.1,1598-1616).
gggactgcctacattgagt

SEQ ID NO: 236003 - DNA, 19 bp, Homo sapiens
  siRNA target sequence for C21orf106 (NM_015151.1,1711-1729).
ctcagaagctgaaacatta

SEQ ID NO: 236004 - DNA, 19 bp, Homo sapiens
  siRNA target sequence for C21orf106 (NM_015151.1,1763-1781).
ctgtggcatggcgtgttaa

SEQ ID NO: 236005 - DNA, 19 bp, Homo sapiens
  siRNA target sequence for C21orf106 (NM_015151.1,1959-1977).
cactgcgcatgctgattgt

SEQ ID NO: 236006 - DNA, 19 bp, Homo sapiens
  siRNA target sequence for C21orf106 (NM_015151.1,2155-2173).
gtcgatgaacggtctaagt

SEQ ID NO: 236007 - DNA, 19 bp, Homo sapiens
  siRNA target sequence for C21orf106 (NM_015151.1,2157-2175).
cgatgaacggtctaagtta

SEQ ID NO: 236008 - DNA, 19 bp, Homo sapiens
  siRNA target sequence for C21orf106 (NM_015151.1,2158-2176).
gatgaacggtctaagttat

SEQ ID NO: 236009 - DNA, 19 bp, Homo sapiens
  siRNA target sequence for C21orf106 (NM_015151.1,2166-2184).
gtctaagttatggtgttat

SEQ ID NO: 236010 - DNA, 19 bp, Homo sapiens
  siRNA target sequence for C21orf106 (NM_015151.1,2276-2294).
gaaggtaccccttatcttt

SEQ ID NO: 236011 - DNA, 19 bp, Homo sapiens
  siRNA target sequence for C21orf106 (NM_015151.1,2279-2297).
ggtaccccttatctttgta

SEQ ID NO: 236012 - DNA, 19 bp, Homo sapiens
  siRNA target sequence for C21orf106 (NM_015151.1,2787-2805).
ctctcggagggattcacat

SEQ ID NO: 236013 - DNA, 19 bp, Homo sapiens
  siRNA target sequence for C21orf106 (NM_015151.1,2791-2809).
cggagggattcacatttct

SEQ ID NO: 236014 - DNA, 19 bp, Homo sapiens
  siRNA target sequence for C21orf106 (NM_015151.1,2836-2854).
gacgctgcacccgtgtaat

SEQ ID NO: 236015 - DNA, 19 bp, Homo sapiens
  siRNA target sequence for C21orf106 (NM_015151.1,2838-2856).
cgctgcacccgtgtaatgt

SEQ ID NO: 236016 - DNA, 19 bp, Homo sapiens
  siRNA target sequence for C21orf106 (NM_015151.1,3072-3090).
ctgaccacccgctgttctt

SEQ ID NO: 236017 - DNA, 19 bp, Homo sapiens
  siRNA target sequence for C21orf106 (NM_015151.1,3238-3256).
cctcattgccgcgttctat

SEQ ID NO: 236018 - DNA, 19 bp, Homo sapiens
  siRNA target sequence for C21orf106 (NM_015151.1,3513-3531).
ccgatgtcctcgcatactt

SEQ ID NO: 236019 - DNA, 19 bp, Homo sapiens
  siRNA target sequence for C21orf106 (NM_015151.1,3596-3614).
gccttatgccgctccataa

SEQ ID NO: 236020 - DNA, 19 bp, Homo sapiens
  siRNA target sequence for C21orf106 (NM_015151.1,3597-3615).
ccttatgccgctccataaa

SEQ ID NO: 236021 - DNA, 19 bp, Homo sapiens
  siRNA target sequence for C21orf106 (NM_015151.1,3667-3685).
ctactgtggccttggtttt

SEQ ID NO: 236022 - DNA, 19 bp, Homo sapiens
  siRNA target sequence for C21orf106 (NM_015151.1,3777-3795).
cggccgtcagccagtacaa

SEQ ID NO: 236023 - DNA, 19 bp, Homo sapiens
  siRNA target sequence for C21orf106 (NM_015151.1,4134-4152).
cgcacagcctgccattgat

SEQ ID NO: 236024 - DNA, 19 bp, Homo sapiens
  siRNA target sequence for C21orf106 (NM_015151.1,4443-4461).
ggtctctggatgaaactct

SEQ ID NO: 236025 - DNA, 19 bp, Homo sapiens
  siRNA target sequence for C21orf106 (NM_015151.1,4686-4704).
caggggtgatccctatcaa

SEQ ID NO: 236026 - DNA, 19 bp, Homo sapiens
  siRNA target sequence for C5orf4 (NM_016348.1,1270-1288).
ctgattgcacctaacaatt

SEQ ID NO: 236027 - DNA, 19 bp, Homo sapiens
  siRNA target sequence for C5orf4 (NM_016348.1,1298-1316).
cggccacacgccctaatga

SEQ ID NO: 236028 - DNA, 19 bp, Homo sapiens
  siRNA target sequence for C5orf4 (NM_016348.1,1299-1317).
ggccacacgccctaatgat

SEQ ID NO: 236029 - DNA, 19 bp, Homo sapiens
  siRNA target sequence for C5orf4 (NM_032385.1,142-160).
ctggacatatgctacacaa

SEQ ID NO: 236030 - DNA, 19 bp, Homo sapiens
  siRNA target sequence for C5orf4 (NM_032385.1,145-163).
gacatatgctacacaatga

SEQ ID NO: 236031 - DNA, 19 bp, Homo sapiens
  siRNA target sequence for C5orf4 (NM_032385.1,183-201).
cacatctggggctctatga

SEQ ID NO: 236032 - DNA, 19 bp, Homo sapiens
  siRNA target sequence for C5orf4 (NM_032385.1,321-339).
gagaggctgctgactacat

SEQ ID NO: 236033 - DNA, 19 bp, Homo sapiens
  siRNA target sequence for C5orf4 (NM_032385.1,326-344).
gctgctgactacatttgaa

SEQ ID NO: 236034 - DNA, 19 bp, Homo sapiens
  siRNA target sequence for C5orf4 (NM_032385.1,356-374).
gatcctcttctttataggt

SEQ ID NO: 236035 - DNA, 19 bp, Homo sapiens
  siRNA target sequence for C5orf4 (NM_032385.1,428-446).
ggttgacacaacaggaaaa

SEQ ID NO: 236036 - DNA, 19 bp, Homo sapiens
  siRNA target sequence for C5orf4 (NM_032385.1,518-536).
gtctatccgcacagttctt

SEQ ID NO: 236037 - DNA, 19 bp, Homo sapiens
  siRNA target sequence for C5orf4 (NM_032385.1,520-538).
ctatccgcacagttctttt

SEQ ID NO: 236038 - DNA, 19 bp, Homo sapiens
  siRNA target sequence for C5orf4 (NM_032385.1,539-557).
caaccagtgcatgatatct

SEQ ID NO: 236039 - DNA, 19 bp, Homo sapiens
  siRNA target sequence for C5orf4 (NM_032385.1,664-682).
cgctgatcgaggaagtctt

SEQ ID NO: 236040 - DNA, 19 bp, Homo sapiens
  siRNA target sequence for C5orf4 (NM_032385.1,672-690).
gaggaagtcttgttctact

SEQ ID NO: 236041 - DNA, 19 bp, Homo sapiens
  siRNA target sequence for C5orf4 (NM_032385.1,675-693).
gaagtcttgttctactatt

SEQ ID NO: 236042 - DNA, 19 bp, Homo sapiens
  siRNA target sequence for CGI-111 (NM_016048.1,351-369).
ccttcaagcactgtgtttt

SEQ ID NO: 236043 - DNA, 19 bp, Homo sapiens
  siRNA target sequence for CGI-111 (NM_016048.1,376-394).
gtgatatgcaggaaaggtt

SEQ ID NO: 236044 - DNA, 19 bp, Homo sapiens
  siRNA target sequence for CGI-111 (NM_016048.1,395-413).
cagaccagccatcaagtat

SEQ ID NO: 236045 - DNA, 19 bp, Homo sapiens
  siRNA target sequence for CGI-111 (NM_016048.1,397-415).
gaccagccatcaagtattt

SEQ ID NO: 236046 - DNA, 19 bp, Homo sapiens
  siRNA target sequence for CGI-111 (NM_016048.1,430-448).
gcgtgggacagagattgtt

SEQ ID NO: 236047 - DNA, 19 bp, Homo sapiens
  siRNA target sequence for CGI-111 (NM_016048.1,458-476).
ccggattttaggaattcct

SEQ ID NO: 236048 - DNA, 19 bp, Homo sapiens
  siRNA target sequence for CGI-111 (NM_016048.1,511-529).
ggagcacggttcaagaaat

SEQ ID NO: 236049 - DNA, 19 bp, Homo sapiens
  siRNA target sequence for CGI-111 (NM_016048.1,512-530).
gagcacggttcaagaaatt

SEQ ID NO: 236050 - DNA, 19 bp, Homo sapiens
  siRNA target sequence for CGI-111 (NM_016048.1,514-532).
gcacggttcaagaaattga

SEQ ID NO: 236051 - DNA, 19 bp, Homo sapiens
  siRNA target sequence for CGI-111 (NM_016048.1,569-587).
gttttcaatggtattacca

SEQ ID NO: 236052 - DNA, 19 bp, Homo sapiens
  siRNA target sequence for CGI-111 (NM_016048.1,617-635).
cggagtcaggagtgttgta

SEQ ID NO: 236053 - DNA, 19 bp, Homo sapiens
  siRNA target sequence for CGI-111 (NM_016048.1,621-639).
gtcaggagtgttgtattat

SEQ ID NO: 236054 - DNA, 19 bp, Homo sapiens
  siRNA target sequence for CGI-111 (NM_016048.1,626-644).
gagtgttgtattatttgga

SEQ ID NO: 236055 - DNA, 19 bp, Homo sapiens
  siRNA target sequence for CGI-111 (NM_016048.1,654-672).
catgtgtgcatccaacaaa

SEQ ID NO: 236056 - DNA, 19 bp, Homo sapiens
  siRNA target sequence for CGI-111 (NM_016048.1,694-712).
gaggagtcgaggttcacat

SEQ ID NO: 236057 - DNA, 19 bp, Homo sapiens
  siRNA target sequence for CGI-111 (NM_016048.1,697-715).
gagtcgaggttcacattgt

SEQ ID NO: 236058 - DNA, 19 bp, Homo sapiens
  siRNA target sequence for CGI-111 (NM_016048.1,717-735).
gctgatgccacctcatcaa

SEQ ID NO: 236059 - DNA, 19 bp, Homo sapiens
  siRNA target sequence for CGI-111 (NM_016048.1,720-738).
gatgccacctcatcaagaa

SEQ ID NO: 236060 - DNA, 19 bp, Homo sapiens
  siRNA target sequence for CGI-67 (NM_016014.1,456-474).
cgagcagactggcagtatt

SEQ ID NO: 236061 - DNA, 19 bp, Homo sapiens
  siRNA target sequence for CGI-67 (NM_016014.1,459-477).
gcagactggcagtattctt

SEQ ID NO: 236062 - DNA, 19 bp, Homo sapiens
  siRNA target sequence for CGI-67 (NM_016014.1,489-507).
gatgctattgagtgtttca

SEQ ID NO: 236063 - DNA, 19 bp, Homo sapiens
  siRNA target sequence for CGI-67 (NM_016014.1,492-510).
gctattgagtgtttcatga

SEQ ID NO: 236064 - DNA, 19 bp, Homo sapiens
  siRNA target sequence for CGI-67 (NM_016014.1,517-535).
ccagtaaaggcaacagaat

SEQ ID NO: 236065 - DNA, 19 bp, Homo sapiens
  siRNA target sequence for CGI-67 (NM_016014.1,518-536).
cagtaaaggcaacagaatt

SEQ ID NO: 236066 - DNA, 19 bp, Homo sapiens
  siRNA target sequence for CGI-67 (NM_016014.1,526-544).
gcaacagaattgcttgtat

SEQ ID NO: 236067 - DNA, 19 bp, Homo sapiens
  siRNA target sequence for CGI-67 (NM_016014.1,556-574).
gttcacccaatgcgaaata

SEQ ID NO: 236068 - DNA, 19 bp, Homo sapiens
  siRNA target sequence for CGI-67 (NM_016014.1,568-586).
cgaaatacactttactctt

SEQ ID NO: 236069 - DNA, 19 bp, Homo sapiens
  siRNA target sequence for CGI-67 (NM_016014.1,613-631).
gtcaaatgagcagctttta

SEQ ID NO: 236070 - DNA, 19 bp, Homo sapiens
  siRNA target sequence for CGI-67 (NM_016014.1,637-655).
gactaggatcacggattaa

SEQ ID NO: 236071 - DNA, 19 bp, Homo sapiens
  siRNA target sequence for CGI-67 (NM_016014.1,639-657).
ctaggatcacggattaatt

SEQ ID NO: 236072 - DNA, 19 bp, Homo sapiens
  siRNA target sequence for CGI-67 (NM_016014.1,642-660).
ggatcacggattaattgta

SEQ ID NO: 236073 - DNA, 19 bp, Homo sapiens
  siRNA target sequence for CGI-67 (NM_016014.1,643-661).
gatcacggattaattgtaa

SEQ ID NO: 236074 - DNA, 19 bp, Homo sapiens
  siRNA target sequence for CGI-67 (NM_016014.1,646-664).
cacggattaattgtaatat

SEQ ID NO: 236075 - DNA, 19 bp, Homo sapiens
  siRNA target sequence for CGI-67 (NM_016014.1,648-666).
cggattaattgtaatatat

SEQ ID NO: 236076 - DNA, 19 bp, Homo sapiens
  siRNA target sequence for CGI-67 (NM_016014.1,722-740).
cctctatgcagacattgaa

SEQ ID NO: 236077 - DNA, 19 bp, Homo sapiens
  siRNA target sequence for CGI-67 (NM_016014.1,750-768).
cttgctcttaggacaagat

SEQ ID NO: 236078 - DNA, 19 bp, Homo sapiens
  siRNA target sequence for CGI-67 (NM_016014.1,772-790).
gcattcgccctgaaaatgt

SEQ ID NO: 236079 - DNA, 19 bp, Homo sapiens
  siRNA target sequence for CGI-67 (NM_016014.1,830-848).
ggatcttgctgctcgatat

SEQ ID NO: 236080 - DNA, 19 bp, Homo sapiens
  siRNA target sequence for CGI-67 (NM_016014.1,834-852).
cttgctgctcgatatgaga

SEQ ID NO: 236081 - DNA, 19 bp, Homo sapiens
  siRNA target sequence for CGI-67 (NM_016014.1,936-954).
gcattcccaaacattgaca

SEQ ID NO: 236082 - DNA, 19 bp, Homo sapiens
  siRNA target sequence for CGI-67 (NM_016014.1,994-1012).
ggactgaagatgaagtcat

SEQ ID NO: 236083 - DNA, 19 bp, Homo sapiens
  siRNA target sequence for CTMP (NM_053055.2,138-156).
cgagctgaggtcattttct

SEQ ID NO: 236084 - DNA, 19 bp, Homo sapiens
  siRNA target sequence for CTMP (NM_053055.2,264-282).
gaaacgtttgccttcatat

SEQ ID NO: 236085 - DNA, 19 bp, Homo sapiens
  siRNA target sequence for CTMP (NM_053055.2,293-311).
ctactgaatggattcaaga

SEQ ID NO: 236086 - DNA, 19 bp, Homo sapiens
  siRNA target sequence for CTMP (NM_176853.1,253-271).
gacggctcctggaaacgtt

SEQ ID NO: 236087 - DNA, 19 bp, Homo sapiens
  siRNA target sequence for DKFZP434P1750 (NM_015527.2,267-285).
gggctcagattcagagata

SEQ ID NO: 236088 - DNA, 19 bp, Homo sapiens
  siRNA target sequence for DKFZP434P1750 (NM_015527.2,300-318).
gcgcaagacggacaagtat

SEQ ID NO: 236089 - DNA, 19 bp, Homo sapiens
  siRNA target sequence for DKFZP434P1750 (NM_015527.2,503-521).
cctggcagtacctgtctaa

SEQ ID NO: 236090 - DNA, 19 bp, Homo sapiens
  siRNA target sequence for DKFZP434P1750 (NM_015527.2,504-522).
ctggcagtacctgtctaat

SEQ ID NO: 236091 - DNA, 19 bp, Homo sapiens
  siRNA target sequence for DKFZP434P1750 (NM_015527.2,508-526).
cagtacctgtctaatagca

SEQ ID NO: 236092 - DNA, 19 bp, Homo sapiens
  siRNA target sequence for DKFZP434P1750 (NM_015527.2,518-536).
ctaatagcaaggaacttct

SEQ ID NO: 236093 - DNA, 19 bp, Homo sapiens
  siRNA target sequence for DKFZP434P1750 (NM_015527.2,940-958).
gaccctgtgctctacatga

SEQ ID NO: 236094 - DNA, 19 bp, Homo sapiens
  siRNA target sequence for DKFZP434P1750 (NM_015527.2,1110-1128).
ctcctgccaaggcatgtat

SEQ ID NO: 236095 - DNA, 19 bp, Homo sapiens
  siRNA target sequence for DKFZP434P1750 (NM_015527.2,1112-1130).
cctgccaaggcatgtatga

SEQ ID NO: 236096 - DNA, 19 bp, Homo sapiens
  siRNA target sequence for DKFZP434P1750 (NM_015527.2,1804-1822).
cggcaggacgcttacttct

SEQ ID NO: 236097 - DNA, 19 bp, Homo sapiens
  siRNA target sequence for DKFZP566J2046 (NM_031208.1,527-545).
gctatgtttctaagatcat

SEQ ID NO: 236098 - DNA, 19 bp, Homo sapiens
  siRNA target sequence for DKFZP566J2046 (NM_031208.1,588-606).
gggagttggaccggttaaa

SEQ ID NO: 236099 - DNA, 19 bp, Homo sapiens
  siRNA target sequence for DKFZP566J2046 (NM_031208.1,590-608).
gagttggaccggttaaaga

SEQ ID NO: 236100 - DNA, 19 bp, Homo sapiens
  siRNA target sequence for DKFZP566J2046 (NM_031208.1,592-610).
gttggaccggttaaagaaa

SEQ ID NO: 236101 - DNA, 19 bp, Homo sapiens
  siRNA target sequence for DKFZP566J2046 (NM_031208.1,636-654).
cgggctggtcagtatgaca

SEQ ID NO: 236102 - DNA, 19 bp, Homo sapiens
  siRNA target sequence for DKFZP566J2046 (NM_031208.1,637-655).
gggctggtcagtatgacat

SEQ ID NO: 236103 - DNA, 19 bp, Homo sapiens
  siRNA target sequence for DKFZP566J2046 (NM_031208.1,638-656).
ggctggtcagtatgacatt

SEQ ID NO: 236104 - DNA, 19 bp, Homo sapiens
  siRNA target sequence for ECHDC1 (NM_018479.1,355-373).
catcccatggattttatga

SEQ ID NO: 236105 - DNA, 19 bp, Homo sapiens
  siRNA target sequence for ECHDC1 (NM_018479.1,412-430).
gatccattgaccttcagaa

SEQ ID NO: 236106 - DNA, 19 bp, Homo sapiens
  siRNA target sequence for ECHDC1 (NM_018479.1,442-460).
gcattggcattcttactct

SEQ ID NO: 236107 - DNA, 19 bp, Homo sapiens
  siRNA target sequence for ECHDC1 (NM_018479.1,453-471).
cttactctgaacaatccaa

SEQ ID NO: 236108 - DNA, 19 bp, Homo sapiens
  siRNA target sequence for ECHDC1 (NM_018479.1,459-477).
ctgaacaatccaagtagaa

SEQ ID NO: 236109 - DNA, 19 bp, Homo sapiens
  siRNA target sequence for ECHDC1 (NM_018479.1,493-511).
gtgttatgatgctacaact

SEQ ID NO: 236110 - DNA, 19 bp, Homo sapiens
  siRNA target sequence for ECHDC1 (NM_018479.1,507-525).
caacttctggaaaaagtaa

SEQ ID NO: 236111 - DNA, 19 bp, Homo sapiens
  siRNA target sequence for ECHDC1 (NM_018479.1,566-584).
ccgtggggcaaaaaatact

SEQ ID NO: 236112 - DNA, 19 bp, Homo sapiens
  siRNA target sequence for ECHDC1 (NM_018479.1,567-585).
cgtggggcaaaaaatactt

SEQ ID NO: 236113 - DNA, 19 bp, Homo sapiens
  siRNA target sequence for ECHDC1 (NM_018479.1,690-708).
ggaggagcagaatttacta

SEQ ID NO: 236114 - DNA, 19 bp, Homo sapiens
  siRNA target sequence for ECHDC1 (NM_018479.1,735-753).
ccagagagtaagatcagat

SEQ ID NO: 236115 - DNA, 19 bp, Homo sapiens
  siRNA target sequence for ECHDC1 (NM_018479.1,793-811).
gcaccacccggctagttga

SEQ ID NO: 236116 - DNA, 19 bp, Homo sapiens
  siRNA target sequence for ECHDC1 (NM_018479.1,794-812).
caccacccggctagttgaa

SEQ ID NO: 236117 - DNA, 19 bp, Homo sapiens
  siRNA target sequence for ECHDC1 (NM_018479.1,797-815).
cacccggctagttgaaata

SEQ ID NO: 236118 - DNA, 19 bp, Homo sapiens
  siRNA target sequence for ECHDC1 (NM_018479.1,799-817).
cccggctagttgaaataat

SEQ ID NO: 236119 - DNA, 19 bp, Homo sapiens
  siRNA target sequence for ECHDC1 (NM_018479.1,823-841).
gtagacaagctctcaaagt

SEQ ID NO: 236120 - DNA, 19 bp, Homo sapiens
  siRNA target sequence for ECHDC1 (NM_018479.1,852-870).
gcccttaaactggattcaa

SEQ ID NO: 236121 - DNA, 19 bp, Homo sapiens
  siRNA target sequence for ECHDC1 (NM_018479.1,902-920).
ggtcttgcagtcttcagat

SEQ ID NO: 236122 - DNA, 19 bp, Homo sapiens
  siRNA target sequence for ECHDC1 (NM_018479.1,905-923).
cttgcagtcttcagatgaa

SEQ ID NO: 236123 - DNA, 19 bp, Homo sapiens
  siRNA target sequence for ECHDC1 (NM_018479.1,948-966).
gaatggctaaagcaattca

SEQ ID NO: 236124 - DNA, 19 bp, Homo sapiens
  siRNA target sequence for ECHDC1 (NM_018479.1,972-990).
gggccaccggaagtaatta

SEQ ID NO: 236125 - DNA, 19 bp, Homo sapiens
  siRNA target sequence for ECHDC1 (NM_018479.1,1018-1036).
gcagagagctatatttgga

SEQ ID NO: 236126 - DNA, 19 bp, Homo sapiens
  siRNA target sequence for ECHDC1 (NM_018479.1,1042-1060).
cattacagaacgaaagaga

SEQ ID NO: 236127 - DNA, 19 bp, Homo sapiens
  siRNA target sequence for ECHDC1 (NM_018479.1,1049-1067).
gaacgaaagagatctttta

SEQ ID NO: 236128 - DNA, 19 bp, Homo sapiens
  siRNA target sequence for ECHDC1 (NM_018479.1,1052-1070).
cgaaagagatcttttagga

SEQ ID NO: 236129 - DNA, 19 bp, Homo sapiens
  siRNA target sequence for ECHDC1 (NM_018479.1,1101-1119).
gctattgctaagaaaggaa

SEQ ID NO: 236130 - DNA, 19 bp, Homo sapiens
  siRNA target sequence for ECHDC1 (NM_018479.1,1102-1120).
ctattgctaagaaaggaaa

SEQ ID NO: 236131 - DNA, 19 bp, Homo sapiens
  siRNA target sequence for ECHDC3 (NM_024693.2,348-366).
cagctggacggcataagga

SEQ ID NO: 236132 - DNA, 19 bp, Homo sapiens
  siRNA target sequence for ECHDC3 (NM_024693.2,457-475).
gcaacgatctgaaagtcat

SEQ ID NO: 236133 - DNA, 19 bp, Homo sapiens
  siRNA target sequence for ECHDC3 (NM_024693.2,508-526).
ctgggcatgacttaaagga

SEQ ID NO: 236134 - DNA, 19 bp, Homo sapiens
  siRNA target sequence for ECHDC3 (NM_024693.2,549-567).
gattaccatgccgaagtat

SEQ ID NO: 236135 - DNA, 19 bp, Homo sapiens
  siRNA target sequence for ECHDC3 (NM_024693.2,729-747).
gtcgggctcttctgttcta

SEQ ID NO: 236136 - DNA, 19 bp, Homo sapiens
  siRNA target sequence for ECHDC3 (NM_024693.2,766-784).
caagagcagtgcctagaaa

SEQ ID NO: 236137 - DNA, 19 bp, Homo sapiens
  siRNA target sequence for FA2H (NM_024306.2,294-312).
gctggctggagcagtacta

SEQ ID NO: 236138 - DNA, 19 bp, Homo sapiens
  siRNA target sequence for FA2H (NM_024306.2,658-676).
ccgactcttcacgtcattt

SEQ ID NO: 236139 - DNA, 19 bp, Homo sapiens
  siRNA target sequence for FA2H (NM_024306.2,659-677).
cgactcttcacgtcattta

SEQ ID NO: 236140 - DNA, 19 bp, Homo sapiens
  siRNA target sequence for FA2H (NM_024306.2,664-682).
cttcacgtcatttacaaca

SEQ ID NO: 236141 - DNA, 19 bp, Homo sapiens
  siRNA target sequence for FA2H (NM_024306.2,798-816).
ccagcgacagctattacct

SEQ ID NO: 236142 - DNA, 19 bp, Homo sapiens
  siRNA target sequence for FA2H (NM_024306.2,908-926).
gtgatcggcgtcttctact

SEQ ID NO: 236143 - DNA, 19 bp, Homo sapiens
  siRNA target sequence for FA2H (NM_024306.2,990-1008).
gctacgtcctctatgacat

SEQ ID NO: 236144 - DNA, 19 bp, Homo sapiens
  siRNA target sequence for FHL5 (NM_020482.3,478-496).
gacagtccatactgtgtta

SEQ ID NO: 236145 - DNA, 19 bp, Homo sapiens
  siRNA target sequence for FHL5 (NM_020482.3,497-515).
catgttatgatcgtgtatt

SEQ ID NO: 236146 - DNA, 19 bp, Homo sapiens
  siRNA target sequence for FHL5 (NM_020482.3,505-523).
gatcgtgtattttctaact

SEQ ID NO: 236147 - DNA, 19 bp, Homo sapiens
  siRNA target sequence for FHL5 (NM_020482.3,528-546).
cgaggaatgcaaaaaacca

SEQ ID NO: 236148 - DNA, 19 bp, Homo sapiens
  siRNA target sequence for FHL5 (NM_020482.3,531-549).
ggaatgcaaaaaaccaatt

SEQ ID NO: 236149 - DNA, 19 bp, Homo sapiens
  siRNA target sequence for FHL5 (NM_020482.3,537-555).
caaaaaaccaattgaatct

SEQ ID NO: 236150 - DNA, 19 bp, Homo sapiens
  siRNA target sequence for FHL5 (NM_020482.3,544-562).
ccaattgaatctgattcta

SEQ ID NO: 236151 - DNA, 19 bp, Homo sapiens
  siRNA target sequence for FHL5 (NM_020482.3,556-574).
gattctaaggatctttgtt

SEQ ID NO: 236152 - DNA, 19 bp, Homo sapiens
  siRNA target sequence for FHL5 (NM_020482.3,670-688).
ctgtgcacggagtgctatt

SEQ ID NO: 236153 - DNA, 19 bp, Homo sapiens
  siRNA target sequence for FHL5 (NM_020482.3,672-690).
gtgcacggagtgctattct

SEQ ID NO: 236154 - DNA, 19 bp, Homo sapiens
  siRNA target sequence for FHL5 (NM_020482.3,674-692).
gcacggagtgctattctaa

SEQ ID NO: 236155 - DNA, 19 bp, Homo sapiens
  siRNA target sequence for FHL5 (NM_020482.3,737-755).
ctggttcccgcaaaatgga

SEQ ID NO: 236156 - DNA, 19 bp, Homo sapiens
  siRNA target sequence for FHL5 (NM_020482.3,739-757).
ggttcccgcaaaatggaat

SEQ ID NO: 236157 - DNA, 19 bp, Homo sapiens
  siRNA target sequence for FHL5 (NM_020482.3,740-758).
gttcccgcaaaatggaatt

SEQ ID NO: 236158 - DNA, 19 bp, Homo sapiens
  siRNA target sequence for FHL5 (NM_020482.3,798-816).
gaattgccgacaacctata

SEQ ID NO: 236159 - DNA, 19 bp, Homo sapiens
  siRNA target sequence for FHL5 (NM_020482.3,817-835).
gggacaaagcctttgatct

SEQ ID NO: 236160 - DNA, 19 bp, Homo sapiens
  siRNA target sequence for FHL5 (NM_020482.3,883-901).
gctcactactgcaactttt

SEQ ID NO: 236161 - DNA, 19 bp, Homo sapiens
  siRNA target sequence for FHL5 (NM_020482.3,923-941).
gtgggataacattttgtga

SEQ ID NO: 236162 - DNA, 19 bp, Homo sapiens
  siRNA target sequence for FHL5 (NM_020482.3,1039-1057).
gactgctacaaccatcttt

SEQ ID NO: 236163 - DNA, 19 bp, Homo sapiens
  siRNA target sequence for FHL5 (NM_020482.3,1099-1117).
ctcacaggtgccaagttta

SEQ ID NO: 236164 - DNA, 19 bp, Homo sapiens
  siRNA target sequence for FHL5 (NM_020482.3,1213-1231).
gaaatcttctgccaaaaat

SEQ ID NO: 236165 - DNA, 19 bp, Homo sapiens
  siRNA target sequence for FLJ10925 (NM_018275.3,194-212).
gcgactactcgatgtactt

SEQ ID NO: 236166 - DNA, 19 bp, Homo sapiens
  siRNA target sequence for FLJ10925 (NM_018275.3,302-320).
gggagactgtccgttttct

SEQ ID NO: 236167 - DNA, 19 bp, Homo sapiens
  siRNA target sequence for FLJ10925 (NM_018275.3,644-662).
ccgtttcactggatagact

SEQ ID NO: 236168 - DNA, 19 bp, Homo sapiens
  siRNA target sequence for FLJ10925 (NM_018275.3,672-690).
gacacctaaggccaagatt

SEQ ID NO: 236169 - DNA, 19 bp, Homo sapiens
  siRNA target sequence for FLJ10925 (NM_018275.3,677-695).
ctaaggccaagattgtagt

SEQ ID NO: 236170 - DNA, 19 bp, Homo sapiens
  siRNA target sequence for FLJ10925 (NM_018275.3,767-785).
gatctcctggggagacatt

SEQ ID NO: 236171 - DNA, 19 bp, Homo sapiens
  siRNA target sequence for FLJ10925 (NM_018275.3,963-981).
cttcaacgccagttatcta

SEQ ID NO: 236172 - DNA, 19 bp, Homo sapiens
  siRNA target sequence for FLJ10925 (NM_018275.3,1291-1309).
gtgatgaccgcttcttgta

SEQ ID NO: 236173 - DNA, 19 bp, Homo sapiens
  siRNA target sequence for FLJ10925 (NM_018275.3,1323-1341).
gacctacgagcgtttcact

SEQ ID NO: 236174 - DNA, 19 bp, Homo sapiens
  siRNA target sequence for FLJ10925 (NM_018275.3,1860-1878).
gttgtctctggacaagatt

SEQ ID NO: 236175 - DNA, 19 bp, Homo sapiens
  siRNA target sequence for FLJ10948 (NM_018281.1,170-188).
ccaagggatcactgagatt

SEQ ID NO: 236176 - DNA, 19 bp, Homo sapiens
  siRNA target sequence for FLJ10948 (NM_018281.1,285-303).
cgtgtcctgctcttcagaa

SEQ ID NO: 236177 - DNA, 19 bp, Homo sapiens
  siRNA target sequence for FLJ10948 (NM_018281.1,516-534).
gcgaaggagctcatcttca

SEQ ID NO: 236178 - DNA, 19 bp, Homo sapiens
  siRNA target sequence for FLJ10948 (NM_018281.1,674-692).
cgtgcggctgggcaaagta

SEQ ID NO: 236179 - DNA, 19 bp, Homo sapiens
  siRNA target sequence for FLJ10948 (NM_018281.1,809-827).
gaagcggactcccaaattt

SEQ ID NO: 236180 - DNA, 19 bp, Homo sapiens
  siRNA target sequence for FLJ10948 (NM_018281.1,812-830).
gcggactcccaaatttgtt

SEQ ID NO: 236181 - DNA, 19 bp, Homo sapiens
  siRNA target sequence for FLJ12377 (NM_024989.1,138-156).
ctggaacctggcgttttat

SEQ ID NO: 236182 - DNA, 19 bp, Homo sapiens
  siRNA target sequence for FLJ12377 (NM_024989.1,140-158).
ggaacctggcgttttatgt

SEQ ID NO: 236183 - DNA, 19 bp, Homo sapiens
  siRNA target sequence for FLJ12377 (NM_024989.1,214-232).
gagaataagtgcagtatga

SEQ ID NO: 236184 - DNA, 19 bp, Homo sapiens
  siRNA target sequence for FLJ12377 (NM_024989.1,224-242).
gcagtatgagctacatgtt

SEQ ID NO: 236185 - DNA, 19 bp, Homo sapiens
  siRNA target sequence for FLJ12377 (NM_024989.1,227-245).
gtatgagctacatgtttga

SEQ ID NO: 236186 - DNA, 19 bp, Homo sapiens
  siRNA target sequence for FLJ12377 (NM_024989.1,246-264).
gtacccggagtatcagaaa

SEQ ID NO: 236187 - DNA, 19 bp, Homo sapiens
  siRNA target sequence for FLJ12377 (NM_024989.1,251-269).
cggagtatcagaaaataga

SEQ ID NO: 236188 - DNA, 19 bp, Homo sapiens
  siRNA target sequence for FLJ12377 (NM_024989.1,293-311).
gctatcccgcatatgagtt

SEQ ID NO: 236189 - DNA, 19 bp, Homo sapiens
  siRNA target sequence for FLJ12377 (NM_024989.1,299-317).
ccgcatatgagttgtatct

SEQ ID NO: 236190 - DNA, 19 bp, Homo sapiens
  siRNA target sequence for FLJ12377 (NM_024989.1,300-318).
cgcatatgagttgtatctt

SEQ ID NO: 236191 - DNA, 19 bp, Homo sapiens
  siRNA target sequence for FLJ12377 (NM_024989.1,327-345).
gggatcctatgctgaagaa

SEQ ID NO: 236192 - DNA, 19 bp, Homo sapiens
  siRNA target sequence for FLJ12377 (NM_024989.1,332-350).
cctatgctgaagaacacaa

SEQ ID NO: 236193 - DNA, 19 bp, Homo sapiens
  siRNA target sequence for FLJ12377 (NM_024989.1,357-375).
ccctttgacgggtattcca

SEQ ID NO: 236194 - DNA, 19 bp, Homo sapiens
  siRNA target sequence for FLJ12377 (NM_024989.1,365-383).
cgggtattccagttctctt

SEQ ID NO: 236195 - DNA, 19 bp, Homo sapiens
  siRNA target sequence for FLJ12377 (NM_024989.1,392-410).
gtaatgctggaagttataa

SEQ ID NO: 236196 - DNA, 19 bp, Homo sapiens
  siRNA target sequence for FLJ12377 (NM_024989.1,428-446).
gctccattgcacttagaaa

SEQ ID NO: 236197 - DNA, 19 bp, Homo sapiens
  siRNA target sequence for FLJ12377 (NM_024989.1,468-486).
gtaccactttgacttcttt

SEQ ID NO: 236198 - DNA, 19 bp, Homo sapiens
  siRNA target sequence for FLJ12377 (NM_024989.1,471-489).
ccactttgacttctttagt

SEQ ID NO: 236199 - DNA, 19 bp, Homo sapiens
  siRNA target sequence for FLJ12377 (NM_024989.1,563-581).
gtattaaaacaattctcaa

SEQ ID NO: 236200 - DNA, 19 bp, Homo sapiens
  siRNA target sequence for FLJ12377 (NM_024989.1,572-590).
caattctcaaactctataa

SEQ ID NO: 236201 - DNA, 19 bp, Homo sapiens
  siRNA target sequence for FLJ12377 (NM_024989.1,583-601).
ctctataagggtcaagaat

SEQ ID NO: 236202 - DNA, 19 bp, Homo sapiens
  siRNA target sequence for FLJ12377 (NM_024989.1,585-603).
ctataagggtcaagaattt

SEQ ID NO: 236203 - DNA, 19 bp, Homo sapiens
  siRNA target sequence for FLJ12377 (NM_024989.1,595-613).
caagaatttgctccaaaaa

SEQ ID NO: 236204 - DNA, 19 bp, Homo sapiens
  siRNA target sequence for FLJ12377 (NM_024989.1,607-625).
ccaaaaagtgtggcaataa

SEQ ID NO: 236205 - DNA, 19 bp, Homo sapiens
  siRNA target sequence for FLJ12377 (NM_024989.1,608-626).
caaaaagtgtggcaataat

SEQ ID NO: 236206 - DNA, 19 bp, Homo sapiens
  siRNA target sequence for FLJ12377 (NM_024989.1,618-636).
ggcaataattggtcattct

SEQ ID NO: 236207 - DNA, 19 bp, Homo sapiens
  siRNA target sequence for FLJ12377 (NM_024989.1,619-637).
gcaataattggtcattcta

SEQ ID NO: 236208 - DNA, 19 bp, Homo sapiens
  siRNA target sequence for FLJ12377 (NM_024989.1,620-638).
caataattggtcattctat

SEQ ID NO: 236209 - DNA, 19 bp, Homo sapiens
  siRNA target sequence for FLJ12377 (NM_024989.1,649-667).
gttgcaagagcattgctta

SEQ ID NO: 236210 - DNA, 19 bp, Homo sapiens
  siRNA target sequence for FLJ12377 (NM_024989.1,653-671).
caagagcattgcttacact

SEQ ID NO: 236211 - DNA, 19 bp, Homo sapiens
  siRNA target sequence for FLJ12377 (NM_024989.1,688-706).
gatctgataaatcttctta

SEQ ID NO: 236212 - DNA, 19 bp, Homo sapiens
  siRNA target sequence for FLJ12377 (NM_024989.1,693-711).
gataaatcttcttattaca

SEQ ID NO: 236213 - DNA, 19 bp, Homo sapiens
  siRNA target sequence for FLJ12377 (NM_024989.1,741-759).
gccattagatcgtttcatt

SEQ ID NO: 236214 - DNA, 19 bp, Homo sapiens
  siRNA target sequence for FLJ12377 (NM_024989.1,742-760).
ccattagatcgtttcatta

SEQ ID NO: 236215 - DNA, 19 bp, Homo sapiens
  siRNA target sequence for FLJ12377 (NM_024989.1,748-766).
gatcgtttcattacagatt

SEQ ID NO: 236216 - DNA, 19 bp, Homo sapiens
  siRNA target sequence for FLJ12377 (NM_024989.1,776-794).
ctgtaaacaactattggat

SEQ ID NO: 236217 - DNA, 19 bp, Homo sapiens
  siRNA target sequence for FLJ12377 (NM_024989.1,783-801).
caactattggattctaaat

SEQ ID NO: 236218 - DNA, 19 bp, Homo sapiens
  siRNA target sequence for FLJ12377 (NM_024989.1,796-814).
ctaaatgctcgacacataa

SEQ ID NO: 236219 - DNA, 19 bp, Homo sapiens
  siRNA target sequence for FLJ12377 (NM_024989.1,802-820).
gctcgacacataaatttaa

SEQ ID NO: 236220 - DNA, 19 bp, Homo sapiens
  siRNA target sequence for FLJ12377 (NM_024989.1,839-857).
gaggattccgggattacca

SEQ ID NO: 236221 - DNA, 19 bp, Homo sapiens
  siRNA target sequence for FLJ12377 (NM_024989.1,859-877).
gttcgttcaggattgactt

SEQ ID NO: 236222 - DNA, 19 bp, Homo sapiens
  siRNA target sequence for FLJ12377 (NM_024989.1,965-983).
ccattgtgtggtgtaaaca

SEQ ID NO: 236223 - DNA, 19 bp, Homo sapiens
  siRNA target sequence for FLJ12377 (NM_024989.1,995-1013).
ctacagttcgagcattctt

SEQ ID NO: 236224 - DNA, 19 bp, Homo sapiens
  siRNA target sequence for FLJ12377 (NM_024989.1,998-1016).
cagttcgagcattctttga

SEQ ID NO: 236225 - DNA, 19 bp, Homo sapiens
  siRNA target sequence for FLJ12377 (NM_024989.1,1003-1021).
cgagcattctttgatctta

SEQ ID NO: 236226 - DNA, 19 bp, Homo sapiens
  siRNA target sequence for FLJ12377 (NM_024989.1,1039-1057).
caaataactcaaaattcca

SEQ ID NO: 236227 - DNA, 19 bp, Homo sapiens
  siRNA target sequence for FLJ12377 (NM_024989.1,1077-1095).
gtatcaccactttataaga

SEQ ID NO: 236228 - DNA, 19 bp, Homo sapiens
  siRNA target sequence for FLJ12377 (NM_024989.1,1094-1112).
gacacccatcaaaacattt

SEQ ID NO: 236229 - DNA, 19 bp, Homo sapiens
  siRNA target sequence for FLJ12377 (NM_024989.1,1138-1156).
gacttaacagggacatcta

SEQ ID NO: 236230 - DNA, 19 bp, Homo sapiens
  siRNA target sequence for FLJ12377 (NM_024989.1,1165-1183).
ctagtaaaagtgtccaaat

SEQ ID NO: 236231 - DNA, 19 bp, Homo sapiens
  siRNA target sequence for FLJ12377 (NM_024989.1,1184-1202).
ggacctatgtagcttacaa

SEQ ID NO: 236232 - DNA, 19 bp, Homo sapiens
  siRNA target sequence for FLJ12377 (NM_024989.1,1200-1218).
caacgaatctgagaagata

SEQ ID NO: 236233 - DNA, 19 bp, Homo sapiens
  siRNA target sequence for FLJ12377 (NM_024989.1,1203-1221).
cgaatctgagaagatatat

SEQ ID NO: 236234 - DNA, 19 bp, Homo sapiens
  siRNA target sequence for FLJ12377 (NM_024989.1,1339-1357).
caaggggttgatttatcat

SEQ ID NO: 236235 - DNA, 19 bp, Homo sapiens
  siRNA target sequence for FLJ12377 (NM_024989.1,1364-1382).
ctgaactgctgccaacaat

SEQ ID NO: 236236 - DNA, 19 bp, Homo sapiens
  siRNA target sequence for FLJ12377 (NM_024989.1,1405-1423).
caagactatccatctttgt

SEQ ID NO: 236237 - DNA, 19 bp, Homo sapiens
  siRNA target sequence for FLJ12377 (NM_024989.1,1418-1436).
ctttgtctcatcttgttgt

SEQ ID NO: 236238 - DNA, 19 bp, Homo sapiens
  siRNA target sequence for FLJ12377 (NM_024989.1,1445-1463).
catctgttcgtggaagtaa

SEQ ID NO: 236239 - DNA, 19 bp, Homo sapiens
  siRNA target sequence for FLJ12377 (NM_024989.1,1448-1466).
ctgttcgtggaagtaagtt

SEQ ID NO: 236240 - DNA, 19 bp, Homo sapiens
  siRNA target sequence for FLJ12377 (NM_024989.1,1457-1475).
gaagtaagtttgttgtaga

SEQ ID NO: 236241 - DNA, 19 bp, Homo sapiens
  siRNA target sequence for FLJ12377 (NM_024989.1,1468-1486).
gttgtagattgtgaattct

SEQ ID NO: 236242 - DNA, 19 bp, Homo sapiens
  siRNA target sequence for FLJ12377 (NM_024989.1,1512-1530).
gcttcctgtaactcatctt

SEQ ID NO: 236243 - DNA, 19 bp, Homo sapiens
  siRNA target sequence for FLJ12377 (NM_024989.1,1513-1531).
cttcctgtaactcatcttt

SEQ ID NO: 236244 - DNA, 19 bp, Homo sapiens
  siRNA target sequence for FLJ12377 (NM_024989.1,1550-1568).
caaggaaagtggtgttaaa

SEQ ID NO: 236245 - DNA, 19 bp, Homo sapiens
  siRNA target sequence for FLJ12377 (NM_024989.1,1571-1589).
caaatggcctatactacaa

SEQ ID NO: 236246 - DNA, 19 bp, Homo sapiens
  siRNA target sequence for FLJ12377 (NM_024989.1,1577-1595).
gcctatactacaatctaga

SEQ ID NO: 236247 - DNA, 19 bp, Homo sapiens
  siRNA target sequence for FLJ12377 (NM_024989.1,1600-1618).
ctgaactttggacagatat

SEQ ID NO: 236248 - DNA, 19 bp, Homo sapiens
  siRNA target sequence for FLJ12377 (NM_024989.1,1610-1628).
gacagatataccaagcttt

SEQ ID NO: 236249 - DNA, 19 bp, Homo sapiens
  siRNA target sequence for FLJ12377 (NM_024989.1,1612-1630).
cagatataccaagctttta

SEQ ID NO: 236250 - DNA, 19 bp, Homo sapiens
  siRNA target sequence for FLJ12377 (NM_024989.1,1669-1687).
gaaataaccagtatctata

SEQ ID NO: 236251 - DNA, 19 bp, Homo sapiens
  siRNA target sequence for FLJ12377 (NM_024989.1,1679-1697).
gtatctatagacttcatat

SEQ ID NO: 236252 - DNA, 19 bp, Homo sapiens
  siRNA target sequence for FLJ12377 (NM_024989.1,1703-1721).
ggtcttatgaagattcact

SEQ ID NO: 236253 - DNA, 19 bp, Homo sapiens
  siRNA target sequence for FLJ12377 (NM_024989.1,1704-1722).
gtcttatgaagattcacta

SEQ ID NO: 236254 - DNA, 19 bp, Homo sapiens
  siRNA target sequence for FLJ12377 (NM_024989.1,1834-1852).
cggtacgaggtgacagtta

SEQ ID NO: 236255 - DNA, 19 bp, Homo sapiens
  siRNA target sequence for FLJ12377 (NM_024989.1,1839-1857).
cgaggtgacagttaagact

SEQ ID NO: 236256 - DNA, 19 bp, Homo sapiens
  siRNA target sequence for FLJ12377 (NM_024989.1,1840-1858).
gaggtgacagttaagactt

SEQ ID NO: 236257 - DNA, 19 bp, Homo sapiens
  siRNA target sequence for FLJ14906 (NM_032859.1,133-151).
gttggttaacctcaaagtt

SEQ ID NO: 236258 - DNA, 19 bp, Homo sapiens
  siRNA target sequence for FLJ14906 (NM_032859.1,167-185).
gattatcgaggatatggaa

SEQ ID NO: 236259 - DNA, 19 bp, Homo sapiens
  siRNA target sequence for FLJ14906 (NM_032859.1,228-246).
ctgaagctgtgttagacta

SEQ ID NO: 236260 - DNA, 19 bp, Homo sapiens
  siRNA target sequence for FLJ14906 (NM_032859.1,255-273).
ctagacctgaccttgataa

SEQ ID NO: 236261 - DNA, 19 bp, Homo sapiens
  siRNA target sequence for FLJ14906 (NM_032859.1,328-346).
ggcttctgaaaattcacat

SEQ ID NO: 236262 - DNA, 19 bp, Homo sapiens
  siRNA target sequence for FLJ14906 (NM_032859.1,364-382).
ggtggagaacacattttta

SEQ ID NO: 236263 - DNA, 19 bp, Homo sapiens
  siRNA target sequence for FLJ14906 (NM_032859.1,392-410).
catatggccagcactttat

SEQ ID NO: 236264 - DNA, 19 bp, Homo sapiens
  siRNA target sequence for FLJ14906 (NM_032859.1,418-436).
ctttccgatgcgttacctt

SEQ ID NO: 236265 - DNA, 19 bp, Homo sapiens
  siRNA target sequence for FLJ14906 (NM_032859.1,423-441).
cgatgcgttaccttccttt

SEQ ID NO: 236266 - DNA, 19 bp, Homo sapiens
  siRNA target sequence for FLJ14906 (NM_032859.1,424-442).
gatgcgttaccttccttta

SEQ ID NO: 236267 - DNA, 19 bp, Homo sapiens
  siRNA target sequence for FLJ14906 (NM_032859.1,428-446).
cgttaccttcctttatggt

SEQ ID NO: 236268 - DNA, 19 bp, Homo sapiens
  siRNA target sequence for FLJ14906 (NM_032859.1,466-484).
gtcctacagaaaaatctct

SEQ ID NO: 236269 - DNA, 19 bp, Homo sapiens
  siRNA target sequence for FLJ14906 (NM_032859.1,489-507).
gtagaatgccttcactttt

SEQ ID NO: 236270 - DNA, 19 bp, Homo sapiens
  siRNA target sequence for FLJ14906 (NM_032859.1,520-538).
ctcagatcaattaattcca

SEQ ID NO: 236271 - DNA, 19 bp, Homo sapiens
  siRNA target sequence for FLJ14906 (NM_032859.1,537-555).
caccagtaatgatgaaaca

SEQ ID NO: 236272 - DNA, 19 bp, Homo sapiens
  siRNA target sequence for FLJ14906 (NM_032859.1,572-590).
ccatctcggactaagagat

SEQ ID NO: 236273 - DNA, 19 bp, Homo sapiens
  siRNA target sequence for FLJ14906 (NM_032859.1,573-591).
catctcggactaagagatt

SEQ ID NO: 236274 - DNA, 19 bp, Homo sapiens
  siRNA target sequence for FLJ14906 (NM_032859.1,627-645).
ggcagtgccaaggctattt

SEQ ID NO: 236275 - DNA, 19 bp, Homo sapiens
  siRNA target sequence for FLJ14906 (NM_032859.1,631-649).
gtgccaaggctatttcact

SEQ ID NO: 236276 - DNA, 19 bp, Homo sapiens
  siRNA target sequence for FLJ14906 (NM_032859.1,640-658).
ctatttcactgcacttgaa

SEQ ID NO: 236277 - DNA, 19 bp, Homo sapiens
  siRNA target sequence for FLJ14906 (NM_032859.1,648-666).
ctgcacttgaacagttcat

SEQ ID NO: 236278 - DNA, 19 bp, Homo sapiens
  siRNA target sequence for FLJ14906 (NM_032859.1,703-721).
ggcaaaaacttcatctaat

SEQ ID NO: 236279 - DNA, 19 bp, Homo sapiens
  siRNA target sequence for FLJ14906 (NM_032859.1,714-732).
catctaatgtaacaattat

SEQ ID NO: 236280 - DNA, 19 bp, Homo sapiens
  siRNA target sequence for FLJ20581 (NM_017888.2,292-310).
gtgcctgagtacttcaact

SEQ ID NO: 236281 - DNA, 19 bp, Homo sapiens
  siRNA target sequence for FLJ20581 (NM_017888.2,558-576).
gacagggactgtgatgatt

SEQ ID NO: 236282 - DNA, 19 bp, Homo sapiens
  siRNA target sequence for FLJ20581 (NM_017888.2,816-834).
cccgctggccatctacttt

SEQ ID NO: 236283 - DNA, 19 bp, Homo sapiens
  siRNA target sequence for FLJ20581 (NM_017888.2,817-835).
ccgctggccatctacttta

SEQ ID NO: 236284 - DNA, 19 bp, Homo sapiens
  siRNA target sequence for FLJ20581 (NM_017888.2,1340-1358).
cctacgatgtgcagattgt

SEQ ID NO: 236285 - DNA, 19 bp, Homo sapiens
  siRNA target sequence for FLJ20581 (NM_017888.2,1434-1452).
ctgtttcttcaattgctat

SEQ ID NO: 236286 - DNA, 19 bp, Homo sapiens
  siRNA target sequence for FLJ20920 (NM_025149.2,219-237).
ggggtgcaccaaaaagcat

SEQ ID NO: 236287 - DNA, 19 bp, Homo sapiens
  siRNA target sequence for FLJ20920 (NM_025149.2,224-242).
gcaccaaaaagcatcttaa

SEQ ID NO: 236288 - DNA, 19 bp, Homo sapiens
  siRNA target sequence for FLJ20920 (NM_025149.2,424-442).
ggacctaactcctatgcat

SEQ ID NO: 236289 - DNA, 19 bp, Homo sapiens
  siRNA target sequence for FLJ20920 (NM_025149.2,512-530).
ctatggaactggagtatgt

SEQ ID NO: 236290 - DNA, 19 bp, Homo sapiens
  siRNA target sequence for FLJ20920 (NM_025149.2,794-812).
gccatgaccccatcaacat

SEQ ID NO: 236291 - DNA, 19 bp, Homo sapiens
  siRNA target sequence for FLJ20920 (NM_025149.2,879-897).
caactccaacattttagga

SEQ ID NO: 236292 - DNA, 19 bp, Homo sapiens
  siRNA target sequence for FLJ20920 (NM_025149.2,949-967).
cccaaccccctgtaccatt

SEQ ID NO: 236293 - DNA, 19 bp, Homo sapiens
  siRNA target sequence for FLJ20920 (NM_025149.2,977-995).
ccgtggcaggcacaatgat

SEQ ID NO: 236294 - DNA, 19 bp, Homo sapiens
  siRNA target sequence for FLJ20920 (NM_025149.2,1081-1099).
ggcaccttcctgtatggta

SEQ ID NO: 236295 - DNA, 19 bp, Homo sapiens
  siRNA target sequence for FLJ20920 (NM_025149.2,1133-1151).
cagacttctccagttatga

SEQ ID NO: 236296 - DNA, 19 bp, Homo sapiens
  siRNA target sequence for FLJ20920 (NM_025149.2,1483-1501).
gatcaggacaagtggtatt

SEQ ID NO: 236297 - DNA, 19 bp, Homo sapiens
  siRNA target sequence for FLJ20920 (NM_025149.2,1555-1573).
cgctctaaggatatgatca

SEQ ID NO: 236298 - DNA, 19 bp, Homo sapiens
  siRNA target sequence for FLJ20920 (NM_025149.2,1576-1594).
cggggtggtgagaacatct

SEQ ID NO: 236299 - DNA, 19 bp, Homo sapiens
  siRNA target sequence for FLJ20920 (NM_025149.2,1577-1595).
ggggtggtgagaacatcta

SEQ ID NO: 236300 - DNA, 19 bp, Homo sapiens
  siRNA target sequence for FLJ20920 (NM_025149.2,1606-1624).
ctcgaggacttctttcaca

SEQ ID NO: 236301 - DNA, 19 bp, Homo sapiens
  siRNA target sequence for FLJ20920 (NM_025149.2,1674-1692).
gatgggggaagagatttgt

SEQ ID NO: 236302 - DNA, 19 bp, Homo sapiens
  siRNA target sequence for FLJ20920 (NM_025149.2,1781-1799).
cgaagtacatcgtgtttgt

SEQ ID NO: 236303 - DNA, 19 bp, Homo sapiens
  siRNA target sequence for FLJ20920 (NM_025149.2,1854-1872).
gcagatggaacgacatcta

SEQ ID NO: 236304 - DNA, 19 bp, Homo sapiens
  siRNA target sequence for FLJ20920 (NM_025149.2,1855-1873).
cagatggaacgacatctaa

SEQ ID NO: 236305 - DNA, 19 bp, Homo sapiens
  siRNA target sequence for FLJ20920 (NM_025149.2,1857-1875).
gatggaacgacatctaaat

SEQ ID NO: 236306 - DNA, 19 bp, Homo sapiens
  siRNA target sequence for FLJ20920 (NM_025149.2,1861-1879).
gaacgacatctaaatctgt

SEQ ID NO: 236307 - DNA, 19 bp, Homo sapiens
  siRNA target sequence for FLJ21820 (NM_021925.1,95-113).
gccgaaacccaggttctaa

SEQ ID NO: 236308 - DNA, 19 bp, Homo sapiens
  siRNA target sequence for FLJ21820 (NM_021925.1,96-114).
ccgaaacccaggttctaaa

SEQ ID NO: 236309 - DNA, 19 bp, Homo sapiens
  siRNA target sequence for FLJ21820 (NM_021925.1,97-115).
cgaaacccaggttctaaaa

SEQ ID NO: 236310 - DNA, 19 bp, Homo sapiens
  siRNA target sequence for FLJ21820 (NM_021925.1,123-141).
cctggacagacctctttca

SEQ ID NO: 236311 - DNA, 19 bp, Homo sapiens
  siRNA target sequence for FLJ21820 (NM_021925.1,129-147).
cagacctctttcatgatca

SEQ ID NO: 236312 - DNA, 19 bp, Homo sapiens
  siRNA target sequence for FLJ21820 (NM_021925.1,131-149).
gacctctttcatgatcaaa

SEQ ID NO: 236313 - DNA, 19 bp, Homo sapiens
  siRNA target sequence for FLJ21820 (NM_021925.1,133-151).
cctctttcatgatcaaagt

SEQ ID NO: 236314 - DNA, 19 bp, Homo sapiens
  siRNA target sequence for FLJ21820 (NM_021925.1,161-179).
cctaagctgcttattttca

SEQ ID NO: 236315 - DNA, 19 bp, Homo sapiens
  siRNA target sequence for FLJ21820 (NM_021925.1,229-247).
ggctttatactctttgaca

SEQ ID NO: 236316 - DNA, 19 bp, Homo sapiens
  siRNA target sequence for FLJ21820 (NM_021925.1,290-308).
gcgttggctcccaaagaca

SEQ ID NO: 236317 - DNA, 19 bp, Homo sapiens
  siRNA target sequence for FLJ21820 (NM_021925.1,375-393).
gacaaatagagcacaaact

SEQ ID NO: 236318 - DNA, 19 bp, Homo sapiens
  siRNA target sequence for FLJ21820 (NM_021925.1,459-477).
gctatttcacacttcagat

SEQ ID NO: 236319 - DNA, 19 bp, Homo sapiens
  siRNA target sequence for FLJ21820 (NM_021925.1,550-568).
gtcacccaatggcagaatt

SEQ ID NO: 236320 - DNA, 19 bp, Homo sapiens
  siRNA target sequence for FLJ21820 (NM_021925.1,564-582).
gaattgccactccactttt

SEQ ID NO: 236321 - DNA, 19 bp, Homo sapiens
  siRNA target sequence for FLJ21820 (NM_021925.1,578-596).
cttttgtgctggtttcgat

SEQ ID NO: 236322 - DNA, 19 bp, Homo sapiens
  siRNA target sequence for FLJ21820 (NM_021925.1,583-601).
gtgctggtttcgatatgtt

SEQ ID NO: 236323 - DNA, 19 bp, Homo sapiens
  siRNA target sequence for FLJ21820 (NM_021925.1,585-603).
gctggtttcgatatgttct

SEQ ID NO: 236324 - DNA, 19 bp, Homo sapiens
  siRNA target sequence for FLJ21820 (NM_021925.1,588-606).
ggtttcgatatgttctcta

SEQ ID NO: 236325 - DNA, 19 bp, Homo sapiens
  siRNA target sequence for FLJ21820 (NM_021925.1,589-607).
gtttcgatatgttctctat

SEQ ID NO: 236326 - DNA, 19 bp, Homo sapiens
  siRNA target sequence for FLJ21820 (NM_021925.1,633-651).
cgtgtcctgagacaatcaa

SEQ ID NO: 236327 - DNA, 19 bp, Homo sapiens
  siRNA target sequence for FLJ21820 (NM_021925.1,645-663).
caatcaagtccttgctaat

SEQ ID NO: 236328 - DNA, 19 bp, Homo sapiens
  siRNA target sequence for FLJ21820 (NM_021925.1,649-667).
caagtccttgctaatcaga

SEQ ID NO: 236329 - DNA, 19 bp, Homo sapiens
  siRNA target sequence for FLJ21820 (NM_021925.1,664-682).
cagaaggggccttcaagta

SEQ ID NO: 236330 - DNA, 19 bp, Homo sapiens
  siRNA target sequence for FLJ21820 (NM_021925.1,669-687).
ggggccttcaagtaatgaa

SEQ ID NO: 236331 - DNA, 19 bp, Homo sapiens
  siRNA target sequence for FLJ21820 (NM_021925.1,806-824).
gagcatttatgtaagctta

SEQ ID NO: 236332 - DNA, 19 bp, Homo sapiens
  siRNA target sequence for FLJ21820 (NM_021925.1,816-834).
gtaagcttacattttatta

SEQ ID NO: 236333 - DNA, 19 bp, Homo sapiens
  siRNA target sequence for FLJ21820 (NM_021925.1,820-838).
gcttacattttattatggt

SEQ ID NO: 236334 - DNA, 19 bp, Homo sapiens
  siRNA target sequence for FLJ21820 (NM_021925.1,852-870).
ggtgtccaaaagagtacta

SEQ ID NO: 236335 - DNA, 19 bp, Homo sapiens
  siRNA target sequence for FLJ21820 (NM_021925.1,853-871).
gtgtccaaaagagtactat

SEQ ID NO: 236336 - DNA, 19 bp, Homo sapiens
  siRNA target sequence for FLJ21820 (NM_021925.1,858-876).
caaaagagtactatgaaga

SEQ ID NO: 236337 - DNA, 19 bp, Homo sapiens
  siRNA target sequence for FLJ21820 (NM_021925.1,863-881).
gagtactatgaagacatta

SEQ ID NO: 236338 - DNA, 19 bp, Homo sapiens
  siRNA target sequence for FLJ21820 (NM_021925.1,908-926).
cgactctgtgagaaaaaca

SEQ ID NO: 236339 - DNA, 19 bp, Homo sapiens
  siRNA target sequence for FLJ21820 (NM_021925.1,936-954).
ctttcatcacccattttaa

SEQ ID NO: 236340 - DNA, 19 bp, Homo sapiens
  siRNA target sequence for FLJ21820 (NM_021925.1,992-1010).
gatgacttgtccaaaatgt

SEQ ID NO: 236341 - DNA, 19 bp, Homo sapiens
  siRNA target sequence for FLJ21963 (NM_024560.2,105-123).
ggctgcagtgtcgtaaagt

SEQ ID NO: 236342 - DNA, 19 bp, Homo sapiens
  siRNA target sequence for FLJ21963 (NM_024560.2,107-125).
ctgcagtgtcgtaaagtca

SEQ ID NO: 236343 - DNA, 19 bp, Homo sapiens
  siRNA target sequence for FLJ21963 (NM_024560.2,261-279).
gcagtggcagcgagtacaa

SEQ ID NO: 236344 - DNA, 19 bp, Homo sapiens
  siRNA target sequence for FLJ21963 (NM_024560.2,407-425).
gtggaaggaatgcttaaca

SEQ ID NO: 236345 - DNA, 19 bp, Homo sapiens
  siRNA target sequence for FLJ21963 (NM_024560.2,409-427).
ggaaggaatgcttaacatt

SEQ ID NO: 236346 - DNA, 19 bp, Homo sapiens
  siRNA target sequence for FLJ21963 (NM_024560.2,418-436).
gcttaacatttgttacaat

SEQ ID NO: 236347 - DNA, 19 bp, Homo sapiens
  siRNA target sequence for FLJ21963 (NM_024560.2,438-456).
ccgttgatcgtcatattga

SEQ ID NO: 236348 - DNA, 19 bp, Homo sapiens
  siRNA target sequence for FLJ21963 (NM_024560.2,439-457).
cgttgatcgtcatattgaa

SEQ ID NO: 236349 - DNA, 19 bp, Homo sapiens
  siRNA target sequence for FLJ21963 (NM_024560.2,446-464).
cgtcatattgaaaatggta

SEQ ID NO: 236350 - DNA, 19 bp, Homo sapiens
  siRNA target sequence for FLJ21963 (NM_024560.2,470-488).
gataagattgctatcatct

SEQ ID NO: 236351 - DNA, 19 bp, Homo sapiens
  siRNA target sequence for FLJ21963 (NM_024560.2,495-513).
gtcctgttacaaacactaa

SEQ ID NO: 236352 - DNA, 19 bp, Homo sapiens
  siRNA target sequence for FLJ21963 (NM_024560.2,574-592).
caagcatggcatcaagaaa

SEQ ID NO: 236353 - DNA, 19 bp, Homo sapiens
  siRNA target sequence for FLJ21963 (NM_024560.2,593-611).
ggtgacactgtggttatct

SEQ ID NO: 236354 - DNA, 19 bp, Homo sapiens
  siRNA target sequence for FLJ21963 (NM_024560.2,594-612).
gtgacactgtggttatcta

SEQ ID NO: 236355 - DNA, 19 bp, Homo sapiens
  siRNA target sequence for FLJ21963 (NM_024560.2,622-640).
gatcccacaggcgatgtat

SEQ ID NO: 236356 - DNA, 19 bp, Homo sapiens
  siRNA target sequence for FLJ21963 (NM_024560.2,626-644).
ccacaggcgatgtatacca

SEQ ID NO: 236357 - DNA, 19 bp, Homo sapiens
  siRNA target sequence for FLJ21963 (NM_024560.2,627-645).
cacaggcgatgtataccat

SEQ ID NO: 236358 - DNA, 19 bp, Homo sapiens
  siRNA target sequence for FLJ21963 (NM_024560.2,646-664).
gttggcatgtgcaaggata

SEQ ID NO: 236359 - DNA, 19 bp, Homo sapiens
  siRNA target sequence for FLJ21963 (NM_024560.2,698-716).
gcttccaaagaactaagta

SEQ ID NO: 236360 - DNA, 19 bp, Homo sapiens
  siRNA target sequence for FLJ21963 (NM_024560.2,717-735).
gtcgcattgatcatgtaaa

SEQ ID NO: 236361 - DNA, 19 bp, Homo sapiens
  siRNA target sequence for FLJ21963 (NM_024560.2,774-792).
ctggaaggagggtagagta

SEQ ID NO: 236362 - DNA, 19 bp, Homo sapiens
  siRNA target sequence for FLJ21963 (NM_024560.2,793-811).
cgtaccacttgtagaagaa

SEQ ID NO: 236363 - DNA, 19 bp, Homo sapiens
  siRNA target sequence for FLJ21963 (NM_024560.2,968-986).
ccactgtatattctttaca

SEQ ID NO: 236364 - DNA, 19 bp, Homo sapiens
  siRNA target sequence for FLJ21963 (NM_024560.2,992-1010).
ggcacaacggggttaccta

SEQ ID NO: 236365 - DNA, 19 bp, Homo sapiens
  siRNA target sequence for FLJ21963 (NM_024560.2,993-1011).
gcacaacggggttacctaa

SEQ ID NO: 236366 - DNA, 19 bp, Homo sapiens
  siRNA target sequence for FLJ21963 (NM_024560.2,1048-1066).
gctacactggtcaatgtct

SEQ ID NO: 236367 - DNA, 19 bp, Homo sapiens
  siRNA target sequence for FLJ21963 (NM_024560.2,1049-1067).
ctacactggtcaatgtctt

SEQ ID NO: 236368 - DNA, 19 bp, Homo sapiens
  siRNA target sequence for FLJ21963 (NM_024560.2,1099-1117).
gtgggcagcttctgactta

SEQ ID NO: 236369 - DNA, 19 bp, Homo sapiens
  siRNA target sequence for FLJ21963 (NM_024560.2,1123-1141).
ggttgttggacattcctat

SEQ ID NO: 236370 - DNA, 19 bp, Homo sapiens
  siRNA target sequence for FLJ21963 (NM_024560.2,1124-1142).
gttgttggacattcctata

SEQ ID NO: 236371 - DNA, 19 bp, Homo sapiens
  siRNA target sequence for FLJ21963 (NM_024560.2,1144-1162).
ctgctatggacctcttctt

SEQ ID NO: 236372 - DNA, 19 bp, Homo sapiens
  siRNA target sequence for FLJ21963 (NM_024560.2,1146-1164).
gctatggacctcttcttca

SEQ ID NO: 236373 - DNA, 19 bp, Homo sapiens
  siRNA target sequence for FLJ21963 (NM_024560.2,1166-1184).
gggaacacaacagttttat

SEQ ID NO: 236374 - DNA, 19 bp, Homo sapiens
  siRNA target sequence for FLJ21963 (NM_024560.2,1208-1226).
ccagatgctggcgcttatt

SEQ ID NO: 236375 - DNA, 19 bp, Homo sapiens
  siRNA target sequence for FLJ21963 (NM_024560.2,1209-1227).
cagatgctggcgcttattt

SEQ ID NO: 236376 - DNA, 19 bp, Homo sapiens
  siRNA target sequence for FLJ21963 (NM_024560.2,1334-1352).
ctgacaaggttcaaaacat

SEQ ID NO: 236377 - DNA, 19 bp, Homo sapiens
  siRNA target sequence for FLJ21963 (NM_024560.2,1365-1383).
gagaacgatgtgatgtaga

SEQ ID NO: 236378 - DNA, 19 bp, Homo sapiens
  siRNA target sequence for FLJ21963 (NM_024560.2,1408-1426).
cttcagagtacctgtctta

SEQ ID NO: 236379 - DNA, 19 bp, Homo sapiens
  siRNA target sequence for FLJ21963 (NM_024560.2,1475-1493).
gttggattaggcaattcta

SEQ ID NO: 236380 - DNA, 19 bp, Homo sapiens
  siRNA target sequence for FLJ21963 (NM_024560.2,1478-1496).
ggattaggcaattctaaaa

SEQ ID NO: 236381 - DNA, 19 bp, Homo sapiens
  siRNA target sequence for FLJ21963 (NM_024560.2,1576-1594).
ggctcggtgtttaggaaat

SEQ ID NO: 236382 - DNA, 19 bp, Homo sapiens
  siRNA target sequence for FLJ21963 (NM_024560.2,1577-1595).
gctcggtgtttaggaaata

SEQ ID NO: 236383 - DNA, 19 bp, Homo sapiens
  siRNA target sequence for FLJ21963 (NM_024560.2,1651-1669).
ggaagcattcaagcattta

SEQ ID NO: 236384 - DNA, 19 bp, Homo sapiens
  siRNA target sequence for FLJ21963 (NM_024560.2,1727-1745).
gaaggctatttgtatgtta

SEQ ID NO: 236385 - DNA, 19 bp, Homo sapiens
  siRNA target sequence for FLJ21963 (NM_024560.2,1747-1765).
gtctcgagtggatgatgta

SEQ ID NO: 236386 - DNA, 19 bp, Homo sapiens
  siRNA target sequence for FLJ21963 (NM_024560.2,1749-1767).
ctcgagtggatgatgtaat

SEQ ID NO: 236387 - DNA, 19 bp, Homo sapiens
  siRNA target sequence for FLJ21963 (NM_024560.2,1751-1769).
cgagtggatgatgtaataa

SEQ ID NO: 236388 - DNA, 19 bp, Homo sapiens
  siRNA target sequence for FLJ21963 (NM_024560.2,1854-1872).
gcaaggaagatcccttaaa

SEQ ID NO: 236389 - DNA, 19 bp, Homo sapiens
  siRNA target sequence for FLJ21963 (NM_024560.2,1855-1873).
caaggaagatcccttaaaa

SEQ ID NO: 236390 - DNA, 19 bp, Homo sapiens
  siRNA target sequence for FLJ21963 (NM_024560.2,1883-1901).
cccttagcactctgtgtat

SEQ ID NO: 236391 - DNA, 19 bp, Homo sapiens
  siRNA target sequence for FLJ21963 (NM_024560.2,1884-1902).
ccttagcactctgtgtatt

SEQ ID NO: 236392 - DNA, 19 bp, Homo sapiens
  siRNA target sequence for FLJ21963 (NM_024560.2,2038-2056).
gatcccccgatcagcttta

SEQ ID NO: 236393 - DNA, 19 bp, Homo sapiens
  siRNA target sequence for FLJ21963 (NM_024560.2,2041-2059).
cccccgatcagctttatct

SEQ ID NO: 236394 - DNA, 19 bp, Homo sapiens
  siRNA target sequence for FLJ21963 (NM_024560.2,2051-2069).
gctttatctgccattgtca

SEQ ID NO: 236395 - DNA, 19 bp, Homo sapiens
  siRNA target sequence for FLJ21963 (NM_024560.2,2072-2090).
ggcaagccatacaagataa

SEQ ID NO: 236396 - DNA, 19 bp, Homo sapiens
  siRNA target sequence for FLJ21963 (NM_024560.2,2074-2092).
caagccatacaagataact

SEQ ID NO: 236397 - DNA, 19 bp, Homo sapiens
  siRNA target sequence for FLJ21963 (NM_024560.2,2086-2104).
gataacttctacaattgaa

SEQ ID NO: 236398 - DNA, 19 bp, Homo sapiens
  siRNA target sequence for FLJ23469 (NM_024710.1,482-500).
cttggacccccgttcttat

SEQ ID NO: 236399 - DNA, 19 bp, Homo sapiens
  siRNA target sequence for FLJ23469 (NM_024710.1,700-718).
ccgtccacccccagttcaa

SEQ ID NO: 236400 - DNA, 19 bp, Homo sapiens
  siRNA target sequence for FLJ25449 (NM_144714.1,187-205).
gagcaccaataatgcttta

SEQ ID NO: 236401 - DNA, 19 bp, Homo sapiens
  siRNA target sequence for FLJ25449 (NM_144714.1,370-388).
cacattaccctgttccata

SEQ ID NO: 236402 - DNA, 19 bp, Homo sapiens
  siRNA target sequence for FLJ25449 (NM_144714.1,384-402).
ccatatgcaagcacgaaat

SEQ ID NO: 236403 - DNA, 19 bp, Homo sapiens
  siRNA target sequence for FLJ25449 (NM_144714.1,385-403).
catatgcaagcacgaaatt

SEQ ID NO: 236404 - DNA, 19 bp, Homo sapiens
  siRNA target sequence for FLJ25449 (NM_144714.1,424-442).
ccataagaagcaacatgta

SEQ ID NO: 236405 - DNA, 19 bp, Homo sapiens
  siRNA target sequence for FLJ25449 (NM_144714.1,449-467).
gccacgctgggtttccaat

SEQ ID NO: 236406 - DNA, 19 bp, Homo sapiens
  siRNA target sequence for FLJ25449 (NM_144714.1,453-471).
cgctgggtttccaatggat

SEQ ID NO: 236407 - DNA, 19 bp, Homo sapiens
  siRNA target sequence for FLJ25449 (NM_144714.1,504-522).
ctgttcagagacagttcat

SEQ ID NO: 236408 - DNA, 19 bp, Homo sapiens
  siRNA target sequence for FLJ25449 (NM_144714.1,513-531).
gacagttcatgatttctaa

SEQ ID NO: 236409 - DNA, 19 bp, Homo sapiens
  siRNA target sequence for FLJ25449 (NM_144714.1,523-541).
gatttctaaactattgtca

SEQ ID NO: 236410 - DNA, 19 bp, Homo sapiens
  siRNA target sequence for FLJ25449 (NM_144714.1,585-603).
cttttgagctgctttggaa

SEQ ID NO: 236411 - DNA, 19 bp, Homo sapiens
  siRNA target sequence for FLJ25449 (NM_144714.1,608-626).
caaataccagcatactata

SEQ ID NO: 236412 - DNA, 19 bp, Homo sapiens
  siRNA target sequence for FLJ25449 (NM_144714.1,644-662).
gacaggagtgtcatatatt

SEQ ID NO: 236413 - DNA, 19 bp, Homo sapiens
  siRNA target sequence for FLJ25449 (NM_144714.1,651-669).
gtgtcatatattctcaaaa

SEQ ID NO: 236414 - DNA, 19 bp, Homo sapiens
  siRNA target sequence for FLJ25449 (NM_144714.1,712-730).
caggaattctacatggaaa

SEQ ID NO: 236415 - DNA, 19 bp, Homo sapiens
  siRNA target sequence for FLJ25449 (NM_144714.1,751-769).
cactgtagtgagtaatttt

SEQ ID NO: 236416 - DNA, 19 bp, Homo sapiens
  siRNA target sequence for FLJ25449 (NM_144714.1,827-845).
gcggcagagttgacatcaa

SEQ ID NO: 236417 - DNA, 19 bp, Homo sapiens
  siRNA target sequence for FLJ25449 (NM_144714.1,828-846).
cggcagagttgacatcaat

SEQ ID NO: 236418 - DNA, 19 bp, Homo sapiens
  siRNA target sequence for FLJ25449 (NM_144714.1,843-861).
caatggaactcccagtttt

SEQ ID NO: 236419 - DNA, 19 bp, Homo sapiens
  siRNA target sequence for FLJ25449 (NM_144714.1,887-905).
gatccttcttaccaaatga

SEQ ID NO: 236420 - DNA, 19 bp, Homo sapiens
  siRNA target sequence for FLJ25449 (NM_144714.1,890-908).
ccttcttaccaaatgacaa

SEQ ID NO: 236421 - DNA, 19 bp, Homo sapiens
  siRNA target sequence for FLJ25449 (NM_144714.1,914-932).
gagcaacaaataatcaatt

SEQ ID NO: 236422 - DNA, 19 bp, Homo sapiens
  siRNA target sequence for FLJ25449 (NM_144714.1,1091-1109).
gaagtgtccagggttcaat

SEQ ID NO: 236423 - DNA, 19 bp, Homo sapiens
  siRNA target sequence for FLJ25449 (NM_144714.1,1125-1143).
cagttacttgtatattgga

SEQ ID NO: 236424 - DNA, 19 bp, Homo sapiens
  siRNA target sequence for FLJ25449 (NM_144714.1,1147-1165).
caaacctaaaagtccttat

SEQ ID NO: 236425 - DNA, 19 bp, Homo sapiens
  siRNA target sequence for FLJ25449 (NM_144714.1,1166-1184).
gctcataagaattggaaaa

SEQ ID NO: 236426 - DNA, 19 bp, Homo sapiens
  siRNA target sequence for FLJ32332 (NM_144641.1,641-659).
ggtgcggagagatgagata

SEQ ID NO: 236427 - DNA, 19 bp, Homo sapiens
  siRNA target sequence for FLJ32332 (NM_144641.1,710-728).
gcagctggcctttgtctat

SEQ ID NO: 236428 - DNA, 19 bp, Homo sapiens
  siRNA target sequence for FLJ37964 (NM_182578.1,251-269).
ccatgttctcaagattctt

SEQ ID NO: 236429 - DNA, 19 bp, Homo sapiens
  siRNA target sequence for FLJ37964 (NM_182578.1,331-349).
ctgagcctgtaccaagaat

SEQ ID NO: 236430 - DNA, 19 bp, Homo sapiens
  siRNA target sequence for FLJ37964 (NM_182578.1,333-351).
gagcctgtaccaagaattt

SEQ ID NO: 236431 - DNA, 19 bp, Homo sapiens
  siRNA target sequence for FLJ37964 (NM_182578.1,669-687).
ggggctgttcacactaagt

SEQ ID NO: 236432 - DNA, 19 bp, Homo sapiens
  siRNA target sequence for FLJ37964 (NM_182578.1,671-689).
ggctgttcacactaagtct

SEQ ID NO: 236433 - DNA, 19 bp, Homo sapiens
  siRNA target sequence for FLJ37964 (NM_182578.1,763-781).
gaccagaagctttacatgt

SEQ ID NO: 236434 - DNA, 19 bp, Homo sapiens
  siRNA target sequence for FLJ40125 (NM_178494.2,284-302).
ctgcgccgagccttcttga

SEQ ID NO: 236435 - DNA, 19 bp, Homo sapiens
  siRNA target sequence for FLJ40125 (NM_178494.2,557-575).
cgagcgttgggcgacttta

SEQ ID NO: 236436 - DNA, 19 bp, Homo sapiens
  siRNA target sequence for FLJ40125 (NM_178494.2,560-578).
gcgttgggcgactttacct

SEQ ID NO: 236437 - DNA, 19 bp, Homo sapiens
  siRNA target sequence for FLJ40125 (NM_178494.2,561-579).
cgttgggcgactttaccta

SEQ ID NO: 236438 - DNA, 19 bp, Homo sapiens
  siRNA target sequence for FLJ40125 (NM_178494.2,814-832).
ggcgtggcgtggtaccttt

SEQ ID NO: 236439 - DNA, 19 bp, Homo sapiens
  siRNA target sequence for FLJ40125 (NM_178494.2,997-1015).
gaggcacgggagagttagt

SEQ ID NO: 236440 - DNA, 19 bp, Homo sapiens
  siRNA target sequence for FLJ40125 (NM_178494.2,1010-1028).
gttagtggaagggacttaa

SEQ ID NO: 236441 - DNA, 19 bp, Homo sapiens
  siRNA target sequence for FLJ40773 (NM_152666.1,589-607).
ggccttaactattcagaaa

SEQ ID NO: 236442 - DNA, 19 bp, Homo sapiens
  siRNA target sequence for FLJ40773 (NM_152666.1,637-655).
ggctggatgaatttactca

SEQ ID NO: 236443 - DNA, 19 bp, Homo sapiens
  siRNA target sequence for FLJ40773 (NM_152666.1,638-656).
gctggatgaatttactcaa

SEQ ID NO: 236444 - DNA, 19 bp, Homo sapiens
  siRNA target sequence for FLJ40773 (NM_152666.1,729-747).
gggtcaacgtctttttgaa

SEQ ID NO: 236445 - DNA, 19 bp, Homo sapiens
  siRNA target sequence for FLJ40773 (NM_152666.1,756-774).
ccagctgacttcgcaaaat

SEQ ID NO: 236446 - DNA, 19 bp, Homo sapiens
  siRNA target sequence for FLJ40773 (NM_152666.1,757-775).
cagctgacttcgcaaaata

SEQ ID NO: 236447 - DNA, 19 bp, Homo sapiens
  siRNA target sequence for FLJ40773 (NM_152666.1,759-777).
gctgacttcgcaaaatatt

SEQ ID NO: 236448 - DNA, 19 bp, Homo sapiens
  siRNA target sequence for FLJ40773 (NM_152666.1,762-780).
gacttcgcaaaatattgaa

SEQ ID NO: 236449 - DNA, 19 bp, Homo sapiens
  siRNA target sequence for FLJ40773 (NM_152666.1,786-804).
gctagtgagtgatgtaaca

SEQ ID NO: 236450 - DNA, 19 bp, Homo sapiens
  siRNA target sequence for FLJ40773 (NM_152666.1,844-862).
gccgaggtgacgtacatga

SEQ ID NO: 236451 - DNA, 19 bp, Homo sapiens
  siRNA target sequence for FLJ40773 (NM_152666.1,847-865).
gaggtgacgtacatgaaca

SEQ ID NO: 236452 - DNA, 19 bp, Homo sapiens
  siRNA target sequence for FLJ40773 (NM_152666.1,913-931).
gacaaacagcacgtgtata

SEQ ID NO: 236453 - DNA, 19 bp, Homo sapiens
  siRNA target sequence for FLJ40773 (NM_152666.1,976-994).
gaactcggtgtcatcttct

SEQ ID NO: 236454 - DNA, 19 bp, Homo sapiens
  siRNA target sequence for FLJ40773 (NM_152666.1,982-1000).
ggtgtcatcttctacaact

SEQ ID NO: 236455 - DNA, 19 bp, Homo sapiens
  siRNA target sequence for FLJ40773 (NM_152666.1,1004-1022).
gctgcctggtcctagattt

SEQ ID NO: 236456 - DNA, 19 bp, Homo sapiens
  siRNA target sequence for FLJ40773 (NM_152666.1,1007-1025).
gcctggtcctagatttaca

SEQ ID NO: 236457 - DNA, 19 bp, Homo sapiens
  siRNA target sequence for FLJ40773 (NM_152666.1,1014-1032).
cctagatttacaaaggata

SEQ ID NO: 236458 - DNA, 19 bp, Homo sapiens
  siRNA target sequence for FLJ40773 (NM_152666.1,1015-1033).
ctagatttacaaaggatat

SEQ ID NO: 236459 - DNA, 19 bp, Homo sapiens
  siRNA target sequence for FLJ40773 (NM_152666.1,1029-1047).
gatatttgctctatatagt

SEQ ID NO: 236460 - DNA, 19 bp, Homo sapiens
  siRNA target sequence for FLJ40773 (NM_152666.1,1036-1054).
gctctatatagttcattaa

SEQ ID NO: 236461 - DNA, 19 bp, Homo sapiens
  siRNA target sequence for FLJ40773 (NM_152666.1,1072-1090).
cctcaaacctggtccaaaa

SEQ ID NO: 236462 - DNA, 19 bp, Homo sapiens
  siRNA target sequence for FLJ40773 (NM_152666.1,1080-1098).
ctggtccaaaagactctat

SEQ ID NO: 236463 - DNA, 19 bp, Homo sapiens
  siRNA target sequence for FLJ40773 (NM_152666.1,1134-1152).
gttgaatgaaaccaaatct

SEQ ID NO: 236464 - DNA, 19 bp, Homo sapiens
  siRNA target sequence for FLJ40773 (NM_152666.1,1145-1163).
ccaaatctcaagcatttgt

SEQ ID NO: 236465 - DNA, 19 bp, Homo sapiens
  siRNA target sequence for FLJ40773 (NM_152666.1,1146-1164).
caaatctcaagcatttgta

SEQ ID NO: 236466 - DNA, 19 bp, Homo sapiens
  siRNA target sequence for FLJ40773 (NM_152666.1,1151-1169).
ctcaagcatttgtatcgaa

SEQ ID NO: 236467 - DNA, 19 bp, Homo sapiens
  siRNA target sequence for FLJ40773 (NM_152666.1,1153-1171).
caagcatttgtatcgaatt

SEQ ID NO: 236468 - DNA, 19 bp, Homo sapiens
  siRNA target sequence for FLJ40773 (NM_152666.1,1187-1205).
gccctaaaaacagaagttt

SEQ ID NO: 236469 - DNA, 19 bp, Homo sapiens
  siRNA target sequence for FLJ40773 (NM_152666.1,1217-1235).
ccatctacagtgtgataga

SEQ ID NO: 236470 - DNA, 19 bp, Homo sapiens
  siRNA target sequence for FLJ40773 (NM_152666.1,1218-1236).
catctacagtgtgatagat

SEQ ID NO: 236471 - DNA, 19 bp, Homo sapiens
  siRNA target sequence for FLJ40773 (NM_152666.1,1339-1357).
gaagcattagttttacgaa

SEQ ID NO: 236472 - DNA, 19 bp, Homo sapiens
  siRNA target sequence for FLJ40773 (NM_152666.1,1397-1415).
ctgatccccttacgtttaa

SEQ ID NO: 236473 - DNA, 19 bp, Homo sapiens
  siRNA target sequence for FLJ40773 (NM_152666.1,1399-1417).
gatccccttacgtttaact

SEQ ID NO: 236474 - DNA, 19 bp, Homo sapiens
  siRNA target sequence for FLJ40773 (NM_152666.1,1402-1420).
ccccttacgtttaacttta

SEQ ID NO: 236475 - DNA, 19 bp, Homo sapiens
  siRNA target sequence for FLJ40773 (NM_152666.1,1403-1421).
cccttacgtttaactttat

SEQ ID NO: 236476 - DNA, 19 bp, Homo sapiens
  siRNA target sequence for FLJ40773 (NM_152666.1,1404-1422).
ccttacgtttaactttatt

SEQ ID NO: 236477 - DNA, 19 bp, Homo sapiens
  siRNA target sequence for FLJ40773 (NM_152666.1,1528-1546).
cacacctttcctaggttaa

SEQ ID NO: 236478 - DNA, 19 bp, Homo sapiens
  siRNA target sequence for FLJ40773 (NM_152666.1,1530-1548).
cacctttcctaggttaaat

SEQ ID NO: 236479 - DNA, 19 bp, Homo sapiens
  siRNA target sequence for FLJ40773 (NM_152666.1,1541-1559).
ggttaaatcgcaacaagta

SEQ ID NO: 236480 - DNA, 19 bp, Homo sapiens
  siRNA target sequence for FLJ40773 (NM_152666.1,1576-1594).
gcagcttatattggaaatt

SEQ ID NO: 236481 - DNA, 19 bp, Homo sapiens
  siRNA target sequence for FLJ40773 (NM_152666.1,1597-1615).
gattgggtagggaatgatt

SEQ ID NO: 236482 - DNA, 19 bp, Homo sapiens
  siRNA target sequence for FLJ40773 (NM_152666.1,1627-1645).
gctggcacgggccttgtta

SEQ ID NO: 236483 - DNA, 19 bp, Homo sapiens
  siRNA target sequence for FLJ40773 (NM_152666.1,1628-1646).
ctggcacgggccttgttat

SEQ ID NO: 236484 - DNA, 19 bp, Homo sapiens
  siRNA target sequence for FLJ40773 (NM_152666.1,1630-1648).
ggcacgggccttgttatca

SEQ ID NO: 236485 - DNA, 19 bp, Homo sapiens
  siRNA target sequence for FLJ40773 (NM_152666.1,1631-1649).
gcacgggccttgttatcaa

SEQ ID NO: 236486 - DNA, 19 bp, Homo sapiens
  siRNA target sequence for FLJ40773 (NM_152666.1,1686-1704).
gcaacttaaagatgtgttt

SEQ ID NO: 236487 - DNA, 19 bp, Homo sapiens
  siRNA target sequence for FLJ40773 (NM_152666.1,1721-1739).
caccgtatgccaaaacctt

SEQ ID NO: 236488 - DNA, 19 bp, Homo sapiens
  siRNA target sequence for FLJ40773 (NM_152666.1,1763-1781).
gctcaagcctgttcaaact

SEQ ID NO: 236489 - DNA, 19 bp, Homo sapiens
  siRNA target sequence for FLJ40773 (NM_152666.1,1766-1784).
caagcctgttcaaactcaa

SEQ ID NO: 236490 - DNA, 19 bp, Homo sapiens
  siRNA target sequence for FLJ40773 (NM_152666.1,1782-1800).
caaacccctctccaacaaa

SEQ ID NO: 236491 - DNA, 19 bp, Homo sapiens
  siRNA target sequence for GAF1 (NM_015470.1,1252-1270).
gtcaatgggagccacattt

SEQ ID NO: 236492 - DNA, 19 bp, Homo sapiens
  siRNA target sequence for GAF1 (NM_015470.1,1744-1762).
gaggaaaaggccaagagta

SEQ ID NO: 236493 - DNA, 19 bp, Homo sapiens
  siRNA target sequence for GAF1 (NM_015470.1,1785-1803).
caaggacccgactcagaaa

SEQ ID NO: 236494 - DNA, 19 bp, Homo sapiens
  siRNA target sequence for GAF1 (NM_015470.1,2014-2032).
gaccagtcggccaagtact

SEQ ID NO: 236495 - DNA, 19 bp, Homo sapiens
  siRNA target sequence for GENX-3414 (NM_003943.1,165-183).
gtctggccggagcactttt

SEQ ID NO: 236496 - DNA, 19 bp, Homo sapiens
  siRNA target sequence for GENX-3414 (NM_003943.1,169-187).
ggccggagcacttttcgtt

SEQ ID NO: 236497 - DNA, 19 bp, Homo sapiens
  siRNA target sequence for GENX-3414 (NM_003943.1,349-367).
gcatcttcaagaaagcaat

SEQ ID NO: 236498 - DNA, 19 bp, Homo sapiens
  siRNA target sequence for GENX-3414 (NM_003943.1,359-377).
gaaagcaatggacatttga

SEQ ID NO: 236499 - DNA, 19 bp, Homo sapiens
  siRNA target sequence for GENX-3414 (NM_003943.1,454-472).
caattcaagagaacatgtt

SEQ ID NO: 236500 - DNA, 19 bp, Homo sapiens
  siRNA target sequence for GENX-3414 (NM_003943.1,615-633).
ctaaagcagctacatgttt

SEQ ID NO: 236501 - DNA, 19 bp, Homo sapiens
  siRNA target sequence for GENX-3414 (NM_003943.1,651-669).
ctagcaacctgctcaagaa

SEQ ID NO: 236502 - DNA, 19 bp, Homo sapiens
  siRNA target sequence for GENX-3414 (NM_003943.1,788-806).
cttaaggctccagtgttaa

SEQ ID NO: 236503 - DNA, 19 bp, Homo sapiens
  siRNA target sequence for GENX-3414 (NM_003943.1,793-811).
ggctccagtgttaaaccta

SEQ ID NO: 236504 - DNA, 19 bp, Homo sapiens
  siRNA target sequence for GENX-3414 (NM_003943.1,794-812).
gctccagtgttaaacctaa

SEQ ID NO: 236505 - DNA, 19 bp, Homo sapiens
  siRNA target sequence for GENX-3414 (NM_003943.1,798-816).
cagtgttaaacctaaacca

SEQ ID NO: 236506 - DNA, 19 bp, Homo sapiens
  siRNA target sequence for GENX-3414 (NM_003943.1,902-920).
gcagggtctcagcaagtta

SEQ ID NO: 236507 - DNA, 19 bp, Homo sapiens
  siRNA target sequence for GENX-3414 (NM_003943.1,906-924).
ggtctcagcaagttagtgt

SEQ ID NO: 236508 - DNA, 19 bp, Homo sapiens
  siRNA target sequence for GENX-3414 (NM_003943.1,925-943).
caggttccaggtccattat

SEQ ID NO: 236509 - DNA, 19 bp, Homo sapiens
  siRNA target sequence for GENX-3414 (NM_003943.1,927-945).
ggttccaggtccattatgt

SEQ ID NO: 236510 - DNA, 19 bp, Homo sapiens
  siRNA target sequence for GENX-3414 (NM_003943.1,948-966).
caagcactgatgtgcaatt

SEQ ID NO: 236511 - DNA, 19 bp, Homo sapiens
  siRNA target sequence for GENX-3414 (NM_003943.1,951-969).
gcactgatgtgcaattcat

SEQ ID NO: 236512 - DNA, 19 bp, Homo sapiens
  siRNA target sequence for GENX-3414 (NM_003943.1,1118-1136).
gttacccgctgggaagaat

SEQ ID NO: 236513 - DNA, 19 bp, Homo sapiens
  siRNA target sequence for GENX-3414 (NM_003943.1,1129-1147).
ggaagaatgcagcaataga

SEQ ID NO: 236514 - DNA, 19 bp, Homo sapiens
  siRNA target sequence for GENX-3414 (NM_003943.1,1158-1176).
ctggccatgaggataaagt

SEQ ID NO: 236515 - DNA, 19 bp, Homo sapiens
  siRNA target sequence for GENX-3414 (NM_003943.1,1184-1202).
gcatggtgggggattcact

SEQ ID NO: 236516 - DNA, 19 bp, Homo sapiens
  siRNA target sequence for GPHN (NM_020806.3,59-77).
gtgtcggagtccttacagt

SEQ ID NO: 236517 - DNA, 19 bp, Homo sapiens
  siRNA target sequence for GPHN (NM_020806.3,67-85).
gtccttacagtgagtgata

SEQ ID NO: 236518 - DNA, 19 bp, Homo sapiens
  siRNA target sequence for GPHN (NM_020806.3,69-87).
ccttacagtgagtgatagt

SEQ ID NO: 236519 - DNA, 19 bp, Homo sapiens
  siRNA target sequence for GPHN (NM_020806.3,112-130).
cgcagtgggataaatctca

SEQ ID NO: 236520 - DNA, 19 bp, Homo sapiens
  siRNA target sequence for GPHN (NM_020806.3,113-131).
gcagtgggataaatctcaa

SEQ ID NO: 236521 - DNA, 19 bp, Homo sapiens
  siRNA target sequence for GPHN (NM_020806.3,114-132).
cagtgggataaatctcaaa

SEQ ID NO: 236522 - DNA, 19 bp, Homo sapiens
  siRNA target sequence for GPHN (NM_020806.3,156-174).
gttgggtgggactatatca

SEQ ID NO: 236523 - DNA, 19 bp, Homo sapiens
  siRNA target sequence for GPHN (NM_020806.3,222-240).
gatagattggtgtgatgaa

SEQ ID NO: 236524 - DNA, 19 bp, Homo sapiens
  siRNA target sequence for GPHN (NM_020806.3,360-378).
gatgggatcacttaatgtt

SEQ ID NO: 236525 - DNA, 19 bp, Homo sapiens
  siRNA target sequence for GPHN (NM_020806.3,402-420).
gcctgtatgtggaatcaga

SEQ ID NO: 236526 - DNA, 19 bp, Homo sapiens
  siRNA target sequence for GPHN (NM_020806.3,605-623).
ctaccagcccccataaaca

SEQ ID NO: 236527 - DNA, 19 bp, Homo sapiens
  siRNA target sequence for GPHN (NM_020806.3,628-646).
gaagacaaaggagttcaat

SEQ ID NO: 236528 - DNA, 19 bp, Homo sapiens
  siRNA target sequence for GPHN (NM_020806.3,697-715).
gatagttcctcatcacata

SEQ ID NO: 236529 - DNA, 19 bp, Homo sapiens
  siRNA target sequence for GPHN (NM_020806.3,799-817).
cctggtctcatcaattatt

SEQ ID NO: 236530 - DNA, 19 bp, Homo sapiens
  siRNA target sequence for GPHN (NM_020806.3,840-858).
gattccagactccatcatt

SEQ ID NO: 236531 - DNA, 19 bp, Homo sapiens
  siRNA target sequence for GPHN (NM_020806.3,1019-1037).
gtcacagtgctgtcgatat

SEQ ID NO: 236532 - DNA, 19 bp, Homo sapiens
  siRNA target sequence for GPHN (NM_020806.3,1021-1039).
cacagtgctgtcgatatca

SEQ ID NO: 236533 - DNA, 19 bp, Homo sapiens
  siRNA target sequence for GPHN (NM_020806.3,1089-1107).
ggacaaagcctttatcaca

SEQ ID NO: 236534 - DNA, 19 bp, Homo sapiens
  siRNA target sequence for GPHN (NM_020806.3,1123-1141).
ccggtgcttgggacagaaa

SEQ ID NO: 236535 - DNA, 19 bp, Homo sapiens
  siRNA target sequence for GPHN (NM_020806.3,1124-1142).
cggtgcttgggacagaaat

SEQ ID NO: 236536 - DNA, 19 bp, Homo sapiens
  siRNA target sequence for GPHN (NM_020806.3,1167-1185).
gcgagtccttgctcaagat

SEQ ID NO: 236537 - DNA, 19 bp, Homo sapiens
  siRNA target sequence for GPHN (NM_020806.3,1173-1191).
ccttgctcaagatgtatat

SEQ ID NO: 236538 - DNA, 19 bp, Homo sapiens
  siRNA target sequence for GPHN (NM_020806.3,1215-1233).
cccagcatcagtaaaagat

SEQ ID NO: 236539 - DNA, 19 bp, Homo sapiens
  siRNA target sequence for GPHN (NM_020806.3,1330-1348).
caagtcatgcgggttacaa

SEQ ID NO: 236540 - DNA, 19 bp, Homo sapiens
  siRNA target sequence for GPHN (NM_020806.3,1368-1386).
cggtgctgatgcagtagta

SEQ ID NO: 236541 - DNA, 19 bp, Homo sapiens
  siRNA target sequence for GPHN (NM_020806.3,1370-1388).
gtgctgatgcagtagtaca

SEQ ID NO: 236542 - DNA, 19 bp, Homo sapiens
  siRNA target sequence for GPHN (NM_020806.3,1381-1399).
gtagtacaagtggaagata

SEQ ID NO: 236543 - DNA, 19 bp, Homo sapiens
  siRNA target sequence for GPHN (NM_020806.3,1462-1480).
gctcggccaggccaagata

SEQ ID NO: 236544 - DNA, 19 bp, Homo sapiens
  siRNA target sequence for GPHN (NM_020806.3,1463-1481).
ctcggccaggccaagatat

SEQ ID NO: 236545 - DNA, 19 bp, Homo sapiens
  siRNA target sequence for GPHN (NM_020806.3,1484-1502).
ggcccatcggccatgacat

SEQ ID NO: 236546 - DNA, 19 bp, Homo sapiens
  siRNA target sequence for GPHN (NM_020806.3,1485-1503).
gcccatcggccatgacatt

SEQ ID NO: 236547 - DNA, 19 bp, Homo sapiens
  siRNA target sequence for GPHN (NM_020806.3,1488-1506).
catcggccatgacattaaa

SEQ ID NO: 236548 - DNA, 19 bp, Homo sapiens
  siRNA target sequence for GPHN (NM_020806.3,1583-1601).
cagaggttgaagttaataa

SEQ ID NO: 236549 - DNA, 19 bp, Homo sapiens
  siRNA target sequence for GPHN (NM_020806.3,1585-1603).
gaggttgaagttaataagt

SEQ ID NO: 236550 - DNA, 19 bp, Homo sapiens
  siRNA target sequence for GPHN (NM_020806.3,1632-1650).
gaatgagctgctaaatcct

SEQ ID NO: 236551 - DNA, 19 bp, Homo sapiens
  siRNA target sequence for GPHN (NM_020806.3,1659-1677).
cctcttaccagggaagatt

SEQ ID NO: 236552 - DNA, 19 bp, Homo sapiens
  siRNA target sequence for GPHN (NM_020806.3,1686-1704).
caatcgttcaactcttcta

SEQ ID NO: 236553 - DNA, 19 bp, Homo sapiens
  siRNA target sequence for GPHN (NM_020806.3,1723-1741).
ggttaccccacgatcaact

SEQ ID NO: 236554 - DNA, 19 bp, Homo sapiens
  siRNA target sequence for GPHN (NM_020806.3,1724-1742).
gttaccccacgatcaactt

SEQ ID NO: 236555 - DNA, 19 bp, Homo sapiens
  siRNA target sequence for GPHN (NM_020806.3,1733-1751).
cgatcaacttgggtattgt

SEQ ID NO: 236556 - DNA, 19 bp, Homo sapiens
  siRNA target sequence for GPHN (NM_020806.3,1734-1752).
gatcaacttgggtattgta

SEQ ID NO: 236557 - DNA, 19 bp, Homo sapiens
  siRNA target sequence for GPHN (NM_020806.3,1782-1800).
cttgaatgagggtatcagt

SEQ ID NO: 236558 - DNA, 19 bp, Homo sapiens
  siRNA target sequence for GPHN (NM_020806.3,1799-1817).
gtcgtgctgatgtcatcat

SEQ ID NO: 236559 - DNA, 19 bp, Homo sapiens
  siRNA target sequence for GPHN (NM_020806.3,1801-1819).
cgtgctgatgtcatcatca

SEQ ID NO: 236560 - DNA, 19 bp, Homo sapiens
  siRNA target sequence for GPHN (NM_020806.3,1820-1838).
catcagggggtgtatccat

SEQ ID NO: 236561 - DNA, 19 bp, Homo sapiens
  siRNA target sequence for GPHN (NM_020806.3,1863-1881).
ggtgctggacattgatctt

SEQ ID NO: 236562 - DNA, 19 bp, Homo sapiens
  siRNA target sequence for GPHN (NM_020806.3,1879-1897).
cttcatgctcagatccatt

SEQ ID NO: 236563 - DNA, 19 bp, Homo sapiens
  siRNA target sequence for GPHN (NM_020806.3,1923-1941).
cttgccaacaacatttgca

SEQ ID NO: 236564 - DNA, 19 bp, Homo sapiens
  siRNA target sequence for GPHN (NM_020806.3,2010-2028).
cacctgcaatctctttgtt

SEQ ID NO: 236565 - DNA, 19 bp, Homo sapiens
  siRNA target sequence for GPHN (NM_020806.3,2065-2083).
cctcggccaaccatcatca

SEQ ID NO: 236566 - DNA, 19 bp, Homo sapiens
  siRNA target sequence for GPHN (NM_020806.3,2066-2084).
ctcggccaaccatcatcaa

SEQ ID NO: 236567 - DNA, 19 bp, Homo sapiens
  siRNA target sequence for GPHN (NM_020806.3,2082-2100).
caaagcaaggttatcatgt

SEQ ID NO: 236568 - DNA, 19 bp, Homo sapiens
  siRNA target sequence for GPHN (NM_020806.3,2090-2108).
ggttatcatgtgatgtaaa

SEQ ID NO: 236569 - DNA, 19 bp, Homo sapiens
  siRNA target sequence for GPHN (NM_020806.3,2130-2148).
ccatcggtgtatactaact

SEQ ID NO: 236570 - DNA, 19 bp, Homo sapiens
  siRNA target sequence for GPHN (NM_020806.3,2131-2149).
catcggtgtatactaactt

SEQ ID NO: 236571 - DNA, 19 bp, Homo sapiens
  siRNA target sequence for GPHN (NM_020806.3,2175-2193).
ggcacagagtacaggtaat

SEQ ID NO: 236572 - DNA, 19 bp, Homo sapiens
  siRNA target sequence for GPHN (NM_020806.3,2225-2243).
gtgccaatggattgttgat

SEQ ID NO: 236573 - DNA, 19 bp, Homo sapiens
  siRNA target sequence for GPR56 (NM_005682.3,236-254).
gggccacagggaagacttt

SEQ ID NO: 236574 - DNA, 19 bp, Homo sapiens
  siRNA target sequence for GPR56 (NM_005682.3,286-304).
ggagcagcctccactacaa

SEQ ID NO: 236575 - DNA, 19 bp, Homo sapiens
  siRNA target sequence for GPR56 (NM_005682.3,287-305).
gagcagcctccactacaaa

SEQ ID NO: 236576 - DNA, 19 bp, Homo sapiens
  siRNA target sequence for GPR56 (NM_005682.3,1195-1213).
gtgtgttctgggttgaaga

SEQ ID NO: 236577 - DNA, 19 bp, Homo sapiens
  siRNA target sequence for GPR56 (NM_005682.3,1257-1275).
gagaccgtcaggagagaaa

SEQ ID NO: 236578 - DNA, 19 bp, Homo sapiens
  siRNA target sequence for HSRTSBETA (NM_017512.1,43-61).
ctgcctatgtcgtcataga

SEQ ID NO: 236579 - DNA, 19 bp, Homo sapiens
  siRNA target sequence for HSRTSBETA (NM_017512.1,45-63).
gcctatgtcgtcatagaaa

SEQ ID NO: 236580 - DNA, 19 bp, Homo sapiens
  siRNA target sequence for HSRTSBETA (NM_017512.1,47-65).
ctatgtcgtcatagaaact

SEQ ID NO: 236581 - DNA, 19 bp, Homo sapiens
  siRNA target sequence for HSRTSBETA (NM_017512.1,241-259).
gatggattggtccagaaaa

SEQ ID NO: 236582 - DNA, 19 bp, Homo sapiens
  siRNA target sequence for HSRTSBETA (NM_017512.1,371-389).
gctggtatcctgcatagat

SEQ ID NO: 236583 - DNA, 19 bp, Homo sapiens
  siRNA target sequence for HSRTSBETA (NM_017512.1,375-393).
gtatcctgcatagatttca

SEQ ID NO: 236584 - DNA, 19 bp, Homo sapiens
  siRNA target sequence for HSRTSBETA (NM_017512.1,661-679).
gaccggaaaagactttgat

SEQ ID NO: 236585 - DNA, 19 bp, Homo sapiens
  siRNA target sequence for HSRTSBETA (NM_017512.1,663-681).
ccggaaaagactttgatga

SEQ ID NO: 236586 - DNA, 19 bp, Homo sapiens
  siRNA target sequence for HSRTSBETA (NM_017512.1,664-682).
cggaaaagactttgatgat

SEQ ID NO: 236587 - DNA, 19 bp, Homo sapiens
  siRNA target sequence for HSRTSBETA (NM_017512.1,772-790).
cctcccctgatgacattct

SEQ ID NO: 236588 - DNA, 19 bp, Homo sapiens
  siRNA target sequence for HSRTSBETA (NM_017512.1,792-810).
gggcacgccaccatttcca

SEQ ID NO: 236589 - DNA, 19 bp, Homo sapiens
  siRNA target sequence for HSRTSBETA (NM_017512.1,793-811).
ggcacgccaccatttccaa

SEQ ID NO: 236590 - DNA, 19 bp, Homo sapiens
  siRNA target sequence for HSRTSBETA (NM_017512.1,812-830).
ggcactggtcccattagga

SEQ ID NO: 236591 - DNA, 19 bp, Homo sapiens
  siRNA target sequence for HSRTSBETA (NM_017512.1,814-832).
cactggtcccattaggaat

SEQ ID NO: 236592 - DNA, 19 bp, Homo sapiens
  siRNA target sequence for HSRTSBETA (NM_017512.1,856-874).
gccacaatagagtgatatt

SEQ ID NO: 236593 - DNA, 19 bp, Homo sapiens
  siRNA target sequence for HSRTSBETA (NM_017512.1,903-921).
cagttcctccagattgaca

SEQ ID NO: 236594 - DNA, 19 bp, Homo sapiens
  siRNA target sequence for HSRTSBETA (NM_017512.1,1107-1125).
ctgcatgagcatttcaagt

SEQ ID NO: 236595 - DNA, 19 bp, Homo sapiens
  siRNA target sequence for HSRTSBETA (NM_017512.1,1109-1127).
gcatgagcatttcaagtat

SEQ ID NO: 236596 - DNA, 19 bp, Homo sapiens
  siRNA target sequence for HSRTSBETA (NM_017512.1,1170-1188).
cccggctactcaacagaaa

SEQ ID NO: 236597 - DNA, 19 bp, Homo sapiens
  siRNA target sequence for HSRTSBETA (NM_017512.1,1171-1189).
ccggctactcaacagaaat

SEQ ID NO: 236598 - DNA, 19 bp, Homo sapiens
  siRNA target sequence for HSRTSBETA (NM_017512.1,1173-1191).
ggctactcaacagaaatga

SEQ ID NO: 236599 - DNA, 19 bp, Homo sapiens
  siRNA target sequence for KIAA1463 (NM_020849.1,211-229).
cgggtcaatactgaagata

SEQ ID NO: 236600 - DNA, 19 bp, Homo sapiens
  siRNA target sequence for KIAA1463 (NM_020849.1,250-268).
caggatgtagggcatgtaa

SEQ ID NO: 236601 - DNA, 19 bp, Homo sapiens
  siRNA target sequence for KIAA1463 (NM_020849.1,279-297).
gatgatgtgcattgtgaaa

SEQ ID NO: 236602 - DNA, 19 bp, Homo sapiens
  siRNA target sequence for KIAA1463 (NM_020849.1,362-380).
ctggaggcatgatgtactt

SEQ ID NO: 236603 - DNA, 19 bp, Homo sapiens
  siRNA target sequence for KIAA1463 (NM_020849.1,414-432).
ggtaattccagtgaattct

SEQ ID NO: 236604 - DNA, 19 bp, Homo sapiens
  siRNA target sequence for KIAA1463 (NM_020849.1,540-558).
ggttagtggtcgaagacat

SEQ ID NO: 236605 - DNA, 19 bp, Homo sapiens
  siRNA target sequence for KIAA1463 (NM_020849.1,541-559).
gttagtggtcgaagacata

SEQ ID NO: 236606 - DNA, 19 bp, Homo sapiens
  siRNA target sequence for KIAA1463 (NM_020849.1,554-572).
gacataatgctgatgacat

SEQ ID NO: 236607 - DNA, 19 bp, Homo sapiens
  siRNA target sequence for KIAA1463 (NM_020849.1,584-602).
gattggctgtagaatcaat

SEQ ID NO: 236608 - DNA, 19 bp, Homo sapiens
  siRNA target sequence for KIAA1463 (NM_020849.1,589-607).
gctgtagaatcaataaaga

SEQ ID NO: 236609 - DNA, 19 bp, Homo sapiens
  siRNA target sequence for KIAA1463 (NM_020849.1,669-687).
ggtggttgcggaacaaaga

SEQ ID NO: 236610 - DNA, 19 bp, Homo sapiens
  siRNA target sequence for KIAA1463 (NM_020849.1,738-756).
ggcgatcgatagcattcat

SEQ ID NO: 236611 - DNA, 19 bp, Homo sapiens
  siRNA target sequence for KIAA1463 (NM_020849.1,740-758).
cgatcgatagcattcatca

SEQ ID NO: 236612 - DNA, 19 bp, Homo sapiens
  siRNA target sequence for KIAA1463 (NM_020849.1,741-759).
gatcgatagcattcatcaa

SEQ ID NO: 236613 - DNA, 19 bp, Homo sapiens
  siRNA target sequence for KIAA1463 (NM_020849.1,814-832).
ctaggaggaatccatatat

SEQ ID NO: 236614 - DNA, 19 bp, Homo sapiens
  siRNA target sequence for KIAA1463 (NM_020849.1,818-836).
gaggaatccatatatctca

SEQ ID NO: 236615 - DNA, 19 bp, Homo sapiens
  siRNA target sequence for KIAA1463 (NM_020849.1,1091-1109).
cgactcctgaccatgtact

SEQ ID NO: 236616 - DNA, 19 bp, Homo sapiens
  siRNA target sequence for KIAA1463 (NM_020849.1,1097-1115).
ctgaccatgtactcttcat

SEQ ID NO: 236617 - DNA, 19 bp, Homo sapiens
  siRNA target sequence for KIAA1463 (NM_020849.1,1105-1123).
gtactcttcatgctgttaa

SEQ ID NO: 236618 - DNA, 19 bp, Homo sapiens
  siRNA target sequence for KIAA1463 (NM_020849.1,1202-1220).
gtgataagggacatctaaa

SEQ ID NO: 236619 - DNA, 19 bp, Homo sapiens
  siRNA target sequence for KIAA1463 (NM_020849.1,1250-1268).
cacctggcattgagttaat

SEQ ID NO: 236620 - DNA, 19 bp, Homo sapiens
  siRNA target sequence for KIAA1463 (NM_020849.1,1287-1305).
cctgtatgcgggctgtata

SEQ ID NO: 236621 - DNA, 19 bp, Homo sapiens
  siRNA target sequence for KIAA1463 (NM_020849.1,1290-1308).
gtatgcgggctgtatacct

SEQ ID NO: 236622 - DNA, 19 bp, Homo sapiens
  siRNA target sequence for KIAA1463 (NM_020849.1,1353-1371).
gcccactgtccgaatgatt

SEQ ID NO: 236623 - DNA, 19 bp, Homo sapiens
  siRNA target sequence for KIAA1463 (NM_020849.1,1355-1373).
ccactgtccgaatgattgt

SEQ ID NO: 236624 - DNA, 19 bp, Homo sapiens
  siRNA target sequence for KIAA1463 (NM_020849.1,1356-1374).
cactgtccgaatgattgtt

SEQ ID NO: 236625 - DNA, 19 bp, Homo sapiens
  siRNA target sequence for KIAA1463 (NM_020849.1,1358-1376).
ctgtccgaatgattgttga

SEQ ID NO: 236626 - DNA, 19 bp, Homo sapiens
  siRNA target sequence for KIAA1463 (NM_020849.1,1509-1527).
gttacctcagctgtataaa

SEQ ID NO: 236627 - DNA, 19 bp, Homo sapiens
  siRNA target sequence for KIAA1463 (NM_020849.1,1585-1603).
cttacaggagtgaagatgt

SEQ ID NO: 236628 - DNA, 19 bp, Homo sapiens
  siRNA target sequence for KIAA1463 (NM_020849.1,1642-1660).
ctccagtgtgagttgtact

SEQ ID NO: 236629 - DNA, 19 bp, Homo sapiens
  siRNA target sequence for KIAA1463 (NM_020849.1,1742-1760).
gccaccagtctgtcttaat

SEQ ID NO: 236630 - DNA, 19 bp, Homo sapiens
  siRNA target sequence for KIAA1463 (NM_020849.1,1743-1761).
ccaccagtctgtcttaatt

SEQ ID NO: 236631 - DNA, 19 bp, Homo sapiens
  siRNA target sequence for KIAA1463 (NM_020849.1,1746-1764).
ccagtctgtcttaattcct

SEQ ID NO: 236632 - DNA, 19 bp, Homo sapiens
  siRNA target sequence for KIAA1463 (NM_020849.1,1832-1850).
ctttctgctcctattcagt

SEQ ID NO: 236633 - DNA, 19 bp, Homo sapiens
  siRNA target sequence for KIAA1463 (NM_020849.1,2023-2041).
gtcagcaccacttttggat

SEQ ID NO: 236634 - DNA, 19 bp, Homo sapiens
  siRNA target sequence for KIAA1463 (NM_020849.1,2028-2046).
caccacttttggatcaaga

SEQ ID NO: 236635 - DNA, 19 bp, Homo sapiens
  siRNA target sequence for KIAA1463 (NM_020849.1,2042-2060).
caagagtcaatgtagcaat

SEQ ID NO: 236636 - DNA, 19 bp, Homo sapiens
  siRNA target sequence for KIAA1463 (NM_020849.1,2098-2116).
gtgtatgtggatctgaaat

SEQ ID NO: 236637 - DNA, 19 bp, Homo sapiens
  siRNA target sequence for KIAA1463 (NM_020849.1,2295-2313).
cggctactacaccatctat

SEQ ID NO: 236638 - DNA, 19 bp, Homo sapiens
  siRNA target sequence for KIAA1463 (NM_020849.1,2297-2315).
gctactacaccatctatga

SEQ ID NO: 236639 - DNA, 19 bp, Homo sapiens
  siRNA target sequence for KIAA1463 (NM_020849.1,2298-2316).
ctactacaccatctatgat

SEQ ID NO: 236640 - DNA, 19 bp, Homo sapiens
  siRNA target sequence for KIAA1463 (NM_020849.1,2326-2344).
cttcaagctgatcatttca

SEQ ID NO: 236641 - DNA, 19 bp, Homo sapiens
  siRNA target sequence for KIAA1463 (NM_020849.1,2329-2347).
caagctgatcatttcaaca

SEQ ID NO: 236642 - DNA, 19 bp, Homo sapiens
  siRNA target sequence for KIAA1463 (NM_020849.1,2385-2403).
ggctcggacaggatacctt

SEQ ID NO: 236643 - DNA, 19 bp, Homo sapiens
  siRNA target sequence for KIAA1463 (NM_020849.1,2445-2463).
gcgtcatgatgcattgtat

SEQ ID NO: 236644 - DNA, 19 bp, Homo sapiens
  siRNA target sequence for KIAA1463 (NM_020849.1,2490-2508).
ggagctgagaggattacga

SEQ ID NO: 236645 - DNA, 19 bp, Homo sapiens
  siRNA target sequence for KIAA1463 (NM_020849.1,2491-2509).
gagctgagaggattacgat

SEQ ID NO: 236646 - DNA, 19 bp, Homo sapiens
  siRNA target sequence for KIAA1463 (NM_020849.1,2541-2559).
ccggatccacagaagcatt

SEQ ID NO: 236647 - DNA, 19 bp, Homo sapiens
  siRNA target sequence for KIAA1463 (NM_020849.1,2794-2812).
cccatctacgtggcttata

SEQ ID NO: 236648 - DNA, 19 bp, Homo sapiens
  siRNA target sequence for KIAA1463 (NM_020849.1,2795-2813).
ccatctacgtggcttataa

SEQ ID NO: 236649 - DNA, 19 bp, Homo sapiens
  siRNA target sequence for KIAA1959 (NM_032873.2,618-636).
cagaagctttccgactttt

SEQ ID NO: 236650 - DNA, 19 bp, Homo sapiens
  siRNA target sequence for KIAA1959 (NM_032873.2,697-715).
cactctgccagttctttat

SEQ ID NO: 236651 - DNA, 19 bp, Homo sapiens
  siRNA target sequence for KIAA1959 (NM_032873.2,764-782).
ggtcagtcgctggaaatgt

SEQ ID NO: 236652 - DNA, 19 bp, Homo sapiens
  siRNA target sequence for KIAA1959 (NM_032873.2,765-783).
gtcagtcgctggaaatgta

SEQ ID NO: 236653 - DNA, 19 bp, Homo sapiens
  siRNA target sequence for KIAA1959 (NM_032873.2,769-787).
gtcgctggaaatgtaagtt

SEQ ID NO: 236654 - DNA, 19 bp, Homo sapiens
  siRNA target sequence for KIAA1959 (NM_032873.2,771-789).
cgctggaaatgtaagttct

SEQ ID NO: 236655 - DNA, 19 bp, Homo sapiens
  siRNA target sequence for KIAA1959 (NM_032873.2,801-819).
cccctggagctctatacgt

SEQ ID NO: 236656 - DNA, 19 bp, Homo sapiens
  siRNA target sequence for KIAA1959 (NM_032873.2,833-851).
cggcctctttgtaaaggaa

SEQ ID NO: 236657 - DNA, 19 bp, Homo sapiens
  siRNA target sequence for KIAA1959 (NM_032873.2,1059-1077).
cgggatatccgatttgcta

SEQ ID NO: 236658 - DNA, 19 bp, Homo sapiens
  siRNA target sequence for KIAA1959 (NM_032873.2,1103-1121).
cccctataccccacaaaat

SEQ ID NO: 236659 - DNA, 19 bp, Homo sapiens
  siRNA target sequence for KIAA1959 (NM_032873.2,1187-1205).
cagcgagggttggatctat

SEQ ID NO: 236660 - DNA, 19 bp, Homo sapiens
  siRNA target sequence for KIAA1959 (NM_032873.2,1233-1251).
ggactcctgcctgagaatt

SEQ ID NO: 236661 - DNA, 19 bp, Homo sapiens
  siRNA target sequence for KIAA1959 (NM_032873.2,1234-1252).
gactcctgcctgagaatta

SEQ ID NO: 236662 - DNA, 19 bp, Homo sapiens
  siRNA target sequence for KIAA1959 (NM_032873.2,1239-1257).
ctgcctgagaattacatta

SEQ ID NO: 236663 - DNA, 19 bp, Homo sapiens
  siRNA target sequence for KIAA1959 (NM_032873.2,1242-1260).
cctgagaattacattacca

SEQ ID NO: 236664 - DNA, 19 bp, Homo sapiens
  siRNA target sequence for KIAA1959 (NM_032873.2,1269-1287).
gaatgcagcacctggatat

SEQ ID NO: 236665 - DNA, 19 bp, Homo sapiens
  siRNA target sequence for KIAA1959 (NM_032873.2,1273-1291).
gcagcacctggatatttca

SEQ ID NO: 236666 - DNA, 19 bp, Homo sapiens
  siRNA target sequence for KIAA1959 (NM_032873.2,1274-1292).
cagcacctggatatttcat

SEQ ID NO: 236667 - DNA, 19 bp, Homo sapiens
  siRNA target sequence for KIAA1959 (NM_032873.2,1290-1308).
catggttcttattcaatct

SEQ ID NO: 236668 - DNA, 19 bp, Homo sapiens
  siRNA target sequence for KIAA1959 (NM_032873.2,1336-1354).
cgtttggggatggagtatt

SEQ ID NO: 236669 - DNA, 19 bp, Homo sapiens
  siRNA target sequence for KIAA1959 (NM_032873.2,1388-1406).
ggagacgactcctcttact

SEQ ID NO: 236670 - DNA, 19 bp, Homo sapiens
  siRNA target sequence for KIAA1959 (NM_032873.2,1389-1407).
gagacgactcctcttacta

SEQ ID NO: 236671 - DNA, 19 bp, Homo sapiens
  siRNA target sequence for KIAA1959 (NM_032873.2,1457-1475).
ccagaagcgatgccttttt

SEQ ID NO: 236672 - DNA, 19 bp, Homo sapiens
  siRNA target sequence for KIAA1959 (NM_032873.2,1568-1586).
cctgaacatgcctcatagt

SEQ ID NO: 236673 - DNA, 19 bp, Homo sapiens
  siRNA target sequence for KIAA1959 (NM_032873.2,1571-1589).
gaacatgcctcatagttta

SEQ ID NO: 236674 - DNA, 19 bp, Homo sapiens
  siRNA target sequence for KIAA1959 (NM_032873.2,1600-1618).
gtggtggtttccgagatta

SEQ ID NO: 236675 - DNA, 19 bp, Homo sapiens
  siRNA target sequence for KIAA1959 (NM_032873.2,1603-1621).
gtggtttccgagattacga

SEQ ID NO: 236676 - DNA, 19 bp, Homo sapiens
  siRNA target sequence for KIAA1959 (NM_032873.2,1610-1628).
ccgagattacgagaaagat

SEQ ID NO: 236677 - DNA, 19 bp, Homo sapiens
  siRNA target sequence for KIAA1959 (NM_032873.2,1671-1689).
ggtgaagccttattagaga

SEQ ID NO: 236678 - DNA, 19 bp, Homo sapiens
  siRNA target sequence for KIAA1959 (NM_032873.2,1677-1695).
gccttattagagagcaata

SEQ ID NO: 236679 - DNA, 19 bp, Homo sapiens
  siRNA target sequence for KIAA1959 (NM_032873.2,1688-1706).
gagcaataccattatcgat

SEQ ID NO: 236680 - DNA, 19 bp, Homo sapiens
  siRNA target sequence for KIAA1959 (NM_032873.2,1696-1714).
ccattatcgatcatgtcta

SEQ ID NO: 236681 - DNA, 19 bp, Homo sapiens
  siRNA target sequence for KIAA1959 (NM_032873.2,1736-1754).
cgttcagactgcacacaat

SEQ ID NO: 236682 - DNA, 19 bp, Homo sapiens
  siRNA target sequence for KIAA1959 (NM_032873.2,1737-1755).
gttcagactgcacacaata

SEQ ID NO: 236683 - DNA, 19 bp, Homo sapiens
  siRNA target sequence for KIAA1959 (NM_032873.2,1744-1762).
ctgcacacaatatcttgaa

SEQ ID NO: 236684 - DNA, 19 bp, Homo sapiens
  siRNA target sequence for KIAA1959 (NM_032873.2,1829-1847).
ggttgctgggagcacatta

SEQ ID NO: 236685 - DNA, 19 bp, Homo sapiens
  siRNA target sequence for KIAA1959 (NM_032873.2,1841-1859).
cacattacctgcatggata

SEQ ID NO: 236686 - DNA, 19 bp, Homo sapiens
  siRNA target sequence for KIAA1959 (NM_032873.2,1881-1899).
gccaacctgagtgttgata

SEQ ID NO: 236687 - DNA, 19 bp, Homo sapiens
  siRNA target sequence for KIAA1959 (NM_032873.2,1883-1901).
caacctgagtgttgataca

SEQ ID NO: 236688 - DNA, 19 bp, Homo sapiens
  siRNA target sequence for KIAA1959 (NM_032873.2,1921-1939).
caatcagcaaattagttgt

SEQ ID NO: 236689 - DNA, 19 bp, Homo sapiens
  siRNA target sequence for KIAA1959 (NM_032873.2,1949-1967).
ctatgatacttatatcagt

SEQ ID NO: 236690 - DNA, 19 bp, Homo sapiens
  siRNA target sequence for KIAA1959 (NM_032873.2,2098-2116).
ccaaggacttcgtacaaat

SEQ ID NO: 236691 - DNA, 19 bp, Homo sapiens
  siRNA target sequence for LIPH (NM_139248.1,120-138).
gttgtgcttgtcaagatca

SEQ ID NO: 236692 - DNA, 19 bp, Homo sapiens
  siRNA target sequence for LIPH (NM_139248.1,192-210).
ggttggtacgggactaaat

SEQ ID NO: 236693 - DNA, 19 bp, Homo sapiens
  siRNA target sequence for LIPH (NM_139248.1,282-300).
cttgaatgtgaccaagaaa

SEQ ID NO: 236694 - DNA, 19 bp, Homo sapiens
  siRNA target sequence for LIPH (NM_139248.1,305-323).
ccttcattgtccatggatt

SEQ ID NO: 236695 - DNA, 19 bp, Homo sapiens
  siRNA target sequence for LIPH (NM_139248.1,422-440).
gagctacaactttaatata

SEQ ID NO: 236696 - DNA, 19 bp, Homo sapiens
  siRNA target sequence for LIPH (NM_139248.1,452-470).
ctagtaagaccagaaaagt

SEQ ID NO: 236697 - DNA, 19 bp, Homo sapiens
  siRNA target sequence for LIPH (NM_139248.1,472-490).
gccatggtcttgaaggaat

SEQ ID NO: 236698 - DNA, 19 bp, Homo sapiens
  siRNA target sequence for LIPH (NM_139248.1,477-495).
ggtcttgaaggaatttatt

SEQ ID NO: 236699 - DNA, 19 bp, Homo sapiens
  siRNA target sequence for LIPH (NM_139248.1,537-555).
catgatcggagtaagtcta

SEQ ID NO: 236700 - DNA, 19 bp, Homo sapiens
  siRNA target sequence for LIPH (NM_139248.1,572-590).
ggtttgttggagagatgta

SEQ ID NO: 236701 - DNA, 19 bp, Homo sapiens
  siRNA target sequence for LIPH (NM_139248.1,653-671).
ctcaccaagacagattaga

SEQ ID NO: 236702 - DNA, 19 bp, Homo sapiens
  siRNA target sequence for LIPH (NM_139248.1,726-744).
ctacaaggagccattagga

SEQ ID NO: 236703 - DNA, 19 bp, Homo sapiens
  siRNA target sequence for LIPH (NM_139248.1,759-777).
cccaaatggaggattggat

SEQ ID NO: 236704 - DNA, 19 bp, Homo sapiens
  siRNA target sequence for LIPH (NM_139248.1,797-815).
caatattgggaggatttca

SEQ ID NO: 236705 - DNA, 19 bp, Homo sapiens
  siRNA target sequence for LIPH (NM_139248.1,829-847).
gaccaccagaggtctgtat

SEQ ID NO: 236706 - DNA, 19 bp, Homo sapiens
  siRNA target sequence for LIPH (NM_139248.1,905-923).
cctaccaggattataggaa

SEQ ID NO: 236707 - DNA, 19 bp, Homo sapiens
  siRNA target sequence for LIPH (NM_139248.1,938-956).
gctgcggcacgtcacaaaa

SEQ ID NO: 236708 - DNA, 19 bp, Homo sapiens
  siRNA target sequence for LIPH (NM_139248.1,965-983).
gtccccttctgggctatta

SEQ ID NO: 236709 - DNA, 19 bp, Homo sapiens
  siRNA target sequence for LIPH (NM_139248.1,969-987).
ccttctgggctattatgct

SEQ ID NO: 236710 - DNA, 19 bp, Homo sapiens
  siRNA target sequence for LIPH (NM_139248.1,975-993).
gggctattatgctgataat

SEQ ID NO: 236711 - DNA, 19 bp, Homo sapiens
  siRNA target sequence for LIPH (NM_139248.1,976-994).
ggctattatgctgataatt

SEQ ID NO: 236712 - DNA, 19 bp, Homo sapiens
  siRNA target sequence for LIPH (NM_139248.1,1062-1080).
cccattctgcatgtatcat

SEQ ID NO: 236713 - DNA, 19 bp, Homo sapiens
  siRNA target sequence for LIPH (NM_139248.1,1068-1086).
ctgcatgtatcattacttt

SEQ ID NO: 236714 - DNA, 19 bp, Homo sapiens
  siRNA target sequence for LIPH (NM_139248.1,1118-1136).
gaagaggggacattaccat

SEQ ID NO: 236715 - DNA, 19 bp, Homo sapiens
  siRNA target sequence for LIPH (NM_139248.1,1123-1141).
ggggacattaccatcaaat

SEQ ID NO: 236716 - DNA, 19 bp, Homo sapiens
  siRNA target sequence for LIPH (NM_139248.1,1261-1279).
gcaatttccttgatgttct

SEQ ID NO: 236717 - DNA, 19 bp, Homo sapiens
  siRNA target sequence for LIPH (NM_139248.1,1278-1296).
ctctacaggatctctaata

SEQ ID NO: 236718 - DNA, 19 bp, Homo sapiens
  siRNA target sequence for LIPH (NM_139248.1,1316-1334).
ggattctccgaatgaagtt

SEQ ID NO: 236719 - DNA, 19 bp, Homo sapiens
  siRNA target sequence for LIPH (NM_139248.1,1321-1339).
ctccgaatgaagttaaggt

SEQ ID NO: 236720 - DNA, 19 bp, Homo sapiens
  siRNA target sequence for LIPH (NM_139248.1,1387-1405).
ctgatggaaaacgttgaaa

SEQ ID NO: 236721 - DNA, 19 bp, Homo sapiens
  siRNA target sequence for LOC122618 (NM_138790.1,499-517).
gcgtccacgtggcttcata

SEQ ID NO: 236722 - DNA, 19 bp, Homo sapiens
  siRNA target sequence for LOC122618 (NM_138790.1,501-519).
gtccacgtggcttcatact

SEQ ID NO: 236723 - DNA, 19 bp, Homo sapiens
  siRNA target sequence for LOC122618 (NM_138790.1,504-522).
cacgtggcttcatactact

SEQ ID NO: 236724 - DNA, 19 bp, Homo sapiens
  siRNA target sequence for LOC122618 (NM_138790.1,735-753).
ggtgttttgcactccaaat

SEQ ID NO: 236725 - DNA, 19 bp, Homo sapiens
  siRNA target sequence for LOC122618 (NM_138790.1,831-849).
cttggcgctgtcatctata

SEQ ID NO: 236726 - DNA, 19 bp, Homo sapiens
  siRNA target sequence for LOC122618 (NM_138790.1,834-852).
ggcgctgtcatctataact

SEQ ID NO: 236727 - DNA, 19 bp, Homo sapiens
  siRNA target sequence for LOC122618 (NM_138790.1,1093-1111).
gcgcccaggagttcatcta

SEQ ID NO: 236728 - DNA, 19 bp, Homo sapiens
  siRNA target sequence for LOC122618 (NM_138790.1,1113-1131).
gcctccgtgatggagtatt

SEQ ID NO: 236729 - DNA, 19 bp, Homo sapiens
  siRNA target sequence for LOC122618 (NM_138790.1,1318-1336).
ctgtggacgtgaaagtctt

SEQ ID NO: 236730 - DNA, 19 bp, Homo sapiens
  siRNA target sequence for LOC122618 (NM_138790.1,1341-1359).
gtgccggtggggaaccatt

SEQ ID NO: 236731 - DNA, 19 bp, Homo sapiens
  siRNA target sequence for LOC122618 (NM_138790.1,1406-1424).
ggagaaggcagcctacata

SEQ ID NO: 236732 - DNA, 19 bp, Homo sapiens
  siRNA target sequence for LOC122618 (NM_138790.1,1432-1450).
ccaactggtcggaggatta

SEQ ID NO: 236733 - DNA, 19 bp, Homo sapiens
  siRNA target sequence for LOC197322 (NM_174917.1,468-486).
cacgtacagggagctttat

SEQ ID NO: 236734 - DNA, 19 bp, Homo sapiens
  siRNA target sequence for LOC197322 (NM_174917.1,567-585).
cttcctatgcgctaacgat

SEQ ID NO: 236735 - DNA, 19 bp, Homo sapiens
  siRNA target sequence for LOC197322 (NM_174917.1,1052-1070).
gagccacctgtgtgatgat

SEQ ID NO: 236736 - DNA, 19 bp, Homo sapiens
  siRNA target sequence for LOC197322 (NM_174917.1,1176-1194).
gtactacgacaggcatttt

SEQ ID NO: 236737 - DNA, 19 bp, Homo sapiens
  siRNA target sequence for LOC197322 (NM_174917.1,1201-1219).
ccgcacgcccaggatttct

SEQ ID NO: 236738 - DNA, 19 bp, Homo sapiens
  siRNA target sequence for LOC197322 (NM_174917.1,1202-1220).
cgcacgcccaggatttctt

SEQ ID NO: 236739 - DNA, 19 bp, Homo sapiens
  siRNA target sequence for LOC197322 (NM_174917.1,1218-1236).
cttgcgtgcagtttgtgaa

SEQ ID NO: 236740 - DNA, 19 bp, Homo sapiens
  siRNA target sequence for LOC197322 (NM_174917.1,1423-1441).
gtacaggtgcgcattgtct

SEQ ID NO: 236741 - DNA, 19 bp, Homo sapiens
  siRNA target sequence for LOC197322 (NM_174917.1,1429-1447).
gtgcgcattgtctcagaaa

SEQ ID NO: 236742 - DNA, 19 bp, Homo sapiens
  siRNA target sequence for LOC197322 (NM_174917.1,1559-1577).
cctccgtgtttcgagaata

SEQ ID NO: 236743 - DNA, 19 bp, Homo sapiens
  siRNA target sequence for LOC197322 (NM_174917.1,1786-1804).
ggagttccggatatgacat

SEQ ID NO: 236744 - DNA, 19 bp, Homo sapiens
  siRNA target sequence for LOC201164 (NM_178836.2,487-505).
caggctacatgcatcacaa

SEQ ID NO: 236745 - DNA, 19 bp, Homo sapiens
  siRNA target sequence for LOC201164 (NM_178836.2,608-626).
cgagtacgtgcggcttttt

SEQ ID NO: 236746 - DNA, 19 bp, Homo sapiens
  siRNA target sequence for LOC201164 (NM_178836.2,642-660).
cgcatctgggaacagttta

SEQ ID NO: 236747 - DNA, 19 bp, Homo sapiens
  siRNA target sequence for LOC201164 (NM_178836.2,662-680).
ccctacaaagtataccttt

SEQ ID NO: 236748 - DNA, 19 bp, Homo sapiens
  siRNA target sequence for LOC201164 (NM_178836.2,663-681).
cctacaaagtatacctttt

SEQ ID NO: 236749 - DNA, 19 bp, Homo sapiens
  siRNA target sequence for LOC201164 (NM_178836.2,664-682).
ctacaaagtataccttttt

SEQ ID NO: 236750 - DNA, 19 bp, Homo sapiens
  siRNA target sequence for LOC93081 (NM_138779.2,334-352).
gcatctcatgggtttttct

SEQ ID NO: 236751 - DNA, 19 bp, Homo sapiens
  siRNA target sequence for LOC93081 (NM_138779.2,354-372).
cctgagatttacctgtaaa

SEQ ID NO: 236752 - DNA, 19 bp, Homo sapiens
  siRNA target sequence for LOC93081 (NM_138779.2,365-383).
cctgtaaaggccttaatat

SEQ ID NO: 236753 - DNA, 19 bp, Homo sapiens
  siRNA target sequence for LOC93081 (NM_138779.2,373-391).
ggccttaatattgtacata

SEQ ID NO: 236754 - DNA, 19 bp, Homo sapiens
  siRNA target sequence for LOC93081 (NM_138779.2,375-393).
ccttaatattgtacataga

SEQ ID NO: 236755 - DNA, 19 bp, Homo sapiens
  siRNA target sequence for LOC93081 (NM_138779.2,400-418).
gcgtataaatcagttttga

SEQ ID NO: 236756 - DNA, 19 bp, Homo sapiens
  siRNA target sequence for LOC93081 (NM_138779.2,500-518).
ctgtaatgtgtcacattga

SEQ ID NO: 236757 - DNA, 19 bp, Homo sapiens
  siRNA target sequence for LOC93081 (NM_138779.2,541-559).
gttcggggtctcatttgta

SEQ ID NO: 236758 - DNA, 19 bp, Homo sapiens
  siRNA target sequence for LOC93081 (NM_138779.2,544-562).
cggggtctcatttgtattt

SEQ ID NO: 236759 - DNA, 19 bp, Homo sapiens
  siRNA target sequence for LOC93081 (NM_138779.2,604-622).
gatgaagacctctttcgtt

SEQ ID NO: 236760 - DNA, 19 bp, Homo sapiens
  siRNA target sequence for LOC93081 (NM_138779.2,607-625).
gaagacctctttcgtttaa

SEQ ID NO: 236761 - DNA, 19 bp, Homo sapiens
  siRNA target sequence for LOC93081 (NM_138779.2,728-746).
ggattgagaaggcaaatca

SEQ ID NO: 236762 - DNA, 19 bp, Homo sapiens
  siRNA target sequence for LOC93081 (NM_138779.2,759-777).
gaaaggacggtcgacaaat

SEQ ID NO: 236763 - DNA, 19 bp, Homo sapiens
  siRNA target sequence for LOC93081 (NM_138779.2,764-782).
gacggtcgacaaatgatgt

SEQ ID NO: 236764 - DNA, 19 bp, Homo sapiens
  siRNA target sequence for LOC93081 (NM_138779.2,766-784).
cggtcgacaaatgatgttt

SEQ ID NO: 236765 - DNA, 19 bp, Homo sapiens
  siRNA target sequence for LOC93081 (NM_138779.2,767-785).
ggtcgacaaatgatgtttt

SEQ ID NO: 236766 - DNA, 19 bp, Homo sapiens
  siRNA target sequence for LOC93081 (NM_138779.2,815-833).
ggatccaagaaattactga

SEQ ID NO: 236767 - DNA, 19 bp, Homo sapiens
  siRNA target sequence for LYPLAL1 (NM_138794.1,108-126).
gattctggacaaggattaa

SEQ ID NO: 236768 - DNA, 19 bp, Homo sapiens
  siRNA target sequence for LYPLAL1 (NM_138794.1,141-159).
caggttttaaatcaagatt

SEQ ID NO: 236769 - DNA, 19 bp, Homo sapiens
  siRNA target sequence for LYPLAL1 (NM_138794.1,195-213).
gctcctcccagatcatata

SEQ ID NO: 236770 - DNA, 19 bp, Homo sapiens
  siRNA target sequence for LYPLAL1 (NM_138794.1,205-223).
gatcatatactcctatgaa

SEQ ID NO: 236771 - DNA, 19 bp, Homo sapiens
  siRNA target sequence for LYPLAL1 (NM_138794.1,229-247).
gaatctccaatgtatggtt

SEQ ID NO: 236772 - DNA, 19 bp, Homo sapiens
  siRNA target sequence for LYPLAL1 (NM_138794.1,275-293).
cccagaacaccttgaatca

SEQ ID NO: 236773 - DNA, 19 bp, Homo sapiens
  siRNA target sequence for LYPLAL1 (NM_138794.1,305-323).
gtgtcaagtgcttactgat

SEQ ID NO: 236774 - DNA, 19 bp, Homo sapiens
  siRNA target sequence for LYPLAL1 (NM_138794.1,339-357).
gtaaaaagtggcatcaaga

SEQ ID NO: 236775 - DNA, 19 bp, Homo sapiens
  siRNA target sequence for LYPLAL1 (NM_138794.1,415-433).
catatagaaatcatcaaga

SEQ ID NO: 236776 - DNA, 19 bp, Homo sapiens
  siRNA target sequence for LYPLAL1 (NM_138794.1,444-462).
gtatttgctctttctagtt

SEQ ID NO: 236777 - DNA, 19 bp, Homo sapiens
  siRNA target sequence for LYPLAL1 (NM_138794.1,489-507).
caggctcttcagaagagta

SEQ ID NO: 236778 - DNA, 19 bp, Homo sapiens
  siRNA target sequence for LYPLAL1 (NM_138794.1,491-509).
ggctcttcagaagagtaat

SEQ ID NO: 236779 - DNA, 19 bp, Homo sapiens
  siRNA target sequence for LYPLAL1 (NM_138794.1,510-528).
ggtgtacttcctgaattat

SEQ ID NO: 236780 - DNA, 19 bp, Homo sapiens
  siRNA target sequence for LYPLAL1 (NM_138794.1,511-529).
gtgtacttcctgaattatt

SEQ ID NO: 236781 - DNA, 19 bp, Homo sapiens
  siRNA target sequence for LYPLAL1 (NM_138794.1,544-562).
ctgcagatgagttagttct

SEQ ID NO: 236782 - DNA, 19 bp, Homo sapiens
  siRNA target sequence for LYPLAL1 (NM_138794.1,549-567).
gatgagttagttcttcatt

SEQ ID NO: 236783 - DNA, 19 bp, Homo sapiens
  siRNA target sequence for LYPLAL1 (NM_138794.1,607-625).
gagtgaccacgaagtttca

SEQ ID NO: 236784 - DNA, 19 bp, Homo sapiens
  siRNA target sequence for LYPLAL1 (NM_138794.1,609-627).
gtgaccacgaagtttcata

SEQ ID NO: 236785 - DNA, 19 bp, Homo sapiens
  siRNA target sequence for LYPLAL1 (NM_138794.1,611-629).
gaccacgaagtttcatagt

SEQ ID NO: 236786 - DNA, 19 bp, Homo sapiens
  siRNA target sequence for LYPLAL1 (NM_138794.1,613-631).
ccacgaagtttcatagttt

SEQ ID NO: 236787 - DNA, 19 bp, Homo sapiens
  siRNA target sequence for LYPLAL1 (NM_138794.1,644-662).
ccatgagctaagcaaaact

SEQ ID NO: 236788 - DNA, 19 bp, Homo sapiens
  siRNA target sequence for LYPLAL1 (NM_138794.1,655-673).
gcaaaactgagttagacat

SEQ ID NO: 236789 - DNA, 19 bp, Homo sapiens
  siRNA target sequence for LYPLAL1 (NM_138794.1,661-679).
ctgagttagacatattgaa

SEQ ID NO: 236790 - DNA, 19 bp, Homo sapiens
  siRNA target sequence for LYPLAL1 (NM_138794.1,671-689).
catattgaagttatggatt

SEQ ID NO: 236791 - DNA, 19 bp, Homo sapiens
  siRNA target sequence for MCOLN1 (NM_020533.1,245-263).
ccttcgccgtcgtctcaaa

SEQ ID NO: 236792 - DNA, 19 bp, Homo sapiens
  siRNA target sequence for MCOLN1 (NM_020533.1,246-264).
cttcgccgtcgtctcaaat

SEQ ID NO: 236793 - DNA, 19 bp, Homo sapiens
  siRNA target sequence for MCOLN1 (NM_020533.1,249-267).
cgccgtcgtctcaaatact

SEQ ID NO: 236794 - DNA, 19 bp, Homo sapiens
  siRNA target sequence for MCOLN1 (NM_020533.1,250-268).
gccgtcgtctcaaatactt

SEQ ID NO: 236795 - DNA, 19 bp, Homo sapiens
  siRNA target sequence for MCOLN1 (NM_020533.1,251-269).
ccgtcgtctcaaatacttt

SEQ ID NO: 236796 - DNA, 19 bp, Homo sapiens
  siRNA target sequence for MCOLN1 (NM_020533.1,657-675).
gccaacgacacatttgaca

SEQ ID NO: 236797 - DNA, 19 bp, Homo sapiens
  siRNA target sequence for MCOLN1 (NM_020533.1,658-676).
ccaacgacacatttgacat

SEQ ID NO: 236798 - DNA, 19 bp, Homo sapiens
  siRNA target sequence for MCOLN1 (NM_020533.1,659-677).
caacgacacatttgacatt

SEQ ID NO: 236799 - DNA, 19 bp, Homo sapiens
  siRNA target sequence for MCOLN1 (NM_020533.1,662-680).
cgacacatttgacattgat

SEQ ID NO: 236800 - DNA, 19 bp, Homo sapiens
  siRNA target sequence for MCOLN1 (NM_020533.1,747-765).
gatctcaccctcttggaaa

SEQ ID NO: 236801 - DNA, 19 bp, Homo sapiens
  siRNA target sequence for MCOLN1 (NM_020533.1,766-784).
gcagctccagttacaagaa

SEQ ID NO: 236802 - DNA, 19 bp, Homo sapiens
  siRNA target sequence for MCOLN1 (NM_020533.1,801-819).
cacaagctggtcaatgtca

SEQ ID NO: 236803 - DNA, 19 bp, Homo sapiens
  siRNA target sequence for MCOLN1 (NM_020533.1,851-869).
ccagagcctcatcaataat

SEQ ID NO: 236804 - DNA, 19 bp, Homo sapiens
  siRNA target sequence for MCOLN1 (NM_020533.1,870-888).
gagatcccggactgctata

SEQ ID NO: 236805 - DNA, 19 bp, Homo sapiens
  siRNA target sequence for MCOLN1 (NM_020533.1,897-915).
gtcctgatcacgtttgaca

SEQ ID NO: 236806 - DNA, 19 bp, Homo sapiens
  siRNA target sequence for MCOLN1 (NM_020533.1,1012-1030).
gcttccggctcctgtttga

SEQ ID NO: 236807 - DNA, 19 bp, Homo sapiens
  siRNA target sequence for MCOLN1 (NM_020533.1,1110-1128).
gagtttgtggggttcatgt

SEQ ID NO: 236808 - DNA, 19 bp, Homo sapiens
  siRNA target sequence for MCOLN1 (NM_020533.1,1159-1177).
gggagcggctggaatttgt

SEQ ID NO: 236809 - DNA, 19 bp, Homo sapiens
  siRNA target sequence for MCOLN1 (NM_020533.1,1161-1179).
gagcggctggaatttgtca

SEQ ID NO: 236810 - DNA, 19 bp, Homo sapiens
  siRNA target sequence for MCOLN1 (NM_020533.1,1163-1181).
gcggctggaatttgtcaat

SEQ ID NO: 236811 - DNA, 19 bp, Homo sapiens
  siRNA target sequence for MCOLN1 (NM_020533.1,1414-1432).
gctgcgtggctgtcatcta

SEQ ID NO: 236812 - DNA, 19 bp, Homo sapiens
  siRNA target sequence for MCOLN1 (NM_020533.1,1513-1531).
gcctgttctcgctcatcaa

SEQ ID NO: 236813 - DNA, 19 bp, Homo sapiens
  siRNA target sequence for MCOLN1 (NM_020533.1,1848-1866).
cattcgctgctggtgaatt

SEQ ID NO: 236814 - DNA, 19 bp, Homo sapiens
  siRNA target sequence for MGC15429 (NM_032750.1,679-697).
ccatctgcactgacaaaat

SEQ ID NO: 236815 - DNA, 19 bp, Homo sapiens
  siRNA target sequence for MGC15429 (NM_032750.1,725-743).
gactccagctctgattgta

SEQ ID NO: 236816 - DNA, 19 bp, Homo sapiens
  siRNA target sequence for MGC15429 (NM_032750.1,727-745).
ctccagctctgattgtata

SEQ ID NO: 236817 - DNA, 19 bp, Homo sapiens
  siRNA target sequence for MGC19531 (NM_005167.4,1573-1591).
gtgcactggttgtgatcta

SEQ ID NO: 236818 - DNA, 19 bp, Homo sapiens
  siRNA target sequence for MGC19531 (NM_005167.4,1625-1643).
cgatagcagggccatcatt

SEQ ID NO: 236819 - DNA, 19 bp, Homo sapiens
  siRNA target sequence for MGC19531 (NM_005167.4,1665-1683).
ccaatgtcccgggagttta

SEQ ID NO: 236820 - DNA, 19 bp, Homo sapiens
  siRNA target sequence for MGC19531 (NM_005167.4,1831-1849).
ccggctgggcctacaaaaa

SEQ ID NO: 236821 - DNA, 19 bp, Homo sapiens
  siRNA target sequence for MGC19531 (NM_005167.4,1833-1851).
ggctgggcctacaaaaaga

SEQ ID NO: 236822 - DNA, 19 bp, Homo sapiens
  siRNA target sequence for MGC19531 (NM_005167.4,1834-1852).
gctgggcctacaaaaagat

SEQ ID NO: 236823 - DNA, 19 bp, Homo sapiens
  siRNA target sequence for MGC19531 (NM_005167.4,1942-1960).
gagaccacagccttaaggt

SEQ ID NO: 236824 - DNA, 19 bp, Homo sapiens
  siRNA target sequence for MGC19531 (NM_005167.4,2003-2021).
ccctgaggtacgagtgtat

SEQ ID NO: 236825 - DNA, 19 bp, Homo sapiens
  siRNA target sequence for MGC19531 (NM_005167.4,2005-2023).
ctgaggtacgagtgtatga

SEQ ID NO: 236826 - DNA, 19 bp, Homo sapiens
  siRNA target sequence for MGC19531 (NM_005167.4,2016-2034).
gtgtatgacctgacacaat

SEQ ID NO: 236827 - DNA, 19 bp, Homo sapiens
  siRNA target sequence for MGC19531 (NM_005167.4,2018-2036).
gtatgacctgacacaatat

SEQ ID NO: 236828 - DNA, 19 bp, Homo sapiens
  siRNA target sequence for MGC19531 (NM_005167.4,2134-2152).
cggcctatgagcctaatga

SEQ ID NO: 236829 - DNA, 19 bp, Homo sapiens
  siRNA target sequence for MGC19531 (NM_005167.4,2224-2242).
ggcgtctccccaacaacaa

SEQ ID NO: 236830 - DNA, 19 bp, Homo sapiens
  siRNA target sequence for MGC19531 (NM_005167.4,2286-2304).
ggagggccaggcagttact

SEQ ID NO: 236831 - DNA, 19 bp, Homo sapiens
  siRNA target sequence for MGC5352 (NM_138575.1,288-306).
caagctggaccactacaaa

SEQ ID NO: 236832 - DNA, 19 bp, Homo sapiens
  siRNA target sequence for MGC5352 (NM_138575.1,433-451).
gcaagcttggggttgaagt

SEQ ID NO: 236833 - DNA, 19 bp, Homo sapiens
  siRNA target sequence for MGC5352 (NM_138575.1,434-452).
caagcttggggttgaagtt

SEQ ID NO: 236834 - DNA, 19 bp, Homo sapiens
  siRNA target sequence for MGC5352 (NM_138575.1,441-459).
ggggttgaagtttaataaa

SEQ ID NO: 236835 - DNA, 19 bp, Homo sapiens
  siRNA target sequence for MGC5352 (NM_138575.1,442-460).
gggttgaagtttaataaaa

SEQ ID NO: 236836 - DNA, 19 bp, Homo sapiens
  siRNA target sequence for MGC5352 (NM_138575.1,601-619).
ccggaagctgtgcagtatt

SEQ ID NO: 236837 - DNA, 19 bp, Homo sapiens
  siRNA target sequence for MGC5352 (NM_138575.1,759-777).
gttgtccgctggggatttt

SEQ ID NO: 236838 - DNA, 19 bp, Homo sapiens
  siRNA target sequence for MOCS2 (NM_004531.3,567-585).
cgagaaactttcagtagat

SEQ ID NO: 236839 - DNA, 19 bp, Homo sapiens
  siRNA target sequence for MOCS2 (NM_004531.3,589-607).
gtctcacagttggtgattt

SEQ ID NO: 236840 - DNA, 19 bp, Homo sapiens
  siRNA target sequence for MOCS2 (NM_004531.3,610-628).
ccgctctgtggtgcaatat

SEQ ID NO: 236841 - DNA, 19 bp, Homo sapiens
  siRNA target sequence for MOCS2 (NM_004531.3,620-638).
gtgcaatatccctatttgt

SEQ ID NO: 236842 - DNA, 19 bp, Homo sapiens
  siRNA target sequence for MOCS2 (NM_004531.3,640-658).
gggactacaagaaataact

SEQ ID NO: 236843 - DNA, 19 bp, Homo sapiens
  siRNA target sequence for MOCS2 (NM_004531.3,641-659).
ggactacaagaaataactt

SEQ ID NO: 236844 - DNA, 19 bp, Homo sapiens
  siRNA target sequence for MOCS2 (NM_004531.3,680-698).
gcttagaatatgaagcata

SEQ ID NO: 236845 - DNA, 19 bp, Homo sapiens
  siRNA target sequence for MOCS2 (NM_004531.3,681-699).
cttagaatatgaagcatat

SEQ ID NO: 236846 - DNA, 19 bp, Homo sapiens
  siRNA target sequence for MOCS2 (NM_004531.3,747-765).
gcagaaatggccagtcaaa

SEQ ID NO: 236847 - DNA, 19 bp, Homo sapiens
  siRNA target sequence for MOCS2 (NM_004531.3,802-820).
gtgtcagaagcaagcataa

SEQ ID NO: 236848 - DNA, 19 bp, Homo sapiens
  siRNA target sequence for MOCS2 (NM_004531.3,843-861).
cagagctgcatctcttgaa

SEQ ID NO: 236849 - DNA, 19 bp, Homo sapiens
  siRNA target sequence for MOCS2 (NM_004531.3,865-883).
gtgagctatgccattgata

SEQ ID NO: 236850 - DNA, 19 bp, Homo sapiens
  siRNA target sequence for MOCS2 (NM_004531.3,867-885).
gagctatgccattgatact

SEQ ID NO: 236851 - DNA, 19 bp, Homo sapiens
  siRNA target sequence for MOCS2 (NM_004531.3,869-887).
gctatgccattgatacttt

SEQ ID NO: 236852 - DNA, 19 bp, Homo sapiens
  siRNA target sequence for MOCS2 (NM_004531.3,870-888).
ctatgccattgatacttta

SEQ ID NO: 236853 - DNA, 19 bp, Homo sapiens
  siRNA target sequence for MOCS2 (NM_004531.3,893-911).
ccaaggtgcccatatggaa

SEQ ID NO: 236854 - DNA, 19 bp, Homo sapiens
  siRNA target sequence for MOCS2 (NM_004531.3,894-912).
caaggtgcccatatggaaa

SEQ ID NO: 236855 - DNA, 19 bp, Homo sapiens
  siRNA target sequence for MOCS2 (NM_004531.3,908-926).
ggaaaaaggaaatatacga

SEQ ID NO: 236856 - DNA, 19 bp, Homo sapiens
  siRNA target sequence for NDRG1 (NM_006096.2,212-230).
cggcctcctgcaagagttt

SEQ ID NO: 236857 - DNA, 19 bp, Homo sapiens
  siRNA target sequence for NDRG1 (NM_006096.2,214-232).
gcctcctgcaagagtttga

SEQ ID NO: 236858 - DNA, 19 bp, Homo sapiens
  siRNA target sequence for NDRG1 (NM_006096.2,242-260).
gcaggacatcgagacttta

SEQ ID NO: 236859 - DNA, 19 bp, Homo sapiens
  siRNA target sequence for NDRG1 (NM_006096.2,245-263).
ggacatcgagactttacat

SEQ ID NO: 236860 - DNA, 19 bp, Homo sapiens
  siRNA target sequence for NDRG1 (NM_006096.2,355-373).
gctacaaccccctcttcaa

SEQ ID NO: 236861 - DNA, 19 bp, Homo sapiens
  siRNA target sequence for NDRG1 (NM_006096.2,561-579).
gcaggcgcctacatcctaa

SEQ ID NO: 236862 - DNA, 19 bp, Homo sapiens
  siRNA target sequence for NDRG1 (NM_006096.2,569-587).
ctacatcctaactcgattt

SEQ ID NO: 236863 - DNA, 19 bp, Homo sapiens
  siRNA target sequence for NDRG1 (NM_006096.2,580-598).
ctcgatttgctctaaacaa

SEQ ID NO: 236864 - DNA, 19 bp, Homo sapiens
  siRNA target sequence for NDRG1 (NM_006096.2,773-791).
ccgccagcacattgtgaat

SEQ ID NO: 236865 - DNA, 19 bp, Homo sapiens
  siRNA target sequence for NDRG1 (NM_006096.2,809-827).
cctgcacctgttcatcaat

SEQ ID NO: 236866 - DNA, 19 bp, Homo sapiens
  siRNA target sequence for NDRG3 (NM_022477.2,113-131).
gagatcaaaccacttctaa

SEQ ID NO: 236867 - DNA, 19 bp, Homo sapiens
  siRNA target sequence for NDRG3 (NM_022477.2,165-183).
gtgtggtccacgtcactat

SEQ ID NO: 236868 - DNA, 19 bp, Homo sapiens
  siRNA target sequence for NDRG3 (NM_022477.2,167-185).
gtggtccacgtcactataa

SEQ ID NO: 236869 - DNA, 19 bp, Homo sapiens
  siRNA target sequence for NDRG3 (NM_022477.2,169-187).
ggtccacgtcactataaga

SEQ ID NO: 236870 - DNA, 19 bp, Homo sapiens
  siRNA target sequence for NDRG3 (NM_022477.2,207-225).
gaccagttatactaacata

SEQ ID NO: 236871 - DNA, 19 bp, Homo sapiens
  siRNA target sequence for NDRG3 (NM_022477.2,232-250).
cattggcctcaaccataaa

SEQ ID NO: 236872 - DNA, 19 bp, Homo sapiens
  siRNA target sequence for NDRG3 (NM_022477.2,236-254).
ggcctcaaccataaatcct

SEQ ID NO: 236873 - DNA, 19 bp, Homo sapiens
  siRNA target sequence for NDRG3 (NM_022477.2,255-273).
gtttcaatgcattctttaa

SEQ ID NO: 236874 - DNA, 19 bp, Homo sapiens
  siRNA target sequence for NDRG3 (NM_022477.2,472-490).
catcctcagcagatttgca

SEQ ID NO: 236875 - DNA, 19 bp, Homo sapiens
  siRNA target sequence for NDRG3 (NM_022477.2,516-534).
gccttgtgctcattaatgt

SEQ ID NO: 236876 - DNA, 19 bp, Homo sapiens
  siRNA target sequence for NDRG3 (NM_022477.2,545-563).
gctaaaggctggattgact

SEQ ID NO: 236877 - DNA, 19 bp, Homo sapiens
  siRNA target sequence for NDRG3 (NM_022477.2,594-612).
ccaatgttgtggacattat

SEQ ID NO: 236878 - DNA, 19 bp, Homo sapiens
  siRNA target sequence for NDRG3 (NM_022477.2,765-783).
ccatactgggccaaaatga

SEQ ID NO: 236879 - DNA, 19 bp, Homo sapiens
  siRNA target sequence for NDRG3 (NM_022477.2,770-788).
ctgggccaaaatgataaca

SEQ ID NO: 236880 - DNA, 19 bp, Homo sapiens
  siRNA target sequence for NDRG3 (NM_022477.2,850-868).
ggctgtggtcgaatgcaat

SEQ ID NO: 236881 - DNA, 19 bp, Homo sapiens
  siRNA target sequence for NDRG3 (NM_022477.2,851-869).
gctgtggtcgaatgcaatt

SEQ ID NO: 236882 - DNA, 19 bp, Homo sapiens
  siRNA target sequence for NDRG3 (NM_022477.2,870-888).
cccgcctgaaccctataaa

SEQ ID NO: 236883 - DNA, 19 bp, Homo sapiens
  siRNA target sequence for NDRG3 (NM_022477.2,874-892).
cctgaaccctataaataca

SEQ ID NO: 236884 - DNA, 19 bp, Homo sapiens
  siRNA target sequence for NDRG3 (NM_022477.2,921-939).
gactgccccaggtagttca

SEQ ID NO: 236885 - DNA, 19 bp, Homo sapiens
  siRNA target sequence for NDRG3 (NM_022477.2,976-994).
gcagggaatgggctacata

SEQ ID NO: 236886 - DNA, 19 bp, Homo sapiens
  siRNA target sequence for NDRG3 (NM_022477.2,1099-1117).
gtcagatggaactcaagaa

SEQ ID NO: 236887 - DNA, 19 bp, Homo sapiens
  siRNA target sequence for NLGN4 (NM_020742.2,508-526).
ccccggtctgcgtcatgtt

SEQ ID NO: 236888 - DNA, 19 bp, Homo sapiens
  siRNA target sequence for NLGN4 (NM_020742.2,510-528).
ccggtctgcgtcatgttaa

SEQ ID NO: 236889 - DNA, 19 bp, Homo sapiens
  siRNA target sequence for NRXN3 (NM_004796.2,500-518).
ctcggacgacttcttctat

SEQ ID NO: 236890 - DNA, 19 bp, Homo sapiens
  siRNA target sequence for NRXN3 (NM_004796.2,503-521).
ggacgacttcttctatgta

SEQ ID NO: 236891 - DNA, 19 bp, Homo sapiens
  siRNA target sequence for NRXN3 (NM_004796.2,583-601).
gccttaaagaggttgttta

SEQ ID NO: 236892 - DNA, 19 bp, Homo sapiens
  siRNA target sequence for NRXN3 (NM_004796.2,668-686).
ctatggcgaagttgtgttt

SEQ ID NO: 236893 - DNA, 19 bp, Homo sapiens
  siRNA target sequence for NRXN3 (NM_004796.2,674-692).
cgaagttgtgtttaagtgt

SEQ ID NO: 236894 - DNA, 19 bp, Homo sapiens
  siRNA target sequence for NRXN3 (NM_004796.2,711-729).
gaccccatcaactttgaga

SEQ ID NO: 236895 - DNA, 19 bp, Homo sapiens
  siRNA target sequence for NRXN3 (NM_004796.2,752-770).
gcccaagtggaacactaaa

SEQ ID NO: 236896 - DNA, 19 bp, Homo sapiens
  siRNA target sequence for NRXN3 (NM_004796.2,864-882).
cggagccagaagaatacaa

SEQ ID NO: 236897 - DNA, 19 bp, Homo sapiens
  siRNA target sequence for NRXN3 (NM_004796.2,1023-1041).
ggcagatcaggtactatat

SEQ ID NO: 236898 - DNA, 19 bp, Homo sapiens
  siRNA target sequence for NRXN3 (NM_004796.2,1133-1151).
gaaccgtgctggccttatt

SEQ ID NO: 236899 - DNA, 19 bp, Homo sapiens
  siRNA target sequence for NRXN3 (NM_004796.2,1198-1216).
gctgcatccgcgacctatt

SEQ ID NO: 236900 - DNA, 19 bp, Homo sapiens
  siRNA target sequence for NRXN3 (NM_004796.2,1201-1219).
gcatccgcgacctattcat

SEQ ID NO: 236901 - DNA, 19 bp, Homo sapiens
  siRNA target sequence for NRXN3 (NM_004796.2,1202-1220).
catccgcgacctattcatt

SEQ ID NO: 236902 - DNA, 19 bp, Homo sapiens
  siRNA target sequence for NRXN3 (NM_004796.2,1205-1223).
ccgcgacctattcattgat

SEQ ID NO: 236903 - DNA, 19 bp, Homo sapiens
  siRNA target sequence for NRXN3 (NM_004796.2,1221-1239).
gatgggcgcagcaagaaca

SEQ ID NO: 236904 - DNA, 19 bp, Homo sapiens
  siRNA target sequence for NRXN3 (NM_004796.2,1318-1336).
gctacccctgcaagaataa

SEQ ID NO: 236905 - DNA, 19 bp, Homo sapiens
  siRNA target sequence for NRXN3 (NM_004796.2,1319-1337).
ctacccctgcaagaataat

SEQ ID NO: 236906 - DNA, 19 bp, Homo sapiens
  siRNA target sequence for NRXN3 (NM_004796.2,1437-1455).
gatggtagcatgtacatga

SEQ ID NO: 236907 - DNA, 19 bp, Homo sapiens
  siRNA target sequence for NRXN3 (NM_004796.2,1599-1617).
gtcaagctcatggttaact

SEQ ID NO: 236908 - DNA, 19 bp, Homo sapiens
  siRNA target sequence for NRXN3 (NM_004796.2,1601-1619).
caagctcatggttaactta

SEQ ID NO: 236909 - DNA, 19 bp, Homo sapiens
  siRNA target sequence for NRXN3 (NM_004796.2,1605-1623).
ctcatggttaacttagact

SEQ ID NO: 236910 - DNA, 19 bp, Homo sapiens
  siRNA target sequence for NRXN3 (NM_004796.2,1611-1629).
gttaacttagactgtatca

SEQ ID NO: 236911 - DNA, 19 bp, Homo sapiens
  siRNA target sequence for NRXN3 (NM_004796.2,1739-1757).
gttaaccgtggatgatgat

SEQ ID NO: 236912 - DNA, 19 bp, Homo sapiens
  siRNA target sequence for NRXN3 (NM_004796.2,2082-2100).
ccagatggcttcattctct

SEQ ID NO: 236913 - DNA, 19 bp, Homo sapiens
  siRNA target sequence for NRXN3 (NM_004796.2,2138-2156).
gcttgtcaaggggtatata

SEQ ID NO: 236914 - DNA, 19 bp, Homo sapiens
  siRNA target sequence for NRXN3 (NM_004796.2,2148-2166).
gggtatatacactacgttt

SEQ ID NO: 236915 - DNA, 19 bp, Homo sapiens
  siRNA target sequence for NRXN3 (NM_004796.2,2149-2167).
ggtatatacactacgtttt

SEQ ID NO: 236916 - DNA, 19 bp, Homo sapiens
  siRNA target sequence for NRXN3 (NM_004796.2,2244-2262).
gtcatcactcgggacaata

SEQ ID NO: 236917 - DNA, 19 bp, Homo sapiens
  siRNA target sequence for NRXN3 (NM_004796.2,2246-2264).
catcactcgggacaatagt

SEQ ID NO: 236918 - DNA, 19 bp, Homo sapiens
  siRNA target sequence for NRXN3 (NM_004796.2,2525-2543).
cacctgccaggaagattca

SEQ ID NO: 236919 - DNA, 19 bp, Homo sapiens
  siRNA target sequence for NRXN3 (NM_004796.2,2556-2574).
ggggtctgcatgcaacaat

SEQ ID NO: 236920 - DNA, 19 bp, Homo sapiens
  siRNA target sequence for NRXN3 (NM_004796.2,2635-2653).
ctggcgctacgtacatctt

SEQ ID NO: 236921 - DNA, 19 bp, Homo sapiens
  siRNA target sequence for NRXN3 (NM_004796.2,2645-2663).
gtacatctttgggaaaagt

SEQ ID NO: 236922 - DNA, 19 bp, Homo sapiens
  siRNA target sequence for NRXN3 (NM_004796.2,3008-3026).
caacactcaggcgcaaata

SEQ ID NO: 236923 - DNA, 19 bp, Homo sapiens
  siRNA target sequence for NRXN3 (NM_004796.2,3066-3084).
caactctctgggctctatt

SEQ ID NO: 236924 - DNA, 19 bp, Homo sapiens
  siRNA target sequence for NRXN3 (NM_004796.2,3091-3109).
gtttgaaagtactgaacat

SEQ ID NO: 236925 - DNA, 19 bp, Homo sapiens
  siRNA target sequence for NRXN3 (NM_004796.2,3117-3135).
gagaacaaccccaatatta

SEQ ID NO: 236926 - DNA, 19 bp, Homo sapiens
  siRNA target sequence for NRXN3 (NM_004796.2,3119-3137).
gaacaaccccaatattaaa

SEQ ID NO: 236927 - DNA, 19 bp, Homo sapiens
  siRNA target sequence for NRXN3 (NM_004796.2,3162-3180).
ggagaagtcccatcaattt

SEQ ID NO: 236928 - DNA, 19 bp, Homo sapiens
  siRNA target sequence for NRXN3 (NM_004796.2,3199-3217).
cctccatgccaccagaaat

SEQ ID NO: 236929 - DNA, 19 bp, Homo sapiens
  siRNA target sequence for NRXN3 (NM_004796.2,3228-3246).
gtcatggaaaccactacta

SEQ ID NO: 236930 - DNA, 19 bp, Homo sapiens
  siRNA target sequence for NRXN3 (NM_004796.2,3230-3248).
catggaaaccactactaca

SEQ ID NO: 236931 - DNA, 19 bp, Homo sapiens
  siRNA target sequence for NRXN3 (NM_004796.2,3256-3274).
ctaccacaacccgtaagaa

SEQ ID NO: 236932 - DNA, 19 bp, Homo sapiens
  siRNA target sequence for NRXN3 (NM_004796.2,3296-3314).
gccaacatcagatgatctt

SEQ ID NO: 236933 - DNA, 19 bp, Homo sapiens
  siRNA target sequence for NRXN3 (NM_004796.2,3530-3548).
ggacgaggggtcctatcaa

SEQ ID NO: 236934 - DNA, 19 bp, Homo sapiens
  siRNA target sequence for NRXN3 (NM_004796.2,3552-3570).
gacgagacgcggaactaca

SEQ ID NO: 236935 - DNA, 19 bp, Homo sapiens
  siRNA target sequence for NRXN3 (NM_004796.2,3555-3573).
gagacgcggaactacatca

SEQ ID NO: 236936 - DNA, 19 bp, Homo sapiens
  siRNA target sequence for NRXN3 (NM_138970.1,1048-1066).
ctgtatggagttcttctaa

SEQ ID NO: 236937 - DNA, 19 bp, Homo sapiens
  siRNA target sequence for NRXN3 (NM_138970.1,1146-1164).
cactcagtgcctatttcta

SEQ ID NO: 236938 - DNA, 19 bp, Homo sapiens
  siRNA target sequence for NRXN3 (NM_138970.1,1155-1173).
cctatttctatctatcgtt

SEQ ID NO: 236939 - DNA, 19 bp, Homo sapiens
  siRNA target sequence for OAZIN (NM_015878.3,765-783).
ggatgaaggaacaaacctt

SEQ ID NO: 236940 - DNA, 19 bp, Homo sapiens
  siRNA target sequence for OAZIN (NM_015878.3,848-866).
gagatcttggaaagattgt

SEQ ID NO: 236941 - DNA, 19 bp, Homo sapiens
  siRNA target sequence for OAZIN (NM_015878.3,850-868).
gatcttggaaagattgtga

SEQ ID NO: 236942 - DNA, 19 bp, Homo sapiens
  siRNA target sequence for OAZIN (NM_015878.3,876-894).
cagtcaatggcagaatgta

SEQ ID NO: 236943 - DNA, 19 bp, Homo sapiens
  siRNA target sequence for OAZIN (NM_015878.3,888-906).
gaatgtagtggctcagata

SEQ ID NO: 236944 - DNA, 19 bp, Homo sapiens
  siRNA target sequence for OAZIN (NM_015878.3,901-919).
cagataaagccattctaca

SEQ ID NO: 236945 - DNA, 19 bp, Homo sapiens
  siRNA target sequence for OAZIN (NM_015878.3,967-985).
cttggaaccggatttgctt

SEQ ID NO: 236946 - DNA, 19 bp, Homo sapiens
  siRNA target sequence for OAZIN (NM_015878.3,1024-1042).
ggtgtacctccagaaaaca

SEQ ID NO: 236947 - DNA, 19 bp, Homo sapiens
  siRNA target sequence for OAZIN (NM_015878.3,1025-1043).
gtgtacctccagaaaacat

SEQ ID NO: 236948 - DNA, 19 bp, Homo sapiens
  siRNA target sequence for OAZIN (NM_015878.3,1027-1045).
gtacctccagaaaacatta

SEQ ID NO: 236949 - DNA, 19 bp, Homo sapiens
  siRNA target sequence for OAZIN (NM_015878.3,1062-1080).
caagcaagtgtctcagata

SEQ ID NO: 236950 - DNA, 19 bp, Homo sapiens
  siRNA target sequence for OAZIN (NM_015878.3,1066-1084).
caagtgtctcagataaagt

SEQ ID NO: 236951 - DNA, 19 bp, Homo sapiens
  siRNA target sequence for OAZIN (NM_015878.3,1091-1109).
caaaagttggagtgaatat

SEQ ID NO: 236952 - DNA, 19 bp, Homo sapiens
  siRNA target sequence for OAZIN (NM_015878.3,1111-1129).
ctgacatgtgacaatgaaa

SEQ ID NO: 236953 - DNA, 19 bp, Homo sapiens
  siRNA target sequence for OAZIN (NM_015878.3,1115-1133).
catgtgacaatgaaattga

SEQ ID NO: 236954 - DNA, 19 bp, Homo sapiens
  siRNA target sequence for OAZIN (NM_015878.3,1166-1184).
ccaaggtcttactacatat

SEQ ID NO: 236955 - DNA, 19 bp, Homo sapiens
  siRNA target sequence for OAZIN (NM_015878.3,1167-1185).
caaggtcttactacatatt

SEQ ID NO: 236956 - DNA, 19 bp, Homo sapiens
  siRNA target sequence for OAZIN (NM_015878.3,1170-1188).
ggtcttactacatattgca

SEQ ID NO: 236957 - DNA, 19 bp, Homo sapiens
  siRNA target sequence for OAZIN (NM_015878.3,1180-1198).
catattgcaacagaagata

SEQ ID NO: 236958 - DNA, 19 bp, Homo sapiens
  siRNA target sequence for OAZIN (NM_015878.3,1207-1225).
ggtgaagagggtaacatga

SEQ ID NO: 236959 - DNA, 19 bp, Homo sapiens
  siRNA target sequence for OAZIN (NM_015878.3,1210-1228).
gaagagggtaacatgaagt

SEQ ID NO: 236960 - DNA, 19 bp, Homo sapiens
  siRNA target sequence for OAZIN (NM_015878.3,1260-1278).
cttggaatgtgctaaggaa

SEQ ID NO: 236961 - DNA, 19 bp, Homo sapiens
  siRNA target sequence for OAZIN (NM_015878.3,1268-1286).
gtgctaaggaacttgatgt

SEQ ID NO: 236962 - DNA, 19 bp, Homo sapiens
  siRNA target sequence for OAZIN (NM_015878.3,1276-1294).
gaacttgatgtccaaataa

SEQ ID NO: 236963 - DNA, 19 bp, Homo sapiens
  siRNA target sequence for OAZIN (NM_015878.3,1297-1315).
ggggttaaatttcatgttt

SEQ ID NO: 236964 - DNA, 19 bp, Homo sapiens
  siRNA target sequence for OAZIN (NM_015878.3,1325-1343).
gcaaagaatctcaagtata

SEQ ID NO: 236965 - DNA, 19 bp, Homo sapiens
  siRNA target sequence for OAZIN (NM_015878.3,1363-1381).
gctcgatgtgtgtttgaca

SEQ ID NO: 236966 - DNA, 19 bp, Homo sapiens
  siRNA target sequence for OAZIN (NM_015878.3,1388-1406).
gagaaattggctttacgat

SEQ ID NO: 236967 - DNA, 19 bp, Homo sapiens
  siRNA target sequence for OAZIN (NM_015878.3,1398-1416).
ctttacgatgaacatgtta

SEQ ID NO: 236968 - DNA, 19 bp, Homo sapiens
  siRNA target sequence for OAZIN (NM_015878.3,1403-1421).
cgatgaacatgttagacat

SEQ ID NO: 236969 - DNA, 19 bp, Homo sapiens
  siRNA target sequence for OAZIN (NM_015878.3,1429-1447).
ggattcacgggaactgaat

SEQ ID NO: 236970 - DNA, 19 bp, Homo sapiens
  siRNA target sequence for OAZIN (NM_015878.3,1430-1448).
gattcacgggaactgaatt

SEQ ID NO: 236971 - DNA, 19 bp, Homo sapiens
  siRNA target sequence for OAZIN (NM_015878.3,1434-1452).
cacgggaactgaatttcaa

SEQ ID NO: 236972 - DNA, 19 bp, Homo sapiens
  siRNA target sequence for OAZIN (NM_015878.3,1455-1473).
ggaagaggttaatcatgtt

SEQ ID NO: 236973 - DNA, 19 bp, Homo sapiens
  siRNA target sequence for OAZIN (NM_015878.3,1456-1474).
gaagaggttaatcatgtta

SEQ ID NO: 236974 - DNA, 19 bp, Homo sapiens
  siRNA target sequence for OAZIN (NM_015878.3,1459-1477).
gaggttaatcatgttatca

SEQ ID NO: 236975 - DNA, 19 bp, Homo sapiens
  siRNA target sequence for OAZIN (NM_015878.3,1480-1498).
cctctgttggatatctact

SEQ ID NO: 236976 - DNA, 19 bp, Homo sapiens
  siRNA target sequence for OAZIN (NM_015878.3,1502-1520).
ctgaaggatctggtgttaa

SEQ ID NO: 236977 - DNA, 19 bp, Homo sapiens
  siRNA target sequence for OAZIN (NM_015878.3,1504-1522).
gaaggatctggtgttaaga

SEQ ID NO: 236978 - DNA, 19 bp, Homo sapiens
  siRNA target sequence for OAZIN (NM_015878.3,1559-1577).
catttacactcgcagttaa

SEQ ID NO: 236979 - DNA, 19 bp, Homo sapiens
  siRNA target sequence for OAZIN (NM_015878.3,1706-1724).
ctgaggacttaaataccat

SEQ ID NO: 236980 - DNA, 19 bp, Homo sapiens
  siRNA target sequence for OAZIN (NM_015878.3,1753-1771).
gatgagcctctgtttacaa

SEQ ID NO: 236981 - DNA, 19 bp, Homo sapiens
  siRNA target sequence for OAZIN (NM_015878.3,1790-1808).
cctgtgatgagcttgatca

SEQ ID NO: 236982 - DNA, 19 bp, Homo sapiens
  siRNA target sequence for OAZIN (NM_015878.3,1791-1809).
ctgtgatgagcttgatcaa

SEQ ID NO: 236983 - DNA, 19 bp, Homo sapiens
  siRNA target sequence for OAZIN (NM_015878.3,1793-1811).
gtgatgagcttgatcaaat

SEQ ID NO: 236984 - DNA, 19 bp, Homo sapiens
  siRNA target sequence for OAZIN (NM_015878.3,1843-1861).
gtgggagattggcttatct

SEQ ID NO: 236985 - DNA, 19 bp, Homo sapiens
  siRNA target sequence for OAZIN (NM_015878.3,1845-1863).
gggagattggcttatcttt

SEQ ID NO: 236986 - DNA, 19 bp, Homo sapiens
  siRNA target sequence for OAZIN (NM_015878.3,1847-1865).
gagattggcttatctttga

SEQ ID NO: 236987 - DNA, 19 bp, Homo sapiens
  siRNA target sequence for PGS1 (NM_024419.2,395-413).
ggactgcctggaaagtact

SEQ ID NO: 236988 - DNA, 19 bp, Homo sapiens
  siRNA target sequence for PGS1 (NM_024419.2,405-423).
gaaagtactctagaaaagt

SEQ ID NO: 236989 - DNA, 19 bp, Homo sapiens
  siRNA target sequence for PGS1 (NM_024419.2,422-440).
gtcactccaagcaaagttt

SEQ ID NO: 236990 - DNA, 19 bp, Homo sapiens
  siRNA target sequence for PGS1 (NM_024419.2,552-570).
cgagtctccctctttcaca

SEQ ID NO: 236991 - DNA, 19 bp, Homo sapiens
  siRNA target sequence for PGS1 (NM_024419.2,631-649).
gcctccagcacattaaggt

SEQ ID NO: 236992 - DNA, 19 bp, Homo sapiens
  siRNA target sequence for PGS1 (NM_024419.2,660-678).
gacaacagcgtcatcttga

SEQ ID NO: 236993 - DNA, 19 bp, Homo sapiens
  siRNA target sequence for PGS1 (NM_024419.2,748-766).
cggagattgccgacttctt

SEQ ID NO: 236994 - DNA, 19 bp, Homo sapiens
  siRNA target sequence for PGS1 (NM_024419.2,841-859).
ggatggtgcatccttacaa

SEQ ID NO: 236995 - DNA, 19 bp, Homo sapiens
  siRNA target sequence for PGS1 (NM_024419.2,960-978).
cacagcaactctcttttga

SEQ ID NO: 236996 - DNA, 19 bp, Homo sapiens
  siRNA target sequence for PGS1 (NM_024419.2,1057-1075).
ccttcgagattcaaatcga

SEQ ID NO: 236997 - DNA, 19 bp, Homo sapiens
  siRNA target sequence for PGS1 (NM_024419.2,1058-1076).
cttcgagattcaaatcgat

SEQ ID NO: 236998 - DNA, 19 bp, Homo sapiens
  siRNA target sequence for PGS1 (NM_024419.2,1064-1082).
gattcaaatcgatgagatt

SEQ ID NO: 236999 - DNA, 19 bp, Homo sapiens
  siRNA target sequence for PGS1 (NM_024419.2,1427-1445).
gctgattggctctcctaat

SEQ ID NO: 237000 - DNA, 19 bp, Homo sapiens
  siRNA target sequence for PGS1 (NM_024419.2,1428-1446).
ctgattggctctcctaatt

SEQ ID NO: 237001 - DNA, 19 bp, Homo sapiens
  siRNA target sequence for PGS1 (NM_024419.2,1430-1448).
gattggctctcctaatttt

SEQ ID NO: 237002 - DNA, 19 bp, Homo sapiens
  siRNA target sequence for PIGB (NM_004855.3,331-349).
ccgctcccacggcaagata

SEQ ID NO: 237003 - DNA, 19 bp, Homo sapiens
  siRNA target sequence for PIGB (NM_004855.3,332-350).
cgctcccacggcaagataa

SEQ ID NO: 237004 - DNA, 19 bp, Homo sapiens
  siRNA target sequence for PIGB (NM_004855.3,333-351).
gctcccacggcaagataaa

SEQ ID NO: 237005 - DNA, 19 bp, Homo sapiens
  siRNA target sequence for PIGB (NM_004855.3,336-354).
cccacggcaagataaagct

SEQ ID NO: 237006 - DNA, 19 bp, Homo sapiens
  siRNA target sequence for PIGB (NM_004855.3,352-370).
gctgcgaaagagaaagtct

SEQ ID NO: 237007 - DNA, 19 bp, Homo sapiens
  siRNA target sequence for PIGB (NM_004855.3,353-371).
ctgcgaaagagaaagtcta

SEQ ID NO: 237008 - DNA, 19 bp, Homo sapiens
  siRNA target sequence for PIGB (NM_004855.3,443-461).
ctcttgtttaccatagctt

SEQ ID NO: 237009 - DNA, 19 bp, Homo sapiens
  siRNA target sequence for PIGB (NM_004855.3,448-466).
gtttaccatagctttacga

SEQ ID NO: 237010 - DNA, 19 bp, Homo sapiens
  siRNA target sequence for PIGB (NM_004855.3,534-552).
cacatcacatggttttcaa

SEQ ID NO: 237011 - DNA, 19 bp, Homo sapiens
  siRNA target sequence for PIGB (NM_004855.3,536-554).
catcacatggttttcaatt

SEQ ID NO: 237012 - DNA, 19 bp, Homo sapiens
  siRNA target sequence for PIGB (NM_004855.3,541-559).
catggttttcaattatggt

SEQ ID NO: 237013 - DNA, 19 bp, Homo sapiens
  siRNA target sequence for PIGB (NM_004855.3,594-612).
gttacacttatcccttaat

SEQ ID NO: 237014 - DNA, 19 bp, Homo sapiens
  siRNA target sequence for PIGB (NM_004855.3,618-636).
caagcatttacaagattct

SEQ ID NO: 237015 - DNA, 19 bp, Homo sapiens
  siRNA target sequence for PIGB (NM_004855.3,621-639).
gcatttacaagattcttca

SEQ ID NO: 237016 - DNA, 19 bp, Homo sapiens
  siRNA target sequence for PIGB (NM_004855.3,648-666).
ggaaagatagtgttcagtt

SEQ ID NO: 237017 - DNA, 19 bp, Homo sapiens
  siRNA target sequence for PIGB (NM_004855.3,670-688).
gatttggattcctagactt

SEQ ID NO: 237018 - DNA, 19 bp, Homo sapiens
  siRNA target sequence for PIGB (NM_004855.3,710-728).
gtagcagatgtgagacttt

SEQ ID NO: 237019 - DNA, 19 bp, Homo sapiens
  siRNA target sequence for PIGB (NM_004855.3,716-734).
gatgtgagactttactcat

SEQ ID NO: 237020 - DNA, 19 bp, Homo sapiens
  siRNA target sequence for PIGB (NM_004855.3,816-834).
gtaccagaacccttacaaa

SEQ ID NO: 237021 - DNA, 19 bp, Homo sapiens
  siRNA target sequence for PIGB (NM_004855.3,841-859).
ggaaactgttctcactata

SEQ ID NO: 237022 - DNA, 19 bp, Homo sapiens
  siRNA target sequence for PIGB (NM_004855.3,863-881).
gctcttttctactatcctt

SEQ ID NO: 237023 - DNA, 19 bp, Homo sapiens
  siRNA target sequence for PIGB (NM_004855.3,901-919).
gaacagtgtcaaatactca

SEQ ID NO: 237024 - DNA, 19 bp, Homo sapiens
  siRNA target sequence for PIGB (NM_004855.3,926-944).
gtggcacttgccttcataa

SEQ ID NO: 237025 - DNA, 19 bp, Homo sapiens
  siRNA target sequence for PIGB (NM_004855.3,928-946).
ggcacttgccttcataatt

SEQ ID NO: 237026 - DNA, 19 bp, Homo sapiens
  siRNA target sequence for PIGB (NM_004855.3,1062-1080).
gtttgtctctgatgattga

SEQ ID NO: 237027 - DNA, 19 bp, Homo sapiens
  siRNA target sequence for PIGB (NM_004855.3,1068-1086).
ctctgatgattgatcgtat

SEQ ID NO: 237028 - DNA, 19 bp, Homo sapiens
  siRNA target sequence for PIGB (NM_004855.3,1101-1119).
ggactctggttcaatttaa

SEQ ID NO: 237029 - DNA, 19 bp, Homo sapiens
  siRNA target sequence for PIGB (NM_004855.3,1102-1120).
gactctggttcaatttaat

SEQ ID NO: 237030 - DNA, 19 bp, Homo sapiens
  siRNA target sequence for PIGB (NM_004855.3,1182-1200).
ggtacttcagtcaaggatt

SEQ ID NO: 237031 - DNA, 19 bp, Homo sapiens
  siRNA target sequence for PIGB (NM_004855.3,1186-1204).
cttcagtcaaggatttcca

SEQ ID NO: 237032 - DNA, 19 bp, Homo sapiens
  siRNA target sequence for PIGB (NM_004855.3,1191-1209).
gtcaaggatttccagttat

SEQ ID NO: 237033 - DNA, 19 bp, Homo sapiens
  siRNA target sequence for PIGB (NM_004855.3,1246-1264).
ctatctagcaccaaagaga

SEQ ID NO: 237034 - DNA, 19 bp, Homo sapiens
  siRNA target sequence for PIGB (NM_004855.3,1263-1281).
gataccggatacttttggt

SEQ ID NO: 237035 - DNA, 19 bp, Homo sapiens
  siRNA target sequence for PIGB (NM_004855.3,1291-1309).
gtggacactgcttgtttat

SEQ ID NO: 237036 - DNA, 19 bp, Homo sapiens
  siRNA target sequence for PIGB (NM_004855.3,1311-1329).
gcatgttgagccacaaaga

SEQ ID NO: 237037 - DNA, 19 bp, Homo sapiens
  siRNA target sequence for PIGB (NM_004855.3,1444-1462).
gttcctcgccctttatact

SEQ ID NO: 237038 - DNA, 19 bp, Homo sapiens
  siRNA target sequence for PIGB (NM_004855.3,1450-1468).
cgccctttatactggttta

SEQ ID NO: 237039 - DNA, 19 bp, Homo sapiens
  siRNA target sequence for PIGB (NM_004855.3,1452-1470).
ccctttatactggtttagt

SEQ ID NO: 237040 - DNA, 19 bp, Homo sapiens
  siRNA target sequence for PIGB (NM_004855.3,1487-1505).
cttgatgtcatgagtcata

SEQ ID NO: 237041 - DNA, 19 bp, Homo sapiens
  siRNA target sequence for PIGB (NM_004855.3,1603-1621).
cccacttcccatgagattt

SEQ ID NO: 237042 - DNA, 19 bp, Homo sapiens
  siRNA target sequence for PIGB (NM_004855.3,1639-1657).
cctgactggaaaaagtcat

SEQ ID NO: 237043 - DNA, 19 bp, Homo sapiens
  siRNA target sequence for PIGB (NM_004855.3,1670-1688).
gcagatgtattttacctaa

SEQ ID NO: 237044 - DNA, 19 bp, Homo sapiens
  siRNA target sequence for PIGB (NM_004855.3,1691-1709).
cccttaaactggttacata

SEQ ID NO: 237045 - DNA, 19 bp, Homo sapiens
  siRNA target sequence for PIGB (NM_004855.3,1834-1852).
cttgccagagggtcgaatt

SEQ ID NO: 237046 - DNA, 19 bp, Homo sapiens
  siRNA target sequence for PIGB (NM_004855.3,1847-1865).
cgaattggaagtcacatat

SEQ ID NO: 237047 - DNA, 19 bp, Homo sapiens
  siRNA target sequence for PIGB (NM_004855.3,1848-1866).
gaattggaagtcacatata

SEQ ID NO: 237048 - DNA, 19 bp, Homo sapiens
  siRNA target sequence for PIGB (NM_004855.3,1857-1875).
gtcacatatatgtctatga

SEQ ID NO: 237049 - DNA, 19 bp, Homo sapiens
  siRNA target sequence for PIGB (NM_004855.3,1868-1886).
gtctatgaacggaagttaa

SEQ ID NO: 237050 - DNA, 19 bp, Homo sapiens
  siRNA target sequence for PLEKHE1 (NM_194449.1,205-223).
ccgcttctatgcaggaaaa

SEQ ID NO: 237051 - DNA, 19 bp, Homo sapiens
  siRNA target sequence for PLEKHE1 (NM_194449.1,256-274).
gctctcaggaatgtataat

SEQ ID NO: 237052 - DNA, 19 bp, Homo sapiens
  siRNA target sequence for PLEKHE1 (NM_194449.1,338-356).
gggacctgcctgatagtat

SEQ ID NO: 237053 - DNA, 19 bp, Homo sapiens
  siRNA target sequence for PLEKHE1 (NM_194449.1,343-361).
ctgcctgatagtatcatct

SEQ ID NO: 237054 - DNA, 19 bp, Homo sapiens
  siRNA target sequence for PLEKHE1 (NM_194449.1,349-367).
gatagtatcatctgtgaaa

SEQ ID NO: 237055 - DNA, 19 bp, Homo sapiens
  siRNA target sequence for PLEKHE1 (NM_194449.1,388-406).
gcatgttctgccactaatt

SEQ ID NO: 237056 - DNA, 19 bp, Homo sapiens
  siRNA target sequence for PLEKHE1 (NM_194449.1,436-454).
ccaacactgtttagcattt

SEQ ID NO: 237057 - DNA, 19 bp, Homo sapiens
  siRNA target sequence for PLEKHE1 (NM_194449.1,437-455).
caacactgtttagcattta

SEQ ID NO: 237058 - DNA, 19 bp, Homo sapiens
  siRNA target sequence for PLEKHE1 (NM_194449.1,440-458).
cactgtttagcatttagct

SEQ ID NO: 237059 - DNA, 19 bp, Homo sapiens
  siRNA target sequence for PLEKHE1 (NM_194449.1,484-502).
ctacatttgctttgatact

SEQ ID NO: 237060 - DNA, 19 bp, Homo sapiens
  siRNA target sequence for PLEKHE1 (NM_194449.1,497-515).
gatactttcacagaatact

SEQ ID NO: 237061 - DNA, 19 bp, Homo sapiens
  siRNA target sequence for PLEKHE1 (NM_194449.1,545-563).
gcatcccagcgcattagct

SEQ ID NO: 237062 - DNA, 19 bp, Homo sapiens
  siRNA target sequence for PLEKHE1 (NM_194449.1,566-584).
gtggacctctcgtgttgta

SEQ ID NO: 237063 - DNA, 19 bp, Homo sapiens
  siRNA target sequence for PLEKHE1 (NM_194449.1,623-641).
gacctcactcatctcaatt

SEQ ID NO: 237064 - DNA, 19 bp, Homo sapiens
  siRNA target sequence for PLEKHE1 (NM_194449.1,684-702).
ccagggggcttaatgaact

SEQ ID NO: 237065 - DNA, 19 bp, Homo sapiens
  siRNA target sequence for PLEKHE1 (NM_194449.1,704-722).
caaaggttcaccaagttga

SEQ ID NO: 237066 - DNA, 19 bp, Homo sapiens
  siRNA target sequence for PLEKHE1 (NM_194449.1,767-785).
gcagtctgcagtattccaa

SEQ ID NO: 237067 - DNA, 19 bp, Homo sapiens
  siRNA target sequence for PLEKHE1 (NM_194449.1,843-861).
gagtgatgcacaacttaca

SEQ ID NO: 237068 - DNA, 19 bp, Homo sapiens
  siRNA target sequence for PLEKHE1 (NM_194449.1,960-978).
ctgacattcccgaagtatt

SEQ ID NO: 237069 - DNA, 19 bp, Homo sapiens
  siRNA target sequence for PLEKHE1 (NM_194449.1,968-986).
cccgaagtattggagaaat

SEQ ID NO: 237070 - DNA, 19 bp, Homo sapiens
  siRNA target sequence for PLEKHE1 (NM_194449.1,969-987).
ccgaagtattggagaaatt

SEQ ID NO: 237071 - DNA, 19 bp, Homo sapiens
  siRNA target sequence for PLEKHE1 (NM_194449.1,988-1006).
gactgctgtggataaactt

SEQ ID NO: 237072 - DNA, 19 bp, Homo sapiens
  siRNA target sequence for PLEKHE1 (NM_194449.1,992-1010).
gctgtggataaactttgta

SEQ ID NO: 237073 - DNA, 19 bp, Homo sapiens
  siRNA target sequence for PLEKHE1 (NM_194449.1,997-1015).
ggataaactttgtatgtct

SEQ ID NO: 237074 - DNA, 19 bp, Homo sapiens
  siRNA target sequence for PLEKHE1 (NM_194449.1,1079-1097).
gatctaaggttgaacgtaa

SEQ ID NO: 237075 - DNA, 19 bp, Homo sapiens
  siRNA target sequence for PLEKHE1 (NM_194449.1,1086-1104).
ggttgaacgtaattaggaa

SEQ ID NO: 237076 - DNA, 19 bp, Homo sapiens
  siRNA target sequence for PLEKHE1 (NM_194449.1,1124-1142).
gactttctacagcatgtta

SEQ ID NO: 237077 - DNA, 19 bp, Homo sapiens
  siRNA target sequence for PLEKHE1 (NM_194449.1,1126-1144).
ctttctacagcatgttact

SEQ ID NO: 237078 - DNA, 19 bp, Homo sapiens
  siRNA target sequence for PLEKHE1 (NM_194449.1,1148-1166).
cttgacctacgagacaata

SEQ ID NO: 237079 - DNA, 19 bp, Homo sapiens
  siRNA target sequence for PLEKHE1 (NM_194449.1,1175-1193).
gatctagatgctatgattt

SEQ ID NO: 237080 - DNA, 19 bp, Homo sapiens
  siRNA target sequence for PLEKHE1 (NM_194449.1,1184-1202).
gctatgattttcaacaaca

SEQ ID NO: 237081 - DNA, 19 bp, Homo sapiens
  siRNA target sequence for PLEKHE1 (NM_194449.1,1195-1213).
caacaacattgaagtttta

SEQ ID NO: 237082 - DNA, 19 bp, Homo sapiens
  siRNA target sequence for PLEKHE1 (NM_194449.1,1205-1223).
gaagttttacactgtgaaa

SEQ ID NO: 237083 - DNA, 19 bp, Homo sapiens
  siRNA target sequence for PLEKHE1 (NM_194449.1,1224-1242).
ggaatcaactggtcacatt

SEQ ID NO: 237084 - DNA, 19 bp, Homo sapiens
  siRNA target sequence for PLEKHE1 (NM_194449.1,1229-1247).
caactggtcacattagaca

SEQ ID NO: 237085 - DNA, 19 bp, Homo sapiens
  siRNA target sequence for PLEKHE1 (NM_194449.1,1268-1286).
gcgctctatgcctcttcta

SEQ ID NO: 237086 - DNA, 19 bp, Homo sapiens
  siRNA target sequence for PLEKHE1 (NM_194449.1,1278-1296).
cctcttctaatgaacttgt

SEQ ID NO: 237087 - DNA, 19 bp, Homo sapiens
  siRNA target sequence for PLEKHE1 (NM_194449.1,1279-1297).
ctcttctaatgaacttgtt

SEQ ID NO: 237088 - DNA, 19 bp, Homo sapiens
  siRNA target sequence for PLEKHE1 (NM_194449.1,1281-1299).
cttctaatgaacttgttca

SEQ ID NO: 237089 - DNA, 19 bp, Homo sapiens
  siRNA target sequence for PLEKHE1 (NM_194449.1,1307-1325).
gtttacccagttccaaatt

SEQ ID NO: 237090 - DNA, 19 bp, Homo sapiens
  siRNA target sequence for PLEKHE1 (NM_194449.1,1350-1368).
ggaaccgcttagaaaatgt

SEQ ID NO: 237091 - DNA, 19 bp, Homo sapiens
  siRNA target sequence for PLEKHE1 (NM_194449.1,1369-1387).
gcctgagtgggtatgtgaa

SEQ ID NO: 237092 - DNA, 19 bp, Homo sapiens
  siRNA target sequence for PLEKHE1 (NM_194449.1,1389-1407).
gccgaaagctagaagtttt

SEQ ID NO: 237093 - DNA, 19 bp, Homo sapiens
  siRNA target sequence for PLEKHE1 (NM_194449.1,1409-1427).
gatattggccataatcaaa

SEQ ID NO: 237094 - DNA, 19 bp, Homo sapiens
  siRNA target sequence for PLEKHE1 (NM_194449.1,1416-1434).
gccataatcaaatatgtga

SEQ ID NO: 237095 - DNA, 19 bp, Homo sapiens
  siRNA target sequence for PLEKHE1 (NM_194449.1,1436-1454).
cttcctgcccgcttatttt

SEQ ID NO: 237096 - DNA, 19 bp, Homo sapiens
  siRNA target sequence for PLEKHE1 (NM_194449.1,1442-1460).
gcccgcttattttgtaata

SEQ ID NO: 237097 - DNA, 19 bp, Homo sapiens
  siRNA target sequence for PLEKHE1 (NM_194449.1,1461-1479).
gcagtctccggaaactact

SEQ ID NO: 237098 - DNA, 19 bp, Homo sapiens
  siRNA target sequence for PLEKHE1 (NM_194449.1,1505-1523).
ctgcctgaaaggctagaaa

SEQ ID NO: 237099 - DNA, 19 bp, Homo sapiens
  siRNA target sequence for PLEKHE1 (NM_194449.1,1507-1525).
gcctgaaaggctagaaaga

SEQ ID NO: 237100 - DNA, 19 bp, Homo sapiens
  siRNA target sequence for PLEKHE1 (NM_194449.1,1508-1526).
cctgaaaggctagaaagaa

SEQ ID NO: 237101 - DNA, 19 bp, Homo sapiens
  siRNA target sequence for PLEKHE1 (NM_194449.1,1615-1633).
gaacgcctctgcgaacaaa

SEQ ID NO: 237102 - DNA, 19 bp, Homo sapiens
  siRNA target sequence for PLEKHE1 (NM_194449.1,1656-1674).
cgctttccgaagagacaaa

SEQ ID NO: 237103 - DNA, 19 bp, Homo sapiens
  siRNA target sequence for PLEKHE1 (NM_194449.1,1658-1676).
ctttccgaagagacaaaca

SEQ ID NO: 237104 - DNA, 19 bp, Homo sapiens
  siRNA target sequence for PLEKHE1 (NM_194449.1,1662-1680).
ccgaagagacaaacagtat

SEQ ID NO: 237105 - DNA, 19 bp, Homo sapiens
  siRNA target sequence for PLEKHE1 (NM_194449.1,1671-1689).
caaacagtatcttacaaga

SEQ ID NO: 237106 - DNA, 19 bp, Homo sapiens
  siRNA target sequence for PLEKHE1 (NM_194449.1,1742-1760).
ggacacccccatttgaaga

SEQ ID NO: 237107 - DNA, 19 bp, Homo sapiens
  siRNA target sequence for PLEKHE1 (NM_194449.1,1743-1761).
gacacccccatttgaagat

SEQ ID NO: 237108 - DNA, 19 bp, Homo sapiens
  siRNA target sequence for PLEKHE1 (NM_194449.1,1928-1946).
gaggtctttcccgaagtta

SEQ ID NO: 237109 - DNA, 19 bp, Homo sapiens
  siRNA target sequence for PLEKHE1 (NM_194449.1,1981-1999).
ctgtaatgagctaagtgaa

SEQ ID NO: 237110 - DNA, 19 bp, Homo sapiens
  siRNA target sequence for PLEKHE1 (NM_194449.1,2104-2122).
ccgctgtttcaagattgat

SEQ ID NO: 237111 - DNA, 19 bp, Homo sapiens
  siRNA target sequence for PLEKHE1 (NM_194449.1,2157-2175).
ctgtatggagtcatggtta

SEQ ID NO: 237112 - DNA, 19 bp, Homo sapiens
  siRNA target sequence for PLEKHE1 (NM_194449.1,2183-2201).
gcttcgggggtaaaaaaca

SEQ ID NO: 237113 - DNA, 19 bp, Homo sapiens
  siRNA target sequence for PLEKHE1 (NM_194449.1,2213-2231).
gcagccctgtcggtgaata

SEQ ID NO: 237114 - DNA, 19 bp, Homo sapiens
  siRNA target sequence for PLEKHE1 (NM_194449.1,2214-2232).
cagccctgtcggtgaataa

SEQ ID NO: 237115 - DNA, 19 bp, Homo sapiens
  siRNA target sequence for PLEKHE1 (NM_194449.1,2219-2237).
ctgtcggtgaataacttct

SEQ ID NO: 237116 - DNA, 19 bp, Homo sapiens
  siRNA target sequence for PLEKHE1 (NM_194449.1,2253-2271).
ccctgtatggtgtgtttga

SEQ ID NO: 237117 - DNA, 19 bp, Homo sapiens
  siRNA target sequence for PLEKHE1 (NM_194449.1,2432-2450).
gccgctgtcctttgtcata

SEQ ID NO: 237118 - DNA, 19 bp, Homo sapiens
  siRNA target sequence for PLEKHE1 (NM_194449.1,2433-2451).
ccgctgtcctttgtcatat

SEQ ID NO: 237119 - DNA, 19 bp, Homo sapiens
  siRNA target sequence for PLEKHE1 (NM_194449.1,2435-2453).
gctgtcctttgtcatatca

SEQ ID NO: 237120 - DNA, 19 bp, Homo sapiens
  siRNA target sequence for PLEKHE1 (NM_194449.1,2549-2567).
cctctgtccagatcttaca

SEQ ID NO: 237121 - DNA, 19 bp, Homo sapiens
  siRNA target sequence for PLEKHE1 (NM_194449.1,2603-2621).
cagcacaaggccattatca

SEQ ID NO: 237122 - DNA, 19 bp, Homo sapiens
  siRNA target sequence for PLEKHE1 (NM_194449.1,2605-2623).
gcacaaggccattatcact

SEQ ID NO: 237123 - DNA, 19 bp, Homo sapiens
  siRNA target sequence for PLEKHE1 (NM_194449.1,2730-2748).
ctccccaggatgagttctt

SEQ ID NO: 237124 - DNA, 19 bp, Homo sapiens
  siRNA target sequence for PLEKHE1 (NM_194449.1,2732-2750).
ccccaggatgagttcttca

SEQ ID NO: 237125 - DNA, 19 bp, Homo sapiens
  siRNA target sequence for PLEKHE1 (NM_194449.1,3056-3074).
ggcatggcttccgagatta

SEQ ID NO: 237126 - DNA, 19 bp, Homo sapiens
  siRNA target sequence for PLEKHE1 (NM_194449.1,3414-3432).
gtgatgagggcattgtcat

SEQ ID NO: 237127 - DNA, 19 bp, Homo sapiens
  siRNA target sequence for PLEKHE1 (NM_194449.1,3537-3555).
ggagccacaatgtgataga

SEQ ID NO: 237128 - DNA, 19 bp, Homo sapiens
  siRNA target sequence for PLEKHE1 (NM_194449.1,3583-3601).
gcctggaggctattttgct

SEQ ID NO: 237129 - DNA, 19 bp, Homo sapiens
  siRNA target sequence for PLEKHE1 (NM_194449.1,3615-3633).
cggatcctgatgatcagtt

SEQ ID NO: 237130 - DNA, 19 bp, Homo sapiens
  siRNA target sequence for PLEKHE1 (NM_194449.1,3616-3634).
ggatcctgatgatcagttt

SEQ ID NO: 237131 - DNA, 19 bp, Homo sapiens
  siRNA target sequence for PLEKHE1 (NM_194449.1,3620-3638).
cctgatgatcagtttatca

SEQ ID NO: 237132 - DNA, 19 bp, Homo sapiens
  siRNA target sequence for PLEKHE1 (NM_194449.1,3621-3639).
ctgatgatcagtttatcat

SEQ ID NO: 237133 - DNA, 19 bp, Homo sapiens
  siRNA target sequence for PLEKHE1 (NM_194449.1,3760-3778).
ggaccagctgccagattat

SEQ ID NO: 237134 - DNA, 19 bp, Homo sapiens
  siRNA target sequence for PLEKHE1 (NM_194449.1,3761-3779).
gaccagctgccagattatt

SEQ ID NO: 237135 - DNA, 19 bp, Homo sapiens
  siRNA target sequence for PME-1 (NM_016147.1,381-399).
gttcacggcagcgattatt

SEQ ID NO: 237136 - DNA, 19 bp, Homo sapiens
  siRNA target sequence for PME-1 (NM_016147.1,384-402).
cacggcagcgattattagt

SEQ ID NO: 237137 - DNA, 19 bp, Homo sapiens
  siRNA target sequence for PME-1 (NM_016147.1,387-405).
ggcagcgattattagtaga

SEQ ID NO: 237138 - DNA, 19 bp, Homo sapiens
  siRNA target sequence for PME-1 (NM_016147.1,567-585).
catgggtggtgctattgca

SEQ ID NO: 237139 - DNA, 19 bp, Homo sapiens
  siRNA target sequence for PME-1 (NM_016147.1,624-642).
gggtctgtgcatgattgat

SEQ ID NO: 237140 - DNA, 19 bp, Homo sapiens
  siRNA target sequence for PME-1 (NM_016147.1,632-650).
gcatgattgatgttgtaga

SEQ ID NO: 237141 - DNA, 19 bp, Homo sapiens
  siRNA target sequence for PME-1 (NM_016147.1,656-674).
cagctatggatgcacttaa

SEQ ID NO: 237142 - DNA, 19 bp, Homo sapiens
  siRNA target sequence for PME-1 (NM_016147.1,690-708).
cttacggggtcgtcctaaa

SEQ ID NO: 237143 - DNA, 19 bp, Homo sapiens
  siRNA target sequence for PME-1 (NM_016147.1,694-712).
cggggtcgtcctaaaacct

SEQ ID NO: 237144 - DNA, 19 bp, Homo sapiens
  siRNA target sequence for PME-1 (NM_016147.1,695-713).
ggggtcgtcctaaaacctt

SEQ ID NO: 237145 - DNA, 19 bp, Homo sapiens
  siRNA target sequence for PME-1 (NM_016147.1,700-718).
cgtcctaaaaccttcaagt

SEQ ID NO: 237146 - DNA, 19 bp, Homo sapiens
  siRNA target sequence for PME-1 (NM_016147.1,752-770).
gtggccagattcgaaatct

SEQ ID NO: 237147 - DNA, 19 bp, Homo sapiens
  siRNA target sequence for PME-1 (NM_016147.1,788-806).
caatggttggccaagtcaa

SEQ ID NO: 237148 - DNA, 19 bp, Homo sapiens
  siRNA target sequence for PME-1 (NM_016147.1,845-863).
ctatagtggaaggaatcat

SEQ ID NO: 237149 - DNA, 19 bp, Homo sapiens
  siRNA target sequence for PME-1 (NM_016147.1,890-908).
gaagtgagtctataagcaa

SEQ ID NO: 237150 - DNA, 19 bp, Homo sapiens
  siRNA target sequence for PME-1 (NM_016147.1,950-968).
catacacctggagaattga

SEQ ID NO: 237151 - DNA, 19 bp, Homo sapiens
  siRNA target sequence for PME-1 (NM_016147.1,1001-1019).
ggttccgaggcttatccaa

SEQ ID NO: 237152 - DNA, 19 bp, Homo sapiens
  siRNA target sequence for PME-1 (NM_016147.1,1006-1024).
cgaggcttatccaatctct

SEQ ID NO: 237153 - DNA, 19 bp, Homo sapiens
  siRNA target sequence for PME-1 (NM_016147.1,1010-1028).
gcttatccaatctctttct

SEQ ID NO: 237154 - DNA, 19 bp, Homo sapiens
  siRNA target sequence for PME-1 (NM_016147.1,1011-1029).
cttatccaatctctttctt

SEQ ID NO: 237155 - DNA, 19 bp, Homo sapiens
  siRNA target sequence for PME-1 (NM_016147.1,1027-1045).
cttagttgtcccattccta

SEQ ID NO: 237156 - DNA, 19 bp, Homo sapiens
  siRNA target sequence for PME-1 (NM_016147.1,1031-1049).
gttgtcccattcctaaatt

SEQ ID NO: 237157 - DNA, 19 bp, Homo sapiens
  siRNA target sequence for PME-1 (NM_016147.1,1034-1052).
gtcccattcctaaattgct

SEQ ID NO: 237158 - DNA, 19 bp, Homo sapiens
  siRNA target sequence for PME-1 (NM_016147.1,1054-1072).
ctcttggctggtgttgata

SEQ ID NO: 237159 - DNA, 19 bp, Homo sapiens
  siRNA target sequence for PME-1 (NM_016147.1,1063-1081).
ggtgttgatagattggata

SEQ ID NO: 237160 - DNA, 19 bp, Homo sapiens
  siRNA target sequence for PNPLA1 (NM_173676.1,319-337).
ctcattgaggccctatact

SEQ ID NO: 237161 - DNA, 19 bp, Homo sapiens
  siRNA target sequence for PNPLA1 (NM_173676.1,514-532).
cacgacttccgcatgttca

SEQ ID NO: 237162 - DNA, 19 bp, Homo sapiens
  siRNA target sequence for PNPLA1 (NM_173676.1,517-535).
gacttccgcatgttcaact

SEQ ID NO: 237163 - DNA, 19 bp, Homo sapiens
  siRNA target sequence for PNPLA1 (NM_173676.1,569-587).
ggatgacccacgcattgtt

SEQ ID NO: 237164 - DNA, 19 bp, Homo sapiens
  siRNA target sequence for PNPLA1 (NM_173676.1,601-619).
gtgatcctgcacgattact

SEQ ID NO: 237165 - DNA, 19 bp, Homo sapiens
  siRNA target sequence for PNPLA1 (NM_173676.1,629-647).
ggtacgaggatgcagtttt

SEQ ID NO: 237166 - DNA, 19 bp, Homo sapiens
  siRNA target sequence for PNPLA1 (NM_173676.1,634-652).
gaggatgcagttttgtact

SEQ ID NO: 237167 - DNA, 19 bp, Homo sapiens
  siRNA target sequence for PNPLA1 (NM_173676.1,659-677).
ggctgaatgctgtttatct

SEQ ID NO: 237168 - DNA, 19 bp, Homo sapiens
  siRNA target sequence for PNPLA1 (NM_173676.1,667-685).
gctgtttatcttaattctt

SEQ ID NO: 237169 - DNA, 19 bp, Homo sapiens
  siRNA target sequence for PNPLA1 (NM_173676.1,885-903).
gcagacacttgaattcaca

SEQ ID NO: 237170 - DNA, 19 bp, Homo sapiens
  siRNA target sequence for PNPLA1 (NM_173676.1,991-1009).
ggcatgccacctgtatcat

SEQ ID NO: 237171 - DNA, 19 bp, Homo sapiens
  siRNA target sequence for PNPLA1 (NM_173676.1,992-1010).
gcatgccacctgtatcatt

SEQ ID NO: 237172 - DNA, 19 bp, Homo sapiens
  siRNA target sequence for PNPLA1 (NM_173676.1,1203-1221).
gccccgaagttctctttca

SEQ ID NO: 237173 - DNA, 19 bp, Homo sapiens
  siRNA target sequence for PNPLA1 (NM_173676.1,1337-1355).
ccgtcagcaagccttatgt

SEQ ID NO: 237174 - DNA, 19 bp, Homo sapiens
  siRNA target sequence for PNPLA1 (NM_173676.1,1338-1356).
cgtcagcaagccttatgta

SEQ ID NO: 237175 - DNA, 19 bp, Homo sapiens
  siRNA target sequence for PNPLA1 (NM_173676.1,1339-1357).
gtcagcaagccttatgtaa

SEQ ID NO: 237176 - DNA, 19 bp, Homo sapiens
  siRNA target sequence for PNPLA1 (NM_173676.1,1375-1393).
gactcaaactgggtgaata

SEQ ID NO: 237177 - DNA, 19 bp, Homo sapiens
  siRNA target sequence for PNPLA1 (NM_173676.1,1379-1397).
caaactgggtgaataaggt

SEQ ID NO: 237178 - DNA, 19 bp, Homo sapiens
  siRNA target sequence for PPM1L (NM_139245.1,333-351).
gactgtatcctatgatgaa

SEQ ID NO: 237179 - DNA, 19 bp, Homo sapiens
  siRNA target sequence for PPM1L (NM_139245.1,353-371).
caggcacaacgtgtttgat

SEQ ID NO: 237180 - DNA, 19 bp, Homo sapiens
  siRNA target sequence for PPM1L (NM_139245.1,369-387).
gattgctctgctatcagat

SEQ ID NO: 237181 - DNA, 19 bp, Homo sapiens
  siRNA target sequence for PPM1L (NM_139245.1,374-392).
ctctgctatcagataaaga

SEQ ID NO: 237182 - DNA, 19 bp, Homo sapiens
  siRNA target sequence for PPM1L (NM_139245.1,425-443).
gggtcctgtgtgacaaaga

SEQ ID NO: 237183 - DNA, 19 bp, Homo sapiens
  siRNA target sequence for PPM1L (NM_139245.1,515-533).
caggtggtttcatcagttt

SEQ ID NO: 237184 - DNA, 19 bp, Homo sapiens
  siRNA target sequence for PPM1L (NM_139245.1,583-601).
ggggattatccgctgaaaa

SEQ ID NO: 237185 - DNA, 19 bp, Homo sapiens
  siRNA target sequence for PPM1L (NM_139245.1,584-602).
gggattatccgctgaaaaa

SEQ ID NO: 237186 - DNA, 19 bp, Homo sapiens
  siRNA target sequence for PPM1L (NM_139245.1,585-603).
ggattatccgctgaaaaat

SEQ ID NO: 237187 - DNA, 19 bp, Homo sapiens
  siRNA target sequence for PPM1L (NM_139245.1,658-676).
cagcctgagttcatgatct

SEQ ID NO: 237188 - DNA, 19 bp, Homo sapiens
  siRNA target sequence for PPM1L (NM_139245.1,669-687).
catgatcttggcatcagat

SEQ ID NO: 237189 - DNA, 19 bp, Homo sapiens
  siRNA target sequence for PPM1L (NM_139245.1,715-733).
gaagcagttcgattcatca

SEQ ID NO: 237190 - DNA, 19 bp, Homo sapiens
  siRNA target sequence for PPM1L (NM_139245.1,760-778).
ggggccaagagcatagttt

SEQ ID NO: 237191 - DNA, 19 bp, Homo sapiens
  siRNA target sequence for PPM1L (NM_139245.1,764-782).
ccaagagcatagttttaca

SEQ ID NO: 237192 - DNA, 19 bp, Homo sapiens
  siRNA target sequence for PPM1L (NM_139245.1,770-788).
gcatagttttacagtcatt

SEQ ID NO: 237193 - DNA, 19 bp, Homo sapiens
  siRNA target sequence for PPM1L (NM_139245.1,796-814).
ggctgccctgacaatataa

SEQ ID NO: 237194 - DNA, 19 bp, Homo sapiens
  siRNA target sequence for PPM1L (NM_139245.1,798-816).
ctgccctgacaatataaca

SEQ ID NO: 237195 - DNA, 19 bp, Homo sapiens
  siRNA target sequence for PPM1L (NM_139245.1,800-818).
gccctgacaatataacagt

SEQ ID NO: 237196 - DNA, 19 bp, Homo sapiens
  siRNA target sequence for PPM1L (NM_139245.1,815-833).
cagtcatggtggtgaagtt

SEQ ID NO: 237197 - DNA, 19 bp, Homo sapiens
  siRNA target sequence for PPM1L (NM_139245.1,826-844).
gtgaagttcagaaatagca

SEQ ID NO: 237198 - DNA, 19 bp, Homo sapiens
  siRNA target sequence for SAH (NM_005622.1,164-182).
ctacgtcatgccaagtgtt

SEQ ID NO: 237199 - DNA, 19 bp, Homo sapiens
  siRNA target sequence for SAH (NM_005622.1,180-198).
gttttcagcgcctagcaat

SEQ ID NO: 237200 - DNA, 19 bp, Homo sapiens
  siRNA target sequence for SAH (NM_005622.1,187-205).
gcgcctagcaatttttggt

SEQ ID NO: 237201 - DNA, 19 bp, Homo sapiens
  siRNA target sequence for SAH (NM_005622.1,207-225).
ctgtgagggcactgcataa

SEQ ID NO: 237202 - DNA, 19 bp, Homo sapiens
  siRNA target sequence for SAH (NM_005622.1,213-231).
gggcactgcataaagataa

SEQ ID NO: 237203 - DNA, 19 bp, Homo sapiens
  siRNA target sequence for SAH (NM_005622.1,293-311).
gggattccagagtatttca

SEQ ID NO: 237204 - DNA, 19 bp, Homo sapiens
  siRNA target sequence for SAH (NM_005622.1,294-312).
ggattccagagtatttcaa

SEQ ID NO: 237205 - DNA, 19 bp, Homo sapiens
  siRNA target sequence for SAH (NM_005622.1,329-347).
ctggaccaatggactgata

SEQ ID NO: 237206 - DNA, 19 bp, Homo sapiens
  siRNA target sequence for SAH (NM_005622.1,334-352).
ccaatggactgataaggaa

SEQ ID NO: 237207 - DNA, 19 bp, Homo sapiens
  siRNA target sequence for SAH (NM_005622.1,335-353).
caatggactgataaggaaa

SEQ ID NO: 237208 - DNA, 19 bp, Homo sapiens
  siRNA target sequence for SAH (NM_005622.1,494-512).
ggagatcgggtaattctga

SEQ ID NO: 237209 - DNA, 19 bp, Homo sapiens
  siRNA target sequence for SAH (NM_005622.1,495-513).
gagatcgggtaattctgat

SEQ ID NO: 237210 - DNA, 19 bp, Homo sapiens
  siRNA target sequence for SAH (NM_005622.1,559-577).
gcgaacagggacagtttta

SEQ ID NO: 237211 - DNA, 19 bp, Homo sapiens
  siRNA target sequence for SAH (NM_005622.1,560-578).
cgaacagggacagttttaa

SEQ ID NO: 237212 - DNA, 19 bp, Homo sapiens
  siRNA target sequence for SAH (NM_005622.1,591-609).
ctcagctgacccagaaaga

SEQ ID NO: 237213 - DNA, 19 bp, Homo sapiens
  siRNA target sequence for SAH (NM_005622.1,616-634).
ctacagactacaatcttca

SEQ ID NO: 237214 - DNA, 19 bp, Homo sapiens
  siRNA target sequence for SAH (NM_005622.1,680-698).
gacgctgttgcatccaaat

SEQ ID NO: 237215 - DNA, 19 bp, Homo sapiens
  siRNA target sequence for SAH (NM_005622.1,682-700).
cgctgttgcatccaaatgt

SEQ ID NO: 237216 - DNA, 19 bp, Homo sapiens
  siRNA target sequence for SAH (NM_005622.1,709-727).
gcactccaagctgattgta

SEQ ID NO: 237217 - DNA, 19 bp, Homo sapiens
  siRNA target sequence for SAH (NM_005622.1,710-728).
cactccaagctgattgtat

SEQ ID NO: 237218 - DNA, 19 bp, Homo sapiens
  siRNA target sequence for SAH (NM_005622.1,818-836).
gagatcatggccatattct

SEQ ID NO: 237219 - DNA, 19 bp, Homo sapiens
  siRNA target sequence for SAH (NM_005622.1,893-911).
ggtttaggattatctgtaa

SEQ ID NO: 237220 - DNA, 19 bp, Homo sapiens
  siRNA target sequence for SAH (NM_005622.1,894-912).
gtttaggattatctgtaaa

SEQ ID NO: 237221 - DNA, 19 bp, Homo sapiens
  siRNA target sequence for SAH (NM_005622.1,914-932).
ggaaggttctggctagatt

SEQ ID NO: 237222 - DNA, 19 bp, Homo sapiens
  siRNA target sequence for SAH (NM_005622.1,919-937).
gttctggctagatttgaca

SEQ ID NO: 237223 - DNA, 19 bp, Homo sapiens
  siRNA target sequence for SAH (NM_005622.1,982-1000).
gtctgcatggagtagtgtt

SEQ ID NO: 237224 - DNA, 19 bp, Homo sapiens
  siRNA target sequence for SAH (NM_005622.1,1012-1030).
gatccagggagcatgtgta

SEQ ID NO: 237225 - DNA, 19 bp, Homo sapiens
  siRNA target sequence for SAH (NM_005622.1,1049-1067).
cgttttgagccgacttcta

SEQ ID NO: 237226 - DNA, 19 bp, Homo sapiens
  siRNA target sequence for SAH (NM_005622.1,1058-1076).
ccgacttctatcttgcaaa

SEQ ID NO: 237227 - DNA, 19 bp, Homo sapiens
  siRNA target sequence for SAH (NM_005622.1,1128-1146).
gaatgcttgtacagaatga

SEQ ID NO: 237228 - DNA, 19 bp, Homo sapiens
  siRNA target sequence for SAH (NM_005622.1,1145-1163).
gatataaccagctataagt

SEQ ID NO: 237229 - DNA, 19 bp, Homo sapiens
  siRNA target sequence for SAH (NM_005622.1,1155-1173).
gctataagtttaaaagctt

SEQ ID NO: 237230 - DNA, 19 bp, Homo sapiens
  siRNA target sequence for SAH (NM_005622.1,1186-1204).
gagtgctggggaaccaatt

SEQ ID NO: 237231 - DNA, 19 bp, Homo sapiens
  siRNA target sequence for SAH (NM_005622.1,1246-1264).
ggatatctacgaaggatat

SEQ ID NO: 237232 - DNA, 19 bp, Homo sapiens
  siRNA target sequence for SAH (NM_005622.1,1259-1277).
ggatatggacagactgaaa

SEQ ID NO: 237233 - DNA, 19 bp, Homo sapiens
  siRNA target sequence for SAH (NM_005622.1,1282-1300).
gctaatctgtggaaatttt

SEQ ID NO: 237234 - DNA, 19 bp, Homo sapiens
  siRNA target sequence for SAH (NM_005622.1,1373-1391).
ccttccaggagaatgttta

SEQ ID NO: 237235 - DNA, 19 bp, Homo sapiens
  siRNA target sequence for SAH (NM_005622.1,1374-1392).
cttccaggagaatgtttaa

SEQ ID NO: 237236 - DNA, 19 bp, Homo sapiens
  siRNA target sequence for SAH (NM_005622.1,1387-1405).
gtttaacaacccaatctgt

SEQ ID NO: 237237 - DNA, 19 bp, Homo sapiens
  siRNA target sequence for SAH (NM_005622.1,1393-1411).
caacccaatctgtacacta

SEQ ID NO: 237238 - DNA, 19 bp, Homo sapiens
  siRNA target sequence for SAH (NM_005622.1,1420-1438).
ccgcttacccccatataaa

SEQ ID NO: 237239 - DNA, 19 bp, Homo sapiens
  siRNA target sequence for SAH (NM_005622.1,1422-1440).
gcttacccccatataaact

SEQ ID NO: 237240 - DNA, 19 bp, Homo sapiens
  siRNA target sequence for SAH (NM_005622.1,1423-1441).
cttacccccatataaactt

SEQ ID NO: 237241 - DNA, 19 bp, Homo sapiens
  siRNA target sequence for SAH (NM_005622.1,1427-1445).
cccccatataaactttctt

SEQ ID NO: 237242 - DNA, 19 bp, Homo sapiens
  siRNA target sequence for SERAC1 (NM_032861.2,270-288).
ggctgtgacattagatact

SEQ ID NO: 237243 - DNA, 19 bp, Homo sapiens
  siRNA target sequence for SERAC1 (NM_032861.2,272-290).
ctgtgacattagatactca

SEQ ID NO: 237244 - DNA, 19 bp, Homo sapiens
  siRNA target sequence for SERAC1 (NM_032861.2,292-310).
gtggtagaacgagaaaaaa

SEQ ID NO: 237245 - DNA, 19 bp, Homo sapiens
  siRNA target sequence for SERAC1 (NM_032861.2,419-437).
caacatcagccaagatact

SEQ ID NO: 237246 - DNA, 19 bp, Homo sapiens
  siRNA target sequence for SERAC1 (NM_032861.2,464-482).
gtacagttgatatagaaga

SEQ ID NO: 237247 - DNA, 19 bp, Homo sapiens
  siRNA target sequence for SERAC1 (NM_032861.2,547-565).
gaggctgtgcgggaaatgt

SEQ ID NO: 237248 - DNA, 19 bp, Homo sapiens
  siRNA target sequence for SERAC1 (NM_032861.2,572-590).
cccatcactggcatgatta

SEQ ID NO: 237249 - DNA, 19 bp, Homo sapiens
  siRNA target sequence for SERAC1 (NM_032861.2,586-604).
gattaccagtataggataa

SEQ ID NO: 237250 - DNA, 19 bp, Homo sapiens
  siRNA target sequence for SERAC1 (NM_032861.2,615-633).
ctgtgatccgaaaactctt

SEQ ID NO: 237251 - DNA, 19 bp, Homo sapiens
  siRNA target sequence for SERAC1 (NM_032861.2,617-635).
gtgatccgaaaactcttat

SEQ ID NO: 237252 - DNA, 19 bp, Homo sapiens
  siRNA target sequence for SERAC1 (NM_032861.2,622-640).
ccgaaaactcttattggtt

SEQ ID NO: 237253 - DNA, 19 bp, Homo sapiens
  siRNA target sequence for SERAC1 (NM_032861.2,623-641).
cgaaaactcttattggttt

SEQ ID NO: 237254 - DNA, 19 bp, Homo sapiens
  siRNA target sequence for SERAC1 (NM_032861.2,772-790).
gagtgtatccagtatttta

SEQ ID NO: 237255 - DNA, 19 bp, Homo sapiens
  siRNA target sequence for SERAC1 (NM_032861.2,829-847).
gctcagaagggtggtttat

SEQ ID NO: 237256 - DNA, 19 bp, Homo sapiens
  siRNA target sequence for SERAC1 (NM_032861.2,832-850).
cagaagggtggtttatggt

SEQ ID NO: 237257 - DNA, 19 bp, Homo sapiens
  siRNA target sequence for SERAC1 (NM_032861.2,837-855).
gggtggtttatggtgtttt

SEQ ID NO: 237258 - DNA, 19 bp, Homo sapiens
  siRNA target sequence for SERAC1 (NM_032861.2,868-886).
cttccttatgctgaaagtt

SEQ ID NO: 237259 - DNA, 19 bp, Homo sapiens
  siRNA target sequence for SERAC1 (NM_032861.2,921-939).
ctgtttagaagctatagta

SEQ ID NO: 237260 - DNA, 19 bp, Homo sapiens
  siRNA target sequence for SERAC1 (NM_032861.2,956-974).
ccacacattgtgataaaat

SEQ ID NO: 237261 - DNA, 19 bp, Homo sapiens
  siRNA target sequence for SERAC1 (NM_032861.2,1007-1025).
ggctgtaccgacttcacaa

SEQ ID NO: 237262 - DNA, 19 bp, Homo sapiens
  siRNA target sequence for SERAC1 (NM_032861.2,1031-1049).
gccctaaagtacagagaaa

SEQ ID NO: 237263 - DNA, 19 bp, Homo sapiens
  siRNA target sequence for SERAC1 (NM_032861.2,1032-1050).
ccctaaagtacagagaaat

SEQ ID NO: 237264 - DNA, 19 bp, Homo sapiens
  siRNA target sequence for SERAC1 (NM_032861.2,1034-1052).
ctaaagtacagagaaatat

SEQ ID NO: 237265 - DNA, 19 bp, Homo sapiens
  siRNA target sequence for SERAC1 (NM_032861.2,1084-1102).
gaacatcttcattcttcta

SEQ ID NO: 237266 - DNA, 19 bp, Homo sapiens
  siRNA target sequence for SERAC1 (NM_032861.2,1243-1261).
ctgcatccccaatatcgaa

SEQ ID NO: 237267 - DNA, 19 bp, Homo sapiens
  siRNA target sequence for SERAC1 (NM_032861.2,1341-1359).
cagtgagcaggctgtaatt

SEQ ID NO: 237268 - DNA, 19 bp, Homo sapiens
  siRNA target sequence for SERAC1 (NM_032861.2,1347-1365).
gcaggctgtaattgaaaaa

SEQ ID NO: 237269 - DNA, 19 bp, Homo sapiens
  siRNA target sequence for SERAC1 (NM_032861.2,1375-1393).
gatgaagacagatatacga

SEQ ID NO: 237270 - DNA, 19 bp, Homo sapiens
  siRNA target sequence for SERAC1 (NM_032861.2,1402-1420).
cccaagacatggttagcaa

SEQ ID NO: 237271 - DNA, 19 bp, Homo sapiens
  siRNA target sequence for SERAC1 (NM_032861.2,1427-1445).
gtcctgctctccgaattat

SEQ ID NO: 237272 - DNA, 19 bp, Homo sapiens
  siRNA target sequence for SERAC1 (NM_032861.2,1429-1447).
cctgctctccgaattatat

SEQ ID NO: 237273 - DNA, 19 bp, Homo sapiens
  siRNA target sequence for SERAC1 (NM_032861.2,1433-1451).
ctctccgaattatatctgt

SEQ ID NO: 237274 - DNA, 19 bp, Homo sapiens
  siRNA target sequence for SERAC1 (NM_032861.2,1498-1516).
gaaagaaagtccattgcat

SEQ ID NO: 237275 - DNA, 19 bp, Homo sapiens
  siRNA target sequence for SERAC1 (NM_032861.2,1596-1614).
gggaggtcttcttgtcaaa

SEQ ID NO: 237276 - DNA, 19 bp, Homo sapiens
  siRNA target sequence for SERAC1 (NM_032861.2,1598-1616).
gaggtcttcttgtcaaaaa

SEQ ID NO: 237277 - DNA, 19 bp, Homo sapiens
  siRNA target sequence for SERAC1 (NM_032861.2,1600-1618).
ggtcttcttgtcaaaaaga

SEQ ID NO: 237278 - DNA, 19 bp, Homo sapiens
  siRNA target sequence for SERAC1 (NM_032861.2,1601-1619).
gtcttcttgtcaaaaagat

SEQ ID NO: 237279 - DNA, 19 bp, Homo sapiens
  siRNA target sequence for SERAC1 (NM_032861.2,1641-1659).
gccagaaatgagtactgtt

SEQ ID NO: 237280 - DNA, 19 bp, Homo sapiens
  siRNA target sequence for SERAC1 (NM_032861.2,1650-1668).
gagtactgttatcaacaat

SEQ ID NO: 237281 - DNA, 19 bp, Homo sapiens
  siRNA target sequence for SERAC1 (NM_032861.2,1665-1683).
caataccagaggaataatt

SEQ ID NO: 237282 - DNA, 19 bp, Homo sapiens
  siRNA target sequence for SERAC1 (NM_032861.2,1706-1724).
gatcacgtttggctgaata

SEQ ID NO: 237283 - DNA, 19 bp, Homo sapiens
  siRNA target sequence for SERAC1 (NM_032861.2,1752-1770).
cccctcgttggaagtcaaa

SEQ ID NO: 237284 - DNA, 19 bp, Homo sapiens
  siRNA target sequence for SERAC1 (NM_032861.2,1802-1820).
cactacaagatgactttct

SEQ ID NO: 237285 - DNA, 19 bp, Homo sapiens
  siRNA target sequence for SERAC1 (NM_032861.2,1813-1831).
gactttctggagtttgcta

SEQ ID NO: 237286 - DNA, 19 bp, Homo sapiens
  siRNA target sequence for SERAC1 (NM_032861.2,1815-1833).
ctttctggagtttgctaaa

SEQ ID NO: 237287 - DNA, 19 bp, Homo sapiens
  siRNA target sequence for SERAC1 (NM_032861.2,1954-1972).
gtggatgttaaccatttga

SEQ ID NO: 237288 - DNA, 19 bp, Homo sapiens
  siRNA target sequence for SERAC1 (NM_032861.2,1960-1978).
gttaaccatttgaacattt

SEQ ID NO: 237289 - DNA, 19 bp, Homo sapiens
  siRNA target sequence for SERAC1 (NM_032861.2,2007-2025).
gtaccagcgtactttacaa

SEQ ID NO: 237290 - DNA, 19 bp, Homo sapiens
  siRNA target sequence for SERAC1 (NM_032861.2,2011-2029).
cagcgtactttacaattca

SEQ ID NO: 237291 - DNA, 19 bp, Homo sapiens
  siRNA target sequence for SERAC1 (NM_032861.2,2013-2031).
gcgtactttacaattcatt

SEQ ID NO: 237292 - DNA, 19 bp, Homo sapiens
  siRNA target sequence for SLC27A3 (NM_024330.1,492-510).
gcggagcgcgagagtaaca

SEQ ID NO: 237293 - DNA, 19 bp, Homo sapiens
  siRNA target sequence for SLC27A3 (NM_024330.1,961-979).
ctggaattagcgatttgct

SEQ ID NO: 237294 - DNA, 19 bp, Homo sapiens
  siRNA target sequence for SLC27A3 (NM_024330.1,1045-1063).
cagacacgtgcctgtacat

SEQ ID NO: 237295 - DNA, 19 bp, Homo sapiens
  siRNA target sequence for SLC27A3 (NM_024330.1,1047-1065).
gacacgtgcctgtacatct

SEQ ID NO: 237296 - DNA, 19 bp, Homo sapiens
  siRNA target sequence for SLC27A3 (NM_024330.1,1099-1117).
ctcggatcagtcatctgaa

SEQ ID NO: 237297 - DNA, 19 bp, Homo sapiens
  siRNA target sequence for SLC27A3 (NM_024330.1,1124-1142).
gcaatgccagggcttctat

SEQ ID NO: 237298 - DNA, 19 bp, Homo sapiens
  siRNA target sequence for SLC27A3 (NM_024330.1,1245-1263).
gccacagtggtgctgaaat

SEQ ID NO: 237299 - DNA, 19 bp, Homo sapiens
  siRNA target sequence for SLC27A3 (NM_024330.1,1334-1352).
ggagctgtgccgatacctt

SEQ ID NO: 237300 - DNA, 19 bp, Homo sapiens
  siRNA target sequence for SLC27A3 (NM_024330.1,1375-1393).
cagaacgtggccataaggt

SEQ ID NO: 237301 - DNA, 19 bp, Homo sapiens
  siRNA target sequence for SLC27A3 (NM_024330.1,1552-1570).
ggctttacaagcatatctt

SEQ ID NO: 237302 - DNA, 19 bp, Homo sapiens
  siRNA target sequence for SLC27A3 (NM_024330.1,1577-1595).
ctccttgattcgctatgat

SEQ ID NO: 237303 - DNA, 19 bp, Homo sapiens
  siRNA target sequence for SLC27A3 (NM_024330.1,1579-1597).
ccttgattcgctatgatgt

SEQ ID NO: 237304 - DNA, 19 bp, Homo sapiens
  siRNA target sequence for SLC27A3 (NM_024330.1,1799-1817).
ctgcgatgaccaaggtttt

SEQ ID NO: 237305 - DNA, 19 bp, Homo sapiens
  siRNA target sequence for SLC27A3 (NM_024330.1,1893-1911).
gtcttcgaggccctagatt

SEQ ID NO: 237306 - DNA, 19 bp, Homo sapiens
  siRNA target sequence for SLC27A3 (NM_024330.1,1898-1916).
cgaggccctagattttctt

SEQ ID NO: 237307 - DNA, 19 bp, Homo sapiens
  siRNA target sequence for SLC27A3 (NM_024330.1,1969-1987).
gaatggcagccctagttct

SEQ ID NO: 237308 - DNA, 19 bp, Homo sapiens
  siRNA target sequence for SLC27A3 (NM_024330.1,2026-2044).
cccacgtgtctgagaactt

SEQ ID NO: 237309 - DNA, 19 bp, Homo sapiens
  siRNA target sequence for SLC27A4 (NM_005094.2,427-445).
ccatcaggcgcgatatctt

SEQ ID NO: 237310 - DNA, 19 bp, Homo sapiens
  siRNA target sequence for SLC27A4 (NM_005094.2,428-446).
catcaggcgcgatatcttt

SEQ ID NO: 237311 - DNA, 19 bp, Homo sapiens
  siRNA target sequence for SLC27A4 (NM_005094.2,504-522).
cggacagtgcccattttgt

SEQ ID NO: 237312 - DNA, 19 bp, Homo sapiens
  siRNA target sequence for SLC27A4 (NM_005094.2,990-1008).
ggcttcacagataaactgt

SEQ ID NO: 237313 - DNA, 19 bp, Homo sapiens
  siRNA target sequence for SLC27A4 (NM_005094.2,991-1009).
gcttcacagataaactgtt

SEQ ID NO: 237314 - DNA, 19 bp, Homo sapiens
  siRNA target sequence for SLC27A4 (NM_005094.2,997-1015).
cagataaactgttctacat

SEQ ID NO: 237315 - DNA, 19 bp, Homo sapiens
  siRNA target sequence for SLC27A4 (NM_005094.2,1082-1100).
ggctgccctggtgtactat

SEQ ID NO: 237316 - DNA, 19 bp, Homo sapiens
  siRNA target sequence for SLC27A4 (NM_005094.2,1209-1227).
gtgattcggaagaagttct

SEQ ID NO: 237317 - DNA, 19 bp, Homo sapiens
  siRNA target sequence for SLC27A4 (NM_005094.2,1236-1254).
cggttctgggacgattgta

SEQ ID NO: 237318 - DNA, 19 bp, Homo sapiens
  siRNA target sequence for SLC27A4 (NM_005094.2,1237-1255).
ggttctgggacgattgtat

SEQ ID NO: 237319 - DNA, 19 bp, Homo sapiens
  siRNA target sequence for SLC27A4 (NM_005094.2,1267-1285).
gcacgattgtgcagtacat

SEQ ID NO: 237320 - DNA, 19 bp, Homo sapiens
  siRNA target sequence for SLC27A4 (NM_005094.2,1268-1286).
cacgattgtgcagtacatt

SEQ ID NO: 237321 - DNA, 19 bp, Homo sapiens
  siRNA target sequence for SLC27A4 (NM_005094.2,1417-1435).
cccaggtggctgagttcta

SEQ ID NO: 237322 - DNA, 19 bp, Homo sapiens
  siRNA target sequence for SLC27A4 (NM_005094.2,1725-1743).
ggggaccaggcctacctta

SEQ ID NO: 237323 - DNA, 19 bp, Homo sapiens
  siRNA target sequence for SLC27A4 (NM_005094.2,2039-2057).
gcctgagctgcacaaaaca

SEQ ID NO: 237324 - DNA, 19 bp, Homo sapiens
  siRNA target sequence for SLC27A4 (NM_005094.2,2098-2116).
gctttgacccggctattgt

SEQ ID NO: 237325 - DNA, 19 bp, Homo sapiens
  siRNA target sequence for SLC27A4 (NM_005094.2,2117-2135).
gaaagacccgctgttctat

SEQ ID NO: 237326 - DNA, 19 bp, Homo sapiens
  siRNA target sequence for SLC27A4 (NM_005094.2,2123-2141).
cccgctgttctatctagat

SEQ ID NO: 237327 - DNA, 19 bp, Homo sapiens
  siRNA target sequence for TA-PP2C (NM_139283.1,371-389).
gtaagggcctcctcaagaa

SEQ ID NO: 237328 - DNA, 19 bp, Homo sapiens
  siRNA target sequence for TA-PP2C (NM_139283.1,488-506).
gagttgatccatctcaatt

SEQ ID NO: 237329 - DNA, 19 bp, Homo sapiens
  siRNA target sequence for TA-PP2C (NM_139283.1,490-508).
gttgatccatctcaattct

SEQ ID NO: 237330 - DNA, 19 bp, Homo sapiens
  siRNA target sequence for TA-PP2C (NM_139283.1,522-540).
gcggacgtgtgaacgttta

SEQ ID NO: 237331 - DNA, 19 bp, Homo sapiens
  siRNA target sequence for TA-PP2C (NM_139283.1,524-542).
ggacgtgtgaacgtttagt

SEQ ID NO: 237332 - DNA, 19 bp, Homo sapiens
  siRNA target sequence for TA-PP2C (NM_139283.1,527-545).
cgtgtgaacgtttagtaaa

SEQ ID NO: 237333 - DNA, 19 bp, Homo sapiens
  siRNA target sequence for TA-PP2C (NM_139283.1,528-546).
gtgtgaacgtttagtaaaa

SEQ ID NO: 237334 - DNA, 19 bp, Homo sapiens
  siRNA target sequence for TA-PP2C (NM_139283.1,530-548).
gtgaacgtttagtaaaaga

SEQ ID NO: 237335 - DNA, 19 bp, Homo sapiens
  siRNA target sequence for TA-PP2C (NM_139283.1,551-569).
gacggttcgtacctagtaa

SEQ ID NO: 237336 - DNA, 19 bp, Homo sapiens
  siRNA target sequence for TA-PP2C (NM_139283.1,566-584).
gtaatcccattggaattct

SEQ ID NO: 237337 - DNA, 19 bp, Homo sapiens
  siRNA target sequence for TA-PP2C (NM_139283.1,597-615).
ctgtgagttgctgcaaaat

SEQ ID NO: 237338 - DNA, 19 bp, Homo sapiens
  siRNA target sequence for TA-PP2C (NM_139283.1,599-617).
gtgagttgctgcaaaataa

SEQ ID NO: 237339 - DNA, 19 bp, Homo sapiens
  siRNA target sequence for TA-PP2C (NM_139283.1,773-791).
ctccattccagctctcaat

SEQ ID NO: 237340 - DNA, 19 bp, Homo sapiens
  siRNA target sequence for TA-PP2C (NM_139283.1,893-911).
cagatggactctttgacaa

SEQ ID NO: 237341 - DNA, 19 bp, Homo sapiens
  siRNA target sequence for TA-PP2C (NM_139283.1,907-925).
gacaacatgcctgattata

SEQ ID NO: 237342 - DNA, 19 bp, Homo sapiens
  siRNA target sequence for TA-PP2C (NM_139283.1,912-930).
catgcctgattatatgatt

SEQ ID NO: 237343 - DNA, 19 bp, Homo sapiens
  siRNA target sequence for TA-PP2C (NM_139283.1,917-935).
ctgattatatgattcttca

SEQ ID NO: 237344 - DNA, 19 bp, Homo sapiens
  siRNA target sequence for TA-PP2C (NM_139283.1,1042-1060).
ccttttgcacagtttgcat

SEQ ID NO: 237345 - DNA, 19 bp, Homo sapiens
  siRNA target sequence for TA-PP2C (NM_139283.1,1058-1076).
catgtgacaatggattgaa

SEQ ID NO: 237346 - DNA, 19 bp, Homo sapiens
  siRNA target sequence for TA-PP2C (NM_139283.1,1104-1122).
caccgtccttctttcaata

SEQ ID NO: 237347 - DNA, 19 bp, Homo sapiens
  siRNA target sequence for TA-PP2C (NM_139283.1,1106-1124).
ccgtccttctttcaatagt

SEQ ID NO: 237348 - DNA, 19 bp, Homo sapiens
  siRNA target sequence for TA-WDRP (NM_139281.1,225-243).
gggactgggtacgtgtttt

SEQ ID NO: 237349 - DNA, 19 bp, Homo sapiens
  siRNA target sequence for TA-WDRP (NM_139281.1,309-327).
cacggccagcgcgcttttt

SEQ ID NO: 237350 - DNA, 19 bp, Homo sapiens
  siRNA target sequence for TA-WDRP (NM_139281.1,438-456).
cacctatgacgttcagaaa

SEQ ID NO: 237351 - DNA, 19 bp, Homo sapiens
  siRNA target sequence for TA-WDRP (NM_139281.1,440-458).
cctatgacgttcagaaact

SEQ ID NO: 237352 - DNA, 19 bp, Homo sapiens
  siRNA target sequence for TA-WDRP (NM_139281.1,441-459).
ctatgacgttcagaaactt

SEQ ID NO: 237353 - DNA, 19 bp, Homo sapiens
  siRNA target sequence for TA-WDRP (NM_139281.1,509-527).
cagctgatggcagattagt

SEQ ID NO: 237354 - DNA, 19 bp, Homo sapiens
  siRNA target sequence for TA-WDRP (NM_139281.1,554-572).
ctgcatttgcccgtaataa

SEQ ID NO: 237355 - DNA, 19 bp, Homo sapiens
  siRNA target sequence for TA-WDRP (NM_139281.1,566-584).
gtaataaagagatagtaca

SEQ ID NO: 237356 - DNA, 19 bp, Homo sapiens
  siRNA target sequence for TA-WDRP (NM_139281.1,574-592).
gagatagtacataccttta

SEQ ID NO: 237357 - DNA, 19 bp, Homo sapiens
  siRNA target sequence for TA-WDRP (NM_139281.1,652-670).
gatactgatggcattctta

SEQ ID NO: 237358 - DNA, 19 bp, Homo sapiens
  siRNA target sequence for TA-WDRP (NM_139281.1,751-769).
catccaagtacctacttga

SEQ ID NO: 237359 - DNA, 19 bp, Homo sapiens
  siRNA target sequence for TA-WDRP (NM_139281.1,754-772).
ccaagtacctacttgaata

SEQ ID NO: 237360 - DNA, 19 bp, Homo sapiens
  siRNA target sequence for TA-WDRP (NM_139281.1,801-819).
cctgcagttgtggaatgta

SEQ ID NO: 237361 - DNA, 19 bp, Homo sapiens
  siRNA target sequence for TA-WDRP (NM_139281.1,884-902).
caccagccgtggatgttgt

SEQ ID NO: 237362 - DNA, 19 bp, Homo sapiens
  siRNA target sequence for TA-WDRP (NM_139281.1,890-908).
ccgtggatgttgttgctat

SEQ ID NO: 237363 - DNA, 19 bp, Homo sapiens
  siRNA target sequence for TA-WDRP (NM_139281.1,894-912).
ggatgttgttgctattggt

SEQ ID NO: 237364 - DNA, 19 bp, Homo sapiens
  siRNA target sequence for TA-WDRP (NM_139281.1,918-936).
gtcaggtcaagttatcatt

SEQ ID NO: 237365 - DNA, 19 bp, Homo sapiens
  siRNA target sequence for TA-WDRP (NM_139281.1,920-938).
caggtcaagttatcattca

SEQ ID NO: 237366 - DNA, 19 bp, Homo sapiens
  siRNA target sequence for TA-WDRP (NM_139281.1,922-940).
ggtcaagttatcattcaca

SEQ ID NO: 237367 - DNA, 19 bp, Homo sapiens
  siRNA target sequence for TA-WDRP (NM_139281.1,923-941).
gtcaagttatcattcacaa

SEQ ID NO: 237368 - DNA, 19 bp, Homo sapiens
  siRNA target sequence for TA-WDRP (NM_139281.1,928-946).
gttatcattcacaacatta

SEQ ID NO: 237369 - DNA, 19 bp, Homo sapiens
  siRNA target sequence for TA-WDRP (NM_139281.1,979-997).
gactggggacccattactt

SEQ ID NO: 237370 - DNA, 19 bp, Homo sapiens
  siRNA target sequence for TA-WDRP (NM_139281.1,1121-1139).
caattgccggactgacatt

SEQ ID NO: 237371 - DNA, 19 bp, Homo sapiens
  siRNA target sequence for TA-WDRP (NM_139281.1,1143-1161).
ccatagagagccacttctt

SEQ ID NO: 237372 - DNA, 19 bp, Homo sapiens
  siRNA target sequence for TA-WDRP (NM_139281.1,1152-1170).
gccacttcttgtcacaaat

SEQ ID NO: 237373 - DNA, 19 bp, Homo sapiens
  siRNA target sequence for TA-WDRP (NM_139281.1,1164-1182).
cacaaatggcgctgacaat

SEQ ID NO: 237374 - DNA, 19 bp, Homo sapiens
  siRNA target sequence for TA-WDRP (NM_139281.1,1177-1195).
gacaatgctcttaggatat

SEQ ID NO: 237375 - DNA, 19 bp, Homo sapiens
  siRNA target sequence for TA-WDRP (NM_139281.1,1183-1201).
gctcttaggatatggatat

SEQ ID NO: 237376 - DNA, 19 bp, Homo sapiens
  siRNA target sequence for TA-WDRP (NM_139281.1,1184-1202).
ctcttaggatatggatatt

SEQ ID NO: 237377 - DNA, 19 bp, Homo sapiens
  siRNA target sequence for TA-WDRP (NM_139281.1,1214-1232).
caggtgaaggccgactttt

SEQ ID NO: 237378 - DNA, 19 bp, Homo sapiens
  siRNA target sequence for TA-WDRP (NM_139281.1,1216-1234).
ggtgaaggccgacttttga

SEQ ID NO: 237379 - DNA, 19 bp, Homo sapiens
  siRNA target sequence for TA-WDRP (NM_139281.1,1222-1240).
ggccgacttttgagattca

SEQ ID NO: 237380 - DNA, 19 bp, Homo sapiens
  siRNA target sequence for TA-WDRP (NM_139281.1,1226-1244).
gacttttgagattcagaat

SEQ ID NO: 237381 - DNA, 19 bp, Homo sapiens
  siRNA target sequence for TA-WDRP (NM_139281.1,1253-1271).
gtgctcctcttaccaatat

SEQ ID NO: 237382 - DNA, 19 bp, Homo sapiens
  siRNA target sequence for TA-WDRP (NM_139281.1,1258-1276).
cctcttaccaatatcagat

SEQ ID NO: 237383 - DNA, 19 bp, Homo sapiens
  siRNA target sequence for TA-WDRP (NM_139281.1,1259-1277).
ctcttaccaatatcagata

SEQ ID NO: 237384 - DNA, 19 bp, Homo sapiens
  siRNA target sequence for TA-WDRP (NM_139281.1,1261-1279).
cttaccaatatcagatatt

SEQ ID NO: 237385 - DNA, 19 bp, Homo sapiens
  siRNA target sequence for TA-WDRP (NM_139281.1,1340-1358).
ccacggtacatgaaaaatt

SEQ ID NO: 237386 - DNA, 19 bp, Homo sapiens
  siRNA target sequence for TA-WDRP (NM_139281.1,1365-1383).
gagcttgggacatggatta

SEQ ID NO: 237387 - DNA, 19 bp, Homo sapiens
  siRNA target sequence for TA-WDRP (NM_139281.1,1367-1385).
gcttgggacatggattaat

SEQ ID NO: 237388 - DNA, 19 bp, Homo sapiens
  siRNA target sequence for TA-WDRP (NM_139281.1,1368-1386).
cttgggacatggattaata

SEQ ID NO: 237389 - DNA, 19 bp, Homo sapiens
  siRNA target sequence for TA-WDRP (NM_139281.1,1405-1423).
cgtaaaggacttcagaata

SEQ ID NO: 237390 - DNA, 19 bp, Homo sapiens
  siRNA target sequence for TA-WDRP (NM_139281.1,1481-1499).
gtgactgggatggtatcat

SEQ ID NO: 237391 - DNA, 19 bp, Homo sapiens
  siRNA target sequence for TA-WDRP (NM_139281.1,1526-1544).
gctcaacctggaattatca

SEQ ID NO: 237392 - DNA, 19 bp, Homo sapiens
  siRNA target sequence for TA-WDRP (NM_139281.1,1550-1568).
ctacaataggcgcttactt

SEQ ID NO: 237393 - DNA, 19 bp, Homo sapiens
  siRNA target sequence for TA-WDRP (NM_139281.1,1604-1622).
ctgcaacagcagtggatat

SEQ ID NO: 237394 - DNA, 19 bp, Homo sapiens
  siRNA target sequence for TA-WDRP (NM_139281.1,1683-1701).
catgcagtctggcatacat

SEQ ID NO: 237395 - DNA, 19 bp, Homo sapiens
  siRNA target sequence for TA-WDRP (NM_139281.1,1694-1712).
gcatacatcgaggaagttt

SEQ ID NO: 237396 - DNA, 19 bp, Homo sapiens
  siRNA target sequence for TA-WDRP (NM_139281.1,1726-1744).
gctcacaagggatctgtta

SEQ ID NO: 237397 - DNA, 19 bp, Homo sapiens
  siRNA target sequence for TA-WDRP (NM_139281.1,1748-1766).
gtgtcgcagtggatggatt

SEQ ID NO: 237398 - DNA, 19 bp, Homo sapiens
  siRNA target sequence for TA-WDRP (NM_139281.1,1750-1768).
gtcgcagtggatggattaa

SEQ ID NO: 237399 - DNA, 19 bp, Homo sapiens
  siRNA target sequence for TA-WDRP (NM_139281.1,1754-1772).
cagtggatggattaaacca

SEQ ID NO: 237400 - DNA, 19 bp, Homo sapiens
  siRNA target sequence for TA-WDRP (NM_139281.1,1787-1805).
ctggtagtgaaggattact

SEQ ID NO: 237401 - DNA, 19 bp, Homo sapiens
  siRNA target sequence for TA-WDRP (NM_139281.1,1789-1807).
ggtagtgaaggattactca

SEQ ID NO: 237402 - DNA, 19 bp, Homo sapiens
  siRNA target sequence for TA-WDRP (NM_139281.1,1790-1808).
gtagtgaaggattactcaa

SEQ ID NO: 237403 - DNA, 19 bp, Homo sapiens
  siRNA target sequence for TA-WDRP (NM_139281.1,1976-1994).
gacaccaaggccaaataaa

SEQ ID NO: 237404 - DNA, 19 bp, Homo sapiens
  siRNA target sequence for TA-WDRP (NM_139281.1,2012-2030).
ctgatggtcgttggttaat

SEQ ID NO: 237405 - DNA, 19 bp, Homo sapiens
  siRNA target sequence for TA-WDRP (NM_139281.1,2014-2032).
gatggtcgttggttaataa

SEQ ID NO: 237406 - DNA, 19 bp, Homo sapiens
  siRNA target sequence for TA-WDRP (NM_139281.1,2103-2121).
ggactcggctcctctcaat

SEQ ID NO: 237407 - DNA, 19 bp, Homo sapiens
  siRNA target sequence for TA-WDRP (NM_139281.1,2106-2124).
ctcggctcctctcaatgtt

SEQ ID NO: 237408 - DNA, 19 bp, Homo sapiens
  siRNA target sequence for TA-WDRP (NM_139281.1,2130-2148).
gtctcctactggagacttt

SEQ ID NO: 237409 - DNA, 19 bp, Homo sapiens
  siRNA target sequence for TA-WDRP (NM_139281.1,2225-2243).
ggccacttcctgcagatta

SEQ ID NO: 237410 - DNA, 19 bp, Homo sapiens
  siRNA target sequence for TA-WDRP (NM_139281.1,2226-2244).
gccacttcctgcagattat

SEQ ID NO: 237411 - DNA, 19 bp, Homo sapiens
  siRNA target sequence for TA-WDRP (NM_139281.1,2237-2255).
cagattatgtcccttcaat

SEQ ID NO: 237412 - DNA, 19 bp, Homo sapiens
  siRNA target sequence for TA-WDRP (NM_139281.1,2259-2277).
catgcttcctggtacttgt

SEQ ID NO: 237413 - DNA, 19 bp, Homo sapiens
  siRNA target sequence for TA-WDRP (NM_139281.1,2273-2291).
cttgtcaaacccaagatgt

SEQ ID NO: 237414 - DNA, 19 bp, Homo sapiens
  siRNA target sequence for TA-WDRP (NM_139281.1,2398-2416).
cgatggaaaaaccttctta

SEQ ID NO: 237415 - DNA, 19 bp, Homo sapiens
  siRNA target sequence for TA-WDRP (NM_139281.1,2403-2421).
gaaaaaccttcttaacctt

SEQ ID NO: 237416 - DNA, 19 bp, Homo sapiens
  siRNA target sequence for TA-WDRP (NM_139281.1,2505-2523).
ccttgtacccagatatgct

SEQ ID NO: 237417 - DNA, 19 bp, Homo sapiens
  siRNA target sequence for TA-WDRP (NM_139281.1,2550-2568).
gcagtctaaagtggtaaat

SEQ ID NO: 237418 - DNA, 19 bp, Homo sapiens
  siRNA target sequence for TA-WDRP (NM_139281.1,2572-2590).
ggagttttggctcaaaaat

SEQ ID NO: 237419 - DNA, 19 bp, Homo sapiens
  siRNA target sequence for TA-WDRP (NM_139281.1,2591-2609).
cagatttctgcttgaaact

SEQ ID NO: 237420 - DNA, 19 bp, Homo sapiens
  siRNA target sequence for TA-WDRP (NM_139281.1,2645-2663).
ctctcaaccttctgaaaga

SEQ ID NO: 237421 - DNA, 19 bp, Homo sapiens
  siRNA target sequence for TA-WDRP (NM_139281.1,2649-2667).
caaccttctgaaagaatca

SEQ ID NO: 237422 - DNA, 19 bp, Homo sapiens
  siRNA target sequence for TA-WDRP (NM_139281.1,2668-2686).
ggcccatcaggaattgaaa

SEQ ID NO: 237423 - DNA, 19 bp, Homo sapiens
  siRNA target sequence for TA-WDRP (NM_139281.1,2716-2734).
ggtgggtccatagaagtta

SEQ ID NO: 237424 - DNA, 19 bp, Homo sapiens
  siRNA target sequence for TA-WDRP (NM_139281.1,2717-2735).
gtgggtccatagaagttat

SEQ ID NO: 237425 - DNA, 19 bp, Homo sapiens
  siRNA target sequence for TA-WDRP (NM_139281.1,2720-2738).
ggtccatagaagttatgca

SEQ ID NO: 237426 - DNA, 19 bp, Homo sapiens
  siRNA target sequence for TA-WDRP (NM_139281.1,2774-2792).
gaaagcgtgattttgagtt

SEQ ID NO: 237427 - DNA, 19 bp, Homo sapiens
  siRNA target sequence for TA-WDRP (NM_139281.1,2903-2921).
ggacccatttgcaatcact

SEQ ID NO: 237428 - DNA, 19 bp, Homo sapiens
  siRNA target sequence for TA-WDRP (NM_139281.1,2913-2931).
gcaatcactcttcaatcaa

SEQ ID NO: 237429 - DNA, 19 bp, Homo sapiens
  siRNA target sequence for TA-WDRP (NM_139281.1,2914-2932).
caatcactcttcaatcaaa

SEQ ID NO: 237430 - DNA, 19 bp, Homo sapiens
  siRNA target sequence for TA-WDRP (NM_139281.1,2929-2947).
caaagcatgtgtattttaa

SEQ ID NO: 237431 - DNA, 19 bp, Homo sapiens
  siRNA target sequence for TTS-2.2 (NM_020376.2,392-410).
gaggctggtgccaagttca

SEQ ID NO: 237432 - DNA, 19 bp, Homo sapiens
  siRNA target sequence for TTS-2.2 (NM_020376.2,396-414).
ctggtgccaagttcattga

SEQ ID NO: 237433 - DNA, 19 bp, Homo sapiens
  siRNA target sequence for TTS-2.2 (NM_020376.2,462-480).
ccttcaacctggtaaagat

SEQ ID NO: 237434 - DNA, 19 bp, Homo sapiens
  siRNA target sequence for TTS-2.2 (NM_020376.2,567-585).
cagacggcgagaatgtcat

SEQ ID NO: 237435 - DNA, 19 bp, Homo sapiens
  siRNA target sequence for TTS-2.2 (NM_020376.2,569-587).
gacggcgagaatgtcatta

SEQ ID NO: 237436 - DNA, 19 bp, Homo sapiens
  siRNA target sequence for TTS-2.2 (NM_020376.2,694-712).
cgtggatggtggcatttca

SEQ ID NO: 237437 - DNA, 19 bp, Homo sapiens
  siRNA target sequence for TTS-2.2 (NM_020376.2,722-740).
ccactctatgagcttaaga

SEQ ID NO: 237438 - DNA, 19 bp, Homo sapiens
  siRNA target sequence for TTS-2.2 (NM_020376.2,1044-1062).
gcgcccaagcggaggatta

SEQ ID NO: 237439 - DNA, 19 bp, Homo sapiens
  siRNA target sequence for TTS-2.2 (NM_020376.2,1046-1064).
gcccaagcggaggattact

SEQ ID NO: 237440 - DNA, 19 bp, Homo sapiens
  siRNA target sequence for UBASH3A (NM_018961.1,194-212).
gcctggctgcatgatcatt

SEQ ID NO: 237441 - DNA, 19 bp, Homo sapiens
  siRNA target sequence for UBASH3A (NM_018961.1,320-338).
cgccagtgtgcaaagaaca

SEQ ID NO: 237442 - DNA, 19 bp, Homo sapiens
  siRNA target sequence for UBASH3A (NM_018961.1,562-580).
cacggaagcatctctctta

SEQ ID NO: 237443 - DNA, 19 bp, Homo sapiens
  siRNA target sequence for UBASH3A (NM_018961.1,643-661).
gaggctgagcaatttaact

SEQ ID NO: 237444 - DNA, 19 bp, Homo sapiens
  siRNA target sequence for UBASH3A (NM_018961.1,646-664).
gctgagcaatttaactaga

SEQ ID NO: 237445 - DNA, 19 bp, Homo sapiens
  siRNA target sequence for UBASH3A (NM_018961.1,680-698).
cactacatccttcaaaaat

SEQ ID NO: 237446 - DNA, 19 bp, Homo sapiens
  siRNA target sequence for UBASH3A (NM_018961.1,738-756).
ccttggcccacaagttcta

SEQ ID NO: 237447 - DNA, 19 bp, Homo sapiens
  siRNA target sequence for UBASH3A (NM_018961.1,870-888).
ccctgagagccctattcca

SEQ ID NO: 237448 - DNA, 19 bp, Homo sapiens
  siRNA target sequence for UBASH3A (NM_018961.1,1067-1085).
gtgaagcacaggatgtaca

SEQ ID NO: 237449 - DNA, 19 bp, Homo sapiens
  siRNA target sequence for UBASH3A (NM_018961.1,1140-1158).
gatgcagcggggaatttct

SEQ ID NO: 237450 - DNA, 19 bp, Homo sapiens
  siRNA target sequence for UBASH3A (NM_018961.1,1163-1181).
caaacggcaaggagtctta

SEQ ID NO: 237451 - DNA, 19 bp, Homo sapiens
  siRNA target sequence for UBASH3A (NM_018961.1,1290-1308).
ccactcctgatgggaaata

SEQ ID NO: 237452 - DNA, 19 bp, Homo sapiens
  siRNA target sequence for UBASH3A (NM_018961.1,1350-1368).
ggagtcgtgggatcaaaga

SEQ ID NO: 237453 - DNA, 19 bp, Homo sapiens
  siRNA target sequence for UBASH3A (NM_018961.1,1356-1374).
gtgggatcaaagactttga

SEQ ID NO: 237454 - DNA, 19 bp, Homo sapiens
  siRNA target sequence for UBASH3A (NM_018961.1,1363-1381).
caaagactttgaaaacgat

SEQ ID NO: 237455 - DNA, 19 bp, Homo sapiens
  siRNA target sequence for UBASH3A (NM_018961.1,1392-1410).
catcgtgtggcattttcca

SEQ ID NO: 237456 - DNA, 19 bp, Homo sapiens
  siRNA target sequence for UBASH3A (NM_018961.1,1402-1420).
cattttccagtccagaatt

SEQ ID NO: 237457 - DNA, 19 bp, Homo sapiens
  siRNA target sequence for UBASH3A (NM_018961.1,1490-1508).
gtgcagacggccaaactca

SEQ ID NO: 237458 - DNA, 19 bp, Homo sapiens
  siRNA target sequence for UBASH3A (NM_018961.1,1548-1566).
gagtggaacctggaatctt

SEQ ID NO: 237459 - DNA, 19 bp, Homo sapiens
  siRNA target sequence for UBASH3A (NM_018961.1,1622-1640).
gagctgaaagaggcaaatt

SEQ ID NO: 237460 - DNA, 19 bp, Homo sapiens
  siRNA target sequence for UBASH3A (NM_018961.1,1634-1652).
gcaaatttcaacattgaca

SEQ ID NO: 237461 - DNA, 19 bp, Homo sapiens
  siRNA target sequence for UBASH3A (NM_018961.1,1728-1746).
cggcgagcatggtgcaaat

SEQ ID NO: 237462 - DNA, 19 bp, Homo sapiens
  siRNA target sequence for UBASH3A (NM_018961.1,1731-1749).
cgagcatggtgcaaatcgt

SEQ ID NO: 237463 - DNA, 19 bp, Homo sapiens
  siRNA target sequence for UBASH3A (NM_018961.1,1768-1786).
cacgggtgtcatcctaatt

SEQ ID NO: 237464 - DNA, 19 bp, Homo sapiens
  siRNA target sequence for UBASH3A (NM_018961.1,1770-1788).
cgggtgtcatcctaattgt

SEQ ID NO: 237465 - DNA, 19 bp, Homo sapiens
  siRNA target sequence for UBASH3A (NM_018961.1,1973-1991).
gcgaacgcagcatttaact

SEQ ID NO: 237466 - DNA, 19 bp, Homo sapiens
  siRNA target sequence for UPP2 (NM_173355.2,201-219).
gttatacctgcctccaata

SEQ ID NO: 237467 - DNA, 19 bp, Homo sapiens
  siRNA target sequence for UPP2 (NM_173355.2,227-245).
gagatctgacaggaataca

SEQ ID NO: 237468 - DNA, 19 bp, Homo sapiens
  siRNA target sequence for UPP2 (NM_173355.2,232-250).
ctgacaggaatacatatgt

SEQ ID NO: 237469 - DNA, 19 bp, Homo sapiens
  siRNA target sequence for UPP2 (NM_173355.2,244-262).
catatgttggaaaaaggtt

SEQ ID NO: 237470 - DNA, 19 bp, Homo sapiens
  siRNA target sequence for UPP2 (NM_173355.2,259-277).
ggtttgttcacgttaaaaa

SEQ ID NO: 237471 - DNA, 19 bp, Homo sapiens
  siRNA target sequence for UPP2 (NM_173355.2,341-359).
caacctaccagcaatgttt

SEQ ID NO: 237472 - DNA, 19 bp, Homo sapiens
  siRNA target sequence for UPP2 (NM_173355.2,351-369).
gcaatgtttggagatgtaa

SEQ ID NO: 237473 - DNA, 19 bp, Homo sapiens
  siRNA target sequence for UPP2 (NM_173355.2,385-403).
gtgggagccccaacagaat

SEQ ID NO: 237474 - DNA, 19 bp, Homo sapiens
  siRNA target sequence for UPP2 (NM_173355.2,387-405).
gggagccccaacagaatga

SEQ ID NO: 237475 - DNA, 19 bp, Homo sapiens
  siRNA target sequence for UPP2 (NM_173355.2,477-495).
gctgggacagacagatact

SEQ ID NO: 237476 - DNA, 19 bp, Homo sapiens
  siRNA target sequence for UPP2 (NM_173355.2,484-502).
cagacagatactgtatgta

SEQ ID NO: 237477 - DNA, 19 bp, Homo sapiens
  siRNA target sequence for UPP2 (NM_173355.2,539-557).
gggcatcccctccatttct

SEQ ID NO: 237478 - DNA, 19 bp, Homo sapiens
  siRNA target sequence for UPP2 (NM_173355.2,540-558).
ggcatcccctccatttcta

SEQ ID NO: 237479 - DNA, 19 bp, Homo sapiens
  siRNA target sequence for UPP2 (NM_173355.2,541-559).
gcatcccctccatttctat

SEQ ID NO: 237480 - DNA, 19 bp, Homo sapiens
  siRNA target sequence for UPP2 (NM_173355.2,564-582).
cttcatgaactcatcaaat

SEQ ID NO: 237481 - DNA, 19 bp, Homo sapiens
  siRNA target sequence for UPP2 (NM_173355.2,601-619).
gctgcgatgtcaccattat

SEQ ID NO: 237482 - DNA, 19 bp, Homo sapiens
  siRNA target sequence for UPP2 (NM_173355.2,602-620).
ctgcgatgtcaccattatt

SEQ ID NO: 237483 - DNA, 19 bp, Homo sapiens
  siRNA target sequence for UPP2 (NM_173355.2,651-669).
gcaccagggactgttgtaa

SEQ ID NO: 237484 - DNA, 19 bp, Homo sapiens
  siRNA target sequence for UPP2 (NM_173355.2,682-700).
ctgtagactccttctttaa

SEQ ID NO: 237485 - DNA, 19 bp, Homo sapiens
  siRNA target sequence for UPP2 (NM_173355.2,731-749).
cattgtcacccgaagtact

SEQ ID NO: 237486 - DNA, 19 bp, Homo sapiens
  siRNA target sequence for UPP2 (NM_173355.2,779-797).
gttcaactgtagcaaagaa

SEQ ID NO: 237487 - DNA, 19 bp, Homo sapiens
  siRNA target sequence for UPP2 (NM_173355.2,814-832).
ccctcgttggacatacaat

SEQ ID NO: 237488 - DNA, 19 bp, Homo sapiens
  siRNA target sequence for UPP2 (NM_173355.2,816-834).
ctcgttggacatacaatgt

SEQ ID NO: 237489 - DNA, 19 bp, Homo sapiens
  siRNA target sequence for UPP2 (NM_173355.2,819-837).
gttggacatacaatgtgta

SEQ ID NO: 237490 - DNA, 19 bp, Homo sapiens
  siRNA target sequence for UPP2 (NM_173355.2,833-851).
gtgtacctatgatttttat

SEQ ID NO: 237491 - DNA, 19 bp, Homo sapiens
  siRNA target sequence for UPP2 (NM_173355.2,937-955).
gtgtcaggaatattgaaat

SEQ ID NO: 237492 - DNA, 19 bp, Homo sapiens
  siRNA target sequence for UPP2 (NM_173355.2,1038-1056).
gactgtgatcagatcaact

SEQ ID NO: 237493 - DNA, 19 bp, Homo sapiens
  siRNA target sequence for UPP2 (NM_173355.2,1049-1067).
gatcaacttgcctcatgat

SEQ ID NO: 237494 - DNA, 19 bp, Homo sapiens
  siRNA target sequence for UPP2 (NM_173355.2,1089-1107).
cggcctcagctcctaatct

SEQ ID NO: 237495 - DNA, 19 bp, Homo sapiens
  siRNA target sequence for UXS1 (NM_025076.1,784-802).
caatacgattgggacatta

SEQ ID NO: 237496 - DNA, 19 bp, Homo sapiens
  siRNA target sequence for UXS1 (NM_025076.1,789-807).
cgattgggacattaaacat

SEQ ID NO: 237497 - DNA, 19 bp, Homo sapiens
  siRNA target sequence for UXS1 (NM_025076.1,906-924).
ggggccacgtgaatccaat

SEQ ID NO: 237498 - DNA, 19 bp, Homo sapiens
  siRNA target sequence for UXS1 (NM_025076.1,907-925).
gggccacgtgaatccaata

SEQ ID NO: 237499 - DNA, 19 bp, Homo sapiens
  siRNA target sequence for UXS1 (NM_025076.1,910-928).
ccacgtgaatccaatagga

SEQ ID NO: 237500 - DNA, 19 bp, Homo sapiens
  siRNA target sequence for UXS1 (NM_025076.1,1038-1056).
ggccacgcatgcacatgaa

SEQ ID NO: 237501 - DNA, 19 bp, Homo sapiens
  siRNA target sequence for UXS1 (NM_025076.1,1153-1171).
cgtcagcgatctagtgaat

SEQ ID NO: 237502 - DNA, 19 bp, Homo sapiens
  siRNA target sequence for UXS1 (NM_025076.1,1173-1191).
gcctcgtggctctcatgaa

SEQ ID NO: 237503 - DNA, 19 bp, Homo sapiens
  siRNA target sequence for UXS1 (NM_025076.1,1175-1193).
ctcgtggctctcatgaaca

SEQ ID NO: 237504 - DNA, 19 bp, Homo sapiens
  siRNA target sequence for UXS1 (NM_025076.1,1274-1292).
gttggtagcggaagtgaaa

SEQ ID NO: 237505 - DNA, 19 bp, Homo sapiens
  siRNA target sequence for UXS1 (NM_025076.1,1278-1296).
gtagcggaagtgaaattca

SEQ ID NO: 237506 - DNA, 19 bp, Homo sapiens
  siRNA target sequence for UXS1 (NM_025076.1,1385-1403).
ccgctggaggaaggtttaa

SEQ ID NO: 237507 - DNA, 19 bp, Homo sapiens
  siRNA target sequence for UXS1 (NM_025076.1,1433-1451).
ctcgagtaccaggcaaata

SEQ ID NO: 237508 - DNA, 19 bp, Homo sapiens
  siRNA target sequence for UXS1 (NM_025076.1,1435-1453).
cgagtaccaggcaaataat

SEQ ID NO: 237509 - DNA, 19 bp, Homo sapiens
  siRNA target sequence for UXS1 (NM_025076.1,1454-1472).
cagtacatccccaaaccaa

SEQ ID NO: 237510 - DNA, 19 bp, Homo sapiens
  siRNA target sequence for HTR1B (NM_000863.1,57-75).
ggttcctcaagccaactta

SEQ ID NO: 237511 - DNA, 19 bp, Homo sapiens
  siRNA target sequence for HTR1B (NM_000863.1,58-76).
gttcctcaagccaacttat

SEQ ID NO: 237512 - DNA, 19 bp, Homo sapiens
  siRNA target sequence for HTR1B (NM_000863.1,98-116).
gcagcgccaaggactacat

SEQ ID NO: 237513 - DNA, 19 bp, Homo sapiens
  siRNA target sequence for HTR1B (NM_000863.1,104-122).
ccaaggactacatttacca

SEQ ID NO: 237514 - DNA, 19 bp, Homo sapiens
  siRNA target sequence for HTR1B (NM_000863.1,148-166).
gtactgctggttatgctat

SEQ ID NO: 237515 - DNA, 19 bp, Homo sapiens
  siRNA target sequence for HTR1B (NM_000863.1,310-328).
cccatcagcaccatgtaca

SEQ ID NO: 237516 - DNA, 19 bp, Homo sapiens
  siRNA target sequence for HTR1B (NM_000863.1,462-480).
cgtggagtactcagctaaa

SEQ ID NO: 237517 - DNA, 19 bp, Homo sapiens
  siRNA target sequence for HTR1B (NM_000863.1,463-481).
gtggagtactcagctaaaa

SEQ ID NO: 237518 - DNA, 19 bp, Homo sapiens
  siRNA target sequence for HTR1B (NM_000863.1,638-656).
cggtgggtgctttctactt

SEQ ID NO: 237519 - DNA, 19 bp, Homo sapiens
  siRNA target sequence for HTR1B (NM_000863.1,703-721).
gcccgctcccggattttga

SEQ ID NO: 237520 - DNA, 19 bp, Homo sapiens
  siRNA target sequence for HTR1B (NM_000863.1,704-722).
cccgctcccggattttgaa

SEQ ID NO: 237521 - DNA, 19 bp, Homo sapiens
  siRNA target sequence for HTR1B (NM_000863.1,705-723).
ccgctcccggattttgaaa

SEQ ID NO: 237522 - DNA, 19 bp, Homo sapiens
  siRNA target sequence for HTR1B (NM_000863.1,707-725).
gctcccggattttgaaaca

SEQ ID NO: 237523 - DNA, 19 bp, Homo sapiens
  siRNA target sequence for HTR1B (NM_000863.1,794-812).
cctcggtcacctctattaa

SEQ ID NO: 237524 - DNA, 19 bp, Homo sapiens
  siRNA target sequence for HTR1B (NM_000863.1,884-902).
ccgacgccctgctggaaaa

SEQ ID NO: 237525 - DNA, 19 bp, Homo sapiens
  siRNA target sequence for HTR1B (NM_000863.1,1008-1026).
gatgcctatctgcaaagat

SEQ ID NO: 237526 - DNA, 19 bp, Homo sapiens
  siRNA target sequence for HTR1B (NM_000863.1,1035-1053).
gttccacctagccatcttt

SEQ ID NO: 237527 - DNA, 19 bp, Homo sapiens
  siRNA target sequence for HTR1B (NM_000863.1,1039-1057).
cacctagccatctttgact

SEQ ID NO: 237528 - DNA, 19 bp, Homo sapiens
  siRNA target sequence for HTR1D (NM_000864.3,688-706).
ctcaccaccatcttactca

SEQ ID NO: 237529 - DNA, 19 bp, Homo sapiens
  siRNA target sequence for HTR1D (NM_000864.3,810-828).
cacccacacctggaacttt

SEQ ID NO: 237530 - DNA, 19 bp, Homo sapiens
  siRNA target sequence for HTR1D (NM_000864.3,1366-1384).
ctggaacgcaagaggattt

SEQ ID NO: 237531 - DNA, 19 bp, Homo sapiens
  siRNA target sequence for HTR1D (NM_000864.3,1368-1386).
ggaacgcaagaggatttct

SEQ ID NO: 237532 - DNA, 19 bp, Homo sapiens
  siRNA target sequence for HTR1E (NM_000865.1,593-611).
ggccagcatggctataaga

SEQ ID NO: 237533 - DNA, 19 bp, Homo sapiens
  siRNA target sequence for HTR1E (NM_000865.1,729-747).
cagcctgccaactacctaa

SEQ ID NO: 237534 - DNA, 19 bp, Homo sapiens
  siRNA target sequence for HTR1E (NM_000865.1,732-750).
cctgccaactacctaatct

SEQ ID NO: 237535 - DNA, 19 bp, Homo sapiens
  siRNA target sequence for HTR1E (NM_000865.1,735-753).
gccaactacctaatctgtt

SEQ ID NO: 237536 - DNA, 19 bp, Homo sapiens
  siRNA target sequence for HTR1E (NM_000865.1,1092-1110).
cagcacgaccatgttatct

SEQ ID NO: 237537 - DNA, 19 bp, Homo sapiens
  siRNA target sequence for HTR1E (NM_000865.1,1095-1113).
cacgaccatgttatctaca

SEQ ID NO: 237538 - DNA, 19 bp, Homo sapiens
  siRNA target sequence for HTR1E (NM_000865.1,1104-1122).
gttatctacaccatttact

SEQ ID NO: 237539 - DNA, 19 bp, Homo sapiens
  siRNA target sequence for HTR1E (NM_000865.1,1124-1142).
cacgctgggtgcgttttat

SEQ ID NO: 237540 - DNA, 19 bp, Homo sapiens
  siRNA target sequence for HTR1E (NM_000865.1,1153-1171).
ctttgatactgattctcta

SEQ ID NO: 237541 - DNA, 19 bp, Homo sapiens
  siRNA target sequence for HTR1E (NM_000865.1,1224-1242).
cggcacttaagcaacagaa

SEQ ID NO: 237542 - DNA, 19 bp, Homo sapiens
  siRNA target sequence for HTR1E (NM_000865.1,1273-1291).
gtaaacttacacagacttt

SEQ ID NO: 237543 - DNA, 19 bp, Homo sapiens
  siRNA target sequence for HTR1E (NM_000865.1,1320-1338).
cctaccacagagtttgaaa

SEQ ID NO: 237544 - DNA, 19 bp, Homo sapiens
  siRNA target sequence for HTR1E (NM_000865.1,1364-1382).
ccccttcgacaatgatcta

SEQ ID NO: 237545 - DNA, 19 bp, Homo sapiens
  siRNA target sequence for HTR1E (NM_000865.1,1367-1385).
cttcgacaatgatctagat

SEQ ID NO: 237546 - DNA, 19 bp, Homo sapiens
  siRNA target sequence for HTR1E (NM_000865.1,1395-1413).
gaacgtcagcagatctcta

SEQ ID NO: 237547 - DNA, 19 bp, Homo sapiens
  siRNA target sequence for HTR1E (NM_000865.1,1438-1456).
gcatcctggggctgattct

SEQ ID NO: 237548 - DNA, 19 bp, Homo sapiens
  siRNA target sequence for HTR1E (NM_000865.1,1451-1469).
gattctgggtgcattcatt

SEQ ID NO: 237549 - DNA, 19 bp, Homo sapiens
  siRNA target sequence for HTR1E (NM_000865.1,1506-1524).
gtgggtctgagcatctaca

SEQ ID NO: 237550 - DNA, 19 bp, Homo sapiens
  siRNA target sequence for HTR1E (NM_000865.1,1559-1577).
gctcggttatgtgaattct

SEQ ID NO: 237551 - DNA, 19 bp, Homo sapiens
  siRNA target sequence for HTR1E (NM_000865.1,1590-1608).
ctgctctatacgagtttta

SEQ ID NO: 237552 - DNA, 19 bp, Homo sapiens
  siRNA target sequence for HTR1E (NM_000865.1,1592-1610).
gctctatacgagttttaat

SEQ ID NO: 237553 - DNA, 19 bp, Homo sapiens
  siRNA target sequence for HTR1E (NM_000865.1,1595-1613).
ctatacgagttttaatgaa

SEQ ID NO: 237554 - DNA, 19 bp, Homo sapiens
  siRNA target sequence for HTR1E (NM_000865.1,1600-1618).
cgagttttaatgaagactt

SEQ ID NO: 237555 - DNA, 19 bp, Homo sapiens
  siRNA target sequence for HTR1F (NM_000866.1,54-72).
cagaatgccatccaaaatt

SEQ ID NO: 237556 - DNA, 19 bp, Homo sapiens
  siRNA target sequence for HTR1F (NM_000866.1,56-74).
gaatgccatccaaaattct

SEQ ID NO: 237557 - DNA, 19 bp, Homo sapiens
  siRNA target sequence for HTR1F (NM_000866.1,100-118).
gcactgatgacaacaacta

SEQ ID NO: 237558 - DNA, 19 bp, Homo sapiens
  siRNA target sequence for HTR1F (NM_000866.1,103-121).
ctgatgacaacaactatca

SEQ ID NO: 237559 - DNA, 19 bp, Homo sapiens
  siRNA target sequence for HTR1F (NM_000866.1,116-134).
ctatcaactcccttgtgat

SEQ ID NO: 237560 - DNA, 19 bp, Homo sapiens
  siRNA target sequence for HTR1F (NM_000866.1,126-144).
ccttgtgatcgctgcaatt

SEQ ID NO: 237561 - DNA, 19 bp, Homo sapiens
  siRNA target sequence for HTR1F (NM_000866.1,127-145).
cttgtgatcgctgcaatta

SEQ ID NO: 237562 - DNA, 19 bp, Homo sapiens
  siRNA target sequence for HTR1F (NM_000866.1,165-183).
ccatccagccaattattta

SEQ ID NO: 237563 - DNA, 19 bp, Homo sapiens
  siRNA target sequence for HTR1F (NM_000866.1,191-209).
cccttgcagtcacagattt

SEQ ID NO: 237564 - DNA, 19 bp, Homo sapiens
  siRNA target sequence for HTR1F (NM_000866.1,333-351).
cttgcatctctcagctata

SEQ ID NO: 237565 - DNA, 19 bp, Homo sapiens
  siRNA target sequence for HTR1F (NM_000866.1,336-354).
gcatctctcagctatagct

SEQ ID NO: 237566 - DNA, 19 bp, Homo sapiens
  siRNA target sequence for HTR1F (NM_000866.1,337-355).
catctctcagctatagctt

SEQ ID NO: 237567 - DNA, 19 bp, Homo sapiens
  siRNA target sequence for HTR1F (NM_000866.1,342-360).
ctcagctatagctttggat

SEQ ID NO: 237568 - DNA, 19 bp, Homo sapiens
  siRNA target sequence for HTR1F (NM_000866.1,385-403).
gttgagtatgccaggaaaa

SEQ ID NO: 237569 - DNA, 19 bp, Homo sapiens
  siRNA target sequence for HTR1F (NM_000866.1,410-428).
caaagcatgctggcattat

SEQ ID NO: 237570 - DNA, 19 bp, Homo sapiens
  siRNA target sequence for HTR1F (NM_000866.1,414-432).
gcatgctggcattatgatt

SEQ ID NO: 237571 - DNA, 19 bp, Homo sapiens
  siRNA target sequence for HTR1F (NM_000866.1,532-550).
cacattgtttccaccattt

SEQ ID NO: 237572 - DNA, 19 bp, Homo sapiens
  siRNA target sequence for HTR1F (NM_000866.1,542-560).
ccaccatttactcaacatt

SEQ ID NO: 237573 - DNA, 19 bp, Homo sapiens
  siRNA target sequence for HTR1F (NM_000866.1,546-564).
catttactcaacatttgga

SEQ ID NO: 237574 - DNA, 19 bp, Homo sapiens
  siRNA target sequence for HTR1F (NM_000866.1,646-664).
caagcaagtaggattgcaa

SEQ ID NO: 237575 - DNA, 19 bp, Homo sapiens
  siRNA target sequence for HTR1F (NM_000866.1,700-718).
ggtgagaaaagcactaaat

SEQ ID NO: 237576 - DNA, 19 bp, Homo sapiens
  siRNA target sequence for HTR1F (NM_000866.1,725-743).
ccacatcctatgtactaga

SEQ ID NO: 237577 - DNA, 19 bp, Homo sapiens
  siRNA target sequence for HTR1F (NM_000866.1,728-746).
catcctatgtactagaaaa

SEQ ID NO: 237578 - DNA, 19 bp, Homo sapiens
  siRNA target sequence for HTR1F (NM_000866.1,759-777).
cccatcaacagactttgat

SEQ ID NO: 237579 - DNA, 19 bp, Homo sapiens
  siRNA target sequence for HTR1F (NM_000866.1,760-778).
ccatcaacagactttgata

SEQ ID NO: 237580 - DNA, 19 bp, Homo sapiens
  siRNA target sequence for HTR1F (NM_000866.1,761-779).
catcaacagactttgataa

SEQ ID NO: 237581 - DNA, 19 bp, Homo sapiens
  siRNA target sequence for HTR1F (NM_000866.1,797-815).
gaagtctcaggtctgaatt

SEQ ID NO: 237582 - DNA, 19 bp, Homo sapiens
  siRNA target sequence for HTR1F (NM_000866.1,811-829).
gaattcaagcatgagaaat

SEQ ID NO: 237583 - DNA, 19 bp, Homo sapiens
  siRNA target sequence for HTR1F (NM_000866.1,846-864).
gatctcaggtacaagagaa

SEQ ID NO: 237584 - DNA, 19 bp, Homo sapiens
  siRNA target sequence for HTR1F (NM_000866.1,875-893).
ccactaccctgggattaat

SEQ ID NO: 237585 - DNA, 19 bp, Homo sapiens
  siRNA target sequence for HTR1F (NM_000866.1,894-912).
cttgggtgcatttgtaata

SEQ ID NO: 237586 - DNA, 19 bp, Homo sapiens
  siRNA target sequence for HTR1F (NM_000866.1,897-915).
gggtgcatttgtaatatgt

SEQ ID NO: 237587 - DNA, 19 bp, Homo sapiens
  siRNA target sequence for HTR1F (NM_000866.1,997-1015).
gcatggcttgggtatctca

SEQ ID NO: 237588 - DNA, 19 bp, Homo sapiens
  siRNA target sequence for HTR1F (NM_000866.1,1008-1026).
gtatctcaattcccttata

SEQ ID NO: 237589 - DNA, 19 bp, Homo sapiens
  siRNA target sequence for HTR1F (NM_000866.1,1021-1039).
cttataaatccactgattt

SEQ ID NO: 237590 - DNA, 19 bp, Homo sapiens
  siRNA target sequence for HTR1F (NM_000866.1,1033-1051).
ctgatttacacaatcttta

SEQ ID NO: 237591 - DNA, 19 bp, Homo sapiens
  siRNA target sequence for HTR2A (NM_000621.1,186-204).
ctacgaactccctaatgca

SEQ ID NO: 237592 - DNA, 19 bp, Homo sapiens
  siRNA target sequence for HTR2A (NM_000621.1,189-207).
cgaactccctaatgcaatt

SEQ ID NO: 237593 - DNA, 19 bp, Homo sapiens
  siRNA target sequence for HTR2A (NM_000621.1,193-211).
ctccctaatgcaattaaat

SEQ ID NO: 237594 - DNA, 19 bp, Homo sapiens
  siRNA target sequence for HTR2A (NM_000621.1,196-214).
cctaatgcaattaaatgat

SEQ ID NO: 237595 - DNA, 19 bp, Homo sapiens
  siRNA target sequence for HTR2A (NM_000621.1,219-237).
ccaggctctacagtaatga

SEQ ID NO: 237596 - DNA, 19 bp, Homo sapiens
  siRNA target sequence for HTR2A (NM_000621.1,279-297).
ggacagtcgactctgaaaa

SEQ ID NO: 237597 - DNA, 19 bp, Homo sapiens
  siRNA target sequence for HTR2A (NM_000621.1,280-298).
gacagtcgactctgaaaat

SEQ ID NO: 237598 - DNA, 19 bp, Homo sapiens
  siRNA target sequence for HTR2A (NM_000621.1,284-302).
gtcgactctgaaaatcgaa

SEQ ID NO: 237599 - DNA, 19 bp, Homo sapiens
  siRNA target sequence for HTR2A (NM_000621.1,336-354).
cgtgtctctccttacttca

SEQ ID NO: 237600 - DNA, 19 bp, Homo sapiens
  siRNA target sequence for HTR2A (NM_000621.1,383-401).
ctgacagccgtagtgatta

SEQ ID NO: 237601 - DNA, 19 bp, Homo sapiens
  siRNA target sequence for HTR2A (NM_000621.1,385-403).
gacagccgtagtgattatt

SEQ ID NO: 237602 - DNA, 19 bp, Homo sapiens
  siRNA target sequence for HTR2A (NM_000621.1,387-405).
cagccgtagtgattattct

SEQ ID NO: 237603 - DNA, 19 bp, Homo sapiens
  siRNA target sequence for HTR2A (NM_000621.1,397-415).
gattattctaactattgct

SEQ ID NO: 237604 - DNA, 19 bp, Homo sapiens
  siRNA target sequence for HTR2A (NM_000621.1,408-426).
ctattgctggaaacatact

SEQ ID NO: 237605 - DNA, 19 bp, Homo sapiens
  siRNA target sequence for HTR2A (NM_000621.1,417-435).
gaaacatactcgtcatcat

SEQ ID NO: 237606 - DNA, 19 bp, Homo sapiens
  siRNA target sequence for HTR2A (NM_000621.1,489-507).
cacttgccatagctgatat

SEQ ID NO: 237607 - DNA, 19 bp, Homo sapiens
  siRNA target sequence for HTR2A (NM_000621.1,530-548).
cccgtgtccatgttaacca

SEQ ID NO: 237608 - DNA, 19 bp, Homo sapiens
  siRNA target sequence for HTR2A (NM_000621.1,531-549).
ccgtgtccatgttaaccat

SEQ ID NO: 237609 - DNA, 19 bp, Homo sapiens
  siRNA target sequence for HTR2A (NM_000621.1,569-587).
cctctgccgagcaagcttt

SEQ ID NO: 237610 - DNA, 19 bp, Homo sapiens
  siRNA target sequence for HTR2A (NM_000621.1,698-716).
cgcttcaactccagaacta

SEQ ID NO: 237611 - DNA, 19 bp, Homo sapiens
  siRNA target sequence for HTR2A (NM_000621.1,711-729).
gaactaaggcatttctgaa

SEQ ID NO: 237612 - DNA, 19 bp, Homo sapiens
  siRNA target sequence for HTR2A (NM_000621.1,744-762).
ggaccatatcagtaggtat

SEQ ID NO: 237613 - DNA, 19 bp, Homo sapiens
  siRNA target sequence for HTR2A (NM_000621.1,786-804).
ggctacaggacgattcgaa

SEQ ID NO: 237614 - DNA, 19 bp, Homo sapiens
  siRNA target sequence for HTR2A (NM_000621.1,794-812).
gacgattcgaaggtcttta

SEQ ID NO: 237615 - DNA, 19 bp, Homo sapiens
  siRNA target sequence for HTR2A (NM_000621.1,825-843).
gcttactcgccgatgataa

SEQ ID NO: 237616 - DNA, 19 bp, Homo sapiens
  siRNA target sequence for HTR2A (NM_000621.1,851-869).
ctgatcggctcttttgtgt

SEQ ID NO: 237617 - DNA, 19 bp, Homo sapiens
  siRNA target sequence for HTR2A (NM_000621.1,892-910).
catggtgatcacctacttt

SEQ ID NO: 237618 - DNA, 19 bp, Homo sapiens
  siRNA target sequence for HTR2A (NM_000621.1,896-914).
gtgatcacctactttctaa

SEQ ID NO: 237619 - DNA, 19 bp, Homo sapiens
  siRNA target sequence for HTR2A (NM_000621.1,898-916).
gatcacctactttctaact

SEQ ID NO: 237620 - DNA, 19 bp, Homo sapiens
  siRNA target sequence for HTR2A (NM_000621.1,939-957).
ctactttgtgtgtaagtga

SEQ ID NO: 237621 - DNA, 19 bp, Homo sapiens
  siRNA target sequence for HTR2A (NM_000621.1,964-982).
cacacgggccaaattagct

SEQ ID NO: 237622 - DNA, 19 bp, Homo sapiens
  siRNA target sequence for HTR2A (NM_000621.1,1181-1199).
gccgtcatctgcaaagagt

SEQ ID NO: 237623 - DNA, 19 bp, Homo sapiens
  siRNA target sequence for HTR2A (NM_000621.1,1225-1243).
cctgctcaatgtgtttgtt

SEQ ID NO: 237624 - DNA, 19 bp, Homo sapiens
  siRNA target sequence for HTR2A (NM_000621.1,1241-1259).
gtttggatcggttatctct

SEQ ID NO: 237625 - DNA, 19 bp, Homo sapiens
  siRNA target sequence for HTR2A (NM_000621.1,1266-1284).
cagtcaacccactagtcta

SEQ ID NO: 237626 - DNA, 19 bp, Homo sapiens
  siRNA target sequence for HTR2A (NM_000621.1,1303-1321).
ctataggtcagccttttca

SEQ ID NO: 237627 - DNA, 19 bp, Homo sapiens
  siRNA target sequence for HTR2A (NM_000621.1,1311-1329).
cagccttttcacggtatat

SEQ ID NO: 237628 - DNA, 19 bp, Homo sapiens
  siRNA target sequence for HTR2A (NM_000621.1,1314-1332).
ccttttcacggtatattca

SEQ ID NO: 237629 - DNA, 19 bp, Homo sapiens
  siRNA target sequence for HTR2A (NM_000621.1,1508-1526).
gaggcttctaaagacaata

SEQ ID NO: 237630 - DNA, 19 bp, Homo sapiens
  siRNA target sequence for HTR2A (NM_000621.1,1522-1540).
caatagcgacggagtgaat

SEQ ID NO: 237631 - DNA, 19 bp, Homo sapiens
  siRNA target sequence for HTR2C (NM_000868.1,809-827).
gagcccagtagcagctata

SEQ ID NO: 237632 - DNA, 19 bp, Homo sapiens
  siRNA target sequence for HTR2C (NM_000868.1,811-829).
gcccagtagcagctatagt

SEQ ID NO: 237633 - DNA, 19 bp, Homo sapiens
  siRNA target sequence for HTR2C (NM_000868.1,813-831).
ccagtagcagctatagtaa

SEQ ID NO: 237634 - DNA, 19 bp, Homo sapiens
  siRNA target sequence for HTR2C (NM_000868.1,822-840).
gctatagtaactgacattt

SEQ ID NO: 237635 - DNA, 19 bp, Homo sapiens
  siRNA target sequence for HTR2C (NM_000868.1,851-869).
cgatggtggacgcttcaaa

SEQ ID NO: 237636 - DNA, 19 bp, Homo sapiens
  siRNA target sequence for HTR2C (NM_000868.1,852-870).
gatggtggacgcttcaaat

SEQ ID NO: 237637 - DNA, 19 bp, Homo sapiens
  siRNA target sequence for HTR2C (NM_000868.1,873-891).
ccagacggggtacaaaact

SEQ ID NO: 237638 - DNA, 19 bp, Homo sapiens
  siRNA target sequence for HTR2C (NM_000868.1,898-916).
cactttcaatcgtcatcat

SEQ ID NO: 237639 - DNA, 19 bp, Homo sapiens
  siRNA target sequence for HTR2C (NM_000868.1,900-918).
ctttcaatcgtcatcataa

SEQ ID NO: 237640 - DNA, 19 bp, Homo sapiens
  siRNA target sequence for HTR2C (NM_000868.1,904-922).
caatcgtcatcataataat

SEQ ID NO: 237641 - DNA, 19 bp, Homo sapiens
  siRNA target sequence for HTR2C (NM_000868.1,987-1005).
gccaccaattacttcttaa

SEQ ID NO: 237642 - DNA, 19 bp, Homo sapiens
  siRNA target sequence for HTR2C (NM_000868.1,1057-1075).
ctctcctggcaatccttta

SEQ ID NO: 237643 - DNA, 19 bp, Homo sapiens
  siRNA target sequence for HTR2C (NM_000868.1,1064-1082).
ggcaatcctttatgattat

SEQ ID NO: 237644 - DNA, 19 bp, Homo sapiens
  siRNA target sequence for HTR2C (NM_000868.1,1087-1105).
ggccactacctagatattt

SEQ ID NO: 237645 - DNA, 19 bp, Homo sapiens
  siRNA target sequence for HTR2C (NM_000868.1,1089-1107).
ccactacctagatatttgt

SEQ ID NO: 237646 - DNA, 19 bp, Homo sapiens
  siRNA target sequence for HTR2C (NM_000868.1,1108-1126).
gccccgtctggatttcttt

SEQ ID NO: 237647 - DNA, 19 bp, Homo sapiens
  siRNA target sequence for HTR2C (NM_000868.1,1109-1127).
ccccgtctggatttcttta

SEQ ID NO: 237648 - DNA, 19 bp, Homo sapiens
  siRNA target sequence for HTR2C (NM_000868.1,1111-1129).
ccgtctggatttctttaga

SEQ ID NO: 237649 - DNA, 19 bp, Homo sapiens
  siRNA target sequence for HTR2C (NM_000868.1,1112-1130).
cgtctggatttctttagat

SEQ ID NO: 237650 - DNA, 19 bp, Homo sapiens
  siRNA target sequence for HTR2C (NM_000868.1,1178-1196).
ggatcggtatgtagcaata

SEQ ID NO: 237651 - DNA, 19 bp, Homo sapiens
  siRNA target sequence for HTR2C (NM_000868.1,1182-1200).
cggtatgtagcaatacgta

SEQ ID NO: 237652 - DNA, 19 bp, Homo sapiens
  siRNA target sequence for HTR2C (NM_000868.1,1184-1202).
gtatgtagcaatacgtaat

SEQ ID NO: 237653 - DNA, 19 bp, Homo sapiens
  siRNA target sequence for HTR2C (NM_000868.1,1192-1210).
caatacgtaatcctattga

SEQ ID NO: 237654 - DNA, 19 bp, Homo sapiens
  siRNA target sequence for HTR2C (NM_000868.1,1209-1227).
gagcatagccgtttcaatt

SEQ ID NO: 237655 - DNA, 19 bp, Homo sapiens
  siRNA target sequence for HTR2C (NM_000868.1,1350-1368).
gtgctcaacgacccaaatt

SEQ ID NO: 237656 - DNA, 19 bp, Homo sapiens
  siRNA target sequence for HTR2C (NM_000868.1,1355-1373).
caacgacccaaatttcgtt

SEQ ID NO: 237657 - DNA, 19 bp, Homo sapiens
  siRNA target sequence for HTR2C (NM_000868.1,1381-1399).
ggtccttcgtagctttctt

SEQ ID NO: 237658 - DNA, 19 bp, Homo sapiens
  siRNA target sequence for HTR2C (NM_000868.1,1407-1425).
ctgacgattatggtgatta

SEQ ID NO: 237659 - DNA, 19 bp, Homo sapiens
  siRNA target sequence for HTR2C (NM_000868.1,1411-1429).
cgattatggtgattacgta

SEQ ID NO: 237660 - DNA, 19 bp, Homo sapiens
  siRNA target sequence for HTR2C (NM_000868.1,1452-1470).
cgccgacaagctttgatgt

SEQ ID NO: 237661 - DNA, 19 bp, Homo sapiens
  siRNA target sequence for HTR2C (NM_000868.1,1453-1471).
gccgacaagctttgatgtt

SEQ ID NO: 237662 - DNA, 19 bp, Homo sapiens
  siRNA target sequence for HTR2C (NM_000868.1,1454-1472).
ccgacaagctttgatgtta

SEQ ID NO: 237663 - DNA, 19 bp, Homo sapiens
  siRNA target sequence for HTR2C (NM_000868.1,1490-1508).
ggaaccgcctggactaagt

SEQ ID NO: 237664 - DNA, 19 bp, Homo sapiens
  siRNA target sequence for HTR2C (NM_000868.1,1501-1519).
gactaagtctggatttcct

SEQ ID NO: 237665 - DNA, 19 bp, Homo sapiens
  siRNA target sequence for HTR2C (NM_000868.1,1556-1574).
ctctgcaaaccctaaccaa

SEQ ID NO: 237666 - DNA, 19 bp, Homo sapiens
  siRNA target sequence for HTR2C (NM_000868.1,1584-1602).
gcacgccgaagaaagaaga

SEQ ID NO: 237667 - DNA, 19 bp, Homo sapiens
  siRNA target sequence for HTR2C (NM_000868.1,1625-1643).
catgcaggctatcaacaat

SEQ ID NO: 237668 - DNA, 19 bp, Homo sapiens
  siRNA target sequence for HTR2C (NM_000868.1,1629-1647).
caggctatcaacaatgaaa

SEQ ID NO: 237669 - DNA, 19 bp, Homo sapiens
  siRNA target sequence for HTR2C (NM_000868.1,1631-1649).
ggctatcaacaatgaaaga

SEQ ID NO: 237670 - DNA, 19 bp, Homo sapiens
  siRNA target sequence for HTR2C (NM_000868.1,1697-1715).
gtggtgcccatttttcatt

SEQ ID NO: 237671 - DNA, 19 bp, Homo sapiens
  siRNA target sequence for HTR2C (NM_000868.1,1817-1835).
caatcctctggtgtatact

SEQ ID NO: 237672 - DNA, 19 bp, Homo sapiens
  siRNA target sequence for HTR2C (NM_000868.1,1827-1845).
gtgtatactctgttcaaca

SEQ ID NO: 237673 - DNA, 19 bp, Homo sapiens
  siRNA target sequence for HTR2C (NM_000868.1,1829-1847).
gtatactctgttcaacaaa

SEQ ID NO: 237674 - DNA, 19 bp, Homo sapiens
  siRNA target sequence for HTR2C (NM_000868.1,1868-1886).
caactatttgcgttgcaat

SEQ ID NO: 237675 - DNA, 19 bp, Homo sapiens
  siRNA target sequence for HTR2C (NM_000868.1,1871-1889).
ctatttgcgttgcaattat

SEQ ID NO: 237676 - DNA, 19 bp, Homo sapiens
  siRNA target sequence for HTR2C (NM_000868.1,1877-1895).
gcgttgcaattataaggta

SEQ ID NO: 237677 - DNA, 19 bp, Homo sapiens
  siRNA target sequence for HTR2C (NM_000868.1,1882-1900).
gcaattataaggtagagaa

SEQ ID NO: 237678 - DNA, 19 bp, Homo sapiens
  siRNA target sequence for HTR2C (NM_000868.1,1946-1964).
gtctgggagggagcttaat

SEQ ID NO: 237679 - DNA, 19 bp, Homo sapiens
  siRNA target sequence for HTR2C (NM_000868.1,1948-1966).
ctgggagggagcttaatgt

SEQ ID NO: 237680 - DNA, 19 bp, Homo sapiens
  siRNA target sequence for HTR2C (NM_000868.1,1970-1988).
catttatcggcataccaat

SEQ ID NO: 237681 - DNA, 19 bp, Homo sapiens
  siRNA target sequence for HTR2C (NM_000868.1,2074-2092).
gtgtggttagcgaaaggat

SEQ ID NO: 237682 - DNA, 19 bp, Homo sapiens
  siRNA target sequence for HTR2C (NM_000868.1,2076-2094).
gtggttagcgaaaggatta

SEQ ID NO: 237683 - DNA, 19 bp, Homo sapiens
  siRNA target sequence for HTR2C (NM_000868.1,2079-2097).
gttagcgaaaggattagca

SEQ ID NO: 237684 - DNA, 19 bp, Homo sapiens
  siRNA target sequence for HTR4 (NM_000870.2,373-391).
ccattgagctggttcaaga

SEQ ID NO: 237685 - DNA, 19 bp, Homo sapiens
  siRNA target sequence for HTR4 (NM_000870.2,446-464).
gctcacaacggcatcgatt

SEQ ID NO: 237686 - DNA, 19 bp, Homo sapiens
  siRNA target sequence for HTR4 (NM_000870.2,447-465).
ctcacaacggcatcgattt

SEQ ID NO: 237687 - DNA, 19 bp, Homo sapiens
  siRNA target sequence for HTR4 (NM_000870.2,449-467).
cacaacggcatcgattttt

SEQ ID NO: 237688 - DNA, 19 bp, Homo sapiens
  siRNA target sequence for HTR4 (NM_000870.2,451-469).
caacggcatcgatttttca

SEQ ID NO: 237689 - DNA, 19 bp, Homo sapiens
  siRNA target sequence for HTR4 (NM_000870.2,522-540).
gtctataggaacaagatga

SEQ ID NO: 237690 - DNA, 19 bp, Homo sapiens
  siRNA target sequence for HTR4 (NM_000870.2,543-561).
cctctgcgcatcgcattaa

SEQ ID NO: 237691 - DNA, 19 bp, Homo sapiens
  siRNA target sequence for HTR4 (NM_000870.2,544-562).
ctctgcgcatcgcattaat

SEQ ID NO: 237692 - DNA, 19 bp, Homo sapiens
  siRNA target sequence for HTR4 (NM_000870.2,577-595).
gggtcatccccacgtttat

SEQ ID NO: 237693 - DNA, 19 bp, Homo sapiens
  siRNA target sequence for HTR4 (NM_000870.2,622-640).
ggaataacattggcataat

SEQ ID NO: 237694 - DNA, 19 bp, Homo sapiens
  siRNA target sequence for HTR4 (NM_000870.2,623-641).
gaataacattggcataatt

SEQ ID NO: 237695 - DNA, 19 bp, Homo sapiens
  siRNA target sequence for HTR4 (NM_000870.2,665-683).
caaccagaactctaactct

SEQ ID NO: 237696 - DNA, 19 bp, Homo sapiens
  siRNA target sequence for HTR4 (NM_000870.2,770-788).
ggcctattaccgcatctat

SEQ ID NO: 237697 - DNA, 19 bp, Homo sapiens
  siRNA target sequence for HTR4 (NM_000870.2,772-790).
cctattaccgcatctatgt

SEQ ID NO: 237698 - DNA, 19 bp, Homo sapiens
  siRNA target sequence for HTR4 (NM_000870.2,973-991).
ccaatattgtggatccttt

SEQ ID NO: 237699 - DNA, 19 bp, Homo sapiens
  siRNA target sequence for HTR4 (NM_000870.2,981-999).
gtggatcctttcatagact

SEQ ID NO: 237700 - DNA, 19 bp, Homo sapiens
  siRNA target sequence for HTR4 (NM_000870.2,1032-1050).
ctctggctcggctatatca

SEQ ID NO: 237701 - DNA, 19 bp, Homo sapiens
  siRNA target sequence for HTR4 (NM_000870.2,1034-1052).
ctggctcggctatatcaat

SEQ ID NO: 237702 - DNA, 19 bp, Homo sapiens
  siRNA target sequence for HTR4 (NM_000870.2,1056-1074).
gggttgaacccttttctct

SEQ ID NO: 237703 - DNA, 19 bp, Homo sapiens
  siRNA target sequence for HTR4 (NM_000870.2,1057-1075).
ggttgaacccttttctcta

SEQ ID NO: 237704 - DNA, 19 bp, Homo sapiens
  siRNA target sequence for HTR4 (NM_000870.2,1071-1089).
ctctacgccttcttgaata

SEQ ID NO: 237705 - DNA, 19 bp, Homo sapiens
  siRNA target sequence for HTR4 (NM_000870.2,1076-1094).
cgccttcttgaataagtct

SEQ ID NO: 237706 - DNA, 19 bp, Homo sapiens
  siRNA target sequence for HTR4 (NM_000870.2,1077-1095).
gccttcttgaataagtctt

SEQ ID NO: 237707 - DNA, 19 bp, Homo sapiens
  siRNA target sequence for HTR4 (NM_000870.2,1082-1100).
cttgaataagtcttttaga

SEQ ID NO: 237708 - DNA, 19 bp, Homo sapiens
  siRNA target sequence for HTR4 (NM_000870.2,1099-1117).
gacgtgccttcctcatcat

SEQ ID NO: 237709 - DNA, 19 bp, Homo sapiens
  siRNA target sequence for HTR5A (NM_024012.1,110-128).
cggtcttcggagtgcttat

SEQ ID NO: 237710 - DNA, 19 bp, Homo sapiens
  siRNA target sequence for HTR5A (NM_024012.1,335-353).
ggctgtgccagctttggat

SEQ ID NO: 237711 - DNA, 19 bp, Homo sapiens
  siRNA target sequence for HTR5A (NM_024012.1,1041-1059).
cgccttcaagaacttcttt

SEQ ID NO: 237712 - DNA, 19 bp, Homo sapiens
  siRNA target sequence for HTR7 (NM_000872.3,452-470).
gtggggaacagatcaacta

SEQ ID NO: 237713 - DNA, 19 bp, Homo sapiens
  siRNA target sequence for HTR7 (NM_000872.3,471-489).
cggcagagtcgagaaagtt

SEQ ID NO: 237714 - DNA, 19 bp, Homo sapiens
  siRNA target sequence for HTR7 (NM_000872.3,473-491).
gcagagtcgagaaagttgt

SEQ ID NO: 237715 - DNA, 19 bp, Homo sapiens
  siRNA target sequence for HTR7 (NM_000872.3,882-900).
caccttacctccactcttt

SEQ ID NO: 237716 - DNA, 19 bp, Homo sapiens
  siRNA target sequence for HTR7 (NM_000872.3,946-964).
caggactttggctatacga

SEQ ID NO: 237717 - DNA, 19 bp, Homo sapiens
  siRNA target sequence for HTR7 (NM_000872.3,948-966).
ggactttggctatacgatt

SEQ ID NO: 237718 - DNA, 19 bp, Homo sapiens
  siRNA target sequence for HTR7 (NM_000872.3,949-967).
gactttggctatacgattt

SEQ ID NO: 237719 - DNA, 19 bp, Homo sapiens
  siRNA target sequence for HTR7 (NM_000872.3,955-973).
ggctatacgatttactcta

SEQ ID NO: 237720 - DNA, 19 bp, Homo sapiens
  siRNA target sequence for HTR7 (NM_000872.3,971-989).
ctaccgcagtggcatttta

SEQ ID NO: 237721 - DNA, 19 bp, Homo sapiens
  siRNA target sequence for HTR7 (NM_000872.3,994-1012).
cccatgtccgtcatgcttt

SEQ ID NO: 237722 - DNA, 19 bp, Homo sapiens
  siRNA target sequence for HTR7 (NM_000872.3,995-1013).
ccatgtccgtcatgctttt

SEQ ID NO: 237723 - DNA, 19 bp, Homo sapiens
  siRNA target sequence for HTR7 (NM_000872.3,1001-1019).
ccgtcatgcttttcatgta

SEQ ID NO: 237724 - DNA, 19 bp, Homo sapiens
  siRNA target sequence for HTR7 (NM_000872.3,1049-1067).
gtgctgccaaacacaagtt

SEQ ID NO: 237725 - DNA, 19 bp, Homo sapiens
  siRNA target sequence for HTR7 (NM_019859.2,1612-1630).
ccagaccatcacaattggt

SEQ ID NO: 237726 - DNA, 19 bp, Homo sapiens
  siRNA target sequence for HTR7 (NM_019859.2,1613-1631).
cagaccatcacaattggtt

SEQ ID NO: 237727 - DNA, 19 bp, Homo sapiens
  siRNA target sequence for ADRA2A (NM_000681.2,1028-1046).
gcaacgtgctcgtcatcat

SEQ ID NO: 237728 - DNA, 19 bp, Homo sapiens
  siRNA target sequence for ADRA2A (NM_000681.2,2088-2106).
gccacgcacgctcttcaaa

SEQ ID NO: 237729 - DNA, 19 bp, Homo sapiens
  siRNA target sequence for ADRA2A (NM_000681.2,2090-2108).
cacgcacgctcttcaaatt

SEQ ID NO: 237730 - DNA, 19 bp, Homo sapiens
  siRNA target sequence for ADRA2A (NM_000681.2,2092-2110).
cgcacgctcttcaaattct

SEQ ID NO: 237731 - DNA, 19 bp, Homo sapiens
  siRNA target sequence for ADRA2B (NM_000682.3,524-542).
cctccagcatcggatcttt

SEQ ID NO: 237732 - DNA, 19 bp, Homo sapiens
  siRNA target sequence for ADRA2B (NM_000682.3,774-792).
gggggagacccctgaagat

SEQ ID NO: 237733 - DNA, 19 bp, Homo sapiens
  siRNA target sequence for ADRA2B (NM_000682.3,1038-1056).
caggggcgtgggtgctata

SEQ ID NO: 237734 - DNA, 19 bp, Homo sapiens
  siRNA target sequence for ADRA2B (NM_000682.3,1041-1059).
gggcgtgggtgctataggt

SEQ ID NO: 237735 - DNA, 19 bp, Homo sapiens
  siRNA target sequence for ADRA2C (NM_000683.2,1279-1297).
ctcgatgtgctgttttgca

SEQ ID NO: 237736 - DNA, 19 bp, Homo sapiens
  siRNA target sequence for ADRA1A (NM_000680.1,491-509).
gcaccggtgaacatttcca

SEQ ID NO: 237737 - DNA, 19 bp, Homo sapiens
  siRNA target sequence for ADRA1A (NM_000680.1,492-510).
caccggtgaacatttccaa

SEQ ID NO: 237738 - DNA, 19 bp, Homo sapiens
  siRNA target sequence for ADRA1A (NM_000680.1,890-908).
gcactctccctggtcatat

SEQ ID NO: 237739 - DNA, 19 bp, Homo sapiens
  siRNA target sequence for ADRA1A (NM_000680.1,1209-1227).
cagtgaggctcctcaagtt

SEQ ID NO: 237740 - DNA, 19 bp, Homo sapiens
  siRNA target sequence for ADRA1A (NM_000680.1,1420-1438).
ctccagccaagagttcaaa

SEQ ID NO: 237741 - DNA, 19 bp, Homo sapiens
  siRNA target sequence for ADRA1A (NM_000680.1,1564-1582).
catccccgtgggatcaaga

SEQ ID NO: 237742 - DNA, 19 bp, Homo sapiens
  siRNA target sequence for ADRA1A (NM_000680.1,1606-1624).
gacggatggcgtttgtgaa

SEQ ID NO: 237743 - DNA, 19 bp, Homo sapiens
  siRNA target sequence for ADRA1A (NM_000680.1,1649-1667).
cgtggatctgccaggatta

SEQ ID NO: 237744 - DNA, 19 bp, Homo sapiens
  siRNA target sequence for ADRA1A (NM_000680.1,1775-1793).
catcaagttccaaccatta

SEQ ID NO: 237745 - DNA, 19 bp, Homo sapiens
  siRNA target sequence for ADRA1B (NM_000679.2,215-233).
cccactggggagagttgaa

SEQ ID NO: 237746 - DNA, 19 bp, Homo sapiens
  siRNA target sequence for ADRA1B (NM_000679.2,216-234).
ccactggggagagttgaaa

SEQ ID NO: 237747 - DNA, 19 bp, Homo sapiens
  siRNA target sequence for ADRA1B (NM_000679.2,356-374).
gcaacatcctagtcatctt

SEQ ID NO: 237748 - DNA, 19 bp, Homo sapiens
  siRNA target sequence for ADRA1B (NM_000679.2,762-780).
caccgaagaacccttctat

SEQ ID NO: 237749 - DNA, 19 bp, Homo sapiens
  siRNA target sequence for ADRA1B (NM_000679.2,813-831).
ccctctggcggtcattcta

SEQ ID NO: 237750 - DNA, 19 bp, Homo sapiens
  siRNA target sequence for ADRA1B (NM_000679.2,815-833).
ctctggcggtcattctagt

SEQ ID NO: 237751 - DNA, 19 bp, Homo sapiens
  siRNA target sequence for ADRA1B (NM_000679.2,821-839).
cggtcattctagtcatgta

SEQ ID NO: 237752 - DNA, 19 bp, Homo sapiens
  siRNA target sequence for ADRA1B (NM_000679.2,837-855).
gtactgccgtgtctatata

SEQ ID NO: 237753 - DNA, 19 bp, Homo sapiens
  siRNA target sequence for ADRA1B (NM_000679.2,922-940).
ctgaccctgaggatccatt

SEQ ID NO: 237754 - DNA, 19 bp, Homo sapiens
  siRNA target sequence for ADRA1B (NM_000679.2,932-950).
ggatccattccaagaactt

SEQ ID NO: 237755 - DNA, 19 bp, Homo sapiens
  siRNA target sequence for ADRA1B (NM_000679.2,1001-1019).
gttccatagctgtcaaact

SEQ ID NO: 237756 - DNA, 19 bp, Homo sapiens
  siRNA target sequence for ADRA1B (NM_000679.2,1061-1079).
gcattgtggtcggtatgtt

SEQ ID NO: 237757 - DNA, 19 bp, Homo sapiens
  siRNA target sequence for ADRA1B (NM_000679.2,1066-1084).
gtggtcggtatgttcatct

SEQ ID NO: 237758 - DNA, 19 bp, Homo sapiens
  siRNA target sequence for ADRA1D (NM_000678.2,392-410).
caggtaacctgcttgtcat

SEQ ID NO: 237759 - DNA, 19 bp, Homo sapiens
  siRNA target sequence for ADRA1D (NM_000678.2,1058-1076).
ccgtgcgcctgctcaagtt

SEQ ID NO: 237760 - DNA, 19 bp, Homo sapiens
  siRNA target sequence for ADRA1D (NM_000678.2,1060-1078).
gtgcgcctgctcaagttct

SEQ ID NO: 237761 - DNA, 19 bp, Homo sapiens
  siRNA target sequence for ADRA1D (NM_000678.2,1193-1211).
catcggagggcgtcttcaa

SEQ ID NO: 237762 - DNA, 19 bp, Homo sapiens
  siRNA target sequence for ADRA1D (NM_000678.2,1268-1286).
gttccagccgcgagttcaa

SEQ ID NO: 237763 - DNA, 19 bp, Homo sapiens
  siRNA target sequence for ADRA1D (NM_000678.2,1721-1739).
cctgccaggcctacgaatt

SEQ ID NO: 237764 - DNA, 19 bp, Homo sapiens
  siRNA target sequence for ADRA1D (NM_000678.2,1756-1774).
ctacgggagaccgatattt

SEQ ID NO: 237765 - DNA, 19 bp, Homo sapiens
  siRNA target sequence for ADRB2 (NM_000024.3,610-628).
cgctactttgccattactt

SEQ ID NO: 237766 - DNA, 19 bp, Homo sapiens
  siRNA target sequence for ADRB2 (NM_000024.3,612-630).
ctactttgccattacttca

SEQ ID NO: 237767 - DNA, 19 bp, Homo sapiens
  siRNA target sequence for ADRB2 (NM_000024.3,907-925).
ctccagaagattgacaaat

SEQ ID NO: 237768 - DNA, 19 bp, Homo sapiens
  siRNA target sequence for ADRB2 (NM_000024.3,909-927).
ccagaagattgacaaatct

SEQ ID NO: 237769 - DNA, 19 bp, Homo sapiens
  siRNA target sequence for ADRB2 (NM_000024.3,985-1003).
catggactccgcagatctt

SEQ ID NO: 237770 - DNA, 19 bp, Homo sapiens
  siRNA target sequence for ADRB2 (NM_000024.3,1083-1101).
cttcttcatcgttaacatt

SEQ ID NO: 237771 - DNA, 19 bp, Homo sapiens
  siRNA target sequence for ADRB2 (NM_000024.3,1123-1141).
ctcatccgtaaggaagttt

SEQ ID NO: 237772 - DNA, 19 bp, Homo sapiens
  siRNA target sequence for ADRB2 (NM_000024.3,1243-1261).
ctgcgcaggtcttctttga

SEQ ID NO: 237773 - DNA, 19 bp, Homo sapiens
  siRNA target sequence for ADRB2 (NM_000024.3,1362-1380).
cccaggcacggaagacttt

SEQ ID NO: 237774 - DNA, 19 bp, Homo sapiens
  siRNA target sequence for ADRB2 (NM_000024.3,1397-1415).
ctgtgcctagcgataacat

SEQ ID NO: 237775 - DNA, 19 bp, Homo sapiens
  siRNA target sequence for ADRB2 (NM_000024.3,1401-1419).
gcctagcgataacattgat

SEQ ID NO: 237776 - DNA, 19 bp, Homo sapiens
  siRNA target sequence for ADRB2 (NM_000024.3,1402-1420).
cctagcgataacattgatt

SEQ ID NO: 237777 - DNA, 19 bp, Homo sapiens
  siRNA target sequence for ADRB2 (NM_000024.3,1407-1425).
cgataacattgattcacaa

SEQ ID NO: 237778 - DNA, 19 bp, Homo sapiens
  siRNA target sequence for ADRB2 (NM_000024.3,1423-1441).
caagggaggaattgtagta

SEQ ID NO: 237779 - DNA, 19 bp, Homo sapiens
  siRNA target sequence for ADRB2 (NM_000024.3,1428-1446).
gaggaattgtagtacaaat

SEQ ID NO: 237780 - DNA, 19 bp, Homo sapiens
  siRNA target sequence for ADRB2 (NM_000024.3,1430-1448).
ggaattgtagtacaaatga

SEQ ID NO: 237781 - DNA, 19 bp, Homo sapiens
  siRNA target sequence for ADRB1 (NM_000684.1,459-477).
gagtacggctccttcttct

SEQ ID NO: 237782 - DNA, 19 bp, Homo sapiens
  siRNA target sequence for ADRB3 (NM_000025.1,1187-1205).
cctgaactggctaggttat

SEQ ID NO: 237783 - DNA, 19 bp, Homo sapiens
  siRNA target sequence for HRH1 (NM_000861.2,195-213).
cctcctgcctcttagaaga

SEQ ID NO: 237784 - DNA, 19 bp, Homo sapiens
  siRNA target sequence for HRH1 (NM_000861.2,411-429).
ccgtcgtcatgcctatgaa

SEQ ID NO: 237785 - DNA, 19 bp, Homo sapiens
  siRNA target sequence for HRH1 (NM_000861.2,413-431).
gtcgtcatgcctatgaaca

SEQ ID NO: 237786 - DNA, 19 bp, Homo sapiens
  siRNA target sequence for HRH1 (NM_000861.2,506-524).
gccagcacagcgtccattt

SEQ ID NO: 237787 - DNA, 19 bp, Homo sapiens
  siRNA target sequence for HRH1 (NM_000861.2,569-587).
cagcccctcaggtacctta

SEQ ID NO: 237788 - DNA, 19 bp, Homo sapiens
  siRNA target sequence for HRH1 (NM_000861.2,717-735).
gtgagacagacttctatga

SEQ ID NO: 237789 - DNA, 19 bp, Homo sapiens
  siRNA target sequence for HRH1 (NM_000861.2,844-862).
gcaccgggagctcatcaat

SEQ ID NO: 237790 - DNA, 19 bp, Homo sapiens
  siRNA target sequence for HRH1 (NM_000861.2,848-866).
cgggagctcatcaataggt

SEQ ID NO: 237791 - DNA, 19 bp, Homo sapiens
  siRNA target sequence for HRH1 (NM_000861.2,876-894).
ccttctcagaaattaagct

SEQ ID NO: 237792 - DNA, 19 bp, Homo sapiens
  siRNA target sequence for HRH1 (NM_000861.2,910-928).
caagggggatgccaagaaa

SEQ ID NO: 237793 - DNA, 19 bp, Homo sapiens
  siRNA target sequence for HRH1 (NM_000861.2,944-962).
ccctgggaggttctgaaaa

SEQ ID NO: 237794 - DNA, 19 bp, Homo sapiens
  siRNA target sequence for HRH1 (NM_000861.2,1199-1217).
catggggccagcgagatat

SEQ ID NO: 237795 - DNA, 19 bp, Homo sapiens
  siRNA target sequence for HRH1 (NM_000861.2,1317-1335).
ctaacacaggcctggatta

SEQ ID NO: 237796 - DNA, 19 bp, Homo sapiens
  siRNA target sequence for HRH1 (NM_000861.2,1331-1349).
gattacatcaagtttactt

SEQ ID NO: 237797 - DNA, 19 bp, Homo sapiens
  siRNA target sequence for HRH1 (NM_000861.2,1357-1375).
gctccgctcgcattcaaga

SEQ ID NO: 237798 - DNA, 19 bp, Homo sapiens
  siRNA target sequence for HRH1 (NM_000861.2,1365-1383).
cgcattcaagacagtatgt

SEQ ID NO: 237799 - DNA, 19 bp, Homo sapiens
  siRNA target sequence for HRH1 (NM_000861.2,1366-1384).
gcattcaagacagtatgta

SEQ ID NO: 237800 - DNA, 19 bp, Homo sapiens
  siRNA target sequence for HRH1 (NM_000861.2,1461-1479).
ggatcccttatttcatctt

SEQ ID NO: 237801 - DNA, 19 bp, Homo sapiens
  siRNA target sequence for HRH1 (NM_000861.2,1584-1602).
ccttgtgcaatgagaactt

SEQ ID NO: 237802 - DNA, 19 bp, Homo sapiens
  siRNA target sequence for HRH2 (NM_022304.1,672-690).
ccgcaacctgaccaattgt

SEQ ID NO: 237803 - DNA, 19 bp, Homo sapiens
  siRNA target sequence for HRH2 (NM_022304.1,673-691).
cgcaacctgaccaattgtt

SEQ ID NO: 237804 - DNA, 19 bp, Homo sapiens
  siRNA target sequence for HRH2 (NM_022304.1,674-692).
gcaacctgaccaattgttt

SEQ ID NO: 237805 - DNA, 19 bp, Homo sapiens
  siRNA target sequence for HRH2 (NM_022304.1,696-714).
cgtgtccttggctatcact

SEQ ID NO: 237806 - DNA, 19 bp, Homo sapiens
  siRNA target sequence for HRH2 (NM_022304.1,931-949).
gccatctctctggtcttaa

SEQ ID NO: 237807 - DNA, 19 bp, Homo sapiens
  siRNA target sequence for HRH2 (NM_022304.1,932-950).
ccatctctctggtcttaat

SEQ ID NO: 237808 - DNA, 19 bp, Homo sapiens
  siRNA target sequence for HRH2 (NM_022304.1,933-951).
catctctctggtcttaatt

SEQ ID NO: 237809 - DNA, 19 bp, Homo sapiens
  siRNA target sequence for HRH2 (NM_022304.1,1162-1180).
gccaagaggatcaatcaca

SEQ ID NO: 237810 - DNA, 19 bp, Homo sapiens
  siRNA target sequence for HRH2 (NM_022304.1,1163-1181).
ccaagaggatcaatcacat

SEQ ID NO: 237811 - DNA, 19 bp, Homo sapiens
  siRNA target sequence for HRH2 (NM_022304.1,1164-1182).
caagaggatcaatcacatt

SEQ ID NO: 237812 - DNA, 19 bp, Homo sapiens
  siRNA target sequence for HRH2 (NM_022304.1,1452-1470).
ccgcaactcccacaaaact

SEQ ID NO: 237813 - DNA, 19 bp, Homo sapiens
  siRNA target sequence for HRH2 (NM_022304.1,1453-1471).
cgcaactcccacaaaactt

SEQ ID NO: 237814 - DNA, 19 bp, Homo sapiens
  siRNA target sequence for HRH3 (NM_007232.1,494-512).
cgcacccagaacaacttct

SEQ ID NO: 237815 - DNA, 19 bp, Homo sapiens
  siRNA target sequence for HRH3 (NM_007232.1,861-879).
gctatgccgagttcttcta

SEQ ID NO: 237816 - DNA, 19 bp, Homo sapiens
  siRNA target sequence for HRH3 (NM_007232.1,866-884).
gccgagttcttctacaact

SEQ ID NO: 237817 - DNA, 19 bp, Homo sapiens
  siRNA target sequence for HRH3 (NM_007232.1,936-954).
gcgtcaccttctttaacct

SEQ ID NO: 237818 - DNA, 19 bp, Homo sapiens
  siRNA target sequence for HRH3 (NM_007232.1,1466-1484).
cctgactactggtacgaaa

SEQ ID NO: 237819 - DNA, 19 bp, Homo sapiens
  siRNA target sequence for HRH4 (NM_021624.2,117-135).
gcacaatcaatttatcact

SEQ ID NO: 237820 - DNA, 19 bp, Homo sapiens
  siRNA target sequence for HRH4 (NM_021624.2,134-152).
ctaagcactcgtgttactt

SEQ ID NO: 237821 - DNA, 19 bp, Homo sapiens
  siRNA target sequence for HRH4 (NM_021624.2,139-157).
cactcgtgttactttagca

SEQ ID NO: 237822 - DNA, 19 bp, Homo sapiens
  siRNA target sequence for HRH4 (NM_021624.2,143-161).
cgtgttactttagcatttt

SEQ ID NO: 237823 - DNA, 19 bp, Homo sapiens
  siRNA target sequence for HRH4 (NM_021624.2,168-186).
ccttagtagcttttgctat

SEQ ID NO: 237824 - DNA, 19 bp, Homo sapiens
  siRNA target sequence for HRH4 (NM_021624.2,194-212).
ggaaatgctttggtcattt

SEQ ID NO: 237825 - DNA, 19 bp, Homo sapiens
  siRNA target sequence for HRH4 (NM_021624.2,195-213).
gaaatgctttggtcatttt

SEQ ID NO: 237826 - DNA, 19 bp, Homo sapiens
  siRNA target sequence for HRH4 (NM_021624.2,235-253).
ccttagacatcgaagtagt

SEQ ID NO: 237827 - DNA, 19 bp, Homo sapiens
  siRNA target sequence for HRH4 (NM_021624.2,242-260).
catcgaagtagttattttt

SEQ ID NO: 237828 - DNA, 19 bp, Homo sapiens
  siRNA target sequence for HRH4 (NM_021624.2,320-338).
cctcacacgctgttcgaat

SEQ ID NO: 237829 - DNA, 19 bp, Homo sapiens
  siRNA target sequence for HRH4 (NM_021624.2,331-349).
gttcgaatgggattttgga

SEQ ID NO: 237830 - DNA, 19 bp, Homo sapiens
  siRNA target sequence for HRH4 (NM_021624.2,369-387).
ggctcactactgactatct

SEQ ID NO: 237831 - DNA, 19 bp, Homo sapiens
  siRNA target sequence for HRH4 (NM_021624.2,373-391).
cactactgactatctgtta

SEQ ID NO: 237832 - DNA, 19 bp, Homo sapiens
  siRNA target sequence for HRH4 (NM_021624.2,435-453).
gatacctgtcagtctcaaa

SEQ ID NO: 237833 - DNA, 19 bp, Homo sapiens
  siRNA target sequence for HRH4 (NM_021624.2,482-500).
ggggtcttgaagattgtta

SEQ ID NO: 237834 - DNA, 19 bp, Homo sapiens
  siRNA target sequence for HRH4 (NM_021624.2,484-502).
ggtcttgaagattgttact

SEQ ID NO: 237835 - DNA, 19 bp, Homo sapiens
  siRNA target sequence for HRH4 (NM_021624.2,521-539).
gtgctggccttcttagtga

SEQ ID NO: 237836 - DNA, 19 bp, Homo sapiens
  siRNA target sequence for HRH4 (NM_021624.2,523-541).
gctggccttcttagtgaat

SEQ ID NO: 237837 - DNA, 19 bp, Homo sapiens
  siRNA target sequence for HRH4 (NM_021624.2,546-564).
caatgattctagtttcaga

SEQ ID NO: 237838 - DNA, 19 bp, Homo sapiens
  siRNA target sequence for HRH4 (NM_021624.2,633-651).
catcattcttggaattcgt

SEQ ID NO: 237839 - DNA, 19 bp, Homo sapiens
  siRNA target sequence for HRH4 (NM_021624.2,649-667).
cgtgatcccagtcatctta

SEQ ID NO: 237840 - DNA, 19 bp, Homo sapiens
  siRNA target sequence for HRH4 (NM_021624.2,659-677).
gtcatcttagtcgcttatt

SEQ ID NO: 237841 - DNA, 19 bp, Homo sapiens
  siRNA target sequence for HRH4 (NM_021624.2,778-796).
ctcattcagaggtagacta

SEQ ID NO: 237842 - DNA, 19 bp, Homo sapiens
  siRNA target sequence for HRH4 (NM_021624.2,901-919).
gaatagcaatacaattgct

SEQ ID NO: 237843 - DNA, 19 bp, Homo sapiens
  siRNA target sequence for HRH4 (NM_021624.2,1090-1108).
ctcagcaacaggtcctaaa

SEQ ID NO: 237844 - DNA, 19 bp, Homo sapiens
  siRNA target sequence for HRH4 (NM_021624.2,1095-1113).
caacaggtcctaaatcagt

SEQ ID NO: 237845 - DNA, 19 bp, Homo sapiens
  siRNA target sequence for HRH4 (NM_021624.2,1101-1119).
gtcctaaatcagtttggta

SEQ ID NO: 237846 - DNA, 19 bp, Homo sapiens
  siRNA target sequence for HRH4 (NM_021624.2,1103-1121).
cctaaatcagtttggtata

SEQ ID NO: 237847 - DNA, 19 bp, Homo sapiens
  siRNA target sequence for HRH4 (NM_021624.2,1180-1198).
gtgtcacaagcgctttcaa

SEQ ID NO: 237848 - DNA, 19 bp, Homo sapiens
  siRNA target sequence for HRH4 (NM_021624.2,1247-1265).
caacacagtcggtcagtat

SEQ ID NO: 237849 - DNA, 19 bp, Homo sapiens
  siRNA target sequence for HRH4 (NM_021624.2,1252-1270).
cagtcggtcagtatcttct

SEQ ID NO: 237850 - DNA, 19 bp, Homo sapiens
  siRNA target sequence for HTR6 (NM_000871.1,639-657).
cgcaacacgtccaacttct

SEQ ID NO: 237851 - DNA, 19 bp, Homo sapiens
  siRNA target sequence for HTR6 (NM_000871.1,640-658).
gcaacacgtccaacttctt

SEQ ID NO: 237852 - DNA, 19 bp, Homo sapiens
  siRNA target sequence for HTR6 (NM_000871.1,1065-1083).
ccctcgggtgccatatgct

SEQ ID NO: 237853 - DNA, 19 bp, Homo sapiens
  siRNA target sequence for HTR6 (NM_000871.1,1066-1084).
cctcgggtgccatatgctt

SEQ ID NO: 237854 - DNA, 19 bp, Homo sapiens
  siRNA target sequence for HTR6 (NM_000871.1,1382-1400).
cacatggctgggttactgt

SEQ ID NO: 237855 - DNA, 19 bp, Homo sapiens
  siRNA target sequence for HTR6 (NM_000871.1,1384-1402).
catggctgggttactgtaa

SEQ ID NO: 237856 - DNA, 19 bp, Homo sapiens
  siRNA target sequence for HTR6 (NM_000871.1,1717-1735).
ccgtcaatttcttcaacat

SEQ ID NO: 237857 - DNA, 19 bp, Homo sapiens
  siRNA target sequence for DRD1 (NM_000794.2,763-781).
gggacttctctgttcgtat

SEQ ID NO: 237858 - DNA, 19 bp, Homo sapiens
  siRNA target sequence for DRD1 (NM_000794.2,840-858).
gtctgtgctgccgttatca

SEQ ID NO: 237859 - DNA, 19 bp, Homo sapiens
  siRNA target sequence for DRD1 (NM_000794.2,877-895).
ccaaggtgaccaacttctt

SEQ ID NO: 237860 - DNA, 19 bp, Homo sapiens
  siRNA target sequence for DRD1 (NM_000794.2,981-999).
ccctttgggtccttctgta

SEQ ID NO: 237861 - DNA, 19 bp, Homo sapiens
  siRNA target sequence for DRD1 (NM_000794.2,1098-1116).
cggtatgagagaaagatga

SEQ ID NO: 237862 - DNA, 19 bp, Homo sapiens
  siRNA target sequence for DRD1 (NM_000794.2,1216-1234).
caagcccctctgatggaaa

SEQ ID NO: 237863 - DNA, 19 bp, Homo sapiens
  siRNA target sequence for DRD1 (NM_000794.2,1293-1311).
gccatctcatcctctgtaa

SEQ ID NO: 237864 - DNA, 19 bp, Homo sapiens
  siRNA target sequence for DRD1 (NM_000794.2,1295-1313).
catctcatcctctgtaata

SEQ ID NO: 237865 - DNA, 19 bp, Homo sapiens
  siRNA target sequence for DRD1 (NM_000794.2,1300-1318).
catcctctgtaataagctt

SEQ ID NO: 237866 - DNA, 19 bp, Homo sapiens
  siRNA target sequence for DRD1 (NM_000794.2,1325-1343).
ccctgtggccatcatgatt

SEQ ID NO: 237867 - DNA, 19 bp, Homo sapiens
  siRNA target sequence for DRD1 (NM_000794.2,1361-1379).
ctacaggattgctcagaaa

SEQ ID NO: 237868 - DNA, 19 bp, Homo sapiens
  siRNA target sequence for DRD1 (NM_000794.2,1433-1451).
ccagaccaccacaggtaat

SEQ ID NO: 237869 - DNA, 19 bp, Homo sapiens
  siRNA target sequence for DRD1 (NM_000794.2,1436-1454).
gaccaccacaggtaatgga

SEQ ID NO: 237870 - DNA, 19 bp, Homo sapiens
  siRNA target sequence for DRD1 (NM_000794.2,1452-1470).
ggaaagcctgtcgaatgtt

SEQ ID NO: 237871 - DNA, 19 bp, Homo sapiens
  siRNA target sequence for DRD1 (NM_000794.2,1457-1475).
gcctgtcgaatgttctcaa

SEQ ID NO: 237872 - DNA, 19 bp, Homo sapiens
  siRNA target sequence for DRD1 (NM_000794.2,1477-1495).
cggaaagttcttttaagat

SEQ ID NO: 237873 - DNA, 19 bp, Homo sapiens
  siRNA target sequence for DRD1 (NM_000794.2,1558-1576).
gctgttggctacctttctt

SEQ ID NO: 237874 - DNA, 19 bp, Homo sapiens
  siRNA target sequence for DRD1 (NM_000794.2,1664-1682).
gtttgggtgggctaattca

SEQ ID NO: 237875 - DNA, 19 bp, Homo sapiens
  siRNA target sequence for DRD1 (NM_000794.2,1697-1715).
catttatgcctttaatgct

SEQ ID NO: 237876 - DNA, 19 bp, Homo sapiens
  siRNA target sequence for DRD1 (NM_000794.2,1758-1776).
ctttgccctgcgacgaata

SEQ ID NO: 237877 - DNA, 19 bp, Homo sapiens
  siRNA target sequence for DRD1 (NM_000794.2,1780-1798).
ccatagagacggtgagtat

SEQ ID NO: 237878 - DNA, 19 bp, Homo sapiens
  siRNA target sequence for DRD1 (NM_000794.2,1785-1803).
gagacggtgagtatcaata

SEQ ID NO: 237879 - DNA, 19 bp, Homo sapiens
  siRNA target sequence for DRD1 (NM_000794.2,1789-1807).
cggtgagtatcaataacaa

SEQ ID NO: 237880 - DNA, 19 bp, Homo sapiens
  siRNA target sequence for DRD1 (NM_000794.2,1790-1808).
ggtgagtatcaataacaat

SEQ ID NO: 237881 - DNA, 19 bp, Homo sapiens
  siRNA target sequence for DRD1 (NM_000794.2,1974-1992).
gtcatattggactatgaca

SEQ ID NO: 237882 - DNA, 19 bp, Homo sapiens
  siRNA target sequence for DRD2 (NM_000795.2,251-269).
cggacagaccccactacaa

SEQ ID NO: 237883 - DNA, 19 bp, Homo sapiens
  siRNA target sequence for DRD2 (NM_000795.2,257-275).
gaccccactacaactacta

SEQ ID NO: 237884 - DNA, 19 bp, Homo sapiens
  siRNA target sequence for DRD2 (NM_000795.2,451-469).
gtggtaggtgagtggaaat

SEQ ID NO: 237885 - DNA, 19 bp, Homo sapiens
  siRNA target sequence for DRD2 (NM_000795.2,454-472).
gtaggtgagtggaaattca

SEQ ID NO: 237886 - DNA, 19 bp, Homo sapiens
  siRNA target sequence for DRD2 (NM_000795.2,521-539).
cggcgagcatcctgaactt

SEQ ID NO: 237887 - DNA, 19 bp, Homo sapiens
  siRNA target sequence for DRD2 (NM_000795.2,523-541).
gcgagcatcctgaacttgt

SEQ ID NO: 237888 - DNA, 19 bp, Homo sapiens
  siRNA target sequence for DRD2 (NM_000795.2,576-594).
catgcccatgctgtacaat

SEQ ID NO: 237889 - DNA, 19 bp, Homo sapiens
  siRNA target sequence for DRD2 (NM_000795.2,673-691).
ctcctcttcggactcaata

SEQ ID NO: 237890 - DNA, 19 bp, Homo sapiens
  siRNA target sequence for DRD2 (NM_000795.2,756-774).
cttctacgtgcccttcatt

SEQ ID NO: 237891 - DNA, 19 bp, Homo sapiens
  siRNA target sequence for DRD2 (NM_000795.2,899-917).
ctcaccccgaggacatgaa

SEQ ID NO: 237892 - DNA, 19 bp, Homo sapiens
  siRNA target sequence for DRD2 (NM_000795.2,926-944).
ccgttatcatgaagtctaa

SEQ ID NO: 237893 - DNA, 19 bp, Homo sapiens
  siRNA target sequence for DRD2 (NM_000795.2,1131-1149).
cgccaaaccagagaagaat

SEQ ID NO: 237894 - DNA, 19 bp, Homo sapiens
  siRNA target sequence for DRD2 (NM_000795.2,1169-1187).
ccaagattgccaagatctt

SEQ ID NO: 237895 - DNA, 19 bp, Homo sapiens
  siRNA target sequence for DRD2 (NM_000795.2,1170-1188).
caagattgccaagatcttt

SEQ ID NO: 237896 - DNA, 19 bp, Homo sapiens
  siRNA target sequence for DRD2 (NM_000795.2,1297-1315).
gttctcggcgtgttcatca

SEQ ID NO: 237897 - DNA, 19 bp, Homo sapiens
  siRNA target sequence for DRD2 (NM_000795.2,1338-1356).
cacacacatcctgaacata

SEQ ID NO: 237898 - DNA, 19 bp, Homo sapiens
  siRNA target sequence for DRD2 (NM_000795.2,1342-1360).
cacatcctgaacatacact

SEQ ID NO: 237899 - DNA, 19 bp, Homo sapiens
  siRNA target sequence for DRD3 (NM_000796.2,562-580).
caggtggagtctggaattt

SEQ ID NO: 237900 - DNA, 19 bp, Homo sapiens
  siRNA target sequence for DRD3 (NM_000796.2,628-646).
gtacagccagcatccttaa

SEQ ID NO: 237901 - DNA, 19 bp, Homo sapiens
  siRNA target sequence for DRD3 (NM_000796.2,631-649).
cagccagcatccttaatct

SEQ ID NO: 237902 - DNA, 19 bp, Homo sapiens
  siRNA target sequence for DRD3 (NM_000796.2,787-805).
ctcttctgtttggctttaa

SEQ ID NO: 237903 - DNA, 19 bp, Homo sapiens
  siRNA target sequence for DRD3 (NM_000796.2,792-810).
ctgtttggctttaatacca

SEQ ID NO: 237904 - DNA, 19 bp, Homo sapiens
  siRNA target sequence for DRD3 (NM_000796.2,920-938).
ctatgtggtgctgaaacaa

SEQ ID NO: 237905 - DNA, 19 bp, Homo sapiens
  siRNA target sequence for DRD3 (NM_000796.2,1038-1056).
gagctgaagcgttactaca

SEQ ID NO: 237906 - DNA, 19 bp, Homo sapiens
  siRNA target sequence for DRD3 (NM_000796.2,1083-1101).
ggaccaggcttccaagaaa

SEQ ID NO: 237907 - DNA, 19 bp, Homo sapiens
  siRNA target sequence for DRD3 (NM_000796.2,1160-1178).
gcccaagctcagcttagaa

SEQ ID NO: 237908 - DNA, 19 bp, Homo sapiens
  siRNA target sequence for DRD3 (NM_000796.2,1162-1180).
ccaagctcagcttagaagt

SEQ ID NO: 237909 - DNA, 19 bp, Homo sapiens
  siRNA target sequence for DRD3 (NM_000796.2,1163-1181).
caagctcagcttagaagtt

SEQ ID NO: 237910 - DNA, 19 bp, Homo sapiens
  siRNA target sequence for DRD3 (NM_000796.2,1169-1187).
cagcttagaagttcgaaaa

SEQ ID NO: 237911 - DNA, 19 bp, Homo sapiens
  siRNA target sequence for DRD3 (NM_000796.2,1171-1189).
gcttagaagttcgaaaact

SEQ ID NO: 237912 - DNA, 19 bp, Homo sapiens
  siRNA target sequence for DRD3 (NM_000796.2,1198-1216).
gcagattatcgacatcttt

SEQ ID NO: 237913 - DNA, 19 bp, Homo sapiens
  siRNA target sequence for DRD3 (NM_000796.2,1365-1383).
gtgtccccagagctttaca

SEQ ID NO: 237914 - DNA, 19 bp, Homo sapiens
  siRNA target sequence for DRD5 (NM_000798.3,89-107).
ggcagttcgctctatacca

SEQ ID NO: 237915 - DNA, 19 bp, Homo sapiens
  siRNA target sequence for DRD5 (NM_000798.3,185-203).
gcctgctgaccctactcat

SEQ ID NO: 237916 - DNA, 19 bp, Homo sapiens
  siRNA target sequence for DRD5 (NM_000798.3,302-320).
ccgtgtcagaccttttcgt

SEQ ID NO: 237917 - DNA, 19 bp, Homo sapiens
  siRNA target sequence for DRD5 (NM_000798.3,490-508).
cgctacaagcgcaagatga

SEQ ID NO: 237918 - DNA, 19 bp, Homo sapiens
  siRNA target sequence for DRD5 (NM_000798.3,718-736).
cgaacctacgccatctctt

SEQ ID NO: 237919 - DNA, 19 bp, Homo sapiens
  siRNA target sequence for OR1A1 (NM_014565.1,20-38).
cctctacactggaattcat

SEQ ID NO: 237920 - DNA, 19 bp, Homo sapiens
  siRNA target sequence for OR1A1 (NM_014565.1,263-281).
gcagcaaatccatctcttt

SEQ ID NO: 237921 - DNA, 19 bp, Homo sapiens
  siRNA target sequence for OR1A1 (NM_014565.1,312-330).
gatagccttgggtaacaca

SEQ ID NO: 237922 - DNA, 19 bp, Homo sapiens
  siRNA target sequence for OR1A1 (NM_014565.1,322-340).
ggtaacacagacagctata

SEQ ID NO: 237923 - DNA, 19 bp, Homo sapiens
  siRNA target sequence for OR1A1 (NM_014565.1,323-341).
gtaacacagacagctatat

SEQ ID NO: 237924 - DNA, 19 bp, Homo sapiens
  siRNA target sequence for OR1A1 (NM_014565.1,639-657).
cattgtctcctatattcga

SEQ ID NO: 237925 - DNA, 19 bp, Homo sapiens
  siRNA target sequence for OR1A1 (NM_014565.1,732-750).
cacggttgtctctttgtat

SEQ ID NO: 237926 - DNA, 19 bp, Homo sapiens
  siRNA target sequence for OR1A1 (NM_014565.1,734-752).
cggttgtctctttgtatta

SEQ ID NO: 237927 - DNA, 19 bp, Homo sapiens
  siRNA target sequence for OR1A1 (NM_014565.1,777-795).
ccgccctttgaccaattat

SEQ ID NO: 237928 - DNA, 19 bp, Homo sapiens
  siRNA target sequence for OR1A1 (NM_014565.1,778-796).
cgccctttgaccaattata

SEQ ID NO: 237929 - DNA, 19 bp, Homo sapiens
  siRNA target sequence for OR1A1 (NM_014565.1,805-823).
gacgcagtgatcactgtaa

SEQ ID NO: 237930 - DNA, 19 bp, Homo sapiens
  siRNA target sequence for OR1A1 (NM_014565.1,830-848).
cggcagtgaccccaatgtt

SEQ ID NO: 237931 - DNA, 19 bp, Homo sapiens
  siRNA target sequence for OR1A1 (NM_014565.1,831-849).
ggcagtgaccccaatgtta

SEQ ID NO: 237932 - DNA, 19 bp, Homo sapiens
  siRNA target sequence for OR1A1 (NM_014565.1,832-850).
gcagtgaccccaatgttaa

SEQ ID NO: 237933 - DNA, 19 bp, Homo sapiens
  siRNA target sequence for OR1A1 (NM_014565.1,837-855).
gaccccaatgttaaatcct

SEQ ID NO: 237934 - DNA, 19 bp, Homo sapiens
  siRNA target sequence for OR1A1 (NM_014565.1,889-907).
gctgccctgcggaaactct

SEQ ID NO: 237935 - DNA, 19 bp, Homo sapiens
  siRNA target sequence for OR1A2 (NM_012352.1,20-38).
cctttaacctggattttat

SEQ ID NO: 237936 - DNA, 19 bp, Homo sapiens
  siRNA target sequence for OR1A2 (NM_012352.1,53-71).
ctagtcagcaagaacagaa

SEQ ID NO: 237937 - DNA, 19 bp, Homo sapiens
  siRNA target sequence for OR1A2 (NM_012352.1,604-622).
ggggtcggcgttttctctt

SEQ ID NO: 237938 - DNA, 19 bp, Homo sapiens
  siRNA target sequence for OR1A2 (NM_012352.1,605-623).
gggtcggcgttttctcttt

SEQ ID NO: 237939 - DNA, 19 bp, Homo sapiens
  siRNA target sequence for OR1A2 (NM_012352.1,682-700).
ccatctaccaagagtctat

SEQ ID NO: 237940 - DNA, 19 bp, Homo sapiens
  siRNA target sequence for OR1A2 (NM_012352.1,686-704).
ctaccaagagtctattcaa

SEQ ID NO: 237941 - DNA, 19 bp, Homo sapiens
  siRNA target sequence for OR1A2 (NM_012352.1,758-776).
caacgatgggcatgtattt

SEQ ID NO: 237942 - DNA, 19 bp, Homo sapiens
  siRNA target sequence for OR1A2 (NM_012352.1,778-796).
cgccctctgaccagttaca

SEQ ID NO: 237943 - DNA, 19 bp, Homo sapiens
  siRNA target sequence for OR1A2 (NM_012352.1,801-819).
caaagatgcagtgataact

SEQ ID NO: 237944 - DNA, 19 bp, Homo sapiens
  siRNA target sequence for OR1A2 (NM_012352.1,837-855).
gaccccagcattaaatcct

SEQ ID NO: 237945 - DNA, 19 bp, Homo sapiens
  siRNA target sequence for OR1A2 (NM_012352.1,844-862).
gcattaaatcctttcatct

SEQ ID NO: 237946 - DNA, 19 bp, Homo sapiens
  siRNA target sequence for OR1A2 (NM_012352.1,889-907).
gcagccctacagaaactct

SEQ ID NO: 237947 - DNA, 19 bp, Homo sapiens
  siRNA target sequence for OR1A2 (NM_012352.1,890-908).
cagccctacagaaactctt

SEQ ID NO: 237948 - DNA, 19 bp, Homo sapiens
  siRNA target sequence for OR1D2 (NM_002548.1,410-428).
gccctaagctctgtatctt

SEQ ID NO: 237949 - DNA, 19 bp, Homo sapiens
  siRNA target sequence for OR1D2 (NM_002548.1,411-429).
ccctaagctctgtatctta

SEQ ID NO: 237950 - DNA, 19 bp, Homo sapiens
  siRNA target sequence for OR1D2 (NM_002548.1,506-524).
gtgggtcacgaaaaatcca

SEQ ID NO: 237951 - DNA, 19 bp, Homo sapiens
  siRNA target sequence for OR1D2 (NM_002548.1,512-530).
cacgaaaaatccactacat

SEQ ID NO: 237952 - DNA, 19 bp, Homo sapiens
  siRNA target sequence for OR1D2 (NM_002548.1,514-532).
cgaaaaatccactacatct

SEQ ID NO: 237953 - DNA, 19 bp, Homo sapiens
  siRNA target sequence for OR1D2 (NM_002548.1,558-576).
gatggcatgttccaacatt

SEQ ID NO: 237954 - DNA, 19 bp, Homo sapiens
  siRNA target sequence for OR1D2 (NM_002548.1,629-647).
cctttggattcgtgatcat

SEQ ID NO: 237955 - DNA, 19 bp, Homo sapiens
  siRNA target sequence for OR1D2 (NM_002548.1,757-775).
gggacactttgtatggtat

SEQ ID NO: 237956 - DNA, 19 bp, Homo sapiens
  siRNA target sequence for OR1D2 (NM_002548.1,758-776).
ggacactttgtatggtata

SEQ ID NO: 237957 - DNA, 19 bp, Homo sapiens
  siRNA target sequence for OR1D2 (NM_002548.1,761-779).
cactttgtatggtatacct

SEQ ID NO: 237958 - DNA, 19 bp, Homo sapiens
  siRNA target sequence for OR1D2 (NM_002548.1,763-781).
ctttgtatggtatacctaa

SEQ ID NO: 237959 - DNA, 19 bp, Homo sapiens
  siRNA target sequence for OR1D2 (NM_002548.1,905-923).
gactcctagataaacactt

SEQ ID NO: 237960 - DNA, 19 bp, Homo sapiens
  siRNA target sequence for OR1D2 (NM_002548.1,907-925).
ctcctagataaacacttta

SEQ ID NO: 237961 - DNA, 19 bp, Homo sapiens
  siRNA target sequence for OR1E1 (NM_003553.1,236-254).
ccaagttgttacagaacat

SEQ ID NO: 237962 - DNA, 19 bp, Homo sapiens
  siRNA target sequence for OR1E1 (NM_003553.1,899-917).
ccctgagcagagtcattca

SEQ ID NO: 237963 - DNA, 19 bp, Homo sapiens
  siRNA target sequence for OR1E1 (NM_003553.1,900-918).
cctgagcagagtcattcat

SEQ ID NO: 237964 - DNA, 19 bp, Homo sapiens
  siRNA target sequence for OR1E1 (NM_003553.1,908-926).
gagtcattcatcagaagaa

SEQ ID NO: 237965 - DNA, 19 bp, Homo sapiens
  siRNA target sequence for OR1G1 (NM_003555.1,86-104).
ggtccttcctgttcatgta

SEQ ID NO: 237966 - DNA, 19 bp, Homo sapiens
  siRNA target sequence for OR1G1 (NM_003555.1,123-141).
caacctcctcatcattcta

SEQ ID NO: 237967 - DNA, 19 bp, Homo sapiens
  siRNA target sequence for OR1G1 (NM_003555.1,279-297).
ctactcagggtgtctacta

SEQ ID NO: 237968 - DNA, 19 bp, Homo sapiens
  siRNA target sequence for OR1G1 (NM_003555.1,284-302).
cagggtgtctactacagtt

SEQ ID NO: 237969 - DNA, 19 bp, Homo sapiens
  siRNA target sequence for OR1G1 (NM_003555.1,288-306).
gtgtctactacagttgtat

SEQ ID NO: 237970 - DNA, 19 bp, Homo sapiens
  siRNA target sequence for OR1G1 (NM_003555.1,437-455).
ctgcatcctggatcatgaa

SEQ ID NO: 237971 - DNA, 19 bp, Homo sapiens
  siRNA target sequence for OR1G1 (NM_003555.1,609-627).
gggtctcacaggactcatt

SEQ ID NO: 237972 - DNA, 19 bp, Homo sapiens
  siRNA target sequence for OR1G1 (NM_003555.1,631-649).
gtgctttgcctgattatct

SEQ ID NO: 237973 - DNA, 19 bp, Homo sapiens
  siRNA target sequence for OR1G1 (NM_003555.1,633-651).
gctttgcctgattatctct

SEQ ID NO: 237974 - DNA, 19 bp, Homo sapiens
  siRNA target sequence for OR1G1 (NM_003555.1,896-914).
cttccctgagaaagttaat

SEQ ID NO: 237975 - DNA, 19 bp, Homo sapiens
  siRNA target sequence for OR2C1 (NM_012368.1,23-41).
ccttgcagggctttgttct

SEQ ID NO: 237976 - DNA, 19 bp, Homo sapiens
  siRNA target sequence for OR2C1 (NM_012368.1,200-218).
cctccttggaccttgcttt

SEQ ID NO: 237977 - DNA, 19 bp, Homo sapiens
  siRNA target sequence for OR2C1 (NM_012368.1,210-228).
ccttgctttcgctactagt

SEQ ID NO: 237978 - DNA, 19 bp, Homo sapiens
  siRNA target sequence for OR2C1 (NM_012368.1,211-229).
cttgctttcgctactagtt

SEQ ID NO: 237979 - DNA, 19 bp, Homo sapiens
  siRNA target sequence for OR2C1 (NM_012368.1,237-255).
ccaaatgctgatcaattta

SEQ ID NO: 237980 - DNA, 19 bp, Homo sapiens
  siRNA target sequence for OR2C1 (NM_012368.1,238-256).
caaatgctgatcaatttat

SEQ ID NO: 237981 - DNA, 19 bp, Homo sapiens
  siRNA target sequence for OR2C1 (NM_012368.1,290-308).
gcataacccagctctatgt

SEQ ID NO: 237982 - DNA, 19 bp, Homo sapiens
  siRNA target sequence for OR2C1 (NM_012368.1,620-638).
ctgcagtcccactaagcat

SEQ ID NO: 237983 - DNA, 19 bp, Homo sapiens
  siRNA target sequence for OR2C1 (NM_012368.1,699-717).
gaggcgaaaggcgttcaat

SEQ ID NO: 237984 - DNA, 19 bp, Homo sapiens
  siRNA target sequence for OR2C1 (NM_012368.1,703-721).
cgaaaggcgttcaatacgt

SEQ ID NO: 237985 - DNA, 19 bp, Homo sapiens
  siRNA target sequence for OR3A1 (NM_002550.1,10-28).
gaatctggggccaatggaa

SEQ ID NO: 237986 - DNA, 19 bp, Homo sapiens
  siRNA target sequence for OR3A1 (NM_002550.1,233-251).
gcgtcactgttccatcaat

SEQ ID NO: 237987 - DNA, 19 bp, Homo sapiens
  siRNA target sequence for OR3A1 (NM_002550.1,635-653).
cccccatggctctcattgt

SEQ ID NO: 237988 - DNA, 19 bp, Homo sapiens
  siRNA target sequence for OR3A1 (NM_002550.1,793-811).
ctgggttcaaccaagcttt

SEQ ID NO: 237989 - DNA, 19 bp, Homo sapiens
  siRNA target sequence for OR3A1 (NM_002550.1,797-815).
gttcaaccaagctttcaga

SEQ ID NO: 237990 - DNA, 19 bp, Homo sapiens
  siRNA target sequence for OR3A1 (NM_002550.1,819-837).
ggataaagctgttggaatt

SEQ ID NO: 237991 - DNA, 19 bp, Homo sapiens
  siRNA target sequence for OR51B4 (NM_033179.1,64-82).
cactaccggatctctatgt

SEQ ID NO: 237992 - DNA, 19 bp, Homo sapiens
  siRNA target sequence for OR51B4 (NM_033179.1,200-218).
cggaccttgggatgacatt

SEQ ID NO: 237993 - DNA, 19 bp, Homo sapiens
  siRNA target sequence for OR51B4 (NM_033179.1,202-220).
gaccttgggatgacattca

SEQ ID NO: 237994 - DNA, 19 bp, Homo sapiens
  siRNA target sequence for OR51B4 (NM_033179.1,205-223).
cttgggatgacattcacta

SEQ ID NO: 237995 - DNA, 19 bp, Homo sapiens
  siRNA target sequence for OR51B4 (NM_033179.1,281-299).
cctgtttcacccaatcctt

SEQ ID NO: 237996 - DNA, 19 bp, Homo sapiens
  siRNA target sequence for OR51B4 (NM_033179.1,337-355).
cttgttttggcctatgact

SEQ ID NO: 237997 - DNA, 19 bp, Homo sapiens
  siRNA target sequence for OR51B4 (NM_033179.1,478-496).
ctctactgctacccatatt

SEQ ID NO: 237998 - DNA, 19 bp, Homo sapiens
  siRNA target sequence for OR51B4 (NM_033179.1,480-498).
ctactgctacccatattgt

SEQ ID NO: 237999 - DNA, 19 bp, Homo sapiens
  siRNA target sequence for OR51B4 (NM_033179.1,508-526).
gccctcttgcacacatttt

SEQ ID NO: 238000 - DNA, 19 bp, Homo sapiens
  siRNA target sequence for OR51B4 (NM_033179.1,521-539).
cattttgcctccatcaaga

SEQ ID NO: 238001 - DNA, 19 bp, Homo sapiens
  siRNA target sequence for OR51B4 (NM_033179.1,528-546).
cctccatcaagatgtcata

SEQ ID NO: 238002 - DNA, 19 bp, Homo sapiens
  siRNA target sequence for OR51B4 (NM_033179.1,531-549).
ccatcaagatgtcataaaa

SEQ ID NO: 238003 - DNA, 19 bp, Homo sapiens
  siRNA target sequence for OR51B4 (NM_033179.1,557-575).
gtgctgatatcacgtttaa

SEQ ID NO: 238004 - DNA, 19 bp, Homo sapiens
  siRNA target sequence for OR51B4 (NM_033179.1,560-578).
ctgatatcacgtttaatca

SEQ ID NO: 238005 - DNA, 19 bp, Homo sapiens
  siRNA target sequence for OR51B4 (NM_033179.1,570-588).
gtttaatcacatatatcca

SEQ ID NO: 238006 - DNA, 19 bp, Homo sapiens
  siRNA target sequence for OR51B4 (NM_033179.1,619-637).
gatgctctaatcatcatct

SEQ ID NO: 238007 - DNA, 19 bp, Homo sapiens
  siRNA target sequence for OR51B4 (NM_033179.1,728-746).
gctgtgtcctagtatttca

SEQ ID NO: 238008 - DNA, 19 bp, Homo sapiens
  siRNA target sequence for OR51B4 (NM_033179.1,731-749).
gtgtcctagtatttcacat

SEQ ID NO: 238009 - DNA, 19 bp, Homo sapiens
  siRNA target sequence for OR51B4 (NM_033179.1,841-859).
cctccattcgtgaatccta

SEQ ID NO: 238010 - DNA, 19 bp, Homo sapiens
  siRNA target sequence for OR51B4 (NM_033179.1,842-860).
ctccattcgtgaatcctat

SEQ ID NO: 238011 - DNA, 19 bp, Homo sapiens
  siRNA target sequence for OR51E2 (NM_030774.2,270-288).
cctttgtgcttattggtat

SEQ ID NO: 238012 - DNA, 19 bp, Homo sapiens
  siRNA target sequence for OR51E2 (NM_030774.2,340-358).
gtatgtagtggcaatgttt

SEQ ID NO: 238013 - DNA, 19 bp, Homo sapiens
  siRNA target sequence for OR51E2 (NM_030774.2,344-362).
gtagtggcaatgtttggaa

SEQ ID NO: 238014 - DNA, 19 bp, Homo sapiens
  siRNA target sequence for OR51E2 (NM_030774.2,462-480).
catccaccatgcctaagat

SEQ ID NO: 238015 - DNA, 19 bp, Homo sapiens
  siRNA target sequence for OR51E2 (NM_030774.2,496-514).
gtttgattcccgagagatt

SEQ ID NO: 238016 - DNA, 19 bp, Homo sapiens
  siRNA target sequence for OR51E2 (NM_030774.2,554-572).
gccctctcagccattgaat

SEQ ID NO: 238017 - DNA, 19 bp, Homo sapiens
  siRNA target sequence for OR51E2 (NM_030774.2,635-653).
gctgcagtgctcaacaata

SEQ ID NO: 238018 - DNA, 19 bp, Homo sapiens
  siRNA target sequence for OR51E2 (NM_030774.2,686-704).
gtccgcggatccctctttt

SEQ ID NO: 238019 - DNA, 19 bp, Homo sapiens
  siRNA target sequence for OR51E2 (NM_030774.2,755-773).
gtcctctcgcactcctatt

SEQ ID NO: 238020 - DNA, 19 bp, Homo sapiens
  siRNA target sequence for OR51E2 (NM_030774.2,817-835).
gcccaatgtggtatatggt

SEQ ID NO: 238021 - DNA, 19 bp, Homo sapiens
  siRNA target sequence for OR51E2 (NM_030774.2,860-878).
ggcgtggacgtaatgttca

SEQ ID NO: 238022 - DNA, 19 bp, Homo sapiens
  siRNA target sequence for OR51E2 (NM_030774.2,861-879).
gcgtggacgtaatgttcat

SEQ ID NO: 238023 - DNA, 19 bp, Homo sapiens
  siRNA target sequence for OR51E2 (NM_030774.2,863-881).
gtggacgtaatgttcatct

SEQ ID NO: 238024 - DNA, 19 bp, Homo sapiens
  siRNA target sequence for OR51E2 (NM_030774.2,1047-1065).
ccattgtgcgtgttgtcat

SEQ ID NO: 238025 - DNA, 19 bp, Homo sapiens
  siRNA target sequence for OR51E2 (NM_030774.2,1140-1158).
cacgggtgctggctatgtt

SEQ ID NO: 238026 - DNA, 19 bp, Homo sapiens
  siRNA target sequence for OR51E2 (NM_030774.2,1142-1160).
cgggtgctggctatgttca

SEQ ID NO: 238027 - DNA, 19 bp, Homo sapiens
  siRNA target sequence for OR51E2 (NM_030774.2,1148-1166).
ctggctatgttcaagatca

SEQ ID NO: 238028 - DNA, 19 bp, Homo sapiens
  siRNA target sequence for OR7A5 (NM_017506.1,428-446).
gctgacatttgtgttactt

SEQ ID NO: 238029 - DNA, 19 bp, Homo sapiens
  siRNA target sequence for OR7A5 (NM_017506.1,809-827).
cacatggtgatatatttta

SEQ ID NO: 238030 - DNA, 19 bp, Homo sapiens
  siRNA target sequence for OR7A5 (NM_017506.1,1149-1167).
caatgaaagggcaattttt

SEQ ID NO: 238031 - DNA, 19 bp, Homo sapiens
  siRNA target sequence for OR7C1 (NM_198944.1,16-34).
caaacacatgcccaagaat

SEQ ID NO: 238032 - DNA, 19 bp, Homo sapiens
  siRNA target sequence for OR7C1 (NM_198944.1,53-71).
cagcaacgtcagagattca

SEQ ID NO: 238033 - DNA, 19 bp, Homo sapiens
  siRNA target sequence for OR7C1 (NM_198944.1,55-73).
gcaacgtcagagattcagt

SEQ ID NO: 238034 - DNA, 19 bp, Homo sapiens
  siRNA target sequence for OR7C1 (NM_198944.1,56-74).
caacgtcagagattcagtt

SEQ ID NO: 238035 - DNA, 19 bp, Homo sapiens
  siRNA target sequence for OR7C1 (NM_198944.1,59-77).
cgtcagagattcagttcat

SEQ ID NO: 238036 - DNA, 19 bp, Homo sapiens
  siRNA target sequence for OR7C1 (NM_198944.1,62-80).
cagagattcagttcattct

SEQ ID NO: 238037 - DNA, 19 bp, Homo sapiens
  siRNA target sequence for OR7C1 (NM_198944.1,64-82).
gagattcagttcattctct

SEQ ID NO: 238038 - DNA, 19 bp, Homo sapiens
  siRNA target sequence for OR7C1 (NM_198944.1,287-305).
gctgtctcagtcagatttt

SEQ ID NO: 238039 - DNA, 19 bp, Homo sapiens
  siRNA target sequence for OR7C1 (NM_198944.1,500-518).
ccttctgcaccgaaatgga

SEQ ID NO: 238040 - DNA, 19 bp, Homo sapiens
  siRNA target sequence for OR7C1 (NM_198944.1,501-519).
cttctgcaccgaaatggaa

SEQ ID NO: 238041 - DNA, 19 bp, Homo sapiens
  siRNA target sequence for OR7C1 (NM_198944.1,504-522).
ctgcaccgaaatggaaatt

SEQ ID NO: 238042 - DNA, 19 bp, Homo sapiens
  siRNA target sequence for OR7C1 (NM_198944.1,589-607).
gtggtgatatactttgcaa

SEQ ID NO: 238043 - DNA, 19 bp, Homo sapiens
  siRNA target sequence for OR7C1 (NM_198944.1,610-628).
ggcgtcctgggtgtgattt

SEQ ID NO: 238044 - DNA, 19 bp, Homo sapiens
  siRNA target sequence for OR7C1 (NM_198944.1,917-935).
gtagggcaacattttttaa

SEQ ID NO: 238045 - DNA, 19 bp, Homo sapiens
  siRNA target sequence for OR8B8 (NM_012378.1,18-36).
ctccttcgtgacacagttt

SEQ ID NO: 238046 - DNA, 19 bp, Homo sapiens
  siRNA target sequence for OR8B8 (NM_012378.1,189-207).
ctataacttgtccttcata

SEQ ID NO: 238047 - DNA, 19 bp, Homo sapiens
  siRNA target sequence for OR8B8 (NM_012378.1,216-234).
ctattccagtgttatcact

SEQ ID NO: 238048 - DNA, 19 bp, Homo sapiens
  siRNA target sequence for OR8B8 (NM_012378.1,506-524).
gtgccaataaccttgtcaa

SEQ ID NO: 238049 - DNA, 19 bp, Homo sapiens
  siRNA target sequence for TAS2R1 (NM_019599.1,4-22).
ctagagtctcacctcatta

SEQ ID NO: 238050 - DNA, 19 bp, Homo sapiens
  siRNA target sequence for TAS2R1 (NM_019599.1,9-27).
gtctcacctcattatctat

SEQ ID NO: 238051 - DNA, 19 bp, Homo sapiens
  siRNA target sequence for TAS2R1 (NM_019599.1,31-49).
cttcttgcagtgatacaat

SEQ ID NO: 238052 - DNA, 19 bp, Homo sapiens
  siRNA target sequence for TAS2R1 (NM_019599.1,149-167).
gtctggcagtttctagaat

SEQ ID NO: 238053 - DNA, 19 bp, Homo sapiens
  siRNA target sequence for TAS2R1 (NM_019599.1,186-204).
cttctacgttaatgtgatt

SEQ ID NO: 238054 - DNA, 19 bp, Homo sapiens
  siRNA target sequence for TAS2R1 (NM_019599.1,189-207).
ctacgttaatgtgattgtt

SEQ ID NO: 238055 - DNA, 19 bp, Homo sapiens
  siRNA target sequence for TAS2R1 (NM_019599.1,228-246).
catgtgttctgcgaattgt

SEQ ID NO: 238056 - DNA, 19 bp, Homo sapiens
  siRNA target sequence for TAS2R1 (NM_019599.1,236-254).
ctgcgaattgtgcaattct

SEQ ID NO: 238057 - DNA, 19 bp, Homo sapiens
  siRNA target sequence for TAS2R1 (NM_019599.1,238-256).
gcgaattgtgcaattctct

SEQ ID NO: 238058 - DNA, 19 bp, Homo sapiens
  siRNA target sequence for TAS2R1 (NM_019599.1,239-257).
cgaattgtgcaattctctt

SEQ ID NO: 238059 - DNA, 19 bp, Homo sapiens
  siRNA target sequence for TAS2R1 (NM_019599.1,240-258).
gaattgtgcaattctctta

SEQ ID NO: 238060 - DNA, 19 bp, Homo sapiens
  siRNA target sequence for TAS2R1 (NM_019599.1,247-265).
gcaattctcttatttataa

SEQ ID NO: 238061 - DNA, 19 bp, Homo sapiens
  siRNA target sequence for TAS2R1 (NM_019599.1,294-312).
gctcggcgttttctattgt

SEQ ID NO: 238062 - DNA, 19 bp, Homo sapiens
  siRNA target sequence for TAS2R1 (NM_019599.1,331-349).
cgtcacccactcttcatct

SEQ ID NO: 238063 - DNA, 19 bp, Homo sapiens
  siRNA target sequence for TAS2R1 (NM_019599.1,393-411).
ggggtctctgctatatgta

SEQ ID NO: 238064 - DNA, 19 bp, Homo sapiens
  siRNA target sequence for TAS2R1 (NM_019599.1,394-412).
gggtctctgctatatgtat

SEQ ID NO: 238065 - DNA, 19 bp, Homo sapiens
  siRNA target sequence for TAS2R1 (NM_019599.1,400-418).
ctgctatatgtatctatga

SEQ ID NO: 238066 - DNA, 19 bp, Homo sapiens
  siRNA target sequence for TAS2R1 (NM_019599.1,409-427).
gtatctatgatttgtgttt

SEQ ID NO: 238067 - DNA, 19 bp, Homo sapiens
  siRNA target sequence for TAS2R1 (NM_019599.1,422-440).
gtgttttccatagcaaata

SEQ ID NO: 238068 - DNA, 19 bp, Homo sapiens
  siRNA target sequence for TAS2R1 (NM_019599.1,434-452).
gcaaatatgcagggtttat

SEQ ID NO: 238069 - DNA, 19 bp, Homo sapiens
  siRNA target sequence for TAS2R1 (NM_019599.1,508-526).
gatacactggctatacaga

SEQ ID NO: 238070 - DNA, 19 bp, Homo sapiens
  siRNA target sequence for TAS2R1 (NM_019599.1,514-532).
ctggctatacagattttct

SEQ ID NO: 238071 - DNA, 19 bp, Homo sapiens
  siRNA target sequence for TAS2R1 (NM_019599.1,609-627).
gcacacccggcaaatgaga

SEQ ID NO: 238072 - DNA, 19 bp, Homo sapiens
  siRNA target sequence for TAS2R1 (NM_019599.1,786-804).
catccttgtgattggtata

SEQ ID NO: 238073 - DNA, 19 bp, Homo sapiens
  siRNA target sequence for TAS2R1 (NM_019599.1,814-832).
ggacactctctcatcttaa

SEQ ID NO: 238074 - DNA, 19 bp, Homo sapiens
  siRNA target sequence for TAS2R1 (NM_019599.1,815-833).
gacactctctcatcttaat

SEQ ID NO: 238075 - DNA, 19 bp, Homo sapiens
  siRNA target sequence for TAS2R10 (NM_023921.1,102-120).
ctgtgccaagaataagtta

SEQ ID NO: 238076 - DNA, 19 bp, Homo sapiens
  siRNA target sequence for TAS2R10 (NM_023921.1,106-124).
gccaagaataagttatcta

SEQ ID NO: 238077 - DNA, 19 bp, Homo sapiens
  siRNA target sequence for TAS2R10 (NM_023921.1,122-140).
ctacgattggctttattct

SEQ ID NO: 238078 - DNA, 19 bp, Homo sapiens
  siRNA target sequence for TAS2R10 (NM_023921.1,139-157).
ctcaccggcttagctattt

SEQ ID NO: 238079 - DNA, 19 bp, Homo sapiens
  siRNA target sequence for TAS2R10 (NM_023921.1,141-159).
caccggcttagctatttca

SEQ ID NO: 238080 - DNA, 19 bp, Homo sapiens
  siRNA target sequence for TAS2R10 (NM_023921.1,144-162).
cggcttagctatttcaaga

SEQ ID NO: 238081 - DNA, 19 bp, Homo sapiens
  siRNA target sequence for TAS2R10 (NM_023921.1,145-163).
ggcttagctatttcaagaa

SEQ ID NO: 238082 - DNA, 19 bp, Homo sapiens
  siRNA target sequence for TAS2R10 (NM_023921.1,146-164).
gcttagctatttcaagaat

SEQ ID NO: 238083 - DNA, 19 bp, Homo sapiens
  siRNA target sequence for TAS2R10 (NM_023921.1,171-189).
gatatggataataattaca

SEQ ID NO: 238084 - DNA, 19 bp, Homo sapiens
  siRNA target sequence for TAS2R10 (NM_023921.1,193-211).
ggatttatacagatattct

SEQ ID NO: 238085 - DNA, 19 bp, Homo sapiens
  siRNA target sequence for TAS2R10 (NM_023921.1,202-220).
cagatattctctccaaata

SEQ ID NO: 238086 - DNA, 19 bp, Homo sapiens
  siRNA target sequence for TAS2R10 (NM_023921.1,227-245).
cctccggtaacctaattga

SEQ ID NO: 238087 - DNA, 19 bp, Homo sapiens
  siRNA target sequence for TAS2R10 (NM_023921.1,228-246).
ctccggtaacctaattgaa

SEQ ID NO: 238088 - DNA, 19 bp, Homo sapiens
  siRNA target sequence for TAS2R10 (NM_023921.1,230-248).
ccggtaacctaattgaata

SEQ ID NO: 238089 - DNA, 19 bp, Homo sapiens
  siRNA target sequence for TAS2R10 (NM_023921.1,231-249).
cggtaacctaattgaatat

SEQ ID NO: 238090 - DNA, 19 bp, Homo sapiens
  siRNA target sequence for TAS2R10 (NM_023921.1,232-250).
ggtaacctaattgaatata

SEQ ID NO: 238091 - DNA, 19 bp, Homo sapiens
  siRNA target sequence for TAS2R10 (NM_023921.1,264-282).
ggtaattggtaatcaatca

SEQ ID NO: 238092 - DNA, 19 bp, Homo sapiens
  siRNA target sequence for TAS2R10 (NM_023921.1,271-289).
ggtaatcaatcaagtatgt

SEQ ID NO: 238093 - DNA, 19 bp, Homo sapiens
  siRNA target sequence for TAS2R10 (NM_023921.1,381-399).
ggttcttcccttcatgata

SEQ ID NO: 238094 - DNA, 19 bp, Homo sapiens
  siRNA target sequence for TAS2R10 (NM_023921.1,388-406).
cccttcatgatagtattct

SEQ ID NO: 238095 - DNA, 19 bp, Homo sapiens
  siRNA target sequence for TAS2R10 (NM_023921.1,393-411).
catgatagtattcttactt

SEQ ID NO: 238096 - DNA, 19 bp, Homo sapiens
  siRNA target sequence for TAS2R10 (NM_023921.1,396-414).
gatagtattcttacttatt

SEQ ID NO: 238097 - DNA, 19 bp, Homo sapiens
  siRNA target sequence for TAS2R10 (NM_023921.1,405-423).
cttacttatttcatcgtta

SEQ ID NO: 238098 - DNA, 19 bp, Homo sapiens
  siRNA target sequence for TAS2R10 (NM_023921.1,409-427).
cttatttcatcgttactta

SEQ ID NO: 238099 - DNA, 19 bp, Homo sapiens
  siRNA target sequence for TAS2R10 (NM_023921.1,419-437).
cgttacttaattttgcata

SEQ ID NO: 238100 - DNA, 19 bp, Homo sapiens
  siRNA target sequence for TAS2R10 (NM_023921.1,434-452).
catacattgcgaagattct

SEQ ID NO: 238101 - DNA, 19 bp, Homo sapiens
  siRNA target sequence for TAS2R10 (NM_023921.1,562-580).
ctatccctaattacatgta

SEQ ID NO: 238102 - DNA, 19 bp, Homo sapiens
  siRNA target sequence for TAS2R10 (NM_023921.1,612-630).
caggcagatgcaatcgaat

SEQ ID NO: 238103 - DNA, 19 bp, Homo sapiens
  siRNA target sequence for TAS2R10 (NM_023921.1,616-634).
cagatgcaatcgaatgtga

SEQ ID NO: 238104 - DNA, 19 bp, Homo sapiens
  siRNA target sequence for TAS2R10 (NM_023921.1,812-830).
ggggtcactcatttatctt

SEQ ID NO: 238105 - DNA, 19 bp, Homo sapiens
  siRNA target sequence for TAS2R10 (NM_023921.1,869-887).
gggtactgcagcaattgaa

SEQ ID NO: 238106 - DNA, 19 bp, Homo sapiens
  siRNA target sequence for TAS2R10 (NM_023921.1,871-889).
gtactgcagcaattgaagt

SEQ ID NO: 238107 - DNA, 19 bp, Homo sapiens
  siRNA target sequence for TAS2R13 (NM_023920.1,8-26).
gtgccctgccgagtatctt

SEQ ID NO: 238108 - DNA, 19 bp, Homo sapiens
  siRNA target sequence for TAS2R13 (NM_023920.1,10-28).
gccctgccgagtatcttca

SEQ ID NO: 238109 - DNA, 19 bp, Homo sapiens
  siRNA target sequence for TAS2R13 (NM_023920.1,20-38).
gtatcttcactcttgtaat

SEQ ID NO: 238110 - DNA, 19 bp, Homo sapiens
  siRNA target sequence for TAS2R13 (NM_023920.1,24-42).
cttcactcttgtaataatt

SEQ ID NO: 238111 - DNA, 19 bp, Homo sapiens
  siRNA target sequence for TAS2R13 (NM_023920.1,34-52).
gtaataattgcagaattca

SEQ ID NO: 238112 - DNA, 19 bp, Homo sapiens
  siRNA target sequence for TAS2R13 (NM_023920.1,58-76).
gggaatttgagcaatggat

SEQ ID NO: 238113 - DNA, 19 bp, Homo sapiens
  siRNA target sequence for TAS2R13 (NM_023920.1,68-86).
gcaatggatttatagtact

SEQ ID NO: 238114 - DNA, 19 bp, Homo sapiens
  siRNA target sequence for TAS2R13 (NM_023920.1,74-92).
gatttatagtactgatcaa

SEQ ID NO: 238115 - DNA, 19 bp, Homo sapiens
  siRNA target sequence for TAS2R13 (NM_023920.1,95-113).
gcattgactgggtcagtaa

SEQ ID NO: 238116 - DNA, 19 bp, Homo sapiens
  siRNA target sequence for TAS2R13 (NM_023920.1,96-114).
cattgactgggtcagtaaa

SEQ ID NO: 238117 - DNA, 19 bp, Homo sapiens
  siRNA target sequence for TAS2R13 (NM_023920.1,120-138).
gctgtcctcagtcgataaa

SEQ ID NO: 238118 - DNA, 19 bp, Homo sapiens
  siRNA target sequence for TAS2R13 (NM_023920.1,130-148).
gtcgataaactcctcatta

SEQ ID NO: 238119 - DNA, 19 bp, Homo sapiens
  siRNA target sequence for TAS2R13 (NM_023920.1,133-151).
gataaactcctcattatct

SEQ ID NO: 238120 - DNA, 19 bp, Homo sapiens
  siRNA target sequence for TAS2R13 (NM_023920.1,170-188).
ggctgatctgggaaatatt

SEQ ID NO: 238121 - DNA, 19 bp, Homo sapiens
  siRNA target sequence for TAS2R13 (NM_023920.1,210-228).
gcattatctagccatattt

SEQ ID NO: 238122 - DNA, 19 bp, Homo sapiens
  siRNA target sequence for TAS2R13 (NM_023920.1,236-254).
gaacaggattaagaattat

SEQ ID NO: 238123 - DNA, 19 bp, Homo sapiens
  siRNA target sequence for TAS2R13 (NM_023920.1,266-284).
ggatagtttctaatcactt

SEQ ID NO: 238124 - DNA, 19 bp, Homo sapiens
  siRNA target sequence for TAS2R13 (NM_023920.1,302-320).
caatcttcagcatctttta

SEQ ID NO: 238125 - DNA, 19 bp, Homo sapiens
  siRNA target sequence for TAS2R13 (NM_023920.1,327-345).
caaaatagcgagtttctct

SEQ ID NO: 238126 - DNA, 19 bp, Homo sapiens
  siRNA target sequence for TAS2R13 (NM_023920.1,376-394).
gtaaacaaagtgattctga

SEQ ID NO: 238127 - DNA, 19 bp, Homo sapiens
  siRNA target sequence for TAS2R13 (NM_023920.1,462-480).
ctggctggaccgatatgaa

SEQ ID NO: 238128 - DNA, 19 bp, Homo sapiens
  siRNA target sequence for TAS2R13 (NM_023920.1,465-483).
gctggaccgatatgaaaga

SEQ ID NO: 238129 - DNA, 19 bp, Homo sapiens
  siRNA target sequence for TAS2R13 (NM_023920.1,466-484).
ctggaccgatatgaaagaa

SEQ ID NO: 238130 - DNA, 19 bp, Homo sapiens
  siRNA target sequence for TAS2R13 (NM_023920.1,469-487).
gaccgatatgaaagaaaca

SEQ ID NO: 238131 - DNA, 19 bp, Homo sapiens
  siRNA target sequence for TAS2R13 (NM_023920.1,529-547).
gtgtcggtcaaattcacta

SEQ ID NO: 238132 - DNA, 19 bp, Homo sapiens
  siRNA target sequence for TAS2R13 (NM_023920.1,534-552).
ggtcaaattcactatgact

SEQ ID NO: 238133 - DNA, 19 bp, Homo sapiens
  siRNA target sequence for TAS2R13 (NM_023920.1,555-573).
gttcagtctaacaccattt

SEQ ID NO: 238134 - DNA, 19 bp, Homo sapiens
  siRNA target sequence for TAS2R13 (NM_023920.1,560-578).
gtctaacaccatttactgt

SEQ ID NO: 238135 - DNA, 19 bp, Homo sapiens
  siRNA target sequence for TAS2R13 (NM_023920.1,628-646).
cagaaaatgcaactcaatt

SEQ ID NO: 238136 - DNA, 19 bp, Homo sapiens
  siRNA target sequence for TAS2R13 (NM_023920.1,669-687).
gaccaaggtccatacaaat

SEQ ID NO: 238137 - DNA, 19 bp, Homo sapiens
  siRNA target sequence for TAS2R13 (NM_023920.1,742-760).
gttctcatatcatggattt

SEQ ID NO: 238138 - DNA, 19 bp, Homo sapiens
  siRNA target sequence for TAS2R13 (NM_023920.1,847-865).
ctaggaaacgctaagttaa

SEQ ID NO: 238139 - DNA, 19 bp, Homo sapiens
  siRNA target sequence for TAS2R14 (NM_023922.1,18-36).
gagcatatttacattcgtt

SEQ ID NO: 238140 - DNA, 19 bp, Homo sapiens
  siRNA target sequence for TAS2R14 (NM_023922.1,104-122).
gggtcaagggaagaaagat

SEQ ID NO: 238141 - DNA, 19 bp, Homo sapiens
  siRNA target sequence for TAS2R14 (NM_023922.1,243-261).
gttcagaatgcttactaat

SEQ ID NO: 238142 - DNA, 19 bp, Homo sapiens
  siRNA target sequence for TAS2R14 (NM_023922.1,299-317).
ctacaggcctcggtacttt

SEQ ID NO: 238143 - DNA, 19 bp, Homo sapiens
  siRNA target sequence for TAS2R14 (NM_023922.1,302-320).
caggcctcggtacttttta

SEQ ID NO: 238144 - DNA, 19 bp, Homo sapiens
  siRNA target sequence for TAS2R14 (NM_023922.1,304-322).
ggcctcggtactttttatt

SEQ ID NO: 238145 - DNA, 19 bp, Homo sapiens
  siRNA target sequence for TAS2R14 (NM_023922.1,363-381).
cctaaagtggagggttaaa

SEQ ID NO: 238146 - DNA, 19 bp, Homo sapiens
  siRNA target sequence for TAS2R14 (NM_023922.1,364-382).
ctaaagtggagggttaaaa

SEQ ID NO: 238147 - DNA, 19 bp, Homo sapiens
  siRNA target sequence for TAS2R14 (NM_023922.1,406-424).
gtgacttcggtcttcttgt

SEQ ID NO: 238148 - DNA, 19 bp, Homo sapiens
  siRNA target sequence for TAS2R14 (NM_023922.1,408-426).
gacttcggtcttcttgttt

SEQ ID NO: 238149 - DNA, 19 bp, Homo sapiens
  siRNA target sequence for TAS2R14 (NM_023922.1,436-454).
gcactgataaacatccata

SEQ ID NO: 238150 - DNA, 19 bp, Homo sapiens
  siRNA target sequence for TAS2R14 (NM_023922.1,437-455).
cactgataaacatccatat

SEQ ID NO: 238151 - DNA, 19 bp, Homo sapiens
  siRNA target sequence for TAS2R14 (NM_023922.1,439-457).
ctgataaacatccatataa

SEQ ID NO: 238152 - DNA, 19 bp, Homo sapiens
  siRNA target sequence for TAS2R14 (NM_023922.1,518-536).
cacgattttccagtcttat

SEQ ID NO: 238153 - DNA, 19 bp, Homo sapiens
  siRNA target sequence for TAS2R14 (NM_023922.1,712-730).
ctactctatgccattttct

SEQ ID NO: 238154 - DNA, 19 bp, Homo sapiens
  siRNA target sequence for TAS2R14 (NM_023922.1,824-842).
gtcactcatgtgttctgat

SEQ ID NO: 238155 - DNA, 19 bp, Homo sapiens
  siRNA target sequence for TAS2R14 (NM_023922.1,919-937).
ccctcaggtcacaaagaat

SEQ ID NO: 238156 - DNA, 19 bp, Homo sapiens
  siRNA target sequence for TAS2R16 (NM_016945.1,46-64).
cttgagtccttgacaatta

SEQ ID NO: 238157 - DNA, 19 bp, Homo sapiens
  siRNA target sequence for TAS2R16 (NM_016945.1,69-87).
gcagagcagcctaattgtt

SEQ ID NO: 238158 - DNA, 19 bp, Homo sapiens
  siRNA target sequence for TAS2R16 (NM_016945.1,131-149).
ctgtggacatgattctcat

SEQ ID NO: 238159 - DNA, 19 bp, Homo sapiens
  siRNA target sequence for TAS2R16 (NM_016945.1,173-191).
gtctacagtgggcatcaat

SEQ ID NO: 238160 - DNA, 19 bp, Homo sapiens
  siRNA target sequence for TAS2R16 (NM_016945.1,182-200).
gggcatcaatgctgaacaa

SEQ ID NO: 238161 - DNA, 19 bp, Homo sapiens
  siRNA target sequence for TAS2R16 (NM_016945.1,183-201).
ggcatcaatgctgaacaat

SEQ ID NO: 238162 - DNA, 19 bp, Homo sapiens
  siRNA target sequence for TAS2R16 (NM_016945.1,184-202).
gcatcaatgctgaacaatt

SEQ ID NO: 238163 - DNA, 19 bp, Homo sapiens
  siRNA target sequence for TAS2R16 (NM_016945.1,185-203).
catcaatgctgaacaattt

SEQ ID NO: 238164 - DNA, 19 bp, Homo sapiens
  siRNA target sequence for TAS2R16 (NM_016945.1,290-308).
gcttgcttaccgtgttcta

SEQ ID NO: 238165 - DNA, 19 bp, Homo sapiens
  siRNA target sequence for TAS2R16 (NM_016945.1,311-329).
gcatcaaggtctcttcttt

SEQ ID NO: 238166 - DNA, 19 bp, Homo sapiens
  siRNA target sequence for TAS2R16 (NM_016945.1,371-389).
ggttgtttccctggatatt

SEQ ID NO: 238167 - DNA, 19 bp, Homo sapiens
  siRNA target sequence for TAS2R16 (NM_016945.1,372-390).
gttgtttccctggatatta

SEQ ID NO: 238168 - DNA, 19 bp, Homo sapiens
  siRNA target sequence for TAS2R16 (NM_016945.1,400-418).
ctgatgattacttgtgtaa

SEQ ID NO: 238169 - DNA, 19 bp, Homo sapiens
  siRNA target sequence for TAS2R16 (NM_016945.1,434-452).
ctattgggaattacattca

SEQ ID NO: 238170 - DNA, 19 bp, Homo sapiens
  siRNA target sequence for TAS2R16 (NM_016945.1,472-490).
gagcatctaccaagaaaca

SEQ ID NO: 238171 - DNA, 19 bp, Homo sapiens
  siRNA target sequence for TAS2R16 (NM_016945.1,481-499).
ccaagaaacagcactgtaa

SEQ ID NO: 238172 - DNA, 19 bp, Homo sapiens
  siRNA target sequence for TAS2R16 (NM_016945.1,491-509).
gcactgtaactgacaaact

SEQ ID NO: 238173 - DNA, 19 bp, Homo sapiens
  siRNA target sequence for TAS2R16 (NM_016945.1,492-510).
cactgtaactgacaaactt

SEQ ID NO: 238174 - DNA, 19 bp, Homo sapiens
  siRNA target sequence for TAS2R16 (NM_016945.1,531-549).
gttccaggctcatacagtt

SEQ ID NO: 238175 - DNA, 19 bp, Homo sapiens
  siRNA target sequence for TAS2R16 (NM_016945.1,541-559).
catacagttgcattggtta

SEQ ID NO: 238176 - DNA, 19 bp, Homo sapiens
  siRNA target sequence for TAS2R16 (NM_016945.1,680-698).
ggtcccttgccgtcttatt

SEQ ID NO: 238177 - DNA, 19 bp, Homo sapiens
  siRNA target sequence for TAS2R16 (NM_016945.1,681-699).
gtcccttgccgtcttattt

SEQ ID NO: 238178 - DNA, 19 bp, Homo sapiens
  siRNA target sequence for TAS2R16 (NM_016945.1,689-707).
ccgtcttatttattgtgtt

SEQ ID NO: 238179 - DNA, 19 bp, Homo sapiens
  siRNA target sequence for TAS2R16 (NM_016945.1,711-729).
ctcttactttctaaccata

SEQ ID NO: 238180 - DNA, 19 bp, Homo sapiens
  siRNA target sequence for TAS2R16 (NM_016945.1,834-852).
gagcagccctacgttgaaa

SEQ ID NO: 238181 - DNA, 19 bp, Homo sapiens
  siRNA target sequence for TAS2R16 (NM_016945.1,839-857).
gccctacgttgaaaaggat

SEQ ID NO: 238182 - DNA, 19 bp, Homo sapiens
  siRNA target sequence for TAS2R3 (NM_016943.1,67-85).
gtcaattgtttcattgagt

SEQ ID NO: 238183 - DNA, 19 bp, Homo sapiens
  siRNA target sequence for TAS2R3 (NM_016943.1,94-112).
ggtagcagctggttcaaga

SEQ ID NO: 238184 - DNA, 19 bp, Homo sapiens
  siRNA target sequence for TAS2R3 (NM_016943.1,172-190).
ctgctgtgtattatcttga

SEQ ID NO: 238185 - DNA, 19 bp, Homo sapiens
  siRNA target sequence for TAS2R3 (NM_016943.1,186-204).
cttgactgatagtttttta

SEQ ID NO: 238186 - DNA, 19 bp, Homo sapiens
  siRNA target sequence for TAS2R3 (NM_016943.1,213-231).
ctctcccaacacacatgat

SEQ ID NO: 238187 - DNA, 19 bp, Homo sapiens
  siRNA target sequence for TAS2R3 (NM_016943.1,233-251).
cagggataataatgcaaat

SEQ ID NO: 238188 - DNA, 19 bp, Homo sapiens
  siRNA target sequence for TAS2R3 (NM_016943.1,264-282).
ctggacatttacaaaccat

SEQ ID NO: 238189 - DNA, 19 bp, Homo sapiens
  siRNA target sequence for TAS2R3 (NM_016943.1,327-345).
gaaaatcgccagtttctct

SEQ ID NO: 238190 - DNA, 19 bp, Homo sapiens
  siRNA target sequence for TAS2R3 (NM_016943.1,363-381).
gctcaagtggagagtttct

SEQ ID NO: 238191 - DNA, 19 bp, Homo sapiens
  siRNA target sequence for TAS2R3 (NM_016943.1,376-394).
gtttctagggtgatggtat

SEQ ID NO: 238192 - DNA, 19 bp, Homo sapiens
  siRNA target sequence for TAS2R3 (NM_016943.1,380-398).
ctagggtgatggtatggat

SEQ ID NO: 238193 - DNA, 19 bp, Homo sapiens
  siRNA target sequence for TAS2R3 (NM_016943.1,434-452).
ccgcatctctgatcaatga

SEQ ID NO: 238194 - DNA, 19 bp, Homo sapiens
  siRNA target sequence for TAS2R3 (NM_016943.1,436-454).
gcatctctgatcaatgagt

SEQ ID NO: 238195 - DNA, 19 bp, Homo sapiens
  siRNA target sequence for TAS2R3 (NM_016943.1,563-581).
ggtacctgcctcccttaat

SEQ ID NO: 238196 - DNA, 19 bp, Homo sapiens
  siRNA target sequence for TAS2R3 (NM_016943.1,568-586).
ctgcctcccttaattgtgt

SEQ ID NO: 238197 - DNA, 19 bp, Homo sapiens
  siRNA target sequence for TAS2R3 (NM_016943.1,758-776).
catcatttggtaatttcct

SEQ ID NO: 238198 - DNA, 19 bp, Homo sapiens
  siRNA target sequence for TAS2R3 (NM_016943.1,805-823).
ggcgaagtaatgacaatgt

SEQ ID NO: 238199 - DNA, 19 bp, Homo sapiens
  siRNA target sequence for TAS2R3 (NM_016943.1,806-824).
gcgaagtaatgacaatgtt

SEQ ID NO: 238200 - DNA, 19 bp, Homo sapiens
  siRNA target sequence for TAS2R3 (NM_016943.1,807-825).
cgaagtaatgacaatgttt

SEQ ID NO: 238201 - DNA, 19 bp, Homo sapiens
  siRNA target sequence for TAS2R3 (NM_016943.1,808-826).
gaagtaatgacaatgtttt

SEQ ID NO: 238202 - DNA, 19 bp, Homo sapiens
  siRNA target sequence for TAS2R3 (NM_016943.1,829-847).
cctgctggccactcattta

SEQ ID NO: 238203 - DNA, 19 bp, Homo sapiens
  siRNA target sequence for TAS2R3 (NM_016943.1,902-920).
gtgagtctggtcatctgaa

SEQ ID NO: 238204 - DNA, 19 bp, Homo sapiens
  siRNA target sequence for TAS2R3 (NM_016943.1,926-944).
gatccaagggacccatttt

SEQ ID NO: 238205 - DNA, 19 bp, Homo sapiens
  siRNA target sequence for TAS2R3 (NM_016943.1,930-948).
caagggacccattttctct

SEQ ID NO: 238206 - DNA, 19 bp, Homo sapiens
  siRNA target sequence for TAS2R4 (NM_016944.1,104-122).
gggtcaaaagccatagaat

SEQ ID NO: 238207 - DNA, 19 bp, Homo sapiens
  siRNA target sequence for TAS2R4 (NM_016944.1,155-173).
gcatcaccaggtttcttat

SEQ ID NO: 238208 - DNA, 19 bp, Homo sapiens
  siRNA target sequence for TAS2R4 (NM_016944.1,299-317).
ccttgctcaatatcttgta

SEQ ID NO: 238209 - DNA, 19 bp, Homo sapiens
  siRNA target sequence for TAS2R4 (NM_016944.1,453-471).
ccaggcatcaccttttcct

SEQ ID NO: 238210 - DNA, 19 bp, Homo sapiens
  siRNA target sequence for TAS2R4 (NM_016944.1,475-493).
cttgtgactacgagaaata

SEQ ID NO: 238211 - DNA, 19 bp, Homo sapiens
  siRNA target sequence for TAS2R4 (NM_016944.1,480-498).
gactacgagaaataacaca

SEQ ID NO: 238212 - DNA, 19 bp, Homo sapiens
  siRNA target sequence for TAS2R4 (NM_016944.1,486-504).
gagaaataacacatcattt

SEQ ID NO: 238213 - DNA, 19 bp, Homo sapiens
  siRNA target sequence for TAS2R4 (NM_016944.1,601-619).
cactccttgaggagacata

SEQ ID NO: 238214 - DNA, 19 bp, Homo sapiens
  siRNA target sequence for TAS2R4 (NM_016944.1,603-621).
ctccttgaggagacatata

SEQ ID NO: 238215 - DNA, 19 bp, Homo sapiens
  siRNA target sequence for TAS2R4 (NM_016944.1,605-623).
ccttgaggagacatataca

SEQ ID NO: 238216 - DNA, 19 bp, Homo sapiens
  siRNA target sequence for TAS2R4 (NM_016944.1,671-689).
ctcatgtaggtgctatgaa

SEQ ID NO: 238217 - DNA, 19 bp, Homo sapiens
  siRNA target sequence for TAS2R4 (NM_016944.1,706-724).
ctcatcctctacattccat

SEQ ID NO: 238218 - DNA, 19 bp, Homo sapiens
  siRNA target sequence for TAS2R4 (NM_016944.1,734-752).
ctaccctggtccagtatct

SEQ ID NO: 238219 - DNA, 19 bp, Homo sapiens
  siRNA target sequence for TAS2R4 (NM_016944.1,744-762).
ccagtatctccccttttat

SEQ ID NO: 238220 - DNA, 19 bp, Homo sapiens
  siRNA target sequence for TAS2R4 (NM_016944.1,747-765).
gtatctccccttttatgca

SEQ ID NO: 238221 - DNA, 19 bp, Homo sapiens
  siRNA target sequence for TAS2R4 (NM_016944.1,777-795).
ggggaccaaatccatttgt

SEQ ID NO: 238222 - DNA, 19 bp, Homo sapiens
  siRNA target sequence for TAS2R4 (NM_016944.1,823-841).
ggacattctgttctcatta

SEQ ID NO: 238223 - DNA, 19 bp, Homo sapiens
  siRNA target sequence for TAS2R5 (NM_018980.1,46-64).
gaatttctcatcggtttaa

SEQ ID NO: 238224 - DNA, 19 bp, Homo sapiens
  siRNA target sequence for TAS2R5 (NM_018980.1,54-72).
catcggtttaattggaaat

SEQ ID NO: 238225 - DNA, 19 bp, Homo sapiens
  siRNA target sequence for TAS2R5 (NM_018980.1,128-146).
catataacctcattatcct

SEQ ID NO: 238226 - DNA, 19 bp, Homo sapiens
  siRNA target sequence for TAS2R5 (NM_018980.1,200-218).
gcttgtttccacttttcca

SEQ ID NO: 238227 - DNA, 19 bp, Homo sapiens
  siRNA target sequence for TAS2R5 (NM_018980.1,225-243).
ccgttggcttcgctatctt

SEQ ID NO: 238228 - DNA, 19 bp, Homo sapiens
  siRNA target sequence for TAS2R5 (NM_018980.1,226-244).
cgttggcttcgctatctta

SEQ ID NO: 238229 - DNA, 19 bp, Homo sapiens
  siRNA target sequence for TAS2R5 (NM_018980.1,230-248).
ggcttcgctatcttagtat

SEQ ID NO: 238230 - DNA, 19 bp, Homo sapiens
  siRNA target sequence for TAS2R5 (NM_018980.1,232-250).
cttcgctatcttagtatct

SEQ ID NO: 238231 - DNA, 19 bp, Homo sapiens
  siRNA target sequence for TAS2R5 (NM_018980.1,235-253).
cgctatcttagtatcttct

SEQ ID NO: 238232 - DNA, 19 bp, Homo sapiens
  siRNA target sequence for TAS2R5 (NM_018980.1,384-402).
gtgccttctgggctacttt

SEQ ID NO: 238233 - DNA, 19 bp, Homo sapiens
  siRNA target sequence for TAS2R5 (NM_018980.1,386-404).
gccttctgggctactttat

SEQ ID NO: 238234 - DNA, 19 bp, Homo sapiens
  siRNA target sequence for TAS2R5 (NM_018980.1,387-405).
ccttctgggctactttata

SEQ ID NO: 238235 - DNA, 19 bp, Homo sapiens
  siRNA target sequence for TAS2R5 (NM_018980.1,471-489).
cattcggtatccctttgaa

SEQ ID NO: 238236 - DNA, 19 bp, Homo sapiens
  siRNA target sequence for TAS2R5 (NM_018980.1,494-512).
ggcagtacctgtatgcatt

SEQ ID NO: 238237 - DNA, 19 bp, Homo sapiens
  siRNA target sequence for TAS2R5 (NM_018980.1,495-513).
gcagtacctgtatgcattt

SEQ ID NO: 238238 - DNA, 19 bp, Homo sapiens
  siRNA target sequence for TAS2R5 (NM_018980.1,566-584).
ggatgctgattgtctcttt

SEQ ID NO: 238239 - DNA, 19 bp, Homo sapiens
  siRNA target sequence for TAS2R5 (NM_018980.1,573-591).
gattgtctctttgtataca

SEQ ID NO: 238240 - DNA, 19 bp, Homo sapiens
  siRNA target sequence for TAS2R5 (NM_018980.1,688-706).
cttcacctggtttatatca

SEQ ID NO: 238241 - DNA, 19 bp, Homo sapiens
  siRNA target sequence for TAS2R5 (NM_018980.1,723-741).
catcacctccaagacttat

SEQ ID NO: 238242 - DNA, 19 bp, Homo sapiens
  siRNA target sequence for TAS2R5 (NM_018980.1,726-744).
cacctccaagacttatcct

SEQ ID NO: 238243 - DNA, 19 bp, Homo sapiens
  siRNA target sequence for TAS2R5 (NM_018980.1,783-801).
ggcagcctatccttctctt

SEQ ID NO: 238244 - DNA, 19 bp, Homo sapiens
  siRNA target sequence for TAS2R5 (NM_018980.1,799-817).
cttcattctctcatattga

SEQ ID NO: 238245 - DNA, 19 bp, Homo sapiens
  siRNA target sequence for TAS2R7 (NM_023919.1,7-25).
gataaagtgcagactactt

SEQ ID NO: 238246 - DNA, 19 bp, Homo sapiens
  siRNA target sequence for TAS2R7 (NM_023919.1,38-56).
cagttggagagttttcagt

SEQ ID NO: 238247 - DNA, 19 bp, Homo sapiens
  siRNA target sequence for TAS2R7 (NM_023919.1,48-66).
gttttcagtggggatctta

SEQ ID NO: 238248 - DNA, 19 bp, Homo sapiens
  siRNA target sequence for TAS2R7 (NM_023919.1,63-81).
cttagggaatgcattcatt

SEQ ID NO: 238249 - DNA, 19 bp, Homo sapiens
  siRNA target sequence for TAS2R7 (NM_023919.1,73-91).
gcattcattggattggtaa

SEQ ID NO: 238250 - DNA, 19 bp, Homo sapiens
  siRNA target sequence for TAS2R7 (NM_023919.1,74-92).
cattcattggattggtaaa

SEQ ID NO: 238251 - DNA, 19 bp, Homo sapiens
  siRNA target sequence for TAS2R7 (NM_023919.1,125-143).
cctccattgatttaatcct

SEQ ID NO: 238252 - DNA, 19 bp, Homo sapiens
  siRNA target sequence for TAS2R7 (NM_023919.1,172-190).
ctattgtgcgtaatactat

SEQ ID NO: 238253 - DNA, 19 bp, Homo sapiens
  siRNA target sequence for TAS2R7 (NM_023919.1,177-195).
gtgcgtaatactattagat

SEQ ID NO: 238254 - DNA, 19 bp, Homo sapiens
  siRNA target sequence for TAS2R7 (NM_023919.1,210-228).
gctatatccagatgtctat

SEQ ID NO: 238255 - DNA, 19 bp, Homo sapiens
  siRNA target sequence for TAS2R7 (NM_023919.1,261-279).
cttctggacactaaccaat

SEQ ID NO: 238256 - DNA, 19 bp, Homo sapiens
  siRNA target sequence for TAS2R7 (NM_023919.1,271-289).
ctaaccaatcatttaagta

SEQ ID NO: 238257 - DNA, 19 bp, Homo sapiens
  siRNA target sequence for TAS2R7 (NM_023919.1,411-429).
cgtggttctctctgtgttt

SEQ ID NO: 238258 - DNA, 19 bp, Homo sapiens
  siRNA target sequence for TAS2R7 (NM_023919.1,506-524).
cttggagttgcagagtaaa

SEQ ID NO: 238259 - DNA, 19 bp, Homo sapiens
  siRNA target sequence for TAS2R7 (NM_023919.1,535-553).
catgcttctaccaagttat

SEQ ID NO: 238260 - DNA, 19 bp, Homo sapiens
  siRNA target sequence for TAS2R7 (NM_023919.1,780-798).
gccagagacggaattagct

SEQ ID NO: 238261 - DNA, 19 bp, Homo sapiens
  siRNA target sequence for TAS2R7 (NM_023919.1,786-804).
gacggaattagctgtgatt

SEQ ID NO: 238262 - DNA, 19 bp, Homo sapiens
  siRNA target sequence for TAS2R7 (NM_023919.1,809-827).
gtgagtccatagctctaat

SEQ ID NO: 238263 - DNA, 19 bp, Homo sapiens
  siRNA target sequence for TAS2R7 (NM_023919.1,811-829).
gagtccatagctctaatct

SEQ ID NO: 238264 - DNA, 19 bp, Homo sapiens
  siRNA target sequence for TAS2R7 (NM_023919.1,828-846).
ctacccctcaagtcattca

SEQ ID NO: 238265 - DNA, 19 bp, Homo sapiens
  siRNA target sequence for TAS2R7 (NM_023919.1,836-854).
caagtcattcatttatcct

SEQ ID NO: 238266 - DNA, 19 bp, Homo sapiens
  siRNA target sequence for TAS2R7 (NM_023919.1,852-870).
cctaatactggggaacaat

SEQ ID NO: 238267 - DNA, 19 bp, Homo sapiens
  siRNA target sequence for TAS2R7 (NM_023919.1,887-905).
ctctaaaggtgatttggaa

SEQ ID NO: 238268 - DNA, 19 bp, Homo sapiens
  siRNA target sequence for TAS2R7 (NM_023919.1,903-921).
gaaagtaatgtctattcta

SEQ ID NO: 238269 - DNA, 19 bp, Homo sapiens
  siRNA target sequence for TAS2R8 (NM_023918.1,11-29).
ctgcagataacatctttat

SEQ ID NO: 238270 - DNA, 19 bp, Homo sapiens
  siRNA target sequence for TAS2R8 (NM_023918.1,13-31).
gcagataacatctttataa

SEQ ID NO: 238271 - DNA, 19 bp, Homo sapiens
  siRNA target sequence for TAS2R8 (NM_023918.1,46-64).
gaattcatactaggaatat

SEQ ID NO: 238272 - DNA, 19 bp, Homo sapiens
  siRNA target sequence for TAS2R8 (NM_023918.1,74-92).
gatacattgcactagtcaa

SEQ ID NO: 238273 - DNA, 19 bp, Homo sapiens
  siRNA target sequence for TAS2R8 (NM_023918.1,138-156).
catccttaccaatttagtt

SEQ ID NO: 238274 - DNA, 19 bp, Homo sapiens
  siRNA target sequence for TAS2R8 (NM_023918.1,170-188).
gtttgatcagtgtaatggt

SEQ ID NO: 238275 - DNA, 19 bp, Homo sapiens
  siRNA target sequence for TAS2R8 (NM_023918.1,186-204).
ggttgtaaatggcattgta

SEQ ID NO: 238276 - DNA, 19 bp, Homo sapiens
  siRNA target sequence for TAS2R8 (NM_023918.1,208-226).
gtactgaacccagatgttt

SEQ ID NO: 238277 - DNA, 19 bp, Homo sapiens
  siRNA target sequence for TAS2R8 (NM_023918.1,213-231).
gaacccagatgtttataca

SEQ ID NO: 238278 - DNA, 19 bp, Homo sapiens
  siRNA target sequence for TAS2R8 (NM_023918.1,269-287).
catttgccaactacttaaa

SEQ ID NO: 238279 - DNA, 19 bp, Homo sapiens
  siRNA target sequence for TAS2R8 (NM_023918.1,299-317).
ccacctgccttaatgtctt

SEQ ID NO: 238280 - DNA, 19 bp, Homo sapiens
  siRNA target sequence for TAS2R8 (NM_023918.1,363-381).
gctgaagtggaaaattgat

SEQ ID NO: 238281 - DNA, 19 bp, Homo sapiens
  siRNA target sequence for TAS2R8 (NM_023918.1,396-414).
gatcctgctgggatgcttt

SEQ ID NO: 238282 - DNA, 19 bp, Homo sapiens
  siRNA target sequence for TAS2R8 (NM_023918.1,434-452).
gccttatagcagcaatagt

SEQ ID NO: 238283 - DNA, 19 bp, Homo sapiens
  siRNA target sequence for TAS2R8 (NM_023918.1,435-453).
ccttatagcagcaatagta

SEQ ID NO: 238284 - DNA, 19 bp, Homo sapiens
  siRNA target sequence for TAS2R8 (NM_023918.1,454-472).
ctgagttgtgattataggt

SEQ ID NO: 238285 - DNA, 19 bp, Homo sapiens
  siRNA target sequence for TAS2R8 (NM_023918.1,516-534).
ccatgtgagtaaaatacca

SEQ ID NO: 238286 - DNA, 19 bp, Homo sapiens
  siRNA target sequence for TAS2R8 (NM_023918.1,522-540).
gagtaaaataccatacttt

SEQ ID NO: 238287 - DNA, 19 bp, Homo sapiens
  siRNA target sequence for TAS2R8 (NM_023918.1,524-542).
gtaaaataccatactttga

SEQ ID NO: 238288 - DNA, 19 bp, Homo sapiens
  siRNA target sequence for TAS2R8 (NM_023918.1,541-559).
gaacccttgactctcttta

SEQ ID NO: 238289 - DNA, 19 bp, Homo sapiens
  siRNA target sequence for TAS2R8 (NM_023918.1,545-563).
ccttgactctctttaacct

SEQ ID NO: 238290 - DNA, 19 bp, Homo sapiens
  siRNA target sequence for TAS2R8 (NM_023918.1,553-571).
ctctttaacctgtttgcaa

SEQ ID NO: 238291 - DNA, 19 bp, Homo sapiens
  siRNA target sequence for TAS2R8 (NM_023918.1,555-573).
ctttaacctgtttgcaatt

SEQ ID NO: 238292 - DNA, 19 bp, Homo sapiens
  siRNA target sequence for TAS2R8 (NM_023918.1,569-587).
caattgtcccatttattgt

SEQ ID NO: 238293 - DNA, 19 bp, Homo sapiens
  siRNA target sequence for TAS2R8 (NM_023918.1,640-658).
caaataaaactctatgcta

SEQ ID NO: 238294 - DNA, 19 bp, Homo sapiens
  siRNA target sequence for TAS2R8 (NM_023918.1,759-777).
gatgacctttagctatctt

SEQ ID NO: 238295 - DNA, 19 bp, Homo sapiens
  siRNA target sequence for TAS2R8 (NM_023918.1,765-783).
ctttagctatcttatgaca

SEQ ID NO: 238296 - DNA, 19 bp, Homo sapiens
  siRNA target sequence for TAS2R9 (NM_023917.1,8-26).
gtgcaatagaggcaatata

SEQ ID NO: 238297 - DNA, 19 bp, Homo sapiens
  siRNA target sequence for TAS2R9 (NM_023917.1,10-28).
gcaatagaggcaatatata

SEQ ID NO: 238298 - DNA, 19 bp, Homo sapiens
  siRNA target sequence for TAS2R9 (NM_023917.1,11-29).
caatagaggcaatatatat

SEQ ID NO: 238299 - DNA, 19 bp, Homo sapiens
  siRNA target sequence for TAS2R9 (NM_023917.1,73-91).
ggattcattgtactagtta

SEQ ID NO: 238300 - DNA, 19 bp, Homo sapiens
  siRNA target sequence for TAS2R9 (NM_023917.1,74-92).
gattcattgtactagttaa

SEQ ID NO: 238301 - DNA, 19 bp, Homo sapiens
  siRNA target sequence for TAS2R9 (NM_023917.1,172-190).
ctgctgtgtgtaatatcat

SEQ ID NO: 238302 - DNA, 19 bp, Homo sapiens
  siRNA target sequence for TAS2R9 (NM_023917.1,174-192).
gctgtgtgtaatatcatta

SEQ ID NO: 238303 - DNA, 19 bp, Homo sapiens
  siRNA target sequence for TAS2R9 (NM_023917.1,177-195).
gtgtgtaatatcattagat

SEQ ID NO: 238304 - DNA, 19 bp, Homo sapiens
  siRNA target sequence for TAS2R9 (NM_023917.1,210-228).
gctctttccaggtacatat

SEQ ID NO: 238305 - DNA, 19 bp, Homo sapiens
  siRNA target sequence for TAS2R9 (NM_023917.1,229-247).
ggcaatagcgtgctagtaa

SEQ ID NO: 238306 - DNA, 19 bp, Homo sapiens
  siRNA target sequence for TAS2R9 (NM_023917.1,238-256).
gtgctagtaagcattgtga

SEQ ID NO: 238307 - DNA, 19 bp, Homo sapiens
  siRNA target sequence for TAS2R9 (NM_023917.1,240-258).
gctagtaagcattgtgaat

SEQ ID NO: 238308 - DNA, 19 bp, Homo sapiens
  siRNA target sequence for TAS2R9 (NM_023917.1,302-320).
cttgcctcagtatcttcta

SEQ ID NO: 238309 - DNA, 19 bp, Homo sapiens
  siRNA target sequence for TAS2R9 (NM_023917.1,407-425).
ggtcctttcttatctcttt

SEQ ID NO: 238310 - DNA, 19 bp, Homo sapiens
  siRNA target sequence for TAS2R9 (NM_023917.1,456-474).
gtggtatcaccttttcaaa

SEQ ID NO: 238311 - DNA, 19 bp, Homo sapiens
  siRNA target sequence for TAS2R9 (NM_023917.1,458-476).
ggtatcaccttttcaaagt

SEQ ID NO: 238312 - DNA, 19 bp, Homo sapiens
  siRNA target sequence for TAS2R9 (NM_023917.1,726-744).
cgtgtactacccagtcttt

SEQ ID NO: 238313 - DNA, 19 bp, Homo sapiens
  siRNA target sequence for TAS2R9 (NM_023917.1,753-771).
gacctctagcgctctgatt

SEQ ID NO: 238314 - DNA, 19 bp, Homo sapiens
  siRNA target sequence for TAS2R9 (NM_023917.1,768-786).
gattcctcagggaaaatta

SEQ ID NO: 238315 - DNA, 19 bp, Homo sapiens
  siRNA target sequence for TAS2R9 (NM_023917.1,789-807).
gttgatgattggtgacata

SEQ ID NO: 238316 - DNA, 19 bp, Homo sapiens
  siRNA target sequence for TAS2R9 (NM_023917.1,792-810).
gatgattggtgacatagta

SEQ ID NO: 238317 - DNA, 19 bp, Homo sapiens
  siRNA target sequence for TAS2R9 (NM_023917.1,795-813).
gattggtgacatagtaact

SEQ ID NO: 238318 - DNA, 19 bp, Homo sapiens
  siRNA target sequence for TAS2R9 (NM_023917.1,844-862).
ctaattatgggaaatagca

SEQ ID NO: 238319 - DNA, 19 bp, Homo sapiens
  siRNA target sequence for ELOVL4 (NM_022726.2,249-267).
cgggtagtgtcctaaacgt

SEQ ID NO: 238320 - DNA, 19 bp, Homo sapiens
  siRNA target sequence for ELOVL4 (NM_022726.2,250-268).
gggtagtgtcctaaacgta

SEQ ID NO: 238321 - DNA, 19 bp, Homo sapiens
  siRNA target sequence for ELOVL4 (NM_022726.2,324-342).
cagataagcgtgtggaaaa

SEQ ID NO: 238322 - DNA, 19 bp, Homo sapiens
  siRNA target sequence for ELOVL4 (NM_022726.2,326-344).
gataagcgtgtggaaaatt

SEQ ID NO: 238323 - DNA, 19 bp, Homo sapiens
  siRNA target sequence for ELOVL4 (NM_022726.2,362-380).
ccttggcctacactaagta

SEQ ID NO: 238324 - DNA, 19 bp, Homo sapiens
  siRNA target sequence for ELOVL4 (NM_022726.2,374-392).
ctaagtataagcactcttt

SEQ ID NO: 238325 - DNA, 19 bp, Homo sapiens
  siRNA target sequence for ELOVL4 (NM_022726.2,378-396).
gtataagcactctttatct

SEQ ID NO: 238326 - DNA, 19 bp, Homo sapiens
  siRNA target sequence for ELOVL4 (NM_022726.2,408-426).
ggctgggtccaaaatggat

SEQ ID NO: 238327 - DNA, 19 bp, Homo sapiens
  siRNA target sequence for ELOVL4 (NM_022726.2,427-445).
gaaggaccgagaacctttt

SEQ ID NO: 238328 - DNA, 19 bp, Homo sapiens
  siRNA target sequence for ELOVL4 (NM_022726.2,452-470).
cgtctagtgctcattatct

SEQ ID NO: 238329 - DNA, 19 bp, Homo sapiens
  siRNA target sequence for ELOVL4 (NM_022726.2,455-473).
ctagtgctcattatctata

SEQ ID NO: 238330 - DNA, 19 bp, Homo sapiens
  siRNA target sequence for ELOVL4 (NM_022726.2,458-476).
gtgctcattatctataatt

SEQ ID NO: 238331 - DNA, 19 bp, Homo sapiens
  siRNA target sequence for ELOVL4 (NM_022726.2,480-498).
ggatggttttgcttaacct

SEQ ID NO: 238332 - DNA, 19 bp, Homo sapiens
  siRNA target sequence for ELOVL4 (NM_022726.2,514-532).
gttattcatgggatcatat

SEQ ID NO: 238333 - DNA, 19 bp, Homo sapiens
  siRNA target sequence for ELOVL4 (NM_022726.2,536-554).
gcgggatatagctatattt

SEQ ID NO: 238334 - DNA, 19 bp, Homo sapiens
  siRNA target sequence for ELOVL4 (NM_022726.2,556-574).
ccagagtgtggattattct

SEQ ID NO: 238335 - DNA, 19 bp, Homo sapiens
  siRNA target sequence for ELOVL4 (NM_022726.2,557-575).
cagagtgtggattattcta

SEQ ID NO: 238336 - DNA, 19 bp, Homo sapiens
  siRNA target sequence for ELOVL4 (NM_022726.2,561-579).
gtgtggattattctaataa

SEQ ID NO: 238337 - DNA, 19 bp, Homo sapiens
  siRNA target sequence for ELOVL4 (NM_022726.2,608-626).
ctgtggtggtactttgtat

SEQ ID NO: 238338 - DNA, 19 bp, Homo sapiens
  siRNA target sequence for ELOVL4 (NM_022726.2,610-628).
gtggtggtactttgtatct

SEQ ID NO: 238339 - DNA, 19 bp, Homo sapiens
  siRNA target sequence for ELOVL4 (NM_022726.2,679-697).
caaccaagtttctttcctt

SEQ ID NO: 238340 - DNA, 19 bp, Homo sapiens
  siRNA target sequence for ELOVL4 (NM_022726.2,707-725).
catcactgtacgatgttta

SEQ ID NO: 238341 - DNA, 19 bp, Homo sapiens
  siRNA target sequence for ELOVL4 (NM_022726.2,710-728).
cactgtacgatgtttacct

SEQ ID NO: 238342 - DNA, 19 bp, Homo sapiens
  siRNA target sequence for ELOVL4 (NM_022726.2,726-744).
ccttgtggtggattggaat

SEQ ID NO: 238343 - DNA, 19 bp, Homo sapiens
  siRNA target sequence for ELOVL4 (NM_022726.2,800-818).
catgtgattatgtactcat

SEQ ID NO: 238344 - DNA, 19 bp, Homo sapiens
  siRNA target sequence for ELOVL4 (NM_022726.2,805-823).
gattatgtactcatactat

SEQ ID NO: 238345 - DNA, 19 bp, Homo sapiens
  siRNA target sequence for ELOVL4 (NM_022726.2,814-832).
ctcatactatgggttaact

SEQ ID NO: 238346 - DNA, 19 bp, Homo sapiens
  siRNA target sequence for ELOVL4 (NM_022726.2,839-857).
ggcccatggattcagaaat

SEQ ID NO: 238347 - DNA, 19 bp, Homo sapiens
  siRNA target sequence for ELOVL4 (NM_022726.2,867-885).
ggaaacgatacctgactat

SEQ ID NO: 238348 - DNA, 19 bp, Homo sapiens
  siRNA target sequence for ELOVL4 (NM_022726.2,880-898).
gactatgttgcaactgatt

SEQ ID NO: 238349 - DNA, 19 bp, Homo sapiens
  siRNA target sequence for ELOVL4 (NM_022726.2,889-907).
gcaactgattcaattccat

SEQ ID NO: 238350 - DNA, 19 bp, Homo sapiens
  siRNA target sequence for ELOVL4 (NM_022726.2,920-938).
cacacggcactgtctcttt

SEQ ID NO: 238351 - DNA, 19 bp, Homo sapiens
  siRNA target sequence for ELOVL4 (NM_022726.2,963-981).
ggatgcactgggctctaat

SEQ ID NO: 238352 - DNA, 19 bp, Homo sapiens
  siRNA target sequence for ELOVL4 (NM_022726.2,974-992).
gctctaattgcctatgcaa

SEQ ID NO: 238353 - DNA, 19 bp, Homo sapiens
  siRNA target sequence for ELOVL4 (NM_022726.2,975-993).
ctctaattgcctatgcaat

SEQ ID NO: 238354 - DNA, 19 bp, Homo sapiens
  siRNA target sequence for ELOVL4 (NM_022726.2,985-1003).
ctatgcaatcagcttcata

SEQ ID NO: 238355 - DNA, 19 bp, Homo sapiens
  siRNA target sequence for ELOVL4 (NM_022726.2,990-1008).
caatcagcttcatatttct

SEQ ID NO: 238356 - DNA, 19 bp, Homo sapiens
  siRNA target sequence for ELOVL4 (NM_022726.2,1042-1060).
gcctaagaaaccaaaagct

SEQ ID NO: 238357 - DNA, 19 bp, Homo sapiens
  siRNA target sequence for ELOVL4 (NM_022726.2,1094-1112).
ggtgtgagcaaatcagaaa

SEQ ID NO: 238358 - DNA, 19 bp, Homo sapiens
  siRNA target sequence for OPN1SW (NM_001708.1,19-37).
gtcggaggaagagttttat

SEQ ID NO: 238359 - DNA, 19 bp, Homo sapiens
  siRNA target sequence for OPN1SW (NM_001708.1,130-148).
gggcactgtcttccttata

SEQ ID NO: 238360 - DNA, 19 bp, Homo sapiens
  siRNA target sequence for OPN1SW (NM_001708.1,179-197).
gccacactgcgctacaaaa

SEQ ID NO: 238361 - DNA, 19 bp, Homo sapiens
  siRNA target sequence for OPN1SW (NM_001708.1,180-198).
ccacactgcgctacaaaaa

SEQ ID NO: 238362 - DNA, 19 bp, Homo sapiens
  siRNA target sequence for OPN1SW (NM_001708.1,183-201).
cactgcgctacaaaaagtt

SEQ ID NO: 238363 - DNA, 19 bp, Homo sapiens
  siRNA target sequence for OPN1SW (NM_001708.1,203-221).
cggcagcccctcaactaca

SEQ ID NO: 238364 - DNA, 19 bp, Homo sapiens
  siRNA target sequence for OPN1SW (NM_001708.1,204-222).
ggcagcccctcaactacat

SEQ ID NO: 238365 - DNA, 19 bp, Homo sapiens
  siRNA target sequence for OPN1SW (NM_001708.1,205-223).
gcagcccctcaactacatt

SEQ ID NO: 238366 - DNA, 19 bp, Homo sapiens
  siRNA target sequence for OPN1SW (NM_001708.1,288-306).
ccagctgtaacggatactt

SEQ ID NO: 238367 - DNA, 19 bp, Homo sapiens
  siRNA target sequence for OPN1SW (NM_001708.1,308-326).
gtcttcggtcgccatgttt

SEQ ID NO: 238368 - DNA, 19 bp, Homo sapiens
  siRNA target sequence for OPN1SW (NM_001708.1,310-328).
cttcggtcgccatgtttgt

SEQ ID NO: 238369 - DNA, 19 bp, Homo sapiens
  siRNA target sequence for OPN1SW (NM_001708.1,401-419).
cgctacattgtcatctgta

SEQ ID NO: 238370 - DNA, 19 bp, Homo sapiens
  siRNA target sequence for OPN1SW (NM_001708.1,473-491).
gctacctggaccattggta

SEQ ID NO: 238371 - DNA, 19 bp, Homo sapiens
  siRNA target sequence for OPN1SW (NM_001708.1,474-492).
ctacctggaccattggtat

SEQ ID NO: 238372 - DNA, 19 bp, Homo sapiens
  siRNA target sequence for OPN1SW (NM_001708.1,593-611).
cgcagcgagtcctatacgt

SEQ ID NO: 238373 - DNA, 19 bp, Homo sapiens
  siRNA target sequence for OPN1SW (NM_001708.1,813-831).
ccatgtacatggtcaacaa

SEQ ID NO: 238374 - DNA, 19 bp, Homo sapiens
  siRNA target sequence for OPN1SW (NM_001708.1,823-841).
ggtcaacaaccgtaaccat

SEQ ID NO: 238375 - DNA, 19 bp, Homo sapiens
  siRNA target sequence for OPN1SW (NM_001708.1,886-904).
gagtgcttgcatctacaat

SEQ ID NO: 238376 - DNA, 19 bp, Homo sapiens
  siRNA target sequence for OPN3 (NM_014322.1,242-260).
ctcgtcctctactacaagt

SEQ ID NO: 238377 - DNA, 19 bp, Homo sapiens
  siRNA target sequence for OPN3 (NM_014322.1,329-347).
ctcttcggggtcaccttta

SEQ ID NO: 238378 - DNA, 19 bp, Homo sapiens
  siRNA target sequence for OPN3 (NM_014322.1,488-506).
catgccagagtgatcaatt

SEQ ID NO: 238379 - DNA, 19 bp, Homo sapiens
  siRNA target sequence for OPN3 (NM_014322.1,491-509).
gccagagtgatcaattttt

SEQ ID NO: 238380 - DNA, 19 bp, Homo sapiens
  siRNA target sequence for OPN3 (NM_014322.1,691-709).
ggtgcccctgggtgtcata

SEQ ID NO: 238381 - DNA, 19 bp, Homo sapiens
  siRNA target sequence for OPN3 (NM_014322.1,718-736).
ctatggccatattctatat

SEQ ID NO: 238382 - DNA, 19 bp, Homo sapiens
  siRNA target sequence for OPN3 (NM_014322.1,723-741).
gccatattctatattccat

SEQ ID NO: 238383 - DNA, 19 bp, Homo sapiens
  siRNA target sequence for OPN3 (NM_014322.1,724-742).
ccatattctatattccatt

SEQ ID NO: 238384 - DNA, 19 bp, Homo sapiens
  siRNA target sequence for OPN3 (NM_014322.1,851-869).
gtctgttggatgccttata

SEQ ID NO: 238385 - DNA, 19 bp, Homo sapiens
  siRNA target sequence for OPN3 (NM_014322.1,877-895).
ctgcttcttggtggttaat

SEQ ID NO: 238386 - DNA, 19 bp, Homo sapiens
  siRNA target sequence for OPN3 (NM_014322.1,907-925).
cctggtcactccaacaata

SEQ ID NO: 238387 - DNA, 19 bp, Homo sapiens
  siRNA target sequence for OPN3 (NM_014322.1,908-926).
ctggtcactccaacaatat

SEQ ID NO: 238388 - DNA, 19 bp, Homo sapiens
  siRNA target sequence for OPN3 (NM_014322.1,910-928).
ggtcactccaacaatatct

SEQ ID NO: 238389 - DNA, 19 bp, Homo sapiens
  siRNA target sequence for OPN3 (NM_014322.1,911-929).
gtcactccaacaatatcta

SEQ ID NO: 238390 - DNA, 19 bp, Homo sapiens
  siRNA target sequence for OPN3 (NM_014322.1,917-935).
ccaacaatatctattgttt

SEQ ID NO: 238391 - DNA, 19 bp, Homo sapiens
  siRNA target sequence for OPN3 (NM_014322.1,947-965).
gctaaatcgaacactgtat

SEQ ID NO: 238392 - DNA, 19 bp, Homo sapiens
  siRNA target sequence for OPN3 (NM_014322.1,948-966).
ctaaatcgaacactgtata

SEQ ID NO: 238393 - DNA, 19 bp, Homo sapiens
  siRNA target sequence for OPN3 (NM_014322.1,1045-1063).
gtgccagaggcctgctaaa

SEQ ID NO: 238394 - DNA, 19 bp, Homo sapiens
  siRNA target sequence for OPN3 (NM_014322.1,1047-1065).
gccagaggcctgctaaaga

SEQ ID NO: 238395 - DNA, 19 bp, Homo sapiens
  siRNA target sequence for OPN3 (NM_014322.1,1205-1223).
gacgacagcgacaaaacca

SEQ ID NO: 238396 - DNA, 19 bp, Homo sapiens
  siRNA target sequence for OPN4 (NM_033282.1,403-421).
gcaacctgacggtcatcta

SEQ ID NO: 238397 - DNA, 19 bp, Homo sapiens
  siRNA target sequence for OPN4 (NM_033282.1,408-426).
ctgacggtcatctatacct

SEQ ID NO: 238398 - DNA, 19 bp, Homo sapiens
  siRNA target sequence for OPN4 (NM_033282.1,448-466).
ggacacctgccaacatgtt

SEQ ID NO: 238399 - DNA, 19 bp, Homo sapiens
  siRNA target sequence for OPN4 (NM_033282.1,454-472).
ctgccaacatgttcattat

SEQ ID NO: 238400 - DNA, 19 bp, Homo sapiens
  siRNA target sequence for OPN4 (NM_033282.1,529-547).
ccagtagcctctataagca

SEQ ID NO: 238401 - DNA, 19 bp, Homo sapiens
  siRNA target sequence for OPN4 (NM_033282.1,563-581).
gacaggctgcgagttctat

SEQ ID NO: 238402 - DNA, 19 bp, Homo sapiens
  siRNA target sequence for OPN4 (NM_033282.1,642-660).
gaccgctacctggtaatca

SEQ ID NO: 238403 - DNA, 19 bp, Homo sapiens
  siRNA target sequence for OPN4 (NM_033282.1,1119-1137).
gtcctgacaccctacatga

SEQ ID NO: 238404 - DNA, 19 bp, Homo sapiens
  siRNA target sequence for RDS (NM_000322.2,292-310).
gggctctggctcatgaact

SEQ ID NO: 238405 - DNA, 19 bp, Homo sapiens
  siRNA target sequence for RDS (NM_000322.2,384-402).
cgatgtgatgaataattct

SEQ ID NO: 238406 - DNA, 19 bp, Homo sapiens
  siRNA target sequence for RDS (NM_000322.2,409-427).
cattttgtgcccaactcat

SEQ ID NO: 238407 - DNA, 19 bp, Homo sapiens
  siRNA target sequence for RDS (NM_000322.2,534-552).
gccgtacctggctatctgt

SEQ ID NO: 238408 - DNA, 19 bp, Homo sapiens
  siRNA target sequence for RDS (NM_000322.2,674-692).
cccctggcaggtgtttcat

SEQ ID NO: 238409 - DNA, 19 bp, Homo sapiens
  siRNA target sequence for RDS (NM_000322.2,676-694).
cctggcaggtgtttcatga

SEQ ID NO: 238410 - DNA, 19 bp, Homo sapiens
  siRNA target sequence for RDS (NM_000322.2,680-698).
gcaggtgtttcatgaagaa

SEQ ID NO: 238411 - DNA, 19 bp, Homo sapiens
  siRNA target sequence for RDS (NM_000322.2,711-729).
gctgcagatcgagttcaaa

SEQ ID NO: 238412 - DNA, 19 bp, Homo sapiens
  siRNA target sequence for RDS (NM_000322.2,712-730).
ctgcagatcgagttcaaat

SEQ ID NO: 238413 - DNA, 19 bp, Homo sapiens
  siRNA target sequence for RDS (NM_000322.2,792-810).
ggacttttcctccaaagaa

SEQ ID NO: 238414 - DNA, 19 bp, Homo sapiens
  siRNA target sequence for RDS (NM_000322.2,899-917).
cctgcatccagtatcagat

SEQ ID NO: 238415 - DNA, 19 bp, Homo sapiens
  siRNA target sequence for RDS (NM_000322.2,994-1012).
gccctgctgagctactaca

SEQ ID NO: 238416 - DNA, 19 bp, Homo sapiens
  siRNA target sequence for RDS (NM_000322.2,1036-1054).
gtcgtcacgctcctcattt

SEQ ID NO: 238417 - DNA, 19 bp, Homo sapiens
  siRNA target sequence for RDS (NM_000322.2,1059-1077).
cttcgaggtgaccattaca

SEQ ID NO: 238418 - DNA, 19 bp, Homo sapiens
  siRNA target sequence for RHO (NM_000539.2,106-124).
cagaaggccctaacttcta

SEQ ID NO: 238419 - DNA, 19 bp, Homo sapiens
  siRNA target sequence for RHO (NM_000539.2,300-318).
cgcacgcctctcaactaca

SEQ ID NO: 238420 - DNA, 19 bp, Homo sapiens
  siRNA target sequence for RHO (NM_000539.2,301-319).
gcacgcctctcaactacat

SEQ ID NO: 238421 - DNA, 19 bp, Homo sapiens
  siRNA target sequence for RHO (NM_000539.2,334-352).
ccgtggctgacctcttcat

SEQ ID NO: 238422 - DNA, 19 bp, Homo sapiens
  siRNA target sequence for RHO (NM_000539.2,385-403).
cctctctgcatggatactt

SEQ ID NO: 238423 - DNA, 19 bp, Homo sapiens
  siRNA target sequence for RHO (NM_000539.2,445-463).
ccaccctgggcggtgaaat

SEQ ID NO: 238424 - DNA, 19 bp, Homo sapiens
  siRNA target sequence for RHO (NM_000539.2,652-670).
cgtgtggaatcgactacta

SEQ ID NO: 238425 - DNA, 19 bp, Homo sapiens
  siRNA target sequence for RHO (NM_000539.2,686-704).
ggtcaacaacgagtctttt

SEQ ID NO: 238426 - DNA, 19 bp, Homo sapiens
  siRNA target sequence for RHO (NM_000539.2,696-714).
gagtcttttgtcatctaca

SEQ ID NO: 238427 - DNA, 19 bp, Homo sapiens
  siRNA target sequence for RHO (NM_000539.2,900-918).
gccagcgtggcattctaca

SEQ ID NO: 238428 - DNA, 19 bp, Homo sapiens
  siRNA target sequence for RHO (NM_000539.2,901-919).
ccagcgtggcattctacat

SEQ ID NO: 238429 - DNA, 19 bp, Homo sapiens
  siRNA target sequence for RHO (NM_000539.2,904-922).
gcgtggcattctacatctt

SEQ ID NO: 238430 - DNA, 19 bp, Homo sapiens
  siRNA target sequence for ROM1 (NM_000327.2,391-409).
gtctgaatgcagctctata

SEQ ID NO: 238431 - DNA, 19 bp, Homo sapiens
  siRNA target sequence for ROM1 (NM_000327.2,642-660).
cgccacgggtacaaggatt

SEQ ID NO: 238432 - DNA, 19 bp, Homo sapiens
  siRNA target sequence for ROM1 (NM_000327.2,647-665).
cgggtacaaggattggttt

SEQ ID NO: 238433 - DNA, 19 bp, Homo sapiens
  siRNA target sequence for ROM1 (NM_000327.2,724-742).
ggatccagagcaatgtaga

SEQ ID NO: 238434 - DNA, 19 bp, Homo sapiens
  siRNA target sequence for ROM1 (NM_000327.2,725-743).
gatccagagcaatgtagaa

SEQ ID NO: 238435 - DNA, 19 bp, Homo sapiens
  siRNA target sequence for ROM1 (NM_000327.2,806-824).
cctgcaaaaccgtctttca

SEQ ID NO: 238436 - DNA, 19 bp, Homo sapiens
  siRNA target sequence for ROM1 (NM_000327.2,852-870).
ccccgacaacccaaccaaa

SEQ ID NO: 238437 - DNA, 19 bp, Homo sapiens
  siRNA target sequence for ROM1 (NM_000327.2,853-871).
cccgacaacccaaccaaaa

SEQ ID NO: 238438 - DNA, 19 bp, Homo sapiens
  siRNA target sequence for ROM1 (NM_000327.2,1044-1062).
gagacccagggctatctct

SEQ ID NO: 238439 - DNA, 19 bp, Homo sapiens
  siRNA target sequence for ROM1 (NM_000327.2,1065-1083).
cccagtgggctgaaagata

SEQ ID NO: 238440 - DNA, 19 bp, Homo sapiens
  siRNA target sequence for ROM1 (NM_000327.2,1066-1084).
ccagtgggctgaaagatat

SEQ ID NO: 238441 - DNA, 19 bp, Homo sapiens
  siRNA target sequence for ROM1 (NM_000327.2,1158-1176).
cctcccaaggaggatctat

SEQ ID NO: 238442 - DNA, 19 bp, Homo sapiens
  siRNA target sequence for ROM1 (NM_000327.2,1162-1180).
ccaaggaggatctatctga

SEQ ID NO: 238443 - DNA, 19 bp, Homo sapiens
  siRNA target sequence for PTGER1 (NM_000955.2,1008-1026).
gccagcttgtcggtatcat

SEQ ID NO: 238444 - DNA, 19 bp, Homo sapiens
  siRNA target sequence for PTGER2 (NM_000956.2,158-176).
ggcaatgcctccaatgact

SEQ ID NO: 238445 - DNA, 19 bp, Homo sapiens
  siRNA target sequence for PTGER2 (NM_000956.2,988-1006).
gcctttcacgatttttgca

SEQ ID NO: 238446 - DNA, 19 bp, Homo sapiens
  siRNA target sequence for PTGER2 (NM_000956.2,989-1007).
cctttcacgatttttgcat

SEQ ID NO: 238447 - DNA, 19 bp, Homo sapiens
  siRNA target sequence for PTGER2 (NM_000956.2,990-1008).
ctttcacgatttttgcata

SEQ ID NO: 238448 - DNA, 19 bp, Homo sapiens
  siRNA target sequence for PTGER2 (NM_000956.2,996-1014).
cgatttttgcatatatgaa

SEQ ID NO: 238449 - DNA, 19 bp, Homo sapiens
  siRNA target sequence for PTGER2 (NM_000956.2,1020-1038).
cctcttcccgaaaggaaaa

SEQ ID NO: 238450 - DNA, 19 bp, Homo sapiens
  siRNA target sequence for PTGER2 (NM_000956.2,1046-1064).
ctccaagctcttaggtttt

SEQ ID NO: 238451 - DNA, 19 bp, Homo sapiens
  siRNA target sequence for PTGER2 (NM_000956.2,1052-1070).
gctcttaggtttttatcaa

SEQ ID NO: 238452 - DNA, 19 bp, Homo sapiens
  siRNA target sequence for PTGER2 (NM_000956.2,1144-1162).
ctgttgtcggatttcatta

SEQ ID NO: 238453 - DNA, 19 bp, Homo sapiens
  siRNA target sequence for PTGER3 (NM_000957.2,653-671).
ggctctcctcgttgttcat

SEQ ID NO: 238454 - DNA, 19 bp, Homo sapiens
  siRNA target sequence for PTGER3 (NM_000957.2,722-740).
ggtatgcgagccacatgaa

SEQ ID NO: 238455 - DNA, 19 bp, Homo sapiens
  siRNA target sequence for PTGER3 (NM_000957.2,898-916).
cataactggggcaaccttt

SEQ ID NO: 238456 - DNA, 19 bp, Homo sapiens
  siRNA target sequence for PTGER3 (NM_000957.2,1115-1133).
ggtctccgctcctgataat

SEQ ID NO: 238457 - DNA, 19 bp, Homo sapiens
  siRNA target sequence for PTGER3 (NM_000957.2,1125-1143).
cctgataatgatgttgaaa

SEQ ID NO: 238458 - DNA, 19 bp, Homo sapiens
  siRNA target sequence for PTGER3 (NM_000957.2,1201-1219).
gaatgcaacttcttcttaa

SEQ ID NO: 238459 - DNA, 19 bp, Homo sapiens
  siRNA target sequence for PTGER3 (NM_000957.2,1206-1224).
caacttcttcttaatagct

SEQ ID NO: 238460 - DNA, 19 bp, Homo sapiens
  siRNA target sequence for PTGER3 (NM_000957.2,1263-1281).
ggtttacctgctgttaaga

SEQ ID NO: 238461 - DNA, 19 bp, Homo sapiens
  siRNA target sequence for PTGER3 (NM_000957.2,1264-1282).
gtttacctgctgttaagaa

SEQ ID NO: 238462 - DNA, 19 bp, Homo sapiens
  siRNA target sequence for PTGER3 (NM_000957.2,1442-1460).
cacaacttccactaacact

SEQ ID NO: 238463 - DNA, 19 bp, Homo sapiens
  siRNA target sequence for PTGER3 (NM_000957.2,1462-1480).
gcgagcttcaaacttctta

SEQ ID NO: 238464 - DNA, 19 bp, Homo sapiens
  siRNA target sequence for PTGER3 (NM_198715.1,1299-1317).
gttttgccaggtagcaaat

SEQ ID NO: 238465 - DNA, 19 bp, Homo sapiens
  siRNA target sequence for PTGER3 (NM_198715.1,1347-1365).
gaaagggcagcctatctca

SEQ ID NO: 238466 - DNA, 19 bp, Homo sapiens
  siRNA target sequence for PTGER3 (NM_198715.1,1351-1369).
gggcagcctatctcattat

SEQ ID NO: 238467 - DNA, 19 bp, Homo sapiens
  siRNA target sequence for PTGER3 (NM_198715.1,1356-1374).
gcctatctcattatctaat

SEQ ID NO: 238468 - DNA, 19 bp, Homo sapiens
  siRNA target sequence for PTGER3 (NM_198718.1,1368-1386).
gagggcaactgcacattgt

SEQ ID NO: 238469 - DNA, 19 bp, Homo sapiens
  siRNA target sequence for PTGER3 (NM_198718.1,1381-1399).
cattgtgggcaagtacaaa

SEQ ID NO: 238470 - DNA, 19 bp, Homo sapiens
  siRNA target sequence for PTGER3 (NM_198718.1,1385-1403).
gtgggcaagtacaaaccta

SEQ ID NO: 238471 - DNA, 19 bp, Homo sapiens
  siRNA target sequence for PTGER3 (NM_198718.1,1438-1456).
gtgagcagcattaatgtgt

SEQ ID NO: 238472 - DNA, 19 bp, Homo sapiens
  siRNA target sequence for PTGER4 (NM_000958.2,785-803).
gacctgttgggcactttgt

SEQ ID NO: 238473 - DNA, 19 bp, Homo sapiens
  siRNA target sequence for PTGER4 (NM_000958.2,868-886).
cgagtacagcaccttcatt

SEQ ID NO: 238474 - DNA, 19 bp, Homo sapiens
  siRNA target sequence for PTGER4 (NM_000958.2,1006-1024).
cacgctctttgcagtctat

SEQ ID NO: 238475 - DNA, 19 bp, Homo sapiens
  siRNA target sequence for PTGER4 (NM_000958.2,1025-1043).
gcgtccaacgtgctctttt

SEQ ID NO: 238476 - DNA, 19 bp, Homo sapiens
  siRNA target sequence for PTGER4 (NM_000958.2,1452-1470).
cgctcgtggtgcgagtatt

SEQ ID NO: 238477 - DNA, 19 bp, Homo sapiens
  siRNA target sequence for PTGER4 (NM_000958.2,1498-1516).
ggagcgagaagtcagtaaa

SEQ ID NO: 238478 - DNA, 19 bp, Homo sapiens
  siRNA target sequence for PTGER4 (NM_000958.2,1499-1517).
gagcgagaagtcagtaaaa

SEQ ID NO: 238479 - DNA, 19 bp, Homo sapiens
  siRNA target sequence for PTGER4 (NM_000958.2,1528-1546).
gcaggccatccgaattgct

SEQ ID NO: 238480 - DNA, 19 bp, Homo sapiens
  siRNA target sequence for PTGER4 (NM_000958.2,1529-1547).
caggccatccgaattgctt

SEQ ID NO: 238481 - DNA, 19 bp, Homo sapiens
  siRNA target sequence for PTGER4 (NM_000958.2,1562-1580).
ctagacccctggatatata

SEQ ID NO: 238482 - DNA, 19 bp, Homo sapiens
  siRNA target sequence for PTGER4 (NM_000958.2,1594-1612).
gacagtgctcagtaaagca

SEQ ID NO: 238483 - DNA, 19 bp, Homo sapiens
  siRNA target sequence for PTGER4 (NM_000958.2,1676-1694).
cactgctcagacagtcaaa

SEQ ID NO: 238484 - DNA, 19 bp, Homo sapiens
  siRNA target sequence for PTGER4 (NM_000958.2,1718-1736).
cactctcgctccttcatct

SEQ ID NO: 238485 - DNA, 19 bp, Homo sapiens
  siRNA target sequence for PTGER4 (NM_000958.2,1750-1768).
ggagatcagcagtacatct

SEQ ID NO: 238486 - DNA, 19 bp, Homo sapiens
  siRNA target sequence for PTGER4 (NM_000958.2,1883-1901).
ctgaggactttgcgaatat

SEQ ID NO: 238487 - DNA, 19 bp, Homo sapiens
  siRNA target sequence for PTGER4 (NM_000958.2,1887-1905).
ggactttgcgaatatcaga

SEQ ID NO: 238488 - DNA, 19 bp, Homo sapiens
  siRNA target sequence for PTGER4 (NM_000958.2,1930-1948).
ggactcagagagtgtctta

SEQ ID NO: 238489 - DNA, 19 bp, Homo sapiens
  siRNA target sequence for PTGER4 (NM_000958.2,2002-2020).
ctccctgcaagtcacattt

SEQ ID NO: 238490 - DNA, 19 bp, Homo sapiens
  siRNA target sequence for PTGER4 (NM_000958.2,2035-2053).
gaacttatcagaaaaatgt

SEQ ID NO: 238491 - DNA, 19 bp, Homo sapiens
  siRNA target sequence for PTGFR (NM_000959.2,303-321).
gcagctgcgcttctttcaa

SEQ ID NO: 238492 - DNA, 19 bp, Homo sapiens
  siRNA target sequence for PTGFR (NM_000959.2,304-322).
cagctgcgcttctttcaaa

SEQ ID NO: 238493 - DNA, 19 bp, Homo sapiens
  siRNA target sequence for PTGFR (NM_000959.2,306-324).
gctgcgcttctttcaaaca

SEQ ID NO: 238494 - DNA, 19 bp, Homo sapiens
  siRNA target sequence for PTGFR (NM_000959.2,309-327).
gcgcttctttcaaacacaa

SEQ ID NO: 238495 - DNA, 19 bp, Homo sapiens
  siRNA target sequence for PTGFR (NM_000959.2,446-464).
gaagtccaaggcatcgttt

SEQ ID NO: 238496 - DNA, 19 bp, Homo sapiens
  siRNA target sequence for PTGFR (NM_000959.2,474-492).
gccagtggcctggtaatca

SEQ ID NO: 238497 - DNA, 19 bp, Homo sapiens
  siRNA target sequence for PTGFR (NM_000959.2,476-494).
cagtggcctggtaatcact

SEQ ID NO: 238498 - DNA, 19 bp, Homo sapiens
  siRNA target sequence for PTGFR (NM_000959.2,480-498).
ggcctggtaatcactgatt

SEQ ID NO: 238499 - DNA, 19 bp, Homo sapiens
  siRNA target sequence for PTGFR (NM_000959.2,481-499).
gcctggtaatcactgattt

SEQ ID NO: 238500 - DNA, 19 bp, Homo sapiens
  siRNA target sequence for PTGFR (NM_000959.2,520-538).
gagccatagcagtatttgt

SEQ ID NO: 238501 - DNA, 19 bp, Homo sapiens
  siRNA target sequence for PTGFR (NM_000959.2,523-541).
ccatagcagtatttgtata

SEQ ID NO: 238502 - DNA, 19 bp, Homo sapiens
  siRNA target sequence for PTGFR (NM_000959.2,524-542).
catagcagtatttgtatat

SEQ ID NO: 238503 - DNA, 19 bp, Homo sapiens
  siRNA target sequence for PTGFR (NM_000959.2,653-671).
ggccattgagcggtgtatt

SEQ ID NO: 238504 - DNA, 19 bp, Homo sapiens
  siRNA target sequence for PTGFR (NM_000959.2,656-674).
cattgagcggtgtattgga

SEQ ID NO: 238505 - DNA, 19 bp, Homo sapiens
  siRNA target sequence for PTGFR (NM_000959.2,664-682).
ggtgtattggagtcacaaa

SEQ ID NO: 238506 - DNA, 19 bp, Homo sapiens
  siRNA target sequence for PTGFR (NM_000959.2,665-683).
gtgtattggagtcacaaaa

SEQ ID NO: 238507 - DNA, 19 bp, Homo sapiens
  siRNA target sequence for PTGFR (NM_000959.2,672-690).
ggagtcacaaaaccaatat

SEQ ID NO: 238508 - DNA, 19 bp, Homo sapiens
  siRNA target sequence for PTGFR (NM_000959.2,779-797).
ccttggacatcgagactat

SEQ ID NO: 238509 - DNA, 19 bp, Homo sapiens
  siRNA target sequence for PTGFR (NM_000959.2,780-798).
cttggacatcgagactata

SEQ ID NO: 238510 - DNA, 19 bp, Homo sapiens
  siRNA target sequence for PTGFR (NM_000959.2,783-801).
ggacatcgagactataaaa

SEQ ID NO: 238511 - DNA, 19 bp, Homo sapiens
  siRNA target sequence for PTGFR (NM_000959.2,814-832).
ggacctggtgtttctacaa

SEQ ID NO: 238512 - DNA, 19 bp, Homo sapiens
  siRNA target sequence for PTGFR (NM_000959.2,896-914).
cttagcccttggtgtttca

SEQ ID NO: 238513 - DNA, 19 bp, Homo sapiens
  siRNA target sequence for PTGFR (NM_000959.2,917-935).
gttgtgcaatgcaatcaca

SEQ ID NO: 238514 - DNA, 19 bp, Homo sapiens
  siRNA target sequence for PTGFR (NM_000959.2,1016-1034).
gctcctggcgataatgtgt

SEQ ID NO: 238515 - DNA, 19 bp, Homo sapiens
  siRNA target sequence for PTGFR (NM_000959.2,1031-1049).
gtgtgtctcctgtatttgt

SEQ ID NO: 238516 - DNA, 19 bp, Homo sapiens
  siRNA target sequence for PTGFR (NM_000959.2,1054-1072).
gcccatttctggttacaat

SEQ ID NO: 238517 - DNA, 19 bp, Homo sapiens
  siRNA target sequence for PTGFR (NM_000959.2,1064-1082).
ggttacaatggccaacatt

SEQ ID NO: 238518 - DNA, 19 bp, Homo sapiens
  siRNA target sequence for PTGFR (NM_000959.2,1143-1161).
gcaacatggaatcaaatct

SEQ ID NO: 238519 - DNA, 19 bp, Homo sapiens
  siRNA target sequence for PTGFR (NM_000959.2,1147-1165).
catggaatcaaatcttaga

SEQ ID NO: 238520 - DNA, 19 bp, Homo sapiens
  siRNA target sequence for PTGFR (NM_000959.2,1160-1178).
cttagatccttgggtatat

SEQ ID NO: 238521 - DNA, 19 bp, Homo sapiens
  siRNA target sequence for PTGFR (NM_000959.2,1188-1206).
cgaaaggctgtccttaaga

SEQ ID NO: 238522 - DNA, 19 bp, Homo sapiens
  siRNA target sequence for PTGFR (NM_000959.2,1189-1207).
gaaaggctgtccttaagaa

SEQ ID NO: 238523 - DNA, 19 bp, Homo sapiens
  siRNA target sequence for PTGFR (NM_000959.2,1194-1212).
gctgtccttaagaatctct

SEQ ID NO: 238524 - DNA, 19 bp, Homo sapiens
  siRNA target sequence for PTGFR (NM_000959.2,1197-1215).
gtccttaagaatctctata

SEQ ID NO: 238525 - DNA, 19 bp, Homo sapiens
  siRNA target sequence for PTGFR (NM_000959.2,1241-1259).
gcatgtcatcagcttacat

SEQ ID NO: 238526 - DNA, 19 bp, Homo sapiens
  siRNA target sequence for PTGFR (NM_000959.2,1245-1263).
gtcatcagcttacatattt

SEQ ID NO: 238527 - DNA, 19 bp, Homo sapiens
  siRNA target sequence for PTGFR (NM_000959.2,1257-1275).
catatttgggagcttagtt

SEQ ID NO: 238528 - DNA, 19 bp, Homo sapiens
  siRNA target sequence for PTGFR (NM_000959.2,1266-1284).
gagcttagttccattaaaa

SEQ ID NO: 238529 - DNA, 19 bp, Homo sapiens
  siRNA target sequence for PTGDR (NM_000953.2,587-605).
ctttctgcgcgctaccttt

SEQ ID NO: 238530 - DNA, 19 bp, Homo sapiens
  siRNA target sequence for PTGDR (NM_000953.2,641-659).
gcacctggtgctttatcca

SEQ ID NO: 238531 - DNA, 19 bp, Homo sapiens
  siRNA target sequence for PTGDR (NM_000953.2,930-948).
gtgttctctgcccgtaatt

SEQ ID NO: 238532 - DNA, 19 bp, Homo sapiens
  siRNA target sequence for PTGDR (NM_000953.2,932-950).
gttctctgcccgtaattta

SEQ ID NO: 238533 - DNA, 19 bp, Homo sapiens
  siRNA target sequence for PTGDR (NM_000953.2,965-983).
gagcatttaaggatgtcaa

SEQ ID NO: 238534 - DNA, 19 bp, Homo sapiens
  siRNA target sequence for PTGDR (NM_000953.2,1020-1038).
ccgagccttgcgatttcta

SEQ ID NO: 238535 - DNA, 19 bp, Homo sapiens
  siRNA target sequence for PTGDR (NM_000953.2,1021-1039).
cgagccttgcgatttctat

SEQ ID NO: 238536 - DNA, 19 bp, Homo sapiens
  siRNA target sequence for PTGDR (NM_000953.2,1025-1043).
ccttgcgatttctatctgt

SEQ ID NO: 238537 - DNA, 19 bp, Homo sapiens
  siRNA target sequence for PTGDR (NM_000953.2,1029-1047).
gcgatttctatctgtgatt

SEQ ID NO: 238538 - DNA, 19 bp, Homo sapiens
  siRNA target sequence for PTGDR (NM_000953.2,1030-1048).
cgatttctatctgtgattt

SEQ ID NO: 238539 - DNA, 19 bp, Homo sapiens
  siRNA target sequence for TBXA2R (NM_001060.2,448-466).
ggcgtcgtcatgatcttct

SEQ ID NO: 238540 - DNA, 19 bp, Homo sapiens
  siRNA target sequence for TBXA2R (NM_001060.2,449-467).
gcgtcgtcatgatcttctt

SEQ ID NO: 238541 - DNA, 19 bp, Homo sapiens
  siRNA target sequence for EDG1 (NM_001400.2,295-313).
gactacgtcaactatgata

SEQ ID NO: 238542 - DNA, 19 bp, Homo sapiens
  siRNA target sequence for EDG1 (NM_001400.2,367-385).
gagaacagcattaaactga

SEQ ID NO: 238543 - DNA, 19 bp, Homo sapiens
  siRNA target sequence for EDG1 (NM_001400.2,389-407).
cggtggtgttcattctcat

SEQ ID NO: 238544 - DNA, 19 bp, Homo sapiens
  siRNA target sequence for EDG1 (NM_001400.2,455-473).
ggaaaaccaagaaattcca

SEQ ID NO: 238545 - DNA, 19 bp, Homo sapiens
  siRNA target sequence for EDG1 (NM_001400.2,475-493).
cgacccatgtactatttta

SEQ ID NO: 238546 - DNA, 19 bp, Homo sapiens
  siRNA target sequence for EDG1 (NM_001400.2,600-618).
gcgggaagggagtatgttt

SEQ ID NO: 238547 - DNA, 19 bp, Homo sapiens
  siRNA target sequence for EDG1 (NM_001400.2,658-676).
gccattgagcgctatatca

SEQ ID NO: 238548 - DNA, 19 bp, Homo sapiens
  siRNA target sequence for EDG1 (NM_001400.2,660-678).
cattgagcgctatatcaca

SEQ ID NO: 238549 - DNA, 19 bp, Homo sapiens
  siRNA target sequence for EDG1 (NM_001400.2,697-715).
cacaacgggagcaataact

SEQ ID NO: 238550 - DNA, 19 bp, Homo sapiens
  siRNA target sequence for EDG1 (NM_001400.2,718-736).
cgcctcttcctgctaatca

SEQ ID NO: 238551 - DNA, 19 bp, Homo sapiens
  siRNA target sequence for EDG1 (NM_001400.2,886-904).
ctctccatcgtcattctgt

SEQ ID NO: 238552 - DNA, 19 bp, Homo sapiens
  siRNA target sequence for EDG1 (NM_001400.2,901-919).
ctgtactgcagaatctact

SEQ ID NO: 238553 - DNA, 19 bp, Homo sapiens
  siRNA target sequence for EDG1 (NM_001400.2,1002-1020).
gctgctcaagaccgtaatt

SEQ ID NO: 238554 - DNA, 19 bp, Homo sapiens
  siRNA target sequence for EDG1 (NM_001400.2,1003-1021).
ctgctcaagaccgtaatta

SEQ ID NO: 238555 - DNA, 19 bp, Homo sapiens
  siRNA target sequence for EDG1 (NM_001400.2,1204-1222).
gccttcatccggatcatgt

SEQ ID NO: 238556 - DNA, 19 bp, Homo sapiens
  siRNA target sequence for EDG1 (NM_001400.2,1297-1315).
cgcagcaaatcggacaatt

SEQ ID NO: 238557 - DNA, 19 bp, Homo sapiens
  siRNA target sequence for EDG1 (NM_001400.2,1342-1360).
gacaacccagagaccatta

SEQ ID NO: 238558 - DNA, 19 bp, Homo sapiens
  siRNA target sequence for EDG1 (NM_001400.2,1348-1366).
ccagagaccattatgtctt

SEQ ID NO: 238559 - DNA, 19 bp, Homo sapiens
  siRNA target sequence for EDG2 (NM_001401.2,511-529).
cttggaatcactgtttgta

SEQ ID NO: 238560 - DNA, 19 bp, Homo sapiens
  siRNA target sequence for EDG2 (NM_001401.2,640-658).
gctgggttggcctacttct

SEQ ID NO: 238561 - DNA, 19 bp, Homo sapiens
  siRNA target sequence for EDG2 (NM_001401.2,641-659).
ctgggttggcctacttcta

SEQ ID NO: 238562 - DNA, 19 bp, Homo sapiens
  siRNA target sequence for EDG2 (NM_001401.2,644-662).
ggttggcctacttctatct

SEQ ID NO: 238563 - DNA, 19 bp, Homo sapiens
  siRNA target sequence for EDG2 (NM_001401.2,669-687).
caacacaggacccaatact

SEQ ID NO: 238564 - DNA, 19 bp, Homo sapiens
  siRNA target sequence for EDG2 (NM_001401.2,775-793).
gcaatcgagaggcacatta

SEQ ID NO: 238565 - DNA, 19 bp, Homo sapiens
  siRNA target sequence for EDG2 (NM_001401.2,863-881).
ggactatggccatcgttat

SEQ ID NO: 238566 - DNA, 19 bp, Homo sapiens
  siRNA target sequence for EDG2 (NM_001401.2,873-891).
catcgttatgggtgctata

SEQ ID NO: 238567 - DNA, 19 bp, Homo sapiens
  siRNA target sequence for EDG2 (NM_001401.2,898-916).
gtgggctggaactgtatct

SEQ ID NO: 238568 - DNA, 19 bp, Homo sapiens
  siRNA target sequence for EDG2 (NM_001401.2,949-967).
ctctacagtgactcttact

SEQ ID NO: 238569 - DNA, 19 bp, Homo sapiens
  siRNA target sequence for EDG2 (NM_001401.2,1005-1023).
ggtaatggtggttctctat

SEQ ID NO: 238570 - DNA, 19 bp, Homo sapiens
  siRNA target sequence for EDG2 (NM_001401.2,1042-1060).
gttcgccagaggactatga

SEQ ID NO: 238571 - DNA, 19 bp, Homo sapiens
  siRNA target sequence for EDG2 (NM_001401.2,1135-1153).
gtgcttggggcctttatca

SEQ ID NO: 238572 - DNA, 19 bp, Homo sapiens
  siRNA target sequence for EDG2 (NM_001401.2,1281-1299).
ctcctaccgcgacaaagaa

SEQ ID NO: 238573 - DNA, 19 bp, Homo sapiens
  siRNA target sequence for EDG2 (NM_001401.2,1297-1315).
gaaatgagcgccaccttta

SEQ ID NO: 238574 - DNA, 19 bp, Homo sapiens
  siRNA target sequence for EDG4 (NM_004720.3,288-306).
ccgcacagcccgactttca

SEQ ID NO: 238575 - DNA, 19 bp, Homo sapiens
  siRNA target sequence for EDG4 (NM_004720.3,290-308).
gcacagcccgactttcact

SEQ ID NO: 238576 - DNA, 19 bp, Homo sapiens
  siRNA target sequence for EDG4 (NM_004720.3,443-461).
gcgtggtcatgctcattgt

SEQ ID NO: 238577 - DNA, 19 bp, Homo sapiens
  siRNA target sequence for EDG4 (NM_004720.3,556-574).
ctgctcagccgctcctatt

SEQ ID NO: 238578 - DNA, 19 bp, Homo sapiens
  siRNA target sequence for EDG4 (NM_004720.3,819-837).
caatgtcctggctgtagaa

SEQ ID NO: 238579 - DNA, 19 bp, Homo sapiens
  siRNA target sequence for EDG4 (NM_004720.3,823-841).
gtcctggctgtagaaaagt

SEQ ID NO: 238580 - DNA, 19 bp, Homo sapiens
  siRNA target sequence for EDG4 (NM_004720.3,964-982).
cgcgagtctgtccactata

SEQ ID NO: 238581 - DNA, 19 bp, Homo sapiens
  siRNA target sequence for EDG4 (NM_004720.3,966-984).
cgagtctgtccactataca

SEQ ID NO: 238582 - DNA, 19 bp, Homo sapiens
  siRNA target sequence for EDG8 (NM_030760.2,152-170).
ccttcatcgtgctagagaa

SEQ ID NO: 238583 - DNA, 19 bp, Homo sapiens
  siRNA target sequence for EDG8 (NM_030760.2,156-174).
catcgtgctagagaatcta

SEQ ID NO: 238584 - DNA, 19 bp, Homo sapiens
  siRNA target sequence for EDG8 (NM_030760.2,301-319).
ccgctcacgctgaaactgt

SEQ ID NO: 238585 - DNA, 19 bp, Homo sapiens
  siRNA target sequence for EDG8 (NM_030760.2,1173-1191).
ccggactctggtatcagaa

SEQ ID NO: 238586 - DNA, 19 bp, Homo sapiens
  siRNA target sequence for TSHR (NM_000369.1,261-279).
cgcagactctgaagcttat

SEQ ID NO: 238587 - DNA, 19 bp, Homo sapiens
  siRNA target sequence for TSHR (NM_000369.1,281-299).
gagactcacctgagaacta

SEQ ID NO: 238588 - DNA, 19 bp, Homo sapiens
  siRNA target sequence for TSHR (NM_000369.1,283-301).
gactcacctgagaactatt

SEQ ID NO: 238589 - DNA, 19 bp, Homo sapiens
  siRNA target sequence for TSHR (NM_000369.1,292-310).
gagaactattccaagtcat

SEQ ID NO: 238590 - DNA, 19 bp, Homo sapiens
  siRNA target sequence for TSHR (NM_000369.1,326-344).
cccaatatttccagaatct

SEQ ID NO: 238591 - DNA, 19 bp, Homo sapiens
  siRNA target sequence for TSHR (NM_000369.1,327-345).
ccaatatttccagaatcta

SEQ ID NO: 238592 - DNA, 19 bp, Homo sapiens
  siRNA target sequence for TSHR (NM_000369.1,336-354).
ccagaatctacgtatctat

SEQ ID NO: 238593 - DNA, 19 bp, Homo sapiens
  siRNA target sequence for TSHR (NM_000369.1,337-355).
cagaatctacgtatctata

SEQ ID NO: 238594 - DNA, 19 bp, Homo sapiens
  siRNA target sequence for TSHR (NM_000369.1,339-357).
gaatctacgtatctataga

SEQ ID NO: 238595 - DNA, 19 bp, Homo sapiens
  siRNA target sequence for TSHR (NM_000369.1,377-395).
gaatcacactccttctaca

SEQ ID NO: 238596 - DNA, 19 bp, Homo sapiens
  siRNA target sequence for TSHR (NM_000369.1,388-406).
cttctacaatttgagtaaa

SEQ ID NO: 238597 - DNA, 19 bp, Homo sapiens
  siRNA target sequence for TSHR (NM_000369.1,402-420).
gtaaagtgactcacataga

SEQ ID NO: 238598 - DNA, 19 bp, Homo sapiens
  siRNA target sequence for TSHR (NM_000369.1,427-445).
gaataccaggaacttaact

SEQ ID NO: 238599 - DNA, 19 bp, Homo sapiens
  siRNA target sequence for TSHR (NM_000369.1,549-567).
ctgatatattctttatact

SEQ ID NO: 238600 - DNA, 19 bp, Homo sapiens
  siRNA target sequence for TSHR (NM_000369.1,621-639).
gactatgcaatgaaacctt

SEQ ID NO: 238601 - DNA, 19 bp, Homo sapiens
  siRNA target sequence for TSHR (NM_000369.1,652-670).
gtacaacaatggctttact

SEQ ID NO: 238602 - DNA, 19 bp, Homo sapiens
  siRNA target sequence for TSHR (NM_000369.1,655-673).
caacaatggctttacttca

SEQ ID NO: 238603 - DNA, 19 bp, Homo sapiens
  siRNA target sequence for TSHR (NM_000369.1,672-690).
cagtccaaggatatgcttt

SEQ ID NO: 238604 - DNA, 19 bp, Homo sapiens
  siRNA target sequence for TSHR (NM_000369.1,707-725).
gatgctgtttacctaaaca

SEQ ID NO: 238605 - DNA, 19 bp, Homo sapiens
  siRNA target sequence for TSHR (NM_000369.1,710-728).
gctgtttacctaaacaaga

SEQ ID NO: 238606 - DNA, 19 bp, Homo sapiens
  siRNA target sequence for TSHR (NM_000369.1,713-731).
gtttacctaaacaagaata

SEQ ID NO: 238607 - DNA, 19 bp, Homo sapiens
  siRNA target sequence for TSHR (NM_000369.1,758-776).
gcatttggaggagtataca

SEQ ID NO: 238608 - DNA, 19 bp, Homo sapiens
  siRNA target sequence for TSHR (NM_000369.1,918-936).
cacgggctgacctttctta

SEQ ID NO: 238609 - DNA, 19 bp, Homo sapiens
  siRNA target sequence for TSHR (NM_000369.1,951-969).
gtgcttttaagaatcagaa

SEQ ID NO: 238610 - DNA, 19 bp, Homo sapiens
  siRNA target sequence for TSHR (NM_000369.1,1021-1039).
gagcttgcgccagagaaaa

SEQ ID NO: 238611 - DNA, 19 bp, Homo sapiens
  siRNA target sequence for TSHR (NM_000369.1,1103-1121).
gttgggtacaaggaaaagt

SEQ ID NO: 238612 - DNA, 19 bp, Homo sapiens
  siRNA target sequence for TSHR (NM_000369.1,1122-1140).
ccaagttccaggatactca

SEQ ID NO: 238613 - DNA, 19 bp, Homo sapiens
  siRNA target sequence for TSHR (NM_000369.1,1123-1141).
caagttccaggatactcat

SEQ ID NO: 238614 - DNA, 19 bp, Homo sapiens
  siRNA target sequence for TSHR (NM_000369.1,1137-1155).
ctcataacaacgctcatta

SEQ ID NO: 238615 - DNA, 19 bp, Homo sapiens
  siRNA target sequence for TSHR (NM_000369.1,1139-1157).
cataacaacgctcattatt

SEQ ID NO: 238616 - DNA, 19 bp, Homo sapiens
  siRNA target sequence for TSHR (NM_000369.1,1149-1167).
ctcattattacgtcttctt

SEQ ID NO: 238617 - DNA, 19 bp, Homo sapiens
  siRNA target sequence for TSHR (NM_000369.1,1250-1268).
cattatgactacaccatat

SEQ ID NO: 238618 - DNA, 19 bp, Homo sapiens
  siRNA target sequence for TSHR (NM_000369.1,1296-1314).
cccccaagtccgatgagtt

SEQ ID NO: 238619 - DNA, 19 bp, Homo sapiens
  siRNA target sequence for TSHR (NM_000369.1,1328-1346).
gacataatgggctacaagt

SEQ ID NO: 238620 - DNA, 19 bp, Homo sapiens
  siRNA target sequence for TSHR (NM_000369.1,1338-1356).
gctacaagttcctgagaat

SEQ ID NO: 238621 - DNA, 19 bp, Homo sapiens
  siRNA target sequence for TSHR (NM_000369.1,1339-1357).
ctacaagttcctgagaatt

SEQ ID NO: 238622 - DNA, 19 bp, Homo sapiens
  siRNA target sequence for TSHR (NM_000369.1,1530-1548).
ctcactctgagtactacaa

SEQ ID NO: 238623 - DNA, 19 bp, Homo sapiens
  siRNA target sequence for TSHR (NM_000369.1,1581-1599).
gcaacacggctggtttctt

SEQ ID NO: 238624 - DNA, 19 bp, Homo sapiens
  siRNA target sequence for TSHR (NM_000369.1,1604-1622).
gtctttgcaagcgagttat

SEQ ID NO: 238625 - DNA, 19 bp, Homo sapiens
  siRNA target sequence for TSHR (NM_000369.1,1829-1847).
cctcttgctctggcatata

SEQ ID NO: 238626 - DNA, 19 bp, Homo sapiens
  siRNA target sequence for TSHR (NM_000369.1,1835-1853).
gctctggcatatattgttt

SEQ ID NO: 238627 - DNA, 19 bp, Homo sapiens
  siRNA target sequence for TSHR (NM_000369.1,1944-1962).
caggggacaaagataccaa

SEQ ID NO: 238628 - DNA, 19 bp, Homo sapiens
  siRNA target sequence for TSHR (NM_000369.1,2007-2025).
gcatggccccaatctcatt

SEQ ID NO: 238629 - DNA, 19 bp, Homo sapiens
  siRNA target sequence for TSHR (NM_000369.1,2011-2029).
ggccccaatctcattctat

SEQ ID NO: 238630 - DNA, 19 bp, Homo sapiens
  siRNA target sequence for TSHR (NM_000369.1,2026-2044).
ctatgctctgtcagcaatt

SEQ ID NO: 238631 - DNA, 19 bp, Homo sapiens
  siRNA target sequence for TSHR (NM_000369.1,2030-2048).
gctctgtcagcaattctga

SEQ ID NO: 238632 - DNA, 19 bp, Homo sapiens
  siRNA target sequence for TSHR (NM_000369.1,2031-2049).
ctctgtcagcaattctgaa

SEQ ID NO: 238633 - DNA, 19 bp, Homo sapiens
  siRNA target sequence for TSHR (NM_000369.1,2055-2073).
ctctcatcactgttagcaa

SEQ ID NO: 238634 - DNA, 19 bp, Homo sapiens
  siRNA target sequence for TSHR (NM_000369.1,2083-2101).
cttgctggtactcttctat

SEQ ID NO: 238635 - DNA, 19 bp, Homo sapiens
  siRNA target sequence for TSHR (NM_000369.1,2123-2141).
ccattcctctatgctattt

SEQ ID NO: 238636 - DNA, 19 bp, Homo sapiens
  siRNA target sequence for TSHR (NM_000369.1,2170-2188).
catcctactcagcaagttt

SEQ ID NO: 238637 - DNA, 19 bp, Homo sapiens
  siRNA target sequence for TSHR (NM_000369.1,2181-2199).
gcaagtttggcatctgtaa

SEQ ID NO: 238638 - DNA, 19 bp, Homo sapiens
  siRNA target sequence for TSHR (NM_000369.1,2302-2320).
catggaagatgtctatgaa

SEQ ID NO: 238639 - DNA, 19 bp, Homo sapiens
  siRNA target sequence for GNRHR (NM_000406.1,1759-1777).
gtgcctctcctgaacagaa

SEQ ID NO: 238640 - DNA, 19 bp, Homo sapiens
  siRNA target sequence for GNRHR (NM_000406.1,1860-1878).
cgagtgacggttactttct

SEQ ID NO: 238641 - DNA, 19 bp, Homo sapiens
  siRNA target sequence for GNRHR (NM_000406.1,1861-1879).
gagtgacggttactttctt

SEQ ID NO: 238642 - DNA, 19 bp, Homo sapiens
  siRNA target sequence for GNRHR (NM_000406.1,1889-1907).
gctctctgcgacctttaat

SEQ ID NO: 238643 - DNA, 19 bp, Homo sapiens
  siRNA target sequence for GNRHR (NM_000406.1,1892-1910).
ctctgcgacctttaatgct

SEQ ID NO: 238644 - DNA, 19 bp, Homo sapiens
  siRNA target sequence for GNRHR (NM_000406.1,1897-1915).
cgacctttaatgcttcttt

SEQ ID NO: 238645 - DNA, 19 bp, Homo sapiens
  siRNA target sequence for GNRHR (NM_000406.1,2039-2057).
ggatgggatgtggaacatt

SEQ ID NO: 238646 - DNA, 19 bp, Homo sapiens
  siRNA target sequence for GNRHR (NM_000406.1,2040-2058).
gatgggatgtggaacatta

SEQ ID NO: 238647 - DNA, 19 bp, Homo sapiens
  siRNA target sequence for GNRHR (NM_000406.1,2054-2072).
cattacagtccaatggtat

SEQ ID NO: 238648 - DNA, 19 bp, Homo sapiens
  siRNA target sequence for GNRHR (NM_000406.1,2068-2086).
ggtatgctggagagttact

SEQ ID NO: 238649 - DNA, 19 bp, Homo sapiens
  siRNA target sequence for GNRHR (NM_000406.1,2097-2115).
ctcagttatctaaagcttt

SEQ ID NO: 238650 - DNA, 19 bp, Homo sapiens
  siRNA target sequence for GNRHR (NM_000406.1,2179-2197).
cgaggcccctagctttgaa

SEQ ID NO: 238651 - DNA, 19 bp, Homo sapiens
  siRNA target sequence for GNRHR (NM_000406.1,2180-2198).
gaggcccctagctttgaaa

SEQ ID NO: 238652 - DNA, 19 bp, Homo sapiens
  siRNA target sequence for GNRHR (NM_000406.1,2184-2202).
cccctagctttgaaaagca

SEQ ID NO: 238653 - DNA, 19 bp, Homo sapiens
  siRNA target sequence for GNRHR (NM_000406.1,2185-2203).
ccctagctttgaaaagcaa

SEQ ID NO: 238654 - DNA, 19 bp, Homo sapiens
  siRNA target sequence for GNRHR (NM_000406.1,2259-2277).
gcaggaccacagttataca

SEQ ID NO: 238655 - DNA, 19 bp, Homo sapiens
  siRNA target sequence for GNRHR (NM_000406.1,2260-2278).
caggaccacagttatacat

SEQ ID NO: 238656 - DNA, 19 bp, Homo sapiens
  siRNA target sequence for GNRHR (NM_000406.1,2263-2281).
gaccacagttatacatctt

SEQ ID NO: 238657 - DNA, 19 bp, Homo sapiens
  siRNA target sequence for GNRHR (NM_000406.1,2322-2340).
gttttctctcaatgtgtaa

SEQ ID NO: 238658 - DNA, 19 bp, Homo sapiens
  siRNA target sequence for GNRHR (NM_000406.1,2362-2380).
ggtggcatcaagcatttta

SEQ ID NO: 238659 - DNA, 19 bp, Homo sapiens
  siRNA target sequence for GNRHR (NM_000406.1,2363-2381).
gtggcatcaagcattttat

SEQ ID NO: 238660 - DNA, 19 bp, Homo sapiens
  siRNA target sequence for GNRHR (NM_000406.1,2480-2498).
ggacccccacgaactacaa

SEQ ID NO: 238661 - DNA, 19 bp, Homo sapiens
  siRNA target sequence for GNRHR (NM_000406.1,2490-2508).
gaactacaactgaatcagt

SEQ ID NO: 238662 - DNA, 19 bp, Homo sapiens
  siRNA target sequence for GNRHR (NM_000406.1,2501-2519).
gaatcagtccaagaacaat

SEQ ID NO: 238663 - DNA, 19 bp, Homo sapiens
  siRNA target sequence for GNRHR (NM_000406.1,2507-2525).
gtccaagaacaatatacca

SEQ ID NO: 238664 - DNA, 19 bp, Homo sapiens
  siRNA target sequence for GNRHR (NM_000406.1,2529-2547).
gcacggctgaagactctaa

SEQ ID NO: 238665 - DNA, 19 bp, Homo sapiens
  siRNA target sequence for GNRHR (NM_000406.1,2530-2548).
cacggctgaagactctaaa

SEQ ID NO: 238666 - DNA, 19 bp, Homo sapiens
  siRNA target sequence for GNRHR (NM_000406.1,2532-2550).
cggctgaagactctaaaaa

SEQ ID NO: 238667 - DNA, 19 bp, Homo sapiens
  siRNA target sequence for GNRHR (NM_000406.1,2535-2553).
ctgaagactctaaaaatga

SEQ ID NO: 238668 - DNA, 19 bp, Homo sapiens
  siRNA target sequence for GNRHR (NM_000406.1,2582-2600).
ctgctggactccctactat

SEQ ID NO: 238669 - DNA, 19 bp, Homo sapiens
  siRNA target sequence for GNRHR (NM_000406.1,2644-2662).
ggttgtcagacccagtaaa

SEQ ID NO: 238670 - DNA, 19 bp, Homo sapiens
  siRNA target sequence for GNRHR (NM_000406.1,2645-2663).
gttgtcagacccagtaaat

SEQ ID NO: 238671 - DNA, 19 bp, Homo sapiens
  siRNA target sequence for GNRHR (NM_000406.1,2650-2668).
cagacccagtaaatcactt

SEQ ID NO: 238672 - DNA, 19 bp, Homo sapiens
  siRNA target sequence for GNRHR (NM_000406.1,2703-2721).
gatccacttatctatggat

SEQ ID NO: 238673 - DNA, 19 bp, Homo sapiens
  siRNA target sequence for FSHR (NM_000145.2,206-224).
cccgaggaatgccattgaa

SEQ ID NO: 238674 - DNA, 19 bp, Homo sapiens
  siRNA target sequence for FSHR (NM_000145.2,208-226).
cgaggaatgccattgaact

SEQ ID NO: 238675 - DNA, 19 bp, Homo sapiens
  siRNA target sequence for FSHR (NM_000145.2,245-263).
gcttcgagtcatccaaaaa

SEQ ID NO: 238676 - DNA, 19 bp, Homo sapiens
  siRNA target sequence for FSHR (NM_000145.2,353-371).
ccttcccaaattacatgaa

SEQ ID NO: 238677 - DNA, 19 bp, Homo sapiens
  siRNA target sequence for FSHR (NM_000145.2,441-459).
caatatctgttaatatcca

SEQ ID NO: 238678 - DNA, 19 bp, Homo sapiens
  siRNA target sequence for FSHR (NM_000145.2,536-554).
cataaacatccacacaatt

SEQ ID NO: 238679 - DNA, 19 bp, Homo sapiens
  siRNA target sequence for FSHR (NM_000145.2,572-590).
ggggctgagctttgaaagt

SEQ ID NO: 238680 - DNA, 19 bp, Homo sapiens
  siRNA target sequence for FSHR (NM_000145.2,574-592).
ggctgagctttgaaagtgt

SEQ ID NO: 238681 - DNA, 19 bp, Homo sapiens
  siRNA target sequence for FSHR (NM_000145.2,580-598).
gctttgaaagtgtgattct

SEQ ID NO: 238682 - DNA, 19 bp, Homo sapiens
  siRNA target sequence for FSHR (NM_000145.2,581-599).
ctttgaaagtgtgattcta

SEQ ID NO: 238683 - DNA, 19 bp, Homo sapiens
  siRNA target sequence for FSHR (NM_000145.2,611-629).
gaatgggattcaagaaata

SEQ ID NO: 238684 - DNA, 19 bp, Homo sapiens
  siRNA target sequence for FSHR (NM_000145.2,615-633).
gggattcaagaaatacaca

SEQ ID NO: 238685 - DNA, 19 bp, Homo sapiens
  siRNA target sequence for FSHR (NM_000145.2,644-662).
caatggaacccaactagat

SEQ ID NO: 238686 - DNA, 19 bp, Homo sapiens
  siRNA target sequence for FSHR (NM_000145.2,665-683).
gctgaatctaagcgataat

SEQ ID NO: 238687 - DNA, 19 bp, Homo sapiens
  siRNA target sequence for FSHR (NM_000145.2,666-684).
ctgaatctaagcgataata

SEQ ID NO: 238688 - DNA, 19 bp, Homo sapiens
  siRNA target sequence for FSHR (NM_000145.2,668-686).
gaatctaagcgataataat

SEQ ID NO: 238689 - DNA, 19 bp, Homo sapiens
  siRNA target sequence for FSHR (NM_000145.2,676-694).
gcgataataataatttaga

SEQ ID NO: 238690 - DNA, 19 bp, Homo sapiens
  siRNA target sequence for FSHR (NM_000145.2,677-695).
cgataataataatttagaa

SEQ ID NO: 238691 - DNA, 19 bp, Homo sapiens
  siRNA target sequence for FSHR (NM_000145.2,696-714).
gaattgcctaatgatgttt

SEQ ID NO: 238692 - DNA, 19 bp, Homo sapiens
  siRNA target sequence for FSHR (NM_000145.2,729-747).
ggaccagtcattctagata

SEQ ID NO: 238693 - DNA, 19 bp, Homo sapiens
  siRNA target sequence for FSHR (NM_000145.2,778-796).
gctatggcttagaaaatct

SEQ ID NO: 238694 - DNA, 19 bp, Homo sapiens
  siRNA target sequence for FSHR (NM_000145.2,779-797).
ctatggcttagaaaatctt

SEQ ID NO: 238695 - DNA, 19 bp, Homo sapiens
  siRNA target sequence for FSHR (NM_000145.2,810-828).
gccaggtcgacttacaact

SEQ ID NO: 238696 - DNA, 19 bp, Homo sapiens
  siRNA target sequence for FSHR (NM_000145.2,811-829).
ccaggtcgacttacaactt

SEQ ID NO: 238697 - DNA, 19 bp, Homo sapiens
  siRNA target sequence for FSHR (NM_000145.2,812-830).
caggtcgacttacaactta

SEQ ID NO: 238698 - DNA, 19 bp, Homo sapiens
  siRNA target sequence for FSHR (NM_000145.2,814-832).
ggtcgacttacaacttaaa

SEQ ID NO: 238699 - DNA, 19 bp, Homo sapiens
  siRNA target sequence for FSHR (NM_000145.2,815-833).
gtcgacttacaacttaaaa

SEQ ID NO: 238700 - DNA, 19 bp, Homo sapiens
  siRNA target sequence for FSHR (NM_000145.2,894-912).
cattgctgtgcctttgcaa

SEQ ID NO: 238701 - DNA, 19 bp, Homo sapiens
  siRNA target sequence for FSHR (NM_000145.2,1055-1073).
catgacgtacactgagttt

SEQ ID NO: 238702 - DNA, 19 bp, Homo sapiens
  siRNA target sequence for FSHR (NM_000145.2,1060-1078).
cgtacactgagtttgacta

SEQ ID NO: 238703 - DNA, 19 bp, Homo sapiens
  siRNA target sequence for FSHR (NM_000145.2,1061-1079).
gtacactgagtttgactat

SEQ ID NO: 238704 - DNA, 19 bp, Homo sapiens
  siRNA target sequence for FSHR (NM_000145.2,1068-1086).
gagtttgactatgacttat

SEQ ID NO: 238705 - DNA, 19 bp, Homo sapiens
  siRNA target sequence for FSHR (NM_000145.2,1114-1132).
cccctaagccagatgcatt

SEQ ID NO: 238706 - DNA, 19 bp, Homo sapiens
  siRNA target sequence for FSHR (NM_000145.2,1146-1164).
gatatcatggggtacaaca

SEQ ID NO: 238707 - DNA, 19 bp, Homo sapiens
  siRNA target sequence for FSHR (NM_000145.2,1171-1189).
gagtcctgatatggtttat

SEQ ID NO: 238708 - DNA, 19 bp, Homo sapiens
  siRNA target sequence for FSHR (NM_000145.2,1221-1239).
gtgctagtgatcctaacta

SEQ ID NO: 238709 - DNA, 19 bp, Homo sapiens
  siRNA target sequence for FSHR (NM_000145.2,1232-1250).
cctaactaccagccaatat

SEQ ID NO: 238710 - DNA, 19 bp, Homo sapiens
  siRNA target sequence for FSHR (NM_000145.2,1233-1251).
ctaactaccagccaatata

SEQ ID NO: 238711 - DNA, 19 bp, Homo sapiens
  siRNA target sequence for FSHR (NM_000145.2,1260-1278).
gtccccaggttccttatgt

SEQ ID NO: 238712 - DNA, 19 bp, Homo sapiens
  siRNA target sequence for FSHR (NM_000145.2,1294-1312).
ctgatctctgcattggaat

SEQ ID NO: 238713 - DNA, 19 bp, Homo sapiens
  siRNA target sequence for FSHR (NM_000145.2,1329-1347).
gcatcagttgatatccata

SEQ ID NO: 238714 - DNA, 19 bp, Homo sapiens
  siRNA target sequence for FSHR (NM_000145.2,1333-1351).
cagttgatatccataccaa

SEQ ID NO: 238715 - DNA, 19 bp, Homo sapiens
  siRNA target sequence for FSHR (NM_000145.2,1348-1366).
ccaagagccaatatcacaa

SEQ ID NO: 238716 - DNA, 19 bp, Homo sapiens
  siRNA target sequence for FSHR (NM_000145.2,1626-1644).
ctgcccatggatattgaca

SEQ ID NO: 238717 - DNA, 19 bp, Homo sapiens
  siRNA target sequence for FSHR (NM_000145.2,1672-1690).
ccctccttgtgctcaatgt

SEQ ID NO: 238718 - DNA, 19 bp, Homo sapiens
  siRNA target sequence for FSHR (NM_000145.2,1714-1732).
gctgctatatccacatcta

SEQ ID NO: 238719 - DNA, 19 bp, Homo sapiens
  siRNA target sequence for FSHR (NM_000145.2,2022-2040).
caagcccaaatttatagga

SEQ ID NO: 238720 - DNA, 19 bp, Homo sapiens
  siRNA target sequence for FSHR (NM_000145.2,2111-2129).
cagtggttccacttacata

SEQ ID NO: 238721 - DNA, 19 bp, Homo sapiens
  siRNA target sequence for FSHR (NM_000145.2,2116-2134).
gttccacttacatacttgt

SEQ ID NO: 238722 - DNA, 19 bp, Homo sapiens
  siRNA target sequence for FSHR (NM_000145.2,2126-2144).
catacttgtccctctaagt

SEQ ID NO: 238723 - DNA, 19 bp, Homo sapiens
  siRNA target sequence for GPR24 (NM_005297.2,521-539).
ggagcatctcctacatcaa

SEQ ID NO: 238724 - DNA, 19 bp, Homo sapiens
  siRNA target sequence for GPR24 (NM_005297.2,669-687).
caacctctcggtagtagat

SEQ ID NO: 238725 - DNA, 19 bp, Homo sapiens
  siRNA target sequence for GPR24 (NM_005297.2,1273-1291).
ccgaccctcacctttgtct

SEQ ID NO: 238726 - DNA, 19 bp, Homo sapiens
  siRNA target sequence for GPR24 (NM_005297.2,1274-1292).
cgaccctcacctttgtcta

SEQ ID NO: 238727 - DNA, 19 bp, Homo sapiens
  siRNA target sequence for GPR105 (NM_014879.1,300-318).
gtactgtatggtcttcatt

SEQ ID NO: 238728 - DNA, 19 bp, Homo sapiens
  siRNA target sequence for GPR105 (NM_014879.1,347-365).
gatggatattcttttacgt

SEQ ID NO: 238729 - DNA, 19 bp, Homo sapiens
  siRNA target sequence for GPR105 (NM_014879.1,363-381).
cgtgcccagctctaagagt

SEQ ID NO: 238730 - DNA, 19 bp, Homo sapiens
  siRNA target sequence for GPR105 (NM_014879.1,371-389).
gctctaagagtttcatcat

SEQ ID NO: 238731 - DNA, 19 bp, Homo sapiens
  siRNA target sequence for GPR105 (NM_014879.1,380-398).
gtttcatcatctatctcaa

SEQ ID NO: 238732 - DNA, 19 bp, Homo sapiens
  siRNA target sequence for GPR105 (NM_014879.1,396-414).
caagaacattgttattgct

SEQ ID NO: 238733 - DNA, 19 bp, Homo sapiens
  siRNA target sequence for GPR105 (NM_014879.1,406-424).
gttattgctgactttgtga

SEQ ID NO: 238734 - DNA, 19 bp, Homo sapiens
  siRNA target sequence for GPR105 (NM_014879.1,534-552).
cgtcagcattgtgttcttt

SEQ ID NO: 238735 - DNA, 19 bp, Homo sapiens
  siRNA target sequence for GPR105 (NM_014879.1,630-648).
caaacttctgtcagtgata

SEQ ID NO: 238736 - DNA, 19 bp, Homo sapiens
  siRNA target sequence for GPR105 (NM_014879.1,667-685).
ctccttgctgttccaaata

SEQ ID NO: 238737 - DNA, 19 bp, Homo sapiens
  siRNA target sequence for GPR105 (NM_014879.1,670-688).
cttgctgttccaaatatta

SEQ ID NO: 238738 - DNA, 19 bp, Homo sapiens
  siRNA target sequence for GPR105 (NM_014879.1,704-722).
gtgttagggaggttacaca

SEQ ID NO: 238739 - DNA, 19 bp, Homo sapiens
  siRNA target sequence for GPR105 (NM_014879.1,764-782).
ggcacaaagcatcaaacta

SEQ ID NO: 238740 - DNA, 19 bp, Homo sapiens
  siRNA target sequence for GPR105 (NM_014879.1,819-837).
gttaatcgttttctatact

SEQ ID NO: 238741 - DNA, 19 bp, Homo sapiens
  siRNA target sequence for GPR105 (NM_014879.1,903-921).
gaaatctagccgcaacata

SEQ ID NO: 238742 - DNA, 19 bp, Homo sapiens
  siRNA target sequence for GPR105 (NM_014879.1,970-988).
gccagaatcccctacacaa

SEQ ID NO: 238743 - DNA, 19 bp, Homo sapiens
  siRNA target sequence for GPR105 (NM_014879.1,992-1010).
gtcagaccgaagctcatta

SEQ ID NO: 238744 - DNA, 19 bp, Homo sapiens
  siRNA target sequence for GPR105 (NM_014879.1,994-1012).
cagaccgaagctcattaca

SEQ ID NO: 238745 - DNA, 19 bp, Homo sapiens
  siRNA target sequence for GPR105 (NM_014879.1,1078-1096).
gtatgcttggaccctatta

SEQ ID NO: 238746 - DNA, 19 bp, Homo sapiens
  siRNA target sequence for GPR105 (NM_014879.1,1082-1100).
gcttggaccctattattta

SEQ ID NO: 238747 - DNA, 19 bp, Homo sapiens
  siRNA target sequence for GPR105 (NM_014879.1,1083-1101).
cttggaccctattatttat

SEQ ID NO: 238748 - DNA, 19 bp, Homo sapiens
  siRNA target sequence for GPR105 (NM_014879.1,1114-1132).
cagccgtttagggaaatct

SEQ ID NO: 238749 - DNA, 19 bp, Homo sapiens
  siRNA target sequence for GPR105 (NM_014879.1,1116-1134).
gccgtttagggaaatctta

SEQ ID NO: 238750 - DNA, 19 bp, Homo sapiens
  siRNA target sequence for GPR105 (NM_014879.1,1117-1135).
ccgtttagggaaatcttat

SEQ ID NO: 238751 - DNA, 19 bp, Homo sapiens
  siRNA target sequence for GPR105 (NM_014879.1,1146-1164).
gcacattccattaaaagct

SEQ ID NO: 238752 - DNA, 19 bp, Homo sapiens
  siRNA target sequence for GPR105 (NM_014879.1,1163-1181).
ctcagaatgacctagacat

SEQ ID NO: 238753 - DNA, 19 bp, Homo sapiens
  siRNA target sequence for GPR105 (NM_014879.1,1210-1228).
cttgaaagcacagatactt

SEQ ID NO: 238754 - DNA, 19 bp, Homo sapiens
  siRNA target sequence for GPR105 (NM_014879.1,1213-1231).
gaaagcacagatactttgt

SEQ ID NO: 238755 - DNA, 19 bp, Homo sapiens
  siRNA target sequence for P2RY4 (NM_002565.2,252-270).
gctggactgttggtttgat

SEQ ID NO: 238756 - DNA, 19 bp, Homo sapiens
  siRNA target sequence for P2RY4 (NM_002565.2,344-362).
caaccctatggctcttcat

SEQ ID NO: 238757 - DNA, 19 bp, Homo sapiens
  siRNA target sequence for P2RY4 (NM_002565.2,385-403).
gcaacggccacctacatgt

SEQ ID NO: 238758 - DNA, 19 bp, Homo sapiens
  siRNA target sequence for P2RY4 (NM_002565.2,386-404).
caacggccacctacatgtt

SEQ ID NO: 238759 - DNA, 19 bp, Homo sapiens
  siRNA target sequence for P2RY4 (NM_002565.2,447-465).
caccctcatctactattat

SEQ ID NO: 238760 - DNA, 19 bp, Homo sapiens
  siRNA target sequence for P2RY4 (NM_002565.2,450-468).
cctcatctactattatgca

SEQ ID NO: 238761 - DNA, 19 bp, Homo sapiens
  siRNA target sequence for P2RY4 (NM_002565.2,511-529).
gtccgctttcttttctatt

SEQ ID NO: 238762 - DNA, 19 bp, Homo sapiens
  siRNA target sequence for P2RY4 (NM_002565.2,685-703).
cccaacctgttctttgtca

SEQ ID NO: 238763 - DNA, 19 bp, Homo sapiens
  siRNA target sequence for P2RY4 (NM_002565.2,743-761).
ccactcggcctgaagagtt

SEQ ID NO: 238764 - DNA, 19 bp, Homo sapiens
  siRNA target sequence for P2RY4 (NM_002565.2,822-840).
ggtcactcttgtttgctat

SEQ ID NO: 238765 - DNA, 19 bp, Homo sapiens
  siRNA target sequence for P2RY4 (NM_002565.2,1007-1025).
ctgactgccgagtactgaa

SEQ ID NO: 238766 - DNA, 19 bp, Homo sapiens
  siRNA target sequence for P2RY4 (NM_002565.2,1011-1029).
ctgccgagtactgaacatt

SEQ ID NO: 238767 - DNA, 19 bp, Homo sapiens
  siRNA target sequence for P2RY4 (NM_002565.2,1013-1031).
gccgagtactgaacattgt

SEQ ID NO: 238768 - DNA, 19 bp, Homo sapiens
  siRNA target sequence for P2RY4 (NM_002565.2,1256-1274).
ctcctagggcagatagatt

SEQ ID NO: 238769 - DNA, 19 bp, Homo sapiens
  siRNA target sequence for P2RY4 (NM_002565.2,1258-1276).
cctagggcagatagattgt

SEQ ID NO: 238770 - DNA, 19 bp, Homo sapiens
  siRNA target sequence for GPR86 (NM_023914.2,223-241).
gagacactcggatagtaca

SEQ ID NO: 238771 - DNA, 19 bp, Homo sapiens
  siRNA target sequence for GPR86 (NM_023914.2,258-276).
ctctacacagtggttttct

SEQ ID NO: 238772 - DNA, 19 bp, Homo sapiens
  siRNA target sequence for GPR86 (NM_023914.2,281-299).
cggcatcctgctgaatact

SEQ ID NO: 238773 - DNA, 19 bp, Homo sapiens
  siRNA target sequence for GPR86 (NM_023914.2,282-300).
ggcatcctgctgaatactt

SEQ ID NO: 238774 - DNA, 19 bp, Homo sapiens
  siRNA target sequence for GPR86 (NM_023914.2,302-320).
ggctctgtgggtgtttgtt

SEQ ID NO: 238775 - DNA, 19 bp, Homo sapiens
  siRNA target sequence for GPR86 (NM_023914.2,347-365).
catctacctcaaaaacact

SEQ ID NO: 238776 - DNA, 19 bp, Homo sapiens
  siRNA target sequence for GPR86 (NM_023914.2,364-382).
ctttggtggccgacttgat

SEQ ID NO: 238777 - DNA, 19 bp, Homo sapiens
  siRNA target sequence for GPR86 (NM_023914.2,388-406).
cactcatgcttcctttcaa

SEQ ID NO: 238778 - DNA, 19 bp, Homo sapiens
  siRNA target sequence for GPR86 (NM_023914.2,466-484).
cttcggtgatattttatga

SEQ ID NO: 238779 - DNA, 19 bp, Homo sapiens
  siRNA target sequence for GPR86 (NM_023914.2,513-531).
gggctcatagcctttgaca

SEQ ID NO: 238780 - DNA, 19 bp, Homo sapiens
  siRNA target sequence for GPR86 (NM_023914.2,670-688).
caccatcgtctgtgaaaaa

SEQ ID NO: 238781 - DNA, 19 bp, Homo sapiens
  siRNA target sequence for GPR86 (NM_023914.2,672-690).
ccatcgtctgtgaaaaagt

SEQ ID NO: 238782 - DNA, 19 bp, Homo sapiens
  siRNA target sequence for GPR86 (NM_023914.2,714-732).
gggctgaaatggcatcaaa

SEQ ID NO: 238783 - DNA, 19 bp, Homo sapiens
  siRNA target sequence for GPR86 (NM_023914.2,715-733).
ggctgaaatggcatcaaat

SEQ ID NO: 238784 - DNA, 19 bp, Homo sapiens
  siRNA target sequence for GPR86 (NM_023914.2,763-781).
ggactgtttttatcctaat

SEQ ID NO: 238785 - DNA, 19 bp, Homo sapiens
  siRNA target sequence for GPR86 (NM_023914.2,766-784).
ctgtttttatcctaatgct

SEQ ID NO: 238786 - DNA, 19 bp, Homo sapiens
  siRNA target sequence for GPR86 (NM_023914.2,931-949).
ccagagttccatatactca

SEQ ID NO: 238787 - DNA, 19 bp, Homo sapiens
  siRNA target sequence for GPR86 (NM_023914.2,983-1001).
gcaaaatcaactgtttatt

SEQ ID NO: 238788 - DNA, 19 bp, Homo sapiens
  siRNA target sequence for GPR86 (NM_023914.2,1025-1043).
ggcagcaactaacatttgt

SEQ ID NO: 238789 - DNA, 19 bp, Homo sapiens
  siRNA target sequence for GPR86 (NM_023914.2,1042-1060).
gtatggatcccttaatata

SEQ ID NO: 238790 - DNA, 19 bp, Homo sapiens
  siRNA target sequence for GPR86 (NM_023914.2,1123-1141).
catcaagccaagaaaatca

SEQ ID NO: 238791 - DNA, 19 bp, Homo sapiens
  siRNA target sequence for GPR86 (NM_023914.2,1144-1162).
gcagtcagacagacaacat

SEQ ID NO: 238792 - DNA, 19 bp, Homo sapiens
  siRNA target sequence for GPR86 (NM_023914.2,1149-1167).
cagacagacaacataacct

SEQ ID NO: 238793 - DNA, 19 bp, Homo sapiens
  siRNA target sequence for GPR87 (NM_023915.2,370-388).
caacttgacgcttgcaaaa

SEQ ID NO: 238794 - DNA, 19 bp, Homo sapiens
  siRNA target sequence for GPR87 (NM_023915.2,373-391).
cttgacgcttgcaaaatta

SEQ ID NO: 238795 - DNA, 19 bp, Homo sapiens
  siRNA target sequence for GPR87 (NM_023915.2,376-394).
gacgcttgcaaaattacca

SEQ ID NO: 238796 - DNA, 19 bp, Homo sapiens
  siRNA target sequence for GPR87 (NM_023915.2,378-396).
cgcttgcaaaattaccaaa

SEQ ID NO: 238797 - DNA, 19 bp, Homo sapiens
  siRNA target sequence for GPR87 (NM_023915.2,380-398).
cttgcaaaattaccaaata

SEQ ID NO: 238798 - DNA, 19 bp, Homo sapiens
  siRNA target sequence for GPR87 (NM_023915.2,384-402).
caaaattaccaaataacga

SEQ ID NO: 238799 - DNA, 19 bp, Homo sapiens
  siRNA target sequence for GPR87 (NM_023915.2,409-427).
cggccaagagagtcacaat

SEQ ID NO: 238800 - DNA, 19 bp, Homo sapiens
  siRNA target sequence for GPR87 (NM_023915.2,412-430).
ccaagagagtcacaattca

SEQ ID NO: 238801 - DNA, 19 bp, Homo sapiens
  siRNA target sequence for GPR87 (NM_023915.2,443-461).
gacgggccaggaaagaaca

SEQ ID NO: 238802 - DNA, 19 bp, Homo sapiens
  siRNA target sequence for GPR87 (NM_023915.2,457-475).
gaacaccacccttcacaat

SEQ ID NO: 238803 - DNA, 19 bp, Homo sapiens
  siRNA target sequence for GPR87 (NM_023915.2,462-480).
ccacccttcacaatgaatt

SEQ ID NO: 238804 - DNA, 19 bp, Homo sapiens
  siRNA target sequence for GPR87 (NM_023915.2,463-481).
cacccttcacaatgaattt

SEQ ID NO: 238805 - DNA, 19 bp, Homo sapiens
  siRNA target sequence for GPR87 (NM_023915.2,497-515).
ccggtgctttatctcatta

SEQ ID NO: 238806 - DNA, 19 bp, Homo sapiens
  siRNA target sequence for GPR87 (NM_023915.2,498-516).
cggtgctttatctcattat

SEQ ID NO: 238807 - DNA, 19 bp, Homo sapiens
  siRNA target sequence for GPR87 (NM_023915.2,614-632).
gttgcagacctcataatga

SEQ ID NO: 238808 - DNA, 19 bp, Homo sapiens
  siRNA target sequence for GPR87 (NM_023915.2,677-695).
ccttggtacttcaagttta

SEQ ID NO: 238809 - DNA, 19 bp, Homo sapiens
  siRNA target sequence for GPR87 (NM_023915.2,681-699).
ggtacttcaagtttattct

SEQ ID NO: 238810 - DNA, 19 bp, Homo sapiens
  siRNA target sequence for GPR87 (NM_023915.2,705-723).
gatacacttcagttttgtt

SEQ ID NO: 238811 - DNA, 19 bp, Homo sapiens
  siRNA target sequence for GPR87 (NM_023915.2,749-767).
gtgttccttgggctgataa

SEQ ID NO: 238812 - DNA, 19 bp, Homo sapiens
  siRNA target sequence for GPR87 (NM_023915.2,754-772).
ccttgggctgataagcatt

SEQ ID NO: 238813 - DNA, 19 bp, Homo sapiens
  siRNA target sequence for GPR87 (NM_023915.2,803-821).
ggggactctcggatgtaca

SEQ ID NO: 238814 - DNA, 19 bp, Homo sapiens
  siRNA target sequence for GPR87 (NM_023915.2,829-847).
cttcacgaaggttttatct

SEQ ID NO: 238815 - DNA, 19 bp, Homo sapiens
  siRNA target sequence for GPR87 (NM_023915.2,832-850).
cacgaaggttttatctgtt

SEQ ID NO: 238816 - DNA, 19 bp, Homo sapiens
  siRNA target sequence for GPR87 (NM_023915.2,858-876).
gggtgatcatggctgtttt

SEQ ID NO: 238817 - DNA, 19 bp, Homo sapiens
  siRNA target sequence for GPR87 (NM_023915.2,929-947).
catgactgctcaaaactta

SEQ ID NO: 238818 - DNA, 19 bp, Homo sapiens
  siRNA target sequence for GPR87 (NM_023915.2,975-993).
cggcagtcacctatgtgaa

SEQ ID NO: 238819 - DNA, 19 bp, Homo sapiens
  siRNA target sequence for GPR87 (NM_023915.2,1069-1087).
cagcaggcaattcataagt

SEQ ID NO: 238820 - DNA, 19 bp, Homo sapiens
  siRNA target sequence for GPR87 (NM_023915.2,1071-1089).
gcaggcaattcataagtca

SEQ ID NO: 238821 - DNA, 19 bp, Homo sapiens
  siRNA target sequence for GPR87 (NM_023915.2,1095-1113).
gccgaaagcgaaaacataa

SEQ ID NO: 238822 - DNA, 19 bp, Homo sapiens
  siRNA target sequence for GPR87 (NM_023915.2,1149-1167).
cctgctttctaccatatca

SEQ ID NO: 238823 - DNA, 19 bp, Homo sapiens
  siRNA target sequence for GPR87 (NM_023915.2,1152-1170).
gctttctaccatatcactt

SEQ ID NO: 238824 - DNA, 19 bp, Homo sapiens
  siRNA target sequence for GPR87 (NM_023915.2,1171-1189).
gtgcagaattccttttact

SEQ ID NO: 238825 - DNA, 19 bp, Homo sapiens
  siRNA target sequence for GPR87 (NM_023915.2,1198-1216).
cttagacaggcttttagat

SEQ ID NO: 238826 - DNA, 19 bp, Homo sapiens
  siRNA target sequence for GPR87 (NM_023915.2,1234-1252).
cctatattactgcaaagaa

SEQ ID NO: 238827 - DNA, 19 bp, Homo sapiens
  siRNA target sequence for GPR87 (NM_023915.2,1264-1282).
cttgtctgcgtgtaatgtt

SEQ ID NO: 238828 - DNA, 19 bp, Homo sapiens
  siRNA target sequence for GPR87 (NM_023915.2,1280-1298).
gtttgcctggatccaataa

SEQ ID NO: 238829 - DNA, 19 bp, Homo sapiens
  siRNA target sequence for GPR87 (NM_023915.2,1312-1330).
gtgtaggtcattttcaaga

SEQ ID NO: 238830 - DNA, 19 bp, Homo sapiens
  siRNA target sequence for GPR87 (NM_023915.2,1382-1400).
ctgcaaagtgtgagaagat

SEQ ID NO: 238831 - DNA, 19 bp, Homo sapiens
  siRNA target sequence for GPR87 (NM_023915.2,1398-1416).
gatcggaagttcgcatata

SEQ ID NO: 238832 - DNA, 19 bp, Homo sapiens
  siRNA target sequence for GPR87 (NM_023915.2,1401-1419).
cggaagttcgcatatatta

SEQ ID NO: 238833 - DNA, 19 bp, Homo sapiens
  siRNA target sequence for GPR87 (NM_023915.2,1402-1420).
ggaagttcgcatatattat

SEQ ID NO: 238834 - DNA, 19 bp, Homo sapiens
  siRNA target sequence for GPR87 (NM_023915.2,1406-1424).
gttcgcatatattatgatt

SEQ ID NO: 238835 - DNA, 19 bp, Homo sapiens
  siRNA target sequence for P2RY12 (NM_022788.3,381-399).
cgatgaggattttctttca

SEQ ID NO: 238836 - DNA, 19 bp, Homo sapiens
  siRNA target sequence for P2RY12 (NM_022788.3,403-421).
ccggagtaaatcaaacttt

SEQ ID NO: 238837 - DNA, 19 bp, Homo sapiens
  siRNA target sequence for P2RY12 (NM_022788.3,404-422).
cggagtaaatcaaacttta

SEQ ID NO: 238838 - DNA, 19 bp, Homo sapiens
  siRNA target sequence for P2RY12 (NM_022788.3,471-489).
cttttccattcaaaattct

SEQ ID NO: 238839 - DNA, 19 bp, Homo sapiens
  siRNA target sequence for P2RY12 (NM_022788.3,536-554).
caagttacctccgtcatat

SEQ ID NO: 238840 - DNA, 19 bp, Homo sapiens
  siRNA target sequence for P2RY12 (NM_022788.3,539-557).
gttacctccgtcatatttt

SEQ ID NO: 238841 - DNA, 19 bp, Homo sapiens
  siRNA target sequence for P2RY12 (NM_022788.3,543-561).
cctccgtcatattttattt

SEQ ID NO: 238842 - DNA, 19 bp, Homo sapiens
  siRNA target sequence for P2RY12 (NM_022788.3,589-607).
gggactgataactatcgat

SEQ ID NO: 238843 - DNA, 19 bp, Homo sapiens
  siRNA target sequence for P2RY12 (NM_022788.3,639-657).
catccaaccccaaaaatct

SEQ ID NO: 238844 - DNA, 19 bp, Homo sapiens
  siRNA target sequence for P2RY12 (NM_022788.3,683-701).
gtcatctgggcattcatgt

SEQ ID NO: 238845 - DNA, 19 bp, Homo sapiens
  siRNA target sequence for P2RY12 (NM_022788.3,688-706).
ctgggcattcatgttctta

SEQ ID NO: 238846 - DNA, 19 bp, Homo sapiens
  siRNA target sequence for P2RY12 (NM_022788.3,690-708).
gggcattcatgttcttact

SEQ ID NO: 238847 - DNA, 19 bp, Homo sapiens
  siRNA target sequence for P2RY12 (NM_022788.3,739-757).
gcagccgagagacaagaat

SEQ ID NO: 238848 - DNA, 19 bp, Homo sapiens
  siRNA target sequence for P2RY12 (NM_022788.3,863-881).
gtatgttatacactcatta

SEQ ID NO: 238849 - DNA, 19 bp, Homo sapiens
  siRNA target sequence for P2RY12 (NM_022788.3,890-908).
ctgtaccggtcatacgtaa

SEQ ID NO: 238850 - DNA, 19 bp, Homo sapiens
  siRNA target sequence for P2RY12 (NM_022788.3,909-927).
gaacgaggggtgtaggtaa

SEQ ID NO: 238851 - DNA, 19 bp, Homo sapiens
  siRNA target sequence for P2RY12 (NM_022788.3,912-930).
cgaggggtgtaggtaaagt

SEQ ID NO: 238852 - DNA, 19 bp, Homo sapiens
  siRNA target sequence for P2RY12 (NM_022788.3,924-942).
gtaaagtccccaggaaaaa

SEQ ID NO: 238853 - DNA, 19 bp, Homo sapiens
  siRNA target sequence for P2RY12 (NM_022788.3,944-962).
gtgaacgtcaaagttttca

SEQ ID NO: 238854 - DNA, 19 bp, Homo sapiens
  siRNA target sequence for P2RY12 (NM_022788.3,1000-1018).
ccattttgcccgaattcct

SEQ ID NO: 238855 - DNA, 19 bp, Homo sapiens
  siRNA target sequence for P2RY12 (NM_022788.3,1029-1047).
gccaaacccgggatgtctt

SEQ ID NO: 238856 - DNA, 19 bp, Homo sapiens
  siRNA target sequence for P2RY12 (NM_022788.3,1030-1048).
ccaaacccgggatgtcttt

SEQ ID NO: 238857 - DNA, 19 bp, Homo sapiens
  siRNA target sequence for P2RY12 (NM_022788.3,1049-1067).
gactgcactgctgaaaata

SEQ ID NO: 238858 - DNA, 19 bp, Homo sapiens
  siRNA target sequence for P2RY12 (NM_022788.3,1051-1069).
ctgcactgctgaaaatact

SEQ ID NO: 238859 - DNA, 19 bp, Homo sapiens
  siRNA target sequence for P2RY12 (NM_022788.3,1053-1071).
gcactgctgaaaatactct

SEQ ID NO: 238860 - DNA, 19 bp, Homo sapiens
  siRNA target sequence for P2RY12 (NM_022788.3,1087-1105).
gagcactctgtggttaact

SEQ ID NO: 238861 - DNA, 19 bp, Homo sapiens
  siRNA target sequence for P2RY12 (NM_022788.3,1099-1117).
gttaacttccttaaatgca

SEQ ID NO: 238862 - DNA, 19 bp, Homo sapiens
  siRNA target sequence for P2RY12 (NM_022788.3,1120-1138).
cctggatccgttcatctat

SEQ ID NO: 238863 - DNA, 19 bp, Homo sapiens
  siRNA target sequence for P2RY12 (NM_022788.3,1123-1141).
ggatccgttcatctatttt

SEQ ID NO: 238864 - DNA, 19 bp, Homo sapiens
  siRNA target sequence for P2RY12 (NM_022788.3,1189-1207).
ccccaattctgcaacatct

SEQ ID NO: 238865 - DNA, 19 bp, Homo sapiens
  siRNA target sequence for GPR135 (NM_022571.3,955-973).
cgcgtgctgcgcttcttca

SEQ ID NO: 238866 - DNA, 19 bp, Homo sapiens
  siRNA target sequence for GPR135 (NM_022571.3,1168-1186).
cgcaatcccaacatttcga

SEQ ID NO: 238867 - DNA, 19 bp, Homo sapiens
  siRNA target sequence for GPR135 (NM_022571.3,1169-1187).
gcaatcccaacatttcgat

SEQ ID NO: 238868 - DNA, 19 bp, Homo sapiens
  siRNA target sequence for GPR135 (NM_022571.3,1212-1230).
gggctaccggactaggaat

SEQ ID NO: 238869 - DNA, 19 bp, Homo sapiens
  siRNA target sequence for GPR135 (NM_022571.3,1277-1295).
gccgcagtcgccttcgaaa

SEQ ID NO: 238870 - DNA, 19 bp, Homo sapiens
  siRNA target sequence for GPR135 (NM_022571.3,1383-1401).
ccgcaaaaatccagttgta

SEQ ID NO: 238871 - DNA, 19 bp, Homo sapiens
  siRNA target sequence for PTAFR (NM_000952.2,108-126).
cactctcttcccgattgtt

SEQ ID NO: 238872 - DNA, 19 bp, Homo sapiens
  siRNA target sequence for PTAFR (NM_000952.2,142-160).
gtgctcggggtcattgcta

SEQ ID NO: 238873 - DNA, 19 bp, Homo sapiens
  siRNA target sequence for PTAFR (NM_000952.2,144-162).
gctcggggtcattgctaat

SEQ ID NO: 238874 - DNA, 19 bp, Homo sapiens
  siRNA target sequence for PTAFR (NM_000952.2,247-265).
gcggacatgctcttcttga

SEQ ID NO: 238875 - DNA, 19 bp, Homo sapiens
  siRNA target sequence for PTAFR (NM_000952.2,248-266).
cggacatgctcttcttgat

SEQ ID NO: 238876 - DNA, 19 bp, Homo sapiens
  siRNA target sequence for PTAFR (NM_000952.2,250-268).
gacatgctcttcttgatca

SEQ ID NO: 238877 - DNA, 19 bp, Homo sapiens
  siRNA target sequence for PTAFR (NM_000952.2,281-299).
ggattgtctactaccaaaa

SEQ ID NO: 238878 - DNA, 19 bp, Homo sapiens
  siRNA target sequence for PTAFR (NM_000952.2,384-402).
cctgggcgtcatcacttat

SEQ ID NO: 238879 - DNA, 19 bp, Homo sapiens
  siRNA target sequence for PTAFR (NM_000952.2,385-403).
ctgggcgtcatcacttata

SEQ ID NO: 238880 - DNA, 19 bp, Homo sapiens
  siRNA target sequence for PTAFR (NM_000952.2,418-436).
gtaactcggcccatcaaga

SEQ ID NO: 238881 - DNA, 19 bp, Homo sapiens
  siRNA target sequence for PTAFR (NM_000952.2,454-472).
cgcaagcgtggcatctctt

SEQ ID NO: 238882 - DNA, 19 bp, Homo sapiens
  siRNA target sequence for PTAFR (NM_000952.2,575-593).
ctcgctgctttgagcatta

SEQ ID NO: 238883 - DNA, 19 bp, Homo sapiens
  siRNA target sequence for PTAFR (NM_000952.2,578-596).
gctgctttgagcattacga

SEQ ID NO: 238884 - DNA, 19 bp, Homo sapiens
  siRNA target sequence for PTAFR (NM_000952.2,605-623).
gcgtgccagtcctcatcat

SEQ ID NO: 238885 - DNA, 19 bp, Homo sapiens
  siRNA target sequence for PTAFR (NM_000952.2,770-788).
cggtcttggcggtgttcat

SEQ ID NO: 238886 - DNA, 19 bp, Homo sapiens
  siRNA target sequence for PTAFR (NM_000952.2,864-882).
ccaccaggccattaatgat

SEQ ID NO: 238887 - DNA, 19 bp, Homo sapiens
  siRNA target sequence for PTAFR (NM_000952.2,920-938).
gtgtcttagaccctgttat

SEQ ID NO: 238888 - DNA, 19 bp, Homo sapiens
  siRNA target sequence for PTAFR (NM_000952.2,970-988).
cacctcaccgaaaagttct

SEQ ID NO: 238889 - DNA, 19 bp, Homo sapiens
  siRNA target sequence for PTAFR (NM_000952.2,973-991).
ctcaccgaaaagttctaca

SEQ ID NO: 238890 - DNA, 19 bp, Homo sapiens
  siRNA target sequence for PTAFR (NM_000952.2,997-1015).
cgcagtagccggaaatgct

SEQ ID NO: 238891 - DNA, 19 bp, Homo sapiens
  siRNA target sequence for PTAFR (NM_000952.2,1069-1087).
cctggcaattccctcaaaa

SEQ ID NO: 238892 - DNA, 19 bp, Homo sapiens
  siRNA target sequence for CYSLTR1 (NM_006639.2,441-459).
gccatgacactattgatga

SEQ ID NO: 238893 - DNA, 19 bp, Homo sapiens
  siRNA target sequence for CYSLTR1 (NM_006639.2,460-478).
cttccgcaatcaagtgtat

SEQ ID NO: 238894 - DNA, 19 bp, Homo sapiens
  siRNA target sequence for CYSLTR1 (NM_006639.2,480-498).
ccaccttgtactctatgat

SEQ ID NO: 238895 - DNA, 19 bp, Homo sapiens
  siRNA target sequence for CYSLTR1 (NM_006639.2,532-550).
gctctatgtcctcataaaa

SEQ ID NO: 238896 - DNA, 19 bp, Homo sapiens
  siRNA target sequence for CYSLTR1 (NM_006639.2,567-585).
cagccttccaagtatacat

SEQ ID NO: 238897 - DNA, 19 bp, Homo sapiens
  siRNA target sequence for CYSLTR1 (NM_006639.2,570-588).
ccttccaagtatacatgat

SEQ ID NO: 238898 - DNA, 19 bp, Homo sapiens
  siRNA target sequence for CYSLTR1 (NM_006639.2,571-589).
cttccaagtatacatgatt

SEQ ID NO: 238899 - DNA, 19 bp, Homo sapiens
  siRNA target sequence for CYSLTR1 (NM_006639.2,574-592).
ccaagtatacatgattaat

SEQ ID NO: 238900 - DNA, 19 bp, Homo sapiens
  siRNA target sequence for CYSLTR1 (NM_006639.2,596-614).
gcagtagcagatctacttt

SEQ ID NO: 238901 - DNA, 19 bp, Homo sapiens
  siRNA target sequence for CYSLTR1 (NM_006639.2,629-647).
cctctccgtgtggtctatt

SEQ ID NO: 238902 - DNA, 19 bp, Homo sapiens
  siRNA target sequence for CYSLTR1 (NM_006639.2,634-652).
ccgtgtggtctattatgtt

SEQ ID NO: 238903 - DNA, 19 bp, Homo sapiens
  siRNA target sequence for CYSLTR1 (NM_006639.2,636-654).
gtgtggtctattatgttca

SEQ ID NO: 238904 - DNA, 19 bp, Homo sapiens
  siRNA target sequence for CYSLTR1 (NM_006639.2,666-684).
ggctctttggtgacttctt

SEQ ID NO: 238905 - DNA, 19 bp, Homo sapiens
  siRNA target sequence for CYSLTR1 (NM_006639.2,689-707).
cgcctcagcacctatgctt

SEQ ID NO: 238906 - DNA, 19 bp, Homo sapiens
  siRNA target sequence for CYSLTR1 (NM_006639.2,721-739).
ctattgtagcatcttcttt

SEQ ID NO: 238907 - DNA, 19 bp, Homo sapiens
  siRNA target sequence for CYSLTR1 (NM_006639.2,760-778).
ccggtgcattgcaattgtt

SEQ ID NO: 238908 - DNA, 19 bp, Homo sapiens
  siRNA target sequence for CYSLTR1 (NM_006639.2,761-779).
cggtgcattgcaattgttt

SEQ ID NO: 238909 - DNA, 19 bp, Homo sapiens
  siRNA target sequence for CYSLTR1 (NM_006639.2,762-780).
ggtgcattgcaattgtttt

SEQ ID NO: 238910 - DNA, 19 bp, Homo sapiens
  siRNA target sequence for CYSLTR1 (NM_006639.2,782-800).
ccagtccagaacattaatt

SEQ ID NO: 238911 - DNA, 19 bp, Homo sapiens
  siRNA target sequence for CYSLTR1 (NM_006639.2,829-847).
gtgtgtaggtatttggatt

SEQ ID NO: 238912 - DNA, 19 bp, Homo sapiens
  siRNA target sequence for CYSLTR1 (NM_006639.2,836-854).
ggtatttggatttttgtga

SEQ ID NO: 238913 - DNA, 19 bp, Homo sapiens
  siRNA target sequence for CYSLTR1 (NM_006639.2,880-898).
ggccaaaccacaaaaagat

SEQ ID NO: 238914 - DNA, 19 bp, Homo sapiens
  siRNA target sequence for CYSLTR1 (NM_006639.2,882-900).
ccaaaccacaaaaagatga

SEQ ID NO: 238915 - DNA, 19 bp, Homo sapiens
  siRNA target sequence for CYSLTR1 (NM_006639.2,978-996).
cattgtttgttggctttat

SEQ ID NO: 238916 - DNA, 19 bp, Homo sapiens
  siRNA target sequence for CYSLTR1 (NM_006639.2,1111-1129).
cgtgaccgctgccttttta

SEQ ID NO: 238917 - DNA, 19 bp, Homo sapiens
  siRNA target sequence for CYSLTR1 (NM_006639.2,1119-1137).
ctgcctttttagtcagttt

SEQ ID NO: 238918 - DNA, 19 bp, Homo sapiens
  siRNA target sequence for CYSLTR1 (NM_006639.2,1122-1140).
cctttttagtcagtttcat

SEQ ID NO: 238919 - DNA, 19 bp, Homo sapiens
  siRNA target sequence for CYSLTR1 (NM_006639.2,1134-1152).
gtttcatgccatatcatat

SEQ ID NO: 238920 - DNA, 19 bp, Homo sapiens
  siRNA target sequence for CYSLTR1 (NM_006639.2,1138-1156).
catgccatatcatattcaa

SEQ ID NO: 238921 - DNA, 19 bp, Homo sapiens
  siRNA target sequence for CYSLTR1 (NM_006639.2,1157-1175).
cgtaccattcaccttcatt

SEQ ID NO: 238922 - DNA, 19 bp, Homo sapiens
  siRNA target sequence for CYSLTR1 (NM_006639.2,1158-1176).
gtaccattcaccttcattt

SEQ ID NO: 238923 - DNA, 19 bp, Homo sapiens
  siRNA target sequence for CYSLTR1 (NM_006639.2,1220-1238).
cagaagtccgtggtcataa

SEQ ID NO: 238924 - DNA, 19 bp, Homo sapiens
  siRNA target sequence for CYSLTR1 (NM_006639.2,1293-1311).
ctgggggtaactttaggaa

SEQ ID NO: 238925 - DNA, 19 bp, Homo sapiens
  siRNA target sequence for CYSLTR1 (NM_006639.2,1295-1313).
gggggtaactttaggaaaa

SEQ ID NO: 238926 - DNA, 19 bp, Homo sapiens
  siRNA target sequence for CYSLTR1 (NM_006639.2,1314-1332).
ggctgtctacattcagaaa

SEQ ID NO: 238927 - DNA, 19 bp, Homo sapiens
  siRNA target sequence for CYSLTR1 (NM_006639.2,1318-1336).
gtctacattcagaaagcat

SEQ ID NO: 238928 - DNA, 19 bp, Homo sapiens
  siRNA target sequence for CYSLTR1 (NM_006639.2,1338-1356).
ctttgtccagcgtgactta

SEQ ID NO: 238929 - DNA, 19 bp, Homo sapiens
  siRNA target sequence for CYSLTR1 (NM_006639.2,1342-1360).
gtccagcgtgacttatgta

SEQ ID NO: 238930 - DNA, 19 bp, Homo sapiens
  siRNA target sequence for CYSLTR2 (NM_020377.2,32-50).
catccatctccgtatcaga

SEQ ID NO: 238931 - DNA, 19 bp, Homo sapiens
  siRNA target sequence for CYSLTR2 (NM_020377.2,89-107).
ggaactgcacaattgaaaa

SEQ ID NO: 238932 - DNA, 19 bp, Homo sapiens
  siRNA target sequence for CYSLTR2 (NM_020377.2,166-184).
ggaaatgggttgtccatat

SEQ ID NO: 238933 - DNA, 19 bp, Homo sapiens
  siRNA target sequence for CYSLTR2 (NM_020377.2,167-185).
gaaatgggttgtccatata

SEQ ID NO: 238934 - DNA, 19 bp, Homo sapiens
  siRNA target sequence for CYSLTR2 (NM_020377.2,212-230).
ccacatctgtgaacgtttt

SEQ ID NO: 238935 - DNA, 19 bp, Homo sapiens
  siRNA target sequence for CYSLTR2 (NM_020377.2,215-233).
catctgtgaacgttttcat

SEQ ID NO: 238936 - DNA, 19 bp, Homo sapiens
  siRNA target sequence for CYSLTR2 (NM_020377.2,222-240).
gaacgttttcatgctaaat

SEQ ID NO: 238937 - DNA, 19 bp, Homo sapiens
  siRNA target sequence for CYSLTR2 (NM_020377.2,277-295).
cccttcagggctgactatt

SEQ ID NO: 238938 - DNA, 19 bp, Homo sapiens
  siRNA target sequence for CYSLTR2 (NM_020377.2,279-297).
cttcagggctgactattat

SEQ ID NO: 238939 - DNA, 19 bp, Homo sapiens
  siRNA target sequence for CYSLTR2 (NM_020377.2,282-300).
cagggctgactattatctt

SEQ ID NO: 238940 - DNA, 19 bp, Homo sapiens
  siRNA target sequence for CYSLTR2 (NM_020377.2,285-303).
ggctgactattatcttaga

SEQ ID NO: 238941 - DNA, 19 bp, Homo sapiens
  siRNA target sequence for CYSLTR2 (NM_020377.2,298-316).
cttagaggctccaattgga

SEQ ID NO: 238942 - DNA, 19 bp, Homo sapiens
  siRNA target sequence for CYSLTR2 (NM_020377.2,328-346).
ctggcctgcaggattatgt

SEQ ID NO: 238943 - DNA, 19 bp, Homo sapiens
  siRNA target sequence for CYSLTR2 (NM_020377.2,330-348).
ggcctgcaggattatgtct

SEQ ID NO: 238944 - DNA, 19 bp, Homo sapiens
  siRNA target sequence for CYSLTR2 (NM_020377.2,333-351).
ctgcaggattatgtcttat

SEQ ID NO: 238945 - DNA, 19 bp, Homo sapiens
  siRNA target sequence for CYSLTR2 (NM_020377.2,353-371).
ccttgtatgtcaacatgta

SEQ ID NO: 238946 - DNA, 19 bp, Homo sapiens
  siRNA target sequence for CYSLTR2 (NM_020377.2,408-426).
gcgtttcctggcaatggtt

SEQ ID NO: 238947 - DNA, 19 bp, Homo sapiens
  siRNA target sequence for CYSLTR2 (NM_020377.2,471-489).
gatcctctgtgggatcata

SEQ ID NO: 238948 - DNA, 19 bp, Homo sapiens
  siRNA target sequence for CYSLTR2 (NM_020377.2,475-493).
ctctgtgggatcatatgga

SEQ ID NO: 238949 - DNA, 19 bp, Homo sapiens
  siRNA target sequence for CYSLTR2 (NM_020377.2,549-567).
cagtgtcacatcatgctta

SEQ ID NO: 238950 - DNA, 19 bp, Homo sapiens
  siRNA target sequence for CYSLTR2 (NM_020377.2,563-581).
gcttagagctgaatctcta

SEQ ID NO: 238951 - DNA, 19 bp, Homo sapiens
  siRNA target sequence for CYSLTR2 (NM_020377.2,564-582).
cttagagctgaatctctat

SEQ ID NO: 238952 - DNA, 19 bp, Homo sapiens
  siRNA target sequence for CYSLTR2 (NM_020377.2,660-678).
ctgttatctgctgatcatt

SEQ ID NO: 238953 - DNA, 19 bp, Homo sapiens
  siRNA target sequence for CYSLTR2 (NM_020377.2,672-690).
gatcattcgggttctgtta

SEQ ID NO: 238954 - DNA, 19 bp, Homo sapiens
  siRNA target sequence for CYSLTR2 (NM_020377.2,675-693).
cattcgggttctgttaaaa

SEQ ID NO: 238955 - DNA, 19 bp, Homo sapiens
  siRNA target sequence for CYSLTR2 (NM_020377.2,810-828).
ccacttgacgacatggaaa

SEQ ID NO: 238956 - DNA, 19 bp, Homo sapiens
  siRNA target sequence for CYSLTR2 (NM_020377.2,829-847).
gtgggtttatgcaaagaca

SEQ ID NO: 238957 - DNA, 19 bp, Homo sapiens
  siRNA target sequence for LTB4R2 (NM_019839.1,1748-1766).
ctgctgagctggaagactt

SEQ ID NO: 238958 - DNA, 19 bp, Homo sapiens
  siRNA target sequence for LTB4R2 (NM_019839.1,2274-2292).
ccgctttcgtgcttccttt

SEQ ID NO: 238959 - DNA, 19 bp, Homo sapiens
  siRNA target sequence for CNR1 (NM_016083.3,123-141).
cctgtacgtgggctcaaat

SEQ ID NO: 238960 - DNA, 19 bp, Homo sapiens
  siRNA target sequence for CNR1 (NM_016083.3,129-147).
cgtgggctcaaatgacatt

SEQ ID NO: 238961 - DNA, 19 bp, Homo sapiens
  siRNA target sequence for CNR1 (NM_016083.3,512-530).
ggccttcctaccacttcat

SEQ ID NO: 238962 - DNA, 19 bp, Homo sapiens
  siRNA target sequence for CNR1 (NM_016083.3,555-573).
cctggggagtgtcattttt

SEQ ID NO: 238963 - DNA, 19 bp, Homo sapiens
  siRNA target sequence for CNR1 (NM_016083.3,597-615).
cgtgttccaccgcaaagat

SEQ ID NO: 238964 - DNA, 19 bp, Homo sapiens
  siRNA target sequence for CNR1 (NM_016083.3,598-616).
gtgttccaccgcaaagata

SEQ ID NO: 238965 - DNA, 19 bp, Homo sapiens
  siRNA target sequence for CNR1 (NM_016083.3,620-638).
gcaacgtgtttctgttcaa

SEQ ID NO: 238966 - DNA, 19 bp, Homo sapiens
  siRNA target sequence for CNR1 (NM_016083.3,730-748).
gcctataagaggattgtca

SEQ ID NO: 238967 - DNA, 19 bp, Homo sapiens
  siRNA target sequence for CNR1 (NM_016083.3,785-803).
ggaccatagccattgtgat

SEQ ID NO: 238968 - DNA, 19 bp, Homo sapiens
  siRNA target sequence for CNR1 (NM_016083.3,833-851).
gcgagaaactgcaatctgt

SEQ ID NO: 238969 - DNA, 19 bp, Homo sapiens
  siRNA target sequence for CNR1 (NM_016083.3,869-887).
cacacattgatgaaaccta

SEQ ID NO: 238970 - DNA, 19 bp, Homo sapiens
  siRNA target sequence for CNR1 (NM_016083.3,911-929).
ccagcgtactgcttctgtt

SEQ ID NO: 238971 - DNA, 19 bp, Homo sapiens
  siRNA target sequence for CNR1 (NM_016083.3,972-990).
ccacgccgtccgcatgatt

SEQ ID NO: 238972 - DNA, 19 bp, Homo sapiens
  siRNA target sequence for CNR1 (NM_016083.3,1066-1084).
gcccgcatggacattaggt

SEQ ID NO: 238973 - DNA, 19 bp, Homo sapiens
  siRNA target sequence for CNR1 (NM_016083.3,1067-1085).
cccgcatggacattaggtt

SEQ ID NO: 238974 - DNA, 19 bp, Homo sapiens
  siRNA target sequence for CNR1 (NM_016083.3,1068-1086).
ccgcatggacattaggtta

SEQ ID NO: 238975 - DNA, 19 bp, Homo sapiens
  siRNA target sequence for CNR1 (NM_016083.3,1281-1299).
cgctttccggagcatgttt

SEQ ID NO: 238976 - DNA, 19 bp, Homo sapiens
  siRNA target sequence for CNR1 (NM_016083.3,1318-1336).
gcgcagcctctggataaca

SEQ ID NO: 238977 - DNA, 19 bp, Homo sapiens
  siRNA target sequence for CNR1 (NM_016083.3,1349-1367).
cggactgcctgcacaaaca

SEQ ID NO: 238978 - DNA, 19 bp, Homo sapiens
  siRNA target sequence for CNR1 (NM_016083.3,1359-1377).
gcacaaacacgcaaacaat

SEQ ID NO: 238979 - DNA, 19 bp, Homo sapiens
  siRNA target sequence for CNR1 (NM_016083.3,1413-1431).
caagagcacggtcaagatt

SEQ ID NO: 238980 - DNA, 19 bp, Homo sapiens
  siRNA target sequence for CNR2 (NM_001841.1,373-391).
gccagtgtggtctttgcat

SEQ ID NO: 238981 - DNA, 19 bp, Homo sapiens
  siRNA target sequence for CNR2 (NM_001841.1,1173-1191).
gccagattccagagatcta

SEQ ID NO: 238982 - DNA, 19 bp, Homo sapiens
  siRNA target sequence for CNR2 (NM_001841.1,1175-1193).
cagattccagagatctaga

SEQ ID NO: 238983 - DNA, 19 bp, Homo sapiens
  siRNA target sequence for MTNR1A (NM_005958.2,230-248).
cggtgtatcggaacaagaa

SEQ ID NO: 238984 - DNA, 19 bp, Homo sapiens
  siRNA target sequence for MTNR1A (NM_005958.2,327-345).
ggtgctgatgtcgatattt

SEQ ID NO: 238985 - DNA, 19 bp, Homo sapiens
  siRNA target sequence for MTNR1A (NM_005958.2,331-349).
ctgatgtcgatatttaaca

SEQ ID NO: 238986 - DNA, 19 bp, Homo sapiens
  siRNA target sequence for MTNR1A (NM_005958.2,407-425).
gcgtcatcggctccatatt

SEQ ID NO: 238987 - DNA, 19 bp, Homo sapiens
  siRNA target sequence for MTNR1A (NM_005958.2,473-491).
gtctcaagtacgacaaact

SEQ ID NO: 238988 - DNA, 19 bp, Homo sapiens
  siRNA target sequence for MTNR1A (NM_005958.2,666-684).
cctcgtccccatgatcata

SEQ ID NO: 238989 - DNA, 19 bp, Homo sapiens
  siRNA target sequence for MTNR1A (NM_005958.2,670-688).
gtccccatgatcatagtca

SEQ ID NO: 238990 - DNA, 19 bp, Homo sapiens
  siRNA target sequence for MTNR1A (NM_005958.2,695-713).
gttacctgagaatatggat

SEQ ID NO: 238991 - DNA, 19 bp, Homo sapiens
  siRNA target sequence for MTNR1A (NM_005958.2,748-766).
gaccgcaaacccaaactga

SEQ ID NO: 238992 - DNA, 19 bp, Homo sapiens
  siRNA target sequence for MTNR1A (NM_005958.2,917-935).
gttactacatggcgtattt

SEQ ID NO: 238993 - DNA, 19 bp, Homo sapiens
  siRNA target sequence for MTNR1A (NM_005958.2,944-962).
gcctcaatgccattatata

SEQ ID NO: 238994 - DNA, 19 bp, Homo sapiens
  siRNA target sequence for MTNR1A (NM_005958.2,964-982).
gggctactgaaccaaaatt

SEQ ID NO: 238995 - DNA, 19 bp, Homo sapiens
  siRNA target sequence for MTNR1A (NM_005958.2,990-1008).
ggaatacaggagaattata

SEQ ID NO: 238996 - DNA, 19 bp, Homo sapiens
  siRNA target sequence for MTNR1A (NM_005958.2,1019-1037).
gtacagccagggtgttctt

SEQ ID NO: 238997 - DNA, 19 bp, Homo sapiens
  siRNA target sequence for MTNR1A (NM_005958.2,1056-1074).
cgtggccgatagggttaaa

SEQ ID NO: 238998 - DNA, 19 bp, Homo sapiens
  siRNA target sequence for MTNR1A (NM_005958.2,1057-1075).
gtggccgatagggttaaat

SEQ ID NO: 238999 - DNA, 19 bp, Homo sapiens
  siRNA target sequence for MTNR1A (NM_005958.2,1060-1078).
gccgatagggttaaatgga

SEQ ID NO: 239000 - DNA, 19 bp, Homo sapiens
  siRNA target sequence for MTNR1A (NM_005958.2,1092-1110).
gatgaccaacaataatgta

SEQ ID NO: 239001 - DNA, 19 bp, Homo sapiens
  siRNA target sequence for MTNR1A (NM_005958.2,1095-1113).
gaccaacaataatgtagta

SEQ ID NO: 239002 - DNA, 19 bp, Homo sapiens
  siRNA target sequence for MTNR1A (NM_005958.2,1097-1115).
ccaacaataatgtagtaaa

SEQ ID NO: 239003 - DNA, 19 bp, Homo sapiens
  siRNA target sequence for MTNR1B (NM_005959.2,313-331).
gctccggaacgcaggtaat

SEQ ID NO: 239004 - DNA, 19 bp, Homo sapiens
  siRNA target sequence for MTNR1B (NM_005959.2,317-335).
cggaacgcaggtaatttgt

SEQ ID NO: 239005 - DNA, 19 bp, Homo sapiens
  siRNA target sequence for MTNR1B (NM_005959.2,318-336).
ggaacgcaggtaatttgtt

SEQ ID NO: 239006 - DNA, 19 bp, Homo sapiens
  siRNA target sequence for MTNR1B (NM_005959.2,479-497).
ggctctgtcttcaatatca

SEQ ID NO: 239007 - DNA, 19 bp, Homo sapiens
  siRNA target sequence for MTNR1B (NM_005959.2,649-667).
gtacgacccacgcatctat

SEQ ID NO: 239008 - DNA, 19 bp, Homo sapiens
  siRNA target sequence for MTNR1B (NM_005959.2,838-856).
cgacttgcggagctttcta

SEQ ID NO: 239009 - DNA, 19 bp, Homo sapiens
  siRNA target sequence for MTNR1B (NM_005959.2,839-857).
gacttgcggagctttctaa

SEQ ID NO: 239010 - DNA, 19 bp, Homo sapiens
  siRNA target sequence for MTNR1B (NM_005959.2,927-945).
ccatcaacccccaagaaat

SEQ ID NO: 239011 - DNA, 19 bp, Homo sapiens
  siRNA target sequence for MTNR1B (NM_005959.2,955-973).
gatccctgaggggctattt

SEQ ID NO: 239012 - DNA, 19 bp, Homo sapiens
  siRNA target sequence for MTNR1B (NM_005959.2,959-977).
cctgaggggctatttgtca

SEQ ID NO: 239013 - DNA, 19 bp, Homo sapiens
  siRNA target sequence for MTNR1B (NM_005959.2,1028-1046).
gggctcttgaaccaaaact

SEQ ID NO: 239014 - DNA, 19 bp, Homo sapiens
  siRNA target sequence for MTNR1B (NM_005959.2,1029-1047).
ggctcttgaaccaaaactt

SEQ ID NO: 239015 - DNA, 19 bp, Homo sapiens
  siRNA target sequence for MTNR1B (NM_005959.2,1087-1105).
cccacggcactgcattcaa

SEQ ID NO: 239016 - DNA, 19 bp, Homo sapiens
  siRNA target sequence for TRHR (NM_003301.1,35-53).
gtcagtgaactgaaccaaa

SEQ ID NO: 239017 - DNA, 19 bp, Homo sapiens
  siRNA target sequence for TRHR (NM_003301.1,94-112).
ggtggtcaccatcttactt

SEQ ID NO: 239018 - DNA, 19 bp, Homo sapiens
  siRNA target sequence for TRHR (NM_003301.1,261-279).
ccaacataacagacagtat

SEQ ID NO: 239019 - DNA, 19 bp, Homo sapiens
  siRNA target sequence for TRHR (NM_003301.1,289-307).
ctgggtctatggctatgtt

SEQ ID NO: 239020 - DNA, 19 bp, Homo sapiens
  siRNA target sequence for TRHR (NM_003301.1,308-326).
ggatgcctctgcattactt

SEQ ID NO: 239021 - DNA, 19 bp, Homo sapiens
  siRNA target sequence for TRHR (NM_003301.1,309-327).
gatgcctctgcattactta

SEQ ID NO: 239022 - DNA, 19 bp, Homo sapiens
  siRNA target sequence for TRHR (NM_003301.1,334-352).
gtatttgggaattaatgca

SEQ ID NO: 239023 - DNA, 19 bp, Homo sapiens
  siRNA target sequence for TRHR (NM_003301.1,350-368).
gcatcctcttgttcaataa

SEQ ID NO: 239024 - DNA, 19 bp, Homo sapiens
  siRNA target sequence for TRHR (NM_003301.1,363-381).
caataacagcctttaccat

SEQ ID NO: 239025 - DNA, 19 bp, Homo sapiens
  siRNA target sequence for TRHR (NM_003301.1,385-403).
gaggtacatagcaatctgt

SEQ ID NO: 239026 - DNA, 19 bp, Homo sapiens
  siRNA target sequence for TRHR (NM_003301.1,460-478).
ctttgtctgggctttcaca

SEQ ID NO: 239027 - DNA, 19 bp, Homo sapiens
  siRNA target sequence for TRHR (NM_003301.1,466-484).
ctgggctttcacatctctt

SEQ ID NO: 239028 - DNA, 19 bp, Homo sapiens
  siRNA target sequence for TRHR (NM_003301.1,505-523).
cttgctggatctcaatatt

SEQ ID NO: 239029 - DNA, 19 bp, Homo sapiens
  siRNA target sequence for TRHR (NM_003301.1,517-535).
caatattagcacctacaaa

SEQ ID NO: 239030 - DNA, 19 bp, Homo sapiens
  siRNA target sequence for TRHR (NM_003301.1,525-543).
gcacctacaaagatgctat

SEQ ID NO: 239031 - DNA, 19 bp, Homo sapiens
  siRNA target sequence for TRHR (NM_003301.1,536-554).
gatgctattgtgatatcct

SEQ ID NO: 239032 - DNA, 19 bp, Homo sapiens
  siRNA target sequence for TRHR (NM_003301.1,580-598).
ctactcacctatttaccta

SEQ ID NO: 239033 - DNA, 19 bp, Homo sapiens
  siRNA target sequence for TRHR (NM_003301.1,638-656).
gctaccgtcctctatggat

SEQ ID NO: 239034 - DNA, 19 bp, Homo sapiens
  siRNA target sequence for TRHR (NM_003301.1,639-657).
ctaccgtcctctatggatt

SEQ ID NO: 239035 - DNA, 19 bp, Homo sapiens
  siRNA target sequence for TRHR (NM_003301.1,647-665).
ctctatggattcatagcta

SEQ ID NO: 239036 - DNA, 19 bp, Homo sapiens
  siRNA target sequence for TRHR (NM_003301.1,685-703).
cattccttcagatcctaaa

SEQ ID NO: 239037 - DNA, 19 bp, Homo sapiens
  siRNA target sequence for TRHR (NM_003301.1,732-750).
caacccatcagaacacaaa

SEQ ID NO: 239038 - DNA, 19 bp, Homo sapiens
  siRNA target sequence for TRHR (NM_003301.1,735-753).
cccatcagaacacaaatct

SEQ ID NO: 239039 - DNA, 19 bp, Homo sapiens
  siRNA target sequence for TRHR (NM_003301.1,758-776).
gtaaatacctctaatagat

SEQ ID NO: 239040 - DNA, 19 bp, Homo sapiens
  siRNA target sequence for TRHR (NM_003301.1,820-838).
gctggcagtggttgtaatt

SEQ ID NO: 239041 - DNA, 19 bp, Homo sapiens
  siRNA target sequence for TRHR (NM_003301.1,867-885).
ggactctagtggttgtcaa

SEQ ID NO: 239042 - DNA, 19 bp, Homo sapiens
  siRNA target sequence for TRHR (NM_003301.1,959-977).
gccatcaacccggtgattt

SEQ ID NO: 239043 - DNA, 19 bp, Homo sapiens
  siRNA target sequence for TRHR (NM_003301.1,960-978).
ccatcaacccggtgattta

SEQ ID NO: 239044 - DNA, 19 bp, Homo sapiens
  siRNA target sequence for TRHR (NM_003301.1,964-982).
caacccggtgatttacaat

SEQ ID NO: 239045 - DNA, 19 bp, Homo sapiens
  siRNA target sequence for TRHR (NM_003301.1,968-986).
ccggtgatttacaatctca

SEQ ID NO: 239046 - DNA, 19 bp, Homo sapiens
  siRNA target sequence for TRHR (NM_003301.1,1044-1062).
cagagaaacctgctaacta

SEQ ID NO: 239047 - DNA, 19 bp, Homo sapiens
  siRNA target sequence for TRHR (NM_003301.1,1186-1204).
ggcttctgaggtatccttt

SEQ ID NO: 239048 - DNA, 19 bp, Homo sapiens
  siRNA target sequence for ADMR (NM_007264.2,199-217).
cttcaaccacactttgtct

SEQ ID NO: 239049 - DNA, 19 bp, Homo sapiens
  siRNA target sequence for ADMR (NM_007264.2,473-491).
cgcttcactcactacttct

SEQ ID NO: 239050 - DNA, 19 bp, Homo sapiens
  siRNA target sequence for ADMR (NM_007264.2,480-498).
ctcactacttctactttgt

SEQ ID NO: 239051 - DNA, 19 bp, Homo sapiens
  siRNA target sequence for ADMR (NM_007264.2,490-508).
ctactttgtcaacatgtat

SEQ ID NO: 239052 - DNA, 19 bp, Homo sapiens
  siRNA target sequence for ADMR (NM_007264.2,700-718).
cctcttcatggcacctttt

SEQ ID NO: 239053 - DNA, 19 bp, Homo sapiens
  siRNA target sequence for ADMR (NM_007264.2,879-897).
cctacgtggccgtctttgt

SEQ ID NO: 239054 - DNA, 19 bp, Homo sapiens
  siRNA target sequence for ADMR (NM_007264.2,977-995).
gtccacctgctctacttct

SEQ ID NO: 239055 - DNA, 19 bp, Homo sapiens
  siRNA target sequence for ADORA1 (NM_000674.1,698-716).
ggccctgctggcaattgct

SEQ ID NO: 239056 - DNA, 19 bp, Homo sapiens
  siRNA target sequence for ADORA1 (NM_000674.1,724-742).
gctacctccgggtcaagat

SEQ ID NO: 239057 - DNA, 19 bp, Homo sapiens
  siRNA target sequence for ADORA1 (NM_000674.1,1069-1087).
gcgacccgcagaagtacta

SEQ ID NO: 239058 - DNA, 19 bp, Homo sapiens
  siRNA target sequence for ADORA1 (NM_000674.1,1070-1088).
cgacccgcagaagtactat

SEQ ID NO: 239059 - DNA, 19 bp, Homo sapiens
  siRNA target sequence for ADORA1 (NM_000674.1,1297-1315).
gcgtcaccttccttaagat

SEQ ID NO: 239060 - DNA, 19 bp, Homo sapiens
  siRNA target sequence for ADORA1 (NM_000674.1,1304-1322).
cttccttaagatttggaat

SEQ ID NO: 239061 - DNA, 19 bp, Homo sapiens
  siRNA target sequence for ADORA2A (NM_000675.3,602-620).
catcccgctccggtacaat

SEQ ID NO: 239062 - DNA, 19 bp, Homo sapiens
  siRNA target sequence for ADORA2A (NM_000675.3,855-873).
ctcatgctgggtgtctatt

SEQ ID NO: 239063 - DNA, 19 bp, Homo sapiens
  siRNA target sequence for ADORA2A (NM_000675.3,1018-1036).
ggctgcccctacacatcat

SEQ ID NO: 239064 - DNA, 19 bp, Homo sapiens
  siRNA target sequence for ADORA2A (NM_000675.3,1023-1041).
cccctacacatcatcaact

SEQ ID NO: 239065 - DNA, 19 bp, Homo sapiens
  siRNA target sequence for ADORA2A (NM_000675.3,1104-1122).
gtcctctcccacaccaatt

SEQ ID NO: 239066 - DNA, 19 bp, Homo sapiens
  siRNA target sequence for ADORA2B (NM_000676.2,625-643).
ccgtggcagtcgacagata

SEQ ID NO: 239067 - DNA, 19 bp, Homo sapiens
  siRNA target sequence for ADORA2B (NM_000676.2,657-675).
gtcccgctcaggtataaaa

SEQ ID NO: 239068 - DNA, 19 bp, Homo sapiens
  siRNA target sequence for ADORA2B (NM_000676.2,659-677).
cccgctcaggtataaaagt

SEQ ID NO: 239069 - DNA, 19 bp, Homo sapiens
  siRNA target sequence for ADORA2B (NM_000676.2,660-678).
ccgctcaggtataaaagtt

SEQ ID NO: 239070 - DNA, 19 bp, Homo sapiens
  siRNA target sequence for ADORA2B (NM_000676.2,661-679).
cgctcaggtataaaagttt

SEQ ID NO: 239071 - DNA, 19 bp, Homo sapiens
  siRNA target sequence for ADORA2B (NM_000676.2,731-749).
ctttggcatcggattgact

SEQ ID NO: 239072 - DNA, 19 bp, Homo sapiens
  siRNA target sequence for ADORA2B (NM_000676.2,774-792).
gacagtgccaccaacaact

SEQ ID NO: 239073 - DNA, 19 bp, Homo sapiens
  siRNA target sequence for ADORA2B (NM_000676.2,806-824).
ggatggaaccacgaatgaa

SEQ ID NO: 239074 - DNA, 19 bp, Homo sapiens
  siRNA target sequence for ADORA2B (NM_000676.2,872-890).
ctacatggtatatttcaat

SEQ ID NO: 239075 - DNA, 19 bp, Homo sapiens
  siRNA target sequence for ADORA2B (NM_000676.2,910-928).
ccccactgcttataatgct

SEQ ID NO: 239076 - DNA, 19 bp, Homo sapiens
  siRNA target sequence for ADORA2B (NM_000676.2,930-948).
gtgatctacattaagatct

SEQ ID NO: 239077 - DNA, 19 bp, Homo sapiens
  siRNA target sequence for ADORA2B (NM_000676.2,1133-1151).
gcccaagtgggcaatgaat

SEQ ID NO: 239078 - DNA, 19 bp, Homo sapiens
  siRNA target sequence for ADORA2B (NM_000676.2,1166-1184).
gtcacatgccaattcagtt

SEQ ID NO: 239079 - DNA, 19 bp, Homo sapiens
  siRNA target sequence for ADORA2B (NM_000676.2,1182-1200).
gttgtcaatcccattgtct

SEQ ID NO: 239080 - DNA, 19 bp, Homo sapiens
  siRNA target sequence for ADORA2B (NM_000676.2,1215-1233).
cgagacttccgctacactt

SEQ ID NO: 239081 - DNA, 19 bp, Homo sapiens
  siRNA target sequence for ADORA2B (NM_000676.2,1216-1234).
gagacttccgctacacttt

SEQ ID NO: 239082 - DNA, 19 bp, Homo sapiens
  siRNA target sequence for ADORA3 (NM_000677.2,793-811).
cattggccaatgttaccta

SEQ ID NO: 239083 - DNA, 19 bp, Homo sapiens
  siRNA target sequence for ADORA3 (NM_000677.2,798-816).
gccaatgttacctacatca

SEQ ID NO: 239084 - DNA, 19 bp, Homo sapiens
  siRNA target sequence for ADORA3 (NM_000677.2,962-980).
catgcctttggccattgtt

SEQ ID NO: 239085 - DNA, 19 bp, Homo sapiens
  siRNA target sequence for ADORA3 (NM_000677.2,1107-1125).
cttaccgtcagatacaaga

SEQ ID NO: 239086 - DNA, 19 bp, Homo sapiens
  siRNA target sequence for ADORA3 (NM_000677.2,1128-1146).
gtcaccactcacagaagaa

SEQ ID NO: 239087 - DNA, 19 bp, Homo sapiens
  siRNA target sequence for ADORA3 (NM_000677.2,1228-1246).
cctcagagtaccacagaaa

SEQ ID NO: 239088 - DNA, 19 bp, Homo sapiens
  siRNA target sequence for ADORA3 (NM_000677.2,1229-1247).
ctcagagtaccacagaaat

SEQ ID NO: 239089 - DNA, 19 bp, Homo sapiens
  siRNA target sequence for ADORA3 (NM_000677.2,1256-1274).
cctttcatgccaatttgtt

SEQ ID NO: 239090 - DNA, 19 bp, Homo sapiens
  siRNA target sequence for ADORA3 (NM_000677.2,1343-1361).
catgtgcgccatctatctt

SEQ ID NO: 239091 - DNA, 19 bp, Homo sapiens
  siRNA target sequence for ADORA3 (NM_000677.2,1348-1366).
gcgccatctatcttgacat

SEQ ID NO: 239092 - DNA, 19 bp, Homo sapiens
  siRNA target sequence for ADORA3 (NM_000677.2,1351-1369).
ccatctatcttgacatctt

SEQ ID NO: 239093 - DNA, 19 bp, Homo sapiens
  siRNA target sequence for ADORA3 (NM_000677.2,1359-1377).
cttgacatcttttacatca

SEQ ID NO: 239094 - DNA, 19 bp, Homo sapiens
  siRNA target sequence for ADORA3 (NM_000677.2,1385-1403).
caaactcagtctgaactta

SEQ ID NO: 239095 - DNA, 19 bp, Homo sapiens
  siRNA target sequence for ADORA3 (NM_000677.2,1418-1436).
gacaggtgcattttatgga

SEQ ID NO: 239096 - DNA, 19 bp, Homo sapiens
  siRNA target sequence for ADORA3 (NM_000677.2,1492-1510).
catggctgcctttatctat

SEQ ID NO: 239097 - DNA, 19 bp, Homo sapiens
  siRNA target sequence for ADORA3 (NM_000677.2,1500-1518).
cctttatctatcatcaact

SEQ ID NO: 239098 - DNA, 19 bp, Homo sapiens
  siRNA target sequence for ADORA3 (NM_000677.2,1603-1621).
ctatcgtctatgcctataa

SEQ ID NO: 239099 - DNA, 19 bp, Homo sapiens
  siRNA target sequence for AGTRL1 (NM_005161.2,321-339).
gtggtgattttgacaacta

SEQ ID NO: 239100 - DNA, 19 bp, Homo sapiens
  siRNA target sequence for AGTRL1 (NM_005161.2,323-341).
ggtgattttgacaactact

SEQ ID NO: 239101 - DNA, 19 bp, Homo sapiens
  siRNA target sequence for AGTRL1 (NM_005161.2,324-342).
gtgattttgacaactacta

SEQ ID NO: 239102 - DNA, 19 bp, Homo sapiens
  siRNA target sequence for AGTRL1 (NM_005161.2,492-510).
ggcgctcagctgatatctt

SEQ ID NO: 239103 - DNA, 19 bp, Homo sapiens
  siRNA target sequence for AGTRL1 (NM_005161.2,494-512).
cgctcagctgatatcttca

SEQ ID NO: 239104 - DNA, 19 bp, Homo sapiens
  siRNA target sequence for AGTRL1 (NM_005161.2,495-513).
gctcagctgatatcttcat

SEQ ID NO: 239105 - DNA, 19 bp, Homo sapiens
  siRNA target sequence for AGTRL1 (NM_005161.2,751-769).
cgtggccacggcagttctt

SEQ ID NO: 239106 - DNA, 19 bp, Homo sapiens
  siRNA target sequence for AGTRL1 (NM_005161.2,752-770).
gtggccacggcagttcttt

SEQ ID NO: 239107 - DNA, 19 bp, Homo sapiens
  siRNA target sequence for AGTRL1 (NM_005161.2,1160-1178).
gacctcttcctcatgaaca

SEQ ID NO: 239108 - DNA, 19 bp, Homo sapiens
  siRNA target sequence for BLR1 (NM_001716.2,95-113).
cgctaacgctggaaatgga

SEQ ID NO: 239109 - DNA, 19 bp, Homo sapiens
  siRNA target sequence for BLR1 (NM_001716.2,147-165).
ggacagattggacaactat

SEQ ID NO: 239110 - DNA, 19 bp, Homo sapiens
  siRNA target sequence for BLR1 (NM_001716.2,148-166).
gacagattggacaactata

SEQ ID NO: 239111 - DNA, 19 bp, Homo sapiens
  siRNA target sequence for BLR1 (NM_001716.2,152-170).
gattggacaactataacga

SEQ ID NO: 239112 - DNA, 19 bp, Homo sapiens
  siRNA target sequence for BLR1 (NM_001716.2,173-191).
cctccctggtggaaaatca

SEQ ID NO: 239113 - DNA, 19 bp, Homo sapiens
  siRNA target sequence for BLR1 (NM_001716.2,438-456).
gaccttcctctgcaaaact

SEQ ID NO: 239114 - DNA, 19 bp, Homo sapiens
  siRNA target sequence for BLR1 (NM_001716.2,656-674).
gccaaggccatcacaacaa

SEQ ID NO: 239115 - DNA, 19 bp, Homo sapiens
  siRNA target sequence for BLR1 (NM_001716.2,905-923).
cctaccacatcgtcatctt

SEQ ID NO: 239116 - DNA, 19 bp, Homo sapiens
  siRNA target sequence for CMKOR1 (NM_020311.1,313-331).
cttcgtcatcggcatgatt

SEQ ID NO: 239117 - DNA, 19 bp, Homo sapiens
  siRNA target sequence for CMKOR1 (NM_020311.1,383-401).
gacacgcactgctacatct

SEQ ID NO: 239118 - DNA, 19 bp, Homo sapiens
  siRNA target sequence for CMKOR1 (NM_020311.1,387-405).
cgcactgctacatcttgaa

SEQ ID NO: 239119 - DNA, 19 bp, Homo sapiens
  siRNA target sequence for CMKOR1 (NM_020311.1,815-833).
gccgttcccttctccatta

SEQ ID NO: 239120 - DNA, 19 bp, Homo sapiens
  siRNA target sequence for CMKOR1 (NM_020311.1,816-834).
ccgttcccttctccattat

SEQ ID NO: 239121 - DNA, 19 bp, Homo sapiens
  siRNA target sequence for CMKOR1 (NM_020311.1,828-846).
ccattatcgctgtcttcta

SEQ ID NO: 239122 - DNA, 19 bp, Homo sapiens
  siRNA target sequence for CMKOR1 (NM_020311.1,963-981).
cggtgctgctggacatctt

SEQ ID NO: 239123 - DNA, 19 bp, Homo sapiens
  siRNA target sequence for CMKOR1 (NM_020311.1,965-983).
gtgctgctggacatcttct

SEQ ID NO: 239124 - DNA, 19 bp, Homo sapiens
  siRNA target sequence for CMKOR1 (NM_020311.1,1147-1165).
caagtactcggccaaaaca

SEQ ID NO: 239125 - DNA, 19 bp, Homo sapiens
  siRNA target sequence for CXCR6 (NM_006564.1,84-102).
ggcagagcatgattaccat

SEQ ID NO: 239126 - DNA, 19 bp, Homo sapiens
  siRNA target sequence for CXCR6 (NM_006564.1,113-131).
ggttcagcagtttcaatga

SEQ ID NO: 239127 - DNA, 19 bp, Homo sapiens
  siRNA target sequence for CXCR6 (NM_006564.1,397-415).
ctgggcatctacactatta

SEQ ID NO: 239128 - DNA, 19 bp, Homo sapiens
  siRNA target sequence for CXCR6 (NM_006564.1,400-418).
ggcatctacactattaact

SEQ ID NO: 239129 - DNA, 19 bp, Homo sapiens
  siRNA target sequence for CXCR6 (NM_006564.1,401-419).
gcatctacactattaactt

SEQ ID NO: 239130 - DNA, 19 bp, Homo sapiens
  siRNA target sequence for CXCR6 (NM_006564.1,452-470).
ctgtggatcgtttcattgt

SEQ ID NO: 239131 - DNA, 19 bp, Homo sapiens
  siRNA target sequence for CXCR6 (NM_006564.1,569-587).
ccttgccccaaattatcta

SEQ ID NO: 239132 - DNA, 19 bp, Homo sapiens
  siRNA target sequence for CXCR6 (NM_006564.1,628-646).
catgacgaggcaatttcca

SEQ ID NO: 239133 - DNA, 19 bp, Homo sapiens
  siRNA target sequence for CXCR6 (NM_006564.1,687-705).
gccactgctcaccatgatt

SEQ ID NO: 239134 - DNA, 19 bp, Homo sapiens
  siRNA target sequence for CXCR6 (NM_006564.1,699-717).
catgattgtctgctattca

SEQ ID NO: 239135 - DNA, 19 bp, Homo sapiens
  siRNA target sequence for CXCR6 (NM_006564.1,706-724).
gtctgctattcagtcataa

SEQ ID NO: 239136 - DNA, 19 bp, Homo sapiens
  siRNA target sequence for CXCR6 (NM_006564.1,710-728).
gctattcagtcataatcaa

SEQ ID NO: 239137 - DNA, 19 bp, Homo sapiens
  siRNA target sequence for CXCR6 (NM_006564.1,711-729).
ctattcagtcataatcaaa

SEQ ID NO: 239138 - DNA, 19 bp, Homo sapiens
  siRNA target sequence for CXCR6 (NM_006564.1,716-734).
cagtcataatcaaaacact

SEQ ID NO: 239139 - DNA, 19 bp, Homo sapiens
  siRNA target sequence for CXCR6 (NM_006564.1,846-864).
cacacactgggaatactat

SEQ ID NO: 239140 - DNA, 19 bp, Homo sapiens
  siRNA target sequence for CXCR6 (NM_006564.1,865-883).
gccatgaccagctttcact

SEQ ID NO: 239141 - DNA, 19 bp, Homo sapiens
  siRNA target sequence for CXCR6 (NM_006564.1,947-965).
cctttgtcagcctgaagtt

SEQ ID NO: 239142 - DNA, 19 bp, Homo sapiens
  siRNA target sequence for CXCR6 (NM_006564.1,952-970).
gtcagcctgaagtttcgaa

SEQ ID NO: 239143 - DNA, 19 bp, Homo sapiens
  siRNA target sequence for CXCR6 (NM_006564.1,958-976).
ctgaagtttcgaaagaact

SEQ ID NO: 239144 - DNA, 19 bp, Homo sapiens
  siRNA target sequence for CXCR6 (NM_006564.1,985-1003).
cttgtgaaggacattggtt

SEQ ID NO: 239145 - DNA, 19 bp, Homo sapiens
  siRNA target sequence for CXCR6 (NM_006564.1,1014-1032).
ccttggggtctcacatcaa

SEQ ID NO: 239146 - DNA, 19 bp, Homo sapiens
  siRNA target sequence for CXCR6 (NM_006564.1,1023-1041).
ctcacatcaatggaaatct

SEQ ID NO: 239147 - DNA, 19 bp, Homo sapiens
  siRNA target sequence for CXCR6 (NM_006564.1,1045-1063).
gaggacaattccaagactt

SEQ ID NO: 239148 - DNA, 19 bp, Homo sapiens
  siRNA target sequence for EBI2 (NM_004951.2,116-134).
gcacggccaggatagtaat

SEQ ID NO: 239149 - DNA, 19 bp, Homo sapiens
  siRNA target sequence for EBI2 (NM_004951.2,147-165).
cagcctcgtcttcatcatt

SEQ ID NO: 239150 - DNA, 19 bp, Homo sapiens
  siRNA target sequence for EBI2 (NM_004951.2,167-185).
ggctcgtgggaaacttact

SEQ ID NO: 239151 - DNA, 19 bp, Homo sapiens
  siRNA target sequence for EBI2 (NM_004951.2,168-186).
gctcgtgggaaacttacta

SEQ ID NO: 239152 - DNA, 19 bp, Homo sapiens
  siRNA target sequence for EBI2 (NM_004951.2,189-207).
cttggtcgtcattgttcaa

SEQ ID NO: 239153 - DNA, 19 bp, Homo sapiens
  siRNA target sequence for EBI2 (NM_004951.2,193-211).
gtcgtcattgttcaaaaca

SEQ ID NO: 239154 - DNA, 19 bp, Homo sapiens
  siRNA target sequence for EBI2 (NM_004951.2,230-248).
ccaccctctattcaacaaa

SEQ ID NO: 239155 - DNA, 19 bp, Homo sapiens
  siRNA target sequence for EBI2 (NM_004951.2,252-270).
ggtgatttctgatatactt

SEQ ID NO: 239156 - DNA, 19 bp, Homo sapiens
  siRNA target sequence for EBI2 (NM_004951.2,279-297).
cgctttgcctacacgaata

SEQ ID NO: 239157 - DNA, 19 bp, Homo sapiens
  siRNA target sequence for EBI2 (NM_004951.2,292-310).
cgaatagcctactatgcaa

SEQ ID NO: 239158 - DNA, 19 bp, Homo sapiens
  siRNA target sequence for EBI2 (NM_004951.2,293-311).
gaatagcctactatgcaat

SEQ ID NO: 239159 - DNA, 19 bp, Homo sapiens
  siRNA target sequence for EBI2 (NM_004951.2,334-352).
gatgccttgtgtaggataa

SEQ ID NO: 239160 - DNA, 19 bp, Homo sapiens
  siRNA target sequence for EBI2 (NM_004951.2,347-365).
ggataactgcgctagtgtt

SEQ ID NO: 239161 - DNA, 19 bp, Homo sapiens
  siRNA target sequence for EBI2 (NM_004951.2,348-366).
gataactgcgctagtgttt

SEQ ID NO: 239162 - DNA, 19 bp, Homo sapiens
  siRNA target sequence for EBI2 (NM_004951.2,353-371).
ctgcgctagtgttttacat

SEQ ID NO: 239163 - DNA, 19 bp, Homo sapiens
  siRNA target sequence for EBI2 (NM_004951.2,356-374).
cgctagtgttttacatcaa

SEQ ID NO: 239164 - DNA, 19 bp, Homo sapiens
  siRNA target sequence for EBI2 (NM_004951.2,363-381).
gttttacatcaacacatat

SEQ ID NO: 239165 - DNA, 19 bp, Homo sapiens
  siRNA target sequence for EBI2 (NM_004951.2,377-395).
catatgcaggtgtgaactt

SEQ ID NO: 239166 - DNA, 19 bp, Homo sapiens
  siRNA target sequence for EBI2 (NM_004951.2,408-426).
gagtattgaccgcttcatt

SEQ ID NO: 239167 - DNA, 19 bp, Homo sapiens
  siRNA target sequence for EBI2 (NM_004951.2,436-454).
caccctctacgctacaaca

SEQ ID NO: 239168 - DNA, 19 bp, Homo sapiens
  siRNA target sequence for EBI2 (NM_004951.2,439-457).
cctctacgctacaacaaga

SEQ ID NO: 239169 - DNA, 19 bp, Homo sapiens
  siRNA target sequence for EBI2 (NM_004951.2,440-458).
ctctacgctacaacaagat

SEQ ID NO: 239170 - DNA, 19 bp, Homo sapiens
  siRNA target sequence for EBI2 (NM_004951.2,442-460).
ctacgctacaacaagataa

SEQ ID NO: 239171 - DNA, 19 bp, Homo sapiens
  siRNA target sequence for EBI2 (NM_004951.2,475-493).
gcaaaaggcgtgtgcatat

SEQ ID NO: 239172 - DNA, 19 bp, Homo sapiens
  siRNA target sequence for EBI2 (NM_004951.2,476-494).
caaaaggcgtgtgcatatt

SEQ ID NO: 239173 - DNA, 19 bp, Homo sapiens
  siRNA target sequence for EBI2 (NM_004951.2,531-549).
cctcatcaaccctatgtca

SEQ ID NO: 239174 - DNA, 19 bp, Homo sapiens
  siRNA target sequence for EBI2 (NM_004951.2,532-550).
ctcatcaaccctatgtcaa

SEQ ID NO: 239175 - DNA, 19 bp, Homo sapiens
  siRNA target sequence for EBI2 (NM_004951.2,579-597).
ggagtatccaaactttgaa

SEQ ID NO: 239176 - DNA, 19 bp, Homo sapiens
  siRNA target sequence for EBI2 (NM_004951.2,622-640).
ctgcttggggcatgtttca

SEQ ID NO: 239177 - DNA, 19 bp, Homo sapiens
  siRNA target sequence for EBI2 (NM_004951.2,624-642).
gcttggggcatgtttcata

SEQ ID NO: 239178 - DNA, 19 bp, Homo sapiens
  siRNA target sequence for EBI2 (NM_004951.2,628-646).
ggggcatgtttcataggat

SEQ ID NO: 239179 - DNA, 19 bp, Homo sapiens
  siRNA target sequence for EBI2 (NM_004951.2,629-647).
gggcatgtttcataggata

SEQ ID NO: 239180 - DNA, 19 bp, Homo sapiens
  siRNA target sequence for EBI2 (NM_004951.2,644-662).
gatatgtacttccacttat

SEQ ID NO: 239181 - DNA, 19 bp, Homo sapiens
  siRNA target sequence for EBI2 (NM_004951.2,649-667).
gtacttccacttataatca

SEQ ID NO: 239182 - DNA, 19 bp, Homo sapiens
  siRNA target sequence for EBI2 (NM_004951.2,655-673).
ccacttataatcattctca

SEQ ID NO: 239183 - DNA, 19 bp, Homo sapiens
  siRNA target sequence for EBI2 (NM_004951.2,666-684).
cattctcatctgctattct

SEQ ID NO: 239184 - DNA, 19 bp, Homo sapiens
  siRNA target sequence for EBI2 (NM_004951.2,685-703).
cagatctgctgcaaactct

SEQ ID NO: 239185 - DNA, 19 bp, Homo sapiens
  siRNA target sequence for EBI2 (NM_004951.2,723-741).
cccactcactgagaaatct

SEQ ID NO: 239186 - DNA, 19 bp, Homo sapiens
  siRNA target sequence for EBI2 (NM_004951.2,731-749).
ctgagaaatctggtgtaaa

SEQ ID NO: 239187 - DNA, 19 bp, Homo sapiens
  siRNA target sequence for EBI2 (NM_004951.2,735-753).
gaaatctggtgtaaacaaa

SEQ ID NO: 239188 - DNA, 19 bp, Homo sapiens
  siRNA target sequence for EBI2 (NM_004951.2,806-824).
caccttaccatgttgcaat

SEQ ID NO: 239189 - DNA, 19 bp, Homo sapiens
  siRNA target sequence for EBI2 (NM_004951.2,808-826).
ccttaccatgttgcaatta

SEQ ID NO: 239190 - DNA, 19 bp, Homo sapiens
  siRNA target sequence for EBI2 (NM_004951.2,809-827).
cttaccatgttgcaattat

SEQ ID NO: 239191 - DNA, 19 bp, Homo sapiens
  siRNA target sequence for EBI2 (NM_004951.2,817-835).
gttgcaattattcaacata

SEQ ID NO: 239192 - DNA, 19 bp, Homo sapiens
  siRNA target sequence for EBI2 (NM_004951.2,820-838).
gcaattattcaacatatga

SEQ ID NO: 239193 - DNA, 19 bp, Homo sapiens
  siRNA target sequence for EBI2 (NM_004951.2,843-861).
gaagcttcgtttctctaat

SEQ ID NO: 239194 - DNA, 19 bp, Homo sapiens
  siRNA target sequence for EBI2 (NM_004951.2,868-886).
gaatgtagccaaagacatt

SEQ ID NO: 239195 - DNA, 19 bp, Homo sapiens
  siRNA target sequence for EBI2 (NM_004951.2,872-890).
gtagccaaagacattcgtt

SEQ ID NO: 239196 - DNA, 19 bp, Homo sapiens
  siRNA target sequence for EBI2 (NM_004951.2,913-931).
gtatgcctgatgaacttca

SEQ ID NO: 239197 - DNA, 19 bp, Homo sapiens
  siRNA target sequence for EBI2 (NM_004951.2,919-937).
ctgatgaacttcaattgct

SEQ ID NO: 239198 - DNA, 19 bp, Homo sapiens
  siRNA target sequence for EBI2 (NM_004951.2,935-953).
gctgcatggacccttttat

SEQ ID NO: 239199 - DNA, 19 bp, Homo sapiens
  siRNA target sequence for EBI2 (NM_004951.2,938-956).
gcatggacccttttatcta

SEQ ID NO: 239200 - DNA, 19 bp, Homo sapiens
  siRNA target sequence for EBI2 (NM_004951.2,1007-1025).
ggcaagtcagtgtatcgat

SEQ ID NO: 239201 - DNA, 19 bp, Homo sapiens
  siRNA target sequence for EBI2 (NM_004951.2,1012-1030).
gtcagtgtatcgatttcta

SEQ ID NO: 239202 - DNA, 19 bp, Homo sapiens
  siRNA target sequence for EBI2 (NM_004951.2,1014-1032).
cagtgtatcgatttctagt

SEQ ID NO: 239203 - DNA, 19 bp, Homo sapiens
  siRNA target sequence for EBI2 (NM_004951.2,1054-1072).
gaaaattcacgtgaaatga

SEQ ID NO: 239204 - DNA, 19 bp, Homo sapiens
  siRNA target sequence for ET(B)R-LP-2 (NM_004767.2,364-382).
gaactgaggggcaatctga

SEQ ID NO: 239205 - DNA, 19 bp, Homo sapiens
  siRNA target sequence for ET(B)R-LP-2 (NM_004767.2,912-930).
ggactcatgcatcatgaaa

SEQ ID NO: 239206 - DNA, 19 bp, Homo sapiens
  siRNA target sequence for ET(B)R-LP-2 (NM_004767.2,943-961).
ctgcccgagtccctgtatt

SEQ ID NO: 239207 - DNA, 19 bp, Homo sapiens
  siRNA target sequence for ET(B)R-LP-2 (NM_004767.2,947-965).
ccgagtccctgtattcact

SEQ ID NO: 239208 - DNA, 19 bp, Homo sapiens
  siRNA target sequence for ET(B)R-LP-2 (NM_004767.2,987-1005).
ccgcatgtggtggtacttt

SEQ ID NO: 239209 - DNA, 19 bp, Homo sapiens
  siRNA target sequence for ET(B)R-LP-2 (NM_004767.2,1406-1424).
ccaatgggtcggacaacaa

SEQ ID NO: 239210 - DNA, 19 bp, Homo sapiens
  siRNA target sequence for ET(B)R-LP-2 (NM_004767.2,1438-1456).
gtgtcctcttccatctact

SEQ ID NO: 239211 - DNA, 19 bp, Homo sapiens
  siRNA target sequence for FKSG79 (NM_032553.1,60-78).
caggccagatggagacaat

SEQ ID NO: 239212 - DNA, 19 bp, Homo sapiens
  siRNA target sequence for FKSG79 (NM_032553.1,131-149).
caggtctcatagggaatat

SEQ ID NO: 239213 - DNA, 19 bp, Homo sapiens
  siRNA target sequence for FKSG79 (NM_032553.1,133-151).
ggtctcatagggaatatat

SEQ ID NO: 239214 - DNA, 19 bp, Homo sapiens
  siRNA target sequence for FKSG79 (NM_032553.1,134-152).
gtctcatagggaatatatt

SEQ ID NO: 239215 - DNA, 19 bp, Homo sapiens
  siRNA target sequence for FKSG79 (NM_032553.1,157-175).
ctgtgggtattctatggtt

SEQ ID NO: 239216 - DNA, 19 bp, Homo sapiens
  siRNA target sequence for FKSG79 (NM_032553.1,161-179).
gggtattctatggttatat

SEQ ID NO: 239217 - DNA, 19 bp, Homo sapiens
  siRNA target sequence for FKSG79 (NM_032553.1,216-234).
cttagccattgctgactta

SEQ ID NO: 239218 - DNA, 19 bp, Homo sapiens
  siRNA target sequence for FKSG79 (NM_032553.1,254-272).
cactgaggatcttctacta

SEQ ID NO: 239219 - DNA, 19 bp, Homo sapiens
  siRNA target sequence for FKSG79 (NM_032553.1,301-319).
ggtctctgcatgttctgtt

SEQ ID NO: 239220 - DNA, 19 bp, Homo sapiens
  siRNA target sequence for FKSG79 (NM_032553.1,369-387).
catcagtgtgcgacgattt

SEQ ID NO: 239221 - DNA, 19 bp, Homo sapiens
  siRNA target sequence for FKSG79 (NM_032553.1,374-392).
gtgtgcgacgattttggtt

SEQ ID NO: 239222 - DNA, 19 bp, Homo sapiens
  siRNA target sequence for FKSG79 (NM_032553.1,454-472).
gctggctggctgatcatct

SEQ ID NO: 239223 - DNA, 19 bp, Homo sapiens
  siRNA target sequence for FKSG79 (NM_032553.1,499-517).
ctcagaaccagtgatgata

SEQ ID NO: 239224 - DNA, 19 bp, Homo sapiens
  siRNA target sequence for FKSG79 (NM_032553.1,574-592).
gcccagtccgttgttatga

SEQ ID NO: 239225 - DNA, 19 bp, Homo sapiens
  siRNA target sequence for FKSG79 (NM_032553.1,575-593).
cccagtccgttgttatgat

SEQ ID NO: 239226 - DNA, 19 bp, Homo sapiens
  siRNA target sequence for FKSG79 (NM_032553.1,577-595).
cagtccgttgttatgatga

SEQ ID NO: 239227 - DNA, 19 bp, Homo sapiens
  siRNA target sequence for FKSG79 (NM_032553.1,594-612).
gaccattggcgagttgatt

SEQ ID NO: 239228 - DNA, 19 bp, Homo sapiens
  siRNA target sequence for FKSG79 (NM_032553.1,603-621).
cgagttgattgggtttgta

SEQ ID NO: 239229 - DNA, 19 bp, Homo sapiens
  siRNA target sequence for FKSG79 (NM_032553.1,606-624).
gttgattgggtttgtaact

SEQ ID NO: 239230 - DNA, 19 bp, Homo sapiens
  siRNA target sequence for FKSG79 (NM_032553.1,626-644).
cgcttctgattgtcctata

SEQ ID NO: 239231 - DNA, 19 bp, Homo sapiens
  siRNA target sequence for FKSG79 (NM_032553.1,627-645).
gcttctgattgtcctatat

SEQ ID NO: 239232 - DNA, 19 bp, Homo sapiens
  siRNA target sequence for FKSG79 (NM_032553.1,651-669).
ctggaagacggttttatca

SEQ ID NO: 239233 - DNA, 19 bp, Homo sapiens
  siRNA target sequence for FKSG79 (NM_032553.1,653-671).
ggaagacggttttatcact

SEQ ID NO: 239234 - DNA, 19 bp, Homo sapiens
  siRNA target sequence for FKSG79 (NM_032553.1,661-679).
gttttatcactgcaagata

SEQ ID NO: 239235 - DNA, 19 bp, Homo sapiens
  siRNA target sequence for FKSG79 (NM_032553.1,737-755).
cctgtgcaggggtattcct

SEQ ID NO: 239236 - DNA, 19 bp, Homo sapiens
  siRNA target sequence for FKSG79 (NM_032553.1,738-756).
ctgtgcaggggtattccta

SEQ ID NO: 239237 - DNA, 19 bp, Homo sapiens
  siRNA target sequence for FKSG79 (NM_032553.1,740-758).
gtgcaggggtattcctaat

SEQ ID NO: 239238 - DNA, 19 bp, Homo sapiens
  siRNA target sequence for FKSG79 (NM_032553.1,742-760).
gcaggggtattcctaattt

SEQ ID NO: 239239 - DNA, 19 bp, Homo sapiens
  siRNA target sequence for FKSG79 (NM_032553.1,745-763).
ggggtattcctaatttgct

SEQ ID NO: 239240 - DNA, 19 bp, Homo sapiens
  siRNA target sequence for FKSG79 (NM_032553.1,746-764).
gggtattcctaatttgctt

SEQ ID NO: 239241 - DNA, 19 bp, Homo sapiens
  siRNA target sequence for FKSG79 (NM_032553.1,766-784).
gcaccttatcatttcagtt

SEQ ID NO: 239242 - DNA, 19 bp, Homo sapiens
  siRNA target sequence for FKSG79 (NM_032553.1,802-820).
gtgaagtccaatgaaatta

SEQ ID NO: 239243 - DNA, 19 bp, Homo sapiens
  siRNA target sequence for FKSG79 (NM_032553.1,832-850).
gccagaagggtgattctaa

SEQ ID NO: 239244 - DNA, 19 bp, Homo sapiens
  siRNA target sequence for FKSG79 (NM_032553.1,833-851).
ccagaagggtgattctaat

SEQ ID NO: 239245 - DNA, 19 bp, Homo sapiens
  siRNA target sequence for FKSG79 (NM_032553.1,834-852).
cagaagggtgattctaata

SEQ ID NO: 239246 - DNA, 19 bp, Homo sapiens
  siRNA target sequence for FKSG79 (NM_032553.1,836-854).
gaagggtgattctaatatt

SEQ ID NO: 239247 - DNA, 19 bp, Homo sapiens
  siRNA target sequence for FKSG79 (NM_032553.1,839-857).
gggtgattctaatatttca

SEQ ID NO: 239248 - DNA, 19 bp, Homo sapiens
  siRNA target sequence for FKSG79 (NM_032553.1,840-858).
ggtgattctaatatttcat

SEQ ID NO: 239249 - DNA, 19 bp, Homo sapiens
  siRNA target sequence for FKSG79 (NM_032553.1,870-888).
gtgtcttgctagtctgaat

SEQ ID NO: 239250 - DNA, 19 bp, Homo sapiens
  siRNA target sequence for FKSG79 (NM_032553.1,874-892).
cttgctagtctgaattcat

SEQ ID NO: 239251 - DNA, 19 bp, Homo sapiens
  siRNA target sequence for FKSG79 (NM_032553.1,893-911).
gtcttgacccagtcatata

SEQ ID NO: 239252 - DNA, 19 bp, Homo sapiens
  siRNA target sequence for FKSG79 (NM_032553.1,898-916).
gacccagtcatatactact

SEQ ID NO: 239253 - DNA, 19 bp, Homo sapiens
  siRNA target sequence for FKSG79 (NM_032553.1,900-918).
cccagtcatatactacttt

SEQ ID NO: 239254 - DNA, 19 bp, Homo sapiens
  siRNA target sequence for FKSG79 (NM_032553.1,901-919).
ccagtcatatactactttt

SEQ ID NO: 239255 - DNA, 19 bp, Homo sapiens
  siRNA target sequence for FKSG79 (NM_032553.1,933-951).
ccgaagacggctttcaaga

SEQ ID NO: 239256 - DNA, 19 bp, Homo sapiens
  siRNA target sequence for FKSG79 (NM_032553.1,968-986).
gcatccaactccatgcaaa

SEQ ID NO: 239257 - DNA, 19 bp, Homo sapiens
  siRNA target sequence for FKSG79 (NM_032553.1,969-987).
catccaactccatgcaaaa

SEQ ID NO: 239258 - DNA, 19 bp, Homo sapiens
  siRNA target sequence for FKSG79 (NM_032553.1,1013-1031).
ccaccatgacacctgaatt

SEQ ID NO: 239259 - DNA, 19 bp, Homo sapiens
  siRNA target sequence for FY (NM_002036.1,704-722).
cagtgtcctgggtatccta

SEQ ID NO: 239260 - DNA, 19 bp, Homo sapiens
  siRNA target sequence for FY (NM_002036.1,1077-1095).
ggactctgcaccctgatat

SEQ ID NO: 239261 - DNA, 19 bp, Homo sapiens
  siRNA target sequence for FY (NM_002036.1,1080-1098).
ctctgcaccctgatataca

SEQ ID NO: 239262 - DNA, 19 bp, Homo sapiens
  siRNA target sequence for FY (NM_002036.1,1219-1237).
gcccctggatgaatatcct

SEQ ID NO: 239263 - DNA, 19 bp, Homo sapiens
  siRNA target sequence for FY (NM_002036.1,1366-1384).
cagaagccctggcaatttt

SEQ ID NO: 239264 - DNA, 19 bp, Homo sapiens
  siRNA target sequence for FY (NM_002036.1,1404-1422).
ctgctcctcgccctattct

SEQ ID NO: 239265 - DNA, 19 bp, Homo sapiens
  siRNA target sequence for GHSR (NM_004122.1,347-365).
gcaaactcttccaattcgt

SEQ ID NO: 239266 - DNA, 19 bp, Homo sapiens
  siRNA target sequence for GHSR (NM_198407.1,837-855).
ccacgtagggcgatattta

SEQ ID NO: 239267 - DNA, 19 bp, Homo sapiens
  siRNA target sequence for GHSR (NM_198407.1,838-856).
cacgtagggcgatatttat

SEQ ID NO: 239268 - DNA, 19 bp, Homo sapiens
  siRNA target sequence for GHSR (NM_198407.1,840-858).
cgtagggcgatatttattt

SEQ ID NO: 239269 - DNA, 19 bp, Homo sapiens
  siRNA target sequence for GHSR (NM_198407.1,1071-1089).
ggcctggacagaatctagt

SEQ ID NO: 239270 - DNA, 19 bp, Homo sapiens
  siRNA target sequence for GHSR (NM_198407.1,1074-1092).
ctggacagaatctagtatt

SEQ ID NO: 239271 - DNA, 19 bp, Homo sapiens
  siRNA target sequence for GHSR (NM_198407.1,1076-1094).
ggacagaatctagtattaa

SEQ ID NO: 239272 - DNA, 19 bp, Homo sapiens
  siRNA target sequence for GNRHR2 (NM_057163.1,74-92).
gggatgccacctggaatat

SEQ ID NO: 239273 - DNA, 19 bp, Homo sapiens
  siRNA target sequence for GNRHR2 (NM_057163.1,84-102).
ctggaatatcactgttcaa

SEQ ID NO: 239274 - DNA, 19 bp, Homo sapiens
  siRNA target sequence for GNRHR2 (NM_057163.1,122-140).
catgtcggacactgatgtt

SEQ ID NO: 239275 - DNA, 19 bp, Homo sapiens
  siRNA target sequence for GNRHR2 (NM_057163.1,230-248).
cccgttcaggtgtaaggaa

SEQ ID NO: 239276 - DNA, 19 bp, Homo sapiens
  siRNA target sequence for GNRHR2 (NM_057163.1,231-249).
ccgttcaggtgtaaggaaa

SEQ ID NO: 239277 - DNA, 19 bp, Homo sapiens
  siRNA target sequence for GNRHR2 (NM_057163.1,258-276).
ggcagcctggggacttagt

SEQ ID NO: 239278 - DNA, 19 bp, Homo sapiens
  siRNA target sequence for GNRHR2 (NM_057163.1,380-398).
ggcaagagaccacctataa

SEQ ID NO: 239279 - DNA, 19 bp, Homo sapiens
  siRNA target sequence for GNRHR2 (NM_057163.1,439-457).
gccatggccatctgctata

SEQ ID NO: 239280 - DNA, 19 bp, Homo sapiens
  siRNA target sequence for GNRHR2 (NM_057163.1,615-633).
ctggacaccttattaccta

SEQ ID NO: 239281 - DNA, 19 bp, Homo sapiens
  siRNA target sequence for GNRHR2 (NM_057163.1,717-735).
cctcaatgctcctttggat

SEQ ID NO: 239282 - DNA, 19 bp, Homo sapiens
  siRNA target sequence for GNRHR2 (NM_057163.1,775-793).
gggcaccaagaacttagta

SEQ ID NO: 239283 - DNA, 19 bp, Homo sapiens
  siRNA target sequence for GNRHR2 (NM_057163.1,776-794).
ggcaccaagaacttagtat

SEQ ID NO: 239284 - DNA, 19 bp, Homo sapiens
  siRNA target sequence for GNRHR2 (NM_057163.1,781-799).
caagaacttagtatagact

SEQ ID NO: 239285 - DNA, 19 bp, Homo sapiens
  siRNA target sequence for GNRHR2 (NM_057163.1,787-805).
cttagtatagactcttcta

SEQ ID NO: 239286 - DNA, 19 bp, Homo sapiens
  siRNA target sequence for GNRHR2 (NM_057163.1,865-883).
caaaaaactgtgacatcaa

SEQ ID NO: 239287 - DNA, 19 bp, Homo sapiens
  siRNA target sequence for GNRHR2 (NM_057163.1,905-923).
gcatttctataacatctat

SEQ ID NO: 239288 - DNA, 19 bp, Homo sapiens
  siRNA target sequence for GPBAR1 (NM_170699.1,726-744).
cctgtacctcgaagtctat

SEQ ID NO: 239289 - DNA, 19 bp, Homo sapiens
  siRNA target sequence for GPR (NM_007223.1,1007-1025).
gcaggtcgtcatcttcata

SEQ ID NO: 239290 - DNA, 19 bp, Homo sapiens
  siRNA target sequence for GPR (NM_007223.1,1027-1045).
gctcgctgctcggaaactt

SEQ ID NO: 239291 - DNA, 19 bp, Homo sapiens
  siRNA target sequence for GPR (NM_007223.1,1030-1048).
cgctgctcggaaacttcat

SEQ ID NO: 239292 - DNA, 19 bp, Homo sapiens
  siRNA target sequence for GPR (NM_007223.1,1038-1056).
ggaaacttcatggtgttat

SEQ ID NO: 239293 - DNA, 19 bp, Homo sapiens
  siRNA target sequence for GPR (NM_007223.1,1068-1086).
cgcacaaccgtgttcaaat

SEQ ID NO: 239294 - DNA, 19 bp, Homo sapiens
  siRNA target sequence for GPR (NM_007223.1,1070-1088).
cacaaccgtgttcaaatct

SEQ ID NO: 239295 - DNA, 19 bp, Homo sapiens
  siRNA target sequence for GPR (NM_007223.1,1072-1090).
caaccgtgttcaaatctgt

SEQ ID NO: 239296 - DNA, 19 bp, Homo sapiens
  siRNA target sequence for GPR (NM_007223.1,1214-1232).
ctgcaaggtcgtcaaattt

SEQ ID NO: 239297 - DNA, 19 bp, Homo sapiens
  siRNA target sequence for GPR (NM_007223.1,1216-1234).
gcaaggtcgtcaaattttt

SEQ ID NO: 239298 - DNA, 19 bp, Homo sapiens
  siRNA target sequence for GPR (NM_007223.1,1267-1285).
gcttccctgctattgcttt

SEQ ID NO: 239299 - DNA, 19 bp, Homo sapiens
  siRNA target sequence for GPR (NM_007223.1,1281-1299).
gctttggacaggtactact

SEQ ID NO: 239300 - DNA, 19 bp, Homo sapiens
  siRNA target sequence for GPR (NM_007223.1,1342-1360).
cccgtgaactggtgatgta

SEQ ID NO: 239301 - DNA, 19 bp, Homo sapiens
  siRNA target sequence for GPR (NM_007223.1,1344-1362).
cgtgaactggtgatgtaca

SEQ ID NO: 239302 - DNA, 19 bp, Homo sapiens
  siRNA target sequence for GPR (NM_007223.1,1345-1363).
gtgaactggtgatgtacat

SEQ ID NO: 239303 - DNA, 19 bp, Homo sapiens
  siRNA target sequence for GPR (NM_007223.1,1524-1542).
gtggtgttcctcttcttga

SEQ ID NO: 239304 - DNA, 19 bp, Homo sapiens
  siRNA target sequence for GPR (NM_007223.1,1608-1626).
ccacagaacaccatctcta

SEQ ID NO: 239305 - DNA, 19 bp, Homo sapiens
  siRNA target sequence for GPR (NM_007223.1,1680-1698).
gtgatggtcttcatcttgt

SEQ ID NO: 239306 - DNA, 19 bp, Homo sapiens
  siRNA target sequence for GPR (NM_007223.1,1782-1800).
gtttggctgcccaaagtct

SEQ ID NO: 239307 - DNA, 19 bp, Homo sapiens
  siRNA target sequence for GPR (NM_007223.1,1823-1841).
ctttcttactgtgaacaaa

SEQ ID NO: 239308 - DNA, 19 bp, Homo sapiens
  siRNA target sequence for GPR (NM_007223.1,1888-1906).
ggtacagtcgccgtaatgt

SEQ ID NO: 239309 - DNA, 19 bp, Homo sapiens
  siRNA target sequence for GPR (NM_007223.1,2067-2085).
caggccaaggagatattta

SEQ ID NO: 239310 - DNA, 19 bp, Homo sapiens
  siRNA target sequence for GPR (NM_007223.1,2191-2209).
ctgaaacattccctgataa

SEQ ID NO: 239311 - DNA, 19 bp, Homo sapiens
  siRNA target sequence for GPR (NM_007223.1,2226-2244).
ggctttgggccttttgagt

SEQ ID NO: 239312 - DNA, 19 bp, Homo sapiens
  siRNA target sequence for GPR (NM_007223.1,2366-2384).
gatgagcagaaacaataaa

SEQ ID NO: 239313 - DNA, 19 bp, Homo sapiens
  siRNA target sequence for GPR1 (NM_005279.2,190-208).
cctatgacctagactatta

SEQ ID NO: 239314 - DNA, 19 bp, Homo sapiens
  siRNA target sequence for GPR1 (NM_005279.2,220-238).
ctgatttggaggagaaagt

SEQ ID NO: 239315 - DNA, 19 bp, Homo sapiens
  siRNA target sequence for GPR1 (NM_005279.2,259-277).
gggtctccctggtgttata

SEQ ID NO: 239316 - DNA, 19 bp, Homo sapiens
  siRNA target sequence for GPR1 (NM_005279.2,260-278).
ggtctccctggtgttatat

SEQ ID NO: 239317 - DNA, 19 bp, Homo sapiens
  siRNA target sequence for GPR1 (NM_005279.2,263-281).
ctccctggtgttatattgt

SEQ ID NO: 239318 - DNA, 19 bp, Homo sapiens
  siRNA target sequence for GPR1 (NM_005279.2,381-399).
gccattgcggatttcattt

SEQ ID NO: 239319 - DNA, 19 bp, Homo sapiens
  siRNA target sequence for GPR1 (NM_005279.2,382-400).
ccattgcggatttcatttt

SEQ ID NO: 239320 - DNA, 19 bp, Homo sapiens
  siRNA target sequence for GPR1 (NM_005279.2,468-486).
ctgtgcaaagccaattcct

SEQ ID NO: 239321 - DNA, 19 bp, Homo sapiens
  siRNA target sequence for GPR1 (NM_005279.2,538-556).
gcctggaccactatatcca

SEQ ID NO: 239322 - DNA, 19 bp, Homo sapiens
  siRNA target sequence for GPR1 (NM_005279.2,563-581).
ccatcctgtcttatctcat

SEQ ID NO: 239323 - DNA, 19 bp, Homo sapiens
  siRNA target sequence for GPR1 (NM_005279.2,583-601).
ggcatcgaaccctcaagaa

SEQ ID NO: 239324 - DNA, 19 bp, Homo sapiens
  siRNA target sequence for GPR1 (NM_005279.2,604-622).
ctctgattgtcattatatt

SEQ ID NO: 239325 - DNA, 19 bp, Homo sapiens
  siRNA target sequence for GPR1 (NM_005279.2,606-624).
ctgattgtcattatattca

SEQ ID NO: 239326 - DNA, 19 bp, Homo sapiens
  siRNA target sequence for GPR1 (NM_005279.2,672-690).
gacactgtggagttcaata

SEQ ID NO: 239327 - DNA, 19 bp, Homo sapiens
  siRNA target sequence for GPR1 (NM_005279.2,674-692).
cactgtggagttcaataat

SEQ ID NO: 239328 - DNA, 19 bp, Homo sapiens
  siRNA target sequence for GPR1 (NM_005279.2,678-696).
gtggagttcaataatcata

SEQ ID NO: 239329 - DNA, 19 bp, Homo sapiens
  siRNA target sequence for GPR1 (NM_005279.2,683-701).
gttcaataatcatactctt

SEQ ID NO: 239330 - DNA, 19 bp, Homo sapiens
  siRNA target sequence for GPR1 (NM_005279.2,693-711).
catactctttgctataaca

SEQ ID NO: 239331 - DNA, 19 bp, Homo sapiens
  siRNA target sequence for GPR1 (NM_005279.2,726-744).
gatcctgacctcactttga

SEQ ID NO: 239332 - DNA, 19 bp, Homo sapiens
  siRNA target sequence for GPR1 (NM_005279.2,763-781).
cttgggtgaaatttatcat

SEQ ID NO: 239333 - DNA, 19 bp, Homo sapiens
  siRNA target sequence for GPR1 (NM_005279.2,794-812).
ccctttgctaacaatgagt

SEQ ID NO: 239334 - DNA, 19 bp, Homo sapiens
  siRNA target sequence for GPR1 (NM_005279.2,951-969).
ctcaccattcaccacaata

SEQ ID NO: 239335 - DNA, 19 bp, Homo sapiens
  siRNA target sequence for GPR1 (NM_005279.2,970-988).
gctattcccaccatgtgat

SEQ ID NO: 239336 - DNA, 19 bp, Homo sapiens
  siRNA target sequence for GPR1 (NM_005279.2,1014-1032).
ggtttggcattcctcaata

SEQ ID NO: 239337 - DNA, 19 bp, Homo sapiens
  siRNA target sequence for GPR1 (NM_005279.2,1045-1063).
ccatcctttatgtcctaat

SEQ ID NO: 239338 - DNA, 19 bp, Homo sapiens
  siRNA target sequence for GPR1 (NM_005279.2,1050-1068).
ctttatgtcctaattagta

SEQ ID NO: 239339 - DNA, 19 bp, Homo sapiens
  siRNA target sequence for GPR1 (NM_005279.2,1056-1074).
gtcctaattagtaagaagt

SEQ ID NO: 239340 - DNA, 19 bp, Homo sapiens
  siRNA target sequence for GPR1 (NM_005279.2,1091-1109).
gtcctcagttgctgagata

SEQ ID NO: 239341 - DNA, 19 bp, Homo sapiens
  siRNA target sequence for GPR100 (NM_181885.1,85-103).
gctccgatgcctgtcaaat

SEQ ID NO: 239342 - DNA, 19 bp, Homo sapiens
  siRNA target sequence for GPR100 (NM_181885.1,86-104).
ctccgatgcctgtcaaatt

SEQ ID NO: 239343 - DNA, 19 bp, Homo sapiens
  siRNA target sequence for GPR100 (NM_181885.1,89-107).
cgatgcctgtcaaattcct

SEQ ID NO: 239344 - DNA, 19 bp, Homo sapiens
  siRNA target sequence for GPR100 (NM_181885.1,181-199).
ctgtgggtactgagtaact

SEQ ID NO: 239345 - DNA, 19 bp, Homo sapiens
  siRNA target sequence for GPR100 (NM_181885.1,183-201).
gtgggtactgagtaactgt

SEQ ID NO: 239346 - DNA, 19 bp, Homo sapiens
  siRNA target sequence for GPR100 (NM_181885.1,826-844).
ctggtgccctggaacagta

SEQ ID NO: 239347 - DNA, 19 bp, Homo sapiens
  siRNA target sequence for GPR100 (NM_181885.1,837-855).
gaacagtactttctatact

SEQ ID NO: 239348 - DNA, 19 bp, Homo sapiens
  siRNA target sequence for GPR100 (NM_181885.1,854-872).
ctatccagacgtatgtctt

SEQ ID NO: 239349 - DNA, 19 bp, Homo sapiens
  siRNA target sequence for GPR101 (NM_054021.1,101-119).
gctcaaccgtgctggttat

SEQ ID NO: 239350 - DNA, 19 bp, Homo sapiens
  siRNA target sequence for GPR101 (NM_054021.1,193-211).
gtgaccaaccgttttatct

SEQ ID NO: 239351 - DNA, 19 bp, Homo sapiens
  siRNA target sequence for GPR101 (NM_054021.1,195-213).
gaccaaccgttttatcttt

SEQ ID NO: 239352 - DNA, 19 bp, Homo sapiens
  siRNA target sequence for GPR101 (NM_054021.1,197-215).
ccaaccgttttatctttaa

SEQ ID NO: 239353 - DNA, 19 bp, Homo sapiens
  siRNA target sequence for GPR101 (NM_054021.1,566-584).
gccccagctacactattct

SEQ ID NO: 239354 - DNA, 19 bp, Homo sapiens
  siRNA target sequence for GPR101 (NM_054021.1,600-618).
catcgtcattccactgatt

SEQ ID NO: 239355 - DNA, 19 bp, Homo sapiens
  siRNA target sequence for GPR101 (NM_054021.1,666-684).
gcatgctctgctgtacaat

SEQ ID NO: 239356 - DNA, 19 bp, Homo sapiens
  siRNA target sequence for GPR101 (NM_054021.1,948-966).
cagcatggagggtaaggaa

SEQ ID NO: 239357 - DNA, 19 bp, Homo sapiens
  siRNA target sequence for GPR101 (NM_054021.1,1066-1084).
ggtgaagacgacatcaatt

SEQ ID NO: 239358 - DNA, 19 bp, Homo sapiens
  siRNA target sequence for GPR101 (NM_054021.1,1069-1087).
gaagacgacatcaatttca

SEQ ID NO: 239359 - DNA, 19 bp, Homo sapiens
  siRNA target sequence for GPR101 (NM_054021.1,1179-1197).
ccagtgcaaagctgctaaa

SEQ ID NO: 239360 - DNA, 19 bp, Homo sapiens
  siRNA target sequence for GPR101 (NM_054021.1,1190-1208).
ctgctaaagtgatcttcat

SEQ ID NO: 239361 - DNA, 19 bp, Homo sapiens
  siRNA target sequence for GPR101 (NM_054021.1,1192-1210).
gctaaagtgatcttcatca

SEQ ID NO: 239362 - DNA, 19 bp, Homo sapiens
  siRNA target sequence for GPR101 (NM_054021.1,1193-1211).
ctaaagtgatcttcatcat

SEQ ID NO: 239363 - DNA, 19 bp, Homo sapiens
  siRNA target sequence for GPR101 (NM_054021.1,1301-1319).
gggtgatcaccataatcat

SEQ ID NO: 239364 - DNA, 19 bp, Homo sapiens
  siRNA target sequence for GPR101 (NM_054021.1,1303-1321).
gtgatcaccataatcatct

SEQ ID NO: 239365 - DNA, 19 bp, Homo sapiens
  siRNA target sequence for GPR102 (NM_053278.1,46-64).
gatgtgaatggatcttgta

SEQ ID NO: 239366 - DNA, 19 bp, Homo sapiens
  siRNA target sequence for GPR102 (NM_053278.1,51-69).
gaatggatcttgtattgaa

SEQ ID NO: 239367 - DNA, 19 bp, Homo sapiens
  siRNA target sequence for GPR102 (NM_053278.1,83-101).
ctgggtcccgggtaattct

SEQ ID NO: 239368 - DNA, 19 bp, Homo sapiens
  siRNA target sequence for GPR102 (NM_053278.1,102-120).
gtacacggcgtttagcttt

SEQ ID NO: 239369 - DNA, 19 bp, Homo sapiens
  siRNA target sequence for GPR102 (NM_053278.1,291-309).
gtattttggagccaaattt

SEQ ID NO: 239370 - DNA, 19 bp, Homo sapiens
  siRNA target sequence for GPR102 (NM_053278.1,523-541).
gggctggaggaattagtaa

SEQ ID NO: 239371 - DNA, 19 bp, Homo sapiens
  siRNA target sequence for GPR102 (NM_053278.1,554-572).
gcgtaggtggctgtcaaat

SEQ ID NO: 239372 - DNA, 19 bp, Homo sapiens
  siRNA target sequence for GPR102 (NM_053278.1,555-573).
cgtaggtggctgtcaaatt

SEQ ID NO: 239373 - DNA, 19 bp, Homo sapiens
  siRNA target sequence for GPR102 (NM_053278.1,556-574).
gtaggtggctgtcaaatta

SEQ ID NO: 239374 - DNA, 19 bp, Homo sapiens
  siRNA target sequence for GPR102 (NM_053278.1,560-578).
gtggctgtcaaattattgt

SEQ ID NO: 239375 - DNA, 19 bp, Homo sapiens
  siRNA target sequence for GPR102 (NM_053278.1,562-580).
ggctgtcaaattattgtaa

SEQ ID NO: 239376 - DNA, 19 bp, Homo sapiens
  siRNA target sequence for GPR102 (NM_053278.1,564-582).
ctgtcaaattattgtaagt

SEQ ID NO: 239377 - DNA, 19 bp, Homo sapiens
  siRNA target sequence for GPR102 (NM_053278.1,607-625).
ctgttattcttcataccta

SEQ ID NO: 239378 - DNA, 19 bp, Homo sapiens
  siRNA target sequence for GPR102 (NM_053278.1,667-685).
gctaaacaacaagctataa

SEQ ID NO: 239379 - DNA, 19 bp, Homo sapiens
  siRNA target sequence for GPR102 (NM_053278.1,779-797).
gggtcacggtactagcatt

SEQ ID NO: 239380 - DNA, 19 bp, Homo sapiens
  siRNA target sequence for GPR102 (NM_053278.1,780-798).
ggtcacggtactagcattt

SEQ ID NO: 239381 - DNA, 19 bp, Homo sapiens
  siRNA target sequence for GPR102 (NM_053278.1,783-801).
cacggtactagcatttgtt

SEQ ID NO: 239382 - DNA, 19 bp, Homo sapiens
  siRNA target sequence for GPR102 (NM_053278.1,785-803).
cggtactagcatttgttat

SEQ ID NO: 239383 - DNA, 19 bp, Homo sapiens
  siRNA target sequence for GPR102 (NM_053278.1,787-805).
gtactagcatttgttattt

SEQ ID NO: 239384 - DNA, 19 bp, Homo sapiens
  siRNA target sequence for GPR102 (NM_053278.1,806-824).
catggttaccgtatacagt

SEQ ID NO: 239385 - DNA, 19 bp, Homo sapiens
  siRNA target sequence for GPR102 (NM_053278.1,810-828).
gttaccgtatacagttgat

SEQ ID NO: 239386 - DNA, 19 bp, Homo sapiens
  siRNA target sequence for GPR102 (NM_053278.1,814-832).
ccgtatacagttgatatat

SEQ ID NO: 239387 - DNA, 19 bp, Homo sapiens
  siRNA target sequence for GPR102 (NM_053278.1,863-881).
ctgcctatatctatgaaat

SEQ ID NO: 239388 - DNA, 19 bp, Homo sapiens
  siRNA target sequence for GPR102 (NM_053278.1,993-1011).
ggctagttcatcaaccatt

SEQ ID NO: 239389 - DNA, 19 bp, Homo sapiens
  siRNA target sequence for GPR102 (NM_053278.1,994-1012).
gctagttcatcaaccatta

SEQ ID NO: 239390 - DNA, 19 bp, Homo sapiens
  siRNA target sequence for GPR119 (NM_178471.1,43-61).
gcctccctcatcattgcta

SEQ ID NO: 239391 - DNA, 19 bp, Homo sapiens
  siRNA target sequence for GPR119 (NM_178471.1,236-254).
gcctgcggatggcatttgt

SEQ ID NO: 239392 - DNA, 19 bp, Homo sapiens
  siRNA target sequence for GPR119 (NM_178471.1,325-343).
cagcccttccgctacttga

SEQ ID NO: 239393 - DNA, 19 bp, Homo sapiens
  siRNA target sequence for GPR119 (NM_178471.1,555-573).
ctgcgacatgctcaagatt

SEQ ID NO: 239394 - DNA, 19 bp, Homo sapiens
  siRNA target sequence for GPR119 (NM_178471.1,583-601).
cacagccagcagattcgaa

SEQ ID NO: 239395 - DNA, 19 bp, Homo sapiens
  siRNA target sequence for GPR119 (NM_178471.1,647-665).
ggactcccagcgacttcaa

SEQ ID NO: 239396 - DNA, 19 bp, Homo sapiens
  siRNA target sequence for GPR119 (NM_178471.1,648-666).
gactcccagcgacttcaaa

SEQ ID NO: 239397 - DNA, 19 bp, Homo sapiens
  siRNA target sequence for GPR119 (NM_178471.1,674-692).
gtactgtgtctgttctcat

SEQ ID NO: 239398 - DNA, 19 bp, Homo sapiens
  siRNA target sequence for GPR119 (NM_178471.1,965-983).
cctgtcacatcgtcactat

SEQ ID NO: 239399 - DNA, 19 bp, Homo sapiens
  siRNA target sequence for GPR12 (NM_005288.1,31-49).
gggctgcctcgggattatt

SEQ ID NO: 239400 - DNA, 19 bp, Homo sapiens
  siRNA target sequence for GPR12 (NM_005288.1,36-54).
gcctcgggattatttagat

SEQ ID NO: 239401 - DNA, 19 bp, Homo sapiens
  siRNA target sequence for GPR12 (NM_005288.1,56-74).
ccgctgctgcggagaacat

SEQ ID NO: 239402 - DNA, 19 bp, Homo sapiens
  siRNA target sequence for GPR12 (NM_005288.1,187-205).
gccattgtggtccttatca

SEQ ID NO: 239403 - DNA, 19 bp, Homo sapiens
  siRNA target sequence for GPR12 (NM_005288.1,287-305).
gactcatcaccaattttgt

SEQ ID NO: 239404 - DNA, 19 bp, Homo sapiens
  siRNA target sequence for GPR12 (NM_005288.1,413-431).
gctacctctcactgtacta

SEQ ID NO: 239405 - DNA, 19 bp, Homo sapiens
  siRNA target sequence for GPR12 (NM_005288.1,451-469).
gagaggacggtcacgttta

SEQ ID NO: 239406 - DNA, 19 bp, Homo sapiens
  siRNA target sequence for GPR12 (NM_005288.1,646-664).
ctctacatccagatctgta

SEQ ID NO: 239407 - DNA, 19 bp, Homo sapiens
  siRNA target sequence for GPR12 (NM_005288.1,675-693).
gaggcacgcccatcagata

SEQ ID NO: 239408 - DNA, 19 bp, Homo sapiens
  siRNA target sequence for GPR12 (NM_005288.1,715-733).
gccacgtcgcactatgtga

SEQ ID NO: 239409 - DNA, 19 bp, Homo sapiens
  siRNA target sequence for GPR12 (NM_005288.1,801-819).
caccctctattccttgata

SEQ ID NO: 239410 - DNA, 19 bp, Homo sapiens
  siRNA target sequence for GPR120 (NM_181745.1,559-577).
gaccaggaaatttcgattt

SEQ ID NO: 239411 - DNA, 19 bp, Homo sapiens
  siRNA target sequence for GPR120 (NM_181745.1,562-580).
caggaaatttcgatttgca

SEQ ID NO: 239412 - DNA, 19 bp, Homo sapiens
  siRNA target sequence for GPR120 (NM_181745.1,612-630).
ctcgtgggatgtctctttt

SEQ ID NO: 239413 - DNA, 19 bp, Homo sapiens
  siRNA target sequence for GPR120 (NM_181745.1,622-640).
gtctcttttgttactttga

SEQ ID NO: 239414 - DNA, 19 bp, Homo sapiens
  siRNA target sequence for GPR120 (NM_181745.1,661-679).
gtcattgtgatcagttact

SEQ ID NO: 239415 - DNA, 19 bp, Homo sapiens
  siRNA target sequence for GPR120 (NM_181745.1,963-981).
ggtggccttcacatttgct

SEQ ID NO: 239416 - DNA, 19 bp, Homo sapiens
  siRNA target sequence for GPR120 (NM_181745.1,997-1015).
cccatcctctacaacatga

SEQ ID NO: 239417 - DNA, 19 bp, Homo sapiens
  siRNA target sequence for GPR120 (NM_181745.1,1103-1121).
gaaatgacttgtcgattat

SEQ ID NO: 239418 - DNA, 19 bp, Homo sapiens
  siRNA target sequence for GPR132 (NM_013345.2,904-922).
gcccaatgctactgaaaaa

SEQ ID NO: 239419 - DNA, 19 bp, Homo sapiens
  siRNA target sequence for GPR132 (NM_013345.2,1483-1501).
ggattgccgggtactacta

SEQ ID NO: 239420 - DNA, 19 bp, Homo sapiens
  siRNA target sequence for GPR132 (NM_013345.2,1801-1819).
gcgtggctgaccccattat

SEQ ID NO: 239421 - DNA, 19 bp, Homo sapiens
  siRNA target sequence for GPR132 (NM_013345.2,1803-1821).
gtggctgaccccattatct

SEQ ID NO: 239422 - DNA, 19 bp, Homo sapiens
  siRNA target sequence for GPR132 (NM_013345.2,1866-1884).
cataaggggtggaaagagt

SEQ ID NO: 239423 - DNA, 19 bp, Homo sapiens
  siRNA target sequence for GPR145 (NM_032503.1,141-159).
cacctctgccgaactttta

SEQ ID NO: 239424 - DNA, 19 bp, Homo sapiens
  siRNA target sequence for GPR145 (NM_032503.1,171-189).
gaataaagagtttgcttat

SEQ ID NO: 239425 - DNA, 19 bp, Homo sapiens
  siRNA target sequence for GPR145 (NM_032503.1,224-242).
cttccatgattgggattat

SEQ ID NO: 239426 - DNA, 19 bp, Homo sapiens
  siRNA target sequence for GPR145 (NM_032503.1,270-288).
cctcattgtattcactata

SEQ ID NO: 239427 - DNA, 19 bp, Homo sapiens
  siRNA target sequence for GPR145 (NM_032503.1,308-326).
cagtccctgacatctatat

SEQ ID NO: 239428 - DNA, 19 bp, Homo sapiens
  siRNA target sequence for GPR145 (NM_032503.1,424-442).
ctctgcaccatcatcacat

SEQ ID NO: 239429 - DNA, 19 bp, Homo sapiens
  siRNA target sequence for GPR145 (NM_032503.1,438-456).
cacatccctggatacttgt

SEQ ID NO: 239430 - DNA, 19 bp, Homo sapiens
  siRNA target sequence for GPR145 (NM_032503.1,440-458).
catccctggatacttgtaa

SEQ ID NO: 239431 - DNA, 19 bp, Homo sapiens
  siRNA target sequence for GPR145 (NM_032503.1,445-463).
ctggatacttgtaaccaat

SEQ ID NO: 239432 - DNA, 19 bp, Homo sapiens
  siRNA target sequence for GPR145 (NM_032503.1,466-484).
gcctgtagtgccatcatga

SEQ ID NO: 239433 - DNA, 19 bp, Homo sapiens
  siRNA target sequence for GPR145 (NM_032503.1,621-639).
ctactcgaaggtcatcaaa

SEQ ID NO: 239434 - DNA, 19 bp, Homo sapiens
  siRNA target sequence for GPR145 (NM_032503.1,624-642).
ctcgaaggtcatcaaattt

SEQ ID NO: 239435 - DNA, 19 bp, Homo sapiens
  siRNA target sequence for GPR145 (NM_032503.1,626-644).
cgaaggtcatcaaatttaa

SEQ ID NO: 239436 - DNA, 19 bp, Homo sapiens
  siRNA target sequence for GPR145 (NM_032503.1,677-695).
catcccctgacgatgtact

SEQ ID NO: 239437 - DNA, 19 bp, Homo sapiens
  siRNA target sequence for GPR145 (NM_032503.1,685-703).
gacgatgtactctggtata

SEQ ID NO: 239438 - DNA, 19 bp, Homo sapiens
  siRNA target sequence for GPR145 (NM_032503.1,687-705).
cgatgtactctggtataca

SEQ ID NO: 239439 - DNA, 19 bp, Homo sapiens
  siRNA target sequence for GPR145 (NM_032503.1,691-709).
gtactctggtatacacttt

SEQ ID NO: 239440 - DNA, 19 bp, Homo sapiens
  siRNA target sequence for GPR145 (NM_032503.1,694-712).
ctctggtatacactttatt

SEQ ID NO: 239441 - DNA, 19 bp, Homo sapiens
  siRNA target sequence for GPR145 (NM_032503.1,776-794).
gctatacttgggagatgta

SEQ ID NO: 239442 - DNA, 19 bp, Homo sapiens
  siRNA target sequence for GPR145 (NM_032503.1,777-795).
ctatacttgggagatgtat

SEQ ID NO: 239443 - DNA, 19 bp, Homo sapiens
  siRNA target sequence for GPR145 (NM_032503.1,782-800).
cttgggagatgtatcaaca

SEQ ID NO: 239444 - DNA, 19 bp, Homo sapiens
  siRNA target sequence for GPR145 (NM_032503.1,785-803).
gggagatgtatcaacagaa

SEQ ID NO: 239445 - DNA, 19 bp, Homo sapiens
  siRNA target sequence for GPR145 (NM_032503.1,786-804).
ggagatgtatcaacagaat

SEQ ID NO: 239446 - DNA, 19 bp, Homo sapiens
  siRNA target sequence for GPR145 (NM_032503.1,874-892).
gtgctggtggtagtcttta

SEQ ID NO: 239447 - DNA, 19 bp, Homo sapiens
  siRNA target sequence for GPR145 (NM_032503.1,897-915).
gagtgctgccccttatcat

SEQ ID NO: 239448 - DNA, 19 bp, Homo sapiens
  siRNA target sequence for GPR145 (NM_032503.1,899-917).
gtgctgccccttatcatgt

SEQ ID NO: 239449 - DNA, 19 bp, Homo sapiens
  siRNA target sequence for GPR145 (NM_032503.1,902-920).
ctgccccttatcatgtgat

SEQ ID NO: 239450 - DNA, 19 bp, Homo sapiens
  siRNA target sequence for GPR145 (NM_032503.1,905-923).
ccccttatcatgtgataca

SEQ ID NO: 239451 - DNA, 19 bp, Homo sapiens
  siRNA target sequence for GPR145 (NM_032503.1,906-924).
cccttatcatgtgatacaa

SEQ ID NO: 239452 - DNA, 19 bp, Homo sapiens
  siRNA target sequence for GPR145 (NM_032503.1,1007-1025).
gcagcattaacccttttct

SEQ ID NO: 239453 - DNA, 19 bp, Homo sapiens
  siRNA target sequence for GPR145 (NM_032503.1,1010-1028).
gcattaacccttttctcta

SEQ ID NO: 239454 - DNA, 19 bp, Homo sapiens
  siRNA target sequence for GPR145 (NM_032503.1,1079-1097).
gagcgactgagaaggaaat

SEQ ID NO: 239455 - DNA, 19 bp, Homo sapiens
  siRNA target sequence for GPR146 (NM_138445.1,200-218).
catgccggacgtgtacttt

SEQ ID NO: 239456 - DNA, 19 bp, Homo sapiens
  siRNA target sequence for GPR146 (NM_138445.1,204-222).
ccggacgtgtactttgtca

SEQ ID NO: 239457 - DNA, 19 bp, Homo sapiens
  siRNA target sequence for GPR146 (NM_138445.1,205-223).
cggacgtgtactttgtcaa

SEQ ID NO: 239458 - DNA, 19 bp, Homo sapiens
  siRNA target sequence for GPR146 (NM_138445.1,757-775).
ggacgccacactatctgat

SEQ ID NO: 239459 - DNA, 19 bp, Homo sapiens
  siRNA target sequence for GPR146 (NM_138445.1,834-852).
gggctactgcactttgtga

SEQ ID NO: 239460 - DNA, 19 bp, Homo sapiens
  siRNA target sequence for GPR146 (NM_138445.1,900-918).
cttctctaccgctacatga

SEQ ID NO: 239461 - DNA, 19 bp, Homo sapiens
  siRNA target sequence for GPR146 (NM_138445.1,938-956).
gctccaacggctgatgaaa

SEQ ID NO: 239462 - DNA, 19 bp, Homo sapiens
  siRNA target sequence for GPR15 (NM_005290.1,17-35).
cttcagtttatttggatta

SEQ ID NO: 239463 - DNA, 19 bp, Homo sapiens
  siRNA target sequence for GPR15 (NM_005290.1,165-183).
gggagcgttgcatttcaaa

SEQ ID NO: 239464 - DNA, 19 bp, Homo sapiens
  siRNA target sequence for GPR15 (NM_005290.1,194-212).
gaagactgatcgacatctt

SEQ ID NO: 239465 - DNA, 19 bp, Homo sapiens
  siRNA target sequence for GPR15 (NM_005290.1,197-215).
gactgatcgacatctttat

SEQ ID NO: 239466 - DNA, 19 bp, Homo sapiens
  siRNA target sequence for GPR15 (NM_005290.1,199-217).
ctgatcgacatctttatca

SEQ ID NO: 239467 - DNA, 19 bp, Homo sapiens
  siRNA target sequence for GPR15 (NM_005290.1,270-288).
ggataaagaagcatctcta

SEQ ID NO: 239468 - DNA, 19 bp, Homo sapiens
  siRNA target sequence for GPR15 (NM_005290.1,412-430).
ccagtcgtatccaggaaat

SEQ ID NO: 239469 - DNA, 19 bp, Homo sapiens
  siRNA target sequence for GPR15 (NM_005290.1,413-431).
cagtcgtatccaggaaatt

SEQ ID NO: 239470 - DNA, 19 bp, Homo sapiens
  siRNA target sequence for GPR15 (NM_005290.1,417-435).
cgtatccaggaaattcaga

SEQ ID NO: 239471 - DNA, 19 bp, Homo sapiens
  siRNA target sequence for GPR15 (NM_005290.1,461-479).
gtgccagcatctggtttat

SEQ ID NO: 239472 - DNA, 19 bp, Homo sapiens
  siRNA target sequence for GPR15 (NM_005290.1,516-534).
ggagctcacgctgattgat

SEQ ID NO: 239473 - DNA, 19 bp, Homo sapiens
  siRNA target sequence for GPR15 (NM_005290.1,519-537).
gctcacgctgattgatgat

SEQ ID NO: 239474 - DNA, 19 bp, Homo sapiens
  siRNA target sequence for GPR15 (NM_005290.1,520-538).
ctcacgctgattgatgata

SEQ ID NO: 239475 - DNA, 19 bp, Homo sapiens
  siRNA target sequence for GPR15 (NM_005290.1,568-586).
ccaattaaactcatatggt

SEQ ID NO: 239476 - DNA, 19 bp, Homo sapiens
  siRNA target sequence for GPR15 (NM_005290.1,636-654).
gacctgctactgttgcatt

SEQ ID NO: 239477 - DNA, 19 bp, Homo sapiens
  siRNA target sequence for GPR15 (NM_005290.1,759-777).
ctggctgcccttcaatact

SEQ ID NO: 239478 - DNA, 19 bp, Homo sapiens
  siRNA target sequence for GPR15 (NM_005290.1,763-781).
ctgcccttcaatactttca

SEQ ID NO: 239479 - DNA, 19 bp, Homo sapiens
  siRNA target sequence for GPR15 (NM_005290.1,767-785).
ccttcaatactttcaagtt

SEQ ID NO: 239480 - DNA, 19 bp, Homo sapiens
  siRNA target sequence for GPR15 (NM_005290.1,803-821).
ggttgcggcaagaacacta

SEQ ID NO: 239481 - DNA, 19 bp, Homo sapiens
  siRNA target sequence for GPR15 (NM_005290.1,804-822).
gttgcggcaagaacactat

SEQ ID NO: 239482 - DNA, 19 bp, Homo sapiens
  siRNA target sequence for GPR15 (NM_005290.1,807-825).
gcggcaagaacactattta

SEQ ID NO: 239483 - DNA, 19 bp, Homo sapiens
  siRNA target sequence for GPR15 (NM_005290.1,833-851).
ctattcttcagcttggtat

SEQ ID NO: 239484 - DNA, 19 bp, Homo sapiens
  siRNA target sequence for GPR15 (NM_005290.1,998-1016).
cagatagtcacctcactaa

SEQ ID NO: 239485 - DNA, 19 bp, Homo sapiens
  siRNA target sequence for GPR151 (NM_194251.1,144-162).
ccttcacaatgcttggaaa

SEQ ID NO: 239486 - DNA, 19 bp, Homo sapiens
  siRNA target sequence for GPR151 (NM_194251.1,247-265).
gctacggcgtactccaaaa

SEQ ID NO: 239487 - DNA, 19 bp, Homo sapiens
  siRNA target sequence for GPR151 (NM_194251.1,251-269).
cggcgtactccaaaagtgt

SEQ ID NO: 239488 - DNA, 19 bp, Homo sapiens
  siRNA target sequence for GPR151 (NM_194251.1,253-271).
gcgtactccaaaagtgttt

SEQ ID NO: 239489 - DNA, 19 bp, Homo sapiens
  siRNA target sequence for GPR151 (NM_194251.1,329-347).
cagccaagagcctgacaat

SEQ ID NO: 239490 - DNA, 19 bp, Homo sapiens
  siRNA target sequence for GPR151 (NM_194251.1,333-351).
caagagcctgacaatcgtt

SEQ ID NO: 239491 - DNA, 19 bp, Homo sapiens
  siRNA target sequence for GPR151 (NM_194251.1,348-366).
cgttgtggtggccaaagta

SEQ ID NO: 239492 - DNA, 19 bp, Homo sapiens
  siRNA target sequence for GPR151 (NM_194251.1,349-367).
gttgtggtggccaaagtat

SEQ ID NO: 239493 - DNA, 19 bp, Homo sapiens
  siRNA target sequence for GPR151 (NM_194251.1,364-382).
gtatgcttcatgtatgcaa

SEQ ID NO: 239494 - DNA, 19 bp, Homo sapiens
  siRNA target sequence for GPR151 (NM_194251.1,389-407).
cagccaagcaagtgagtat

SEQ ID NO: 239495 - DNA, 19 bp, Homo sapiens
  siRNA target sequence for GPR151 (NM_194251.1,400-418).
gtgagtatccacaactaca

SEQ ID NO: 239496 - DNA, 19 bp, Homo sapiens
  siRNA target sequence for GPR151 (NM_194251.1,469-487).
ctgccggaatggttcttta

SEQ ID NO: 239497 - DNA, 19 bp, Homo sapiens
  siRNA target sequence for GPR151 (NM_194251.1,472-490).
ccggaatggttctttagca

SEQ ID NO: 239498 - DNA, 19 bp, Homo sapiens
  siRNA target sequence for GPR151 (NM_194251.1,632-650).
gagcttatgaccaatgtaa

SEQ ID NO: 239499 - DNA, 19 bp, Homo sapiens
  siRNA target sequence for GPR151 (NM_194251.1,634-652).
gcttatgaccaatgtaaaa

SEQ ID NO: 239500 - DNA, 19 bp, Homo sapiens
  siRNA target sequence for GPR151 (NM_194251.1,635-653).
cttatgaccaatgtaaaaa

SEQ ID NO: 239501 - DNA, 19 bp, Homo sapiens
  siRNA target sequence for GPR151 (NM_194251.1,806-824).
ccccaccacaaggtttcat

SEQ ID NO: 239502 - DNA, 19 bp, Homo sapiens
  siRNA target sequence for GPR151 (NM_194251.1,831-849).
gtctcaagtcttgatgttt

SEQ ID NO: 239503 - DNA, 19 bp, Homo sapiens
  siRNA target sequence for GPR151 (NM_194251.1,860-878).
cagcaaatcctctcatttt

SEQ ID NO: 239504 - DNA, 19 bp, Homo sapiens
  siRNA target sequence for GPR151 (NM_194251.1,923-941).
ggaaatggatgataaccaa

SEQ ID NO: 239505 - DNA, 19 bp, Homo sapiens
  siRNA target sequence for GPR151 (NM_194251.1,930-948).
gatgataaccaaaaaacct

SEQ ID NO: 239506 - DNA, 19 bp, Homo sapiens
  siRNA target sequence for GPR151 (NM_194251.1,1172-1190).
ctatcccctgggaacatga

SEQ ID NO: 239507 - DNA, 19 bp, Homo sapiens
  siRNA target sequence for GPR160 (NM_014373.1,391-409).
gttaactatctgctattct

SEQ ID NO: 239508 - DNA, 19 bp, Homo sapiens
  siRNA target sequence for GPR160 (NM_014373.1,411-429).
gatcatacttgggaaaata

SEQ ID NO: 239509 - DNA, 19 bp, Homo sapiens
  siRNA target sequence for GPR160 (NM_014373.1,414-432).
catacttgggaaaatatta

SEQ ID NO: 239510 - DNA, 19 bp, Homo sapiens
  siRNA target sequence for GPR160 (NM_014373.1,441-459).
ccttacactaggaatgaga

SEQ ID NO: 239511 - DNA, 19 bp, Homo sapiens
  siRNA target sequence for GPR160 (NM_014373.1,498-516).
catttcactagcattcgtt

SEQ ID NO: 239512 - DNA, 19 bp, Homo sapiens
  siRNA target sequence for GPR160 (NM_014373.1,503-521).
cactagcattcgttgatct

SEQ ID NO: 239513 - DNA, 19 bp, Homo sapiens
  siRNA target sequence for GPR160 (NM_014373.1,509-527).
cattcgttgatcttttact

SEQ ID NO: 239514 - DNA, 19 bp, Homo sapiens
  siRNA target sequence for GPR160 (NM_014373.1,532-550).
gtaaacatttccattatat

SEQ ID NO: 239515 - DNA, 19 bp, Homo sapiens
  siRNA target sequence for GPR160 (NM_014373.1,597-615).
ccacatctgcctatttact

SEQ ID NO: 239516 - DNA, 19 bp, Homo sapiens
  siRNA target sequence for GPR160 (NM_014373.1,660-678).
cctgacagcttgtatagat

SEQ ID NO: 239517 - DNA, 19 bp, Homo sapiens
  siRNA target sequence for GPR160 (NM_014373.1,663-681).
gacagcttgtatagattat

SEQ ID NO: 239518 - DNA, 19 bp, Homo sapiens
  siRNA target sequence for GPR160 (NM_014373.1,813-831).
gaaggcacagaatgcttat

SEQ ID NO: 239519 - DNA, 19 bp, Homo sapiens
  siRNA target sequence for GPR160 (NM_014373.1,833-851).
ctcgtcactgtcctttcta

SEQ ID NO: 239520 - DNA, 19 bp, Homo sapiens
  siRNA target sequence for GPR160 (NM_014373.1,838-856).
cactgtcctttctatgtca

SEQ ID NO: 239521 - DNA, 19 bp, Homo sapiens
  siRNA target sequence for GPR160 (NM_014373.1,853-871).
gtcagcattcagagttact

SEQ ID NO: 239522 - DNA, 19 bp, Homo sapiens
  siRNA target sequence for GPR160 (NM_014373.1,888-906).
ggtgatgattttatttgta

SEQ ID NO: 239523 - DNA, 19 bp, Homo sapiens
  siRNA target sequence for GPR160 (NM_014373.1,923-941).
gggaagaagttactacttt

SEQ ID NO: 239524 - DNA, 19 bp, Homo sapiens
  siRNA target sequence for GPR160 (NM_014373.1,943-961).
gtacaggctatcaggataa

SEQ ID NO: 239525 - DNA, 19 bp, Homo sapiens
  siRNA target sequence for GPR160 (NM_014373.1,956-974).
ggataacttcctatatgaa

SEQ ID NO: 239526 - DNA, 19 bp, Homo sapiens
  siRNA target sequence for GPR160 (NM_014373.1,957-975).
gataacttcctatatgaat

SEQ ID NO: 239527 - DNA, 19 bp, Homo sapiens
  siRNA target sequence for GPR160 (NM_014373.1,1013-1031).
gttatactgtgagatctaa

SEQ ID NO: 239528 - DNA, 19 bp, Homo sapiens
  siRNA target sequence for GPR160 (NM_014373.1,1046-1064).
ccaagctcattgtctgttt

SEQ ID NO: 239529 - DNA, 19 bp, Homo sapiens
  siRNA target sequence for GPR160 (NM_014373.1,1066-1084).
ctcagtacctggttaccat

SEQ ID NO: 239530 - DNA, 19 bp, Homo sapiens
  siRNA target sequence for GPR160 (NM_014373.1,1070-1088).
gtacctggttaccatttgt

SEQ ID NO: 239531 - DNA, 19 bp, Homo sapiens
  siRNA target sequence for GPR160 (NM_014373.1,1076-1094).
ggttaccatttgtactact

SEQ ID NO: 239532 - DNA, 19 bp, Homo sapiens
  siRNA target sequence for GPR160 (NM_014373.1,1087-1105).
gtactacttcaggtaatca

SEQ ID NO: 239533 - DNA, 19 bp, Homo sapiens
  siRNA target sequence for GPR160 (NM_014373.1,1155-1173).
ctggttatactttgtcaat

SEQ ID NO: 239534 - DNA, 19 bp, Homo sapiens
  siRNA target sequence for GPR160 (NM_014373.1,1186-1204).
gctacagtgtattggttta

SEQ ID NO: 239535 - DNA, 19 bp, Homo sapiens
  siRNA target sequence for GPR160 (NM_014373.1,1230-1248).
cattggattacctttggat

SEQ ID NO: 239536 - DNA, 19 bp, Homo sapiens
  siRNA target sequence for GPR160 (NM_014373.1,1275-1293).
cattccacttacaattcct

SEQ ID NO: 239537 - DNA, 19 bp, Homo sapiens
  siRNA target sequence for GPR160 (NM_014373.1,1292-1310).
ctaatcttgagcaaattga

SEQ ID NO: 239538 - DNA, 19 bp, Homo sapiens
  siRNA target sequence for GPR160 (NM_014373.1,1314-1332).
gcctatatcaataatgatt

SEQ ID NO: 239539 - DNA, 19 bp, Homo sapiens
  siRNA target sequence for GPR160 (NM_014373.1,1315-1333).
cctatatcaataatgattt

SEQ ID NO: 239540 - DNA, 19 bp, Homo sapiens
  siRNA target sequence for GPR161 (NM_007369.1,205-223).
gtggtcaccttgtacaaga

SEQ ID NO: 239541 - DNA, 19 bp, Homo sapiens
  siRNA target sequence for GPR161 (NM_007369.1,208-226).
gtcaccttgtacaagaagt

SEQ ID NO: 239542 - DNA, 19 bp, Homo sapiens
  siRNA target sequence for GPR161 (NM_007369.1,323-341).
ccatccgcagggaatggat

SEQ ID NO: 239543 - DNA, 19 bp, Homo sapiens
  siRNA target sequence for GPR161 (NM_007369.1,491-509).
ctgtgatggcacttgtcta

SEQ ID NO: 239544 - DNA, 19 bp, Homo sapiens
  siRNA target sequence for GPR161 (NM_007369.1,557-575).
ggtcatccgtggagtttga

SEQ ID NO: 239545 - DNA, 19 bp, Homo sapiens
  siRNA target sequence for GPR161 (NM_007369.1,568-586).
gagtttgacgagttcaaat

SEQ ID NO: 239546 - DNA, 19 bp, Homo sapiens
  siRNA target sequence for GPR161 (NM_007369.1,940-958).
gccctctgggggaaaagct

SEQ ID NO: 239547 - DNA, 19 bp, Homo sapiens
  siRNA target sequence for GPR161 (NM_007369.1,1044-1062).
caagacagttcgcaaagaa

SEQ ID NO: 239548 - DNA, 19 bp, Homo sapiens
  siRNA target sequence for GPR161 (NM_007369.1,1047-1065).
gacagttcgcaaagaacta

SEQ ID NO: 239549 - DNA, 19 bp, Homo sapiens
  siRNA target sequence for GPR161 (NM_007369.1,1049-1067).
cagttcgcaaagaactact

SEQ ID NO: 239550 - DNA, 19 bp, Homo sapiens
  siRNA target sequence for GPR161 (NM_007369.1,1077-1095).
ctttggggaccggtattat

SEQ ID NO: 239551 - DNA, 19 bp, Homo sapiens
  siRNA target sequence for GPR161 (NM_007369.1,1088-1106).
ggtattatcgggaaccatt

SEQ ID NO: 239552 - DNA, 19 bp, Homo sapiens
  siRNA target sequence for GPR161 (NM_007369.1,1264-1282).
ggtaacctgcgtgctttat

SEQ ID NO: 239553 - DNA, 19 bp, Homo sapiens
  siRNA target sequence for GPR161 (NM_153832.1,1509-1527).
caggactcagggacagata

SEQ ID NO: 239554 - DNA, 19 bp, Homo sapiens
  siRNA target sequence for GPR161 (NM_153832.1,1646-1664).
caagaactcgattcttcat

SEQ ID NO: 239555 - DNA, 19 bp, Homo sapiens
  siRNA target sequence for GPR161 (NM_153832.1,1652-1670).
ctcgattcttcatgtgaaa

SEQ ID NO: 239556 - DNA, 19 bp, Homo sapiens
  siRNA target sequence for GPR161 (NM_153832.1,1725-1743).
gaggccgaagccaaaatca

SEQ ID NO: 239557 - DNA, 19 bp, Homo sapiens
  siRNA target sequence for GPR161 (NM_153832.1,1730-1748).
cgaagccaaaatcaactta

SEQ ID NO: 239558 - DNA, 19 bp, Homo sapiens
  siRNA target sequence for GPR18 (NM_005292.2,494-512).
cacatccagatgaatacaa

SEQ ID NO: 239559 - DNA, 19 bp, Homo sapiens
  siRNA target sequence for GPR18 (NM_005292.2,517-535).
gcagcccttgtcttctata

SEQ ID NO: 239560 - DNA, 19 bp, Homo sapiens
  siRNA target sequence for GPR18 (NM_005292.2,520-538).
gcccttgtcttctatagct

SEQ ID NO: 239561 - DNA, 19 bp, Homo sapiens
  siRNA target sequence for GPR18 (NM_005292.2,537-555).
ctgtatcttcataattgga

SEQ ID NO: 239562 - DNA, 19 bp, Homo sapiens
  siRNA target sequence for GPR18 (NM_005292.2,574-592).
gcattatgggttttcagtt

SEQ ID NO: 239563 - DNA, 19 bp, Homo sapiens
  siRNA target sequence for GPR18 (NM_005292.2,611-629).
ccacggtaaccatctatat

SEQ ID NO: 239564 - DNA, 19 bp, Homo sapiens
  siRNA target sequence for GPR18 (NM_005292.2,616-634).
gtaaccatctatatgatga

SEQ ID NO: 239565 - DNA, 19 bp, Homo sapiens
  siRNA target sequence for GPR18 (NM_005292.2,639-657).
ggcattagtggacttgata

SEQ ID NO: 239566 - DNA, 19 bp, Homo sapiens
  siRNA target sequence for GPR18 (NM_005292.2,640-658).
gcattagtggacttgatat

SEQ ID NO: 239567 - DNA, 19 bp, Homo sapiens
  siRNA target sequence for GPR18 (NM_005292.2,668-686).
ctttaccctttcgaatgtt

SEQ ID NO: 239568 - DNA, 19 bp, Homo sapiens
  siRNA target sequence for GPR18 (NM_005292.2,675-693).
ctttcgaatgttttattat

SEQ ID NO: 239569 - DNA, 19 bp, Homo sapiens
  siRNA target sequence for GPR18 (NM_005292.2,709-727).
ccatttggagagtacttct

SEQ ID NO: 239570 - DNA, 19 bp, Homo sapiens
  siRNA target sequence for GPR18 (NM_005292.2,720-738).
gtacttctgccagattctt

SEQ ID NO: 239571 - DNA, 19 bp, Homo sapiens
  siRNA target sequence for GPR18 (NM_005292.2,739-757).
ggagctctcacagtgtttt

SEQ ID NO: 239572 - DNA, 19 bp, Homo sapiens
  siRNA target sequence for GPR18 (NM_005292.2,740-758).
gagctctcacagtgtttta

SEQ ID NO: 239573 - DNA, 19 bp, Homo sapiens
  siRNA target sequence for GPR18 (NM_005292.2,822-840).
gccgaagtacgccaaagaa

SEQ ID NO: 239574 - DNA, 19 bp, Homo sapiens
  siRNA target sequence for GPR18 (NM_005292.2,824-842).
cgaagtacgccaaagaact

SEQ ID NO: 239575 - DNA, 19 bp, Homo sapiens
  siRNA target sequence for GPR18 (NM_005292.2,825-843).
gaagtacgccaaagaactt

SEQ ID NO: 239576 - DNA, 19 bp, Homo sapiens
  siRNA target sequence for GPR18 (NM_005292.2,872-890).
gtgtgggagtctggataat

SEQ ID NO: 239577 - DNA, 19 bp, Homo sapiens
  siRNA target sequence for GPR18 (NM_005292.2,874-892).
gtgggagtctggataatga

SEQ ID NO: 239578 - DNA, 19 bp, Homo sapiens
  siRNA target sequence for GPR18 (NM_005292.2,910-928).
cctctgctactgctctata

SEQ ID NO: 239579 - DNA, 19 bp, Homo sapiens
  siRNA target sequence for GPR18 (NM_005292.2,955-973).
gccacctgcctcaagattt

SEQ ID NO: 239580 - DNA, 19 bp, Homo sapiens
  siRNA target sequence for GPR18 (NM_005292.2,957-975).
cacctgcctcaagatttct

SEQ ID NO: 239581 - DNA, 19 bp, Homo sapiens
  siRNA target sequence for GPR18 (NM_005292.2,959-977).
cctgcctcaagatttctga

SEQ ID NO: 239582 - DNA, 19 bp, Homo sapiens
  siRNA target sequence for GPR18 (NM_005292.2,1011-1029).
cctcactcgactgacattt

SEQ ID NO: 239583 - DNA, 19 bp, Homo sapiens
  siRNA target sequence for GPR18 (NM_005292.2,1012-1030).
ctcactcgactgacatttt

SEQ ID NO: 239584 - DNA, 19 bp, Homo sapiens
  siRNA target sequence for GPR18 (NM_005292.2,1018-1036).
cgactgacattttttttct

SEQ ID NO: 239585 - DNA, 19 bp, Homo sapiens
  siRNA target sequence for GPR18 (NM_005292.2,1060-1078).
gggtgctacttggtcatta

SEQ ID NO: 239586 - DNA, 19 bp, Homo sapiens
  siRNA target sequence for GPR18 (NM_005292.2,1062-1080).
gtgctacttggtcattatt

SEQ ID NO: 239587 - DNA, 19 bp, Homo sapiens
  siRNA target sequence for GPR18 (NM_005292.2,1220-1238).
gaacgggggagaacagtta

SEQ ID NO: 239588 - DNA, 19 bp, Homo sapiens
  siRNA target sequence for GPR18 (NM_005292.2,1223-1241).
cgggggagaacagttacaa

SEQ ID NO: 239589 - DNA, 19 bp, Homo sapiens
  siRNA target sequence for GPR18 (NM_005292.2,1224-1242).
gggggagaacagttacaat

SEQ ID NO: 239590 - DNA, 19 bp, Homo sapiens
  siRNA target sequence for GPR18 (NM_005292.2,1291-1309).
gatgtgattctctactaca

SEQ ID NO: 239591 - DNA, 19 bp, Homo sapiens
  siRNA target sequence for GPR18 (NM_005292.2,1302-1320).
ctactacatcgtttcaaaa

SEQ ID NO: 239592 - DNA, 19 bp, Homo sapiens
  siRNA target sequence for GPR18 (NM_005292.2,1336-1354).
gtcattagtgtcatgctat

SEQ ID NO: 239593 - DNA, 19 bp, Homo sapiens
  siRNA target sequence for GPR18 (NM_005292.2,1345-1363).
gtcatgctataccgtaatt

SEQ ID NO: 239594 - DNA, 19 bp, Homo sapiens
  siRNA target sequence for GPR18 (NM_005292.2,1350-1368).
gctataccgtaattacctt

SEQ ID NO: 239595 - DNA, 19 bp, Homo sapiens
  siRNA target sequence for GPR18 (NM_005292.2,1369-1387).
cgaagcatgcgcagaaaaa

SEQ ID NO: 239596 - DNA, 19 bp, Homo sapiens
  siRNA target sequence for GPR18 (NM_005292.2,1399-1417).
ggtagtctacggtcactaa

SEQ ID NO: 239597 - DNA, 19 bp, Homo sapiens
  siRNA target sequence for GPR18 (NM_005292.2,1403-1421).
gtctacggtcactaagcaa

SEQ ID NO: 239598 - DNA, 19 bp, Homo sapiens
  siRNA target sequence for GPR18 (NM_005292.2,1405-1423).
ctacggtcactaagcaata

SEQ ID NO: 239599 - DNA, 19 bp, Homo sapiens
  siRNA target sequence for GPR18 (NM_005292.2,1408-1426).
cggtcactaagcaatataa

SEQ ID NO: 239600 - DNA, 19 bp, Homo sapiens
  siRNA target sequence for GPR19 (NM_006143.1,49-67).
cagcaagccacatttgatt

SEQ ID NO: 239601 - DNA, 19 bp, Homo sapiens
  siRNA target sequence for GPR19 (NM_006143.1,51-69).
gcaagccacatttgattat

SEQ ID NO: 239602 - DNA, 19 bp, Homo sapiens
  siRNA target sequence for GPR19 (NM_006143.1,52-70).
caagccacatttgattatt

SEQ ID NO: 239603 - DNA, 19 bp, Homo sapiens
  siRNA target sequence for GPR19 (NM_006143.1,132-150).
gccaatacctgatggaatt

SEQ ID NO: 239604 - DNA, 19 bp, Homo sapiens
  siRNA target sequence for GPR19 (NM_006143.1,435-453).
gcaaggttgtgcgatattt

SEQ ID NO: 239605 - DNA, 19 bp, Homo sapiens
  siRNA target sequence for GPR19 (NM_006143.1,436-454).
caaggttgtgcgatatttt

SEQ ID NO: 239606 - DNA, 19 bp, Homo sapiens
  siRNA target sequence for GPR19 (NM_006143.1,439-457).
ggttgtgcgatattttcaa

SEQ ID NO: 239607 - DNA, 19 bp, Homo sapiens
  siRNA target sequence for GPR19 (NM_006143.1,440-458).
gttgtgcgatattttcaat

SEQ ID NO: 239608 - DNA, 19 bp, Homo sapiens
  siRNA target sequence for GPR19 (NM_006143.1,446-464).
cgatattttcaatatctca

SEQ ID NO: 239609 - DNA, 19 bp, Homo sapiens
  siRNA target sequence for GPR19 (NM_006143.1,605-623).
gtgacccctgtgctctttt

SEQ ID NO: 239610 - DNA, 19 bp, Homo sapiens
  siRNA target sequence for GPR19 (NM_006143.1,634-652).
caactgggacagtcattgt

SEQ ID NO: 239611 - DNA, 19 bp, Homo sapiens
  siRNA target sequence for GPR19 (NM_006143.1,639-657).
gggacagtcattgtaacta

SEQ ID NO: 239612 - DNA, 19 bp, Homo sapiens
  siRNA target sequence for GPR19 (NM_006143.1,640-658).
ggacagtcattgtaactat

SEQ ID NO: 239613 - DNA, 19 bp, Homo sapiens
  siRNA target sequence for GPR19 (NM_006143.1,641-659).
gacagtcattgtaactatt

SEQ ID NO: 239614 - DNA, 19 bp, Homo sapiens
  siRNA target sequence for GPR19 (NM_006143.1,804-822).
ggaggacaatgaacattgt

SEQ ID NO: 239615 - DNA, 19 bp, Homo sapiens
  siRNA target sequence for GPR19 (NM_006143.1,817-835).
cattgtccctcggacaaaa

SEQ ID NO: 239616 - DNA, 19 bp, Homo sapiens
  siRNA target sequence for GPR19 (NM_006143.1,821-839).
gtccctcggacaaaagtga

SEQ ID NO: 239617 - DNA, 19 bp, Homo sapiens
  siRNA target sequence for GPR19 (NM_006143.1,921-939).
cccatgaacaagactataa

SEQ ID NO: 239618 - DNA, 19 bp, Homo sapiens
  siRNA target sequence for GPR19 (NM_006143.1,953-971).
gttttcacagctatcacat

SEQ ID NO: 239619 - DNA, 19 bp, Homo sapiens
  siRNA target sequence for GPR19 (NM_006143.1,967-985).
cacatggatatcctttagt

SEQ ID NO: 239620 - DNA, 19 bp, Homo sapiens
  siRNA target sequence for GPR19 (NM_006143.1,994-1012).
ctctaaacctactctgtat

SEQ ID NO: 239621 - DNA, 19 bp, Homo sapiens
  siRNA target sequence for GPR19 (NM_006143.1,1001-1019).
cctactctgtattcaattt

SEQ ID NO: 239622 - DNA, 19 bp, Homo sapiens
  siRNA target sequence for GPR19 (NM_006143.1,1002-1020).
ctactctgtattcaattta

SEQ ID NO: 239623 - DNA, 19 bp, Homo sapiens
  siRNA target sequence for GPR19 (NM_006143.1,1072-1090).
gaaatgttaccgaagcaat

SEQ ID NO: 239624 - DNA, 19 bp, Homo sapiens
  siRNA target sequence for GPR19 (NM_006143.1,1083-1101).
gaagcaatgcctatactat

SEQ ID NO: 239625 - DNA, 19 bp, Homo sapiens
  siRNA target sequence for GPR19 (NM_006143.1,1093-1111).
ctatactatcacaacaagt

SEQ ID NO: 239626 - DNA, 19 bp, Homo sapiens
  siRNA target sequence for GPR19 (NM_006143.1,1110-1128).
gttcaaggatggccaaaaa

SEQ ID NO: 239627 - DNA, 19 bp, Homo sapiens
  siRNA target sequence for GPR19 (NM_006143.1,1132-1150).
ctacgttggcatttcagaa

SEQ ID NO: 239628 - DNA, 19 bp, Homo sapiens
  siRNA target sequence for GPR19 (NM_006143.1,1154-1172).
ccttccatggccaaaacta

SEQ ID NO: 239629 - DNA, 19 bp, Homo sapiens
  siRNA target sequence for GPR19 (NM_006143.1,1183-1201).
ctcgatctatgactcattt

SEQ ID NO: 239630 - DNA, 19 bp, Homo sapiens
  siRNA target sequence for GPR19 (NM_006143.1,1185-1203).
cgatctatgactcatttga

SEQ ID NO: 239631 - DNA, 19 bp, Homo sapiens
  siRNA target sequence for GPR19 (NM_006143.1,1229-1247).
gcttggcccattaactcaa

SEQ ID NO: 239632 - DNA, 19 bp, Homo sapiens
  siRNA target sequence for GPR19 (NM_006143.1,1234-1252).
gcccattaactcaaatcca

SEQ ID NO: 239633 - DNA, 19 bp, Homo sapiens
  siRNA target sequence for GPR20 (NM_005293.1,323-341).
cgcgcttcgctgtgtacta

SEQ ID NO: 239634 - DNA, 19 bp, Homo sapiens
  siRNA target sequence for GPR20 (NM_005293.1,374-392).
cgcacgtcctcggttactt

SEQ ID NO: 239635 - DNA, 19 bp, Homo sapiens
  siRNA target sequence for GPR20 (NM_005293.1,734-752).
cggtgctcatcatctttct

SEQ ID NO: 239636 - DNA, 19 bp, Homo sapiens
  siRNA target sequence for GPR22 (NM_005295.1,11-29).
ctcccattctggaaatcaa

SEQ ID NO: 239637 - DNA, 19 bp, Homo sapiens
  siRNA target sequence for GPR22 (NM_005295.1,27-45).
caacatgcagtctgaatct

SEQ ID NO: 239638 - DNA, 19 bp, Homo sapiens
  siRNA target sequence for GPR22 (NM_005295.1,33-51).
gcagtctgaatctaacatt

SEQ ID NO: 239639 - DNA, 19 bp, Homo sapiens
  siRNA target sequence for GPR22 (NM_005295.1,34-52).
cagtctgaatctaacatta

SEQ ID NO: 239640 - DNA, 19 bp, Homo sapiens
  siRNA target sequence for GPR22 (NM_005295.1,36-54).
gtctgaatctaacattaca

SEQ ID NO: 239641 - DNA, 19 bp, Homo sapiens
  siRNA target sequence for GPR22 (NM_005295.1,38-56).
ctgaatctaacattacagt

SEQ ID NO: 239642 - DNA, 19 bp, Homo sapiens
  siRNA target sequence for GPR22 (NM_005295.1,90-108).
gtaccaaccactatcatat

SEQ ID NO: 239643 - DNA, 19 bp, Homo sapiens
  siRNA target sequence for GPR22 (NM_005295.1,100-118).
ctatcatatccgttaagct

SEQ ID NO: 239644 - DNA, 19 bp, Homo sapiens
  siRNA target sequence for GPR22 (NM_005295.1,126-144).
gtctctcaccggatttctt

SEQ ID NO: 239645 - DNA, 19 bp, Homo sapiens
  siRNA target sequence for GPR22 (NM_005295.1,128-146).
ctctcaccggatttcttat

SEQ ID NO: 239646 - DNA, 19 bp, Homo sapiens
  siRNA target sequence for GPR22 (NM_005295.1,132-150).
caccggatttcttatgtta

SEQ ID NO: 239647 - DNA, 19 bp, Homo sapiens
  siRNA target sequence for GPR22 (NM_005295.1,134-152).
ccggatttcttatgttaga

SEQ ID NO: 239648 - DNA, 19 bp, Homo sapiens
  siRNA target sequence for GPR22 (NM_005295.1,135-153).
cggatttcttatgttagaa

SEQ ID NO: 239649 - DNA, 19 bp, Homo sapiens
  siRNA target sequence for GPR22 (NM_005295.1,190-208).
gtactttactgcatgaaat

SEQ ID NO: 239650 - DNA, 19 bp, Homo sapiens
  siRNA target sequence for GPR22 (NM_005295.1,198-216).
ctgcatgaaatccaactta

SEQ ID NO: 239651 - DNA, 19 bp, Homo sapiens
  siRNA target sequence for GPR22 (NM_005295.1,200-218).
gcatgaaatccaacttaat

SEQ ID NO: 239652 - DNA, 19 bp, Homo sapiens
  siRNA target sequence for GPR22 (NM_005295.1,219-237).
caactctgtcagtaacatt

SEQ ID NO: 239653 - DNA, 19 bp, Homo sapiens
  siRNA target sequence for GPR22 (NM_005295.1,226-244).
gtcagtaacattattacaa

SEQ ID NO: 239654 - DNA, 19 bp, Homo sapiens
  siRNA target sequence for GPR22 (NM_005295.1,279-297).
gggatgtattcctctaact

SEQ ID NO: 239655 - DNA, 19 bp, Homo sapiens
  siRNA target sequence for GPR22 (NM_005295.1,280-298).
ggatgtattcctctaacta

SEQ ID NO: 239656 - DNA, 19 bp, Homo sapiens
  siRNA target sequence for GPR22 (NM_005295.1,281-299).
gatgtattcctctaactat

SEQ ID NO: 239657 - DNA, 19 bp, Homo sapiens
  siRNA target sequence for GPR22 (NM_005295.1,284-302).
gtattcctctaactatagt

SEQ ID NO: 239658 - DNA, 19 bp, Homo sapiens
  siRNA target sequence for GPR22 (NM_005295.1,290-308).
ctctaactatagttatcct

SEQ ID NO: 239659 - DNA, 19 bp, Homo sapiens
  siRNA target sequence for GPR22 (NM_005295.1,351-369).
ccatgaggcttgtgtatct

SEQ ID NO: 239660 - DNA, 19 bp, Homo sapiens
  siRNA target sequence for GPR22 (NM_005295.1,358-376).
gcttgtgtatcttttgcaa

SEQ ID NO: 239661 - DNA, 19 bp, Homo sapiens
  siRNA target sequence for GPR22 (NM_005295.1,393-411).
caacgtttttgctatcact

SEQ ID NO: 239662 - DNA, 19 bp, Homo sapiens
  siRNA target sequence for GPR22 (NM_005295.1,404-422).
ctatcactttggacagata

SEQ ID NO: 239663 - DNA, 19 bp, Homo sapiens
  siRNA target sequence for GPR22 (NM_005295.1,439-457).
cctgcaaaccgaattctga

SEQ ID NO: 239664 - DNA, 19 bp, Homo sapiens
  siRNA target sequence for GPR22 (NM_005295.1,443-461).
caaaccgaattctgacaat

SEQ ID NO: 239665 - DNA, 19 bp, Homo sapiens
  siRNA target sequence for GPR22 (NM_005295.1,462-480).
gggcagagctgtaatgtta

SEQ ID NO: 239666 - DNA, 19 bp, Homo sapiens
  siRNA target sequence for GPR22 (NM_005295.1,592-610).
gtcagtacaaatgaatact

SEQ ID NO: 239667 - DNA, 19 bp, Homo sapiens
  siRNA target sequence for GPR22 (NM_005295.1,614-632).
ctgaactgggaatgtatta

SEQ ID NO: 239668 - DNA, 19 bp, Homo sapiens
  siRNA target sequence for GPR22 (NM_005295.1,646-664).
cagatcccaatattctttt

SEQ ID NO: 239669 - DNA, 19 bp, Homo sapiens
  siRNA target sequence for GPR22 (NM_005295.1,668-686).
ctgttgtagtaatgttaat

SEQ ID NO: 239670 - DNA, 19 bp, Homo sapiens
  siRNA target sequence for GPR22 (NM_005295.1,676-694).
gtaatgttaatcacataca

SEQ ID NO: 239671 - DNA, 19 bp, Homo sapiens
  siRNA target sequence for GPR22 (NM_005295.1,687-705).
cacatacaccaaaatactt

SEQ ID NO: 239672 - DNA, 19 bp, Homo sapiens
  siRNA target sequence for GPR22 (NM_005295.1,706-724).
caggctcttaatattcgaa

SEQ ID NO: 239673 - DNA, 19 bp, Homo sapiens
  siRNA target sequence for GPR22 (NM_005295.1,708-726).
ggctcttaatattcgaata

SEQ ID NO: 239674 - DNA, 19 bp, Homo sapiens
  siRNA target sequence for GPR22 (NM_005295.1,721-739).
cgaataggcacaagatttt

SEQ ID NO: 239675 - DNA, 19 bp, Homo sapiens
  siRNA target sequence for GPR22 (NM_005295.1,822-840).
cagtggtgggagaaatgta

SEQ ID NO: 239676 - DNA, 19 bp, Homo sapiens
  siRNA target sequence for GPR22 (NM_005295.1,879-897).
cctccggcgagctgtgaaa

SEQ ID NO: 239677 - DNA, 19 bp, Homo sapiens
  siRNA target sequence for GPR22 (NM_005295.1,903-921).
ccgtgaacgacgagaaaga

SEQ ID NO: 239678 - DNA, 19 bp, Homo sapiens
  siRNA target sequence for GPR22 (NM_005295.1,938-956).
ggatgtctttattgattat

SEQ ID NO: 239679 - DNA, 19 bp, Homo sapiens
  siRNA target sequence for GPR22 (NM_005295.1,1020-1038).
cccaagtgaccttttagta

SEQ ID NO: 239680 - DNA, 19 bp, Homo sapiens
  siRNA target sequence for GPR22 (NM_005295.1,1021-1039).
ccaagtgaccttttagtaa

SEQ ID NO: 239681 - DNA, 19 bp, Homo sapiens
  siRNA target sequence for GPR22 (NM_005295.1,1022-1040).
caagtgaccttttagtaaa

SEQ ID NO: 239682 - DNA, 19 bp, Homo sapiens
  siRNA target sequence for GPR22 (NM_005295.1,1065-1083).
ggcttatggaacaactata

SEQ ID NO: 239683 - DNA, 19 bp, Homo sapiens
  siRNA target sequence for GPR22 (NM_005295.1,1066-1084).
gcttatggaacaactatat

SEQ ID NO: 239684 - DNA, 19 bp, Homo sapiens
  siRNA target sequence for GPR22 (NM_005295.1,1154-1172).
gagttgtttctatagtaga

SEQ ID NO: 239685 - DNA, 19 bp, Homo sapiens
  siRNA target sequence for GPR23 (NM_005296.1,69-87).
gggtgacagaagattcatt

SEQ ID NO: 239686 - DNA, 19 bp, Homo sapiens
  siRNA target sequence for GPR23 (NM_005296.1,80-98).
gattcattgacttccaatt

SEQ ID NO: 239687 - DNA, 19 bp, Homo sapiens
  siRNA target sequence for GPR23 (NM_005296.1,124-142).
cccaggttgggcaatgcta

SEQ ID NO: 239688 - DNA, 19 bp, Homo sapiens
  siRNA target sequence for GPR23 (NM_005296.1,134-152).
gcaatgctactgccaataa

SEQ ID NO: 239689 - DNA, 19 bp, Homo sapiens
  siRNA target sequence for GPR23 (NM_005296.1,139-157).
gctactgccaataatactt

SEQ ID NO: 239690 - DNA, 19 bp, Homo sapiens
  siRNA target sequence for GPR23 (NM_005296.1,166-184).
gatgattccttcaagtata

SEQ ID NO: 239691 - DNA, 19 bp, Homo sapiens
  siRNA target sequence for GPR23 (NM_005296.1,283-301).
gagactgctatttttatca

SEQ ID NO: 239692 - DNA, 19 bp, Homo sapiens
  siRNA target sequence for GPR23 (NM_005296.1,324-342).
gctttttgtctgtacacta

SEQ ID NO: 239693 - DNA, 19 bp, Homo sapiens
  siRNA target sequence for GPR23 (NM_005296.1,333-351).
ctgtacactaccttttaaa

SEQ ID NO: 239694 - DNA, 19 bp, Homo sapiens
  siRNA target sequence for GPR23 (NM_005296.1,335-353).
gtacactaccttttaaaat

SEQ ID NO: 239695 - DNA, 19 bp, Homo sapiens
  siRNA target sequence for GPR23 (NM_005296.1,416-434).
cattccttaccaacatcta

SEQ ID NO: 239696 - DNA, 19 bp, Homo sapiens
  siRNA target sequence for GPR23 (NM_005296.1,494-512).
cttttcgatctcgtactat

SEQ ID NO: 239697 - DNA, 19 bp, Homo sapiens
  siRNA target sequence for GPR23 (NM_005296.1,499-517).
cgatctcgtactattagga

SEQ ID NO: 239698 - DNA, 19 bp, Homo sapiens
  siRNA target sequence for GPR23 (NM_005296.1,562-580).
gtcctcagtggcggtattt

SEQ ID NO: 239699 - DNA, 19 bp, Homo sapiens
  siRNA target sequence for GPR23 (NM_005296.1,564-582).
cctcagtggcggtatttca

SEQ ID NO: 239700 - DNA, 19 bp, Homo sapiens
  siRNA target sequence for GPR23 (NM_005296.1,597-615).
caccactaatgtcaacaat

SEQ ID NO: 239701 - DNA, 19 bp, Homo sapiens
  siRNA target sequence for GPR23 (NM_005296.1,649-667).
cgtgtctggaagacttatt

SEQ ID NO: 239702 - DNA, 19 bp, Homo sapiens
  siRNA target sequence for GPR23 (NM_005296.1,779-797).
ctcaaattgggaccaataa

SEQ ID NO: 239703 - DNA, 19 bp, Homo sapiens
  siRNA target sequence for GPR23 (NM_005296.1,781-799).
caaattgggaccaataaga

SEQ ID NO: 239704 - DNA, 19 bp, Homo sapiens
  siRNA target sequence for GPR23 (NM_005296.1,888-906).
ggtgcgctcccaagctatt

SEQ ID NO: 239705 - DNA, 19 bp, Homo sapiens
  siRNA target sequence for GPR23 (NM_005296.1,889-907).
gtgcgctcccaagctatta

SEQ ID NO: 239706 - DNA, 19 bp, Homo sapiens
  siRNA target sequence for GPR23 (NM_005296.1,891-909).
gcgctcccaagctattact

SEQ ID NO: 239707 - DNA, 19 bp, Homo sapiens
  siRNA target sequence for GPR23 (NM_005296.1,892-910).
cgctcccaagctattacta

SEQ ID NO: 239708 - DNA, 19 bp, Homo sapiens
  siRNA target sequence for GPR23 (NM_005296.1,893-911).
gctcccaagctattactaa

SEQ ID NO: 239709 - DNA, 19 bp, Homo sapiens
  siRNA target sequence for GPR23 (NM_005296.1,894-912).
ctcccaagctattactaat

SEQ ID NO: 239710 - DNA, 19 bp, Homo sapiens
  siRNA target sequence for GPR23 (NM_005296.1,898-916).
caagctattactaattgct

SEQ ID NO: 239711 - DNA, 19 bp, Homo sapiens
  siRNA target sequence for GPR23 (NM_005296.1,902-920).
ctattactaattgcttttt

SEQ ID NO: 239712 - DNA, 19 bp, Homo sapiens
  siRNA target sequence for GPR23 (NM_005296.1,961-979).
cttgcaactctgaactgtt

SEQ ID NO: 239713 - DNA, 19 bp, Homo sapiens
  siRNA target sequence for GPR23 (NM_005296.1,964-982).
gcaactctgaactgttgtt

SEQ ID NO: 239714 - DNA, 19 bp, Homo sapiens
  siRNA target sequence for GPR23 (NM_005296.1,965-983).
caactctgaactgttgttt

SEQ ID NO: 239715 - DNA, 19 bp, Homo sapiens
  siRNA target sequence for GPR23 (NM_005296.1,977-995).
gttgttttgaccctttcat

SEQ ID NO: 239716 - DNA, 19 bp, Homo sapiens
  siRNA target sequence for GPR23 (NM_005296.1,980-998).
gttttgaccctttcatcta

SEQ ID NO: 239717 - DNA, 19 bp, Homo sapiens
  siRNA target sequence for GPR23 (NM_005296.1,1062-1080).
cctgtttaagactgaaaca

SEQ ID NO: 239718 - DNA, 19 bp, Homo sapiens
  siRNA target sequence for GPR23 (NM_005296.1,1120-1138).
gaagtgagtgatcaaacaa

SEQ ID NO: 239719 - DNA, 19 bp, Homo sapiens
  siRNA target sequence for GPR23 (NM_005296.1,1123-1141).
gtgagtgatcaaacaacaa

SEQ ID NO: 239720 - DNA, 19 bp, Homo sapiens
  siRNA target sequence for GPR23 (NM_005296.1,1150-1168).
ggtgaattaatgctagaat

SEQ ID NO: 239721 - DNA, 19 bp, Homo sapiens
  siRNA target sequence for GPR26 (NM_153442.1,914-932).
gcatccgacccctttgtgt

SEQ ID NO: 239722 - DNA, 19 bp, Homo sapiens
  siRNA target sequence for GPR26 (NM_153442.1,915-933).
catccgacccctttgtgta

SEQ ID NO: 239723 - DNA, 19 bp, Homo sapiens
  siRNA target sequence for GPR26 (NM_153442.1,947-965).
caccagtaccgcaaaagct

SEQ ID NO: 239724 - DNA, 19 bp, Homo sapiens
  siRNA target sequence for GPR27 (NM_018971.1,808-826).
ctcctcgtgctggaagaat

SEQ ID NO: 239725 - DNA, 19 bp, Homo sapiens
  siRNA target sequence for GPR27 (NM_018971.1,1105-1123).
gacctgaaaggcattggtt

SEQ ID NO: 239726 - DNA, 19 bp, Homo sapiens
  siRNA target sequence for GPR3 (NM_005281.2,140-158).
ctcaggcaacgtgaatgta

SEQ ID NO: 239727 - DNA, 19 bp, Homo sapiens
  siRNA target sequence for GPR3 (NM_005281.2,496-514).
gctacctttctctgtacaa

SEQ ID NO: 239728 - DNA, 19 bp, Homo sapiens
  siRNA target sequence for GPR3 (NM_005281.2,517-535).
ccctcacctactattcaga

SEQ ID NO: 239729 - DNA, 19 bp, Homo sapiens
  siRNA target sequence for GPR3 (NM_005281.2,640-658).
ccacatgtggcgtggttta

SEQ ID NO: 239730 - DNA, 19 bp, Homo sapiens
  siRNA target sequence for GPR3 (NM_005281.2,641-659).
cacatgtggcgtggtttat

SEQ ID NO: 239731 - DNA, 19 bp, Homo sapiens
  siRNA target sequence for GPR3 (NM_005281.2,726-744).
cagctctacgcccaaatct

SEQ ID NO: 239732 - DNA, 19 bp, Homo sapiens
  siRNA target sequence for GPR30 (NM_001505.1,971-989).
cccgacctgtacttcatca

SEQ ID NO: 239733 - DNA, 19 bp, Homo sapiens
  siRNA target sequence for GPR30 (NM_001505.1,1073-1091).
gtcctgtgcaccttcatgt

SEQ ID NO: 239734 - DNA, 19 bp, Homo sapiens
  siRNA target sequence for GPR30 (NM_001505.1,1100-1118).
ctgcaggtcaacatgtaca

SEQ ID NO: 239735 - DNA, 19 bp, Homo sapiens
  siRNA target sequence for GPR30 (NM_001505.1,1295-1313).
gacgaggcctgcttctgtt

SEQ ID NO: 239736 - DNA, 19 bp, Homo sapiens
  siRNA target sequence for GPR30 (NM_001505.1,1601-1619).
ctcacgggccacattgtca

SEQ ID NO: 239737 - DNA, 19 bp, Homo sapiens
  siRNA target sequence for GPR30 (NM_001505.1,1700-1718).
ctgtacattgagcagaaaa

SEQ ID NO: 239738 - DNA, 19 bp, Homo sapiens
  siRNA target sequence for GPR31 (NM_005299.1,940-958).
cccagagactcctattcct

SEQ ID NO: 239739 - DNA, 19 bp, Homo sapiens
  siRNA target sequence for GPR32 (NM_001506.1,949-967).
gtcttcgttggcagagatt

SEQ ID NO: 239740 - DNA, 19 bp, Homo sapiens
  siRNA target sequence for GPR32 (NM_001506.1,954-972).
cgttggcagagatttccaa

SEQ ID NO: 239741 - DNA, 19 bp, Homo sapiens
  siRNA target sequence for GPR34 (NM_005300.2,180-198).
gaagtcataccataacaat

SEQ ID NO: 239742 - DNA, 19 bp, Homo sapiens
  siRNA target sequence for GPR34 (NM_005300.2,234-252).
cccacagaatgcgctttat

SEQ ID NO: 239743 - DNA, 19 bp, Homo sapiens
  siRNA target sequence for GPR34 (NM_005300.2,235-253).
ccacagaatgcgctttata

SEQ ID NO: 239744 - DNA, 19 bp, Homo sapiens
  siRNA target sequence for GPR34 (NM_005300.2,236-254).
cacagaatgcgctttataa

SEQ ID NO: 239745 - DNA, 19 bp, Homo sapiens
  siRNA target sequence for GPR34 (NM_005300.2,264-282).
gcgaccaaccgccacaaaa

SEQ ID NO: 239746 - DNA, 19 bp, Homo sapiens
  siRNA target sequence for GPR34 (NM_005300.2,283-301).
cttctcagcaacaccaaat

SEQ ID NO: 239747 - DNA, 19 bp, Homo sapiens
  siRNA target sequence for GPR34 (NM_005300.2,332-350).
ctatctactgtgttaacca

SEQ ID NO: 239748 - DNA, 19 bp, Homo sapiens
  siRNA target sequence for GPR34 (NM_005300.2,348-366).
ccacatcctactctgttat

SEQ ID NO: 239749 - DNA, 19 bp, Homo sapiens
  siRNA target sequence for GPR34 (NM_005300.2,349-367).
cacatcctactctgttatt

SEQ ID NO: 239750 - DNA, 19 bp, Homo sapiens
  siRNA target sequence for GPR34 (NM_005300.2,351-369).
catcctactctgttatttt

SEQ ID NO: 239751 - DNA, 19 bp, Homo sapiens
  siRNA target sequence for GPR34 (NM_005300.2,376-394).
gggactggttgggaacata

SEQ ID NO: 239752 - DNA, 19 bp, Homo sapiens
  siRNA target sequence for GPR34 (NM_005300.2,377-395).
ggactggttgggaacataa

SEQ ID NO: 239753 - DNA, 19 bp, Homo sapiens
  siRNA target sequence for GPR34 (NM_005300.2,378-396).
gactggttgggaacataat

SEQ ID NO: 239754 - DNA, 19 bp, Homo sapiens
  siRNA target sequence for GPR34 (NM_005300.2,413-431).
ctgggtattcaccgtaaaa

SEQ ID NO: 239755 - DNA, 19 bp, Homo sapiens
  siRNA target sequence for GPR34 (NM_005300.2,416-434).
ggtattcaccgtaaaagaa

SEQ ID NO: 239756 - DNA, 19 bp, Homo sapiens
  siRNA target sequence for GPR34 (NM_005300.2,417-435).
gtattcaccgtaaaagaaa

SEQ ID NO: 239757 - DNA, 19 bp, Homo sapiens
  siRNA target sequence for GPR34 (NM_005300.2,438-456).
ccattcaaatttatctact

SEQ ID NO: 239758 - DNA, 19 bp, Homo sapiens
  siRNA target sequence for GPR34 (NM_005300.2,473-491).
gacctcctactcatcttct

SEQ ID NO: 239759 - DNA, 19 bp, Homo sapiens
  siRNA target sequence for GPR34 (NM_005300.2,492-510).
gcctccctttccgaataat

SEQ ID NO: 239760 - DNA, 19 bp, Homo sapiens
  siRNA target sequence for GPR34 (NM_005300.2,496-514).
ccctttccgaataatgtat

SEQ ID NO: 239761 - DNA, 19 bp, Homo sapiens
  siRNA target sequence for GPR34 (NM_005300.2,498-516).
ctttccgaataatgtatca

SEQ ID NO: 239762 - DNA, 19 bp, Homo sapiens
  siRNA target sequence for GPR34 (NM_005300.2,502-520).
ccgaataatgtatcatatt

SEQ ID NO: 239763 - DNA, 19 bp, Homo sapiens
  siRNA target sequence for GPR34 (NM_005300.2,532-550).
gtggacactaggtgtgatt

SEQ ID NO: 239764 - DNA, 19 bp, Homo sapiens
  siRNA target sequence for GPR34 (NM_005300.2,583-601).
gaacatgtacattagcatt

SEQ ID NO: 239765 - DNA, 19 bp, Homo sapiens
  siRNA target sequence for GPR34 (NM_005300.2,619-637).
cagtttggatcgctatata

SEQ ID NO: 239766 - DNA, 19 bp, Homo sapiens
  siRNA target sequence for GPR34 (NM_005300.2,625-643).
ggatcgctatataaaaatt

SEQ ID NO: 239767 - DNA, 19 bp, Homo sapiens
  siRNA target sequence for GPR34 (NM_005300.2,626-644).
gatcgctatataaaaatta

SEQ ID NO: 239768 - DNA, 19 bp, Homo sapiens
  siRNA target sequence for GPR34 (NM_005300.2,722-740).
cttggtggattcctaacta

SEQ ID NO: 239769 - DNA, 19 bp, Homo sapiens
  siRNA target sequence for GPR34 (NM_005300.2,726-744).
gtggattcctaactatgat

SEQ ID NO: 239770 - DNA, 19 bp, Homo sapiens
  siRNA target sequence for GPR34 (NM_005300.2,728-746).
ggattcctaactatgatta

SEQ ID NO: 239771 - DNA, 19 bp, Homo sapiens
  siRNA target sequence for GPR34 (NM_005300.2,729-747).
gattcctaactatgattat

SEQ ID NO: 239772 - DNA, 19 bp, Homo sapiens
  siRNA target sequence for GPR34 (NM_005300.2,767-785).
gggcataattccacaatgt

SEQ ID NO: 239773 - DNA, 19 bp, Homo sapiens
  siRNA target sequence for GPR34 (NM_005300.2,777-795).
ccacaatgtgtttccatta

SEQ ID NO: 239774 - DNA, 19 bp, Homo sapiens
  siRNA target sequence for GPR34 (NM_005300.2,786-804).
gtttccattacagagataa

SEQ ID NO: 239775 - DNA, 19 bp, Homo sapiens
  siRNA target sequence for GPR34 (NM_005300.2,790-808).
ccattacagagataagcat

SEQ ID NO: 239776 - DNA, 19 bp, Homo sapiens
  siRNA target sequence for GPR34 (NM_005300.2,921-939).
ctaaaaggaggtcaaaatt

SEQ ID NO: 239777 - DNA, 19 bp, Homo sapiens
  siRNA target sequence for GPR34 (NM_005300.2,931-949).
gtcaaaatttcctaattct

SEQ ID NO: 239778 - DNA, 19 bp, Homo sapiens
  siRNA target sequence for GPR34 (NM_005300.2,966-984).
cagctcgtaactcctttat

SEQ ID NO: 239779 - DNA, 19 bp, Homo sapiens
  siRNA target sequence for GPR34 (NM_005300.2,969-987).
ctcgtaactcctttattgt

SEQ ID NO: 239780 - DNA, 19 bp, Homo sapiens
  siRNA target sequence for GPR34 (NM_005300.2,972-990).
gtaactcctttattgtact

SEQ ID NO: 239781 - DNA, 19 bp, Homo sapiens
  siRNA target sequence for GPR34 (NM_005300.2,1022-1040).
catgcctttcgattcatct

SEQ ID NO: 239782 - DNA, 19 bp, Homo sapiens
  siRNA target sequence for GPR34 (NM_005300.2,1025-1043).
gcctttcgattcatctaca

SEQ ID NO: 239783 - DNA, 19 bp, Homo sapiens
  siRNA target sequence for GPR34 (NM_005300.2,1088-1106).
gttcacaaaaccaatgaga

SEQ ID NO: 239784 - DNA, 19 bp, Homo sapiens
  siRNA target sequence for GPR34 (NM_005300.2,1168-1186).
cagtaacattcgcaaaata

SEQ ID NO: 239785 - DNA, 19 bp, Homo sapiens
  siRNA target sequence for GPR34 (NM_005300.2,1170-1188).
gtaacattcgcaaaataat

SEQ ID NO: 239786 - DNA, 19 bp, Homo sapiens
  siRNA target sequence for GPR34 (NM_005300.2,1235-1253).
gaaagcacttcagaattta

SEQ ID NO: 239787 - DNA, 19 bp, Homo sapiens
  siRNA target sequence for GPR34 (NM_005300.2,1259-1277).
ggatactccctgcatgata

SEQ ID NO: 239788 - DNA, 19 bp, Homo sapiens
  siRNA target sequence for GPR34 (NM_005300.2,1291-1309).
gaaaatacagtctagttct

SEQ ID NO: 239789 - DNA, 19 bp, Homo sapiens
  siRNA target sequence for GPR34 (NM_005300.2,1300-1318).
gtctagttctaaaagtact

SEQ ID NO: 239790 - DNA, 19 bp, Homo sapiens
  siRNA target sequence for GPR35 (NM_005301.2,733-751).
cggagacccgcatctacat

SEQ ID NO: 239791 - DNA, 19 bp, Homo sapiens
  siRNA target sequence for GPR35 (NM_005301.2,735-753).
gagacccgcatctacatga

SEQ ID NO: 239792 - DNA, 19 bp, Homo sapiens
  siRNA target sequence for GPR35 (NM_005301.2,1066-1084).
ggagcacccggcacaattt

SEQ ID NO: 239793 - DNA, 19 bp, Homo sapiens
  siRNA target sequence for GPR35 (NM_005301.2,1069-1087).
gcacccggcacaatttcaa

SEQ ID NO: 239794 - DNA, 19 bp, Homo sapiens
  siRNA target sequence for GPR37 (NM_005302.2,744-762).
ccctgcgtccagaaacgaa

SEQ ID NO: 239795 - DNA, 19 bp, Homo sapiens
  siRNA target sequence for GPR37 (NM_005302.2,745-763).
cctgcgtccagaaacgaaa

SEQ ID NO: 239796 - DNA, 19 bp, Homo sapiens
  siRNA target sequence for GPR37 (NM_005302.2,748-766).
gcgtccagaaacgaaactt

SEQ ID NO: 239797 - DNA, 19 bp, Homo sapiens
  siRNA target sequence for GPR37 (NM_005302.2,750-768).
gtccagaaacgaaacttgt

SEQ ID NO: 239798 - DNA, 19 bp, Homo sapiens
  siRNA target sequence for GPR37 (NM_005302.2,817-835).
gcctggggaccgggaaatt

SEQ ID NO: 239799 - DNA, 19 bp, Homo sapiens
  siRNA target sequence for GPR37 (NM_005302.2,876-894).
gcagggggcagcgtttctt

SEQ ID NO: 239800 - DNA, 19 bp, Homo sapiens
  siRNA target sequence for GPR37 (NM_005302.2,1171-1189).
cccggagccagcgatcttt

SEQ ID NO: 239801 - DNA, 19 bp, Homo sapiens
  siRNA target sequence for GPR37 (NM_005302.2,1172-1190).
ccggagccagcgatctttt

SEQ ID NO: 239802 - DNA, 19 bp, Homo sapiens
  siRNA target sequence for GPR37 (NM_005302.2,1174-1192).
ggagccagcgatctttttt

SEQ ID NO: 239803 - DNA, 19 bp, Homo sapiens
  siRNA target sequence for GPR37 (NM_005302.2,1175-1193).
gagccagcgatctttttta

SEQ ID NO: 239804 - DNA, 19 bp, Homo sapiens
  siRNA target sequence for GPR37 (NM_005302.2,1177-1195).
gccagcgatcttttttact

SEQ ID NO: 239805 - DNA, 19 bp, Homo sapiens
  siRNA target sequence for GPR37 (NM_005302.2,1269-1287).
gcacgaagggtggacaatt

SEQ ID NO: 239806 - DNA, 19 bp, Homo sapiens
  siRNA target sequence for GPR37 (NM_005302.2,1303-1321).
gcgctggcccagaatggat

SEQ ID NO: 239807 - DNA, 19 bp, Homo sapiens
  siRNA target sequence for GPR37 (NM_005302.2,1323-1341).
cttgggtgaaggaatccat

SEQ ID NO: 239808 - DNA, 19 bp, Homo sapiens
  siRNA target sequence for GPR37 (NM_005302.2,1464-1482).
cttcgggaccggcatcatt

SEQ ID NO: 239809 - DNA, 19 bp, Homo sapiens
  siRNA target sequence for GPR37 (NM_005302.2,1507-1525).
gtgtgccacaactactaca

SEQ ID NO: 239810 - DNA, 19 bp, Homo sapiens
  siRNA target sequence for GPR37 (NM_005302.2,1592-1610).
gccttccgctggtcatctt

SEQ ID NO: 239811 - DNA, 19 bp, Homo sapiens
  siRNA target sequence for GPR37 (NM_005302.2,1652-1670).
gcaagatcgtgccctatat

SEQ ID NO: 239812 - DNA, 19 bp, Homo sapiens
  siRNA target sequence for GPR37 (NM_005302.2,1653-1671).
caagatcgtgccctatata

SEQ ID NO: 239813 - DNA, 19 bp, Homo sapiens
  siRNA target sequence for GPR37 (NM_005302.2,1736-1754).
ctgccaccaacgtacagat

SEQ ID NO: 239814 - DNA, 19 bp, Homo sapiens
  siRNA target sequence for GPR37 (NM_005302.2,1739-1757).
ccaccaacgtacagatgta

SEQ ID NO: 239815 - DNA, 19 bp, Homo sapiens
  siRNA target sequence for GPR37 (NM_005302.2,1742-1760).
ccaacgtacagatgtacta

SEQ ID NO: 239816 - DNA, 19 bp, Homo sapiens
  siRNA target sequence for GPR37 (NM_005302.2,1747-1765).
gtacagatgtactacgaaa

SEQ ID NO: 239817 - DNA, 19 bp, Homo sapiens
  siRNA target sequence for GPR37 (NM_005302.2,1750-1768).
cagatgtactacgaaatga

SEQ ID NO: 239818 - DNA, 19 bp, Homo sapiens
  siRNA target sequence for GPR37 (NM_005302.2,1761-1779).
cgaaatgatcgaaaactgt

SEQ ID NO: 239819 - DNA, 19 bp, Homo sapiens
  siRNA target sequence for GPR37 (NM_005302.2,1771-1789).
gaaaactgttcctcaacaa

SEQ ID NO: 239820 - DNA, 19 bp, Homo sapiens
  siRNA target sequence for GPR37 (NM_005302.2,1792-1810).
gccaaacttgctgttatat

SEQ ID NO: 239821 - DNA, 19 bp, Homo sapiens
  siRNA target sequence for GPR37 (NM_005302.2,1811-1829).
gggtgggagctctattgtt

SEQ ID NO: 239822 - DNA, 19 bp, Homo sapiens
  siRNA target sequence for GPR37 (NM_005302.2,1812-1830).
ggtgggagctctattgtta

SEQ ID NO: 239823 - DNA, 19 bp, Homo sapiens
  siRNA target sequence for GPR37 (NM_005302.2,1894-1912).
ccggcagaaaggtgcatta

SEQ ID NO: 239824 - DNA, 19 bp, Homo sapiens
  siRNA target sequence for GPR37 (NM_005302.2,1895-1913).
cggcagaaaggtgcattat

SEQ ID NO: 239825 - DNA, 19 bp, Homo sapiens
  siRNA target sequence for GPR37 (NM_005302.2,1896-1914).
ggcagaaaggtgcattatt

SEQ ID NO: 239826 - DNA, 19 bp, Homo sapiens
  siRNA target sequence for GPR37 (NM_005302.2,1917-1935).
gatctctcctgatttacca

SEQ ID NO: 239827 - DNA, 19 bp, Homo sapiens
  siRNA target sequence for GPR37 (NM_005302.2,1972-1990).
gcgagactgtggtggtatt

SEQ ID NO: 239828 - DNA, 19 bp, Homo sapiens
  siRNA target sequence for GPR37 (NM_005302.2,1973-1991).
cgagactgtggtggtattt

SEQ ID NO: 239829 - DNA, 19 bp, Homo sapiens
  siRNA target sequence for GPR37 (NM_005302.2,2038-2056).
ctagtgactgcgaggaaaa

SEQ ID NO: 239830 - DNA, 19 bp, Homo sapiens
  siRNA target sequence for GPR37 (NM_005302.2,2075-2093).
cctgtacccgagggaataa

SEQ ID NO: 239831 - DNA, 19 bp, Homo sapiens
  siRNA target sequence for GPR37 (NM_005302.2,2087-2105).
ggaataaacggcagattca

SEQ ID NO: 239832 - DNA, 19 bp, Homo sapiens
  siRNA target sequence for GPR37 (NM_005302.2,2088-2106).
gaataaacggcagattcaa

SEQ ID NO: 239833 - DNA, 19 bp, Homo sapiens
  siRNA target sequence for GPR37 (NM_005302.2,2110-2128).
gagagtcagatgaactgta

SEQ ID NO: 239834 - DNA, 19 bp, Homo sapiens
  siRNA target sequence for GPR37 (NM_005302.2,2131-2149).
gtagtggcactgaccattt

SEQ ID NO: 239835 - DNA, 19 bp, Homo sapiens
  siRNA target sequence for GPR37 (NM_005302.2,2134-2152).
gtggcactgaccattttat

SEQ ID NO: 239836 - DNA, 19 bp, Homo sapiens
  siRNA target sequence for GPR37 (NM_005302.2,2136-2154).
ggcactgaccattttatat

SEQ ID NO: 239837 - DNA, 19 bp, Homo sapiens
  siRNA target sequence for GPR37 (NM_005302.2,2162-2180).
gcattattcctgaaaatat

SEQ ID NO: 239838 - DNA, 19 bp, Homo sapiens
  siRNA target sequence for GPR37 (NM_005302.2,2226-2244).
gacaatggacctccttaat

SEQ ID NO: 239839 - DNA, 19 bp, Homo sapiens
  siRNA target sequence for GPR37 (NM_005302.2,2228-2246).
caatggacctccttaatat

SEQ ID NO: 239840 - DNA, 19 bp, Homo sapiens
  siRNA target sequence for GPR37 (NM_005302.2,2233-2251).
gacctccttaatatcatca

SEQ ID NO: 239841 - DNA, 19 bp, Homo sapiens
  siRNA target sequence for GPR37 (NM_005302.2,2425-2443).
gaactctcgcctttcagta

SEQ ID NO: 239842 - DNA, 19 bp, Homo sapiens
  siRNA target sequence for GPR37 (NM_005302.2,2430-2448).
ctcgcctttcagtaccata

SEQ ID NO: 239843 - DNA, 19 bp, Homo sapiens
  siRNA target sequence for GPR37 (NM_005302.2,2441-2459).
gtaccatacgccgtgaaat

SEQ ID NO: 239844 - DNA, 19 bp, Homo sapiens
  siRNA target sequence for GPR37 (NM_005302.2,2451-2469).
ccgtgaaatgtccactttt

SEQ ID NO: 239845 - DNA, 19 bp, Homo sapiens
  siRNA target sequence for GPR37 (NM_005302.2,2470-2488).
gcttctgtcggaactcatt

SEQ ID NO: 239846 - DNA, 19 bp, Homo sapiens
  siRNA target sequence for GPR38 (NM_001507.1,209-227).
ggaccaccaccaacttgta

SEQ ID NO: 239847 - DNA, 19 bp, Homo sapiens
  siRNA target sequence for GPR38 (NM_001507.1,242-260).
ccgtgtccgacctactcat

SEQ ID NO: 239848 - DNA, 19 bp, Homo sapiens
  siRNA target sequence for GPR38 (NM_001507.1,942-960).
ccacgttggcagaatcatt

SEQ ID NO: 239849 - DNA, 19 bp, Homo sapiens
  siRNA target sequence for GPR38 (NM_001507.1,949-967).
ggcagaatcatttacataa

SEQ ID NO: 239850 - DNA, 19 bp, Homo sapiens
  siRNA target sequence for GPR38 (NM_001507.1,973-991).
gaagattcgcggatgatgt

SEQ ID NO: 239851 - DNA, 19 bp, Homo sapiens
  siRNA target sequence for GPR38 (NM_001507.1,1015-1033).
gtcgctctgcaacttttct

SEQ ID NO: 239852 - DNA, 19 bp, Homo sapiens
  siRNA target sequence for GPR38 (NM_001507.1,1017-1035).
cgctctgcaacttttctat

SEQ ID NO: 239853 - DNA, 19 bp, Homo sapiens
  siRNA target sequence for GPR39 (NM_001508.1,26-44).
gtgactgctcccaaatcat

SEQ ID NO: 239854 - DNA, 19 bp, Homo sapiens
  siRNA target sequence for GPR39 (NM_001508.1,53-71).
gtcatgtccccgagtttga

SEQ ID NO: 239855 - DNA, 19 bp, Homo sapiens
  siRNA target sequence for GPR39 (NM_001508.1,72-90).
ggtggccacctggatcaaa

SEQ ID NO: 239856 - DNA, 19 bp, Homo sapiens
  siRNA target sequence for GPR39 (NM_001508.1,268-286).
gagttctacagcatcatct

SEQ ID NO: 239857 - DNA, 19 bp, Homo sapiens
  siRNA target sequence for GPR39 (NM_001508.1,857-875).
ggctgattgttgtgacatt

SEQ ID NO: 239858 - DNA, 19 bp, Homo sapiens
  siRNA target sequence for GPR39 (NM_001508.1,979-997).
cccttctcggagacgtttt

SEQ ID NO: 239859 - DNA, 19 bp, Homo sapiens
  siRNA target sequence for GPR39 (NM_001508.1,980-998).
ccttctcggagacgttttt

SEQ ID NO: 239860 - DNA, 19 bp, Homo sapiens
  siRNA target sequence for GPR39 (NM_001508.1,1308-1326).
cgcgaaaccagccaattct

SEQ ID NO: 239861 - DNA, 19 bp, Homo sapiens
  siRNA target sequence for GPR39 (NM_001508.1,1328-1346).
ctgcagagaatggttttca

SEQ ID NO: 239862 - DNA, 19 bp, Homo sapiens
  siRNA target sequence for GPR4 (NM_005282.1,651-669).
ccgccatccctctacatct

SEQ ID NO: 239863 - DNA, 19 bp, Homo sapiens
  siRNA target sequence for GPR4 (NM_005282.1,805-823).
cgctgtgggtggactactt

SEQ ID NO: 239864 - DNA, 19 bp, Homo sapiens
  siRNA target sequence for GPR4 (NM_005282.1,1373-1391).
cgaggagcgcgtcttttct

SEQ ID NO: 239865 - DNA, 19 bp, Homo sapiens
  siRNA target sequence for GPR40 (NM_005303.1,352-370).
cggaggccgtgctattcct

SEQ ID NO: 239866 - DNA, 19 bp, Homo sapiens
  siRNA target sequence for GPR40 (NM_005303.1,741-759).
cttcctgtaccccaatcta

SEQ ID NO: 239867 - DNA, 19 bp, Homo sapiens
  siRNA target sequence for GPR40 (NM_005303.1,798-816).
ctggagtgtggtgcttaat

SEQ ID NO: 239868 - DNA, 19 bp, Homo sapiens
  siRNA target sequence for GPR40 (NM_005303.1,818-836).
cgctggtgaccggttactt

SEQ ID NO: 239869 - DNA, 19 bp, Homo sapiens
  siRNA target sequence for GPR43 (NM_005306.1,243-261).
ctgcgccctcacgagtttt

SEQ ID NO: 239870 - DNA, 19 bp, Homo sapiens
  siRNA target sequence for GPR43 (NM_005306.1,430-448).
gtgatcatcgttcaatact

SEQ ID NO: 239871 - DNA, 19 bp, Homo sapiens
  siRNA target sequence for GPR43 (NM_005306.1,753-771).
cccctggtggcggtcaata

SEQ ID NO: 239872 - DNA, 19 bp, Homo sapiens
  siRNA target sequence for GPR43 (NM_005306.1,805-823).
gaccccctgctcttctatt

SEQ ID NO: 239873 - DNA, 19 bp, Homo sapiens
  siRNA target sequence for GPR43 (NM_005306.1,967-985).
ccaagttcggacttcacta

SEQ ID NO: 239874 - DNA, 19 bp, Homo sapiens
  siRNA target sequence for GPR44 (NM_004778.1,430-448).
gcactcctccatcttcttt

SEQ ID NO: 239875 - DNA, 19 bp, Homo sapiens
  siRNA target sequence for GPR44 (NM_004778.1,649-667).
cattatgtgctactacaat

SEQ ID NO: 239876 - DNA, 19 bp, Homo sapiens
  siRNA target sequence for GPR45 (NM_007227.3,134-152).
gtcccttgaggcttacaca

SEQ ID NO: 239877 - DNA, 19 bp, Homo sapiens
  siRNA target sequence for GPR45 (NM_007227.3,136-154).
cccttgaggcttacacata

SEQ ID NO: 239878 - DNA, 19 bp, Homo sapiens
  siRNA target sequence for GPR45 (NM_007227.3,447-465).
gccacgctctactggtttt

SEQ ID NO: 239879 - DNA, 19 bp, Homo sapiens
  siRNA target sequence for GPR45 (NM_007227.3,449-467).
cacgctctactggtttttt

SEQ ID NO: 239880 - DNA, 19 bp, Homo sapiens
  siRNA target sequence for GPR45 (NM_007227.3,1090-1108).
gctggagaatcaaaaaatt

SEQ ID NO: 239881 - DNA, 19 bp, Homo sapiens
  siRNA target sequence for GPR45 (NM_007227.3,1110-1128).
cgcgaggcctgcatagagt

SEQ ID NO: 239882 - DNA, 19 bp, Homo sapiens
  siRNA target sequence for GPR45 (NM_007227.3,1111-1129).
gcgaggcctgcatagagtt

SEQ ID NO: 239883 - DNA, 19 bp, Homo sapiens
  siRNA target sequence for GPR45 (NM_007227.3,1200-1218).
gtctacgtgtgcaatgaaa

SEQ ID NO: 239884 - DNA, 19 bp, Homo sapiens
  siRNA target sequence for GPR48 (NM_018490.1,622-640).
caagcgctggatatcagta

SEQ ID NO: 239885 - DNA, 19 bp, Homo sapiens
  siRNA target sequence for GPR48 (NM_018490.1,625-643).
gcgctggatatcagtatga

SEQ ID NO: 239886 - DNA, 19 bp, Homo sapiens
  siRNA target sequence for GPR48 (NM_018490.1,657-675).
gttgccagaagatgcattt

SEQ ID NO: 239887 - DNA, 19 bp, Homo sapiens
  siRNA target sequence for GPR48 (NM_018490.1,743-761).
ccttgtctgggttgaaaga

SEQ ID NO: 239888 - DNA, 19 bp, Homo sapiens
  siRNA target sequence for GPR48 (NM_018490.1,744-762).
cttgtctgggttgaaagaa

SEQ ID NO: 239889 - DNA, 19 bp, Homo sapiens
  siRNA target sequence for GPR48 (NM_018490.1,769-787).
gttctaacgctccagaata

SEQ ID NO: 239890 - DNA, 19 bp, Homo sapiens
  siRNA target sequence for GPR48 (NM_018490.1,847-865).
cgtttagatgccaaccata

SEQ ID NO: 239891 - DNA, 19 bp, Homo sapiens
  siRNA target sequence for GPR48 (NM_018490.1,848-866).
gtttagatgccaaccatat

SEQ ID NO: 239892 - DNA, 19 bp, Homo sapiens
  siRNA target sequence for GPR48 (NM_018490.1,853-871).
gatgccaaccatattacct

SEQ ID NO: 239893 - DNA, 19 bp, Homo sapiens
  siRNA target sequence for GPR48 (NM_018490.1,872-890).
cagtccccgaggacagttt

SEQ ID NO: 239894 - DNA, 19 bp, Homo sapiens
  siRNA target sequence for GPR48 (NM_018490.1,885-903).
cagttttgaaggacttgtt

SEQ ID NO: 239895 - DNA, 19 bp, Homo sapiens
  siRNA target sequence for GPR48 (NM_018490.1,992-1010).
ccctggctctcaacaagat

SEQ ID NO: 239896 - DNA, 19 bp, Homo sapiens
  siRNA target sequence for GPR48 (NM_018490.1,994-1012).
ctggctctcaacaagatct

SEQ ID NO: 239897 - DNA, 19 bp, Homo sapiens
  siRNA target sequence for GPR48 (NM_018490.1,1022-1040).
ctgactttgcatttaccaa

SEQ ID NO: 239898 - DNA, 19 bp, Homo sapiens
  siRNA target sequence for GPR48 (NM_018490.1,1030-1048).
gcatttaccaacctttcaa

SEQ ID NO: 239899 - DNA, 19 bp, Homo sapiens
  siRNA target sequence for GPR48 (NM_018490.1,1088-1106).
gcctgagtcaacactgttt

SEQ ID NO: 239900 - DNA, 19 bp, Homo sapiens
  siRNA target sequence for GPR48 (NM_018490.1,1092-1110).
gagtcaacactgttttgat

SEQ ID NO: 239901 - DNA, 19 bp, Homo sapiens
  siRNA target sequence for GPR48 (NM_018490.1,1159-1177).
gaatttcctcaggctatta

SEQ ID NO: 239902 - DNA, 19 bp, Homo sapiens
  siRNA target sequence for GPR48 (NM_018490.1,1249-1267).
gatggtaatccactcttaa

SEQ ID NO: 239903 - DNA, 19 bp, Homo sapiens
  siRNA target sequence for GPR48 (NM_018490.1,1252-1270).
ggtaatccactcttaagaa

SEQ ID NO: 239904 - DNA, 19 bp, Homo sapiens
  siRNA target sequence for GPR48 (NM_018490.1,1434-1452).
gataagcagcatacctaat

SEQ ID NO: 239905 - DNA, 19 bp, Homo sapiens
  siRNA target sequence for GPR48 (NM_018490.1,1481-1499).
ggactttggacttgtctta

SEQ ID NO: 239906 - DNA, 19 bp, Homo sapiens
  siRNA target sequence for GPR48 (NM_018490.1,1515-1533).
ccttccaagttttaatggt

SEQ ID NO: 239907 - DNA, 19 bp, Homo sapiens
  siRNA target sequence for GPR48 (NM_018490.1,1556-1574).
ctttacagcgtaatcaaat

SEQ ID NO: 239908 - DNA, 19 bp, Homo sapiens
  siRNA target sequence for GPR48 (NM_018490.1,1564-1582).
cgtaatcaaatctaccaaa

SEQ ID NO: 239909 - DNA, 19 bp, Homo sapiens
  siRNA target sequence for GPR48 (NM_018490.1,1565-1583).
gtaatcaaatctaccaaat

SEQ ID NO: 239910 - DNA, 19 bp, Homo sapiens
  siRNA target sequence for GPR48 (NM_018490.1,1600-1618).
caaggcctgatatctctaa

SEQ ID NO: 239911 - DNA, 19 bp, Homo sapiens
  siRNA target sequence for GPR48 (NM_018490.1,1604-1622).
gcctgatatctctaaggat

SEQ ID NO: 239912 - DNA, 19 bp, Homo sapiens
  siRNA target sequence for GPR48 (NM_018490.1,1605-1623).
cctgatatctctaaggatt

SEQ ID NO: 239913 - DNA, 19 bp, Homo sapiens
  siRNA target sequence for GPR48 (NM_018490.1,1613-1631).
ctctaaggattctagatct

SEQ ID NO: 239914 - DNA, 19 bp, Homo sapiens
  siRNA target sequence for GPR48 (NM_018490.1,1632-1650).
gagtagaaacctgatacat

SEQ ID NO: 239915 - DNA, 19 bp, Homo sapiens
  siRNA target sequence for GPR48 (NM_018490.1,1634-1652).
gtagaaacctgatacatga

SEQ ID NO: 239916 - DNA, 19 bp, Homo sapiens
  siRNA target sequence for GPR48 (NM_018490.1,1674-1692).
cacacttgggccaataact

SEQ ID NO: 239917 - DNA, 19 bp, Homo sapiens
  siRNA target sequence for GPR48 (NM_018490.1,1676-1694).
cacttgggccaataactaa

SEQ ID NO: 239918 - DNA, 19 bp, Homo sapiens
  siRNA target sequence for GPR48 (NM_018490.1,1685-1703).
caataactaacctagatgt

SEQ ID NO: 239919 - DNA, 19 bp, Homo sapiens
  siRNA target sequence for GPR48 (NM_018490.1,1695-1713).
cctagatgtaagtttcaat

SEQ ID NO: 239920 - DNA, 19 bp, Homo sapiens
  siRNA target sequence for GPR48 (NM_018490.1,1710-1728).
caatgaattaacttccttt

SEQ ID NO: 239921 - DNA, 19 bp, Homo sapiens
  siRNA target sequence for GPR48 (NM_018490.1,1714-1732).
gaattaacttcctttccta

SEQ ID NO: 239922 - DNA, 19 bp, Homo sapiens
  siRNA target sequence for GPR48 (NM_018490.1,1813-1831).
gttaacctcaggtctttat

SEQ ID NO: 239923 - DNA, 19 bp, Homo sapiens
  siRNA target sequence for GPR48 (NM_018490.1,1834-1852).
gtaccatatgcttatcagt

SEQ ID NO: 239924 - DNA, 19 bp, Homo sapiens
  siRNA target sequence for GPR48 (NM_018490.1,1871-1889).
gtgactcttatgcaaattt

SEQ ID NO: 239925 - DNA, 19 bp, Homo sapiens
  siRNA target sequence for GPR48 (NM_018490.1,1873-1891).
gactcttatgcaaatttaa

SEQ ID NO: 239926 - DNA, 19 bp, Homo sapiens
  siRNA target sequence for GPR48 (NM_018490.1,1964-1982).
caagcactcttgaaaatga

SEQ ID NO: 239927 - DNA, 19 bp, Homo sapiens
  siRNA target sequence for GPR48 (NM_018490.1,2004-2022).
ccattgtacaccttcaaca

SEQ ID NO: 239928 - DNA, 19 bp, Homo sapiens
  siRNA target sequence for GPR48 (NM_018490.1,2060-2078).
ggatgattcgtcttactgt

SEQ ID NO: 239929 - DNA, 19 bp, Homo sapiens
  siRNA target sequence for GPR48 (NM_018490.1,2112-2130).
cctgcttgttattttaaca

SEQ ID NO: 239930 - DNA, 19 bp, Homo sapiens
  siRNA target sequence for GPR48 (NM_018490.1,2150-2168).
cactgccttcgtccaaatt

SEQ ID NO: 239931 - DNA, 19 bp, Homo sapiens
  siRNA target sequence for GPR48 (NM_018490.1,2152-2170).
ctgccttcgtccaaattgt

SEQ ID NO: 239932 - DNA, 19 bp, Homo sapiens
  siRNA target sequence for GPR48 (NM_018490.1,2154-2172).
gccttcgtccaaattgttt

SEQ ID NO: 239933 - DNA, 19 bp, Homo sapiens
  siRNA target sequence for GPR48 (NM_018490.1,2219-2237).
gcatcctaacttttcttga

SEQ ID NO: 239934 - DNA, 19 bp, Homo sapiens
  siRNA target sequence for GPR48 (NM_018490.1,2220-2238).
catcctaacttttcttgat

SEQ ID NO: 239935 - DNA, 19 bp, Homo sapiens
  siRNA target sequence for GPR48 (NM_018490.1,2249-2267).
ggggcagattcgctgaatt

SEQ ID NO: 239936 - DNA, 19 bp, Homo sapiens
  siRNA target sequence for GPR48 (NM_018490.1,2250-2268).
gggcagattcgctgaattt

SEQ ID NO: 239937 - DNA, 19 bp, Homo sapiens
  siRNA target sequence for GPR48 (NM_018490.1,2356-2374).
ctagcaactgtcgaaagaa

SEQ ID NO: 239938 - DNA, 19 bp, Homo sapiens
  siRNA target sequence for GPR48 (NM_018490.1,2405-2423).
ggaagagcaatcatctcaa

SEQ ID NO: 239939 - DNA, 19 bp, Homo sapiens
  siRNA target sequence for GPR48 (NM_018490.1,2411-2429).
gcaatcatctcaaacagtt

SEQ ID NO: 239940 - DNA, 19 bp, Homo sapiens
  siRNA target sequence for GPR48 (NM_018490.1,2490-2508).
ccatagaggggaatattct

SEQ ID NO: 239941 - DNA, 19 bp, Homo sapiens
  siRNA target sequence for GPR48 (NM_018490.1,2537-2555).
caggtgaaacgccatcatt

SEQ ID NO: 239942 - DNA, 19 bp, Homo sapiens
  siRNA target sequence for GPR48 (NM_018490.1,2542-2560).
gaaacgccatcattaggat

SEQ ID NO: 239943 - DNA, 19 bp, Homo sapiens
  siRNA target sequence for GPR48 (NM_018490.1,2566-2584).
gtaacgttagtgctattaa

SEQ ID NO: 239944 - DNA, 19 bp, Homo sapiens
  siRNA target sequence for GPR48 (NM_018490.1,2571-2589).
gttagtgctattaaactca

SEQ ID NO: 239945 - DNA, 19 bp, Homo sapiens
  siRNA target sequence for GPR48 (NM_018490.1,2626-2644).
ctatactgcaacttggaaa

SEQ ID NO: 239946 - DNA, 19 bp, Homo sapiens
  siRNA target sequence for GPR48 (NM_018490.1,2664-2682).
ctcacaatctagcatgatt

SEQ ID NO: 239947 - DNA, 19 bp, Homo sapiens
  siRNA target sequence for GPR48 (NM_018490.1,2686-2704).
catgtcgcttggctaatct

SEQ ID NO: 239948 - DNA, 19 bp, Homo sapiens
  siRNA target sequence for GPR48 (NM_018490.1,2689-2707).
gtcgcttggctaatcttca

SEQ ID NO: 239949 - DNA, 19 bp, Homo sapiens
  siRNA target sequence for GPR48 (NM_018490.1,2698-2716).
ctaatcttcaccaattgca

SEQ ID NO: 239950 - DNA, 19 bp, Homo sapiens
  siRNA target sequence for GPR48 (NM_018490.1,2724-2742).
ctgccctgtggcgtttttt

SEQ ID NO: 239951 - DNA, 19 bp, Homo sapiens
  siRNA target sequence for GPR48 (NM_018490.1,2727-2745).
ccctgtggcgtttttttca

SEQ ID NO: 239952 - DNA, 19 bp, Homo sapiens
  siRNA target sequence for GPR48 (NM_018490.1,2733-2751).
ggcgtttttttcatttgca

SEQ ID NO: 239953 - DNA, 19 bp, Homo sapiens
  siRNA target sequence for GPR48 (NM_018490.1,2769-2787).
ctctatcagccccgaaata

SEQ ID NO: 239954 - DNA, 19 bp, Homo sapiens
  siRNA target sequence for GPR48 (NM_018490.1,2771-2789).
ctatcagccccgaaataat

SEQ ID NO: 239955 - DNA, 19 bp, Homo sapiens
  siRNA target sequence for GPR48 (NM_018490.1,2892-2910).
gcgacgtgttaccaagaaa

SEQ ID NO: 239956 - DNA, 19 bp, Homo sapiens
  siRNA target sequence for GPR48 (NM_018490.1,2893-2911).
cgacgtgttaccaagaaaa

SEQ ID NO: 239957 - DNA, 19 bp, Homo sapiens
  siRNA target sequence for GPR48 (NM_018490.1,2948-2966).
gttgtctggaacaggattt

SEQ ID NO: 239958 - DNA, 19 bp, Homo sapiens
  siRNA target sequence for GPR48 (NM_018490.1,2951-2969).
gtctggaacaggatttcta

SEQ ID NO: 239959 - DNA, 19 bp, Homo sapiens
  siRNA target sequence for GPR48 (NM_018490.1,2953-2971).
ctggaacaggatttctact

SEQ ID NO: 239960 - DNA, 19 bp, Homo sapiens
  siRNA target sequence for GPR48 (NM_018490.1,2978-2996).
gtggcatgtactcacattt

SEQ ID NO: 239961 - DNA, 19 bp, Homo sapiens
  siRNA target sequence for GPR48 (NM_018490.1,3017-3035).
gcgactgctgcgaatcgtt

SEQ ID NO: 239962 - DNA, 19 bp, Homo sapiens
  siRNA target sequence for GPR48 (NM_018490.1,3018-3036).
cgactgctgcgaatcgttt

SEQ ID NO: 239963 - DNA, 19 bp, Homo sapiens
  siRNA target sequence for GPR48 (NM_018490.1,3024-3042).
ctgcgaatcgtttctttta

SEQ ID NO: 239964 - DNA, 19 bp, Homo sapiens
  siRNA target sequence for GPR48 (NM_018490.1,3027-3045).
cgaatcgtttcttttaaca

SEQ ID NO: 239965 - DNA, 19 bp, Homo sapiens
  siRNA target sequence for GPR48 (NM_018490.1,3148-3166).
cagtcggcccactctgatt

SEQ ID NO: 239966 - DNA, 19 bp, Homo sapiens
  siRNA target sequence for GPR48 (NM_018490.1,3150-3168).
gtcggcccactctgattat

SEQ ID NO: 239967 - DNA, 19 bp, Homo sapiens
  siRNA target sequence for GPR48 (NM_018490.1,3153-3171).
ggcccactctgattatgca

SEQ ID NO: 239968 - DNA, 19 bp, Homo sapiens
  siRNA target sequence for GPR48 (NM_018490.1,3256-3274).
cctttggtgcgctatgctt

SEQ ID NO: 239969 - DNA, 19 bp, Homo sapiens
  siRNA target sequence for GPR48 (NM_018490.1,3261-3279).
ggtgcgctatgcttacaat

SEQ ID NO: 239970 - DNA, 19 bp, Homo sapiens
  siRNA target sequence for GPR48 (NM_018490.1,3264-3282).
gcgctatgcttacaatcta

SEQ ID NO: 239971 - DNA, 19 bp, Homo sapiens
  siRNA target sequence for GPR49 (NM_003667.2,254-272).
cctacctagacctcagtat

SEQ ID NO: 239972 - DNA, 19 bp, Homo sapiens
  siRNA target sequence for GPR49 (NM_003667.2,341-359).
cgggaaacgctctgacata

SEQ ID NO: 239973 - DNA, 19 bp, Homo sapiens
  siRNA target sequence for GPR49 (NM_003667.2,344-362).
gaaacgctctgacatacat

SEQ ID NO: 239974 - DNA, 19 bp, Homo sapiens
  siRNA target sequence for GPR49 (NM_003667.2,380-398).
ctggcctttacagtcttaa

SEQ ID NO: 239975 - DNA, 19 bp, Homo sapiens
  siRNA target sequence for GPR49 (NM_003667.2,383-401).
gcctttacagtcttaaagt

SEQ ID NO: 239976 - DNA, 19 bp, Homo sapiens
  siRNA target sequence for GPR49 (NM_003667.2,384-402).
cctttacagtcttaaagtt

SEQ ID NO: 239977 - DNA, 19 bp, Homo sapiens
  siRNA target sequence for GPR49 (NM_003667.2,473-491).
ccctgcgtctggatgctaa

SEQ ID NO: 239978 - DNA, 19 bp, Homo sapiens
  siRNA target sequence for GPR49 (NM_003667.2,555-573).
ggatgacaatgcgttaaca

SEQ ID NO: 239979 - DNA, 19 bp, Homo sapiens
  siRNA target sequence for GPR49 (NM_003667.2,559-577).
gacaatgcgttaacagaaa

SEQ ID NO: 239980 - DNA, 19 bp, Homo sapiens
  siRNA target sequence for GPR49 (NM_003667.2,678-696).
cagcttggtagttctacat

SEQ ID NO: 239981 - DNA, 19 bp, Homo sapiens
  siRNA target sequence for GPR49 (NM_003667.2,723-741).
gggaaagaaatgctttgat

SEQ ID NO: 239982 - DNA, 19 bp, Homo sapiens
  siRNA target sequence for GPR49 (NM_003667.2,750-768).
cagcctagagactttagat

SEQ ID NO: 239983 - DNA, 19 bp, Homo sapiens
  siRNA target sequence for GPR49 (NM_003667.2,809-827).
ggacactctccaaccttaa

SEQ ID NO: 239984 - DNA, 19 bp, Homo sapiens
  siRNA target sequence for GPR49 (NM_003667.2,812-830).
cactctccaaccttaaaga

SEQ ID NO: 239985 - DNA, 19 bp, Homo sapiens
  siRNA target sequence for GPR49 (NM_003667.2,855-873).
caggtcgatacctgagaaa

SEQ ID NO: 239986 - DNA, 19 bp, Homo sapiens
  siRNA target sequence for GPR49 (NM_003667.2,880-898).
gtaggcaacccttctctta

SEQ ID NO: 239987 - DNA, 19 bp, Homo sapiens
  siRNA target sequence for GPR49 (NM_003667.2,991-1009).
gcctcacaaataactgaat

SEQ ID NO: 239988 - DNA, 19 bp, Homo sapiens
  siRNA target sequence for GPR49 (NM_003667.2,1081-1099).
caaaccgtctgcaatcagt

SEQ ID NO: 239989 - DNA, 19 bp, Homo sapiens
  siRNA target sequence for GPR49 (NM_003667.2,1087-1105).
gtctgcaatcagttaccta

SEQ ID NO: 239990 - DNA, 19 bp, Homo sapiens
  siRNA target sequence for GPR49 (NM_003667.2,1091-1109).
gcaatcagttacctaatct

SEQ ID NO: 239991 - DNA, 19 bp, Homo sapiens
  siRNA target sequence for GPR49 (NM_003667.2,1114-1132).
gtgctagatctgtcttaca

SEQ ID NO: 239992 - DNA, 19 bp, Homo sapiens
  siRNA target sequence for GPR49 (NM_003667.2,1125-1143).
gtcttacaacctattagaa

SEQ ID NO: 239993 - DNA, 19 bp, Homo sapiens
  siRNA target sequence for GPR49 (NM_003667.2,1127-1145).
cttacaacctattagaaga

SEQ ID NO: 239994 - DNA, 19 bp, Homo sapiens
  siRNA target sequence for GPR49 (NM_003667.2,1131-1149).
caacctattagaagattta

SEQ ID NO: 239995 - DNA, 19 bp, Homo sapiens
  siRNA target sequence for GPR49 (NM_003667.2,1141-1159).
gaagatttacccagttttt

SEQ ID NO: 239996 - DNA, 19 bp, Homo sapiens
  siRNA target sequence for GPR49 (NM_003667.2,1186-1204).
gacctaagacataatgaaa

SEQ ID NO: 239997 - DNA, 19 bp, Homo sapiens
  siRNA target sequence for GPR49 (NM_003667.2,1244-1262).
gcctccgatcgctgaattt

SEQ ID NO: 239998 - DNA, 19 bp, Homo sapiens
  siRNA target sequence for GPR49 (NM_003667.2,1268-1286).
ggaacaaaattgctattat

SEQ ID NO: 239999 - DNA, 19 bp, Homo sapiens
  siRNA target sequence for GPR49 (NM_003667.2,1269-1287).
gaacaaaattgctattatt

SEQ ID NO: 240000 - DNA, 19 bp, Homo sapiens
  siRNA target sequence for GPR49 (NM_003667.2,1341-1359).
caacctcctgtcgtctttt

SEQ ID NO: 240001 - DNA, 19 bp, Homo sapiens
  siRNA target sequence for GPR49 (NM_003667.2,1345-1363).
ctcctgtcgtcttttccta

SEQ ID NO: 240002 - DNA, 19 bp, Homo sapiens
  siRNA target sequence for GPR49 (NM_003667.2,1347-1365).
cctgtcgtcttttcctata

SEQ ID NO: 240003 - DNA, 19 bp, Homo sapiens
  siRNA target sequence for GPR49 (NM_003667.2,1348-1366).
ctgtcgtcttttcctataa

SEQ ID NO: 240004 - DNA, 19 bp, Homo sapiens
  siRNA target sequence for GPR49 (NM_003667.2,1350-1368).
gtcgtcttttcctataact

SEQ ID NO: 240005 - DNA, 19 bp, Homo sapiens
  siRNA target sequence for GPR49 (NM_003667.2,1370-1388).
ggttacatggtttaactca

SEQ ID NO: 240006 - DNA, 19 bp, Homo sapiens
  siRNA target sequence for GPR49 (NM_003667.2,1378-1396).
ggtttaactcacttaaaat

SEQ ID NO: 240007 - DNA, 19 bp, Homo sapiens
  siRNA target sequence for GPR49 (NM_003667.2,1411-1429).
gccttacagagcttgatat

SEQ ID NO: 240008 - DNA, 19 bp, Homo sapiens
  siRNA target sequence for GPR49 (NM_003667.2,1413-1431).
cttacagagcttgatatca

SEQ ID NO: 240009 - DNA, 19 bp, Homo sapiens
  siRNA target sequence for GPR49 (NM_003667.2,1445-1463).
cagaactcaaggttataga

SEQ ID NO: 240010 - DNA, 19 bp, Homo sapiens
  siRNA target sequence for GPR49 (NM_003667.2,1479-1497).
ccagtgctgtgcatttgga

SEQ ID NO: 240011 - DNA, 19 bp, Homo sapiens
  siRNA target sequence for GPR49 (NM_003667.2,1557-1575).
ggacgaccttcataagaaa

SEQ ID NO: 240012 - DNA, 19 bp, Homo sapiens
  siRNA target sequence for GPR49 (NM_003667.2,1560-1578).
cgaccttcataagaaagat

SEQ ID NO: 240013 - DNA, 19 bp, Homo sapiens
  siRNA target sequence for GPR49 (NM_003667.2,1644-1662).
cctgaaagcccttcattca

SEQ ID NO: 240014 - DNA, 19 bp, Homo sapiens
  siRNA target sequence for GPR49 (NM_003667.2,1797-1815).
cagatcccctctgtacatt

SEQ ID NO: 240015 - DNA, 19 bp, Homo sapiens
  siRNA target sequence for GPR49 (NM_003667.2,1817-1835).
cccccattaaactgttaat

SEQ ID NO: 240016 - DNA, 19 bp, Homo sapiens
  siRNA target sequence for GPR49 (NM_003667.2,1818-1836).
ccccattaaactgttaatt

SEQ ID NO: 240017 - DNA, 19 bp, Homo sapiens
  siRNA target sequence for GPR49 (NM_003667.2,1949-1967).
gggttggttgccatgtcat

SEQ ID NO: 240018 - DNA, 19 bp, Homo sapiens
  siRNA target sequence for GPR49 (NM_003667.2,1950-1968).
ggttggttgccatgtcatt

SEQ ID NO: 240019 - DNA, 19 bp, Homo sapiens
  siRNA target sequence for GPR49 (NM_003667.2,1955-1973).
gttgccatgtcattggttt

SEQ ID NO: 240020 - DNA, 19 bp, Homo sapiens
  siRNA target sequence for GPR49 (NM_003667.2,1991-2009).
cagaatcatctgttttcct

SEQ ID NO: 240021 - DNA, 19 bp, Homo sapiens
  siRNA target sequence for GPR49 (NM_003667.2,2032-2050).
cgtgggttctctgtgaaat

SEQ ID NO: 240022 - DNA, 19 bp, Homo sapiens
  siRNA target sequence for GPR49 (NM_003667.2,2035-2053).
gggttctctgtgaaatatt

SEQ ID NO: 240023 - DNA, 19 bp, Homo sapiens
  siRNA target sequence for GPR49 (NM_003667.2,2054-2072).
ctgcaaaatttgaaacgaa

SEQ ID NO: 240024 - DNA, 19 bp, Homo sapiens
  siRNA target sequence for GPR49 (NM_003667.2,2327-2345).
gggactgctctatggtaaa

SEQ ID NO: 240025 - DNA, 19 bp, Homo sapiens
  siRNA target sequence for GPR49 (NM_003667.2,2333-2351).
gctctatggtaaaacacat

SEQ ID NO: 240026 - DNA, 19 bp, Homo sapiens
  siRNA target sequence for GPR49 (NM_003667.2,2334-2352).
ctctatggtaaaacacatt

SEQ ID NO: 240027 - DNA, 19 bp, Homo sapiens
  siRNA target sequence for GPR49 (NM_003667.2,2403-2421).
gtccttctcctctttaata

SEQ ID NO: 240028 - DNA, 19 bp, Homo sapiens
  siRNA target sequence for GPR49 (NM_003667.2,2511-2529).
cttgttcaatcctcacttt

SEQ ID NO: 240029 - DNA, 19 bp, Homo sapiens
  siRNA target sequence for GPR49 (NM_003667.2,2562-2580).
ctacgtctggacaagatca

SEQ ID NO: 240030 - DNA, 19 bp, Homo sapiens
  siRNA target sequence for GPR49 (NM_003667.2,2565-2583).
cgtctggacaagatcaaaa

SEQ ID NO: 240031 - DNA, 19 bp, Homo sapiens
  siRNA target sequence for GPR49 (NM_003667.2,2587-2605).
ccaagcttgatgtcaatta

SEQ ID NO: 240032 - DNA, 19 bp, Homo sapiens
  siRNA target sequence for GPR49 (NM_003667.2,2592-2610).
cttgatgtcaattaactct

SEQ ID NO: 240033 - DNA, 19 bp, Homo sapiens
  siRNA target sequence for GPR49 (NM_003667.2,2700-2718).
cgtgccatcaccagcttat

SEQ ID NO: 240034 - DNA, 19 bp, Homo sapiens
  siRNA target sequence for GPR50 (NM_004224.1,93-111).
caccccctatggctgtatt

SEQ ID NO: 240035 - DNA, 19 bp, Homo sapiens
  siRNA target sequence for GPR50 (NM_004224.1,105-123).
ctgtattggctgtaagcta

SEQ ID NO: 240036 - DNA, 19 bp, Homo sapiens
  siRNA target sequence for GPR50 (NM_004224.1,139-157).
ccaccggctctaatcatct

SEQ ID NO: 240037 - DNA, 19 bp, Homo sapiens
  siRNA target sequence for GPR50 (NM_004224.1,140-158).
caccggctctaatcatctt

SEQ ID NO: 240038 - DNA, 19 bp, Homo sapiens
  siRNA target sequence for GPR50 (NM_004224.1,142-160).
ccggctctaatcatcttta

SEQ ID NO: 240039 - DNA, 19 bp, Homo sapiens
  siRNA target sequence for GPR50 (NM_004224.1,143-161).
cggctctaatcatctttat

SEQ ID NO: 240040 - DNA, 19 bp, Homo sapiens
  siRNA target sequence for GPR50 (NM_004224.1,145-163).
gctctaatcatctttatgt

SEQ ID NO: 240041 - DNA, 19 bp, Homo sapiens
  siRNA target sequence for GPR50 (NM_004224.1,182-200).
ccatcgttgtagacctaat

SEQ ID NO: 240042 - DNA, 19 bp, Homo sapiens
  siRNA target sequence for GPR50 (NM_004224.1,350-368).
gggatctgagccagttaca

SEQ ID NO: 240043 - DNA, 19 bp, Homo sapiens
  siRNA target sequence for GPR50 (NM_004224.1,352-370).
gatctgagccagttacagt

SEQ ID NO: 240044 - DNA, 19 bp, Homo sapiens
  siRNA target sequence for GPR50 (NM_004224.1,373-391).
cagatggtcgggttcatca

SEQ ID NO: 240045 - DNA, 19 bp, Homo sapiens
  siRNA target sequence for GPR50 (NM_004224.1,547-565).
gtcctgcccaacatgtaca

SEQ ID NO: 240046 - DNA, 19 bp, Homo sapiens
  siRNA target sequence for GPR50 (NM_004224.1,761-779).
ctgaggttcgcaattttct

SEQ ID NO: 240047 - DNA, 19 bp, Homo sapiens
  siRNA target sequence for GPR50 (NM_004224.1,763-781).
gaggttcgcaattttctaa

SEQ ID NO: 240048 - DNA, 19 bp, Homo sapiens
  siRNA target sequence for GPR50 (NM_004224.1,951-969).
cgggctcctcaatgagaat

SEQ ID NO: 240049 - DNA, 19 bp, Homo sapiens
  siRNA target sequence for GPR50 (NM_004224.1,953-971).
ggctcctcaatgagaattt

SEQ ID NO: 240050 - DNA, 19 bp, Homo sapiens
  siRNA target sequence for GPR50 (NM_004224.1,986-1004).
ggaccatcttccatgctat

SEQ ID NO: 240051 - DNA, 19 bp, Homo sapiens
  siRNA target sequence for GPR50 (NM_004224.1,1001-1019).
ctatgcggcaccctatcat

SEQ ID NO: 240052 - DNA, 19 bp, Homo sapiens
  siRNA target sequence for GPR50 (NM_004224.1,1006-1024).
cggcaccctatcatattct

SEQ ID NO: 240053 - DNA, 19 bp, Homo sapiens
  siRNA target sequence for GPR50 (NM_004224.1,1007-1025).
ggcaccctatcatattctt

SEQ ID NO: 240054 - DNA, 19 bp, Homo sapiens
  siRNA target sequence for GPR50 (NM_004224.1,1098-1116).
cgaccaagctcgtgaacaa

SEQ ID NO: 240055 - DNA, 19 bp, Homo sapiens
  siRNA target sequence for GPR50 (NM_004224.1,1155-1173).
gatgaatgtccggaatgtt

SEQ ID NO: 240056 - DNA, 19 bp, Homo sapiens
  siRNA target sequence for GPR50 (NM_004224.1,1248-1266).
ctctgcctatcgcaaatct

SEQ ID NO: 240057 - DNA, 19 bp, Homo sapiens
  siRNA target sequence for GPR50 (NM_004224.1,1275-1293).
ccaccacaagtctgtcttt

SEQ ID NO: 240058 - DNA, 19 bp, Homo sapiens
  siRNA target sequence for GPR50 (NM_004224.1,1599-1617).
gcccaccactgctgactat

SEQ ID NO: 240059 - DNA, 19 bp, Homo sapiens
  siRNA target sequence for GPR50 (NM_004224.1,1836-1854).
cactaccagtaccaatgat

SEQ ID NO: 240060 - DNA, 19 bp, Homo sapiens
  siRNA target sequence for GPR50 (NM_004224.1,1841-1859).
ccagtaccaatgattacca

SEQ ID NO: 240061 - DNA, 19 bp, Homo sapiens
  siRNA target sequence for GPR50 (NM_004224.1,1842-1860).
cagtaccaatgattaccat

SEQ ID NO: 240062 - DNA, 19 bp, Homo sapiens
  siRNA target sequence for GPR52 (NM_005684.1,7-25).
gaatccaggtggactgaat

SEQ ID NO: 240063 - DNA, 19 bp, Homo sapiens
  siRNA target sequence for GPR52 (NM_005684.1,123-141).
cttcgagacagtggttatt

SEQ ID NO: 240064 - DNA, 19 bp, Homo sapiens
  siRNA target sequence for GPR52 (NM_005684.1,166-184).
gctgggaatctaacagtta

SEQ ID NO: 240065 - DNA, 19 bp, Homo sapiens
  siRNA target sequence for GPR52 (NM_005684.1,169-187).
gggaatctaacagttatct

SEQ ID NO: 240066 - DNA, 19 bp, Homo sapiens
  siRNA target sequence for GPR52 (NM_005684.1,203-221).
ctccactgttacatcatta

SEQ ID NO: 240067 - DNA, 19 bp, Homo sapiens
  siRNA target sequence for GPR52 (NM_005684.1,217-235).
cattatactaccagctatt

SEQ ID NO: 240068 - DNA, 19 bp, Homo sapiens
  siRNA target sequence for GPR52 (NM_005684.1,224-242).
ctaccagctatttcattca

SEQ ID NO: 240069 - DNA, 19 bp, Homo sapiens
  siRNA target sequence for GPR52 (NM_005684.1,317-335).
caggtgtccacgagtcatt

SEQ ID NO: 240070 - DNA, 19 bp, Homo sapiens
  siRNA target sequence for GPR52 (NM_005684.1,405-423).
cagtgtggatcgttatctt

SEQ ID NO: 240071 - DNA, 19 bp, Homo sapiens
  siRNA target sequence for GPR52 (NM_005684.1,411-429).
ggatcgttatcttgcaata

SEQ ID NO: 240072 - DNA, 19 bp, Homo sapiens
  siRNA target sequence for GPR52 (NM_005684.1,412-430).
gatcgttatcttgcaataa

SEQ ID NO: 240073 - DNA, 19 bp, Homo sapiens
  siRNA target sequence for GPR52 (NM_005684.1,415-433).
cgttatcttgcaataacca

SEQ ID NO: 240074 - DNA, 19 bp, Homo sapiens
  siRNA target sequence for GPR52 (NM_005684.1,416-434).
gttatcttgcaataaccaa

SEQ ID NO: 240075 - DNA, 19 bp, Homo sapiens
  siRNA target sequence for GPR52 (NM_005684.1,432-450).
caagcctctttcctacaat

SEQ ID NO: 240076 - DNA, 19 bp, Homo sapiens
  siRNA target sequence for GPR52 (NM_005684.1,435-453).
gcctctttcctacaatcaa

SEQ ID NO: 240077 - DNA, 19 bp, Homo sapiens
  siRNA target sequence for GPR52 (NM_005684.1,467-485).
gtcgcttgagaatttgcat

SEQ ID NO: 240078 - DNA, 19 bp, Homo sapiens
  siRNA target sequence for GPR52 (NM_005684.1,469-487).
cgcttgagaatttgcatta

SEQ ID NO: 240079 - DNA, 19 bp, Homo sapiens
  siRNA target sequence for GPR52 (NM_005684.1,692-710).
gtcagcacaccaaagagat

SEQ ID NO: 240080 - DNA, 19 bp, Homo sapiens
  siRNA target sequence for GPR52 (NM_005684.1,694-712).
cagcacaccaaagagataa

SEQ ID NO: 240081 - DNA, 19 bp, Homo sapiens
  siRNA target sequence for GPR52 (NM_005684.1,696-714).
gcacaccaaagagataaat

SEQ ID NO: 240082 - DNA, 19 bp, Homo sapiens
  siRNA target sequence for GPR52 (NM_005684.1,781-799).
cgtcgctacgccatggttt

SEQ ID NO: 240083 - DNA, 19 bp, Homo sapiens
  siRNA target sequence for GPR52 (NM_005684.1,782-800).
gtcgctacgccatggtttt

SEQ ID NO: 240084 - DNA, 19 bp, Homo sapiens
  siRNA target sequence for GPR52 (NM_005684.1,784-802).
cgctacgccatggttttgt

SEQ ID NO: 240085 - DNA, 19 bp, Homo sapiens
  siRNA target sequence for GPR52 (NM_005684.1,785-803).
gctacgccatggttttgtt

SEQ ID NO: 240086 - DNA, 19 bp, Homo sapiens
  siRNA target sequence for GPR52 (NM_005684.1,828-846).
gctgtggctcccctatata

SEQ ID NO: 240087 - DNA, 19 bp, Homo sapiens
  siRNA target sequence for GPR52 (NM_005684.1,835-853).
ctcccctatataatttact

SEQ ID NO: 240088 - DNA, 19 bp, Homo sapiens
  siRNA target sequence for GPR52 (NM_005684.1,1039-1057).
gcacaagaacccaaaccta

SEQ ID NO: 240089 - DNA, 19 bp, Homo sapiens
  siRNA target sequence for GPR52 (NM_005684.1,1054-1072).
cctaggaaacgggctaatt

SEQ ID NO: 240090 - DNA, 19 bp, Homo sapiens
  siRNA target sequence for GPR54 (NM_032551.2,128-146).
ggctcgtgccgctcttctt

SEQ ID NO: 240091 - DNA, 19 bp, Homo sapiens
  siRNA target sequence for GPR54 (NM_032551.2,220-238).
cggaccgtgaccaacttct

SEQ ID NO: 240092 - DNA, 19 bp, Homo sapiens
  siRNA target sequence for GPR55 (NM_005683.2,234-252).
gtgtcaacgagctgatgaa

SEQ ID NO: 240093 - DNA, 19 bp, Homo sapiens
  siRNA target sequence for GPR55 (NM_005683.2,247-265).
gatgaaaaccctacagttt

SEQ ID NO: 240094 - DNA, 19 bp, Homo sapiens
  siRNA target sequence for GPR55 (NM_005683.2,343-361).
gaacaggtggcccgattat

SEQ ID NO: 240095 - DNA, 19 bp, Homo sapiens
  siRNA target sequence for GPR55 (NM_005683.2,346-364).
caggtggcccgattatgct

SEQ ID NO: 240096 - DNA, 19 bp, Homo sapiens
  siRNA target sequence for GPR55 (NM_005683.2,590-608).
cggtcccccaggaagatct

SEQ ID NO: 240097 - DNA, 19 bp, Homo sapiens
  siRNA target sequence for GPR55 (NM_005683.2,645-663).
ccggaagcatccctatcta

SEQ ID NO: 240098 - DNA, 19 bp, Homo sapiens
  siRNA target sequence for GPR55 (NM_005683.2,647-665).
ggaagcatccctatctaca

SEQ ID NO: 240099 - DNA, 19 bp, Homo sapiens
  siRNA target sequence for GPR55 (NM_005683.2,651-669).
gcatccctatctacagttt

SEQ ID NO: 240100 - DNA, 19 bp, Homo sapiens
  siRNA target sequence for GPR55 (NM_005683.2,655-673).
ccctatctacagtttccat

SEQ ID NO: 240101 - DNA, 19 bp, Homo sapiens
  siRNA target sequence for GPR55 (NM_005683.2,700-718).
ccacaacatgtctgatgat

SEQ ID NO: 240102 - DNA, 19 bp, Homo sapiens
  siRNA target sequence for GPR55 (NM_005683.2,701-719).
cacaacatgtctgatgata

SEQ ID NO: 240103 - DNA, 19 bp, Homo sapiens
  siRNA target sequence for GPR55 (NM_005683.2,1004-1022).
caattgtccatgtgtttct

SEQ ID NO: 240104 - DNA, 19 bp, Homo sapiens
  siRNA target sequence for GPR55 (NM_005683.2,1053-1071).
gctactactttgtcatcaa

SEQ ID NO: 240105 - DNA, 19 bp, Homo sapiens
  siRNA target sequence for GPR55 (NM_005683.2,1073-1091).
gaattccgcatgaacatca

SEQ ID NO: 240106 - DNA, 19 bp, Homo sapiens
  siRNA target sequence for GPR58 (NM_014626.1,19-37).
ggatccatattcatcacaa

SEQ ID NO: 240107 - DNA, 19 bp, Homo sapiens
  siRNA target sequence for GPR58 (NM_014626.1,43-61).
ggcaatcttgccatgataa

SEQ ID NO: 240108 - DNA, 19 bp, Homo sapiens
  siRNA target sequence for GPR58 (NM_014626.1,116-134).
ccatggccatcactgattt

SEQ ID NO: 240109 - DNA, 19 bp, Homo sapiens
  siRNA target sequence for GPR58 (NM_014626.1,149-167).
ccatcatgccatatagtat

SEQ ID NO: 240110 - DNA, 19 bp, Homo sapiens
  siRNA target sequence for GPR58 (NM_014626.1,157-175).
ccatatagtatgatcagat

SEQ ID NO: 240111 - DNA, 19 bp, Homo sapiens
  siRNA target sequence for GPR58 (NM_014626.1,191-209).
ggtattttgggcttacatt

SEQ ID NO: 240112 - DNA, 19 bp, Homo sapiens
  siRNA target sequence for GPR58 (NM_014626.1,234-252).
cctgatgcttagcataaca

SEQ ID NO: 240113 - DNA, 19 bp, Homo sapiens
  siRNA target sequence for GPR58 (NM_014626.1,235-253).
ctgatgcttagcataacat

SEQ ID NO: 240114 - DNA, 19 bp, Homo sapiens
  siRNA target sequence for GPR58 (NM_014626.1,240-258).
gcttagcataacatccatt

SEQ ID NO: 240115 - DNA, 19 bp, Homo sapiens
  siRNA target sequence for GPR58 (NM_014626.1,241-259).
cttagcataacatccattt

SEQ ID NO: 240116 - DNA, 19 bp, Homo sapiens
  siRNA target sequence for GPR58 (NM_014626.1,274-292).
gtggccattgatagatttt

SEQ ID NO: 240117 - DNA, 19 bp, Homo sapiens
  siRNA target sequence for GPR58 (NM_014626.1,369-387).
gtcggtccctggagcattt

SEQ ID NO: 240118 - DNA, 19 bp, Homo sapiens
  siRNA target sequence for GPR58 (NM_014626.1,411-429).
ggcctatgcagatggaata

SEQ ID NO: 240119 - DNA, 19 bp, Homo sapiens
  siRNA target sequence for GPR58 (NM_014626.1,424-442).
ggaatagagggctatgaca

SEQ ID NO: 240120 - DNA, 19 bp, Homo sapiens
  siRNA target sequence for GPR58 (NM_014626.1,467-485).
gcccagtgatgttcaacaa

SEQ ID NO: 240121 - DNA, 19 bp, Homo sapiens
  siRNA target sequence for GPR58 (NM_014626.1,472-490).
gtgatgttcaacaagctat

SEQ ID NO: 240122 - DNA, 19 bp, Homo sapiens
  siRNA target sequence for GPR58 (NM_014626.1,491-509).
gggggaccaccttgtttat

SEQ ID NO: 240123 - DNA, 19 bp, Homo sapiens
  siRNA target sequence for GPR58 (NM_014626.1,533-551).
ctatgatggtggggattta

SEQ ID NO: 240124 - DNA, 19 bp, Homo sapiens
  siRNA target sequence for GPR58 (NM_014626.1,580-598).
catgctcatgccatcaata

SEQ ID NO: 240125 - DNA, 19 bp, Homo sapiens
  siRNA target sequence for GPR58 (NM_014626.1,583-601).
gctcatgccatcaataact

SEQ ID NO: 240126 - DNA, 19 bp, Homo sapiens
  siRNA target sequence for GPR58 (NM_014626.1,594-612).
caataacttgcgagaaaat

SEQ ID NO: 240127 - DNA, 19 bp, Homo sapiens
  siRNA target sequence for GPR58 (NM_014626.1,600-618).
cttgcgagaaaatcaaaat

SEQ ID NO: 240128 - DNA, 19 bp, Homo sapiens
  siRNA target sequence for GPR58 (NM_014626.1,666-684).
gataggagttttcttatta

SEQ ID NO: 240129 - DNA, 19 bp, Homo sapiens
  siRNA target sequence for GPR58 (NM_014626.1,718-736).
gatccctttttgaacttct

SEQ ID NO: 240130 - DNA, 19 bp, Homo sapiens
  siRNA target sequence for GPR58 (NM_014626.1,721-739).
ccctttttgaacttctcta

SEQ ID NO: 240131 - DNA, 19 bp, Homo sapiens
  siRNA target sequence for GPR58 (NM_014626.1,737-755).
ctactcctgtagttttgtt

SEQ ID NO: 240132 - DNA, 19 bp, Homo sapiens
  siRNA target sequence for GPR58 (NM_014626.1,767-785).
catggtttggctattttaa

SEQ ID NO: 240133 - DNA, 19 bp, Homo sapiens
  siRNA target sequence for GPR58 (NM_014626.1,788-806).
ccacatgtaatccgttaat

SEQ ID NO: 240134 - DNA, 19 bp, Homo sapiens
  siRNA target sequence for GPR58 (NM_014626.1,789-807).
cacatgtaatccgttaata

SEQ ID NO: 240135 - DNA, 19 bp, Homo sapiens
  siRNA target sequence for GPR58 (NM_014626.1,791-809).
catgtaatccgttaatata

SEQ ID NO: 240136 - DNA, 19 bp, Homo sapiens
  siRNA target sequence for GPR58 (NM_014626.1,800-818).
cgttaatatatggtttctt

SEQ ID NO: 240137 - DNA, 19 bp, Homo sapiens
  siRNA target sequence for GPR58 (NM_014626.1,875-893).
catgtttccataatactat

SEQ ID NO: 240138 - DNA, 19 bp, Homo sapiens
  siRNA target sequence for GPR58 (NM_014626.1,882-900).
ccataatactattttgtgt

SEQ ID NO: 240139 - DNA, 19 bp, Homo sapiens
  siRNA target sequence for GPR6 (NM_005284.2,519-537).
cgctacctgtccctgtata

SEQ ID NO: 240140 - DNA, 19 bp, Homo sapiens
  siRNA target sequence for GPR61 (NM_031936.2,528-546).
cgcctgccctccgaaaatt

SEQ ID NO: 240141 - DNA, 19 bp, Homo sapiens
  siRNA target sequence for GPR61 (NM_031936.2,529-547).
gcctgccctccgaaaattt

SEQ ID NO: 240142 - DNA, 19 bp, Homo sapiens
  siRNA target sequence for GPR61 (NM_031936.2,531-549).
ctgccctccgaaaatttgt

SEQ ID NO: 240143 - DNA, 19 bp, Homo sapiens
  siRNA target sequence for GPR61 (NM_031936.2,533-551).
gccctccgaaaatttgtct

SEQ ID NO: 240144 - DNA, 19 bp, Homo sapiens
  siRNA target sequence for GPR61 (NM_031936.2,660-678).
cctgccgcctctacttgtt

SEQ ID NO: 240145 - DNA, 19 bp, Homo sapiens
  siRNA target sequence for GPR61 (NM_031936.2,661-679).
ctgccgcctctacttgttt

SEQ ID NO: 240146 - DNA, 19 bp, Homo sapiens
  siRNA target sequence for GPR61 (NM_031936.2,663-681).
gccgcctctacttgtttct

SEQ ID NO: 240147 - DNA, 19 bp, Homo sapiens
  siRNA target sequence for GPR61 (NM_031936.2,665-683).
cgcctctacttgtttctga

SEQ ID NO: 240148 - DNA, 19 bp, Homo sapiens
  siRNA target sequence for GPR61 (NM_031936.2,680-698).
ctgagcgtgtgctttgtca

SEQ ID NO: 240149 - DNA, 19 bp, Homo sapiens
  siRNA target sequence for GPR61 (NM_031936.2,727-745).
caatgtggagcgctactat

SEQ ID NO: 240150 - DNA, 19 bp, Homo sapiens
  siRNA target sequence for GPR61 (NM_031936.2,733-751).
ggagcgctactattacgta

SEQ ID NO: 240151 - DNA, 19 bp, Homo sapiens
  siRNA target sequence for GPR61 (NM_031936.2,1077-1095).
ggcaacgctccgaatctct

SEQ ID NO: 240152 - DNA, 19 bp, Homo sapiens
  siRNA target sequence for GPR61 (NM_031936.2,1443-1461).
gctccattgaggagaactt

SEQ ID NO: 240153 - DNA, 19 bp, Homo sapiens
  siRNA target sequence for GPR62 (NM_080865.2,1007-1025).
ggccgtgggccaatttgca

SEQ ID NO: 240154 - DNA, 19 bp, Homo sapiens
  siRNA target sequence for GPR63 (NM_030784.1,223-241).
gtgttgactgcgttccata

SEQ ID NO: 240155 - DNA, 19 bp, Homo sapiens
  siRNA target sequence for GPR63 (NM_030784.1,245-263).
ggacatccaacacaacatt

SEQ ID NO: 240156 - DNA, 19 bp, Homo sapiens
  siRNA target sequence for GPR63 (NM_030784.1,246-264).
gacatccaacacaacattt

SEQ ID NO: 240157 - DNA, 19 bp, Homo sapiens
  siRNA target sequence for GPR63 (NM_030784.1,257-275).
caacatttgtcgtgtatga

SEQ ID NO: 240158 - DNA, 19 bp, Homo sapiens
  siRNA target sequence for GPR63 (NM_030784.1,260-278).
catttgtcgtgtatgaaaa

SEQ ID NO: 240159 - DNA, 19 bp, Homo sapiens
  siRNA target sequence for GPR63 (NM_030784.1,341-359).
gatatagttttgaaaccat

SEQ ID NO: 240160 - DNA, 19 bp, Homo sapiens
  siRNA target sequence for GPR63 (NM_030784.1,360-378).
ggctcccactggtttgagt

SEQ ID NO: 240161 - DNA, 19 bp, Homo sapiens
  siRNA target sequence for GPR63 (NM_030784.1,361-379).
gctcccactggtttgagtt

SEQ ID NO: 240162 - DNA, 19 bp, Homo sapiens
  siRNA target sequence for GPR63 (NM_030784.1,381-399).
cttgaccgtgaatagtaca

SEQ ID NO: 240163 - DNA, 19 bp, Homo sapiens
  siRNA target sequence for GPR63 (NM_030784.1,422-440).
catttaagagcctaaactt

SEQ ID NO: 240164 - DNA, 19 bp, Homo sapiens
  siRNA target sequence for GPR63 (NM_030784.1,450-468).
gatcaccctttctgctata

SEQ ID NO: 240165 - DNA, 19 bp, Homo sapiens
  siRNA target sequence for GPR63 (NM_030784.1,455-473).
ccctttctgctataatgat

SEQ ID NO: 240166 - DNA, 19 bp, Homo sapiens
  siRNA target sequence for GPR63 (NM_030784.1,456-474).
cctttctgctataatgata

SEQ ID NO: 240167 - DNA, 19 bp, Homo sapiens
  siRNA target sequence for GPR63 (NM_030784.1,461-479).
ctgctataatgatattcat

SEQ ID NO: 240168 - DNA, 19 bp, Homo sapiens
  siRNA target sequence for GPR63 (NM_030784.1,508-526).
gttgtttgcctcatggttt

SEQ ID NO: 240169 - DNA, 19 bp, Homo sapiens
  siRNA target sequence for GPR63 (NM_030784.1,539-557).
ccatgaggtctgcaattaa

SEQ ID NO: 240170 - DNA, 19 bp, Homo sapiens
  siRNA target sequence for GPR63 (NM_030784.1,564-582).
ccttgccagcctagctttt

SEQ ID NO: 240171 - DNA, 19 bp, Homo sapiens
  siRNA target sequence for GPR63 (NM_030784.1,613-631).
ccctttgccctggtaacta

SEQ ID NO: 240172 - DNA, 19 bp, Homo sapiens
  siRNA target sequence for GPR63 (NM_030784.1,614-632).
cctttgccctggtaactat

SEQ ID NO: 240173 - DNA, 19 bp, Homo sapiens
  siRNA target sequence for GPR63 (NM_030784.1,615-633).
ctttgccctggtaactatt

SEQ ID NO: 240174 - DNA, 19 bp, Homo sapiens
  siRNA target sequence for GPR63 (NM_030784.1,619-637).
gccctggtaactattctta

SEQ ID NO: 240175 - DNA, 19 bp, Homo sapiens
  siRNA target sequence for GPR63 (NM_030784.1,621-639).
cctggtaactattcttact

SEQ ID NO: 240176 - DNA, 19 bp, Homo sapiens
  siRNA target sequence for GPR63 (NM_030784.1,634-652).
cttactacccgatggattt

SEQ ID NO: 240177 - DNA, 19 bp, Homo sapiens
  siRNA target sequence for GPR63 (NM_030784.1,668-686).
gtagggtatctgctatgtt

SEQ ID NO: 240178 - DNA, 19 bp, Homo sapiens
  siRNA target sequence for GPR63 (NM_030784.1,720-738).
cctgctcatcattagcata

SEQ ID NO: 240179 - DNA, 19 bp, Homo sapiens
  siRNA target sequence for GPR63 (NM_030784.1,723-741).
gctcatcattagcatagat

SEQ ID NO: 240180 - DNA, 19 bp, Homo sapiens
  siRNA target sequence for GPR63 (NM_030784.1,724-742).
ctcatcattagcatagata

SEQ ID NO: 240181 - DNA, 19 bp, Homo sapiens
  siRNA target sequence for GPR63 (NM_030784.1,734-752).
gcatagataggttccttat

SEQ ID NO: 240182 - DNA, 19 bp, Homo sapiens
  siRNA target sequence for GPR63 (NM_030784.1,735-753).
catagataggttccttatt

SEQ ID NO: 240183 - DNA, 19 bp, Homo sapiens
  siRNA target sequence for GPR63 (NM_030784.1,780-798).
cccatatagagctaaggtt

SEQ ID NO: 240184 - DNA, 19 bp, Homo sapiens
  siRNA target sequence for GPR63 (NM_030784.1,795-813).
ggttctgattgcagtttct

SEQ ID NO: 240185 - DNA, 19 bp, Homo sapiens
  siRNA target sequence for GPR63 (NM_030784.1,796-814).
gttctgattgcagtttctt

SEQ ID NO: 240186 - DNA, 19 bp, Homo sapiens
  siRNA target sequence for GPR63 (NM_030784.1,897-915).
gtttgggtacacaaccaat

SEQ ID NO: 240187 - DNA, 19 bp, Homo sapiens
  siRNA target sequence for GPR63 (NM_030784.1,917-935).
caggctaccaggcttatgt

SEQ ID NO: 240188 - DNA, 19 bp, Homo sapiens
  siRNA target sequence for GPR63 (NM_030784.1,919-937).
ggctaccaggcttatgtga

SEQ ID NO: 240189 - DNA, 19 bp, Homo sapiens
  siRNA target sequence for GPR63 (NM_030784.1,925-943).
caggcttatgtgattttga

SEQ ID NO: 240190 - DNA, 19 bp, Homo sapiens
  siRNA target sequence for GPR63 (NM_030784.1,927-945).
ggcttatgtgattttgatt

SEQ ID NO: 240191 - DNA, 19 bp, Homo sapiens
  siRNA target sequence for GPR63 (NM_030784.1,963-981).
catacccttcctggtaata

SEQ ID NO: 240192 - DNA, 19 bp, Homo sapiens
  siRNA target sequence for GPR63 (NM_030784.1,973-991).
ctggtaatactgtactcat

SEQ ID NO: 240193 - DNA, 19 bp, Homo sapiens
  siRNA target sequence for GPR63 (NM_030784.1,989-1007).
catttatgggcatactcaa

SEQ ID NO: 240194 - DNA, 19 bp, Homo sapiens
  siRNA target sequence for GPR63 (NM_030784.1,1115-1133).
gcattgacatgggctttaa

SEQ ID NO: 240195 - DNA, 19 bp, Homo sapiens
  siRNA target sequence for GPR63 (NM_030784.1,1138-1156).
cgtgccttcaccactattt

SEQ ID NO: 240196 - DNA, 19 bp, Homo sapiens
  siRNA target sequence for GPR63 (NM_030784.1,1226-1244).
gtaagcacttttactatca

SEQ ID NO: 240197 - DNA, 19 bp, Homo sapiens
  siRNA target sequence for GPR63 (NM_030784.1,1239-1257).
ctatcagcacaactttttt

SEQ ID NO: 240198 - DNA, 19 bp, Homo sapiens
  siRNA target sequence for GPR63 (NM_030784.1,1290-1308).
cctcaagtctgcattgaat

SEQ ID NO: 240199 - DNA, 19 bp, Homo sapiens
  siRNA target sequence for GPR63 (NM_030784.1,1301-1319).
cattgaatccgctgatcta

SEQ ID NO: 240200 - DNA, 19 bp, Homo sapiens
  siRNA target sequence for GPR63 (NM_030784.1,1365-1383).
gcctaagtccttcaagttt

SEQ ID NO: 240201 - DNA, 19 bp, Homo sapiens
  siRNA target sequence for GPR63 (NM_030784.1,1366-1384).
cctaagtccttcaagtttt

SEQ ID NO: 240202 - DNA, 19 bp, Homo sapiens
  siRNA target sequence for GPR73 (NM_138964.1,28-46).
gacaatgccaccaacactt

SEQ ID NO: 240203 - DNA, 19 bp, Homo sapiens
  siRNA target sequence for GPR73 (NM_138964.1,111-129).
cagctacagcgactatgat

SEQ ID NO: 240204 - DNA, 19 bp, Homo sapiens
  siRNA target sequence for GPR73 (NM_138964.1,113-131).
gctacagcgactatgatat

SEQ ID NO: 240205 - DNA, 19 bp, Homo sapiens
  siRNA target sequence for GPR73 (NM_138964.1,148-166).
gaggatgtgaccaattcca

SEQ ID NO: 240206 - DNA, 19 bp, Homo sapiens
  siRNA target sequence for GPR73 (NM_138964.1,159-177).
caattccaggacgttcttt

SEQ ID NO: 240207 - DNA, 19 bp, Homo sapiens
  siRNA target sequence for GPR73 (NM_138964.1,227-245).
gcggcattggaaacttcat

SEQ ID NO: 240208 - DNA, 19 bp, Homo sapiens
  siRNA target sequence for GPR73 (NM_138964.1,1044-1062).
caccgtcaagtacttcaaa

SEQ ID NO: 240209 - DNA, 19 bp, Homo sapiens
  siRNA target sequence for GPR73 (NM_138964.1,1046-1064).
ccgtcaagtacttcaaaaa

SEQ ID NO: 240210 - DNA, 19 bp, Homo sapiens
  siRNA target sequence for GPR73 (NM_138964.1,1159-1177).
gtggactgcatcagactaa

SEQ ID NO: 240211 - DNA, 19 bp, Homo sapiens
  siRNA target sequence for GPR73L1 (NM_144773.2,198-216).
ctgcggcatcggtaacttt

SEQ ID NO: 240212 - DNA, 19 bp, Homo sapiens
  siRNA target sequence for GPR73L1 (NM_144773.2,200-218).
gcggcatcggtaactttgt

SEQ ID NO: 240213 - DNA, 19 bp, Homo sapiens
  siRNA target sequence for GPR73L1 (NM_144773.2,202-220).
ggcatcggtaactttgtct

SEQ ID NO: 240214 - DNA, 19 bp, Homo sapiens
  siRNA target sequence for GPR73L1 (NM_144773.2,227-245).
ctgccctcacccgctataa

SEQ ID NO: 240215 - DNA, 19 bp, Homo sapiens
  siRNA target sequence for GPR73L1 (NM_144773.2,229-247).
gccctcacccgctataaga

SEQ ID NO: 240216 - DNA, 19 bp, Homo sapiens
  siRNA target sequence for GPR73L1 (NM_144773.2,230-248).
ccctcacccgctataagaa

SEQ ID NO: 240217 - DNA, 19 bp, Homo sapiens
  siRNA target sequence for GPR73L1 (NM_144773.2,232-250).
ctcacccgctataagaagt

SEQ ID NO: 240218 - DNA, 19 bp, Homo sapiens
  siRNA target sequence for GPR73L1 (NM_144773.2,480-498).
cttgaaaccacggatgaat

SEQ ID NO: 240219 - DNA, 19 bp, Homo sapiens
  siRNA target sequence for GPR73L1 (NM_144773.2,533-551).
ggatggtgtccattctcat

SEQ ID NO: 240220 - DNA, 19 bp, Homo sapiens
  siRNA target sequence for GPR73L1 (NM_144773.2,534-552).
gatggtgtccattctcatt

SEQ ID NO: 240221 - DNA, 19 bp, Homo sapiens
  siRNA target sequence for GPR73L1 (NM_144773.2,559-577).
ccatcggcttactttgcaa

SEQ ID NO: 240222 - DNA, 19 bp, Homo sapiens
  siRNA target sequence for GPR75 (NM_006794.1,333-351).
cttggtgacctgtactttt

SEQ ID NO: 240223 - DNA, 19 bp, Homo sapiens
  siRNA target sequence for GPR75 (NM_006794.1,336-354).
ggtgacctgtacttttcta

SEQ ID NO: 240224 - DNA, 19 bp, Homo sapiens
  siRNA target sequence for GPR75 (NM_006794.1,376-394).
ggttcctatggcaacttca

SEQ ID NO: 240225 - DNA, 19 bp, Homo sapiens
  siRNA target sequence for GPR75 (NM_006794.1,386-404).
gcaacttcattgtcttctt

SEQ ID NO: 240226 - DNA, 19 bp, Homo sapiens
  siRNA target sequence for GPR75 (NM_006794.1,542-560).
gtagtatcccggatgcttt

SEQ ID NO: 240227 - DNA, 19 bp, Homo sapiens
  siRNA target sequence for GPR75 (NM_006794.1,738-756).
caccttggctaccttgaaa

SEQ ID NO: 240228 - DNA, 19 bp, Homo sapiens
  siRNA target sequence for GPR75 (NM_006794.1,815-833).
ccattttgtctctctatgt

SEQ ID NO: 240229 - DNA, 19 bp, Homo sapiens
  siRNA target sequence for GPR75 (NM_006794.1,859-877).
gtggtctctgtctcttaca

SEQ ID NO: 240230 - DNA, 19 bp, Homo sapiens
  siRNA target sequence for GPR75 (NM_006794.1,866-884).
ctgtctcttacatcatgat

SEQ ID NO: 240231 - DNA, 19 bp, Homo sapiens
  siRNA target sequence for GPR75 (NM_006794.1,1009-1027).
gccatgccggctctgtata

SEQ ID NO: 240232 - DNA, 19 bp, Homo sapiens
  siRNA target sequence for GPR75 (NM_006794.1,1056-1074).
cgttcagacccgtggatat

SEQ ID NO: 240233 - DNA, 19 bp, Homo sapiens
  siRNA target sequence for GPR75 (NM_006794.1,1057-1075).
gttcagacccgtggatata

SEQ ID NO: 240234 - DNA, 19 bp, Homo sapiens
  siRNA target sequence for GPR75 (NM_006794.1,1060-1078).
cagacccgtggatatacca

SEQ ID NO: 240235 - DNA, 19 bp, Homo sapiens
  siRNA target sequence for GPR75 (NM_006794.1,1170-1188).
ggtcacctgtgtgatcatt

SEQ ID NO: 240236 - DNA, 19 bp, Homo sapiens
  siRNA target sequence for GPR75 (NM_006794.1,1259-1277).
ggagcttcattctttacca

SEQ ID NO: 240237 - DNA, 19 bp, Homo sapiens
  siRNA target sequence for GPR75 (NM_006794.1,1453-1471).
ctcgaagtcaacagaaaca

SEQ ID NO: 240238 - DNA, 19 bp, Homo sapiens
  siRNA target sequence for GPR75 (NM_006794.1,1542-1560).
ggcttgtggcccaagtcat

SEQ ID NO: 240239 - DNA, 19 bp, Homo sapiens
  siRNA target sequence for GPR75 (NM_006794.1,1550-1568).
gcccaagtcattcaaaaga

SEQ ID NO: 240240 - DNA, 19 bp, Homo sapiens
  siRNA target sequence for GPR75 (NM_006794.1,1556-1574).
gtcattcaaaagaaagtat

SEQ ID NO: 240241 - DNA, 19 bp, Homo sapiens
  siRNA target sequence for GPR75 (NM_006794.1,1632-1650).
catcaacactcggattgaa

SEQ ID NO: 240242 - DNA, 19 bp, Homo sapiens
  siRNA target sequence for GPR75 (NM_006794.1,1640-1658).
ctcggattgaaccttacta

SEQ ID NO: 240243 - DNA, 19 bp, Homo sapiens
  siRNA target sequence for GPR75 (NM_006794.1,1642-1660).
cggattgaaccttactaca

SEQ ID NO: 240244 - DNA, 19 bp, Homo sapiens
  siRNA target sequence for GPR75 (NM_006794.1,1651-1669).
ccttactacagcatctata

SEQ ID NO: 240245 - DNA, 19 bp, Homo sapiens
  siRNA target sequence for GPR75 (NM_006794.1,1652-1670).
cttactacagcatctataa

SEQ ID NO: 240246 - DNA, 19 bp, Homo sapiens
  siRNA target sequence for GPR75 (NM_006794.1,1694-1712).
gcagcccatgtaacttaca

SEQ ID NO: 240247 - DNA, 19 bp, Homo sapiens
  siRNA target sequence for GPR75 (NM_006794.1,1703-1721).
gtaacttacagccagtaaa

SEQ ID NO: 240248 - DNA, 19 bp, Homo sapiens
  siRNA target sequence for GPR75 (NM_006794.1,1707-1725).
cttacagccagtaaactct

SEQ ID NO: 240249 - DNA, 19 bp, Homo sapiens
  siRNA target sequence for GPR75 (NM_006794.1,1713-1731).
gccagtaaactcttttgga

SEQ ID NO: 240250 - DNA, 19 bp, Homo sapiens
  siRNA target sequence for GPR78 (NM_080819.2,544-562).
gcgtcctcctggtgaatct

SEQ ID NO: 240251 - DNA, 19 bp, Homo sapiens
  siRNA target sequence for GPR78 (NM_080819.2,1141-1159).
ggaagattggcattgctat

SEQ ID NO: 240252 - DNA, 19 bp, Homo sapiens
  siRNA target sequence for GPR78 (NM_080819.2,1142-1160).
gaagattggcattgctatt

SEQ ID NO: 240253 - DNA, 19 bp, Homo sapiens
  siRNA target sequence for GPR78 (NM_080819.2,1177-1195).
gctttgccccgtatgtcat

SEQ ID NO: 240254 - DNA, 19 bp, Homo sapiens
  siRNA target sequence for GPR80 (NM_080818.2,20-38).
gaatgagccactagactat

SEQ ID NO: 240255 - DNA, 19 bp, Homo sapiens
  siRNA target sequence for GPR80 (NM_080818.2,26-44).
gccactagactatttagca

SEQ ID NO: 240256 - DNA, 19 bp, Homo sapiens
  siRNA target sequence for GPR80 (NM_080818.2,27-45).
ccactagactatttagcaa

SEQ ID NO: 240257 - DNA, 19 bp, Homo sapiens
  siRNA target sequence for GPR80 (NM_080818.2,28-46).
cactagactatttagcaaa

SEQ ID NO: 240258 - DNA, 19 bp, Homo sapiens
  siRNA target sequence for GPR80 (NM_080818.2,33-51).
gactatttagcaaatgctt

SEQ ID NO: 240259 - DNA, 19 bp, Homo sapiens
  siRNA target sequence for GPR80 (NM_080818.2,116-134).
gcactacctccctgttatt

SEQ ID NO: 240260 - DNA, 19 bp, Homo sapiens
  siRNA target sequence for GPR80 (NM_080818.2,117-135).
cactacctccctgttattt

SEQ ID NO: 240261 - DNA, 19 bp, Homo sapiens
  siRNA target sequence for GPR80 (NM_080818.2,119-137).
ctacctccctgttatttat

SEQ ID NO: 240262 - DNA, 19 bp, Homo sapiens
  siRNA target sequence for GPR80 (NM_080818.2,146-164).
cttcctcgtgggatttcca

SEQ ID NO: 240263 - DNA, 19 bp, Homo sapiens
  siRNA target sequence for GPR80 (NM_080818.2,163-181).
caggcaatgcagtagtgat

SEQ ID NO: 240264 - DNA, 19 bp, Homo sapiens
  siRNA target sequence for GPR80 (NM_080818.2,165-183).
ggcaatgcagtagtgatat

SEQ ID NO: 240265 - DNA, 19 bp, Homo sapiens
  siRNA target sequence for GPR80 (NM_080818.2,177-195).
gtgatatccacttacattt

SEQ ID NO: 240266 - DNA, 19 bp, Homo sapiens
  siRNA target sequence for GPR80 (NM_080818.2,247-265).
gcacagatctgctgtatct

SEQ ID NO: 240267 - DNA, 19 bp, Homo sapiens
  siRNA target sequence for GPR80 (NM_080818.2,321-339).
ggagatttcatgtgtaagt

SEQ ID NO: 240268 - DNA, 19 bp, Homo sapiens
  siRNA target sequence for GPR80 (NM_080818.2,345-363).
cgcttcagcttccatttca

SEQ ID NO: 240269 - DNA, 19 bp, Homo sapiens
  siRNA target sequence for GPR80 (NM_080818.2,407-425).
ccgctactgtgtgatcatt

SEQ ID NO: 240270 - DNA, 19 bp, Homo sapiens
  siRNA target sequence for GPR80 (NM_080818.2,409-427).
gctactgtgtgatcattca

SEQ ID NO: 240271 - DNA, 19 bp, Homo sapiens
  siRNA target sequence for GPR80 (NM_080818.2,436-454).
gctgcttttccattcacaa

SEQ ID NO: 240272 - DNA, 19 bp, Homo sapiens
  siRNA target sequence for GPR80 (NM_080818.2,440-458).
cttttccattcacaaaact

SEQ ID NO: 240273 - DNA, 19 bp, Homo sapiens
  siRNA target sequence for GPR80 (NM_080818.2,516-534).
ccgatgaccttcttgatca

SEQ ID NO: 240274 - DNA, 19 bp, Homo sapiens
  siRNA target sequence for GPR80 (NM_080818.2,577-595).
ccagttcggatgaactcaa

SEQ ID NO: 240275 - DNA, 19 bp, Homo sapiens
  siRNA target sequence for GPR80 (NM_080818.2,578-596).
cagttcggatgaactcaat

SEQ ID NO: 240276 - DNA, 19 bp, Homo sapiens
  siRNA target sequence for GPR80 (NM_080818.2,583-601).
cggatgaactcaatactat

SEQ ID NO: 240277 - DNA, 19 bp, Homo sapiens
  siRNA target sequence for GPR80 (NM_080818.2,640-658).
gcctccccttggtgatagt

SEQ ID NO: 240278 - DNA, 19 bp, Homo sapiens
  siRNA target sequence for GPR80 (NM_080818.2,653-671).
gatagtgacactttgctat

SEQ ID NO: 240279 - DNA, 19 bp, Homo sapiens
  siRNA target sequence for GPR80 (NM_080818.2,657-675).
gtgacactttgctatacca

SEQ ID NO: 240280 - DNA, 19 bp, Homo sapiens
  siRNA target sequence for GPR80 (NM_080818.2,667-685).
gctataccacgattatcca

SEQ ID NO: 240281 - DNA, 19 bp, Homo sapiens
  siRNA target sequence for GPR80 (NM_080818.2,694-712).
cccatggactgcaaactga

SEQ ID NO: 240282 - DNA, 19 bp, Homo sapiens
  siRNA target sequence for GPR80 (NM_080818.2,750-768).
ctgctactccttgcatttt

SEQ ID NO: 240283 - DNA, 19 bp, Homo sapiens
  siRNA target sequence for GPR80 (NM_080818.2,756-774).
ctccttgcattttacgtat

SEQ ID NO: 240284 - DNA, 19 bp, Homo sapiens
  siRNA target sequence for GPR80 (NM_080818.2,813-831).
gaatctcgcctgctttcaa

SEQ ID NO: 240285 - DNA, 19 bp, Homo sapiens
  siRNA target sequence for GPR80 (NM_080818.2,819-837).
cgcctgctttcaatcagtt

SEQ ID NO: 240286 - DNA, 19 bp, Homo sapiens
  siRNA target sequence for GPR80 (NM_080818.2,822-840).
ctgctttcaatcagttgtt

SEQ ID NO: 240287 - DNA, 19 bp, Homo sapiens
  siRNA target sequence for GPR80 (NM_080818.2,838-856).
gttccattgagaatcagat

SEQ ID NO: 240288 - DNA, 19 bp, Homo sapiens
  siRNA target sequence for GPR80 (NM_080818.2,858-876).
catgaagcttacatcgttt

SEQ ID NO: 240289 - DNA, 19 bp, Homo sapiens
  siRNA target sequence for GPR80 (NM_080818.2,861-879).
gaagcttacatcgtttcta

SEQ ID NO: 240290 - DNA, 19 bp, Homo sapiens
  siRNA target sequence for GPR80 (NM_080818.2,869-887).
catcgtttctagaccatta

SEQ ID NO: 240291 - DNA, 19 bp, Homo sapiens
  siRNA target sequence for GPR80 (NM_080818.2,872-890).
cgtttctagaccattagct

SEQ ID NO: 240292 - DNA, 19 bp, Homo sapiens
  siRNA target sequence for GPR80 (NM_080818.2,907-925).
gtaacctgttactatatgt

SEQ ID NO: 240293 - DNA, 19 bp, Homo sapiens
  siRNA target sequence for GPR82 (NM_080817.1,20-38).
gtattcaaccatctatgat

SEQ ID NO: 240294 - DNA, 19 bp, Homo sapiens
  siRNA target sequence for GPR82 (NM_080817.1,44-62).
ccatggctttaccaatcat

SEQ ID NO: 240295 - DNA, 19 bp, Homo sapiens
  siRNA target sequence for GPR82 (NM_080817.1,49-67).
gctttaccaatcatttaca

SEQ ID NO: 240296 - DNA, 19 bp, Homo sapiens
  siRNA target sequence for GPR82 (NM_080817.1,199-217).
gccatgcctttcatgagta

SEQ ID NO: 240297 - DNA, 19 bp, Homo sapiens
  siRNA target sequence for GPR82 (NM_080817.1,200-218).
ccatgcctttcatgagtat

SEQ ID NO: 240298 - DNA, 19 bp, Homo sapiens
  siRNA target sequence for GPR82 (NM_080817.1,263-281).
gcagagtggtcaattttct

SEQ ID NO: 240299 - DNA, 19 bp, Homo sapiens
  siRNA target sequence for GPR82 (NM_080817.1,273-291).
caattttctgggaactcta

SEQ ID NO: 240300 - DNA, 19 bp, Homo sapiens
  siRNA target sequence for GPR82 (NM_080817.1,293-311).
ccatgcatgcaagtatgtt

SEQ ID NO: 240301 - DNA, 19 bp, Homo sapiens
  siRNA target sequence for GPR82 (NM_080817.1,315-333).
cagtctcttaattttaagt

SEQ ID NO: 240302 - DNA, 19 bp, Homo sapiens
  siRNA target sequence for GPR82 (NM_080817.1,340-358).
gccataagccgctatgcta

SEQ ID NO: 240303 - DNA, 19 bp, Homo sapiens
  siRNA target sequence for GPR82 (NM_080817.1,347-365).
gccgctatgctaccttaat

SEQ ID NO: 240304 - DNA, 19 bp, Homo sapiens
  siRNA target sequence for GPR82 (NM_080817.1,350-368).
gctatgctaccttaatgca

SEQ ID NO: 240305 - DNA, 19 bp, Homo sapiens
  siRNA target sequence for GPR82 (NM_080817.1,351-369).
ctatgctaccttaatgcaa

SEQ ID NO: 240306 - DNA, 19 bp, Homo sapiens
  siRNA target sequence for GPR82 (NM_080817.1,378-396).
ctcgcaagagactacttca

SEQ ID NO: 240307 - DNA, 19 bp, Homo sapiens
  siRNA target sequence for GPR82 (NM_080817.1,392-410).
cttcatgctatgagaaaat

SEQ ID NO: 240308 - DNA, 19 bp, Homo sapiens
  siRNA target sequence for GPR82 (NM_080817.1,439-457).
cgccagcccaactttgcta

SEQ ID NO: 240309 - DNA, 19 bp, Homo sapiens
  siRNA target sequence for GPR82 (NM_080817.1,444-462).
gcccaactttgctagaaaa

SEQ ID NO: 240310 - DNA, 19 bp, Homo sapiens
  siRNA target sequence for GPR82 (NM_080817.1,446-464).
ccaactttgctagaaaact

SEQ ID NO: 240311 - DNA, 19 bp, Homo sapiens
  siRNA target sequence for GPR82 (NM_080817.1,484-502).
gttgtactgggcataatca

SEQ ID NO: 240312 - DNA, 19 bp, Homo sapiens
  siRNA target sequence for GPR82 (NM_080817.1,505-523).
ccagttaccgtatactact

SEQ ID NO: 240313 - DNA, 19 bp, Homo sapiens
  siRNA target sequence for GPR82 (NM_080817.1,513-531).
cgtatactactcagtcata

SEQ ID NO: 240314 - DNA, 19 bp, Homo sapiens
  siRNA target sequence for GPR82 (NM_080817.1,612-630).
cattggaaccacatttatt

SEQ ID NO: 240315 - DNA, 19 bp, Homo sapiens
  siRNA target sequence for GPR82 (NM_080817.1,616-634).
ggaaccacatttattggat

SEQ ID NO: 240316 - DNA, 19 bp, Homo sapiens
  siRNA target sequence for GPR82 (NM_080817.1,639-657).
ctttttagtagtactaaca

SEQ ID NO: 240317 - DNA, 19 bp, Homo sapiens
  siRNA target sequence for GPR82 (NM_080817.1,646-664).
gtagtactaacatcatact

SEQ ID NO: 240318 - DNA, 19 bp, Homo sapiens
  siRNA target sequence for GPR82 (NM_080817.1,649-667).
gtactaacatcatactact

SEQ ID NO: 240319 - DNA, 19 bp, Homo sapiens
  siRNA target sequence for GPR82 (NM_080817.1,652-670).
ctaacatcatactactctt

SEQ ID NO: 240320 - DNA, 19 bp, Homo sapiens
  siRNA target sequence for GPR82 (NM_080817.1,673-691).
gtaagccatctgagaaaaa

SEQ ID NO: 240321 - DNA, 19 bp, Homo sapiens
  siRNA target sequence for GPR82 (NM_080817.1,698-716).
cctgtacgtccattatgga

SEQ ID NO: 240322 - DNA, 19 bp, Homo sapiens
  siRNA target sequence for GPR82 (NM_080817.1,715-733).
gagaaagatttgacttaca

SEQ ID NO: 240323 - DNA, 19 bp, Homo sapiens
  siRNA target sequence for GPR82 (NM_080817.1,717-735).
gaaagatttgacttacagt

SEQ ID NO: 240324 - DNA, 19 bp, Homo sapiens
  siRNA target sequence for GPR82 (NM_080817.1,756-774).
ggtcatccagattctacta

SEQ ID NO: 240325 - DNA, 19 bp, Homo sapiens
  siRNA target sequence for GPR82 (NM_080817.1,782-800).
gcttccttccttatagtat

SEQ ID NO: 240326 - DNA, 19 bp, Homo sapiens
  siRNA target sequence for GPR82 (NM_080817.1,820-838).
gttctacaccaaagagata

SEQ ID NO: 240327 - DNA, 19 bp, Homo sapiens
  siRNA target sequence for GPR82 (NM_080817.1,835-853).
gataactgtcagcaattga

SEQ ID NO: 240328 - DNA, 19 bp, Homo sapiens
  siRNA target sequence for GPR82 (NM_080817.1,840-858).
ctgtcagcaattgaattat

SEQ ID NO: 240329 - DNA, 19 bp, Homo sapiens
  siRNA target sequence for GPR82 (NM_080817.1,905-923).
gtagcacagaccccattat

SEQ ID NO: 240330 - DNA, 19 bp, Homo sapiens
  siRNA target sequence for GPR82 (NM_080817.1,908-926).
gcacagaccccattatatt

SEQ ID NO: 240331 - DNA, 19 bp, Homo sapiens
  siRNA target sequence for GPR82 (NM_080817.1,909-927).
cacagaccccattatattt

SEQ ID NO: 240332 - DNA, 19 bp, Homo sapiens
  siRNA target sequence for GPR82 (NM_080817.1,954-972).
gacactatataatctcttt

SEQ ID NO: 240333 - DNA, 19 bp, Homo sapiens
  siRNA target sequence for GPR83 (NM_016540.2,117-135).
gcctcgcacttcttctctt

SEQ ID NO: 240334 - DNA, 19 bp, Homo sapiens
  siRNA target sequence for GPR83 (NM_016540.2,152-170).
ctccgactggcagaacttt

SEQ ID NO: 240335 - DNA, 19 bp, Homo sapiens
  siRNA target sequence for GPR83 (NM_016540.2,154-172).
ccgactggcagaactttgt

SEQ ID NO: 240336 - DNA, 19 bp, Homo sapiens
  siRNA target sequence for GPR83 (NM_016540.2,235-253).
cttactccttcatcattgt

SEQ ID NO: 240337 - DNA, 19 bp, Homo sapiens
  siRNA target sequence for GPR83 (NM_016540.2,345-363).
gcagttgccgacataatga

SEQ ID NO: 240338 - DNA, 19 bp, Homo sapiens
  siRNA target sequence for GPR83 (NM_016540.2,346-364).
cagttgccgacataatgat

SEQ ID NO: 240339 - DNA, 19 bp, Homo sapiens
  siRNA target sequence for GPR83 (NM_016540.2,377-395).
cacccccttcactttggtt

SEQ ID NO: 240340 - DNA, 19 bp, Homo sapiens
  siRNA target sequence for GPR83 (NM_016540.2,388-406).
ctttggttcgctttgtgaa

SEQ ID NO: 240341 - DNA, 19 bp, Homo sapiens
  siRNA target sequence for GPR83 (NM_016540.2,402-420).
gtgaacagcacatggatat

SEQ ID NO: 240342 - DNA, 19 bp, Homo sapiens
  siRNA target sequence for GPR83 (NM_016540.2,404-422).
gaacagcacatggatattt

SEQ ID NO: 240343 - DNA, 19 bp, Homo sapiens
  siRNA target sequence for GPR83 (NM_016540.2,540-558).
ccccggatctcaatcacaa

SEQ ID NO: 240344 - DNA, 19 bp, Homo sapiens
  siRNA target sequence for GPR83 (NM_016540.2,541-559).
cccggatctcaatcacaaa

SEQ ID NO: 240345 - DNA, 19 bp, Homo sapiens
  siRNA target sequence for GPR83 (NM_016540.2,590-608).
catggctacgttcttttca

SEQ ID NO: 240346 - DNA, 19 bp, Homo sapiens
  siRNA target sequence for GPR83 (NM_016540.2,618-636).
gctatctgccagaaattat

SEQ ID NO: 240347 - DNA, 19 bp, Homo sapiens
  siRNA target sequence for GPR83 (NM_016540.2,782-800).
cgctcgtgtggccaagaaa

SEQ ID NO: 240348 - DNA, 19 bp, Homo sapiens
  siRNA target sequence for GPR83 (NM_016540.2,784-802).
ctcgtgtggccaagaaact

SEQ ID NO: 240349 - DNA, 19 bp, Homo sapiens
  siRNA target sequence for GPR83 (NM_016540.2,786-804).
cgtgtggccaagaaactgt

SEQ ID NO: 240350 - DNA, 19 bp, Homo sapiens
  siRNA target sequence for GPR83 (NM_016540.2,803-821).
gtggctgtgtaatatgatt

SEQ ID NO: 240351 - DNA, 19 bp, Homo sapiens
  siRNA target sequence for GPR83 (NM_016540.2,959-977).
ggtcatccgcaccaacaat

SEQ ID NO: 240352 - DNA, 19 bp, Homo sapiens
  siRNA target sequence for GPR83 (NM_016540.2,971-989).
caacaatgccctctacttt

SEQ ID NO: 240353 - DNA, 19 bp, Homo sapiens
  siRNA target sequence for GPR83 (NM_016540.2,1157-1175).
ctggacagagaagaatgat

SEQ ID NO: 240354 - DNA, 19 bp, Homo sapiens
  siRNA target sequence for GPR84 (NM_020370.1,134-152).
ctgtgctgggctatcgtta

SEQ ID NO: 240355 - DNA, 19 bp, Homo sapiens
  siRNA target sequence for GPR84 (NM_020370.1,138-156).
gctgggctatcgttatgtt

SEQ ID NO: 240356 - DNA, 19 bp, Homo sapiens
  siRNA target sequence for GPR84 (NM_020370.1,548-566).
ctcccctctggcctattta

SEQ ID NO: 240357 - DNA, 19 bp, Homo sapiens
  siRNA target sequence for GPR84 (NM_020370.1,550-568).
cccctctggcctatttata

SEQ ID NO: 240358 - DNA, 19 bp, Homo sapiens
  siRNA target sequence for GPR84 (NM_020370.1,551-569).
ccctctggcctatttatat

SEQ ID NO: 240359 - DNA, 19 bp, Homo sapiens
  siRNA target sequence for GPR84 (NM_020370.1,721-739).
gcactggaccaatacaagt

SEQ ID NO: 240360 - DNA, 19 bp, Homo sapiens
  siRNA target sequence for GPR84 (NM_020370.1,722-740).
cactggaccaatacaagtt

SEQ ID NO: 240361 - DNA, 19 bp, Homo sapiens
  siRNA target sequence for GPR84 (NM_020370.1,838-856).
cccagtgaggggatttcat

SEQ ID NO: 240362 - DNA, 19 bp, Homo sapiens
  siRNA target sequence for GPR84 (NM_020370.1,840-858).
cagtgaggggatttcatct

SEQ ID NO: 240363 - DNA, 19 bp, Homo sapiens
  siRNA target sequence for GPR84 (NM_020370.1,891-909).
ggaaggggactcatcagaa

SEQ ID NO: 240364 - DNA, 19 bp, Homo sapiens
  siRNA target sequence for GPR84 (NM_020370.1,910-928).
gtgggagaccagatcaaca

SEQ ID NO: 240365 - DNA, 19 bp, Homo sapiens
  siRNA target sequence for GPR84 (NM_020370.1,976-994).
gccaaagcccagccaatta

SEQ ID NO: 240366 - DNA, 19 bp, Homo sapiens
  siRNA target sequence for GPR84 (NM_020370.1,1014-1032).
ggattcttcatcggaattt

SEQ ID NO: 240367 - DNA, 19 bp, Homo sapiens
  siRNA target sequence for GPR84 (NM_020370.1,1035-1053).
gaaggtgactcgaatgtgt

SEQ ID NO: 240368 - DNA, 19 bp, Homo sapiens
  siRNA target sequence for GPR84 (NM_020370.1,1038-1056).
ggtgactcgaatgtgtttt

SEQ ID NO: 240369 - DNA, 19 bp, Homo sapiens
  siRNA target sequence for GPR84 (NM_020370.1,1041-1059).
gactcgaatgtgttttgct

SEQ ID NO: 240370 - DNA, 19 bp, Homo sapiens
  siRNA target sequence for GPR84 (NM_020370.1,1162-1180).
ctcacctggctcaatggtt

SEQ ID NO: 240371 - DNA, 19 bp, Homo sapiens
  siRNA target sequence for GPR84 (NM_020370.1,1214-1232).
gccaattccgccaagcata

SEQ ID NO: 240372 - DNA, 19 bp, Homo sapiens
  siRNA target sequence for GPR84 (NM_020370.1,1215-1233).
ccaattccgccaagcatat

SEQ ID NO: 240373 - DNA, 19 bp, Homo sapiens
  siRNA target sequence for GPR84 (NM_020370.1,1225-1243).
caagcatatggctccattt

SEQ ID NO: 240374 - DNA, 19 bp, Homo sapiens
  siRNA target sequence for GPR84 (NM_020370.1,1228-1246).
gcatatggctccattttaa

SEQ ID NO: 240375 - DNA, 19 bp, Homo sapiens
  siRNA target sequence for GPR85 (NM_018970.3,627-645).
cctctaacagcctttctga

SEQ ID NO: 240376 - DNA, 19 bp, Homo sapiens
  siRNA target sequence for GPR85 (NM_018970.3,628-646).
ctctaacagcctttctgaa

SEQ ID NO: 240377 - DNA, 19 bp, Homo sapiens
  siRNA target sequence for GPR85 (NM_018970.3,732-750).
catagagcaccttactact

SEQ ID NO: 240378 - DNA, 19 bp, Homo sapiens
  siRNA target sequence for GPR85 (NM_018970.3,950-968).
ccatcaccgcttctataca

SEQ ID NO: 240379 - DNA, 19 bp, Homo sapiens
  siRNA target sequence for GPR85 (NM_018970.3,951-969).
catcaccgcttctatacaa

SEQ ID NO: 240380 - DNA, 19 bp, Homo sapiens
  siRNA target sequence for GPR85 (NM_018970.3,954-972).
caccgcttctatacaaaga

SEQ ID NO: 240381 - DNA, 19 bp, Homo sapiens
  siRNA target sequence for GPR85 (NM_018970.3,1053-1071).
gacgtgggcacttactcat

SEQ ID NO: 240382 - DNA, 19 bp, Homo sapiens
  siRNA target sequence for GPR85 (NM_018970.3,1058-1076).
gggcacttactcattcatt

SEQ ID NO: 240383 - DNA, 19 bp, Homo sapiens
  siRNA target sequence for GPR85 (NM_018970.3,1073-1091).
cattagggaggaagatcaa

SEQ ID NO: 240384 - DNA, 19 bp, Homo sapiens
  siRNA target sequence for GPR85 (NM_018970.3,1109-1127).
ctccttcagggctaatgat

SEQ ID NO: 240385 - DNA, 19 bp, Homo sapiens
  siRNA target sequence for GPR85 (NM_018970.3,1115-1133).
cagggctaatgattcctta

SEQ ID NO: 240386 - DNA, 19 bp, Homo sapiens
  siRNA target sequence for GPR85 (NM_018970.3,1119-1137).
gctaatgattccttaggat

SEQ ID NO: 240387 - DNA, 19 bp, Homo sapiens
  siRNA target sequence for GPR85 (NM_018970.3,1120-1138).
ctaatgattccttaggatt

SEQ ID NO: 240388 - DNA, 19 bp, Homo sapiens
  siRNA target sequence for GPR85 (NM_018970.3,1179-1197).
gtctacctcaagctgatat

SEQ ID NO: 240389 - DNA, 19 bp, Homo sapiens
  siRNA target sequence for GPR85 (NM_018970.3,1181-1199).
ctacctcaagctgatattt

SEQ ID NO: 240390 - DNA, 19 bp, Homo sapiens
  siRNA target sequence for GPR85 (NM_018970.3,1202-1220).
cgtccacgatcgaagaaaa

SEQ ID NO: 240391 - DNA, 19 bp, Homo sapiens
  siRNA target sequence for GPR85 (NM_018970.3,1203-1221).
gtccacgatcgaagaaaaa

SEQ ID NO: 240392 - DNA, 19 bp, Homo sapiens
  siRNA target sequence for GPR85 (NM_018970.3,1206-1224).
cacgatcgaagaaaaatga

SEQ ID NO: 240393 - DNA, 19 bp, Homo sapiens
  siRNA target sequence for GPR85 (NM_018970.3,1301-1319).
caattggctagcaggattt

SEQ ID NO: 240394 - DNA, 19 bp, Homo sapiens
  siRNA target sequence for GPR85 (NM_018970.3,1384-1402).
gaaggctattggtcttaga

SEQ ID NO: 240395 - DNA, 19 bp, Homo sapiens
  siRNA target sequence for GPR85 (NM_018970.3,1394-1412).
ggtcttagacgagttcaaa

SEQ ID NO: 240396 - DNA, 19 bp, Homo sapiens
  siRNA target sequence for GPR85 (NM_018970.3,1395-1413).
gtcttagacgagttcaaaa

SEQ ID NO: 240397 - DNA, 19 bp, Homo sapiens
  siRNA target sequence for GPR85 (NM_018970.3,1478-1496).
ctacctggtggcctgttat

SEQ ID NO: 240398 - DNA, 19 bp, Homo sapiens
  siRNA target sequence for GPR85 (NM_018970.3,1488-1506).
gcctgttattggagagttt

SEQ ID NO: 240399 - DNA, 19 bp, Homo sapiens
  siRNA target sequence for GPR85 (NM_018970.3,1660-1678).
ggttaccaagggaacctta

SEQ ID NO: 240400 - DNA, 19 bp, Homo sapiens
  siRNA target sequence for GPR85 (NM_018970.3,1669-1687).
gggaaccttactgtgttat

SEQ ID NO: 240401 - DNA, 19 bp, Homo sapiens
  siRNA target sequence for GPR85 (NM_018970.3,1671-1689).
gaaccttactgtgttatat

SEQ ID NO: 240402 - DNA, 19 bp, Homo sapiens
  siRNA target sequence for GPR88 (NM_022049.1,534-552).
ccggtgtcactcctgtatt

SEQ ID NO: 240403 - DNA, 19 bp, Homo sapiens
  siRNA target sequence for GPR88 (NM_022049.1,580-598).
ccaacggcatggtcatcta

SEQ ID NO: 240404 - DNA, 19 bp, Homo sapiens
  siRNA target sequence for GPR88 (NM_022049.1,581-599).
caacggcatggtcatctat

SEQ ID NO: 240405 - DNA, 19 bp, Homo sapiens
  siRNA target sequence for GPR88 (NM_022049.1,1111-1129).
gggtcagcgtgctcaactt

SEQ ID NO: 240406 - DNA, 19 bp, Homo sapiens
  siRNA target sequence for GPR91 (NM_033050.1,94-112).
gaggctgccctggaaaagt

SEQ ID NO: 240407 - DNA, 19 bp, Homo sapiens
  siRNA target sequence for GPR91 (NM_033050.1,156-174).
ccttggaaataccattgtt

SEQ ID NO: 240408 - DNA, 19 bp, Homo sapiens
  siRNA target sequence for GPR91 (NM_033050.1,160-178).
ggaaataccattgttgttt

SEQ ID NO: 240409 - DNA, 19 bp, Homo sapiens
  siRNA target sequence for GPR91 (NM_033050.1,172-190).
gttgtttacggctacatct

SEQ ID NO: 240410 - DNA, 19 bp, Homo sapiens
  siRNA target sequence for GPR91 (NM_033050.1,175-193).
gtttacggctacatcttct

SEQ ID NO: 240411 - DNA, 19 bp, Homo sapiens
  siRNA target sequence for GPR91 (NM_033050.1,268-286).
ctccccatgctgataagga

SEQ ID NO: 240412 - DNA, 19 bp, Homo sapiens
  siRNA target sequence for GPR91 (NM_033050.1,273-291).
catgctgataaggagttat

SEQ ID NO: 240413 - DNA, 19 bp, Homo sapiens
  siRNA target sequence for GPR91 (NM_033050.1,326-344).
gcataagcaaccgatatgt

SEQ ID NO: 240414 - DNA, 19 bp, Homo sapiens
  siRNA target sequence for GPR91 (NM_033050.1,392-410).
gcatagatcgatacttgat

SEQ ID NO: 240415 - DNA, 19 bp, Homo sapiens
  siRNA target sequence for GPR91 (NM_033050.1,393-411).
catagatcgatacttgata

SEQ ID NO: 240416 - DNA, 19 bp, Homo sapiens
  siRNA target sequence for GPR91 (NM_033050.1,397-415).
gatcgatacttgataatta

SEQ ID NO: 240417 - DNA, 19 bp, Homo sapiens
  siRNA target sequence for GPR91 (NM_033050.1,401-419).
gatacttgataattaagta

SEQ ID NO: 240418 - DNA, 19 bp, Homo sapiens
  siRNA target sequence for GPR91 (NM_033050.1,547-565).
ggcaccacctgtaatgatt

SEQ ID NO: 240419 - DNA, 19 bp, Homo sapiens
  siRNA target sequence for GPR91 (NM_033050.1,548-566).
gcaccacctgtaatgattt

SEQ ID NO: 240420 - DNA, 19 bp, Homo sapiens
  siRNA target sequence for GPR91 (NM_033050.1,621-639).
gttggggttccttattcct

SEQ ID NO: 240421 - DNA, 19 bp, Homo sapiens
  siRNA target sequence for GPR91 (NM_033050.1,731-749).
ctctcaacttggtcatcat

SEQ ID NO: 240422 - DNA, 19 bp, Homo sapiens
  siRNA target sequence for GPR91 (NM_033050.1,787-805).
cacgtcatgcggaatgtga

SEQ ID NO: 240423 - DNA, 19 bp, Homo sapiens
  siRNA target sequence for GPR91 (NM_033050.1,845-863).
gcactcaggtcgtcatcaa

SEQ ID NO: 240424 - DNA, 19 bp, Homo sapiens
  siRNA target sequence for GPR92 (NM_020400.3,396-414).
cggtggtgagcgtgtacat

SEQ ID NO: 240425 - DNA, 19 bp, Homo sapiens
  siRNA target sequence for GPR92 (NM_020400.3,1111-1129).
cccgctggtgtactacttt

SEQ ID NO: 240426 - DNA, 19 bp, Homo sapiens
  siRNA target sequence for GPR92 (NM_020400.3,1112-1130).
ccgctggtgtactacttta

SEQ ID NO: 240427 - DNA, 19 bp, Homo sapiens
  siRNA target sequence for GRCA (NM_014449.1,551-569).
caatgcgtggccatcatgt

SEQ ID NO: 240428 - DNA, 19 bp, Homo sapiens
  siRNA target sequence for GRCA (NM_014449.1,612-630).
cagagggccgagtttgcaa

SEQ ID NO: 240429 - DNA, 19 bp, Homo sapiens
  siRNA target sequence for GRCA (NM_014449.1,616-634).
gggccgagtttgcaaagtt

SEQ ID NO: 240430 - DNA, 19 bp, Homo sapiens
  siRNA target sequence for GRCA (NM_014449.1,771-789).
cccatgatgagacaaacat

SEQ ID NO: 240431 - DNA, 19 bp, Homo sapiens
  siRNA target sequence for GRCA (NM_014449.1,779-797).
gagacaaacatcttctcta

SEQ ID NO: 240432 - DNA, 19 bp, Homo sapiens
  siRNA target sequence for GRCA (NM_019858.1,702-720).
cgggcacacacatactcat

SEQ ID NO: 240433 - DNA, 19 bp, Homo sapiens
  siRNA target sequence for GRCA (NM_019858.1,770-788).
gcttcctccgactatgact

SEQ ID NO: 240434 - DNA, 19 bp, Homo sapiens
  siRNA target sequence for GRCA (NM_019858.1,785-803).
gactggaacgagagtatct

SEQ ID NO: 240435 - DNA, 19 bp, Homo sapiens
  siRNA target sequence for GRCA (NM_019858.1,993-1011).
ccattggctggcacaacaa

SEQ ID NO: 240436 - DNA, 19 bp, Homo sapiens
  siRNA target sequence for GRCA (NM_019858.1,1009-1027).
caacggcgagcgctactat

SEQ ID NO: 240437 - DNA, 19 bp, Homo sapiens
  siRNA target sequence for GRCA (NM_019858.1,1356-1374).
gcgccatcgtctttctcta

SEQ ID NO: 240438 - DNA, 19 bp, Homo sapiens
  siRNA target sequence for GRCA (NM_019858.1,1357-1375).
cgccatcgtctttctctat

SEQ ID NO: 240439 - DNA, 19 bp, Homo sapiens
  siRNA target sequence for GREAT (NM_130806.2,141-159).
gcctcagattgattacaat

SEQ ID NO: 240440 - DNA, 19 bp, Homo sapiens
  siRNA target sequence for GREAT (NM_130806.2,181-199).
cgttctgatcaatgtcaaa

SEQ ID NO: 240441 - DNA, 19 bp, Homo sapiens
  siRNA target sequence for GREAT (NM_130806.2,277-295).
gtgcttaccccgagctttt

SEQ ID NO: 240442 - DNA, 19 bp, Homo sapiens
  siRNA target sequence for GREAT (NM_130806.2,357-375).
gtggatgggcgaccatatt

SEQ ID NO: 240443 - DNA, 19 bp, Homo sapiens
  siRNA target sequence for GREAT (NM_130806.2,414-432).
cacaggagtgctttctaaa

SEQ ID NO: 240444 - DNA, 19 bp, Homo sapiens
  siRNA target sequence for GREAT (NM_130806.2,498-516).
ctgtgccgatgatttctaa

SEQ ID NO: 240445 - DNA, 19 bp, Homo sapiens
  siRNA target sequence for GREAT (NM_130806.2,500-518).
gtgccgatgatttctaaca

SEQ ID NO: 240446 - DNA, 19 bp, Homo sapiens
  siRNA target sequence for GREAT (NM_130806.2,502-520).
gccgatgatttctaacaat

SEQ ID NO: 240447 - DNA, 19 bp, Homo sapiens
  siRNA target sequence for GREAT (NM_130806.2,504-522).
cgatgatttctaacaatgt

SEQ ID NO: 240448 - DNA, 19 bp, Homo sapiens
  siRNA target sequence for GREAT (NM_130806.2,525-543).
cattactgtctcttaagaa

SEQ ID NO: 240449 - DNA, 19 bp, Homo sapiens
  siRNA target sequence for GREAT (NM_130806.2,556-574).
cagtcttccagataaagtt

SEQ ID NO: 240450 - DNA, 19 bp, Homo sapiens
  siRNA target sequence for GREAT (NM_130806.2,558-576).
gtcttccagataaagtttt

SEQ ID NO: 240451 - DNA, 19 bp, Homo sapiens
  siRNA target sequence for GREAT (NM_130806.2,577-595).
catcaaatacacaaaactt

SEQ ID NO: 240452 - DNA, 19 bp, Homo sapiens
  siRNA target sequence for GREAT (NM_130806.2,644-662).
gcattttttggattatgta

SEQ ID NO: 240453 - DNA, 19 bp, Homo sapiens
  siRNA target sequence for GREAT (NM_130806.2,710-728).
cctggaatattcaaagact

SEQ ID NO: 240454 - DNA, 19 bp, Homo sapiens
  siRNA target sequence for GREAT (NM_130806.2,725-743).
gacttacatcagctaactt

SEQ ID NO: 240455 - DNA, 19 bp, Homo sapiens
  siRNA target sequence for GREAT (NM_130806.2,741-759).
cttggctaattctagatga

SEQ ID NO: 240456 - DNA, 19 bp, Homo sapiens
  siRNA target sequence for GREAT (NM_130806.2,785-803).
cgcttgtttacgggattaa

SEQ ID NO: 240457 - DNA, 19 bp, Homo sapiens
  siRNA target sequence for GREAT (NM_130806.2,826-844).
ggttaataactacttagaa

SEQ ID NO: 240458 - DNA, 19 bp, Homo sapiens
  siRNA target sequence for GREAT (NM_130806.2,970-988).
gcctagaaatcaaattggt

SEQ ID NO: 240459 - DNA, 19 bp, Homo sapiens
  siRNA target sequence for GREAT (NM_130806.2,971-989).
cctagaaatcaaattggtt

SEQ ID NO: 240460 - DNA, 19 bp, Homo sapiens
  siRNA target sequence for GREAT (NM_130806.2,972-990).
ctagaaatcaaattggttt

SEQ ID NO: 240461 - DNA, 19 bp, Homo sapiens
  siRNA target sequence for GREAT (NM_130806.2,1040-1058).
ctgtctagcaatacgataa

SEQ ID NO: 240462 - DNA, 19 bp, Homo sapiens
  siRNA target sequence for GREAT (NM_130806.2,1116-1134).
catccaatcctcttatgta

SEQ ID NO: 240463 - DNA, 19 bp, Homo sapiens
  siRNA target sequence for GREAT (NM_130806.2,1226-1244).
caacccatgaagaatcttt

SEQ ID NO: 240464 - DNA, 19 bp, Homo sapiens
  siRNA target sequence for GREAT (NM_130806.2,1283-1301).
gctccccatgtccgaatat

SEQ ID NO: 240465 - DNA, 19 bp, Homo sapiens
  siRNA target sequence for GREAT (NM_130806.2,1287-1305).
cccatgtccgaatatgtat

SEQ ID NO: 240466 - DNA, 19 bp, Homo sapiens
  siRNA target sequence for GREAT (NM_130806.2,1309-1327).
cttgacggacggcatttct

SEQ ID NO: 240467 - DNA, 19 bp, Homo sapiens
  siRNA target sequence for GREAT (NM_130806.2,1314-1332).
cggacggcatttcttcatt

SEQ ID NO: 240468 - DNA, 19 bp, Homo sapiens
  siRNA target sequence for GREAT (NM_130806.2,1337-1355).
gacctcttggctaacaata

SEQ ID NO: 240469 - DNA, 19 bp, Homo sapiens
  siRNA target sequence for GREAT (NM_130806.2,1347-1365).
ctaacaatatcctcagaat

SEQ ID NO: 240470 - DNA, 19 bp, Homo sapiens
  siRNA target sequence for GREAT (NM_130806.2,1376-1394).
gttatagctttcattacct

SEQ ID NO: 240471 - DNA, 19 bp, Homo sapiens
  siRNA target sequence for GREAT (NM_130806.2,1387-1405).
cattacctgctttggaaat

SEQ ID NO: 240472 - DNA, 19 bp, Homo sapiens
  siRNA target sequence for GREAT (NM_130806.2,1418-1436).
ggcatgagatctttcatta

SEQ ID NO: 240473 - DNA, 19 bp, Homo sapiens
  siRNA target sequence for GREAT (NM_130806.2,1419-1437).
gcatgagatctttcattaa

SEQ ID NO: 240474 - DNA, 19 bp, Homo sapiens
  siRNA target sequence for GREAT (NM_130806.2,1423-1441).
gagatctttcattaaagct

SEQ ID NO: 240475 - DNA, 19 bp, Homo sapiens
  siRNA target sequence for GREAT (NM_130806.2,1432-1450).
cattaaagctgaaaataca

SEQ ID NO: 240476 - DNA, 19 bp, Homo sapiens
  siRNA target sequence for GREAT (NM_130806.2,1454-1472).
cacgctatgtccatcaaaa

SEQ ID NO: 240477 - DNA, 19 bp, Homo sapiens
  siRNA target sequence for GREAT (NM_130806.2,1458-1476).
ctatgtccatcaaaatcct

SEQ ID NO: 240478 - DNA, 19 bp, Homo sapiens
  siRNA target sequence for GREAT (NM_130806.2,1493-1511).
ctgatgggtgtttacttgt

SEQ ID NO: 240479 - DNA, 19 bp, Homo sapiens
  siRNA target sequence for GREAT (NM_130806.2,1500-1518).
gtgtttacttgttctttgt

SEQ ID NO: 240480 - DNA, 19 bp, Homo sapiens
  siRNA target sequence for GREAT (NM_130806.2,1513-1531).
ctttgttggcattttcgat

SEQ ID NO: 240481 - DNA, 19 bp, Homo sapiens
  siRNA target sequence for GREAT (NM_130806.2,1637-1655).
ctgctactgacctacttga

SEQ ID NO: 240482 - DNA, 19 bp, Homo sapiens
  siRNA target sequence for GREAT (NM_130806.2,1640-1658).
ctactgacctacttgactt

SEQ ID NO: 240483 - DNA, 19 bp, Homo sapiens
  siRNA target sequence for GREAT (NM_130806.2,1743-1761).
ggatggcgggatttttaat

SEQ ID NO: 240484 - DNA, 19 bp, Homo sapiens
  siRNA target sequence for GREAT (NM_130806.2,1744-1762).
gatggcgggatttttaata

SEQ ID NO: 240485 - DNA, 19 bp, Homo sapiens
  siRNA target sequence for GREAT (NM_130806.2,1747-1765).
ggcgggatttttaatagct

SEQ ID NO: 240486 - DNA, 19 bp, Homo sapiens
  siRNA target sequence for GREAT (NM_130806.2,1763-1781).
gctgtaattccattttgga

SEQ ID NO: 240487 - DNA, 19 bp, Homo sapiens
  siRNA target sequence for GREAT (NM_130806.2,1818-1836).
gagtatgtttcccacttta

SEQ ID NO: 240488 - DNA, 19 bp, Homo sapiens
  siRNA target sequence for GREAT (NM_130806.2,1843-1861).
ccaaacagaagatattgga

SEQ ID NO: 240489 - DNA, 19 bp, Homo sapiens
  siRNA target sequence for GREAT (NM_130806.2,1922-1940).
gtgttttcctatattacta

SEQ ID NO: 240490 - DNA, 19 bp, Homo sapiens
  siRNA target sequence for GREAT (NM_130806.2,1975-1993).
cacagaagtaaggaattgt

SEQ ID NO: 240491 - DNA, 19 bp, Homo sapiens
  siRNA target sequence for GREAT (NM_130806.2,2058-2076).
ggattcctgtatttgtagt

SEQ ID NO: 240492 - DNA, 19 bp, Homo sapiens
  siRNA target sequence for GREAT (NM_130806.2,2059-2077).
gattcctgtatttgtagtt

SEQ ID NO: 240493 - DNA, 19 bp, Homo sapiens
  siRNA target sequence for GREAT (NM_130806.2,2088-2106).
ccctcttccgggtggaaat

SEQ ID NO: 240494 - DNA, 19 bp, Homo sapiens
  siRNA target sequence for GREAT (NM_130806.2,2089-2107).
cctcttccgggtggaaata

SEQ ID NO: 240495 - DNA, 19 bp, Homo sapiens
  siRNA target sequence for GREAT (NM_130806.2,2092-2110).
cttccgggtggaaatacca

SEQ ID NO: 240496 - DNA, 19 bp, Homo sapiens
  siRNA target sequence for GREAT (NM_130806.2,2102-2120).
gaaataccagacacaatga

SEQ ID NO: 240497 - DNA, 19 bp, Homo sapiens
  siRNA target sequence for GREAT (NM_130806.2,2119-2137).
gacttcctggatagtgatt

SEQ ID NO: 240498 - DNA, 19 bp, Homo sapiens
  siRNA target sequence for GREAT (NM_130806.2,2337-2355).
cacttggagacagtataat

SEQ ID NO: 240499 - DNA, 19 bp, Homo sapiens
  siRNA target sequence for H963 (NM_013308.2,249-267).
cttctgcccagtttataaa

SEQ ID NO: 240500 - DNA, 19 bp, Homo sapiens
  siRNA target sequence for H963 (NM_013308.2,273-291).
ggagccattcacgtatttt

SEQ ID NO: 240501 - DNA, 19 bp, Homo sapiens
  siRNA target sequence for H963 (NM_013308.2,274-292).
gagccattcacgtattttt

SEQ ID NO: 240502 - DNA, 19 bp, Homo sapiens
  siRNA target sequence for H963 (NM_013308.2,335-353).
caacctgggcttttataca

SEQ ID NO: 240503 - DNA, 19 bp, Homo sapiens
  siRNA target sequence for H963 (NM_013308.2,371-389).
ggtgtgtgagcatctactt

SEQ ID NO: 240504 - DNA, 19 bp, Homo sapiens
  siRNA target sequence for H963 (NM_013308.2,372-390).
gtgtgtgagcatctactta

SEQ ID NO: 240505 - DNA, 19 bp, Homo sapiens
  siRNA target sequence for H963 (NM_013308.2,374-392).
gtgtgagcatctacttaat

SEQ ID NO: 240506 - DNA, 19 bp, Homo sapiens
  siRNA target sequence for H963 (NM_013308.2,376-394).
gtgagcatctacttaatta

SEQ ID NO: 240507 - DNA, 19 bp, Homo sapiens
  siRNA target sequence for H963 (NM_013308.2,378-396).
gagcatctacttaattaat

SEQ ID NO: 240508 - DNA, 19 bp, Homo sapiens
  siRNA target sequence for H963 (NM_013308.2,417-435).
gcttactctggcattacca

SEQ ID NO: 240509 - DNA, 19 bp, Homo sapiens
  siRNA target sequence for H963 (NM_013308.2,424-442).
ctggcattaccagtgaaaa

SEQ ID NO: 240510 - DNA, 19 bp, Homo sapiens
  siRNA target sequence for H963 (NM_013308.2,502-520).
gcctgcctcatctatatca

SEQ ID NO: 240511 - DNA, 19 bp, Homo sapiens
  siRNA target sequence for H963 (NM_013308.2,503-521).
cctgcctcatctatatcaa

SEQ ID NO: 240512 - DNA, 19 bp, Homo sapiens
  siRNA target sequence for H963 (NM_013308.2,590-608).
gcaagatctaccgaataca

SEQ ID NO: 240513 - DNA, 19 bp, Homo sapiens
  siRNA target sequence for H963 (NM_013308.2,613-631).
cccggatttgccaaaatga

SEQ ID NO: 240514 - DNA, 19 bp, Homo sapiens
  siRNA target sequence for H963 (NM_013308.2,647-665).
ggctaatggtccttcttat

SEQ ID NO: 240515 - DNA, 19 bp, Homo sapiens
  siRNA target sequence for H963 (NM_013308.2,649-667).
ctaatggtccttcttataa

SEQ ID NO: 240516 - DNA, 19 bp, Homo sapiens
  siRNA target sequence for H963 (NM_013308.2,720-738).
gggttgtatggagtttaaa

SEQ ID NO: 240517 - DNA, 19 bp, Homo sapiens
  siRNA target sequence for H963 (NM_013308.2,721-739).
ggttgtatggagtttaaaa

SEQ ID NO: 240518 - DNA, 19 bp, Homo sapiens
  siRNA target sequence for H963 (NM_013308.2,722-740).
gttgtatggagtttaaaaa

SEQ ID NO: 240519 - DNA, 19 bp, Homo sapiens
  siRNA target sequence for H963 (NM_013308.2,808-826).
gccatcattttaatatcca

SEQ ID NO: 240520 - DNA, 19 bp, Homo sapiens
  siRNA target sequence for H963 (NM_013308.2,841-859).
cgacagctctacagaaaca

SEQ ID NO: 240521 - DNA, 19 bp, Homo sapiens
  siRNA target sequence for H963 (NM_013308.2,913-931).
gtgaccacgggctacatca

SEQ ID NO: 240522 - DNA, 19 bp, Homo sapiens
  siRNA target sequence for H963 (NM_013308.2,915-933).
gaccacgggctacatcata

SEQ ID NO: 240523 - DNA, 19 bp, Homo sapiens
  siRNA target sequence for H963 (NM_013308.2,920-938).
cgggctacatcatatgctt

SEQ ID NO: 240524 - DNA, 19 bp, Homo sapiens
  siRNA target sequence for H963 (NM_013308.2,1001-1019).
gctcaaccaggatttcact

SEQ ID NO: 240525 - DNA, 19 bp, Homo sapiens
  siRNA target sequence for H963 (NM_013308.2,1056-1074).
gtcgaacctgtgctttgat

SEQ ID NO: 240526 - DNA, 19 bp, Homo sapiens
  siRNA target sequence for H963 (NM_013308.2,1125-1143).
gacttttgcctcacctaaa

SEQ ID NO: 240527 - DNA, 19 bp, Homo sapiens
  siRNA target sequence for H963 (NM_013308.2,1127-1145).
cttttgcctcacctaaaga

SEQ ID NO: 240528 - DNA, 19 bp, Homo sapiens
  siRNA target sequence for HM74 (NM_006018.1,1138-1156).
ccaacctcaaataaccatt

SEQ ID NO: 240529 - DNA, 19 bp, Homo sapiens
  siRNA target sequence for HM74a (NM_177551.2,568-586).
cagaatggcggtgcaaatt

SEQ ID NO: 240530 - DNA, 19 bp, Homo sapiens
  siRNA target sequence for JCG1 (NM_153445.1,18-36).
caccactgtggtagagttt

SEQ ID NO: 240531 - DNA, 19 bp, Homo sapiens
  siRNA target sequence for JCG1 (NM_153445.1,21-39).
cactgtggtagagtttact

SEQ ID NO: 240532 - DNA, 19 bp, Homo sapiens
  siRNA target sequence for JCG1 (NM_153445.1,23-41).
ctgtggtagagtttactct

SEQ ID NO: 240533 - DNA, 19 bp, Homo sapiens
  siRNA target sequence for JCG1 (NM_153445.1,109-127).
gtcaccttaatgggtaata

SEQ ID NO: 240534 - DNA, 19 bp, Homo sapiens
  siRNA target sequence for JCG1 (NM_153445.1,294-312).
ggcccagctctgttctgta

SEQ ID NO: 240535 - DNA, 19 bp, Homo sapiens
  siRNA target sequence for JCG1 (NM_153445.1,416-434).
gagtctgcatcatcttagt

SEQ ID NO: 240536 - DNA, 19 bp, Homo sapiens
  siRNA target sequence for JCG1 (NM_153445.1,451-469).
ggtggatgtgtgaatgctt

SEQ ID NO: 240537 - DNA, 19 bp, Homo sapiens
  siRNA target sequence for JCG1 (NM_153445.1,473-491).
cattcattggctgcttatt

SEQ ID NO: 240538 - DNA, 19 bp, Homo sapiens
  siRNA target sequence for JCG1 (NM_153445.1,536-554).
gtgactattcaccactttt

SEQ ID NO: 240539 - DNA, 19 bp, Homo sapiens
  siRNA target sequence for JCG1 (NM_153445.1,562-580).
gcttgttcccatgatttta

SEQ ID NO: 240540 - DNA, 19 bp, Homo sapiens
  siRNA target sequence for JCG1 (NM_153445.1,635-653).
gtgtcatagccatatccta

SEQ ID NO: 240541 - DNA, 19 bp, Homo sapiens
  siRNA target sequence for JCG1 (NM_153445.1,644-662).
ccatatcctacatctatat

SEQ ID NO: 240542 - DNA, 19 bp, Homo sapiens
  siRNA target sequence for JCG1 (NM_153445.1,908-926).
gagagcttagaataaaaat

SEQ ID NO: 240543 - DNA, 19 bp, Homo sapiens
  siRNA target sequence for JCG3 (NM_153444.1,10-28).
ctgaaggacgggaatcaca

SEQ ID NO: 240544 - DNA, 19 bp, Homo sapiens
  siRNA target sequence for JCG3 (NM_153444.1,34-52).
ctgacggggttcatcctat

SEQ ID NO: 240545 - DNA, 19 bp, Homo sapiens
  siRNA target sequence for JCG3 (NM_153444.1,56-74).
gcttaacagatgatccaat

SEQ ID NO: 240546 - DNA, 19 bp, Homo sapiens
  siRNA target sequence for JCG3 (NM_153444.1,82-100).
gtcatcctcttcatgatca

SEQ ID NO: 240547 - DNA, 19 bp, Homo sapiens
  siRNA target sequence for JCG3 (NM_153444.1,96-114).
gatcatcctatctggtaat

SEQ ID NO: 240548 - DNA, 19 bp, Homo sapiens
  siRNA target sequence for JCG3 (NM_153444.1,107-125).
ctggtaatctcagcataat

SEQ ID NO: 240549 - DNA, 19 bp, Homo sapiens
  siRNA target sequence for JCG3 (NM_153444.1,146-164).
ctcagctccatcatcctat

SEQ ID NO: 240550 - DNA, 19 bp, Homo sapiens
  siRNA target sequence for JCG3 (NM_153444.1,193-211).
gctgacatggcctattcat

SEQ ID NO: 240551 - DNA, 19 bp, Homo sapiens
  siRNA target sequence for JCG3 (NM_153444.1,196-214).
gacatggcctattcatctt

SEQ ID NO: 240552 - DNA, 19 bp, Homo sapiens
  siRNA target sequence for JCG3 (NM_153444.1,221-239).
cacccaacatgcttgtaaa

SEQ ID NO: 240553 - DNA, 19 bp, Homo sapiens
  siRNA target sequence for JCG3 (NM_153444.1,410-428).
gtgtccagctactcttagt

SEQ ID NO: 240554 - DNA, 19 bp, Homo sapiens
  siRNA target sequence for JCG3 (NM_153444.1,414-432).
ccagctactcttagtagtt

SEQ ID NO: 240555 - DNA, 19 bp, Homo sapiens
  siRNA target sequence for JCG3 (NM_153444.1,435-453).
catagctggttttctcatt

SEQ ID NO: 240556 - DNA, 19 bp, Homo sapiens
  siRNA target sequence for JCG3 (NM_153444.1,631-649).
gccgtctgctacatctata

SEQ ID NO: 240557 - DNA, 19 bp, Homo sapiens
  siRNA target sequence for JCG3 (NM_153444.1,632-650).
ccgtctgctacatctatat

SEQ ID NO: 240558 - DNA, 19 bp, Homo sapiens
  siRNA target sequence for JCG3 (NM_153444.1,766-784).
gtgatgcccaattttagct

SEQ ID NO: 240559 - DNA, 19 bp, Homo sapiens
  siRNA target sequence for JCG3 (NM_153444.1,772-790).
cccaattttagctactcaa

SEQ ID NO: 240560 - DNA, 19 bp, Homo sapiens
  siRNA target sequence for JCG3 (NM_153444.1,922-940).
catgatgcttgttatttta

SEQ ID NO: 240561 - DNA, 19 bp, Homo sapiens
  siRNA target sequence for JCG6 (NM_178168.1,813-831).
caagaagttgttatcatta

SEQ ID NO: 240562 - DNA, 19 bp, Homo sapiens
  siRNA target sequence for LGR6 (NM_021636.1,94-112).
ccaaggttgacacttgttt

SEQ ID NO: 240563 - DNA, 19 bp, Homo sapiens
  siRNA target sequence for LGR6 (NM_021636.1,99-117).
gttgacacttgtttgtcaa

SEQ ID NO: 240564 - DNA, 19 bp, Homo sapiens
  siRNA target sequence for LGR6 (NM_021636.1,113-131).
gtcaagtgtcaataatcat

SEQ ID NO: 240565 - DNA, 19 bp, Homo sapiens
  siRNA target sequence for LGR6 (NM_021636.1,115-133).
caagtgtcaataatcatct

SEQ ID NO: 240566 - DNA, 19 bp, Homo sapiens
  siRNA target sequence for LGR6 (NM_021636.1,461-479).
ctgtcagggccctcaacaa

SEQ ID NO: 240567 - DNA, 19 bp, Homo sapiens
  siRNA target sequence for LGR6 (NM_021636.1,560-578).
gccttgtggtgctgcattt

SEQ ID NO: 240568 - DNA, 19 bp, Homo sapiens
  siRNA target sequence for LGR6 (NM_021636.1,565-583).
gtggtgctgcatttgcata

SEQ ID NO: 240569 - DNA, 19 bp, Homo sapiens
  siRNA target sequence for LGR6 (NM_021636.1,706-724).
caggaactggggttccata

SEQ ID NO: 240570 - DNA, 19 bp, Homo sapiens
  siRNA target sequence for LGR6 (NM_021636.1,709-727).
gaactggggttccataaca

SEQ ID NO: 240571 - DNA, 19 bp, Homo sapiens
  siRNA target sequence for LGR6 (NM_021636.1,712-730).
ctggggttccataacaaca

SEQ ID NO: 240572 - DNA, 19 bp, Homo sapiens
  siRNA target sequence for LGR6 (NM_021636.1,716-734).
ggttccataacaacaacat

SEQ ID NO: 240573 - DNA, 19 bp, Homo sapiens
  siRNA target sequence for LGR6 (NM_021636.1,772-790).
ctgctacagacgatacact

SEQ ID NO: 240574 - DNA, 19 bp, Homo sapiens
  siRNA target sequence for LGR6 (NM_021636.1,774-792).
gctacagacgatacacttt

SEQ ID NO: 240575 - DNA, 19 bp, Homo sapiens
  siRNA target sequence for LGR6 (NM_021636.1,775-793).
ctacagacgatacactttt

SEQ ID NO: 240576 - DNA, 19 bp, Homo sapiens
  siRNA target sequence for LGR6 (NM_021636.1,782-800).
cgatacacttttatgataa

SEQ ID NO: 240577 - DNA, 19 bp, Homo sapiens
  siRNA target sequence for LGR6 (NM_021636.1,841-859).
cctaaactccacacactat

SEQ ID NO: 240578 - DNA, 19 bp, Homo sapiens
  siRNA target sequence for LGR6 (NM_021636.1,999-1017).
ggaactgtctcacaatcaa

SEQ ID NO: 240579 - DNA, 19 bp, Homo sapiens
  siRNA target sequence for LGR6 (NM_021636.1,1080-1098).
ccgcatctgggaaattgga

SEQ ID NO: 240580 - DNA, 19 bp, Homo sapiens
  siRNA target sequence for LGR6 (NM_021636.1,2173-2191).
ggtgcctacatcaaactgt

SEQ ID NO: 240581 - DNA, 19 bp, Homo sapiens
  siRNA target sequence for LGR6 (NM_021636.1,2508-2526).
gaagagctcctgtgattct

SEQ ID NO: 240582 - DNA, 19 bp, Homo sapiens
  siRNA target sequence for LGR6 (NM_021636.1,2549-2567).
ctgatgtggatctcattct

SEQ ID NO: 240583 - DNA, 19 bp, Homo sapiens
  siRNA target sequence for LGR7 (NM_021634.1,59-77).
ggggtggacaggatgtcaa

SEQ ID NO: 240584 - DNA, 19 bp, Homo sapiens
  siRNA target sequence for LGR7 (NM_021634.1,125-143).
ctcagctcctgcactgtaa

SEQ ID NO: 240585 - DNA, 19 bp, Homo sapiens
  siRNA target sequence for LGR7 (NM_021634.1,334-352).
gactgtgatgaaaccaatt

SEQ ID NO: 240586 - DNA, 19 bp, Homo sapiens
  siRNA target sequence for LGR7 (NM_021634.1,361-379).
gttccatcggtttcttcaa

SEQ ID NO: 240587 - DNA, 19 bp, Homo sapiens
  siRNA target sequence for LGR7 (NM_021634.1,365-383).
catcggtttcttcaaatgt

SEQ ID NO: 240588 - DNA, 19 bp, Homo sapiens
  siRNA target sequence for LGR7 (NM_021634.1,393-411).
gtcacttcagtggaactta

SEQ ID NO: 240589 - DNA, 19 bp, Homo sapiens
  siRNA target sequence for LGR7 (NM_021634.1,471-489).
gcaaaacaataagattaca

SEQ ID NO: 240590 - DNA, 19 bp, Homo sapiens
  siRNA target sequence for LGR7 (NM_021634.1,491-509).
ccatctccatctatgcttt

SEQ ID NO: 240591 - DNA, 19 bp, Homo sapiens
  siRNA target sequence for LGR7 (NM_021634.1,514-532).
ggactgaatagccttacta

SEQ ID NO: 240592 - DNA, 19 bp, Homo sapiens
  siRNA target sequence for LGR7 (NM_021634.1,515-533).
gactgaatagccttactaa

SEQ ID NO: 240593 - DNA, 19 bp, Homo sapiens
  siRNA target sequence for LGR7 (NM_021634.1,524-542).
gccttactaaactgtatct

SEQ ID NO: 240594 - DNA, 19 bp, Homo sapiens
  siRNA target sequence for LGR7 (NM_021634.1,526-544).
cttactaaactgtatctca

SEQ ID NO: 240595 - DNA, 19 bp, Homo sapiens
  siRNA target sequence for LGR7 (NM_021634.1,564-582).
cctgaagccgggtgttttt

SEQ ID NO: 240596 - DNA, 19 bp, Homo sapiens
  siRNA target sequence for LGR7 (NM_021634.1,567-585).
gaagccgggtgtttttgaa

SEQ ID NO: 240597 - DNA, 19 bp, Homo sapiens
  siRNA target sequence for LGR7 (NM_021634.1,570-588).
gccgggtgtttttgaagat

SEQ ID NO: 240598 - DNA, 19 bp, Homo sapiens
  siRNA target sequence for LGR7 (NM_021634.1,572-590).
cgggtgtttttgaagatct

SEQ ID NO: 240599 - DNA, 19 bp, Homo sapiens
  siRNA target sequence for LGR7 (NM_021634.1,586-604).
gatcttcacagactagaat

SEQ ID NO: 240600 - DNA, 19 bp, Homo sapiens
  siRNA target sequence for LGR7 (NM_021634.1,596-614).
gactagaatggctgataat

SEQ ID NO: 240601 - DNA, 19 bp, Homo sapiens
  siRNA target sequence for LGR7 (NM_021634.1,635-653).
gaatttccccaccaacatt

SEQ ID NO: 240602 - DNA, 19 bp, Homo sapiens
  siRNA target sequence for LGR7 (NM_021634.1,647-665).
caacattttatggactaaa

SEQ ID NO: 240603 - DNA, 19 bp, Homo sapiens
  siRNA target sequence for LGR7 (NM_021634.1,702-720).
cacccgtttacctgataaa

SEQ ID NO: 240604 - DNA, 19 bp, Homo sapiens
  siRNA target sequence for LGR7 (NM_021634.1,705-723).
ccgtttacctgataaacct

SEQ ID NO: 240605 - DNA, 19 bp, Homo sapiens
  siRNA target sequence for LGR7 (NM_021634.1,733-751).
cacatgccaagactacatt

SEQ ID NO: 240606 - DNA, 19 bp, Homo sapiens
  siRNA target sequence for LGR7 (NM_021634.1,763-781).
gaaggcaaccatatccata

SEQ ID NO: 240607 - DNA, 19 bp, Homo sapiens
  siRNA target sequence for LGR7 (NM_021634.1,766-784).
ggcaaccatatccataatt

SEQ ID NO: 240608 - DNA, 19 bp, Homo sapiens
  siRNA target sequence for LGR7 (NM_021634.1,767-785).
gcaaccatatccataattt

SEQ ID NO: 240609 - DNA, 19 bp, Homo sapiens
  siRNA target sequence for LGR7 (NM_021634.1,768-786).
caaccatatccataattta

SEQ ID NO: 240610 - DNA, 19 bp, Homo sapiens
  siRNA target sequence for LGR7 (NM_021634.1,810-828).
cagtaatttaactgtttta

SEQ ID NO: 240611 - DNA, 19 bp, Homo sapiens
  siRNA target sequence for LGR7 (NM_021634.1,911-929).
gtaataagattgaaaatct

SEQ ID NO: 240612 - DNA, 19 bp, Homo sapiens
  siRNA target sequence for LGR7 (NM_021634.1,928-946).
cttccaccgcttatattca

SEQ ID NO: 240613 - DNA, 19 bp, Homo sapiens
  siRNA target sequence for LGR7 (NM_021634.1,957-975).
ggagctgtcacaattgaat

SEQ ID NO: 240614 - DNA, 19 bp, Homo sapiens
  siRNA target sequence for LGR7 (NM_021634.1,960-978).
gctgtcacaattgaatctt

SEQ ID NO: 240615 - DNA, 19 bp, Homo sapiens
  siRNA target sequence for LGR7 (NM_021634.1,961-979).
ctgtcacaattgaatcttt

SEQ ID NO: 240616 - DNA, 19 bp, Homo sapiens
  siRNA target sequence for LGR7 (NM_021634.1,1048-1066).
ctagaagggattgaaattt

SEQ ID NO: 240617 - DNA, 19 bp, Homo sapiens
  siRNA target sequence for LGR7 (NM_021634.1,1074-1092).
ccaacaaaggatgtttaga

SEQ ID NO: 240618 - DNA, 19 bp, Homo sapiens
  siRNA target sequence for LGR7 (NM_021634.1,1082-1100).
ggatgtttagacctcttat

SEQ ID NO: 240619 - DNA, 19 bp, Homo sapiens
  siRNA target sequence for LGR7 (NM_021634.1,1086-1104).
gtttagacctcttatgaat

SEQ ID NO: 240620 - DNA, 19 bp, Homo sapiens
  siRNA target sequence for LGR7 (NM_021634.1,1190-1208).
catctctagagaatctctt

SEQ ID NO: 240621 - DNA, 19 bp, Homo sapiens
  siRNA target sequence for LGR7 (NM_021634.1,1200-1218).
gaatctcttggcaagcatt

SEQ ID NO: 240622 - DNA, 19 bp, Homo sapiens
  siRNA target sequence for LGR7 (NM_021634.1,1215-1233).
cattattcagagagtattt

SEQ ID NO: 240623 - DNA, 19 bp, Homo sapiens
  siRNA target sequence for LGR7 (NM_021634.1,1228-1246).
gtatttgtctgggttgtat

SEQ ID NO: 240624 - DNA, 19 bp, Homo sapiens
  siRNA target sequence for LGR7 (NM_021634.1,1317-1335).
gtatgccatgtcaatcatt

SEQ ID NO: 240625 - DNA, 19 bp, Homo sapiens
  siRNA target sequence for LGR7 (NM_021634.1,1343-1361).
gctgtgccgactgcttaat

SEQ ID NO: 240626 - DNA, 19 bp, Homo sapiens
  siRNA target sequence for LGR7 (NM_021634.1,1406-1424).
gtggagaatacaataagca

SEQ ID NO: 240627 - DNA, 19 bp, Homo sapiens
  siRNA target sequence for LGR7 (NM_021634.1,1454-1472).
gtcagcttgtaggatcttt

SEQ ID NO: 240628 - DNA, 19 bp, Homo sapiens
  siRNA target sequence for LGR7 (NM_021634.1,1465-1483).
ggatctttggccattctgt

SEQ ID NO: 240629 - DNA, 19 bp, Homo sapiens
  siRNA target sequence for LGR7 (NM_021634.1,1482-1500).
gtccacagaagtatcagtt

SEQ ID NO: 240630 - DNA, 19 bp, Homo sapiens
  siRNA target sequence for LGR7 (NM_021634.1,1580-1598).
gaacaattacagttctgat

SEQ ID NO: 240631 - DNA, 19 bp, Homo sapiens
  siRNA target sequence for LGR7 (NM_021634.1,1636-1654).
ccattgagcaataaggaat

SEQ ID NO: 240632 - DNA, 19 bp, Homo sapiens
  siRNA target sequence for LGR7 (NM_021634.1,1673-1691).
gcaccaatggagtatgctt

SEQ ID NO: 240633 - DNA, 19 bp, Homo sapiens
  siRNA target sequence for LGR7 (NM_021634.1,1688-1706).
gcttccctcttcattcaga

SEQ ID NO: 240634 - DNA, 19 bp, Homo sapiens
  siRNA target sequence for LGR7 (NM_021634.1,1744-1762).
gcaatttttcttggtatta

SEQ ID NO: 240635 - DNA, 19 bp, Homo sapiens
  siRNA target sequence for LGR7 (NM_021634.1,1767-1785).
ggccgcatttatcatcata

SEQ ID NO: 240636 - DNA, 19 bp, Homo sapiens
  siRNA target sequence for LGR7 (NM_021634.1,1769-1787).
ccgcatttatcatcatagt

SEQ ID NO: 240637 - DNA, 19 bp, Homo sapiens
  siRNA target sequence for LGR7 (NM_021634.1,1771-1789).
gcatttatcatcatagttt

SEQ ID NO: 240638 - DNA, 19 bp, Homo sapiens
  siRNA target sequence for LGR7 (NM_021634.1,1872-1890).
gatccttgccaaacgtttt

SEQ ID NO: 240639 - DNA, 19 bp, Homo sapiens
  siRNA target sequence for LGR7 (NM_021634.1,1876-1894).
cttgccaaacgttttttct

SEQ ID NO: 240640 - DNA, 19 bp, Homo sapiens
  siRNA target sequence for LGR7 (NM_021634.1,1879-1897).
gccaaacgttttttcttta

SEQ ID NO: 240641 - DNA, 19 bp, Homo sapiens
  siRNA target sequence for LGR7 (NM_021634.1,1952-1970).
cactgcttcaggtagaaat

SEQ ID NO: 240642 - DNA, 19 bp, Homo sapiens
  siRNA target sequence for LGR7 (NM_021634.1,1956-1974).
gcttcaggtagaaatacca

SEQ ID NO: 240643 - DNA, 19 bp, Homo sapiens
  siRNA target sequence for LGR7 (NM_021634.1,1966-1984).
gaaataccaggtaccataa

SEQ ID NO: 240644 - DNA, 19 bp, Homo sapiens
  siRNA target sequence for LGR7 (NM_021634.1,1988-2006).
cttgggtagtgatttttat

SEQ ID NO: 240645 - DNA, 19 bp, Homo sapiens
  siRNA target sequence for LGR7 (NM_021634.1,2051-2069).
ccacaagaccatttaaaga

SEQ ID NO: 240646 - DNA, 19 bp, Homo sapiens
  siRNA target sequence for LGR7 (NM_021634.1,2057-2075).
gaccatttaaagaaatgat

SEQ ID NO: 240647 - DNA, 19 bp, Homo sapiens
  siRNA target sequence for LGR7 (NM_021634.1,2080-2098).
cggttttggtataactaca

SEQ ID NO: 240648 - DNA, 19 bp, Homo sapiens
  siRNA target sequence for LGR7 (NM_021634.1,2088-2106).
gtataactacagacaaaga

SEQ ID NO: 240649 - DNA, 19 bp, Homo sapiens
  siRNA target sequence for LGR7 (NM_021634.1,2147-2165).
cattcatctgggtggaaat

SEQ ID NO: 240650 - DNA, 19 bp, Homo sapiens
  siRNA target sequence for LGR7 (NM_021634.1,2178-2196).
ggagatgccacctgagtta

SEQ ID NO: 240651 - DNA, 19 bp, Homo sapiens
  siRNA target sequence for LGR7 (NM_021634.1,2179-2197).
gagatgccacctgagttaa

SEQ ID NO: 240652 - DNA, 19 bp, Homo sapiens
  siRNA target sequence for LGR7 (NM_021634.1,2245-2263).
caatcaacgagactcaatt

SEQ ID NO: 240653 - DNA, 19 bp, Homo sapiens
  siRNA target sequence for LGR7 (NM_021634.1,2249-2267).
caacgagactcaattccta

SEQ ID NO: 240654 - DNA, 19 bp, Homo sapiens
  siRNA target sequence for LGR7 (NM_021634.1,2253-2271).
gagactcaattcctattca

SEQ ID NO: 240655 - DNA, 19 bp, Homo sapiens
  siRNA target sequence for LHCGR (NM_000233.1,155-173).
cggtctcactcgactatca

SEQ ID NO: 240656 - DNA, 19 bp, Homo sapiens
  siRNA target sequence for LHCGR (NM_000233.1,157-175).
gtctcactcgactatcact

SEQ ID NO: 240657 - DNA, 19 bp, Homo sapiens
  siRNA target sequence for LHCGR (NM_000233.1,219-237).
ggacttaatgaggtcataa

SEQ ID NO: 240658 - DNA, 19 bp, Homo sapiens
  siRNA target sequence for LHCGR (NM_000233.1,291-309).
gacaacctcctcaatttgt

SEQ ID NO: 240659 - DNA, 19 bp, Homo sapiens
  siRNA target sequence for LHCGR (NM_000233.1,293-311).
caacctcctcaatttgtct

SEQ ID NO: 240660 - DNA, 19 bp, Homo sapiens
  siRNA target sequence for LHCGR (NM_000233.1,320-338).
gatccagaacaccaaaaat

SEQ ID NO: 240661 - DNA, 19 bp, Homo sapiens
  siRNA target sequence for LHCGR (NM_000233.1,324-342).
cagaacaccaaaaatctga

SEQ ID NO: 240662 - DNA, 19 bp, Homo sapiens
  siRNA target sequence for LHCGR (NM_000233.1,347-365).
cattgagcccggagcattt

SEQ ID NO: 240663 - DNA, 19 bp, Homo sapiens
  siRNA target sequence for LHCGR (NM_000233.1,355-373).
ccggagcatttataaatct

SEQ ID NO: 240664 - DNA, 19 bp, Homo sapiens
  siRNA target sequence for LHCGR (NM_000233.1,356-374).
cggagcatttataaatctt

SEQ ID NO: 240665 - DNA, 19 bp, Homo sapiens
  siRNA target sequence for LHCGR (NM_000233.1,389-407).
cttgagcatctgtaacaca

SEQ ID NO: 240666 - DNA, 19 bp, Homo sapiens
  siRNA target sequence for LHCGR (NM_000233.1,440-458).
cttctcctctgaatcaaat

SEQ ID NO: 240667 - DNA, 19 bp, Homo sapiens
  siRNA target sequence for LHCGR (NM_000233.1,511-529).
cttttcaagggatgaataa

SEQ ID NO: 240668 - DNA, 19 bp, Homo sapiens
  siRNA target sequence for LHCGR (NM_000233.1,516-534).
caagggatgaataatgaat

SEQ ID NO: 240669 - DNA, 19 bp, Homo sapiens
  siRNA target sequence for LHCGR (NM_000233.1,535-553).
ctgtaacactcaaactata

SEQ ID NO: 240670 - DNA, 19 bp, Homo sapiens
  siRNA target sequence for LHCGR (NM_000233.1,541-559).
cactcaaactatatggaaa

SEQ ID NO: 240671 - DNA, 19 bp, Homo sapiens
  siRNA target sequence for LHCGR (NM_000233.1,669-687).
gccacagggccgaaaacct

SEQ ID NO: 240672 - DNA, 19 bp, Homo sapiens
  siRNA target sequence for LHCGR (NM_000233.1,737-755).
gtccattcagaggctaatt

SEQ ID NO: 240673 - DNA, 19 bp, Homo sapiens
  siRNA target sequence for LHCGR (NM_000233.1,757-775).
ccacgtcatcctattctct

SEQ ID NO: 240674 - DNA, 19 bp, Homo sapiens
  siRNA target sequence for LHCGR (NM_000233.1,758-776).
cacgtcatcctattctcta

SEQ ID NO: 240675 - DNA, 19 bp, Homo sapiens
  siRNA target sequence for LHCGR (NM_000233.1,760-778).
cgtcatcctattctctaaa

SEQ ID NO: 240676 - DNA, 19 bp, Homo sapiens
  siRNA target sequence for LHCGR (NM_000233.1,785-803).
gccatcaagagaaacattt

SEQ ID NO: 240677 - DNA, 19 bp, Homo sapiens
  siRNA target sequence for LHCGR (NM_000233.1,793-811).
gagaaacatttgtcaatct

SEQ ID NO: 240678 - DNA, 19 bp, Homo sapiens
  siRNA target sequence for LHCGR (NM_000233.1,1098-1116).
gtcctgatttggctgatta

SEQ ID NO: 240679 - DNA, 19 bp, Homo sapiens
  siRNA target sequence for LHCGR (NM_000233.1,1100-1118).
cctgatttggctgattaat

SEQ ID NO: 240680 - DNA, 19 bp, Homo sapiens
  siRNA target sequence for LHCGR (NM_000233.1,1101-1119).
ctgatttggctgattaata

SEQ ID NO: 240681 - DNA, 19 bp, Homo sapiens
  siRNA target sequence for LHCGR (NM_000233.1,1163-1181).
gacaagtcgttacaaactt

SEQ ID NO: 240682 - DNA, 19 bp, Homo sapiens
  siRNA target sequence for LHCGR (NM_000233.1,1168-1186).
gtcgttacaaacttacagt

SEQ ID NO: 240683 - DNA, 19 bp, Homo sapiens
  siRNA target sequence for LHCGR (NM_000233.1,1248-1266).
ctcatagcctcagttgatt

SEQ ID NO: 240684 - DNA, 19 bp, Homo sapiens
  siRNA target sequence for LHCGR (NM_000233.1,1258-1276).
cagttgattcccaaaccaa

SEQ ID NO: 240685 - DNA, 19 bp, Homo sapiens
  siRNA target sequence for LHCGR (NM_000233.1,1273-1291).
ccaagggccagtactataa

SEQ ID NO: 240686 - DNA, 19 bp, Homo sapiens
  siRNA target sequence for LHCGR (NM_000233.1,1277-1295).
gggccagtactataaccat

SEQ ID NO: 240687 - DNA, 19 bp, Homo sapiens
  siRNA target sequence for LHCGR (NM_000233.1,1343-1361).
cactgtattcgcaagtgaa

SEQ ID NO: 240688 - DNA, 19 bp, Homo sapiens
  siRNA target sequence for LHCGR (NM_000233.1,1347-1365).
gtattcgcaagtgaacttt

SEQ ID NO: 240689 - DNA, 19 bp, Homo sapiens
  siRNA target sequence for LHCGR (NM_000233.1,1382-1400).
cgtcatcactctagaaaga

SEQ ID NO: 240690 - DNA, 19 bp, Homo sapiens
  siRNA target sequence for LHCGR (NM_000233.1,1406-1424).
caccatcacctatgctatt

SEQ ID NO: 240691 - DNA, 19 bp, Homo sapiens
  siRNA target sequence for LHCGR (NM_000233.1,1420-1438).
ctattcacctggaccaaaa

SEQ ID NO: 240692 - DNA, 19 bp, Homo sapiens
  siRNA target sequence for LHCGR (NM_000233.1,1433-1451).
ccaaaagctgcgattaaga

SEQ ID NO: 240693 - DNA, 19 bp, Homo sapiens
  siRNA target sequence for LHCGR (NM_000233.1,1450-1468).
gacatgccattctgattat

SEQ ID NO: 240694 - DNA, 19 bp, Homo sapiens
  siRNA target sequence for LHCGR (NM_000233.1,1484-1502).
cttttcttctctaattgct

SEQ ID NO: 240695 - DNA, 19 bp, Homo sapiens
  siRNA target sequence for LHCGR (NM_000233.1,1489-1507).
cttctctaattgctatgtt

SEQ ID NO: 240696 - DNA, 19 bp, Homo sapiens
  siRNA target sequence for LHCGR (NM_000233.1,1512-1530).
cttgtcggtgtcagcaatt

SEQ ID NO: 240697 - DNA, 19 bp, Homo sapiens
  siRNA target sequence for LHCGR (NM_000233.1,1515-1533).
gtcggtgtcagcaattaca

SEQ ID NO: 240698 - DNA, 19 bp, Homo sapiens
  siRNA target sequence for LHCGR (NM_000233.1,1519-1537).
gtgtcagcaattacatgaa

SEQ ID NO: 240699 - DNA, 19 bp, Homo sapiens
  siRNA target sequence for LHCGR (NM_000233.1,1575-1593).
ctctcacaagtctatatat

SEQ ID NO: 240700 - DNA, 19 bp, Homo sapiens
  siRNA target sequence for LHCGR (NM_000233.1,1577-1595).
ctcacaagtctatatatta

SEQ ID NO: 240701 - DNA, 19 bp, Homo sapiens
  siRNA target sequence for LHCGR (NM_000233.1,1581-1599).
caagtctatatattaacca

SEQ ID NO: 240702 - DNA, 19 bp, Homo sapiens
  siRNA target sequence for LHCGR (NM_000233.1,1663-1681).
cagttcgaaacccagaatt

SEQ ID NO: 240703 - DNA, 19 bp, Homo sapiens
  siRNA target sequence for LHCGR (NM_000233.1,1665-1683).
gttcgaaacccagaattaa

SEQ ID NO: 240704 - DNA, 19 bp, Homo sapiens
  siRNA target sequence for LHCGR (NM_000233.1,1677-1695).
gaattaatggctaccaata

SEQ ID NO: 240705 - DNA, 19 bp, Homo sapiens
  siRNA target sequence for LHCGR (NM_000233.1,1685-1703).
ggctaccaataaagataca

SEQ ID NO: 240706 - DNA, 19 bp, Homo sapiens
  siRNA target sequence for LHCGR (NM_000233.1,1728-1746).
ctcatcttcaccgatttca

SEQ ID NO: 240707 - DNA, 19 bp, Homo sapiens
  siRNA target sequence for LHCGR (NM_000233.1,1775-1793).
catctcagctgccttcaaa

SEQ ID NO: 240708 - DNA, 19 bp, Homo sapiens
  siRNA target sequence for LHCGR (NM_000233.1,1786-1804).
ccttcaaagtacctcttat

SEQ ID NO: 240709 - DNA, 19 bp, Homo sapiens
  siRNA target sequence for LHCGR (NM_000233.1,1794-1812).
gtacctcttatcacagtaa

SEQ ID NO: 240710 - DNA, 19 bp, Homo sapiens
  siRNA target sequence for LHCGR (NM_000233.1,1809-1827).
gtaaccaactctaaagttt

SEQ ID NO: 240711 - DNA, 19 bp, Homo sapiens
  siRNA target sequence for LHCGR (NM_000233.1,1813-1831).
ccaactctaaagttttact

SEQ ID NO: 240712 - DNA, 19 bp, Homo sapiens
  siRNA target sequence for LHCGR (NM_000233.1,1872-1890).
ctgtatgcaatattcacta

SEQ ID NO: 240713 - DNA, 19 bp, Homo sapiens
  siRNA target sequence for LHCGR (NM_000233.1,1879-1897).
caatattcactaagacatt

SEQ ID NO: 240714 - DNA, 19 bp, Homo sapiens
  siRNA target sequence for LHCGR (NM_000233.1,1944-1962).
cgtcgggctgaactttata

SEQ ID NO: 240715 - DNA, 19 bp, Homo sapiens
  siRNA target sequence for LHCGR (NM_000233.1,2005-2023).
gcttcactggatcaaataa

SEQ ID NO: 240716 - DNA, 19 bp, Homo sapiens
  siRNA target sequence for MAS1L (NM_052967.1,4-22).
gtctgggggaaaatttgct

SEQ ID NO: 240717 - DNA, 19 bp, Homo sapiens
  siRNA target sequence for MAS1L (NM_052967.1,36-54).
ggctggatggacagtgttt

SEQ ID NO: 240718 - DNA, 19 bp, Homo sapiens
  siRNA target sequence for MAS1L (NM_052967.1,138-156).
gctctgtggcgtctttctt

SEQ ID NO: 240719 - DNA, 19 bp, Homo sapiens
  siRNA target sequence for MAS1L (NM_052967.1,165-183).
gacgaatgaaaccatacat

SEQ ID NO: 240720 - DNA, 19 bp, Homo sapiens
  siRNA target sequence for MAS1L (NM_052967.1,259-277).
ctctgtggggtcttattga

SEQ ID NO: 240721 - DNA, 19 bp, Homo sapiens
  siRNA target sequence for MAS1L (NM_052967.1,261-279).
ctgtggggtcttattgaat

SEQ ID NO: 240722 - DNA, 19 bp, Homo sapiens
  siRNA target sequence for MAS1L (NM_052967.1,314-332).
cgaatccctacatggtata

SEQ ID NO: 240723 - DNA, 19 bp, Homo sapiens
  siRNA target sequence for MAS1L (NM_052967.1,348-366).
cgctgctgacgtgatctat

SEQ ID NO: 240724 - DNA, 19 bp, Homo sapiens
  siRNA target sequence for MAS1L (NM_052967.1,350-368).
ctgctgacgtgatctatct

SEQ ID NO: 240725 - DNA, 19 bp, Homo sapiens
  siRNA target sequence for MAS1L (NM_052967.1,377-395).
cggcagtggggttcttaca

SEQ ID NO: 240726 - DNA, 19 bp, Homo sapiens
  siRNA target sequence for MAS1L (NM_052967.1,545-563).
gatgccaccgcccaaaata

SEQ ID NO: 240727 - DNA, 19 bp, Homo sapiens
  siRNA target sequence for MAS1L (NM_052967.1,553-571).
cgcccaaaatacacatcta

SEQ ID NO: 240728 - DNA, 19 bp, Homo sapiens
  siRNA target sequence for MAS1L (NM_052967.1,593-611).
ggggcctgcctttttgcat

SEQ ID NO: 240729 - DNA, 19 bp, Homo sapiens
  siRNA target sequence for MAS1L (NM_052967.1,600-618).
gcctttttgcatcaacata

SEQ ID NO: 240730 - DNA, 19 bp, Homo sapiens
  siRNA target sequence for MAS1L (NM_052967.1,602-620).
ctttttgcatcaacatagt

SEQ ID NO: 240731 - DNA, 19 bp, Homo sapiens
  siRNA target sequence for MAS1L (NM_052967.1,633-651).
cctaacttactggaaacat

SEQ ID NO: 240732 - DNA, 19 bp, Homo sapiens
  siRNA target sequence for MAS1L (NM_052967.1,725-743).
cgagtctgactctactcat

SEQ ID NO: 240733 - DNA, 19 bp, Homo sapiens
  siRNA target sequence for MAS1L (NM_052967.1,843-861).
cgtggcacccctcataaca

SEQ ID NO: 240734 - DNA, 19 bp, Homo sapiens
  siRNA target sequence for MAS1L (NM_052967.1,846-864).
ggcacccctcataacagat

SEQ ID NO: 240735 - DNA, 19 bp, Homo sapiens
  siRNA target sequence for MAS1L (NM_052967.1,877-895).
gtcaccacctcctatttaa

SEQ ID NO: 240736 - DNA, 19 bp, Homo sapiens
  siRNA target sequence for MAS1L (NM_052967.1,949-967).
gtggggagcctcagaaaga

SEQ ID NO: 240737 - DNA, 19 bp, Homo sapiens
  siRNA target sequence for MBC2 (NM_015292.1,204-222).
ctggcggtgctgacttcat

SEQ ID NO: 240738 - DNA, 19 bp, Homo sapiens
  siRNA target sequence for MBC2 (NM_015292.1,329-347).
ggtccgcgacgagaaagaa

SEQ ID NO: 240739 - DNA, 19 bp, Homo sapiens
  siRNA target sequence for MBC2 (NM_015292.1,395-413).
cactgcgaaaactctctat

SEQ ID NO: 240740 - DNA, 19 bp, Homo sapiens
  siRNA target sequence for MBC2 (NM_015292.1,399-417).
gcgaaaactctctatatga

SEQ ID NO: 240741 - DNA, 19 bp, Homo sapiens
  siRNA target sequence for MBC2 (NM_015292.1,401-419).
gaaaactctctatatgagt

SEQ ID NO: 240742 - DNA, 19 bp, Homo sapiens
  siRNA target sequence for MBC2 (NM_015292.1,445-463).
gcttcccagacgtggaaaa

SEQ ID NO: 240743 - DNA, 19 bp, Homo sapiens
  siRNA target sequence for MBC2 (NM_015292.1,501-519).
cccttcctgggccagtata

SEQ ID NO: 240744 - DNA, 19 bp, Homo sapiens
  siRNA target sequence for MBC2 (NM_015292.1,550-568).
cggctgttaggggatctaa

SEQ ID NO: 240745 - DNA, 19 bp, Homo sapiens
  siRNA target sequence for MBC2 (NM_015292.1,570-588).
ccccatctgcaaacattta

SEQ ID NO: 240746 - DNA, 19 bp, Homo sapiens
  siRNA target sequence for MBC2 (NM_015292.1,572-590).
ccatctgcaaacatttaca

SEQ ID NO: 240747 - DNA, 19 bp, Homo sapiens
  siRNA target sequence for MBC2 (NM_015292.1,700-718).
gtgatgtgcagattgatgt

SEQ ID NO: 240748 - DNA, 19 bp, Homo sapiens
  siRNA target sequence for MBC2 (NM_015292.1,772-790).
gcgttttgcgggtgatact

SEQ ID NO: 240749 - DNA, 19 bp, Homo sapiens
  siRNA target sequence for MBC2 (NM_015292.1,822-840).
ggggctgtgtcaatgttct

SEQ ID NO: 240750 - DNA, 19 bp, Homo sapiens
  siRNA target sequence for MBC2 (NM_015292.1,847-865).
gacgcccgaccctagacat

SEQ ID NO: 240751 - DNA, 19 bp, Homo sapiens
  siRNA target sequence for MBC2 (NM_015292.1,850-868).
gcccgaccctagacatcaa

SEQ ID NO: 240752 - DNA, 19 bp, Homo sapiens
  siRNA target sequence for MBC2 (NM_015292.1,852-870).
ccgaccctagacatcaact

SEQ ID NO: 240753 - DNA, 19 bp, Homo sapiens
  siRNA target sequence for MBC2 (NM_015292.1,1028-1046).
gcccaggggcattattcga

SEQ ID NO: 240754 - DNA, 19 bp, Homo sapiens
  siRNA target sequence for MBC2 (NM_015292.1,1029-1047).
cccaggggcattattcgaa

SEQ ID NO: 240755 - DNA, 19 bp, Homo sapiens
  siRNA target sequence for MBC2 (NM_015292.1,1030-1048).
ccaggggcattattcgaat

SEQ ID NO: 240756 - DNA, 19 bp, Homo sapiens
  siRNA target sequence for MBC2 (NM_015292.1,1031-1049).
caggggcattattcgaatt

SEQ ID NO: 240757 - DNA, 19 bp, Homo sapiens
  siRNA target sequence for MBC2 (NM_015292.1,1033-1051).
ggggcattattcgaattca

SEQ ID NO: 240758 - DNA, 19 bp, Homo sapiens
  siRNA target sequence for MBC2 (NM_015292.1,1073-1091).
gagttccaaggacaaatat

SEQ ID NO: 240759 - DNA, 19 bp, Homo sapiens
  siRNA target sequence for MBC2 (NM_015292.1,1075-1093).
gttccaaggacaaatatgt

SEQ ID NO: 240760 - DNA, 19 bp, Homo sapiens
  siRNA target sequence for MBC2 (NM_015292.1,1138-1156).
gtttgggtacccagacatt

SEQ ID NO: 240761 - DNA, 19 bp, Homo sapiens
  siRNA target sequence for MBC2 (NM_015292.1,1157-1175).
ctgcagtcgtgtcattgat

SEQ ID NO: 240762 - DNA, 19 bp, Homo sapiens
  siRNA target sequence for MBC2 (NM_015292.1,1159-1177).
gcagtcgtgtcattgatga

SEQ ID NO: 240763 - DNA, 19 bp, Homo sapiens
  siRNA target sequence for MBC2 (NM_015292.1,1160-1178).
cagtcgtgtcattgatgaa

SEQ ID NO: 240764 - DNA, 19 bp, Homo sapiens
  siRNA target sequence for MBC2 (NM_015292.1,1162-1180).
gtcgtgtcattgatgaaga

SEQ ID NO: 240765 - DNA, 19 bp, Homo sapiens
  siRNA target sequence for MBC2 (NM_015292.1,1259-1277).
cgacaaggatccagataaa

SEQ ID NO: 240766 - DNA, 19 bp, Homo sapiens
  siRNA target sequence for MBC2 (NM_015292.1,1475-1493).
gtcagctgccatcttagtt

SEQ ID NO: 240767 - DNA, 19 bp, Homo sapiens
  siRNA target sequence for MBC2 (NM_015292.1,1546-1564).
ccaaccctatggtacaact

SEQ ID NO: 240768 - DNA, 19 bp, Homo sapiens
  siRNA target sequence for MBC2 (NM_015292.1,1677-1695).
gtgcaagtgaaggatgatt

SEQ ID NO: 240769 - DNA, 19 bp, Homo sapiens
  siRNA target sequence for MBC2 (NM_015292.1,1807-1825).
gactctatatgaaactagt

SEQ ID NO: 240770 - DNA, 19 bp, Homo sapiens
  siRNA target sequence for MBC2 (NM_015292.1,1838-1856).
gtacttggattcatcagaa

SEQ ID NO: 240771 - DNA, 19 bp, Homo sapiens
  siRNA target sequence for MBC2 (NM_015292.1,1895-1913).
ggacgtggacagtgagaat

SEQ ID NO: 240772 - DNA, 19 bp, Homo sapiens
  siRNA target sequence for MBC2 (NM_015292.1,1992-2010).
gtgcttcggatccatgtat

SEQ ID NO: 240773 - DNA, 19 bp, Homo sapiens
  siRNA target sequence for MBC2 (NM_015292.1,1994-2012).
gcttcggatccatgtatta

SEQ ID NO: 240774 - DNA, 19 bp, Homo sapiens
  siRNA target sequence for MBC2 (NM_015292.1,2073-2091).
gacccctatgtcaaactaa

SEQ ID NO: 240775 - DNA, 19 bp, Homo sapiens
  siRNA target sequence for MBC2 (NM_015292.1,2076-2094).
ccctatgtcaaactaaagt

SEQ ID NO: 240776 - DNA, 19 bp, Homo sapiens
  siRNA target sequence for MBC2 (NM_015292.1,2077-2095).
cctatgtcaaactaaagtt

SEQ ID NO: 240777 - DNA, 19 bp, Homo sapiens
  siRNA target sequence for MBC2 (NM_015292.1,2107-2125).
gcttccggagccatgttgt

SEQ ID NO: 240778 - DNA, 19 bp, Homo sapiens
  siRNA target sequence for MBC2 (NM_015292.1,2258-2276).
gcgtctcaccacagtctta

SEQ ID NO: 240779 - DNA, 19 bp, Homo sapiens
  siRNA target sequence for MBC2 (NM_015292.1,2259-2277).
cgtctcaccacagtcttaa

SEQ ID NO: 240780 - DNA, 19 bp, Homo sapiens
  siRNA target sequence for MBC2 (NM_015292.1,2260-2278).
gtctcaccacagtcttaaa

SEQ ID NO: 240781 - DNA, 19 bp, Homo sapiens
  siRNA target sequence for MBC2 (NM_015292.1,2262-2280).
ctcaccacagtcttaaaca

SEQ ID NO: 240782 - DNA, 19 bp, Homo sapiens
  siRNA target sequence for MBC2 (NM_015292.1,2264-2282).
caccacagtcttaaacagt

SEQ ID NO: 240783 - DNA, 19 bp, Homo sapiens
  siRNA target sequence for MBC2 (NM_015292.1,2443-2461).
ccctgctatccatctatat

SEQ ID NO: 240784 - DNA, 19 bp, Homo sapiens
  siRNA target sequence for MBC2 (NM_015292.1,2529-2547).
gtgggagatagttctcata

SEQ ID NO: 240785 - DNA, 19 bp, Homo sapiens
  siRNA target sequence for MBC2 (NM_015292.1,2531-2549).
gggagatagttctcataaa

SEQ ID NO: 240786 - DNA, 19 bp, Homo sapiens
  siRNA target sequence for MBC2 (NM_015292.1,2555-2573).
gactatttcgcaaacttca

SEQ ID NO: 240787 - DNA, 19 bp, Homo sapiens
  siRNA target sequence for MBC2 (NM_015292.1,2661-2679).
ggcgtgctgggctcattat

SEQ ID NO: 240788 - DNA, 19 bp, Homo sapiens
  siRNA target sequence for MBC2 (NM_015292.1,2720-2738).
cttggaccgctggtttaca

SEQ ID NO: 240789 - DNA, 19 bp, Homo sapiens
  siRNA target sequence for MBC2 (NM_015292.1,2915-2933).
gcagcgcctaacacatgtt

SEQ ID NO: 240790 - DNA, 19 bp, Homo sapiens
  siRNA target sequence for MBC2 (NM_015292.1,2979-2997).
ctgactctgtggtactaca

SEQ ID NO: 240791 - DNA, 19 bp, Homo sapiens
  siRNA target sequence for MBC2 (NM_015292.1,3035-3053).
ccggtcccttcgacagaat

SEQ ID NO: 240792 - DNA, 19 bp, Homo sapiens
  siRNA target sequence for MBC2 (NM_015292.1,3145-3163).
ccctgagtcctgaatttaa

SEQ ID NO: 240793 - DNA, 19 bp, Homo sapiens
  siRNA target sequence for MBC2 (NM_015292.1,3219-3237).
gtctctgtcaagtctaatt

SEQ ID NO: 240794 - DNA, 19 bp, Homo sapiens
  siRNA target sequence for MGC21621 (NM_145015.2,569-587).
gcacgtttgccgactacat

SEQ ID NO: 240795 - DNA, 19 bp, Homo sapiens
  siRNA target sequence for MGC21621 (NM_145015.2,767-785).
cctgcctgcacaactactt

SEQ ID NO: 240796 - DNA, 19 bp, Homo sapiens
  siRNA target sequence for MGC21621 (NM_145015.2,990-1008).
ggtgtcctccatctactta

SEQ ID NO: 240797 - DNA, 19 bp, Homo sapiens
  siRNA target sequence for MGC24137 (NM_152430.1,173-191).
ccagtgctacatacttcat

SEQ ID NO: 240798 - DNA, 19 bp, Homo sapiens
  siRNA target sequence for MGC24137 (NM_152430.1,179-197).
ctacatacttcatcctaat

SEQ ID NO: 240799 - DNA, 19 bp, Homo sapiens
  siRNA target sequence for MGC24137 (NM_152430.1,249-267).
ctccctctaccttattgct

SEQ ID NO: 240800 - DNA, 19 bp, Homo sapiens
  siRNA target sequence for MGC24137 (NM_152430.1,265-283).
gctgtgctaggtaacttga

SEQ ID NO: 240801 - DNA, 19 bp, Homo sapiens
  siRNA target sequence for MGC24137 (NM_152430.1,268-286).
gtgctaggtaacttgacaa

SEQ ID NO: 240802 - DNA, 19 bp, Homo sapiens
  siRNA target sequence for MGC24137 (NM_152430.1,274-292).
ggtaacttgacaatcatct

SEQ ID NO: 240803 - DNA, 19 bp, Homo sapiens
  siRNA target sequence for MGC24137 (NM_152430.1,440-458).
cttgtctgctacagatgtt

SEQ ID NO: 240804 - DNA, 19 bp, Homo sapiens
  siRNA target sequence for MGC24137 (NM_152430.1,567-585).
gcctcgtgtcaccaaaatt

SEQ ID NO: 240805 - DNA, 19 bp, Homo sapiens
  siRNA target sequence for MGC24137 (NM_152430.1,652-670).
cccttctgccgctccaata

SEQ ID NO: 240806 - DNA, 19 bp, Homo sapiens
  siRNA target sequence for MGC24137 (NM_152430.1,657-675).
ctgccgctccaatatcctt

SEQ ID NO: 240807 - DNA, 19 bp, Homo sapiens
  siRNA target sequence for MGC24137 (NM_152430.1,887-905).
gtgctgtgttcatattcta

SEQ ID NO: 240808 - DNA, 19 bp, Homo sapiens
  siRNA target sequence for MGC24137 (NM_152430.1,972-990).
catcttggccaatatctat

SEQ ID NO: 240809 - DNA, 19 bp, Homo sapiens
  siRNA target sequence for MGC24137 (NM_152430.1,1055-1073).
gcatccttcgacttttcca

SEQ ID NO: 240810 - DNA, 19 bp, Homo sapiens
  siRNA target sequence for MGC26856 (NM_152779.1,87-105).
cttgggtctgtgtttggta

SEQ ID NO: 240811 - DNA, 19 bp, Homo sapiens
  siRNA target sequence for MGC26856 (NM_152779.1,178-196).
gaatggcgtggcaaagtca

SEQ ID NO: 240812 - DNA, 19 bp, Homo sapiens
  siRNA target sequence for MGC26856 (NM_152779.1,292-310).
gactgtttggataaatcat

SEQ ID NO: 240813 - DNA, 19 bp, Homo sapiens
  siRNA target sequence for MGC26856 (NM_152779.1,390-408).
cattacggcttggtataat

SEQ ID NO: 240814 - DNA, 19 bp, Homo sapiens
  siRNA target sequence for MGC26856 (NM_152779.1,402-420).
gtataatgaaacccaattt

SEQ ID NO: 240815 - DNA, 19 bp, Homo sapiens
  siRNA target sequence for MGC26856 (NM_152779.1,458-476).
gccattatacacagttagt

SEQ ID NO: 240816 - DNA, 19 bp, Homo sapiens
  siRNA target sequence for MGC26856 (NM_152779.1,459-477).
ccattatacacagttagtt

SEQ ID NO: 240817 - DNA, 19 bp, Homo sapiens
  siRNA target sequence for MGC26856 (NM_152779.1,471-489).
gttagtttgggccaattca

SEQ ID NO: 240818 - DNA, 19 bp, Homo sapiens
  siRNA target sequence for MGC26856 (NM_152779.1,479-497).
gggccaattcattttatgt

SEQ ID NO: 240819 - DNA, 19 bp, Homo sapiens
  siRNA target sequence for MGC26856 (NM_152779.1,542-560).
ctgcaatatttgtatgcaa

SEQ ID NO: 240820 - DNA, 19 bp, Homo sapiens
  siRNA target sequence for MGC26856 (NM_152779.1,572-590).
caggaaattttgcaaatat

SEQ ID NO: 240821 - DNA, 19 bp, Homo sapiens
  siRNA target sequence for MGC26856 (NM_152779.1,720-738).
cagcttaggttttcttctt

SEQ ID NO: 240822 - DNA, 19 bp, Homo sapiens
  siRNA target sequence for MGC40047 (NM_175911.2,391-409).
cccaaatcaaactggaata

SEQ ID NO: 240823 - DNA, 19 bp, Homo sapiens
  siRNA target sequence for MGC40047 (NM_175911.2,392-410).
ccaaatcaaactggaatat

SEQ ID NO: 240824 - DNA, 19 bp, Homo sapiens
  siRNA target sequence for MGC40047 (NM_175911.2,454-472).
gggtaactcggccatgatt

SEQ ID NO: 240825 - DNA, 19 bp, Homo sapiens
  siRNA target sequence for MGC40047 (NM_175911.2,456-474).
gtaactcggccatgattca

SEQ ID NO: 240826 - DNA, 19 bp, Homo sapiens
  siRNA target sequence for MGC40047 (NM_175911.2,534-552).
cccttatggacctgatgta

SEQ ID NO: 240827 - DNA, 19 bp, Homo sapiens
  siRNA target sequence for MGC40047 (NM_175911.2,621-639).
gatgtggtgtgcaaagctt

SEQ ID NO: 240828 - DNA, 19 bp, Homo sapiens
  siRNA target sequence for MGC40047 (NM_175911.2,649-667).
gaccatggcgtgttctgaa

SEQ ID NO: 240829 - DNA, 19 bp, Homo sapiens
  siRNA target sequence for MGC40047 (NM_175911.2,712-730).
ctgccactctctctattat

SEQ ID NO: 240830 - DNA, 19 bp, Homo sapiens
  siRNA target sequence for MGC40047 (NM_175911.2,715-733).
ccactctctctattatcct

SEQ ID NO: 240831 - DNA, 19 bp, Homo sapiens
  siRNA target sequence for MGC40047 (NM_175911.2,716-734).
cactctctctattatccta

SEQ ID NO: 240832 - DNA, 19 bp, Homo sapiens
  siRNA target sequence for MGC40047 (NM_175911.2,731-749).
cctatccgcatgagtaaaa

SEQ ID NO: 240833 - DNA, 19 bp, Homo sapiens
  siRNA target sequence for MGC40047 (NM_175911.2,732-750).
ctatccgcatgagtaaaat

SEQ ID NO: 240834 - DNA, 19 bp, Homo sapiens
  siRNA target sequence for MGC40047 (NM_175911.2,840-858).
gcaggtctagggctattga

SEQ ID NO: 240835 - DNA, 19 bp, Homo sapiens
  siRNA target sequence for MGC40047 (NM_175911.2,846-864).
ctagggctattgaccattt

SEQ ID NO: 240836 - DNA, 19 bp, Homo sapiens
  siRNA target sequence for MGC40047 (NM_175911.2,905-923).
gatacttgggtctatgaat

SEQ ID NO: 240837 - DNA, 19 bp, Homo sapiens
  siRNA target sequence for MGC40047 (NM_175911.2,909-927).
cttgggtctatgaatatat

SEQ ID NO: 240838 - DNA, 19 bp, Homo sapiens
  siRNA target sequence for MGC40047 (NM_175911.2,912-930).
gggtctatgaatatatggt

SEQ ID NO: 240839 - DNA, 19 bp, Homo sapiens
  siRNA target sequence for MGC40047 (NM_175911.2,913-931).
ggtctatgaatatatggtt

SEQ ID NO: 240840 - DNA, 19 bp, Homo sapiens
  siRNA target sequence for MGC40047 (NM_175911.2,962-980).
cctttcattggcatcactt

SEQ ID NO: 240841 - DNA, 19 bp, Homo sapiens
  siRNA target sequence for MGC40047 (NM_175911.2,998-1016).
ctatttgctgtctatcata

SEQ ID NO: 240842 - DNA, 19 bp, Homo sapiens
  siRNA target sequence for MGC40047 (NM_175911.2,1062-1080).
cacatttaactgtagtgat

SEQ ID NO: 240843 - DNA, 19 bp, Homo sapiens
  siRNA target sequence for MGC40047 (NM_175911.2,1071-1089).
ctgtagtgatcttttacta

SEQ ID NO: 240844 - DNA, 19 bp, Homo sapiens
  siRNA target sequence for MGC40047 (NM_175911.2,1231-1249).
ggctatgaggagagtgttt

SEQ ID NO: 240845 - DNA, 19 bp, Homo sapiens
  siRNA target sequence for MGC40047 (NM_175911.2,1239-1257).
ggagagtgtttgggatatt

SEQ ID NO: 240846 - DNA, 19 bp, Homo sapiens
  siRNA target sequence for MRGX1 (NM_147199.1,270-288).
cccccataccatctctaaa

SEQ ID NO: 240847 - DNA, 19 bp, Homo sapiens
  siRNA target sequence for MRGX1 (NM_147199.1,271-289).
ccccataccatctctaaaa

SEQ ID NO: 240848 - DNA, 19 bp, Homo sapiens
  siRNA target sequence for MRGX1 (NM_147199.1,272-290).
cccataccatctctaaaat

SEQ ID NO: 240849 - DNA, 19 bp, Homo sapiens
  siRNA target sequence for MRGX1 (NM_147199.1,298-316).
cctgtgatgatgttttcct

SEQ ID NO: 240850 - DNA, 19 bp, Homo sapiens
  siRNA target sequence for MRGX1 (NM_147199.1,299-317).
ctgtgatgatgttttccta

SEQ ID NO: 240851 - DNA, 19 bp, Homo sapiens
  siRNA target sequence for MRGX1 (NM_147199.1,505-523).
gattctgcttggtgtcaaa

SEQ ID NO: 240852 - DNA, 19 bp, Homo sapiens
  siRNA target sequence for MRGX1 (NM_147199.1,729-747).
cgtggacagggaagtctta

SEQ ID NO: 240853 - DNA, 19 bp, Homo sapiens
  siRNA target sequence for MRGX1 (NM_147199.1,730-748).
gtggacagggaagtcttat

SEQ ID NO: 240854 - DNA, 19 bp, Homo sapiens
  siRNA target sequence for MRGX3 (NM_054031.1,524-542).
cgtcagatttcattacaat

SEQ ID NO: 240855 - DNA, 19 bp, Homo sapiens
  siRNA target sequence for MRGX3 (NM_054031.1,703-721).
cagtgggccctgttttcca

SEQ ID NO: 240856 - DNA, 19 bp, Homo sapiens
  siRNA target sequence for MRGX3 (NM_054031.1,730-748).
ctggattggaaagtcttat

SEQ ID NO: 240857 - DNA, 19 bp, Homo sapiens
  siRNA target sequence for MRGX4 (NM_054032.1,228-246).
cagcttccagattatacgt

SEQ ID NO: 240858 - DNA, 19 bp, Homo sapiens
  siRNA target sequence for MRGX4 (NM_054032.1,729-747).
cctgaatttggaagtctta

SEQ ID NO: 240859 - DNA, 19 bp, Homo sapiens
  siRNA target sequence for MRGX4 (NM_054032.1,777-795).
cctgtcctctctaaacagt

SEQ ID NO: 240860 - DNA, 19 bp, Homo sapiens
  siRNA target sequence for MRGX4 (NM_054032.1,778-796).
ctgtcctctctaaacagta

SEQ ID NO: 240861 - DNA, 19 bp, Homo sapiens
  siRNA target sequence for OPRL1 (NM_000913.3,274-292).
cgttctgggaggttatcta

SEQ ID NO: 240862 - DNA, 19 bp, Homo sapiens
  siRNA target sequence for OPRL1 (NM_000913.3,454-472).
ggaactgccttgtcatgta

SEQ ID NO: 240863 - DNA, 19 bp, Homo sapiens
  siRNA target sequence for OPRL1 (NM_000913.3,683-701).
gagtgtggatcgctatgta

SEQ ID NO: 240864 - DNA, 19 bp, Homo sapiens
  siRNA target sequence for OR10H1 (NM_013940.1,516-534).
ggagatccaccattttgct

SEQ ID NO: 240865 - DNA, 19 bp, Homo sapiens
  siRNA target sequence for OR10H1 (NM_013940.1,517-535).
gagatccaccattttgctt

SEQ ID NO: 240866 - DNA, 19 bp, Homo sapiens
  siRNA target sequence for OR10H1 (NM_013940.1,909-927).
gaagaccttcttcagtaaa

SEQ ID NO: 240867 - DNA, 19 bp, Homo sapiens
  siRNA target sequence for OR10H2 (NM_013939.1,919-937).
ctcagcacactctattcct

SEQ ID NO: 240868 - DNA, 19 bp, Homo sapiens
  siRNA target sequence for OR10H3 (NM_013938.1,10-28).
cagaactacagaaccatat

SEQ ID NO: 240869 - DNA, 19 bp, Homo sapiens
  siRNA target sequence for OR10H3 (NM_013938.1,12-30).
gaactacagaaccatatct

SEQ ID NO: 240870 - DNA, 19 bp, Homo sapiens
  siRNA target sequence for OR10H3 (NM_013938.1,391-409).
ctgcattacaacatgctaa

SEQ ID NO: 240871 - DNA, 19 bp, Homo sapiens
  siRNA target sequence for OR10H3 (NM_013938.1,394-412).
cattacaacatgctaatga

SEQ ID NO: 240872 - DNA, 19 bp, Homo sapiens
  siRNA target sequence for OR10H3 (NM_013938.1,714-732).
gactttctccacttgtgta

SEQ ID NO: 240873 - DNA, 19 bp, Homo sapiens
  siRNA target sequence for OR10J1 (NM_012351.1,119-137).
gcgtgttccttgcactata

SEQ ID NO: 240874 - DNA, 19 bp, Homo sapiens
  siRNA target sequence for OR10J1 (NM_012351.1,126-144).
ccttgcactatacatctta

SEQ ID NO: 240875 - DNA, 19 bp, Homo sapiens
  siRNA target sequence for OR10J1 (NM_012351.1,127-145).
cttgcactatacatcttaa

SEQ ID NO: 240876 - DNA, 19 bp, Homo sapiens
  siRNA target sequence for OR10J1 (NM_012351.1,146-164).
ccttagcaggcaatatcat

SEQ ID NO: 240877 - DNA, 19 bp, Homo sapiens
  siRNA target sequence for OR10J1 (NM_012351.1,346-364).
gtaacctttggcatcacta

SEQ ID NO: 240878 - DNA, 19 bp, Homo sapiens
  siRNA target sequence for OR10J1 (NM_012351.1,444-462).
caagaggctgcgtatccaa

SEQ ID NO: 240879 - DNA, 19 bp, Homo sapiens
  siRNA target sequence for OR10J1 (NM_012351.1,449-467).
ggctgcgtatccaacttgt

SEQ ID NO: 240880 - DNA, 19 bp, Homo sapiens
  siRNA target sequence for OR10J1 (NM_012351.1,487-505).
gggctgattgtagcaataa

SEQ ID NO: 240881 - DNA, 19 bp, Homo sapiens
  siRNA target sequence for OR10J1 (NM_012351.1,616-634).
gaaatcctgactttgatta

SEQ ID NO: 240882 - DNA, 19 bp, Homo sapiens
  siRNA target sequence for OR10J1 (NM_012351.1,621-639).
cctgactttgattatcagt

SEQ ID NO: 240883 - DNA, 19 bp, Homo sapiens
  siRNA target sequence for OR10J1 (NM_012351.1,638-656).
gtgtgctggtgcttgttgt

SEQ ID NO: 240884 - DNA, 19 bp, Homo sapiens
  siRNA target sequence for OR10J1 (NM_012351.1,685-703).
gttctcattatctctacaa

SEQ ID NO: 240885 - DNA, 19 bp, Homo sapiens
  siRNA target sequence for OR10J1 (NM_012351.1,696-714).
ctctacaatcctcaagatt

SEQ ID NO: 240886 - DNA, 19 bp, Homo sapiens
  siRNA target sequence for OR11A1 (NM_013937.2,101-119).
gtctccacaggaaacgaaa

SEQ ID NO: 240887 - DNA, 19 bp, Homo sapiens
  siRNA target sequence for OR11A1 (NM_013937.2,111-129).
gaaacgaaactattactga

SEQ ID NO: 240888 - DNA, 19 bp, Homo sapiens
  siRNA target sequence for OR11A1 (NM_013937.2,324-342).
cagtgatgccaaaaatgct

SEQ ID NO: 240889 - DNA, 19 bp, Homo sapiens
  siRNA target sequence for OR11A1 (NM_013937.2,458-476).
cgctacctggcaatttgct

SEQ ID NO: 240890 - DNA, 19 bp, Homo sapiens
  siRNA target sequence for OR11A1 (NM_013937.2,459-477).
gctacctggcaatttgcta

SEQ ID NO: 240891 - DNA, 19 bp, Homo sapiens
  siRNA target sequence for OR11A1 (NM_013937.2,683-701).
gtgacaactctcattctgt

SEQ ID NO: 240892 - DNA, 19 bp, Homo sapiens
  siRNA target sequence for OR11A1 (NM_013937.2,702-720).
ctgtgttctgcctcactat

SEQ ID NO: 240893 - DNA, 19 bp, Homo sapiens
  siRNA target sequence for OR11A1 (NM_013937.2,712-730).
cctcactattccttttgga

SEQ ID NO: 240894 - DNA, 19 bp, Homo sapiens
  siRNA target sequence for OR11A1 (NM_013937.2,729-747).
gactgattctgacatctta

SEQ ID NO: 240895 - DNA, 19 bp, Homo sapiens
  siRNA target sequence for OR11A1 (NM_013937.2,739-757).
gacatcttatgccagaatt

SEQ ID NO: 240896 - DNA, 19 bp, Homo sapiens
  siRNA target sequence for OR11A1 (NM_013937.2,831-849).
ctgtagtgaccacattcta

SEQ ID NO: 240897 - DNA, 19 bp, Homo sapiens
  siRNA target sequence for OR11A1 (NM_013937.2,852-870).
gaacgctcatgatctttta

SEQ ID NO: 240898 - DNA, 19 bp, Homo sapiens
  siRNA target sequence for OR11A1 (NM_013937.2,992-1010).
gcacttcggaagattctct

SEQ ID NO: 240899 - DNA, 19 bp, Homo sapiens
  siRNA target sequence for OR11A1 (NM_013937.2,998-1016).
cggaagattctctgtatca

SEQ ID NO: 240900 - DNA, 19 bp, Homo sapiens
  siRNA target sequence for OR11A1 (NM_013937.2,1003-1021).
gattctctgtatcaaacaa

SEQ ID NO: 240901 - DNA, 19 bp, Homo sapiens
  siRNA target sequence for OR12D3 (NM_030959.2,8-26).
gagaatgtcactacaatga

SEQ ID NO: 240902 - DNA, 19 bp, Homo sapiens
  siRNA target sequence for OR12D3 (NM_030959.2,14-32).
gtcactacaatgaatgagt

SEQ ID NO: 240903 - DNA, 19 bp, Homo sapiens
  siRNA target sequence for OR12D3 (NM_030959.2,115-133).
gattggaaatggatctata

SEQ ID NO: 240904 - DNA, 19 bp, Homo sapiens
  siRNA target sequence for OR12D3 (NM_030959.2,120-138).
gaaatggatctatattggt

SEQ ID NO: 240905 - DNA, 19 bp, Homo sapiens
  siRNA target sequence for OR12D3 (NM_030959.2,259-277).
cagtcgcagggctatatct

SEQ ID NO: 240906 - DNA, 19 bp, Homo sapiens
  siRNA target sequence for OR12D3 (NM_030959.2,261-279).
gtcgcagggctatatcttt

SEQ ID NO: 240907 - DNA, 19 bp, Homo sapiens
  siRNA target sequence for OR12D3 (NM_030959.2,264-282).
gcagggctatatcttttct

SEQ ID NO: 240908 - DNA, 19 bp, Homo sapiens
  siRNA target sequence for OR12D3 (NM_030959.2,410-428).
ccccaggtgtgtattctgt

SEQ ID NO: 240909 - DNA, 19 bp, Homo sapiens
  siRNA target sequence for OR12D3 (NM_030959.2,484-502).
gactgcacacctgagtttt

SEQ ID NO: 240910 - DNA, 19 bp, Homo sapiens
  siRNA target sequence for OR12D3 (NM_030959.2,507-525).
gctctcagaaactcaatca

SEQ ID NO: 240911 - DNA, 19 bp, Homo sapiens
  siRNA target sequence for OR12D3 (NM_030959.2,539-557).
gtcaagccgctcttagaat

SEQ ID NO: 240912 - DNA, 19 bp, Homo sapiens
  siRNA target sequence for OR12D3 (NM_030959.2,567-585).
gtgacacattactcaatca

SEQ ID NO: 240913 - DNA, 19 bp, Homo sapiens
  siRNA target sequence for OR12D3 (NM_030959.2,618-636).
ccatgggagctttctttct

SEQ ID NO: 240914 - DNA, 19 bp, Homo sapiens
  siRNA target sequence for OR12D3 (NM_030959.2,761-779).
cctgtgggcttcacatata

SEQ ID NO: 240915 - DNA, 19 bp, Homo sapiens
  siRNA target sequence for OR12D3 (NM_030959.2,762-780).
ctgtgggcttcacatatat

SEQ ID NO: 240916 - DNA, 19 bp, Homo sapiens
  siRNA target sequence for OR12D3 (NM_030959.2,766-784).
gggcttcacatatattcgt

SEQ ID NO: 240917 - DNA, 19 bp, Homo sapiens
  siRNA target sequence for OR12D3 (NM_030959.2,815-833).
cggataatggccatcatgt

SEQ ID NO: 240918 - DNA, 19 bp, Homo sapiens
  siRNA target sequence for OR12D3 (NM_030959.2,816-834).
ggataatggccatcatgta

SEQ ID NO: 240919 - DNA, 19 bp, Homo sapiens
  siRNA target sequence for OR12D3 (NM_030959.2,851-869).
gtactgaatccactaatct

SEQ ID NO: 240920 - DNA, 19 bp, Homo sapiens
  siRNA target sequence for OR1E2 (NM_003554.1,215-233).
gcttttcctcagtcacaat

SEQ ID NO: 240921 - DNA, 19 bp, Homo sapiens
  siRNA target sequence for OR1F1 (NM_012360.1,427-445).
ctgctggttgctggattat

SEQ ID NO: 240922 - DNA, 19 bp, Homo sapiens
  siRNA target sequence for OR1F1 (NM_012360.1,577-595).
cacctcaatgaggtcataa

SEQ ID NO: 240923 - DNA, 19 bp, Homo sapiens
  siRNA target sequence for OR1F1 (NM_012360.1,582-600).
caatgaggtcataatcctt

SEQ ID NO: 240924 - DNA, 19 bp, Homo sapiens
  siRNA target sequence for OR1F1 (NM_012360.1,819-837).
ggctactgtgttgtataca

SEQ ID NO: 240925 - DNA, 19 bp, Homo sapiens
  siRNA target sequence for OR1F1 (NM_012360.1,897-915).
ggctctgaaaaaagtagtt

SEQ ID NO: 240926 - DNA, 19 bp, Homo sapiens
  siRNA target sequence for OR2H1 (NM_030883.3,650-668).
ctgctttaccacaagttgt

SEQ ID NO: 240927 - DNA, 19 bp, Homo sapiens
  siRNA target sequence for OR2H3 (NM_007160.2,505-523).
gatcggcaggtggatgatt

SEQ ID NO: 240928 - DNA, 19 bp, Homo sapiens
  siRNA target sequence for OR2H3 (NM_007160.2,902-920).
gattgctggggaaggaaat

SEQ ID NO: 240929 - DNA, 19 bp, Homo sapiens
  siRNA target sequence for OR2J2 (NM_030905.1,20-38).
caagttcggaagacttctt

SEQ ID NO: 240930 - DNA, 19 bp, Homo sapiens
  siRNA target sequence for OR2J2 (NM_030905.1,23-41).
gttcggaagacttctttat

SEQ ID NO: 240931 - DNA, 19 bp, Homo sapiens
  siRNA target sequence for OR2J2 (NM_030905.1,239-257).
ctcagttgctggtgaatct

SEQ ID NO: 240932 - DNA, 19 bp, Homo sapiens
  siRNA target sequence for OR2J2 (NM_030905.1,287-305).
ctggttgcatggttcaact

SEQ ID NO: 240933 - DNA, 19 bp, Homo sapiens
  siRNA target sequence for OR2J2 (NM_030905.1,289-307).
ggttgcatggttcaacttt

SEQ ID NO: 240934 - DNA, 19 bp, Homo sapiens
  siRNA target sequence for OR2J2 (NM_030905.1,442-460).
gcttcttgggtaattggtt

SEQ ID NO: 240935 - DNA, 19 bp, Homo sapiens
  siRNA target sequence for OR2J2 (NM_030905.1,449-467).
gggtaattggttttactat

SEQ ID NO: 240936 - DNA, 19 bp, Homo sapiens
  siRNA target sequence for OR2J2 (NM_030905.1,518-536).
gcctagtggatcacttctt

SEQ ID NO: 240937 - DNA, 19 bp, Homo sapiens
  siRNA target sequence for OR2J2 (NM_030905.1,547-565).
ccagcacttctgcgtttat

SEQ ID NO: 240938 - DNA, 19 bp, Homo sapiens
  siRNA target sequence for OR2J2 (NM_030905.1,550-568).
gcacttctgcgtttatcat

SEQ ID NO: 240939 - DNA, 19 bp, Homo sapiens
  siRNA target sequence for OR2J2 (NM_030905.1,569-587).
gtgttgacacccatgcaaa

SEQ ID NO: 240940 - DNA, 19 bp, Homo sapiens
  siRNA target sequence for OR2J2 (NM_030905.1,673-691).
gctgtactgagcatgcaat

SEQ ID NO: 240941 - DNA, 19 bp, Homo sapiens
  siRNA target sequence for OR2J2 (NM_030905.1,703-721).
cttcagaaagtgtttagga

SEQ ID NO: 240942 - DNA, 19 bp, Homo sapiens
  siRNA target sequence for OR2J2 (NM_030905.1,722-740).
catgtggagcccatcttat

SEQ ID NO: 240943 - DNA, 19 bp, Homo sapiens
  siRNA target sequence for OR2J2 (NM_030905.1,725-743).
gtggagcccatcttatggt

SEQ ID NO: 240944 - DNA, 19 bp, Homo sapiens
  siRNA target sequence for OR2J2 (NM_030905.1,730-748).
gcccatcttatggttgtat

SEQ ID NO: 240945 - DNA, 19 bp, Homo sapiens
  siRNA target sequence for OR2J2 (NM_030905.1,732-750).
ccatcttatggttgtatct

SEQ ID NO: 240946 - DNA, 19 bp, Homo sapiens
  siRNA target sequence for OR2J2 (NM_030905.1,841-859).
gttgtcacaccgagtctta

SEQ ID NO: 240947 - DNA, 19 bp, Homo sapiens
  siRNA target sequence for OR2J2 (NM_030905.1,846-864).
cacaccgagtcttaatcct

SEQ ID NO: 240948 - DNA, 19 bp, Homo sapiens
  siRNA target sequence for OR2J2 (NM_030905.1,851-869).
cgagtcttaatcctctaat

SEQ ID NO: 240949 - DNA, 19 bp, Homo sapiens
  siRNA target sequence for OR2W1 (NM_030903.1,42-60).
gcttggcttctctaaccat

SEQ ID NO: 240950 - DNA, 19 bp, Homo sapiens
  siRNA target sequence for OR2W1 (NM_030903.1,91-109).
gtcgccatcttctacttaa

SEQ ID NO: 240951 - DNA, 19 bp, Homo sapiens
  siRNA target sequence for OR2W1 (NM_030903.1,93-111).
cgccatcttctacttaatt

SEQ ID NO: 240952 - DNA, 19 bp, Homo sapiens
  siRNA target sequence for OR2W1 (NM_030903.1,94-112).
gccatcttctacttaatta

SEQ ID NO: 240953 - DNA, 19 bp, Homo sapiens
  siRNA target sequence for OR2W1 (NM_030903.1,278-296).
gctatgtgggttgtatcat

SEQ ID NO: 240954 - DNA, 19 bp, Homo sapiens
  siRNA target sequence for OR2W1 (NM_030903.1,287-305).
gttgtatcatccaactcta

SEQ ID NO: 240955 - DNA, 19 bp, Homo sapiens
  siRNA target sequence for OR2W1 (NM_030903.1,354-372).
gtcctatgatcgttttaca

SEQ ID NO: 240956 - DNA, 19 bp, Homo sapiens
  siRNA target sequence for OR2W1 (NM_030903.1,361-379).
gatcgttttacagctatat

SEQ ID NO: 240957 - DNA, 19 bp, Homo sapiens
  siRNA target sequence for OR2W1 (NM_030903.1,364-382).
cgttttacagctatatgta

SEQ ID NO: 240958 - DNA, 19 bp, Homo sapiens
  siRNA target sequence for OR2W1 (NM_030903.1,405-423).
catgaacccacatctatgt

SEQ ID NO: 240959 - DNA, 19 bp, Homo sapiens
  siRNA target sequence for OR2W1 (NM_030903.1,415-433).
catctatgtctaaagatga

SEQ ID NO: 240960 - DNA, 19 bp, Homo sapiens
  siRNA target sequence for OR2W1 (NM_030903.1,422-440).
gtctaaagatgattatcat

SEQ ID NO: 240961 - DNA, 19 bp, Homo sapiens
  siRNA target sequence for OR2W1 (NM_030903.1,438-456).
catgatctggagtattagt

SEQ ID NO: 240962 - DNA, 19 bp, Homo sapiens
  siRNA target sequence for OR2W1 (NM_030903.1,459-477).
ggccaattctgtagtatta

SEQ ID NO: 240963 - DNA, 19 bp, Homo sapiens
  siRNA target sequence for OR2W1 (NM_030903.1,460-478).
gccaattctgtagtattat

SEQ ID NO: 240964 - DNA, 19 bp, Homo sapiens
  siRNA target sequence for OR2W1 (NM_030903.1,462-480).
caattctgtagtattatgt

SEQ ID NO: 240965 - DNA, 19 bp, Homo sapiens
  siRNA target sequence for OR2W1 (NM_030903.1,543-561).
gccagctctggtcaagata

SEQ ID NO: 240966 - DNA, 19 bp, Homo sapiens
  siRNA target sequence for OR2W1 (NM_030903.1,552-570).
ggtcaagatagcttgtgta

SEQ ID NO: 240967 - DNA, 19 bp, Homo sapiens
  siRNA target sequence for OR2W1 (NM_030903.1,859-877).
ccgctcatttacaccttaa

SEQ ID NO: 240968 - DNA, 19 bp, Homo sapiens
  siRNA target sequence for OR2W1 (NM_030903.1,861-879).
gctcatttacaccttaaga

SEQ ID NO: 240969 - DNA, 19 bp, Homo sapiens
  siRNA target sequence for OR2W1 (NM_030903.1,862-880).
ctcatttacaccttaagaa

SEQ ID NO: 240970 - DNA, 19 bp, Homo sapiens
  siRNA target sequence for OR3A2 (NM_002551.2,1070-1088).
ggcaggcacacctttggtt

SEQ ID NO: 240971 - DNA, 19 bp, Homo sapiens
  siRNA target sequence for OR3A2 (NM_002551.2,1184-1202).
cctcaccgtggtttgtctt

SEQ ID NO: 240972 - DNA, 19 bp, Homo sapiens
  siRNA target sequence for OR3A2 (NM_002551.2,1185-1203).
ctcaccgtggtttgtcttt

SEQ ID NO: 240973 - DNA, 19 bp, Homo sapiens
  siRNA target sequence for OR3A2 (NM_002551.2,1209-1227).
ggaagaggtatcttcaact

SEQ ID NO: 240974 - DNA, 19 bp, Homo sapiens
  siRNA target sequence for OR3A2 (NM_002551.2,1210-1228).
gaagaggtatcttcaacta

SEQ ID NO: 240975 - DNA, 19 bp, Homo sapiens
  siRNA target sequence for OR3A2 (NM_002551.2,1213-1231).
gaggtatcttcaactacat

SEQ ID NO: 240976 - DNA, 19 bp, Homo sapiens
  siRNA target sequence for OR52A1 (NM_012375.1,33-51).
ctctgtgttgacactagta

SEQ ID NO: 240977 - DNA, 19 bp, Homo sapiens
  siRNA target sequence for OR52A1 (NM_012375.1,103-121).
gccatttatctcattgcta

SEQ ID NO: 240978 - DNA, 19 bp, Homo sapiens
  siRNA target sequence for OR52A1 (NM_012375.1,112-130).
ctcattgctatgattggaa

SEQ ID NO: 240979 - DNA, 19 bp, Homo sapiens
  siRNA target sequence for OR52A1 (NM_012375.1,114-132).
cattgctatgattggaaat

SEQ ID NO: 240980 - DNA, 19 bp, Homo sapiens
  siRNA target sequence for OR52A1 (NM_012375.1,201-219).
gctaggagccacagacatt

SEQ ID NO: 240981 - DNA, 19 bp, Homo sapiens
  siRNA target sequence for OR52A1 (NM_012375.1,220-238).
gcacttgctagcagcatta

SEQ ID NO: 240982 - DNA, 19 bp, Homo sapiens
  siRNA target sequence for OR52A1 (NM_012375.1,221-239).
cacttgctagcagcattat

SEQ ID NO: 240983 - DNA, 19 bp, Homo sapiens
  siRNA target sequence for OR52A1 (NM_012375.1,230-248).
gcagcattatgccaaagat

SEQ ID NO: 240984 - DNA, 19 bp, Homo sapiens
  siRNA target sequence for OR52A1 (NM_012375.1,240-258).
gccaaagatgcttggaata

SEQ ID NO: 240985 - DNA, 19 bp, Homo sapiens
  siRNA target sequence for OR52A1 (NM_012375.1,289-307).
gattcctgcttgcttcaaa

SEQ ID NO: 240986 - DNA, 19 bp, Homo sapiens
  siRNA target sequence for OR52A1 (NM_012375.1,384-402).
ctgttatccactaagacat

SEQ ID NO: 240987 - DNA, 19 bp, Homo sapiens
  siRNA target sequence for OR52A1 (NM_012375.1,420-438).
ccagcttgtcattcagata

SEQ ID NO: 240988 - DNA, 19 bp, Homo sapiens
  siRNA target sequence for OR52A1 (NM_012375.1,424-442).
cttgtcattcagataggaa

SEQ ID NO: 240989 - DNA, 19 bp, Homo sapiens
  siRNA target sequence for OR52A1 (NM_012375.1,450-468).
cgtactcagggctgctatt

SEQ ID NO: 240990 - DNA, 19 bp, Homo sapiens
  siRNA target sequence for OR52A1 (NM_012375.1,476-494).
ccccatgcctagtactgat

SEQ ID NO: 240991 - DNA, 19 bp, Homo sapiens
  siRNA target sequence for OR52A1 (NM_012375.1,477-495).
cccatgcctagtactgata

SEQ ID NO: 240992 - DNA, 19 bp, Homo sapiens
  siRNA target sequence for OR52A1 (NM_012375.1,478-496).
ccatgcctagtactgataa

SEQ ID NO: 240993 - DNA, 19 bp, Homo sapiens
  siRNA target sequence for OR52A1 (NM_012375.1,479-497).
catgcctagtactgataaa

SEQ ID NO: 240994 - DNA, 19 bp, Homo sapiens
  siRNA target sequence for OR52A1 (NM_012375.1,498-516).
gtgccggtttcaattttat

SEQ ID NO: 240995 - DNA, 19 bp, Homo sapiens
  siRNA target sequence for OR52A1 (NM_012375.1,500-518).
gccggtttcaattttatca

SEQ ID NO: 240996 - DNA, 19 bp, Homo sapiens
  siRNA target sequence for OR52A1 (NM_012375.1,502-520).
cggtttcaattttatcaca

SEQ ID NO: 240997 - DNA, 19 bp, Homo sapiens
  siRNA target sequence for OR52A1 (NM_012375.1,549-567).
gcatatggccattgtgaaa

SEQ ID NO: 240998 - DNA, 19 bp, Homo sapiens
  siRNA target sequence for OR52A1 (NM_012375.1,575-593).
cagcaaatgttcaagtcaa

SEQ ID NO: 240999 - DNA, 19 bp, Homo sapiens
  siRNA target sequence for OR52A1 (NM_012375.1,578-596).
caaatgttcaagtcaacaa

SEQ ID NO: 241000 - DNA, 19 bp, Homo sapiens
  siRNA target sequence for OR52A1 (NM_012375.1,583-601).
gttcaagtcaacaaaatct

SEQ ID NO: 241001 - DNA, 19 bp, Homo sapiens
  siRNA target sequence for OR52A1 (NM_012375.1,589-607).
gtcaacaaaatctatggtt

SEQ ID NO: 241002 - DNA, 19 bp, Homo sapiens
  siRNA target sequence for OR52A1 (NM_012375.1,657-675).
gtcctacatccagatattt

SEQ ID NO: 241003 - DNA, 19 bp, Homo sapiens
  siRNA target sequence for OR52A1 (NM_012375.1,663-681).
catccagatatttatcaca

SEQ ID NO: 241004 - DNA, 19 bp, Homo sapiens
  siRNA target sequence for OR52A1 (NM_012375.1,699-717).
gaaggaggctaggtttaaa

SEQ ID NO: 241005 - DNA, 19 bp, Homo sapiens
  siRNA target sequence for OR52A1 (NM_012375.1,853-871).
ctggtccctccatttctca

SEQ ID NO: 241006 - DNA, 19 bp, Homo sapiens
  siRNA target sequence for OR52A1 (NM_012375.1,855-873).
ggtccctccatttctcaat

SEQ ID NO: 241007 - DNA, 19 bp, Homo sapiens
  siRNA target sequence for OR52A1 (NM_012375.1,899-917).
cacagattcgcattcatgt

SEQ ID NO: 241008 - DNA, 19 bp, Homo sapiens
  siRNA target sequence for OR52A1 (NM_012375.1,907-925).
cgcattcatgtggtaaaaa

SEQ ID NO: 241009 - DNA, 19 bp, Homo sapiens
  siRNA target sequence for OR5I1 (NM_006637.1,65-83).
gccctgaactgcagattgt

SEQ ID NO: 241010 - DNA, 19 bp, Homo sapiens
  siRNA target sequence for OR5I1 (NM_006637.1,136-154).
ggattgatgctgttgatca

SEQ ID NO: 241011 - DNA, 19 bp, Homo sapiens
  siRNA target sequence for OR5I1 (NM_006637.1,144-162).
gctgttgatcaggattgat

SEQ ID NO: 241012 - DNA, 19 bp, Homo sapiens
  siRNA target sequence for OR5I1 (NM_006637.1,192-210).
ccttagcaacctatcattt

SEQ ID NO: 241013 - DNA, 19 bp, Homo sapiens
  siRNA target sequence for OR5I1 (NM_006637.1,211-229).
gtagacctttgctatttct

SEQ ID NO: 241014 - DNA, 19 bp, Homo sapiens
  siRNA target sequence for OR5I1 (NM_006637.1,221-239).
gctatttctcagacattgt

SEQ ID NO: 241015 - DNA, 19 bp, Homo sapiens
  siRNA target sequence for OR5I1 (NM_006637.1,261-279).
cctctcggagaacaaatct

SEQ ID NO: 241016 - DNA, 19 bp, Homo sapiens
  siRNA target sequence for OR5I1 (NM_006637.1,262-280).
ctctcggagaacaaatcta

SEQ ID NO: 241017 - DNA, 19 bp, Homo sapiens
  siRNA target sequence for OR5I1 (NM_006637.1,264-282).
ctcggagaacaaatctatt

SEQ ID NO: 241018 - DNA, 19 bp, Homo sapiens
  siRNA target sequence for OR5I1 (NM_006637.1,293-311).
ggtgtgccctgcagtttta

SEQ ID NO: 241019 - DNA, 19 bp, Homo sapiens
  siRNA target sequence for OR5I1 (NM_006637.1,294-312).
gtgtgccctgcagttttat

SEQ ID NO: 241020 - DNA, 19 bp, Homo sapiens
  siRNA target sequence for OR5I1 (NM_006637.1,320-338).
gtacttttgcagatacaga

SEQ ID NO: 241021 - DNA, 19 bp, Homo sapiens
  siRNA target sequence for OR5I1 (NM_006637.1,423-441).
catctgtatgcggttgatt

SEQ ID NO: 241022 - DNA, 19 bp, Homo sapiens
  siRNA target sequence for OR5I1 (NM_006637.1,428-446).
gtatgcggttgattgtctt

SEQ ID NO: 241023 - DNA, 19 bp, Homo sapiens
  siRNA target sequence for OR5I1 (NM_006637.1,438-456).
gattgtcttgtcatacctt

SEQ ID NO: 241024 - DNA, 19 bp, Homo sapiens
  siRNA target sequence for OR5I1 (NM_006637.1,474-492).
cctggttcacacatccttt

SEQ ID NO: 241025 - DNA, 19 bp, Homo sapiens
  siRNA target sequence for OR5I1 (NM_006637.1,549-567).
ccctcccctgcttaaacta

SEQ ID NO: 241026 - DNA, 19 bp, Homo sapiens
  siRNA target sequence for OR5I1 (NM_006637.1,654-672).
ctcctactttttcattctt

SEQ ID NO: 241027 - DNA, 19 bp, Homo sapiens
  siRNA target sequence for OR5I1 (NM_006637.1,670-688).
cttctctcagtcttaaaga

SEQ ID NO: 241028 - DNA, 19 bp, Homo sapiens
  siRNA target sequence for OR5I1 (NM_006637.1,787-805).
cggcccagctacctgtatt

SEQ ID NO: 241029 - DNA, 19 bp, Homo sapiens
  siRNA target sequence for OR5I1 (NM_006637.1,798-816).
cctgtattctccaaacact

SEQ ID NO: 241030 - DNA, 19 bp, Homo sapiens
  siRNA target sequence for OR5I1 (NM_006637.1,919-937).
ctaagatcaaaggtagatt

SEQ ID NO: 241031 - DNA, 19 bp, Homo sapiens
  siRNA target sequence for OR5V1 (NM_030876.3,101-119).
caaacagctataactgaat

SEQ ID NO: 241032 - DNA, 19 bp, Homo sapiens
  siRNA target sequence for OR5V1 (NM_030876.3,107-125).
gctataactgaattcatca

SEQ ID NO: 241033 - DNA, 19 bp, Homo sapiens
  siRNA target sequence for OR5V1 (NM_030876.3,130-148).
gggattctccaacctaaat

SEQ ID NO: 241034 - DNA, 19 bp, Homo sapiens
  siRNA target sequence for OR5V1 (NM_030876.3,171-189).
ccatcttctttctgactta

SEQ ID NO: 241035 - DNA, 19 bp, Homo sapiens
  siRNA target sequence for OR5V1 (NM_030876.3,312-330).
gcaatgtcccccagatgat

SEQ ID NO: 241036 - DNA, 19 bp, Homo sapiens
  siRNA target sequence for OR5V1 (NM_030876.3,370-388).
ggggtgtgtggttcaactt

SEQ ID NO: 241037 - DNA, 19 bp, Homo sapiens
  siRNA target sequence for OR5V1 (NM_030876.3,466-484).
caatcctttaaggtattca

SEQ ID NO: 241038 - DNA, 19 bp, Homo sapiens
  siRNA target sequence for OR5V1 (NM_030876.3,493-511).
gagcaaggttctatgcaat

SEQ ID NO: 241039 - DNA, 19 bp, Homo sapiens
  siRNA target sequence for OR5V1 (NM_030876.3,496-514).
caaggttctatgcaatcaa

SEQ ID NO: 241040 - DNA, 19 bp, Homo sapiens
  siRNA target sequence for OR5V1 (NM_030876.3,499-517).
ggttctatgcaatcaatta

SEQ ID NO: 241041 - DNA, 19 bp, Homo sapiens
  siRNA target sequence for OR5V1 (NM_030876.3,560-578).
catacagtgttgacattct

SEQ ID NO: 241042 - DNA, 19 bp, Homo sapiens
  siRNA target sequence for OR5V1 (NM_030876.3,585-603).
ccttctgtggcaacaatca

SEQ ID NO: 241043 - DNA, 19 bp, Homo sapiens
  siRNA target sequence for OR5V1 (NM_030876.3,591-609).
gtggcaacaatcagattaa

SEQ ID NO: 241044 - DNA, 19 bp, Homo sapiens
  siRNA target sequence for OR5V1 (NM_030876.3,594-612).
gcaacaatcagattaatta

SEQ ID NO: 241045 - DNA, 19 bp, Homo sapiens
  siRNA target sequence for OR5V1 (NM_030876.3,643-661).
cttgtcttgtggaaacact

SEQ ID NO: 241046 - DNA, 19 bp, Homo sapiens
  siRNA target sequence for OR5V1 (NM_030876.3,842-860).
ggcagcgccatctttacat

SEQ ID NO: 241047 - DNA, 19 bp, Homo sapiens
  siRNA target sequence for OR5V1 (NM_030876.3,844-862).
cagcgccatctttacatat

SEQ ID NO: 241048 - DNA, 19 bp, Homo sapiens
  siRNA target sequence for OR5V1 (NM_030876.3,863-881).
gtacggcccatctcaactt

SEQ ID NO: 241049 - DNA, 19 bp, Homo sapiens
  siRNA target sequence for OR5V1 (NM_030876.3,866-884).
cggcccatctcaacttact

SEQ ID NO: 241050 - DNA, 19 bp, Homo sapiens
  siRNA target sequence for OR5V1 (NM_030876.3,1003-1021).
caagtggcagccaccaatt

SEQ ID NO: 241051 - DNA, 19 bp, Homo sapiens
  siRNA target sequence for OR5V1 (NM_030876.3,1023-1041).
cctctttggatagtaaact

SEQ ID NO: 241052 - DNA, 19 bp, Homo sapiens
  siRNA target sequence for OR6A1 (NM_003696.2,264-282).
gcgccactacaggtactat

SEQ ID NO: 241053 - DNA, 19 bp, Homo sapiens
  siRNA target sequence for OR6A1 (NM_003696.2,265-283).
cgccactacaggtactatt

SEQ ID NO: 241054 - DNA, 19 bp, Homo sapiens
  siRNA target sequence for OR6A1 (NM_003696.2,267-285).
ccactacaggtactattgt

SEQ ID NO: 241055 - DNA, 19 bp, Homo sapiens
  siRNA target sequence for OR6A1 (NM_003696.2,268-286).
cactacaggtactattgtt

SEQ ID NO: 241056 - DNA, 19 bp, Homo sapiens
  siRNA target sequence for OR6A1 (NM_003696.2,345-363).
gcaattaggaaccattcta

SEQ ID NO: 241057 - DNA, 19 bp, Homo sapiens
  siRNA target sequence for OR6A1 (NM_003696.2,474-492).
gatcatggacagctaatct

SEQ ID NO: 241058 - DNA, 19 bp, Homo sapiens
  siRNA target sequence for OR6A1 (NM_003696.2,550-568).
gtgtccttctcgctgttat

SEQ ID NO: 241059 - DNA, 19 bp, Homo sapiens
  siRNA target sequence for OR6A1 (NM_003696.2,676-694).
gcatctccatggtcaaagt

SEQ ID NO: 241060 - DNA, 19 bp, Homo sapiens
  siRNA target sequence for OR6A1 (NM_003696.2,686-704).
ggtcaaagtttttcttatt

SEQ ID NO: 241061 - DNA, 19 bp, Homo sapiens
  siRNA target sequence for OR6A1 (NM_003696.2,904-922).
cggctgctggacgctataa

SEQ ID NO: 241062 - DNA, 19 bp, Homo sapiens
  siRNA target sequence for OR6A1 (NM_003696.2,915-933).
cgctataaggccttttcca

SEQ ID NO: 241063 - DNA, 19 bp, Homo sapiens
  siRNA target sequence for OR6A1 (NM_003696.2,945-963).
catctcactgttgtgataa

SEQ ID NO: 241064 - DNA, 19 bp, Homo sapiens
  siRNA target sequence for OR6A1 (NM_003696.2,972-990).
gcagccagtatcttcatct

SEQ ID NO: 241065 - DNA, 19 bp, Homo sapiens
  siRNA target sequence for OR6A1 (NM_003696.2,1014-1032).
gcttttgacaccaacaagt

SEQ ID NO: 241066 - DNA, 19 bp, Homo sapiens
  siRNA target sequence for OR6A1 (NM_003696.2,1015-1033).
cttttgacaccaacaagtt

SEQ ID NO: 241067 - DNA, 19 bp, Homo sapiens
  siRNA target sequence for OR6A1 (NM_003696.2,1152-1170).
cctgaccccaagaaagcta

SEQ ID NO: 241068 - DNA, 19 bp, Homo sapiens
  siRNA target sequence for P2RY1 (NM_002563.2,941-959).
cgtctcctcgtcgttcaaa

SEQ ID NO: 241069 - DNA, 19 bp, Homo sapiens
  siRNA target sequence for P2RY1 (NM_002563.2,942-960).
gtctcctcgtcgttcaaat

SEQ ID NO: 241070 - DNA, 19 bp, Homo sapiens
  siRNA target sequence for P2RY1 (NM_002563.2,976-994).
cgggcttccagttttacta

SEQ ID NO: 241071 - DNA, 19 bp, Homo sapiens
  siRNA target sequence for P2RY1 (NM_002563.2,996-1014).
ctgccggctgtctacatct

SEQ ID NO: 241072 - DNA, 19 bp, Homo sapiens
  siRNA target sequence for P2RY1 (NM_002563.2,1003-1021).
ctgtctacatcttggtatt

SEQ ID NO: 241073 - DNA, 19 bp, Homo sapiens
  siRNA target sequence for P2RY1 (NM_002563.2,1094-1112).
ctccgtgtacatgttcaat

SEQ ID NO: 241074 - DNA, 19 bp, Homo sapiens
  siRNA target sequence for P2RY1 (NM_002563.2,1096-1114).
ccgtgtacatgttcaattt

SEQ ID NO: 241075 - DNA, 19 bp, Homo sapiens
  siRNA target sequence for P2RY1 (NM_002563.2,1219-1237).
ggttcatctttcatgtgaa

SEQ ID NO: 241076 - DNA, 19 bp, Homo sapiens
  siRNA target sequence for P2RY1 (NM_002563.2,1408-1426).
gtaccggggtccgcaaaaa

SEQ ID NO: 241077 - DNA, 19 bp, Homo sapiens
  siRNA target sequence for P2RY1 (NM_002563.2,1411-1429).
ccggggtccgcaaaaacaa

SEQ ID NO: 241078 - DNA, 19 bp, Homo sapiens
  siRNA target sequence for P2RY1 (NM_002563.2,1412-1430).
cggggtccgcaaaaacaaa

SEQ ID NO: 241079 - DNA, 19 bp, Homo sapiens
  siRNA target sequence for P2RY1 (NM_002563.2,1460-1478).
cgagtacctgcgaagttat

SEQ ID NO: 241080 - DNA, 19 bp, Homo sapiens
  siRNA target sequence for P2RY1 (NM_002563.2,1461-1479).
gagtacctgcgaagttatt

SEQ ID NO: 241081 - DNA, 19 bp, Homo sapiens
  siRNA target sequence for P2RY1 (NM_002563.2,1536-1554).
ctgggctgttacggattaa

SEQ ID NO: 241082 - DNA, 19 bp, Homo sapiens
  siRNA target sequence for P2RY1 (NM_002563.2,1538-1556).
gggctgttacggattaatt

SEQ ID NO: 241083 - DNA, 19 bp, Homo sapiens
  siRNA target sequence for P2RY1 (NM_002563.2,1540-1558).
gctgttacggattaattgt

SEQ ID NO: 241084 - DNA, 19 bp, Homo sapiens
  siRNA target sequence for P2RY1 (NM_002563.2,1593-1611).
cctctgaggagaaaatcga

SEQ ID NO: 241085 - DNA, 19 bp, Homo sapiens
  siRNA target sequence for P2RY1 (NM_002563.2,1594-1612).
ctctgaggagaaaatcgat

SEQ ID NO: 241086 - DNA, 19 bp, Homo sapiens
  siRNA target sequence for P2RY1 (NM_002563.2,1609-1627).
cgatttacctggtaatcat

SEQ ID NO: 241087 - DNA, 19 bp, Homo sapiens
  siRNA target sequence for P2RY1 (NM_002563.2,1610-1628).
gatttacctggtaatcatt

SEQ ID NO: 241088 - DNA, 19 bp, Homo sapiens
  siRNA target sequence for P2RY1 (NM_002563.2,1649-1667).
gtcttacatccctttccat

SEQ ID NO: 241089 - DNA, 19 bp, Homo sapiens
  siRNA target sequence for P2RY1 (NM_002563.2,1668-1686).
gtgatgaaaacgatgaact

SEQ ID NO: 241090 - DNA, 19 bp, Homo sapiens
  siRNA target sequence for P2RY1 (NM_002563.2,1717-1735).
caatgtgtgctttcaatga

SEQ ID NO: 241091 - DNA, 19 bp, Homo sapiens
  siRNA target sequence for P2RY1 (NM_002563.2,1815-1833).
gcgggagatactttcagaa

SEQ ID NO: 241092 - DNA, 19 bp, Homo sapiens
  siRNA target sequence for P2RY1 (NM_002563.2,1845-1863).
cgagccacaaggaaagctt

SEQ ID NO: 241093 - DNA, 19 bp, Homo sapiens
  siRNA target sequence for P2RY1 (NM_002563.2,1904-1922).
catgaccctcaatatttta

SEQ ID NO: 241094 - DNA, 19 bp, Homo sapiens
  siRNA target sequence for P2RY1 (NM_002563.2,1931-1949).
caagcagaatggagataca

SEQ ID NO: 241095 - DNA, 19 bp, Homo sapiens
  siRNA target sequence for P2RY10 (NM_014499.2,422-440).
ccagcactgctgagattta

SEQ ID NO: 241096 - DNA, 19 bp, Homo sapiens
  siRNA target sequence for P2RY10 (NM_014499.2,428-446).
ctgctgagatttactgtaa

SEQ ID NO: 241097 - DNA, 19 bp, Homo sapiens
  siRNA target sequence for P2RY10 (NM_014499.2,466-484).
caatactccctctatgcaa

SEQ ID NO: 241098 - DNA, 19 bp, Homo sapiens
  siRNA target sequence for P2RY10 (NM_014499.2,475-493).
ctctatgcaaccacctata

SEQ ID NO: 241099 - DNA, 19 bp, Homo sapiens
  siRNA target sequence for P2RY10 (NM_014499.2,485-503).
ccacctatatcctcatatt

SEQ ID NO: 241100 - DNA, 19 bp, Homo sapiens
  siRNA target sequence for P2RY10 (NM_014499.2,541-559).
gttctgtgccgcttcatca

SEQ ID NO: 241101 - DNA, 19 bp, Homo sapiens
  siRNA target sequence for P2RY10 (NM_014499.2,604-622).
gctgaccttgctcatgtat

SEQ ID NO: 241102 - DNA, 19 bp, Homo sapiens
  siRNA target sequence for P2RY10 (NM_014499.2,609-627).
ccttgctcatgtattatct

SEQ ID NO: 241103 - DNA, 19 bp, Homo sapiens
  siRNA target sequence for P2RY10 (NM_014499.2,610-628).
cttgctcatgtattatctt

SEQ ID NO: 241104 - DNA, 19 bp, Homo sapiens
  siRNA target sequence for P2RY10 (NM_014499.2,626-644).
ctttacccctccggattta

SEQ ID NO: 241105 - DNA, 19 bp, Homo sapiens
  siRNA target sequence for P2RY10 (NM_014499.2,631-649).
cccctccggatttactatt

SEQ ID NO: 241106 - DNA, 19 bp, Homo sapiens
  siRNA target sequence for P2RY10 (NM_014499.2,632-650).
ccctccggatttactatta

SEQ ID NO: 241107 - DNA, 19 bp, Homo sapiens
  siRNA target sequence for P2RY10 (NM_014499.2,634-652).
ctccggatttactattaca

SEQ ID NO: 241108 - DNA, 19 bp, Homo sapiens
  siRNA target sequence for P2RY10 (NM_014499.2,741-759).
gacgtgcatcagtcttcaa

SEQ ID NO: 241109 - DNA, 19 bp, Homo sapiens
  siRNA target sequence for P2RY10 (NM_014499.2,877-895).
ctgagaagcacagacttaa

SEQ ID NO: 241110 - DNA, 19 bp, Homo sapiens
  siRNA target sequence for P2RY10 (NM_014499.2,949-967).
gcgttggtcgggatgatta

SEQ ID NO: 241111 - DNA, 19 bp, Homo sapiens
  siRNA target sequence for P2RY10 (NM_014499.2,951-969).
gttggtcgggatgattaca

SEQ ID NO: 241112 - DNA, 19 bp, Homo sapiens
  siRNA target sequence for P2RY10 (NM_014499.2,954-972).
ggtcgggatgattacagtt

SEQ ID NO: 241113 - DNA, 19 bp, Homo sapiens
  siRNA target sequence for P2RY10 (NM_014499.2,1017-1035).
gtgtacctggaaaactact

SEQ ID NO: 241114 - DNA, 19 bp, Homo sapiens
  siRNA target sequence for P2RY10 (NM_014499.2,1091-1109).
cactgcggatggtgttcat

SEQ ID NO: 241115 - DNA, 19 bp, Homo sapiens
  siRNA target sequence for P2RY10 (NM_014499.2,1207-1225).
gtccgaatcgcactgtatt

SEQ ID NO: 241116 - DNA, 19 bp, Homo sapiens
  siRNA target sequence for P2RY10 (NM_014499.2,1211-1229).
gaatcgcactgtatttcca

SEQ ID NO: 241117 - DNA, 19 bp, Homo sapiens
  siRNA target sequence for P2RY10 (NM_014499.2,1263-1281).
ccttttggatccaattctt

SEQ ID NO: 241118 - DNA, 19 bp, Homo sapiens
  siRNA target sequence for P2RY10 (NM_014499.2,1359-1377).
caaggagagtggttcatca

SEQ ID NO: 241119 - DNA, 19 bp, Homo sapiens
  siRNA target sequence for P2RY10 (NM_014499.2,1365-1383).
gagtggttcatcaatgatt

SEQ ID NO: 241120 - DNA, 19 bp, Homo sapiens
  siRNA target sequence for P2RY11 (NM_002566.3,50-68).
cagctgccgacgacaaact

SEQ ID NO: 241121 - DNA, 19 bp, Homo sapiens
  siRNA target sequence for P2RY11 (NM_002566.3,52-70).
gctgccgacgacaaactca

SEQ ID NO: 241122 - DNA, 19 bp, Homo sapiens
  siRNA target sequence for P2RY11 (NM_002566.3,553-571).
cccgaggcctgcatcaagt

SEQ ID NO: 241123 - DNA, 19 bp, Homo sapiens
  siRNA target sequence for P2RY11 (NM_002566.3,846-864).
cccgagctttgcagacata

SEQ ID NO: 241124 - DNA, 19 bp, Homo sapiens
  siRNA target sequence for P2RY11 (NM_002566.3,944-962).
gtgtccaccctctactcta

SEQ ID NO: 241125 - DNA, 19 bp, Homo sapiens
  siRNA target sequence for P2RY2 (NM_002564.2,410-428).
gcttcaacgaggacttcaa

SEQ ID NO: 241126 - DNA, 19 bp, Homo sapiens
  siRNA target sequence for P2RY2 (NM_002564.2,488-506).
ccgtggcgctctacatctt

SEQ ID NO: 241127 - DNA, 19 bp, Homo sapiens
  siRNA target sequence for P2RY2 (NM_002564.2,493-511).
gcgctctacatcttcttgt

SEQ ID NO: 241128 - DNA, 19 bp, Homo sapiens
  siRNA target sequence for P2RY2 (NM_002564.2,528-546).
gaatgcgtccaccacatat

SEQ ID NO: 241129 - DNA, 19 bp, Homo sapiens
  siRNA target sequence for P2RY2 (NM_002564.2,532-550).
gcgtccaccacatatatgt

SEQ ID NO: 241130 - DNA, 19 bp, Homo sapiens
  siRNA target sequence for P2RY2 (NM_002564.2,533-551).
cgtccaccacatatatgtt

SEQ ID NO: 241131 - DNA, 19 bp, Homo sapiens
  siRNA target sequence for P2RY2 (NM_002564.2,593-611).
cgctgctggtctattacta

SEQ ID NO: 241132 - DNA, 19 bp, Homo sapiens
  siRNA target sequence for P2RY2 (NM_002564.2,832-850).
cccgtgctctactttgtca

SEQ ID NO: 241133 - DNA, 19 bp, Homo sapiens
  siRNA target sequence for P2RY2 (NM_002564.2,968-986).
ccgtcatccttgtctgtta

SEQ ID NO: 241134 - DNA, 19 bp, Homo sapiens
  siRNA target sequence for P2RY2 (NM_002564.2,1212-1230).
gctggccagtgctaacagt

SEQ ID NO: 241135 - DNA, 19 bp, Homo sapiens
  siRNA target sequence for P2RY5 (NM_005767.3,1054-1072).
ggagatttactttgtaaga

SEQ ID NO: 241136 - DNA, 19 bp, Homo sapiens
  siRNA target sequence for P2RY5 (NM_005767.3,1105-1123).
ggaagcattctgttcttaa

SEQ ID NO: 241137 - DNA, 19 bp, Homo sapiens
  siRNA target sequence for P2RY5 (NM_005767.3,1119-1137).
cttaacctgtattagtgta

SEQ ID NO: 241138 - DNA, 19 bp, Homo sapiens
  siRNA target sequence for P2RY5 (NM_005767.3,1142-1160).
gatttctggcaattgtcta

SEQ ID NO: 241139 - DNA, 19 bp, Homo sapiens
  siRNA target sequence for P2RY5 (NM_005767.3,1150-1168).
gcaattgtctacccattta

SEQ ID NO: 241140 - DNA, 19 bp, Homo sapiens
  siRNA target sequence for P2RY5 (NM_005767.3,1156-1174).
gtctacccatttaagtcaa

SEQ ID NO: 241141 - DNA, 19 bp, Homo sapiens
  siRNA target sequence for P2RY5 (NM_005767.3,1212-1230).
cactggcgtgtggttaact

SEQ ID NO: 241142 - DNA, 19 bp, Homo sapiens
  siRNA target sequence for P2RY5 (NM_005767.3,1214-1232).
ctggcgtgtggttaactgt

SEQ ID NO: 241143 - DNA, 19 bp, Homo sapiens
  siRNA target sequence for P2RY5 (NM_005767.3,1271-1289).
cccactctcagggtaacaa

SEQ ID NO: 241144 - DNA, 19 bp, Homo sapiens
  siRNA target sequence for P2RY5 (NM_005767.3,1272-1290).
ccactctcagggtaacaat

SEQ ID NO: 241145 - DNA, 19 bp, Homo sapiens
  siRNA target sequence for P2RY5 (NM_005767.3,1293-1311).
ctcagaagcctgctttgaa

SEQ ID NO: 241146 - DNA, 19 bp, Homo sapiens
  siRNA target sequence for P2RY5 (NM_005767.3,1342-1360).
ctctcaaggattgtaattt

SEQ ID NO: 241147 - DNA, 19 bp, Homo sapiens
  siRNA target sequence for P2RY5 (NM_005767.3,1437-1455).
caaacctgttacattaagt

SEQ ID NO: 241148 - DNA, 19 bp, Homo sapiens
  siRNA target sequence for P2RY5 (NM_005767.3,1441-1459).
cctgttacattaagtagaa

SEQ ID NO: 241149 - DNA, 19 bp, Homo sapiens
  siRNA target sequence for P2RY5 (NM_005767.3,1620-1638).
cccaatcactctctgtatt

SEQ ID NO: 241150 - DNA, 19 bp, Homo sapiens
  siRNA target sequence for P2RY5 (NM_005767.3,1639-1657).
gctgtttccaactgttgtt

SEQ ID NO: 241151 - DNA, 19 bp, Homo sapiens
  siRNA target sequence for P2RY5 (NM_005767.3,1655-1673).
gttttgaccctatagttta

SEQ ID NO: 241152 - DNA, 19 bp, Homo sapiens
  siRNA target sequence for P2RY5 (NM_005767.3,1660-1678).
gaccctatagtttactact

SEQ ID NO: 241153 - DNA, 19 bp, Homo sapiens
  siRNA target sequence for P2RY5 (NM_005767.3,1662-1680).
ccctatagtttactacttt

SEQ ID NO: 241154 - DNA, 19 bp, Homo sapiens
  siRNA target sequence for P2RY5 (NM_005767.3,1663-1681).
cctatagtttactacttta

SEQ ID NO: 241155 - DNA, 19 bp, Homo sapiens
  siRNA target sequence for P2RY5 (NM_005767.3,1677-1695).
ctttacatcggacacaatt

SEQ ID NO: 241156 - DNA, 19 bp, Homo sapiens
  siRNA target sequence for P2RY5 (NM_005767.3,1686-1704).
ggacacaattcagaattca

SEQ ID NO: 241157 - DNA, 19 bp, Homo sapiens
  siRNA target sequence for P2RY5 (NM_005767.3,1743-1761).
cagattctctgaagttcat

SEQ ID NO: 241158 - DNA, 19 bp, Homo sapiens
  siRNA target sequence for P2RY5 (NM_005767.3,1788-1806).
cctacagaccttaaaaagt

SEQ ID NO: 241159 - DNA, 19 bp, Homo sapiens
  siRNA target sequence for P2RY5 (NM_005767.3,1794-1812).
gaccttaaaaagtaagata

SEQ ID NO: 241160 - DNA, 19 bp, Homo sapiens
  siRNA target sequence for P2RY6 (NM_004154.3,352-370).
gtgtctaccgcgagaactt

SEQ ID NO: 241161 - DNA, 19 bp, Homo sapiens
  siRNA target sequence for P2RY6 (NM_004154.3,484-502).
ccgtgtacaccctaaacct

SEQ ID NO: 241162 - DNA, 19 bp, Homo sapiens
  siRNA target sequence for P2RY6 (NM_004154.3,485-503).
cgtgtacaccctaaacctt

SEQ ID NO: 241163 - DNA, 19 bp, Homo sapiens
  siRNA target sequence for P2RY6 (NM_004154.3,539-557).
cctgctcatctacaactat

SEQ ID NO: 241164 - DNA, 19 bp, Homo sapiens
  siRNA target sequence for P2RY6 (NM_004154.3,1108-1126).
gcgtcccctgcactgtatt

SEQ ID NO: 241165 - DNA, 19 bp, Homo sapiens
  siRNA target sequence for P2RY6 (NM_004154.3,1133-1151).
ctttgcagcggcctacaaa

SEQ ID NO: 241166 - DNA, 19 bp, Homo sapiens
  siRNA target sequence for P2RY6 (NM_004154.3,1234-1252).
cacatgagctcctacagaa

SEQ ID NO: 241167 - DNA, 19 bp, Homo sapiens
  siRNA target sequence for P2RY8 (NM_178129.3,375-393).
gatccccgtcggtcatctt

SEQ ID NO: 241168 - DNA, 19 bp, Homo sapiens
  siRNA target sequence for P2RY8 (NM_178129.3,380-398).
ccgtcggtcatcttcatga

SEQ ID NO: 241169 - DNA, 19 bp, Homo sapiens
  siRNA target sequence for P2RY8 (NM_178129.3,381-399).
cgtcggtcatcttcatgat

SEQ ID NO: 241170 - DNA, 19 bp, Homo sapiens
  siRNA target sequence for P2RY8 (NM_178129.3,430-448).
cagcgtgttgcctttccaa

SEQ ID NO: 241171 - DNA, 19 bp, Homo sapiens
  siRNA target sequence for P2RY8 (NM_178129.3,432-450).
gcgtgttgcctttccaaat

SEQ ID NO: 241172 - DNA, 19 bp, Homo sapiens
  siRNA target sequence for P2RY8 (NM_178129.3,515-533).
gccttttacgcaaacatgt

SEQ ID NO: 241173 - DNA, 19 bp, Homo sapiens
  siRNA target sequence for P2RY8 (NM_178129.3,1050-1068).
gtctcagctgcctcaacaa

SEQ ID NO: 241174 - DNA, 19 bp, Homo sapiens
  siRNA target sequence for P2RY8 (NM_178129.3,1069-1087).
ctgtctggacccgtttgtt

SEQ ID NO: 241175 - DNA, 19 bp, Homo sapiens
  siRNA target sequence for P2RY8 (NM_178129.3,1071-1089).
gtctggacccgtttgttta

SEQ ID NO: 241176 - DNA, 19 bp, Homo sapiens
  siRNA target sequence for P2RY8 (NM_178129.3,1073-1091).
ctggacccgtttgtttatt

SEQ ID NO: 241177 - DNA, 19 bp, Homo sapiens
  siRNA target sequence for P2RY8 (NM_178129.3,1114-1132).
gctgcgcctgcgggaatat

SEQ ID NO: 241178 - DNA, 19 bp, Homo sapiens
  siRNA target sequence for P2RY8 (NM_178129.3,1115-1133).
ctgcgcctgcgggaatatt

SEQ ID NO: 241179 - DNA, 19 bp, Homo sapiens
  siRNA target sequence for RGR (NM_002921.2,589-607).
ctcttcatcacgatcactt

SEQ ID NO: 241180 - DNA, 19 bp, Homo sapiens
  siRNA target sequence for RGR (NM_002921.2,701-719).
cctatgccatcctgtatct

SEQ ID NO: 241181 - DNA, 19 bp, Homo sapiens
  siRNA target sequence for RGR (NM_002921.2,800-818).
cgatcaatgccatcaacta

SEQ ID NO: 241182 - DNA, 19 bp, Homo sapiens
  siRNA target sequence for RRH (NM_006583.1,70-88).
gcaacagttcagactctaa

SEQ ID NO: 241183 - DNA, 19 bp, Homo sapiens
  siRNA target sequence for RRH (NM_006583.1,132-150).
gttgcaacttacttgatta

SEQ ID NO: 241184 - DNA, 19 bp, Homo sapiens
  siRNA target sequence for RRH (NM_006583.1,152-170).
ggcaggtatgataagtatt

SEQ ID NO: 241185 - DNA, 19 bp, Homo sapiens
  siRNA target sequence for RRH (NM_006583.1,153-171).
gcaggtatgataagtatta

SEQ ID NO: 241186 - DNA, 19 bp, Homo sapiens
  siRNA target sequence for RRH (NM_006583.1,186-204).
gttctgggcatcttcatta

SEQ ID NO: 241187 - DNA, 19 bp, Homo sapiens
  siRNA target sequence for RRH (NM_006583.1,192-210).
ggcatcttcattaagtaca

SEQ ID NO: 241188 - DNA, 19 bp, Homo sapiens
  siRNA target sequence for RRH (NM_006583.1,193-211).
gcatcttcattaagtacaa

SEQ ID NO: 241189 - DNA, 19 bp, Homo sapiens
  siRNA target sequence for RRH (NM_006583.1,335-353).
cgcaggctgtcaggtttat

SEQ ID NO: 241190 - DNA, 19 bp, Homo sapiens
  siRNA target sequence for RRH (NM_006583.1,375-393).
ggaatggcaagcattggat

SEQ ID NO: 241191 - DNA, 19 bp, Homo sapiens
  siRNA target sequence for RRH (NM_006583.1,376-394).
gaatggcaagcattggatt

SEQ ID NO: 241192 - DNA, 19 bp, Homo sapiens
  siRNA target sequence for RRH (NM_006583.1,438-456).
cctgacgtagggagaagaa

SEQ ID NO: 241193 - DNA, 19 bp, Homo sapiens
  siRNA target sequence for RRH (NM_006583.1,439-457).
ctgacgtagggagaagaat

SEQ ID NO: 241194 - DNA, 19 bp, Homo sapiens
  siRNA target sequence for RRH (NM_006583.1,441-459).
gacgtagggagaagaatga

SEQ ID NO: 241195 - DNA, 19 bp, Homo sapiens
  siRNA target sequence for RRH (NM_006583.1,454-472).
gaatgaccaccaacactta

SEQ ID NO: 241196 - DNA, 19 bp, Homo sapiens
  siRNA target sequence for RRH (NM_006583.1,467-485).
cacttacatcggcttgatt

SEQ ID NO: 241197 - DNA, 19 bp, Homo sapiens
  siRNA target sequence for RRH (NM_006583.1,469-487).
cttacatcggcttgattct

SEQ ID NO: 241198 - DNA, 19 bp, Homo sapiens
  siRNA target sequence for RRH (NM_006583.1,514-532).
gggctttgatgcctatcat

SEQ ID NO: 241199 - DNA, 19 bp, Homo sapiens
  siRNA target sequence for RRH (NM_006583.1,515-533).
ggctttgatgcctatcata

SEQ ID NO: 241200 - DNA, 19 bp, Homo sapiens
  siRNA target sequence for RRH (NM_006583.1,564-582).
ggtgctacgtgtaccataa

SEQ ID NO: 241201 - DNA, 19 bp, Homo sapiens
  siRNA target sequence for RRH (NM_006583.1,565-583).
gtgctacgtgtaccataaa

SEQ ID NO: 241202 - DNA, 19 bp, Homo sapiens
  siRNA target sequence for RRH (NM_006583.1,567-585).
gctacgtgtaccataaact

SEQ ID NO: 241203 - DNA, 19 bp, Homo sapiens
  siRNA target sequence for RRH (NM_006583.1,623-641).
gacagttattgcgataaat

SEQ ID NO: 241204 - DNA, 19 bp, Homo sapiens
  siRNA target sequence for RRH (NM_006583.1,625-643).
cagttattgcgataaattt

SEQ ID NO: 241205 - DNA, 19 bp, Homo sapiens
  siRNA target sequence for RRH (NM_006583.1,681-699).
catgtcacgctatccatta

SEQ ID NO: 241206 - DNA, 19 bp, Homo sapiens
  siRNA target sequence for RRH (NM_006583.1,686-704).
cacgctatccattaaacat

SEQ ID NO: 241207 - DNA, 19 bp, Homo sapiens
  siRNA target sequence for RRH (NM_006583.1,688-706).
cgctatccattaaacatca

SEQ ID NO: 241208 - DNA, 19 bp, Homo sapiens
  siRNA target sequence for RRH (NM_006583.1,739-757).
gagactggtcagatcagat

SEQ ID NO: 241209 - DNA, 19 bp, Homo sapiens
  siRNA target sequence for RRH (NM_006583.1,743-761).
ctggtcagatcagatagat

SEQ ID NO: 241210 - DNA, 19 bp, Homo sapiens
  siRNA target sequence for RRH (NM_006583.1,745-763).
ggtcagatcagatagatgt

SEQ ID NO: 241211 - DNA, 19 bp, Homo sapiens
  siRNA target sequence for RRH (NM_006583.1,746-764).
gtcagatcagatagatgta

SEQ ID NO: 241212 - DNA, 19 bp, Homo sapiens
  siRNA target sequence for RRH (NM_006583.1,801-819).
gtggcatggtccccttatt

SEQ ID NO: 241213 - DNA, 19 bp, Homo sapiens
  siRNA target sequence for RRH (NM_006583.1,804-822).
gcatggtccccttattcca

SEQ ID NO: 241214 - DNA, 19 bp, Homo sapiens
  siRNA target sequence for RRH (NM_006583.1,805-823).
catggtccccttattccat

SEQ ID NO: 241215 - DNA, 19 bp, Homo sapiens
  siRNA target sequence for RRH (NM_006583.1,827-845).
gtgcttatgggcttctttt

SEQ ID NO: 241216 - DNA, 19 bp, Homo sapiens
  siRNA target sequence for RRH (NM_006583.1,830-848).
cttatgggcttcttttggt

SEQ ID NO: 241217 - DNA, 19 bp, Homo sapiens
  siRNA target sequence for RRH (NM_006583.1,878-896).
catcatagctccactgttt

SEQ ID NO: 241218 - DNA, 19 bp, Homo sapiens
  siRNA target sequence for RRH (NM_006583.1,914-932).
ctataacccctgcatttat

SEQ ID NO: 241219 - DNA, 19 bp, Homo sapiens
  siRNA target sequence for RRH (NM_006583.1,950-968).
gtttcggagggcaatgctt

SEQ ID NO: 241220 - DNA, 19 bp, Homo sapiens
  siRNA target sequence for RRH (NM_006583.1,965-983).
gcttgccatgttcaaatgt

SEQ ID NO: 241221 - DNA, 19 bp, Homo sapiens
  siRNA target sequence for RRH (NM_006583.1,1020-1038).
cccatggatgtatctcaaa

SEQ ID NO: 241222 - DNA, 19 bp, Homo sapiens
  siRNA target sequence for RRH (NM_006583.1,1021-1039).
ccatggatgtatctcaaaa

SEQ ID NO: 241223 - DNA, 19 bp, Homo sapiens
  siRNA target sequence for SALPR (NM_016568.1,381-399).
cacgatagccaccatgaat

SEQ ID NO: 241224 - DNA, 19 bp, Homo sapiens
  siRNA target sequence for SALPR (NM_016568.1,383-401).
cgatagccaccatgaataa

SEQ ID NO: 241225 - DNA, 19 bp, Homo sapiens
  siRNA target sequence for SALPR (NM_016568.1,653-671).
gcaacctgctggttctcta

SEQ ID NO: 241226 - DNA, 19 bp, Homo sapiens
  siRNA target sequence for SALPR (NM_016568.1,695-713).
ggcgcaagtcctctatcaa

SEQ ID NO: 241227 - DNA, 19 bp, Homo sapiens
  siRNA target sequence for SALPR (NM_016568.1,733-751).
gcgctgacggactttcagt

SEQ ID NO: 241228 - DNA, 19 bp, Homo sapiens
  siRNA target sequence for SALPR (NM_016568.1,734-752).
cgctgacggactttcagtt

SEQ ID NO: 241229 - DNA, 19 bp, Homo sapiens
  siRNA target sequence for SALPR (NM_016568.1,735-753).
gctgacggactttcagttt

SEQ ID NO: 241230 - DNA, 19 bp, Homo sapiens
  siRNA target sequence for SALPR (NM_016568.1,783-801).
gaacgctcttgacttcaaa

SEQ ID NO: 241231 - DNA, 19 bp, Homo sapiens
  siRNA target sequence for SALPR (NM_016568.1,1192-1210).
ctgccgctgggcatcatta

SEQ ID NO: 241232 - DNA, 19 bp, Homo sapiens
  siRNA target sequence for SALPR (NM_016568.1,1196-1214).
cgctgggcatcattatctt

SEQ ID NO: 241233 - DNA, 19 bp, Homo sapiens
  siRNA target sequence for SALPR (NM_016568.1,1323-1341).
gtcgaaggtcaccaaatca

SEQ ID NO: 241234 - DNA, 19 bp, Homo sapiens
  siRNA target sequence for SALPR (NM_016568.1,1325-1343).
cgaaggtcaccaaatcagt

SEQ ID NO: 241235 - DNA, 19 bp, Homo sapiens
  siRNA target sequence for sdolf (NM_033519.1,216-234).
ccactgtggtacataggat

SEQ ID NO: 241236 - DNA, 19 bp, Homo sapiens
  siRNA target sequence for sdolf (NM_033519.1,320-338).
gccaacttcctgatactca

SEQ ID NO: 241237 - DNA, 19 bp, Homo sapiens
  siRNA target sequence for sdolf (NM_033519.1,321-339).
ccaacttcctgatactcat

SEQ ID NO: 241238 - DNA, 19 bp, Homo sapiens
  siRNA target sequence for sdolf (NM_033519.1,561-579).
ctgacacccgccacattga

SEQ ID NO: 241239 - DNA, 19 bp, Homo sapiens
  siRNA target sequence for sdolf (NM_033519.1,817-835).
catggtgactgcaatggta

SEQ ID NO: 241240 - DNA, 19 bp, Homo sapiens
  siRNA target sequence for SREB3 (NM_018969.3,311-329).
cgtccgcatcagcttatgt

SEQ ID NO: 241241 - DNA, 19 bp, Homo sapiens
  siRNA target sequence for SREB3 (NM_018969.3,370-388).
gcgggtaacgccatcttgt

SEQ ID NO: 241242 - DNA, 19 bp, Homo sapiens
  siRNA target sequence for SREB3 (NM_018969.3,418-436).
cacaaggctccttactact

SEQ ID NO: 241243 - DNA, 19 bp, Homo sapiens
  siRNA target sequence for SREB3 (NM_018969.3,536-554).
cactcagctgcaagattgt

SEQ ID NO: 241244 - DNA, 19 bp, Homo sapiens
  siRNA target sequence for SREB3 (NM_018969.3,545-563).
gcaagattgtggcctttat

SEQ ID NO: 241245 - DNA, 19 bp, Homo sapiens
  siRNA target sequence for SREB3 (NM_018969.3,744-762).
gggcacctacaagtttatt

SEQ ID NO: 241246 - DNA, 19 bp, Homo sapiens
  siRNA target sequence for SREB3 (NM_018969.3,768-786).
ggaggaccagtgcatcttt

SEQ ID NO: 241247 - DNA, 19 bp, Homo sapiens
  siRNA target sequence for SREB3 (NM_018969.3,815-833).
cgctgggcttcatgcttat

SEQ ID NO: 241248 - DNA, 19 bp, Homo sapiens
  siRNA target sequence for SREB3 (NM_018969.3,817-835).
ctgggcttcatgcttatgt

SEQ ID NO: 241249 - DNA, 19 bp, Homo sapiens
  siRNA target sequence for SREB3 (NM_018969.3,1127-1145).
cgatcacactgctctttct

SEQ ID NO: 241250 - DNA, 19 bp, Homo sapiens
  siRNA target sequence for SREB3 (NM_018969.3,1175-1193).
gctactggcgagtgtttgt

SEQ ID NO: 241251 - DNA, 19 bp, Homo sapiens
  siRNA target sequence for SREB3 (NM_018969.3,1256-1274).
ctgccgtcaacccaattgt

SEQ ID NO: 241252 - DNA, 19 bp, Homo sapiens
  siRNA target sequence for SREB3 (NM_018969.3,1258-1276).
gccgtcaacccaattgtct

SEQ ID NO: 241253 - DNA, 19 bp, Homo sapiens
  siRNA target sequence for TA4 (NM_175067.1,86-104).
cgggatcccgggtgattct

SEQ ID NO: 241254 - DNA, 19 bp, Homo sapiens
  siRNA target sequence for TA4 (NM_175067.1,93-111).
ccgggtgattctgtacata

SEQ ID NO: 241255 - DNA, 19 bp, Homo sapiens
  siRNA target sequence for TA4 (NM_175067.1,95-113).
gggtgattctgtacatagt

SEQ ID NO: 241256 - DNA, 19 bp, Homo sapiens
  siRNA target sequence for TA4 (NM_175067.1,97-115).
gtgattctgtacatagtgt

SEQ ID NO: 241257 - DNA, 19 bp, Homo sapiens
  siRNA target sequence for TA4 (NM_175067.1,301-319).
gggaggagtttttgtactt

SEQ ID NO: 241258 - DNA, 19 bp, Homo sapiens
  siRNA target sequence for TA4 (NM_175067.1,470-488).
ggatcctgcccctcatgta

SEQ ID NO: 241259 - DNA, 19 bp, Homo sapiens
  siRNA target sequence for TA4 (NM_175067.1,565-583).
ggttgtcagaccgttgtaa

SEQ ID NO: 241260 - DNA, 19 bp, Homo sapiens
  siRNA target sequence for TA4 (NM_175067.1,566-584).
gttgtcagaccgttgtaaa

SEQ ID NO: 241261 - DNA, 19 bp, Homo sapiens
  siRNA target sequence for TA4 (NM_175067.1,569-587).
gtcagaccgttgtaaatca

SEQ ID NO: 241262 - DNA, 19 bp, Homo sapiens
  siRNA target sequence for TA4 (NM_175067.1,571-589).
cagaccgttgtaaatcaaa

SEQ ID NO: 241263 - DNA, 19 bp, Homo sapiens
  siRNA target sequence for TA4 (NM_175067.1,610-628).
ctatccttctttataccta

SEQ ID NO: 241264 - DNA, 19 bp, Homo sapiens
  siRNA target sequence for TA4 (NM_175067.1,677-695).
gacaggcgaaaaagataga

SEQ ID NO: 241265 - DNA, 19 bp, Homo sapiens
  siRNA target sequence for TA4 (NM_175067.1,679-697).
caggcgaaaaagatagaaa

SEQ ID NO: 241266 - DNA, 19 bp, Homo sapiens
  siRNA target sequence for TA4 (NM_175067.1,681-699).
ggcgaaaaagatagaaaat

SEQ ID NO: 241267 - DNA, 19 bp, Homo sapiens
  siRNA target sequence for TA4 (NM_175067.1,788-806).
cagtggtagcatttatgat

SEQ ID NO: 241268 - DNA, 19 bp, Homo sapiens
  siRNA target sequence for TA4 (NM_175067.1,865-883).
cctgcctgtatttatgaga

SEQ ID NO: 241269 - DNA, 19 bp, Homo sapiens
  siRNA target sequence for TA4 (NM_175067.1,999-1017).
cagttcagcaaccatgaat

SEQ ID NO: 241270 - DNA, 19 bp, Homo sapiens
  siRNA target sequence for TAR1 (NM_138327.1,83-101).
gtttaatggtgctcataat

SEQ ID NO: 241271 - DNA, 19 bp, Homo sapiens
  siRNA target sequence for TAR1 (NM_138327.1,110-128).
cactcgttggcaatctgat

SEQ ID NO: 241272 - DNA, 19 bp, Homo sapiens
  siRNA target sequence for TAR1 (NM_138327.1,114-132).
cgttggcaatctgatagtt

SEQ ID NO: 241273 - DNA, 19 bp, Homo sapiens
  siRNA target sequence for TAR1 (NM_138327.1,119-137).
gcaatctgatagttattgt

SEQ ID NO: 241274 - DNA, 19 bp, Homo sapiens
  siRNA target sequence for TAR1 (NM_138327.1,124-142).
ctgatagttattgtttcta

SEQ ID NO: 241275 - DNA, 19 bp, Homo sapiens
  siRNA target sequence for TAR1 (NM_138327.1,126-144).
gatagttattgtttctata

SEQ ID NO: 241276 - DNA, 19 bp, Homo sapiens
  siRNA target sequence for TAR1 (NM_138327.1,299-317).
caagcaccgacattatgct

SEQ ID NO: 241277 - DNA, 19 bp, Homo sapiens
  siRNA target sequence for TAR1 (NM_138327.1,351-369).
ctccattgaccgctactat

SEQ ID NO: 241278 - DNA, 19 bp, Homo sapiens
  siRNA target sequence for TAR1 (NM_138327.1,571-589).
ggggtactgacctttatga

SEQ ID NO: 241279 - DNA, 19 bp, Homo sapiens
  siRNA target sequence for TAR1 (NM_138327.1,573-591).
ggtactgacctttatgact

SEQ ID NO: 241280 - DNA, 19 bp, Homo sapiens
  siRNA target sequence for TAR1 (NM_138327.1,574-592).
gtactgacctttatgactt

SEQ ID NO: 241281 - DNA, 19 bp, Homo sapiens
  siRNA target sequence for TAR1 (NM_138327.1,608-626).
gatctattatgttatgtgt

SEQ ID NO: 241282 - DNA, 19 bp, Homo sapiens
  siRNA target sequence for TAR1 (NM_138327.1,627-645).
ctattacagaatatatctt

SEQ ID NO: 241283 - DNA, 19 bp, Homo sapiens
  siRNA target sequence for TAR1 (NM_138327.1,768-786).
gatgggagttttcctaata

SEQ ID NO: 241284 - DNA, 19 bp, Homo sapiens
  siRNA target sequence for TAR1 (NM_138327.1,772-790).
ggagttttcctaatatgct

SEQ ID NO: 241285 - DNA, 19 bp, Homo sapiens
  siRNA target sequence for TAR1 (NM_138327.1,845-863).
cacctactttgaatgatgt

SEQ ID NO: 241286 - DNA, 19 bp, Homo sapiens
  siRNA target sequence for TAR1 (NM_138327.1,979-997).
gattcatccaggtgtaaat

SEQ ID NO: 241287 - DNA, 19 bp, Homo sapiens
  siRNA target sequence for TAR3 (NM_175057.1,31-49).
gtggagctgtgttacaaga

SEQ ID NO: 241288 - DNA, 19 bp, Homo sapiens
  siRNA target sequence for TAR3 (NM_175057.1,52-70).
gtgaacgaatcctgcatta

SEQ ID NO: 241289 - DNA, 19 bp, Homo sapiens
  siRNA target sequence for TAR3 (NM_175057.1,54-72).
gaacgaatcctgcattaaa

SEQ ID NO: 241290 - DNA, 19 bp, Homo sapiens
  siRNA target sequence for TAR3 (NM_175057.1,57-75).
cgaatcctgcattaaaact

SEQ ID NO: 241291 - DNA, 19 bp, Homo sapiens
  siRNA target sequence for TAR3 (NM_175057.1,83-101).
cgccaggtcctcgatctat

SEQ ID NO: 241292 - DNA, 19 bp, Homo sapiens
  siRNA target sequence for TAR3 (NM_175057.1,146-164).
gaaacttactggtcatgat

SEQ ID NO: 241293 - DNA, 19 bp, Homo sapiens
  siRNA target sequence for TAR3 (NM_175057.1,156-174).
ggtcatgattgctatcctt

SEQ ID NO: 241294 - DNA, 19 bp, Homo sapiens
  siRNA target sequence for TAR3 (NM_175057.1,194-212).
cacctacaaactttctgat

SEQ ID NO: 241295 - DNA, 19 bp, Homo sapiens
  siRNA target sequence for TAR3 (NM_175057.1,297-315).
ctttggggacagttactgt

SEQ ID NO: 241296 - DNA, 19 bp, Homo sapiens
  siRNA target sequence for TAR3 (NM_175057.1,406-424).
gatcctctgacctatccaa

SEQ ID NO: 241297 - DNA, 19 bp, Homo sapiens
  siRNA target sequence for TAR3 (NM_175057.1,414-432).
gacctatccaaccaagttt

SEQ ID NO: 241298 - DNA, 19 bp, Homo sapiens
  siRNA target sequence for TAR3 (NM_175057.1,470-488).
ggttcttttctgtcacata

SEQ ID NO: 241299 - DNA, 19 bp, Homo sapiens
  siRNA target sequence for TAR3 (NM_175057.1,527-545).
gaattgaggaattagtagt

SEQ ID NO: 241300 - DNA, 19 bp, Homo sapiens
  siRNA target sequence for TAR3 (NM_175057.1,586-604).
caaaactgggtcctacttt

SEQ ID NO: 241301 - DNA, 19 bp, Homo sapiens
  siRNA target sequence for TAR3 (NM_175057.1,631-649).
gtcgccatggtgtttatat

SEQ ID NO: 241302 - DNA, 19 bp, Homo sapiens
  siRNA target sequence for TAR3 (NM_175057.1,675-693).
gcatcaggctaggaagata

SEQ ID NO: 241303 - DNA, 19 bp, Homo sapiens
  siRNA target sequence for TAR3 (NM_175057.1,681-699).
ggctaggaagatagaaagt

SEQ ID NO: 241304 - DNA, 19 bp, Homo sapiens
  siRNA target sequence for TAR3 (NM_175057.1,771-789).
caaaaccttgggaattgct

SEQ ID NO: 241305 - DNA, 19 bp, Homo sapiens
  siRNA target sequence for TAR3 (NM_175057.1,837-855).
gattgatgcttatatgaat

SEQ ID NO: 241306 - DNA, 19 bp, Homo sapiens
  siRNA target sequence for TAR3 (NM_175057.1,863-881).
ctcctccttatgtttatga

SEQ ID NO: 241307 - DNA, 19 bp, Homo sapiens
  siRNA target sequence for TAR3 (NM_175057.1,865-883).
cctccttatgtttatgaga

SEQ ID NO: 241308 - DNA, 19 bp, Homo sapiens
  siRNA target sequence for TAR3 (NM_175057.1,976-994).
gtaagcggcaaggtcttaa

SEQ ID NO: 241309 - DNA, 19 bp, Homo sapiens
  siRNA target sequence for TAR3 (NM_175057.1,996-1014).
gactgattcgtcaacaact

SEQ ID NO: 241310 - DNA, 19 bp, Homo sapiens
  siRNA target sequence for TAR3 (NM_175057.1,1000-1018).
gattcgtcaacaactaatt

SEQ ID NO: 241311 - DNA, 19 bp, Homo sapiens
  siRNA target sequence for TG1019 (NM_148962.3,96-114).
gtggtggccagctgatagt

SEQ ID NO: 241312 - DNA, 19 bp, Homo sapiens
  siRNA target sequence for TG1019 (NM_148962.3,398-416).
ggcctggtggggaacagtt

SEQ ID NO: 241313 - DNA, 19 bp, Homo sapiens
  siRNA target sequence for TG1019 (NM_148962.3,399-417).
gcctggtggggaacagttt

SEQ ID NO: 241314 - DNA, 19 bp, Homo sapiens
  siRNA target sequence for TG1019 (NM_148962.3,414-432).
gtttggccctcttcatctt

SEQ ID NO: 241315 - DNA, 19 bp, Homo sapiens
  siRNA target sequence for TG1019 (NM_148962.3,519-537).
ccctccgcgtggactacta

SEQ ID NO: 241316 - DNA, 19 bp, Homo sapiens
  siRNA target sequence for TG1019 (NM_148962.3,576-594).
gcaaagtcaacctcttcat

SEQ ID NO: 241317 - DNA, 19 bp, Homo sapiens
  siRNA target sequence for TG1019 (NM_148962.3,609-627).
gcacggccagcgttgtctt

SEQ ID NO: 241318 - DNA, 19 bp, Homo sapiens
  siRNA target sequence for TG1019 (NM_148962.3,878-896).
gcgctcatcctctttgcta

SEQ ID NO: 241319 - DNA, 19 bp, Homo sapiens
  siRNA target sequence for VN1R1 (NM_020633.2,3-21).
ggttggagacacattaaaa

SEQ ID NO: 241320 - DNA, 19 bp, Homo sapiens
  siRNA target sequence for VN1R1 (NM_020633.2,8-26).
gagacacattaaaacttct

SEQ ID NO: 241321 - DNA, 19 bp, Homo sapiens
  siRNA target sequence for VN1R1 (NM_020633.2,31-49).
ccactgatgacaagatact

SEQ ID NO: 241322 - DNA, 19 bp, Homo sapiens
  siRNA target sequence for VN1R1 (NM_020633.2,32-50).
cactgatgacaagatactt

SEQ ID NO: 241323 - DNA, 19 bp, Homo sapiens
  siRNA target sequence for VN1R1 (NM_020633.2,103-121).
cccctagattttgatgaaa

SEQ ID NO: 241324 - DNA, 19 bp, Homo sapiens
  siRNA target sequence for VN1R1 (NM_020633.2,146-164).
ggattagcttcctcattca

SEQ ID NO: 241325 - DNA, 19 bp, Homo sapiens
  siRNA target sequence for VN1R1 (NM_020633.2,175-193).
gggatcctgggaaattcct

SEQ ID NO: 241326 - DNA, 19 bp, Homo sapiens
  siRNA target sequence for VN1R1 (NM_020633.2,177-195).
gatcctgggaaattccttt

SEQ ID NO: 241327 - DNA, 19 bp, Homo sapiens
  siRNA target sequence for VN1R1 (NM_020633.2,240-258).
gagacccacggacttgatt

SEQ ID NO: 241328 - DNA, 19 bp, Homo sapiens
  siRNA target sequence for VN1R1 (NM_020633.2,242-260).
gacccacggacttgattct

SEQ ID NO: 241329 - DNA, 19 bp, Homo sapiens
  siRNA target sequence for VN1R1 (NM_020633.2,244-262).
cccacggacttgattctca

SEQ ID NO: 241330 - DNA, 19 bp, Homo sapiens
  siRNA target sequence for VN1R1 (NM_020633.2,284-302).
ccatggtccttttctttaa

SEQ ID NO: 241331 - DNA, 19 bp, Homo sapiens
  siRNA target sequence for VN1R1 (NM_020633.2,362-380).
gtaagtttgtcttttatta

SEQ ID NO: 241332 - DNA, 19 bp, Homo sapiens
  siRNA target sequence for VN1R1 (NM_020633.2,384-402).
cagggtgggcacaagagtt

SEQ ID NO: 241333 - DNA, 19 bp, Homo sapiens
  siRNA target sequence for VN1R1 (NM_020633.2,420-438).
ccttctcaatggattccaa

SEQ ID NO: 241334 - DNA, 19 bp, Homo sapiens
  siRNA target sequence for VN1R1 (NM_020633.2,431-449).
gattccaagccattaagct

SEQ ID NO: 241335 - DNA, 19 bp, Homo sapiens
  siRNA target sequence for VN1R1 (NM_020633.2,448-466).
ctcaaccccagtatatgca

SEQ ID NO: 241336 - DNA, 19 bp, Homo sapiens
  siRNA target sequence for VN1R1 (NM_020633.2,488-506).
gatccccaaggtttattga

SEQ ID NO: 241337 - DNA, 19 bp, Homo sapiens
  siRNA target sequence for VN1R1 (NM_020633.2,535-553).
catgtcttgatgaatgcat

SEQ ID NO: 241338 - DNA, 19 bp, Homo sapiens
  siRNA target sequence for VN1R1 (NM_020633.2,568-586).
gtgaatggcccactgaata

SEQ ID NO: 241339 - DNA, 19 bp, Homo sapiens
  siRNA target sequence for VN1R1 (NM_020633.2,575-593).
gcccactgaatagcaaaaa

SEQ ID NO: 241340 - DNA, 19 bp, Homo sapiens
  siRNA target sequence for VN1R1 (NM_020633.2,630-648).
caaagcatcaaagagattt

SEQ ID NO: 241341 - DNA, 19 bp, Homo sapiens
  siRNA target sequence for VN1R1 (NM_020633.2,653-671).
cattacatgcagtcttata

SEQ ID NO: 241342 - DNA, 19 bp, Homo sapiens
  siRNA target sequence for VN1R1 (NM_020633.2,834-852).
ggtgagctccttttttgtt

SEQ ID NO: 241343 - DNA, 19 bp, Homo sapiens
  siRNA target sequence for VN1R1 (NM_020633.2,855-873).
ctattcagtccatagtttt

SEQ ID NO: 241344 - DNA, 19 bp, Homo sapiens
  siRNA target sequence for VN1R1 (NM_020633.2,884-902).
ggacaactgtagttgcaaa

SEQ ID NO: 241345 - DNA, 19 bp, Homo sapiens
  siRNA target sequence for VN1R1 (NM_020633.2,931-949).
gtgttggtcgcctcatgtt

SEQ ID NO: 241346 - DNA, 19 bp, Homo sapiens
  siRNA target sequence for VN1R1 (NM_020633.2,964-982).
ccttttgtcctcatcatga

SEQ ID NO: 241347 - DNA, 19 bp, Homo sapiens
  siRNA target sequence for VN1R2 (NM_173856.1,265-283).
gggctggaccctacactat

SEQ ID NO: 241348 - DNA, 19 bp, Homo sapiens
  siRNA target sequence for VN1R2 (NM_173856.1,266-284).
ggctggaccctacactatt

SEQ ID NO: 241349 - DNA, 19 bp, Homo sapiens
  siRNA target sequence for VN1R2 (NM_173856.1,278-296).
cactattccaggtagttgt

SEQ ID NO: 241350 - DNA, 19 bp, Homo sapiens
  siRNA target sequence for VN1R2 (NM_173856.1,307-325).
gggaatttttcactcttat

SEQ ID NO: 241351 - DNA, 19 bp, Homo sapiens
  siRNA target sequence for VN1R2 (NM_173856.1,412-430).
gttatcctatctaaaagaa

SEQ ID NO: 241352 - DNA, 19 bp, Homo sapiens
  siRNA target sequence for VN1R2 (NM_173856.1,434-452).
cagagaccatggcaacttt

SEQ ID NO: 241353 - DNA, 19 bp, Homo sapiens
  siRNA target sequence for VN1R2 (NM_173856.1,454-472).
gggttgaaacattttgaca

SEQ ID NO: 241354 - DNA, 19 bp, Homo sapiens
  siRNA target sequence for VN1R2 (NM_173856.1,456-474).
gttgaaacattttgacaat

SEQ ID NO: 241355 - DNA, 19 bp, Homo sapiens
  siRNA target sequence for VN1R2 (NM_173856.1,607-625).
gtaaaagccccgacataca

SEQ ID NO: 241356 - DNA, 19 bp, Homo sapiens
  siRNA target sequence for VN1R2 (NM_173856.1,654-672).
cttccacatgctggtaaat

SEQ ID NO: 241357 - DNA, 19 bp, Homo sapiens
  siRNA target sequence for VN1R2 (NM_173856.1,746-764).
gttctgccccacttagtga

SEQ ID NO: 241358 - DNA, 19 bp, Homo sapiens
  siRNA target sequence for VN1R2 (NM_173856.1,752-770).
ccccacttagtgatgaagt

SEQ ID NO: 241359 - DNA, 19 bp, Homo sapiens
  siRNA target sequence for VN1R2 (NM_173856.1,795-813).
gacatccttccatgatgtt

SEQ ID NO: 241360 - DNA, 19 bp, Homo sapiens
  siRNA target sequence for VN1R2 (NM_173856.1,842-860).
gcagctccatcgttttggt

SEQ ID NO: 241361 - DNA, 19 bp, Homo sapiens
  siRNA target sequence for VN1R2 (NM_173856.1,848-866).
ccatcgttttggtcttgta

SEQ ID NO: 241362 - DNA, 19 bp, Homo sapiens
  siRNA target sequence for VN1R2 (NM_173856.1,880-898).
caggtacaacacatctgta

SEQ ID NO: 241363 - DNA, 19 bp, Homo sapiens
  siRNA target sequence for VN1R2 (NM_173856.1,960-978).
ggtgagcacctttgcatta

SEQ ID NO: 241364 - DNA, 19 bp, Homo sapiens
  siRNA target sequence for VN1R2 (NM_173856.1,965-983).
gcacctttgcattatgtta

SEQ ID NO: 241365 - DNA, 19 bp, Homo sapiens
  siRNA target sequence for VN1R2 (NM_173856.1,996-1014).
catcacctacgtttattta

SEQ ID NO: 241366 - DNA, 19 bp, Homo sapiens
  siRNA target sequence for VN1R2 (NM_173856.1,999-1017).
cacctacgtttatttagct

SEQ ID NO: 241367 - DNA, 19 bp, Homo sapiens
  siRNA target sequence for VN1R2 (NM_173856.1,1015-1033).
gctctcttcgataattcca

SEQ ID NO: 241368 - DNA, 19 bp, Homo sapiens
  siRNA target sequence for VN1R2 (NM_173856.1,1079-1097).
caactattagcccttttgt

SEQ ID NO: 241369 - DNA, 19 bp, Homo sapiens
  siRNA target sequence for VN1R3 (NM_174980.1,14-32).
cctccaaggattttgcaat

SEQ ID NO: 241370 - DNA, 19 bp, Homo sapiens
  siRNA target sequence for VN1R3 (NM_174980.1,15-33).
ctccaaggattttgcaata

SEQ ID NO: 241371 - DNA, 19 bp, Homo sapiens
  siRNA target sequence for VN1R3 (NM_174980.1,28-46).
gcaataggcatgatcttat

SEQ ID NO: 241372 - DNA, 19 bp, Homo sapiens
  siRNA target sequence for VN1R3 (NM_174980.1,85-103).
cttctctaccactatagtt

SEQ ID NO: 241373 - DNA, 19 bp, Homo sapiens
  siRNA target sequence for VN1R3 (NM_174980.1,90-108).
ctaccactatagtttcctt

SEQ ID NO: 241374 - DNA, 19 bp, Homo sapiens
  siRNA target sequence for VN1R3 (NM_174980.1,110-128).
gtttcaccagaggtatgtt

SEQ ID NO: 241375 - DNA, 19 bp, Homo sapiens
  siRNA target sequence for VN1R3 (NM_174980.1,167-185).
ccaactccttggttatact

SEQ ID NO: 241376 - DNA, 19 bp, Homo sapiens
  siRNA target sequence for VN1R3 (NM_174980.1,239-257).
gtgatattggatgcaaatt

SEQ ID NO: 241377 - DNA, 19 bp, Homo sapiens
  siRNA target sequence for VN1R3 (NM_174980.1,369-387).
gaagctacatgctcacaaa

SEQ ID NO: 241378 - DNA, 19 bp, Homo sapiens
  siRNA target sequence for VN1R3 (NM_174980.1,376-394).
catgctcacaaatacatca

SEQ ID NO: 241379 - DNA, 19 bp, Homo sapiens
  siRNA target sequence for VN1R3 (NM_174980.1,424-442).
ctgaacacgctggtaaata

SEQ ID NO: 241380 - DNA, 19 bp, Homo sapiens
  siRNA target sequence for VN1R3 (NM_174980.1,429-447).
cacgctggtaaatattact

SEQ ID NO: 241381 - DNA, 19 bp, Homo sapiens
  siRNA target sequence for VN1R3 (NM_174980.1,431-449).
cgctggtaaatattactgt

SEQ ID NO: 241382 - DNA, 19 bp, Homo sapiens
  siRNA target sequence for VN1R3 (NM_174980.1,553-571).
catattgtcttgttatcat

SEQ ID NO: 241383 - DNA, 19 bp, Homo sapiens
  siRNA target sequence for VN1R3 (NM_174980.1,564-582).
gttatcatcccttgatgtt

SEQ ID NO: 241384 - DNA, 19 bp, Homo sapiens
  siRNA target sequence for VN1R3 (NM_174980.1,611-629).
gtggctccatggtttttat

SEQ ID NO: 241385 - DNA, 19 bp, Homo sapiens
  siRNA target sequence for VN1R3 (NM_174980.1,614-632).
gctccatggtttttatcct

SEQ ID NO: 241386 - DNA, 19 bp, Homo sapiens
  siRNA target sequence for VN1R3 (NM_174980.1,732-750).
gagcaccttgtgttacttt

SEQ ID NO: 241387 - DNA, 19 bp, Homo sapiens
  siRNA target sequence for VN1R4 (NM_173857.1,19-37).
gcagtgggaatgatcttat

SEQ ID NO: 241388 - DNA, 19 bp, Homo sapiens
  siRNA target sequence for VN1R4 (NM_173857.1,60-78).
ggggagcttctctgttctt

SEQ ID NO: 241389 - DNA, 19 bp, Homo sapiens
  siRNA target sequence for VN1R4 (NM_173857.1,82-100).
cattatctctccttttact

SEQ ID NO: 241390 - DNA, 19 bp, Homo sapiens
  siRNA target sequence for VN1R4 (NM_173857.1,113-131).
ggttaaggtccacagattt

SEQ ID NO: 241391 - DNA, 19 bp, Homo sapiens
  siRNA target sequence for VN1R4 (NM_173857.1,145-163).
ctgattgtagccaacttct

SEQ ID NO: 241392 - DNA, 19 bp, Homo sapiens
  siRNA target sequence for VN1R4 (NM_173857.1,147-165).
gattgtagccaacttctta

SEQ ID NO: 241393 - DNA, 19 bp, Homo sapiens
  siRNA target sequence for VN1R4 (NM_173857.1,162-180).
cttagctctccgctgtaaa

SEQ ID NO: 241394 - DNA, 19 bp, Homo sapiens
  siRNA target sequence for VN1R4 (NM_173857.1,200-218).
cagcttttggggttagata

SEQ ID NO: 241395 - DNA, 19 bp, Homo sapiens
  siRNA target sequence for VN1R4 (NM_173857.1,208-226).
ggggttagatattttctca

SEQ ID NO: 241396 - DNA, 19 bp, Homo sapiens
  siRNA target sequence for VN1R4 (NM_173857.1,209-227).
gggttagatattttctcaa

SEQ ID NO: 241397 - DNA, 19 bp, Homo sapiens
  siRNA target sequence for VN1R4 (NM_173857.1,230-248).
ctcttgggtgcaaacttgt

SEQ ID NO: 241398 - DNA, 19 bp, Homo sapiens
  siRNA target sequence for VN1R4 (NM_173857.1,344-362).
ggtgggcaaaacttaaaga

SEQ ID NO: 241399 - DNA, 19 bp, Homo sapiens
  siRNA target sequence for VN1R4 (NM_173857.1,347-365).
gggcaaaacttaaagagaa

SEQ ID NO: 241400 - DNA, 19 bp, Homo sapiens
  siRNA target sequence for VN1R4 (NM_173857.1,413-431).
gcatgttggtaaacatcat

SEQ ID NO: 241401 - DNA, 19 bp, Homo sapiens
  siRNA target sequence for VN1R4 (NM_173857.1,483-501).
cgaggatttgggatactgt

SEQ ID NO: 241402 - DNA, 19 bp, Homo sapiens
  siRNA target sequence for VN1R4 (NM_173857.1,505-523).
gggggaggcaacaacaaaa

SEQ ID NO: 241403 - DNA, 19 bp, Homo sapiens
  siRNA target sequence for VN1R4 (NM_173857.1,506-524).
ggggaggcaacaacaaaat

SEQ ID NO: 241404 - DNA, 19 bp, Homo sapiens
  siRNA target sequence for VN1R4 (NM_173857.1,533-551).
cactgcgtgcaatgttgtt

SEQ ID NO: 241405 - DNA, 19 bp, Homo sapiens
  siRNA target sequence for VN1R4 (NM_173857.1,712-730).
ctggtgagcacctttgtgt

SEQ ID NO: 241406 - DNA, 19 bp, Homo sapiens
  siRNA target sequence for VN1R4 (NM_173857.1,777-795).
ggataatcccaatagttta

SEQ ID NO: 241407 - DNA, 19 bp, Homo sapiens
  siRNA target sequence for VN1R4 (NM_173857.1,804-822).
cacttcagccttaatgagt

SEQ ID NO: 241408 - DNA, 19 bp, Homo sapiens
  siRNA target sequence for VN1R4 (NM_173857.1,812-830).
ccttaatgagtgtatgttt

SEQ ID NO: 241409 - DNA, 19 bp, Homo sapiens
  siRNA target sequence for CASR (NM_000388.2,439-457).
gaccagcgagcccaaaaga

SEQ ID NO: 241410 - DNA, 19 bp, Homo sapiens
  siRNA target sequence for CASR (NM_000388.2,536-554).
cggagtctgtggaatgtat

SEQ ID NO: 241411 - DNA, 19 bp, Homo sapiens
  siRNA target sequence for CASR (NM_000388.2,538-556).
gagtctgtggaatgtatca

SEQ ID NO: 241412 - DNA, 19 bp, Homo sapiens
  siRNA target sequence for CASR (NM_000388.2,544-562).
gtggaatgtatcaggtata

SEQ ID NO: 241413 - DNA, 19 bp, Homo sapiens
  siRNA target sequence for CASR (NM_000388.2,578-596).
gctggttacaggctatgat

SEQ ID NO: 241414 - DNA, 19 bp, Homo sapiens
  siRNA target sequence for CASR (NM_000388.2,579-597).
ctggttacaggctatgata

SEQ ID NO: 241415 - DNA, 19 bp, Homo sapiens
  siRNA target sequence for CASR (NM_000388.2,601-619).
gccatagaggagataaaca

SEQ ID NO: 241416 - DNA, 19 bp, Homo sapiens
  siRNA target sequence for CASR (NM_000388.2,647-665).
cgctgggatacaggatatt

SEQ ID NO: 241417 - DNA, 19 bp, Homo sapiens
  siRNA target sequence for CASR (NM_000388.2,671-689).
cttgcaacaccgtttctaa

SEQ ID NO: 241418 - DNA, 19 bp, Homo sapiens
  siRNA target sequence for CASR (NM_000388.2,718-736).
gctcaaaacaaaattgatt

SEQ ID NO: 241419 - DNA, 19 bp, Homo sapiens
  siRNA target sequence for CASR (NM_000388.2,771-789).
gcacattccctctacgatt

SEQ ID NO: 241420 - DNA, 19 bp, Homo sapiens
  siRNA target sequence for CASR (NM_000388.2,821-839).
ccacggcagtggcaaatct

SEQ ID NO: 241421 - DNA, 19 bp, Homo sapiens
  siRNA target sequence for CASR (NM_000388.2,855-873).
cattccccaggtcagttat

SEQ ID NO: 241422 - DNA, 19 bp, Homo sapiens
  siRNA target sequence for CASR (NM_000388.2,887-905).
gactcctcagcaacaagaa

SEQ ID NO: 241423 - DNA, 19 bp, Homo sapiens
  siRNA target sequence for CASR (NM_000388.2,892-910).
ctcagcaacaagaatcaat

SEQ ID NO: 241424 - DNA, 19 bp, Homo sapiens
  siRNA target sequence for CASR (NM_000388.2,924-942).
ccgaaccatccccaatgat

SEQ ID NO: 241425 - DNA, 19 bp, Homo sapiens
  siRNA target sequence for CASR (NM_000388.2,926-944).
gaaccatccccaatgatga

SEQ ID NO: 241426 - DNA, 19 bp, Homo sapiens
  siRNA target sequence for CASR (NM_000388.2,964-982).
gcagacatcatcgagtatt

SEQ ID NO: 241427 - DNA, 19 bp, Homo sapiens
  siRNA target sequence for CASR (NM_000388.2,965-983).
cagacatcatcgagtattt

SEQ ID NO: 241428 - DNA, 19 bp, Homo sapiens
  siRNA target sequence for CASR (NM_000388.2,1135-1153).
gtggtagaggtgattcaaa

SEQ ID NO: 241429 - DNA, 19 bp, Homo sapiens
  siRNA target sequence for CASR (NM_000388.2,1137-1155).
ggtagaggtgattcaaaat

SEQ ID NO: 241430 - DNA, 19 bp, Homo sapiens
  siRNA target sequence for CASR (NM_000388.2,1138-1156).
gtagaggtgattcaaaatt

SEQ ID NO: 241431 - DNA, 19 bp, Homo sapiens
  siRNA target sequence for CASR (NM_000388.2,1355-1373).
caggcttccgggaattcct

SEQ ID NO: 241432 - DNA, 19 bp, Homo sapiens
  siRNA target sequence for CASR (NM_000388.2,1395-1413).
gtctgtccacaatggtttt

SEQ ID NO: 241433 - DNA, 19 bp, Homo sapiens
  siRNA target sequence for CASR (NM_000388.2,1477-1495).
cctgtggacacctttctga

SEQ ID NO: 241434 - DNA, 19 bp, Homo sapiens
  siRNA target sequence for CASR (NM_000388.2,1494-1512).
gagaggtcacgaagaaagt

SEQ ID NO: 241435 - DNA, 19 bp, Homo sapiens
  siRNA target sequence for CASR (NM_000388.2,1507-1525).
gaaagtggcgacaggttta

SEQ ID NO: 241436 - DNA, 19 bp, Homo sapiens
  siRNA target sequence for CASR (NM_000388.2,1511-1529).
gtggcgacaggtttagcaa

SEQ ID NO: 241437 - DNA, 19 bp, Homo sapiens
  siRNA target sequence for CASR (NM_000388.2,1556-1574).
gtacaggggatgagaacat

SEQ ID NO: 241438 - DNA, 19 bp, Homo sapiens
  siRNA target sequence for CASR (NM_000388.2,1580-1598).
gtgtcgagaccccttacat

SEQ ID NO: 241439 - DNA, 19 bp, Homo sapiens
  siRNA target sequence for CASR (NM_000388.2,1584-1602).
cgagaccccttacatagat

SEQ ID NO: 241440 - DNA, 19 bp, Homo sapiens
  siRNA target sequence for CASR (NM_000388.2,1585-1603).
gagaccccttacatagatt

SEQ ID NO: 241441 - DNA, 19 bp, Homo sapiens
  siRNA target sequence for CASR (NM_000388.2,1607-1625).
cgcatttacggatatccta

SEQ ID NO: 241442 - DNA, 19 bp, Homo sapiens
  siRNA target sequence for CASR (NM_000388.2,1615-1633).
cggatatcctacaatgtgt

SEQ ID NO: 241443 - DNA, 19 bp, Homo sapiens
  siRNA target sequence for CASR (NM_000388.2,1654-1672).
gcccacgccttgcaagata

SEQ ID NO: 241444 - DNA, 19 bp, Homo sapiens
  siRNA target sequence for CASR (NM_000388.2,1657-1675).
cacgccttgcaagatatat

SEQ ID NO: 241445 - DNA, 19 bp, Homo sapiens
  siRNA target sequence for CASR (NM_000388.2,1659-1677).
cgccttgcaagatatatat

SEQ ID NO: 241446 - DNA, 19 bp, Homo sapiens
  siRNA target sequence for CASR (NM_000388.2,1660-1678).
gccttgcaagatatatata

SEQ ID NO: 241447 - DNA, 19 bp, Homo sapiens
  siRNA target sequence for CASR (NM_000388.2,1715-1733).
cctgtgcagacatcaagaa

SEQ ID NO: 241448 - DNA, 19 bp, Homo sapiens
  siRNA target sequence for CASR (NM_000388.2,1761-1779).
cctacggcatctaaacttt

SEQ ID NO: 241449 - DNA, 19 bp, Homo sapiens
  siRNA target sequence for CASR (NM_000388.2,1762-1780).
ctacggcatctaaacttta

SEQ ID NO: 241450 - DNA, 19 bp, Homo sapiens
  siRNA target sequence for CASR (NM_000388.2,1832-1850).
ggaactattccatcatcaa

SEQ ID NO: 241451 - DNA, 19 bp, Homo sapiens
  siRNA target sequence for CASR (NM_000388.2,1870-1888).
gatggctccatcgtgttta

SEQ ID NO: 241452 - DNA, 19 bp, Homo sapiens
  siRNA target sequence for CASR (NM_000388.2,1874-1892).
gctccatcgtgtttaagga

SEQ ID NO: 241453 - DNA, 19 bp, Homo sapiens
  siRNA target sequence for CASR (NM_000388.2,1875-1893).
ctccatcgtgtttaaggaa

SEQ ID NO: 241454 - DNA, 19 bp, Homo sapiens
  siRNA target sequence for CASR (NM_000388.2,1924-1942).
ggagaaagactcttcatca

SEQ ID NO: 241455 - DNA, 19 bp, Homo sapiens
  siRNA target sequence for CASR (NM_000388.2,2019-2037).
gaccaggaaagggatcatt

SEQ ID NO: 241456 - DNA, 19 bp, Homo sapiens
  siRNA target sequence for CASR (NM_000388.2,2021-2039).
ccaggaaagggatcattga

SEQ ID NO: 241457 - DNA, 19 bp, Homo sapiens
  siRNA target sequence for CASR (NM_000388.2,2047-2065).
cccacctgctgctttgagt

SEQ ID NO: 241458 - DNA, 19 bp, Homo sapiens
  siRNA target sequence for CASR (NM_000388.2,2078-2096).
ctgatggggagtatagtga

SEQ ID NO: 241459 - DNA, 19 bp, Homo sapiens
  siRNA target sequence for CASR (NM_000388.2,2171-2189).
ccaaggagatcgagtttct

SEQ ID NO: 241460 - DNA, 19 bp, Homo sapiens
  siRNA target sequence for CASR (NM_000388.2,2231-2249).
ccgtgctgggcattttcct

SEQ ID NO: 241461 - DNA, 19 bp, Homo sapiens
  siRNA target sequence for CASR (NM_000388.2,2284-2302).
cgcaacacacccattgtca

SEQ ID NO: 241462 - DNA, 19 bp, Homo sapiens
  siRNA target sequence for CASR (NM_000388.2,2638-2656).
ctggaggatgagatcatct

SEQ ID NO: 241463 - DNA, 19 bp, Homo sapiens
  siRNA target sequence for CASR (NM_000388.2,2820-2838).
cgtctggatctccttcatt

SEQ ID NO: 241464 - DNA, 19 bp, Homo sapiens
  siRNA target sequence for CASR (NM_000388.2,2999-3017).
ccgcagctcacgctttcaa

SEQ ID NO: 241465 - DNA, 19 bp, Homo sapiens
  siRNA target sequence for CASR (NM_000388.2,3258-3276).
caagcagaaggtcatcttt

SEQ ID NO: 241466 - DNA, 19 bp, Homo sapiens
  siRNA target sequence for CASR (NM_000388.2,3328-3346).
gccatggcccacaggaatt

SEQ ID NO: 241467 - DNA, 19 bp, Homo sapiens
  siRNA target sequence for CASR (NM_000388.2,3330-3348).
catggcccacaggaattct

SEQ ID NO: 241468 - DNA, 19 bp, Homo sapiens
  siRNA target sequence for CASR (NM_000388.2,3425-3443).
gcggggaaacggacttaga

SEQ ID NO: 241469 - DNA, 19 bp, Homo sapiens
  siRNA target sequence for CASR (NM_000388.2,3519-3537).
gttgtccccagcacttgta

SEQ ID NO: 241470 - DNA, 19 bp, Homo sapiens
  siRNA target sequence for CASR (NM_000388.2,3545-3563).
gttcacagagctttgtcat

SEQ ID NO: 241471 - DNA, 19 bp, Homo sapiens
  siRNA target sequence for CASR (NM_000388.2,3568-3586).
ggtggaggcagcactgtta

SEQ ID NO: 241472 - DNA, 19 bp, Homo sapiens
  siRNA target sequence for CASR (NM_000388.2,3578-3596).
gcactgttacagaaaacgt

SEQ ID NO: 241473 - DNA, 19 bp, Homo sapiens
  siRNA target sequence for CASR (NM_000388.2,3579-3597).
cactgttacagaaaacgta

SEQ ID NO: 241474 - DNA, 19 bp, Homo sapiens
  siRNA target sequence for GPRC5B (NM_016235.1,343-361).
gtgcggctgcccttcatca

SEQ ID NO: 241475 - DNA, 19 bp, Homo sapiens
  siRNA target sequence for GPRC5B (NM_016235.1,1116-1134).
ctccatggatgaacacaat

SEQ ID NO: 241476 - DNA, 19 bp, Homo sapiens
  siRNA target sequence for GPRC5B (NM_016235.1,1207-1225).
cccagcgctccgtttagaa

SEQ ID NO: 241477 - DNA, 19 bp, Homo sapiens
  siRNA target sequence for GPRC6A (NM_148963.1,25-43).
ggcattcttaattatacta

SEQ ID NO: 241478 - DNA, 19 bp, Homo sapiens
  siRNA target sequence for GPRC6A (NM_148963.1,111-129).
ccacttctccgggacatat

SEQ ID NO: 241479 - DNA, 19 bp, Homo sapiens
  siRNA target sequence for GPRC6A (NM_148963.1,114-132).
cttctccgggacatatcat

SEQ ID NO: 241480 - DNA, 19 bp, Homo sapiens
  siRNA target sequence for GPRC6A (NM_148963.1,117-135).
ctccgggacatatcataat

SEQ ID NO: 241481 - DNA, 19 bp, Homo sapiens
  siRNA target sequence for GPRC6A (NM_148963.1,121-139).
gggacatatcataattgga

SEQ ID NO: 241482 - DNA, 19 bp, Homo sapiens
  siRNA target sequence for GPRC6A (NM_148963.1,186-204).
ccagacgaccacaaatcca

SEQ ID NO: 241483 - DNA, 19 bp, Homo sapiens
  siRNA target sequence for GPRC6A (NM_148963.1,356-374).
gccactctgaggtttcttt

SEQ ID NO: 241484 - DNA, 19 bp, Homo sapiens
  siRNA target sequence for GPRC6A (NM_148963.1,362-380).
ctgaggtttctttctaaat

SEQ ID NO: 241485 - DNA, 19 bp, Homo sapiens
  siRNA target sequence for GPRC6A (NM_148963.1,403-421).
ggagtttaagtgtgactat

SEQ ID NO: 241486 - DNA, 19 bp, Homo sapiens
  siRNA target sequence for GPRC6A (NM_148963.1,404-422).
gagtttaagtgtgactatt

SEQ ID NO: 241487 - DNA, 19 bp, Homo sapiens
  siRNA target sequence for GPRC6A (NM_148963.1,426-444).
gctacatgccaagagttaa

SEQ ID NO: 241488 - DNA, 19 bp, Homo sapiens
  siRNA target sequence for GPRC6A (NM_148963.1,440-458).
gttaaggctgtcataggtt

SEQ ID NO: 241489 - DNA, 19 bp, Homo sapiens
  siRNA target sequence for GPRC6A (NM_148963.1,456-474).
gttctgggtactcagaaat

SEQ ID NO: 241490 - DNA, 19 bp, Homo sapiens
  siRNA target sequence for GPRC6A (NM_148963.1,485-503).
gtctccaggatgttgaatt

SEQ ID NO: 241491 - DNA, 19 bp, Homo sapiens
  siRNA target sequence for GPRC6A (NM_148963.1,520-538).
ggtgggttatgaatcaact

SEQ ID NO: 241492 - DNA, 19 bp, Homo sapiens
  siRNA target sequence for GPRC6A (NM_148963.1,554-572).
gacaaaattcgctttcctt

SEQ ID NO: 241493 - DNA, 19 bp, Homo sapiens
  siRNA target sequence for GPRC6A (NM_148963.1,646-664).
gaactggattggcatcata

SEQ ID NO: 241494 - DNA, 19 bp, Homo sapiens
  siRNA target sequence for GPRC6A (NM_148963.1,683-701).
ggacgattggctcttaaca

SEQ ID NO: 241495 - DNA, 19 bp, Homo sapiens
  siRNA target sequence for GPRC6A (NM_148963.1,686-704).
cgattggctcttaacactt

SEQ ID NO: 241496 - DNA, 19 bp, Homo sapiens
  siRNA target sequence for GPRC6A (NM_148963.1,687-705).
gattggctcttaacacttt

SEQ ID NO: 241497 - DNA, 19 bp, Homo sapiens
  siRNA target sequence for GPRC6A (NM_148963.1,730-748).
cgtgtgcatagccttcaaa

SEQ ID NO: 241498 - DNA, 19 bp, Homo sapiens
  siRNA target sequence for GPRC6A (NM_148963.1,780-798).
ccattgaagtcagaatcaa

SEQ ID NO: 241499 - DNA, 19 bp, Homo sapiens
  siRNA target sequence for GPRC6A (NM_148963.1,824-842).
gaagcccaggttaatgtca

SEQ ID NO: 241500 - DNA, 19 bp, Homo sapiens
  siRNA target sequence for GPRC6A (NM_148963.1,858-876).
ggcaattccatgtttttga

SEQ ID NO: 241501 - DNA, 19 bp, Homo sapiens
  siRNA target sequence for GPRC6A (NM_148963.1,859-877).
gcaattccatgtttttgat

SEQ ID NO: 241502 - DNA, 19 bp, Homo sapiens
  siRNA target sequence for GPRC6A (NM_148963.1,913-931).
gatgtggattgctagtgat

SEQ ID NO: 241503 - DNA, 19 bp, Homo sapiens
  siRNA target sequence for GPRC6A (NM_148963.1,916-934).
gtggattgctagtgataat

SEQ ID NO: 241504 - DNA, 19 bp, Homo sapiens
  siRNA target sequence for GPRC6A (NM_148963.1,952-970).
gattaccaccattcctaat

SEQ ID NO: 241505 - DNA, 19 bp, Homo sapiens
  siRNA target sequence for GPRC6A (NM_148963.1,992-1010).
gtagggtttgcctttagaa

SEQ ID NO: 241506 - DNA, 19 bp, Homo sapiens
  siRNA target sequence for GPRC6A (NM_148963.1,1002-1020).
cctttagaagagggaatat

SEQ ID NO: 241507 - DNA, 19 bp, Homo sapiens
  siRNA target sequence for GPRC6A (NM_148963.1,1069-1087).
cagtcacaaactcttacat

SEQ ID NO: 241508 - DNA, 19 bp, Homo sapiens
  siRNA target sequence for GPRC6A (NM_148963.1,1133-1151).
gatttgagtcaatgcatat

SEQ ID NO: 241509 - DNA, 19 bp, Homo sapiens
  siRNA target sequence for GPRC6A (NM_148963.1,1146-1164).
gcatattcaatcattctca

SEQ ID NO: 241510 - DNA, 19 bp, Homo sapiens
  siRNA target sequence for GPRC6A (NM_148963.1,1246-1264).
gccaggactcattcatagt

SEQ ID NO: 241511 - DNA, 19 bp, Homo sapiens
  siRNA target sequence for GPRC6A (NM_148963.1,1247-1265).
ccaggactcattcatagta

SEQ ID NO: 241512 - DNA, 19 bp, Homo sapiens
  siRNA target sequence for GPRC6A (NM_148963.1,1248-1266).
caggactcattcatagtat

SEQ ID NO: 241513 - DNA, 19 bp, Homo sapiens
  siRNA target sequence for GPRC6A (NM_148963.1,1275-1293).
cagtgtttgcccttggtta

SEQ ID NO: 241514 - DNA, 19 bp, Homo sapiens
  siRNA target sequence for GPRC6A (NM_148963.1,1330-1348).
gaaccccaacgcctttcaa

SEQ ID NO: 241515 - DNA, 19 bp, Homo sapiens
  siRNA target sequence for GPRC6A (NM_148963.1,1364-1382).
ggtgtgctaaaaaatgtga

SEQ ID NO: 241516 - DNA, 19 bp, Homo sapiens
  siRNA target sequence for GPRC6A (NM_148963.1,1387-1405).
cactgatggatggaattca

SEQ ID NO: 241517 - DNA, 19 bp, Homo sapiens
  siRNA target sequence for GPRC6A (NM_148963.1,1415-1433).
gatgctcacggggatttaa

SEQ ID NO: 241518 - DNA, 19 bp, Homo sapiens
  siRNA target sequence for GPRC6A (NM_148963.1,1418-1436).
gctcacggggatttaaata

SEQ ID NO: 241519 - DNA, 19 bp, Homo sapiens
  siRNA target sequence for GPRC6A (NM_148963.1,1473-1491).
gacacatgactgtcactaa

SEQ ID NO: 241520 - DNA, 19 bp, Homo sapiens
  siRNA target sequence for GPRC6A (NM_148963.1,1475-1493).
cacatgactgtcactaaga

SEQ ID NO: 241521 - DNA, 19 bp, Homo sapiens
  siRNA target sequence for GPRC6A (NM_148963.1,1565-1583).
cttaagcaaattcaatcta

SEQ ID NO: 241522 - DNA, 19 bp, Homo sapiens
  siRNA target sequence for GPRC6A (NM_148963.1,1623-1641).
ctacaagaagtcaacacat

SEQ ID NO: 241523 - DNA, 19 bp, Homo sapiens
  siRNA target sequence for GPRC6A (NM_148963.1,1637-1655).
cacatctgttgctatgaat

SEQ ID NO: 241524 - DNA, 19 bp, Homo sapiens
  siRNA target sequence for GPRC6A (NM_148963.1,1660-1678).
gaactgtcctgaaaatcat

SEQ ID NO: 241525 - DNA, 19 bp, Homo sapiens
  siRNA target sequence for GPRC6A (NM_148963.1,1708-1726).
ccttttatgcaacaacaaa

SEQ ID NO: 241526 - DNA, 19 bp, Homo sapiens
  siRNA target sequence for GPRC6A (NM_148963.1,1739-1757).
cctgttaggagcactatgt

SEQ ID NO: 241527 - DNA, 19 bp, Homo sapiens
  siRNA target sequence for GPRC6A (NM_148963.1,1825-1843).
cctactgggaatcatattt

SEQ ID NO: 241528 - DNA, 19 bp, Homo sapiens
  siRNA target sequence for GPRC6A (NM_148963.1,1847-1865).
ctggttgttggcataatat

SEQ ID NO: 241529 - DNA, 19 bp, Homo sapiens
  siRNA target sequence for GPRC6A (NM_148963.1,1882-1900).
cacacctgttgtgaaatca

SEQ ID NO: 241530 - DNA, 19 bp, Homo sapiens
  siRNA target sequence for GPRC6A (NM_148963.1,1982-2000).
ccacaagacttcacatgta

SEQ ID NO: 241531 - DNA, 19 bp, Homo sapiens
  siRNA target sequence for GPRC6A (NM_148963.1,1983-2001).
cacaagacttcacatgtaa

SEQ ID NO: 241532 - DNA, 19 bp, Homo sapiens
  siRNA target sequence for GPRC6A (NM_148963.1,1985-2003).
caagacttcacatgtaaaa

SEQ ID NO: 241533 - DNA, 19 bp, Homo sapiens
  siRNA target sequence for GPRC6A (NM_148963.1,1998-2016).
gtaaaaccaggcagacaat

SEQ ID NO: 241534 - DNA, 19 bp, Homo sapiens
  siRNA target sequence for GPRC6A (NM_148963.1,2017-2035).
gtttggagtgagctttact

SEQ ID NO: 241535 - DNA, 19 bp, Homo sapiens
  siRNA target sequence for GPRC6A (NM_148963.1,2077-2095).
gctagccttcagctttgat

SEQ ID NO: 241536 - DNA, 19 bp, Homo sapiens
  siRNA target sequence for GPRC6A (NM_148963.1,2088-2106).
gctttgatcccaaattaca

SEQ ID NO: 241537 - DNA, 19 bp, Homo sapiens
  siRNA target sequence for GPRC6A (NM_148963.1,2123-2141).
ctctatagaccgatcctta

SEQ ID NO: 241538 - DNA, 19 bp, Homo sapiens
  siRNA target sequence for GPRC6A (NM_148963.1,2130-2148).
gaccgatccttattatctt

SEQ ID NO: 241539 - DNA, 19 bp, Homo sapiens
  siRNA target sequence for GPRC6A (NM_148963.1,2157-2175).
cgggcatccaggttgtcat

SEQ ID NO: 241540 - DNA, 19 bp, Homo sapiens
  siRNA target sequence for GPRC6A (NM_148963.1,2158-2176).
gggcatccaggttgtcatt

SEQ ID NO: 241541 - DNA, 19 bp, Homo sapiens
  siRNA target sequence for GPRC6A (NM_148963.1,2178-2196).
gcacactctggctaatctt

SEQ ID NO: 241542 - DNA, 19 bp, Homo sapiens
  siRNA target sequence for GPRC6A (NM_148963.1,2205-2223).
ctactgtagaggtgaatgt

SEQ ID NO: 241543 - DNA, 19 bp, Homo sapiens
  siRNA target sequence for GPRC6A (NM_148963.1,2251-2269).
gtgtgaggagggatccata

SEQ ID NO: 241544 - DNA, 19 bp, Homo sapiens
  siRNA target sequence for GPRC6A (NM_148963.1,2387-2405).
ctcatttacttcatagctt

SEQ ID NO: 241545 - DNA, 19 bp, Homo sapiens
  siRNA target sequence for GPRC6A (NM_148963.1,2450-2468).
gtaccagctgtggagatta

SEQ ID NO: 241546 - DNA, 19 bp, Homo sapiens
  siRNA target sequence for GPRC6A (NM_148963.1,2462-2480).
gagattattgtcatattaa

SEQ ID NO: 241547 - DNA, 19 bp, Homo sapiens
  siRNA target sequence for GPRC6A (NM_148963.1,2512-2530).
catccccaaatgctatgtt

SEQ ID NO: 241548 - DNA, 19 bp, Homo sapiens
  siRNA target sequence for GPRC6A (NM_148963.1,2516-2534).
cccaaatgctatgttatta

SEQ ID NO: 241549 - DNA, 19 bp, Homo sapiens
  siRNA target sequence for GPRC6A (NM_148963.1,2517-2535).
ccaaatgctatgttattat

SEQ ID NO: 241550 - DNA, 19 bp, Homo sapiens
  siRNA target sequence for GPRC6A (NM_148963.1,2570-2588).
ctcaagatgatctacagtt

SEQ ID NO: 241551 - DNA, 19 bp, Homo sapiens
  siRNA target sequence for GPRC6A (NM_148963.1,2572-2590).
caagatgatctacagttat

SEQ ID NO: 241552 - DNA, 19 bp, Homo sapiens
  siRNA target sequence for GPRC6A (NM_148963.1,2753-2771).
gccacaagtgtatctaaaa

SEQ ID NO: 241553 - DNA, 19 bp, Homo sapiens
  siRNA target sequence for GPRC6A (NM_148963.1,2755-2773).
cacaagtgtatctaaaact

SEQ ID NO: 241554 - DNA, 19 bp, Homo sapiens
  siRNA target sequence for GPRC6A (NM_148963.1,2772-2790).
ctttgcctcgaaaaagaat

SEQ ID NO: 241555 - DNA, 19 bp, Homo sapiens
  siRNA target sequence for GPRC6A (NM_148963.1,2780-2798).
cgaaaaagaatgtcaagta

SEQ ID NO: 241556 - DNA, 19 bp, Homo sapiens
  siRNA target sequence for GRM1 (NM_000838.2,238-256).
ggtcgggctccttttgttt

SEQ ID NO: 241557 - DNA, 19 bp, Homo sapiens
  siRNA target sequence for GRM1 (NM_000838.2,239-257).
gtcgggctccttttgtttt

SEQ ID NO: 241558 - DNA, 19 bp, Homo sapiens
  siRNA target sequence for GRM1 (NM_000838.2,354-372).
gaatggacggagatgtcat

SEQ ID NO: 241559 - DNA, 19 bp, Homo sapiens
  siRNA target sequence for GRM1 (NM_000838.2,485-503).
cacacgttggataagatca

SEQ ID NO: 241560 - DNA, 19 bp, Homo sapiens
  siRNA target sequence for GRM1 (NM_000838.2,606-624).
gggactctctgatttccat

SEQ ID NO: 241561 - DNA, 19 bp, Homo sapiens
  siRNA target sequence for GRM1 (NM_000838.2,607-625).
ggactctctgatttccatt

SEQ ID NO: 241562 - DNA, 19 bp, Homo sapiens
  siRNA target sequence for GRM1 (NM_000838.2,677-695).
cccccaggcaggactaaga

SEQ ID NO: 241563 - DNA, 19 bp, Homo sapiens
  siRNA target sequence for GRM1 (NM_000838.2,775-793).
cccccagatcgcttattca

SEQ ID NO: 241564 - DNA, 19 bp, Homo sapiens
  siRNA target sequence for GRM1 (NM_000838.2,815-833).
gacaaaactttgtacaaat

SEQ ID NO: 241565 - DNA, 19 bp, Homo sapiens
  siRNA target sequence for GRM1 (NM_000838.2,875-893).
gccatgcttgacatagtca

SEQ ID NO: 241566 - DNA, 19 bp, Homo sapiens
  siRNA target sequence for GRM1 (NM_000838.2,951-969).
gcggaatggacgctttcaa

SEQ ID NO: 241567 - DNA, 19 bp, Homo sapiens
  siRNA target sequence for GRM1 (NM_000838.2,952-970).
cggaatggacgctttcaaa

SEQ ID NO: 241568 - DNA, 19 bp, Homo sapiens
  siRNA target sequence for GRM1 (NM_000838.2,954-972).
gaatggacgctttcaaaga

SEQ ID NO: 241569 - DNA, 19 bp, Homo sapiens
  siRNA target sequence for GRM1 (NM_000838.2,1162-1180).
gggcgagttctcactcatt

SEQ ID NO: 241570 - DNA, 19 bp, Homo sapiens
  siRNA target sequence for GRM1 (NM_000838.2,1242-1260).
ggggaatcacgataaagct

SEQ ID NO: 241571 - DNA, 19 bp, Homo sapiens
  siRNA target sequence for GRM1 (NM_000838.2,1273-1291).
ggtcaggtcatttgatgat

SEQ ID NO: 241572 - DNA, 19 bp, Homo sapiens
  siRNA target sequence for GRM1 (NM_000838.2,1274-1292).
gtcaggtcatttgatgatt

SEQ ID NO: 241573 - DNA, 19 bp, Homo sapiens
  siRNA target sequence for GRM1 (NM_000838.2,1416-1434).
gcacaggcaatgaaagctt

SEQ ID NO: 241574 - DNA, 19 bp, Homo sapiens
  siRNA target sequence for GRM1 (NM_000838.2,1661-1679).
cctggaaggtatgatatca

SEQ ID NO: 241575 - DNA, 19 bp, Homo sapiens
  siRNA target sequence for GRM1 (NM_000838.2,1662-1680).
ctggaaggtatgatatcat

SEQ ID NO: 241576 - DNA, 19 bp, Homo sapiens
  siRNA target sequence for GRM1 (NM_000838.2,1668-1686).
ggtatgatatcatgaatct

SEQ ID NO: 241577 - DNA, 19 bp, Homo sapiens
  siRNA target sequence for GRM1 (NM_000838.2,1687-1705).
gcagtacactgaagctaat

SEQ ID NO: 241578 - DNA, 19 bp, Homo sapiens
  siRNA target sequence for GRM1 (NM_000838.2,1697-1715).
gaagctaatcgctatgact

SEQ ID NO: 241579 - DNA, 19 bp, Homo sapiens
  siRNA target sequence for GRM1 (NM_000838.2,1701-1719).
ctaatcgctatgactatgt

SEQ ID NO: 241580 - DNA, 19 bp, Homo sapiens
  siRNA target sequence for GRM1 (NM_000838.2,1818-1836).
gcttaaagggccagattaa

SEQ ID NO: 241581 - DNA, 19 bp, Homo sapiens
  siRNA target sequence for GRM1 (NM_000838.2,1825-1843).
gggccagattaaggttata

SEQ ID NO: 241582 - DNA, 19 bp, Homo sapiens
  siRNA target sequence for GRM1 (NM_000838.2,1875-1893).
gcacggcctgcaaagagaa

SEQ ID NO: 241583 - DNA, 19 bp, Homo sapiens
  siRNA target sequence for GRM1 (NM_000838.2,1880-1898).
gcctgcaaagagaatgaat

SEQ ID NO: 241584 - DNA, 19 bp, Homo sapiens
  siRNA target sequence for GRM1 (NM_000838.2,1975-1993).
cattcctgtgcgctatctt

SEQ ID NO: 241585 - DNA, 19 bp, Homo sapiens
  siRNA target sequence for GRM1 (NM_000838.2,1994-2012).
gagtggagcaacatcgaat

SEQ ID NO: 241586 - DNA, 19 bp, Homo sapiens
  siRNA target sequence for GRM1 (NM_000838.2,2001-2019).
gcaacatcgaatccattat

SEQ ID NO: 241587 - DNA, 19 bp, Homo sapiens
  siRNA target sequence for GRM1 (NM_000838.2,2059-2077).
gtttgtcaccctaatcttt

SEQ ID NO: 241588 - DNA, 19 bp, Homo sapiens
  siRNA target sequence for GRM1 (NM_000838.2,2067-2085).
ccctaatctttgtactgta

SEQ ID NO: 241589 - DNA, 19 bp, Homo sapiens
  siRNA target sequence for GRM1 (NM_000838.2,2164-2182).
gtgcccattcactctcatt

SEQ ID NO: 241590 - DNA, 19 bp, Homo sapiens
  siRNA target sequence for GRM1 (NM_000838.2,2242-2260).
gatgtgctactctgcttta

SEQ ID NO: 241591 - DNA, 19 bp, Homo sapiens
  siRNA target sequence for GRM1 (NM_000838.2,2256-2274).
ctttagtgactaaaaccaa

SEQ ID NO: 241592 - DNA, 19 bp, Homo sapiens
  siRNA target sequence for GRM1 (NM_000838.2,2261-2279).
gtgactaaaaccaatcgta

SEQ ID NO: 241593 - DNA, 19 bp, Homo sapiens
  siRNA target sequence for GRM1 (NM_000838.2,2263-2281).
gactaaaaccaatcgtatt

SEQ ID NO: 241594 - DNA, 19 bp, Homo sapiens
  siRNA target sequence for GRM1 (NM_000838.2,2353-2371).
ggtgatcattgcctcaatt

SEQ ID NO: 241595 - DNA, 19 bp, Homo sapiens
  siRNA target sequence for GRM1 (NM_000838.2,2497-2515).
ggcccctttgggctacaat

SEQ ID NO: 241596 - DNA, 19 bp, Homo sapiens
  siRNA target sequence for GRM1 (NM_000838.2,2668-2686).
gatcatcacaacttgcttt

SEQ ID NO: 241597 - DNA, 19 bp, Homo sapiens
  siRNA target sequence for GRM1 (NM_000838.2,2687-2705).
gcagtgagtctcagtgtaa

SEQ ID NO: 241598 - DNA, 19 bp, Homo sapiens
  siRNA target sequence for GRM1 (NM_000838.2,2732-2750).
cccaagatgtacatcatta

SEQ ID NO: 241599 - DNA, 19 bp, Homo sapiens
  siRNA target sequence for GRM1 (NM_000838.2,2945-2963).
cccaagggacagcatatgt

SEQ ID NO: 241600 - DNA, 19 bp, Homo sapiens
  siRNA target sequence for GRM1 (NM_000838.2,3061-3079).
gagcctgaccttttcagat

SEQ ID NO: 241601 - DNA, 19 bp, Homo sapiens
  siRNA target sequence for GRM1 (NM_000838.2,3084-3102).
gcaccaagaccctttacaa

SEQ ID NO: 241602 - DNA, 19 bp, Homo sapiens
  siRNA target sequence for GRM1 (NM_000838.2,3302-3320).
ccccctccacagcagaaat

SEQ ID NO: 241603 - DNA, 19 bp, Homo sapiens
  siRNA target sequence for GRM1 (NM_000838.2,3363-3381).
ccgcgatcccggattttca

SEQ ID NO: 241604 - DNA, 19 bp, Homo sapiens
  siRNA target sequence for GRM1 (NM_000838.2,3527-3545).
gacgacagcgagaggttta

SEQ ID NO: 241605 - DNA, 19 bp, Homo sapiens
  siRNA target sequence for GRM1 (NM_000838.2,3753-3771).
cccctcccaacgtatccta

SEQ ID NO: 241606 - DNA, 19 bp, Homo sapiens
  siRNA target sequence for GRM1 (NM_000838.2,3785-3803).
ctgcgggactacaagcaaa

SEQ ID NO: 241607 - DNA, 19 bp, Homo sapiens
  siRNA target sequence for GRM2 (NM_000839.1,362-380).
ctgccccgacggctcttat

SEQ ID NO: 241608 - DNA, 19 bp, Homo sapiens
  siRNA target sequence for GRM2 (NM_000839.1,458-476).
caacctcttgaggctattt

SEQ ID NO: 241609 - DNA, 19 bp, Homo sapiens
  siRNA target sequence for GRM2 (NM_000839.1,522-540).
gacaagtcccgctatgact

SEQ ID NO: 241610 - DNA, 19 bp, Homo sapiens
  siRNA target sequence for GRM2 (NM_000839.1,591-609).
gagattctccgcttcttca

SEQ ID NO: 241611 - DNA, 19 bp, Homo sapiens
  siRNA target sequence for GRM2 (NM_000839.1,965-983).
ctaccccatcagtgacttt

SEQ ID NO: 241612 - DNA, 19 bp, Homo sapiens
  siRNA target sequence for GRM2 (NM_000839.1,1303-1321).
cagctgacacccacaatga

SEQ ID NO: 241613 - DNA, 19 bp, Homo sapiens
  siRNA target sequence for GRM2 (NM_000839.1,1347-1365).
ggtattggccgctacaaca

SEQ ID NO: 241614 - DNA, 19 bp, Homo sapiens
  siRNA target sequence for GRM2 (NM_000839.1,1348-1366).
gtattggccgctacaacat

SEQ ID NO: 241615 - DNA, 19 bp, Homo sapiens
  siRNA target sequence for GRM2 (NM_000839.1,1573-1591).
cgtgccagccctatgagta

SEQ ID NO: 241616 - DNA, 19 bp, Homo sapiens
  siRNA target sequence for GRM2 (NM_000839.1,1592-1610).
ccgattggacgaattcact

SEQ ID NO: 241617 - DNA, 19 bp, Homo sapiens
  siRNA target sequence for GRM2 (NM_000839.1,1593-1611).
cgattggacgaattcactt

SEQ ID NO: 241618 - DNA, 19 bp, Homo sapiens
  siRNA target sequence for GRM2 (NM_000839.1,1886-1904).
cacggcagtgtgtacctta

SEQ ID NO: 241619 - DNA, 19 bp, Homo sapiens
  siRNA target sequence for GRM2 (NM_000839.1,1900-1918).
ccttacggcgtcttggttt

SEQ ID NO: 241620 - DNA, 19 bp, Homo sapiens
  siRNA target sequence for GRM2 (NM_000839.1,2007-2025).
cagcggccacgcttcatca

SEQ ID NO: 241621 - DNA, 19 bp, Homo sapiens
  siRNA target sequence for GRM2 (NM_000839.1,2169-2187).
caccgcgatgcaagtatgt

SEQ ID NO: 241622 - DNA, 19 bp, Homo sapiens
  siRNA target sequence for GRM2 (NM_000839.1,2191-2209).
gctcgctggcctacaatgt

SEQ ID NO: 241623 - DNA, 19 bp, Homo sapiens
  siRNA target sequence for GRM2 (NM_000839.1,2251-2269).
gcaagtgccccgaaaactt

SEQ ID NO: 241624 - DNA, 19 bp, Homo sapiens
  siRNA target sequence for GRM3 (NM_000840.1,274-292).
caagttcttaccttagctt

SEQ ID NO: 241625 - DNA, 19 bp, Homo sapiens
  siRNA target sequence for GRM3 (NM_000840.1,317-335).
ctttaggggaccataactt

SEQ ID NO: 241626 - DNA, 19 bp, Homo sapiens
  siRNA target sequence for GRM3 (NM_000840.1,322-340).
ggggaccataactttctaa

SEQ ID NO: 241627 - DNA, 19 bp, Homo sapiens
  siRNA target sequence for GRM3 (NM_000840.1,422-440).
gtgggcgaatcaatgaaga

SEQ ID NO: 241628 - DNA, 19 bp, Homo sapiens
  siRNA target sequence for GRM3 (NM_000840.1,454-472).
cgcctggaagccatgttgt

SEQ ID NO: 241629 - DNA, 19 bp, Homo sapiens
  siRNA target sequence for GRM3 (NM_000840.1,529-547).
gttcacattttggatacat

SEQ ID NO: 241630 - DNA, 19 bp, Homo sapiens
  siRNA target sequence for GRM3 (NM_000840.1,551-569).
caagggatacctatgcatt

SEQ ID NO: 241631 - DNA, 19 bp, Homo sapiens
  siRNA target sequence for GRM3 (NM_000840.1,574-592).
caatcactggagtttgtca

SEQ ID NO: 241632 - DNA, 19 bp, Homo sapiens
  siRNA target sequence for GRM3 (NM_000840.1,641-659).
gatcctatgccattcaaga

SEQ ID NO: 241633 - DNA, 19 bp, Homo sapiens
  siRNA target sequence for GRM3 (NM_000840.1,684-702).
ggtcattggtggctcttat

SEQ ID NO: 241634 - DNA, 19 bp, Homo sapiens
  siRNA target sequence for GRM3 (NM_000840.1,685-703).
gtcattggtggctcttata

SEQ ID NO: 241635 - DNA, 19 bp, Homo sapiens
  siRNA target sequence for GRM3 (NM_000840.1,776-794).
gcgccaaactcagtgataa

SEQ ID NO: 241636 - DNA, 19 bp, Homo sapiens
  siRNA target sequence for GRM3 (NM_000840.1,778-796).
gccaaactcagtgataagt

SEQ ID NO: 241637 - DNA, 19 bp, Homo sapiens
  siRNA target sequence for GRM3 (NM_000840.1,790-808).
gataagtcgcgctatgatt

SEQ ID NO: 241638 - DNA, 19 bp, Homo sapiens
  siRNA target sequence for GRM3 (NM_000840.1,1025-1043).
gcgtgatccgagaactgtt

SEQ ID NO: 241639 - DNA, 19 bp, Homo sapiens
  siRNA target sequence for GRM3 (NM_000840.1,1332-1350).
gtgcagcctccagaacaaa

SEQ ID NO: 241640 - DNA, 19 bp, Homo sapiens
  siRNA target sequence for GRM3 (NM_000840.1,1499-1517).
ccaagctttgtgatgctat

SEQ ID NO: 241641 - DNA, 19 bp, Homo sapiens
  siRNA target sequence for GRM3 (NM_000840.1,1549-1567).
gattacttgctgaaaatca

SEQ ID NO: 241642 - DNA, 19 bp, Homo sapiens
  siRNA target sequence for GRM3 (NM_000840.1,1576-1594).
gctccattcaacccaaata

SEQ ID NO: 241643 - DNA, 19 bp, Homo sapiens
  siRNA target sequence for GRM3 (NM_000840.1,1580-1598).
cattcaacccaaataaaga

SEQ ID NO: 241644 - DNA, 19 bp, Homo sapiens
  siRNA target sequence for GRM3 (NM_000840.1,1597-1615).
gatgcagatagcatagtca

SEQ ID NO: 241645 - DNA, 19 bp, Homo sapiens
  siRNA target sequence for GRM3 (NM_000840.1,1601-1619).
cagatagcatagtcaagtt

SEQ ID NO: 241646 - DNA, 19 bp, Homo sapiens
  siRNA target sequence for GRM3 (NM_000840.1,1643-1661).
ggcgatacaacgtgttcaa

SEQ ID NO: 241647 - DNA, 19 bp, Homo sapiens
  siRNA target sequence for GRM3 (NM_000840.1,1644-1662).
gcgatacaacgtgttcaat

SEQ ID NO: 241648 - DNA, 19 bp, Homo sapiens
  siRNA target sequence for GRM3 (NM_000840.1,1645-1663).
cgatacaacgtgttcaatt

SEQ ID NO: 241649 - DNA, 19 bp, Homo sapiens
  siRNA target sequence for GRM3 (NM_000840.1,1646-1664).
gatacaacgtgttcaattt

SEQ ID NO: 241650 - DNA, 19 bp, Homo sapiens
  siRNA target sequence for GRM3 (NM_000840.1,1650-1668).
caacgtgttcaatttccaa

SEQ ID NO: 241651 - DNA, 19 bp, Homo sapiens
  siRNA target sequence for GRM3 (NM_000840.1,1672-1690).
gtaggtggaaagtattcct

SEQ ID NO: 241652 - DNA, 19 bp, Homo sapiens
  siRNA target sequence for GRM3 (NM_000840.1,1679-1697).
gaaagtattcctacttgaa

SEQ ID NO: 241653 - DNA, 19 bp, Homo sapiens
  siRNA target sequence for GRM3 (NM_000840.1,1718-1736).
ccttatcgctagatgtcaa

SEQ ID NO: 241654 - DNA, 19 bp, Homo sapiens
  siRNA target sequence for GRM3 (NM_000840.1,1724-1742).
cgctagatgtcaactctat

SEQ ID NO: 241655 - DNA, 19 bp, Homo sapiens
  siRNA target sequence for GRM3 (NM_000840.1,1792-1810).
gcccccaatgaaatgaaga

SEQ ID NO: 241656 - DNA, 19 bp, Homo sapiens
  siRNA target sequence for GRM3 (NM_000840.1,1849-1867).
ccctgtgaaccctacgaat

SEQ ID NO: 241657 - DNA, 19 bp, Homo sapiens
  siRNA target sequence for GRM3 (NM_000840.1,1850-1868).
cctgtgaaccctacgaata

SEQ ID NO: 241658 - DNA, 19 bp, Homo sapiens
  siRNA target sequence for GRM3 (NM_000840.1,1853-1871).
gtgaaccctacgaatacct

SEQ ID NO: 241659 - DNA, 19 bp, Homo sapiens
  siRNA target sequence for GRM3 (NM_000840.1,2002-2020).
gcctgtctgggttttatgt

SEQ ID NO: 241660 - DNA, 19 bp, Homo sapiens
  siRNA target sequence for GRM3 (NM_000840.1,2024-2042).
catgcatggttgtaactgt

SEQ ID NO: 241661 - DNA, 19 bp, Homo sapiens
  siRNA target sequence for GRM3 (NM_000840.1,2027-2045).
gcatggttgtaactgtttt

SEQ ID NO: 241662 - DNA, 19 bp, Homo sapiens
  siRNA target sequence for GRM3 (NM_000840.1,2032-2050).
gttgtaactgtttttatca

SEQ ID NO: 241663 - DNA, 19 bp, Homo sapiens
  siRNA target sequence for GRM3 (NM_000840.1,2089-2107).
gaactctgctacatcttat

SEQ ID NO: 241664 - DNA, 19 bp, Homo sapiens
  siRNA target sequence for GRM3 (NM_000840.1,2092-2110).
ctctgctacatcttattgt

SEQ ID NO: 241665 - DNA, 19 bp, Homo sapiens
  siRNA target sequence for GRM3 (NM_000840.1,2113-2131).
ggggttggcctgtcatact

SEQ ID NO: 241666 - DNA, 19 bp, Homo sapiens
  siRNA target sequence for GRM3 (NM_000840.1,2201-2219).
gttccttcgctatctgtta

SEQ ID NO: 241667 - DNA, 19 bp, Homo sapiens
  siRNA target sequence for GRM3 (NM_000840.1,2205-2223).
cttcgctatctgttactca

SEQ ID NO: 241668 - DNA, 19 bp, Homo sapiens
  siRNA target sequence for GRM3 (NM_000840.1,2278-2296).
ggcgctcagaggccaaaat

SEQ ID NO: 241669 - DNA, 19 bp, Homo sapiens
  siRNA target sequence for GRM3 (NM_000840.1,2279-2297).
gcgctcagaggccaaaatt

SEQ ID NO: 241670 - DNA, 19 bp, Homo sapiens
  siRNA target sequence for GRM3 (NM_000840.1,2282-2300).
ctcagaggccaaaattcat

SEQ ID NO: 241671 - DNA, 19 bp, Homo sapiens
  siRNA target sequence for GRM3 (NM_000840.1,2333-2351).
gtctgatcctggtgcaaat

SEQ ID NO: 241672 - DNA, 19 bp, Homo sapiens
  siRNA target sequence for GRM3 (NM_000840.1,2419-2437).
cgggaaacagtcatcctaa

SEQ ID NO: 241673 - DNA, 19 bp, Homo sapiens
  siRNA target sequence for GRM3 (NM_000840.1,2420-2438).
gggaaacagtcatcctaaa

SEQ ID NO: 241674 - DNA, 19 bp, Homo sapiens
  siRNA target sequence for GRM3 (NM_000840.1,2422-2440).
gaaacagtcatcctaaaat

SEQ ID NO: 241675 - DNA, 19 bp, Homo sapiens
  siRNA target sequence for GRM3 (NM_000840.1,2426-2444).
cagtcatcctaaaatgcaa

SEQ ID NO: 241676 - DNA, 19 bp, Homo sapiens
  siRNA target sequence for GRM3 (NM_000840.1,2452-2470).
gattccagcatgttgatct

SEQ ID NO: 241677 - DNA, 19 bp, Homo sapiens
  siRNA target sequence for GRM3 (NM_000840.1,2471-2489).
ctcttacctacgatgtgat

SEQ ID NO: 241678 - DNA, 19 bp, Homo sapiens
  siRNA target sequence for GRM3 (NM_000840.1,2505-2523).
cactgtgtacgccttcaaa

SEQ ID NO: 241679 - DNA, 19 bp, Homo sapiens
  siRNA target sequence for GRM3 (NM_000840.1,2525-2543).
cgcggaagtgcccagaaaa

SEQ ID NO: 241680 - DNA, 19 bp, Homo sapiens
  siRNA target sequence for GRM3 (NM_000840.1,2547-2565).
caacgaagctaagttcata

SEQ ID NO: 241681 - DNA, 19 bp, Homo sapiens
  siRNA target sequence for GRM3 (NM_000840.1,2554-2572).
gctaagttcataggtttta

SEQ ID NO: 241682 - DNA, 19 bp, Homo sapiens
  siRNA target sequence for GRM3 (NM_000840.1,2603-2621).
ccttcctccctatatttta

SEQ ID NO: 241683 - DNA, 19 bp, Homo sapiens
  siRNA target sequence for GRM4 (NM_000841.1,276-294).
ggccaccctcacatgaatt

SEQ ID NO: 241684 - DNA, 19 bp, Homo sapiens
  siRNA target sequence for GRM4 (NM_000841.1,290-308).
gaattccatccgcatagat

SEQ ID NO: 241685 - DNA, 19 bp, Homo sapiens
  siRNA target sequence for GRM4 (NM_000841.1,674-692).
ccttcgcctcttcaagata

SEQ ID NO: 241686 - DNA, 19 bp, Homo sapiens
  siRNA target sequence for GRM4 (NM_000841.1,920-938).
cgcccagtcggtgaagata

SEQ ID NO: 241687 - DNA, 19 bp, Homo sapiens
  siRNA target sequence for GRM4 (NM_000841.1,955-973).
caggcgagttcgacaagat

SEQ ID NO: 241688 - DNA, 19 bp, Homo sapiens
  siRNA target sequence for GRM4 (NM_000841.1,957-975).
ggcgagttcgacaagatca

SEQ ID NO: 241689 - DNA, 19 bp, Homo sapiens
  siRNA target sequence for GRM4 (NM_000841.1,1314-1332).
ggcagccacgtcaagaagt

SEQ ID NO: 241690 - DNA, 19 bp, Homo sapiens
  siRNA target sequence for GRM4 (NM_000841.1,1478-1496).
gcgcatggaccctgtagat

SEQ ID NO: 241691 - DNA, 19 bp, Homo sapiens
  siRNA target sequence for GRM4 (NM_000841.1,1498-1516).
gcacccagctgcttaagta

SEQ ID NO: 241692 - DNA, 19 bp, Homo sapiens
  siRNA target sequence for GRM4 (NM_000841.1,1590-1608).
cgctatgacatctaccaat

SEQ ID NO: 241693 - DNA, 19 bp, Homo sapiens
  siRNA target sequence for GRM4 (NM_000841.1,1661-1679).
ccacctgcaccttagaata

SEQ ID NO: 241694 - DNA, 19 bp, Homo sapiens
  siRNA target sequence for GRM4 (NM_000841.1,1827-1845).
gaccgctacacctgtaaga

SEQ ID NO: 241695 - DNA, 19 bp, Homo sapiens
  siRNA target sequence for GRM4 (NM_000841.1,2125-2143).
gctcgctgcgccgaatctt

SEQ ID NO: 241696 - DNA, 19 bp, Homo sapiens
  siRNA target sequence for GRM4 (NM_000841.1,2679-2697).
ctctacatgcccaaagtct

SEQ ID NO: 241697 - DNA, 19 bp, Homo sapiens
  siRNA target sequence for GRM4 (NM_000841.1,2874-2892).
cagacttacgtcacttaca

SEQ ID NO: 241698 - DNA, 19 bp, Homo sapiens
  siRNA target sequence for GRM4 (NM_000841.1,2887-2905).
cttacaccaaccatgcaat

SEQ ID NO: 241699 - DNA, 19 bp, Homo sapiens
  siRNA target sequence for GRM5 (NM_000842.1,1070-1088).
gggctgacaggtatgatgt

SEQ ID NO: 241700 - DNA, 19 bp, Homo sapiens
  siRNA target sequence for GRM5 (NM_000842.1,1146-1164).
cgatgtcaagtggtttgat

SEQ ID NO: 241701 - DNA, 19 bp, Homo sapiens
  siRNA target sequence for GRM5 (NM_000842.1,1197-1215).
ccaccgaaacccttggttt

SEQ ID NO: 241702 - DNA, 19 bp, Homo sapiens
  siRNA target sequence for GRM5 (NM_000842.1,1200-1218).
ccgaaacccttggtttcaa

SEQ ID NO: 241703 - DNA, 19 bp, Homo sapiens
  siRNA target sequence for GRM5 (NM_000842.1,1284-1302).
caagacttgcaatagttct

SEQ ID NO: 241704 - DNA, 19 bp, Homo sapiens
  siRNA target sequence for GRM5 (NM_000842.1,1321-1339).
catgttcaggattccaaaa

SEQ ID NO: 241705 - DNA, 19 bp, Homo sapiens
  siRNA target sequence for GRM5 (NM_000842.1,1334-1352).
ccaaaatgggatttgtgat

SEQ ID NO: 241706 - DNA, 19 bp, Homo sapiens
  siRNA target sequence for GRM5 (NM_000842.1,1348-1366).
gtgatcaacgccatctatt

SEQ ID NO: 241707 - DNA, 19 bp, Homo sapiens
  siRNA target sequence for GRM5 (NM_000842.1,1493-1511).
gggtttctggagatacgat

SEQ ID NO: 241708 - DNA, 19 bp, Homo sapiens
  siRNA target sequence for GRM5 (NM_000842.1,1499-1517).
ctggagatacgatcctatt

SEQ ID NO: 241709 - DNA, 19 bp, Homo sapiens
  siRNA target sequence for GRM5 (NM_000842.1,1502-1520).
gagatacgatcctattcga

SEQ ID NO: 241710 - DNA, 19 bp, Homo sapiens
  siRNA target sequence for GRM5 (NM_000842.1,1508-1526).
cgatcctattcgatgagaa

SEQ ID NO: 241711 - DNA, 19 bp, Homo sapiens
  siRNA target sequence for GRM5 (NM_000842.1,1509-1527).
gatcctattcgatgagaat

SEQ ID NO: 241712 - DNA, 19 bp, Homo sapiens
  siRNA target sequence for GRM5 (NM_000842.1,1683-1701).
cagtgaaccatgtgagaaa

SEQ ID NO: 241713 - DNA, 19 bp, Homo sapiens
  siRNA target sequence for GRM5 (NM_000842.1,1815-1833).
gtcttggcccactgatgat

SEQ ID NO: 241714 - DNA, 19 bp, Homo sapiens
  siRNA target sequence for GRM5 (NM_000842.1,1848-1866).
cttgatcccagtacagtat

SEQ ID NO: 241715 - DNA, 19 bp, Homo sapiens
  siRNA target sequence for GRM5 (NM_000842.1,1851-1869).
gatcccagtacagtatctt

SEQ ID NO: 241716 - DNA, 19 bp, Homo sapiens
  siRNA target sequence for GRM5 (NM_000842.1,1939-1957).
gttactgtagtcttcatca

SEQ ID NO: 241717 - DNA, 19 bp, Homo sapiens
  siRNA target sequence for GRM5 (NM_000842.1,1953-1971).
catcatttaccgtgataca

SEQ ID NO: 241718 - DNA, 19 bp, Homo sapiens
  siRNA target sequence for GRM5 (NM_000842.1,1964-1982).
gtgatacaccagtagtcaa

SEQ ID NO: 241719 - DNA, 19 bp, Homo sapiens
  siRNA target sequence for GRM5 (NM_000842.1,1992-2010).
cagggaactctgctacatt

SEQ ID NO: 241720 - DNA, 19 bp, Homo sapiens
  siRNA target sequence for GRM5 (NM_000842.1,2060-2078).
cgaagcccaaacagattta

SEQ ID NO: 241721 - DNA, 19 bp, Homo sapiens
  siRNA target sequence for GRM5 (NM_000842.1,2124-2142).
ctactcagcccttgtaaca

SEQ ID NO: 241722 - DNA, 19 bp, Homo sapiens
  siRNA target sequence for GRM5 (NM_000842.1,2219-2237).
cctgtgcccagctagtgat

SEQ ID NO: 241723 - DNA, 19 bp, Homo sapiens
  siRNA target sequence for GRM5 (NM_000842.1,2225-2243).
cccagctagtgattgcttt

SEQ ID NO: 241724 - DNA, 19 bp, Homo sapiens
  siRNA target sequence for GRM5 (NM_000842.1,2310-2328).
gcatgactacccaagcatt

SEQ ID NO: 241725 - DNA, 19 bp, Homo sapiens
  siRNA target sequence for GRM5 (NM_000842.1,2321-2339).
caagcattcgagaagtcta

SEQ ID NO: 241726 - DNA, 19 bp, Homo sapiens
  siRNA target sequence for GRM5 (NM_000842.1,2335-2353).
gtctacctgatctgtaaca

SEQ ID NO: 241727 - DNA, 19 bp, Homo sapiens
  siRNA target sequence for GRM5 (NM_000842.1,2384-2402).
gatacaatggattgttgat

SEQ ID NO: 241728 - DNA, 19 bp, Homo sapiens
  siRNA target sequence for GRM5 (NM_000842.1,2423-2441).
cgttcaagaccagaaatgt

SEQ ID NO: 241729 - DNA, 19 bp, Homo sapiens
  siRNA target sequence for GRM5 (NM_000842.1,2484-2502).
gtacacgacctgcattata

SEQ ID NO: 241730 - DNA, 19 bp, Homo sapiens
  siRNA target sequence for GRM5 (NM_000842.1,2723-2741).
gatccagcagcctagtcaa

SEQ ID NO: 241731 - DNA, 19 bp, Homo sapiens
  siRNA target sequence for GRM5 (NM_000842.1,2849-2867).
gcctgtccatccacatcaa

SEQ ID NO: 241732 - DNA, 19 bp, Homo sapiens
  siRNA target sequence for GRM5 (NM_000842.1,3044-3062).
ccaaggcgctgtatgatgt

SEQ ID NO: 241733 - DNA, 19 bp, Homo sapiens
  siRNA target sequence for GRM5 (NM_000842.1,3627-3645).
cccgtcgtctcccaaatat

SEQ ID NO: 241734 - DNA, 19 bp, Homo sapiens
  siRNA target sequence for GRM5 (NM_000842.1,3629-3647).
cgtcgtctcccaaatatga

SEQ ID NO: 241735 - DNA, 19 bp, Homo sapiens
  siRNA target sequence for GRM5 (NM_000842.1,3652-3670).
cttatcataagagattaca

SEQ ID NO: 241736 - DNA, 19 bp, Homo sapiens
  siRNA target sequence for GRM6 (NM_000843.2,730-748).
ccacacgctatgacttctt

SEQ ID NO: 241737 - DNA, 19 bp, Homo sapiens
  siRNA target sequence for GRM6 (NM_000843.2,910-928).
gtattgcccagtctatcaa

SEQ ID NO: 241738 - DNA, 19 bp, Homo sapiens
  siRNA target sequence for GRM6 (NM_000843.2,1180-1198).
cctccatcgacggatttga

SEQ ID NO: 241739 - DNA, 19 bp, Homo sapiens
  siRNA target sequence for GRM6 (NM_000843.2,1253-1271).
cgagttctgggaagagaat

SEQ ID NO: 241740 - DNA, 19 bp, Homo sapiens
  siRNA target sequence for GRM6 (NM_000843.2,1311-1329).
gattccacccgcaaatgca

SEQ ID NO: 241741 - DNA, 19 bp, Homo sapiens
  siRNA target sequence for GRM6 (NM_000843.2,1824-1842).
caggtggacgagttcacat

SEQ ID NO: 241742 - DNA, 19 bp, Homo sapiens
  siRNA target sequence for GRM6 (NM_000843.2,1996-2014).
ccttcgtgcggtacaacaa

SEQ ID NO: 241743 - DNA, 19 bp, Homo sapiens
  siRNA target sequence for GRM6 (NM_000843.2,2304-2322).
gtggtggggatgatagcat

SEQ ID NO: 241744 - DNA, 19 bp, Homo sapiens
  siRNA target sequence for GRM6 (NM_000843.2,2340-2358).
ccacacagcgtgattgact

SEQ ID NO: 241745 - DNA, 19 bp, Homo sapiens
  siRNA target sequence for GRM6 (NM_000843.2,2341-2359).
cacacagcgtgattgacta

SEQ ID NO: 241746 - DNA, 19 bp, Homo sapiens
  siRNA target sequence for GRM7 (NM_000844.2,174-192).
cgcgtcctgactttgatga

SEQ ID NO: 241747 - DNA, 19 bp, Homo sapiens
  siRNA target sequence for GRM7 (NM_000844.2,495-513).
ctcgaacagtcgcttactt

SEQ ID NO: 241748 - DNA, 19 bp, Homo sapiens
  siRNA target sequence for GRM7 (NM_000844.2,581-599).
cgtcaagccggagaaagta

SEQ ID NO: 241749 - DNA, 19 bp, Homo sapiens
  siRNA target sequence for GRM7 (NM_000844.2,665-683).
ccagatcccccagattagt

SEQ ID NO: 241750 - DNA, 19 bp, Homo sapiens
  siRNA target sequence for GRM7 (NM_000844.2,671-689).
cccccagattagttatgca

SEQ ID NO: 241751 - DNA, 19 bp, Homo sapiens
  siRNA target sequence for GRM7 (NM_000844.2,672-690).
ccccagattagttatgcat

SEQ ID NO: 241752 - DNA, 19 bp, Homo sapiens
  siRNA target sequence for GRM7 (NM_000844.2,694-712).
cggcacccgagctaagtga

SEQ ID NO: 241753 - DNA, 19 bp, Homo sapiens
  siRNA target sequence for GRM7 (NM_000844.2,695-713).
ggcacccgagctaagtgat

SEQ ID NO: 241754 - DNA, 19 bp, Homo sapiens
  siRNA target sequence for GRM7 (NM_000844.2,771-789).
gccatggtagacattgtaa

SEQ ID NO: 241755 - DNA, 19 bp, Homo sapiens
  siRNA target sequence for GRM7 (NM_000844.2,793-811).
ccctaggctggaattatgt

SEQ ID NO: 241756 - DNA, 19 bp, Homo sapiens
  siRNA target sequence for GRM7 (NM_000844.2,821-839).
cgcatcggaaggaagttat

SEQ ID NO: 241757 - DNA, 19 bp, Homo sapiens
  siRNA target sequence for GRM7 (NM_000844.2,855-873).
gagtccttcacgcagattt

SEQ ID NO: 241758 - DNA, 19 bp, Homo sapiens
  siRNA target sequence for GRM7 (NM_000844.2,938-956).
gaccattgactttgataga

SEQ ID NO: 241759 - DNA, 19 bp, Homo sapiens
  siRNA target sequence for GRM7 (NM_000844.2,988-1006).
ccagggccgtcgtgatttt

SEQ ID NO: 241760 - DNA, 19 bp, Homo sapiens
  siRNA target sequence for GRM7 (NM_000844.2,989-1007).
cagggccgtcgtgattttt

SEQ ID NO: 241761 - DNA, 19 bp, Homo sapiens
  siRNA target sequence for GRM7 (NM_000844.2,1008-1026).
gccaacgatgaggatataa

SEQ ID NO: 241762 - DNA, 19 bp, Homo sapiens
  siRNA target sequence for GRM7 (NM_000844.2,1196-1214).
ctttacgtcccgtacactt

SEQ ID NO: 241763 - DNA, 19 bp, Homo sapiens
  siRNA target sequence for GRM7 (NM_000844.2,1201-1219).
cgtcccgtacacttgaaaa

SEQ ID NO: 241764 - DNA, 19 bp, Homo sapiens
  siRNA target sequence for GRM7 (NM_000844.2,1204-1222).
cccgtacacttgaaaacaa

SEQ ID NO: 241765 - DNA, 19 bp, Homo sapiens
  siRNA target sequence for GRM7 (NM_000844.2,1206-1224).
cgtacacttgaaaacaaca

SEQ ID NO: 241766 - DNA, 19 bp, Homo sapiens
  siRNA target sequence for GRM7 (NM_000844.2,1223-1241).
cagaagaaatgtatggttt

SEQ ID NO: 241767 - DNA, 19 bp, Homo sapiens
  siRNA target sequence for GRM7 (NM_000844.2,1233-1251).
gtatggtttgccgaatact

SEQ ID NO: 241768 - DNA, 19 bp, Homo sapiens
  siRNA target sequence for GRM7 (NM_000844.2,1243-1261).
ccgaatactgggaggaaaa

SEQ ID NO: 241769 - DNA, 19 bp, Homo sapiens
  siRNA target sequence for GRM7 (NM_000844.2,1268-1286).
ctgcaagttgacgattagt

SEQ ID NO: 241770 - DNA, 19 bp, Homo sapiens
  siRNA target sequence for GRM7 (NM_000844.2,1279-1297).
cgattagtgggtcaaaaaa

SEQ ID NO: 241771 - DNA, 19 bp, Homo sapiens
  siRNA target sequence for GRM7 (NM_000844.2,1379-1397).
cgtgattgacgcagtctat

SEQ ID NO: 241772 - DNA, 19 bp, Homo sapiens
  siRNA target sequence for GRM7 (NM_000844.2,1410-1428).
gcccttcaccacatgaaca

SEQ ID NO: 241773 - DNA, 19 bp, Homo sapiens
  siRNA target sequence for GRM7 (NM_000844.2,1411-1429).
cccttcaccacatgaacaa

SEQ ID NO: 241774 - DNA, 19 bp, Homo sapiens
  siRNA target sequence for GRM7 (NM_000844.2,1496-1514).
gaagtatatacgcaatgtt

SEQ ID NO: 241775 - DNA, 19 bp, Homo sapiens
  siRNA target sequence for GRM7 (NM_000844.2,1531-1549).
ctggcactccagtgatgtt

SEQ ID NO: 241776 - DNA, 19 bp, Homo sapiens
  siRNA target sequence for GRM7 (NM_000844.2,1573-1591).
ggcgttatgacatctttca

SEQ ID NO: 241777 - DNA, 19 bp, Homo sapiens
  siRNA target sequence for GRM7 (NM_000844.2,1783-1801).
gtgagccttgcgatggtta

SEQ ID NO: 241778 - DNA, 19 bp, Homo sapiens
  siRNA target sequence for GRM7 (NM_000844.2,1850-1868).
gaggcccaatgaaaatcga

SEQ ID NO: 241779 - DNA, 19 bp, Homo sapiens
  siRNA target sequence for GRM7 (NM_000844.2,1880-1898).
ggatattcccatcatcaaa

SEQ ID NO: 241780 - DNA, 19 bp, Homo sapiens
  siRNA target sequence for GRM7 (NM_000844.2,1952-1970).
gatcattgccaccatcttt

SEQ ID NO: 241781 - DNA, 19 bp, Homo sapiens
  siRNA target sequence for GRM7 (NM_000844.2,1979-1997).
cactttcatccgctacaat

SEQ ID NO: 241782 - DNA, 19 bp, Homo sapiens
  siRNA target sequence for GRM7 (NM_000844.2,1981-1999).
ctttcatccgctacaatga

SEQ ID NO: 241783 - DNA, 19 bp, Homo sapiens
  siRNA target sequence for GRM7 (NM_000844.2,2027-2045).
ggaactcagctatgttctt

SEQ ID NO: 241784 - DNA, 19 bp, Homo sapiens
  siRNA target sequence for GRM7 (NM_000844.2,2050-2068).
cgggcatctttctttgcta

SEQ ID NO: 241785 - DNA, 19 bp, Homo sapiens
  siRNA target sequence for GRM7 (NM_000844.2,2113-2131).
gttctttccggcgagtttt

SEQ ID NO: 241786 - DNA, 19 bp, Homo sapiens
  siRNA target sequence for GRM7 (NM_000844.2,2116-2134).
ctttccggcgagttttctt

SEQ ID NO: 241787 - DNA, 19 bp, Homo sapiens
  siRNA target sequence for GRM7 (NM_000844.2,2141-2159).
gggtatgtgcatcagttat

SEQ ID NO: 241788 - DNA, 19 bp, Homo sapiens
  siRNA target sequence for GRM7 (NM_000844.2,2163-2181).
gccctcttgacgaaaacaa

SEQ ID NO: 241789 - DNA, 19 bp, Homo sapiens
  siRNA target sequence for GRM7 (NM_000844.2,2173-2191).
cgaaaacaaatcggattta

SEQ ID NO: 241790 - DNA, 19 bp, Homo sapiens
  siRNA target sequence for GRM7 (NM_000844.2,2185-2203).
ggatttatcgcatatttga

SEQ ID NO: 241791 - DNA, 19 bp, Homo sapiens
  siRNA target sequence for GRM7 (NM_000844.2,2205-2223).
cagggcaagaaatcagtaa

SEQ ID NO: 241792 - DNA, 19 bp, Homo sapiens
  siRNA target sequence for GRM7 (NM_000844.2,2258-2276).
ggcaatcacttccagttta

SEQ ID NO: 241793 - DNA, 19 bp, Homo sapiens
  siRNA target sequence for GRM7 (NM_000844.2,2259-2277).
gcaatcacttccagtttaa

SEQ ID NO: 241794 - DNA, 19 bp, Homo sapiens
  siRNA target sequence for GRM7 (NM_000844.2,2316-2334).
gttgatccacccaacatca

SEQ ID NO: 241795 - DNA, 19 bp, Homo sapiens
  siRNA target sequence for GRM7 (NM_000844.2,2422-2440).
gctccttgggatatagcat

SEQ ID NO: 241796 - DNA, 19 bp, Homo sapiens
  siRNA target sequence for GRM7 (NM_000844.2,2431-2449).
gatatagcattcttctcat

SEQ ID NO: 241797 - DNA, 19 bp, Homo sapiens
  siRNA target sequence for GRM7 (NM_000844.2,2481-2499).
cggggtgtacccgagaatt

SEQ ID NO: 241798 - DNA, 19 bp, Homo sapiens
  siRNA target sequence for GRM7 (NM_000844.2,2482-2500).
ggggtgtacccgagaattt

SEQ ID NO: 241799 - DNA, 19 bp, Homo sapiens
  siRNA target sequence for GRM7 (NM_000844.2,2483-2501).
gggtgtacccgagaatttt

SEQ ID NO: 241800 - DNA, 19 bp, Homo sapiens
  siRNA target sequence for GRM7 (NM_000844.2,2484-2502).
ggtgtacccgagaatttta

SEQ ID NO: 241801 - DNA, 19 bp, Homo sapiens
  siRNA target sequence for GRM7 (NM_000844.2,2531-2549).
gtacacgacatgtatagta

SEQ ID NO: 241802 - DNA, 19 bp, Homo sapiens
  siRNA target sequence for GRM7 (NM_000844.2,2551-2569).
ggcttgccttcattccaat

SEQ ID NO: 241803 - DNA, 19 bp, Homo sapiens
  siRNA target sequence for GRM7 (NM_000844.2,2552-2570).
gcttgccttcattccaatt

SEQ ID NO: 241804 - DNA, 19 bp, Homo sapiens
  siRNA target sequence for GRM7 (NM_000844.2,2584-2602).
ctcaatcagcggaaaagct

SEQ ID NO: 241805 - DNA, 19 bp, Homo sapiens
  siRNA target sequence for GRM7 (NM_000844.2,2610-2628).
caaactaccacgcttacaa

SEQ ID NO: 241806 - DNA, 19 bp, Homo sapiens
  siRNA target sequence for GRM7 (NM_000844.2,2652-2670).
gtggcgctggggatgctat

SEQ ID NO: 241807 - DNA, 19 bp, Homo sapiens
  siRNA target sequence for GRM7 (NM_000844.2,2655-2673).
gcgctggggatgctataca

SEQ ID NO: 241808 - DNA, 19 bp, Homo sapiens
  siRNA target sequence for GRM7 (NM_000844.2,2656-2674).
cgctggggatgctatacat

SEQ ID NO: 241809 - DNA, 19 bp, Homo sapiens
  siRNA target sequence for GRM7 (NM_000844.2,2667-2685).
ctatacatgccgaaagtgt

SEQ ID NO: 241810 - DNA, 19 bp, Homo sapiens
  siRNA target sequence for GRM7 (NM_000844.2,2819-2837).
cgagctctgtgaaaacgta

SEQ ID NO: 241811 - DNA, 19 bp, Homo sapiens
  siRNA target sequence for GRM7 (NM_181874.1,2835-2853).
gtagacccaaacaactgta

SEQ ID NO: 241812 - DNA, 19 bp, Homo sapiens
  siRNA target sequence for GRM7 (NM_181874.1,2840-2858).
cccaaacaactgtatacca

SEQ ID NO: 241813 - DNA, 19 bp, Homo sapiens
  siRNA target sequence for GRM7 (NM_181874.1,2849-2867).
ctgtataccaccagtaaga

SEQ ID NO: 241814 - DNA, 19 bp, Homo sapiens
  siRNA target sequence for GRM7 (NM_181874.1,2884-2902).
ctgttacttggtacactat

SEQ ID NO: 241815 - DNA, 19 bp, Homo sapiens
  siRNA target sequence for GRM7 (NM_181874.1,2897-2915).
cactatcccaccaacagta

SEQ ID NO: 241816 - DNA, 19 bp, Homo sapiens
  siRNA target sequence for GRM7 (NM_181875.1,2869-2887).
gtggaacttggattacact

SEQ ID NO: 241817 - DNA, 19 bp, Homo sapiens
  siRNA target sequence for GRM8 (NM_000845.1,159-177).
ggagtatgcccattccata

SEQ ID NO: 241818 - DNA, 19 bp, Homo sapiens
  siRNA target sequence for GRM8 (NM_000845.1,178-196).
cgggtggatggggacatta

SEQ ID NO: 241819 - DNA, 19 bp, Homo sapiens
  siRNA target sequence for GRM8 (NM_000845.1,377-395).
ctagggacacctatgcttt

SEQ ID NO: 241820 - DNA, 19 bp, Homo sapiens
  siRNA target sequence for GRM8 (NM_000845.1,391-409).
gctttggagcagtctctaa

SEQ ID NO: 241821 - DNA, 19 bp, Homo sapiens
  siRNA target sequence for GRM8 (NM_000845.1,410-428).
cattcgtgcaggcattaat

SEQ ID NO: 241822 - DNA, 19 bp, Homo sapiens
  siRNA target sequence for GRM8 (NM_000845.1,444-462).
ggatgtgaagtgtgctaat

SEQ ID NO: 241823 - DNA, 19 bp, Homo sapiens
  siRNA target sequence for GRM8 (NM_000845.1,463-481).
ggagatccacccattttca

SEQ ID NO: 241824 - DNA, 19 bp, Homo sapiens
  siRNA target sequence for GRM8 (NM_000845.1,480-498).
caccaagcccgacaagatt

SEQ ID NO: 241825 - DNA, 19 bp, Homo sapiens
  siRNA target sequence for GRM8 (NM_000845.1,483-501).
caagcccgacaagatttct

SEQ ID NO: 241826 - DNA, 19 bp, Homo sapiens
  siRNA target sequence for GRM8 (NM_000845.1,593-611).
cagccccagagctaagtga

SEQ ID NO: 241827 - DNA, 19 bp, Homo sapiens
  siRNA target sequence for GRM8 (NM_000845.1,595-613).
gccccagagctaagtgata

SEQ ID NO: 241828 - DNA, 19 bp, Homo sapiens
  siRNA target sequence for GRM8 (NM_000845.1,596-614).
ccccagagctaagtgataa

SEQ ID NO: 241829 - DNA, 19 bp, Homo sapiens
  siRNA target sequence for GRM8 (NM_000845.1,610-628).
gataacaccaggtatgact

SEQ ID NO: 241830 - DNA, 19 bp, Homo sapiens
  siRNA target sequence for GRM8 (NM_000845.1,720-738).
ggcttctgaggggaactat

SEQ ID NO: 241831 - DNA, 19 bp, Homo sapiens
  siRNA target sequence for GRM8 (NM_000845.1,1222-1240).
cgaattgctcgggattcat

SEQ ID NO: 241832 - DNA, 19 bp, Homo sapiens
  siRNA target sequence for GRM8 (NM_000845.1,1229-1247).
ctcgggattcatcttatga

SEQ ID NO: 241833 - DNA, 19 bp, Homo sapiens
  siRNA target sequence for GRM8 (NM_000845.1,1260-1278).
ggtccaatttgtaattgat

SEQ ID NO: 241834 - DNA, 19 bp, Homo sapiens
  siRNA target sequence for GRM8 (NM_000845.1,1294-1312).
gcttacgccctgcacaata

SEQ ID NO: 241835 - DNA, 19 bp, Homo sapiens
  siRNA target sequence for GRM8 (NM_000845.1,1295-1313).
cttacgccctgcacaatat

SEQ ID NO: 241836 - DNA, 19 bp, Homo sapiens
  siRNA target sequence for GRM8 (NM_000845.1,1305-1323).
gcacaatatgcacaaagat

SEQ ID NO: 241837 - DNA, 19 bp, Homo sapiens
  siRNA target sequence for GRM8 (NM_000845.1,1423-1441).
ggcactcctgtcactttta

SEQ ID NO: 241838 - DNA, 19 bp, Homo sapiens
  siRNA target sequence for GRM8 (NM_000845.1,1427-1445).
ctcctgtcacttttaatga

SEQ ID NO: 241839 - DNA, 19 bp, Homo sapiens
  siRNA target sequence for GRM8 (NM_000845.1,1429-1447).
cctgtcacttttaatgaaa

SEQ ID NO: 241840 - DNA, 19 bp, Homo sapiens
  siRNA target sequence for GRM8 (NM_000845.1,1471-1489).
gatatcttccagtatcaaa

SEQ ID NO: 241841 - DNA, 19 bp, Homo sapiens
  siRNA target sequence for GRM8 (NM_000845.1,1560-1578).
catgcagtgggctcataga

SEQ ID NO: 241842 - DNA, 19 bp, Homo sapiens
  siRNA target sequence for GRM8 (NM_000845.1,1569-1587).
ggctcatagagaacatact

SEQ ID NO: 241843 - DNA, 19 bp, Homo sapiens
  siRNA target sequence for GRM8 (NM_000845.1,1670-1688).
gtgaacgctgtgaaggtta

SEQ ID NO: 241844 - DNA, 19 bp, Homo sapiens
  siRNA target sequence for GRM8 (NM_000845.1,1675-1693).
cgctgtgaaggttacaact

SEQ ID NO: 241845 - DNA, 19 bp, Homo sapiens
  siRNA target sequence for GRM8 (NM_000845.1,1754-1772).
gcacaggctgccagcttat

SEQ ID NO: 241846 - DNA, 19 bp, Homo sapiens
  siRNA target sequence for GRM8 (NM_000845.1,1816-1834).
cctgtgtttgttgcaatat

SEQ ID NO: 241847 - DNA, 19 bp, Homo sapiens
  siRNA target sequence for GRM8 (NM_000845.1,1817-1835).
ctgtgtttgttgcaatatt

SEQ ID NO: 241848 - DNA, 19 bp, Homo sapiens
  siRNA target sequence for GRM8 (NM_000845.1,1868-1886).
cctttgtccgctataatga

SEQ ID NO: 241849 - DNA, 19 bp, Homo sapiens
  siRNA target sequence for GRM8 (NM_000845.1,1903-1921).
gcttcaggacgcgaactta

SEQ ID NO: 241850 - DNA, 19 bp, Homo sapiens
  siRNA target sequence for GRM8 (NM_000845.1,1907-1925).
caggacgcgaacttagtta

SEQ ID NO: 241851 - DNA, 19 bp, Homo sapiens
  siRNA target sequence for GRM8 (NM_000845.1,1929-1947).
gctcctaacggggattttt

SEQ ID NO: 241852 - DNA, 19 bp, Homo sapiens
  siRNA target sequence for GRM8 (NM_000845.1,1958-1976).
caatcacgtttttaatgat

SEQ ID NO: 241853 - DNA, 19 bp, Homo sapiens
  siRNA target sequence for GRM8 (NM_000845.1,1978-1996).
gcagcaccagatacaatca

SEQ ID NO: 241854 - DNA, 19 bp, Homo sapiens
  siRNA target sequence for GRM8 (NM_000845.1,1979-1997).
cagcaccagatacaatcat

SEQ ID NO: 241855 - DNA, 19 bp, Homo sapiens
  siRNA target sequence for GRM8 (NM_000845.1,1981-1999).
gcaccagatacaatcatat

SEQ ID NO: 241856 - DNA, 19 bp, Homo sapiens
  siRNA target sequence for GRM8 (NM_000845.1,1984-2002).
ccagatacaatcatatgct

SEQ ID NO: 241857 - DNA, 19 bp, Homo sapiens
  siRNA target sequence for GRM8 (NM_000845.1,2020-2038).
ctaggacttggcatgtgtt

SEQ ID NO: 241858 - DNA, 19 bp, Homo sapiens
  siRNA target sequence for GRM8 (NM_000845.1,2070-2088).
ccgtatccaccgaatattt

SEQ ID NO: 241859 - DNA, 19 bp, Homo sapiens
  siRNA target sequence for GRM8 (NM_000845.1,2072-2090).
gtatccaccgaatatttga

SEQ ID NO: 241860 - DNA, 19 bp, Homo sapiens
  siRNA target sequence for GRM8 (NM_000845.1,2107-2125).
gtcacagcgcccaagttca

SEQ ID NO: 241861 - DNA, 19 bp, Homo sapiens
  siRNA target sequence for GRM8 (NM_000845.1,2176-2194).
ctccttggagtgtttgtct

SEQ ID NO: 241862 - DNA, 19 bp, Homo sapiens
  siRNA target sequence for GRM8 (NM_000845.1,2309-2327).
gttcacttggatacagtat

SEQ ID NO: 241863 - DNA, 19 bp, Homo sapiens
  siRNA target sequence for GRM8 (NM_000845.1,2329-2347).
ctcttgatggtcacttgta

SEQ ID NO: 241864 - DNA, 19 bp, Homo sapiens
  siRNA target sequence for GRM8 (NM_000845.1,2424-2442).
cacctgcatcatttggtta

SEQ ID NO: 241865 - DNA, 19 bp, Homo sapiens
  siRNA target sequence for GRM8 (NM_000845.1,2490-2508).
gtacatccagacaacaaca

SEQ ID NO: 241866 - DNA, 19 bp, Homo sapiens
  siRNA target sequence for GRM8 (NM_000845.1,2493-2511).
catccagacaacaacactt

SEQ ID NO: 241867 - DNA, 19 bp, Homo sapiens
  siRNA target sequence for GRM8 (NM_000845.1,2554-2572).
ctctatatgcccaaggttt

SEQ ID NO: 241868 - DNA, 19 bp, Homo sapiens
  siRNA target sequence for GRM8 (NM_000845.1,2556-2574).
ctatatgcccaaggtttat

SEQ ID NO: 241869 - DNA, 19 bp, Homo sapiens
  siRNA target sequence for GRM8 (NM_000845.1,2564-2582).
ccaaggtttatattataat

SEQ ID NO: 241870 - DNA, 19 bp, Homo sapiens
  siRNA target sequence for GRM8 (NM_000845.1,2686-2704).
ccaaatggcgaggtgaaaa

SEQ ID NO: 241871 - DNA, 19 bp, Homo sapiens
  siRNA target sequence for GRM8 (NM_000845.1,2710-2728).
ctctgtgagagtcttgaaa

SEQ ID NO: 241872 - DNA, 19 bp, Homo sapiens
  siRNA target sequence for GRM8 (NM_000845.1,2738-2756).
cctctaccaagacaacata

SEQ ID NO: 241873 - DNA, 19 bp, Homo sapiens
  siRNA target sequence for GRM8 (NM_000845.1,2739-2757).
ctctaccaagacaacatat

SEQ ID NO: 241874 - DNA, 19 bp, Homo sapiens
  siRNA target sequence for GRM8 (NM_000845.1,2762-2780).
gttacagcaatcattcaat

SEQ ID NO: 241875 - DNA, 19 bp, Homo sapiens
  siRNA target sequence for RAI3 (NM_003979.2,301-319).
gtactacagactttgtgat

SEQ ID NO: 241876 - DNA, 19 bp, Homo sapiens
  siRNA target sequence for RAI3 (NM_003979.2,425-443).
gactccaacaggcgaaaaa

SEQ ID NO: 241877 - DNA, 19 bp, Homo sapiens
  siRNA target sequence for RAI3 (NM_003979.2,688-706).
ggatgttatcgctattgaa

SEQ ID NO: 241878 - DNA, 19 bp, Homo sapiens
  siRNA target sequence for RAI3 (NM_003979.2,689-707).
gatgttatcgctattgaat

SEQ ID NO: 241879 - DNA, 19 bp, Homo sapiens
  siRNA target sequence for RAI3 (NM_003979.2,729-747).
ggaccaacgtcaatgtctt

SEQ ID NO: 241880 - DNA, 19 bp, Homo sapiens
  siRNA target sequence for RAI3 (NM_003979.2,730-748).
gaccaacgtcaatgtcttt

SEQ ID NO: 241881 - DNA, 19 bp, Homo sapiens
  siRNA target sequence for RAI3 (NM_003979.2,760-778).
cgctcctcgtcgcaatgaa

SEQ ID NO: 241882 - DNA, 19 bp, Homo sapiens
  siRNA target sequence for RAI3 (NM_003979.2,762-780).
ctcctcgtcgcaatgaaga

SEQ ID NO: 241883 - DNA, 19 bp, Homo sapiens
  siRNA target sequence for RAI3 (NM_003979.2,765-783).
ctcgtcgcaatgaagactt

SEQ ID NO: 241884 - DNA, 19 bp, Homo sapiens
  siRNA target sequence for RAI3 (NM_003979.2,768-786).
gtcgcaatgaagactttgt

SEQ ID NO: 241885 - DNA, 19 bp, Homo sapiens
  siRNA target sequence for RAI3 (NM_003979.2,798-816).
cctacgtcctcttcttgat

SEQ ID NO: 241886 - DNA, 19 bp, Homo sapiens
  siRNA target sequence for RAI3 (NM_003979.2,1064-1082).
caacgaaaccccatggatt

SEQ ID NO: 241887 - DNA, 19 bp, Homo sapiens
  siRNA target sequence for RAI3 (NM_003979.2,1093-1111).
ggatgctttctgtaaacct

SEQ ID NO: 241888 - DNA, 19 bp, Homo sapiens
  siRNA target sequence for RAI3 (NM_003979.2,1199-1217).
ctctatgccccctattcca

SEQ ID NO: 241889 - DNA, 19 bp, Homo sapiens
  siRNA target sequence for RAI3 (NM_003979.2,1205-1223).
gccccctattccacacatt

SEQ ID NO: 241890 - DNA, 19 bp, Homo sapiens
  siRNA target sequence for RAI3 (NM_003979.2,1207-1225).
cccctattccacacatttt

SEQ ID NO: 241891 - DNA, 19 bp, Homo sapiens
  siRNA target sequence for RAI3 (NM_003979.2,1278-1296).
cttggccgagcccttacaa

SEQ ID NO: 241892 - DNA, 19 bp, Homo sapiens
  siRNA target sequence for RAI3 (NM_003979.2,1281-1299).
ggccgagcccttacaaaga

SEQ ID NO: 241893 - DNA, 19 bp, Homo sapiens
  siRNA target sequence for RAI3 (NM_003979.2,1283-1301).
ccgagcccttacaaagact

SEQ ID NO: 241894 - DNA, 19 bp, Homo sapiens
  siRNA target sequence for RAI3 (NM_003979.2,1285-1303).
gagcccttacaaagactat

SEQ ID NO: 241895 - DNA, 19 bp, Homo sapiens
  siRNA target sequence for RAI3 (NM_003979.2,1287-1305).
gcccttacaaagactatga

SEQ ID NO: 241896 - DNA, 19 bp, Homo sapiens
  siRNA target sequence for RAI3 (NM_003979.2,1288-1306).
cccttacaaagactatgaa

SEQ ID NO: 241897 - DNA, 19 bp, Homo sapiens
  siRNA target sequence for RAI3 (NM_003979.2,1290-1308).
cttacaaagactatgaagt

SEQ ID NO: 241898 - DNA, 19 bp, Homo sapiens
  siRNA target sequence for TAS1R1 (NM_138697.2,27-45).
cggcctgcagcttctcatt

SEQ ID NO: 241899 - DNA, 19 bp, Homo sapiens
  siRNA target sequence for TAS1R1 (NM_138697.2,28-46).
ggcctgcagcttctcattt

SEQ ID NO: 241900 - DNA, 19 bp, Homo sapiens
  siRNA target sequence for TAS1R1 (NM_138697.2,181-199).
ctgtgtgacaggtcttgta

SEQ ID NO: 241901 - DNA, 19 bp, Homo sapiens
  siRNA target sequence for TAS1R1 (NM_138697.2,189-207).
caggtcttgtagcttcaat

SEQ ID NO: 241902 - DNA, 19 bp, Homo sapiens
  siRNA target sequence for TAS1R1 (NM_138697.2,294-312).
ggggtaccagctgtatgat

SEQ ID NO: 241903 - DNA, 19 bp, Homo sapiens
  siRNA target sequence for TAS1R1 (NM_138697.2,487-505).
ctggtgcccatgattagct

SEQ ID NO: 241904 - DNA, 19 bp, Homo sapiens
  siRNA target sequence for TAS1R1 (NM_138697.2,489-507).
ggtgcccatgattagctat

SEQ ID NO: 241905 - DNA, 19 bp, Homo sapiens
  siRNA target sequence for TAS1R1 (NM_138697.2,563-581).
ccatccccaatgacaagta

SEQ ID NO: 241906 - DNA, 19 bp, Homo sapiens
  siRNA target sequence for TAS1R1 (NM_138697.2,703-721).
caggggatctgcattgctt

SEQ ID NO: 241907 - DNA, 19 bp, Homo sapiens
  siRNA target sequence for TAS1R1 (NM_138697.2,804-822).
caccgtcgtggttgttttt

SEQ ID NO: 241908 - DNA, 19 bp, Homo sapiens
  siRNA target sequence for TAS1R1 (NM_138697.2,808-826).
gtcgtggttgttttttcca

SEQ ID NO: 241909 - DNA, 19 bp, Homo sapiens
  siRNA target sequence for TAS1R1 (NM_138697.2,998-1016).
gcctgaaggcgtttgaaga

SEQ ID NO: 241910 - DNA, 19 bp, Homo sapiens
  siRNA target sequence for TAS1R1 (NM_138697.2,1164-1182).
cgcataccgggctgtgtat

SEQ ID NO: 241911 - DNA, 19 bp, Homo sapiens
  siRNA target sequence for TAS1R1 (NM_138697.2,1275-1293).
ccacaaggtgcatttcctt

SEQ ID NO: 241912 - DNA, 19 bp, Homo sapiens
  siRNA target sequence for TAS1R1 (NM_138697.2,1330-1348).
gatcccctcagtagctata

SEQ ID NO: 241913 - DNA, 19 bp, Homo sapiens
  siRNA target sequence for TAS1R1 (NM_138697.2,1338-1356).
cagtagctataacataatt

SEQ ID NO: 241914 - DNA, 19 bp, Homo sapiens
  siRNA target sequence for TAS1R1 (NM_138697.2,1417-1435).
ccagttcagctaaacataa

SEQ ID NO: 241915 - DNA, 19 bp, Homo sapiens
  siRNA target sequence for TAS1R1 (NM_138697.2,1467-1485).
caaccaggtgcctaagtct

SEQ ID NO: 241916 - DNA, 19 bp, Homo sapiens
  siRNA target sequence for TAS1R1 (NM_138697.2,1947-1965).
gacagttcgctcattccaa

SEQ ID NO: 241917 - DNA, 19 bp, Homo sapiens
  siRNA target sequence for TAS1R1 (NM_138697.2,1951-1969).
gttcgctcattccaactaa

SEQ ID NO: 241918 - DNA, 19 bp, Homo sapiens
  siRNA target sequence for TAS1R1 (NM_138697.2,1954-1972).
cgctcattccaactaatca

SEQ ID NO: 241919 - DNA, 19 bp, Homo sapiens
  siRNA target sequence for TAS1R1 (NM_138697.2,1955-1973).
gctcattccaactaatcat

SEQ ID NO: 241920 - DNA, 19 bp, Homo sapiens
  siRNA target sequence for TAS1R1 (NM_138697.2,1966-1984).
ctaatcatcatcttcaagt

SEQ ID NO: 241921 - DNA, 19 bp, Homo sapiens
  siRNA target sequence for TAS1R1 (NM_138697.2,1991-2009).
ccaaggtacctacattcta

SEQ ID NO: 241922 - DNA, 19 bp, Homo sapiens
  siRNA target sequence for TAS1R1 (NM_138697.2,2032-2050).
ggtgctggcctgtttgtga

SEQ ID NO: 241923 - DNA, 19 bp, Homo sapiens
  siRNA target sequence for TAS1R1 (NM_138697.2,2033-2051).
gtgctggcctgtttgtgat

SEQ ID NO: 241924 - DNA, 19 bp, Homo sapiens
  siRNA target sequence for TAS1R1 (NM_138697.2,2251-2269).
gacttgccagagaactaca

SEQ ID NO: 241925 - DNA, 19 bp, Homo sapiens
  siRNA target sequence for TAS1R1 (NM_138697.2,2405-2423).
gcggcttcggtgggtattt

SEQ ID NO: 241926 - DNA, 19 bp, Homo sapiens
  siRNA target sequence for TAS1R1 (NM_138697.2,2406-2424).
cggcttcggtgggtatttt

SEQ ID NO: 241927 - DNA, 19 bp, Homo sapiens
  siRNA target sequence for TAS1R1 (NM_138697.2,2408-2426).
gcttcggtgggtattttct

SEQ ID NO: 241928 - DNA, 19 bp, Homo sapiens
  siRNA target sequence for TAS1R2 (NM_152232.1,130-148).
caacatgaagggcattgtt

SEQ ID NO: 241929 - DNA, 19 bp, Homo sapiens
  siRNA target sequence for TAS1R2 (NM_152232.1,140-158).
ggcattgttcaccttaact

SEQ ID NO: 241930 - DNA, 19 bp, Homo sapiens
  siRNA target sequence for TAS1R2 (NM_152232.1,141-159).
gcattgttcaccttaactt

SEQ ID NO: 241931 - DNA, 19 bp, Homo sapiens
  siRNA target sequence for TAS1R2 (NM_152232.1,306-324).
gctacatctccaacaatgt

SEQ ID NO: 241932 - DNA, 19 bp, Homo sapiens
  siRNA target sequence for TAS1R2 (NM_152232.1,374-392).
caagaggactacagtaact

SEQ ID NO: 241933 - DNA, 19 bp, Homo sapiens
  siRNA target sequence for TAS1R2 (NM_152232.1,377-395).
gaggactacagtaactaca

SEQ ID NO: 241934 - DNA, 19 bp, Homo sapiens
  siRNA target sequence for TAS1R2 (NM_152232.1,379-397).
ggactacagtaactacatt

SEQ ID NO: 241935 - DNA, 19 bp, Homo sapiens
  siRNA target sequence for TAS1R2 (NM_152232.1,380-398).
gactacagtaactacattt

SEQ ID NO: 241936 - DNA, 19 bp, Homo sapiens
  siRNA target sequence for TAS1R2 (NM_152232.1,604-622).
ccgctggaactggatcatt

SEQ ID NO: 241937 - DNA, 19 bp, Homo sapiens
  siRNA target sequence for TAS1R2 (NM_152232.1,731-749).
cagcccaaccagaacatga

SEQ ID NO: 241938 - DNA, 19 bp, Homo sapiens
  siRNA target sequence for TAS1R2 (NM_152232.1,840-858).
ccctgtaccacttcttcaa

SEQ ID NO: 241939 - DNA, 19 bp, Homo sapiens
  siRNA target sequence for TAS1R2 (NM_152232.1,1208-1226).
ctcggctgtgacaaaagca

SEQ ID NO: 241940 - DNA, 19 bp, Homo sapiens
  siRNA target sequence for TAS1R2 (NM_152232.1,1446-1464).
cctggcacaccgtcaacaa

SEQ ID NO: 241941 - DNA, 19 bp, Homo sapiens
  siRNA target sequence for TAS1R2 (NM_152232.1,1916-1934).
ctctgcttcacaatttgca

SEQ ID NO: 241942 - DNA, 19 bp, Homo sapiens
  siRNA target sequence for TAS1R2 (NM_152232.1,1941-1959).
gtatcgccgtgcgttcttt

SEQ ID NO: 241943 - DNA, 19 bp, Homo sapiens
  siRNA target sequence for TAS1R2 (NM_152232.1,2049-2067).
catttatcacggtactcaa

SEQ ID NO: 241944 - DNA, 19 bp, Homo sapiens
  siRNA target sequence for TAS1R2 (NM_152232.1,2132-2150).
gatgaccccaagatcacaa

SEQ ID NO: 241945 - DNA, 19 bp, Homo sapiens
  siRNA target sequence for TAS1R2 (NM_152232.1,2291-2309).
ctcagcatgaccttctatt

SEQ ID NO: 241946 - DNA, 19 bp, Homo sapiens
  siRNA target sequence for PTHR1 (NM_000316.2,378-396).
ccagccagcataatggaat

SEQ ID NO: 241947 - DNA, 19 bp, Homo sapiens
  siRNA target sequence for PTHR1 (NM_000316.2,591-609).
ccctgtccggactacattt

SEQ ID NO: 241948 - DNA, 19 bp, Homo sapiens
  siRNA target sequence for PTHR1 (NM_000316.2,592-610).
cctgtccggactacattta

SEQ ID NO: 241949 - DNA, 19 bp, Homo sapiens
  siRNA target sequence for PTHR1 (NM_000316.2,593-611).
ctgtccggactacatttat

SEQ ID NO: 241950 - DNA, 19 bp, Homo sapiens
  siRNA target sequence for PTHR1 (NM_000316.2,597-615).
ccggactacatttatgact

SEQ ID NO: 241951 - DNA, 19 bp, Homo sapiens
  siRNA target sequence for PTHR1 (NM_000316.2,598-616).
cggactacatttatgactt

SEQ ID NO: 241952 - DNA, 19 bp, Homo sapiens
  siRNA target sequence for PTHR1 (NM_000316.2,602-620).
ctacatttatgacttcaat

SEQ ID NO: 241953 - DNA, 19 bp, Homo sapiens
  siRNA target sequence for PTHR1 (NM_000316.2,759-777).
cgcctgggcatgatttaca

SEQ ID NO: 241954 - DNA, 19 bp, Homo sapiens
  siRNA target sequence for PTHR1 (NM_000316.2,1053-1071).
gctgtgaccttcttccttt

SEQ ID NO: 241955 - DNA, 19 bp, Homo sapiens
  siRNA target sequence for PTHR1 (NM_000316.2,1518-1536).
gtccagatgcactatgaga

SEQ ID NO: 241956 - DNA, 19 bp, Homo sapiens
  siRNA target sequence for PTHR1 (NM_000316.2,1558-1576).
gattttttgtcgcaatcat

SEQ ID NO: 241957 - DNA, 19 bp, Homo sapiens
  siRNA target sequence for PTHR1 (NM_000316.2,1566-1584).
gtcgcaatcatatactgtt

SEQ ID NO: 241958 - DNA, 19 bp, Homo sapiens
  siRNA target sequence for PTHR1 (NM_000316.2,1569-1587).
gcaatcatatactgtttct

SEQ ID NO: 241959 - DNA, 19 bp, Homo sapiens
  siRNA target sequence for PTHR1 (NM_000316.2,1605-1623).
gctgagatcaagaaatctt

SEQ ID NO: 241960 - DNA, 19 bp, Homo sapiens
  siRNA target sequence for PTHR2 (NM_005048.2,311-329).
ctatagaggagcagattgt

SEQ ID NO: 241961 - DNA, 19 bp, Homo sapiens
  siRNA target sequence for PTHR2 (NM_005048.2,339-357).
gaaagcgaaagtacaatgt

SEQ ID NO: 241962 - DNA, 19 bp, Homo sapiens
  siRNA target sequence for PTHR2 (NM_005048.2,385-403).
gagggagaaggtaattgtt

SEQ ID NO: 241963 - DNA, 19 bp, Homo sapiens
  siRNA target sequence for PTHR2 (NM_005048.2,439-457).
ggaacagtggggaaaatat

SEQ ID NO: 241964 - DNA, 19 bp, Homo sapiens
  siRNA target sequence for PTHR2 (NM_005048.2,463-481).
gttccatgccctccttata

SEQ ID NO: 241965 - DNA, 19 bp, Homo sapiens
  siRNA target sequence for PTHR2 (NM_005048.2,470-488).
gccctccttatatttatga

SEQ ID NO: 241966 - DNA, 19 bp, Homo sapiens
  siRNA target sequence for PTHR2 (NM_005048.2,472-490).
cctccttatatttatgact

SEQ ID NO: 241967 - DNA, 19 bp, Homo sapiens
  siRNA target sequence for PTHR2 (NM_005048.2,473-491).
ctccttatatttatgactt

SEQ ID NO: 241968 - DNA, 19 bp, Homo sapiens
  siRNA target sequence for PTHR2 (NM_005048.2,533-551).
gaacatgggattttatgca

SEQ ID NO: 241969 - DNA, 19 bp, Homo sapiens
  siRNA target sequence for PTHR2 (NM_005048.2,604-622).
ccagatatcagcataggaa

SEQ ID NO: 241970 - DNA, 19 bp, Homo sapiens
  siRNA target sequence for PTHR2 (NM_005048.2,633-651).
ctttgaacgcctctatgta

SEQ ID NO: 241971 - DNA, 19 bp, Homo sapiens
  siRNA target sequence for PTHR2 (NM_005048.2,637-655).
gaacgcctctatgtaatgt

SEQ ID NO: 241972 - DNA, 19 bp, Homo sapiens
  siRNA target sequence for PTHR2 (NM_005048.2,640-658).
cgcctctatgtaatgtata

SEQ ID NO: 241973 - DNA, 19 bp, Homo sapiens
  siRNA target sequence for PTHR2 (NM_005048.2,698-716).
ctattctcatcattggtta

SEQ ID NO: 241974 - DNA, 19 bp, Homo sapiens
  siRNA target sequence for PTHR2 (NM_005048.2,784-802).
gctacaagcatctttgtca

SEQ ID NO: 241975 - DNA, 19 bp, Homo sapiens
  siRNA target sequence for PTHR2 (NM_005048.2,788-806).
caagcatctttgtcaaaga

SEQ ID NO: 241976 - DNA, 19 bp, Homo sapiens
  siRNA target sequence for PTHR2 (NM_005048.2,837-855).
ggagctggagtccctaata

SEQ ID NO: 241977 - DNA, 19 bp, Homo sapiens
  siRNA target sequence for PTHR2 (NM_005048.2,858-876).
gcaggatgacccacaaaat

SEQ ID NO: 241978 - DNA, 19 bp, Homo sapiens
  siRNA target sequence for PTHR2 (NM_005048.2,862-880).
gatgacccacaaaattcca

SEQ ID NO: 241979 - DNA, 19 bp, Homo sapiens
  siRNA target sequence for PTHR2 (NM_005048.2,886-904).
gcaacttctgtggacaaat

SEQ ID NO: 241980 - DNA, 19 bp, Homo sapiens
  siRNA target sequence for PTHR2 (NM_005048.2,893-911).
ctgtggacaaatcacaata

SEQ ID NO: 241981 - DNA, 19 bp, Homo sapiens
  siRNA target sequence for PTHR2 (NM_005048.2,895-913).
gtggacaaatcacaatata

SEQ ID NO: 241982 - DNA, 19 bp, Homo sapiens
  siRNA target sequence for PTHR2 (NM_005048.2,993-1011).
cctgcataatctcatcttt

SEQ ID NO: 241983 - DNA, 19 bp, Homo sapiens
  siRNA target sequence for PTHR2 (NM_005048.2,1123-1141).
gcgaggtgctgggaactta

SEQ ID NO: 241984 - DNA, 19 bp, Homo sapiens
  siRNA target sequence for PTHR2 (NM_005048.2,1148-1166).
gagacatcaagtggattta

SEQ ID NO: 241985 - DNA, 19 bp, Homo sapiens
  siRNA target sequence for PTHR2 (NM_005048.2,1183-1201).
gcagctattgggctgaatt

SEQ ID NO: 241986 - DNA, 19 bp, Homo sapiens
  siRNA target sequence for PTHR2 (NM_005048.2,1184-1202).
cagctattgggctgaattt

SEQ ID NO: 241987 - DNA, 19 bp, Homo sapiens
  siRNA target sequence for PTHR2 (NM_005048.2,1215-1233).
gaatacggttagagttcta

SEQ ID NO: 241988 - DNA, 19 bp, Homo sapiens
  siRNA target sequence for PTHR2 (NM_005048.2,1336-1354).
cattacatcgtgttcgtat

SEQ ID NO: 241989 - DNA, 19 bp, Homo sapiens
  siRNA target sequence for PTHR2 (NM_005048.2,1429-1447).
ggtttctttgtgtctatca

SEQ ID NO: 241990 - DNA, 19 bp, Homo sapiens
  siRNA target sequence for PTHR2 (NM_005048.2,1616-1634).
gcacacgcatggtgcttat

SEQ ID NO: 241991 - DNA, 19 bp, Homo sapiens
  siRNA target sequence for PTHR2 (NM_005048.2,1695-1713).
ctatgtctggagtaactca

SEQ ID NO: 241992 - DNA, 19 bp, Homo sapiens
  siRNA target sequence for PTHR2 (NM_005048.2,1769-1787).
ggcagggagatgatattct

SEQ ID NO: 241993 - DNA, 19 bp, Homo sapiens
  siRNA target sequence for PTHR2 (NM_005048.2,1771-1789).
cagggagatgatattctaa

SEQ ID NO: 241994 - DNA, 19 bp, Homo sapiens
  siRNA target sequence for PTHR2 (NM_005048.2,1775-1793).
gagatgatattctaatgga

SEQ ID NO: 241995 - DNA, 19 bp, Homo sapiens
  siRNA target sequence for PTHR2 (NM_005048.2,1798-1816).
ccttccaggcctatggaat

SEQ ID NO: 241996 - DNA, 19 bp, Homo sapiens
  siRNA target sequence for CALCR (NM_001742.1,58-76).
ccggtgcttggcactgttt

SEQ ID NO: 241997 - DNA, 19 bp, Homo sapiens
  siRNA target sequence for CALCR (NM_001742.1,144-162).
ccaagccatttctttacgt

SEQ ID NO: 241998 - DNA, 19 bp, Homo sapiens
  siRNA target sequence for CALCR (NM_001742.1,161-179).
gtcgtaggacgaaagaaga

SEQ ID NO: 241999 - DNA, 19 bp, Homo sapiens
  siRNA target sequence for CALCR (NM_001742.1,299-317).
ggagtattgtcctatcagt

SEQ ID NO: 242000 - DNA, 19 bp, Homo sapiens
  siRNA target sequence for CALCR (NM_001742.1,300-318).
gagtattgtcctatcagtt

SEQ ID NO: 242001 - DNA, 19 bp, Homo sapiens
  siRNA target sequence for CALCR (NM_001742.1,413-431).
cgaacctggtccaactata

SEQ ID NO: 242002 - DNA, 19 bp, Homo sapiens
  siRNA target sequence for CALCR (NM_001742.1,417-435).
cctggtccaactatactat

SEQ ID NO: 242003 - DNA, 19 bp, Homo sapiens
  siRNA target sequence for CALCR (NM_001742.1,491-509).
gctattgtgggtcattctt

SEQ ID NO: 242004 - DNA, 19 bp, Homo sapiens
  siRNA target sequence for CALCR (NM_001742.1,497-515).
gtgggtcattctttgtcaa

SEQ ID NO: 242005 - DNA, 19 bp, Homo sapiens
  siRNA target sequence for CALCR (NM_001742.1,499-517).
gggtcattctttgtcaatt

SEQ ID NO: 242006 - DNA, 19 bp, Homo sapiens
  siRNA target sequence for CALCR (NM_001742.1,500-518).
ggtcattctttgtcaattt

SEQ ID NO: 242007 - DNA, 19 bp, Homo sapiens
  siRNA target sequence for CALCR (NM_001742.1,503-521).
cattctttgtcaattttca

SEQ ID NO: 242008 - DNA, 19 bp, Homo sapiens
  siRNA target sequence for CALCR (NM_001742.1,536-554).
ctggggattttcgtgtttt

SEQ ID NO: 242009 - DNA, 19 bp, Homo sapiens
  siRNA target sequence for CALCR (NM_001742.1,576-594).
gggtaaccctgcacaagaa

SEQ ID NO: 242010 - DNA, 19 bp, Homo sapiens
  siRNA target sequence for CALCR (NM_001742.1,578-596).
gtaaccctgcacaagaaca

SEQ ID NO: 242011 - DNA, 19 bp, Homo sapiens
  siRNA target sequence for CALCR (NM_001742.1,589-607).
caagaacatgtttcttact

SEQ ID NO: 242012 - DNA, 19 bp, Homo sapiens
  siRNA target sequence for CALCR (NM_001742.1,637-655).
ccacctggttgaagtagta

SEQ ID NO: 242013 - DNA, 19 bp, Homo sapiens
  siRNA target sequence for CALCR (NM_001742.1,682-700).
cccggtgagctgcaagatt

SEQ ID NO: 242014 - DNA, 19 bp, Homo sapiens
  siRNA target sequence for CALCR (NM_001742.1,683-701).
ccggtgagctgcaagattt

SEQ ID NO: 242015 - DNA, 19 bp, Homo sapiens
  siRNA target sequence for CALCR (NM_001742.1,684-702).
cggtgagctgcaagatttt

SEQ ID NO: 242016 - DNA, 19 bp, Homo sapiens
  siRNA target sequence for CALCR (NM_001742.1,751-769).
ctgtgaagggatctatctt

SEQ ID NO: 242017 - DNA, 19 bp, Homo sapiens
  siRNA target sequence for CALCR (NM_001742.1,753-771).
gtgaagggatctatcttca

SEQ ID NO: 242018 - DNA, 19 bp, Homo sapiens
  siRNA target sequence for CALCR (NM_001742.1,759-777).
ggatctatcttcatacact

SEQ ID NO: 242019 - DNA, 19 bp, Homo sapiens
  siRNA target sequence for CALCR (NM_001742.1,806-824).
caacgcttgcggtggtatt

SEQ ID NO: 242020 - DNA, 19 bp, Homo sapiens
  siRNA target sequence for CALCR (NM_001742.1,810-828).
gcttgcggtggtattatct

SEQ ID NO: 242021 - DNA, 19 bp, Homo sapiens
  siRNA target sequence for CALCR (NM_001742.1,877-895).
cagggccgtgtacttcaat

SEQ ID NO: 242022 - DNA, 19 bp, Homo sapiens
  siRNA target sequence for CALCR (NM_001742.1,879-897).
gggccgtgtacttcaatga

SEQ ID NO: 242023 - DNA, 19 bp, Homo sapiens
  siRNA target sequence for CALCR (NM_001742.1,956-974).
gcggcacttgtggtcaatt

SEQ ID NO: 242024 - DNA, 19 bp, Homo sapiens
  siRNA target sequence for CALCR (NM_001742.1,959-977).
gcacttgtggtcaatttct

SEQ ID NO: 242025 - DNA, 19 bp, Homo sapiens
  siRNA target sequence for CALCR (NM_001742.1,998-1016).
cgggtgcttgtgaccaaaa

SEQ ID NO: 242026 - DNA, 19 bp, Homo sapiens
  siRNA target sequence for CALCR (NM_001742.1,1001-1019).
gtgcttgtgaccaaaatga

SEQ ID NO: 242027 - DNA, 19 bp, Homo sapiens
  siRNA target sequence for CALCR (NM_001742.1,1119-1137).
ggagaccttccaacaagat

SEQ ID NO: 242028 - DNA, 19 bp, Homo sapiens
  siRNA target sequence for CALCR (NM_001742.1,1143-1161).
ggaagatatatgattacgt

SEQ ID NO: 242029 - DNA, 19 bp, Homo sapiens
  siRNA target sequence for CALCR (NM_001742.1,1162-1180).
gatgcactctctgattcat

SEQ ID NO: 242030 - DNA, 19 bp, Homo sapiens
  siRNA target sequence for CALCR (NM_001742.1,1249-1267).
ccaatgggcccaattcaaa

SEQ ID NO: 242031 - DNA, 19 bp, Homo sapiens
  siRNA target sequence for CALCR (NM_001742.1,1250-1268).
caatgggcccaattcaaaa

SEQ ID NO: 242032 - DNA, 19 bp, Homo sapiens
  siRNA target sequence for CALCR (NM_001742.1,1254-1272).
gggcccaattcaaaattca

SEQ ID NO: 242033 - DNA, 19 bp, Homo sapiens
  siRNA target sequence for CALCR (NM_001742.1,1340-1358).
gctggcgacatcccaattt

SEQ ID NO: 242034 - DNA, 19 bp, Homo sapiens
  siRNA target sequence for CALCR (NM_001742.1,1341-1359).
ctggcgacatcccaattta

SEQ ID NO: 242035 - DNA, 19 bp, Homo sapiens
  siRNA target sequence for RCP9 (NM_014478.3,84-102).
ctgcgcttctcagtaacta

SEQ ID NO: 242036 - DNA, 19 bp, Homo sapiens
  siRNA target sequence for RCP9 (NM_014478.3,94-112).
cagtaactacgaggtattt

SEQ ID NO: 242037 - DNA, 19 bp, Homo sapiens
  siRNA target sequence for RCP9 (NM_014478.3,96-114).
gtaactacgaggtatttca

SEQ ID NO: 242038 - DNA, 19 bp, Homo sapiens
  siRNA target sequence for RCP9 (NM_014478.3,100-118).
ctacgaggtatttcagtta

SEQ ID NO: 242039 - DNA, 19 bp, Homo sapiens
  siRNA target sequence for RCP9 (NM_014478.3,115-133).
gttactaactgatctgaaa

SEQ ID NO: 242040 - DNA, 19 bp, Homo sapiens
  siRNA target sequence for RCP9 (NM_014478.3,179-197).
cagaacttgaacactatca

SEQ ID NO: 242041 - DNA, 19 bp, Homo sapiens
  siRNA target sequence for RCP9 (NM_014478.3,192-210).
ctatcacctatgaaacgtt

SEQ ID NO: 242042 - DNA, 19 bp, Homo sapiens
  siRNA target sequence for RCP9 (NM_014478.3,196-214).
cacctatgaaacgttaaaa

SEQ ID NO: 242043 - DNA, 19 bp, Homo sapiens
  siRNA target sequence for RCP9 (NM_014478.3,198-216).
cctatgaaacgttaaaata

SEQ ID NO: 242044 - DNA, 19 bp, Homo sapiens
  siRNA target sequence for RCP9 (NM_014478.3,238-256).
gcaccagagtcctgaaatt

SEQ ID NO: 242045 - DNA, 19 bp, Homo sapiens
  siRNA target sequence for CRHR1 (NM_004382.2,442-460).
ctatggtgtccgctacaat

SEQ ID NO: 242046 - DNA, 19 bp, Homo sapiens
  siRNA target sequence for CRHR1 (NM_004382.2,446-464).
ggtgtccgctacaatacca

SEQ ID NO: 242047 - DNA, 19 bp, Homo sapiens
  siRNA target sequence for CRHR1 (NM_004382.2,669-687).
ggtgcctgcgaaacatcat

SEQ ID NO: 242048 - DNA, 19 bp, Homo sapiens
  siRNA target sequence for CRHR1 (NM_004382.2,797-815).
gtgacagccgcctacaact

SEQ ID NO: 242049 - DNA, 19 bp, Homo sapiens
  siRNA target sequence for CRHR1 (NM_004382.2,896-914).
gaccggctgcgcaaatgga

SEQ ID NO: 242050 - DNA, 19 bp, Homo sapiens
  siRNA target sequence for CRHR1 (NM_004382.2,902-920).
ctgcgcaaatggatgttca

SEQ ID NO: 242051 - DNA, 19 bp, Homo sapiens
  siRNA target sequence for CRHR1 (NM_004382.2,905-923).
cgcaaatggatgttcatct

SEQ ID NO: 242052 - DNA, 19 bp, Homo sapiens
  siRNA target sequence for CRHR1 (NM_004382.2,966-984).
ccattgggaagctgtacta

SEQ ID NO: 242053 - DNA, 19 bp, Homo sapiens
  siRNA target sequence for CRHR1 (NM_004382.2,1020-1038).
gggtgtacaccgactacat

SEQ ID NO: 242054 - DNA, 19 bp, Homo sapiens
  siRNA target sequence for CRHR1 (NM_004382.2,1022-1040).
gtgtacaccgactacatct

SEQ ID NO: 242055 - DNA, 19 bp, Homo sapiens
  siRNA target sequence for CRHR1 (NM_004382.2,1134-1152).
cgtctgagaccattcagta

SEQ ID NO: 242056 - DNA, 19 bp, Homo sapiens
  siRNA target sequence for CRHR1 (NM_004382.2,1247-1265).
cgggtcgtcttcatctact

SEQ ID NO: 242057 - DNA, 19 bp, Homo sapiens
  siRNA target sequence for CRHR2 (NM_001883.2,188-206).
cgtgccccgagtacttcaa

SEQ ID NO: 242058 - DNA, 19 bp, Homo sapiens
  siRNA target sequence for CRHR2 (NM_001883.2,260-278).
ggacgtgggcctcaaagat

SEQ ID NO: 242059 - DNA, 19 bp, Homo sapiens
  siRNA target sequence for CRHR2 (NM_001883.2,263-281).
cgtgggcctcaaagatcaa

SEQ ID NO: 242060 - DNA, 19 bp, Homo sapiens
  siRNA target sequence for CRHR2 (NM_001883.2,266-284).
gggcctcaaagatcaacta

SEQ ID NO: 242061 - DNA, 19 bp, Homo sapiens
  siRNA target sequence for CRHR2 (NM_001883.2,287-305).
cacagtgtgagcccatttt

SEQ ID NO: 242062 - DNA, 19 bp, Homo sapiens
  siRNA target sequence for CRHR2 (NM_001883.2,291-309).
gtgtgagcccattttggat

SEQ ID NO: 242063 - DNA, 19 bp, Homo sapiens
  siRNA target sequence for CRHR2 (NM_001883.2,434-452).
gctgtctgcggaatgtgat

SEQ ID NO: 242064 - DNA, 19 bp, Homo sapiens
  siRNA target sequence for CRHR2 (NM_001883.2,437-455).
gtctgcggaatgtgattca

SEQ ID NO: 242065 - DNA, 19 bp, Homo sapiens
  siRNA target sequence for CRHR2 (NM_001883.2,439-457).
ctgcggaatgtgattcact

SEQ ID NO: 242066 - DNA, 19 bp, Homo sapiens
  siRNA target sequence for CRHR2 (NM_001883.2,473-491).
cctttatcctgcgaaatgt

SEQ ID NO: 242067 - DNA, 19 bp, Homo sapiens
  siRNA target sequence for CRHR2 (NM_001883.2,563-581).
ccaccatcttcaactactt

SEQ ID NO: 242068 - DNA, 19 bp, Homo sapiens
  siRNA target sequence for CRHR2 (NM_001883.2,728-746).
ccatcggcaagctctacta

SEQ ID NO: 242069 - DNA, 19 bp, Homo sapiens
  siRNA target sequence for CRHR2 (NM_001883.2,729-747).
catcggcaagctctactat

SEQ ID NO: 242070 - DNA, 19 bp, Homo sapiens
  siRNA target sequence for CRHR2 (NM_001883.2,735-753).
caagctctactatgagaat

SEQ ID NO: 242071 - DNA, 19 bp, Homo sapiens
  siRNA target sequence for CRHR2 (NM_001883.2,825-843).
gctcctgatcaatttcgta

SEQ ID NO: 242072 - DNA, 19 bp, Homo sapiens
  siRNA target sequence for CRHR2 (NM_001883.2,826-844).
ctcctgatcaatttcgtat

SEQ ID NO: 242073 - DNA, 19 bp, Homo sapiens
  siRNA target sequence for CRHR2 (NM_001883.2,828-846).
cctgatcaatttcgtattt

SEQ ID NO: 242074 - DNA, 19 bp, Homo sapiens
  siRNA target sequence for VIPR1 (NM_004624.2,209-227).
gcaggaggagtgtgactat

SEQ ID NO: 242075 - DNA, 19 bp, Homo sapiens
  siRNA target sequence for VIPR1 (NM_004624.2,220-238).
gtgactatgtgcagatgat

SEQ ID NO: 242076 - DNA, 19 bp, Homo sapiens
  siRNA target sequence for VIPR1 (NM_004624.2,395-413).
cattcaaggccgcaatgta

SEQ ID NO: 242077 - DNA, 19 bp, Homo sapiens
  siRNA target sequence for VIPR1 (NM_004624.2,488-506).
caaggcagcgagtttggat

SEQ ID NO: 242078 - DNA, 19 bp, Homo sapiens
  siRNA target sequence for VIPR1 (NM_004624.2,642-660).
cacatgcacctcttcatat

SEQ ID NO: 242079 - DNA, 19 bp, Homo sapiens
  siRNA target sequence for VIPR1 (NM_004624.2,673-691).
gggctgccgctgtcttcat

SEQ ID NO: 242080 - DNA, 19 bp, Homo sapiens
  siRNA target sequence for VIPR1 (NM_004624.2,760-778).
cagccatggtctttttcca

SEQ ID NO: 242081 - DNA, 19 bp, Homo sapiens
  siRNA target sequence for VIPR1 (NM_004624.2,869-887).
gtacttctgggggtacata

SEQ ID NO: 242082 - DNA, 19 bp, Homo sapiens
  siRNA target sequence for VIPR1 (NM_004624.2,932-950).
catcgccaggatccatttt

SEQ ID NO: 242083 - DNA, 19 bp, Homo sapiens
  siRNA target sequence for VIPR1 (NM_004624.2,940-958).
ggatccattttgaggatta

SEQ ID NO: 242084 - DNA, 19 bp, Homo sapiens
  siRNA target sequence for VIPR1 (NM_004624.2,1014-1032).
ctcacctccatcttggtaa

SEQ ID NO: 242085 - DNA, 19 bp, Homo sapiens
  siRNA target sequence for VIPR1 (NM_004624.2,1018-1036).
cctccatcttggtaaactt

SEQ ID NO: 242086 - DNA, 19 bp, Homo sapiens
  siRNA target sequence for VIPR1 (NM_004624.2,1104-1122).
gacagcagtccatactcaa

SEQ ID NO: 242087 - DNA, 19 bp, Homo sapiens
  siRNA target sequence for VIPR1 (NM_004624.2,1153-1171).
ccctgtttggagtacacta

SEQ ID NO: 242088 - DNA, 19 bp, Homo sapiens
  siRNA target sequence for VIPR1 (NM_004624.2,1161-1179).
ggagtacactacatcatgt

SEQ ID NO: 242089 - DNA, 19 bp, Homo sapiens
  siRNA target sequence for VIPR1 (NM_004624.2,1162-1180).
gagtacactacatcatgtt

SEQ ID NO: 242090 - DNA, 19 bp, Homo sapiens
  siRNA target sequence for VIPR1 (NM_004624.2,1182-1200).
gccttctttccggacaatt

SEQ ID NO: 242091 - DNA, 19 bp, Homo sapiens
  siRNA target sequence for VIPR1 (NM_004624.2,1184-1202).
cttctttccggacaatttt

SEQ ID NO: 242092 - DNA, 19 bp, Homo sapiens
  siRNA target sequence for VIPR1 (NM_004624.2,1240-1258).
ggtctttccagggttttgt

SEQ ID NO: 242093 - DNA, 19 bp, Homo sapiens
  siRNA target sequence for GCGR (NM_000160.1,800-818).
gccatccacgcgaatctgt

SEQ ID NO: 242094 - DNA, 19 bp, Homo sapiens
  siRNA target sequence for GCGR (NM_000160.1,801-819).
ccatccacgcgaatctgtt

SEQ ID NO: 242095 - DNA, 19 bp, Homo sapiens
  siRNA target sequence for GCGR (NM_000160.1,802-820).
catccacgcgaatctgttt

SEQ ID NO: 242096 - DNA, 19 bp, Homo sapiens
  siRNA target sequence for GCGR (NM_000160.1,876-894).
cccgctacagccagaaaat

SEQ ID NO: 242097 - DNA, 19 bp, Homo sapiens
  siRNA target sequence for GCGR (NM_000160.1,877-895).
ccgctacagccagaaaatt

SEQ ID NO: 242098 - DNA, 19 bp, Homo sapiens
  siRNA target sequence for GCGR (NM_000160.1,1052-1070).
cccgagaggagcttcttca

SEQ ID NO: 242099 - DNA, 19 bp, Homo sapiens
  siRNA target sequence for GCGR (NM_000160.1,1218-1236).
ccatcctgatcaacttctt

SEQ ID NO: 242100 - DNA, 19 bp, Homo sapiens
  siRNA target sequence for GCGR (NM_000160.1,1292-1310).
caccacacagactacaagt

SEQ ID NO: 242101 - DNA, 19 bp, Homo sapiens
  siRNA target sequence for GCGR (NM_000160.1,1674-1692).
ctggtggcctccctagatt

SEQ ID NO: 242102 - DNA, 19 bp, Homo sapiens
  siRNA target sequence for GHRHR (NM_000823.1,325-343).
gtgaaacgggattgtacta

SEQ ID NO: 242103 - DNA, 19 bp, Homo sapiens
  siRNA target sequence for GHRHR (NM_000823.1,412-430).
gaggaggaatcttacttct

SEQ ID NO: 242104 - DNA, 19 bp, Homo sapiens
  siRNA target sequence for GHRHR (NM_000823.1,456-474).
gggccatagcatctctatt

SEQ ID NO: 242105 - DNA, 19 bp, Homo sapiens
  siRNA target sequence for GHRHR (NM_000823.1,458-476).
gccatagcatctctattgt

SEQ ID NO: 242106 - DNA, 19 bp, Homo sapiens
  siRNA target sequence for GHRHR (NM_000823.1,459-477).
ccatagcatctctattgta

SEQ ID NO: 242107 - DNA, 19 bp, Homo sapiens
  siRNA target sequence for GHRHR (NM_000823.1,549-567).
ccagctgttcaccactttt

SEQ ID NO: 242108 - DNA, 19 bp, Homo sapiens
  siRNA target sequence for GHRHR (NM_000823.1,636-654).
cagcttctccactgttcta

SEQ ID NO: 242109 - DNA, 19 bp, Homo sapiens
  siRNA target sequence for GHRHR (NM_000823.1,891-909).
ctactggtggatcatcaaa

SEQ ID NO: 242110 - DNA, 19 bp, Homo sapiens
  siRNA target sequence for GHRHR (NM_000823.1,924-942).
ctcggtcggggtgaacttt

SEQ ID NO: 242111 - DNA, 19 bp, Homo sapiens
  siRNA target sequence for GHRHR (NM_000823.1,944-962).
ggctttttctcaatattat

SEQ ID NO: 242112 - DNA, 19 bp, Homo sapiens
  siRNA target sequence for GHRHR (NM_000823.1,1034-1052).
ccaagtcgacacttttcct

SEQ ID NO: 242113 - DNA, 19 bp, Homo sapiens
  siRNA target sequence for GHRHR (NM_000823.1,1057-1075).
ccactctttggaattcact

SEQ ID NO: 242114 - DNA, 19 bp, Homo sapiens
  siRNA target sequence for GHRHR (NM_000823.1,1058-1076).
cactctttggaattcacta

SEQ ID NO: 242115 - DNA, 19 bp, Homo sapiens
  siRNA target sequence for GHRHR (NM_000823.1,1067-1085).
gaattcactacatcatctt

SEQ ID NO: 242116 - DNA, 19 bp, Homo sapiens
  siRNA target sequence for SCTR (NM_002980.1,472-490).
gcctgtggcgttaatgtga

SEQ ID NO: 242117 - DNA, 19 bp, Homo sapiens
  siRNA target sequence for SCTR (NM_002980.1,670-688).
cgtgccctgtccaacttca

SEQ ID NO: 242118 - DNA, 19 bp, Homo sapiens
  siRNA target sequence for SCTR (NM_002980.1,899-917).
gttctccagccatttttgt

SEQ ID NO: 242119 - DNA, 19 bp, Homo sapiens
  siRNA target sequence for SCTR (NM_002980.1,1209-1227).
gatccagctgttttttgaa

SEQ ID NO: 242120 - DNA, 19 bp, Homo sapiens
  siRNA target sequence for FKSG83 (NM_032030.1,81-99).
gggaatcttacctgtcttt

SEQ ID NO: 242121 - DNA, 19 bp, Homo sapiens
  siRNA target sequence for FKSG83 (NM_032030.1,112-130).
gggctcatggggaacttat

SEQ ID NO: 242122 - DNA, 19 bp, Homo sapiens
  siRNA target sequence for FKSG83 (NM_032030.1,113-131).
ggctcatggggaacttatt

SEQ ID NO: 242123 - DNA, 19 bp, Homo sapiens
  siRNA target sequence for FKSG83 (NM_032030.1,117-135).
catggggaacttattgcta

SEQ ID NO: 242124 - DNA, 19 bp, Homo sapiens
  siRNA target sequence for FKSG83 (NM_032030.1,121-139).
gggaacttattgctattca

SEQ ID NO: 242125 - DNA, 19 bp, Homo sapiens
  siRNA target sequence for FKSG83 (NM_032030.1,122-140).
ggaacttattgctattcat

SEQ ID NO: 242126 - DNA, 19 bp, Homo sapiens
  siRNA target sequence for FKSG83 (NM_032030.1,184-202).
cccttagatgtgattctca

SEQ ID NO: 242127 - DNA, 19 bp, Homo sapiens
  siRNA target sequence for FKSG83 (NM_032030.1,207-225).
cctaactttggctaatgtt

SEQ ID NO: 242128 - DNA, 19 bp, Homo sapiens
  siRNA target sequence for FKSG83 (NM_032030.1,208-226).
ctaactttggctaatgtta

SEQ ID NO: 242129 - DNA, 19 bp, Homo sapiens
  siRNA target sequence for FKSG83 (NM_032030.1,216-234).
ggctaatgttataacagtt

SEQ ID NO: 242130 - DNA, 19 bp, Homo sapiens
  siRNA target sequence for FKSG83 (NM_032030.1,217-235).
gctaatgttataacagtta

SEQ ID NO: 242131 - DNA, 19 bp, Homo sapiens
  siRNA target sequence for FKSG83 (NM_032030.1,223-241).
gttataacagttatcatca

SEQ ID NO: 242132 - DNA, 19 bp, Homo sapiens
  siRNA target sequence for FKSG83 (NM_032030.1,237-255).
catcaggggtgttccatat

SEQ ID NO: 242133 - DNA, 19 bp, Homo sapiens
  siRNA target sequence for FKSG83 (NM_032030.1,244-262).
ggtgttccatatataatgt

SEQ ID NO: 242134 - DNA, 19 bp, Homo sapiens
  siRNA target sequence for FKSG83 (NM_032030.1,261-279).
gtcatccttcagacttaga

SEQ ID NO: 242135 - DNA, 19 bp, Homo sapiens
  siRNA target sequence for FKSG83 (NM_032030.1,267-285).
cttcagacttagaagtact

SEQ ID NO: 242136 - DNA, 19 bp, Homo sapiens
  siRNA target sequence for FKSG83 (NM_032030.1,272-290).
gacttagaagtacttttgt

SEQ ID NO: 242137 - DNA, 19 bp, Homo sapiens
  siRNA target sequence for FKSG83 (NM_032030.1,359-377).
ctctcctgagtacatttca

SEQ ID NO: 242138 - DNA, 19 bp, Homo sapiens
  siRNA target sequence for FKSG83 (NM_032030.1,435-453).
ccataaattttcccttatt

SEQ ID NO: 242139 - DNA, 19 bp, Homo sapiens
  siRNA target sequence for FKSG83 (NM_032030.1,463-481).
ctaaacaacaggctaatca

SEQ ID NO: 242140 - DNA, 19 bp, Homo sapiens
  siRNA target sequence for FKSG83 (NM_032030.1,505-523).
gtagccaccagcaaatcca

SEQ ID NO: 242141 - DNA, 19 bp, Homo sapiens
  siRNA target sequence for FKSG83 (NM_032030.1,513-531).
cagcaaatccactaatgtt

SEQ ID NO: 242142 - DNA, 19 bp, Homo sapiens
  siRNA target sequence for FKSG83 (NM_032030.1,522-540).
cactaatgttggacttgta

SEQ ID NO: 242143 - DNA, 19 bp, Homo sapiens
  siRNA target sequence for FKSG83 (NM_032030.1,524-542).
ctaatgttggacttgtata

SEQ ID NO: 242144 - DNA, 19 bp, Homo sapiens
  siRNA target sequence for FKSG83 (NM_032030.1,557-575).
gtaaaacaagactgtttat

SEQ ID NO: 242145 - DNA, 19 bp, Homo sapiens
  siRNA target sequence for FKSG83 (NM_032030.1,563-581).
caagactgtttatatacta

SEQ ID NO: 242146 - DNA, 19 bp, Homo sapiens
  siRNA target sequence for FKSG83 (NM_032030.1,582-600).
ccatgcaatgatatttcaa

SEQ ID NO: 242147 - DNA, 19 bp, Homo sapiens
  siRNA target sequence for FKSG83 (NM_032030.1,637-655).
ctcatgatttggactagtt

SEQ ID NO: 242148 - DNA, 19 bp, Homo sapiens
  siRNA target sequence for FKSG83 (NM_032030.1,685-703).
caaaagacggtctttcata

SEQ ID NO: 242149 - DNA, 19 bp, Homo sapiens
  siRNA target sequence for FKSG83 (NM_032030.1,768-786).
gctggtgagccgctttgtt

SEQ ID NO: 242150 - DNA, 19 bp, Homo sapiens
  siRNA target sequence for FKSG83 (NM_032030.1,796-814).
gggactaacgtgtgtcttt

SEQ ID NO: 242151 - DNA, 19 bp, Homo sapiens
  siRNA target sequence for FKSG83 (NM_032030.1,804-822).
cgtgtgtctttccacttat

SEQ ID NO: 242152 - DNA, 19 bp, Homo sapiens
  siRNA target sequence for FKSG83 (NM_032030.1,845-863).
gcctaatcctggagaacat

SEQ ID NO: 242153 - DNA, 19 bp, Homo sapiens
  siRNA target sequence for FKSG83 (NM_032030.1,847-865).
ctaatcctggagaacatta

SEQ ID NO: 242154 - DNA, 19 bp, Homo sapiens
  siRNA target sequence for FKSG83 (NM_032030.1,852-870).
cctggagaacattactagt

SEQ ID NO: 242155 - DNA, 19 bp, Homo sapiens
  siRNA target sequence for FKSG83 (NM_032030.1,861-879).
cattactagttttgtttca

SEQ ID NO: 242156 - DNA, 19 bp, Homo sapiens
  siRNA target sequence for FKSG83 (NM_032030.1,878-896).
catcttcctacccaattat

SEQ ID NO: 242157 - DNA, 19 bp, Homo sapiens
  siRNA target sequence for FKSG83 (NM_032030.1,897-915).
ctgtactttgatattgatt

SEQ ID NO: 242158 - DNA, 19 bp, Homo sapiens
  siRNA target sequence for FKSG83 (NM_032030.1,990-1008).
ctttctattgcatcaaaga

SEQ ID NO: 242159 - DNA, 19 bp, Homo sapiens
  siRNA target sequence for VN1R5 (NM_173858.1,108-126).
gatcaaacttcctggtttt

SEQ ID NO: 242160 - DNA, 19 bp, Homo sapiens
  siRNA target sequence for VN1R5 (NM_173858.1,227-245).
ggtctaagtccattgacat

SEQ ID NO: 242161 - DNA, 19 bp, Homo sapiens
  siRNA target sequence for VN1R5 (NM_173858.1,230-248).
ctaagtccattgacatgat

SEQ ID NO: 242162 - DNA, 19 bp, Homo sapiens
  siRNA target sequence for VN1R5 (NM_173858.1,237-255).
cattgacatgataattagt

SEQ ID NO: 242163 - DNA, 19 bp, Homo sapiens
  siRNA target sequence for VN1R5 (NM_173858.1,303-321).
ggtgtccttagacttcttt

SEQ ID NO: 242164 - DNA, 19 bp, Homo sapiens
  siRNA target sequence for VN1R5 (NM_173858.1,485-503).
gtcacatcttaggattctt

SEQ ID NO: 242165 - DNA, 19 bp, Homo sapiens
  siRNA target sequence for VN1R5 (NM_173858.1,512-530).
catgggtcctcaacatgtt

SEQ ID NO: 242166 - DNA, 19 bp, Homo sapiens
  siRNA target sequence for VN1R5 (NM_173858.1,558-576).
gcggctacccccagtgaaa

SEQ ID NO: 242167 - DNA, 19 bp, Homo sapiens
  siRNA target sequence for VN1R5 (NM_173858.1,581-599).
gccagtcttctgtttgtca

SEQ ID NO: 242168 - DNA, 19 bp, Homo sapiens
  siRNA target sequence for VN1R5 (NM_173858.1,631-649).
cacccacaggagactgttt

SEQ ID NO: 242169 - DNA, 19 bp, Homo sapiens
  siRNA target sequence for VN1R5 (NM_173858.1,705-723).
gaggctacatggtgattat

SEQ ID NO: 242170 - DNA, 19 bp, Homo sapiens
  siRNA target sequence for VN1R5 (NM_173858.1,707-725).
ggctacatggtgattattt

SEQ ID NO: 242171 - DNA, 19 bp, Homo sapiens
  siRNA target sequence for VN1R5 (NM_173858.1,715-733).
ggtgattattttatacaga

SEQ ID NO: 242172 - DNA, 19 bp, Homo sapiens
  siRNA target sequence for VN1R5 (NM_173858.1,777-795).
ccgagtctcaccagtgaaa

SEQ ID NO: 242173 - DNA, 19 bp, Homo sapiens
  siRNA target sequence for VN1R5 (NM_173858.1,778-796).
cgagtctcaccagtgaaaa

SEQ ID NO: 242174 - DNA, 19 bp, Homo sapiens
  siRNA target sequence for VN1R5 (NM_173858.1,875-893).
gtgtgacatggataaatga

SEQ ID NO: 242175 - DNA, 19 bp, Homo sapiens
  siRNA target sequence for VN1R5 (NM_173858.1,881-899).
catggataaatgattctct

SEQ ID NO: 242176 - DNA, 19 bp, Homo sapiens
  siRNA target sequence for VN1R5 (NM_173858.1,938-956).
ccgcaattagtcctttgat

SEQ ID NO: 242177 - DNA, 19 bp, Homo sapiens
  siRNA target sequence for VN1R5 (NM_173858.1,947-965).
gtcctttgatgctaattta

SEQ ID NO: 242178 - DNA, 19 bp, Homo sapiens
  siRNA target sequence for VN1R5 (NM_173858.1,989-1007).
ctctgcaaatgttatggtt

SEQ ID NO: 242179 - DNA, 19 bp, Homo sapiens
  siRNA target sequence for ADCYAP1R1 (NM_001118.3,353-371).
ctgatgggcttcaatgatt

SEQ ID NO: 242180 - DNA, 19 bp, Homo sapiens
  siRNA target sequence for ADCYAP1R1 (NM_001118.3,458-476).
gagctcttccgaatcttca

SEQ ID NO: 242181 - DNA, 19 bp, Homo sapiens
  siRNA target sequence for ADCYAP1R1 (NM_001118.3,594-612).
cggaacccttccctcatta

SEQ ID NO: 242182 - DNA, 19 bp, Homo sapiens
  siRNA target sequence for ADCYAP1R1 (NM_001118.3,596-614).
gaacccttccctcattact

SEQ ID NO: 242183 - DNA, 19 bp, Homo sapiens
  siRNA target sequence for ADCYAP1R1 (NM_001118.3,600-618).
ccttccctcattactttga

SEQ ID NO: 242184 - DNA, 19 bp, Homo sapiens
  siRNA target sequence for ADCYAP1R1 (NM_001118.3,626-644).
gggtttgatgaatatgaat

SEQ ID NO: 242185 - DNA, 19 bp, Homo sapiens
  siRNA target sequence for ADCYAP1R1 (NM_001118.3,649-667).
gactggggaccaggattat

SEQ ID NO: 242186 - DNA, 19 bp, Homo sapiens
  siRNA target sequence for ADCYAP1R1 (NM_001118.3,651-669).
ctggggaccaggattatta

SEQ ID NO: 242187 - DNA, 19 bp, Homo sapiens
  siRNA target sequence for ADCYAP1R1 (NM_001118.3,653-671).
ggggaccaggattattact

SEQ ID NO: 242188 - DNA, 19 bp, Homo sapiens
  siRNA target sequence for ADCYAP1R1 (NM_001118.3,654-672).
gggaccaggattattacta

SEQ ID NO: 242189 - DNA, 19 bp, Homo sapiens
  siRNA target sequence for ADCYAP1R1 (NM_001118.3,819-837).
gggcgatctccgtcttcat

SEQ ID NO: 242190 - DNA, 19 bp, Homo sapiens
  siRNA target sequence for ADCYAP1R1 (NM_001118.3,822-840).
cgatctccgtcttcatcaa

SEQ ID NO: 242191 - DNA, 19 bp, Homo sapiens
  siRNA target sequence for ADCYAP1R1 (NM_001118.3,823-841).
gatctccgtcttcatcaaa

SEQ ID NO: 242192 - DNA, 19 bp, Homo sapiens
  siRNA target sequence for ADCYAP1R1 (NM_001118.3,930-948).
gtgttgtgtccaactactt

SEQ ID NO: 242193 - DNA, 19 bp, Homo sapiens
  siRNA target sequence for ADCYAP1R1 (NM_001118.3,932-950).
gttgtgtccaactacttct

SEQ ID NO: 242194 - DNA, 19 bp, Homo sapiens
  siRNA target sequence for ADCYAP1R1 (NM_001118.3,1004-1022).
cctgaaaggagatacttct

SEQ ID NO: 242195 - DNA, 19 bp, Homo sapiens
  siRNA target sequence for ADCYAP1R1 (NM_001118.3,1005-1023).
ctgaaaggagatacttcta

SEQ ID NO: 242196 - DNA, 19 bp, Homo sapiens
  siRNA target sequence for ADCYAP1R1 (NM_001118.3,1077-1095).
ctacgctgagactctactt

SEQ ID NO: 242197 - DNA, 19 bp, Homo sapiens
  siRNA target sequence for ADCYAP1R1 (NM_001118.3,1080-1098).
cgctgagactctactttga

SEQ ID NO: 242198 - DNA, 19 bp, Homo sapiens
  siRNA target sequence for ADCYAP1R1 (NM_001118.3,1107-1125).
gctgctgggatatgaatga

SEQ ID NO: 242199 - DNA, 19 bp, Homo sapiens
  siRNA target sequence for ADCYAP1R1 (NM_001118.3,1134-1152).
ctctgtggtgggtgatcaa

SEQ ID NO: 242200 - DNA, 19 bp, Homo sapiens
  siRNA target sequence for ADCYAP1R1 (NM_001118.3,1210-1228).
catccttgtgcagaaactt

SEQ ID NO: 242201 - DNA, 19 bp, Homo sapiens
  siRNA target sequence for ADCYAP1R1 (NM_001118.3,1311-1329).
gaatccactacacagtatt

SEQ ID NO: 242202 - DNA, 19 bp, Homo sapiens
  siRNA target sequence for ADCYAP1R1 (NM_001118.3,1359-1377).
gggaaagactcgtgtttga

SEQ ID NO: 242203 - DNA, 19 bp, Homo sapiens
  siRNA target sequence for ADCYAP1R1 (NM_001118.3,1448-1466).
gcggagatcaagcgaaaat

SEQ ID NO: 242204 - DNA, 19 bp, Homo sapiens
  siRNA target sequence for BAI2 (NM_001703.1,388-406).
gcctgtcccctcttactgt

SEQ ID NO: 242205 - DNA, 19 bp, Homo sapiens
  siRNA target sequence for BAI2 (NM_001703.1,603-621).
gcaggtgtgcgcacacttt

SEQ ID NO: 242206 - DNA, 19 bp, Homo sapiens
  siRNA target sequence for BAI2 (NM_001703.1,772-790).
ggctcaggcccctttacct

SEQ ID NO: 242207 - DNA, 19 bp, Homo sapiens
  siRNA target sequence for BAI2 (NM_001703.1,1137-1155).
ctcggggagcagcaatgat

SEQ ID NO: 242208 - DNA, 19 bp, Homo sapiens
  siRNA target sequence for BAI2 (NM_001703.1,1139-1157).
cggggagcagcaatgatct

SEQ ID NO: 242209 - DNA, 19 bp, Homo sapiens
  siRNA target sequence for BAI2 (NM_001703.1,1161-1179).
cacaaccgagatgagatat

SEQ ID NO: 242210 - DNA, 19 bp, Homo sapiens
  siRNA target sequence for BAI2 (NM_001703.1,1395-1413).
gaccaggccctgcaacaat

SEQ ID NO: 242211 - DNA, 19 bp, Homo sapiens
  siRNA target sequence for BAI2 (NM_001703.1,1550-1568).
gtcctgagctgcagactaa

SEQ ID NO: 242212 - DNA, 19 bp, Homo sapiens
  siRNA target sequence for BAI2 (NM_001703.1,1893-1911).
ggaggtgaagccttgtagt

SEQ ID NO: 242213 - DNA, 19 bp, Homo sapiens
  siRNA target sequence for BAI2 (NM_001703.1,1922-1940).
gtccagccttccatgagat

SEQ ID NO: 242214 - DNA, 19 bp, Homo sapiens
  siRNA target sequence for BAI2 (NM_001703.1,1988-2006).
ctggcgagatcatctacaa

SEQ ID NO: 242215 - DNA, 19 bp, Homo sapiens
  siRNA target sequence for BAI2 (NM_001703.1,1991-2009).
gcgagatcatctacaacaa

SEQ ID NO: 242216 - DNA, 19 bp, Homo sapiens
  siRNA target sequence for BAI2 (NM_001703.1,2099-2117).
gctgcatctcccatgagta

SEQ ID NO: 242217 - DNA, 19 bp, Homo sapiens
  siRNA target sequence for BAI2 (NM_001703.1,2307-2325).
cgtgccctcggctgatgat

SEQ ID NO: 242218 - DNA, 19 bp, Homo sapiens
  siRNA target sequence for BAI2 (NM_001703.1,2429-2447).
gtgtcgtggaggacttcat

SEQ ID NO: 242219 - DNA, 19 bp, Homo sapiens
  siRNA target sequence for BAI2 (NM_001703.1,2490-2508).
gattgtcacagataatcta

SEQ ID NO: 242220 - DNA, 19 bp, Homo sapiens
  siRNA target sequence for BAI2 (NM_001703.1,2770-2788).
gagtcctcctactttgtga

SEQ ID NO: 242221 - DNA, 19 bp, Homo sapiens
  siRNA target sequence for BAI2 (NM_001703.1,2925-2943).
gctctcctacatcatcaat

SEQ ID NO: 242222 - DNA, 19 bp, Homo sapiens
  siRNA target sequence for BAI2 (NM_001703.1,3001-3019).
ggagactgggacactgaaa

SEQ ID NO: 242223 - DNA, 19 bp, Homo sapiens
  siRNA target sequence for BAI2 (NM_001703.1,3002-3020).
gagactgggacactgaaaa

SEQ ID NO: 242224 - DNA, 19 bp, Homo sapiens
  siRNA target sequence for BAI2 (NM_001703.1,3186-3204).
caccctgctcgccatctat

SEQ ID NO: 242225 - DNA, 19 bp, Homo sapiens
  siRNA target sequence for BAI2 (NM_001703.1,3209-3227).
ccttttggaggttcataaa

SEQ ID NO: 242226 - DNA, 19 bp, Homo sapiens
  siRNA target sequence for BAI2 (NM_001703.1,3402-3420).
gtcctacctggctgtcatt

SEQ ID NO: 242227 - DNA, 19 bp, Homo sapiens
  siRNA target sequence for BAI2 (NM_001703.1,3658-3676).
gatggcatctccgacaaat

SEQ ID NO: 242228 - DNA, 19 bp, Homo sapiens
  siRNA target sequence for BAI2 (NM_001703.1,4025-4043).
cccctgactcgtgtaagaa

SEQ ID NO: 242229 - DNA, 19 bp, Homo sapiens
  siRNA target sequence for BAI2 (NM_001703.1,4083-4101).
ggatctggcttgtcaaaca

SEQ ID NO: 242230 - DNA, 19 bp, Homo sapiens
  siRNA target sequence for BAI2 (NM_001703.1,4229-4247).
caccactgcctgggaatat

SEQ ID NO: 242231 - DNA, 19 bp, Homo sapiens
  siRNA target sequence for BAI2 (NM_001703.1,4232-4250).
cactgcctgggaatatcct

SEQ ID NO: 242232 - DNA, 19 bp, Homo sapiens
  siRNA target sequence for BAI2 (NM_001703.1,4713-4731).
ctccctggagcgaaagaaa

SEQ ID NO: 242233 - DNA, 19 bp, Homo sapiens
  siRNA target sequence for BAI2 (NM_001703.1,4715-4733).
ccctggagcgaaagaaatt

SEQ ID NO: 242234 - DNA, 19 bp, Homo sapiens
  siRNA target sequence for BAI2 (NM_001703.1,4970-4988).
ggagcaccttcaaatctat

SEQ ID NO: 242235 - DNA, 19 bp, Homo sapiens
  siRNA target sequence for BAI3 (NM_001704.1,43-61).
gttcgtaacctgctgattt

SEQ ID NO: 242236 - DNA, 19 bp, Homo sapiens
  siRNA target sequence for BAI3 (NM_001704.1,46-64).
cgtaacctgctgatttata

SEQ ID NO: 242237 - DNA, 19 bp, Homo sapiens
  siRNA target sequence for BAI3 (NM_001704.1,71-89).
ccacctatctcctggttat

SEQ ID NO: 242238 - DNA, 19 bp, Homo sapiens
  siRNA target sequence for BAI3 (NM_001704.1,74-92).
cctatctcctggttatgtt

SEQ ID NO: 242239 - DNA, 19 bp, Homo sapiens
  siRNA target sequence for BAI3 (NM_001704.1,84-102).
ggttatgtttggatttaat

SEQ ID NO: 242240 - DNA, 19 bp, Homo sapiens
  siRNA target sequence for BAI3 (NM_001704.1,142-160).
gtcatttatggatcgtatt

SEQ ID NO: 242241 - DNA, 19 bp, Homo sapiens
  siRNA target sequence for BAI3 (NM_001704.1,144-162).
catttatggatcgtattct

SEQ ID NO: 242242 - DNA, 19 bp, Homo sapiens
  siRNA target sequence for BAI3 (NM_001704.1,152-170).
gatcgtattctgtaagtga

SEQ ID NO: 242243 - DNA, 19 bp, Homo sapiens
  siRNA target sequence for BAI3 (NM_001704.1,155-173).
cgtattctgtaagtgaaat

SEQ ID NO: 242244 - DNA, 19 bp, Homo sapiens
  siRNA target sequence for BAI3 (NM_001704.1,174-192).
gtttcctaaaaactttaca

SEQ ID NO: 242245 - DNA, 19 bp, Homo sapiens
  siRNA target sequence for BAI3 (NM_001704.1,198-216).
cacttggacgctggaaaat

SEQ ID NO: 242246 - DNA, 19 bp, Homo sapiens
  siRNA target sequence for BAI3 (NM_001704.1,217-235).
ccagatccaaccaaatata

SEQ ID NO: 242247 - DNA, 19 bp, Homo sapiens
  siRNA target sequence for BAI3 (NM_001704.1,220-238).
gatccaaccaaatatagca

SEQ ID NO: 242248 - DNA, 19 bp, Homo sapiens
  siRNA target sequence for BAI3 (NM_001704.1,284-302).
cactcctggcttatcagtt

SEQ ID NO: 242249 - DNA, 19 bp, Homo sapiens
  siRNA target sequence for BAI3 (NM_001704.1,288-306).
cctggcttatcagtttgat

SEQ ID NO: 242250 - DNA, 19 bp, Homo sapiens
  siRNA target sequence for BAI3 (NM_001704.1,291-309).
ggcttatcagtttgatcat

SEQ ID NO: 242251 - DNA, 19 bp, Homo sapiens
  siRNA target sequence for BAI3 (NM_001704.1,292-310).
gcttatcagtttgatcatt

SEQ ID NO: 242252 - DNA, 19 bp, Homo sapiens
  siRNA target sequence for BAI3 (NM_001704.1,378-396).
gaatgctttcgtttttcta

SEQ ID NO: 242253 - DNA, 19 bp, Homo sapiens
  siRNA target sequence for BAI3 (NM_001704.1,394-412).
ctacagtatgataaaaatt

SEQ ID NO: 242254 - DNA, 19 bp, Homo sapiens
  siRNA target sequence for BAI3 (NM_001704.1,425-443).
gtcgagtatttccaactaa

SEQ ID NO: 242255 - DNA, 19 bp, Homo sapiens
  siRNA target sequence for BAI3 (NM_001704.1,427-445).
cgagtatttccaactaatt

SEQ ID NO: 242256 - DNA, 19 bp, Homo sapiens
  siRNA target sequence for BAI3 (NM_001704.1,428-446).
gagtatttccaactaattt

SEQ ID NO: 242257 - DNA, 19 bp, Homo sapiens
  siRNA target sequence for BAI3 (NM_001704.1,440-458).
ctaatttcccaggattaca

SEQ ID NO: 242258 - DNA, 19 bp, Homo sapiens
  siRNA target sequence for BAI3 (NM_001704.1,526-544).
cagtttggttgccatgtat

SEQ ID NO: 242259 - DNA, 19 bp, Homo sapiens
  siRNA target sequence for BAI3 (NM_001704.1,532-550).
ggttgccatgtattatgta

SEQ ID NO: 242260 - DNA, 19 bp, Homo sapiens
  siRNA target sequence for BAI3 (NM_001704.1,599-617).
gtgggatcatgtatacaaa

SEQ ID NO: 242261 - DNA, 19 bp, Homo sapiens
  siRNA target sequence for BAI3 (NM_001704.1,658-676).
gaccagtcgctgattttgt

SEQ ID NO: 242262 - DNA, 19 bp, Homo sapiens
  siRNA target sequence for BAI3 (NM_001704.1,774-792).
gcgaccacccaaagaagaa

SEQ ID NO: 242263 - DNA, 19 bp, Homo sapiens
  siRNA target sequence for BAI3 (NM_001704.1,775-793).
cgaccacccaaagaagaat

SEQ ID NO: 242264 - DNA, 19 bp, Homo sapiens
  siRNA target sequence for BAI3 (NM_001704.1,828-846).
gcgacctcgatctgttcat

SEQ ID NO: 242265 - DNA, 19 bp, Homo sapiens
  siRNA target sequence for BAI3 (NM_001704.1,830-848).
gacctcgatctgttcatga

SEQ ID NO: 242266 - DNA, 19 bp, Homo sapiens
  siRNA target sequence for BAI3 (NM_001704.1,833-851).
ctcgatctgttcatgaaaa

SEQ ID NO: 242267 - DNA, 19 bp, Homo sapiens
  siRNA target sequence for BAI3 (NM_001704.1,936-954).
cacatgttcggttacttgt

SEQ ID NO: 242268 - DNA, 19 bp, Homo sapiens
  siRNA target sequence for BAI3 (NM_001704.1,969-987).
ggtgcgaaccagaacttgt

SEQ ID NO: 242269 - DNA, 19 bp, Homo sapiens
  siRNA target sequence for BAI3 (NM_001704.1,972-990).
gcgaaccagaacttgtgta

SEQ ID NO: 242270 - DNA, 19 bp, Homo sapiens
  siRNA target sequence for BAI3 (NM_001704.1,973-991).
cgaaccagaacttgtgtat

SEQ ID NO: 242271 - DNA, 19 bp, Homo sapiens
  siRNA target sequence for BAI3 (NM_001704.1,1027-1045).
gaatcaagggtttgcaata

SEQ ID NO: 242272 - DNA, 19 bp, Homo sapiens
  siRNA target sequence for BAI3 (NM_001704.1,1117-1135).
ggtcgaggccaaagaacaa

SEQ ID NO: 242273 - DNA, 19 bp, Homo sapiens
  siRNA target sequence for BAI3 (NM_001704.1,1193-1211).
cacatcataagccttgtaa

SEQ ID NO: 242274 - DNA, 19 bp, Homo sapiens
  siRNA target sequence for BAI3 (NM_001704.1,1195-1213).
catcataagccttgtaata

SEQ ID NO: 242275 - DNA, 19 bp, Homo sapiens
  siRNA target sequence for BAI3 (NM_001704.1,1453-1471).
ggctgggaaaggcgaataa

SEQ ID NO: 242276 - DNA, 19 bp, Homo sapiens
  siRNA target sequence for BAI3 (NM_001704.1,1548-1566).
gcgatgccctgcaccttat

SEQ ID NO: 242277 - DNA, 19 bp, Homo sapiens
  siRNA target sequence for BAI3 (NM_001704.1,1550-1568).
gatgccctgcaccttatga

SEQ ID NO: 242278 - DNA, 19 bp, Homo sapiens
  siRNA target sequence for BAI3 (NM_001704.1,1553-1571).
gccctgcaccttatgaaat

SEQ ID NO: 242279 - DNA, 19 bp, Homo sapiens
  siRNA target sequence for BAI3 (NM_001704.1,1593-1611).
gtcgatggtgtggaaaaga

SEQ ID NO: 242280 - DNA, 19 bp, Homo sapiens
  siRNA target sequence for BAI3 (NM_001704.1,1622-1640).
gcgacttggcattcaatca

SEQ ID NO: 242281 - DNA, 19 bp, Homo sapiens
  siRNA target sequence for BAI3 (NM_001704.1,1623-1641).
cgacttggcattcaatcaa

SEQ ID NO: 242282 - DNA, 19 bp, Homo sapiens
  siRNA target sequence for BAI3 (NM_001704.1,1624-1642).
gacttggcattcaatcaat

SEQ ID NO: 242283 - DNA, 19 bp, Homo sapiens
  siRNA target sequence for BAI3 (NM_001704.1,1727-1745).
caagatgcatatcaaatga

SEQ ID NO: 242284 - DNA, 19 bp, Homo sapiens
  siRNA target sequence for BAI3 (NM_001704.1,1751-1769).
gacacttgcagcattcaat

SEQ ID NO: 242285 - DNA, 19 bp, Homo sapiens
  siRNA target sequence for BAI3 (NM_001704.1,1753-1771).
cacttgcagcattcaatta

SEQ ID NO: 242286 - DNA, 19 bp, Homo sapiens
  siRNA target sequence for BAI3 (NM_001704.1,1833-1851).
gacactgttggatttaact

SEQ ID NO: 242287 - DNA, 19 bp, Homo sapiens
  siRNA target sequence for BAI3 (NM_001704.1,1835-1853).
cactgttggatttaactca

SEQ ID NO: 242288 - DNA, 19 bp, Homo sapiens
  siRNA target sequence for BAI3 (NM_001704.1,1951-1969).
gatggtgtccagaacttct

SEQ ID NO: 242289 - DNA, 19 bp, Homo sapiens
  siRNA target sequence for BAI3 (NM_001704.1,2038-2056).
ccagggtcaatagagttaa

SEQ ID NO: 242290 - DNA, 19 bp, Homo sapiens
  siRNA target sequence for BAI3 (NM_001704.1,2137-2155).
gtagtggctagtattcaga

SEQ ID NO: 242291 - DNA, 19 bp, Homo sapiens
  siRNA target sequence for BAI3 (NM_001704.1,2165-2183).
cagcctctgttctaacaga

SEQ ID NO: 242292 - DNA, 19 bp, Homo sapiens
  siRNA target sequence for BAI3 (NM_001704.1,2180-2198).
cagacatcaactttccaat

SEQ ID NO: 242293 - DNA, 19 bp, Homo sapiens
  siRNA target sequence for BAI3 (NM_001704.1,2226-2244).
ggcaagaaactcagaagat

SEQ ID NO: 242294 - DNA, 19 bp, Homo sapiens
  siRNA target sequence for BAI3 (NM_001704.1,2271-2289).
cactccggtgtcatcaaaa

SEQ ID NO: 242295 - DNA, 19 bp, Homo sapiens
  siRNA target sequence for BAI3 (NM_001704.1,2273-2291).
ctccggtgtcatcaaaaga

SEQ ID NO: 242296 - DNA, 19 bp, Homo sapiens
  siRNA target sequence for BAI3 (NM_001704.1,2276-2294).
cggtgtcatcaaaagaatt

SEQ ID NO: 242297 - DNA, 19 bp, Homo sapiens
  siRNA target sequence for BAI3 (NM_001704.1,2317-2335).
cttggcgcagtcctataca

SEQ ID NO: 242298 - DNA, 19 bp, Homo sapiens
  siRNA target sequence for BAI3 (NM_001704.1,2320-2338).
ggcgcagtcctatacaaaa

SEQ ID NO: 242299 - DNA, 19 bp, Homo sapiens
  siRNA target sequence for BAI3 (NM_001704.1,2321-2339).
gcgcagtcctatacaaaaa

SEQ ID NO: 242300 - DNA, 19 bp, Homo sapiens
  siRNA target sequence for BAI3 (NM_001704.1,2323-2341).
gcagtcctatacaaaaact

SEQ ID NO: 242301 - DNA, 19 bp, Homo sapiens
  siRNA target sequence for BAI3 (NM_001704.1,2366-2384).
gaaattatactgtcattaa

SEQ ID NO: 242302 - DNA, 19 bp, Homo sapiens
  siRNA target sequence for BAI3 (NM_001704.1,2435-2453).
cgtttctggagatagaact

SEQ ID NO: 242303 - DNA, 19 bp, Homo sapiens
  siRNA target sequence for BAI3 (NM_001704.1,2463-2481).
ggctaatggtactttgaat

SEQ ID NO: 242304 - DNA, 19 bp, Homo sapiens
  siRNA target sequence for BAI3 (NM_001704.1,2474-2492).
ctttgaatccctattgtgt

SEQ ID NO: 242305 - DNA, 19 bp, Homo sapiens
  siRNA target sequence for BAI3 (NM_001704.1,2507-2525).
ccaaaacgaacgagtcttt

SEQ ID NO: 242306 - DNA, 19 bp, Homo sapiens
  siRNA target sequence for BAI3 (NM_001704.1,2534-2552).
ggtccacccagggatgtaa

SEQ ID NO: 242307 - DNA, 19 bp, Homo sapiens
  siRNA target sequence for BAI3 (NM_001704.1,2538-2556).
cacccagggatgtaaaact

SEQ ID NO: 242308 - DNA, 19 bp, Homo sapiens
  siRNA target sequence for BAI3 (NM_001704.1,2540-2558).
cccagggatgtaaaactgt

SEQ ID NO: 242309 - DNA, 19 bp, Homo sapiens
  siRNA target sequence for BAI3 (NM_001704.1,2564-2582).
ccgatgcatcccatacgaa

SEQ ID NO: 242310 - DNA, 19 bp, Homo sapiens
  siRNA target sequence for BAI3 (NM_001704.1,2565-2583).
cgatgcatcccatacgaaa

SEQ ID NO: 242311 - DNA, 19 bp, Homo sapiens
  siRNA target sequence for BAI3 (NM_001704.1,2570-2588).
catcccatacgaaatgctt

SEQ ID NO: 242312 - DNA, 19 bp, Homo sapiens
  siRNA target sequence for BAI3 (NM_001704.1,2574-2592).
ccatacgaaatgcttatgt

SEQ ID NO: 242313 - DNA, 19 bp, Homo sapiens
  siRNA target sequence for BAI3 (NM_001704.1,2626-2644).
caacctagagaaataatca

SEQ ID NO: 242314 - DNA, 19 bp, Homo sapiens
  siRNA target sequence for BAI3 (NM_001704.1,2663-2681).
cttcagttaccctaatagt

SEQ ID NO: 242315 - DNA, 19 bp, Homo sapiens
  siRNA target sequence for BAI3 (NM_001704.1,2680-2698).
gtaggcagtggtctttctt

SEQ ID NO: 242316 - DNA, 19 bp, Homo sapiens
  siRNA target sequence for BAI3 (NM_001704.1,2725-2743).
gtctatgcagcattatgga

SEQ ID NO: 242317 - DNA, 19 bp, Homo sapiens
  siRNA target sequence for BAI3 (NM_001704.1,2758-2776).
gagagatccataatactaa

SEQ ID NO: 242318 - DNA, 19 bp, Homo sapiens
  siRNA target sequence for BAI3 (NM_001704.1,2792-2810).
ctatcatctcatccaatat

SEQ ID NO: 242319 - DNA, 19 bp, Homo sapiens
  siRNA target sequence for BAI3 (NM_001704.1,2801-2819).
catccaatatcctcatact

SEQ ID NO: 242320 - DNA, 19 bp, Homo sapiens
  siRNA target sequence for BAI3 (NM_001704.1,2825-2843).
gacagactcagacacataa

SEQ ID NO: 242321 - DNA, 19 bp, Homo sapiens
  siRNA target sequence for BAI3 (NM_001704.1,2833-2851).
cagacacataataagagta

SEQ ID NO: 242322 - DNA, 19 bp, Homo sapiens
  siRNA target sequence for BAI3 (NM_001704.1,2861-2879).
ccaccactgcatttttgca

SEQ ID NO: 242323 - DNA, 19 bp, Homo sapiens
  siRNA target sequence for BAI3 (NM_001704.1,2937-2955).
ggctgtaactggaaaaatt

SEQ ID NO: 242324 - DNA, 19 bp, Homo sapiens
  siRNA target sequence for BAI3 (NM_001704.1,2957-2975).
ggacacggcttataagaaa

SEQ ID NO: 242325 - DNA, 19 bp, Homo sapiens
  siRNA target sequence for BAI3 (NM_001704.1,2958-2976).
gacacggcttataagaaaa

SEQ ID NO: 242326 - DNA, 19 bp, Homo sapiens
  siRNA target sequence for BAI3 (NM_001704.1,3028-3046).
gtaggcttcaccagaacaa

SEQ ID NO: 242327 - DNA, 19 bp, Homo sapiens
  siRNA target sequence for BAI3 (NM_001704.1,3088-3106).
ggaggactactctatgctt

SEQ ID NO: 242328 - DNA, 19 bp, Homo sapiens
  siRNA target sequence for BAI3 (NM_001704.1,3092-3110).
gactactctatgcttttgt

SEQ ID NO: 242329 - DNA, 19 bp, Homo sapiens
  siRNA target sequence for BAI3 (NM_001704.1,3264-3282).
caagtgtggagtagtttca

SEQ ID NO: 242330 - DNA, 19 bp, Homo sapiens
  siRNA target sequence for BAI3 (NM_001704.1,3395-3413).
cagataaacgctccatatt

SEQ ID NO: 242331 - DNA, 19 bp, Homo sapiens
  siRNA target sequence for BAI3 (NM_001704.1,3397-3415).
gataaacgctccatattgt

SEQ ID NO: 242332 - DNA, 19 bp, Homo sapiens
  siRNA target sequence for BAI3 (NM_001704.1,3403-3421).
cgctccatattgtttcaaa

SEQ ID NO: 242333 - DNA, 19 bp, Homo sapiens
  siRNA target sequence for BAI3 (NM_001704.1,3443-3461).
cattgcaaggctttgttat

SEQ ID NO: 242334 - DNA, 19 bp, Homo sapiens
  siRNA target sequence for BAI3 (NM_001704.1,3448-3466).
caaggctttgttatagtca

SEQ ID NO: 242335 - DNA, 19 bp, Homo sapiens
  siRNA target sequence for BAI3 (NM_001704.1,3525-3543).
ctgtcaggatcccatcaat

SEQ ID NO: 242336 - DNA, 19 bp, Homo sapiens
  siRNA target sequence for BAI3 (NM_001704.1,3566-3584).
ctaatgggcatgctcaaat

SEQ ID NO: 242337 - DNA, 19 bp, Homo sapiens
  siRNA target sequence for BAI3 (NM_001704.1,3571-3589).
gggcatgctcaaatcatga

SEQ ID NO: 242338 - DNA, 19 bp, Homo sapiens
  siRNA target sequence for BAI3 (NM_001704.1,3612-3630).
cattgcctgtcgatcagtt

SEQ ID NO: 242339 - DNA, 19 bp, Homo sapiens
  siRNA target sequence for BAI3 (NM_001704.1,3617-3635).
cctgtcgatcagttcttca

SEQ ID NO: 242340 - DNA, 19 bp, Homo sapiens
  siRNA target sequence for BAI3 (NM_001704.1,3618-3636).
ctgtcgatcagttcttcat

SEQ ID NO: 242341 - DNA, 19 bp, Homo sapiens
  siRNA target sequence for BAI3 (NM_001704.1,3620-3638).
gtcgatcagttcttcataa

SEQ ID NO: 242342 - DNA, 19 bp, Homo sapiens
  siRNA target sequence for BAI3 (NM_001704.1,3623-3641).
gatcagttcttcataagga

SEQ ID NO: 242343 - DNA, 19 bp, Homo sapiens
  siRNA target sequence for BAI3 (NM_001704.1,3654-3672).
ccgagcagccacaataaca

SEQ ID NO: 242344 - DNA, 19 bp, Homo sapiens
  siRNA target sequence for BAI3 (NM_001704.1,3726-3744).
ccctgaagggctaagctat

SEQ ID NO: 242345 - DNA, 19 bp, Homo sapiens
  siRNA target sequence for BAI3 (NM_001704.1,3727-3745).
cctgaagggctaagctatt

SEQ ID NO: 242346 - DNA, 19 bp, Homo sapiens
  siRNA target sequence for BAI3 (NM_001704.1,3733-3751).
gggctaagctattcaacat

SEQ ID NO: 242347 - DNA, 19 bp, Homo sapiens
  siRNA target sequence for BAI3 (NM_001704.1,3734-3752).
ggctaagctattcaacatt

SEQ ID NO: 242348 - DNA, 19 bp, Homo sapiens
  siRNA target sequence for BAI3 (NM_001704.1,3802-3820).
cacatgcccatgagtatga

SEQ ID NO: 242349 - DNA, 19 bp, Homo sapiens
  siRNA target sequence for BAI3 (NM_001704.1,3804-3822).
catgcccatgagtatgaat

SEQ ID NO: 242350 - DNA, 19 bp, Homo sapiens
  siRNA target sequence for BAI3 (NM_001704.1,3815-3833).
gtatgaatgagcttagcaa

SEQ ID NO: 242351 - DNA, 19 bp, Homo sapiens
  siRNA target sequence for BAI3 (NM_001704.1,3826-3844).
cttagcaatccatgtttga

SEQ ID NO: 242352 - DNA, 19 bp, Homo sapiens
  siRNA target sequence for BAI3 (NM_001704.1,3864-3882).
gcggagaactgtgtactta

SEQ ID NO: 242353 - DNA, 19 bp, Homo sapiens
  siRNA target sequence for BAI3 (NM_001704.1,3918-3936).
catagtccatcctcaagaa

SEQ ID NO: 242354 - DNA, 19 bp, Homo sapiens
  siRNA target sequence for BAI3 (NM_001704.1,3946-3964).
gaaagtgactatattgtga

SEQ ID NO: 242355 - DNA, 19 bp, Homo sapiens
  siRNA target sequence for BAI3 (NM_001704.1,3971-3989).
gaagttctgtaaataacca

SEQ ID NO: 242356 - DNA, 19 bp, Homo sapiens
  siRNA target sequence for BAI3 (NM_001704.1,4050-4068).
gctattgcactacaaagta

SEQ ID NO: 242357 - DNA, 19 bp, Homo sapiens
  siRNA target sequence for BAI3 (NM_001704.1,4051-4069).
ctattgcactacaaagtaa

SEQ ID NO: 242358 - DNA, 19 bp, Homo sapiens
  siRNA target sequence for BAI3 (NM_001704.1,4071-4089).
ccctgaattcaatatgaat

SEQ ID NO: 242359 - DNA, 19 bp, Homo sapiens
  siRNA target sequence for BAI3 (NM_001704.1,4132-4150).
ctcgcaccccaggaacata

SEQ ID NO: 242360 - DNA, 19 bp, Homo sapiens
  siRNA target sequence for BAI3 (NM_001704.1,4174-4192).
cgcacagctgtgaagaatt

SEQ ID NO: 242361 - DNA, 19 bp, Homo sapiens
  siRNA target sequence for BAI3 (NM_001704.1,4243-4261).
ggatcaacgatatcaatga

SEQ ID NO: 242362 - DNA, 19 bp, Homo sapiens
  siRNA target sequence for BAI3 (NM_001704.1,4329-4347).
gaggcatatggaactattt

SEQ ID NO: 242363 - DNA, 19 bp, Homo sapiens
  siRNA target sequence for BAI3 (NM_001704.1,4331-4349).
ggcatatggaactatttca

SEQ ID NO: 242364 - DNA, 19 bp, Homo sapiens
  siRNA target sequence for BAI3 (NM_001704.1,4377-4395).
ggacagatttcgggatata

SEQ ID NO: 242365 - DNA, 19 bp, Homo sapiens
  siRNA target sequence for BAI3 (NM_001704.1,4380-4398).
cagatttcgggatatacca

SEQ ID NO: 242366 - DNA, 19 bp, Homo sapiens
  siRNA target sequence for BAI3 (NM_001704.1,4382-4400).
gatttcgggatataccaaa

SEQ ID NO: 242367 - DNA, 19 bp, Homo sapiens
  siRNA target sequence for BAI3 (NM_001704.1,4387-4405).
cgggatataccaaatacaa

SEQ ID NO: 242368 - DNA, 19 bp, Homo sapiens
  siRNA target sequence for BAI3 (NM_001704.1,4473-4491).
gcattacaccacaatcaat

SEQ ID NO: 242369 - DNA, 19 bp, Homo sapiens
  siRNA target sequence for BAI3 (NM_001704.1,4479-4497).
caccacaatcaatgtctta

SEQ ID NO: 242370 - DNA, 19 bp, Homo sapiens
  siRNA target sequence for C17orf35 (NM_003876.1,333-351).
ggccacagactgctacatt

SEQ ID NO: 242371 - DNA, 19 bp, Homo sapiens
  siRNA target sequence for C17orf35 (NM_003876.1,379-397).
gcccaagaccagtttgagt

SEQ ID NO: 242372 - DNA, 19 bp, Homo sapiens
  siRNA target sequence for C17orf35 (NM_003876.1,380-398).
cccaagaccagtttgagta

SEQ ID NO: 242373 - DNA, 19 bp, Homo sapiens
  siRNA target sequence for C17orf35 (NM_003876.1,418-436).
gaagcccagtacaagtaca

SEQ ID NO: 242374 - DNA, 19 bp, Homo sapiens
  siRNA target sequence for C17orf35 (NM_003876.1,546-564).
gttggcgctgcccttagat

SEQ ID NO: 242375 - DNA, 19 bp, Homo sapiens
  siRNA target sequence for C17orf35 (NM_003876.1,550-568).
gcgctgcccttagattatt

SEQ ID NO: 242376 - DNA, 19 bp, Homo sapiens
  siRNA target sequence for C17orf35 (NM_003876.1,666-684).
ggagtacgacgcctataaa

SEQ ID NO: 242377 - DNA, 19 bp, Homo sapiens
  siRNA target sequence for C7orf9 (NM_022150.2,90-108).
gccacttcaagcttgttaa

SEQ ID NO: 242378 - DNA, 19 bp, Homo sapiens
  siRNA target sequence for C7orf9 (NM_022150.2,204-222).
ggggaaagaagcctcaatt

SEQ ID NO: 242379 - DNA, 19 bp, Homo sapiens
  siRNA target sequence for C7orf9 (NM_022150.2,241-259).
ggggaccaaaaaatgttat

SEQ ID NO: 242380 - DNA, 19 bp, Homo sapiens
  siRNA target sequence for C7orf9 (NM_022150.2,243-261).
ggaccaaaaaatgttatta

SEQ ID NO: 242381 - DNA, 19 bp, Homo sapiens
  siRNA target sequence for C7orf9 (NM_022150.2,266-284).
gagtacacctgcagtcaat

SEQ ID NO: 242382 - DNA, 19 bp, Homo sapiens
  siRNA target sequence for C7orf9 (NM_022150.2,268-286).
gtacacctgcagtcaataa

SEQ ID NO: 242383 - DNA, 19 bp, Homo sapiens
  siRNA target sequence for C7orf9 (NM_022150.2,325-343).
ggaggaacgttcaagaaga

SEQ ID NO: 242384 - DNA, 19 bp, Homo sapiens
  siRNA target sequence for C7orf9 (NM_022150.2,329-347).
gaacgttcaagaagaaaga

SEQ ID NO: 242385 - DNA, 19 bp, Homo sapiens
  siRNA target sequence for C7orf9 (NM_022150.2,437-455).
gtttgggagaacaacaaca

SEQ ID NO: 242386 - DNA, 19 bp, Homo sapiens
  siRNA target sequence for C7orf9 (NM_022150.2,508-526).
caccatgtgccaatgactt

SEQ ID NO: 242387 - DNA, 19 bp, Homo sapiens
  siRNA target sequence for C7orf9 (NM_022150.2,510-528).
ccatgtgccaatgacttat

SEQ ID NO: 242388 - DNA, 19 bp, Homo sapiens
  siRNA target sequence for C7orf9 (NM_022150.2,511-529).
catgtgccaatgacttatt

SEQ ID NO: 242389 - DNA, 19 bp, Homo sapiens
  siRNA target sequence for CALCRL (NM_005795.2,539-557).
ctcttgcctttttttatga

SEQ ID NO: 242390 - DNA, 19 bp, Homo sapiens
  siRNA target sequence for CALCRL (NM_005795.2,583-601).
gagtcctgaggactcaatt

SEQ ID NO: 242391 - DNA, 19 bp, Homo sapiens
  siRNA target sequence for CALCRL (NM_005795.2,588-606).
ctgaggactcaattcagtt

SEQ ID NO: 242392 - DNA, 19 bp, Homo sapiens
  siRNA target sequence for CALCRL (NM_005795.2,628-646).
catgacagctcaatatgaa

SEQ ID NO: 242393 - DNA, 19 bp, Homo sapiens
  siRNA target sequence for CALCRL (NM_005795.2,631-649).
gacagctcaatatgaatgt

SEQ ID NO: 242394 - DNA, 19 bp, Homo sapiens
  siRNA target sequence for CALCRL (NM_005795.2,633-651).
cagctcaatatgaatgtta

SEQ ID NO: 242395 - DNA, 19 bp, Homo sapiens
  siRNA target sequence for CALCRL (NM_005795.2,648-666).
gttaccaaaagattatgca

SEQ ID NO: 242396 - DNA, 19 bp, Homo sapiens
  siRNA target sequence for CALCRL (NM_005795.2,689-707).
ggcgtttactgcaacagaa

SEQ ID NO: 242397 - DNA, 19 bp, Homo sapiens
  siRNA target sequence for CALCRL (NM_005795.2,741-759).
cagcaggaactgaatcaat

SEQ ID NO: 242398 - DNA, 19 bp, Homo sapiens
  siRNA target sequence for CALCRL (NM_005795.2,870-888).
caaattatacccagtgtaa

SEQ ID NO: 242399 - DNA, 19 bp, Homo sapiens
  siRNA target sequence for CALCRL (NM_005795.2,928-946).
gttttacctgaccataatt

SEQ ID NO: 242400 - DNA, 19 bp, Homo sapiens
  siRNA target sequence for CALCRL (NM_005795.2,950-968).
cacggattgtctattgcat

SEQ ID NO: 242401 - DNA, 19 bp, Homo sapiens
  siRNA target sequence for CALCRL (NM_005795.2,981-999).
cgcttggcatattctttta

SEQ ID NO: 242402 - DNA, 19 bp, Homo sapiens
  siRNA target sequence for CALCRL (NM_005795.2,982-1000).
gcttggcatattcttttat

SEQ ID NO: 242403 - DNA, 19 bp, Homo sapiens
  siRNA target sequence for CALCRL (NM_005795.2,1008-1026).
gcctaagttgccaaaggat

SEQ ID NO: 242404 - DNA, 19 bp, Homo sapiens
  siRNA target sequence for CALCRL (NM_005795.2,1014-1032).
gttgccaaaggattacctt

SEQ ID NO: 242405 - DNA, 19 bp, Homo sapiens
  siRNA target sequence for CALCRL (NM_005795.2,1023-1041).
ggattaccttacacaaaaa

SEQ ID NO: 242406 - DNA, 19 bp, Homo sapiens
  siRNA target sequence for CALCRL (NM_005795.2,1029-1047).
ccttacacaaaaatctgtt

SEQ ID NO: 242407 - DNA, 19 bp, Homo sapiens
  siRNA target sequence for CALCRL (NM_005795.2,1058-1076).
gtttgtaactctgttgtaa

SEQ ID NO: 242408 - DNA, 19 bp, Homo sapiens
  siRNA target sequence for CALCRL (NM_005795.2,1062-1080).
gtaactctgttgtaacaat

SEQ ID NO: 242409 - DNA, 19 bp, Homo sapiens
  siRNA target sequence for CALCRL (NM_005795.2,1102-1120).
caacaaccaggccttagta

SEQ ID NO: 242410 - DNA, 19 bp, Homo sapiens
  siRNA target sequence for CALCRL (NM_005795.2,1111-1129).
ggccttagtagccacaaat

SEQ ID NO: 242411 - DNA, 19 bp, Homo sapiens
  siRNA target sequence for CALCRL (NM_005795.2,1114-1132).
cttagtagccacaaatcct

SEQ ID NO: 242412 - DNA, 19 bp, Homo sapiens
  siRNA target sequence for CALCRL (NM_005795.2,1121-1139).
gccacaaatcctgttagtt

SEQ ID NO: 242413 - DNA, 19 bp, Homo sapiens
  siRNA target sequence for CALCRL (NM_005795.2,1141-1159).
caaagtgtcccagttcatt

SEQ ID NO: 242414 - DNA, 19 bp, Homo sapiens
  siRNA target sequence for CALCRL (NM_005795.2,1169-1187).
ctgatgggctgtaattact

SEQ ID NO: 242415 - DNA, 19 bp, Homo sapiens
  siRNA target sequence for CALCRL (NM_005795.2,1256-1274).
catttaatgtggtattatt

SEQ ID NO: 242416 - DNA, 19 bp, Homo sapiens
  siRNA target sequence for CALCRL (NM_005795.2,1282-1300).
ctggggatttccactgatt

SEQ ID NO: 242417 - DNA, 19 bp, Homo sapiens
  siRNA target sequence for CALCRL (NM_005795.2,1293-1311).
cactgattcctgcttgtat

SEQ ID NO: 242418 - DNA, 19 bp, Homo sapiens
  siRNA target sequence for CALCRL (NM_005795.2,1297-1315).
gattcctgcttgtatacat

SEQ ID NO: 242419 - DNA, 19 bp, Homo sapiens
  siRNA target sequence for CALCRL (NM_005795.2,1316-1334).
gccattgctagaagcttat

SEQ ID NO: 242420 - DNA, 19 bp, Homo sapiens
  siRNA target sequence for CALCRL (NM_005795.2,1317-1335).
ccattgctagaagcttata

SEQ ID NO: 242421 - DNA, 19 bp, Homo sapiens
  siRNA target sequence for CALCRL (NM_005795.2,1318-1336).
cattgctagaagcttatat

SEQ ID NO: 242422 - DNA, 19 bp, Homo sapiens
  siRNA target sequence for CALCRL (NM_005795.2,1323-1341).
ctagaagcttatattacaa

SEQ ID NO: 242423 - DNA, 19 bp, Homo sapiens
  siRNA target sequence for CALCRL (NM_005795.2,1329-1347).
gcttatattacaatgacaa

SEQ ID NO: 242424 - DNA, 19 bp, Homo sapiens
  siRNA target sequence for CALCRL (NM_005795.2,1343-1361).
gacaattgctggatcagtt

SEQ ID NO: 242425 - DNA, 19 bp, Homo sapiens
  siRNA target sequence for CALCRL (NM_005795.2,1368-1386).
cccatctcctctacattat

SEQ ID NO: 242426 - DNA, 19 bp, Homo sapiens
  siRNA target sequence for CALCRL (NM_005795.2,1404-1422).
ctgctttactggtgaatct

SEQ ID NO: 242427 - DNA, 19 bp, Homo sapiens
  siRNA target sequence for CALCRL (NM_005795.2,1406-1424).
gctttactggtgaatcttt

SEQ ID NO: 242428 - DNA, 19 bp, Homo sapiens
  siRNA target sequence for CALCRL (NM_005795.2,1447-1465).
cgttctcatcaccaagtta

SEQ ID NO: 242429 - DNA, 19 bp, Homo sapiens
  siRNA target sequence for CALCRL (NM_005795.2,1448-1466).
gttctcatcaccaagttaa

SEQ ID NO: 242430 - DNA, 19 bp, Homo sapiens
  siRNA target sequence for CALCRL (NM_005795.2,1453-1471).
catcaccaagttaaaagtt

SEQ ID NO: 242431 - DNA, 19 bp, Homo sapiens
  siRNA target sequence for CALCRL (NM_005795.2,1473-1491).
cacaccaagcggaatccaa

SEQ ID NO: 242432 - DNA, 19 bp, Homo sapiens
  siRNA target sequence for CALCRL (NM_005795.2,1478-1496).
caagcggaatccaatctgt

SEQ ID NO: 242433 - DNA, 19 bp, Homo sapiens
  siRNA target sequence for CALCRL (NM_005795.2,1482-1500).
cggaatccaatctgtacat

SEQ ID NO: 242434 - DNA, 19 bp, Homo sapiens
  siRNA target sequence for CALCRL (NM_005795.2,1506-1524).
ctgtgagagctactcttat

SEQ ID NO: 242435 - DNA, 19 bp, Homo sapiens
  siRNA target sequence for CALCRL (NM_005795.2,1508-1526).
gtgagagctactcttatct

SEQ ID NO: 242436 - DNA, 19 bp, Homo sapiens
  siRNA target sequence for CALCRL (NM_005795.2,1531-1549).
gccattgcttggcattgaa

SEQ ID NO: 242437 - DNA, 19 bp, Homo sapiens
  siRNA target sequence for CALCRL (NM_005795.2,1592-1610).
gaggtatatgactacatca

SEQ ID NO: 242438 - DNA, 19 bp, Homo sapiens
  siRNA target sequence for CALCRL (NM_005795.2,1701-1719).
ggaatcaatacaaaatcca

SEQ ID NO: 242439 - DNA, 19 bp, Homo sapiens
  siRNA target sequence for CALCRL (NM_005795.2,1751-1769).
cttcgtagtgcgtcttaca

SEQ ID NO: 242440 - DNA, 19 bp, Homo sapiens
  siRNA target sequence for CALCRL (NM_005795.2,1768-1786).
cacagtgtcaacaatcagt

SEQ ID NO: 242441 - DNA, 19 bp, Homo sapiens
  siRNA target sequence for CALCRL (NM_005795.2,1783-1801).
cagtgatggtccaggttat

SEQ ID NO: 242442 - DNA, 19 bp, Homo sapiens
  siRNA target sequence for CALCRL (NM_005795.2,1810-1828).
ctgtcctagtgaacactta

SEQ ID NO: 242443 - DNA, 19 bp, Homo sapiens
  siRNA target sequence for CALCRL (NM_005795.2,1812-1830).
gtcctagtgaacacttaaa

SEQ ID NO: 242444 - DNA, 19 bp, Homo sapiens
  siRNA target sequence for CALCRL (NM_005795.2,1839-1857).
gcatccatgatattgaaaa

SEQ ID NO: 242445 - DNA, 19 bp, Homo sapiens
  siRNA target sequence for FZD1 (NM_003505.1,423-441).
gaggaggcgcctaagaagt

SEQ ID NO: 242446 - DNA, 19 bp, Homo sapiens
  siRNA target sequence for FZD1 (NM_003505.1,459-477).
ggcgcgagctgggaacttt

SEQ ID NO: 242447 - DNA, 19 bp, Homo sapiens
  siRNA target sequence for FZD1 (NM_003505.1,461-479).
cgcgagctgggaactttgt

SEQ ID NO: 242448 - DNA, 19 bp, Homo sapiens
  siRNA target sequence for FZD1 (NM_003505.1,869-887).
gttctaccctctagtgaaa

SEQ ID NO: 242449 - DNA, 19 bp, Homo sapiens
  siRNA target sequence for FZD1 (NM_003505.1,895-913).
gttccgctgagctcaagtt

SEQ ID NO: 242450 - DNA, 19 bp, Homo sapiens
  siRNA target sequence for FZD1 (NM_003505.1,1326-1344).
gtgtatgggctcatgtact

SEQ ID NO: 242451 - DNA, 19 bp, Homo sapiens
  siRNA target sequence for FZD1 (NM_003505.1,1545-1563).
cgagtggtgtgtaatgaca

SEQ ID NO: 242452 - DNA, 19 bp, Homo sapiens
  siRNA target sequence for FZD1 (NM_003505.1,1546-1564).
gagtggtgtgtaatgacaa

SEQ ID NO: 242453 - DNA, 19 bp, Homo sapiens
  siRNA target sequence for FZD1 (NM_003505.1,1733-1751).
cgaagccaactcacagtat

SEQ ID NO: 242454 - DNA, 19 bp, Homo sapiens
  siRNA target sequence for FZD1 (NM_003505.1,1734-1752).
gaagccaactcacagtatt

SEQ ID NO: 242455 - DNA, 19 bp, Homo sapiens
  siRNA target sequence for FZD10 (NM_007197.2,820-838).
gagcagttcaacttcaagt

SEQ ID NO: 242456 - DNA, 19 bp, Homo sapiens
  siRNA target sequence for FZD10 (NM_007197.2,1885-1903).
gcgcagcacaagtgcaaaa

SEQ ID NO: 242457 - DNA, 19 bp, Homo sapiens
  siRNA target sequence for FZD10 (NM_007197.2,1886-1904).
cgcagcacaagtgcaaaat

SEQ ID NO: 242458 - DNA, 19 bp, Homo sapiens
  siRNA target sequence for FZD10 (NM_007197.2,1891-1909).
cacaagtgcaaaatgaaca

SEQ ID NO: 242459 - DNA, 19 bp, Homo sapiens
  siRNA target sequence for FZD10 (NM_007197.2,2055-2073).
ggtgtgcagccgtaggtta

SEQ ID NO: 242460 - DNA, 19 bp, Homo sapiens
  siRNA target sequence for FZD10 (NM_007197.2,2056-2074).
gtgtgcagccgtaggttaa

SEQ ID NO: 242461 - DNA, 19 bp, Homo sapiens
  siRNA target sequence for FZD10 (NM_007197.2,2060-2078).
gcagccgtaggttaaagaa

SEQ ID NO: 242462 - DNA, 19 bp, Homo sapiens
  siRNA target sequence for FZD10 (NM_007197.2,2063-2081).
gccgtaggttaaagaagaa

SEQ ID NO: 242463 - DNA, 19 bp, Homo sapiens
  siRNA target sequence for FZD10 (NM_007197.2,2114-2132).
gcggtgggatttacaaaaa

SEQ ID NO: 242464 - DNA, 19 bp, Homo sapiens
  siRNA target sequence for FZD10 (NM_007197.2,2115-2133).
cggtgggatttacaaaaaa

SEQ ID NO: 242465 - DNA, 19 bp, Homo sapiens
  siRNA target sequence for FZD2 (NM_001466.2,456-474).
gccgtgccgctctatctgt

SEQ ID NO: 242466 - DNA, 19 bp, Homo sapiens
  siRNA target sequence for FZD2 (NM_001466.2,820-838).
cccgatggttccatgttct

SEQ ID NO: 242467 - DNA, 19 bp, Homo sapiens
  siRNA target sequence for FZD2 (NM_001466.2,821-839).
ccgatggttccatgttctt

SEQ ID NO: 242468 - DNA, 19 bp, Homo sapiens
  siRNA target sequence for FZD2 (NM_001466.2,823-841).
gatggttccatgttcttct

SEQ ID NO: 242469 - DNA, 19 bp, Homo sapiens
  siRNA target sequence for FZD2 (NM_001466.2,923-941).
ccacgtacttggtagacat

SEQ ID NO: 242470 - DNA, 19 bp, Homo sapiens
  siRNA target sequence for FZD2 (NM_001466.2,1686-1704).
cacggtctacatgatcaaa

SEQ ID NO: 242471 - DNA, 19 bp, Homo sapiens
  siRNA target sequence for FZD2 (NM_001466.2,1688-1706).
cggtctacatgatcaaata

SEQ ID NO: 242472 - DNA, 19 bp, Homo sapiens
  siRNA target sequence for FZD3 (NM_017412.2,483-501).
ctatgacttggattgtctt

SEQ ID NO: 242473 - DNA, 19 bp, Homo sapiens
  siRNA target sequence for FZD3 (NM_017412.2,539-557).
ggtgggcacagtttgtttt

SEQ ID NO: 242474 - DNA, 19 bp, Homo sapiens
  siRNA target sequence for FZD3 (NM_017412.2,558-576).
cttgtgaacctattacctt

SEQ ID NO: 242475 - DNA, 19 bp, Homo sapiens
  siRNA target sequence for FZD3 (NM_017412.2,587-605).
caagatttgccttataata

SEQ ID NO: 242476 - DNA, 19 bp, Homo sapiens
  siRNA target sequence for FZD3 (NM_017412.2,606-624).
ctaccttcatgcctaatct

SEQ ID NO: 242477 - DNA, 19 bp, Homo sapiens
  siRNA target sequence for FZD3 (NM_017412.2,609-627).
ccttcatgcctaatcttct

SEQ ID NO: 242478 - DNA, 19 bp, Homo sapiens
  siRNA target sequence for FZD3 (NM_017412.2,616-634).
gcctaatcttctgaatcat

SEQ ID NO: 242479 - DNA, 19 bp, Homo sapiens
  siRNA target sequence for FZD3 (NM_017412.2,682-700).
ggtgaatctggattgttct

SEQ ID NO: 242480 - DNA, 19 bp, Homo sapiens
  siRNA target sequence for FZD3 (NM_017412.2,725-743).
gcactctacgctcctattt

SEQ ID NO: 242481 - DNA, 19 bp, Homo sapiens
  siRNA target sequence for FZD3 (NM_017412.2,861-879).
gtaggttcccagattgtga

SEQ ID NO: 242482 - DNA, 19 bp, Homo sapiens
  siRNA target sequence for FZD3 (NM_017412.2,891-909).
ctcgacttgtggatctgaa

SEQ ID NO: 242483 - DNA, 19 bp, Homo sapiens
  siRNA target sequence for FZD3 (NM_017412.2,949-967).
gcagagagactatggtttt

SEQ ID NO: 242484 - DNA, 19 bp, Homo sapiens
  siRNA target sequence for FZD3 (NM_017412.2,950-968).
cagagagactatggttttt

SEQ ID NO: 242485 - DNA, 19 bp, Homo sapiens
  siRNA target sequence for FZD3 (NM_017412.2,969-987).
ggtgtccccgagagttaaa

SEQ ID NO: 242486 - DNA, 19 bp, Homo sapiens
  siRNA target sequence for FZD3 (NM_017412.2,992-1010).
gatcctgatctgggttatt

SEQ ID NO: 242487 - DNA, 19 bp, Homo sapiens
  siRNA target sequence for FZD3 (NM_017412.2,1016-1034).
ctgcatgtgcgtgattgtt

SEQ ID NO: 242488 - DNA, 19 bp, Homo sapiens
  siRNA target sequence for FZD3 (NM_017412.2,1038-1056).
ctccttgtccaaatatgta

SEQ ID NO: 242489 - DNA, 19 bp, Homo sapiens
  siRNA target sequence for FZD3 (NM_017412.2,1040-1058).
ccttgtccaaatatgtact

SEQ ID NO: 242490 - DNA, 19 bp, Homo sapiens
  siRNA target sequence for FZD3 (NM_017412.2,1041-1059).
cttgtccaaatatgtactt

SEQ ID NO: 242491 - DNA, 19 bp, Homo sapiens
  siRNA target sequence for FZD3 (NM_017412.2,1077-1095).
catttgctcgctatttcat

SEQ ID NO: 242492 - DNA, 19 bp, Homo sapiens
  siRNA target sequence for FZD3 (NM_017412.2,1082-1100).
gctcgctatttcataggat

SEQ ID NO: 242493 - DNA, 19 bp, Homo sapiens
  siRNA target sequence for FZD3 (NM_017412.2,1083-1101).
ctcgctatttcataggatt

SEQ ID NO: 242494 - DNA, 19 bp, Homo sapiens
  siRNA target sequence for FZD3 (NM_017412.2,1087-1105).
ctatttcataggattgatt

SEQ ID NO: 242495 - DNA, 19 bp, Homo sapiens
  siRNA target sequence for FZD3 (NM_017412.2,1097-1115).
ggattgatttcaatcattt

SEQ ID NO: 242496 - DNA, 19 bp, Homo sapiens
  siRNA target sequence for FZD3 (NM_017412.2,1116-1134).
gcctctcggccacattgtt

SEQ ID NO: 242497 - DNA, 19 bp, Homo sapiens
  siRNA target sequence for FZD3 (NM_017412.2,1117-1135).
cctctcggccacattgttt

SEQ ID NO: 242498 - DNA, 19 bp, Homo sapiens
  siRNA target sequence for FZD3 (NM_017412.2,1118-1136).
ctctcggccacattgttta

SEQ ID NO: 242499 - DNA, 19 bp, Homo sapiens
  siRNA target sequence for FZD3 (NM_017412.2,1120-1138).
ctcggccacattgtttact

SEQ ID NO: 242500 - DNA, 19 bp, Homo sapiens
  siRNA target sequence for FZD3 (NM_017412.2,1162-1180).
cacaagattccgttatcct

SEQ ID NO: 242501 - DNA, 19 bp, Homo sapiens
  siRNA target sequence for FZD3 (NM_017412.2,1178-1196).
cctgaaaggcctattatat

SEQ ID NO: 242502 - DNA, 19 bp, Homo sapiens
  siRNA target sequence for FZD3 (NM_017412.2,1210-1228).
ctacatgatggtatcctta

SEQ ID NO: 242503 - DNA, 19 bp, Homo sapiens
  siRNA target sequence for FZD3 (NM_017412.2,1259-1277).
cgagtagcctgcaatgcat

SEQ ID NO: 242504 - DNA, 19 bp, Homo sapiens
  siRNA target sequence for FZD3 (NM_017412.2,1278-1296).
ccatccctgcacaatataa

SEQ ID NO: 242505 - DNA, 19 bp, Homo sapiens
  siRNA target sequence for FZD3 (NM_017412.2,1307-1325).
gtgacacaaggatctcata

SEQ ID NO: 242506 - DNA, 19 bp, Homo sapiens
  siRNA target sequence for FZD3 (NM_017412.2,1311-1329).
cacaaggatctcataataa

SEQ ID NO: 242507 - DNA, 19 bp, Homo sapiens
  siRNA target sequence for FZD3 (NM_017412.2,1331-1349).
gcctgtaccatgcttttta

SEQ ID NO: 242508 - DNA, 19 bp, Homo sapiens
  siRNA target sequence for FZD3 (NM_017412.2,1351-1369).
gatactctatttttttact

SEQ ID NO: 242509 - DNA, 19 bp, Homo sapiens
  siRNA target sequence for FZD3 (NM_017412.2,1426-1444).
gccaaagtggggtagtgaa

SEQ ID NO: 242510 - DNA, 19 bp, Homo sapiens
  siRNA target sequence for FZD3 (NM_017412.2,1434-1452).
ggggtagtgaagctattga

SEQ ID NO: 242511 - DNA, 19 bp, Homo sapiens
  siRNA target sequence for FZD3 (NM_017412.2,1440-1458).
gtgaagctattgagaagaa

SEQ ID NO: 242512 - DNA, 19 bp, Homo sapiens
  siRNA target sequence for FZD3 (NM_017412.2,1486-1504).
gggcatccccggaactcta

SEQ ID NO: 242513 - DNA, 19 bp, Homo sapiens
  siRNA target sequence for FZD3 (NM_017412.2,1510-1528).
catccttttagcgatgaat

SEQ ID NO: 242514 - DNA, 19 bp, Homo sapiens
  siRNA target sequence for FZD3 (NM_017412.2,1513-1531).
ccttttagcgatgaataaa

SEQ ID NO: 242515 - DNA, 19 bp, Homo sapiens
  siRNA target sequence for FZD3 (NM_017412.2,1655-1673).
ggcattatatccctaaaca

SEQ ID NO: 242516 - DNA, 19 bp, Homo sapiens
  siRNA target sequence for FZD3 (NM_017412.2,1665-1683).
ccctaaacagagttcgaat

SEQ ID NO: 242517 - DNA, 19 bp, Homo sapiens
  siRNA target sequence for FZD3 (NM_017412.2,1672-1690).
cagagttcgaattgagatt

SEQ ID NO: 242518 - DNA, 19 bp, Homo sapiens
  siRNA target sequence for FZD3 (NM_017412.2,1676-1694).
gttcgaattgagattccat

SEQ ID NO: 242519 - DNA, 19 bp, Homo sapiens
  siRNA target sequence for FZD3 (NM_017412.2,1741-1759).
cggtgttttcagcattctt

SEQ ID NO: 242520 - DNA, 19 bp, Homo sapiens
  siRNA target sequence for FZD3 (NM_017412.2,1766-1784).
gtaccactcttggttgtaa

SEQ ID NO: 242521 - DNA, 19 bp, Homo sapiens
  siRNA target sequence for FZD3 (NM_017412.2,1872-1890).
gtccatatcaggttactca

SEQ ID NO: 242522 - DNA, 19 bp, Homo sapiens
  siRNA target sequence for FZD3 (NM_017412.2,1874-1892).
ccatatcaggttactcaaa

SEQ ID NO: 242523 - DNA, 19 bp, Homo sapiens
  siRNA target sequence for FZD3 (NM_017412.2,1875-1893).
catatcaggttactcaaat

SEQ ID NO: 242524 - DNA, 19 bp, Homo sapiens
  siRNA target sequence for FZD3 (NM_017412.2,1898-1916).
cgtccagacttgattctct

SEQ ID NO: 242525 - DNA, 19 bp, Homo sapiens
  siRNA target sequence for FZD3 (NM_017412.2,1902-1920).
cagacttgattctctttct

SEQ ID NO: 242526 - DNA, 19 bp, Homo sapiens
  siRNA target sequence for FZD3 (NM_017412.2,1946-1964).
gttggcattccctctgtat

SEQ ID NO: 242527 - DNA, 19 bp, Homo sapiens
  siRNA target sequence for FZD3 (NM_017412.2,1949-1967).
ggcattccctctgtatttt

SEQ ID NO: 242528 - DNA, 19 bp, Homo sapiens
  siRNA target sequence for FZD3 (NM_017412.2,1990-2008).
ctttgaatgggccagtttt

SEQ ID NO: 242529 - DNA, 19 bp, Homo sapiens
  siRNA target sequence for FZD3 (NM_017412.2,2096-2114).
ccaaatactcctatcataa

SEQ ID NO: 242530 - DNA, 19 bp, Homo sapiens
  siRNA target sequence for FZD3 (NM_017412.2,2173-2191).
ggctatggtggatgatcaa

SEQ ID NO: 242531 - DNA, 19 bp, Homo sapiens
  siRNA target sequence for FZD3 (NM_017412.2,2269-2287).
cacgccctgcagttacaga

SEQ ID NO: 242532 - DNA, 19 bp, Homo sapiens
  siRNA target sequence for FZD3 (NM_017412.2,2314-2332).
cagcatgtcacgactaaca

SEQ ID NO: 242533 - DNA, 19 bp, Homo sapiens
  siRNA target sequence for FZD3 (NM_017412.2,2316-2334).
gcatgtcacgactaacaga

SEQ ID NO: 242534 - DNA, 19 bp, Homo sapiens
  siRNA target sequence for FZD3 (NM_017412.2,2317-2335).
catgtcacgactaacagat

SEQ ID NO: 242535 - DNA, 19 bp, Homo sapiens
  siRNA target sequence for FZD3 (NM_017412.2,2352-2370).
gttctcatcggctcaatga

SEQ ID NO: 242536 - DNA, 19 bp, Homo sapiens
  siRNA target sequence for FZD3 (NM_017412.2,2392-2410).
cagagatctcagtaataat

SEQ ID NO: 242537 - DNA, 19 bp, Homo sapiens
  siRNA target sequence for FZD3 (NM_017412.2,2437-2455).
cagcatgaatcgggttatt

SEQ ID NO: 242538 - DNA, 19 bp, Homo sapiens
  siRNA target sequence for FZD3 (NM_017412.2,2440-2458).
catgaatcgggttattgaa

SEQ ID NO: 242539 - DNA, 19 bp, Homo sapiens
  siRNA target sequence for FZD3 (NM_017412.2,2443-2461).
gaatcgggttattgaagaa

SEQ ID NO: 242540 - DNA, 19 bp, Homo sapiens
  siRNA target sequence for FZD4 (NM_012193.2,691-709).
gaacccgtcctgaaggaat

SEQ ID NO: 242541 - DNA, 19 bp, Homo sapiens
  siRNA target sequence for FZD4 (NM_012193.2,863-881).
ccaattctgatcagtacat

SEQ ID NO: 242542 - DNA, 19 bp, Homo sapiens
  siRNA target sequence for FZD4 (NM_012193.2,909-927).
gctcaagtgtggctatgat

SEQ ID NO: 242543 - DNA, 19 bp, Homo sapiens
  siRNA target sequence for FZD4 (NM_012193.2,920-938).
gctatgatgctggcttata

SEQ ID NO: 242544 - DNA, 19 bp, Homo sapiens
  siRNA target sequence for FZD4 (NM_012193.2,949-967).
gccaaggagttcactgata

SEQ ID NO: 242545 - DNA, 19 bp, Homo sapiens
  siRNA target sequence for FZD4 (NM_012193.2,950-968).
ccaaggagttcactgatat

SEQ ID NO: 242546 - DNA, 19 bp, Homo sapiens
  siRNA target sequence for FZD4 (NM_012193.2,983-1001).
gggccagcctgtgtttcat

SEQ ID NO: 242547 - DNA, 19 bp, Homo sapiens
  siRNA target sequence for FZD4 (NM_012193.2,1032-1050).
gatcgattcttctaggttt

SEQ ID NO: 242548 - DNA, 19 bp, Homo sapiens
  siRNA target sequence for FZD4 (NM_012193.2,1142-1160).
ggatatcctgtgattttga

SEQ ID NO: 242549 - DNA, 19 bp, Homo sapiens
  siRNA target sequence for FZD4 (NM_012193.2,1327-1345).
gaaatgcacagctcttatt

SEQ ID NO: 242550 - DNA, 19 bp, Homo sapiens
  siRNA target sequence for FZD4 (NM_012193.2,1373-1391).
cagtgaaaaccattgtcat

SEQ ID NO: 242551 - DNA, 19 bp, Homo sapiens
  siRNA target sequence for FZD4 (NM_012193.2,1436-1454).
gctatgttggaaaccaaaa

SEQ ID NO: 242552 - DNA, 19 bp, Homo sapiens
  siRNA target sequence for FZD4 (NM_012193.2,1482-1500).
ggctcccctctttacttat

SEQ ID NO: 242553 - DNA, 19 bp, Homo sapiens
  siRNA target sequence for FZD4 (NM_012193.2,1483-1501).
gctcccctctttacttatt

SEQ ID NO: 242554 - DNA, 19 bp, Homo sapiens
  siRNA target sequence for FZD4 (NM_012193.2,1532-1550).
gtttggtggccttgttcaa

SEQ ID NO: 242555 - DNA, 19 bp, Homo sapiens
  siRNA target sequence for FZD4 (NM_012193.2,1545-1563).
gttcaaaattcggtcaaat

SEQ ID NO: 242556 - DNA, 19 bp, Homo sapiens
  siRNA target sequence for FZD4 (NM_012193.2,1577-1595).
ggacaaagacagacaagtt

SEQ ID NO: 242557 - DNA, 19 bp, Homo sapiens
  siRNA target sequence for FZD4 (NM_012193.2,1619-1637).
gggtgttctcagtactgta

SEQ ID NO: 242558 - DNA, 19 bp, Homo sapiens
  siRNA target sequence for FZD4 (NM_012193.2,1683-1701).
ctccaactgggcacttttt

SEQ ID NO: 242559 - DNA, 19 bp, Homo sapiens
  siRNA target sequence for FZD4 (NM_012193.2,1692-1710).
ggcactttttcggtattct

SEQ ID NO: 242560 - DNA, 19 bp, Homo sapiens
  siRNA target sequence for FZD4 (NM_012193.2,1702-1720).
cggtattctgcagatgatt

SEQ ID NO: 242561 - DNA, 19 bp, Homo sapiens
  siRNA target sequence for FZD5 (NM_003468.2,815-833).
gaggtcctctgcatggatt

SEQ ID NO: 242562 - DNA, 19 bp, Homo sapiens
  siRNA target sequence for FZD5 (NM_003468.2,818-836).
gtcctctgcatggattaca

SEQ ID NO: 242563 - DNA, 19 bp, Homo sapiens
  siRNA target sequence for FZD5 (NM_003468.2,1668-1686).
gcatccgcagcgtcatcaa

SEQ ID NO: 242564 - DNA, 19 bp, Homo sapiens
  siRNA target sequence for FZD6 (NM_003506.2,342-360).
cacctgtgaaccaattact

SEQ ID NO: 242565 - DNA, 19 bp, Homo sapiens
  siRNA target sequence for FZD6 (NM_003506.2,344-362).
cctgtgaaccaattactgt

SEQ ID NO: 242566 - DNA, 19 bp, Homo sapiens
  siRNA target sequence for FZD6 (NM_003506.2,359-377).
ctgttcccagatgtatgaa

SEQ ID NO: 242567 - DNA, 19 bp, Homo sapiens
  siRNA target sequence for FZD6 (NM_003506.2,466-484).
ctcgcaaatctggaatgtt

SEQ ID NO: 242568 - DNA, 19 bp, Homo sapiens
  siRNA target sequence for FZD6 (NM_003506.2,549-567).
ggttccaccttgtcgtaaa

SEQ ID NO: 242569 - DNA, 19 bp, Homo sapiens
  siRNA target sequence for FZD6 (NM_003506.2,557-575).
cttgtcgtaaactttgtga

SEQ ID NO: 242570 - DNA, 19 bp, Homo sapiens
  siRNA target sequence for FZD6 (NM_003506.2,627-645).
gcctgaggagcttgaatgt

SEQ ID NO: 242571 - DNA, 19 bp, Homo sapiens
  siRNA target sequence for FZD6 (NM_003506.2,706-724).
cttggtcctcagaagaaaa

SEQ ID NO: 242572 - DNA, 19 bp, Homo sapiens
  siRNA target sequence for FZD6 (NM_003506.2,755-773).
ggtgtccaaggcatcttaa

SEQ ID NO: 242573 - DNA, 19 bp, Homo sapiens
  siRNA target sequence for FZD6 (NM_003506.2,824-842).
ctccatgccccaacatgta

SEQ ID NO: 242574 - DNA, 19 bp, Homo sapiens
  siRNA target sequence for FZD6 (NM_003506.2,826-844).
ccatgccccaacatgtatt

SEQ ID NO: 242575 - DNA, 19 bp, Homo sapiens
  siRNA target sequence for FZD6 (NM_003506.2,918-936).
gttcacattccttactttt

SEQ ID NO: 242576 - DNA, 19 bp, Homo sapiens
  siRNA target sequence for FZD6 (NM_003506.2,963-981).
cccagagagaccaattata

SEQ ID NO: 242577 - DNA, 19 bp, Homo sapiens
  siRNA target sequence for FZD6 (NM_003506.2,964-982).
ccagagagaccaattatat

SEQ ID NO: 242578 - DNA, 19 bp, Homo sapiens
  siRNA target sequence for FZD6 (NM_003506.2,991-1009).
gtctgttacagcattgtat

SEQ ID NO: 242579 - DNA, 19 bp, Homo sapiens
  siRNA target sequence for FZD6 (NM_003506.2,1012-1030).
cttatgtacttcattggat

SEQ ID NO: 242580 - DNA, 19 bp, Homo sapiens
  siRNA target sequence for FZD6 (NM_003506.2,1064-1082).
cagatgagaagctagaact

SEQ ID NO: 242581 - DNA, 19 bp, Homo sapiens
  siRNA target sequence for FZD6 (NM_003506.2,1117-1135).
gcttgcaccgttttgttca

SEQ ID NO: 242582 - DNA, 19 bp, Homo sapiens
  siRNA target sequence for FZD6 (NM_003506.2,1118-1136).
cttgcaccgttttgttcat

SEQ ID NO: 242583 - DNA, 19 bp, Homo sapiens
  siRNA target sequence for FZD6 (NM_003506.2,1124-1142).
ccgttttgttcatgctttt

SEQ ID NO: 242584 - DNA, 19 bp, Homo sapiens
  siRNA target sequence for FZD6 (NM_003506.2,1200-1218).
cttagctgcaggaagaaaa

SEQ ID NO: 242585 - DNA, 19 bp, Homo sapiens
  siRNA target sequence for FZD6 (NM_003506.2,1226-1244).
gtgaagccatcgagcaaaa

SEQ ID NO: 242586 - DNA, 19 bp, Homo sapiens
  siRNA target sequence for FZD6 (NM_003506.2,1279-1297).
ccaggtttcctgactgtta

SEQ ID NO: 242587 - DNA, 19 bp, Homo sapiens
  siRNA target sequence for FZD6 (NM_003506.2,1292-1310).
ctgttatgcttcttgctat

SEQ ID NO: 242588 - DNA, 19 bp, Homo sapiens
  siRNA target sequence for FZD6 (NM_003506.2,1346-1364).
gctttgttggcctttatga

SEQ ID NO: 242589 - DNA, 19 bp, Homo sapiens
  siRNA target sequence for FZD6 (NM_003506.2,1376-1394).
ctcgctactttgtactctt

SEQ ID NO: 242590 - DNA, 19 bp, Homo sapiens
  siRNA target sequence for FZD6 (NM_003506.2,1466-1484).
gacaagtcatacaacatga

SEQ ID NO: 242591 - DNA, 19 bp, Homo sapiens
  siRNA target sequence for FZD6 (NM_003506.2,1483-1501).
gatggccggaaccaagaaa

SEQ ID NO: 242592 - DNA, 19 bp, Homo sapiens
  siRNA target sequence for FZD6 (NM_003506.2,1487-1505).
gccggaaccaagaaaaact

SEQ ID NO: 242593 - DNA, 19 bp, Homo sapiens
  siRNA target sequence for FZD6 (NM_003506.2,1488-1506).
ccggaaccaagaaaaacta

SEQ ID NO: 242594 - DNA, 19 bp, Homo sapiens
  siRNA target sequence for FZD6 (NM_003506.2,1509-1527).
gaaatttatgattcgaatt

SEQ ID NO: 242595 - DNA, 19 bp, Homo sapiens
  siRNA target sequence for FZD6 (NM_003506.2,1533-1551).
cttcagcggcttgtatctt

SEQ ID NO: 242596 - DNA, 19 bp, Homo sapiens
  siRNA target sequence for FZD6 (NM_003506.2,1591-1609).
caagtgaacaggattacct

SEQ ID NO: 242597 - DNA, 19 bp, Homo sapiens
  siRNA target sequence for FZD6 (NM_003506.2,1633-1651).
cattgtcgtcagtaccata

SEQ ID NO: 242598 - DNA, 19 bp, Homo sapiens
  siRNA target sequence for FZD6 (NM_003506.2,1684-1702).
cgaccagaattggctttat

SEQ ID NO: 242599 - DNA, 19 bp, Homo sapiens
  siRNA target sequence for FZD6 (NM_003506.2,1716-1734).
cctgatgacattaattgtt

SEQ ID NO: 242600 - DNA, 19 bp, Homo sapiens
  siRNA target sequence for FZD6 (NM_003506.2,1780-1798).
gaatgggctgggtttttta

SEQ ID NO: 242601 - DNA, 19 bp, Homo sapiens
  siRNA target sequence for FZD6 (NM_003506.2,1785-1803).
ggctgggttttttaaacga

SEQ ID NO: 242602 - DNA, 19 bp, Homo sapiens
  siRNA target sequence for FZD6 (NM_003506.2,1786-1804).
gctgggttttttaaacgaa

SEQ ID NO: 242603 - DNA, 19 bp, Homo sapiens
  siRNA target sequence for FZD6 (NM_003506.2,1787-1805).
ctgggttttttaaacgaaa

SEQ ID NO: 242604 - DNA, 19 bp, Homo sapiens
  siRNA target sequence for FZD6 (NM_003506.2,1809-1827).
caagagagatccaatcagt

SEQ ID NO: 242605 - DNA, 19 bp, Homo sapiens
  siRNA target sequence for FZD6 (NM_003506.2,1902-1920).
gcactataaaccaagttca

SEQ ID NO: 242606 - DNA, 19 bp, Homo sapiens
  siRNA target sequence for FZD6 (NM_003506.2,1921-1939).
cacaagctgaaggtcattt

SEQ ID NO: 242607 - DNA, 19 bp, Homo sapiens
  siRNA target sequence for FZD6 (NM_003506.2,1926-1944).
gctgaaggtcatttccaaa

SEQ ID NO: 242608 - DNA, 19 bp, Homo sapiens
  siRNA target sequence for FZD6 (NM_003506.2,1982-2000).
gcacttctgcagtagcaat

SEQ ID NO: 242609 - DNA, 19 bp, Homo sapiens
  siRNA target sequence for FZD6 (NM_003506.2,1983-2001).
cacttctgcagtagcaatt

SEQ ID NO: 242610 - DNA, 19 bp, Homo sapiens
  siRNA target sequence for FZD6 (NM_003506.2,1996-2014).
gcaattactagccatgatt

SEQ ID NO: 242611 - DNA, 19 bp, Homo sapiens
  siRNA target sequence for FZD6 (NM_003506.2,1997-2015).
caattactagccatgatta

SEQ ID NO: 242612 - DNA, 19 bp, Homo sapiens
  siRNA target sequence for FZD6 (NM_003506.2,2011-2029).
gattacctaggacaagaaa

SEQ ID NO: 242613 - DNA, 19 bp, Homo sapiens
  siRNA target sequence for FZD6 (NM_003506.2,2048-2066).
cctcaccagaaacatcaat

SEQ ID NO: 242614 - DNA, 19 bp, Homo sapiens
  siRNA target sequence for FZD6 (NM_003506.2,2089-2107).
gctagcacccccaggttaa

SEQ ID NO: 242615 - DNA, 19 bp, Homo sapiens
  siRNA target sequence for FZD6 (NM_003506.2,2093-2111).
gcacccccaggttaagaga

SEQ ID NO: 242616 - DNA, 19 bp, Homo sapiens
  siRNA target sequence for FZD6 (NM_003506.2,2094-2112).
cacccccaggttaagagaa

SEQ ID NO: 242617 - DNA, 19 bp, Homo sapiens
  siRNA target sequence for FZD6 (NM_003506.2,2237-2255).
caaagagtgatattactga

SEQ ID NO: 242618 - DNA, 19 bp, Homo sapiens
  siRNA target sequence for FZD6 (NM_003506.2,2263-2281).
ctggcacagagcaacaatt

SEQ ID NO: 242619 - DNA, 19 bp, Homo sapiens
  siRNA target sequence for FZD6 (NM_003506.2,2283-2301).
gcaggtccccagttcttca

SEQ ID NO: 242620 - DNA, 19 bp, Homo sapiens
  siRNA target sequence for FZD6 (NM_003506.2,2305-2323).
ccaagcagcctcaaaggtt

SEQ ID NO: 242621 - DNA, 19 bp, Homo sapiens
  siRNA target sequence for FZD6 (NM_003506.2,2345-2363).
cggtttcaggagtgagaaa

SEQ ID NO: 242622 - DNA, 19 bp, Homo sapiens
  siRNA target sequence for FZD6 (NM_003506.2,2346-2364).
ggtttcaggagtgagaaaa

SEQ ID NO: 242623 - DNA, 19 bp, Homo sapiens
  siRNA target sequence for FZD6 (NM_003506.2,2374-2392).
ggtggttgtcattcagata

SEQ ID NO: 242624 - DNA, 19 bp, Homo sapiens
  siRNA target sequence for FZD6 (NM_003506.2,2377-2395).
ggttgtcattcagatactt

SEQ ID NO: 242625 - DNA, 19 bp, Homo sapiens
  siRNA target sequence for FZD8 (NM_031866.1,157-175).
cctacatgcccaatcagtt

SEQ ID NO: 242626 - DNA, 19 bp, Homo sapiens
  siRNA target sequence for FZD8 (NM_031866.1,244-262).
gctcgcccgatctcaagtt

SEQ ID NO: 242627 - DNA, 19 bp, Homo sapiens
  siRNA target sequence for FZD8 (NM_031866.1,247-265).
cgcccgatctcaagttctt

SEQ ID NO: 242628 - DNA, 19 bp, Homo sapiens
  siRNA target sequence for FZD8 (NM_031866.1,889-907).
ccgtctccaccttccttat

SEQ ID NO: 242629 - DNA, 19 bp, Homo sapiens
  siRNA target sequence for FZD8 (NM_031866.1,1531-1549).
gcatccgctcggtcatcaa

SEQ ID NO: 242630 - DNA, 19 bp, Homo sapiens
  siRNA target sequence for FZD8 (NM_031866.1,2041-2059).
cggcgagctccgtgtctta

SEQ ID NO: 242631 - DNA, 19 bp, Homo sapiens
  siRNA target sequence for FZD8 (NM_031866.1,2042-2060).
ggcgagctccgtgtcttat

SEQ ID NO: 242632 - DNA, 19 bp, Homo sapiens
  siRNA target sequence for FZD8 (NM_031866.1,2045-2063).
gagctccgtgtcttatcca

SEQ ID NO: 242633 - DNA, 19 bp, Homo sapiens
  siRNA target sequence for FZD8 (NM_031866.1,2047-2065).
gctccgtgtcttatccaaa

SEQ ID NO: 242634 - DNA, 19 bp, Homo sapiens
  siRNA target sequence for FZD9 (NM_003508.1,612-630).
gcgagaaccccgagaagtt

SEQ ID NO: 242635 - DNA, 19 bp, Homo sapiens
  siRNA target sequence for FZD9 (NM_003508.1,1301-1319).
cacatccgcaagatcatga

SEQ ID NO: 242636 - DNA, 19 bp, Homo sapiens
  siRNA target sequence for FZD9 (NM_003508.1,1400-1418).
gccacctgcgtcatcgttt

SEQ ID NO: 242637 - DNA, 19 bp, Homo sapiens
  siRNA target sequence for FZD9 (NM_003508.1,1404-1422).
cctgcgtcatcgtttgcta

SEQ ID NO: 242638 - DNA, 19 bp, Homo sapiens
  siRNA target sequence for FZD9 (NM_003508.1,1405-1423).
ctgcgtcatcgtttgctat

SEQ ID NO: 242639 - DNA, 19 bp, Homo sapiens
  siRNA target sequence for FZD9 (NM_003508.1,1409-1427).
gtcatcgtttgctatgtct

SEQ ID NO: 242640 - DNA, 19 bp, Homo sapiens
  siRNA target sequence for FZD9 (NM_003508.1,1539-1557).
ccaccgtggcggtcttcat

SEQ ID NO: 242641 - DNA, 19 bp, Homo sapiens
  siRNA target sequence for FZD9 (NM_003508.1,1547-1565).
gcggtcttcatgctcaaaa

SEQ ID NO: 242642 - DNA, 19 bp, Homo sapiens
  siRNA target sequence for FZD9 (NM_003508.1,1548-1566).
cggtcttcatgctcaaaat

SEQ ID NO: 242643 - DNA, 19 bp, Homo sapiens
  siRNA target sequence for FZD9 (NM_003508.1,1715-1733).
ggcacgcactgccactata

SEQ ID NO: 242644 - DNA, 19 bp, Homo sapiens
  siRNA target sequence for FZD9 (NM_003508.1,1716-1734).
gcacgcactgccactataa

SEQ ID NO: 242645 - DNA, 19 bp, Homo sapiens
  siRNA target sequence for FZD9 (NM_003508.1,1748-1766).
gtcttgcacatgactaaga

SEQ ID NO: 242646 - DNA, 19 bp, Homo sapiens
  siRNA target sequence for GIPR (NM_000164.1,281-299).
gtaacgggtccttcgatat

SEQ ID NO: 242647 - DNA, 19 bp, Homo sapiens
  siRNA target sequence for GIPR (NM_000164.1,435-453).
gagagaccatacacaatgt

SEQ ID NO: 242648 - DNA, 19 bp, Homo sapiens
  siRNA target sequence for GIPR (NM_000164.1,505-523).
cggttgcaggtcatgtaca

SEQ ID NO: 242649 - DNA, 19 bp, Homo sapiens
  siRNA target sequence for GIPR (NM_000164.1,562-580).
gccctgctcatcttgagtt

SEQ ID NO: 242650 - DNA, 19 bp, Homo sapiens
  siRNA target sequence for GIPR (NM_000164.1,563-581).
ccctgctcatcttgagttt

SEQ ID NO: 242651 - DNA, 19 bp, Homo sapiens
  siRNA target sequence for GIPR (NM_000164.1,565-583).
ctgctcatcttgagtttgt

SEQ ID NO: 242652 - DNA, 19 bp, Homo sapiens
  siRNA target sequence for GIPR (NM_000164.1,568-586).
ctcatcttgagtttgttca

SEQ ID NO: 242653 - DNA, 19 bp, Homo sapiens
  siRNA target sequence for GIPR (NM_000164.1,646-664).
cgagctgcggccattctca

SEQ ID NO: 242654 - DNA, 19 bp, Homo sapiens
  siRNA target sequence for GIPR (NM_000164.1,970-988).
gaagtcaaggccatttggt

SEQ ID NO: 242655 - DNA, 19 bp, Homo sapiens
  siRNA target sequence for GIPR (NM_000164.1,1213-1231).
gccaagctcggctttgaga

SEQ ID NO: 242656 - DNA, 19 bp, Homo sapiens
  siRNA target sequence for GIPR (NM_000164.1,1214-1232).
ccaagctcggctttgagat

SEQ ID NO: 242657 - DNA, 19 bp, Homo sapiens
  siRNA target sequence for GIPR (NM_000164.1,1477-1495).
cgggagttggaaagttact

SEQ ID NO: 242658 - DNA, 19 bp, Homo sapiens
  siRNA target sequence for GLP1R (NM_002062.2,166-184).
cctgccacagacttgttct

SEQ ID NO: 242659 - DNA, 19 bp, Homo sapiens
  siRNA target sequence for GLP1R (NM_002062.2,230-248).
caggctcgttcgtgaatgt

SEQ ID NO: 242660 - DNA, 19 bp, Homo sapiens
  siRNA target sequence for GLP1R (NM_002062.2,232-250).
ggctcgttcgtgaatgtca

SEQ ID NO: 242661 - DNA, 19 bp, Homo sapiens
  siRNA target sequence for GLP1R (NM_002062.2,538-556).
cacctgaacctgtttgcat

SEQ ID NO: 242662 - DNA, 19 bp, Homo sapiens
  siRNA target sequence for GLP1R (NM_002062.2,569-587).
gagcattgtccgtcttcat

SEQ ID NO: 242663 - DNA, 19 bp, Homo sapiens
  siRNA target sequence for GLP1R (NM_002062.2,571-589).
gcattgtccgtcttcatca

SEQ ID NO: 242664 - DNA, 19 bp, Homo sapiens
  siRNA target sequence for GLP1R (NM_002062.2,572-590).
cattgtccgtcttcatcaa

SEQ ID NO: 242665 - DNA, 19 bp, Homo sapiens
  siRNA target sequence for GLP1R (NM_002062.2,598-616).
gccctgaagtggatgtata

SEQ ID NO: 242666 - DNA, 19 bp, Homo sapiens
  siRNA target sequence for GLP1R (NM_002062.2,674-692).
gctgccgcctggtgtttct

SEQ ID NO: 242667 - DNA, 19 bp, Homo sapiens
  siRNA target sequence for GLP1R (NM_002062.2,896-914).
ggaactccaacatgaacta

SEQ ID NO: 242668 - DNA, 19 bp, Homo sapiens
  siRNA target sequence for GLP1R (NM_002062.2,1020-1038).
gtgcaagacagacatcaaa

SEQ ID NO: 242669 - DNA, 19 bp, Homo sapiens
  siRNA target sequence for GLP2R (NM_004246.1,175-193).
gtttccatcaagcaagtta

SEQ ID NO: 242670 - DNA, 19 bp, Homo sapiens
  siRNA target sequence for GLP2R (NM_004246.1,245-263).
catgtctgagagacttact

SEQ ID NO: 242671 - DNA, 19 bp, Homo sapiens
  siRNA target sequence for GLP2R (NM_004246.1,267-285).
ggaaccttctggcatattt

SEQ ID NO: 242672 - DNA, 19 bp, Homo sapiens
  siRNA target sequence for GLP2R (NM_004246.1,287-305).
gtaacgggacatttgatca

SEQ ID NO: 242673 - DNA, 19 bp, Homo sapiens
  siRNA target sequence for GLP2R (NM_004246.1,309-327).
cgtgtgttggcctcattct

SEQ ID NO: 242674 - DNA, 19 bp, Homo sapiens
  siRNA target sequence for GLP2R (NM_004246.1,312-330).
gtgttggcctcattcttct

SEQ ID NO: 242675 - DNA, 19 bp, Homo sapiens
  siRNA target sequence for GLP2R (NM_004246.1,439-457).
gagaacgccacggatattt

SEQ ID NO: 242676 - DNA, 19 bp, Homo sapiens
  siRNA target sequence for GLP2R (NM_004246.1,553-571).
ggatactccttctctctta

SEQ ID NO: 242677 - DNA, 19 bp, Homo sapiens
  siRNA target sequence for GLP2R (NM_004246.1,640-658).
cacatgaacttgtttgctt

SEQ ID NO: 242678 - DNA, 19 bp, Homo sapiens
  siRNA target sequence for GLP2R (NM_004246.1,697-715).
gtcgtcttctacaactctt

SEQ ID NO: 242679 - DNA, 19 bp, Homo sapiens
  siRNA target sequence for GLP2R (NM_004246.1,717-735).
ctccaagaggcctgacaat

SEQ ID NO: 242680 - DNA, 19 bp, Homo sapiens
  siRNA target sequence for GLP2R (NM_004246.1,719-737).
ccaagaggcctgacaatga

SEQ ID NO: 242681 - DNA, 19 bp, Homo sapiens
  siRNA target sequence for GLP2R (NM_004246.1,723-741).
gaggcctgacaatgagaat

SEQ ID NO: 242682 - DNA, 19 bp, Homo sapiens
  siRNA target sequence for GLP2R (NM_004246.1,790-808).
caggttctcttgcattact

SEQ ID NO: 242683 - DNA, 19 bp, Homo sapiens
  siRNA target sequence for GLP2R (NM_004246.1,923-941).
gggccttccctgtgctatt

SEQ ID NO: 242684 - DNA, 19 bp, Homo sapiens
  siRNA target sequence for GLP2R (NM_004246.1,930-948).
ccctgtgctatttgttgta

SEQ ID NO: 242685 - DNA, 19 bp, Homo sapiens
  siRNA target sequence for GLP2R (NM_004246.1,983-1001).
cagggtgctggacaacaaa

SEQ ID NO: 242686 - DNA, 19 bp, Homo sapiens
  siRNA target sequence for GLP2R (NM_004246.1,1038-1056).
catgatgctctgtgtaaca

SEQ ID NO: 242687 - DNA, 19 bp, Homo sapiens
  siRNA target sequence for GLP2R (NM_004246.1,1044-1062).
gctctgtgtaacagtcaat

SEQ ID NO: 242688 - DNA, 19 bp, Homo sapiens
  siRNA target sequence for GLP2R (NM_004246.1,1045-1063).
ctctgtgtaacagtcaatt

SEQ ID NO: 242689 - DNA, 19 bp, Homo sapiens
  siRNA target sequence for GLP2R (NM_004246.1,1049-1067).
gtgtaacagtcaatttctt

SEQ ID NO: 242690 - DNA, 19 bp, Homo sapiens
  siRNA target sequence for GLP2R (NM_004246.1,1175-1193).
ctttattgggcgttcatga

SEQ ID NO: 242691 - DNA, 19 bp, Homo sapiens
  siRNA target sequence for GLP2R (NM_004246.1,1296-1314).
ggccttgcagtatggtttt

SEQ ID NO: 242692 - DNA, 19 bp, Homo sapiens
  siRNA target sequence for GLP2R (NM_004246.1,1333-1351).
gctgagctgcggaaatact

SEQ ID NO: 242693 - DNA, 19 bp, Homo sapiens
  siRNA target sequence for GLP2R (NM_004246.1,1410-1428).
cttccggttcctaggaaaa

SEQ ID NO: 242694 - DNA, 19 bp, Homo sapiens
  siRNA target sequence for GLP2R (NM_004246.1,1477-1495).
ctgcagccctcacttaaca

SEQ ID NO: 242695 - DNA, 19 bp, Homo sapiens
  siRNA target sequence for GPR110 (NM_153840.1,33-51).
cgttgctgggtatgaagtt

SEQ ID NO: 242696 - DNA, 19 bp, Homo sapiens
  siRNA target sequence for GPR110 (NM_153840.1,126-144).
caagctgtttccattagaa

SEQ ID NO: 242697 - DNA, 19 bp, Homo sapiens
  siRNA target sequence for GPR110 (NM_153840.1,177-195).
gtgtaatgacattgtcttt

SEQ ID NO: 242698 - DNA, 19 bp, Homo sapiens
  siRNA target sequence for GPR110 (NM_153840.1,202-220).
gggtccaaggatgatgaat

SEQ ID NO: 242699 - DNA, 19 bp, Homo sapiens
  siRNA target sequence for GPR110 (NM_153840.1,203-221).
ggtccaaggatgatgaata

SEQ ID NO: 242700 - DNA, 19 bp, Homo sapiens
  siRNA target sequence for GPR110 (NM_153840.1,309-327).
gctctctctgcttgaagaa

SEQ ID NO: 242701 - DNA, 19 bp, Homo sapiens
  siRNA target sequence for GPR110 (NM_153840.1,378-396).
gtcatccttcgtgcaaaat

SEQ ID NO: 242702 - DNA, 19 bp, Homo sapiens
  siRNA target sequence for GPR110 (NM_153840.1,380-398).
catccttcgtgcaaaatct

SEQ ID NO: 242703 - DNA, 19 bp, Homo sapiens
  siRNA target sequence for GPR110 (NM_153840.1,456-474).
gtcgattctgagcaatatt

SEQ ID NO: 242704 - DNA, 19 bp, Homo sapiens
  siRNA target sequence for GPR110 (NM_153840.1,501-519).
cagggtgtccaattcaaca

SEQ ID NO: 242705 - DNA, 19 bp, Homo sapiens
  siRNA target sequence for GPR110 (NM_153840.1,503-521).
gggtgtccaattcaacaat

SEQ ID NO: 242706 - DNA, 19 bp, Homo sapiens
  siRNA target sequence for GPR110 (NM_153840.1,515-533).
caacaatggaggatgtcat

SEQ ID NO: 242707 - DNA, 19 bp, Homo sapiens
  siRNA target sequence for GPR110 (NM_153840.1,522-540).
ggaggatgtcatcagtata

SEQ ID NO: 242708 - DNA, 19 bp, Homo sapiens
  siRNA target sequence for GPR110 (NM_153840.1,525-543).
ggatgtcatcagtatagct

SEQ ID NO: 242709 - DNA, 19 bp, Homo sapiens
  siRNA target sequence for GPR110 (NM_153840.1,531-549).
catcagtatagctgacaat

SEQ ID NO: 242710 - DNA, 19 bp, Homo sapiens
  siRNA target sequence for GPR110 (NM_153840.1,536-554).
gtatagctgacaatatcct

SEQ ID NO: 242711 - DNA, 19 bp, Homo sapiens
  siRNA target sequence for GPR110 (NM_153840.1,541-559).
gctgacaatatccttaatt

SEQ ID NO: 242712 - DNA, 19 bp, Homo sapiens
  siRNA target sequence for GPR110 (NM_153840.1,572-590).
ccaactggacagtcttact

SEQ ID NO: 242713 - DNA, 19 bp, Homo sapiens
  siRNA target sequence for GPR110 (NM_153840.1,583-601).
gtcttactgcgggaagaaa

SEQ ID NO: 242714 - DNA, 19 bp, Homo sapiens
  siRNA target sequence for GPR110 (NM_153840.1,614-632).
cacggttactagagacatt

SEQ ID NO: 242715 - DNA, 19 bp, Homo sapiens
  siRNA target sequence for GPR110 (NM_153840.1,664-682).
gctcttcctctgaattttt

SEQ ID NO: 242716 - DNA, 19 bp, Homo sapiens
  siRNA target sequence for GPR110 (NM_153840.1,737-755).
ggggttacagctatcagat

SEQ ID NO: 242717 - DNA, 19 bp, Homo sapiens
  siRNA target sequence for GPR110 (NM_153840.1,738-756).
gggttacagctatcagatt

SEQ ID NO: 242718 - DNA, 19 bp, Homo sapiens
  siRNA target sequence for GPR110 (NM_153840.1,740-758).
gttacagctatcagattaa

SEQ ID NO: 242719 - DNA, 19 bp, Homo sapiens
  siRNA target sequence for GPR110 (NM_153840.1,764-782).
gtccccaaaatacatctat

SEQ ID NO: 242720 - DNA, 19 bp, Homo sapiens
  siRNA target sequence for GPR110 (NM_153840.1,786-804).
catcagaggccgtgtgtta

SEQ ID NO: 242721 - DNA, 19 bp, Homo sapiens
  siRNA target sequence for GPR110 (NM_153840.1,789-807).
cagaggccgtgtgttaatt

SEQ ID NO: 242722 - DNA, 19 bp, Homo sapiens
  siRNA target sequence for GPR110 (NM_153840.1,830-848).
cccttccagaaactattat

SEQ ID NO: 242723 - DNA, 19 bp, Homo sapiens
  siRNA target sequence for GPR110 (NM_153840.1,909-927).
ggtcaatggacctgtgata

SEQ ID NO: 242724 - DNA, 19 bp, Homo sapiens
  siRNA target sequence for GPR110 (NM_153840.1,929-947).
ccacggttattcaaaacta

SEQ ID NO: 242725 - DNA, 19 bp, Homo sapiens
  siRNA target sequence for GPR110 (NM_153840.1,930-948).
cacggttattcaaaactat

SEQ ID NO: 242726 - DNA, 19 bp, Homo sapiens
  siRNA target sequence for GPR110 (NM_153840.1,934-952).
gttattcaaaactattcca

SEQ ID NO: 242727 - DNA, 19 bp, Homo sapiens
  siRNA target sequence for GPR110 (NM_153840.1,999-1017).
ccagcctcattgtgtgttt

SEQ ID NO: 242728 - DNA, 19 bp, Homo sapiens
  siRNA target sequence for GPR110 (NM_153840.1,1000-1018).
cagcctcattgtgtgtttt

SEQ ID NO: 242729 - DNA, 19 bp, Homo sapiens
  siRNA target sequence for GPR110 (NM_153840.1,1019-1037).
gggatttcagtcatttgca

SEQ ID NO: 242730 - DNA, 19 bp, Homo sapiens
  siRNA target sequence for GPR110 (NM_153840.1,1056-1074).
ccacctagtgaatgaaact

SEQ ID NO: 242731 - DNA, 19 bp, Homo sapiens
  siRNA target sequence for GPR110 (NM_153840.1,1083-1101).
cgtgacgtgccaatgtact

SEQ ID NO: 242732 - DNA, 19 bp, Homo sapiens
  siRNA target sequence for GPR110 (NM_153840.1,1109-1127).
cctccttctccatattgat

SEQ ID NO: 242733 - DNA, 19 bp, Homo sapiens
  siRNA target sequence for GPR110 (NM_153840.1,1132-1150).
ccttttgtcccctctacaa

SEQ ID NO: 242734 - DNA, 19 bp, Homo sapiens
  siRNA target sequence for GPR110 (NM_153840.1,1133-1151).
cttttgtcccctctacaat

SEQ ID NO: 242735 - DNA, 19 bp, Homo sapiens
  siRNA target sequence for GPR110 (NM_153840.1,1221-1239).
gatcatcgaggctttgttt

SEQ ID NO: 242736 - DNA, 19 bp, Homo sapiens
  siRNA target sequence for GPR110 (NM_153840.1,1266-1284).
ctctcacacacgtcgtatt

SEQ ID NO: 242737 - DNA, 19 bp, Homo sapiens
  siRNA target sequence for GPR110 (NM_153840.1,1270-1288).
cacacacgtcgtatttgca

SEQ ID NO: 242738 - DNA, 19 bp, Homo sapiens
  siRNA target sequence for GPR110 (NM_153840.1,1531-1549).
gggtgccctctcattatat

SEQ ID NO: 242739 - DNA, 19 bp, Homo sapiens
  siRNA target sequence for GPR110 (NM_153840.1,1567-1585).
gtcacgcaacctagcaata

SEQ ID NO: 242740 - DNA, 19 bp, Homo sapiens
  siRNA target sequence for GPR110 (NM_153840.1,1571-1589).
cgcaacctagcaataccta

SEQ ID NO: 242741 - DNA, 19 bp, Homo sapiens
  siRNA target sequence for GPR110 (NM_153840.1,1600-1618).
gatgtgtgttggcttaact

SEQ ID NO: 242742 - DNA, 19 bp, Homo sapiens
  siRNA target sequence for GPR110 (NM_153840.1,1612-1630).
cttaactggtccaatggaa

SEQ ID NO: 242743 - DNA, 19 bp, Homo sapiens
  siRNA target sequence for GPR110 (NM_153840.1,1739-1757).
gactgagtcgggatgacaa

SEQ ID NO: 242744 - DNA, 19 bp, Homo sapiens
  siRNA target sequence for GPR110 (NM_153840.1,1778-1796).
ggaagagcctcctcattct

SEQ ID NO: 242745 - DNA, 19 bp, Homo sapiens
  siRNA target sequence for GPR110 (NM_153840.1,1818-1836).
ctggggctttggaatagga

SEQ ID NO: 242746 - DNA, 19 bp, Homo sapiens
  siRNA target sequence for GPR110 (NM_153840.1,1891-1909).
gcattccagggatttttta

SEQ ID NO: 242747 - DNA, 19 bp, Homo sapiens
  siRNA target sequence for GPR110 (NM_153840.1,1935-1953).
cagtaagctgcgacaactt

SEQ ID NO: 242748 - DNA, 19 bp, Homo sapiens
  siRNA target sequence for GPR110 (NM_153840.1,1937-1955).
gtaagctgcgacaacttct

SEQ ID NO: 242749 - DNA, 19 bp, Homo sapiens
  siRNA target sequence for GPR110 (NM_153840.1,1962-1980).
caagttgtctgccttaagt

SEQ ID NO: 242750 - DNA, 19 bp, Homo sapiens
  siRNA target sequence for GPR110 (NM_153840.1,2001-2019).
gcaaaactcatcagattta

SEQ ID NO: 242751 - DNA, 19 bp, Homo sapiens
  siRNA target sequence for GPR110 (NM_153840.1,2023-2041).
gccaaacccaaattctcaa

SEQ ID NO: 242752 - DNA, 19 bp, Homo sapiens
  siRNA target sequence for GPR110 (NM_153840.1,2058-2076).
gcaaaacaaaggccattat

SEQ ID NO: 242753 - DNA, 19 bp, Homo sapiens
  siRNA target sequence for GPR110 (NM_153840.1,2093-2111).
gagattcctccgacaacat

SEQ ID NO: 242754 - DNA, 19 bp, Homo sapiens
  siRNA target sequence for GPR110 (NM_153840.1,2109-2127).
catcatgctaactcagttt

SEQ ID NO: 242755 - DNA, 19 bp, Homo sapiens
  siRNA target sequence for GPR110 (NM_153840.1,2120-2138).
ctcagtttgtctcaaatga

SEQ ID NO: 242756 - DNA, 19 bp, Homo sapiens
  siRNA target sequence for GPR111 (NM_153839.1,49-67).
ccattcggggctaacttga

SEQ ID NO: 242757 - DNA, 19 bp, Homo sapiens
  siRNA target sequence for GPR111 (NM_153839.1,66-84).
gactctcatccatacaaga

SEQ ID NO: 242758 - DNA, 19 bp, Homo sapiens
  siRNA target sequence for GPR111 (NM_153839.1,104-122).
gcaagcttctcttgacaaa

SEQ ID NO: 242759 - DNA, 19 bp, Homo sapiens
  siRNA target sequence for GPR111 (NM_153839.1,185-203).
gggttcagttggatcaact

SEQ ID NO: 242760 - DNA, 19 bp, Homo sapiens
  siRNA target sequence for GPR111 (NM_153839.1,275-293).
gggctgcaagcaaaagcaa

SEQ ID NO: 242761 - DNA, 19 bp, Homo sapiens
  siRNA target sequence for GPR111 (NM_153839.1,345-363).
ctactcccagtgtactcaa

SEQ ID NO: 242762 - DNA, 19 bp, Homo sapiens
  siRNA target sequence for GPR111 (NM_153839.1,433-451).
gacacctgccagactctta

SEQ ID NO: 242763 - DNA, 19 bp, Homo sapiens
  siRNA target sequence for GPR111 (NM_153839.1,446-464).
ctcttaatgccctcaacat

SEQ ID NO: 242764 - DNA, 19 bp, Homo sapiens
  siRNA target sequence for GPR111 (NM_153839.1,448-466).
cttaatgccctcaacatct

SEQ ID NO: 242765 - DNA, 19 bp, Homo sapiens
  siRNA target sequence for GPR111 (NM_153839.1,471-489).
ggaggattcacgtttggtt

SEQ ID NO: 242766 - DNA, 19 bp, Homo sapiens
  siRNA target sequence for GPR111 (NM_153839.1,490-508).
cagccatttgaagacaata

SEQ ID NO: 242767 - DNA, 19 bp, Homo sapiens
  siRNA target sequence for GPR111 (NM_153839.1,492-510).
gccatttgaagacaatata

SEQ ID NO: 242768 - DNA, 19 bp, Homo sapiens
  siRNA target sequence for GPR111 (NM_153839.1,534-552).
gtctgagaccataacagat

SEQ ID NO: 242769 - DNA, 19 bp, Homo sapiens
  siRNA target sequence for GPR111 (NM_153839.1,536-554).
ctgagaccataacagatat

SEQ ID NO: 242770 - DNA, 19 bp, Homo sapiens
  siRNA target sequence for GPR111 (NM_153839.1,538-556).
gagaccataacagatatgt

SEQ ID NO: 242771 - DNA, 19 bp, Homo sapiens
  siRNA target sequence for GPR111 (NM_153839.1,550-568).
gatatgttgctacaaaagt

SEQ ID NO: 242772 - DNA, 19 bp, Homo sapiens
  siRNA target sequence for GPR111 (NM_153839.1,648-666).
gctcttacacaacatatca

SEQ ID NO: 242773 - DNA, 19 bp, Homo sapiens
  siRNA target sequence for GPR111 (NM_153839.1,683-701).
gtgttgatgaggcaaagat

SEQ ID NO: 242774 - DNA, 19 bp, Homo sapiens
  siRNA target sequence for GPR111 (NM_153839.1,721-739).
gccaaccacattcttaaca

SEQ ID NO: 242775 - DNA, 19 bp, Homo sapiens
  siRNA target sequence for GPR111 (NM_153839.1,750-768).
ctccaactggactttcatt

SEQ ID NO: 242776 - DNA, 19 bp, Homo sapiens
  siRNA target sequence for GPR111 (NM_153839.1,772-790).
gacagaaacagcagctata

SEQ ID NO: 242777 - DNA, 19 bp, Homo sapiens
  siRNA target sequence for GPR111 (NM_153839.1,825-843).
gctattcatagataaacat

SEQ ID NO: 242778 - DNA, 19 bp, Homo sapiens
  siRNA target sequence for GPR111 (NM_153839.1,859-877).
gatgtcttcattcatacta

SEQ ID NO: 242779 - DNA, 19 bp, Homo sapiens
  siRNA target sequence for GPR111 (NM_153839.1,884-902).
ccaccatatctggagataa

SEQ ID NO: 242780 - DNA, 19 bp, Homo sapiens
  siRNA target sequence for GPR111 (NM_153839.1,969-987).
gttgatcagcagagatgaa

SEQ ID NO: 242781 - DNA, 19 bp, Homo sapiens
  siRNA target sequence for GPR111 (NM_153839.1,1037-1055).
ctattggggctattttgga

SEQ ID NO: 242782 - DNA, 19 bp, Homo sapiens
  siRNA target sequence for GPR111 (NM_153839.1,1247-1265).
cccagcaagctgtttgcaa

SEQ ID NO: 242783 - DNA, 19 bp, Homo sapiens
  siRNA target sequence for GPR111 (NM_153839.1,1249-1267).
cagcaagctgtttgcaaat

SEQ ID NO: 242784 - DNA, 19 bp, Homo sapiens
  siRNA target sequence for GPR111 (NM_153839.1,1317-1335).
catcttagagagtctgatt

SEQ ID NO: 242785 - DNA, 19 bp, Homo sapiens
  siRNA target sequence for GPR111 (NM_153839.1,1354-1372).
gtaggcctgggcatttcta

SEQ ID NO: 242786 - DNA, 19 bp, Homo sapiens
  siRNA target sequence for GPR111 (NM_153839.1,1360-1378).
ctgggcatttctatttgca

SEQ ID NO: 242787 - DNA, 19 bp, Homo sapiens
  siRNA target sequence for GPR111 (NM_153839.1,1450-1468).
cgccatgtgtgcattgtta

SEQ ID NO: 242788 - DNA, 19 bp, Homo sapiens
  siRNA target sequence for GPR111 (NM_153839.1,1453-1471).
catgtgtgcattgttaaca

SEQ ID NO: 242789 - DNA, 19 bp, Homo sapiens
  siRNA target sequence for GPR111 (NM_153839.1,1553-1571).
gtgtggcagccacattttt

SEQ ID NO: 242790 - DNA, 19 bp, Homo sapiens
  siRNA target sequence for GPR111 (NM_153839.1,1838-1856).
ccatcgtggtagtaaacct

SEQ ID NO: 242791 - DNA, 19 bp, Homo sapiens
  siRNA target sequence for GPR111 (NM_153839.1,1864-1882).
gtcacactggtgattgtca

SEQ ID NO: 242792 - DNA, 19 bp, Homo sapiens
  siRNA target sequence for GPR111 (NM_153839.1,1921-1939).
gaagtgagagccattgtga

SEQ ID NO: 242793 - DNA, 19 bp, Homo sapiens
  siRNA target sequence for GPR112 (NM_153834.1,3-21).
ggatgacaactcaaggtat

SEQ ID NO: 242794 - DNA, 19 bp, Homo sapiens
  siRNA target sequence for GPR112 (NM_153834.1,23-41).
ggatggccttctcttatat

SEQ ID NO: 242795 - DNA, 19 bp, Homo sapiens
  siRNA target sequence for GPR112 (NM_153834.1,27-45).
ggccttctcttatattact

SEQ ID NO: 242796 - DNA, 19 bp, Homo sapiens
  siRNA target sequence for GPR112 (NM_153834.1,28-46).
gccttctcttatattacta

SEQ ID NO: 242797 - DNA, 19 bp, Homo sapiens
  siRNA target sequence for GPR112 (NM_153834.1,57-75).
cctgggcagagaagacata

SEQ ID NO: 242798 - DNA, 19 bp, Homo sapiens
  siRNA target sequence for GPR112 (NM_153834.1,92-110).
gagaccatcagcagctaat

SEQ ID NO: 242799 - DNA, 19 bp, Homo sapiens
  siRNA target sequence for GPR112 (NM_153834.1,96-114).
ccatcagcagctaatacta

SEQ ID NO: 242800 - DNA, 19 bp, Homo sapiens
  siRNA target sequence for GPR112 (NM_153834.1,100-118).
cagcagctaatactataca

SEQ ID NO: 242801 - DNA, 19 bp, Homo sapiens
  siRNA target sequence for GPR112 (NM_153834.1,102-120).
gcagctaatactatacaga

SEQ ID NO: 242802 - DNA, 19 bp, Homo sapiens
  siRNA target sequence for GPR112 (NM_153834.1,103-121).
cagctaatactatacagat

SEQ ID NO: 242803 - DNA, 19 bp, Homo sapiens
  siRNA target sequence for GPR112 (NM_153834.1,143-161).
gtcaccacctggcttcatt

SEQ ID NO: 242804 - DNA, 19 bp, Homo sapiens
  siRNA target sequence for GPR112 (NM_153834.1,194-212).
gtgtgaagggcaaattaga

SEQ ID NO: 242805 - DNA, 19 bp, Homo sapiens
  siRNA target sequence for GPR112 (NM_153834.1,314-332).
gcagcgaggttaaaagcat

SEQ ID NO: 242806 - DNA, 19 bp, Homo sapiens
  siRNA target sequence for GPR112 (NM_153834.1,346-364).
cctggcagcttgtactact

SEQ ID NO: 242807 - DNA, 19 bp, Homo sapiens
  siRNA target sequence for GPR112 (NM_153834.1,353-371).
gcttgtactactttcaact

SEQ ID NO: 242808 - DNA, 19 bp, Homo sapiens
  siRNA target sequence for GPR112 (NM_153834.1,378-396).
ccacatcctggaaaacgaa

SEQ ID NO: 242809 - DNA, 19 bp, Homo sapiens
  siRNA target sequence for GPR112 (NM_153834.1,410-428).
gtttagatggaaatatagt

SEQ ID NO: 242810 - DNA, 19 bp, Homo sapiens
  siRNA target sequence for GPR112 (NM_153834.1,489-507).
gcgctgcgttcctgaaaat

SEQ ID NO: 242811 - DNA, 19 bp, Homo sapiens
  siRNA target sequence for GPR112 (NM_153834.1,495-513).
cgttcctgaaaatatgaca

SEQ ID NO: 242812 - DNA, 19 bp, Homo sapiens
  siRNA target sequence for GPR112 (NM_153834.1,533-551).
ctgtttcacaacagataga

SEQ ID NO: 242813 - DNA, 19 bp, Homo sapiens
  siRNA target sequence for GPR112 (NM_153834.1,535-553).
gtttcacaacagatagata

SEQ ID NO: 242814 - DNA, 19 bp, Homo sapiens
  siRNA target sequence for GPR112 (NM_153834.1,558-576).
cactccatcccaaattact

SEQ ID NO: 242815 - DNA, 19 bp, Homo sapiens
  siRNA target sequence for GPR112 (NM_153834.1,618-636).
gtctcaaagcatacctata

SEQ ID NO: 242816 - DNA, 19 bp, Homo sapiens
  siRNA target sequence for GPR112 (NM_153834.1,620-638).
ctcaaagcatacctatatt

SEQ ID NO: 242817 - DNA, 19 bp, Homo sapiens
  siRNA target sequence for GPR112 (NM_153834.1,631-649).
cctatatttgcaactgatt

SEQ ID NO: 242818 - DNA, 19 bp, Homo sapiens
  siRNA target sequence for GPR112 (NM_153834.1,680-698).
ctccacctctggaaacaat

SEQ ID NO: 242819 - DNA, 19 bp, Homo sapiens
  siRNA target sequence for GPR112 (NM_153834.1,754-772).
gatgttttatcaacttcat

SEQ ID NO: 242820 - DNA, 19 bp, Homo sapiens
  siRNA target sequence for GPR112 (NM_153834.1,782-800).
ctctgcctacccagagtat

SEQ ID NO: 242821 - DNA, 19 bp, Homo sapiens
  siRNA target sequence for GPR112 (NM_153834.1,787-805).
cctacccagagtatatcca

SEQ ID NO: 242822 - DNA, 19 bp, Homo sapiens
  siRNA target sequence for GPR112 (NM_153834.1,788-806).
ctacccagagtatatccat

SEQ ID NO: 242823 - DNA, 19 bp, Homo sapiens
  siRNA target sequence for GPR112 (NM_153834.1,795-813).
gagtatatccatagacaat

SEQ ID NO: 242824 - DNA, 19 bp, Homo sapiens
  siRNA target sequence for GPR112 (NM_153834.1,815-833).
ctaccaattccatgaaaaa

SEQ ID NO: 242825 - DNA, 19 bp, Homo sapiens
  siRNA target sequence for GPR112 (NM_153834.1,883-901).
gccatggctactgaaatct

SEQ ID NO: 242826 - DNA, 19 bp, Homo sapiens
  siRNA target sequence for GPR112 (NM_153834.1,907-925).
ccacctacaccttctaatt

SEQ ID NO: 242827 - DNA, 19 bp, Homo sapiens
  siRNA target sequence for GPR112 (NM_153834.1,951-969).
gaattcagttgtatctaca

SEQ ID NO: 242828 - DNA, 19 bp, Homo sapiens
  siRNA target sequence for GPR112 (NM_153834.1,986-1004).
ctcagtcggctgttacgaa

SEQ ID NO: 242829 - DNA, 19 bp, Homo sapiens
  siRNA target sequence for GPR112 (NM_153834.1,1030-1048).
gagtcaacatctatgtcta

SEQ ID NO: 242830 - DNA, 19 bp, Homo sapiens
  siRNA target sequence for GPR112 (NM_153834.1,1108-1126).
ggccaggagttcattgaat

SEQ ID NO: 242831 - DNA, 19 bp, Homo sapiens
  siRNA target sequence for GPR112 (NM_153834.1,1111-1129).
caggagttcattgaatcta

SEQ ID NO: 242832 - DNA, 19 bp, Homo sapiens
  siRNA target sequence for GPR112 (NM_153834.1,1113-1131).
ggagttcattgaatctaca

SEQ ID NO: 242833 - DNA, 19 bp, Homo sapiens
  siRNA target sequence for GPR112 (NM_153834.1,1137-1155).
cggaactgtaccttggttt

SEQ ID NO: 242834 - DNA, 19 bp, Homo sapiens
  siRNA target sequence for GPR112 (NM_153834.1,1138-1156).
ggaactgtaccttggttta

SEQ ID NO: 242835 - DNA, 19 bp, Homo sapiens
  siRNA target sequence for GPR112 (NM_153834.1,1152-1170).
gtttacagtggaaaagact

SEQ ID NO: 242836 - DNA, 19 bp, Homo sapiens
  siRNA target sequence for GPR112 (NM_153834.1,1238-1256).
ctgctccagtagattctgt

SEQ ID NO: 242837 - DNA, 19 bp, Homo sapiens
  siRNA target sequence for GPR112 (NM_153834.1,1240-1258).
gctccagtagattctgtat

SEQ ID NO: 242838 - DNA, 19 bp, Homo sapiens
  siRNA target sequence for GPR112 (NM_153834.1,1282-1300).
ccattggcaacaactgata

SEQ ID NO: 242839 - DNA, 19 bp, Homo sapiens
  siRNA target sequence for GPR112 (NM_153834.1,1283-1301).
cattggcaacaactgatat

SEQ ID NO: 242840 - DNA, 19 bp, Homo sapiens
  siRNA target sequence for GPR112 (NM_153834.1,1309-1327).
gcatttacagtccattcat

SEQ ID NO: 242841 - DNA, 19 bp, Homo sapiens
  siRNA target sequence for GPR112 (NM_153834.1,1336-1354).
ccaactaggcttattgaga

SEQ ID NO: 242842 - DNA, 19 bp, Homo sapiens
  siRNA target sequence for GPR112 (NM_153834.1,1365-1383).
cccaaggacagctgaaaca

SEQ ID NO: 242843 - DNA, 19 bp, Homo sapiens
  siRNA target sequence for GPR112 (NM_153834.1,1375-1393).
gctgaaacagaattgacat

SEQ ID NO: 242844 - DNA, 19 bp, Homo sapiens
  siRNA target sequence for GPR112 (NM_153834.1,1426-1444).
gtggaagatgccatgtcta

SEQ ID NO: 242845 - DNA, 19 bp, Homo sapiens
  siRNA target sequence for GPR112 (NM_153834.1,1429-1447).
gaagatgccatgtctactt

SEQ ID NO: 242846 - DNA, 19 bp, Homo sapiens
  siRNA target sequence for GPR112 (NM_153834.1,1513-1531).
gagagtgtacagacagtta

SEQ ID NO: 242847 - DNA, 19 bp, Homo sapiens
  siRNA target sequence for GPR112 (NM_153834.1,1517-1535).
gtgtacagacagttattga

SEQ ID NO: 242848 - DNA, 19 bp, Homo sapiens
  siRNA target sequence for GPR112 (NM_153834.1,1557-1575).
cttaactcctgaaatcaca

SEQ ID NO: 242849 - DNA, 19 bp, Homo sapiens
  siRNA target sequence for GPR112 (NM_153834.1,1654-1672).
gatggacacttgcttactt

SEQ ID NO: 242850 - DNA, 19 bp, Homo sapiens
  siRNA target sequence for GPR112 (NM_153834.1,1658-1676).
gacacttgcttactttgat

SEQ ID NO: 242851 - DNA, 19 bp, Homo sapiens
  siRNA target sequence for GPR112 (NM_153834.1,1796-1814).
ccctgctggcatctatgaa

SEQ ID NO: 242852 - DNA, 19 bp, Homo sapiens
  siRNA target sequence for GPR112 (NM_153834.1,1861-1879).
gcatttcatgagaatacta

SEQ ID NO: 242853 - DNA, 19 bp, Homo sapiens
  siRNA target sequence for GPR112 (NM_153834.1,1963-1981).
gctactacagccagatata

SEQ ID NO: 242854 - DNA, 19 bp, Homo sapiens
  siRNA target sequence for GPR112 (NM_153834.1,2038-2056).
ggaaccacatccataacca

SEQ ID NO: 242855 - DNA, 19 bp, Homo sapiens
  siRNA target sequence for GPR112 (NM_153834.1,2042-2060).
ccacatccataaccaatat

SEQ ID NO: 242856 - DNA, 19 bp, Homo sapiens
  siRNA target sequence for GPR112 (NM_153834.1,2055-2073).
caatatgcctgaatttaaa

SEQ ID NO: 242857 - DNA, 19 bp, Homo sapiens
  siRNA target sequence for GPR112 (NM_153834.1,2117-2135).
ctgcaaatgaacttccttt

SEQ ID NO: 242858 - DNA, 19 bp, Homo sapiens
  siRNA target sequence for GPR112 (NM_153834.1,2273-2291).
caacgacccctgtaccaaa

SEQ ID NO: 242859 - DNA, 19 bp, Homo sapiens
  siRNA target sequence for GPR112 (NM_153834.1,2338-2356).
gcaacttcccattatctta

SEQ ID NO: 242860 - DNA, 19 bp, Homo sapiens
  siRNA target sequence for GPR112 (NM_153834.1,2353-2371).
cttatgagaaaatcaacta

SEQ ID NO: 242861 - DNA, 19 bp, Homo sapiens
  siRNA target sequence for GPR112 (NM_153834.1,2358-2376).
gagaaaatcaactatagca

SEQ ID NO: 242862 - DNA, 19 bp, Homo sapiens
  siRNA target sequence for GPR112 (NM_153834.1,2382-2400).
ggctgaggtttctccattt

SEQ ID NO: 242863 - DNA, 19 bp, Homo sapiens
  siRNA target sequence for GPR112 (NM_153834.1,2470-2488).
cctgatatagaaaagctaa

SEQ ID NO: 242864 - DNA, 19 bp, Homo sapiens
  siRNA target sequence for GPR112 (NM_153834.1,2484-2502).
gctaagtaccccattggat

SEQ ID NO: 242865 - DNA, 19 bp, Homo sapiens
  siRNA target sequence for GPR112 (NM_153834.1,2485-2503).
ctaagtaccccattggata

SEQ ID NO: 242866 - DNA, 19 bp, Homo sapiens
  siRNA target sequence for GPR112 (NM_153834.1,2489-2507).
gtaccccattggataataa

SEQ ID NO: 242867 - DNA, 19 bp, Homo sapiens
  siRNA target sequence for GPR112 (NM_153834.1,2561-2579).
ccacacctaggagttcata

SEQ ID NO: 242868 - DNA, 19 bp, Homo sapiens
  siRNA target sequence for GPR112 (NM_153834.1,2771-2789).
cgtccttgtctgatggtat

SEQ ID NO: 242869 - DNA, 19 bp, Homo sapiens
  siRNA target sequence for GPR112 (NM_153834.1,2775-2793).
cttgtctgatggtatctta

SEQ ID NO: 242870 - DNA, 19 bp, Homo sapiens
  siRNA target sequence for GPR112 (NM_153834.1,2829-2847).
ccctgtgcctgttactcat

SEQ ID NO: 242871 - DNA, 19 bp, Homo sapiens
  siRNA target sequence for GPR112 (NM_153834.1,2833-2851).
gtgcctgttactcatatgt

SEQ ID NO: 242872 - DNA, 19 bp, Homo sapiens
  siRNA target sequence for GPR112 (NM_153834.1,2836-2854).
cctgttactcatatgttct

SEQ ID NO: 242873 - DNA, 19 bp, Homo sapiens
  siRNA target sequence for GPR112 (NM_153834.1,2904-2922).
catgtctgagccttctaca

SEQ ID NO: 242874 - DNA, 19 bp, Homo sapiens
  siRNA target sequence for GPR112 (NM_153834.1,3019-3037).
gcttccacaaccattgtta

SEQ ID NO: 242875 - DNA, 19 bp, Homo sapiens
  siRNA target sequence for GPR112 (NM_153834.1,3023-3041).
ccacaaccattgttattgt

SEQ ID NO: 242876 - DNA, 19 bp, Homo sapiens
  siRNA target sequence for GPR112 (NM_153834.1,3044-3062).
ctacccatggagacttgat

SEQ ID NO: 242877 - DNA, 19 bp, Homo sapiens
  siRNA target sequence for GPR112 (NM_153834.1,3049-3067).
catggagacttgattcgta

SEQ ID NO: 242878 - DNA, 19 bp, Homo sapiens
  siRNA target sequence for GPR112 (NM_153834.1,3197-3215).
ctacctcagttgatacagt

SEQ ID NO: 242879 - DNA, 19 bp, Homo sapiens
  siRNA target sequence for GPR112 (NM_153834.1,3313-3331).
gaagcaactcaaccaatat

SEQ ID NO: 242880 - DNA, 19 bp, Homo sapiens
  siRNA target sequence for GPR112 (NM_153834.1,3334-3352).
caagtagaggagacttcta

SEQ ID NO: 242881 - DNA, 19 bp, Homo sapiens
  siRNA target sequence for GPR112 (NM_153834.1,3420-3438).
cacagagacctctgttgtt

SEQ ID NO: 242882 - DNA, 19 bp, Homo sapiens
  siRNA target sequence for GPR112 (NM_153834.1,3466-3484).
gccaataagttgactactt

SEQ ID NO: 242883 - DNA, 19 bp, Homo sapiens
  siRNA target sequence for GPR112 (NM_153834.1,3468-3486).
caataagttgactacttca

SEQ ID NO: 242884 - DNA, 19 bp, Homo sapiens
  siRNA target sequence for GPR112 (NM_153834.1,3487-3505).
gtaaacagtcacatttctt

SEQ ID NO: 242885 - DNA, 19 bp, Homo sapiens
  siRNA target sequence for GPR112 (NM_153834.1,3492-3510).
cagtcacatttcttcatct

SEQ ID NO: 242886 - DNA, 19 bp, Homo sapiens
  siRNA target sequence for GPR112 (NM_153834.1,3634-3652).
gaaatgtccccatcaaaga

SEQ ID NO: 242887 - DNA, 19 bp, Homo sapiens
  siRNA target sequence for GPR112 (NM_153834.1,3675-3693).
gggtactccatctttggaa

SEQ ID NO: 242888 - DNA, 19 bp, Homo sapiens
  siRNA target sequence for GPR112 (NM_153834.1,3676-3694).
ggtactccatctttggaaa

SEQ ID NO: 242889 - DNA, 19 bp, Homo sapiens
  siRNA target sequence for GPR112 (NM_153834.1,3771-3789).
gactccctctgatggaaat

SEQ ID NO: 242890 - DNA, 19 bp, Homo sapiens
  siRNA target sequence for GPR112 (NM_153834.1,3773-3791).
ctccctctgatggaaattt

SEQ ID NO: 242891 - DNA, 19 bp, Homo sapiens
  siRNA target sequence for GPR112 (NM_153834.1,3829-3847).
ccaaccttgacctcaagta

SEQ ID NO: 242892 - DNA, 19 bp, Homo sapiens
  siRNA target sequence for GPR112 (NM_153834.1,3830-3848).
caaccttgacctcaagtaa

SEQ ID NO: 242893 - DNA, 19 bp, Homo sapiens
  siRNA target sequence for GPR112 (NM_153834.1,3916-3934).
ctgacaatcaccacttttt

SEQ ID NO: 242894 - DNA, 19 bp, Homo sapiens
  siRNA target sequence for GPR112 (NM_153834.1,3957-3975).
gagtgcccttccagcatat

SEQ ID NO: 242895 - DNA, 19 bp, Homo sapiens
  siRNA target sequence for GPR112 (NM_153834.1,3988-4006).
gtggaaatgatagtaaact

SEQ ID NO: 242896 - DNA, 19 bp, Homo sapiens
  siRNA target sequence for GPR112 (NM_153834.1,4000-4018).
gtaaactccacctatgtga

SEQ ID NO: 242897 - DNA, 19 bp, Homo sapiens
  siRNA target sequence for GPR112 (NM_153834.1,4037-4055).
gccaggatacttcatttgt

SEQ ID NO: 242898 - DNA, 19 bp, Homo sapiens
  siRNA target sequence for GPR112 (NM_153834.1,4038-4056).
ccaggatacttcatttgta

SEQ ID NO: 242899 - DNA, 19 bp, Homo sapiens
  siRNA target sequence for GPR112 (NM_153834.1,4079-4097).
caaggatatcaaatcctat

SEQ ID NO: 242900 - DNA, 19 bp, Homo sapiens
  siRNA target sequence for GPR112 (NM_153834.1,4088-4106).
caaatcctatggacatcaa

SEQ ID NO: 242901 - DNA, 19 bp, Homo sapiens
  siRNA target sequence for GPR112 (NM_153834.1,4093-4111).
cctatggacatcaatacaa

SEQ ID NO: 242902 - DNA, 19 bp, Homo sapiens
  siRNA target sequence for GPR112 (NM_153834.1,4214-4232).
ccacagctggactatataa

SEQ ID NO: 242903 - DNA, 19 bp, Homo sapiens
  siRNA target sequence for GPR112 (NM_153834.1,4215-4233).
cacagctggactatataat

SEQ ID NO: 242904 - DNA, 19 bp, Homo sapiens
  siRNA target sequence for GPR112 (NM_153834.1,4217-4235).
cagctggactatataatga

SEQ ID NO: 242905 - DNA, 19 bp, Homo sapiens
  siRNA target sequence for GPR112 (NM_153834.1,4249-4267).
ctctccgacaggatcacta

SEQ ID NO: 242906 - DNA, 19 bp, Homo sapiens
  siRNA target sequence for GPR112 (NM_153834.1,4320-4338).
ggcaacgtccactcctatt

SEQ ID NO: 242907 - DNA, 19 bp, Homo sapiens
  siRNA target sequence for GPR112 (NM_153834.1,4321-4339).
gcaacgtccactcctattt

SEQ ID NO: 242908 - DNA, 19 bp, Homo sapiens
  siRNA target sequence for GPR112 (NM_153834.1,4322-4340).
caacgtccactcctattta

SEQ ID NO: 242909 - DNA, 19 bp, Homo sapiens
  siRNA target sequence for GPR112 (NM_153834.1,4325-4343).
cgtccactcctatttacca

SEQ ID NO: 242910 - DNA, 19 bp, Homo sapiens
  siRNA target sequence for GPR112 (NM_153834.1,4394-4412).
ctgacactcccccaatagt

SEQ ID NO: 242911 - DNA, 19 bp, Homo sapiens
  siRNA target sequence for GPR112 (NM_153834.1,4398-4416).
cactcccccaatagtgata

SEQ ID NO: 242912 - DNA, 19 bp, Homo sapiens
  siRNA target sequence for GPR112 (NM_153834.1,4403-4421).
ccccaatagtgataactaa

SEQ ID NO: 242913 - DNA, 19 bp, Homo sapiens
  siRNA target sequence for GPR112 (NM_153834.1,4404-4422).
cccaatagtgataactaaa

SEQ ID NO: 242914 - DNA, 19 bp, Homo sapiens
  siRNA target sequence for GPR112 (NM_153834.1,4411-4429).
gtgataactaaatcttcta

SEQ ID NO: 242915 - DNA, 19 bp, Homo sapiens
  siRNA target sequence for GPR112 (NM_153834.1,4413-4431).
gataactaaatcttctaaa

SEQ ID NO: 242916 - DNA, 19 bp, Homo sapiens
  siRNA target sequence for GPR112 (NM_153834.1,4485-4503).
gtctgagatgtcctcaata

SEQ ID NO: 242917 - DNA, 19 bp, Homo sapiens
  siRNA target sequence for GPR112 (NM_153834.1,4553-4571).
ccacaagagttgggttatt

SEQ ID NO: 242918 - DNA, 19 bp, Homo sapiens
  siRNA target sequence for GPR112 (NM_153834.1,4561-4579).
gttgggttattctctactt

SEQ ID NO: 242919 - DNA, 19 bp, Homo sapiens
  siRNA target sequence for GPR112 (NM_153834.1,4565-4583).
ggttattctctactttatt

SEQ ID NO: 242920 - DNA, 19 bp, Homo sapiens
  siRNA target sequence for GPR112 (NM_153834.1,4613-4631).
ccatgcaaacatctacatt

SEQ ID NO: 242921 - DNA, 19 bp, Homo sapiens
  siRNA target sequence for GPR112 (NM_153834.1,4617-4635).
gcaaacatctacattggat

SEQ ID NO: 242922 - DNA, 19 bp, Homo sapiens
  siRNA target sequence for GPR112 (NM_153834.1,4633-4651).
gatgtcacacctgtgatat

SEQ ID NO: 242923 - DNA, 19 bp, Homo sapiens
  siRNA target sequence for GPR112 (NM_153834.1,4654-4672).
gctggggctacttcaaaaa

SEQ ID NO: 242924 - DNA, 19 bp, Homo sapiens
  siRNA target sequence for GPR112 (NM_153834.1,4690-4708).
gctttcactacagaaatga

SEQ ID NO: 242925 - DNA, 19 bp, Homo sapiens
  siRNA target sequence for GPR112 (NM_153834.1,4691-4709).
ctttcactacagaaatgat

SEQ ID NO: 242926 - DNA, 19 bp, Homo sapiens
  siRNA target sequence for GPR112 (NM_153834.1,4759-4777).
ccaactttgccctttgtaa

SEQ ID NO: 242927 - DNA, 19 bp, Homo sapiens
  siRNA target sequence for GPR112 (NM_153834.1,4933-4951).
gcagatgaggctacaactt

SEQ ID NO: 242928 - DNA, 19 bp, Homo sapiens
  siRNA target sequence for GPR112 (NM_153834.1,4956-4974).
catattatctgggattact

SEQ ID NO: 242929 - DNA, 19 bp, Homo sapiens
  siRNA target sequence for GPR112 (NM_153834.1,5008-5026).
ggggtagctctcacagata

SEQ ID NO: 242930 - DNA, 19 bp, Homo sapiens
  siRNA target sequence for GPR112 (NM_153834.1,5011-5029).
gtagctctcacagatactt

SEQ ID NO: 242931 - DNA, 19 bp, Homo sapiens
  siRNA target sequence for GPR112 (NM_153834.1,5066-5084).
ctactcatgcagatagtct

SEQ ID NO: 242932 - DNA, 19 bp, Homo sapiens
  siRNA target sequence for GPR112 (NM_153834.1,5074-5092).
gcagatagtctccatactt

SEQ ID NO: 242933 - DNA, 19 bp, Homo sapiens
  siRNA target sequence for GPR112 (NM_153834.1,5141-5159).
ctggacccacaaaaaatgt

SEQ ID NO: 242934 - DNA, 19 bp, Homo sapiens
  siRNA target sequence for GPR112 (NM_153834.1,5178-5196).
cttttcttctaatactaga

SEQ ID NO: 242935 - DNA, 19 bp, Homo sapiens
  siRNA target sequence for GPR112 (NM_153834.1,5220-5238).
gacttccttaacaaactat

SEQ ID NO: 242936 - DNA, 19 bp, Homo sapiens
  siRNA target sequence for GPR112 (NM_153834.1,5235-5253).
ctatgccacatctttgaat

SEQ ID NO: 242937 - DNA, 19 bp, Homo sapiens
  siRNA target sequence for GPR112 (NM_153834.1,5290-5308).
gcaactctaccctctttga

SEQ ID NO: 242938 - DNA, 19 bp, Homo sapiens
  siRNA target sequence for GPR112 (NM_153834.1,5398-5416).
ccagttctgggaacaagaa

SEQ ID NO: 242939 - DNA, 19 bp, Homo sapiens
  siRNA target sequence for GPR112 (NM_153834.1,5434-5452).
caacctctgcttatgactt

SEQ ID NO: 242940 - DNA, 19 bp, Homo sapiens
  siRNA target sequence for GPR112 (NM_153834.1,5473-5491).
gaaggttctcagtttccaa

SEQ ID NO: 242941 - DNA, 19 bp, Homo sapiens
  siRNA target sequence for GPR112 (NM_153834.1,5488-5506).
ccaatttccaccactatta

SEQ ID NO: 242942 - DNA, 19 bp, Homo sapiens
  siRNA target sequence for GPR112 (NM_153834.1,5489-5507).
caatttccaccactattaa

SEQ ID NO: 242943 - DNA, 19 bp, Homo sapiens
  siRNA target sequence for GPR112 (NM_153834.1,5509-5527).
gtacctacatccaatgaga

SEQ ID NO: 242944 - DNA, 19 bp, Homo sapiens
  siRNA target sequence for GPR112 (NM_153834.1,5554-5572).
cctgggcctttgtcaacat

SEQ ID NO: 242945 - DNA, 19 bp, Homo sapiens
  siRNA target sequence for GPR112 (NM_153834.1,5580-5598).
ctctcagactggtctagta

SEQ ID NO: 242946 - DNA, 19 bp, Homo sapiens
  siRNA target sequence for GPR112 (NM_153834.1,5584-5602).
cagactggtctagtatcta

SEQ ID NO: 242947 - DNA, 19 bp, Homo sapiens
  siRNA target sequence for GPR112 (NM_153834.1,5586-5604).
gactggtctagtatctaaa

SEQ ID NO: 242948 - DNA, 19 bp, Homo sapiens
  siRNA target sequence for GPR112 (NM_153834.1,5588-5606).
ctggtctagtatctaaaga

SEQ ID NO: 242949 - DNA, 19 bp, Homo sapiens
  siRNA target sequence for GPR112 (NM_153834.1,5614-5632).
gcaatgtcatcaattccta

SEQ ID NO: 242950 - DNA, 19 bp, Homo sapiens
  siRNA target sequence for GPR112 (NM_153834.1,5665-5683).
gagaacccttcattatcaa

SEQ ID NO: 242951 - DNA, 19 bp, Homo sapiens
  siRNA target sequence for GPR112 (NM_153834.1,5667-5685).
gaacccttcattatcaaca

SEQ ID NO: 242952 - DNA, 19 bp, Homo sapiens
  siRNA target sequence for GPR112 (NM_153834.1,5705-5723).
ccacattggctgacgttaa

SEQ ID NO: 242953 - DNA, 19 bp, Homo sapiens
  siRNA target sequence for GPR112 (NM_153834.1,5714-5732).
ctgacgttaagcacacatt

SEQ ID NO: 242954 - DNA, 19 bp, Homo sapiens
  siRNA target sequence for GPR112 (NM_153834.1,5762-5780).
ggaccacactcccatcaat

SEQ ID NO: 242955 - DNA, 19 bp, Homo sapiens
  siRNA target sequence for GPR112 (NM_153834.1,5763-5781).
gaccacactcccatcaatt

SEQ ID NO: 242956 - DNA, 19 bp, Homo sapiens
  siRNA target sequence for GPR112 (NM_153834.1,5793-5811).
cacttcaggatctgtaatt

SEQ ID NO: 242957 - DNA, 19 bp, Homo sapiens
  siRNA target sequence for GPR112 (NM_153834.1,5829-5847).
gacatggctcttatctagt

SEQ ID NO: 242958 - DNA, 19 bp, Homo sapiens
  siRNA target sequence for GPR112 (NM_153834.1,5859-5877).
ctcccctccggcaactgta

SEQ ID NO: 242959 - DNA, 19 bp, Homo sapiens
  siRNA target sequence for GPR112 (NM_153834.1,5862-5880).
ccctccggcaactgtatct

SEQ ID NO: 242960 - DNA, 19 bp, Homo sapiens
  siRNA target sequence for GPR112 (NM_153834.1,5863-5881).
cctccggcaactgtatcta

SEQ ID NO: 242961 - DNA, 19 bp, Homo sapiens
  siRNA target sequence for GPR112 (NM_153834.1,5879-5897).
ctaatgcccctcatgttat

SEQ ID NO: 242962 - DNA, 19 bp, Homo sapiens
  siRNA target sequence for GPR112 (NM_153834.1,5906-5924).
ctacagtagaggtgtcaaa

SEQ ID NO: 242963 - DNA, 19 bp, Homo sapiens
  siRNA target sequence for GPR112 (NM_153834.1,5914-5932).
gaggtgtcaaaatcaacat

SEQ ID NO: 242964 - DNA, 19 bp, Homo sapiens
  siRNA target sequence for GPR112 (NM_153834.1,5935-5953).
ctgacatctgacatgatat

SEQ ID NO: 242965 - DNA, 19 bp, Homo sapiens
  siRNA target sequence for GPR112 (NM_153834.1,5937-5955).
gacatctgacatgatatca

SEQ ID NO: 242966 - DNA, 19 bp, Homo sapiens
  siRNA target sequence for GPR112 (NM_153834.1,5954-5972).
cagcgcacccattcactaa

SEQ ID NO: 242967 - DNA, 19 bp, Homo sapiens
  siRNA target sequence for GPR112 (NM_153834.1,5956-5974).
gcgcacccattcactaact

SEQ ID NO: 242968 - DNA, 19 bp, Homo sapiens
  siRNA target sequence for GPR112 (NM_153834.1,5962-5980).
ccattcactaacttgacaa

SEQ ID NO: 242969 - DNA, 19 bp, Homo sapiens
  siRNA target sequence for GPR112 (NM_153834.1,6006-6024).
catactcacccgaaccatt

SEQ ID NO: 242970 - DNA, 19 bp, Homo sapiens
  siRNA target sequence for GPR112 (NM_153834.1,6068-6086).
ctctccctatgtctataaa

SEQ ID NO: 242971 - DNA, 19 bp, Homo sapiens
  siRNA target sequence for GPR112 (NM_153834.1,6182-6200).
ccttcagcagaaagactat

SEQ ID NO: 242972 - DNA, 19 bp, Homo sapiens
  siRNA target sequence for GPR112 (NM_153834.1,6186-6204).
cagcagaaagactatgtca

SEQ ID NO: 242973 - DNA, 19 bp, Homo sapiens
  siRNA target sequence for GPR112 (NM_153834.1,6245-6263).
ctctgcctagctctacaat

SEQ ID NO: 242974 - DNA, 19 bp, Homo sapiens
  siRNA target sequence for GPR112 (NM_153834.1,6329-6347).
cactggactcccttctaaa

SEQ ID NO: 242975 - DNA, 19 bp, Homo sapiens
  siRNA target sequence for GPR112 (NM_153834.1,6333-6351).
ggactcccttctaaatata

SEQ ID NO: 242976 - DNA, 19 bp, Homo sapiens
  siRNA target sequence for GPR112 (NM_153834.1,6340-6358).
cttctaaatataatgacta

SEQ ID NO: 242977 - DNA, 19 bp, Homo sapiens
  siRNA target sequence for GPR112 (NM_153834.1,6343-6361).
ctaaatataatgactacta

SEQ ID NO: 242978 - DNA, 19 bp, Homo sapiens
  siRNA target sequence for GPR112 (NM_153834.1,6440-6458).
caatatcgtccttttttga

SEQ ID NO: 242979 - DNA, 19 bp, Homo sapiens
  siRNA target sequence for GPR112 (NM_153834.1,6582-6600).
gacctataagtggctatta

SEQ ID NO: 242980 - DNA, 19 bp, Homo sapiens
  siRNA target sequence for GPR112 (NM_153834.1,6619-6637).
gcccaaaccagatgcataa

SEQ ID NO: 242981 - DNA, 19 bp, Homo sapiens
  siRNA target sequence for GPR112 (NM_153834.1,6622-6640).
caaaccagatgcataaaaa

SEQ ID NO: 242982 - DNA, 19 bp, Homo sapiens
  siRNA target sequence for GPR112 (NM_153834.1,6655-6673).
gccacaagattctcaatca

SEQ ID NO: 242983 - DNA, 19 bp, Homo sapiens
  siRNA target sequence for GPR112 (NM_153834.1,6675-6693).
catcaacacgggcaaatct

SEQ ID NO: 242984 - DNA, 19 bp, Homo sapiens
  siRNA target sequence for GPR112 (NM_153834.1,6750-6768).
gattgtggatcttgctaat

SEQ ID NO: 242985 - DNA, 19 bp, Homo sapiens
  siRNA target sequence for GPR112 (NM_153834.1,6795-6813).
ggatgttgcagagcatatt

SEQ ID NO: 242986 - DNA, 19 bp, Homo sapiens
  siRNA target sequence for GPR112 (NM_153834.1,6892-6910).
caatgtgatgagataagta

SEQ ID NO: 242987 - DNA, 19 bp, Homo sapiens
  siRNA target sequence for GPR112 (NM_153834.1,6896-6914).
gtgatgagataagtatgaa

SEQ ID NO: 242988 - DNA, 19 bp, Homo sapiens
  siRNA target sequence for GPR112 (NM_153834.1,6915-6933).
cctaactcatgttatgtta

SEQ ID NO: 242989 - DNA, 19 bp, Homo sapiens
  siRNA target sequence for GPR112 (NM_153834.1,6934-6952).
caaataatcaacgttgttt

SEQ ID NO: 242990 - DNA, 19 bp, Homo sapiens
  siRNA target sequence for GPR112 (NM_153834.1,6945-6963).
cgttgttttggaaaagcaa

SEQ ID NO: 242991 - DNA, 19 bp, Homo sapiens
  siRNA target sequence for GPR112 (NM_153834.1,7046-7064).
ctgggcagatagcaaatct

SEQ ID NO: 242992 - DNA, 19 bp, Homo sapiens
  siRNA target sequence for GPR112 (NM_153834.1,7048-7066).
gggcagatagcaaatctga

SEQ ID NO: 242993 - DNA, 19 bp, Homo sapiens
  siRNA target sequence for GPR112 (NM_153834.1,7128-7146).
cagcattcactcctatgaa

SEQ ID NO: 242994 - DNA, 19 bp, Homo sapiens
  siRNA target sequence for GPR112 (NM_153834.1,7130-7148).
gcattcactcctatgaaga

SEQ ID NO: 242995 - DNA, 19 bp, Homo sapiens
  siRNA target sequence for GPR112 (NM_153834.1,7131-7149).
cattcactcctatgaagaa

SEQ ID NO: 242996 - DNA, 19 bp, Homo sapiens
  siRNA target sequence for GPR112 (NM_153834.1,7309-7327).
gccttttgggattttgaga

SEQ ID NO: 242997 - DNA, 19 bp, Homo sapiens
  siRNA target sequence for GPR112 (NM_153834.1,7310-7328).
ccttttgggattttgagaa

SEQ ID NO: 242998 - DNA, 19 bp, Homo sapiens
  siRNA target sequence for GPR112 (NM_153834.1,7336-7354).
ctgggtggatggaattcgt

SEQ ID NO: 242999 - DNA, 19 bp, Homo sapiens
  siRNA target sequence for GPR112 (NM_153834.1,7352-7370).
cgtcaggctgtaaagtaaa

SEQ ID NO: 243000 - DNA, 19 bp, Homo sapiens
  siRNA target sequence for GPR112 (NM_153834.1,7376-7394).
caaatgtaaattacacaat

SEQ ID NO: 243001 - DNA, 19 bp, Homo sapiens
  siRNA target sequence for GPR112 (NM_153834.1,7407-7425).
ccacctcacccattttgga

SEQ ID NO: 243002 - DNA, 19 bp, Homo sapiens
  siRNA target sequence for GPR112 (NM_153834.1,7415-7433).
cccattttggagtcttaat

SEQ ID NO: 243003 - DNA, 19 bp, Homo sapiens
  siRNA target sequence for GPR112 (NM_153834.1,7473-7491).
gatattagcgcttataaca

SEQ ID NO: 243004 - DNA, 19 bp, Homo sapiens
  siRNA target sequence for GPR112 (NM_153834.1,7528-7546).
gttgcagtggtgacataca

SEQ ID NO: 243005 - DNA, 19 bp, Homo sapiens
  siRNA target sequence for GPR112 (NM_153834.1,7534-7552).
gtggtgacatacatagctt

SEQ ID NO: 243006 - DNA, 19 bp, Homo sapiens
  siRNA target sequence for GPR112 (NM_153834.1,7537-7555).
gtgacatacatagctttta

SEQ ID NO: 243007 - DNA, 19 bp, Homo sapiens
  siRNA target sequence for GPR112 (NM_153834.1,7604-7622).
cactactgatgctaaacct

SEQ ID NO: 243008 - DNA, 19 bp, Homo sapiens
  siRNA target sequence for GPR112 (NM_153834.1,7611-7629).
gatgctaaacctggtattt

SEQ ID NO: 243009 - DNA, 19 bp, Homo sapiens
  siRNA target sequence for GPR112 (NM_153834.1,7615-7633).
ctaaacctggtatttttga

SEQ ID NO: 243010 - DNA, 19 bp, Homo sapiens
  siRNA target sequence for GPR112 (NM_153834.1,7684-7702).
gcagtggcacttcattact

SEQ ID NO: 243011 - DNA, 19 bp, Homo sapiens
  siRNA target sequence for GPR112 (NM_153834.1,7749-7767).
gtatttggctctagtcaaa

SEQ ID NO: 243012 - DNA, 19 bp, Homo sapiens
  siRNA target sequence for GPR112 (NM_153834.1,7820-7838).
ggggaatcccggctatcat

SEQ ID NO: 243013 - DNA, 19 bp, Homo sapiens
  siRNA target sequence for GPR112 (NM_153834.1,7898-7916).
cgtgttggattaaagatga

SEQ ID NO: 243014 - DNA, 19 bp, Homo sapiens
  siRNA target sequence for GPR112 (NM_153834.1,7904-7922).
ggattaaagatgattctat

SEQ ID NO: 243015 - DNA, 19 bp, Homo sapiens
  siRNA target sequence for GPR112 (NM_153834.1,7977-7995).
catgttctgcactgttctt

SEQ ID NO: 243016 - DNA, 19 bp, Homo sapiens
  siRNA target sequence for GPR112 (NM_153834.1,7980-7998).
gttctgcactgttcttgtt

SEQ ID NO: 243017 - DNA, 19 bp, Homo sapiens
  siRNA target sequence for GPR112 (NM_153834.1,7983-8001).
ctgcactgttcttgttcaa

SEQ ID NO: 243018 - DNA, 19 bp, Homo sapiens
  siRNA target sequence for GPR112 (NM_153834.1,7988-8006).
ctgttcttgttcaactgaa

SEQ ID NO: 243019 - DNA, 19 bp, Homo sapiens
  siRNA target sequence for GPR112 (NM_153834.1,8069-8087).
caatgagcctgacattctt

SEQ ID NO: 243020 - DNA, 19 bp, Homo sapiens
  siRNA target sequence for GPR112 (NM_153834.1,8073-8091).
gagcctgacattcttactt

SEQ ID NO: 243021 - DNA, 19 bp, Homo sapiens
  siRNA target sequence for GPR112 (NM_153834.1,8095-8113).
ctcacctgggggtttgcat

SEQ ID NO: 243022 - DNA, 19 bp, Homo sapiens
  siRNA target sequence for GPR112 (NM_153834.1,8103-8121).
ggggtttgcattttttgct

SEQ ID NO: 243023 - DNA, 19 bp, Homo sapiens
  siRNA target sequence for GPR112 (NM_153834.1,8154-8172).
gtttgccatttttaacact

SEQ ID NO: 243024 - DNA, 19 bp, Homo sapiens
  siRNA target sequence for GPR112 (NM_153834.1,8189-8207).
gccggtgtcagataaaggt

SEQ ID NO: 243025 - DNA, 19 bp, Homo sapiens
  siRNA target sequence for GPR112 (NM_153834.1,8190-8208).
ccggtgtcagataaaggtt

SEQ ID NO: 243026 - DNA, 19 bp, Homo sapiens
  siRNA target sequence for GPR112 (NM_153834.1,8197-8215).
cagataaaggttggatata

SEQ ID NO: 243027 - DNA, 19 bp, Homo sapiens
  siRNA target sequence for GPR112 (NM_153834.1,8278-8296).
gcaactagctccactttca

SEQ ID NO: 243028 - DNA, 19 bp, Homo sapiens
  siRNA target sequence for GPR112 (NM_153834.1,8279-8297).
caactagctccactttcaa

SEQ ID NO: 243029 - DNA, 19 bp, Homo sapiens
  siRNA target sequence for GPR112 (NM_153834.1,8285-8303).
gctccactttcaaatcttt

SEQ ID NO: 243030 - DNA, 19 bp, Homo sapiens
  siRNA target sequence for GPR112 (NM_153834.1,8286-8304).
ctccactttcaaatcttta

SEQ ID NO: 243031 - DNA, 19 bp, Homo sapiens
  siRNA target sequence for GPR112 (NM_153834.1,8321-8339).
caccttcagaaataagctt

SEQ ID NO: 243032 - DNA, 19 bp, Homo sapiens
  siRNA target sequence for GPR113 (NM_153835.1,27-45).
gctcctggccacaactctt

SEQ ID NO: 243033 - DNA, 19 bp, Homo sapiens
  siRNA target sequence for GPR113 (NM_153835.1,230-248).
ggcccaagggccagacaat

SEQ ID NO: 243034 - DNA, 19 bp, Homo sapiens
  siRNA target sequence for GPR113 (NM_153835.1,232-250).
cccaagggccagacaatgt

SEQ ID NO: 243035 - DNA, 19 bp, Homo sapiens
  siRNA target sequence for GPR113 (NM_153835.1,366-384).
gctggtctccgtctatgta

SEQ ID NO: 243036 - DNA, 19 bp, Homo sapiens
  siRNA target sequence for GPR113 (NM_153835.1,369-387).
ggtctccgtctatgtacat

SEQ ID NO: 243037 - DNA, 19 bp, Homo sapiens
  siRNA target sequence for GPR113 (NM_153835.1,491-509).
gactcacaacagagtgtaa

SEQ ID NO: 243038 - DNA, 19 bp, Homo sapiens
  siRNA target sequence for GPR113 (NM_153835.1,497-515).
caacagagtgtaatgtcaa

SEQ ID NO: 243039 - DNA, 19 bp, Homo sapiens
  siRNA target sequence for GPR113 (NM_153835.1,580-598).
cattaccctccttgtcaaa

SEQ ID NO: 243040 - DNA, 19 bp, Homo sapiens
  siRNA target sequence for GPR113 (NM_153835.1,1447-1465).
ctcctggccttgttcacta

SEQ ID NO: 243041 - DNA, 19 bp, Homo sapiens
  siRNA target sequence for GPR113 (NM_153835.1,1929-1947).
cccattggtccgtaatgga

SEQ ID NO: 243042 - DNA, 19 bp, Homo sapiens
  siRNA target sequence for GPR113 (NM_153835.1,1930-1948).
ccattggtccgtaatggaa

SEQ ID NO: 243043 - DNA, 19 bp, Homo sapiens
  siRNA target sequence for GPR113 (NM_153835.1,1935-1953).
ggtccgtaatggaactgaa

SEQ ID NO: 243044 - DNA, 19 bp, Homo sapiens
  siRNA target sequence for GPR113 (NM_153835.1,1938-1956).
ccgtaatggaactgaaata

SEQ ID NO: 243045 - DNA, 19 bp, Homo sapiens
  siRNA target sequence for GPR113 (NM_153835.1,1939-1957).
cgtaatggaactgaaataa

SEQ ID NO: 243046 - DNA, 19 bp, Homo sapiens
  siRNA target sequence for GPR113 (NM_153835.1,1967-1985).
gcctggtgctgcgaaaact

SEQ ID NO: 243047 - DNA, 19 bp, Homo sapiens
  siRNA target sequence for GPR113 (NM_153835.1,1992-2010).
ccttctgccctcaaactat

SEQ ID NO: 243048 - DNA, 19 bp, Homo sapiens
  siRNA target sequence for GPR113 (NM_153835.1,2395-2413).
gtggtgcggaacaagatct

SEQ ID NO: 243049 - DNA, 19 bp, Homo sapiens
  siRNA target sequence for GPR113 (NM_153835.1,2402-2420).
ggaacaagatctcctattt

SEQ ID NO: 243050 - DNA, 19 bp, Homo sapiens
  siRNA target sequence for GPR113 (NM_153835.1,2762-2780).
ggaagggaggggcgttata

SEQ ID NO: 243051 - DNA, 19 bp, Homo sapiens
  siRNA target sequence for GPR113 (NM_153835.1,2993-3011).
ccacggtccctcattacat

SEQ ID NO: 243052 - DNA, 19 bp, Homo sapiens
  siRNA target sequence for GPR113 (NM_153835.1,2996-3014).
cggtccctcattacatctt

SEQ ID NO: 243053 - DNA, 19 bp, Homo sapiens
  siRNA target sequence for GPR113 (NM_153835.1,2998-3016).
gtccctcattacatcttca

SEQ ID NO: 243054 - DNA, 19 bp, Homo sapiens
  siRNA target sequence for GPR113 (NM_153835.1,3034-3052).
cagggcgtcttcatcctat

SEQ ID NO: 243055 - DNA, 19 bp, Homo sapiens
  siRNA target sequence for GPR113 (NM_153835.1,3037-3055).
ggcgtcttcatcctattgt

SEQ ID NO: 243056 - DNA, 19 bp, Homo sapiens
  siRNA target sequence for GPR113 (NM_153835.1,3038-3056).
gcgtcttcatcctattgtt

SEQ ID NO: 243057 - DNA, 19 bp, Homo sapiens
  siRNA target sequence for GPR115 (NM_153838.1,56-74).
gcggtaggtttggtattgt

SEQ ID NO: 243058 - DNA, 19 bp, Homo sapiens
  siRNA target sequence for GPR115 (NM_153838.1,57-75).
cggtaggtttggtattgtt

SEQ ID NO: 243059 - DNA, 19 bp, Homo sapiens
  siRNA target sequence for GPR115 (NM_153838.1,59-77).
gtaggtttggtattgttct

SEQ ID NO: 243060 - DNA, 19 bp, Homo sapiens
  siRNA target sequence for GPR115 (NM_153838.1,91-109).
caggttgtaacatctttat

SEQ ID NO: 243061 - DNA, 19 bp, Homo sapiens
  siRNA target sequence for GPR115 (NM_153838.1,94-112).
gttgtaacatctttatggt

SEQ ID NO: 243062 - DNA, 19 bp, Homo sapiens
  siRNA target sequence for GPR115 (NM_153838.1,151-169).
gggatgcttcttctgaatt

SEQ ID NO: 243063 - DNA, 19 bp, Homo sapiens
  siRNA target sequence for GPR115 (NM_153838.1,152-170).
ggatgcttcttctgaatta

SEQ ID NO: 243064 - DNA, 19 bp, Homo sapiens
  siRNA target sequence for GPR115 (NM_153838.1,181-199).
ccatcaaaggcccaagtta

SEQ ID NO: 243065 - DNA, 19 bp, Homo sapiens
  siRNA target sequence for GPR115 (NM_153838.1,226-244).
ggagaatgttcccactata

SEQ ID NO: 243066 - DNA, 19 bp, Homo sapiens
  siRNA target sequence for GPR115 (NM_153838.1,229-247).
gaatgttcccactatagat

SEQ ID NO: 243067 - DNA, 19 bp, Homo sapiens
  siRNA target sequence for GPR115 (NM_153838.1,245-263).
gatccaagattcacctaaa

SEQ ID NO: 243068 - DNA, 19 bp, Homo sapiens
  siRNA target sequence for GPR115 (NM_153838.1,518-536).
ctctgcatattctagactt

SEQ ID NO: 243069 - DNA, 19 bp, Homo sapiens
  siRNA target sequence for GPR115 (NM_153838.1,541-559).
gctccagagaccattgaga

SEQ ID NO: 243070 - DNA, 19 bp, Homo sapiens
  siRNA target sequence for GPR115 (NM_153838.1,582-600).
gaactgcccctttgattat

SEQ ID NO: 243071 - DNA, 19 bp, Homo sapiens
  siRNA target sequence for GPR115 (NM_153838.1,609-627).
cactgacatggtgaaatca

SEQ ID NO: 243072 - DNA, 19 bp, Homo sapiens
  siRNA target sequence for GPR115 (NM_153838.1,683-701).
ctacagacttgtctgataa

SEQ ID NO: 243073 - DNA, 19 bp, Homo sapiens
  siRNA target sequence for GPR115 (NM_153838.1,690-708).
cttgtctgataatgttact

SEQ ID NO: 243074 - DNA, 19 bp, Homo sapiens
  siRNA target sequence for GPR115 (NM_153838.1,703-721).
gttactcgagagaaaatga

SEQ ID NO: 243075 - DNA, 19 bp, Homo sapiens
  siRNA target sequence for GPR115 (NM_153838.1,816-834).
gcagtcagtgaatttgttt

SEQ ID NO: 243076 - DNA, 19 bp, Homo sapiens
  siRNA target sequence for GPR115 (NM_153838.1,901-919).
gggtttcacatcaaccata

SEQ ID NO: 243077 - DNA, 19 bp, Homo sapiens
  siRNA target sequence for GPR115 (NM_153838.1,903-921).
gtttcacatcaaccataat

SEQ ID NO: 243078 - DNA, 19 bp, Homo sapiens
  siRNA target sequence for GPR115 (NM_153838.1,907-925).
cacatcaaccataatacct

SEQ ID NO: 243079 - DNA, 19 bp, Homo sapiens
  siRNA target sequence for GPR115 (NM_153838.1,957-975).
gaacaataccacagaagat

SEQ ID NO: 243080 - DNA, 19 bp, Homo sapiens
  siRNA target sequence for GPR115 (NM_153838.1,1031-1049).
catcccaagccattagcat

SEQ ID NO: 243081 - DNA, 19 bp, Homo sapiens
  siRNA target sequence for GPR115 (NM_153838.1,1036-1054).
caagccattagcatagctt

SEQ ID NO: 243082 - DNA, 19 bp, Homo sapiens
  siRNA target sequence for GPR115 (NM_153838.1,1131-1149).
gctatcagtggttttacca

SEQ ID NO: 243083 - DNA, 19 bp, Homo sapiens
  siRNA target sequence for GPR115 (NM_153838.1,1147-1165).
ccagaaaggttgcaagaaa

SEQ ID NO: 243084 - DNA, 19 bp, Homo sapiens
  siRNA target sequence for GPR115 (NM_153838.1,1171-1189).
ctcaccttcgaaaagatca

SEQ ID NO: 243085 - DNA, 19 bp, Homo sapiens
  siRNA target sequence for GPR115 (NM_153838.1,1291-1309).
gtgaaatgccgctgtaact

SEQ ID NO: 243086 - DNA, 19 bp, Homo sapiens
  siRNA target sequence for GPR115 (NM_153838.1,1355-1373).
cgatgaccgacaaagttct

SEQ ID NO: 243087 - DNA, 19 bp, Homo sapiens
  siRNA target sequence for GPR115 (NM_153838.1,1396-1414).
ctcagcgtctcaatcctaa

SEQ ID NO: 243088 - DNA, 19 bp, Homo sapiens
  siRNA target sequence for GPR115 (NM_153838.1,1400-1418).
gcgtctcaatcctaagctt

SEQ ID NO: 243089 - DNA, 19 bp, Homo sapiens
  siRNA target sequence for GPR115 (NM_153838.1,1461-1479).
ggttgtgacggagatatca

SEQ ID NO: 243090 - DNA, 19 bp, Homo sapiens
  siRNA target sequence for GPR115 (NM_153838.1,1462-1480).
gttgtgacggagatatcat

SEQ ID NO: 243091 - DNA, 19 bp, Homo sapiens
  siRNA target sequence for GPR115 (NM_153838.1,1465-1483).
gtgacggagatatcataca

SEQ ID NO: 243092 - DNA, 19 bp, Homo sapiens
  siRNA target sequence for GPR115 (NM_153838.1,1489-1507).
cacgtgtgcatcgtgaata

SEQ ID NO: 243093 - DNA, 19 bp, Homo sapiens
  siRNA target sequence for GPR115 (NM_153838.1,1491-1509).
cgtgtgcatcgtgaatata

SEQ ID NO: 243094 - DNA, 19 bp, Homo sapiens
  siRNA target sequence for GPR115 (NM_153838.1,1494-1512).
gtgcatcgtgaatatagca

SEQ ID NO: 243095 - DNA, 19 bp, Homo sapiens
  siRNA target sequence for GPR115 (NM_153838.1,1549-1567).
ggctctcactttaacatta

SEQ ID NO: 243096 - DNA, 19 bp, Homo sapiens
  siRNA target sequence for GPR115 (NM_153838.1,1550-1568).
gctctcactttaacattaa

SEQ ID NO: 243097 - DNA, 19 bp, Homo sapiens
  siRNA target sequence for GPR115 (NM_153838.1,1650-1668).
caaagcattgctcatcatt

SEQ ID NO: 243098 - DNA, 19 bp, Homo sapiens
  siRNA target sequence for GPR115 (NM_153838.1,1736-1754).
gctatgggtgcccattgat

SEQ ID NO: 243099 - DNA, 19 bp, Homo sapiens
  siRNA target sequence for GPR115 (NM_153838.1,1822-1840).
cttaactgggacaatacca

SEQ ID NO: 243100 - DNA, 19 bp, Homo sapiens
  siRNA target sequence for GPR115 (NM_153838.1,1872-1890).
cgtcattgtggctgtaaat

SEQ ID NO: 243101 - DNA, 19 bp, Homo sapiens
  siRNA target sequence for GPR115 (NM_153838.1,1974-1992).
gaggatcagcaaaaatgtt

SEQ ID NO: 243102 - DNA, 19 bp, Homo sapiens
  siRNA target sequence for GPR115 (NM_153838.1,2033-2051).
gaatagccactctcataga

SEQ ID NO: 243103 - DNA, 19 bp, Homo sapiens
  siRNA target sequence for GPR115 (NM_153838.1,2116-2134).
ctgctgtttggaaccatta

SEQ ID NO: 243104 - DNA, 19 bp, Homo sapiens
  siRNA target sequence for GPR115 (NM_153838.1,2121-2139).
gtttggaaccattatggat

SEQ ID NO: 243105 - DNA, 19 bp, Homo sapiens
  siRNA target sequence for GPR115 (NM_153838.1,2129-2147).
ccattatggatcacaagat

SEQ ID NO: 243106 - DNA, 19 bp, Homo sapiens
  siRNA target sequence for GPR115 (NM_153838.1,2130-2148).
cattatggatcacaagata

SEQ ID NO: 243107 - DNA, 19 bp, Homo sapiens
  siRNA target sequence for GPR115 (NM_153838.1,2215-2233).
ctaggcccaaccaatggat

SEQ ID NO: 243108 - DNA, 19 bp, Homo sapiens
  siRNA target sequence for GPR115 (NM_153838.1,2219-2237).
gcccaaccaatggatctaa

SEQ ID NO: 243109 - DNA, 19 bp, Homo sapiens
  siRNA target sequence for GPR116 (NM_015234.1,29-47).
gcctcatgtttattgtgat

SEQ ID NO: 243110 - DNA, 19 bp, Homo sapiens
  siRNA target sequence for GPR116 (NM_015234.1,30-48).
cctcatgtttattgtgatt

SEQ ID NO: 243111 - DNA, 19 bp, Homo sapiens
  siRNA target sequence for GPR116 (NM_015234.1,65-83).
cactgaactggaattacga

SEQ ID NO: 243112 - DNA, 19 bp, Homo sapiens
  siRNA target sequence for GPR116 (NM_015234.1,74-92).
ggaattacgagtctactat

SEQ ID NO: 243113 - DNA, 19 bp, Homo sapiens
  siRNA target sequence for GPR116 (NM_015234.1,75-93).
gaattacgagtctactatt

SEQ ID NO: 243114 - DNA, 19 bp, Homo sapiens
  siRNA target sequence for GPR116 (NM_015234.1,135-153).
ggcactgaggcaaaaacga

SEQ ID NO: 243115 - DNA, 19 bp, Homo sapiens
  siRNA target sequence for GPR116 (NM_015234.1,235-253).
cctatcaaagcctacttga

SEQ ID NO: 243116 - DNA, 19 bp, Homo sapiens
  siRNA target sequence for GPR116 (NM_015234.1,236-254).
ctatcaaagcctacttgaa

SEQ ID NO: 243117 - DNA, 19 bp, Homo sapiens
  siRNA target sequence for GPR116 (NM_015234.1,289-307).
gaccaaattaccgacattt

SEQ ID NO: 243118 - DNA, 19 bp, Homo sapiens
  siRNA target sequence for GPR116 (NM_015234.1,299-317).
ccgacattttgagcataaa

SEQ ID NO: 243119 - DNA, 19 bp, Homo sapiens
  siRNA target sequence for GPR116 (NM_015234.1,330-348).
ctgcagacctgctggaaat

SEQ ID NO: 243120 - DNA, 19 bp, Homo sapiens
  siRNA target sequence for GPR116 (NM_015234.1,395-413).
ggtgtcttcacaatctcat

SEQ ID NO: 243121 - DNA, 19 bp, Homo sapiens
  siRNA target sequence for GPR116 (NM_015234.1,447-465).
ccattgcagttgccttaaa

SEQ ID NO: 243122 - DNA, 19 bp, Homo sapiens
  siRNA target sequence for GPR116 (NM_015234.1,471-489).
gcctcccaatggacctttt

SEQ ID NO: 243123 - DNA, 19 bp, Homo sapiens
  siRNA target sequence for GPR116 (NM_015234.1,472-490).
cctcccaatggaccttttt

SEQ ID NO: 243124 - DNA, 19 bp, Homo sapiens
  siRNA target sequence for GPR116 (NM_015234.1,519-537).
catgagagtcagactaaat

SEQ ID NO: 243125 - DNA, 19 bp, Homo sapiens
  siRNA target sequence for GPR116 (NM_015234.1,522-540).
gagagtcagactaaatgta

SEQ ID NO: 243126 - DNA, 19 bp, Homo sapiens
  siRNA target sequence for GPR116 (NM_015234.1,577-595).
ctctataggtcctacaaga

SEQ ID NO: 243127 - DNA, 19 bp, Homo sapiens
  siRNA target sequence for GPR116 (NM_015234.1,616-634).
cggaagggttacggaattt

SEQ ID NO: 243128 - DNA, 19 bp, Homo sapiens
  siRNA target sequence for GPR116 (NM_015234.1,677-695).
gaagtgtggttgtgacata

SEQ ID NO: 243129 - DNA, 19 bp, Homo sapiens
  siRNA target sequence for GPR116 (NM_015234.1,712-730).
ccaccatcacttgagttaa

SEQ ID NO: 243130 - DNA, 19 bp, Homo sapiens
  siRNA target sequence for GPR116 (NM_015234.1,713-731).
caccatcacttgagttaat

SEQ ID NO: 243131 - DNA, 19 bp, Homo sapiens
  siRNA target sequence for GPR116 (NM_015234.1,773-791).
cctacaaaatggactacaa

SEQ ID NO: 243132 - DNA, 19 bp, Homo sapiens
  siRNA target sequence for GPR116 (NM_015234.1,783-801).
ggactacaactcctttcaa

SEQ ID NO: 243133 - DNA, 19 bp, Homo sapiens
  siRNA target sequence for GPR116 (NM_015234.1,903-921).
gtcttggcgctatgaagaa

SEQ ID NO: 243134 - DNA, 19 bp, Homo sapiens
  siRNA target sequence for GPR116 (NM_015234.1,905-923).
cttggcgctatgaagaaca

SEQ ID NO: 243135 - DNA, 19 bp, Homo sapiens
  siRNA target sequence for GPR116 (NM_015234.1,944-962).
gcagcagattctcgattta

SEQ ID NO: 243136 - DNA, 19 bp, Homo sapiens
  siRNA target sequence for GPR116 (NM_015234.1,956-974).
cgatttacaccgcactttt

SEQ ID NO: 243137 - DNA, 19 bp, Homo sapiens
  siRNA target sequence for GPR116 (NM_015234.1,1027-1045).
gatgcaggtgaatatgttt

SEQ ID NO: 243138 - DNA, 19 bp, Homo sapiens
  siRNA target sequence for GPR116 (NM_015234.1,1093-1111).
gatgttatgcccatccaaa

SEQ ID NO: 243139 - DNA, 19 bp, Homo sapiens
  siRNA target sequence for GPR116 (NM_015234.1,1096-1114).
gttatgcccatccaaattt

SEQ ID NO: 243140 - DNA, 19 bp, Homo sapiens
  siRNA target sequence for GPR116 (NM_015234.1,1134-1152).
ggtgatgtgcgacaacaat

SEQ ID NO: 243141 - DNA, 19 bp, Homo sapiens
  siRNA target sequence for GPR116 (NM_015234.1,1170-1188).
ctgcagtcagggtaatgtt

SEQ ID NO: 243142 - DNA, 19 bp, Homo sapiens
  siRNA target sequence for GPR116 (NM_015234.1,1172-1190).
gcagtcagggtaatgttaa

SEQ ID NO: 243143 - DNA, 19 bp, Homo sapiens
  siRNA target sequence for GPR116 (NM_015234.1,1241-1259).
cccctgagacagacataga

SEQ ID NO: 243144 - DNA, 19 bp, Homo sapiens
  siRNA target sequence for GPR116 (NM_015234.1,1243-1261).
cctgagacagacatagatt

SEQ ID NO: 243145 - DNA, 19 bp, Homo sapiens
  siRNA target sequence for GPR116 (NM_015234.1,1311-1329).
cgggtcgtctggaacaaca

SEQ ID NO: 243146 - DNA, 19 bp, Homo sapiens
  siRNA target sequence for GPR116 (NM_015234.1,1367-1385).
ccagaggcagtgcaaacat

SEQ ID NO: 243147 - DNA, 19 bp, Homo sapiens
  siRNA target sequence for GPR116 (NM_015234.1,1401-1419).
ctctgtggccaatctaaca

SEQ ID NO: 243148 - DNA, 19 bp, Homo sapiens
  siRNA target sequence for GPR116 (NM_015234.1,1403-1421).
ctgtggccaatctaacaat

SEQ ID NO: 243149 - DNA, 19 bp, Homo sapiens
  siRNA target sequence for GPR116 (NM_015234.1,1449-1467).
gggacaaaacttttctata

SEQ ID NO: 243150 - DNA, 19 bp, Homo sapiens
  siRNA target sequence for GPR116 (NM_015234.1,1478-1496).
gtgatgtgagtaactatga

SEQ ID NO: 243151 - DNA, 19 bp, Homo sapiens
  siRNA target sequence for GPR116 (NM_015234.1,1512-1530).
cacttctgctggaattaaa

SEQ ID NO: 243152 - DNA, 19 bp, Homo sapiens
  siRNA target sequence for GPR116 (NM_015234.1,1514-1532).
cttctgctggaattaaaat

SEQ ID NO: 243153 - DNA, 19 bp, Homo sapiens
  siRNA target sequence for GPR116 (NM_015234.1,1517-1535).
ctgctggaattaaaatata

SEQ ID NO: 243154 - DNA, 19 bp, Homo sapiens
  siRNA target sequence for GPR116 (NM_015234.1,1550-1568).
ccacgaggaggtatcttga

SEQ ID NO: 243155 - DNA, 19 bp, Homo sapiens
  siRNA target sequence for GPR116 (NM_015234.1,1551-1569).
cacgaggaggtatcttgat

SEQ ID NO: 243156 - DNA, 19 bp, Homo sapiens
  siRNA target sequence for GPR116 (NM_015234.1,1618-1636).
ggaacctatcactgcatat

SEQ ID NO: 243157 - DNA, 19 bp, Homo sapiens
  siRNA target sequence for GPR116 (NM_015234.1,1619-1637).
gaacctatcactgcatatt

SEQ ID NO: 243158 - DNA, 19 bp, Homo sapiens
  siRNA target sequence for GPR116 (NM_015234.1,1623-1641).
ctatcactgcatatttaga

SEQ ID NO: 243159 - DNA, 19 bp, Homo sapiens
  siRNA target sequence for GPR116 (NM_015234.1,1647-1665).
gaattcatacagtattgca

SEQ ID NO: 243160 - DNA, 19 bp, Homo sapiens
  siRNA target sequence for GPR116 (NM_015234.1,1694-1712).
ctctaaagctgaacatcat

SEQ ID NO: 243161 - DNA, 19 bp, Homo sapiens
  siRNA target sequence for GPR116 (NM_015234.1,1779-1797).
ggatggagactacaaagtt

SEQ ID NO: 243162 - DNA, 19 bp, Homo sapiens
  siRNA target sequence for GPR116 (NM_015234.1,1855-1873).
gtgtgctacaaacacaatt

SEQ ID NO: 243163 - DNA, 19 bp, Homo sapiens
  siRNA target sequence for GPR116 (NM_015234.1,1926-1944).
ctttaccaatgctgctaat

SEQ ID NO: 243164 - DNA, 19 bp, Homo sapiens
  siRNA target sequence for GPR116 (NM_015234.1,1951-1969).
gtctggagcccatctatga

SEQ ID NO: 243165 - DNA, 19 bp, Homo sapiens
  siRNA target sequence for GPR116 (NM_015234.1,2004-2022).
ccaggatcccgtaataggt

SEQ ID NO: 243166 - DNA, 19 bp, Homo sapiens
  siRNA target sequence for GPR116 (NM_015234.1,2098-2116).
ggcgggaccatcacttaca

SEQ ID NO: 243167 - DNA, 19 bp, Homo sapiens
  siRNA target sequence for GPR116 (NM_015234.1,2099-2117).
gcgggaccatcacttacaa

SEQ ID NO: 243168 - DNA, 19 bp, Homo sapiens
  siRNA target sequence for GPR116 (NM_015234.1,2100-2118).
cgggaccatcacttacaaa

SEQ ID NO: 243169 - DNA, 19 bp, Homo sapiens
  siRNA target sequence for GPR116 (NM_015234.1,2101-2119).
gggaccatcacttacaaat

SEQ ID NO: 243170 - DNA, 19 bp, Homo sapiens
  siRNA target sequence for GPR116 (NM_015234.1,2156-2174).
gcatctctgccccaataaa

SEQ ID NO: 243171 - DNA, 19 bp, Homo sapiens
  siRNA target sequence for GPR116 (NM_015234.1,2344-2362).
gttccaacccaagtaaatt

SEQ ID NO: 243172 - DNA, 19 bp, Homo sapiens
  siRNA target sequence for GPR116 (NM_015234.1,2356-2374).
gtaaattcagaaatgatga

SEQ ID NO: 243173 - DNA, 19 bp, Homo sapiens
  siRNA target sequence for GPR116 (NM_015234.1,2379-2397).
cgtgctctctacggttaat

SEQ ID NO: 243174 - DNA, 19 bp, Homo sapiens
  siRNA target sequence for GPR116 (NM_015234.1,2383-2401).
ctctctacggttaatgtca

SEQ ID NO: 243175 - DNA, 19 bp, Homo sapiens
  siRNA target sequence for GPR116 (NM_015234.1,2424-2442).
cacctggaaggttttacaa

SEQ ID NO: 243176 - DNA, 19 bp, Homo sapiens
  siRNA target sequence for GPR116 (NM_015234.1,2465-2483).
cacagctactacattcagt

SEQ ID NO: 243177 - DNA, 19 bp, Homo sapiens
  siRNA target sequence for GPR116 (NM_015234.1,2577-2595).
cagccacccagaaacctat

SEQ ID NO: 243178 - DNA, 19 bp, Homo sapiens
  siRNA target sequence for GPR116 (NM_015234.1,2779-2797).
gtcagccacaatacaacta

SEQ ID NO: 243179 - DNA, 19 bp, Homo sapiens
  siRNA target sequence for GPR116 (NM_015234.1,2904-2922).
cagcagtgggtgctatgta

SEQ ID NO: 243180 - DNA, 19 bp, Homo sapiens
  siRNA target sequence for GPR116 (NM_015234.1,2909-2927).
gtgggtgctatgtagaaga

SEQ ID NO: 243181 - DNA, 19 bp, Homo sapiens
  siRNA target sequence for GPR116 (NM_015234.1,2938-2956).
gacaatgtcacctgtatct

SEQ ID NO: 243182 - DNA, 19 bp, Homo sapiens
  siRNA target sequence for GPR116 (NM_015234.1,3011-3029).
gttctctcctgggaatact

SEQ ID NO: 243183 - DNA, 19 bp, Homo sapiens
  siRNA target sequence for GPR116 (NM_015234.1,3022-3040).
ggaatactcctggatatta

SEQ ID NO: 243184 - DNA, 19 bp, Homo sapiens
  siRNA target sequence for GPR116 (NM_015234.1,3028-3046).
ctcctggatattatttctt

SEQ ID NO: 243185 - DNA, 19 bp, Homo sapiens
  siRNA target sequence for GPR116 (NM_015234.1,3122-3140).
ccaagaaccggacttctta

SEQ ID NO: 243186 - DNA, 19 bp, Homo sapiens
  siRNA target sequence for GPR116 (NM_015234.1,3123-3141).
caagaaccggacttcttat

SEQ ID NO: 243187 - DNA, 19 bp, Homo sapiens
  siRNA target sequence for GPR116 (NM_015234.1,3145-3163).
cgccacacctgcatagtga

SEQ ID NO: 243188 - DNA, 19 bp, Homo sapiens
  siRNA target sequence for GPR116 (NM_015234.1,3219-3237).
ccaggacaatcgctacata

SEQ ID NO: 243189 - DNA, 19 bp, Homo sapiens
  siRNA target sequence for GPR116 (NM_015234.1,3223-3241).
gacaatcgctacatactct

SEQ ID NO: 243190 - DNA, 19 bp, Homo sapiens
  siRNA target sequence for GPR116 (NM_015234.1,3318-3336).
gggcctcatgctgttctat

SEQ ID NO: 243191 - DNA, 19 bp, Homo sapiens
  siRNA target sequence for GPR116 (NM_015234.1,3333-3351).
ctatcgcctggttttcatt

SEQ ID NO: 243192 - DNA, 19 bp, Homo sapiens
  siRNA target sequence for GPR116 (NM_015234.1,3684-3702).
cctcacttggggttttggt

SEQ ID NO: 243193 - DNA, 19 bp, Homo sapiens
  siRNA target sequence for GPR116 (NM_015234.1,3729-3747).
ccttgtgttccatatcata

SEQ ID NO: 243194 - DNA, 19 bp, Homo sapiens
  siRNA target sequence for GPR116 (NM_015234.1,3833-3851).
ccacacctgtgttttctat

SEQ ID NO: 243195 - DNA, 19 bp, Homo sapiens
  siRNA target sequence for GPR123 (NM_032422.1,19-37).
cactcgcggctgaaatcca

SEQ ID NO: 243196 - DNA, 19 bp, Homo sapiens
  siRNA target sequence for GPR123 (NM_032422.1,366-384).
gttcttgggacctggattt

SEQ ID NO: 243197 - DNA, 19 bp, Homo sapiens
  siRNA target sequence for GPR123 (NM_032422.1,369-387).
cttgggacctggatttatt

SEQ ID NO: 243198 - DNA, 19 bp, Homo sapiens
  siRNA target sequence for GPR123 (NM_032422.1,446-464).
cagggcgtctttatttgtt

SEQ ID NO: 243199 - DNA, 19 bp, Homo sapiens
  siRNA target sequence for GPR123 (NM_032422.1,474-492).
cctaggcaacaaattacca

SEQ ID NO: 243200 - DNA, 19 bp, Homo sapiens
  siRNA target sequence for GPR123 (NM_032422.1,950-968).
gaagccgtgttctgattat

SEQ ID NO: 243201 - DNA, 19 bp, Homo sapiens
  siRNA target sequence for GPR123 (NM_032422.1,953-971).
gccgtgttctgattatcaa

SEQ ID NO: 243202 - DNA, 19 bp, Homo sapiens
  siRNA target sequence for GPR123 (NM_032422.1,1605-1623).
ctcacgcttccgcaacttt

SEQ ID NO: 243203 - DNA, 19 bp, Homo sapiens
  siRNA target sequence for GPR123 (NM_032422.1,1980-1998).
ggcattccccaggtttgaa

SEQ ID NO: 243204 - DNA, 19 bp, Homo sapiens
  siRNA target sequence for GPR123 (NM_032422.1,2317-2335).
cggcacacgctcctgaatt

SEQ ID NO: 243205 - DNA, 19 bp, Homo sapiens
  siRNA target sequence for GPR123 (NM_032422.1,2320-2338).
cacacgctcctgaatttct

SEQ ID NO: 243206 - DNA, 19 bp, Homo sapiens
  siRNA target sequence for GPR123 (NM_032422.1,2421-2439).
catcgtgctgcactattct

SEQ ID NO: 243207 - DNA, 19 bp, Homo sapiens
  siRNA target sequence for GPR123 (NM_032422.1,2424-2442).
cgtgctgcactattctaca

SEQ ID NO: 243208 - DNA, 19 bp, Homo sapiens
  siRNA target sequence for GPR123 (NM_032422.1,2467-2485).
gtgaccgccaggaacatct

SEQ ID NO: 243209 - DNA, 19 bp, Homo sapiens
  siRNA target sequence for GPR123 (NM_032422.1,2576-2594).
gcggaggggtcccctttat

SEQ ID NO: 243210 - DNA, 19 bp, Homo sapiens
  siRNA target sequence for GPR123 (NM_032422.1,2615-2633).
ccacgaacatcaggaatta

SEQ ID NO: 243211 - DNA, 19 bp, Homo sapiens
  siRNA target sequence for GPR123 (NM_032422.1,3404-3422).
gccttcagggcagaactaa

SEQ ID NO: 243212 - DNA, 19 bp, Homo sapiens
  siRNA target sequence for GPR123 (NM_032422.1,3742-3760).
gggctgcccaagggtaaat

SEQ ID NO: 243213 - DNA, 19 bp, Homo sapiens
  siRNA target sequence for GPR123 (NM_032422.1,3743-3761).
ggctgcccaagggtaaatt

SEQ ID NO: 243214 - DNA, 19 bp, Homo sapiens
  siRNA target sequence for GPR123 (NM_032422.1,3805-3823).
cgaacgggaccctggaaaa

SEQ ID NO: 243215 - DNA, 19 bp, Homo sapiens
  siRNA target sequence for GPR123 (NM_032422.1,3809-3827).
cgggaccctggaaaaacga

SEQ ID NO: 243216 - DNA, 19 bp, Homo sapiens
  siRNA target sequence for GPR124 (NM_032777.6,278-296).
ctgctcttgagcaataaca

SEQ ID NO: 243217 - DNA, 19 bp, Homo sapiens
  siRNA target sequence for GPR124 (NM_032777.6,483-501).
ggcttctccgactaaacat

SEQ ID NO: 243218 - DNA, 19 bp, Homo sapiens
  siRNA target sequence for GPR124 (NM_032777.6,485-503).
cttctccgactaaacatat

SEQ ID NO: 243219 - DNA, 19 bp, Homo sapiens
  siRNA target sequence for GPR124 (NM_032777.6,1377-1395).
ctagcttttcagacatgat

SEQ ID NO: 243220 - DNA, 19 bp, Homo sapiens
  siRNA target sequence for GPR124 (NM_032777.6,1390-1408).
catgatggatgtagtctat

SEQ ID NO: 243221 - DNA, 19 bp, Homo sapiens
  siRNA target sequence for GPR124 (NM_032777.6,1804-1822).
caccgggaggcccaatgtt

SEQ ID NO: 243222 - DNA, 19 bp, Homo sapiens
  siRNA target sequence for GPR124 (NM_032777.6,1830-1848).
cgtccttccacatcaagaa

SEQ ID NO: 243223 - DNA, 19 bp, Homo sapiens
  siRNA target sequence for GPR124 (NM_032777.6,2660-2678).
cctatgctccggttctatt

SEQ ID NO: 243224 - DNA, 19 bp, Homo sapiens
  siRNA target sequence for GPR124 (NM_032777.6,2692-2710).
gattccactcattatctgt

SEQ ID NO: 243225 - DNA, 19 bp, Homo sapiens
  siRNA target sequence for GPR124 (NM_032777.6,2724-2742).
cagtcaacatccacaacta

SEQ ID NO: 243226 - DNA, 19 bp, Homo sapiens
  siRNA target sequence for GPR124 (NM_032777.6,2822-2840).
ctcatcacctggatctatt

SEQ ID NO: 243227 - DNA, 19 bp, Homo sapiens
  siRNA target sequence for GPR124 (NM_032777.6,3035-3053).
gatggtgacagcctctatt

SEQ ID NO: 243228 - DNA, 19 bp, Homo sapiens
  siRNA target sequence for GPR128 (NM_032787.1,311-329).
ctactgactggcatcattt

SEQ ID NO: 243229 - DNA, 19 bp, Homo sapiens
  siRNA target sequence for GPR128 (NM_032787.1,470-488).
ctgagatgtacaattgcta

SEQ ID NO: 243230 - DNA, 19 bp, Homo sapiens
  siRNA target sequence for GPR128 (NM_032787.1,495-513).
gtgaaaatagtacctatat

SEQ ID NO: 243231 - DNA, 19 bp, Homo sapiens
  siRNA target sequence for GPR128 (NM_032787.1,563-581).
caaacatgtggcaaggata

SEQ ID NO: 243232 - DNA, 19 bp, Homo sapiens
  siRNA target sequence for GPR128 (NM_032787.1,584-602).
ccaaatgcgggcaatccaa

SEQ ID NO: 243233 - DNA, 19 bp, Homo sapiens
  siRNA target sequence for GPR128 (NM_032787.1,616-634).
gtgcagtctctctctatat

SEQ ID NO: 243234 - DNA, 19 bp, Homo sapiens
  siRNA target sequence for GPR128 (NM_032787.1,656-674).
gtgacaataggaaattgca

SEQ ID NO: 243235 - DNA, 19 bp, Homo sapiens
  siRNA target sequence for GPR128 (NM_032787.1,658-676).
gacaataggaaattgcaat

SEQ ID NO: 243236 - DNA, 19 bp, Homo sapiens
  siRNA target sequence for GPR128 (NM_032787.1,717-735).
cagcaccacttaataacat

SEQ ID NO: 243237 - DNA, 19 bp, Homo sapiens
  siRNA target sequence for GPR128 (NM_032787.1,738-756).
cttctgaagtccagatttt

SEQ ID NO: 243238 - DNA, 19 bp, Homo sapiens
  siRNA target sequence for GPR128 (NM_032787.1,805-823).
gcgagtggttggacagata

SEQ ID NO: 243239 - DNA, 19 bp, Homo sapiens
  siRNA target sequence for GPR128 (NM_032787.1,806-824).
cgagtggttggacagatat

SEQ ID NO: 243240 - DNA, 19 bp, Homo sapiens
  siRNA target sequence for GPR128 (NM_032787.1,812-830).
gttggacagatattcaaca

SEQ ID NO: 243241 - DNA, 19 bp, Homo sapiens
  siRNA target sequence for GPR128 (NM_032787.1,826-844).
caacacttccagaaatgct

SEQ ID NO: 243242 - DNA, 19 bp, Homo sapiens
  siRNA target sequence for GPR128 (NM_032787.1,859-877).
gaaagttgccatagtaaca

SEQ ID NO: 243243 - DNA, 19 bp, Homo sapiens
  siRNA target sequence for GPR128 (NM_032787.1,945-963).
cccttacaacgcttattga

SEQ ID NO: 243244 - DNA, 19 bp, Homo sapiens
  siRNA target sequence for GPR128 (NM_032787.1,954-972).
cgcttattgagcaaatgga

SEQ ID NO: 243245 - DNA, 19 bp, Homo sapiens
  siRNA target sequence for GPR128 (NM_032787.1,987-1005).
ctttgggtaatcaatcagt

SEQ ID NO: 243246 - DNA, 19 bp, Homo sapiens
  siRNA target sequence for GPR128 (NM_032787.1,1002-1020).
cagtggtggaacctaacat

SEQ ID NO: 243247 - DNA, 19 bp, Homo sapiens
  siRNA target sequence for GPR128 (NM_032787.1,1007-1025).
gtggaacctaacatagcaa

SEQ ID NO: 243248 - DNA, 19 bp, Homo sapiens
  siRNA target sequence for GPR128 (NM_032787.1,1009-1027).
ggaacctaacatagcaata

SEQ ID NO: 243249 - DNA, 19 bp, Homo sapiens
  siRNA target sequence for GPR128 (NM_032787.1,1056-1074).
cggtggggccttcaaatgt

SEQ ID NO: 243250 - DNA, 19 bp, Homo sapiens
  siRNA target sequence for GPR128 (NM_032787.1,1097-1115).
gctagcagttctctagttt

SEQ ID NO: 243251 - DNA, 19 bp, Homo sapiens
  siRNA target sequence for GPR128 (NM_032787.1,1102-1120).
cagttctctagtttctagt

SEQ ID NO: 243252 - DNA, 19 bp, Homo sapiens
  siRNA target sequence for GPR128 (NM_032787.1,1112-1130).
gtttctagttcaacattta

SEQ ID NO: 243253 - DNA, 19 bp, Homo sapiens
  siRNA target sequence for GPR128 (NM_032787.1,1116-1134).
ctagttcaacatttataca

SEQ ID NO: 243254 - DNA, 19 bp, Homo sapiens
  siRNA target sequence for GPR128 (NM_032787.1,1175-1193).
cttcaggtcttgcttaata

SEQ ID NO: 243255 - DNA, 19 bp, Homo sapiens
  siRNA target sequence for GPR128 (NM_032787.1,1215-1233).
catgcggctttgtagttta

SEQ ID NO: 243256 - DNA, 19 bp, Homo sapiens
  siRNA target sequence for GPR128 (NM_032787.1,1218-1236).
gcggctttgtagtttatca

SEQ ID NO: 243257 - DNA, 19 bp, Homo sapiens
  siRNA target sequence for GPR128 (NM_032787.1,1219-1237).
cggctttgtagtttatcaa

SEQ ID NO: 243258 - DNA, 19 bp, Homo sapiens
  siRNA target sequence for GPR128 (NM_032787.1,1220-1238).
ggctttgtagtttatcaaa

SEQ ID NO: 243259 - DNA, 19 bp, Homo sapiens
  siRNA target sequence for GPR128 (NM_032787.1,1221-1239).
gctttgtagtttatcaaaa

SEQ ID NO: 243260 - DNA, 19 bp, Homo sapiens
  siRNA target sequence for GPR128 (NM_032787.1,1278-1296).
cggattttagtcaaaaaat

SEQ ID NO: 243261 - DNA, 19 bp, Homo sapiens
  siRNA target sequence for GPR128 (NM_032787.1,1352-1370).
gtctttagtccaaagtaca

SEQ ID NO: 243262 - DNA, 19 bp, Homo sapiens
  siRNA target sequence for GPR128 (NM_032787.1,1400-1418).
gcctgtgtctattggaatt

SEQ ID NO: 243263 - DNA, 19 bp, Homo sapiens
  siRNA target sequence for GPR128 (NM_032787.1,1425-1443).
cgaaggactgggacacata

SEQ ID NO: 243264 - DNA, 19 bp, Homo sapiens
  siRNA target sequence for GPR128 (NM_032787.1,1436-1454).
gacacatatggctgtcaaa

SEQ ID NO: 243265 - DNA, 19 bp, Homo sapiens
  siRNA target sequence for GPR128 (NM_032787.1,1438-1456).
cacatatggctgtcaaaaa

SEQ ID NO: 243266 - DNA, 19 bp, Homo sapiens
  siRNA target sequence for GPR128 (NM_032787.1,1440-1458).
catatggctgtcaaaaaga

SEQ ID NO: 243267 - DNA, 19 bp, Homo sapiens
  siRNA target sequence for GPR128 (NM_032787.1,1486-1504).
ccgctgcaaccatactact

SEQ ID NO: 243268 - DNA, 19 bp, Homo sapiens
  siRNA target sequence for GPR128 (NM_032787.1,1487-1505).
cgctgcaaccatactacta

SEQ ID NO: 243269 - DNA, 19 bp, Homo sapiens
  siRNA target sequence for GPR128 (NM_032787.1,1488-1506).
gctgcaaccatactactaa

SEQ ID NO: 243270 - DNA, 19 bp, Homo sapiens
  siRNA target sequence for GPR128 (NM_032787.1,1489-1507).
ctgcaaccatactactaat

SEQ ID NO: 243271 - DNA, 19 bp, Homo sapiens
  siRNA target sequence for GPR128 (NM_032787.1,1491-1509).
gcaaccatactactaattt

SEQ ID NO: 243272 - DNA, 19 bp, Homo sapiens
  siRNA target sequence for GPR128 (NM_032787.1,1547-1565).
cccaaatcacttgacatat

SEQ ID NO: 243273 - DNA, 19 bp, Homo sapiens
  siRNA target sequence for GPR128 (NM_032787.1,1548-1566).
ccaaatcacttgacatatt

SEQ ID NO: 243274 - DNA, 19 bp, Homo sapiens
  siRNA target sequence for GPR128 (NM_032787.1,1598-1616).
ggtctggctctcacagtta

SEQ ID NO: 243275 - DNA, 19 bp, Homo sapiens
  siRNA target sequence for GPR128 (NM_032787.1,1599-1617).
gtctggctctcacagttat

SEQ ID NO: 243276 - DNA, 19 bp, Homo sapiens
  siRNA target sequence for GPR128 (NM_032787.1,1601-1619).
ctggctctcacagttatat

SEQ ID NO: 243277 - DNA, 19 bp, Homo sapiens
  siRNA target sequence for GPR128 (NM_032787.1,1607-1625).
ctcacagttatatttcaga

SEQ ID NO: 243278 - DNA, 19 bp, Homo sapiens
  siRNA target sequence for GPR128 (NM_032787.1,1653-1671).
cagtaacctgggttttggt

SEQ ID NO: 243279 - DNA, 19 bp, Homo sapiens
  siRNA target sequence for GPR128 (NM_032787.1,1669-1687).
ggtcaatctgtgcatatca

SEQ ID NO: 243280 - DNA, 19 bp, Homo sapiens
  siRNA target sequence for GPR128 (NM_032787.1,1670-1688).
gtcaatctgtgcatatcaa

SEQ ID NO: 243281 - DNA, 19 bp, Homo sapiens
  siRNA target sequence for GPR128 (NM_032787.1,1676-1694).
ctgtgcatatcaatgttga

SEQ ID NO: 243282 - DNA, 19 bp, Homo sapiens
  siRNA target sequence for GPR128 (NM_032787.1,1678-1696).
gtgcatatcaatgttgatt

SEQ ID NO: 243283 - DNA, 19 bp, Homo sapiens
  siRNA target sequence for GPR128 (NM_032787.1,1738-1756).
gaacttgcagacaagtgat

SEQ ID NO: 243284 - DNA, 19 bp, Homo sapiens
  siRNA target sequence for GPR128 (NM_032787.1,1844-1862).
gccgccttactgcactatt

SEQ ID NO: 243285 - DNA, 19 bp, Homo sapiens
  siRNA target sequence for GPR128 (NM_032787.1,1845-1863).
ccgccttactgcactattt

SEQ ID NO: 243286 - DNA, 19 bp, Homo sapiens
  siRNA target sequence for GPR128 (NM_032787.1,1846-1864).
cgccttactgcactatttt

SEQ ID NO: 243287 - DNA, 19 bp, Homo sapiens
  siRNA target sequence for GPR128 (NM_032787.1,1904-1922).
cagctctattaccttctaa

SEQ ID NO: 243288 - DNA, 19 bp, Homo sapiens
  siRNA target sequence for GPR128 (NM_032787.1,1980-1998).
ggggagtcccagctatagt

SEQ ID NO: 243289 - DNA, 19 bp, Homo sapiens
  siRNA target sequence for GPR128 (NM_032787.1,1981-1999).
gggagtcccagctatagta

SEQ ID NO: 243290 - DNA, 19 bp, Homo sapiens
  siRNA target sequence for GPR128 (NM_032787.1,1991-2009).
gctatagtagtggctataa

SEQ ID NO: 243291 - DNA, 19 bp, Homo sapiens
  siRNA target sequence for GPR128 (NM_032787.1,2045-2063).
ccacagtgggaattagact

SEQ ID NO: 243292 - DNA, 19 bp, Homo sapiens
  siRNA target sequence for GPR128 (NM_032787.1,2046-2064).
cacagtgggaattagacta

SEQ ID NO: 243293 - DNA, 19 bp, Homo sapiens
  siRNA target sequence for GPR128 (NM_032787.1,2060-2078).
gactaccggcaagagaaaa

SEQ ID NO: 243294 - DNA, 19 bp, Homo sapiens
  siRNA target sequence for GPR128 (NM_032787.1,2099-2117).
gaacccaatggtgttataa

SEQ ID NO: 243295 - DNA, 19 bp, Homo sapiens
  siRNA target sequence for GPR128 (NM_032787.1,2123-2141).
ccgctgttgtggtcattca

SEQ ID NO: 243296 - DNA, 19 bp, Homo sapiens
  siRNA target sequence for GPR128 (NM_032787.1,2124-2142).
cgctgttgtggtcattcat

SEQ ID NO: 243297 - DNA, 19 bp, Homo sapiens
  siRNA target sequence for GPR128 (NM_032787.1,2140-2158).
catcgtacctgtaaccatt

SEQ ID NO: 243298 - DNA, 19 bp, Homo sapiens
  siRNA target sequence for GPR128 (NM_032787.1,2162-2180).
ctcatcagcaatgttgtta

SEQ ID NO: 243299 - DNA, 19 bp, Homo sapiens
  siRNA target sequence for GPR128 (NM_032787.1,2169-2187).
gcaatgttgttatgtttat

SEQ ID NO: 243300 - DNA, 19 bp, Homo sapiens
  siRNA target sequence for GPR128 (NM_032787.1,2224-2242).
gaacctgacaagcacaaaa

SEQ ID NO: 243301 - DNA, 19 bp, Homo sapiens
  siRNA target sequence for GPR128 (NM_032787.1,2260-2278).
gaagattgttagcacatta

SEQ ID NO: 243302 - DNA, 19 bp, Homo sapiens
  siRNA target sequence for GPR128 (NM_032787.1,2315-2333).
gcatacctgatgctagtta

SEQ ID NO: 243303 - DNA, 19 bp, Homo sapiens
  siRNA target sequence for GPR128 (NM_032787.1,2316-2334).
catacctgatgctagttaa

SEQ ID NO: 243304 - DNA, 19 bp, Homo sapiens
  siRNA target sequence for GPR128 (NM_032787.1,2320-2338).
cctgatgctagttaatgat

SEQ ID NO: 243305 - DNA, 19 bp, Homo sapiens
  siRNA target sequence for GPR128 (NM_032787.1,2323-2341).
gatgctagttaatgatgat

SEQ ID NO: 243306 - DNA, 19 bp, Homo sapiens
  siRNA target sequence for GPR128 (NM_032787.1,2350-2368).
gatcgtcttcagctacata

SEQ ID NO: 243307 - DNA, 19 bp, Homo sapiens
  siRNA target sequence for GPR128 (NM_032787.1,2385-2403).
ctacacagggattgcaaat

SEQ ID NO: 243308 - DNA, 19 bp, Homo sapiens
  siRNA target sequence for GPR128 (NM_032787.1,2388-2406).
cacagggattgcaaatttt

SEQ ID NO: 243309 - DNA, 19 bp, Homo sapiens
  siRNA target sequence for GPR128 (NM_032787.1,2410-2428).
cctgtacactgttagaaca

SEQ ID NO: 243310 - DNA, 19 bp, Homo sapiens
  siRNA target sequence for GPR128 (NM_032787.1,2447-2465).
gcttccaaagtgttgatgt

SEQ ID NO: 243311 - DNA, 19 bp, Homo sapiens
  siRNA target sequence for GPR128 (NM_032787.1,2461-2479).
gatgttgctatcgtctatt

SEQ ID NO: 243312 - DNA, 19 bp, Homo sapiens
  siRNA target sequence for GPR128 (NM_032787.1,2513-2531).
ccgaggctgcgtgtaaaga

SEQ ID NO: 243313 - DNA, 19 bp, Homo sapiens
  siRNA target sequence for GPR128 (NM_032787.1,2514-2532).
cgaggctgcgtgtaaagat

SEQ ID NO: 243314 - DNA, 19 bp, Homo sapiens
  siRNA target sequence for GPR128 (NM_032787.1,2519-2537).
ctgcgtgtaaagatgtata

SEQ ID NO: 243315 - DNA, 19 bp, Homo sapiens
  siRNA target sequence for GPR128 (NM_032787.1,2521-2539).
gcgtgtaaagatgtataat

SEQ ID NO: 243316 - DNA, 19 bp, Homo sapiens
  siRNA target sequence for GPR128 (NM_032787.1,2545-2563).
caggtcattgccaacctta

SEQ ID NO: 243317 - DNA, 19 bp, Homo sapiens
  siRNA target sequence for GPR128 (NM_032787.1,2548-2566).
gtcattgccaaccttacat

SEQ ID NO: 243318 - DNA, 19 bp, Homo sapiens
  siRNA target sequence for GPR128 (NM_032787.1,2550-2568).
cattgccaaccttacatga

SEQ ID NO: 243319 - DNA, 19 bp, Homo sapiens
  siRNA target sequence for GPR128 (NM_032787.1,2592-2610).
ctccgagtactgaggaaat

SEQ ID NO: 243320 - DNA, 19 bp, Homo sapiens
  siRNA target sequence for GPR133 (NM_198827.1,247-265).
gtggcgctgtcgtctatca

SEQ ID NO: 243321 - DNA, 19 bp, Homo sapiens
  siRNA target sequence for GPR133 (NM_198827.1,464-482).
ccgtgctcctacactactt

SEQ ID NO: 243322 - DNA, 19 bp, Homo sapiens
  siRNA target sequence for GPR133 (NM_198827.1,566-584).
gcaagcaccgttactacta

SEQ ID NO: 243323 - DNA, 19 bp, Homo sapiens
  siRNA target sequence for GPR133 (NM_198827.1,567-585).
caagcaccgttactactat

SEQ ID NO: 243324 - DNA, 19 bp, Homo sapiens
  siRNA target sequence for GPR133 (NM_198827.1,944-962).
ccctgcagggactgttcat

SEQ ID NO: 243325 - DNA, 19 bp, Homo sapiens
  siRNA target sequence for GPR133 (NM_198827.1,945-963).
cctgcagggactgttcata

SEQ ID NO: 243326 - DNA, 19 bp, Homo sapiens
  siRNA target sequence for GPR133 (NM_198827.1,1074-1092).
ccactcggacctcatgaat

SEQ ID NO: 243327 - DNA, 19 bp, Homo sapiens
  siRNA target sequence for GPR143 (NM_000273.1,326-344).
ccaccgtgtggttaggatt

SEQ ID NO: 243328 - DNA, 19 bp, Homo sapiens
  siRNA target sequence for GPR143 (NM_000273.1,335-353).
ggttaggattcccaaattt

SEQ ID NO: 243329 - DNA, 19 bp, Homo sapiens
  siRNA target sequence for GPR143 (NM_000273.1,358-376).
gacagcgtctcggatatga

SEQ ID NO: 243330 - DNA, 19 bp, Homo sapiens
  siRNA target sequence for GPR143 (NM_000273.1,575-593).
gagccgccatgctctacta

SEQ ID NO: 243331 - DNA, 19 bp, Homo sapiens
  siRNA target sequence for GPR143 (NM_000273.1,716-734).
cagtggcctctttacttaa

SEQ ID NO: 243332 - DNA, 19 bp, Homo sapiens
  siRNA target sequence for GPR143 (NM_000273.1,720-738).
ggcctctttacttaaagga

SEQ ID NO: 243333 - DNA, 19 bp, Homo sapiens
  siRNA target sequence for GPR143 (NM_000273.1,770-788).
ggatgggagccgtgatcaa

SEQ ID NO: 243334 - DNA, 19 bp, Homo sapiens
  siRNA target sequence for GPR143 (NM_000273.1,781-799).
gtgatcaagatccgatttt

SEQ ID NO: 243335 - DNA, 19 bp, Homo sapiens
  siRNA target sequence for GPR143 (NM_000273.1,827-845).
gttggttgtcgaatatcat

SEQ ID NO: 243336 - DNA, 19 bp, Homo sapiens
  siRNA target sequence for GPR143 (NM_000273.1,830-848).
ggttgtcgaatatcatcaa

SEQ ID NO: 243337 - DNA, 19 bp, Homo sapiens
  siRNA target sequence for GPR143 (NM_000273.1,834-852).
gtcgaatatcatcaatgaa

SEQ ID NO: 243338 - DNA, 19 bp, Homo sapiens
  siRNA target sequence for GPR143 (NM_000273.1,843-861).
catcaatgaaagcctttta

SEQ ID NO: 243339 - DNA, 19 bp, Homo sapiens
  siRNA target sequence for GPR143 (NM_000273.1,873-891).
gatgcaaacagatatcaat

SEQ ID NO: 243340 - DNA, 19 bp, Homo sapiens
  siRNA target sequence for GPR143 (NM_000273.1,924-942).
caagaccacatggtttatt

SEQ ID NO: 243341 - DNA, 19 bp, Homo sapiens
  siRNA target sequence for GPR143 (NM_000273.1,1004-1022).
gatgcagcctgggttttca

SEQ ID NO: 243342 - DNA, 19 bp, Homo sapiens
  siRNA target sequence for GPR143 (NM_000273.1,1170-1188).
gctgtctgaaggttctgat

SEQ ID NO: 243343 - DNA, 19 bp, Homo sapiens
  siRNA target sequence for GPR157 (NM_024980.2,570-588).
gccattgcgctctacttgt

SEQ ID NO: 243344 - DNA, 19 bp, Homo sapiens
  siRNA target sequence for GPR157 (NM_024980.2,571-589).
ccattgcgctctacttgta

SEQ ID NO: 243345 - DNA, 19 bp, Homo sapiens
  siRNA target sequence for GPR64 (NM_005756.1,106-124).
ggcagaactgaagaagttt

SEQ ID NO: 243346 - DNA, 19 bp, Homo sapiens
  siRNA target sequence for GPR64 (NM_005756.1,121-139).
gttttactgacgttcaaga

SEQ ID NO: 243347 - DNA, 19 bp, Homo sapiens
  siRNA target sequence for GPR64 (NM_005756.1,217-235).
ccaccacctgctaaattat

SEQ ID NO: 243348 - DNA, 19 bp, Homo sapiens
  siRNA target sequence for GPR64 (NM_005756.1,258-276).
ctccaatgaggttgaaaca

SEQ ID NO: 243349 - DNA, 19 bp, Homo sapiens
  siRNA target sequence for GPR64 (NM_005756.1,261-279).
caatgaggttgaaacaaca

SEQ ID NO: 243350 - DNA, 19 bp, Homo sapiens
  siRNA target sequence for GPR64 (NM_005756.1,303-321).
cttactcccttcaaacgaa

SEQ ID NO: 243351 - DNA, 19 bp, Homo sapiens
  siRNA target sequence for GPR64 (NM_005756.1,309-327).
cccttcaaacgaaacagaa

SEQ ID NO: 243352 - DNA, 19 bp, Homo sapiens
  siRNA target sequence for GPR64 (NM_005756.1,310-328).
ccttcaaacgaaacagaaa

SEQ ID NO: 243353 - DNA, 19 bp, Homo sapiens
  siRNA target sequence for GPR64 (NM_005756.1,311-329).
cttcaaacgaaacagaaaa

SEQ ID NO: 243354 - DNA, 19 bp, Homo sapiens
  siRNA target sequence for GPR64 (NM_005756.1,368-386).
gcgtcaaaccccagagaaa

SEQ ID NO: 243355 - DNA, 19 bp, Homo sapiens
  siRNA target sequence for GPR64 (NM_005756.1,472-490).
ccccagaatcaacatataa

SEQ ID NO: 243356 - DNA, 19 bp, Homo sapiens
  siRNA target sequence for GPR64 (NM_005756.1,477-495).
gaatcaacatataacgaat

SEQ ID NO: 243357 - DNA, 19 bp, Homo sapiens
  siRNA target sequence for GPR64 (NM_005756.1,509-527).
gagtcctgtctctaagtga

SEQ ID NO: 243358 - DNA, 19 bp, Homo sapiens
  siRNA target sequence for GPR64 (NM_005756.1,565-583).
ctaagtgagacttacttta

SEQ ID NO: 243359 - DNA, 19 bp, Homo sapiens
  siRNA target sequence for GPR64 (NM_005756.1,573-591).
gacttactttataatgtgt

SEQ ID NO: 243360 - DNA, 19 bp, Homo sapiens
  siRNA target sequence for GPR64 (NM_005756.1,920-938).
cacctgtgacccacaatgt

SEQ ID NO: 243361 - DNA, 19 bp, Homo sapiens
  siRNA target sequence for GPR64 (NM_005756.1,933-951).
caatgttccctctccaata

SEQ ID NO: 243362 - DNA, 19 bp, Homo sapiens
  siRNA target sequence for GPR64 (NM_005756.1,1019-1037).
ccccacagtctgaaacgat

SEQ ID NO: 243363 - DNA, 19 bp, Homo sapiens
  siRNA target sequence for GPR64 (NM_005756.1,1081-1099).
cctgtgaaagcctcatttt

SEQ ID NO: 243364 - DNA, 19 bp, Homo sapiens
  siRNA target sequence for GPR64 (NM_005756.1,1115-1133).
ctgcccctgcgaatgtcaa

SEQ ID NO: 243365 - DNA, 19 bp, Homo sapiens
  siRNA target sequence for GPR64 (NM_005756.1,1120-1138).
cctgcgaatgtcaacacta

SEQ ID NO: 243366 - DNA, 19 bp, Homo sapiens
  siRNA target sequence for GPR64 (NM_005756.1,1170-1188).
caacaccagcagtatttct

SEQ ID NO: 243367 - DNA, 19 bp, Homo sapiens
  siRNA target sequence for GPR64 (NM_005756.1,1276-1294).
gtcagcagactccttcatt

SEQ ID NO: 243368 - DNA, 19 bp, Homo sapiens
  siRNA target sequence for GPR64 (NM_005756.1,1322-1340).
ctcaaagattgctgaaagt

SEQ ID NO: 243369 - DNA, 19 bp, Homo sapiens
  siRNA target sequence for GPR64 (NM_005756.1,1368-1386).
cttttcaaacacgactata

SEQ ID NO: 243370 - DNA, 19 bp, Homo sapiens
  siRNA target sequence for GPR64 (NM_005756.1,1432-1450).
gccagtagtttcaacacaa

SEQ ID NO: 243371 - DNA, 19 bp, Homo sapiens
  siRNA target sequence for GPR64 (NM_005756.1,1463-1481).
cccaagaccctgcaaatct

SEQ ID NO: 243372 - DNA, 19 bp, Homo sapiens
  siRNA target sequence for GPR64 (NM_005756.1,1464-1482).
ccaagaccctgcaaatctt

SEQ ID NO: 243373 - DNA, 19 bp, Homo sapiens
  siRNA target sequence for GPR64 (NM_005756.1,1501-1519).
caagctcctgagaacagta

SEQ ID NO: 243374 - DNA, 19 bp, Homo sapiens
  siRNA target sequence for GPR64 (NM_005756.1,1512-1530).
gaacagtattggcacaatt

SEQ ID NO: 243375 - DNA, 19 bp, Homo sapiens
  siRNA target sequence for GPR64 (NM_005756.1,1515-1533).
cagtattggcacaattact

SEQ ID NO: 243376 - DNA, 19 bp, Homo sapiens
  siRNA target sequence for GPR64 (NM_005756.1,1541-1559).
catcgctgatgaataattt

SEQ ID NO: 243377 - DNA, 19 bp, Homo sapiens
  siRNA target sequence for GPR64 (NM_005756.1,1586-1604).
ccagggttcagttcaattt

SEQ ID NO: 243378 - DNA, 19 bp, Homo sapiens
  siRNA target sequence for GPR64 (NM_005756.1,1587-1605).
cagggttcagttcaatttt

SEQ ID NO: 243379 - DNA, 19 bp, Homo sapiens
  siRNA target sequence for GPR64 (NM_005756.1,1654-1672).
ctgatcagctacgtcatat

SEQ ID NO: 243380 - DNA, 19 bp, Homo sapiens
  siRNA target sequence for GPR64 (NM_005756.1,1743-1761).
cccgagccaggatgagtta

SEQ ID NO: 243381 - DNA, 19 bp, Homo sapiens
  siRNA target sequence for GPR64 (NM_005756.1,1744-1762).
ccgagccaggatgagttaa

SEQ ID NO: 243382 - DNA, 19 bp, Homo sapiens
  siRNA target sequence for GPR64 (NM_005756.1,1746-1764).
gagccaggatgagttaaca

SEQ ID NO: 243383 - DNA, 19 bp, Homo sapiens
  siRNA target sequence for GPR64 (NM_005756.1,1758-1776).
gttaacagtgagatgtgta

SEQ ID NO: 243384 - DNA, 19 bp, Homo sapiens
  siRNA target sequence for GPR64 (NM_005756.1,1782-1800).
ggacttgggcagaaatggt

SEQ ID NO: 243385 - DNA, 19 bp, Homo sapiens
  siRNA target sequence for GPR64 (NM_005756.1,1840-1858).
gacaggagattgaatgaaa

SEQ ID NO: 243386 - DNA, 19 bp, Homo sapiens
  siRNA target sequence for GPR64 (NM_005756.1,1844-1862).
ggagattgaatgaaaccat

SEQ ID NO: 243387 - DNA, 19 bp, Homo sapiens
  siRNA target sequence for GPR64 (NM_005756.1,1894-1912).
gttctgctggacctatcta

SEQ ID NO: 243388 - DNA, 19 bp, Homo sapiens
  siRNA target sequence for GPR64 (NM_005756.1,1941-1959).
ggctctgacgttcattaca

SEQ ID NO: 243389 - DNA, 19 bp, Homo sapiens
  siRNA target sequence for GPR64 (NM_005756.1,1942-1960).
gctctgacgttcattacat

SEQ ID NO: 243390 - DNA, 19 bp, Homo sapiens
  siRNA target sequence for GPR64 (NM_005756.1,1943-1961).
ctctgacgttcattacata

SEQ ID NO: 243391 - DNA, 19 bp, Homo sapiens
  siRNA target sequence for GPR64 (NM_005756.1,1945-1963).
ctgacgttcattacatata

SEQ ID NO: 243392 - DNA, 19 bp, Homo sapiens
  siRNA target sequence for GPR64 (NM_005756.1,1947-1965).
gacgttcattacatatatt

SEQ ID NO: 243393 - DNA, 19 bp, Homo sapiens
  siRNA target sequence for GPR64 (NM_005756.1,1966-1984).
ggttgtgggctttcatcaa

SEQ ID NO: 243394 - DNA, 19 bp, Homo sapiens
  siRNA target sequence for GPR64 (NM_005756.1,1998-2016).
gactcttgtaacctacata

SEQ ID NO: 243395 - DNA, 19 bp, Homo sapiens
  siRNA target sequence for GPR64 (NM_005756.1,2034-2052).
gagggattacccttccaaa

SEQ ID NO: 243396 - DNA, 19 bp, Homo sapiens
  siRNA target sequence for GPR64 (NM_005756.1,2109-2127).
ctcgtggattgctctgtat

SEQ ID NO: 243397 - DNA, 19 bp, Homo sapiens
  siRNA target sequence for GPR64 (NM_005756.1,2144-2162).
gcatctcagtggctgtatt

SEQ ID NO: 243398 - DNA, 19 bp, Homo sapiens
  siRNA target sequence for GPR64 (NM_005756.1,2145-2163).
catctcagtggctgtattt

SEQ ID NO: 243399 - DNA, 19 bp, Homo sapiens
  siRNA target sequence for GPR64 (NM_005756.1,2200-2218).
ggcctagaagcattccata

SEQ ID NO: 243400 - DNA, 19 bp, Homo sapiens
  siRNA target sequence for GPR64 (NM_005756.1,2220-2238).
gtacctggcccttgtcaaa

SEQ ID NO: 243401 - DNA, 19 bp, Homo sapiens
  siRNA target sequence for GPR64 (NM_005756.1,2223-2241).
cctggcccttgtcaaagta

SEQ ID NO: 243402 - DNA, 19 bp, Homo sapiens
  siRNA target sequence for GPR64 (NM_005756.1,2224-2242).
ctggcccttgtcaaagtat

SEQ ID NO: 243403 - DNA, 19 bp, Homo sapiens
  siRNA target sequence for GPR64 (NM_005756.1,2226-2244).
ggcccttgtcaaagtattt

SEQ ID NO: 243404 - DNA, 19 bp, Homo sapiens
  siRNA target sequence for GPR64 (NM_005756.1,2227-2245).
gcccttgtcaaagtattta

SEQ ID NO: 243405 - DNA, 19 bp, Homo sapiens
  siRNA target sequence for GPR64 (NM_005756.1,2230-2248).
cttgtcaaagtatttaata

SEQ ID NO: 243406 - DNA, 19 bp, Homo sapiens
  siRNA target sequence for GPR64 (NM_005756.1,2327-2345).
ctatatccccagataacta

SEQ ID NO: 243407 - DNA, 19 bp, Homo sapiens
  siRNA target sequence for GPR64 (NM_005756.1,2362-2380).
gggaaattccccaatggtt

SEQ ID NO: 243408 - DNA, 19 bp, Homo sapiens
  siRNA target sequence for GPR64 (NM_005756.1,2394-2412).
ctgctggatcaacaacaat

SEQ ID NO: 243409 - DNA, 19 bp, Homo sapiens
  siRNA target sequence for GPR64 (NM_005756.1,2437-2455).
ggatatttctgtgtgatat

SEQ ID NO: 243410 - DNA, 19 bp, Homo sapiens
  siRNA target sequence for GPR64 (NM_005756.1,2461-2479).
ctgaacgtcagcatgttca

SEQ ID NO: 243411 - DNA, 19 bp, Homo sapiens
  siRNA target sequence for GPR64 (NM_005756.1,2463-2481).
gaacgtcagcatgttcatt

SEQ ID NO: 243412 - DNA, 19 bp, Homo sapiens
  siRNA target sequence for GPR64 (NM_005756.1,2490-2508).
ggttcagctctgtcgaatt

SEQ ID NO: 243413 - DNA, 19 bp, Homo sapiens
  siRNA target sequence for GPR64 (NM_005756.1,2491-2509).
gttcagctctgtcgaatta

SEQ ID NO: 243414 - DNA, 19 bp, Homo sapiens
  siRNA target sequence for GPR64 (NM_005756.1,2532-2550).
ccagcgaaaaaccagtatt

SEQ ID NO: 243415 - DNA, 19 bp, Homo sapiens
  siRNA target sequence for GPR64 (NM_005756.1,2535-2553).
gcgaaaaaccagtattcaa

SEQ ID NO: 243416 - DNA, 19 bp, Homo sapiens
  siRNA target sequence for GPR64 (NM_005756.1,2564-2582).
gtatcgctggccttacatt

SEQ ID NO: 243417 - DNA, 19 bp, Homo sapiens
  siRNA target sequence for GPR64 (NM_005756.1,2568-2586).
cgctggccttacattttta

SEQ ID NO: 243418 - DNA, 19 bp, Homo sapiens
  siRNA target sequence for GPR64 (NM_005756.1,2618-2636).
cctggggaccagttaacgt

SEQ ID NO: 243419 - DNA, 19 bp, Homo sapiens
  siRNA target sequence for GPR64 (NM_005756.1,2674-2692).
caaggatttttcatattca

SEQ ID NO: 243420 - DNA, 19 bp, Homo sapiens
  siRNA target sequence for GPR64 (NM_005756.1,2727-2745).
gcaatggaggcggtatctt

SEQ ID NO: 243421 - DNA, 19 bp, Homo sapiens
  siRNA target sequence for GPR64 (NM_005756.1,2728-2746).
caatggaggcggtatcttt

SEQ ID NO: 243422 - DNA, 19 bp, Homo sapiens
  siRNA target sequence for GPR64 (NM_005756.1,2733-2751).
gaggcggtatctttgttgt

SEQ ID NO: 243423 - DNA, 19 bp, Homo sapiens
  siRNA target sequence for GPR64 (NM_005756.1,2784-2802).
gagtaaaactgctactaat

SEQ ID NO: 243424 - DNA, 19 bp, Homo sapiens
  siRNA target sequence for GPR64 (NM_005756.1,2792-2810).
ctgctactaatggtttaaa

SEQ ID NO: 243425 - DNA, 19 bp, Homo sapiens
  siRNA target sequence for GPR64 (NM_005756.1,2794-2812).
gctactaatggtttaaaga

SEQ ID NO: 243426 - DNA, 19 bp, Homo sapiens
  siRNA target sequence for GPR64 (NM_005756.1,2830-2848).
ggagtgtccagctcttcaa

SEQ ID NO: 243427 - DNA, 19 bp, Homo sapiens
  siRNA target sequence for GPR64 (NM_005756.1,2833-2851).
gtgtccagctcttcaaatt

SEQ ID NO: 243428 - DNA, 19 bp, Homo sapiens
  siRNA target sequence for GPR64 (NM_005756.1,2882-2900).
ccaccacactgctagtgaa

SEQ ID NO: 243429 - DNA, 19 bp, Homo sapiens
  siRNA target sequence for GPR64 (NM_005756.1,2888-2906).
cactgctagtgaataatga

SEQ ID NO: 243430 - DNA, 19 bp, Homo sapiens
  siRNA target sequence for GPR64 (NM_005756.1,2890-2908).
ctgctagtgaataatgatt

SEQ ID NO: 243431 - DNA, 19 bp, Homo sapiens
  siRNA target sequence for GPR64 (NM_005756.1,2917-2935).
cacgcaagcgggaatggaa

SEQ ID NO: 243432 - DNA, 19 bp, Homo sapiens
  siRNA target sequence for GPR64 (NM_005756.1,2952-2970).
gaatggggtctcttttagt

SEQ ID NO: 243433 - DNA, 19 bp, Homo sapiens
  siRNA target sequence for GPR64 (NM_005756.1,2986-3004).
gtgtgccttcacgatttca

SEQ ID NO: 243434 - DNA, 19 bp, Homo sapiens
  siRNA target sequence for GPR64 (NM_005756.1,3084-3102).
gcggggaagcttacacttt

SEQ ID NO: 243435 - DNA, 19 bp, Homo sapiens
  siRNA target sequence for GPR64 (NM_005756.1,3085-3103).
cggggaagcttacacttta

SEQ ID NO: 243436 - DNA, 19 bp, Homo sapiens
  siRNA target sequence for GPR64 (NM_005756.1,3086-3104).
ggggaagcttacactttat

SEQ ID NO: 243437 - DNA, 19 bp, Homo sapiens
  siRNA target sequence for GPR64 (NM_005756.1,3087-3105).
gggaagcttacactttatt

SEQ ID NO: 243438 - DNA, 19 bp, Homo sapiens
  siRNA target sequence for GPR64 (NM_005756.1,3097-3115).
cactttattgagcaaatgt

SEQ ID NO: 243439 - DNA, 19 bp, Homo sapiens
  siRNA target sequence for GPR97 (NM_170776.3,139-157).
cgacctcaggtcaggaaaa

SEQ ID NO: 243440 - DNA, 19 bp, Homo sapiens
  siRNA target sequence for GPR97 (NM_170776.3,184-202).
gcctggggagcaacaacat

SEQ ID NO: 243441 - DNA, 19 bp, Homo sapiens
  siRNA target sequence for GPR97 (NM_170776.3,291-309).
cagagatactggctaaact

SEQ ID NO: 243442 - DNA, 19 bp, Homo sapiens
  siRNA target sequence for GPR97 (NM_170776.3,395-413).
cactgcagaagacttctat

SEQ ID NO: 243443 - DNA, 19 bp, Homo sapiens
  siRNA target sequence for GPR97 (NM_170776.3,489-507).
cccaagagcctttttcgat

SEQ ID NO: 243444 - DNA, 19 bp, Homo sapiens
  siRNA target sequence for GPR97 (NM_170776.3,606-624).
ggcagcggcgtgttgaaca

SEQ ID NO: 243445 - DNA, 19 bp, Homo sapiens
  siRNA target sequence for GPR97 (NM_170776.3,607-625).
gcagcggcgtgttgaacaa

SEQ ID NO: 243446 - DNA, 19 bp, Homo sapiens
  siRNA target sequence for GPR97 (NM_170776.3,608-626).
cagcggcgtgttgaacaat

SEQ ID NO: 243447 - DNA, 19 bp, Homo sapiens
  siRNA target sequence for GPR97 (NM_170776.3,916-934).
gtggggtctccatgatctt

SEQ ID NO: 243448 - DNA, 19 bp, Homo sapiens
  siRNA target sequence for GPR97 (NM_170776.3,939-957).
gccttcaccattattcttt

SEQ ID NO: 243449 - DNA, 19 bp, Homo sapiens
  siRNA target sequence for GPR97 (NM_170776.3,940-958).
ccttcaccattattcttta

SEQ ID NO: 243450 - DNA, 19 bp, Homo sapiens
  siRNA target sequence for GPR97 (NM_170776.3,1114-1132).
gggctgtcttccactactt

SEQ ID NO: 243451 - DNA, 19 bp, Homo sapiens
  siRNA target sequence for GPR97 (NM_170776.3,1207-1225).
cctacttcgggcactactt

SEQ ID NO: 243452 - DNA, 19 bp, Homo sapiens
  siRNA target sequence for GPR97 (NM_170776.3,1369-1387).
ccatgtacgccctctatat

SEQ ID NO: 243453 - DNA, 19 bp, Homo sapiens
  siRNA target sequence for GPR97 (NM_170776.3,1690-1708).
cctcctctactgcaagatt

SEQ ID NO: 243454 - DNA, 19 bp, Homo sapiens
  siRNA target sequence for GPR97 (NM_170776.3,1715-1733).
ggcccactccgcatctcaa

SEQ ID NO: 243455 - DNA, 19 bp, Homo sapiens
  siRNA target sequence for GPR97 (NM_170776.3,1718-1736).
ccactccgcatctcaagaa

SEQ ID NO: 243456 - DNA, 19 bp, Homo sapiens
  siRNA target sequence for GPR97 (NM_170776.3,1719-1737).
cactccgcatctcaagaat

SEQ ID NO: 243457 - DNA, 19 bp, Homo sapiens
  siRNA target sequence for LANCL1 (NM_006055.1,115-133).
gggccttcccgaatcctta

SEQ ID NO: 243458 - DNA, 19 bp, Homo sapiens
  siRNA target sequence for LANCL1 (NM_006055.1,116-134).
ggccttcccgaatccttat

SEQ ID NO: 243459 - DNA, 19 bp, Homo sapiens
  siRNA target sequence for LANCL1 (NM_006055.1,124-142).
cgaatccttatgctgatta

SEQ ID NO: 243460 - DNA, 19 bp, Homo sapiens
  siRNA target sequence for LANCL1 (NM_006055.1,152-170).
cctggccgaaggctacttt

SEQ ID NO: 243461 - DNA, 19 bp, Homo sapiens
  siRNA target sequence for LANCL1 (NM_006055.1,155-173).
ggccgaaggctactttgat

SEQ ID NO: 243462 - DNA, 19 bp, Homo sapiens
  siRNA target sequence for LANCL1 (NM_006055.1,202-220).
cacaacgcttgaccaataa

SEQ ID NO: 243463 - DNA, 19 bp, Homo sapiens
  siRNA target sequence for LANCL1 (NM_006055.1,204-222).
caacgcttgaccaataaga

SEQ ID NO: 243464 - DNA, 19 bp, Homo sapiens
  siRNA target sequence for LANCL1 (NM_006055.1,303-321).
ggtattgctgtgctttact

SEQ ID NO: 243465 - DNA, 19 bp, Homo sapiens
  siRNA target sequence for LANCL1 (NM_006055.1,362-380).
gttagcacatggctatgta

SEQ ID NO: 243466 - DNA, 19 bp, Homo sapiens
  siRNA target sequence for LANCL1 (NM_006055.1,384-402).
caaagtctgaactgcttaa

SEQ ID NO: 243467 - DNA, 19 bp, Homo sapiens
  siRNA target sequence for LANCL1 (NM_006055.1,408-426).
cgctccatcaccttccttt

SEQ ID NO: 243468 - DNA, 19 bp, Homo sapiens
  siRNA target sequence for LANCL1 (NM_006055.1,453-471).
gccgctgtgctatatcaca

SEQ ID NO: 243469 - DNA, 19 bp, Homo sapiens
  siRNA target sequence for LANCL1 (NM_006055.1,459-477).
gtgctatatcacaagatga

SEQ ID NO: 243470 - DNA, 19 bp, Homo sapiens
  siRNA target sequence for LANCL1 (NM_006055.1,510-528).
cggctaattcacctaaata

SEQ ID NO: 243471 - DNA, 19 bp, Homo sapiens
  siRNA target sequence for LANCL1 (NM_006055.1,511-529).
ggctaattcacctaaataa

SEQ ID NO: 243472 - DNA, 19 bp, Homo sapiens
  siRNA target sequence for LANCL1 (NM_006055.1,513-531).
ctaattcacctaaataaga

SEQ ID NO: 243473 - DNA, 19 bp, Homo sapiens
  siRNA target sequence for LANCL1 (NM_006055.1,537-555).
cctcatgctccaaatgaaa

SEQ ID NO: 243474 - DNA, 19 bp, Homo sapiens
  siRNA target sequence for LANCL1 (NM_006055.1,565-583).
ggcgaataggctacatcta

SEQ ID NO: 243475 - DNA, 19 bp, Homo sapiens
  siRNA target sequence for LANCL1 (NM_006055.1,566-584).
gcgaataggctacatctat

SEQ ID NO: 243476 - DNA, 19 bp, Homo sapiens
  siRNA target sequence for LANCL1 (NM_006055.1,623-641).
gattcctcaaagccatatt

SEQ ID NO: 243477 - DNA, 19 bp, Homo sapiens
  siRNA target sequence for LANCL1 (NM_006055.1,681-699).
ctagctaggaagagaaact

SEQ ID NO: 243478 - DNA, 19 bp, Homo sapiens
  siRNA target sequence for LANCL1 (NM_006055.1,706-724).
caaagtctccactgatgta

SEQ ID NO: 243479 - DNA, 19 bp, Homo sapiens
  siRNA target sequence for LANCL1 (NM_006055.1,710-728).
gtctccactgatgtatgaa

SEQ ID NO: 243480 - DNA, 19 bp, Homo sapiens
  siRNA target sequence for LANCL1 (NM_006055.1,715-733).
cactgatgtatgaatggta

SEQ ID NO: 243481 - DNA, 19 bp, Homo sapiens
  siRNA target sequence for LANCL1 (NM_006055.1,765-783).
ctggctggaatttattact

SEQ ID NO: 243482 - DNA, 19 bp, Homo sapiens
  siRNA target sequence for LANCL1 (NM_006055.1,809-827).
gagccaagggaagttacat

SEQ ID NO: 243483 - DNA, 19 bp, Homo sapiens
  siRNA target sequence for LANCL1 (NM_006055.1,880-898).
gcaattaccctccatgtat

SEQ ID NO: 243484 - DNA, 19 bp, Homo sapiens
  siRNA target sequence for LANCL1 (NM_006055.1,881-899).
caattaccctccatgtata

SEQ ID NO: 243485 - DNA, 19 bp, Homo sapiens
  siRNA target sequence for LANCL1 (NM_006055.1,889-907).
ctccatgtataggtgataa

SEQ ID NO: 243486 - DNA, 19 bp, Homo sapiens
  siRNA target sequence for LANCL1 (NM_006055.1,940-958).
cccctggggtaatctacat

SEQ ID NO: 243487 - DNA, 19 bp, Homo sapiens
  siRNA target sequence for LANCL1 (NM_006055.1,966-984).
caggcctataaggtattca

SEQ ID NO: 243488 - DNA, 19 bp, Homo sapiens
  siRNA target sequence for LANCL1 (NM_006055.1,968-986).
ggcctataaggtattcaga

SEQ ID NO: 243489 - DNA, 19 bp, Homo sapiens
  siRNA target sequence for LANCL1 (NM_006055.1,1137-1155).
ctgtatagggcctgtaagt

SEQ ID NO: 243490 - DNA, 19 bp, Homo sapiens
  siRNA target sequence for LANCL1 (NM_006055.1,1139-1157).
gtatagggcctgtaagttt

SEQ ID NO: 243491 - DNA, 19 bp, Homo sapiens
  siRNA target sequence for LANCL1 (NM_006055.1,1158-1176).
gctgaatggtgcttagagt

SEQ ID NO: 243492 - DNA, 19 bp, Homo sapiens
  siRNA target sequence for LANCL1 (NM_006055.1,1228-1246).
gaatggctggaacaatata

SEQ ID NO: 243493 - DNA, 19 bp, Homo sapiens
  siRNA target sequence for LANCL1 (NM_006055.1,1234-1252).
ctggaacaatatatttcct

SEQ ID NO: 243494 - DNA, 19 bp, Homo sapiens
  siRNA target sequence for LANCL1 (NM_006055.1,1259-1277).
cctgctagtccccacaaaa

SEQ ID NO: 243495 - DNA, 19 bp, Homo sapiens
  siRNA target sequence for LANCL1 (NM_006055.1,1279-1297).
ccaggttccctgcatttga

SEQ ID NO: 243496 - DNA, 19 bp, Homo sapiens
  siRNA target sequence for TAS2R38 (NM_176817.1,21-39).
ccgcactgtgtcctatgaa

SEQ ID NO: 243497 - DNA, 19 bp, Homo sapiens
  siRNA target sequence for TAS2R38 (NM_176817.1,91-109).
ctgaccaatgccttcgttt

SEQ ID NO: 243498 - DNA, 19 bp, Homo sapiens
  siRNA target sequence for TAS2R38 (NM_176817.1,277-295).
caagccatcatcatgctat

SEQ ID NO: 243499 - DNA, 19 bp, Homo sapiens
  siRNA target sequence for TAS2R38 (NM_176817.1,281-299).
ccatcatcatgctatggat

SEQ ID NO: 243500 - DNA, 19 bp, Homo sapiens
  siRNA target sequence for TAS2R38 (NM_176817.1,607-625).
gtgcctcctttcctattgt

SEQ ID NO: 243501 - DNA, 19 bp, Homo sapiens
  siRNA target sequence for TAS2R38 (NM_176817.1,619-637).
ctattgtttctggtttctt

SEQ ID NO: 243502 - DNA, 19 bp, Homo sapiens
  siRNA target sequence for TAS2R38 (NM_176817.1,714-732).
cctggaggcccacattaaa

SEQ ID NO: 243503 - DNA, 19 bp, Homo sapiens
  siRNA target sequence for TAS2R38 (NM_176817.1,799-817).
gtgcccctactgattctgt

SEQ ID NO: 243504 - DNA, 19 bp, Homo sapiens
  siRNA target sequence for TAS2R39 (NM_176881.1,3-21).
gctagggagatgttttcct

SEQ ID NO: 243505 - DNA, 19 bp, Homo sapiens
  siRNA target sequence for TAS2R39 (NM_176881.1,99-117).
catcaccttaattttagca

SEQ ID NO: 243506 - DNA, 19 bp, Homo sapiens
  siRNA target sequence for TAS2R39 (NM_176881.1,104-122).
ccttaattttagcagtttt

SEQ ID NO: 243507 - DNA, 19 bp, Homo sapiens
  siRNA target sequence for TAS2R39 (NM_176881.1,116-134).
cagttttacttgctgaata

SEQ ID NO: 243508 - DNA, 19 bp, Homo sapiens
  siRNA target sequence for TAS2R39 (NM_176881.1,128-146).
ctgaatacctcattggtat

SEQ ID NO: 243509 - DNA, 19 bp, Homo sapiens
  siRNA target sequence for TAS2R39 (NM_176881.1,138-156).
cattggtatcattgcaaat

SEQ ID NO: 243510 - DNA, 19 bp, Homo sapiens
  siRNA target sequence for TAS2R39 (NM_176881.1,143-161).
gtatcattgcaaatggttt

SEQ ID NO: 243511 - DNA, 19 bp, Homo sapiens
  siRNA target sequence for TAS2R39 (NM_176881.1,158-176).
gtttcatcatggctataca

SEQ ID NO: 243512 - DNA, 19 bp, Homo sapiens
  siRNA target sequence for TAS2R39 (NM_176881.1,226-244).
ctggttttcctgagtgtat

SEQ ID NO: 243513 - DNA, 19 bp, Homo sapiens
  siRNA target sequence for TAS2R39 (NM_176881.1,290-308).
gctcaacctccctaagttt

SEQ ID NO: 243514 - DNA, 19 bp, Homo sapiens
  siRNA target sequence for TAS2R39 (NM_176881.1,297-315).
ctccctaagtttttattct

SEQ ID NO: 243515 - DNA, 19 bp, Homo sapiens
  siRNA target sequence for TAS2R39 (NM_176881.1,314-332).
ctgaagacgctgtatatta

SEQ ID NO: 243516 - DNA, 19 bp, Homo sapiens
  siRNA target sequence for TAS2R39 (NM_176881.1,484-502).
ctgtggctgtccgtgttta

SEQ ID NO: 243517 - DNA, 19 bp, Homo sapiens
  siRNA target sequence for TAS2R39 (NM_176881.1,518-536).
gcatgttctgcatcaacat

SEQ ID NO: 243518 - DNA, 19 bp, Homo sapiens
  siRNA target sequence for TAS2R39 (NM_176881.1,540-558).
cactgtgtattgtaacaat

SEQ ID NO: 243519 - DNA, 19 bp, Homo sapiens
  siRNA target sequence for TAS2R39 (NM_176881.1,544-562).
gtgtattgtaacaattctt

SEQ ID NO: 243520 - DNA, 19 bp, Homo sapiens
  siRNA target sequence for TAS2R39 (NM_176881.1,619-637).
gtcggtctggcttttttct

SEQ ID NO: 243521 - DNA, 19 bp, Homo sapiens
  siRNA target sequence for TAS2R39 (NM_176881.1,909-927).
ccctgccagccactcaatt

SEQ ID NO: 243522 - DNA, 19 bp, Homo sapiens
  siRNA target sequence for TAS2R39 (NM_176881.1,917-935).
gccactcaattctactgat

SEQ ID NO: 243523 - DNA, 19 bp, Homo sapiens
  siRNA target sequence for TAS2R39 (NM_176881.1,918-936).
ccactcaattctactgatt

SEQ ID NO: 243524 - DNA, 19 bp, Homo sapiens
  siRNA target sequence for TAS2R39 (NM_176881.1,923-941).
caattctactgattcaaga

SEQ ID NO: 243525 - DNA, 19 bp, Homo sapiens
  siRNA target sequence for TAS2R39 (NM_176881.1,987-1005).
catctttacccaaaagagt

SEQ ID NO: 243526 - DNA, 19 bp, Homo sapiens
  siRNA target sequence for TAS2R40 (NM_176882.1,67-85).
gtggtctccggaatagagt

SEQ ID NO: 243527 - DNA, 19 bp, Homo sapiens
  siRNA target sequence for TAS2R40 (NM_176882.1,138-156).
gtgggccaggggcaaaaca

SEQ ID NO: 243528 - DNA, 19 bp, Homo sapiens
  siRNA target sequence for TAS2R40 (NM_176882.1,161-179).
ccactggtgaccgcattat

SEQ ID NO: 243529 - DNA, 19 bp, Homo sapiens
  siRNA target sequence for TAS2R40 (NM_176882.1,164-182).
ctggtgaccgcattatgtt

SEQ ID NO: 243530 - DNA, 19 bp, Homo sapiens
  siRNA target sequence for TAS2R40 (NM_176882.1,166-184).
ggtgaccgcattatgttga

SEQ ID NO: 243531 - DNA, 19 bp, Homo sapiens
  siRNA target sequence for TAS2R40 (NM_176882.1,167-185).
gtgaccgcattatgttgat

SEQ ID NO: 243532 - DNA, 19 bp, Homo sapiens
  siRNA target sequence for TAS2R40 (NM_176882.1,242-260).
gtctgctattccgaattgt

SEQ ID NO: 243533 - DNA, 19 bp, Homo sapiens
  siRNA target sequence for TAS2R40 (NM_176882.1,244-262).
ctgctattccgaattgttt

SEQ ID NO: 243534 - DNA, 19 bp, Homo sapiens
  siRNA target sequence for TAS2R40 (NM_176882.1,246-264).
gctattccgaattgtttat

SEQ ID NO: 243535 - DNA, 19 bp, Homo sapiens
  siRNA target sequence for TAS2R40 (NM_176882.1,247-265).
ctattccgaattgtttata

SEQ ID NO: 243536 - DNA, 19 bp, Homo sapiens
  siRNA target sequence for TAS2R40 (NM_176882.1,252-270).
ccgaattgtttataaccaa

SEQ ID NO: 243537 - DNA, 19 bp, Homo sapiens
  siRNA target sequence for TAS2R40 (NM_176882.1,253-271).
cgaattgtttataaccaaa

SEQ ID NO: 243538 - DNA, 19 bp, Homo sapiens
  siRNA target sequence for TAS2R40 (NM_176882.1,275-293).
cagtgtatatcctcttcaa

SEQ ID NO: 243539 - DNA, 19 bp, Homo sapiens
  siRNA target sequence for TAS2R40 (NM_176882.1,480-498).
ctcgagagatgtcttcaat

SEQ ID NO: 243540 - DNA, 19 bp, Homo sapiens
  siRNA target sequence for TAS2R40 (NM_176882.1,576-594).
caacctggtatttttctat

SEQ ID NO: 243541 - DNA, 19 bp, Homo sapiens
  siRNA target sequence for TAS2R40 (NM_176882.1,778-796).
gcaattgctctatttcttt

SEQ ID NO: 243542 - DNA, 19 bp, Homo sapiens
  siRNA target sequence for TAS2R40 (NM_176882.1,807-825).
catctttgacacttacagt

SEQ ID NO: 243543 - DNA, 19 bp, Homo sapiens
  siRNA target sequence for TAS2R40 (NM_176882.1,936-954).
ccaagttcctctttaccta

SEQ ID NO: 243544 - DNA, 19 bp, Homo sapiens
  siRNA target sequence for TAS2R41 (NM_176883.1,65-83).
cagcgaatggcttcattgt

SEQ ID NO: 243545 - DNA, 19 bp, Homo sapiens
  siRNA target sequence for TAS2R41 (NM_176883.1,133-151).
gatatgatcctcattagct

SEQ ID NO: 243546 - DNA, 19 bp, Homo sapiens
  siRNA target sequence for TAS2R41 (NM_176883.1,245-263).
gacagttcttccatctaca

SEQ ID NO: 243547 - DNA, 19 bp, Homo sapiens
  siRNA target sequence for TAS2R41 (NM_176883.1,325-343).
gtgaagattgctaacatca

SEQ ID NO: 243548 - DNA, 19 bp, Homo sapiens
  siRNA target sequence for TAS2R41 (NM_176883.1,449-467).
gggtgaactaccctgtata

SEQ ID NO: 243549 - DNA, 19 bp, Homo sapiens
  siRNA target sequence for TAS2R41 (NM_176883.1,453-471).
gaactaccctgtatatcaa

SEQ ID NO: 243550 - DNA, 19 bp, Homo sapiens
  siRNA target sequence for TAS2R41 (NM_176883.1,459-477).
ccctgtatatcaagaattt

SEQ ID NO: 243551 - DNA, 19 bp, Homo sapiens
  siRNA target sequence for TAS2R41 (NM_176883.1,496-514).
gggaacatgacctacaagt

SEQ ID NO: 243552 - DNA, 19 bp, Homo sapiens
  siRNA target sequence for TAS2R41 (NM_176883.1,510-528).
caagtggaatacaaggata

SEQ ID NO: 243553 - DNA, 19 bp, Homo sapiens
  siRNA target sequence for TAS2R41 (NM_176883.1,524-542).
ggatagaaacatactattt

SEQ ID NO: 243554 - DNA, 19 bp, Homo sapiens
  siRNA target sequence for TAS2R41 (NM_176883.1,583-601).
gtttttctggtctcaatta

SEQ ID NO: 243555 - DNA, 19 bp, Homo sapiens
  siRNA target sequence for TAS2R41 (NM_176883.1,617-635).
ctctgaggaggcatactca

SEQ ID NO: 243556 - DNA, 19 bp, Homo sapiens
  siRNA target sequence for TAS2R41 (NM_176883.1,753-771).
cattgatgccgcaaaattt

SEQ ID NO: 243557 - DNA, 19 bp, Homo sapiens
  siRNA target sequence for TAS2R41 (NM_176883.1,757-775).
gatgccgcaaaatttatct

SEQ ID NO: 243558 - DNA, 19 bp, Homo sapiens
  siRNA target sequence for TAS2R41 (NM_176883.1,811-829).
gcagtctacctgtgcatat

SEQ ID NO: 243559 - DNA, 19 bp, Homo sapiens
  siRNA target sequence for TAS2R45 (NM_176886.1,552-570).
cttagtaccctttactgta

SEQ ID NO: 243560 - DNA, 19 bp, Homo sapiens
  siRNA target sequence for TAS2R46 (NM_176887.1,524-542).
caaatacaacggtaaccat

SEQ ID NO: 243561 - DNA, 19 bp, Homo sapiens
  siRNA target sequence for TAS2R48 (NM_176888.1,533-551).
ctgtaactactctagcaaa

SEQ ID NO: 243562 - DNA, 19 bp, Homo sapiens
  siRNA target sequence for TAS2R48 (NM_176888.1,561-579).
ctttactctgagcctaata

SEQ ID NO: 243563 - DNA, 19 bp, Homo sapiens
  siRNA target sequence for TAS2R48 (NM_176888.1,727-745).
ctgtgtataatcacatcaa

SEQ ID NO: 243564 - DNA, 19 bp, Homo sapiens
  siRNA target sequence for TAS2R49 (NM_176889.1,100-118).
gcctgggtcaagagacaaa

SEQ ID NO: 243565 - DNA, 19 bp, Homo sapiens
  siRNA target sequence for TAS2R49 (NM_176889.1,101-119).
cctgggtcaagagacaaaa

SEQ ID NO: 243566 - DNA, 19 bp, Homo sapiens
  siRNA target sequence for TAS2R49 (NM_176889.1,126-144).
ctcagctgatcaaattatt

SEQ ID NO: 243567 - DNA, 19 bp, Homo sapiens
  siRNA target sequence for TAS2R49 (NM_176889.1,369-387).
gaaggctaagagtgtagtt

SEQ ID NO: 243568 - DNA, 19 bp, Homo sapiens
  siRNA target sequence for TAS2R49 (NM_176889.1,425-443).
gtcaccttgtgatgaaaca

SEQ ID NO: 243569 - DNA, 19 bp, Homo sapiens
  siRNA target sequence for TAS2R49 (NM_176889.1,433-451).
gtgatgaaacacacgtata

SEQ ID NO: 243570 - DNA, 19 bp, Homo sapiens
  siRNA target sequence for TAS2R49 (NM_176889.1,435-453).
gatgaaacacacgtatata

SEQ ID NO: 243571 - DNA, 19 bp, Homo sapiens
  siRNA target sequence for TAS2R49 (NM_176889.1,538-556).
gccatgctagcaaacttga

SEQ ID NO: 243572 - DNA, 19 bp, Homo sapiens
  siRNA target sequence for TAS2R49 (NM_176889.1,727-745).
ctgtgtctaatcatatcgt

SEQ ID NO: 243573 - DNA, 19 bp, Homo sapiens
  siRNA target sequence for TAS2R49 (NM_176889.1,729-747).
gtgtctaatcatatcgttt

SEQ ID NO: 243574 - DNA, 19 bp, Homo sapiens
  siRNA target sequence for TAS2R49 (NM_176889.1,733-751).
ctaatcatatcgttttgga

SEQ ID NO: 243575 - DNA, 19 bp, Homo sapiens
  siRNA target sequence for TAS2R49 (NM_176889.1,738-756).
catatcgttttggaatttt

SEQ ID NO: 243576 - DNA, 19 bp, Homo sapiens
  siRNA target sequence for TAS2R49 (NM_176889.1,743-761).
cgttttggaattttaagat

SEQ ID NO: 243577 - DNA, 19 bp, Homo sapiens
  siRNA target sequence for TAS2R49 (NM_176889.1,759-777).
gatgcgaccaaaagaaatt

SEQ ID NO: 243578 - DNA, 19 bp, Homo sapiens
  siRNA target sequence for TAS2R50 (NM_176890.1,440-458).
caaacatggatgagagtat

SEQ ID NO: 243579 - DNA, 19 bp, Homo sapiens
  siRNA target sequence for TAS2R50 (NM_176890.1,549-567).
gagcttcataccctttact

SEQ ID NO: 243580 - DNA, 19 bp, Homo sapiens
  siRNA target sequence for TAS2R50 (NM_176890.1,723-741).
ctttctattcctaatcgtt

SEQ ID NO: 243581 - DNA, 19 bp, Homo sapiens
  siRNA target sequence for TAS2R50 (NM_176890.1,814-832).
cttgcattcgactcattca

SEQ ID NO: 243582 - DNA, 19 bp, Homo sapiens
  siRNA target sequence for TAS2R60 (NM_177437.1,29-47).
cttcggtgactgacaagaa

SEQ ID NO: 243583 - DNA, 19 bp, Homo sapiens
  siRNA target sequence for TAS2R60 (NM_177437.1,139-157).
gtgctacggagaatgttgt

SEQ ID NO: 243584 - DNA, 19 bp, Homo sapiens
  siRNA target sequence for TAS2R60 (NM_177437.1,156-174).
gttgccttgtgataagtta

SEQ ID NO: 243585 - DNA, 19 bp, Homo sapiens
  siRNA target sequence for TAS2R60 (NM_177437.1,203-221).
gtctgcagtcagtggtaat

SEQ ID NO: 243586 - DNA, 19 bp, Homo sapiens
  siRNA target sequence for TAS2R60 (NM_177437.1,217-235).
gtaatgggtaagaccattt

SEQ ID NO: 243587 - DNA, 19 bp, Homo sapiens
  siRNA target sequence for TAS2R60 (NM_177437.1,223-241).
ggtaagaccatttatgttt

SEQ ID NO: 243588 - DNA, 19 bp, Homo sapiens
  siRNA target sequence for TAS2R60 (NM_177437.1,459-477).
cttcaccaccattctattt

SEQ ID NO: 243589 - DNA, 19 bp, Homo sapiens
  siRNA target sequence for TAS2R60 (NM_177437.1,523-541).
ctacaaccttggaatgtca

SEQ ID NO: 243590 - DNA, 19 bp, Homo sapiens
  siRNA target sequence for TAS2R60 (NM_177437.1,556-574).
cggagctactgtgagaaat

SEQ ID NO: 243591 - DNA, 19 bp, Homo sapiens
  siRNA target sequence for TAS2R60 (NM_177437.1,557-575).
ggagctactgtgagaaatt

SEQ ID NO: 243592 - DNA, 19 bp, Homo sapiens
  siRNA target sequence for TAS2R60 (NM_177437.1,585-603).
ccctctaaaaatgattact

SEQ ID NO: 243593 - DNA, 19 bp, Homo sapiens
  siRNA target sequence for TAS2R60 (NM_177437.1,757-775).
gccatgctcttcatctcat

SEQ ID NO: 243594 - DNA, 19 bp, Homo sapiens
  siRNA target sequence for TAS2R60 (NM_177437.1,792-810).
gttcagtgctgcaggtatt

SEQ ID NO: 243595 - DNA, 19 bp, Homo sapiens
  siRNA target sequence for TAS2R60 (NM_177437.1,795-813).
cagtgctgcaggtattttt

SEQ ID NO: 243596 - DNA, 19 bp, Homo sapiens
  siRNA target sequence for TAS2R60 (NM_177437.1,840-858).
gtgggagtcagtgatttat

SEQ ID NO: 243597 - DNA, 19 bp, Homo sapiens
  siRNA target sequence for TAS2R60 (NM_177437.1,842-860).
gggagtcagtgatttatct

SEQ ID NO: 243598 - DNA, 19 bp, Homo sapiens
  siRNA target sequence for TAS2R60 (NM_177437.1,869-887).
cagttcaccccatcattct

SEQ ID NO: 243599 - DNA, 19 bp, Homo sapiens
  siRNA target sequence for VIPR2 (NM_003382.3,254-272).
cagaatgccgatttcatct

SEQ ID NO: 243600 - DNA, 19 bp, Homo sapiens
  siRNA target sequence for VIPR2 (NM_003382.3,260-278).
gccgatttcatctggaaat

SEQ ID NO: 243601 - DNA, 19 bp, Homo sapiens
  siRNA target sequence for VIPR2 (NM_003382.3,261-279).
ccgatttcatctggaaata

SEQ ID NO: 243602 - DNA, 19 bp, Homo sapiens
  siRNA target sequence for VIPR2 (NM_003382.3,346-364).
ggcgtctgggacaacatca

SEQ ID NO: 243603 - DNA, 19 bp, Homo sapiens
  siRNA target sequence for VIPR2 (NM_003382.3,403-421).
gtgccctgcccaaaagtct

SEQ ID NO: 243604 - DNA, 19 bp, Homo sapiens
  siRNA target sequence for VIPR2 (NM_003382.3,535-553).
gagagcaagatcacgtttt

SEQ ID NO: 243605 - DNA, 19 bp, Homo sapiens
  siRNA target sequence for VIPR2 (NM_003382.3,537-555).
gagcaagatcacgttttat

SEQ ID NO: 243606 - DNA, 19 bp, Homo sapiens
  siRNA target sequence for VIPR2 (NM_003382.3,540-558).
caagatcacgttttatatt

SEQ ID NO: 243607 - DNA, 19 bp, Homo sapiens
  siRNA target sequence for VIPR2 (NM_003382.3,559-577).
ctggtgaaggccatttata

SEQ ID NO: 243608 - DNA, 19 bp, Homo sapiens
  siRNA target sequence for VIPR2 (NM_003382.3,607-625).
cttgcaacaggaagcataa

SEQ ID NO: 243609 - DNA, 19 bp, Homo sapiens
  siRNA target sequence for VIPR2 (NM_003382.3,611-629).
caacaggaagcataattct

SEQ ID NO: 243610 - DNA, 19 bp, Homo sapiens
  siRNA target sequence for VIPR2 (NM_003382.3,965-983).
ctgcggccaggctctactt

SEQ ID NO: 243611 - DNA, 19 bp, Homo sapiens
  siRNA target sequence for VIPR2 (NM_003382.3,969-987).
ggccaggctctacttagaa

SEQ ID NO: 243612 - DNA, 19 bp, Homo sapiens
  siRNA target sequence for VIPR2 (NM_003382.3,971-989).
ccaggctctacttagaaga

SEQ ID NO: 243613 - DNA, 19 bp, Homo sapiens
  siRNA target sequence for VIPR2 (NM_003382.3,992-1010).
ccggttgctgggatacaaa

SEQ ID NO: 243614 - DNA, 19 bp, Homo sapiens
  siRNA target sequence for VIPR2 (NM_003382.3,1024-1042).
ccctggtgggtcatacgaa

SEQ ID NO: 243615 - DNA, 19 bp, Homo sapiens
  siRNA target sequence for VIPR2 (NM_003382.3,1025-1043).
cctggtgggtcatacgaat

SEQ ID NO: 243616 - DNA, 19 bp, Homo sapiens
  siRNA target sequence for VIPR2 (NM_003382.3,1035-1053).
catacgaataccgatttta

SEQ ID NO: 243617 - DNA, 19 bp, Homo sapiens
  siRNA target sequence for VIPR2 (NM_003382.3,1039-1057).
cgaataccgattttaattt

SEQ ID NO: 243618 - DNA, 19 bp, Homo sapiens
  siRNA target sequence for VIPR2 (NM_003382.3,1075-1093).
gtccttttcattagtatta

SEQ ID NO: 243619 - DNA, 19 bp, Homo sapiens
  siRNA target sequence for VIPR2 (NM_003382.3,1083-1101).
cattagtattatacgaatt

SEQ ID NO: 243620 - DNA, 19 bp, Homo sapiens
  siRNA target sequence for VIPR2 (NM_003382.3,1241-1259).
cctccaaataccagatact

SEQ ID NO: 243621 - DNA, 19 bp, Homo sapiens
  siRNA target sequence for XPR1 (NM_004736.2,202-220).
cccgagtggaggaagcaat

SEQ ID NO: 243622 - DNA, 19 bp, Homo sapiens
  siRNA target sequence for XPR1 (NM_004736.2,203-221).
ccgagtggaggaagcaata

SEQ ID NO: 243623 - DNA, 19 bp, Homo sapiens
  siRNA target sequence for XPR1 (NM_004736.2,205-223).
gagtggaggaagcaataca

SEQ ID NO: 243624 - DNA, 19 bp, Homo sapiens
  siRNA target sequence for XPR1 (NM_004736.2,311-329).
ggtattttgccaagtttga

SEQ ID NO: 243625 - DNA, 19 bp, Homo sapiens
  siRNA target sequence for XPR1 (NM_004736.2,403-421).
gctcagcgcaggtttgcta

SEQ ID NO: 243626 - DNA, 19 bp, Homo sapiens
  siRNA target sequence for XPR1 (NM_004736.2,408-426).
gcgcaggtttgctacactt

SEQ ID NO: 243627 - DNA, 19 bp, Homo sapiens
  siRNA target sequence for XPR1 (NM_004736.2,414-432).
gtttgctacacttcagaat

SEQ ID NO: 243628 - DNA, 19 bp, Homo sapiens
  siRNA target sequence for XPR1 (NM_004736.2,463-481).
gaaagcactggtgttacta

SEQ ID NO: 243629 - DNA, 19 bp, Homo sapiens
  siRNA target sequence for XPR1 (NM_004736.2,523-541).
gaggaacgtgtccaacata

SEQ ID NO: 243630 - DNA, 19 bp, Homo sapiens
  siRNA target sequence for XPR1 (NM_004736.2,574-592).
gagttctacctcagtctaa

SEQ ID NO: 243631 - DNA, 19 bp, Homo sapiens
  siRNA target sequence for XPR1 (NM_004736.2,626-644).
cagggtttcgaaaaatcct

SEQ ID NO: 243632 - DNA, 19 bp, Homo sapiens
  siRNA target sequence for XPR1 (NM_004736.2,708-726).
ggtggccccattttataca

SEQ ID NO: 243633 - DNA, 19 bp, Homo sapiens
  siRNA target sequence for XPR1 (NM_004736.2,764-782).
ctgtagtgaccaatgaact

SEQ ID NO: 243634 - DNA, 19 bp, Homo sapiens
  siRNA target sequence for XPR1 (NM_004736.2,804-822).
ggctatgaagcgtttacgt

SEQ ID NO: 243635 - DNA, 19 bp, Homo sapiens
  siRNA target sequence for XPR1 (NM_004736.2,850-868).
gcaccagcatggactactt

SEQ ID NO: 243636 - DNA, 19 bp, Homo sapiens
  siRNA target sequence for XPR1 (NM_004736.2,919-937).
gtgcttgccgctgtattta

SEQ ID NO: 243637 - DNA, 19 bp, Homo sapiens
  siRNA target sequence for XPR1 (NM_004736.2,921-939).
gcttgccgctgtatttaaa

SEQ ID NO: 243638 - DNA, 19 bp, Homo sapiens
  siRNA target sequence for XPR1 (NM_004736.2,926-944).
ccgctgtatttaaacttga

SEQ ID NO: 243639 - DNA, 19 bp, Homo sapiens
  siRNA target sequence for XPR1 (NM_004736.2,978-996).
ctatcggggtggctttctt

SEQ ID NO: 243640 - DNA, 19 bp, Homo sapiens
  siRNA target sequence for XPR1 (NM_004736.2,983-1001).
ggggtggctttcttctgat

SEQ ID NO: 243641 - DNA, 19 bp, Homo sapiens
  siRNA target sequence for XPR1 (NM_004736.2,1043-1061).
gacaggctggagtaaacca

SEQ ID NO: 243642 - DNA, 19 bp, Homo sapiens
  siRNA target sequence for XPR1 (NM_004736.2,1063-1081).
gtactcatctttgaactta

SEQ ID NO: 243643 - DNA, 19 bp, Homo sapiens
  siRNA target sequence for XPR1 (NM_004736.2,1078-1096).
cttaatccgagaagcaatt

SEQ ID NO: 243644 - DNA, 19 bp, Homo sapiens
  siRNA target sequence for XPR1 (NM_004736.2,1186-1204).
gtcatccccacatatgtgt

SEQ ID NO: 243645 - DNA, 19 bp, Homo sapiens
  siRNA target sequence for XPR1 (NM_004736.2,1203-1221).
gtatccacttgccctttat

SEQ ID NO: 243646 - DNA, 19 bp, Homo sapiens
  siRNA target sequence for XPR1 (NM_004736.2,1208-1226).
cacttgccctttatggatt

SEQ ID NO: 243647 - DNA, 19 bp, Homo sapiens
  siRNA target sequence for XPR1 (NM_004736.2,1210-1228).
cttgccctttatggattta

SEQ ID NO: 243648 - DNA, 19 bp, Homo sapiens
  siRNA target sequence for XPR1 (NM_004736.2,1214-1232).
ccctttatggatttatggt

SEQ ID NO: 243649 - DNA, 19 bp, Homo sapiens
  siRNA target sequence for XPR1 (NM_004736.2,1215-1233).
cctttatggatttatggtt

SEQ ID NO: 243650 - DNA, 19 bp, Homo sapiens
  siRNA target sequence for XPR1 (NM_004736.2,1250-1268).
ccaccaaaactttctacta

SEQ ID NO: 243651 - DNA, 19 bp, Homo sapiens
  siRNA target sequence for XPR1 (NM_004736.2,1251-1269).
caccaaaactttctactat

SEQ ID NO: 243652 - DNA, 19 bp, Homo sapiens
  siRNA target sequence for XPR1 (NM_004736.2,1253-1271).
ccaaaactttctactataa

SEQ ID NO: 243653 - DNA, 19 bp, Homo sapiens
  siRNA target sequence for XPR1 (NM_004736.2,1390-1408).
gacctggaatatatgatct

SEQ ID NO: 243654 - DNA, 19 bp, Homo sapiens
  siRNA target sequence for XPR1 (NM_004736.2,1477-1495).
ggaatttgccacaaatata

SEQ ID NO: 243655 - DNA, 19 bp, Homo sapiens
  siRNA target sequence for XPR1 (NM_004736.2,1551-1569).
gtgcctgcgccgatatcga

SEQ ID NO: 243656 - DNA, 19 bp, Homo sapiens
  siRNA target sequence for XPR1 (NM_004736.2,1559-1577).
gccgatatcgagacacaaa

SEQ ID NO: 243657 - DNA, 19 bp, Homo sapiens
  siRNA target sequence for XPR1 (NM_004736.2,1560-1578).
ccgatatcgagacacaaaa

SEQ ID NO: 243658 - DNA, 19 bp, Homo sapiens
  siRNA target sequence for XPR1 (NM_004736.2,1581-1599).
ggcctttcctcatttagtt

SEQ ID NO: 243659 - DNA, 19 bp, Homo sapiens
  siRNA target sequence for XPR1 (NM_004736.2,1582-1600).
gcctttcctcatttagtta

SEQ ID NO: 243660 - DNA, 19 bp, Homo sapiens
  siRNA target sequence for XPR1 (NM_004736.2,1606-1624).
ggcaaatactccacaactt

SEQ ID NO: 243661 - DNA, 19 bp, Homo sapiens
  siRNA target sequence for XPR1 (NM_004736.2,1607-1625).
gcaaatactccacaacttt

SEQ ID NO: 243662 - DNA, 19 bp, Homo sapiens
  siRNA target sequence for XPR1 (NM_004736.2,1670-1688).
gaggtcactcggacactat

SEQ ID NO: 243663 - DNA, 19 bp, Homo sapiens
  siRNA target sequence for XPR1 (NM_004736.2,1679-1697).
cggacactatggtgttctt

SEQ ID NO: 243664 - DNA, 19 bp, Homo sapiens
  siRNA target sequence for XPR1 (NM_004736.2,1680-1698).
ggacactatggtgttcttt

SEQ ID NO: 243665 - DNA, 19 bp, Homo sapiens
  siRNA target sequence for XPR1 (NM_004736.2,1681-1699).
gacactatggtgttctttt

SEQ ID NO: 243666 - DNA, 19 bp, Homo sapiens
  siRNA target sequence for XPR1 (NM_004736.2,1762-1780).
gactggggtctcttcgata

SEQ ID NO: 243667 - DNA, 19 bp, Homo sapiens
  siRNA target sequence for XPR1 (NM_004736.2,1766-1784).
ggggtctcttcgataagaa

SEQ ID NO: 243668 - DNA, 19 bp, Homo sapiens
  siRNA target sequence for XPR1 (NM_004736.2,1767-1785).
gggtctcttcgataagaat

SEQ ID NO: 243669 - DNA, 19 bp, Homo sapiens
  siRNA target sequence for XPR1 (NM_004736.2,1828-1846).
caaaaagcctactactact

SEQ ID NO: 243670 - DNA, 19 bp, Homo sapiens
  siRNA target sequence for XPR1 (NM_004736.2,1850-1868).
ccataatagaggatgtgat

SEQ ID NO: 243671 - DNA, 19 bp, Homo sapiens
  siRNA target sequence for XPR1 (NM_004736.2,1896-1914).
ctcgattacctctacaact

SEQ ID NO: 243672 - DNA, 19 bp, Homo sapiens
  siRNA target sequence for XPR1 (NM_004736.2,1898-1916).
cgattacctctacaacttt

SEQ ID NO: 243673 - DNA, 19 bp, Homo sapiens
  siRNA target sequence for XPR1 (NM_004736.2,1922-1940).
ctcattctggggacatcat

SEQ ID NO: 243674 - DNA, 19 bp, Homo sapiens
  siRNA target sequence for XPR1 (NM_004736.2,1966-1984).
gttttccggcgatttgtgt

SEQ ID NO: 243675 - DNA, 19 bp, Homo sapiens
  siRNA target sequence for XPR1 (NM_004736.2,1975-1993).
cgatttgtgtggaacttct

SEQ ID NO: 243676 - DNA, 19 bp, Homo sapiens
  siRNA target sequence for XPR1 (NM_004736.2,1995-2013).
ccgcctggagaatgaacat

SEQ ID NO: 243677 - DNA, 19 bp, Homo sapiens
  siRNA target sequence for XPR1 (NM_004736.2,2063-2081).
ccctgaacgcagatgatca

SEQ ID NO: 243678 - DNA, 19 bp, Homo sapiens
  siRNA target sequence for XPR1 (NM_004736.2,2178-2196).
gcctcgcctcgcttctcaa

SEQ ID NO: 243679 - DNA, 19 bp, Homo sapiens
  siRNA target sequence for XPR1 (NM_004736.2,2179-2197).
cctcgcctcgcttctcaat

SEQ ID NO: 243680 - DNA, 19 bp, Homo sapiens
  siRNA target sequence for XPR1 (NM_004736.2,2183-2201).
gcctcgcttctcaatccaa

SEQ ID NO: 243681 - DNA, 19 bp, Homo sapiens
  siRNA target sequence for XPR1 (NM_004736.2,2198-2216).
ccaaggctcgtgacactaa

SEQ ID NO: 243682 - DNA, 19 bp, Homo sapiens
  siRNA target sequence for XPR1 (NM_004736.2,2202-2220).
ggctcgtgacactaaggta

SEQ ID NO: 243683 - DNA, 19 bp, Homo sapiens
  siRNA target sequence for XPR1 (NM_004736.2,2203-2221).
gctcgtgacactaaggtat

SEQ ID NO: 243684 - DNA, 19 bp, Homo sapiens
  siRNA target sequence for XPR1 (NM_004736.2,2204-2222).
ctcgtgacactaaggtatt

SEQ ID NO: 243685 - DNA, 19 bp, Homo sapiens
  siRNA target sequence for XPR1 (NM_004736.2,2206-2224).
cgtgacactaaggtattga

SEQ ID NO: 243686 - DNA, 19 bp, Homo sapiens
  siRNA target sequence for XPR1 (NM_004736.2,2207-2225).
gtgacactaaggtattgat

SEQ ID NO: 243687 - DNA, 19 bp, Homo sapiens
  siRNA target sequence for XPR1 (NM_004736.2,2211-2229).
cactaaggtattgatagaa

SEQ ID NO: 243688 - DNA, 19 bp, Homo sapiens
  siRNA target sequence for LIFR (NM_002310.2,160-178).
gatatttacgtatgtttga

SEQ ID NO: 243689 - DNA, 19 bp, Homo sapiens
  siRNA target sequence for LIFR (NM_002310.2,188-206).
cctggatggtggacaataa

SEQ ID NO: 243690 - DNA, 19 bp, Homo sapiens
  siRNA target sequence for LIFR (NM_002310.2,231-249).
ccagtggctgttatcaaca

SEQ ID NO: 243691 - DNA, 19 bp, Homo sapiens
  siRNA target sequence for LIFR (NM_002310.2,237-255).
gctgttatcaacatttatt

SEQ ID NO: 243692 - DNA, 19 bp, Homo sapiens
  siRNA target sequence for LIFR (NM_002310.2,295-313).
ggggctcctcatgatttga

SEQ ID NO: 243693 - DNA, 19 bp, Homo sapiens
  siRNA target sequence for LIFR (NM_002310.2,296-314).
gggctcctcatgatttgaa

SEQ ID NO: 243694 - DNA, 19 bp, Homo sapiens
  siRNA target sequence for LIFR (NM_002310.2,298-316).
gctcctcatgatttgaagt

SEQ ID NO: 243695 - DNA, 19 bp, Homo sapiens
  siRNA target sequence for LIFR (NM_002310.2,304-322).
catgatttgaagtgtgtaa

SEQ ID NO: 243696 - DNA, 19 bp, Homo sapiens
  siRNA target sequence for LIFR (NM_002310.2,317-335).
gtgtaactaacaatttgca

SEQ ID NO: 243697 - DNA, 19 bp, Homo sapiens
  siRNA target sequence for LIFR (NM_002310.2,371-389).
caggccgtggtactgatta

SEQ ID NO: 243698 - DNA, 19 bp, Homo sapiens
  siRNA target sequence for LIFR (NM_002310.2,374-392).
gccgtggtactgattatga

SEQ ID NO: 243699 - DNA, 19 bp, Homo sapiens
  siRNA target sequence for LIFR (NM_002310.2,375-393).
ccgtggtactgattatgaa

SEQ ID NO: 243700 - DNA, 19 bp, Homo sapiens
  siRNA target sequence for LIFR (NM_002310.2,383-401).
ctgattatgaagtttgcat

SEQ ID NO: 243701 - DNA, 19 bp, Homo sapiens
  siRNA target sequence for LIFR (NM_002310.2,408-426).
caggtcccgttcttgttat

SEQ ID NO: 243702 - DNA, 19 bp, Homo sapiens
  siRNA target sequence for LIFR (NM_002310.2,410-428).
ggtcccgttcttgttatca

SEQ ID NO: 243703 - DNA, 19 bp, Homo sapiens
  siRNA target sequence for LIFR (NM_002310.2,413-431).
cccgttcttgttatcagtt

SEQ ID NO: 243704 - DNA, 19 bp, Homo sapiens
  siRNA target sequence for LIFR (NM_002310.2,508-526).
ggaagttctacaagtaaat

SEQ ID NO: 243705 - DNA, 19 bp, Homo sapiens
  siRNA target sequence for LIFR (NM_002310.2,538-556).
gaacaaaacgtttccttaa

SEQ ID NO: 243706 - DNA, 19 bp, Homo sapiens
  siRNA target sequence for LIFR (NM_002310.2,562-580).
gatactccagagatcttga

SEQ ID NO: 243707 - DNA, 19 bp, Homo sapiens
  siRNA target sequence for LIFR (NM_002310.2,568-586).
ccagagatcttgaatttgt

SEQ ID NO: 243708 - DNA, 19 bp, Homo sapiens
  siRNA target sequence for LIFR (NM_002310.2,602-620).
cctctacattatacctaaa

SEQ ID NO: 243709 - DNA, 19 bp, Homo sapiens
  siRNA target sequence for LIFR (NM_002310.2,624-642).
gaacgacaggggttcagtt

SEQ ID NO: 243710 - DNA, 19 bp, Homo sapiens
  siRNA target sequence for LIFR (NM_002310.2,627-645).
cgacaggggttcagttttt

SEQ ID NO: 243711 - DNA, 19 bp, Homo sapiens
  siRNA target sequence for LIFR (NM_002310.2,646-664).
ccacaccgctcaaatgtta

SEQ ID NO: 243712 - DNA, 19 bp, Homo sapiens
  siRNA target sequence for LIFR (NM_002310.2,647-665).
cacaccgctcaaatgttat

SEQ ID NO: 243713 - DNA, 19 bp, Homo sapiens
  siRNA target sequence for LIFR (NM_002310.2,649-667).
caccgctcaaatgttatct

SEQ ID NO: 243714 - DNA, 19 bp, Homo sapiens
  siRNA target sequence for LIFR (NM_002310.2,693-711).
gagtatggagctcgtaaaa

SEQ ID NO: 243715 - DNA, 19 bp, Homo sapiens
  siRNA target sequence for LIFR (NM_002310.2,786-804).
ggaatgtgccattcatttt

SEQ ID NO: 243716 - DNA, 19 bp, Homo sapiens
  siRNA target sequence for LIFR (NM_002310.2,815-833).
gatgctacattgacaatct

SEQ ID NO: 243717 - DNA, 19 bp, Homo sapiens
  siRNA target sequence for LIFR (NM_002310.2,870-888).
ccctgtgaagaacatttct

SEQ ID NO: 243718 - DNA, 19 bp, Homo sapiens
  siRNA target sequence for LIFR (NM_002310.2,898-916).
gattctcagactaaggttt

SEQ ID NO: 243719 - DNA, 19 bp, Homo sapiens
  siRNA target sequence for LIFR (NM_002310.2,937-955).
cttgtaggctcagacataa

SEQ ID NO: 243720 - DNA, 19 bp, Homo sapiens
  siRNA target sequence for LIFR (NM_002310.2,945-963).
ctcagacataacattttgt

SEQ ID NO: 243721 - DNA, 19 bp, Homo sapiens
  siRNA target sequence for LIFR (NM_002310.2,991-1009).
gcactgattggccatacaa

SEQ ID NO: 243722 - DNA, 19 bp, Homo sapiens
  siRNA target sequence for LIFR (NM_002310.2,994-1012).
ctgattggccatacaaact

SEQ ID NO: 243723 - DNA, 19 bp, Homo sapiens
  siRNA target sequence for LIFR (NM_002310.2,1013-1031).
gccccttgatccatcttga

SEQ ID NO: 243724 - DNA, 19 bp, Homo sapiens
  siRNA target sequence for LIFR (NM_002310.2,1014-1032).
ccccttgatccatcttgat

SEQ ID NO: 243725 - DNA, 19 bp, Homo sapiens
  siRNA target sequence for LIFR (NM_002310.2,1042-1060).
gttgcaatcaagattcgta

SEQ ID NO: 243726 - DNA, 19 bp, Homo sapiens
  siRNA target sequence for LIFR (NM_002310.2,1046-1064).
caatcaagattcgtaatat

SEQ ID NO: 243727 - DNA, 19 bp, Homo sapiens
  siRNA target sequence for LIFR (NM_002310.2,1096-1114).
gtttttacaaccgaagata

SEQ ID NO: 243728 - DNA, 19 bp, Homo sapiens
  siRNA target sequence for LIFR (NM_002310.2,1246-1264).
cgtgctacaagctacactt

SEQ ID NO: 243729 - DNA, 19 bp, Homo sapiens
  siRNA target sequence for LIFR (NM_002310.2,1247-1265).
gtgctacaagctacacttt

SEQ ID NO: 243730 - DNA, 19 bp, Homo sapiens
  siRNA target sequence for LIFR (NM_002310.2,1250-1268).
ctacaagctacactttagt

SEQ ID NO: 243731 - DNA, 19 bp, Homo sapiens
  siRNA target sequence for LIFR (NM_002310.2,1257-1275).
ctacactttagttgaaagt

SEQ ID NO: 243732 - DNA, 19 bp, Homo sapiens
  siRNA target sequence for LIFR (NM_002310.2,1260-1278).
cactttagttgaaagtttt

SEQ ID NO: 243733 - DNA, 19 bp, Homo sapiens
  siRNA target sequence for LIFR (NM_002310.2,1309-1327).
gaagcacctacaaacgaaa

SEQ ID NO: 243734 - DNA, 19 bp, Homo sapiens
  siRNA target sequence for LIFR (NM_002310.2,1313-1331).
cacctacaaacgaaagcta

SEQ ID NO: 243735 - DNA, 19 bp, Homo sapiens
  siRNA target sequence for LIFR (NM_002310.2,1323-1341).
cgaaagctatcaattatta

SEQ ID NO: 243736 - DNA, 19 bp, Homo sapiens
  siRNA target sequence for LIFR (NM_002310.2,1398-1416).
gctgggtcgatcacaatca

SEQ ID NO: 243737 - DNA, 19 bp, Homo sapiens
  siRNA target sequence for LIFR (NM_002310.2,1401-1419).
gggtcgatcacaatcaaca

SEQ ID NO: 243738 - DNA, 19 bp, Homo sapiens
  siRNA target sequence for LIFR (NM_002310.2,1402-1420).
ggtcgatcacaatcaacaa

SEQ ID NO: 243739 - DNA, 19 bp, Homo sapiens
  siRNA target sequence for LIFR (NM_002310.2,1403-1421).
gtcgatcacaatcaacaat

SEQ ID NO: 243740 - DNA, 19 bp, Homo sapiens
  siRNA target sequence for LIFR (NM_002310.2,1406-1424).
gatcacaatcaacaatttt

SEQ ID NO: 243741 - DNA, 19 bp, Homo sapiens
  siRNA target sequence for LIFR (NM_002310.2,1411-1429).
caatcaacaattttagtta

SEQ ID NO: 243742 - DNA, 19 bp, Homo sapiens
  siRNA target sequence for LIFR (NM_002310.2,1450-1468).
ccccatactcctacttcat

SEQ ID NO: 243743 - DNA, 19 bp, Homo sapiens
  siRNA target sequence for LIFR (NM_002310.2,1457-1475).
ctcctacttcattcaaagt

SEQ ID NO: 243744 - DNA, 19 bp, Homo sapiens
  siRNA target sequence for LIFR (NM_002310.2,1460-1478).
ctacttcattcaaagtgaa

SEQ ID NO: 243745 - DNA, 19 bp, Homo sapiens
  siRNA target sequence for LIFR (NM_002310.2,1520-1538).
caggcaactttgcaaagat

SEQ ID NO: 243746 - DNA, 19 bp, Homo sapiens
  siRNA target sequence for LIFR (NM_002310.2,1566-1584).
gaaatctaattcagtacaa

SEQ ID NO: 243747 - DNA, 19 bp, Homo sapiens
  siRNA target sequence for LIFR (NM_002310.2,1590-1608).
gcggaatgtcacaatcaaa

SEQ ID NO: 243748 - DNA, 19 bp, Homo sapiens
  siRNA target sequence for LIFR (NM_002310.2,1633-1651).
gttgctctggacaagttaa

SEQ ID NO: 243749 - DNA, 19 bp, Homo sapiens
  siRNA target sequence for LIFR (NM_002310.2,1639-1657).
ctggacaagttaaatccat

SEQ ID NO: 243750 - DNA, 19 bp, Homo sapiens
  siRNA target sequence for LIFR (NM_002310.2,1681-1699).
cgttgttctactgaaactt

SEQ ID NO: 243751 - DNA, 19 bp, Homo sapiens
  siRNA target sequence for LIFR (NM_002310.2,1682-1700).
gttgttctactgaaacttt

SEQ ID NO: 243752 - DNA, 19 bp, Homo sapiens
  siRNA target sequence for LIFR (NM_002310.2,1785-1803).
gtggagttctgatggaaaa

SEQ ID NO: 243753 - DNA, 19 bp, Homo sapiens
  siRNA target sequence for LIFR (NM_002310.2,1820-1838).
ggaagcctttacccattaa

SEQ ID NO: 243754 - DNA, 19 bp, Homo sapiens
  siRNA target sequence for LIFR (NM_002310.2,1821-1839).
gaagcctttacccattaat

SEQ ID NO: 243755 - DNA, 19 bp, Homo sapiens
  siRNA target sequence for LIFR (NM_002310.2,1866-1884).
caatgtatcgtgttcatca

SEQ ID NO: 243756 - DNA, 19 bp, Homo sapiens
  siRNA target sequence for LIFR (NM_002310.2,1933-1951).
gcagagatacgacttgata

SEQ ID NO: 243757 - DNA, 19 bp, Homo sapiens
  siRNA target sequence for LIFR (NM_002310.2,1934-1952).
cagagatacgacttgataa

SEQ ID NO: 243758 - DNA, 19 bp, Homo sapiens
  siRNA target sequence for LIFR (NM_002310.2,1938-1956).
gatacgacttgataagaat

SEQ ID NO: 243759 - DNA, 19 bp, Homo sapiens
  siRNA target sequence for LIFR (NM_002310.2,1943-1961).
gacttgataagaatgacta

SEQ ID NO: 243760 - DNA, 19 bp, Homo sapiens
  siRNA target sequence for LIFR (NM_002310.2,1948-1966).
gataagaatgactacatca

SEQ ID NO: 243761 - DNA, 19 bp, Homo sapiens
  siRNA target sequence for LIFR (NM_002310.2,2017-2035).
gcgagtatggaaattccaa

SEQ ID NO: 243762 - DNA, 19 bp, Homo sapiens
  siRNA target sequence for LIFR (NM_002310.2,2018-2036).
cgagtatggaaattccaaa

SEQ ID NO: 243763 - DNA, 19 bp, Homo sapiens
  siRNA target sequence for LIFR (NM_002310.2,2114-2132).
cttgcgactacgtcattaa

SEQ ID NO: 243764 - DNA, 19 bp, Homo sapiens
  siRNA target sequence for LIFR (NM_002310.2,2153-2171).
cggaaccatgccttatgga

SEQ ID NO: 243765 - DNA, 19 bp, Homo sapiens
  siRNA target sequence for LIFR (NM_002310.2,2193-2211).
cagcactgaaactgtaata

SEQ ID NO: 243766 - DNA, 19 bp, Homo sapiens
  siRNA target sequence for LIFR (NM_002310.2,2195-2213).
gcactgaaactgtaataga

SEQ ID NO: 243767 - DNA, 19 bp, Homo sapiens
  siRNA target sequence for LIFR (NM_002310.2,2221-2239).
gagtttcgaccaggtataa

SEQ ID NO: 243768 - DNA, 19 bp, Homo sapiens
  siRNA target sequence for LIFR (NM_002310.2,2223-2241).
gtttcgaccaggtataaga

SEQ ID NO: 243769 - DNA, 19 bp, Homo sapiens
  siRNA target sequence for LIFR (NM_002310.2,2227-2245).
cgaccaggtataagatata

SEQ ID NO: 243770 - DNA, 19 bp, Homo sapiens
  siRNA target sequence for LIFR (NM_002310.2,2230-2248).
ccaggtataagatataatt

SEQ ID NO: 243771 - DNA, 19 bp, Homo sapiens
  siRNA target sequence for LIFR (NM_002310.2,2231-2249).
caggtataagatataattt

SEQ ID NO: 243772 - DNA, 19 bp, Homo sapiens
  siRNA target sequence for LIFR (NM_002310.2,2290-2308).
cgctccatgattggatata

SEQ ID NO: 243773 - DNA, 19 bp, Homo sapiens
  siRNA target sequence for LIFR (NM_002310.2,2298-2316).
gattggatatatagaagaa

SEQ ID NO: 243774 - DNA, 19 bp, Homo sapiens
  siRNA target sequence for LIFR (NM_002310.2,2323-2341).
cccattgttgcaccaaatt

SEQ ID NO: 243775 - DNA, 19 bp, Homo sapiens
  siRNA target sequence for LIFR (NM_002310.2,2324-2342).
ccattgttgcaccaaattt

SEQ ID NO: 243776 - DNA, 19 bp, Homo sapiens
  siRNA target sequence for LIFR (NM_002310.2,2325-2343).
cattgttgcaccaaatttt

SEQ ID NO: 243777 - DNA, 19 bp, Homo sapiens
  siRNA target sequence for LIFR (NM_002310.2,2357-2375).
cttctgcagattcgatatt

SEQ ID NO: 243778 - DNA, 19 bp, Homo sapiens
  siRNA target sequence for LIFR (NM_002310.2,2360-2378).
ctgcagattcgatattagt

SEQ ID NO: 243779 - DNA, 19 bp, Homo sapiens
  siRNA target sequence for LIFR (NM_002310.2,2362-2380).
gcagattcgatattagtaa

SEQ ID NO: 243780 - DNA, 19 bp, Homo sapiens
  siRNA target sequence for LIFR (NM_002310.2,2449-2467).
ggagaaagagacacatcta

SEQ ID NO: 243781 - DNA, 19 bp, Homo sapiens
  siRNA target sequence for LIFR (NM_002310.2,2452-2470).
gaaagagacacatctaaga

SEQ ID NO: 243782 - DNA, 19 bp, Homo sapiens
  siRNA target sequence for LIFR (NM_002310.2,2489-2507).
gtcgttctgacataaaagt

SEQ ID NO: 243783 - DNA, 19 bp, Homo sapiens
  siRNA target sequence for LIFR (NM_002310.2,2491-2509).
cgttctgacataaaagtta

SEQ ID NO: 243784 - DNA, 19 bp, Homo sapiens
  siRNA target sequence for LIFR (NM_002310.2,2532-2550).
gaagacactgagaattgct

SEQ ID NO: 243785 - DNA, 19 bp, Homo sapiens
  siRNA target sequence for LIFR (NM_002310.2,2551-2569).
gatcttcaaggtaaaacaa

SEQ ID NO: 243786 - DNA, 19 bp, Homo sapiens
  siRNA target sequence for LIFR (NM_002310.2,2554-2572).
cttcaaggtaaaacaagtt

SEQ ID NO: 243787 - DNA, 19 bp, Homo sapiens
  siRNA target sequence for LIFR (NM_002310.2,2580-2598).
ggtcttgcgagcctataca

SEQ ID NO: 243788 - DNA, 19 bp, Homo sapiens
  siRNA target sequence for LIFR (NM_002310.2,2583-2601).
cttgcgagcctatacagat

SEQ ID NO: 243789 - DNA, 19 bp, Homo sapiens
  siRNA target sequence for LIFR (NM_002310.2,2615-2633).
cggagaagagtatgtatgt

SEQ ID NO: 243790 - DNA, 19 bp, Homo sapiens
  siRNA target sequence for LIFR (NM_002310.2,2628-2646).
gtatgtggtgacaaaggaa

SEQ ID NO: 243791 - DNA, 19 bp, Homo sapiens
  siRNA target sequence for LIFR (NM_002310.2,2632-2650).
gtggtgacaaaggaaaatt

SEQ ID NO: 243792 - DNA, 19 bp, Homo sapiens
  siRNA target sequence for LIFR (NM_002310.2,2707-2725).
gtggtgacaagtatccttt

SEQ ID NO: 243793 - DNA, 19 bp, Homo sapiens
  siRNA target sequence for LIFR (NM_002310.2,2712-2730).
gacaagtatcctttgctat

SEQ ID NO: 243794 - DNA, 19 bp, Homo sapiens
  siRNA target sequence for LIFR (NM_002310.2,2731-2749).
cggaaacgagaatggatta

SEQ ID NO: 243795 - DNA, 19 bp, Homo sapiens
  siRNA target sequence for LIFR (NM_002310.2,2732-2750).
ggaaacgagaatggattaa

SEQ ID NO: 243796 - DNA, 19 bp, Homo sapiens
  siRNA target sequence for LIFR (NM_002310.2,2757-2775).
cttctaccctgatattcca

SEQ ID NO: 243797 - DNA, 19 bp, Homo sapiens
  siRNA target sequence for LIFR (NM_002310.2,2760-2778).
ctaccctgatattccaaat

SEQ ID NO: 243798 - DNA, 19 bp, Homo sapiens
  siRNA target sequence for LIFR (NM_002310.2,2794-2812).
gcattacagtttcaaaaga

SEQ ID NO: 243799 - DNA, 19 bp, Homo sapiens
  siRNA target sequence for LIFR (NM_002310.2,2828-2846).
gcagtgctcttaaaacatt

SEQ ID NO: 243800 - DNA, 19 bp, Homo sapiens
  siRNA target sequence for LIFR (NM_002310.2,2858-2876).
cttgtaccccaaataatgt

SEQ ID NO: 243801 - DNA, 19 bp, Homo sapiens
  siRNA target sequence for LIFR (NM_002310.2,2861-2879).
gtaccccaaataatgttga

SEQ ID NO: 243802 - DNA, 19 bp, Homo sapiens
  siRNA target sequence for LIFR (NM_002310.2,2886-2904).
ggaaactcgatcagcattt

SEQ ID NO: 243803 - DNA, 19 bp, Homo sapiens
  siRNA target sequence for LIFR (NM_002310.2,2891-2909).
ctcgatcagcatttcctaa

SEQ ID NO: 243804 - DNA, 19 bp, Homo sapiens
  siRNA target sequence for LIFR (NM_002310.2,2983-3001).
catgtggttgtgtcctatt

SEQ ID NO: 243805 - DNA, 19 bp, Homo sapiens
  siRNA target sequence for LIFR (NM_002310.2,2997-3015).
ctattgtccacccatcatt

SEQ ID NO: 243806 - DNA, 19 bp, Homo sapiens
  siRNA target sequence for LIFR (NM_002310.2,3053-3071).
gagggactgcacaggttat

SEQ ID NO: 243807 - DNA, 19 bp, Homo sapiens
  siRNA target sequence for LIFR (NM_002310.2,3055-3073).
gggactgcacaggttattt

SEQ ID NO: 243808 - DNA, 19 bp, Homo sapiens
  siRNA target sequence for LIFR (NM_002310.2,3056-3074).
ggactgcacaggttattta

SEQ ID NO: 243809 - DNA, 19 bp, Homo sapiens
  siRNA target sequence for LIFR (NM_002310.2,3062-3080).
cacaggttatttacattga

SEQ ID NO: 243810 - DNA, 19 bp, Homo sapiens
  siRNA target sequence for LIFR (NM_002310.2,3093-3111).
gtatcagcctcaagcaaaa

SEQ ID NO: 243811 - DNA, 19 bp, Homo sapiens
  siRNA target sequence for LIFR (NM_002310.2,3168-3186).
gcacctccccattaattct

SEQ ID NO: 243812 - DNA, 19 bp, Homo sapiens
  siRNA target sequence for LIFR (NM_002310.2,3169-3187).
cacctccccattaattcta

SEQ ID NO: 243813 - DNA, 19 bp, Homo sapiens
  siRNA target sequence for LIFR (NM_002310.2,3171-3189).
cctccccattaattctact

SEQ ID NO: 243814 - DNA, 19 bp, Homo sapiens
  siRNA target sequence for LIFR (NM_002310.2,3205-3223).
gcagaagaggacttagata

SEQ ID NO: 243815 - DNA, 19 bp, Homo sapiens
  siRNA target sequence for LIFR (NM_002310.2,3237-3255).
cagacctcaggccaatgta

SEQ ID NO: 243816 - DNA, 19 bp, Homo sapiens
  siRNA target sequence for LIFR (NM_002310.2,3239-3257).
gacctcaggccaatgtaaa

SEQ ID NO: 243817 - DNA, 19 bp, Homo sapiens
  siRNA target sequence for LIFR (NM_002310.2,3241-3259).
cctcaggccaatgtaaata

SEQ ID NO: 243818 - DNA, 19 bp, Homo sapiens
  siRNA target sequence for LIFR (NM_002310.2,3244-3262).
caggccaatgtaaatacat

SEQ ID NO: 243819 - DNA, 19 bp, Homo sapiens
  siRNA target sequence for LIFR (NM_002310.2,3249-3267).
caatgtaaatacatggaat

SEQ ID NO: 243820 - DNA, 19 bp, Homo sapiens
  siRNA target sequence for LIFR (NM_002310.2,3306-3324).
cagtgagattgtctcattt

SEQ ID NO: 243821 - DNA, 19 bp, Homo sapiens
  siRNA target sequence for LIFR (NM_002310.2,3310-3328).
gagattgtctcatttggaa

SEQ ID NO: 243822 - DNA, 19 bp, Homo sapiens
  siRNA target sequence for LIFR (NM_002310.2,3325-3343).
ggaagtccatgctccatta

SEQ ID NO: 243823 - DNA, 19 bp, Homo sapiens
  siRNA target sequence for LIFR (NM_002310.2,3338-3356).
ccattaattcccgacaatt

SEQ ID NO: 243824 - DNA, 19 bp, Homo sapiens
  siRNA target sequence for LIFR (NM_002310.2,3339-3357).
cattaattcccgacaattt

SEQ ID NO: 243825 - DNA, 19 bp, Homo sapiens
  siRNA target sequence for LIFR (NM_002310.2,3376-3394).
gaagactctcctaaatcta

SEQ ID NO: 243826 - DNA, 19 bp, Homo sapiens
  siRNA target sequence for LIFR (NM_002310.2,3381-3399).
ctctcctaaatctaatgga

SEQ ID NO: 243827 - DNA, 19 bp, Homo sapiens
  siRNA target sequence for LIFR (NM_002310.2,3401-3419).
gagggtggtcctttacaaa

SEQ ID NO: 243828 - DNA, 19 bp, Homo sapiens
  siRNA target sequence for LIFR (NM_002310.2,3403-3421).
gggtggtcctttacaaact

SEQ ID NO: 243829 - DNA, 19 bp, Homo sapiens
  siRNA target sequence for LIFR (NM_002310.2,3404-3422).
ggtggtcctttacaaactt

SEQ ID NO: 243830 - DNA, 19 bp, Homo sapiens
  siRNA target sequence for LIFR (NM_002310.2,3407-3425).
ggtcctttacaaacttttt

SEQ ID NO: 243831 - DNA, 19 bp, Homo sapiens
  siRNA target sequence for LIFR (NM_002310.2,3427-3445).
cagaacaaaccaaacgatt

SEQ ID NO: 243832 - DNA, 19 bp, Homo sapiens
  siRNA target sequence for GHR (NM_000163.1,142-160).
ctggagtctgcaaagtgtt

SEQ ID NO: 243833 - DNA, 19 bp, Homo sapiens
  siRNA target sequence for GHR (NM_000163.1,158-176).
gttaatccaggcctaaaga

SEQ ID NO: 243834 - DNA, 19 bp, Homo sapiens
  siRNA target sequence for GHR (NM_000163.1,216-234).
cacctgagcgagagacttt

SEQ ID NO: 243835 - DNA, 19 bp, Homo sapiens
  siRNA target sequence for GHR (NM_000163.1,221-239).
gagcgagagactttttcat

SEQ ID NO: 243836 - DNA, 19 bp, Homo sapiens
  siRNA target sequence for GHR (NM_000163.1,282-300).
gacccatacagctgttcta

SEQ ID NO: 243837 - DNA, 19 bp, Homo sapiens
  siRNA target sequence for GHR (NM_000163.1,336-354).
ggaaagaatgccctgatta

SEQ ID NO: 243838 - DNA, 19 bp, Homo sapiens
  siRNA target sequence for GHR (NM_000163.1,367-385).
ggaaaacagctgttacttt

SEQ ID NO: 243839 - DNA, 19 bp, Homo sapiens
  siRNA target sequence for GHR (NM_000163.1,399-417).
cctccatctggatacctta

SEQ ID NO: 243840 - DNA, 19 bp, Homo sapiens
  siRNA target sequence for GHR (NM_000163.1,400-418).
ctccatctggataccttat

SEQ ID NO: 243841 - DNA, 19 bp, Homo sapiens
  siRNA target sequence for GHR (NM_000163.1,408-426).
ggataccttattgtatcaa

SEQ ID NO: 243842 - DNA, 19 bp, Homo sapiens
  siRNA target sequence for GHR (NM_000163.1,573-591).
caccacgcaatgcagatat

SEQ ID NO: 243843 - DNA, 19 bp, Homo sapiens
  siRNA target sequence for GHR (NM_000163.1,578-596).
cgcaatgcagatattcaga

SEQ ID NO: 243844 - DNA, 19 bp, Homo sapiens
  siRNA target sequence for GHR (NM_000163.1,604-622).
gatggttctggagtatgaa

SEQ ID NO: 243845 - DNA, 19 bp, Homo sapiens
  siRNA target sequence for GHR (NM_000163.1,661-679).
gatggaccctatattgaca

SEQ ID NO: 243846 - DNA, 19 bp, Homo sapiens
  siRNA target sequence for GHR (NM_000163.1,665-683).
gaccctatattgacaacat

SEQ ID NO: 243847 - DNA, 19 bp, Homo sapiens
  siRNA target sequence for GHR (NM_000163.1,727-745).
gcgtgtgagatccaaacaa

SEQ ID NO: 243848 - DNA, 19 bp, Homo sapiens
  siRNA target sequence for GHR (NM_000163.1,778-796).
ggtgctctatgtaacactt

SEQ ID NO: 243849 - DNA, 19 bp, Homo sapiens
  siRNA target sequence for GHR (NM_000163.1,805-823).
gagccaatttacatgtgaa

SEQ ID NO: 243850 - DNA, 19 bp, Homo sapiens
  siRNA target sequence for GHR (NM_000163.1,816-834).
catgtgaagaagatttcta

SEQ ID NO: 243851 - DNA, 19 bp, Homo sapiens
  siRNA target sequence for GHR (NM_000163.1,819-837).
gtgaagaagatttctactt

SEQ ID NO: 243852 - DNA, 19 bp, Homo sapiens
  siRNA target sequence for GHR (NM_000163.1,835-853).
ctttccatggctcttaatt

SEQ ID NO: 243853 - DNA, 19 bp, Homo sapiens
  siRNA target sequence for GHR (NM_000163.1,840-858).
catggctcttaattattat

SEQ ID NO: 243854 - DNA, 19 bp, Homo sapiens
  siRNA target sequence for GHR (NM_000163.1,843-861).
ggctcttaattattatctt

SEQ ID NO: 243855 - DNA, 19 bp, Homo sapiens
  siRNA target sequence for GHR (NM_000163.1,864-882).
gaatatttgggctaacagt

SEQ ID NO: 243856 - DNA, 19 bp, Homo sapiens
  siRNA target sequence for GHR (NM_000163.1,872-890).
gggctaacagtgatgctat

SEQ ID NO: 243857 - DNA, 19 bp, Homo sapiens
  siRNA target sequence for GHR (NM_000163.1,873-891).
ggctaacagtgatgctatt

SEQ ID NO: 243858 - DNA, 19 bp, Homo sapiens
  siRNA target sequence for GHR (NM_000163.1,874-892).
gctaacagtgatgctattt

SEQ ID NO: 243859 - DNA, 19 bp, Homo sapiens
  siRNA target sequence for GHR (NM_000163.1,883-901).
gatgctatttgtattctta

SEQ ID NO: 243860 - DNA, 19 bp, Homo sapiens
  siRNA target sequence for GHR (NM_000163.1,982-1000).
cctcaaggaaggaaaatta

SEQ ID NO: 243861 - DNA, 19 bp, Homo sapiens
  siRNA target sequence for GHR (NM_000163.1,1001-1019).
gaggaggtgaacacaatct

SEQ ID NO: 243862 - DNA, 19 bp, Homo sapiens
  siRNA target sequence for GHR (NM_000163.1,1022-1040).
gccattcatgatagctata

SEQ ID NO: 243863 - DNA, 19 bp, Homo sapiens
  siRNA target sequence for GHR (NM_000163.1,1023-1041).
ccattcatgatagctataa

SEQ ID NO: 243864 - DNA, 19 bp, Homo sapiens
  siRNA target sequence for GHR (NM_000163.1,1024-1042).
cattcatgatagctataaa

SEQ ID NO: 243865 - DNA, 19 bp, Homo sapiens
  siRNA target sequence for GHR (NM_000163.1,1035-1053).
gctataaacccgaattcca

SEQ ID NO: 243866 - DNA, 19 bp, Homo sapiens
  siRNA target sequence for GHR (NM_000163.1,1073-1091).
gaatttattgagctagata

SEQ ID NO: 243867 - DNA, 19 bp, Homo sapiens
  siRNA target sequence for GHR (NM_000163.1,1146-1164).
gtgaccatgagaaatcaca

SEQ ID NO: 243868 - DNA, 19 bp, Homo sapiens
  siRNA target sequence for GHR (NM_000163.1,1156-1174).
gaaatcacatagtaaccta

SEQ ID NO: 243869 - DNA, 19 bp, Homo sapiens
  siRNA target sequence for GHR (NM_000163.1,1207-1225).
ctgttgtgaacctgacatt

SEQ ID NO: 243870 - DNA, 19 bp, Homo sapiens
  siRNA target sequence for GHR (NM_000163.1,1220-1238).
gacattctggagactgatt

SEQ ID NO: 243871 - DNA, 19 bp, Homo sapiens
  siRNA target sequence for GHR (NM_000163.1,1277-1295).
gctcagccacagaggttaa

SEQ ID NO: 243872 - DNA, 19 bp, Homo sapiens
  siRNA target sequence for GHR (NM_000163.1,1317-1335).
gccttgaccagaagaatca

SEQ ID NO: 243873 - DNA, 19 bp, Homo sapiens
  siRNA target sequence for GHR (NM_000163.1,1375-1393).
gcagcccagtgttatccaa

SEQ ID NO: 243874 - DNA, 19 bp, Homo sapiens
  siRNA target sequence for GHR (NM_000163.1,1385-1403).
gttatccaagcagagaaaa

SEQ ID NO: 243875 - DNA, 19 bp, Homo sapiens
  siRNA target sequence for GHR (NM_000163.1,1455-1473).
cccatattcagctaagcaa

SEQ ID NO: 243876 - DNA, 19 bp, Homo sapiens
  siRNA target sequence for GHR (NM_000163.1,1456-1474).
ccatattcagctaagcaat

SEQ ID NO: 243877 - DNA, 19 bp, Homo sapiens
  siRNA target sequence for GHR (NM_000163.1,1475-1493).
ccaagttcactgtcaaaca

SEQ ID NO: 243878 - DNA, 19 bp, Homo sapiens
  siRNA target sequence for GHR (NM_000163.1,1486-1504).
gtcaaacatcgacttttat

SEQ ID NO: 243879 - DNA, 19 bp, Homo sapiens
  siRNA target sequence for GHR (NM_000163.1,1505-1523).
gcccaggtgagcgacatta

SEQ ID NO: 243880 - DNA, 19 bp, Homo sapiens
  siRNA target sequence for GHR (NM_000163.1,1507-1525).
ccaggtgagcgacattaca

SEQ ID NO: 243881 - DNA, 19 bp, Homo sapiens
  siRNA target sequence for GHR (NM_000163.1,1569-1587).
cagggatgtcccaatgtga

SEQ ID NO: 243882 - DNA, 19 bp, Homo sapiens
  siRNA target sequence for GHR (NM_000163.1,1677-1695).
ctgtggctcctcacatcaa

SEQ ID NO: 243883 - DNA, 19 bp, Homo sapiens
  siRNA target sequence for GHR (NM_000163.1,1685-1703).
cctcacatcaaggttgaat

SEQ ID NO: 243884 - DNA, 19 bp, Homo sapiens
  siRNA target sequence for GHR (NM_000163.1,1706-1724).
cacatacagccaagcttaa

SEQ ID NO: 243885 - DNA, 19 bp, Homo sapiens
  siRNA target sequence for GHR (NM_000163.1,1810-1828).
gatgcctgtcccagactat

SEQ ID NO: 243886 - DNA, 19 bp, Homo sapiens
  siRNA target sequence for GHR (NM_000163.1,1814-1832).
cctgtcccagactatacct

SEQ ID NO: 243887 - DNA, 19 bp, Homo sapiens
  siRNA target sequence for GHR (NM_000163.1,1825-1843).
ctatacctccattcatata

SEQ ID NO: 243888 - DNA, 19 bp, Homo sapiens
  siRNA target sequence for GHR (NM_000163.1,1830-1848).
cctccattcatatagtaca

SEQ ID NO: 243889 - DNA, 19 bp, Homo sapiens
  siRNA target sequence for GHR (NM_000163.1,1882-1900).
cttgcccttgcctgacaaa

SEQ ID NO: 243890 - DNA, 19 bp, Homo sapiens
  siRNA target sequence for GHR (NM_000163.1,1929-1947).
gcacagaccaactgaacaa

SEQ ID NO: 243891 - DNA, 19 bp, Homo sapiens
  siRNA target sequence for EPOR (NM_000121.2,544-562).
catccacatcaatgaagta

SEQ ID NO: 243892 - DNA, 19 bp, Homo sapiens
  siRNA target sequence for EPOR (NM_000121.2,999-1017).
gcccagagagcgagtttga

SEQ ID NO: 243893 - DNA, 19 bp, Homo sapiens
  siRNA target sequence for EPOR (NM_000121.2,1029-1047).
ccacccacaagggtaactt

SEQ ID NO: 243894 - DNA, 19 bp, Homo sapiens
  siRNA target sequence for EPOR (NM_000121.2,1302-1320).
gtggcagtgtggacatagt

SEQ ID NO: 243895 - DNA, 19 bp, Homo sapiens
  siRNA target sequence for EPOR (NM_000121.2,1400-1418).
gccagctttgagtacacta

SEQ ID NO: 243896 - DNA, 19 bp, Homo sapiens
  siRNA target sequence for CNTFR (NM_001842.3,578-596).
cattcccaacaccttcaat

SEQ ID NO: 243897 - DNA, 19 bp, Homo sapiens
  siRNA target sequence for CNTFR (NM_001842.3,603-621).
gtgctgcatggctccaaaa

SEQ ID NO: 243898 - DNA, 19 bp, Homo sapiens
  siRNA target sequence for CNTFR (NM_001842.3,605-623).
gctgcatggctccaaaatt

SEQ ID NO: 243899 - DNA, 19 bp, Homo sapiens
  siRNA target sequence for CNTFR (NM_001842.3,606-624).
ctgcatggctccaaaatta

SEQ ID NO: 243900 - DNA, 19 bp, Homo sapiens
  siRNA target sequence for CNTFR (NM_001842.3,681-699).
ctgttctccaccatcaagt

SEQ ID NO: 243901 - DNA, 19 bp, Homo sapiens
  siRNA target sequence for CNTFR (NM_001842.3,698-716).
gtacaaggtctccataagt

SEQ ID NO: 243902 - DNA, 19 bp, Homo sapiens
  siRNA target sequence for CNTFR (NM_001842.3,759-777).
gacgagttcaccattgtga

SEQ ID NO: 243903 - DNA, 19 bp, Homo sapiens
  siRNA target sequence for GFRA2 (NM_001495.3,643-661).
cccgcctctcggacatctt

SEQ ID NO: 243904 - DNA, 19 bp, Homo sapiens
  siRNA target sequence for GFRA2 (NM_001495.3,645-663).
cgcctctcggacatcttca

SEQ ID NO: 243905 - DNA, 19 bp, Homo sapiens
  siRNA target sequence for GFRA2 (NM_001495.3,1096-1114).
gctgccctgcggacaatta

SEQ ID NO: 243906 - DNA, 19 bp, Homo sapiens
  siRNA target sequence for GFRA2 (NM_001495.3,1099-1117).
gccctgcggacaattacca

SEQ ID NO: 243907 - DNA, 19 bp, Homo sapiens
  siRNA target sequence for GFRA2 (NM_001495.3,1121-1139).
gtgtctgggctcttatgct

SEQ ID NO: 243908 - DNA, 19 bp, Homo sapiens
  siRNA target sequence for GFRA2 (NM_001495.3,1479-1497).
gccaacaactccaaagagt

SEQ ID NO: 243909 - DNA, 19 bp, Homo sapiens
  siRNA target sequence for GFRA2 (NM_001495.3,1481-1499).
caacaactccaaagagtta

SEQ ID NO: 243910 - DNA, 19 bp, Homo sapiens
  siRNA target sequence for GFRA2 (NM_001495.3,1540-1558).
ggagtaacaaggtgatcaa

SEQ ID NO: 243911 - DNA, 19 bp, Homo sapiens
  siRNA target sequence for GFRA2 (NM_001495.3,1541-1559).
gagtaacaaggtgatcaaa

SEQ ID NO: 243912 - DNA, 19 bp, Homo sapiens
  siRNA target sequence for GFRA2 (NM_001495.3,1550-1568).
ggtgatcaaacctaactca

SEQ ID NO: 243913 - DNA, 19 bp, Homo sapiens
  siRNA target sequence for CRLF2 (NM_022148.2,1002-1020).
cacagaccgaggagaaaga

SEQ ID NO: 243914 - DNA, 19 bp, Homo sapiens
  siRNA target sequence for CRLF2 (NM_022148.2,1065-1083).
gcggtgatgtggtcacaat

SEQ ID NO: 243915 - DNA, 19 bp, Homo sapiens
  siRNA target sequence for CSF2RA (NM_172246.1,1121-1139).
ccattgaatttgatcatct

SEQ ID NO: 243916 - DNA, 19 bp, Homo sapiens
  siRNA target sequence for CSF2RA (NM_172247.1,966-984).
gaatttggttccttaggat

SEQ ID NO: 243917 - DNA, 19 bp, Homo sapiens
  siRNA target sequence for CSF3R (NM_000760.2,207-225).
cttgggctgccctgatcat

SEQ ID NO: 243918 - DNA, 19 bp, Homo sapiens
  siRNA target sequence for CSF3R (NM_000760.2,347-365).
ccggagccacagattctgt

SEQ ID NO: 243919 - DNA, 19 bp, Homo sapiens
  siRNA target sequence for CSF3R (NM_000760.2,642-660).
gcttcactctgaagagttt

SEQ ID NO: 243920 - DNA, 19 bp, Homo sapiens
  siRNA target sequence for CSF3R (NM_000760.2,820-838).
cccacaactgtgtcttgat

SEQ ID NO: 243921 - DNA, 19 bp, Homo sapiens
  siRNA target sequence for CSF3R (NM_000760.2,953-971).
ggcctgcacataaatcaga

SEQ ID NO: 243922 - DNA, 19 bp, Homo sapiens
  siRNA target sequence for CSF3R (NM_000760.2,1035-1053).
ccttggaggcccttcagta

SEQ ID NO: 243923 - DNA, 19 bp, Homo sapiens
  siRNA target sequence for CSF3R (NM_000760.2,1272-1290).
gcggacggatccaaggtta

SEQ ID NO: 243924 - DNA, 19 bp, Homo sapiens
  siRNA target sequence for CSF3R (NM_000760.2,1273-1291).
cggacggatccaaggttat

SEQ ID NO: 243925 - DNA, 19 bp, Homo sapiens
  siRNA target sequence for CSF3R (NM_000760.2,1439-1457).
ccggtggtcttctcagaaa

SEQ ID NO: 243926 - DNA, 19 bp, Homo sapiens
  siRNA target sequence for CSF3R (NM_000760.2,1543-1561).
gcctcagggctatgtgatt

SEQ ID NO: 243927 - DNA, 19 bp, Homo sapiens
  siRNA target sequence for CSF3R (NM_000760.2,1545-1563).
ctcagggctatgtgattga

SEQ ID NO: 243928 - DNA, 19 bp, Homo sapiens
  siRNA target sequence for CSF3R (NM_000760.2,1547-1565).
cagggctatgtgattgagt

SEQ ID NO: 243929 - DNA, 19 bp, Homo sapiens
  siRNA target sequence for CSF3R (NM_000760.2,1580-1598).
cccagcgcgagcaatagca

SEQ ID NO: 243930 - DNA, 19 bp, Homo sapiens
  siRNA target sequence for CSF3R (NM_000760.2,1581-1599).
ccagcgcgagcaatagcaa

SEQ ID NO: 243931 - DNA, 19 bp, Homo sapiens
  siRNA target sequence for CSF3R (NM_000760.2,1586-1604).
gcgagcaatagcaacaaga

SEQ ID NO: 243932 - DNA, 19 bp, Homo sapiens
  siRNA target sequence for CSF3R (NM_000760.2,1716-1734).
gaccctcccagcatgtcta

SEQ ID NO: 243933 - DNA, 19 bp, Homo sapiens
  siRNA target sequence for CSF3R (NM_000760.2,1732-1750).
ctatgcctactctcaagaa

SEQ ID NO: 243934 - DNA, 19 bp, Homo sapiens
  siRNA target sequence for CSF3R (NM_000760.2,2046-2064).
ggtcggagctacacatcat

SEQ ID NO: 243935 - DNA, 19 bp, Homo sapiens
  siRNA target sequence for CSF3R (NM_000760.2,2193-2211).
cctgggtgcccacaatcat

SEQ ID NO: 243936 - DNA, 19 bp, Homo sapiens
  siRNA target sequence for CSF3R (NM_000760.2,2415-2433).
ccagcgatcaggtccttta

SEQ ID NO: 243937 - DNA, 19 bp, Homo sapiens
  siRNA target sequence for CSF3R (NM_000760.2,2416-2434).
cagcgatcaggtcctttat

SEQ ID NO: 243938 - DNA, 19 bp, Homo sapiens
  siRNA target sequence for CSF3R (NM_156039.2,2245-2263).
gctggggcagacatctgaa

SEQ ID NO: 243939 - DNA, 19 bp, Homo sapiens
  siRNA target sequence for CSF3R (NM_156039.2,2246-2264).
ctggggcagacatctgaaa

SEQ ID NO: 243940 - DNA, 19 bp, Homo sapiens
  siRNA target sequence for CSF3R (NM_172313.1,2436-2454).
ccaggcgatctgcatactt

SEQ ID NO: 243941 - DNA, 19 bp, Homo sapiens
  siRNA target sequence for CSF3R (NM_172313.1,2437-2455).
caggcgatctgcatacttt

SEQ ID NO: 243942 - DNA, 19 bp, Homo sapiens
  siRNA target sequence for CSF3R (NM_172313.1,2439-2457).
ggcgatctgcatactttaa

SEQ ID NO: 243943 - DNA, 19 bp, Homo sapiens
  siRNA target sequence for CSF3R (NM_172313.1,2442-2460).
gatctgcatactttaagga

SEQ ID NO: 243944 - DNA, 19 bp, Homo sapiens
  siRNA target sequence for CSF3R (NM_172313.1,2503-2521).
cttgtttcctataacttca

SEQ ID NO: 243945 - DNA, 19 bp, Homo sapiens
  siRNA target sequence for CSF3R (NM_172313.1,2506-2524).
gtttcctataacttcagta

SEQ ID NO: 243946 - DNA, 19 bp, Homo sapiens
  siRNA target sequence for EBI3 (NM_005755.2,307-325).
ctccctacgtgctcaatgt

SEQ ID NO: 243947 - DNA, 19 bp, Homo sapiens
  siRNA target sequence for EBI3 (NM_005755.2,309-327).
ccctacgtgctcaatgtca

SEQ ID NO: 243948 - DNA, 19 bp, Homo sapiens
  siRNA target sequence for EBI3 (NM_005755.2,359-377).
cttcgtgcctttcataaca

SEQ ID NO: 243949 - DNA, 19 bp, Homo sapiens
  siRNA target sequence for F3 (NM_001993.2,216-234).
cgcttcaggcactacaaat

SEQ ID NO: 243950 - DNA, 19 bp, Homo sapiens
  siRNA target sequence for F3 (NM_001993.2,217-235).
gcttcaggcactacaaata

SEQ ID NO: 243951 - DNA, 19 bp, Homo sapiens
  siRNA target sequence for F3 (NM_001993.2,236-254).
ctgtggcagcatataattt

SEQ ID NO: 243952 - DNA, 19 bp, Homo sapiens
  siRNA target sequence for F3 (NM_001993.2,299-317).
ccaaacccgtcaatcaagt

SEQ ID NO: 243953 - DNA, 19 bp, Homo sapiens
  siRNA target sequence for F3 (NM_001993.2,394-412).
ctcaccgacgagattgtga

SEQ ID NO: 243954 - DNA, 19 bp, Homo sapiens
  siRNA target sequence for F3 (NM_001993.2,540-558).
cctcggacagccaacaatt

SEQ ID NO: 243955 - DNA, 19 bp, Homo sapiens
  siRNA target sequence for F3 (NM_001993.2,544-562).
ggacagccaacaattcaga

SEQ ID NO: 243956 - DNA, 19 bp, Homo sapiens
  siRNA target sequence for F3 (NM_001993.2,554-572).
caattcagagttttgaaca

SEQ ID NO: 243957 - DNA, 19 bp, Homo sapiens
  siRNA target sequence for F3 (NM_001993.2,588-606).
gaatgtgaccgtagaagat

SEQ ID NO: 243958 - DNA, 19 bp, Homo sapiens
  siRNA target sequence for F3 (NM_001993.2,604-622).
gatgaacggactttagtca

SEQ ID NO: 243959 - DNA, 19 bp, Homo sapiens
  siRNA target sequence for F3 (NM_001993.2,661-679).
ggcaaggacttaatttata

SEQ ID NO: 243960 - DNA, 19 bp, Homo sapiens
  siRNA target sequence for F3 (NM_001993.2,663-681).
caaggacttaatttataca

SEQ ID NO: 243961 - DNA, 19 bp, Homo sapiens
  siRNA target sequence for F3 (NM_001993.2,666-684).
ggacttaatttatacactt

SEQ ID NO: 243962 - DNA, 19 bp, Homo sapiens
  siRNA target sequence for F3 (NM_001993.2,722-740).
ccaaaacaaacactaatga

SEQ ID NO: 243963 - DNA, 19 bp, Homo sapiens
  siRNA target sequence for F3 (NM_001993.2,734-752).
ctaatgagtttttgattga

SEQ ID NO: 243964 - DNA, 19 bp, Homo sapiens
  siRNA target sequence for F3 (NM_001993.2,780-798).
cagtgttcaagcagtgatt

SEQ ID NO: 243965 - DNA, 19 bp, Homo sapiens
  siRNA target sequence for F3 (NM_001993.2,795-813).
gattccctcccgaacagtt

SEQ ID NO: 243966 - DNA, 19 bp, Homo sapiens
  siRNA target sequence for F3 (NM_001993.2,863-881).
gggaattcagagaaatatt

SEQ ID NO: 243967 - DNA, 19 bp, Homo sapiens
  siRNA target sequence for F3 (NM_001993.2,984-1002).
ggagaactccccactgaat

SEQ ID NO: 243968 - DNA, 19 bp, Homo sapiens
  siRNA target sequence for F3 (NM_001993.2,987-1005).
gaactccccactgaatgtt

SEQ ID NO: 243969 - DNA, 19 bp, Homo sapiens
  siRNA target sequence for F3 (NM_001993.2,990-1008).
ctccccactgaatgtttca

SEQ ID NO: 243970 - DNA, 19 bp, Homo sapiens
  siRNA target sequence for FAD104 (NM_022763.2,168-186).
ggttattctcgttcaagtt

SEQ ID NO: 243971 - DNA, 19 bp, Homo sapiens
  siRNA target sequence for FAD104 (NM_022763.2,169-187).
gttattctcgttcaagtta

SEQ ID NO: 243972 - DNA, 19 bp, Homo sapiens
  siRNA target sequence for FAD104 (NM_022763.2,267-285).
gtcacccaatggatccatt

SEQ ID NO: 243973 - DNA, 19 bp, Homo sapiens
  siRNA target sequence for FAD104 (NM_022763.2,295-313).
catgtgcctccaggttata

SEQ ID NO: 243974 - DNA, 19 bp, Homo sapiens
  siRNA target sequence for FAD104 (NM_022763.2,298-316).
gtgcctccaggttatatct

SEQ ID NO: 243975 - DNA, 19 bp, Homo sapiens
  siRNA target sequence for FAD104 (NM_022763.2,321-339).
ggtgattgaagatagtact

SEQ ID NO: 243976 - DNA, 19 bp, Homo sapiens
  siRNA target sequence for FAD104 (NM_022763.2,438-456).
gactcaccatccacatttt

SEQ ID NO: 243977 - DNA, 19 bp, Homo sapiens
  siRNA target sequence for FAD104 (NM_022763.2,559-577).
gagcaagaaattataccat

SEQ ID NO: 243978 - DNA, 19 bp, Homo sapiens
  siRNA target sequence for FAD104 (NM_022763.2,574-592).
ccattttatggaatgtcaa

SEQ ID NO: 243979 - DNA, 19 bp, Homo sapiens
  siRNA target sequence for FAD104 (NM_022763.2,620-638).
gcaagcctccgcacaaaaa

SEQ ID NO: 243980 - DNA, 19 bp, Homo sapiens
  siRNA target sequence for FAD104 (NM_022763.2,621-639).
caagcctccgcacaaaaaa

SEQ ID NO: 243981 - DNA, 19 bp, Homo sapiens
  siRNA target sequence for FAD104 (NM_022763.2,626-644).
ctccgcacaaaaaactgaa

SEQ ID NO: 243982 - DNA, 19 bp, Homo sapiens
  siRNA target sequence for FAD104 (NM_022763.2,707-725).
gctgcacaacagtatacaa

SEQ ID NO: 243983 - DNA, 19 bp, Homo sapiens
  siRNA target sequence for FAD104 (NM_022763.2,772-790).
ggtagtggtcccggaatta

SEQ ID NO: 243984 - DNA, 19 bp, Homo sapiens
  siRNA target sequence for FAD104 (NM_022763.2,773-791).
gtagtggtcccggaattaa

SEQ ID NO: 243985 - DNA, 19 bp, Homo sapiens
  siRNA target sequence for FAD104 (NM_022763.2,776-794).
gtggtcccggaattaagaa

SEQ ID NO: 243986 - DNA, 19 bp, Homo sapiens
  siRNA target sequence for FAD104 (NM_022763.2,778-796).
ggtcccggaattaagaaaa

SEQ ID NO: 243987 - DNA, 19 bp, Homo sapiens
  siRNA target sequence for FAD104 (NM_022763.2,816-834).
cagcccaaagtcgaatgat

SEQ ID NO: 243988 - DNA, 19 bp, Homo sapiens
  siRNA target sequence for FAD104 (NM_022763.2,819-837).
cccaaagtcgaatgattca

SEQ ID NO: 243989 - DNA, 19 bp, Homo sapiens
  siRNA target sequence for FAD104 (NM_022763.2,821-839).
caaagtcgaatgattcaga

SEQ ID NO: 243990 - DNA, 19 bp, Homo sapiens
  siRNA target sequence for FAD104 (NM_022763.2,1008-1026).
ggtggccttatcagacaaa

SEQ ID NO: 243991 - DNA, 19 bp, Homo sapiens
  siRNA target sequence for FAD104 (NM_022763.2,1090-1108).
cttagaccagcaacagatt

SEQ ID NO: 243992 - DNA, 19 bp, Homo sapiens
  siRNA target sequence for FAD104 (NM_022763.2,1097-1115).
cagcaacagattatcatgt

SEQ ID NO: 243993 - DNA, 19 bp, Homo sapiens
  siRNA target sequence for FAD104 (NM_022763.2,1118-1136).
gggtgtatgccatgtacaa

SEQ ID NO: 243994 - DNA, 19 bp, Homo sapiens
  siRNA target sequence for FAD104 (NM_022763.2,1119-1137).
ggtgtatgccatgtacaat

SEQ ID NO: 243995 - DNA, 19 bp, Homo sapiens
  siRNA target sequence for FAD104 (NM_022763.2,1154-1172).
gctccgagcctgttagctt

SEQ ID NO: 243996 - DNA, 19 bp, Homo sapiens
  siRNA target sequence for FAD104 (NM_022763.2,1218-1236).
ggcacataggagcaaaagt

SEQ ID NO: 243997 - DNA, 19 bp, Homo sapiens
  siRNA target sequence for FAD104 (NM_022763.2,1219-1237).
gcacataggagcaaaagtt

SEQ ID NO: 243998 - DNA, 19 bp, Homo sapiens
  siRNA target sequence for FAD104 (NM_022763.2,1262-1280).
caattgacaacggttcaaa

SEQ ID NO: 243999 - DNA, 19 bp, Homo sapiens
  siRNA target sequence for FAD104 (NM_022763.2,1267-1285).
gacaacggttcaaaaatca

SEQ ID NO: 244000 - DNA, 19 bp, Homo sapiens
  siRNA target sequence for FAD104 (NM_022763.2,1362-1380).
ctgcaagttgacaaagctt

SEQ ID NO: 244001 - DNA, 19 bp, Homo sapiens
  siRNA target sequence for FAD104 (NM_022763.2,1384-1402).
ccggcaatggggtacacat

SEQ ID NO: 244002 - DNA, 19 bp, Homo sapiens
  siRNA target sequence for FAD104 (NM_022763.2,1385-1403).
cggcaatggggtacacatt

SEQ ID NO: 244003 - DNA, 19 bp, Homo sapiens
  siRNA target sequence for FAD104 (NM_022763.2,1387-1405).
gcaatggggtacacattca

SEQ ID NO: 244004 - DNA, 19 bp, Homo sapiens
  siRNA target sequence for FAD104 (NM_022763.2,1414-1432).
gctcgaaacgacattggta

SEQ ID NO: 244005 - DNA, 19 bp, Homo sapiens
  siRNA target sequence for FAD104 (NM_022763.2,1425-1443).
cattggtaccagtggttat

SEQ ID NO: 244006 - DNA, 19 bp, Homo sapiens
  siRNA target sequence for FAD104 (NM_022763.2,1450-1468).
gaggtggtgtgctacacat

SEQ ID NO: 244007 - DNA, 19 bp, Homo sapiens
  siRNA target sequence for FAD104 (NM_022763.2,1452-1470).
ggtggtgtgctacacatta

SEQ ID NO: 244008 - DNA, 19 bp, Homo sapiens
  siRNA target sequence for FAD104 (NM_022763.2,1455-1473).
ggtgtgctacacattagga

SEQ ID NO: 244009 - DNA, 19 bp, Homo sapiens
  siRNA target sequence for FAD104 (NM_022763.2,1456-1474).
gtgtgctacacattaggaa

SEQ ID NO: 244010 - DNA, 19 bp, Homo sapiens
  siRNA target sequence for FAD104 (NM_022763.2,1507-1525).
gttcgagctggcatcacat

SEQ ID NO: 244011 - DNA, 19 bp, Homo sapiens
  siRNA target sequence for FAD104 (NM_022763.2,1559-1577).
gttcacccgaggaagtgat

SEQ ID NO: 244012 - DNA, 19 bp, Homo sapiens
  siRNA target sequence for FAD104 (NM_022763.2,1580-1598).
cctacaccttggaaattca

SEQ ID NO: 244013 - DNA, 19 bp, Homo sapiens
  siRNA target sequence for FAD104 (NM_022763.2,1695-1713).
caggctgactgcttctaat

SEQ ID NO: 244014 - DNA, 19 bp, Homo sapiens
  siRNA target sequence for FAD104 (NM_022763.2,1706-1724).
cttctaatacggaaggaaa

SEQ ID NO: 244015 - DNA, 19 bp, Homo sapiens
  siRNA target sequence for FAD104 (NM_022763.2,1727-1745).
gctgtccaagcgaagttct

SEQ ID NO: 244016 - DNA, 19 bp, Homo sapiens
  siRNA target sequence for FAD104 (NM_022763.2,1728-1746).
ctgtccaagcgaagttctt

SEQ ID NO: 244017 - DNA, 19 bp, Homo sapiens
  siRNA target sequence for FAD104 (NM_022763.2,1730-1748).
gtccaagcgaagttcttgt

SEQ ID NO: 244018 - DNA, 19 bp, Homo sapiens
  siRNA target sequence for FAD104 (NM_022763.2,1781-1799).
ctaccagaccgcttgtcaa

SEQ ID NO: 244019 - DNA, 19 bp, Homo sapiens
  siRNA target sequence for FAD104 (NM_022763.2,1795-1813).
gtcaaaggcccagttacat

SEQ ID NO: 244020 - DNA, 19 bp, Homo sapiens
  siRNA target sequence for FAD104 (NM_022763.2,1872-1890).
caagtacttgctagagatt

SEQ ID NO: 244021 - DNA, 19 bp, Homo sapiens
  siRNA target sequence for FAD104 (NM_022763.2,1878-1896).
cttgctagagattactgat

SEQ ID NO: 244022 - DNA, 19 bp, Homo sapiens
  siRNA target sequence for FAD104 (NM_022763.2,1887-1905).
gattactgatggaaattct

SEQ ID NO: 244023 - DNA, 19 bp, Homo sapiens
  siRNA target sequence for FAD104 (NM_022763.2,1936-1954).
gggtcggctaccgaataca

SEQ ID NO: 244024 - DNA, 19 bp, Homo sapiens
  siRNA target sequence for FAD104 (NM_022763.2,1993-2011).
cgagcatgctgcatcagta

SEQ ID NO: 244025 - DNA, 19 bp, Homo sapiens
  siRNA target sequence for FAD104 (NM_022763.2,2024-2042).
gccagtgttctgaaagtct

SEQ ID NO: 244026 - DNA, 19 bp, Homo sapiens
  siRNA target sequence for FAD104 (NM_022763.2,2041-2059).
ctccctgttcgcacactaa

SEQ ID NO: 244027 - DNA, 19 bp, Homo sapiens
  siRNA target sequence for FAD104 (NM_022763.2,2045-2063).
ctgttcgcacactaagcat

SEQ ID NO: 244028 - DNA, 19 bp, Homo sapiens
  siRNA target sequence for FAD104 (NM_022763.2,2061-2079).
cattgcaccaggtcaatgt

SEQ ID NO: 244029 - DNA, 19 bp, Homo sapiens
  siRNA target sequence for FAD104 (NM_022763.2,2102-2120).
gaccaaagcacaaagaagt

SEQ ID NO: 244030 - DNA, 19 bp, Homo sapiens
  siRNA target sequence for FAD104 (NM_022763.2,2306-2324).
ggtatggtccctattctga

SEQ ID NO: 244031 - DNA, 19 bp, Homo sapiens
  siRNA target sequence for FAD104 (NM_022763.2,2393-2411).
ctgatggatgtgtcttagt

SEQ ID NO: 244032 - DNA, 19 bp, Homo sapiens
  siRNA target sequence for FAD104 (NM_022763.2,2487-2505).
cttagaactcatttatcat

SEQ ID NO: 244033 - DNA, 19 bp, Homo sapiens
  siRNA target sequence for FAD104 (NM_022763.2,2508-2526).
gacagacacccgttttgaa

SEQ ID NO: 244034 - DNA, 19 bp, Homo sapiens
  siRNA target sequence for FAD104 (NM_022763.2,2510-2528).
cagacacccgttttgaaat

SEQ ID NO: 244035 - DNA, 19 bp, Homo sapiens
  siRNA target sequence for FAD104 (NM_022763.2,2512-2530).
gacacccgttttgaaataa

SEQ ID NO: 244036 - DNA, 19 bp, Homo sapiens
  siRNA target sequence for FAD104 (NM_022763.2,2516-2534).
cccgttttgaaataagaga

SEQ ID NO: 244037 - DNA, 19 bp, Homo sapiens
  siRNA target sequence for FAD104 (NM_022763.2,2594-2612).
ggccgtacagtgaacttgt

SEQ ID NO: 244038 - DNA, 19 bp, Homo sapiens
  siRNA target sequence for FAD104 (NM_022763.2,2726-2744).
gggaagagccgtgcaataa

SEQ ID NO: 244039 - DNA, 19 bp, Homo sapiens
  siRNA target sequence for FAD104 (NM_022763.2,2736-2754).
gtgcaataacggatctgaa

SEQ ID NO: 244040 - DNA, 19 bp, Homo sapiens
  siRNA target sequence for FAD104 (NM_022763.2,2738-2756).
gcaataacggatctgaaat

SEQ ID NO: 244041 - DNA, 19 bp, Homo sapiens
  siRNA target sequence for FAD104 (NM_022763.2,2807-2825).
ccaccatgcatgttatgaa

SEQ ID NO: 244042 - DNA, 19 bp, Homo sapiens
  siRNA target sequence for FAD104 (NM_022763.2,2843-2861).
ccacctaccggatcagaat

SEQ ID NO: 244043 - DNA, 19 bp, Homo sapiens
  siRNA target sequence for FAD104 (NM_022763.2,2844-2862).
cacctaccggatcagaatt

SEQ ID NO: 244044 - DNA, 19 bp, Homo sapiens
  siRNA target sequence for FAD104 (NM_022763.2,2846-2864).
cctaccggatcagaattca

SEQ ID NO: 244045 - DNA, 19 bp, Homo sapiens
  siRNA target sequence for FAD104 (NM_022763.2,2865-2883).
ggctataaatgaaattgga

SEQ ID NO: 244046 - DNA, 19 bp, Homo sapiens
  siRNA target sequence for FAD104 (NM_022763.2,2888-2906).
gaccatttagtcagttcat

SEQ ID NO: 244047 - DNA, 19 bp, Homo sapiens
  siRNA target sequence for FAD104 (NM_022763.2,2937-2955).
gcctcctaggctagaatgt

SEQ ID NO: 244048 - DNA, 19 bp, Homo sapiens
  siRNA target sequence for FAD104 (NM_022763.2,2971-2989).
cagagcctgaagctaaaat

SEQ ID NO: 244049 - DNA, 19 bp, Homo sapiens
  siRNA target sequence for FAD104 (NM_022763.2,3052-3070).
gacagaaacaagaggttta

SEQ ID NO: 244050 - DNA, 19 bp, Homo sapiens
  siRNA target sequence for FAD104 (NM_022763.2,3111-3129).
gagactgacggaattcaca

SEQ ID NO: 244051 - DNA, 19 bp, Homo sapiens
  siRNA target sequence for FAD104 (NM_022763.2,3174-3192).
gcccttctcagaaacctat

SEQ ID NO: 244052 - DNA, 19 bp, Homo sapiens
  siRNA target sequence for FAD104 (NM_022763.2,3175-3193).
cccttctcagaaacctata

SEQ ID NO: 244053 - DNA, 19 bp, Homo sapiens
  siRNA target sequence for FAD104 (NM_022763.2,3195-3213).
cttcagcacaaccaaaagt

SEQ ID NO: 244054 - DNA, 19 bp, Homo sapiens
  siRNA target sequence for FAD104 (NM_022763.2,3228-3246).
caaagcacctcgagtaaca

SEQ ID NO: 244055 - DNA, 19 bp, Homo sapiens
  siRNA target sequence for FAD104 (NM_022763.2,3236-3254).
ctcgagtaacacagttaga

SEQ ID NO: 244056 - DNA, 19 bp, Homo sapiens
  siRNA target sequence for FAD104 (NM_022763.2,3282-3300).
gacggtaccatcaatgaaa

SEQ ID NO: 244057 - DNA, 19 bp, Homo sapiens
  siRNA target sequence for FAD104 (NM_022763.2,3318-3336).
cattctgcaggtattggtt

SEQ ID NO: 244058 - DNA, 19 bp, Homo sapiens
  siRNA target sequence for FAD104 (NM_022763.2,3327-3345).
ggtattggttggaagagaa

SEQ ID NO: 244059 - DNA, 19 bp, Homo sapiens
  siRNA target sequence for FAD104 (NM_022763.2,3328-3346).
gtattggttggaagagaat

SEQ ID NO: 244060 - DNA, 19 bp, Homo sapiens
  siRNA target sequence for FAD104 (NM_022763.2,3341-3359).
gagaatctgagtacaaaca

SEQ ID NO: 244061 - DNA, 19 bp, Homo sapiens
  siRNA target sequence for FAD104 (NM_022763.2,3437-3455).
cgtgtcgtcgctgtttaga

SEQ ID NO: 244062 - DNA, 19 bp, Homo sapiens
  siRNA target sequence for FAD104 (NM_022763.2,3485-3503).
gcccctctgcggcttttgt

SEQ ID NO: 244063 - DNA, 19 bp, Homo sapiens
  siRNA target sequence for FAD104 (NM_022763.2,3486-3504).
cccctctgcggcttttgta

SEQ ID NO: 244064 - DNA, 19 bp, Homo sapiens
  siRNA target sequence for FAD104 (NM_022763.2,3487-3505).
ccctctgcggcttttgtat

SEQ ID NO: 244065 - DNA, 19 bp, Homo sapiens
  siRNA target sequence for FAD104 (NM_022763.2,3488-3506).
cctctgcggcttttgtatt

SEQ ID NO: 244066 - DNA, 19 bp, Homo sapiens
  siRNA target sequence for FAD104 (NM_022763.2,3491-3509).
ctgcggcttttgtattaca

SEQ ID NO: 244067 - DNA, 19 bp, Homo sapiens
  siRNA target sequence for FAD104 (NM_022763.2,3511-3529).
cgaagtgaggtcatgctta

SEQ ID NO: 244068 - DNA, 19 bp, Homo sapiens
  siRNA target sequence for FAD104 (NM_022763.2,3537-3555).
catggggagcttagatgat

SEQ ID NO: 244069 - DNA, 19 bp, Homo sapiens
  siRNA target sequence for FAD104 (NM_022763.2,3567-3585).
gagcatgatgcctactgat

SEQ ID NO: 244070 - DNA, 19 bp, Homo sapiens
  siRNA target sequence for FAD104 (NM_022763.2,3570-3588).
catgatgcctactgatgaa

SEQ ID NO: 244071 - DNA, 19 bp, Homo sapiens
  siRNA target sequence for IL11RA (NM_004512.3,424-442).
gccaagcagccgactatga

SEQ ID NO: 244072 - DNA, 19 bp, Homo sapiens
  siRNA target sequence for IL11RA (NM_004512.3,426-444).
caagcagccgactatgaga

SEQ ID NO: 244073 - DNA, 19 bp, Homo sapiens
  siRNA target sequence for IL11RA (NM_004512.3,430-448).
cagccgactatgagaactt

SEQ ID NO: 244074 - DNA, 19 bp, Homo sapiens
  siRNA target sequence for IL11RA (NM_004512.3,432-450).
gccgactatgagaacttct

SEQ ID NO: 244075 - DNA, 19 bp, Homo sapiens
  siRNA target sequence for IL11RA (NM_004512.3,628-646).
ggagccagtaccggattaa

SEQ ID NO: 244076 - DNA, 19 bp, Homo sapiens
  siRNA target sequence for IL11RA (NM_004512.3,629-647).
gagccagtaccggattaat

SEQ ID NO: 244077 - DNA, 19 bp, Homo sapiens
  siRNA target sequence for IL11RA (NM_004512.3,631-649).
gccagtaccggattaatgt

SEQ ID NO: 244078 - DNA, 19 bp, Homo sapiens
  siRNA target sequence for IL11RA (NM_004512.3,633-651).
cagtaccggattaatgtga

SEQ ID NO: 244079 - DNA, 19 bp, Homo sapiens
  siRNA target sequence for IL11RA (NM_004512.3,1012-1030).
gcactgggaccataccaaa

SEQ ID NO: 244080 - DNA, 19 bp, Homo sapiens
  siRNA target sequence for IL11RA (NM_004512.3,1120-1138).
cacaccctcggctacttga

SEQ ID NO: 244081 - DNA, 19 bp, Homo sapiens
  siRNA target sequence for IL13RA1 (NM_001560.2,208-226).
cgagggagccagctcaaat

SEQ ID NO: 244082 - DNA, 19 bp, Homo sapiens
  siRNA target sequence for IL13RA1 (NM_001560.2,211-229).
gggagccagctcaaattgt

SEQ ID NO: 244083 - DNA, 19 bp, Homo sapiens
  siRNA target sequence for IL13RA1 (NM_001560.2,212-230).
ggagccagctcaaattgta

SEQ ID NO: 244084 - DNA, 19 bp, Homo sapiens
  siRNA target sequence for IL13RA1 (NM_001560.2,217-235).
cagctcaaattgtagtcta

SEQ ID NO: 244085 - DNA, 19 bp, Homo sapiens
  siRNA target sequence for IL13RA1 (NM_001560.2,222-240).
caaattgtagtctatggta

SEQ ID NO: 244086 - DNA, 19 bp, Homo sapiens
  siRNA target sequence for IL13RA1 (NM_001560.2,233-251).
ctatggtattttagtcatt

SEQ ID NO: 244087 - DNA, 19 bp, Homo sapiens
  siRNA target sequence for IL13RA1 (NM_001560.2,246-264).
gtcattttggcgacaaaca

SEQ ID NO: 244088 - DNA, 19 bp, Homo sapiens
  siRNA target sequence for IL13RA1 (NM_001560.2,282-300).
cggaaactcgtcgttcaat

SEQ ID NO: 244089 - DNA, 19 bp, Homo sapiens
  siRNA target sequence for IL13RA1 (NM_001560.2,283-301).
ggaaactcgtcgttcaata

SEQ ID NO: 244090 - DNA, 19 bp, Homo sapiens
  siRNA target sequence for IL13RA1 (NM_001560.2,288-306).
ctcgtcgttcaatagaagt

SEQ ID NO: 244091 - DNA, 19 bp, Homo sapiens
  siRNA target sequence for IL13RA1 (NM_001560.2,344-362).
cagtgtagcaccaatgaga

SEQ ID NO: 244092 - DNA, 19 bp, Homo sapiens
  siRNA target sequence for IL13RA1 (NM_001560.2,425-443).
gctgtgactgagcttcaat

SEQ ID NO: 244093 - DNA, 19 bp, Homo sapiens
  siRNA target sequence for IL13RA1 (NM_001560.2,430-448).
gactgagcttcaatgcatt

SEQ ID NO: 244094 - DNA, 19 bp, Homo sapiens
  siRNA target sequence for IL13RA1 (NM_001560.2,458-476).
ctgagctacatgaagtgtt

SEQ ID NO: 244095 - DNA, 19 bp, Homo sapiens
  siRNA target sequence for IL13RA1 (NM_001560.2,482-500).
ctccctggaaggaatacca

SEQ ID NO: 244096 - DNA, 19 bp, Homo sapiens
  siRNA target sequence for IL13RA1 (NM_001560.2,499-517).
cagtcccgacactaactat

SEQ ID NO: 244097 - DNA, 19 bp, Homo sapiens
  siRNA target sequence for IL13RA1 (NM_001560.2,504-522).
ccgacactaactatactct

SEQ ID NO: 244098 - DNA, 19 bp, Homo sapiens
  siRNA target sequence for IL13RA1 (NM_001560.2,510-528).
ctaactatactctctacta

SEQ ID NO: 244099 - DNA, 19 bp, Homo sapiens
  siRNA target sequence for IL13RA1 (NM_001560.2,531-549).
ggcacagaagcctggaaaa

SEQ ID NO: 244100 - DNA, 19 bp, Homo sapiens
  siRNA target sequence for IL13RA1 (NM_001560.2,578-596).
gaaggccaatactttggtt

SEQ ID NO: 244101 - DNA, 19 bp, Homo sapiens
  siRNA target sequence for IL13RA1 (NM_001560.2,726-744).
ctgatcctccacatattaa

SEQ ID NO: 244102 - DNA, 19 bp, Homo sapiens
  siRNA target sequence for IL13RA1 (NM_001560.2,757-775).
ccacaatgatgacctatat

SEQ ID NO: 244103 - DNA, 19 bp, Homo sapiens
  siRNA target sequence for IL13RA1 (NM_001560.2,843-861).
gccaaactgagacacataa

SEQ ID NO: 244104 - DNA, 19 bp, Homo sapiens
  siRNA target sequence for IL13RA1 (NM_001560.2,849-867).
ctgagacacataatgtttt

SEQ ID NO: 244105 - DNA, 19 bp, Homo sapiens
  siRNA target sequence for IL13RA1 (NM_001560.2,871-889).
cgtccaagaggctaaatgt

SEQ ID NO: 244106 - DNA, 19 bp, Homo sapiens
  siRNA target sequence for IL13RA1 (NM_001560.2,944-962).
ggtgttcttcctgatactt

SEQ ID NO: 244107 - DNA, 19 bp, Homo sapiens
  siRNA target sequence for IL13RA1 (NM_001560.2,945-963).
gtgttcttcctgatacttt

SEQ ID NO: 244108 - DNA, 19 bp, Homo sapiens
  siRNA target sequence for IL13RA1 (NM_001560.2,947-965).
gttcttcctgatactttga

SEQ ID NO: 244109 - DNA, 19 bp, Homo sapiens
  siRNA target sequence for IL13RA1 (NM_001560.2,964-982).
gaacacagtcagaataaga

SEQ ID NO: 244110 - DNA, 19 bp, Homo sapiens
  siRNA target sequence for IL13RA1 (NM_001560.2,983-1001).
gtcaaaacaaataagttat

SEQ ID NO: 244111 - DNA, 19 bp, Homo sapiens
  siRNA target sequence for IL13RA1 (NM_001560.2,1026-1044).
gtaattggagccaagaaat

SEQ ID NO: 244112 - DNA, 19 bp, Homo sapiens
  siRNA target sequence for IL13RA1 (NM_001560.2,1037-1055).
caagaaatgagtataggta

SEQ ID NO: 244113 - DNA, 19 bp, Homo sapiens
  siRNA target sequence for IL13RA1 (NM_001560.2,1052-1070).
ggtaagaagcgcaattcca

SEQ ID NO: 244114 - DNA, 19 bp, Homo sapiens
  siRNA target sequence for IL13RA1 (NM_001560.2,1063-1081).
caattccacactctacata

SEQ ID NO: 244115 - DNA, 19 bp, Homo sapiens
  siRNA target sequence for IL13RA1 (NM_001560.2,1068-1086).
ccacactctacataaccat

SEQ ID NO: 244116 - DNA, 19 bp, Homo sapiens
  siRNA target sequence for IL13RA1 (NM_001560.2,1108-1126).
cgtcgcaggtgcaatcata

SEQ ID NO: 244117 - DNA, 19 bp, Homo sapiens
  siRNA target sequence for IL13RA1 (NM_001560.2,1111-1129).
cgcaggtgcaatcatagta

SEQ ID NO: 244118 - DNA, 19 bp, Homo sapiens
  siRNA target sequence for IL13RA1 (NM_001560.2,1113-1131).
caggtgcaatcatagtact

SEQ ID NO: 244119 - DNA, 19 bp, Homo sapiens
  siRNA target sequence for IL13RA1 (NM_001560.2,1181-1199).
gatcctggcaagattttta

SEQ ID NO: 244120 - DNA, 19 bp, Homo sapiens
  siRNA target sequence for IL13RA1 (NM_001560.2,1285-1303).
ctctgtagtgctgatagaa

SEQ ID NO: 244121 - DNA, 19 bp, Homo sapiens
  siRNA target sequence for IL20RA (NM_014432.2,620-638).
caaggagttaaagttactt

SEQ ID NO: 244122 - DNA, 19 bp, Homo sapiens
  siRNA target sequence for IL20RA (NM_014432.2,636-654).
cttacactgtgcagtattt

SEQ ID NO: 244123 - DNA, 19 bp, Homo sapiens
  siRNA target sequence for IL20RA (NM_014432.2,689-707).
gaatgcagaaatatcaata

SEQ ID NO: 244124 - DNA, 19 bp, Homo sapiens
  siRNA target sequence for IL20RA (NM_014432.2,740-758).
gactacgaacaccagtatt

SEQ ID NO: 244125 - DNA, 19 bp, Homo sapiens
  siRNA target sequence for IL20RA (NM_014432.2,742-760).
ctacgaacaccagtattat

SEQ ID NO: 244126 - DNA, 19 bp, Homo sapiens
  siRNA target sequence for IL20RA (NM_014432.2,751-769).
ccagtattatgccaaagtt

SEQ ID NO: 244127 - DNA, 19 bp, Homo sapiens
  siRNA target sequence for IL20RA (NM_014432.2,856-874).
ggtggcactgactacagat

SEQ ID NO: 244128 - DNA, 19 bp, Homo sapiens
  siRNA target sequence for IL20RA (NM_014432.2,953-971).
caaatatactccaatctga

SEQ ID NO: 244129 - DNA, 19 bp, Homo sapiens
  siRNA target sequence for IL20RA (NM_014432.2,963-981).
ccaatctgaagtataacgt

SEQ ID NO: 244130 - DNA, 19 bp, Homo sapiens
  siRNA target sequence for IL20RA (NM_014432.2,986-1004).
gtgttgaatactaaatcaa

SEQ ID NO: 244131 - DNA, 19 bp, Homo sapiens
  siRNA target sequence for IL20RA (NM_014432.2,1055-1073).
ctggagccgaacactcttt

SEQ ID NO: 244132 - DNA, 19 bp, Homo sapiens
  siRNA target sequence for IL20RA (NM_014432.2,1058-1076).
gagccgaacactctttact

SEQ ID NO: 244133 - DNA, 19 bp, Homo sapiens
  siRNA target sequence for IL20RA (NM_014432.2,1138-1156).
gtgtgccaggactttgaaa

SEQ ID NO: 244134 - DNA, 19 bp, Homo sapiens
  siRNA target sequence for IL20RA (NM_014432.2,1143-1161).
ccaggactttgaaagatca

SEQ ID NO: 244135 - DNA, 19 bp, Homo sapiens
  siRNA target sequence for IL20RA (NM_014432.2,1147-1165).
gactttgaaagatcaatca

SEQ ID NO: 244136 - DNA, 19 bp, Homo sapiens
  siRNA target sequence for IL20RA (NM_014432.2,1277-1295).
gagaaacacccagcaaatt

SEQ ID NO: 244137 - DNA, 19 bp, Homo sapiens
  siRNA target sequence for IL20RA (NM_014432.2,1286-1304).
ccagcaaatttgattttga

SEQ ID NO: 244138 - DNA, 19 bp, Homo sapiens
  siRNA target sequence for IL20RA (NM_014432.2,1343-1361).
gctgaaaaaatcgtgatta

SEQ ID NO: 244139 - DNA, 19 bp, Homo sapiens
  siRNA target sequence for IL20RA (NM_014432.2,1373-1391).
ctcaatatctcggatgatt

SEQ ID NO: 244140 - DNA, 19 bp, Homo sapiens
  siRNA target sequence for IL20RA (NM_014432.2,1375-1393).
caatatctcggatgattct

SEQ ID NO: 244141 - DNA, 19 bp, Homo sapiens
  siRNA target sequence for IL20RA (NM_014432.2,1381-1399).
ctcggatgattctaaaatt

SEQ ID NO: 244142 - DNA, 19 bp, Homo sapiens
  siRNA target sequence for IL20RA (NM_014432.2,1514-1532).
gggtatgcttcgcatttga

SEQ ID NO: 244143 - DNA, 19 bp, Homo sapiens
  siRNA target sequence for IL20RA (NM_014432.2,1515-1533).
ggtatgcttcgcatttgat

SEQ ID NO: 244144 - DNA, 19 bp, Homo sapiens
  siRNA target sequence for IL20RA (NM_014432.2,1589-1607).
gagtccctcagcagaacaa

SEQ ID NO: 244145 - DNA, 19 bp, Homo sapiens
  siRNA target sequence for IL20RA (NM_014432.2,1614-1632).
cggataaaacagtcattga

SEQ ID NO: 244146 - DNA, 19 bp, Homo sapiens
  siRNA target sequence for IL20RA (NM_014432.2,1615-1633).
ggataaaacagtcattgaa

SEQ ID NO: 244147 - DNA, 19 bp, Homo sapiens
  siRNA target sequence for IL20RA (NM_014432.2,1710-1728).
ccacacaaggaacattatt

SEQ ID NO: 244148 - DNA, 19 bp, Homo sapiens
  siRNA target sequence for IL20RA (NM_014432.2,1763-1781).
caaacgttacagtactcat

SEQ ID NO: 244149 - DNA, 19 bp, Homo sapiens
  siRNA target sequence for IL20RA (NM_014432.2,1969-1987).
cggagaggagggtcttcta

SEQ ID NO: 244150 - DNA, 19 bp, Homo sapiens
  siRNA target sequence for IL20RA (NM_014432.2,1973-1991).
gaggagggtcttctatcta

SEQ ID NO: 244151 - DNA, 19 bp, Homo sapiens
  siRNA target sequence for IL20RA (NM_014432.2,2036-2054).
gaaacctatctcatgcaat

SEQ ID NO: 244152 - DNA, 19 bp, Homo sapiens
  siRNA target sequence for IL20RA (NM_014432.2,2059-2077).
ggaggaatgggggttatat

SEQ ID NO: 244153 - DNA, 19 bp, Homo sapiens
  siRNA target sequence for IL22RA2 (NM_052962.2,391-409).
gcctcagagggtacaattt

SEQ ID NO: 244154 - DNA, 19 bp, Homo sapiens
  siRNA target sequence for IL22RA2 (NM_052962.2,393-411).
ctcagagggtacaatttca

SEQ ID NO: 244155 - DNA, 19 bp, Homo sapiens
  siRNA target sequence for IL22RA2 (NM_052962.2,395-413).
cagagggtacaatttcagt

SEQ ID NO: 244156 - DNA, 19 bp, Homo sapiens
  siRNA target sequence for IL22RA2 (NM_052962.2,410-428).
cagtcccgaaattttcaca

SEQ ID NO: 244157 - DNA, 19 bp, Homo sapiens
  siRNA target sequence for IL22RA2 (NM_052962.2,415-433).
ccgaaattttcacaacatt

SEQ ID NO: 244158 - DNA, 19 bp, Homo sapiens
  siRNA target sequence for IL22RA2 (NM_052962.2,416-434).
cgaaattttcacaacattt

SEQ ID NO: 244159 - DNA, 19 bp, Homo sapiens
  siRNA target sequence for IL22RA2 (NM_052962.2,485-503).
gtgcagtacaaaatcatgt

SEQ ID NO: 244160 - DNA, 19 bp, Homo sapiens
  siRNA target sequence for IL22RA2 (NM_052962.2,488-506).
cagtacaaaatcatgttct

SEQ ID NO: 244161 - DNA, 19 bp, Homo sapiens
  siRNA target sequence for IL22RA2 (NM_052962.2,502-520).
gttctcatgcagcatgaaa

SEQ ID NO: 244162 - DNA, 19 bp, Homo sapiens
  siRNA target sequence for IL22RA2 (NM_052962.2,580-598).
cagaacattggctaaatat

SEQ ID NO: 244163 - DNA, 19 bp, Homo sapiens
  siRNA target sequence for IL22RA2 (NM_052962.2,630-648).
gttggggtactcaagaact

SEQ ID NO: 244164 - DNA, 19 bp, Homo sapiens
  siRNA target sequence for IL22RA2 (NM_052962.2,675-693).
cagacatacaggaacctta

SEQ ID NO: 244165 - DNA, 19 bp, Homo sapiens
  siRNA target sequence for IL22RA2 (NM_052962.2,782-800).
gatcctccagtcatgaata

SEQ ID NO: 244166 - DNA, 19 bp, Homo sapiens
  siRNA target sequence for IL22RA2 (NM_052962.2,785-803).
cctccagtcatgaatataa

SEQ ID NO: 244167 - DNA, 19 bp, Homo sapiens
  siRNA target sequence for IL22RA2 (NM_052962.2,835-853).
ccatgctccaaatttacca

SEQ ID NO: 244168 - DNA, 19 bp, Homo sapiens
  siRNA target sequence for IL22RA2 (NM_052962.2,839-857).
gctccaaatttaccatata

SEQ ID NO: 244169 - DNA, 19 bp, Homo sapiens
  siRNA target sequence for IL22RA2 (NM_052962.2,843-861).
caaatttaccatatagata

SEQ ID NO: 244170 - DNA, 19 bp, Homo sapiens
  siRNA target sequence for IL22RA2 (NM_052962.2,878-896).
gtatctatagaagattact

SEQ ID NO: 244171 - DNA, 19 bp, Homo sapiens
  siRNA target sequence for IL22RA2 (NM_052962.2,882-900).
ctatagaagattactatga

SEQ ID NO: 244172 - DNA, 19 bp, Homo sapiens
  siRNA target sequence for IL22RA2 (NM_052962.2,890-908).
gattactatgaactactat

SEQ ID NO: 244173 - DNA, 19 bp, Homo sapiens
  siRNA target sequence for IL22RA2 (NM_052962.2,905-923).
ctataccgagtttttataa

SEQ ID NO: 244174 - DNA, 19 bp, Homo sapiens
  siRNA target sequence for IL22RA2 (NM_052962.2,1012-1030).
ctgtgtagtggctgaaata

SEQ ID NO: 244175 - DNA, 19 bp, Homo sapiens
  siRNA target sequence for IL22RA2 (NM_052962.2,1014-1032).
gtgtagtggctgaaatata

SEQ ID NO: 244176 - DNA, 19 bp, Homo sapiens
  siRNA target sequence for IL28RA (NM_173065.1,674-692).
gaggtcccaggacttttct

SEQ ID NO: 244177 - DNA, 19 bp, Homo sapiens
  siRNA target sequence for MGC34923 (NM_144717.2,257-275).
ctttcacaatggttctaga

SEQ ID NO: 244178 - DNA, 19 bp, Homo sapiens
  siRNA target sequence for MGC34923 (NM_144717.2,261-279).
cacaatggttctagaagaa

SEQ ID NO: 244179 - DNA, 19 bp, Homo sapiens
  siRNA target sequence for MGC34923 (NM_144717.2,263-281).
caatggttctagaagaaat

SEQ ID NO: 244180 - DNA, 19 bp, Homo sapiens
  siRNA target sequence for MGC34923 (NM_144717.2,302-320).
ggtttttctacgcattgat

SEQ ID NO: 244181 - DNA, 19 bp, Homo sapiens
  siRNA target sequence for MGC34923 (NM_144717.2,376-394).
gtactctcaaccaacatga

SEQ ID NO: 244182 - DNA, 19 bp, Homo sapiens
  siRNA target sequence for MGC34923 (NM_144717.2,420-438).
gatcgcgcctggagaaaca

SEQ ID NO: 244183 - DNA, 19 bp, Homo sapiens
  siRNA target sequence for MGC34923 (NM_144717.2,430-448).
ggagaaacagtgtactatt

SEQ ID NO: 244184 - DNA, 19 bp, Homo sapiens
  siRNA target sequence for MGC34923 (NM_144717.2,560-578).
cggccactgtgccatacaa

SEQ ID NO: 244185 - DNA, 19 bp, Homo sapiens
  siRNA target sequence for MGC34923 (NM_144717.2,627-645).
cctgaagcatccctttaat

SEQ ID NO: 244186 - DNA, 19 bp, Homo sapiens
  siRNA target sequence for MGC34923 (NM_144717.2,628-646).
ctgaagcatccctttaata

SEQ ID NO: 244187 - DNA, 19 bp, Homo sapiens
  siRNA target sequence for MGC34923 (NM_144717.2,630-648).
gaagcatccctttaataga

SEQ ID NO: 244188 - DNA, 19 bp, Homo sapiens
  siRNA target sequence for MGC34923 (NM_144717.2,637-655).
ccctttaatagaaactcaa

SEQ ID NO: 244189 - DNA, 19 bp, Homo sapiens
  siRNA target sequence for MGC34923 (NM_144717.2,770-788).
ctggtgccgaggaacatgt

SEQ ID NO: 244190 - DNA, 19 bp, Homo sapiens
  siRNA target sequence for MGC34923 (NM_144717.2,773-791).
gtgccgaggaacatgtcaa

SEQ ID NO: 244191 - DNA, 19 bp, Homo sapiens
  siRNA target sequence for MGC34923 (NM_144717.2,775-793).
gccgaggaacatgtcaaaa

SEQ ID NO: 244192 - DNA, 19 bp, Homo sapiens
  siRNA target sequence for MGC34923 (NM_144717.2,837-855).
gccaggggctgcatactgt

SEQ ID NO: 244193 - DNA, 19 bp, Homo sapiens
  siRNA target sequence for MGC34923 (NM_144717.2,1060-1078).
ctcccagacaccttgaaaa

SEQ ID NO: 244194 - DNA, 19 bp, Homo sapiens
  siRNA target sequence for MGC34923 (NM_144717.2,1082-1100).
ccaattcaccccagaagtt

SEQ ID NO: 244195 - DNA, 19 bp, Homo sapiens
  siRNA target sequence for MPL (NM_005373.1,162-180).
gtgtttctcccgaacattt

SEQ ID NO: 244196 - DNA, 19 bp, Homo sapiens
  siRNA target sequence for MPL (NM_005373.1,164-182).
gtttctcccgaacatttga

SEQ ID NO: 244197 - DNA, 19 bp, Homo sapiens
  siRNA target sequence for MPL (NM_005373.1,342-360).
ggaagtgcgtctcttcttt

SEQ ID NO: 244198 - DNA, 19 bp, Homo sapiens
  siRNA target sequence for MPL (NM_005373.1,366-384).
gcacctctgggtgaagaat

SEQ ID NO: 244199 - DNA, 19 bp, Homo sapiens
  siRNA target sequence for MPL (NM_005373.1,442-460).
ccggctccccccagtatca

SEQ ID NO: 244200 - DNA, 19 bp, Homo sapiens
  siRNA target sequence for MPL (NM_005373.1,443-461).
cggctccccccagtatcat

SEQ ID NO: 244201 - DNA, 19 bp, Homo sapiens
  siRNA target sequence for MPL (NM_005373.1,511-529).
gagccagctccagaaatca

SEQ ID NO: 244202 - DNA, 19 bp, Homo sapiens
  siRNA target sequence for MPL (NM_005373.1,584-602).
ctggtcccacggtcataca

SEQ ID NO: 244203 - DNA, 19 bp, Homo sapiens
  siRNA target sequence for MPL (NM_005373.1,902-920).
cacttggactgcaatgctt

SEQ ID NO: 244204 - DNA, 19 bp, Homo sapiens
  siRNA target sequence for MPL (NM_005373.1,904-922).
cttggactgcaatgcttta

SEQ ID NO: 244205 - DNA, 19 bp, Homo sapiens
  siRNA target sequence for MPL (NM_005373.1,1112-1130).
cacgaaatgacagcattat

SEQ ID NO: 244206 - DNA, 19 bp, Homo sapiens
  siRNA target sequence for MPL (NM_005373.1,1250-1268).
ccagtgggcatctggaatt

SEQ ID NO: 244207 - DNA, 19 bp, Homo sapiens
  siRNA target sequence for MPL (NM_005373.1,1253-1271).
gtgggcatctggaattgga

SEQ ID NO: 244208 - DNA, 19 bp, Homo sapiens
  siRNA target sequence for MPL (NM_005373.1,1299-1317).
ccaagagacctgttatcaa

SEQ ID NO: 244209 - DNA, 19 bp, Homo sapiens
  siRNA target sequence for MPL (NM_005373.1,1406-1424).
gatctcgctaccgtttaca

SEQ ID NO: 244210 - DNA, 19 bp, Homo sapiens
  siRNA target sequence for MPL (NM_005373.1,1657-1675).
gtcctaggccagtacctta

SEQ ID NO: 244211 - DNA, 19 bp, Homo sapiens
  siRNA target sequence for MPL (NM_005373.1,1919-1937).
cctacctaccactaagcta

SEQ ID NO: 244212 - DNA, 19 bp, Homo sapiens
  siRNA target sequence for MPL (NM_005373.1,1920-1938).
ctacctaccactaagctat

SEQ ID NO: 244213 - DNA, 19 bp, Homo sapiens
  siRNA target sequence for GRIA1 (NM_000827.2,187-205).
cggtagtaggtgccaattt

SEQ ID NO: 244214 - DNA, 19 bp, Homo sapiens
  siRNA target sequence for GRIA1 (NM_000827.2,218-236).
ccagatcgggggattattt

SEQ ID NO: 244215 - DNA, 19 bp, Homo sapiens
  siRNA target sequence for GRIA1 (NM_000827.2,221-239).
gatcgggggattatttcca

SEQ ID NO: 244216 - DNA, 19 bp, Homo sapiens
  siRNA target sequence for GRIA1 (NM_000827.2,305-323).
gctgctcccccagattgat

SEQ ID NO: 244217 - DNA, 19 bp, Homo sapiens
  siRNA target sequence for GRIA1 (NM_000827.2,312-330).
ccccagattgatattgtga

SEQ ID NO: 244218 - DNA, 19 bp, Homo sapiens
  siRNA target sequence for GRIA1 (NM_000827.2,313-331).
cccagattgatattgtgaa

SEQ ID NO: 244219 - DNA, 19 bp, Homo sapiens
  siRNA target sequence for GRIA1 (NM_000827.2,344-362).
ctttgagatgacctataga

SEQ ID NO: 244220 - DNA, 19 bp, Homo sapiens
  siRNA target sequence for GRIA1 (NM_000827.2,348-366).
gagatgacctatagattct

SEQ ID NO: 244221 - DNA, 19 bp, Homo sapiens
  siRNA target sequence for GRIA1 (NM_000827.2,474-492).
ccgagctttcccgttgata

SEQ ID NO: 244222 - DNA, 19 bp, Homo sapiens
  siRNA target sequence for GRIA1 (NM_000827.2,476-494).
gagctttcccgttgataca

SEQ ID NO: 244223 - DNA, 19 bp, Homo sapiens
  siRNA target sequence for GRIA1 (NM_000827.2,486-504).
gttgatacatccaatcagt

SEQ ID NO: 244224 - DNA, 19 bp, Homo sapiens
  siRNA target sequence for GRIA1 (NM_000827.2,694-712).
gataccggatgctctttca

SEQ ID NO: 244225 - DNA, 19 bp, Homo sapiens
  siRNA target sequence for GRIA1 (NM_000827.2,774-792).
gctatcttgggccagatta

SEQ ID NO: 244226 - DNA, 19 bp, Homo sapiens
  siRNA target sequence for GRIA1 (NM_000827.2,775-793).
ctatcttgggccagattat

SEQ ID NO: 244227 - DNA, 19 bp, Homo sapiens
  siRNA target sequence for GRIA1 (NM_000827.2,815-833).
cggctaccactacattctt

SEQ ID NO: 244228 - DNA, 19 bp, Homo sapiens
  siRNA target sequence for GRIA1 (NM_000827.2,876-894).
gagagtggcgccaatgtga

SEQ ID NO: 244229 - DNA, 19 bp, Homo sapiens
  siRNA target sequence for GRIA1 (NM_000827.2,925-943).
ctattccggccaagatcat

SEQ ID NO: 244230 - DNA, 19 bp, Homo sapiens
  siRNA target sequence for GRIA1 (NM_000827.2,1070-1088).
gcagagaattgatatatct

SEQ ID NO: 244231 - DNA, 19 bp, Homo sapiens
  siRNA target sequence for GRIA1 (NM_000827.2,1172-1190).
ggtgcgatttgaaggttta

SEQ ID NO: 244232 - DNA, 19 bp, Homo sapiens
  siRNA target sequence for GRIA1 (NM_000827.2,1195-1213).
gaaacgtgcagtttaatga

SEQ ID NO: 244233 - DNA, 19 bp, Homo sapiens
  siRNA target sequence for GRIA1 (NM_000827.2,1199-1217).
cgtgcagtttaatgagaaa

SEQ ID NO: 244234 - DNA, 19 bp, Homo sapiens
  siRNA target sequence for GRIA1 (NM_000827.2,1218-1236).
ggacgccggaccaactaca

SEQ ID NO: 244235 - DNA, 19 bp, Homo sapiens
  siRNA target sequence for GRIA1 (NM_000827.2,1237-1255).
cgctccacgtgattgaaat

SEQ ID NO: 244236 - DNA, 19 bp, Homo sapiens
  siRNA target sequence for GRIA1 (NM_000827.2,1239-1257).
ctccacgtgattgaaatga

SEQ ID NO: 244237 - DNA, 19 bp, Homo sapiens
  siRNA target sequence for GRIA1 (NM_000827.2,1244-1262).
cgtgattgaaatgaaacat

SEQ ID NO: 244238 - DNA, 19 bp, Homo sapiens
  siRNA target sequence for GRIA1 (NM_000827.2,1267-1285).
gcatccgaaagattggtta

SEQ ID NO: 244239 - DNA, 19 bp, Homo sapiens
  siRNA target sequence for GRIA1 (NM_000827.2,1366-1384).
catacatcgtcacaacaat

SEQ ID NO: 244240 - DNA, 19 bp, Homo sapiens
  siRNA target sequence for GRIA1 (NM_000827.2,1381-1399).
caatcctagaagatcctta

SEQ ID NO: 244241 - DNA, 19 bp, Homo sapiens
  siRNA target sequence for GRIA1 (NM_000827.2,1396-1414).
cttatgtgatgctcaagaa

SEQ ID NO: 244242 - DNA, 19 bp, Homo sapiens
  siRNA target sequence for GRIA1 (NM_000827.2,1501-1519).
cctaccgtctggagattgt

SEQ ID NO: 244243 - DNA, 19 bp, Homo sapiens
  siRNA target sequence for GRIA1 (NM_000827.2,1685-1703).
ctccatcatgattaaaaaa

SEQ ID NO: 244244 - DNA, 19 bp, Homo sapiens
  siRNA target sequence for GRIA1 (NM_000827.2,1817-1835).
ccgcttcagtccctatgaa

SEQ ID NO: 244245 - DNA, 19 bp, Homo sapiens
  siRNA target sequence for GRIA1 (NM_000827.2,1879-1897).
gtgaccagtccaatgagtt

SEQ ID NO: 244246 - DNA, 19 bp, Homo sapiens
  siRNA target sequence for GRIA1 (NM_000827.2,1899-1917).
gggatattcaacagtttgt

SEQ ID NO: 244247 - DNA, 19 bp, Homo sapiens
  siRNA target sequence for GRIA1 (NM_000827.2,2133-2151).
ctggaagcaggatctacta

SEQ ID NO: 244248 - DNA, 19 bp, Homo sapiens
  siRNA target sequence for GRIA1 (NM_000827.2,2240-2258).
cacagaggaggggatgatt

SEQ ID NO: 244249 - DNA, 19 bp, Homo sapiens
  siRNA target sequence for GRIA1 (NM_000827.2,2399-2417).
ggggtctgccctgagaaat

SEQ ID NO: 244250 - DNA, 19 bp, Homo sapiens
  siRNA target sequence for GRIA1 (NM_000827.2,2407-2425).
ccctgagaaatccagtaaa

SEQ ID NO: 244251 - DNA, 19 bp, Homo sapiens
  siRNA target sequence for GRIA1 (NM_000827.2,2602-2620).
ccatgctggttgccttaat

SEQ ID NO: 244252 - DNA, 19 bp, Homo sapiens
  siRNA target sequence for GRIA1 (NM_000827.2,2630-2648).
ctacaaatcccgtagtgaa

SEQ ID NO: 244253 - DNA, 19 bp, Homo sapiens
  siRNA target sequence for GRIA1 (NM_000827.2,2654-2672).
gcggatgaagggtttttgt

SEQ ID NO: 244254 - DNA, 19 bp, Homo sapiens
  siRNA target sequence for GRIA1 (NM_000827.2,2794-2812).
ccaagtccatgcaatcgat

SEQ ID NO: 244255 - DNA, 19 bp, Homo sapiens
  siRNA target sequence for GRIA1 (NM_000827.2,2795-2813).
caagtccatgcaatcgatt

SEQ ID NO: 244256 - DNA, 19 bp, Homo sapiens
  siRNA target sequence for GRIA2 (NM_000826.1,296-314).
gtagggatggttcagtttt

SEQ ID NO: 244257 - DNA, 19 bp, Homo sapiens
  siRNA target sequence for GRIA2 (NM_000826.1,336-354).
caccccacatcgacaattt

SEQ ID NO: 244258 - DNA, 19 bp, Homo sapiens
  siRNA target sequence for GRIA2 (NM_000826.1,339-357).
cccacatcgacaatttgga

SEQ ID NO: 244259 - DNA, 19 bp, Homo sapiens
  siRNA target sequence for GRIA2 (NM_000826.1,367-385).
cagcttcgcagtcactaat

SEQ ID NO: 244260 - DNA, 19 bp, Homo sapiens
  siRNA target sequence for GRIA2 (NM_000826.1,370-388).
cttcgcagtcactaatgct

SEQ ID NO: 244261 - DNA, 19 bp, Homo sapiens
  siRNA target sequence for GRIA2 (NM_000826.1,428-446).
ggattttatgacaagaagt

SEQ ID NO: 244262 - DNA, 19 bp, Homo sapiens
  siRNA target sequence for GRIA2 (NM_000826.1,519-537).
gcacacatccatttgtcat

SEQ ID NO: 244263 - DNA, 19 bp, Homo sapiens
  siRNA target sequence for GRIA2 (NM_000826.1,522-540).
cacatccatttgtcattca

SEQ ID NO: 244264 - DNA, 19 bp, Homo sapiens
  siRNA target sequence for GRIA2 (NM_000826.1,524-542).
catccatttgtcattcaga

SEQ ID NO: 244265 - DNA, 19 bp, Homo sapiens
  siRNA target sequence for GRIA2 (NM_000826.1,564-582).
ctctccttagcttgattga

SEQ ID NO: 244266 - DNA, 19 bp, Homo sapiens
  siRNA target sequence for GRIA2 (NM_000826.1,566-584).
ctccttagcttgattgaat

SEQ ID NO: 244267 - DNA, 19 bp, Homo sapiens
  siRNA target sequence for GRIA2 (NM_000826.1,569-587).
cttagcttgattgaatact

SEQ ID NO: 244268 - DNA, 19 bp, Homo sapiens
  siRNA target sequence for GRIA2 (NM_000826.1,573-591).
gcttgattgaatactatca

SEQ ID NO: 244269 - DNA, 19 bp, Homo sapiens
  siRNA target sequence for GRIA2 (NM_000826.1,619-637).
cagtgacagaggcttatca

SEQ ID NO: 244270 - DNA, 19 bp, Homo sapiens
  siRNA target sequence for GRIA2 (NM_000826.1,818-836).
gtagaccaggttattacca

SEQ ID NO: 244271 - DNA, 19 bp, Homo sapiens
  siRNA target sequence for GRIA2 (NM_000826.1,910-928).
ccagtttggaggtgcaaat

SEQ ID NO: 244272 - DNA, 19 bp, Homo sapiens
  siRNA target sequence for GRIA2 (NM_000826.1,924-942).
caaatgtctctggatttca

SEQ ID NO: 244273 - DNA, 19 bp, Homo sapiens
  siRNA target sequence for GRIA2 (NM_000826.1,943-961).
gatagtggactatgatgat

SEQ ID NO: 244274 - DNA, 19 bp, Homo sapiens
  siRNA target sequence for GRIA2 (NM_000826.1,956-974).
gatgattcgttggtatcta

SEQ ID NO: 244275 - DNA, 19 bp, Homo sapiens
  siRNA target sequence for GRIA2 (NM_000826.1,959-977).
gattcgttggtatctaaat

SEQ ID NO: 244276 - DNA, 19 bp, Homo sapiens
  siRNA target sequence for GRIA2 (NM_000826.1,963-981).
cgttggtatctaaatttat

SEQ ID NO: 244277 - DNA, 19 bp, Homo sapiens
  siRNA target sequence for GRIA2 (NM_000826.1,964-982).
gttggtatctaaatttata

SEQ ID NO: 244278 - DNA, 19 bp, Homo sapiens
  siRNA target sequence for GRIA2 (NM_000826.1,967-985).
ggtatctaaatttatagaa

SEQ ID NO: 244279 - DNA, 19 bp, Homo sapiens
  siRNA target sequence for GRIA2 (NM_000826.1,1022-1040).
gctcacacaacaacaatta

SEQ ID NO: 244280 - DNA, 19 bp, Homo sapiens
  siRNA target sequence for GRIA2 (NM_000826.1,1059-1077).
cctatgatgccgttcaagt

SEQ ID NO: 244281 - DNA, 19 bp, Homo sapiens
  siRNA target sequence for GRIA2 (NM_000826.1,1085-1103).
gaagccttccgcaacctaa

SEQ ID NO: 244282 - DNA, 19 bp, Homo sapiens
  siRNA target sequence for GRIA2 (NM_000826.1,1094-1112).
cgcaacctaaggaagcaaa

SEQ ID NO: 244283 - DNA, 19 bp, Homo sapiens
  siRNA target sequence for GRIA2 (NM_000826.1,1173-1191).
ggggacaaggtgtagaaat

SEQ ID NO: 244284 - DNA, 19 bp, Homo sapiens
  siRNA target sequence for GRIA2 (NM_000826.1,1174-1192).
gggacaaggtgtagaaata

SEQ ID NO: 244285 - DNA, 19 bp, Homo sapiens
  siRNA target sequence for GRIA2 (NM_000826.1,1223-1241).
ggtctctcaggaaatataa

SEQ ID NO: 244286 - DNA, 19 bp, Homo sapiens
  siRNA target sequence for GRIA2 (NM_000826.1,1224-1242).
gtctctcaggaaatataaa

SEQ ID NO: 244287 - DNA, 19 bp, Homo sapiens
  siRNA target sequence for GRIA2 (NM_000826.1,1230-1248).
caggaaatataaagtttga

SEQ ID NO: 244288 - DNA, 19 bp, Homo sapiens
  siRNA target sequence for GRIA2 (NM_000826.1,1383-1401).
cctctgggcttgagaataa

SEQ ID NO: 244289 - DNA, 19 bp, Homo sapiens
  siRNA target sequence for GRIA2 (NM_000826.1,1406-1424).
gttgttgtcaccacaattt

SEQ ID NO: 244290 - DNA, 19 bp, Homo sapiens
  siRNA target sequence for GRIA2 (NM_000826.1,1427-1445).
gaatctccgtatgttatga

SEQ ID NO: 244291 - DNA, 19 bp, Homo sapiens
  siRNA target sequence for GRIA2 (NM_000826.1,1431-1449).
ctccgtatgttatgatgaa

SEQ ID NO: 244292 - DNA, 19 bp, Homo sapiens
  siRNA target sequence for GRIA2 (NM_000826.1,1433-1451).
ccgtatgttatgatgaaga

SEQ ID NO: 244293 - DNA, 19 bp, Homo sapiens
  siRNA target sequence for GRIA2 (NM_000826.1,1511-1529).
gcagaaatcgccaaacatt

SEQ ID NO: 244294 - DNA, 19 bp, Homo sapiens
  siRNA target sequence for GRIA2 (NM_000826.1,1646-1664).
gcaattgctccattaacta

SEQ ID NO: 244295 - DNA, 19 bp, Homo sapiens
  siRNA target sequence for GRIA2 (NM_000826.1,1708-1726).
catgagcctcgggatatct

SEQ ID NO: 244296 - DNA, 19 bp, Homo sapiens
  siRNA target sequence for GRIA2 (NM_000826.1,1715-1733).
ctcgggatatctatcatga

SEQ ID NO: 244297 - DNA, 19 bp, Homo sapiens
  siRNA target sequence for GRIA2 (NM_000826.1,1826-1844).
ggggtcagtgtagttttat

SEQ ID NO: 244298 - DNA, 19 bp, Homo sapiens
  siRNA target sequence for GRIA2 (NM_000826.1,1914-1932).
gtagtgaatcaactaatga

SEQ ID NO: 244299 - DNA, 19 bp, Homo sapiens
  siRNA target sequence for GRIA2 (NM_000826.1,2065-2083).
ctcctacacggctaactta

SEQ ID NO: 244300 - DNA, 19 bp, Homo sapiens
  siRNA target sequence for GRIA2 (NM_000826.1,2181-2199).
gctccactaaagagttttt

SEQ ID NO: 244301 - DNA, 19 bp, Homo sapiens
  siRNA target sequence for GRIA2 (NM_000826.1,2315-2333).
gggaaatatgcctacttgt

SEQ ID NO: 244302 - DNA, 19 bp, Homo sapiens
  siRNA target sequence for GRIA2 (NM_000826.1,2371-2389).
gccttgcgacaccatgaaa

SEQ ID NO: 244303 - DNA, 19 bp, Homo sapiens
  siRNA target sequence for GRIA2 (NM_000826.1,2373-2391).
cttgcgacaccatgaaagt

SEQ ID NO: 244304 - DNA, 19 bp, Homo sapiens
  siRNA target sequence for GRIA2 (NM_000826.1,2422-2440).
catcgcaacacctaaagga

SEQ ID NO: 244305 - DNA, 19 bp, Homo sapiens
  siRNA target sequence for GRIA2 (NM_000826.1,2592-2610).
gcaacgttgctggagtatt

SEQ ID NO: 244306 - DNA, 19 bp, Homo sapiens
  siRNA target sequence for GRIA2 (NM_000826.1,2679-2697).
gggccgaggcgaaacgaat

SEQ ID NO: 244307 - DNA, 19 bp, Homo sapiens
  siRNA target sequence for GRIA2 (NM_000826.1,2682-2700).
ccgaggcgaaacgaatgaa

SEQ ID NO: 244308 - DNA, 19 bp, Homo sapiens
  siRNA target sequence for GRIA2 (NM_000826.1,2729-2747).
ccatcttcctcgcagaatt

SEQ ID NO: 244309 - DNA, 19 bp, Homo sapiens
  siRNA target sequence for GRIA2 (NM_000826.1,2743-2761).
gaattcacagaattttgca

SEQ ID NO: 244310 - DNA, 19 bp, Homo sapiens
  siRNA target sequence for GRIA2 (NM_000826.1,2789-2807).
ggcatcgaaagtgttaaaa

SEQ ID NO: 244311 - DNA, 19 bp, Homo sapiens
  siRNA target sequence for GRIA3 (NM_000828.2,293-311).
ggcttttgggtcattctca

SEQ ID NO: 244312 - DNA, 19 bp, Homo sapiens
  siRNA target sequence for GRIA3 (NM_000828.2,340-358).
ggtggacttttcatgagaa

SEQ ID NO: 244313 - DNA, 19 bp, Homo sapiens
  siRNA target sequence for GRIA3 (NM_000828.2,385-403).
cgctttgccgtgcagttat

SEQ ID NO: 244314 - DNA, 19 bp, Homo sapiens
  siRNA target sequence for GRIA3 (NM_000828.2,386-404).
gctttgccgtgcagttata

SEQ ID NO: 244315 - DNA, 19 bp, Homo sapiens
  siRNA target sequence for GRIA3 (NM_000828.2,391-409).
gccgtgcagttatacaaca

SEQ ID NO: 244316 - DNA, 19 bp, Homo sapiens
  siRNA target sequence for GRIA3 (NM_000828.2,685-703).
cttctgggtcattacaagt

SEQ ID NO: 244317 - DNA, 19 bp, Homo sapiens
  siRNA target sequence for GRIA3 (NM_000828.2,731-749).
cagaacgaggattttccat

SEQ ID NO: 244318 - DNA, 19 bp, Homo sapiens
  siRNA target sequence for GRIA3 (NM_000828.2,746-764).
ccatcctccaagcgattat

SEQ ID NO: 244319 - DNA, 19 bp, Homo sapiens
  siRNA target sequence for GRIA3 (NM_000828.2,769-787).
gcagcagtgcaaaacaact

SEQ ID NO: 244320 - DNA, 19 bp, Homo sapiens
  siRNA target sequence for GRIA3 (NM_000828.2,866-884).
ggcaggaaaagcgatactt

SEQ ID NO: 244321 - DNA, 19 bp, Homo sapiens
  siRNA target sequence for GRIA3 (NM_000828.2,868-886).
caggaaaagcgatacttga

SEQ ID NO: 244322 - DNA, 19 bp, Homo sapiens
  siRNA target sequence for GRIA3 (NM_000828.2,870-888).
ggaaaagcgatacttgatt

SEQ ID NO: 244323 - DNA, 19 bp, Homo sapiens
  siRNA target sequence for GRIA3 (NM_000828.2,891-909).
ctgcgaagtcgaaaggatt

SEQ ID NO: 244324 - DNA, 19 bp, Homo sapiens
  siRNA target sequence for GRIA3 (NM_000828.2,898-916).
gtcgaaaggattaacacaa

SEQ ID NO: 244325 - DNA, 19 bp, Homo sapiens
  siRNA target sequence for GRIA3 (NM_000828.2,931-949).
gtgatcctagggaaacact

SEQ ID NO: 244326 - DNA, 19 bp, Homo sapiens
  siRNA target sequence for GRIA3 (NM_000828.2,942-960).
gaaacactcaagaggttat

SEQ ID NO: 244327 - DNA, 19 bp, Homo sapiens
  siRNA target sequence for GRIA3 (NM_000828.2,946-964).
cactcaagaggttatcact

SEQ ID NO: 244328 - DNA, 19 bp, Homo sapiens
  siRNA target sequence for GRIA3 (NM_000828.2,970-988).
ctcgctaacctgggtttta

SEQ ID NO: 244329 - DNA, 19 bp, Homo sapiens
  siRNA target sequence for GRIA3 (NM_000828.2,972-990).
cgctaacctgggttttact

SEQ ID NO: 244330 - DNA, 19 bp, Homo sapiens
  siRNA target sequence for GRIA3 (NM_000828.2,978-996).
cctgggttttactgatatt

SEQ ID NO: 244331 - DNA, 19 bp, Homo sapiens
  siRNA target sequence for GRIA3 (NM_000828.2,979-997).
ctgggttttactgatattt

SEQ ID NO: 244332 - DNA, 19 bp, Homo sapiens
  siRNA target sequence for GRIA3 (NM_000828.2,1015-1033).
catgggggagccaacatta

SEQ ID NO: 244333 - DNA, 19 bp, Homo sapiens
  siRNA target sequence for GRIA3 (NM_000828.2,1064-1082).
ctatggttcagcagttcat

SEQ ID NO: 244334 - DNA, 19 bp, Homo sapiens
  siRNA target sequence for GRIA3 (NM_000828.2,1128-1146).
gaatgcaccactaaagtat

SEQ ID NO: 244335 - DNA, 19 bp, Homo sapiens
  siRNA target sequence for GRIA3 (NM_000828.2,1241-1259).
ctggagactgcttagcaaa

SEQ ID NO: 244336 - DNA, 19 bp, Homo sapiens
  siRNA target sequence for GRIA3 (NM_000828.2,1357-1375).
ggacgtaggacaaattata

SEQ ID NO: 244337 - DNA, 19 bp, Homo sapiens
  siRNA target sequence for GRIA3 (NM_000828.2,1360-1378).
cgtaggacaaattatacca

SEQ ID NO: 244338 - DNA, 19 bp, Homo sapiens
  siRNA target sequence for GRIA3 (NM_000828.2,1361-1379).
gtaggacaaattataccat

SEQ ID NO: 244339 - DNA, 19 bp, Homo sapiens
  siRNA target sequence for GRIA3 (NM_000828.2,1479-1497).
cagtgcatcctcagagaat

SEQ ID NO: 244340 - DNA, 19 bp, Homo sapiens
  siRNA target sequence for GRIA3 (NM_000828.2,1503-1521).
catagtagtgactaccatt

SEQ ID NO: 244341 - DNA, 19 bp, Homo sapiens
  siRNA target sequence for GRIA3 (NM_000828.2,1608-1626).
ctatgaaatagccaaacat

SEQ ID NO: 244342 - DNA, 19 bp, Homo sapiens
  siRNA target sequence for GRIA3 (NM_000828.2,1624-1642).
catgtaaggatcaaataca

SEQ ID NO: 244343 - DNA, 19 bp, Homo sapiens
  siRNA target sequence for GRIA3 (NM_000828.2,1653-1671).
cgttggtgacgggaaatat

SEQ ID NO: 244344 - DNA, 19 bp, Homo sapiens
  siRNA target sequence for GRIA3 (NM_000828.2,1676-1694).
caagggatccagagactaa

SEQ ID NO: 244345 - DNA, 19 bp, Homo sapiens
  siRNA target sequence for GRIA3 (NM_000828.2,1680-1698).
ggatccagagactaaaata

SEQ ID NO: 244346 - DNA, 19 bp, Homo sapiens
  siRNA target sequence for GRIA3 (NM_000828.2,1856-1874).
caggcgtattctcatttct

SEQ ID NO: 244347 - DNA, 19 bp, Homo sapiens
  siRNA target sequence for GRIA3 (NM_000828.2,1924-1942).
ggagtcagcgtagttcttt

SEQ ID NO: 244348 - DNA, 19 bp, Homo sapiens
  siRNA target sequence for GRIA3 (NM_000828.2,1925-1943).
gagtcagcgtagttctttt

SEQ ID NO: 244349 - DNA, 19 bp, Homo sapiens
  siRNA target sequence for GRIA3 (NM_000828.2,1950-1968).
cagcaggttcagtccttat

SEQ ID NO: 244350 - DNA, 19 bp, Homo sapiens
  siRNA target sequence for GRIA3 (NM_000828.2,2151-2169).
caccctgatcataatttct

SEQ ID NO: 244351 - DNA, 19 bp, Homo sapiens
  siRNA target sequence for GRIA3 (NM_000828.2,2231-2249).
gtgctgaagacttagctaa

SEQ ID NO: 244352 - DNA, 19 bp, Homo sapiens
  siRNA target sequence for GRIA3 (NM_000828.2,2275-2293).
ctggactccggttcaacaa

SEQ ID NO: 244353 - DNA, 19 bp, Homo sapiens
  siRNA target sequence for GRIA3 (NM_000828.2,2304-2322).
cagaagatccaaaattgct

SEQ ID NO: 244354 - DNA, 19 bp, Homo sapiens
  siRNA target sequence for GRIA3 (NM_000828.2,2359-2377).
gagccatctgtgtttacca

SEQ ID NO: 244355 - DNA, 19 bp, Homo sapiens
  siRNA target sequence for GRIA3 (NM_000828.2,2703-2721).
ggcaggcgttttctatata

SEQ ID NO: 244356 - DNA, 19 bp, Homo sapiens
  siRNA target sequence for GRIA3 (NM_000828.2,2705-2723).
caggcgttttctatatact

SEQ ID NO: 244357 - DNA, 19 bp, Homo sapiens
  siRNA target sequence for GRIA3 (NM_000828.2,2708-2726).
gcgttttctatatacttgt

SEQ ID NO: 244358 - DNA, 19 bp, Homo sapiens
  siRNA target sequence for GRIA3 (NM_000828.2,2810-2828).
caaagaacacccaaaactt

SEQ ID NO: 244359 - DNA, 19 bp, Homo sapiens
  siRNA target sequence for GRIA3 (NM_000828.2,2894-2912).
gaacagagagtgttaagat

SEQ ID NO: 244360 - DNA, 19 bp, Homo sapiens
  siRNA target sequence for GRIA3 (NM_181894.1,564-582).
gccgtgctgcaaagatcat

SEQ ID NO: 244361 - DNA, 19 bp, Homo sapiens
  siRNA target sequence for GRIA3 (NM_181894.1,586-604).
ctgctgcacctaaaatgtt

SEQ ID NO: 244362 - DNA, 19 bp, Homo sapiens
  siRNA target sequence for GRIA3 (NM_181894.1,588-606).
gctgcacctaaaatgttca

SEQ ID NO: 244363 - DNA, 19 bp, Homo sapiens
  siRNA target sequence for GRIA3 (NM_181894.1,621-639).
ccaaaactgggcctattgt

SEQ ID NO: 244364 - DNA, 19 bp, Homo sapiens
  siRNA target sequence for GRIA3 (NM_181894.1,622-640).
caaaactgggcctattgta

SEQ ID NO: 244365 - DNA, 19 bp, Homo sapiens
  siRNA target sequence for GRIK1 (NM_000830.2,465-483).
gctgggcactcctctattt

SEQ ID NO: 244366 - DNA, 19 bp, Homo sapiens
  siRNA target sequence for GRIK1 (NM_000830.2,523-541).
caggatcggagggattttt

SEQ ID NO: 244367 - DNA, 19 bp, Homo sapiens
  siRNA target sequence for GRIK1 (NM_000830.2,625-643).
gatgcctaacaccacatta

SEQ ID NO: 244368 - DNA, 19 bp, Homo sapiens
  siRNA target sequence for GRIK1 (NM_000830.2,630-648).
ctaacaccacattaaccta

SEQ ID NO: 244369 - DNA, 19 bp, Homo sapiens
  siRNA target sequence for GRIK1 (NM_000830.2,636-654).
ccacattaacctatgacat

SEQ ID NO: 244370 - DNA, 19 bp, Homo sapiens
  siRNA target sequence for GRIK1 (NM_000830.2,826-844).
ctcggtggacaacaaagat

SEQ ID NO: 244371 - DNA, 19 bp, Homo sapiens
  siRNA target sequence for GRIK1 (NM_000830.2,902-920).
ctggtcctctattacaact

SEQ ID NO: 244372 - DNA, 19 bp, Homo sapiens
  siRNA target sequence for GRIK1 (NM_000830.2,957-975).
gtctaattcgtctacaaga

SEQ ID NO: 244373 - DNA, 19 bp, Homo sapiens
  siRNA target sequence for GRIK1 (NM_000830.2,986-1004).
gctccctccagatataata

SEQ ID NO: 244374 - DNA, 19 bp, Homo sapiens
  siRNA target sequence for GRIK1 (NM_000830.2,987-1005).
ctccctccagatataatat

SEQ ID NO: 244375 - DNA, 19 bp, Homo sapiens
  siRNA target sequence for GRIK1 (NM_000830.2,989-1007).
ccctccagatataatatta

SEQ ID NO: 244376 - DNA, 19 bp, Homo sapiens
  siRNA target sequence for GRIK1 (NM_000830.2,1072-1090).
gaaaggcaaggagttctat

SEQ ID NO: 244377 - DNA, 19 bp, Homo sapiens
  siRNA target sequence for GRIK1 (NM_000830.2,1077-1095).
gcaaggagttctatgtgat

SEQ ID NO: 244378 - DNA, 19 bp, Homo sapiens
  siRNA target sequence for GRIK1 (NM_000830.2,1078-1096).
caaggagttctatgtgata

SEQ ID NO: 244379 - DNA, 19 bp, Homo sapiens
  siRNA target sequence for GRIK1 (NM_000830.2,1081-1099).
ggagttctatgtgatattt

SEQ ID NO: 244380 - DNA, 19 bp, Homo sapiens
  siRNA target sequence for GRIK1 (NM_000830.2,1084-1102).
gttctatgtgatatttgat

SEQ ID NO: 244381 - DNA, 19 bp, Homo sapiens
  siRNA target sequence for GRIK1 (NM_000830.2,1087-1105).
ctatgtgatatttgattgt

SEQ ID NO: 244382 - DNA, 19 bp, Homo sapiens
  siRNA target sequence for GRIK1 (NM_000830.2,1116-1134).
cagccgctgaaatccttaa

SEQ ID NO: 244383 - DNA, 19 bp, Homo sapiens
  siRNA target sequence for GRIK1 (NM_000830.2,1161-1179).
ccgagtactatcactactt

SEQ ID NO: 244384 - DNA, 19 bp, Homo sapiens
  siRNA target sequence for GRIK1 (NM_000830.2,1162-1180).
cgagtactatcactacttt

SEQ ID NO: 244385 - DNA, 19 bp, Homo sapiens
  siRNA target sequence for GRIK1 (NM_000830.2,1163-1181).
gagtactatcactactttt

SEQ ID NO: 244386 - DNA, 19 bp, Homo sapiens
  siRNA target sequence for GRIK1 (NM_000830.2,1168-1186).
ctatcactactttttcaca

SEQ ID NO: 244387 - DNA, 19 bp, Homo sapiens
  siRNA target sequence for GRIK1 (NM_000830.2,1183-1201).
cacaaccctggacttattt

SEQ ID NO: 244388 - DNA, 19 bp, Homo sapiens
  siRNA target sequence for GRIK1 (NM_000830.2,1247-1265).
gggtttcggctgcttaaca

SEQ ID NO: 244389 - DNA, 19 bp, Homo sapiens
  siRNA target sequence for GRIK1 (NM_000830.2,1248-1266).
ggtttcggctgcttaacat

SEQ ID NO: 244390 - DNA, 19 bp, Homo sapiens
  siRNA target sequence for GRIK1 (NM_000830.2,1280-1298).
gtgtcatccatcattgaga

SEQ ID NO: 244391 - DNA, 19 bp, Homo sapiens
  siRNA target sequence for GRIK1 (NM_000830.2,1368-1386).
ctgaagcggctctgatgta

SEQ ID NO: 244392 - DNA, 19 bp, Homo sapiens
  siRNA target sequence for GRIK1 (NM_000830.2,1447-1465).
cctgcagtgccatagacat

SEQ ID NO: 244393 - DNA, 19 bp, Homo sapiens
  siRNA target sequence for GRIK1 (NM_000830.2,1475-1493).
cgcctcggacccagattta

SEQ ID NO: 244394 - DNA, 19 bp, Homo sapiens
  siRNA target sequence for GRIK1 (NM_000830.2,1523-1541).
ggcttgactgggcatatca

SEQ ID NO: 244395 - DNA, 19 bp, Homo sapiens
  siRNA target sequence for GRIK1 (NM_000830.2,1532-1550).
gggcatatcacctttaata

SEQ ID NO: 244396 - DNA, 19 bp, Homo sapiens
  siRNA target sequence for GRIK1 (NM_000830.2,1533-1551).
ggcatatcacctttaataa

SEQ ID NO: 244397 - DNA, 19 bp, Homo sapiens
  siRNA target sequence for GRIK1 (NM_000830.2,1582-1600).
ggacattattagtctcaaa

SEQ ID NO: 244398 - DNA, 19 bp, Homo sapiens
  siRNA target sequence for GRIK1 (NM_000830.2,1620-1638).
ctgctggcgaagtgtctaa

SEQ ID NO: 244399 - DNA, 19 bp, Homo sapiens
  siRNA target sequence for GRIK1 (NM_000830.2,1623-1641).
ctggcgaagtgtctaaaca

SEQ ID NO: 244400 - DNA, 19 bp, Homo sapiens
  siRNA target sequence for GRIK1 (NM_000830.2,1625-1643).
ggcgaagtgtctaaacact

SEQ ID NO: 244401 - DNA, 19 bp, Homo sapiens
  siRNA target sequence for GRIK1 (NM_000830.2,1635-1653).
ctaaacacttgtataaagt

SEQ ID NO: 244402 - DNA, 19 bp, Homo sapiens
  siRNA target sequence for GRIK1 (NM_000830.2,1715-1733).
gacaagtccagcaatatca

SEQ ID NO: 244403 - DNA, 19 bp, Homo sapiens
  siRNA target sequence for GRIK1 (NM_000830.2,1717-1735).
caagtccagcaatatcact

SEQ ID NO: 244404 - DNA, 19 bp, Homo sapiens
  siRNA target sequence for GRIK1 (NM_000830.2,1744-1762).
ggccaacagaacactcatt

SEQ ID NO: 244405 - DNA, 19 bp, Homo sapiens
  siRNA target sequence for GRIK1 (NM_000830.2,1808-1826).
gataagcctctatatggaa

SEQ ID NO: 244406 - DNA, 19 bp, Homo sapiens
  siRNA target sequence for GRIK1 (NM_000830.2,1850-1868).
ctagacctgttgaaagaat

SEQ ID NO: 244407 - DNA, 19 bp, Homo sapiens
  siRNA target sequence for GRIK1 (NM_000830.2,1946-1964).
gagtggaacgggatggtta

SEQ ID NO: 244408 - DNA, 19 bp, Homo sapiens
  siRNA target sequence for GRIK1 (NM_000830.2,1948-1966).
gtggaacgggatggttaaa

SEQ ID NO: 244409 - DNA, 19 bp, Homo sapiens
  siRNA target sequence for GRIK1 (NM_000830.2,1950-1968).
ggaacgggatggttaaaga

SEQ ID NO: 244410 - DNA, 19 bp, Homo sapiens
  siRNA target sequence for GRIK1 (NM_000830.2,1951-1969).
gaacgggatggttaaagaa

SEQ ID NO: 244411 - DNA, 19 bp, Homo sapiens
  siRNA target sequence for GRIK1 (NM_000830.2,2016-2034).
cctacgtgcgggagaaagt

SEQ ID NO: 244412 - DNA, 19 bp, Homo sapiens
  siRNA target sequence for GRIK1 (NM_000830.2,2020-2038).
cgtgcgggagaaagtcatt

SEQ ID NO: 244413 - DNA, 19 bp, Homo sapiens
  siRNA target sequence for GRIK1 (NM_000830.2,2086-2104).
gaagcccaatggtaccaat

SEQ ID NO: 244414 - DNA, 19 bp, Homo sapiens
  siRNA target sequence for GRIK1 (NM_000830.2,2132-2150).
ctgtctccagatatttgga

SEQ ID NO: 244415 - DNA, 19 bp, Homo sapiens
  siRNA target sequence for GRIK1 (NM_000830.2,2186-2204).
gtactctttgtgattgcaa

SEQ ID NO: 244416 - DNA, 19 bp, Homo sapiens
  siRNA target sequence for GRIK1 (NM_000830.2,2191-2209).
ctttgtgattgcaaggttt

SEQ ID NO: 244417 - DNA, 19 bp, Homo sapiens
  siRNA target sequence for GRIK1 (NM_000830.2,2211-2229).
caccctacgagtggtataa

SEQ ID NO: 244418 - DNA, 19 bp, Homo sapiens
  siRNA target sequence for GRIK1 (NM_000830.2,2386-2404).
caccctaatcatcatttca

SEQ ID NO: 244419 - DNA, 19 bp, Homo sapiens
  siRNA target sequence for GRIK1 (NM_000830.2,2458-2476).
catagattcggcagatgat

SEQ ID NO: 244420 - DNA, 19 bp, Homo sapiens
  siRNA target sequence for GRIK1 (NM_000830.2,2509-2527).
ggttagagatggatcaaca

SEQ ID NO: 244421 - DNA, 19 bp, Homo sapiens
  siRNA target sequence for GRIK1 (NM_000830.2,2510-2528).
gttagagatggatcaacaa

SEQ ID NO: 244422 - DNA, 19 bp, Homo sapiens
  siRNA target sequence for GRIK1 (NM_000830.2,2602-2620).
cgccctggtaagaaacagt

SEQ ID NO: 244423 - DNA, 19 bp, Homo sapiens
  siRNA target sequence for GRIK1 (NM_000830.2,2671-2689).
gtccaccagcattgagtat

SEQ ID NO: 244424 - DNA, 19 bp, Homo sapiens
  siRNA target sequence for GRIK1 (NM_000830.2,2673-2691).
ccaccagcattgagtatgt

SEQ ID NO: 244425 - DNA, 19 bp, Homo sapiens
  siRNA target sequence for GRIK1 (NM_000830.2,2749-2767).
cggagtgggaacacctatt

SEQ ID NO: 244426 - DNA, 19 bp, Homo sapiens
  siRNA target sequence for GRIK1 (NM_000830.2,2753-2771).
gtgggaacacctattggtt

SEQ ID NO: 244427 - DNA, 19 bp, Homo sapiens
  siRNA target sequence for GRIK1 (NM_000830.2,2898-2916).
ccctgggagtggaaaatat

SEQ ID NO: 244428 - DNA, 19 bp, Homo sapiens
  siRNA target sequence for GRIK1 (NM_000830.2,2902-2920).
gggagtggaaaatattgga

SEQ ID NO: 244429 - DNA, 19 bp, Homo sapiens
  siRNA target sequence for GRIK1 (NM_000830.2,2944-2962).
cggactggtcctttctgta

SEQ ID NO: 244430 - DNA, 19 bp, Homo sapiens
  siRNA target sequence for GRIK1 (NM_000830.2,2946-2964).
gactggtcctttctgtatt

SEQ ID NO: 244431 - DNA, 19 bp, Homo sapiens
  siRNA target sequence for GRIK1 (NM_000830.2,2969-2987).
gctattggagaattcatat

SEQ ID NO: 244432 - DNA, 19 bp, Homo sapiens
  siRNA target sequence for GRIK1 (NM_000830.2,2994-3012).
cacggaagaataatgatat

SEQ ID NO: 244433 - DNA, 19 bp, Homo sapiens
  siRNA target sequence for GRIK1 (NM_000830.2,3087-3105).
ctttatctacggatttaga

SEQ ID NO: 244434 - DNA, 19 bp, Homo sapiens
  siRNA target sequence for GRIK1 (NM_175611.1,2998-3016).
ggaagaactgggaatctca

SEQ ID NO: 244435 - DNA, 19 bp, Homo sapiens
  siRNA target sequence for GRIK1 (NM_175611.1,3007-3025).
gggaatctcactgaagaat

SEQ ID NO: 244436 - DNA, 19 bp, Homo sapiens
  siRNA target sequence for GRIK1 (NM_175611.1,3009-3027).
gaatctcactgaagaatca

SEQ ID NO: 244437 - DNA, 19 bp, Homo sapiens
  siRNA target sequence for GRIK1 (NM_175611.1,3073-3091).
cacaagtatccttacttgt

SEQ ID NO: 244438 - DNA, 19 bp, Homo sapiens
  siRNA target sequence for GRIK2 (NM_021956.2,206-224).
gattattttcccgattcta

SEQ ID NO: 244439 - DNA, 19 bp, Homo sapiens
  siRNA target sequence for GRIK2 (NM_021956.2,215-233).
cccgattctaagtaatcca

SEQ ID NO: 244440 - DNA, 19 bp, Homo sapiens
  siRNA target sequence for GRIK2 (NM_021956.2,236-254).
cttcaggcgcaccgttaaa

SEQ ID NO: 244441 - DNA, 19 bp, Homo sapiens
  siRNA target sequence for GRIK2 (NM_021956.2,272-290).
gtggattggatattctcaa

SEQ ID NO: 244442 - DNA, 19 bp, Homo sapiens
  siRNA target sequence for GRIK2 (NM_021956.2,378-396).
gctgtgaacacaattaaca

SEQ ID NO: 244443 - DNA, 19 bp, Homo sapiens
  siRNA target sequence for GRIK2 (NM_021956.2,415-433).
ccaatactacccttaccta

SEQ ID NO: 244444 - DNA, 19 bp, Homo sapiens
  siRNA target sequence for GRIK2 (NM_021956.2,416-434).
caatactacccttacctat

SEQ ID NO: 244445 - DNA, 19 bp, Homo sapiens
  siRNA target sequence for GRIK2 (NM_021956.2,611-629).
ggtgtcagacaacaaagat

SEQ ID NO: 244446 - DNA, 19 bp, Homo sapiens
  siRNA target sequence for GRIK2 (NM_021956.2,620-638).
caacaaagattccttctat

SEQ ID NO: 244447 - DNA, 19 bp, Homo sapiens
  siRNA target sequence for GRIK2 (NM_021956.2,712-730).
ccgtcacggttgtgtatga

SEQ ID NO: 244448 - DNA, 19 bp, Homo sapiens
  siRNA target sequence for GRIK2 (NM_021956.2,713-731).
cgtcacggttgtgtatgat

SEQ ID NO: 244449 - DNA, 19 bp, Homo sapiens
  siRNA target sequence for GRIK2 (NM_021956.2,767-785).
caaagctccatcaaggtat

SEQ ID NO: 244450 - DNA, 19 bp, Homo sapiens
  siRNA target sequence for GRIK2 (NM_021956.2,782-800).
gtataatcttcgactcaaa

SEQ ID NO: 244451 - DNA, 19 bp, Homo sapiens
  siRNA target sequence for GRIK2 (NM_021956.2,827-845).
ggatgcaaaacccttacta

SEQ ID NO: 244452 - DNA, 19 bp, Homo sapiens
  siRNA target sequence for GRIK2 (NM_021956.2,828-846).
gatgcaaaacccttactaa

SEQ ID NO: 244453 - DNA, 19 bp, Homo sapiens
  siRNA target sequence for GRIK2 (NM_021956.2,859-877).
gaggcaaggagtttcatgt

SEQ ID NO: 244454 - DNA, 19 bp, Homo sapiens
  siRNA target sequence for GRIK2 (NM_021956.2,861-879).
ggcaaggagtttcatgtaa

SEQ ID NO: 244455 - DNA, 19 bp, Homo sapiens
  siRNA target sequence for GRIK2 (NM_021956.2,862-880).
gcaaggagtttcatgtaat

SEQ ID NO: 244456 - DNA, 19 bp, Homo sapiens
  siRNA target sequence for GRIK2 (NM_021956.2,866-884).
ggagtttcatgtaatcttt

SEQ ID NO: 244457 - DNA, 19 bp, Homo sapiens
  siRNA target sequence for GRIK2 (NM_021956.2,869-887).
gtttcatgtaatctttgat

SEQ ID NO: 244458 - DNA, 19 bp, Homo sapiens
  siRNA target sequence for GRIK2 (NM_021956.2,873-891).
catgtaatctttgattgta

SEQ ID NO: 244459 - DNA, 19 bp, Homo sapiens
  siRNA target sequence for GRIK2 (NM_021956.2,925-943).
cattagctatgggaatgat

SEQ ID NO: 244460 - DNA, 19 bp, Homo sapiens
  siRNA target sequence for GRIK2 (NM_021956.2,937-955).
gaatgatgacagaatacta

SEQ ID NO: 244461 - DNA, 19 bp, Homo sapiens
  siRNA target sequence for GRIK2 (NM_021956.2,941-959).
gatgacagaatactatcat

SEQ ID NO: 244462 - DNA, 19 bp, Homo sapiens
  siRNA target sequence for GRIK2 (NM_021956.2,944-962).
gacagaatactatcattat

SEQ ID NO: 244463 - DNA, 19 bp, Homo sapiens
  siRNA target sequence for GRIK2 (NM_021956.2,948-966).
gaatactatcattatatct

SEQ ID NO: 244464 - DNA, 19 bp, Homo sapiens
  siRNA target sequence for GRIK2 (NM_021956.2,977-995).
ggacctctttgctcttgat

SEQ ID NO: 244465 - DNA, 19 bp, Homo sapiens
  siRNA target sequence for GRIK2 (NM_021956.2,1008-1026).
cgatacagtggtgttaaca

SEQ ID NO: 244466 - DNA, 19 bp, Homo sapiens
  siRNA target sequence for GRIK2 (NM_021956.2,1028-1046).
gacagggttcagaatatta

SEQ ID NO: 244467 - DNA, 19 bp, Homo sapiens
  siRNA target sequence for GRIK2 (NM_021956.2,1032-1050).
gggttcagaatattaaata

SEQ ID NO: 244468 - DNA, 19 bp, Homo sapiens
  siRNA target sequence for GRIK2 (NM_021956.2,1150-1168).
cgactgatgctgctctaat

SEQ ID NO: 244469 - DNA, 19 bp, Homo sapiens
  siRNA target sequence for GRIK2 (NM_021956.2,1192-1210).
ctgtggccgttcaacagtt

SEQ ID NO: 244470 - DNA, 19 bp, Homo sapiens
  siRNA target sequence for GRIK2 (NM_021956.2,1235-1253).
gcagtgtaatcgacataaa

SEQ ID NO: 244471 - DNA, 19 bp, Homo sapiens
  siRNA target sequence for GRIK2 (NM_021956.2,1265-1283).
cgggacccgctttatgagt

SEQ ID NO: 244472 - DNA, 19 bp, Homo sapiens
  siRNA target sequence for GRIK2 (NM_021956.2,1270-1288).
cccgctttatgagtctaat

SEQ ID NO: 244473 - DNA, 19 bp, Homo sapiens
  siRNA target sequence for GRIK2 (NM_021956.2,1271-1289).
ccgctttatgagtctaatt

SEQ ID NO: 244474 - DNA, 19 bp, Homo sapiens
  siRNA target sequence for GRIK2 (NM_021956.2,1272-1290).
cgctttatgagtctaatta

SEQ ID NO: 244475 - DNA, 19 bp, Homo sapiens
  siRNA target sequence for GRIK2 (NM_021956.2,1273-1291).
gctttatgagtctaattaa

SEQ ID NO: 244476 - DNA, 19 bp, Homo sapiens
  siRNA target sequence for GRIK2 (NM_021956.2,1274-1292).
ctttatgagtctaattaaa

SEQ ID NO: 244477 - DNA, 19 bp, Homo sapiens
  siRNA target sequence for GRIK2 (NM_021956.2,1318-1336).
gcagaataactttcaacaa

SEQ ID NO: 244478 - DNA, 19 bp, Homo sapiens
  siRNA target sequence for GRIK2 (NM_021956.2,1340-1358).
caatggcttgagaacagat

SEQ ID NO: 244479 - DNA, 19 bp, Homo sapiens
  siRNA target sequence for GRIK2 (NM_021956.2,1419-1437).
ccagccagtggcctgaata

SEQ ID NO: 244480 - DNA, 19 bp, Homo sapiens
  siRNA target sequence for GRIK2 (NM_021956.2,1422-1440).
gccagtggcctgaatatga

SEQ ID NO: 244481 - DNA, 19 bp, Homo sapiens
  siRNA target sequence for GRIK2 (NM_021956.2,1424-1442).
cagtggcctgaatatgaca

SEQ ID NO: 244482 - DNA, 19 bp, Homo sapiens
  siRNA target sequence for GRIK2 (NM_021956.2,1433-1451).
gaatatgacagaaagtcaa

SEQ ID NO: 244483 - DNA, 19 bp, Homo sapiens
  siRNA target sequence for GRIK2 (NM_021956.2,1476-1494).
gattccttatccaatcgtt

SEQ ID NO: 244484 - DNA, 19 bp, Homo sapiens
  siRNA target sequence for GRIK2 (NM_021956.2,1480-1498).
ccttatccaatcgttcttt

SEQ ID NO: 244485 - DNA, 19 bp, Homo sapiens
  siRNA target sequence for GRIK2 (NM_021956.2,1486-1504).
ccaatcgttctttgattgt

SEQ ID NO: 244486 - DNA, 19 bp, Homo sapiens
  siRNA target sequence for GRIK2 (NM_021956.2,1487-1505).
caatcgttctttgattgtt

SEQ ID NO: 244487 - DNA, 19 bp, Homo sapiens
  siRNA target sequence for GRIK2 (NM_021956.2,1548-1566).
gacaaacctctctatggta

SEQ ID NO: 244488 - DNA, 19 bp, Homo sapiens
  siRNA target sequence for GRIK2 (NM_021956.2,1559-1577).
ctatggtaatgatcgattt

SEQ ID NO: 244489 - DNA, 19 bp, Homo sapiens
  siRNA target sequence for GRIK2 (NM_021956.2,1698-1716).
ggaatggttcgtgaactaa

SEQ ID NO: 244490 - DNA, 19 bp, Homo sapiens
  siRNA target sequence for GRIK2 (NM_021956.2,1703-1721).
ggttcgtgaactaattgat

SEQ ID NO: 244491 - DNA, 19 bp, Homo sapiens
  siRNA target sequence for GRIK2 (NM_021956.2,1707-1725).
cgtgaactaattgatcata

SEQ ID NO: 244492 - DNA, 19 bp, Homo sapiens
  siRNA target sequence for GRIK2 (NM_021956.2,1708-1726).
gtgaactaattgatcataa

SEQ ID NO: 244493 - DNA, 19 bp, Homo sapiens
  siRNA target sequence for GRIK2 (NM_021956.2,1740-1758).
gttgctccactggctatta

SEQ ID NO: 244494 - DNA, 19 bp, Homo sapiens
  siRNA target sequence for GRIK2 (NM_021956.2,1743-1761).
gctccactggctattacct

SEQ ID NO: 244495 - DNA, 19 bp, Homo sapiens
  siRNA target sequence for GRIK2 (NM_021956.2,1881-1899).
cctgatatctggatgtata

SEQ ID NO: 244496 - DNA, 19 bp, Homo sapiens
  siRNA target sequence for GRIK2 (NM_021956.2,2129-2147).
cacacttatcatcatttct

SEQ ID NO: 244497 - DNA, 19 bp, Homo sapiens
  siRNA target sequence for GRIK2 (NM_021956.2,2146-2164).
cttcgtatactgctaactt

SEQ ID NO: 244498 - DNA, 19 bp, Homo sapiens
  siRNA target sequence for GRIK2 (NM_021956.2,2209-2227).
ctgctgatgatttagctaa

SEQ ID NO: 244499 - DNA, 19 bp, Homo sapiens
  siRNA target sequence for GRIK2 (NM_021956.2,2214-2232).
gatgatttagctaaacaaa

SEQ ID NO: 244500 - DNA, 19 bp, Homo sapiens
  siRNA target sequence for GRIK2 (NM_021956.2,2348-2366).
gctggtcaaaagtaatgaa

SEQ ID NO: 244501 - DNA, 19 bp, Homo sapiens
  siRNA target sequence for GRIK2 (NM_021956.2,2379-2397).
cgagtcctcacctctgatt

SEQ ID NO: 244502 - DNA, 19 bp, Homo sapiens
  siRNA target sequence for GRIK2 (NM_021956.2,2416-2434).
caacaaccatcgagtttgt

SEQ ID NO: 244503 - DNA, 19 bp, Homo sapiens
  siRNA target sequence for GRIK2 (NM_021956.2,2472-2490).
cttatagactctaaaggtt

SEQ ID NO: 244504 - DNA, 19 bp, Homo sapiens
  siRNA target sequence for GRIK2 (NM_021956.2,2515-2533).
ctccatatcgagacaaaat

SEQ ID NO: 244505 - DNA, 19 bp, Homo sapiens
  siRNA target sequence for GRIK2 (NM_021956.2,2526-2544).
gacaaaattaccatagcaa

SEQ ID NO: 244506 - DNA, 19 bp, Homo sapiens
  siRNA target sequence for GRIK2 (NM_021956.2,2528-2546).
caaaattaccatagcaatt

SEQ ID NO: 244507 - DNA, 19 bp, Homo sapiens
  siRNA target sequence for GRIK2 (NM_021956.2,2645-2663).
gggggttcagaatattggt

SEQ ID NO: 244508 - DNA, 19 bp, Homo sapiens
  siRNA target sequence for GRIK2 (NM_021956.2,2686-2704).
ccggcttggtgctttcagt

SEQ ID NO: 244509 - DNA, 19 bp, Homo sapiens
  siRNA target sequence for GRIK2 (NM_021956.2,2687-2705).
cggcttggtgctttcagtt

SEQ ID NO: 244510 - DNA, 19 bp, Homo sapiens
  siRNA target sequence for GRIK2 (NM_021956.2,2709-2727).
gtggcagtgggagaatttt

SEQ ID NO: 244511 - DNA, 19 bp, Homo sapiens
  siRNA target sequence for GRIK2 (NM_021956.2,2711-2729).
ggcagtgggagaattttta

SEQ ID NO: 244512 - DNA, 19 bp, Homo sapiens
  siRNA target sequence for GRIK2 (NM_021956.2,2773-2791).
gtagtgccatggtagaaga

SEQ ID NO: 244513 - DNA, 19 bp, Homo sapiens
  siRNA target sequence for GRIK2 (NM_021956.2,2776-2794).
gtgccatggtagaagaatt

SEQ ID NO: 244514 - DNA, 19 bp, Homo sapiens
  siRNA target sequence for GRIK2 (NM_021956.2,2810-2828).
gtgccagcgtcggttaaaa

SEQ ID NO: 244515 - DNA, 19 bp, Homo sapiens
  siRNA target sequence for GRIK2 (NM_021956.2,2812-2830).
gccagcgtcggttaaaaca

SEQ ID NO: 244516 - DNA, 19 bp, Homo sapiens
  siRNA target sequence for GRIK2 (NM_021956.2,2813-2831).
ccagcgtcggttaaaacat

SEQ ID NO: 244517 - DNA, 19 bp, Homo sapiens
  siRNA target sequence for GRIK2 (NM_021956.2,2814-2832).
cagcgtcggttaaaacata

SEQ ID NO: 244518 - DNA, 19 bp, Homo sapiens
  siRNA target sequence for GRIK2 (NM_021956.2,2838-2856).
caggccccagttattgtga

SEQ ID NO: 244519 - DNA, 19 bp, Homo sapiens
  siRNA target sequence for GRIK2 (NM_021956.2,2841-2859).
gccccagttattgtgaaaa

SEQ ID NO: 244520 - DNA, 19 bp, Homo sapiens
  siRNA target sequence for GRIK2 (NM_021956.2,2894-2912).
cagaaggttgccaggtaaa

SEQ ID NO: 244521 - DNA, 19 bp, Homo sapiens
  siRNA target sequence for GRIK3 (NM_000831.2,279-297).
caacgcccaggtcatgaat

SEQ ID NO: 244522 - DNA, 19 bp, Homo sapiens
  siRNA target sequence for GRIK3 (NM_000831.2,301-319).
gaggagcatgcctttcgat

SEQ ID NO: 244523 - DNA, 19 bp, Homo sapiens
  siRNA target sequence for GRIK3 (NM_000831.2,303-321).
ggagcatgcctttcgattt

SEQ ID NO: 244524 - DNA, 19 bp, Homo sapiens
  siRNA target sequence for GRIK3 (NM_000831.2,304-322).
gagcatgcctttcgatttt

SEQ ID NO: 244525 - DNA, 19 bp, Homo sapiens
  siRNA target sequence for GRIK3 (NM_000831.2,306-324).
gcatgcctttcgattttct

SEQ ID NO: 244526 - DNA, 19 bp, Homo sapiens
  siRNA target sequence for GRIK3 (NM_000831.2,365-383).
caaccttgacctatgacat

SEQ ID NO: 244527 - DNA, 19 bp, Homo sapiens
  siRNA target sequence for GRIK3 (NM_000831.2,368-386).
ccttgacctatgacataca

SEQ ID NO: 244528 - DNA, 19 bp, Homo sapiens
  siRNA target sequence for GRIK3 (NM_000831.2,379-397).
gacatacagaggattcact

SEQ ID NO: 244529 - DNA, 19 bp, Homo sapiens
  siRNA target sequence for GRIK3 (NM_000831.2,808-826).
cgggaattccgcattatct

SEQ ID NO: 244530 - DNA, 19 bp, Homo sapiens
  siRNA target sequence for GRIK3 (NM_000831.2,809-827).
gggaattccgcattatctt

SEQ ID NO: 244531 - DNA, 19 bp, Homo sapiens
  siRNA target sequence for GRIK3 (NM_000831.2,974-992).
caggattccggattctcaa

SEQ ID NO: 244532 - DNA, 19 bp, Homo sapiens
  siRNA target sequence for GRIK3 (NM_000831.2,977-995).
gattccggattctcaatgt

SEQ ID NO: 244533 - DNA, 19 bp, Homo sapiens
  siRNA target sequence for GRIK3 (NM_000831.2,1097-1115).
ctgatgcagccttactgta

SEQ ID NO: 244534 - DNA, 19 bp, Homo sapiens
  siRNA target sequence for GRIK3 (NM_000831.2,1216-1234).
cgcttcatgaacttcatca

SEQ ID NO: 244535 - DNA, 19 bp, Homo sapiens
  siRNA target sequence for GRIK3 (NM_000831.2,1239-1257).
ggctcaatgggaaggatta

SEQ ID NO: 244536 - DNA, 19 bp, Homo sapiens
  siRNA target sequence for GRIK3 (NM_000831.2,1253-1271).
gattaactggacgaattgt

SEQ ID NO: 244537 - DNA, 19 bp, Homo sapiens
  siRNA target sequence for GRIK3 (NM_000831.2,1264-1282).
cgaattgttttcaacaaaa

SEQ ID NO: 244538 - DNA, 19 bp, Homo sapiens
  siRNA target sequence for GRIK3 (NM_000831.2,1364-1382).
ctgccgacgggctcaacat

SEQ ID NO: 244539 - DNA, 19 bp, Homo sapiens
  siRNA target sequence for GRIK3 (NM_000831.2,1419-1437).
cgactctctgacaaacaga

SEQ ID NO: 244540 - DNA, 19 bp, Homo sapiens
  siRNA target sequence for GRIK3 (NM_000831.2,1420-1438).
gactctctgacaaacagat

SEQ ID NO: 244541 - DNA, 19 bp, Homo sapiens
  siRNA target sequence for GRIK3 (NM_000831.2,1464-1482).
ggagcccttcgtcatgttt

SEQ ID NO: 244542 - DNA, 19 bp, Homo sapiens
  siRNA target sequence for GRIK3 (NM_000831.2,1532-1550).
gcatcgacctgctaaagga

SEQ ID NO: 244543 - DNA, 19 bp, Homo sapiens
  siRNA target sequence for GRIK3 (NM_000831.2,1564-1582).
cttggtttctcctatgaga

SEQ ID NO: 244544 - DNA, 19 bp, Homo sapiens
  siRNA target sequence for GRIK3 (NM_000831.2,1935-1953).
ctccgaggtggtggaaaat

SEQ ID NO: 244545 - DNA, 19 bp, Homo sapiens
  siRNA target sequence for GRIK3 (NM_000831.2,2279-2297).
catcggcgctggtgaagaa

SEQ ID NO: 244546 - DNA, 19 bp, Homo sapiens
  siRNA target sequence for GRIK3 (NM_000831.2,2453-2471).
ccccataccgggacaagat

SEQ ID NO: 244547 - DNA, 19 bp, Homo sapiens
  siRNA target sequence for GRIK3 (NM_000831.2,2455-2473).
ccataccgggacaagatca

SEQ ID NO: 244548 - DNA, 19 bp, Homo sapiens
  siRNA target sequence for GRIK3 (NM_000831.2,2503-2521).
gacaagctgcatatcatga

SEQ ID NO: 244549 - DNA, 19 bp, Homo sapiens
  siRNA target sequence for GRIK3 (NM_000831.2,2651-2669).
ccgtgggcgagtttgtgta

SEQ ID NO: 244550 - DNA, 19 bp, Homo sapiens
  siRNA target sequence for GRIK3 (NM_000831.2,2667-2685).
gtacaagctccgcaaaaca

SEQ ID NO: 244551 - DNA, 19 bp, Homo sapiens
  siRNA target sequence for GRIK3 (NM_000831.2,2714-2732).
gcaccgtggccgatgagat

SEQ ID NO: 244552 - DNA, 19 bp, Homo sapiens
  siRNA target sequence for GRIK4 (NM_014619.2,368-386).
cagaggagttcgtcaagtt

SEQ ID NO: 244553 - DNA, 19 bp, Homo sapiens
  siRNA target sequence for GRIK4 (NM_014619.2,531-549).
gctgctccggcaattcctt

SEQ ID NO: 244554 - DNA, 19 bp, Homo sapiens
  siRNA target sequence for GRIK4 (NM_014619.2,532-550).
ctgctccggcaattcctta

SEQ ID NO: 244555 - DNA, 19 bp, Homo sapiens
  siRNA target sequence for GRIK4 (NM_014619.2,708-726).
ggtgtcagcctattacaca

SEQ ID NO: 244556 - DNA, 19 bp, Homo sapiens
  siRNA target sequence for GRIK4 (NM_014619.2,715-733).
gcctattacacatacatct

SEQ ID NO: 244557 - DNA, 19 bp, Homo sapiens
  siRNA target sequence for GRIK4 (NM_014619.2,787-805).
gtcaacatcctgggatttt

SEQ ID NO: 244558 - DNA, 19 bp, Homo sapiens
  siRNA target sequence for GRIK4 (NM_014619.2,911-929).
cctcggccctgctgtttga

SEQ ID NO: 244559 - DNA, 19 bp, Homo sapiens
  siRNA target sequence for GRIK4 (NM_014619.2,912-930).
ctcggccctgctgtttgat

SEQ ID NO: 244560 - DNA, 19 bp, Homo sapiens
  siRNA target sequence for GRIK4 (NM_014619.2,1053-1071).
gcgcatggtagaattggaa

SEQ ID NO: 244561 - DNA, 19 bp, Homo sapiens
  siRNA target sequence for GRIK4 (NM_014619.2,1073-1091).
gtcttaccggccacattga

SEQ ID NO: 244562 - DNA, 19 bp, Homo sapiens
  siRNA target sequence for GRIK4 (NM_014619.2,1075-1093).
cttaccggccacattgaat

SEQ ID NO: 244563 - DNA, 19 bp, Homo sapiens
  siRNA target sequence for GRIK4 (NM_014619.2,1112-1130).
ggtccaactacgctttgaa

SEQ ID NO: 244564 - DNA, 19 bp, Homo sapiens
  siRNA target sequence for GRIK4 (NM_014619.2,1113-1131).
gtccaactacgctttgaaa

SEQ ID NO: 244565 - DNA, 19 bp, Homo sapiens
  siRNA target sequence for GRIK4 (NM_014619.2,1115-1133).
ccaactacgctttgaaaat

SEQ ID NO: 244566 - DNA, 19 bp, Homo sapiens
  siRNA target sequence for GRIK4 (NM_014619.2,1134-1152).
cttacagttcacaaggaat

SEQ ID NO: 244567 - DNA, 19 bp, Homo sapiens
  siRNA target sequence for GRIK4 (NM_014619.2,1138-1156).
cagttcacaaggaatggtt

SEQ ID NO: 244568 - DNA, 19 bp, Homo sapiens
  siRNA target sequence for GRIK4 (NM_014619.2,1367-1385).
cagagatcctccgattcaa

SEQ ID NO: 244569 - DNA, 19 bp, Homo sapiens
  siRNA target sequence for GRIK4 (NM_014619.2,1369-1387).
gagatcctccgattcaact

SEQ ID NO: 244570 - DNA, 19 bp, Homo sapiens
  siRNA target sequence for GRIK4 (NM_014619.2,1375-1393).
ctccgattcaactacaaga

SEQ ID NO: 244571 - DNA, 19 bp, Homo sapiens
  siRNA target sequence for GRIK4 (NM_014619.2,1494-1512).
ggcaggcctcaccattaca

SEQ ID NO: 244572 - DNA, 19 bp, Homo sapiens
  siRNA target sequence for GRIK4 (NM_014619.2,1519-1537).
cgggagaaggtgattgatt

SEQ ID NO: 244573 - DNA, 19 bp, Homo sapiens
  siRNA target sequence for GRIK4 (NM_014619.2,1522-1540).
gagaaggtgattgatttct

SEQ ID NO: 244574 - DNA, 19 bp, Homo sapiens
  siRNA target sequence for GRIK4 (NM_014619.2,1554-1572).
gactctgggaattagcatt

SEQ ID NO: 244575 - DNA, 19 bp, Homo sapiens
  siRNA target sequence for GRIK4 (NM_014619.2,1592-1610).
gacgcaaacccggctattt

SEQ ID NO: 244576 - DNA, 19 bp, Homo sapiens
  siRNA target sequence for GRIK4 (NM_014619.2,1594-1612).
cgcaaacccggctatttct

SEQ ID NO: 244577 - DNA, 19 bp, Homo sapiens
  siRNA target sequence for GRIK4 (NM_014619.2,1834-1852).
gcccctcgcgccttatcca

SEQ ID NO: 244578 - DNA, 19 bp, Homo sapiens
  siRNA target sequence for GRIK4 (NM_014619.2,1877-1895).
gggcattcacgctgatcat

SEQ ID NO: 244579 - DNA, 19 bp, Homo sapiens
  siRNA target sequence for GRIK4 (NM_014619.2,1879-1897).
gcattcacgctgatcatca

SEQ ID NO: 244580 - DNA, 19 bp, Homo sapiens
  siRNA target sequence for GRIK4 (NM_014619.2,1981-1999).
gaccagaccgccattgaat

SEQ ID NO: 244581 - DNA, 19 bp, Homo sapiens
  siRNA target sequence for GRIK4 (NM_014619.2,1983-2001).
ccagaccgccattgaatat

SEQ ID NO: 244582 - DNA, 19 bp, Homo sapiens
  siRNA target sequence for GRIK4 (NM_014619.2,1992-2010).
cattgaatatggcacaatt

SEQ ID NO: 244583 - DNA, 19 bp, Homo sapiens
  siRNA target sequence for GRIK4 (NM_014619.2,2072-2090).
ggaattacatgtattccaa

SEQ ID NO: 244584 - DNA, 19 bp, Homo sapiens
  siRNA target sequence for GRIK4 (NM_014619.2,2126-2144).
gaatcgccagggtgttgaa

SEQ ID NO: 244585 - DNA, 19 bp, Homo sapiens
  siRNA target sequence for GRIK4 (NM_014619.2,2396-2414).
gcctgggaatggagaatat

SEQ ID NO: 244586 - DNA, 19 bp, Homo sapiens
  siRNA target sequence for GRIK4 (NM_014619.2,2419-2437).
ggaatctttgtggttctta

SEQ ID NO: 244587 - DNA, 19 bp, Homo sapiens
  siRNA target sequence for GRIK4 (NM_014619.2,2420-2438).
gaatctttgtggttcttat

SEQ ID NO: 244588 - DNA, 19 bp, Homo sapiens
  siRNA target sequence for GRIK4 (NM_014619.2,2444-2462).
gcttaatcgtggccatttt

SEQ ID NO: 244589 - DNA, 19 bp, Homo sapiens
  siRNA target sequence for GRIK4 (NM_014619.2,2445-2463).
cttaatcgtggccattttt

SEQ ID NO: 244590 - DNA, 19 bp, Homo sapiens
  siRNA target sequence for GRIK4 (NM_014619.2,2540-2558).
ccgagctgcgcagcattat

SEQ ID NO: 244591 - DNA, 19 bp, Homo sapiens
  siRNA target sequence for GRIK5 (NM_002088.3,115-133).
ctgcaatcctggatgatca

SEQ ID NO: 244592 - DNA, 19 bp, Homo sapiens
  siRNA target sequence for GRIK5 (NM_002088.3,217-235).
cccgagtggaagtagacat

SEQ ID NO: 244593 - DNA, 19 bp, Homo sapiens
  siRNA target sequence for GRIK5 (NM_002088.3,220-238).
gagtggaagtagacatctt

SEQ ID NO: 244594 - DNA, 19 bp, Homo sapiens
  siRNA target sequence for GRIK5 (NM_002088.3,347-365).
caccgtgagccatatctgt

SEQ ID NO: 244595 - DNA, 19 bp, Homo sapiens
  siRNA target sequence for GRIK5 (NM_002088.3,736-754).
gaatgacctcagcgtttta

SEQ ID NO: 244596 - DNA, 19 bp, Homo sapiens
  siRNA target sequence for GRIK5 (NM_002088.3,745-763).
cagcgttttacaagtacat

SEQ ID NO: 244597 - DNA, 19 bp, Homo sapiens
  siRNA target sequence for GRIK5 (NM_002088.3,876-894).
gtccgcagcctcaacatgt

SEQ ID NO: 244598 - DNA, 19 bp, Homo sapiens
  siRNA target sequence for GRIK5 (NM_002088.3,1082-1100).
cctgcgcatggtagagtat

SEQ ID NO: 244599 - DNA, 19 bp, Homo sapiens
  siRNA target sequence for GRIK5 (NM_002088.3,1085-1103).
gcgcatggtagagtatgat

SEQ ID NO: 244600 - DNA, 19 bp, Homo sapiens
  siRNA target sequence for GRIK5 (NM_002088.3,1156-1174).
ccctgcgcatcctagaaaa

SEQ ID NO: 244601 - DNA, 19 bp, Homo sapiens
  siRNA target sequence for GRIK5 (NM_002088.3,2070-2088).
cagaattcacggtaccaaa

SEQ ID NO: 244602 - DNA, 19 bp, Homo sapiens
  siRNA target sequence for GRIK5 (NM_002088.3,2302-2320).
ccccgttccgggatgagat

SEQ ID NO: 244603 - DNA, 19 bp, Homo sapiens
  siRNA target sequence for GRIK5 (NM_002088.3,2408-2426).
ggaggaccatcgagctaaa

SEQ ID NO: 244604 - DNA, 19 bp, Homo sapiens
  siRNA target sequence for GRIK5 (NM_002088.3,2411-2429).
ggaccatcgagctaaaggt

SEQ ID NO: 244605 - DNA, 19 bp, Homo sapiens
  siRNA target sequence for GRIK5 (NM_002088.3,2496-2514).
gtggcggtcatggaattca

SEQ ID NO: 244606 - DNA, 19 bp, Homo sapiens
  siRNA target sequence for GRIK5 (NM_002088.3,2498-2516).
ggcggtcatggaattcata

SEQ ID NO: 244607 - DNA, 19 bp, Homo sapiens
  siRNA target sequence for GRIK5 (NM_002088.3,2499-2517).
gcggtcatggaattcatat

SEQ ID NO: 244608 - DNA, 19 bp, Homo sapiens
  siRNA target sequence for GRIK5 (NM_002088.3,2502-2520).
gtcatggaattcatatggt

SEQ ID NO: 244609 - DNA, 19 bp, Homo sapiens
  siRNA target sequence for GRIA4 (NM_000829.1,123-141).
cactgcttttcgattagca

SEQ ID NO: 244610 - DNA, 19 bp, Homo sapiens
  siRNA target sequence for GRIA4 (NM_000829.1,125-143).
ctgcttttcgattagcaat

SEQ ID NO: 244611 - DNA, 19 bp, Homo sapiens
  siRNA target sequence for GRIA4 (NM_000829.1,127-145).
gcttttcgattagcaattt

SEQ ID NO: 244612 - DNA, 19 bp, Homo sapiens
  siRNA target sequence for GRIA4 (NM_000829.1,128-146).
cttttcgattagcaatttt

SEQ ID NO: 244613 - DNA, 19 bp, Homo sapiens
  siRNA target sequence for GRIA4 (NM_000829.1,169-187).
gcgtcggaagctcctttta

SEQ ID NO: 244614 - DNA, 19 bp, Homo sapiens
  siRNA target sequence for GRIA4 (NM_000829.1,170-188).
cgtcggaagctccttttaa

SEQ ID NO: 244615 - DNA, 19 bp, Homo sapiens
  siRNA target sequence for GRIA4 (NM_000829.1,171-189).
gtcggaagctccttttaat

SEQ ID NO: 244616 - DNA, 19 bp, Homo sapiens
  siRNA target sequence for GRIA4 (NM_000829.1,197-215).
ctcatgtggacaacattga

SEQ ID NO: 244617 - DNA, 19 bp, Homo sapiens
  siRNA target sequence for GRIA4 (NM_000829.1,222-240).
caacagttttgctgtaaca

SEQ ID NO: 244618 - DNA, 19 bp, Homo sapiens
  siRNA target sequence for GRIA4 (NM_000829.1,249-267).
ctgttcccagtattctaga

SEQ ID NO: 244619 - DNA, 19 bp, Homo sapiens
  siRNA target sequence for GRIA4 (NM_000829.1,295-313).
gataagaggtcggtacata

SEQ ID NO: 244620 - DNA, 19 bp, Homo sapiens
  siRNA target sequence for GRIA4 (NM_000829.1,385-403).
cagtttgtgctgcaactaa

SEQ ID NO: 244621 - DNA, 19 bp, Homo sapiens
  siRNA target sequence for GRIA4 (NM_000829.1,387-405).
gtttgtgctgcaactaaga

SEQ ID NO: 244622 - DNA, 19 bp, Homo sapiens
  siRNA target sequence for GRIA4 (NM_000829.1,396-414).
gcaactaagaccttcgtta

SEQ ID NO: 244623 - DNA, 19 bp, Homo sapiens
  siRNA target sequence for GRIA4 (NM_000829.1,415-433).
cgaggagcactcttgagtt

SEQ ID NO: 244624 - DNA, 19 bp, Homo sapiens
  siRNA target sequence for GRIA4 (NM_000829.1,416-434).
gaggagcactcttgagttt

SEQ ID NO: 244625 - DNA, 19 bp, Homo sapiens
  siRNA target sequence for GRIA4 (NM_000829.1,442-460).
cactacgaatggaactgtt

SEQ ID NO: 244626 - DNA, 19 bp, Homo sapiens
  siRNA target sequence for GRIA4 (NM_000829.1,444-462).
ctacgaatggaactgtttt

SEQ ID NO: 244627 - DNA, 19 bp, Homo sapiens
  siRNA target sequence for GRIA4 (NM_000829.1,492-510).
ctcgatactccaagctatt

SEQ ID NO: 244628 - DNA, 19 bp, Homo sapiens
  siRNA target sequence for GRIA4 (NM_000829.1,494-512).
cgatactccaagctattat

SEQ ID NO: 244629 - DNA, 19 bp, Homo sapiens
  siRNA target sequence for GRIA4 (NM_000829.1,545-563).
gcgctatatgtgtggaaaa

SEQ ID NO: 244630 - DNA, 19 bp, Homo sapiens
  siRNA target sequence for GRIA4 (NM_000829.1,578-596).
gctataggcaacttctaga

SEQ ID NO: 244631 - DNA, 19 bp, Homo sapiens
  siRNA target sequence for GRIA4 (NM_000829.1,579-597).
ctataggcaacttctagaa

SEQ ID NO: 244632 - DNA, 19 bp, Homo sapiens
  siRNA target sequence for GRIA4 (NM_000829.1,585-603).
gcaacttctagaagaactt

SEQ ID NO: 244633 - DNA, 19 bp, Homo sapiens
  siRNA target sequence for GRIA4 (NM_000829.1,648-666).
gagacttcaaaacatatta

SEQ ID NO: 244634 - DNA, 19 bp, Homo sapiens
  siRNA target sequence for GRIA4 (NM_000829.1,660-678).
catattagaacagattgta

SEQ ID NO: 244635 - DNA, 19 bp, Homo sapiens
  siRNA target sequence for GRIA4 (NM_000829.1,694-712).
gttaaaggctaccattata

SEQ ID NO: 244636 - DNA, 19 bp, Homo sapiens
  siRNA target sequence for GRIA4 (NM_000829.1,726-744).
gggattcaaggatatttct

SEQ ID NO: 244637 - DNA, 19 bp, Homo sapiens
  siRNA target sequence for GRIA4 (NM_000829.1,787-805).
cagttggtggattttaata

SEQ ID NO: 244638 - DNA, 19 bp, Homo sapiens
  siRNA target sequence for GRIA4 (NM_000829.1,828-846).
ggatcgctggaagaaacta

SEQ ID NO: 244639 - DNA, 19 bp, Homo sapiens
  siRNA target sequence for GRIA4 (NM_000829.1,928-946).
gaaactttccgaagtctta

SEQ ID NO: 244640 - DNA, 19 bp, Homo sapiens
  siRNA target sequence for GRIA4 (NM_000829.1,1047-1065).
caaacaggttcgaattcaa

SEQ ID NO: 244641 - DNA, 19 bp, Homo sapiens
  siRNA target sequence for GRIA4 (NM_000829.1,1067-1085).
ggctgacagggaatgttca

SEQ ID NO: 244642 - DNA, 19 bp, Homo sapiens
  siRNA target sequence for GRIA4 (NM_000829.1,1095-1113).
ctatggacgtagagtcaat

SEQ ID NO: 244643 - DNA, 19 bp, Homo sapiens
  siRNA target sequence for GRIA4 (NM_000829.1,1099-1117).
ggacgtagagtcaattaca

SEQ ID NO: 244644 - DNA, 19 bp, Homo sapiens
  siRNA target sequence for GRIA4 (NM_000829.1,1102-1120).
cgtagagtcaattacacaa

SEQ ID NO: 244645 - DNA, 19 bp, Homo sapiens
  siRNA target sequence for GRIA4 (NM_000829.1,1143-1161).
cacaggacctagaaaggtt

SEQ ID NO: 244646 - DNA, 19 bp, Homo sapiens
  siRNA target sequence for GRIA4 (NM_000829.1,1148-1166).
gacctagaaaggttggtta

SEQ ID NO: 244647 - DNA, 19 bp, Homo sapiens
  siRNA target sequence for GRIA4 (NM_000829.1,1174-1192).
gatatggataagttagtct

SEQ ID NO: 244648 - DNA, 19 bp, Homo sapiens
  siRNA target sequence for GRIA4 (NM_000829.1,1179-1197).
ggataagttagtcttgatt

SEQ ID NO: 244649 - DNA, 19 bp, Homo sapiens
  siRNA target sequence for GRIA4 (NM_000829.1,1185-1203).
gttagtcttgattcaagat

SEQ ID NO: 244650 - DNA, 19 bp, Homo sapiens
  siRNA target sequence for GRIA4 (NM_000829.1,1249-1267).
gtggttgtaaccacaatta

SEQ ID NO: 244651 - DNA, 19 bp, Homo sapiens
  siRNA target sequence for GRIA4 (NM_000829.1,1323-1341).
caagtatgaaggatactgt

SEQ ID NO: 244652 - DNA, 19 bp, Homo sapiens
  siRNA target sequence for GRIA4 (NM_000829.1,1369-1387).
catattggtatcaagtata

SEQ ID NO: 244653 - DNA, 19 bp, Homo sapiens
  siRNA target sequence for GRIA4 (NM_000829.1,1474-1492).
gggaaagcagagattgcta

SEQ ID NO: 244654 - DNA, 19 bp, Homo sapiens
  siRNA target sequence for GRIA4 (NM_000829.1,1490-1508).
ctattgcccctctgacaat

SEQ ID NO: 244655 - DNA, 19 bp, Homo sapiens
  siRNA target sequence for GRIA4 (NM_000829.1,1495-1513).
gcccctctgacaatcactt

SEQ ID NO: 244656 - DNA, 19 bp, Homo sapiens
  siRNA target sequence for GRIA4 (NM_000829.1,1541-1559).
ctaagcccttcatgagttt

SEQ ID NO: 244657 - DNA, 19 bp, Homo sapiens
  siRNA target sequence for GRIA4 (NM_000829.1,1556-1574).
gtttgggcatatctatcat

SEQ ID NO: 244658 - DNA, 19 bp, Homo sapiens
  siRNA target sequence for GRIA4 (NM_000829.1,1669-1687).
ggtgtcagcgtggtcttat

SEQ ID NO: 244659 - DNA, 19 bp, Homo sapiens
  siRNA target sequence for GRIA4 (NM_000829.1,1670-1688).
gtgtcagcgtggtcttatt

SEQ ID NO: 244660 - DNA, 19 bp, Homo sapiens
  siRNA target sequence for GRIA4 (NM_000829.1,1674-1692).
cagcgtggtcttattccta

SEQ ID NO: 244661 - DNA, 19 bp, Homo sapiens
  siRNA target sequence for GRIA4 (NM_000829.1,1678-1696).
gtggtcttattcctagtta

SEQ ID NO: 244662 - DNA, 19 bp, Homo sapiens
  siRNA target sequence for GRIA4 (NM_000829.1,1680-1698).
ggtcttattcctagttagt

SEQ ID NO: 244663 - DNA, 19 bp, Homo sapiens
  siRNA target sequence for GRIA4 (NM_000829.1,1683-1701).
cttattcctagttagtaga

SEQ ID NO: 244664 - DNA, 19 bp, Homo sapiens
  siRNA target sequence for GRIA4 (NM_000829.1,1697-1715).
gtagatttagtccatatga

SEQ ID NO: 244665 - DNA, 19 bp, Homo sapiens
  siRNA target sequence for GRIA4 (NM_000829.1,1759-1777).
gaccagcctcccaatgagt

SEQ ID NO: 244666 - DNA, 19 bp, Homo sapiens
  siRNA target sequence for GRIA4 (NM_000829.1,1770-1788).
caatgagtttggcatcttt

SEQ ID NO: 244667 - DNA, 19 bp, Homo sapiens
  siRNA target sequence for GRIA4 (NM_000829.1,1850-1868).
ccctctcaggtcgaattgt

SEQ ID NO: 244668 - DNA, 19 bp, Homo sapiens
  siRNA target sequence for GRIA4 (NM_000829.1,1851-1869).
cctctcaggtcgaattgtt

SEQ ID NO: 244669 - DNA, 19 bp, Homo sapiens
  siRNA target sequence for GRIA4 (NM_000829.1,1981-1999).
ctggccaaacaaacagaaa

SEQ ID NO: 244670 - DNA, 19 bp, Homo sapiens
  siRNA target sequence for GRIA4 (NM_000829.1,2051-2069).
caaaaatagcagtgtatga

SEQ ID NO: 244671 - DNA, 19 bp, Homo sapiens
  siRNA target sequence for GRIA4 (NM_000829.1,2098-2116).
gagccatcagtattcacta

SEQ ID NO: 244672 - DNA, 19 bp, Homo sapiens
  siRNA target sequence for GRIA4 (NM_000829.1,2137-2155).
gctcgtgtccgcaaatcca

SEQ ID NO: 244673 - DNA, 19 bp, Homo sapiens
  siRNA target sequence for GRIA4 (NM_000829.1,2274-2292).
gcccaagggttcctcatta

SEQ ID NO: 244674 - DNA, 19 bp, Homo sapiens
  siRNA target sequence for GRIA4 (NM_000829.1,2677-2695).
ggattggctgtcattgcat

SEQ ID NO: 244675 - DNA, 19 bp, Homo sapiens
  siRNA target sequence for GRID2 (NM_001510.1,59-77).
cggcgaatgcggattcgat

SEQ ID NO: 244676 - DNA, 19 bp, Homo sapiens
  siRNA target sequence for GRID2 (NM_001510.1,63-81).
gaatgcggattcgatcatt

SEQ ID NO: 244677 - DNA, 19 bp, Homo sapiens
  siRNA target sequence for GRID2 (NM_001510.1,67-85).
gcggattcgatcattcaca

SEQ ID NO: 244678 - DNA, 19 bp, Homo sapiens
  siRNA target sequence for GRID2 (NM_001510.1,68-86).
cggattcgatcattcacat

SEQ ID NO: 244679 - DNA, 19 bp, Homo sapiens
  siRNA target sequence for GRID2 (NM_001510.1,78-96).
cattcacatcggagcaatt

SEQ ID NO: 244680 - DNA, 19 bp, Homo sapiens
  siRNA target sequence for GRID2 (NM_001510.1,84-102).
catcggagcaatttttgat

SEQ ID NO: 244681 - DNA, 19 bp, Homo sapiens
  siRNA target sequence for GRID2 (NM_001510.1,137-155).
ctgcggttggtgaccttaa

SEQ ID NO: 244682 - DNA, 19 bp, Homo sapiens
  siRNA target sequence for GRID2 (NM_001510.1,168-186).
gatcttacagactgagaaa

SEQ ID NO: 244683 - DNA, 19 bp, Homo sapiens
  siRNA target sequence for GRID2 (NM_001510.1,238-256).
caagaagcctgtgaactta

SEQ ID NO: 244684 - DNA, 19 bp, Homo sapiens
  siRNA target sequence for GRID2 (NM_001510.1,245-263).
cctgtgaacttatgaatca

SEQ ID NO: 244685 - DNA, 19 bp, Homo sapiens
  siRNA target sequence for GRID2 (NM_001510.1,246-264).
ctgtgaacttatgaatcaa

SEQ ID NO: 244686 - DNA, 19 bp, Homo sapiens
  siRNA target sequence for GRID2 (NM_001510.1,305-323).
caggatccctccagtcttt

SEQ ID NO: 244687 - DNA, 19 bp, Homo sapiens
  siRNA target sequence for GRID2 (NM_001510.1,446-464).
ctgtctacttgcatgatgt

SEQ ID NO: 244688 - DNA, 19 bp, Homo sapiens
  siRNA target sequence for GRID2 (NM_001510.1,453-471).
cttgcatgatgttatccta

SEQ ID NO: 244689 - DNA, 19 bp, Homo sapiens
  siRNA target sequence for GRID2 (NM_001510.1,513-531).
ctatgatagtgaatacgat

SEQ ID NO: 244690 - DNA, 19 bp, Homo sapiens
  siRNA target sequence for GRID2 (NM_001510.1,547-565).
gagttcttggacaaagtct

SEQ ID NO: 244691 - DNA, 19 bp, Homo sapiens
  siRNA target sequence for GRID2 (NM_001510.1,633-651).
ctttgacaccatgagaata

SEQ ID NO: 244692 - DNA, 19 bp, Homo sapiens
  siRNA target sequence for GRID2 (NM_001510.1,664-682).
cgctatcgagacactctta

SEQ ID NO: 244693 - DNA, 19 bp, Homo sapiens
  siRNA target sequence for GRID2 (NM_001510.1,683-701).
ggcgagcgatccttgttat

SEQ ID NO: 244694 - DNA, 19 bp, Homo sapiens
  siRNA target sequence for GRID2 (NM_001510.1,685-703).
cgagcgatccttgttatga

SEQ ID NO: 244695 - DNA, 19 bp, Homo sapiens
  siRNA target sequence for GRID2 (NM_001510.1,716-734).
ccaaatccttcattactga

SEQ ID NO: 244696 - DNA, 19 bp, Homo sapiens
  siRNA target sequence for GRID2 (NM_001510.1,763-781).
gactgtcactggatcatta

SEQ ID NO: 244697 - DNA, 19 bp, Homo sapiens
  siRNA target sequence for GRID2 (NM_001510.1,830-848).
caattggaaggttaacgat

SEQ ID NO: 244698 - DNA, 19 bp, Homo sapiens
  siRNA target sequence for GRID2 (NM_001510.1,845-863).
cgattattcggcagacatt

SEQ ID NO: 244699 - DNA, 19 bp, Homo sapiens
  siRNA target sequence for GRID2 (NM_001510.1,846-864).
gattattcggcagacattt

SEQ ID NO: 244700 - DNA, 19 bp, Homo sapiens
  siRNA target sequence for GRID2 (NM_001510.1,897-915).
ccgtggcaaccatcgaata

SEQ ID NO: 244701 - DNA, 19 bp, Homo sapiens
  siRNA target sequence for GRID2 (NM_001510.1,898-916).
cgtggcaaccatcgaatat

SEQ ID NO: 244702 - DNA, 19 bp, Homo sapiens
  siRNA target sequence for GRID2 (NM_001510.1,901-919).
ggcaaccatcgaatatctt

SEQ ID NO: 244703 - DNA, 19 bp, Homo sapiens
  siRNA target sequence for GRID2 (NM_001510.1,903-921).
caaccatcgaatatcttca

SEQ ID NO: 244704 - DNA, 19 bp, Homo sapiens
  siRNA target sequence for GRID2 (NM_001510.1,906-924).
ccatcgaatatcttcaaca

SEQ ID NO: 244705 - DNA, 19 bp, Homo sapiens
  siRNA target sequence for GRID2 (NM_001510.1,907-925).
catcgaatatcttcaacat

SEQ ID NO: 244706 - DNA, 19 bp, Homo sapiens
  siRNA target sequence for GRID2 (NM_001510.1,910-928).
cgaatatcttcaacattgt

SEQ ID NO: 244707 - DNA, 19 bp, Homo sapiens
  siRNA target sequence for GRID2 (NM_001510.1,939-957).
ggatccatttgctcagaat

SEQ ID NO: 244708 - DNA, 19 bp, Homo sapiens
  siRNA target sequence for GRID2 (NM_001510.1,940-958).
gatccatttgctcagaata

SEQ ID NO: 244709 - DNA, 19 bp, Homo sapiens
  siRNA target sequence for GRID2 (NM_001510.1,963-981).
gatttccaacctttacata

SEQ ID NO: 244710 - DNA, 19 bp, Homo sapiens
  siRNA target sequence for GRID2 (NM_001510.1,989-1007).
cggtgcttctgcttgctaa

SEQ ID NO: 244711 - DNA, 19 bp, Homo sapiens
  siRNA target sequence for GRID2 (NM_001510.1,990-1008).
ggtgcttctgcttgctaat

SEQ ID NO: 244712 - DNA, 19 bp, Homo sapiens
  siRNA target sequence for GRID2 (NM_001510.1,1143-1161).
gactggagagctagaattt

SEQ ID NO: 244713 - DNA, 19 bp, Homo sapiens
  siRNA target sequence for GRID2 (NM_001510.1,1280-1298).
ggtcactgactgacaagaa

SEQ ID NO: 244714 - DNA, 19 bp, Homo sapiens
  siRNA target sequence for GRID2 (NM_001510.1,1321-1339).
gtggttctacgtgtagtaa

SEQ ID NO: 244715 - DNA, 19 bp, Homo sapiens
  siRNA target sequence for GRID2 (NM_001510.1,1323-1341).
ggttctacgtgtagtaact

SEQ ID NO: 244716 - DNA, 19 bp, Homo sapiens
  siRNA target sequence for GRID2 (NM_001510.1,1401-1419).
ccagggcttctccattgat

SEQ ID NO: 244717 - DNA, 19 bp, Homo sapiens
  siRNA target sequence for GRID2 (NM_001510.1,1410-1428).
ctccattgatgttttggat

SEQ ID NO: 244718 - DNA, 19 bp, Homo sapiens
  siRNA target sequence for GRID2 (NM_001510.1,1444-1462).
ctgggttttaactacgaaa

SEQ ID NO: 244719 - DNA, 19 bp, Homo sapiens
  siRNA target sequence for GRID2 (NM_001510.1,1446-1464).
gggttttaactacgaaatt

SEQ ID NO: 244720 - DNA, 19 bp, Homo sapiens
  siRNA target sequence for GRID2 (NM_001510.1,1467-1485).
cgtagcaccggatcacaaa

SEQ ID NO: 244721 - DNA, 19 bp, Homo sapiens
  siRNA target sequence for GRID2 (NM_001510.1,1554-1572).
catagggatttctgcttta

SEQ ID NO: 244722 - DNA, 19 bp, Homo sapiens
  siRNA target sequence for GRID2 (NM_001510.1,1578-1596).
cactccagatcgtgaaaat

SEQ ID NO: 244723 - DNA, 19 bp, Homo sapiens
  siRNA target sequence for GRID2 (NM_001510.1,1629-1647).
ctcagtgggggtactactt

SEQ ID NO: 244724 - DNA, 19 bp, Homo sapiens
  siRNA target sequence for GRID2 (NM_001510.1,1679-1697).
cctgtcttgcaccatttga

SEQ ID NO: 244725 - DNA, 19 bp, Homo sapiens
  siRNA target sequence for GRID2 (NM_001510.1,1755-1773).
cctcttgaactggcttaat

SEQ ID NO: 244726 - DNA, 19 bp, Homo sapiens
  siRNA target sequence for GRID2 (NM_001510.1,1767-1785).
gcttaatcccccacgatta

SEQ ID NO: 244727 - DNA, 19 bp, Homo sapiens
  siRNA target sequence for GRID2 (NM_001510.1,1802-1820).
cgtctactactctctacaa

SEQ ID NO: 244728 - DNA, 19 bp, Homo sapiens
  siRNA target sequence for GRID2 (NM_001510.1,1902-1920).
gggggcttggtggctattt

SEQ ID NO: 244729 - DNA, 19 bp, Homo sapiens
  siRNA target sequence for GRID2 (NM_001510.1,1905-1923).
ggcttggtggctatttgct

SEQ ID NO: 244730 - DNA, 19 bp, Homo sapiens
  siRNA target sequence for GRID2 (NM_001510.1,1907-1925).
cttggtggctatttgcttt

SEQ ID NO: 244731 - DNA, 19 bp, Homo sapiens
  siRNA target sequence for GRID2 (NM_001510.1,1910-1928).
ggtggctatttgctttgat

SEQ ID NO: 244732 - DNA, 19 bp, Homo sapiens
  siRNA target sequence for GRID2 (NM_001510.1,1913-1931).
ggctatttgctttgattgt

SEQ ID NO: 244733 - DNA, 19 bp, Homo sapiens
  siRNA target sequence for GRID2 (NM_001510.1,1914-1932).
gctatttgctttgattgtt

SEQ ID NO: 244734 - DNA, 19 bp, Homo sapiens
  siRNA target sequence for GRID2 (NM_001510.1,1921-1939).
gctttgattgttatctcat

SEQ ID NO: 244735 - DNA, 19 bp, Homo sapiens
  siRNA target sequence for GRID2 (NM_001510.1,1956-1974).
cgctgctttcctcactatt

SEQ ID NO: 244736 - DNA, 19 bp, Homo sapiens
  siRNA target sequence for GRID2 (NM_001510.1,1957-1975).
gctgctttcctcactatta

SEQ ID NO: 244737 - DNA, 19 bp, Homo sapiens
  siRNA target sequence for GRID2 (NM_001510.1,1968-1986).
cactattacacgcattgaa

SEQ ID NO: 244738 - DNA, 19 bp, Homo sapiens
  siRNA target sequence for GRID2 (NM_001510.1,2005-2023).
caggacctttccaagcaaa

SEQ ID NO: 244739 - DNA, 19 bp, Homo sapiens
  siRNA target sequence for GRID2 (NM_001510.1,2046-2064).
cctagactctgcggtatat

SEQ ID NO: 244740 - DNA, 19 bp, Homo sapiens
  siRNA target sequence for GRID2 (NM_001510.1,2073-2091).
ccgcatgaaaggactgaat

SEQ ID NO: 244741 - DNA, 19 bp, Homo sapiens
  siRNA target sequence for GRID2 (NM_001510.1,2083-2101).
ggactgaatccttttgaga

SEQ ID NO: 244742 - DNA, 19 bp, Homo sapiens
  siRNA target sequence for GRID2 (NM_001510.1,2119-2137).
caaatgtggcggatgatca

SEQ ID NO: 244743 - DNA, 19 bp, Homo sapiens
  siRNA target sequence for GRID2 (NM_001510.1,2130-2148).
gatgatcaaccgaagcaat

SEQ ID NO: 244744 - DNA, 19 bp, Homo sapiens
  siRNA target sequence for GRID2 (NM_001510.1,2150-2168).
gatcggagaacaatgttct

SEQ ID NO: 244745 - DNA, 19 bp, Homo sapiens
  siRNA target sequence for GRID2 (NM_001510.1,2174-2192).
cccaggcaggcattcaaaa

SEQ ID NO: 244746 - DNA, 19 bp, Homo sapiens
  siRNA target sequence for GRID2 (NM_001510.1,2179-2197).
gcaggcattcaaaaggtaa

SEQ ID NO: 244747 - DNA, 19 bp, Homo sapiens
  siRNA target sequence for GRID2 (NM_001510.1,2223-2241).
ggatgcagctgtattggaa

SEQ ID NO: 244748 - DNA, 19 bp, Homo sapiens
  siRNA target sequence for GRID2 (NM_001510.1,2224-2242).
gatgcagctgtattggaat

SEQ ID NO: 244749 - DNA, 19 bp, Homo sapiens
  siRNA target sequence for GRID2 (NM_001510.1,2228-2246).
cagctgtattggaatatgt

SEQ ID NO: 244750 - DNA, 19 bp, Homo sapiens
  siRNA target sequence for GRID2 (NM_001510.1,2257-2275).
gacccagattgttcctttt

SEQ ID NO: 244751 - DNA, 19 bp, Homo sapiens
  siRNA target sequence for GRID2 (NM_001510.1,2296-2314).
gctgatcggggatatggaa

SEQ ID NO: 244752 - DNA, 19 bp, Homo sapiens
  siRNA target sequence for GRID2 (NM_001510.1,2331-2349).
cagtccttaccgagatgtt

SEQ ID NO: 244753 - DNA, 19 bp, Homo sapiens
  siRNA target sequence for GRID2 (NM_001510.1,2333-2351).
gtccttaccgagatgtttt

SEQ ID NO: 244754 - DNA, 19 bp, Homo sapiens
  siRNA target sequence for GRID2 (NM_001510.1,2406-2424).
caaatggtggcctaagaat

SEQ ID NO: 244755 - DNA, 19 bp, Homo sapiens
  siRNA target sequence for GRID2 (NM_001510.1,2490-2508).
ctttgcaggggtcttttgt

SEQ ID NO: 244756 - DNA, 19 bp, Homo sapiens
  siRNA target sequence for GRID2 (NM_001510.1,2554-2572).
gagacgtggtggaacaaga

SEQ ID NO: 244757 - DNA, 19 bp, Homo sapiens
  siRNA target sequence for GRID2 (NM_001510.1,2582-2600).
cccgggttccatcaaaaga

SEQ ID NO: 244758 - DNA, 19 bp, Homo sapiens
  siRNA target sequence for GRID2 (NM_001510.1,2628-2646).
cctccatagacgtgtaaat

SEQ ID NO: 244759 - DNA, 19 bp, Homo sapiens
  siRNA target sequence for GRID2 (NM_001510.1,2629-2647).
ctccatagacgtgtaaata

SEQ ID NO: 244760 - DNA, 19 bp, Homo sapiens
  siRNA target sequence for GRID2 (NM_001510.1,2632-2650).
catagacgtgtaaatagct

SEQ ID NO: 244761 - DNA, 19 bp, Homo sapiens
  siRNA target sequence for GRID2 (NM_001510.1,2665-2683).
gacagcccccataaacagt

SEQ ID NO: 244762 - DNA, 19 bp, Homo sapiens
  siRNA target sequence for GRID2 (NM_001510.1,2671-2689).
ccccataaacagttttcca

SEQ ID NO: 244763 - DNA, 19 bp, Homo sapiens
  siRNA target sequence for GRID2 (NM_001510.1,2687-2705).
ccacctcgtcaattgattt

SEQ ID NO: 244764 - DNA, 19 bp, Homo sapiens
  siRNA target sequence for GRID2 (NM_001510.1,2711-2729).
ctctggacattgacacttt

SEQ ID NO: 244765 - DNA, 19 bp, Homo sapiens
  siRNA target sequence for GRID2 (NM_001510.1,2761-2779).
gatttcaggaacactcata

SEQ ID NO: 244766 - DNA, 19 bp, Homo sapiens
  siRNA target sequence for GRID2 (NM_001510.1,2878-2896).
caccgaactggccctttta

SEQ ID NO: 244767 - DNA, 19 bp, Homo sapiens
  siRNA target sequence for GRID2 (NM_001510.1,2946-2964).
gtcatctattccttatcaa

SEQ ID NO: 244768 - DNA, 19 bp, Homo sapiens
  siRNA target sequence for GRID2 (NM_001510.1,2981-2999).
ggctcaatctgggtaatga

SEQ ID NO: 244769 - DNA, 19 bp, Homo sapiens
  siRNA target sequence for GRID2 (NM_001510.1,2982-3000).
gctcaatctgggtaatgat

SEQ ID NO: 244770 - DNA, 19 bp, Homo sapiens
  siRNA target sequence for GRIN3A (NM_133445.1,1030-1048).
ctacaacctgtctttggaa

SEQ ID NO: 244771 - DNA, 19 bp, Homo sapiens
  siRNA target sequence for GRIN3A (NM_133445.1,1541-1559).
cagcttgagagtattaaga

SEQ ID NO: 244772 - DNA, 19 bp, Homo sapiens
  siRNA target sequence for GRIN3A (NM_133445.1,1544-1562).
cttgagagtattaagaaca

SEQ ID NO: 244773 - DNA, 19 bp, Homo sapiens
  siRNA target sequence for GRIN3A (NM_133445.1,1586-1604).
ggctgcgacatggaaagta

SEQ ID NO: 244774 - DNA, 19 bp, Homo sapiens
  siRNA target sequence for GRIN3A (NM_133445.1,1587-1605).
gctgcgacatggaaagtat

SEQ ID NO: 244775 - DNA, 19 bp, Homo sapiens
  siRNA target sequence for GRIN3A (NM_133445.1,1609-1627).
gcggattttcgaaattaca

SEQ ID NO: 244776 - DNA, 19 bp, Homo sapiens
  siRNA target sequence for GRIN3A (NM_133445.1,1610-1628).
cggattttcgaaattacaa

SEQ ID NO: 244777 - DNA, 19 bp, Homo sapiens
  siRNA target sequence for GRIN3A (NM_133445.1,1639-1657).
ggtcatgccccctgaactt

SEQ ID NO: 244778 - DNA, 19 bp, Homo sapiens
  siRNA target sequence for GRIN3A (NM_133445.1,1882-1900).
cacttcaggacaatattta

SEQ ID NO: 244779 - DNA, 19 bp, Homo sapiens
  siRNA target sequence for GRIN3A (NM_133445.1,1910-1928).
ctagccaataccactttca

SEQ ID NO: 244780 - DNA, 19 bp, Homo sapiens
  siRNA target sequence for GRIN3A (NM_133445.1,2049-2067).
gctggcaggggggaaagat

SEQ ID NO: 244781 - DNA, 19 bp, Homo sapiens
  siRNA target sequence for GRIN3A (NM_133445.1,2050-2068).
ctggcaggggggaaagatt

SEQ ID NO: 244782 - DNA, 19 bp, Homo sapiens
  siRNA target sequence for GRIN3A (NM_133445.1,2054-2072).
caggggggaaagattgtca

SEQ ID NO: 244783 - DNA, 19 bp, Homo sapiens
  siRNA target sequence for GRIN3A (NM_133445.1,2095-2113).
gcaggcccagagacacaaa

SEQ ID NO: 244784 - DNA, 19 bp, Homo sapiens
  siRNA target sequence for GRIN3A (NM_133445.1,2148-2166).
gagtggttaccctgattga

SEQ ID NO: 244785 - DNA, 19 bp, Homo sapiens
  siRNA target sequence for GRIN3A (NM_133445.1,2157-2175).
ccctgattgagcatccttt

SEQ ID NO: 244786 - DNA, 19 bp, Homo sapiens
  siRNA target sequence for GRIN3A (NM_133445.1,2158-2176).
cctgattgagcatcctttt

SEQ ID NO: 244787 - DNA, 19 bp, Homo sapiens
  siRNA target sequence for GRIN3A (NM_133445.1,2182-2200).
cacaagggaggtagatgat

SEQ ID NO: 244788 - DNA, 19 bp, Homo sapiens
  siRNA target sequence for GRIN3A (NM_133445.1,2229-2247).
gtctagaccccatgactaa

SEQ ID NO: 244789 - DNA, 19 bp, Homo sapiens
  siRNA target sequence for GRIN3A (NM_133445.1,2278-2296).
cagcctccatagcagtaat

SEQ ID NO: 244790 - DNA, 19 bp, Homo sapiens
  siRNA target sequence for GRIN3A (NM_133445.1,2281-2299).
cctccatagcagtaatgat

SEQ ID NO: 244791 - DNA, 19 bp, Homo sapiens
  siRNA target sequence for GRIN3A (NM_133445.1,2282-2300).
ctccatagcagtaatgata

SEQ ID NO: 244792 - DNA, 19 bp, Homo sapiens
  siRNA target sequence for GRIN3A (NM_133445.1,2284-2302).
ccatagcagtaatgataca

SEQ ID NO: 244793 - DNA, 19 bp, Homo sapiens
  siRNA target sequence for GRIN3A (NM_133445.1,2297-2315).
gatacagtgcccattaaat

SEQ ID NO: 244794 - DNA, 19 bp, Homo sapiens
  siRNA target sequence for GRIN3A (NM_133445.1,2301-2319).
cagtgcccattaaattcaa

SEQ ID NO: 244795 - DNA, 19 bp, Homo sapiens
  siRNA target sequence for GRIN3A (NM_133445.1,2303-2321).
gtgcccattaaattcaaga

SEQ ID NO: 244796 - DNA, 19 bp, Homo sapiens
  siRNA target sequence for GRIN3A (NM_133445.1,2306-2324).
cccattaaattcaagaagt

SEQ ID NO: 244797 - DNA, 19 bp, Homo sapiens
  siRNA target sequence for GRIN3A (NM_133445.1,2325-2343).
gctgctatggatattgcat

SEQ ID NO: 244798 - DNA, 19 bp, Homo sapiens
  siRNA target sequence for GRIN3A (NM_133445.1,2383-2401).
cttcgacctctatattgta

SEQ ID NO: 244799 - DNA, 19 bp, Homo sapiens
  siRNA target sequence for GRIN3A (NM_133445.1,2513-2531).
cggagccaggtgatagatt

SEQ ID NO: 244800 - DNA, 19 bp, Homo sapiens
  siRNA target sequence for GRIN3A (NM_133445.1,2615-2633).
ccactccactggacaatgt

SEQ ID NO: 244801 - DNA, 19 bp, Homo sapiens
  siRNA target sequence for GRIN3A (NM_133445.1,2691-2709).
ggaagagtccatttggttt

SEQ ID NO: 244802 - DNA, 19 bp, Homo sapiens
  siRNA target sequence for GRIN3A (NM_133445.1,2716-2734).
caaggggcgaaatagaagt

SEQ ID NO: 244803 - DNA, 19 bp, Homo sapiens
  siRNA target sequence for GRIN3A (NM_133445.1,2721-2739).
ggcgaaatagaagtaaagt

SEQ ID NO: 244804 - DNA, 19 bp, Homo sapiens
  siRNA target sequence for GRIN3A (NM_133445.1,2798-2816).
gccatcaaacctccaaaat

SEQ ID NO: 244805 - DNA, 19 bp, Homo sapiens
  siRNA target sequence for GRIN3A (NM_133445.1,2843-2861).
ctttgggccattttctgta

SEQ ID NO: 244806 - DNA, 19 bp, Homo sapiens
  siRNA target sequence for GRIN3A (NM_133445.1,2874-2892).
ccacatacacggcaaactt

SEQ ID NO: 244807 - DNA, 19 bp, Homo sapiens
  siRNA target sequence for GRIN3A (NM_133445.1,2905-2923).
ggtaggtgagaagatctat

SEQ ID NO: 244808 - DNA, 19 bp, Homo sapiens
  siRNA target sequence for GRIN3A (NM_133445.1,3031-3049).
cccagagatgcatgaatat

SEQ ID NO: 244809 - DNA, 19 bp, Homo sapiens
  siRNA target sequence for GRIN3A (NM_133445.1,3032-3050).
ccagagatgcatgaatata

SEQ ID NO: 244810 - DNA, 19 bp, Homo sapiens
  siRNA target sequence for GRIN3A (NM_133445.1,3080-3098).
gatggagtggagtatctga

SEQ ID NO: 244811 - DNA, 19 bp, Homo sapiens
  siRNA target sequence for GRIN3A (NM_133445.1,3136-3154).
caaagcccttctggattat

SEQ ID NO: 244812 - DNA, 19 bp, Homo sapiens
  siRNA target sequence for GRIN3A (NM_133445.1,3148-3166).
ggattatgaagtgtcaata

SEQ ID NO: 244813 - DNA, 19 bp, Homo sapiens
  siRNA target sequence for GRIN3A (NM_133445.1,3201-3219).
catttgccatagaaggata

SEQ ID NO: 244814 - DNA, 19 bp, Homo sapiens
  siRNA target sequence for GRIN3A (NM_133445.1,3245-3263).
ccattgaccgccaacatat

SEQ ID NO: 244815 - DNA, 19 bp, Homo sapiens
  siRNA target sequence for GRIN3A (NM_133445.1,3255-3273).
ccaacatatccgagctaat

SEQ ID NO: 244816 - DNA, 19 bp, Homo sapiens
  siRNA target sequence for GRIN3A (NM_133445.1,3264-3282).
ccgagctaatcagtcaata

SEQ ID NO: 244817 - DNA, 19 bp, Homo sapiens
  siRNA target sequence for GRIN3A (NM_133445.1,3269-3287).
ctaatcagtcaatacaagt

SEQ ID NO: 244818 - DNA, 19 bp, Homo sapiens
  siRNA target sequence for GRIN3A (NM_133445.1,3288-3306).
cacatgggtttatggatat

SEQ ID NO: 244819 - DNA, 19 bp, Homo sapiens
  siRNA target sequence for GRIN3A (NM_133445.1,3335-3353).
ccctgtggcaagagaagtt

SEQ ID NO: 244820 - DNA, 19 bp, Homo sapiens
  siRNA target sequence for GRIN3A (NM_133445.1,3359-3377).
gtcacggagactttgcaaa

SEQ ID NO: 244821 - DNA, 19 bp, Homo sapiens
  siRNA target sequence for GRIN3A (NM_133445.1,3374-3392).
caaatgggcatcaaacact

SEQ ID NO: 244822 - DNA, 19 bp, Homo sapiens
  siRNA target sequence for GRIN3A (NM_133445.1,3407-3425).
gtgctgctgtgcattggat

SEQ ID NO: 244823 - DNA, 19 bp, Homo sapiens
  siRNA target sequence for GRIN3A (NM_133445.1,3423-3441).
gatttggtctgtccatttt

SEQ ID NO: 244824 - DNA, 19 bp, Homo sapiens
  siRNA target sequence for GRIN3A (NM_133445.1,3447-3465).
ccattggtgagcacatagt

SEQ ID NO: 244825 - DNA, 19 bp, Homo sapiens
  siRNA target sequence for GRIN3A (NM_133445.1,3452-3470).
ggtgagcacatagtataca

SEQ ID NO: 244826 - DNA, 19 bp, Homo sapiens
  siRNA target sequence for GRIN3A (NM_133445.1,3475-3493).
gctgctaccacgaatcaaa

SEQ ID NO: 244827 - DNA, 19 bp, Homo sapiens
  siRNA target sequence for GRIN3A (NM_133445.1,3476-3494).
ctgctaccacgaatcaaaa

SEQ ID NO: 244828 - DNA, 19 bp, Homo sapiens
  siRNA target sequence for GRIN3A (NM_133445.1,3479-3497).
ctaccacgaatcaaaaaca

SEQ ID NO: 244829 - DNA, 19 bp, Homo sapiens
  siRNA target sequence for GRIN3A (NM_133445.1,3482-3500).
ccacgaatcaaaaacaaat

SEQ ID NO: 244830 - DNA, 19 bp, Homo sapiens
  siRNA target sequence for GRIN3A (NM_133445.1,3485-3503).
cgaatcaaaaacaaatcca

SEQ ID NO: 244831 - DNA, 19 bp, Homo sapiens
  siRNA target sequence for GRIN3A (NM_133445.1,3627-3645).
gtcagcttaccgtatggaa

SEQ ID NO: 244832 - DNA, 19 bp, Homo sapiens
  siRNA target sequence for GRIN3A (NM_133445.1,3629-3647).
cagcttaccgtatggaata

SEQ ID NO: 244833 - DNA, 19 bp, Homo sapiens
  siRNA target sequence for GRIN3A (NM_133445.1,3631-3649).
gcttaccgtatggaatact

SEQ ID NO: 244834 - DNA, 19 bp, Homo sapiens
  siRNA target sequence for GRIN3A (NM_133445.1,3632-3650).
cttaccgtatggaatactt

SEQ ID NO: 244835 - DNA, 19 bp, Homo sapiens
  siRNA target sequence for GRIN3A (NM_133445.1,3637-3655).
cgtatggaatacttccaat

SEQ ID NO: 244836 - DNA, 19 bp, Homo sapiens
  siRNA target sequence for GRIN3A (NM_133445.1,3665-3683).
gacaaccgacggaaataca

SEQ ID NO: 244837 - DNA, 19 bp, Homo sapiens
  siRNA target sequence for GRIN3A (NM_133445.1,3670-3688).
ccgacggaaatacatcttt

SEQ ID NO: 244838 - DNA, 19 bp, Homo sapiens
  siRNA target sequence for GRIN3A (NM_133445.1,3671-3689).
cgacggaaatacatcttta

SEQ ID NO: 244839 - DNA, 19 bp, Homo sapiens
  siRNA target sequence for CD163 (NM_004244.2,158-176).
gagtcccttcaccattact

SEQ ID NO: 244840 - DNA, 19 bp, Homo sapiens
  siRNA target sequence for CD163 (NM_004244.2,333-351).
gaagcggtctctgtgattt

SEQ ID NO: 244841 - DNA, 19 bp, Homo sapiens
  siRNA target sequence for CD163 (NM_004244.2,336-354).
gcggtctctgtgatttgta

SEQ ID NO: 244842 - DNA, 19 bp, Homo sapiens
  siRNA target sequence for CD163 (NM_004244.2,337-355).
cggtctctgtgatttgtaa

SEQ ID NO: 244843 - DNA, 19 bp, Homo sapiens
  siRNA target sequence for CD163 (NM_004244.2,364-382).
gatgtccaactgctatcaa

SEQ ID NO: 244844 - DNA, 19 bp, Homo sapiens
  siRNA target sequence for CD163 (NM_004244.2,492-510).
ggaaagcatagtaactgta

SEQ ID NO: 244845 - DNA, 19 bp, Homo sapiens
  siRNA target sequence for CD163 (NM_004244.2,573-591).
cgtggagggaatatgtgtt

SEQ ID NO: 244846 - DNA, 19 bp, Homo sapiens
  siRNA target sequence for CD163 (NM_004244.2,637-655).
gtgatgataacttcaacat

SEQ ID NO: 244847 - DNA, 19 bp, Homo sapiens
  siRNA target sequence for CD163 (NM_004244.2,660-678).
catgcatctgtcatttgta

SEQ ID NO: 244848 - DNA, 19 bp, Homo sapiens
  siRNA target sequence for CD163 (NM_004244.2,691-709).
gtggaagtgctgtcagttt

SEQ ID NO: 244849 - DNA, 19 bp, Homo sapiens
  siRNA target sequence for CD163 (NM_004244.2,939-957).
ggagaatgggggacaatat

SEQ ID NO: 244850 - DNA, 19 bp, Homo sapiens
  siRNA target sequence for CD163 (NM_004244.2,965-983).
cggctgggacagttacgat

SEQ ID NO: 244851 - DNA, 19 bp, Homo sapiens
  siRNA target sequence for CD163 (NM_004244.2,1027-1045).
cagccattggtcgagttaa

SEQ ID NO: 244852 - DNA, 19 bp, Homo sapiens
  siRNA target sequence for CD163 (NM_004244.2,1046-1064).
cgccagtaagggatttgga

SEQ ID NO: 244853 - DNA, 19 bp, Homo sapiens
  siRNA target sequence for CD163 (NM_004244.2,1164-1182).
gatgctggcgtgacatgtt

SEQ ID NO: 244854 - DNA, 19 bp, Homo sapiens
  siRNA target sequence for CD163 (NM_004244.2,1335-1353).
ggatctgcactcaaaacat

SEQ ID NO: 244855 - DNA, 19 bp, Homo sapiens
  siRNA target sequence for CD163 (NM_004244.2,1369-1387).
ccaaaatccaggcaacaaa

SEQ ID NO: 244856 - DNA, 19 bp, Homo sapiens
  siRNA target sequence for CD163 (NM_004244.2,1405-1423).
gtagctgtaacggaaatga

SEQ ID NO: 244857 - DNA, 19 bp, Homo sapiens
  siRNA target sequence for CD163 (NM_004244.2,1431-1449).
ctttgggactgcaagaact

SEQ ID NO: 244858 - DNA, 19 bp, Homo sapiens
  siRNA target sequence for CD163 (NM_004244.2,1462-1480).
gacttacctgtgatcacta

SEQ ID NO: 244859 - DNA, 19 bp, Homo sapiens
  siRNA target sequence for CD163 (NM_004244.2,1625-1643).
cgttctatgcagggaatta

SEQ ID NO: 244860 - DNA, 19 bp, Homo sapiens
  siRNA target sequence for CD163 (NM_004244.2,1629-1647).
ctatgcagggaattacagt

SEQ ID NO: 244861 - DNA, 19 bp, Homo sapiens
  siRNA target sequence for CD163 (NM_004244.2,1648-1666).
gtggcacagttgtctctat

SEQ ID NO: 244862 - DNA, 19 bp, Homo sapiens
  siRNA target sequence for CD163 (NM_004244.2,1701-1719).
cagatctgggctgaagaat

SEQ ID NO: 244863 - DNA, 19 bp, Homo sapiens
  siRNA target sequence for CD163 (NM_004244.2,1806-1824).
ggagtagtctgctcaagat

SEQ ID NO: 244864 - DNA, 19 bp, Homo sapiens
  siRNA target sequence for CD163 (NM_004244.2,1807-1825).
gagtagtctgctcaagata

SEQ ID NO: 244865 - DNA, 19 bp, Homo sapiens
  siRNA target sequence for CD163 (NM_004244.2,1817-1835).
ctcaagatacacagaaatt

SEQ ID NO: 244866 - DNA, 19 bp, Homo sapiens
  siRNA target sequence for CD163 (NM_004244.2,1894-1912).
cctggggatccctctgtaa

SEQ ID NO: 244867 - DNA, 19 bp, Homo sapiens
  siRNA target sequence for CD163 (NM_004244.2,1992-2010).
gcacgttttggaaaaggaa

SEQ ID NO: 244868 - DNA, 19 bp, Homo sapiens
  siRNA target sequence for CD163 (NM_004244.2,2063-2081).
gggagattgtcctgtaact

SEQ ID NO: 244869 - DNA, 19 bp, Homo sapiens
  siRNA target sequence for CD163 (NM_004244.2,2109-2127).
gagcaagtggcctctgtaa

SEQ ID NO: 244870 - DNA, 19 bp, Homo sapiens
  siRNA target sequence for CD163 (NM_004244.2,2154-2172).
ctgtcctcgtgcaattcat

SEQ ID NO: 244871 - DNA, 19 bp, Homo sapiens
  siRNA target sequence for CD163 (NM_004244.2,2225-2243).
catagagagtggtcaactt

SEQ ID NO: 244872 - DNA, 19 bp, Homo sapiens
  siRNA target sequence for CD163 (NM_004244.2,2236-2254).
gtcaacttcgcctggtaaa

SEQ ID NO: 244873 - DNA, 19 bp, Homo sapiens
  siRNA target sequence for CD163 (NM_004244.2,2368-2386).
gctgtggagaggccattaa

SEQ ID NO: 244874 - DNA, 19 bp, Homo sapiens
  siRNA target sequence for CD163 (NM_004244.2,2369-2387).
ctgtggagaggccattaat

SEQ ID NO: 244875 - DNA, 19 bp, Homo sapiens
  siRNA target sequence for CD163 (NM_004244.2,2490-2508).
ggctgggggcagcaaaatt

SEQ ID NO: 244876 - DNA, 19 bp, Homo sapiens
  siRNA target sequence for CD163 (NM_004244.2,2595-2613).
gggcgtctggaagtttttt

SEQ ID NO: 244877 - DNA, 19 bp, Homo sapiens
  siRNA target sequence for CD163 (NM_004244.2,2596-2614).
ggcgtctggaagtttttta

SEQ ID NO: 244878 - DNA, 19 bp, Homo sapiens
  siRNA target sequence for CD163 (NM_004244.2,2860-2878).
gtgacaacaagataagact

SEQ ID NO: 244879 - DNA, 19 bp, Homo sapiens
  siRNA target sequence for CD163 (NM_004244.2,3004-3022).
gtccagctttgaaagcatt

SEQ ID NO: 244880 - DNA, 19 bp, Homo sapiens
  siRNA target sequence for CD163 (NM_004244.2,3052-3070).
gaccgatatggctcaatga

SEQ ID NO: 244881 - DNA, 19 bp, Homo sapiens
  siRNA target sequence for CD163 (NM_004244.2,3150-3168).
gaagacgctgcagtgaatt

SEQ ID NO: 244882 - DNA, 19 bp, Homo sapiens
  siRNA target sequence for CD163 (NM_004244.2,3153-3171).
gacgctgcagtgaattgca

SEQ ID NO: 244883 - DNA, 19 bp, Homo sapiens
  siRNA target sequence for CD163 (NM_004244.2,3174-3192).
gatatttcagtgcagaaaa

SEQ ID NO: 244884 - DNA, 19 bp, Homo sapiens
  siRNA target sequence for CD163 (NM_004244.2,3223-3241).
cccgtcagtcatcctttat

SEQ ID NO: 244885 - DNA, 19 bp, Homo sapiens
  siRNA target sequence for CD163 (NM_004244.2,3250-3268).
ggatccttggggttgttct

SEQ ID NO: 244886 - DNA, 19 bp, Homo sapiens
  siRNA target sequence for CD163 (NM_004244.2,3273-3291).
gccattttcgtcgcattat

SEQ ID NO: 244887 - DNA, 19 bp, Homo sapiens
  siRNA target sequence for CD163 (NM_004244.2,3285-3303).
gcattattcttcttgacta

SEQ ID NO: 244888 - DNA, 19 bp, Homo sapiens
  siRNA target sequence for CD163 (NM_004244.2,3286-3304).
cattattcttcttgactaa

SEQ ID NO: 244889 - DNA, 19 bp, Homo sapiens
  siRNA target sequence for CD163 (NM_004244.2,3350-3368).
gaacttagtccaccaaatt

SEQ ID NO: 244890 - DNA, 19 bp, Homo sapiens
  siRNA target sequence for CD163 (NM_004244.2,3369-3387).
caataccgggagatgaatt

SEQ ID NO: 244891 - DNA, 19 bp, Homo sapiens
  siRNA target sequence for CD163 (NM_004244.2,3391-3409).
gcctgaatgcagatgatct

SEQ ID NO: 244892 - DNA, 19 bp, Homo sapiens
  siRNA target sequence for CD163 (NM_004244.2,3400-3418).
cagatgatctggacctaat

SEQ ID NO: 244893 - DNA, 19 bp, Homo sapiens
  siRNA target sequence for CD163 (NM_004244.2,3405-3423).
gatctggacctaatgaatt

SEQ ID NO: 244894 - DNA, 19 bp, Homo sapiens
  siRNA target sequence for CD163 (NM_004244.2,3408-3426).
ctggacctaatgaattcct

SEQ ID NO: 244895 - DNA, 19 bp, Homo sapiens
  siRNA target sequence for CD5 (NM_014207.2,149-167).
ggtatgacccagatttcca

SEQ ID NO: 244896 - DNA, 19 bp, Homo sapiens
  siRNA target sequence for CD5 (NM_014207.2,226-244).
gacggatggcacatggttt

SEQ ID NO: 244897 - DNA, 19 bp, Homo sapiens
  siRNA target sequence for CD5 (NM_014207.2,285-303).
ccccagtcaagcgtcaaaa

SEQ ID NO: 244898 - DNA, 19 bp, Homo sapiens
  siRNA target sequence for CD5 (NM_014207.2,287-305).
ccagtcaagcgtcaaaagt

SEQ ID NO: 244899 - DNA, 19 bp, Homo sapiens
  siRNA target sequence for CD5 (NM_014207.2,365-383).
cacctcagagctcaatcat

SEQ ID NO: 244900 - DNA, 19 bp, Homo sapiens
  siRNA target sequence for CD5 (NM_014207.2,761-779).
ccttgccaatccaatggaa

SEQ ID NO: 244901 - DNA, 19 bp, Homo sapiens
  siRNA target sequence for CD5 (NM_014207.2,1119-1137).
cgaactttgggagagaaat

SEQ ID NO: 244902 - DNA, 19 bp, Homo sapiens
  siRNA target sequence for CD5 (NM_014207.2,1120-1138).
gaactttgggagagaaatt

SEQ ID NO: 244903 - DNA, 19 bp, Homo sapiens
  siRNA target sequence for CD5 (NM_014207.2,1325-1343).
caacgggaatgaaccaaaa

SEQ ID NO: 244904 - DNA, 19 bp, Homo sapiens
  siRNA target sequence for CD5 (NM_014207.2,1328-1346).
cgggaatgaaccaaaacat

SEQ ID NO: 244905 - DNA, 19 bp, Homo sapiens
  siRNA target sequence for CD5 (NM_014207.2,1400-1418).
cagcctcccacgtggataa

SEQ ID NO: 244906 - DNA, 19 bp, Homo sapiens
  siRNA target sequence for CD5 (NM_014207.2,1403-1421).
cctcccacgtggataacga

SEQ ID NO: 244907 - DNA, 19 bp, Homo sapiens
  siRNA target sequence for CD5 (NM_014207.2,1404-1422).
ctcccacgtggataacgaa

SEQ ID NO: 244908 - DNA, 19 bp, Homo sapiens
  siRNA target sequence for CD5 (NM_014207.2,1406-1424).
cccacgtggataacgaata

SEQ ID NO: 244909 - DNA, 19 bp, Homo sapiens
  siRNA target sequence for CD5 (NM_014207.2,1408-1426).
cacgtggataacgaataca

SEQ ID NO: 244910 - DNA, 19 bp, Homo sapiens
  siRNA target sequence for CD5 (NM_014207.2,1509-1527).
ctcctccgacagtgactat

SEQ ID NO: 244911 - DNA, 19 bp, Homo sapiens
  siRNA target sequence for CD5L (NM_005894.1,96-114).
caccagacctggattccta

SEQ ID NO: 244912 - DNA, 19 bp, Homo sapiens
  siRNA target sequence for CD5L (NM_005894.1,273-291).
cggaacccctagtggtatt

SEQ ID NO: 244913 - DNA, 19 bp, Homo sapiens
  siRNA target sequence for CD5L (NM_005894.1,274-292).
ggaacccctagtggtattt

SEQ ID NO: 244914 - DNA, 19 bp, Homo sapiens
  siRNA target sequence for CD5L (NM_005894.1,281-299).
ctagtggtattttgtatga

SEQ ID NO: 244915 - DNA, 19 bp, Homo sapiens
  siRNA target sequence for CD5L (NM_005894.1,319-337).
caaaaggtcctcatccaat

SEQ ID NO: 244916 - DNA, 19 bp, Homo sapiens
  siRNA target sequence for CD5L (NM_005894.1,350-368).
caggaacagaagatacatt

SEQ ID NO: 244917 - DNA, 19 bp, Homo sapiens
  siRNA target sequence for CD5L (NM_005894.1,608-626).
gggctgtactgactcaaaa

SEQ ID NO: 244918 - DNA, 19 bp, Homo sapiens
  siRNA target sequence for CD5L (NM_005894.1,609-627).
ggctgtactgactcaaaaa

SEQ ID NO: 244919 - DNA, 19 bp, Homo sapiens
  siRNA target sequence for CD5L (NM_005894.1,759-777).
cacgtgggtcgaatgtgaa

SEQ ID NO: 244920 - DNA, 19 bp, Homo sapiens
  siRNA target sequence for CD5L (NM_005894.1,762-780).
gtgggtcgaatgtgaagat

SEQ ID NO: 244921 - DNA, 19 bp, Homo sapiens
  siRNA target sequence for CD5L (NM_005894.1,945-963).
cagagaccggaaatgctat

SEQ ID NO: 244922 - DNA, 19 bp, Homo sapiens
  siRNA target sequence for CD5L (NM_005894.1,1029-1047).
gcagtgccagcacagattt

SEQ ID NO: 244923 - DNA, 19 bp, Homo sapiens
  siRNA target sequence for CD6 (NM_006725.1,827-845).
ggcaggtggaggtacactt

SEQ ID NO: 244924 - DNA, 19 bp, Homo sapiens
  siRNA target sequence for CD6 (NM_006725.1,970-988).
ggcaggatgtactactcat

SEQ ID NO: 244925 - DNA, 19 bp, Homo sapiens
  siRNA target sequence for CD6 (NM_006725.1,975-993).
gatgtactactcatgcaat

SEQ ID NO: 244926 - DNA, 19 bp, Homo sapiens
  siRNA target sequence for CD6 (NM_006725.1,1019-1037).
gctcctggcggttcaacaa

SEQ ID NO: 244927 - DNA, 19 bp, Homo sapiens
  siRNA target sequence for CD6 (NM_006725.1,1090-1108).
cggagtttgcacaatctgt

SEQ ID NO: 244928 - DNA, 19 bp, Homo sapiens
  siRNA target sequence for CD6 (NM_006725.1,1116-1134).
cgaagtccctgcaagtgtt

SEQ ID NO: 244929 - DNA, 19 bp, Homo sapiens
  siRNA target sequence for CD6 (NM_006725.1,1214-1232).
ccatcgttctgggaattct

SEQ ID NO: 244930 - DNA, 19 bp, Homo sapiens
  siRNA target sequence for CD6 (NM_006725.1,1266-1284).
cctcttgagaattaaagga

SEQ ID NO: 244931 - DNA, 19 bp, Homo sapiens
  siRNA target sequence for CD6 (NM_006725.1,1371-1389).
caccatccccaaagaagtt

SEQ ID NO: 244932 - DNA, 19 bp, Homo sapiens
  siRNA target sequence for CD6 (NM_006725.1,1373-1391).
ccatccccaaagaagtttt

SEQ ID NO: 244933 - DNA, 19 bp, Homo sapiens
  siRNA target sequence for CD6 (NM_006725.1,1494-1512).
cctgaccaccttctacaat

SEQ ID NO: 244934 - DNA, 19 bp, Homo sapiens
  siRNA target sequence for CD6 (NM_006725.1,1707-1725).
ggaggattactgcaatagt

SEQ ID NO: 244935 - DNA, 19 bp, Homo sapiens
  siRNA target sequence for DMBT1 (NM_004406.1,3097-3115).
caacttaccggcattgaca

SEQ ID NO: 244936 - DNA, 19 bp, Homo sapiens
  siRNA target sequence for DMBT1 (NM_004406.1,3438-3456).
gctcagccacccaaataaa

SEQ ID NO: 244937 - DNA, 19 bp, Homo sapiens
  siRNA target sequence for DMBT1 (NM_004406.1,3445-3463).
cacccaaataaattctact

SEQ ID NO: 244938 - DNA, 19 bp, Homo sapiens
  siRNA target sequence for DMBT1 (NM_004406.1,3475-3493).
gtggcatccaacaactaca

SEQ ID NO: 244939 - DNA, 19 bp, Homo sapiens
  siRNA target sequence for DMBT1 (NM_004406.1,3498-3516).
ctgcaagaccctcttcaaa

SEQ ID NO: 244940 - DNA, 19 bp, Homo sapiens
  siRNA target sequence for DMBT1 (NM_004406.1,3500-3518).
gcaagaccctcttcaaatt

SEQ ID NO: 244941 - DNA, 19 bp, Homo sapiens
  siRNA target sequence for DMBT1 (NM_004406.1,3580-3598).
ccccaacaatgctaagtgt

SEQ ID NO: 244942 - DNA, 19 bp, Homo sapiens
  siRNA target sequence for DMBT1 (NM_004406.1,3621-3639).
ctggttatcgcataaacct

SEQ ID NO: 244943 - DNA, 19 bp, Homo sapiens
  siRNA target sequence for DMBT1 (NM_004406.1,3638-3656).
ctgggcttcagtaatctga

SEQ ID NO: 244944 - DNA, 19 bp, Homo sapiens
  siRNA target sequence for DMBT1 (NM_004406.1,3641-3659).
ggcttcagtaatctgaaat

SEQ ID NO: 244945 - DNA, 19 bp, Homo sapiens
  siRNA target sequence for DMBT1 (NM_004406.1,3730-3748).
gctggggaaaatctgtaat

SEQ ID NO: 244946 - DNA, 19 bp, Homo sapiens
  siRNA target sequence for DMBT1 (NM_004406.1,3734-3752).
gggaaaatctgtaatgata

SEQ ID NO: 244947 - DNA, 19 bp, Homo sapiens
  siRNA target sequence for DMBT1 (NM_004406.1,3749-3767).
gataccaggcaaatattta

SEQ ID NO: 244948 - DNA, 19 bp, Homo sapiens
  siRNA target sequence for DMBT1 (NM_004406.1,3757-3775).
gcaaatatttacatcttct

SEQ ID NO: 244949 - DNA, 19 bp, Homo sapiens
  siRNA target sequence for DMBT1 (NM_004406.1,3808-3826).
catcagtttccaaaacact

SEQ ID NO: 244950 - DNA, 19 bp, Homo sapiens
  siRNA target sequence for DMBT1 (NM_004406.1,3827-3845).
ggctttttggcttggtata

SEQ ID NO: 244951 - DNA, 19 bp, Homo sapiens
  siRNA target sequence for DMBT1 (NM_004406.1,3828-3846).
gctttttggcttggtataa

SEQ ID NO: 244952 - DNA, 19 bp, Homo sapiens
  siRNA target sequence for DMBT1 (NM_004406.1,3867-3885).
ccttgaggttggtcaattt

SEQ ID NO: 244953 - DNA, 19 bp, Homo sapiens
  siRNA target sequence for DMBT1 (NM_004406.1,3868-3886).
cttgaggttggtcaattta

SEQ ID NO: 244954 - DNA, 19 bp, Homo sapiens
  siRNA target sequence for DMBT1 (NM_004406.1,3874-3892).
gttggtcaatttaaattca

SEQ ID NO: 244955 - DNA, 19 bp, Homo sapiens
  siRNA target sequence for DMBT1 (NM_004406.1,3912-3930).
ggcgtgtagaaatttacca

SEQ ID NO: 244956 - DNA, 19 bp, Homo sapiens
  siRNA target sequence for DMBT1 (NM_004406.1,3913-3931).
gcgtgtagaaatttaccat

SEQ ID NO: 244957 - DNA, 19 bp, Homo sapiens
  siRNA target sequence for DMBT1 (NM_004406.1,4025-4043).
gcccttggaaatgcatatt

SEQ ID NO: 244958 - DNA, 19 bp, Homo sapiens
  siRNA target sequence for DMBT1 (NM_004406.1,4131-4149).
ggttctcccacaactgtaa

SEQ ID NO: 244959 - DNA, 19 bp, Homo sapiens
  siRNA target sequence for DMBT1 (NM_004406.1,4135-4153).
ctcccacaactgtaatcat

SEQ ID NO: 244960 - DNA, 19 bp, Homo sapiens
  siRNA target sequence for DMBT1 (NM_004406.1,4200-4218).
ctgctccttttctcaacat

SEQ ID NO: 244961 - DNA, 19 bp, Homo sapiens
  siRNA target sequence for DMBT1 (NM_004406.1,4202-4220).
gctccttttctcaacatca

SEQ ID NO: 244962 - DNA, 19 bp, Homo sapiens
  siRNA target sequence for DMBT1 (NM_004406.1,4221-4239).
cccgtccaaacacagatta

SEQ ID NO: 244963 - DNA, 19 bp, Homo sapiens
  siRNA target sequence for DMBT1 (NM_004406.1,4222-4240).
ccgtccaaacacagattat

SEQ ID NO: 244964 - DNA, 19 bp, Homo sapiens
  siRNA target sequence for DMBT1 (NM_004406.1,4223-4241).
cgtccaaacacagattatt

SEQ ID NO: 244965 - DNA, 19 bp, Homo sapiens
  siRNA target sequence for DMBT1 (NM_004406.1,4276-4294).
cttttccagcccattctat

SEQ ID NO: 244966 - DNA, 19 bp, Homo sapiens
  siRNA target sequence for DMBT1 (NM_004406.1,4391-4409).
ggtggctgcaactatgatt

SEQ ID NO: 244967 - DNA, 19 bp, Homo sapiens
  siRNA target sequence for DMBT1 (NM_004406.1,4392-4410).
gtggctgcaactatgatta

SEQ ID NO: 244968 - DNA, 19 bp, Homo sapiens
  siRNA target sequence for DMBT1 (NM_004406.1,4394-4412).
ggctgcaactatgattata

SEQ ID NO: 244969 - DNA, 19 bp, Homo sapiens
  siRNA target sequence for DMBT1 (NM_004406.1,4398-4416).
gcaactatgattatattga

SEQ ID NO: 244970 - DNA, 19 bp, Homo sapiens
  siRNA target sequence for DMBT1 (NM_004406.1,4435-4453).
ccgcagttcccctctcatt

SEQ ID NO: 244971 - DNA, 19 bp, Homo sapiens
  siRNA target sequence for DMBT1 (NM_004406.1,4548-4566).
ggttccgggctgagtacta

SEQ ID NO: 244972 - DNA, 19 bp, Homo sapiens
  siRNA target sequence for DMBT1 (NM_004406.1,4635-4653).
ggagctatctccaatcctt

SEQ ID NO: 244973 - DNA, 19 bp, Homo sapiens
  siRNA target sequence for DMBT1 (NM_004406.1,4645-4663).
ccaatccttgggcttttct

SEQ ID NO: 244974 - DNA, 19 bp, Homo sapiens
  siRNA target sequence for DMBT1 (NM_004406.1,4664-4682).
gccagtgaccttgtcattt

SEQ ID NO: 244975 - DNA, 19 bp, Homo sapiens
  siRNA target sequence for DMBT1 (NM_004406.1,4683-4701).
ccacctggaatggatacta

SEQ ID NO: 244976 - DNA, 19 bp, Homo sapiens
  siRNA target sequence for DMBT1 (NM_004406.1,4722-4740).
cgccgaacctggtgatatt

SEQ ID NO: 244977 - DNA, 19 bp, Homo sapiens
  siRNA target sequence for DMBT1 (NM_004406.1,4724-4742).
ccgaacctggtgatattca

SEQ ID NO: 244978 - DNA, 19 bp, Homo sapiens
  siRNA target sequence for DMBT1 (NM_004406.1,4787-4805).
gacaccatcgactattcca

SEQ ID NO: 244979 - DNA, 19 bp, Homo sapiens
  siRNA target sequence for DMBT1 (NM_004406.1,4848-4866).
ggacagacctccgtattca

SEQ ID NO: 244980 - DNA, 19 bp, Homo sapiens
  siRNA target sequence for DMBT1 (NM_004406.1,4867-4885).
cgtcagctgcagaatgctt

SEQ ID NO: 244981 - DNA, 19 bp, Homo sapiens
  siRNA target sequence for DMBT1 (NM_004406.1,4926-4944).
ccatccacgttgctaataa

SEQ ID NO: 244982 - DNA, 19 bp, Homo sapiens
  siRNA target sequence for DMBT1 (NM_004406.1,4975-4993).
caattttgacgtgaacatt

SEQ ID NO: 244983 - DNA, 19 bp, Homo sapiens
  siRNA target sequence for DMBT1 (NM_004406.1,5100-5118).
ctgtactgaccttgtttgt

SEQ ID NO: 244984 - DNA, 19 bp, Homo sapiens
  siRNA target sequence for DMBT1 (NM_004406.1,5150-5168).
gacttcacgtctttgactt

SEQ ID NO: 244985 - DNA, 19 bp, Homo sapiens
  siRNA target sequence for DMBT1 (NM_004406.1,5155-5173).
cacgtctttgacttatgat

SEQ ID NO: 244986 - DNA, 19 bp, Homo sapiens
  siRNA target sequence for DMBT1 (NM_004406.1,5158-5176).
gtctttgacttatgatcta

SEQ ID NO: 244987 - DNA, 19 bp, Homo sapiens
  siRNA target sequence for DMBT1 (NM_004406.1,5160-5178).
ctttgacttatgatctaat

SEQ ID NO: 244988 - DNA, 19 bp, Homo sapiens
  siRNA target sequence for DMBT1 (NM_004406.1,5286-5304).
ccgtgtacctgcgttgtaa

SEQ ID NO: 244989 - DNA, 19 bp, Homo sapiens
  siRNA target sequence for M160 (NM_174941.2,46-64).
gtggcatattgattttgga

SEQ ID NO: 244990 - DNA, 19 bp, Homo sapiens
  siRNA target sequence for M160 (NM_174941.2,245-263).
gatgatgggtggaacacta

SEQ ID NO: 244991 - DNA, 19 bp, Homo sapiens
  siRNA target sequence for M160 (NM_174941.2,310-328).
cgccatgtttcgttttgga

SEQ ID NO: 244992 - DNA, 19 bp, Homo sapiens
  siRNA target sequence for M160 (NM_174941.2,333-351).
ccgtgactagacatggaaa

SEQ ID NO: 244993 - DNA, 19 bp, Homo sapiens
  siRNA target sequence for M160 (NM_174941.2,334-352).
cgtgactagacatggaaaa

SEQ ID NO: 244994 - DNA, 19 bp, Homo sapiens
  siRNA target sequence for M160 (NM_174941.2,335-353).
gtgactagacatggaaaaa

SEQ ID NO: 244995 - DNA, 19 bp, Homo sapiens
  siRNA target sequence for M160 (NM_174941.2,416-434).
gaatggggaagccataact

SEQ ID NO: 244996 - DNA, 19 bp, Homo sapiens
  siRNA target sequence for M160 (NM_174941.2,435-453).
gttatcatggagaagatgt

SEQ ID NO: 244997 - DNA, 19 bp, Homo sapiens
  siRNA target sequence for M160 (NM_174941.2,492-510).
ggctagtggatggaaacaa

SEQ ID NO: 244998 - DNA, 19 bp, Homo sapiens
  siRNA target sequence for M160 (NM_174941.2,494-512).
ctagtggatggaaacaact

SEQ ID NO: 244999 - DNA, 19 bp, Homo sapiens
  siRNA target sequence for M160 (NM_174941.2,549-567).
ggtggggaactatatgtga

SEQ ID NO: 245000 - DNA, 19 bp, Homo sapiens
  siRNA target sequence for M160 (NM_174941.2,566-584).
gatgatgggtggaacttga

SEQ ID NO: 245001 - DNA, 19 bp, Homo sapiens
  siRNA target sequence for M160 (NM_174941.2,569-587).
gatgggtggaacttgaata

SEQ ID NO: 245002 - DNA, 19 bp, Homo sapiens
  siRNA target sequence for M160 (NM_174941.2,846-864).
gagtagagctgaaaatcca

SEQ ID NO: 245003 - DNA, 19 bp, Homo sapiens
  siRNA target sequence for M160 (NM_174941.2,876-894).
ggaccgtatgccaccataa

SEQ ID NO: 245004 - DNA, 19 bp, Homo sapiens
  siRNA target sequence for M160 (NM_174941.2,886-904).
ccaccataagtggaacaat

SEQ ID NO: 245005 - DNA, 19 bp, Homo sapiens
  siRNA target sequence for M160 (NM_174941.2,939-957).
gtggaaccgcacttcactt

SEQ ID NO: 245006 - DNA, 19 bp, Homo sapiens
  siRNA target sequence for M160 (NM_174941.2,1012-1030).
ctcctgctccggtaatgaa

SEQ ID NO: 245007 - DNA, 19 bp, Homo sapiens
  siRNA target sequence for M160 (NM_174941.2,1015-1033).
ctgctccggtaatgaatct

SEQ ID NO: 245008 - DNA, 19 bp, Homo sapiens
  siRNA target sequence for M160 (NM_174941.2,1017-1035).
gctccggtaatgaatcttt

SEQ ID NO: 245009 - DNA, 19 bp, Homo sapiens
  siRNA target sequence for M160 (NM_174941.2,1018-1036).
ctccggtaatgaatctttt

SEQ ID NO: 245010 - DNA, 19 bp, Homo sapiens
  siRNA target sequence for M160 (NM_174941.2,1037-1055).
ctttgggactgcagacatt

SEQ ID NO: 245011 - DNA, 19 bp, Homo sapiens
  siRNA target sequence for M160 (NM_174941.2,1052-1070).
cattccggaaccgtcaatt

SEQ ID NO: 245012 - DNA, 19 bp, Homo sapiens
  siRNA target sequence for M160 (NM_174941.2,1075-1093).
ctgtcttcatcaaaacgat

SEQ ID NO: 245013 - DNA, 19 bp, Homo sapiens
  siRNA target sequence for M160 (NM_174941.2,1134-1152).
gactagcagatggaagtaa

SEQ ID NO: 245014 - DNA, 19 bp, Homo sapiens
  siRNA target sequence for M160 (NM_174941.2,1165-1183).
gagagtagaggtgagaatt

SEQ ID NO: 245015 - DNA, 19 bp, Homo sapiens
  siRNA target sequence for M160 (NM_174941.2,1229-1247).
caagcccttgtggtttgta

SEQ ID NO: 245016 - DNA, 19 bp, Homo sapiens
  siRNA target sequence for M160 (NM_174941.2,1279-1297).
cagtcgtcgtgctaaacct

SEQ ID NO: 245017 - DNA, 19 bp, Homo sapiens
  siRNA target sequence for M160 (NM_174941.2,1307-1325).
gctagagacatttggataa

SEQ ID NO: 245018 - DNA, 19 bp, Homo sapiens
  siRNA target sequence for M160 (NM_174941.2,1360-1378).
ctgggactgcacatatgat

SEQ ID NO: 245019 - DNA, 19 bp, Homo sapiens
  siRNA target sequence for M160 (NM_174941.2,1369-1387).
cacatatgatggaaaagca

SEQ ID NO: 245020 - DNA, 19 bp, Homo sapiens
  siRNA target sequence for M160 (NM_174941.2,1407-1425).
gatcagatgctggagtaat

SEQ ID NO: 245021 - DNA, 19 bp, Homo sapiens
  siRNA target sequence for M160 (NM_174941.2,1598-1616).
gtgtttggtatgacctatt

SEQ ID NO: 245022 - DNA, 19 bp, Homo sapiens
  siRNA target sequence for M160 (NM_174941.2,1600-1618).
gtttggtatgacctatttt

SEQ ID NO: 245023 - DNA, 19 bp, Homo sapiens
  siRNA target sequence for M160 (NM_174941.2,1645-1663).
ggatgacgtttcttgcatt

SEQ ID NO: 245024 - DNA, 19 bp, Homo sapiens
  siRNA target sequence for M160 (NM_174941.2,1649-1667).
gacgtttcttgcattggaa

SEQ ID NO: 245025 - DNA, 19 bp, Homo sapiens
  siRNA target sequence for M160 (NM_174941.2,1651-1669).
cgtttcttgcattggaaat

SEQ ID NO: 245026 - DNA, 19 bp, Homo sapiens
  siRNA target sequence for M160 (NM_174941.2,1659-1677).
gcattggaaatgagtcaaa

SEQ ID NO: 245027 - DNA, 19 bp, Homo sapiens
  siRNA target sequence for M160 (NM_174941.2,1855-1873).
cggctggaacagtaaagct

SEQ ID NO: 245028 - DNA, 19 bp, Homo sapiens
  siRNA target sequence for M160 (NM_174941.2,1898-1916).
gactgcccatcttctatca

SEQ ID NO: 245029 - DNA, 19 bp, Homo sapiens
  siRNA target sequence for M160 (NM_174941.2,2017-2035).
cagtgggtggggaaataat

SEQ ID NO: 245030 - DNA, 19 bp, Homo sapiens
  siRNA target sequence for M160 (NM_174941.2,2073-2091).
ctgatgcatcggatatgga

SEQ ID NO: 245031 - DNA, 19 bp, Homo sapiens
  siRNA target sequence for M160 (NM_174941.2,2127-2145).
gaaaagttgaggtgaatgt

SEQ ID NO: 245032 - DNA, 19 bp, Homo sapiens
  siRNA target sequence for M160 (NM_174941.2,2150-2168).
ggtgccgtgggaattctgt

SEQ ID NO: 245033 - DNA, 19 bp, Homo sapiens
  siRNA target sequence for M160 (NM_174941.2,2172-2190).
ctaatggctggggaatgaa

SEQ ID NO: 245034 - DNA, 19 bp, Homo sapiens
  siRNA target sequence for M160 (NM_174941.2,2278-2296).
catcttaatgtcgaattct

SEQ ID NO: 245035 - DNA, 19 bp, Homo sapiens
  siRNA target sequence for M160 (NM_174941.2,2321-2339).
ctctgggattgtatacgat

SEQ ID NO: 245036 - DNA, 19 bp, Homo sapiens
  siRNA target sequence for M160 (NM_174941.2,2353-2371).
gactgcgtgtcatttaaat

SEQ ID NO: 245037 - DNA, 19 bp, Homo sapiens
  siRNA target sequence for M160 (NM_174941.2,2355-2373).
ctgcgtgtcatttaaatat

SEQ ID NO: 245038 - DNA, 19 bp, Homo sapiens
  siRNA target sequence for M160 (NM_174941.2,2358-2376).
cgtgtcatttaaatatgga

SEQ ID NO: 245039 - DNA, 19 bp, Homo sapiens
  siRNA target sequence for M160 (NM_174941.2,2412-2430).
ggctggttggagctgatat

SEQ ID NO: 245040 - DNA, 19 bp, Homo sapiens
  siRNA target sequence for M160 (NM_174941.2,2473-2491).
gcgctctgtctgtgattct

SEQ ID NO: 245041 - DNA, 19 bp, Homo sapiens
  siRNA target sequence for M160 (NM_174941.2,2475-2493).
gctctgtctgtgattctga

SEQ ID NO: 245042 - DNA, 19 bp, Homo sapiens
  siRNA target sequence for M160 (NM_174941.2,2476-2494).
ctctgtctgtgattctgat

SEQ ID NO: 245043 - DNA, 19 bp, Homo sapiens
  siRNA target sequence for M160 (NM_174941.2,2591-2609).
ctaacttgggccgaaaagt

SEQ ID NO: 245044 - DNA, 19 bp, Homo sapiens
  siRNA target sequence for M160 (NM_174941.2,2627-2645).
gaaactcaccttgcattat

SEQ ID NO: 245045 - DNA, 19 bp, Homo sapiens
  siRNA target sequence for M160 (NM_174941.2,2640-2658).
cattatgccccattgttca

SEQ ID NO: 245046 - DNA, 19 bp, Homo sapiens
  siRNA target sequence for M160 (NM_174941.2,2660-2678).
catccggaagacacttgta

SEQ ID NO: 245047 - DNA, 19 bp, Homo sapiens
  siRNA target sequence for M160 (NM_174941.2,2699-2717).
gttgtctgttcccgatata

SEQ ID NO: 245048 - DNA, 19 bp, Homo sapiens
  siRNA target sequence for M160 (NM_174941.2,2704-2722).
ctgttcccgatatacagat

SEQ ID NO: 245049 - DNA, 19 bp, Homo sapiens
  siRNA target sequence for M160 (NM_174941.2,2927-2945).
cattgcttagggaatgagt

SEQ ID NO: 245050 - DNA, 19 bp, Homo sapiens
  siRNA target sequence for M160 (NM_174941.2,3050-3068).
ccatgcctcgcaaatgtat

SEQ ID NO: 245051 - DNA, 19 bp, Homo sapiens
  siRNA target sequence for M160 (NM_174941.2,3054-3072).
gcctcgcaaatgtatctga

SEQ ID NO: 245052 - DNA, 19 bp, Homo sapiens
  siRNA target sequence for M160 (NM_174941.2,3065-3083).
gtatctgacccatatttgt

SEQ ID NO: 245053 - DNA, 19 bp, Homo sapiens
  siRNA target sequence for M160 (NM_174941.2,3233-3251).
gcccacgtggtgtgtcaaa

SEQ ID NO: 245054 - DNA, 19 bp, Homo sapiens
  siRNA target sequence for M160 (NM_174941.2,3234-3252).
cccacgtggtgtgtcaaaa

SEQ ID NO: 245055 - DNA, 19 bp, Homo sapiens
  siRNA target sequence for M160 (NM_174941.2,3448-3466).
gaggctctacagtgaaact

SEQ ID NO: 245056 - DNA, 19 bp, Homo sapiens
  siRNA target sequence for M160 (NM_174941.2,3486-3504).
ggagattggaagtcttcta

SEQ ID NO: 245057 - DNA, 19 bp, Homo sapiens
  siRNA target sequence for M160 (NM_174941.2,3487-3505).
gagattggaagtcttctat

SEQ ID NO: 245058 - DNA, 19 bp, Homo sapiens
  siRNA target sequence for M160 (NM_174941.2,3489-3507).
gattggaagtcttctataa

SEQ ID NO: 245059 - DNA, 19 bp, Homo sapiens
  siRNA target sequence for M160 (NM_174941.2,3524-3542).
gtcggcaggaggaacatca

SEQ ID NO: 245060 - DNA, 19 bp, Homo sapiens
  siRNA target sequence for M160 (NM_174941.2,3599-3617).
gtcagcctcgcccctttat

SEQ ID NO: 245061 - DNA, 19 bp, Homo sapiens
  siRNA target sequence for M160 (NM_174941.2,3603-3621).
gcctcgcccctttatctaa

SEQ ID NO: 245062 - DNA, 19 bp, Homo sapiens
  siRNA target sequence for M160 (NM_174941.2,3605-3623).
ctcgcccctttatctaaga

SEQ ID NO: 245063 - DNA, 19 bp, Homo sapiens
  siRNA target sequence for M160 (NM_174941.2,3607-3625).
cgcccctttatctaagaca

SEQ ID NO: 245064 - DNA, 19 bp, Homo sapiens
  siRNA target sequence for M160 (NM_174941.2,3699-3717).
ccccatgggagcgaagaat

SEQ ID NO: 245065 - DNA, 19 bp, Homo sapiens
  siRNA target sequence for M160 (NM_174941.2,3701-3719).
ccatgggagcgaagaatct

SEQ ID NO: 245066 - DNA, 19 bp, Homo sapiens
  siRNA target sequence for M160 (NM_174941.2,3745-3763).
cacatgtgaagatagaata

SEQ ID NO: 245067 - DNA, 19 bp, Homo sapiens
  siRNA target sequence for M160 (NM_174941.2,3961-3979).
catgcggtgcaaaggaaat

SEQ ID NO: 245068 - DNA, 19 bp, Homo sapiens
  siRNA target sequence for M160 (NM_174941.2,3974-3992).
ggaaatgagtcatttctat

SEQ ID NO: 245069 - DNA, 19 bp, Homo sapiens
  siRNA target sequence for M160 (NM_174941.2,4065-4083).
gacagtcgctgaaatcact

SEQ ID NO: 245070 - DNA, 19 bp, Homo sapiens
  siRNA target sequence for M160 (NM_174941.2,4167-4185).
cgtggtgccgagttcagaa

SEQ ID NO: 245071 - DNA, 19 bp, Homo sapiens
  siRNA target sequence for M160 (NM_174941.2,4168-4186).
gtggtgccgagttcagaaa

SEQ ID NO: 245072 - DNA, 19 bp, Homo sapiens
  siRNA target sequence for M160 (NM_174941.2,4171-4189).
gtgccgagttcagaaacaa

SEQ ID NO: 245073 - DNA, 19 bp, Homo sapiens
  siRNA target sequence for M160 (NM_174941.2,4173-4191).
gccgagttcagaaacaaaa

SEQ ID NO: 245074 - DNA, 19 bp, Homo sapiens
  siRNA target sequence for M160 (NM_174941.2,4226-4244).
ggttctctcgaggagaatt

SEQ ID NO: 245075 - DNA, 19 bp, Homo sapiens
  siRNA target sequence for M160 (NM_174941.2,4234-4252).
cgaggagaatttattccat

SEQ ID NO: 245076 - DNA, 19 bp, Homo sapiens
  siRNA target sequence for M160 (NM_174941.2,4280-4298).
gacccacatgggacaagaa

SEQ ID NO: 245077 - DNA, 19 bp, Homo sapiens
  siRNA target sequence for MARCO (NM_006770.2,183-201).
cccaacaagctgcttttca

SEQ ID NO: 245078 - DNA, 19 bp, Homo sapiens
  siRNA target sequence for MARCO (NM_006770.2,209-227).
gcaatggagcctttcgaaa

SEQ ID NO: 245079 - DNA, 19 bp, Homo sapiens
  siRNA target sequence for MARCO (NM_006770.2,214-232).
ggagcctttcgaaatcaat

SEQ ID NO: 245080 - DNA, 19 bp, Homo sapiens
  siRNA target sequence for MARCO (NM_006770.2,358-376).
ccgggtcctggagatgtat

SEQ ID NO: 245081 - DNA, 19 bp, Homo sapiens
  siRNA target sequence for MARCO (NM_006770.2,530-548).
cagcgggtagacaacttca

SEQ ID NO: 245082 - DNA, 19 bp, Homo sapiens
  siRNA target sequence for MARCO (NM_006770.2,558-576).
cagggatgttcagaatcaa

SEQ ID NO: 245083 - DNA, 19 bp, Homo sapiens
  siRNA target sequence for MARCO (NM_006770.2,1350-1368).
ctggggagcaaggagtaaa

SEQ ID NO: 245084 - DNA, 19 bp, Homo sapiens
  siRNA target sequence for MARCO (NM_006770.2,1410-1428).
ggattgtcggcagtagtaa

SEQ ID NO: 245085 - DNA, 19 bp, Homo sapiens
  siRNA target sequence for MARCO (NM_006770.2,1477-1495).
cgatgacgagtggcaaaat

SEQ ID NO: 245086 - DNA, 19 bp, Homo sapiens
  siRNA target sequence for MARCO (NM_006770.2,1483-1501).
cgagtggcaaaattctgat

SEQ ID NO: 245087 - DNA, 19 bp, Homo sapiens
  siRNA target sequence for MARCO (NM_006770.2,1539-1557).
gaagggccctgtacaaagt

SEQ ID NO: 245088 - DNA, 19 bp, Homo sapiens
  siRNA target sequence for MARCO (NM_006770.2,1572-1590).
ggcagatctggctggataa

SEQ ID NO: 245089 - DNA, 19 bp, Homo sapiens
  siRNA target sequence for MARCO (NM_006770.2,1573-1591).
gcagatctggctggataat

SEQ ID NO: 245090 - DNA, 19 bp, Homo sapiens
  siRNA target sequence for MSR1 (NM_002445.2,129-147).
cagtgggatcactttcaca

SEQ ID NO: 245091 - DNA, 19 bp, Homo sapiens
  siRNA target sequence for MSR1 (NM_002445.2,170-188).
ctgctccgaatctgtgaaa

SEQ ID NO: 245092 - DNA, 19 bp, Homo sapiens
  siRNA target sequence for MSR1 (NM_002445.2,172-190).
gctccgaatctgtgaaatt

SEQ ID NO: 245093 - DNA, 19 bp, Homo sapiens
  siRNA target sequence for MSR1 (NM_002445.2,176-194).
cgaatctgtgaaatttgat

SEQ ID NO: 245094 - DNA, 19 bp, Homo sapiens
  siRNA target sequence for MSR1 (NM_002445.2,200-218).
ctcaatgacagctttgctt

SEQ ID NO: 245095 - DNA, 19 bp, Homo sapiens
  siRNA target sequence for MSR1 (NM_002445.2,215-233).
gcttcctccgaatcctaaa

SEQ ID NO: 245096 - DNA, 19 bp, Homo sapiens
  siRNA target sequence for MSR1 (NM_002445.2,365-383).
gaattgctcagttagttca

SEQ ID NO: 245097 - DNA, 19 bp, Homo sapiens
  siRNA target sequence for MSR1 (NM_002445.2,370-388).
gctcagttagttcaactaa

SEQ ID NO: 245098 - DNA, 19 bp, Homo sapiens
  siRNA target sequence for MSR1 (NM_002445.2,371-389).
ctcagttagttcaactaat

SEQ ID NO: 245099 - DNA, 19 bp, Homo sapiens
  siRNA target sequence for MSR1 (NM_002445.2,375-393).
gttagttcaactaatgcaa

SEQ ID NO: 245100 - DNA, 19 bp, Homo sapiens
  siRNA target sequence for MSR1 (NM_002445.2,382-400).
caactaatgcaaatgatat

SEQ ID NO: 245101 - DNA, 19 bp, Homo sapiens
  siRNA target sequence for MSR1 (NM_002445.2,390-408).
gcaaatgatataactcaaa

SEQ ID NO: 245102 - DNA, 19 bp, Homo sapiens
  siRNA target sequence for MSR1 (NM_002445.2,409-427).
gtctcacgggaaaaggaaa

SEQ ID NO: 245103 - DNA, 19 bp, Homo sapiens
  siRNA target sequence for MSR1 (NM_002445.2,593-611).
gcagctaagtaccttgttt

SEQ ID NO: 245104 - DNA, 19 bp, Homo sapiens
  siRNA target sequence for MSR1 (NM_002445.2,594-612).
cagctaagtaccttgtttt

SEQ ID NO: 245105 - DNA, 19 bp, Homo sapiens
  siRNA target sequence for MSR1 (NM_002445.2,623-641).
gggacatgggaatgcaata

SEQ ID NO: 245106 - DNA, 19 bp, Homo sapiens
  siRNA target sequence for MSR1 (NM_002445.2,630-648).
gggaatgcaatagatgaaa

SEQ ID NO: 245107 - DNA, 19 bp, Homo sapiens
  siRNA target sequence for MSR1 (NM_002445.2,652-670).
ccaagtccttaataagttt

SEQ ID NO: 245108 - DNA, 19 bp, Homo sapiens
  siRNA target sequence for MSR1 (NM_002445.2,656-674).
gtccttaataagtttgaat

SEQ ID NO: 245109 - DNA, 19 bp, Homo sapiens
  siRNA target sequence for MSR1 (NM_002445.2,770-788).
ggagcgtgtttacaatgta

SEQ ID NO: 245110 - DNA, 19 bp, Homo sapiens
  siRNA target sequence for MSR1 (NM_002445.2,771-789).
gagcgtgtttacaatgtat

SEQ ID NO: 245111 - DNA, 19 bp, Homo sapiens
  siRNA target sequence for MSR1 (NM_002445.2,773-791).
gcgtgtttacaatgtatca

SEQ ID NO: 245112 - DNA, 19 bp, Homo sapiens
  siRNA target sequence for MSR1 (NM_002445.2,858-876).
gtactgaataacatcacta

SEQ ID NO: 245113 - DNA, 19 bp, Homo sapiens
  siRNA target sequence for MSR1 (NM_002445.2,911-929).
gaccttgagaaatatcact

SEQ ID NO: 245114 - DNA, 19 bp, Homo sapiens
  siRNA target sequence for MSR1 (NM_002445.2,1148-1166).
cacattaagaccagtacaa

SEQ ID NO: 245115 - DNA, 19 bp, Homo sapiens
  siRNA target sequence for MSR1 (NM_002445.2,1150-1168).
cattaagaccagtacaact

SEQ ID NO: 245116 - DNA, 19 bp, Homo sapiens
  siRNA target sequence for MSR1 (NM_002445.2,1161-1179).
gtacaactcactgatcata

SEQ ID NO: 245117 - DNA, 19 bp, Homo sapiens
  siRNA target sequence for MSR1 (NM_138715.1,1226-1244).
cggccagtggggtacaatt

SEQ ID NO: 245118 - DNA, 19 bp, Homo sapiens
  siRNA target sequence for MSR1 (NM_138715.1,1436-1454).
ctgttcacattctgaagat

SEQ ID NO: 245119 - DNA, 19 bp, Homo sapiens
  siRNA target sequence for SCARA3 (NM_016240.2,271-289).
cgctgccagaagaacctat

SEQ ID NO: 245120 - DNA, 19 bp, Homo sapiens
  siRNA target sequence for SCARA3 (NM_016240.2,275-293).
gccagaagaacctatcttt

SEQ ID NO: 245121 - DNA, 19 bp, Homo sapiens
  siRNA target sequence for SCARA3 (NM_016240.2,297-315).
cacatcggtgcggattctt

SEQ ID NO: 245122 - DNA, 19 bp, Homo sapiens
  siRNA target sequence for SCARA3 (NM_016240.2,299-317).
catcggtgcggattcttta

SEQ ID NO: 245123 - DNA, 19 bp, Homo sapiens
  siRNA target sequence for SCARA3 (NM_016240.2,302-320).
cggtgcggattctttacct

SEQ ID NO: 245124 - DNA, 19 bp, Homo sapiens
  siRNA target sequence for SCARA3 (NM_016240.2,404-422).
ccttgacccagtctattta

SEQ ID NO: 245125 - DNA, 19 bp, Homo sapiens
  siRNA target sequence for SCARA3 (NM_016240.2,405-423).
cttgacccagtctatttat

SEQ ID NO: 245126 - DNA, 19 bp, Homo sapiens
  siRNA target sequence for SCARA3 (NM_016240.2,433-451).
cttgtgttaatgcagaaaa

SEQ ID NO: 245127 - DNA, 19 bp, Homo sapiens
  siRNA target sequence for SCARA3 (NM_016240.2,469-487).
ccgaaagccctgaacaact

SEQ ID NO: 245128 - DNA, 19 bp, Homo sapiens
  siRNA target sequence for SCARA3 (NM_016240.2,518-536).
ggccagagatccgaaaact

SEQ ID NO: 245129 - DNA, 19 bp, Homo sapiens
  siRNA target sequence for SCARA3 (NM_016240.2,671-689).
ccatccaccaggttaacca

SEQ ID NO: 245130 - DNA, 19 bp, Homo sapiens
  siRNA target sequence for SCARA3 (NM_016240.2,797-815).
cagtgcaccagatcaactt

SEQ ID NO: 245131 - DNA, 19 bp, Homo sapiens
  siRNA target sequence for SCARA3 (NM_016240.2,959-977).
gagaggcggtcaagaacat

SEQ ID NO: 245132 - DNA, 19 bp, Homo sapiens
  siRNA target sequence for SCARA3 (NM_016240.2,1117-1135).
catgatcttcagtaccata

SEQ ID NO: 245133 - DNA, 19 bp, Homo sapiens
  siRNA target sequence for SCARA3 (NM_016240.2,1327-1345).
ctctactacctgaacaagt

SEQ ID NO: 245134 - DNA, 19 bp, Homo sapiens
  siRNA target sequence for SCARA3 (NM_016240.2,1480-1498).
gaaatccttcgcaatgtca

SEQ ID NO: 245135 - DNA, 19 bp, Homo sapiens
  siRNA target sequence for SCARA3 (NM_016240.2,1535-1553).
gaggattcaaaggagatat

SEQ ID NO: 245136 - DNA, 19 bp, Homo sapiens
  siRNA target sequence for SCARA3 (NM_016240.2,1824-1842).
gggaaaaccgggaattgca

SEQ ID NO: 245137 - DNA, 19 bp, Homo sapiens
  siRNA target sequence for SCARA3 (NM_182826.1,1504-1522).
ctacgaggtcacactttgt

SEQ ID NO: 245138 - DNA, 19 bp, Homo sapiens
  siRNA target sequence for SCARA3 (NM_182826.1,1507-1525).
cgaggtcacactttgtttt

SEQ ID NO: 245139 - DNA, 19 bp, Homo sapiens
  siRNA target sequence for SRCRB4D (NM_080744.1,773-791).
ggggcgtccacaattgctt

SEQ ID NO: 245140 - DNA, 19 bp, Homo sapiens
  siRNA target sequence for SRCRB4D (NM_080744.1,778-796).
gtccacaattgctttcact

SEQ ID NO: 245141 - DNA, 19 bp, Homo sapiens
  siRNA target sequence for SRCRB4D (NM_080744.1,809-827).
ctgtcctgtgtgatgaatt

SEQ ID NO: 245142 - DNA, 19 bp, Homo sapiens
  siRNA target sequence for SRCRB4D (NM_080744.1,881-899).
cgacactgccgaatggaaa

SEQ ID NO: 245143 - DNA, 19 bp, Homo sapiens
  siRNA target sequence for B2M (NM_004048.2,123-141).
ccagcgtactccaaagatt

SEQ ID NO: 245144 - DNA, 19 bp, Homo sapiens
  siRNA target sequence for B2M (NM_004048.2,179-197).
caaatttcctgaattgcta

SEQ ID NO: 245145 - DNA, 19 bp, Homo sapiens
  siRNA target sequence for B2M (NM_004048.2,215-233).
catccgacattgaagttga

SEQ ID NO: 245146 - DNA, 19 bp, Homo sapiens
  siRNA target sequence for B2M (NM_004048.2,218-236).
ccgacattgaagttgactt

SEQ ID NO: 245147 - DNA, 19 bp, Homo sapiens
  siRNA target sequence for B2M (NM_004048.2,219-237).
cgacattgaagttgactta

SEQ ID NO: 245148 - DNA, 19 bp, Homo sapiens
  siRNA target sequence for B2M (NM_004048.2,290-308).
gcaaggactggtctttcta

SEQ ID NO: 245149 - DNA, 19 bp, Homo sapiens
  siRNA target sequence for B2M (NM_004048.2,299-317).
ggtctttctatctcttgta

SEQ ID NO: 245150 - DNA, 19 bp, Homo sapiens
  siRNA target sequence for B2M (NM_004048.2,302-320).
ctttctatctcttgtacta

SEQ ID NO: 245151 - DNA, 19 bp, Homo sapiens
  siRNA target sequence for B2M (NM_004048.2,325-343).
gaattcacccccactgaaa

SEQ ID NO: 245152 - DNA, 19 bp, Homo sapiens
  siRNA target sequence for B2M (NM_004048.2,364-382).
gtgaaccatgtgactttgt

SEQ ID NO: 245153 - DNA, 19 bp, Homo sapiens
  siRNA target sequence for B2M (NM_004048.2,381-399).
gtcacagcccaagatagtt

SEQ ID NO: 245154 - DNA, 19 bp, Homo sapiens
  siRNA target sequence for B2M (NM_004048.2,383-401).
cacagcccaagatagttaa

SEQ ID NO: 245155 - DNA, 19 bp, Homo sapiens
  siRNA target sequence for HFE (NM_000410.2,386-404).
ccagctgttcgtgttctat

SEQ ID NO: 245156 - DNA, 19 bp, Homo sapiens
  siRNA target sequence for HFE (NM_000410.2,392-410).
gttcgtgttctatgatcat

SEQ ID NO: 245157 - DNA, 19 bp, Homo sapiens
  siRNA target sequence for HFE (NM_000410.2,438-456).
ccatgggtttccagtagaa

SEQ ID NO: 245158 - DNA, 19 bp, Homo sapiens
  siRNA target sequence for HFE (NM_000410.2,439-457).
catgggtttccagtagaat

SEQ ID NO: 245159 - DNA, 19 bp, Homo sapiens
  siRNA target sequence for HFE (NM_000410.2,444-462).
gtttccagtagaatttcaa

SEQ ID NO: 245160 - DNA, 19 bp, Homo sapiens
  siRNA target sequence for HFE (NM_000410.2,498-516).
gggtgggatcacatgttca

SEQ ID NO: 245161 - DNA, 19 bp, Homo sapiens
  siRNA target sequence for HFE (NM_000410.2,529-547).
ggactattatggaaaatca

SEQ ID NO: 245162 - DNA, 19 bp, Homo sapiens
  siRNA target sequence for HFE (NM_000410.2,532-550).
ctattatggaaaatcacaa

SEQ ID NO: 245163 - DNA, 19 bp, Homo sapiens
  siRNA target sequence for HFE (NM_000410.2,626-644).
ctggaagtacgggtatgat

SEQ ID NO: 245164 - DNA, 19 bp, Homo sapiens
  siRNA target sequence for HFE (NM_000410.2,645-663).
gggcaggaccaccttgaat

SEQ ID NO: 245165 - DNA, 19 bp, Homo sapiens
  siRNA target sequence for HFE (NM_000410.2,646-664).
ggcaggaccaccttgaatt

SEQ ID NO: 245166 - DNA, 19 bp, Homo sapiens
  siRNA target sequence for HFE (NM_000410.2,725-743).
gtgggaaaggcacaagatt

SEQ ID NO: 245167 - DNA, 19 bp, Homo sapiens
  siRNA target sequence for HFE (NM_000410.2,891-909).
cggtgtcgggccttgaact

SEQ ID NO: 245168 - DNA, 19 bp, Homo sapiens
  siRNA target sequence for HFE (NM_000410.2,892-910).
ggtgtcgggccttgaacta

SEQ ID NO: 245169 - DNA, 19 bp, Homo sapiens
  siRNA target sequence for HFE (NM_000410.2,895-913).
gtcgggccttgaactacta

SEQ ID NO: 245170 - DNA, 19 bp, Homo sapiens
  siRNA target sequence for HFE (NM_000410.2,944-962).
ggataagcagccaatggat

SEQ ID NO: 245171 - DNA, 19 bp, Homo sapiens
  siRNA target sequence for HFE (NM_000410.2,1123-1141).
cgtctggcaccctagtcat

SEQ ID NO: 245172 - DNA, 19 bp, Homo sapiens
  siRNA target sequence for HFE (NM_000410.2,1124-1142).
gtctggcaccctagtcatt

SEQ ID NO: 245173 - DNA, 19 bp, Homo sapiens
  siRNA target sequence for HFE (NM_139002.1,435-453).
ggtgcttcaggataccata

SEQ ID NO: 245174 - DNA, 19 bp, Homo sapiens
  siRNA target sequence for HLA-E (NM_005516.3,266-284).
gggacaccgcacagatttt

SEQ ID NO: 245175 - DNA, 19 bp, Homo sapiens
  siRNA target sequence for HLA-E (NM_005516.3,418-436).
gacggcaaggattatctca

SEQ ID NO: 245176 - DNA, 19 bp, Homo sapiens
  siRNA target sequence for HLA-E (NM_005516.3,486-504).
gatctccgagcaaaagtca

SEQ ID NO: 245177 - DNA, 19 bp, Homo sapiens
  siRNA target sequence for HLA-E (NM_005516.3,489-507).
ctccgagcaaaagtcaaat

SEQ ID NO: 245178 - DNA, 19 bp, Homo sapiens
  siRNA target sequence for HLA-E (NM_005516.3,492-510).
cgagcaaaagtcaaatgat

SEQ ID NO: 245179 - DNA, 19 bp, Homo sapiens
  siRNA target sequence for HLA-F (NM_018950.1,1062-1080).
ggtgtctctcacagctaat

SEQ ID NO: 245180 - DNA, 19 bp, Homo sapiens
  siRNA target sequence for HLA-F (NM_018950.1,1063-1081).
gtgtctctcacagctaata

SEQ ID NO: 245181 - DNA, 19 bp, Homo sapiens
  siRNA target sequence for HLA-F (NM_018950.1,1065-1083).
gtctctcacagctaataaa

SEQ ID NO: 245182 - DNA, 19 bp, Homo sapiens
  siRNA target sequence for HLA-F (NM_018950.1,1067-1085).
ctctcacagctaataaagt

SEQ ID NO: 245183 - DNA, 19 bp, Homo sapiens
  siRNA target sequence for HLA-G (NM_002127.3,746-764).
caccaccctgtctttgact

SEQ ID NO: 245184 - DNA, 19 bp, Homo sapiens
  siRNA target sequence for MR1 (NM_001531.1,33-51).
cctctcatcattgtgttaa

SEQ ID NO: 245185 - DNA, 19 bp, Homo sapiens
  siRNA target sequence for MR1 (NM_001531.1,34-52).
ctctcatcattgtgttaat

SEQ ID NO: 245186 - DNA, 19 bp, Homo sapiens
  siRNA target sequence for MR1 (NM_001531.1,73-91).
ggacgcactctctgagata

SEQ ID NO: 245187 - DNA, 19 bp, Homo sapiens
  siRNA target sequence for MR1 (NM_001531.1,119-137).
ccatggggtccctgaattt

SEQ ID NO: 245188 - DNA, 19 bp, Homo sapiens
  siRNA target sequence for MR1 (NM_001531.1,120-138).
catggggtccctgaattta

SEQ ID NO: 245189 - DNA, 19 bp, Homo sapiens
  siRNA target sequence for MR1 (NM_001531.1,123-141).
ggggtccctgaatttattt

SEQ ID NO: 245190 - DNA, 19 bp, Homo sapiens
  siRNA target sequence for MR1 (NM_001531.1,161-179).
gcaccctatcaccacatat

SEQ ID NO: 245191 - DNA, 19 bp, Homo sapiens
  siRNA target sequence for MR1 (NM_001531.1,165-183).
cctatcaccacatatgaca

SEQ ID NO: 245192 - DNA, 19 bp, Homo sapiens
  siRNA target sequence for MR1 (NM_001531.1,274-292).
gctggcagcagatgttcaa

SEQ ID NO: 245193 - DNA, 19 bp, Homo sapiens
  siRNA target sequence for MR1 (NM_001531.1,307-325).
gcctacagaggcactacaa

SEQ ID NO: 245194 - DNA, 19 bp, Homo sapiens
  siRNA target sequence for MR1 (NM_001531.1,308-326).
cctacagaggcactacaat

SEQ ID NO: 245195 - DNA, 19 bp, Homo sapiens
  siRNA target sequence for MR1 (NM_001531.1,337-355).
ctcacacttaccagagaat

SEQ ID NO: 245196 - DNA, 19 bp, Homo sapiens
  siRNA target sequence for MR1 (NM_001531.1,339-357).
cacacttaccagagaatga

SEQ ID NO: 245197 - DNA, 19 bp, Homo sapiens
  siRNA target sequence for MR1 (NM_001531.1,393-411).
ggatttctgcagtatgcat

SEQ ID NO: 245198 - DNA, 19 bp, Homo sapiens
  siRNA target sequence for MR1 (NM_001531.1,394-412).
gatttctgcagtatgcata

SEQ ID NO: 245199 - DNA, 19 bp, Homo sapiens
  siRNA target sequence for MR1 (NM_001531.1,409-427).
catatgacgggcaggattt

SEQ ID NO: 245200 - DNA, 19 bp, Homo sapiens
  siRNA target sequence for MR1 (NM_001531.1,422-440).
ggatttcctgatcttcaat

SEQ ID NO: 245201 - DNA, 19 bp, Homo sapiens
  siRNA target sequence for MR1 (NM_001531.1,454-472).
cctggctggctgtagataa

SEQ ID NO: 245202 - DNA, 19 bp, Homo sapiens
  siRNA target sequence for MR1 (NM_001531.1,455-473).
ctggctggctgtagataat

SEQ ID NO: 245203 - DNA, 19 bp, Homo sapiens
  siRNA target sequence for MR1 (NM_001531.1,457-475).
ggctggctgtagataatgt

SEQ ID NO: 245204 - DNA, 19 bp, Homo sapiens
  siRNA target sequence for MR1 (NM_001531.1,518-536).
gttgctgtatcaaaagaat

SEQ ID NO: 245205 - DNA, 19 bp, Homo sapiens
  siRNA target sequence for MR1 (NM_001531.1,538-556).
ggctggaagaagaatgtat

SEQ ID NO: 245206 - DNA, 19 bp, Homo sapiens
  siRNA target sequence for MR1 (NM_001531.1,623-641).
cagagtaaatcgcaaagaa

SEQ ID NO: 245207 - DNA, 19 bp, Homo sapiens
  siRNA target sequence for MR1 (NM_001531.1,627-645).
gtaaatcgcaaagaaactt

SEQ ID NO: 245208 - DNA, 19 bp, Homo sapiens
  siRNA target sequence for MR1 (NM_001531.1,670-688).
gcaaagctcatggctttta

SEQ ID NO: 245209 - DNA, 19 bp, Homo sapiens
  siRNA target sequence for MR1 (NM_001531.1,925-943).
ggtccattgtccttgtcat

SEQ ID NO: 245210 - DNA, 19 bp, Homo sapiens
  siRNA target sequence for MR1 (NM_001531.1,926-944).
gtccattgtccttgtcatt

SEQ ID NO: 245211 - DNA, 19 bp, Homo sapiens
  siRNA target sequence for ULBP1 (NM_025218.1,559-577).
ctgggggattgtaagatgt

SEQ ID NO: 245212 - DNA, 19 bp, Homo sapiens
  siRNA target sequence for ULBP1 (NM_025218.1,573-591).
gatgtggcttgaagaattt

SEQ ID NO: 245213 - DNA, 19 bp, Homo sapiens
  siRNA target sequence for ULBP3 (NM_024518.1,94-112).
cactctctctggtataact

SEQ ID NO: 245214 - DNA, 19 bp, Homo sapiens
  siRNA target sequence for ULBP3 (NM_024518.1,105-123).
gtataacttcaccatcatt

SEQ ID NO: 245215 - DNA, 19 bp, Homo sapiens
  siRNA target sequence for ULBP3 (NM_024518.1,166-184).
caggtggatcagaagaatt

SEQ ID NO: 245216 - DNA, 19 bp, Homo sapiens
  siRNA target sequence for ULBP3 (NM_024518.1,202-220).
ggcagtgacaaggtcttat

SEQ ID NO: 245217 - DNA, 19 bp, Homo sapiens
  siRNA target sequence for ULBP3 (NM_024518.1,204-222).
cagtgacaaggtcttatct

SEQ ID NO: 245218 - DNA, 19 bp, Homo sapiens
  siRNA target sequence for ULBP3 (NM_024518.1,221-239).
ctatgggtcacctagaaga

SEQ ID NO: 245219 - DNA, 19 bp, Homo sapiens
  siRNA target sequence for ULBP3 (NM_024518.1,263-281).
ggggaaaacaactggaaat

SEQ ID NO: 245220 - DNA, 19 bp, Homo sapiens
  siRNA target sequence for ULBP3 (NM_024518.1,389-407).
gtgaagccgatggatacat

SEQ ID NO: 245221 - DNA, 19 bp, Homo sapiens
  siRNA target sequence for ULBP3 (NM_024518.1,496-514).
gccaggcggatgaaagaga

SEQ ID NO: 245222 - DNA, 19 bp, Homo sapiens
  siRNA target sequence for ULBP3 (NM_024518.1,532-550).
ggactgaccaccttcttca

SEQ ID NO: 245223 - DNA, 19 bp, Homo sapiens
  siRNA target sequence for ULBP3 (NM_024518.1,533-551).
gactgaccaccttcttcaa

SEQ ID NO: 245224 - DNA, 19 bp, Homo sapiens
  siRNA target sequence for ULBP3 (NM_024518.1,549-567).
caagatggtctcaatgaga

SEQ ID NO: 245225 - DNA, 19 bp, Homo sapiens
  siRNA target sequence for CD74 (NM_004355.1,503-521).
ctgagacaccttaagaaca

SEQ ID NO: 245226 - DNA, 19 bp, Homo sapiens
  siRNA target sequence for CD74 (NM_004355.1,617-635).
gacgctccaccgaaagagt

SEQ ID NO: 245227 - DNA, 19 bp, Homo sapiens
  siRNA target sequence for HLA-DMB (NM_002118.3,334-352).
ctgggactccaaaggattt

SEQ ID NO: 245228 - DNA, 19 bp, Homo sapiens
  siRNA target sequence for HLA-DMB (NM_002118.3,336-354).
gggactccaaaggatttca

SEQ ID NO: 245229 - DNA, 19 bp, Homo sapiens
  siRNA target sequence for HLA-DMB (NM_002118.3,413-431).
gatggccccttgcgaattt

SEQ ID NO: 245230 - DNA, 19 bp, Homo sapiens
  siRNA target sequence for HLA-DMB (NM_002118.3,426-444).
gaatttggggtgctgaata

SEQ ID NO: 245231 - DNA, 19 bp, Homo sapiens
  siRNA target sequence for HLA-DMB (NM_002118.3,503-521).
gcgcaatgggcttcagaat

SEQ ID NO: 245232 - DNA, 19 bp, Homo sapiens
  siRNA target sequence for HLA-DMB (NM_002118.3,504-522).
cgcaatgggcttcagaatt

SEQ ID NO: 245233 - DNA, 19 bp, Homo sapiens
  siRNA target sequence for HLA-DMB (NM_002118.3,506-524).
caatgggcttcagaattgt

SEQ ID NO: 245234 - DNA, 19 bp, Homo sapiens
  siRNA target sequence for HLA-DMB (NM_002118.3,657-675).
ccagcagaagtgactatca

SEQ ID NO: 245235 - DNA, 19 bp, Homo sapiens
  siRNA target sequence for HLA-DMB (NM_002118.3,784-802).
cctcttacggggacactta

SEQ ID NO: 245236 - DNA, 19 bp, Homo sapiens
  siRNA target sequence for HLA-DMB (NM_002118.3,960-978).
gctggccactctagttaca

SEQ ID NO: 245237 - DNA, 19 bp, Homo sapiens
  siRNA target sequence for HLA-DMB (NM_002118.3,988-1006).
ctgggtccaattattcaga

SEQ ID NO: 245238 - DNA, 19 bp, Homo sapiens
  siRNA target sequence for HLA-DOA (NM_002119.2,228-246).
gtggcgtctgcctgagttt

SEQ ID NO: 245239 - DNA, 19 bp, Homo sapiens
  siRNA target sequence for HLA-DOA (NM_002119.2,285-303).
cggcatcgccgcaatcaaa

SEQ ID NO: 245240 - DNA, 19 bp, Homo sapiens
  siRNA target sequence for HLA-DOA (NM_002119.2,438-456).
cttcccccctgtgatcaat

SEQ ID NO: 245241 - DNA, 19 bp, Homo sapiens
  siRNA target sequence for HLA-DOA (NM_002119.2,442-460).
ccccctgtgatcaatatca

SEQ ID NO: 245242 - DNA, 19 bp, Homo sapiens
  siRNA target sequence for HLA-DOB (NM_002120.2,83-101).
ggtggctctgctagtgaat

SEQ ID NO: 245243 - DNA, 19 bp, Homo sapiens
  siRNA target sequence for HLA-DOB (NM_002120.2,87-105).
gctctgctagtgaatctga

SEQ ID NO: 245244 - DNA, 19 bp, Homo sapiens
  siRNA target sequence for HLA-DOB (NM_002120.2,145-163).
cagaagattttgtgattca

SEQ ID NO: 245245 - DNA, 19 bp, Homo sapiens
  siRNA target sequence for HLA-DOB (NM_002120.2,165-183).
gcaaaggctgactgttact

SEQ ID NO: 245246 - DNA, 19 bp, Homo sapiens
  siRNA target sequence for HLA-DOB (NM_002120.2,166-184).
caaaggctgactgttactt

SEQ ID NO: 245247 - DNA, 19 bp, Homo sapiens
  siRNA target sequence for HLA-DOB (NM_002120.2,207-225).
cagtttgtggtcagattca

SEQ ID NO: 245248 - DNA, 19 bp, Homo sapiens
  siRNA target sequence for HLA-DOB (NM_002120.2,504-522).
ccaggggatatcaagatca

SEQ ID NO: 245249 - DNA, 19 bp, Homo sapiens
  siRNA target sequence for HLA-DOB (NM_002120.2,507-525).
ggggatatcaagatcaagt

SEQ ID NO: 245250 - DNA, 19 bp, Homo sapiens
  siRNA target sequence for HLA-DOB (NM_002120.2,604-622).
ctgtggtgatgctagaaat

SEQ ID NO: 245251 - DNA, 19 bp, Homo sapiens
  siRNA target sequence for HLA-DOB (NM_002120.2,628-646).
ctgaacttggacatgtcta

SEQ ID NO: 245252 - DNA, 19 bp, Homo sapiens
  siRNA target sequence for HLA-DOB (NM_002120.2,702-720).
gctcagtctgaatattctt

SEQ ID NO: 245253 - DNA, 19 bp, Homo sapiens
  siRNA target sequence for HLA-DOB (NM_002120.2,799-817).
gggctcagaaaggatatgt

SEQ ID NO: 245254 - DNA, 19 bp, Homo sapiens
  siRNA target sequence for HLA-DOB (NM_002120.2,821-839).
gacgcagatgtctggtaat

SEQ ID NO: 245255 - DNA, 19 bp, Homo sapiens
  siRNA target sequence for HLA-DOB (NM_002120.2,823-841).
cgcagatgtctggtaatga

SEQ ID NO: 245256 - DNA, 19 bp, Homo sapiens
  siRNA target sequence for HLA-DPA1 (NM_033554.2,35-53).
cgccctgaagacagaatgt

SEQ ID NO: 245257 - DNA, 19 bp, Homo sapiens
  siRNA target sequence for HLA-DPA1 (NM_033554.2,36-54).
gccctgaagacagaatgtt

SEQ ID NO: 245258 - DNA, 19 bp, Homo sapiens
  siRNA target sequence for HLA-DPA1 (NM_033554.2,131-149).
gcggaccatgtgtcaactt

SEQ ID NO: 245259 - DNA, 19 bp, Homo sapiens
  siRNA target sequence for HLA-DPA1 (NM_033554.2,132-150).
cggaccatgtgtcaactta

SEQ ID NO: 245260 - DNA, 19 bp, Homo sapiens
  siRNA target sequence for HLA-DPA1 (NM_033554.2,133-151).
ggaccatgtgtcaacttat

SEQ ID NO: 245261 - DNA, 19 bp, Homo sapiens
  siRNA target sequence for HLA-DPA1 (NM_033554.2,147-165).
cttatgccgcgtttgtaca

SEQ ID NO: 245262 - DNA, 19 bp, Homo sapiens
  siRNA target sequence for HLA-DPA1 (NM_033554.2,176-194).
ccaacaggggagtttatgt

SEQ ID NO: 245263 - DNA, 19 bp, Homo sapiens
  siRNA target sequence for HLA-DPA1 (NM_033554.2,177-195).
caacaggggagtttatgtt

SEQ ID NO: 245264 - DNA, 19 bp, Homo sapiens
  siRNA target sequence for HLA-DPA1 (NM_033554.2,300-318).
ggctggctaacattgctat

SEQ ID NO: 245265 - DNA, 19 bp, Homo sapiens
  siRNA target sequence for HLA-DPA1 (NM_033554.2,301-319).
gctggctaacattgctata

SEQ ID NO: 245266 - DNA, 19 bp, Homo sapiens
  siRNA target sequence for HLA-DPA1 (NM_033554.2,302-320).
ctggctaacattgctatat

SEQ ID NO: 245267 - DNA, 19 bp, Homo sapiens
  siRNA target sequence for HLA-DPA1 (NM_033554.2,314-332).
gctatattgaacaacaact

SEQ ID NO: 245268 - DNA, 19 bp, Homo sapiens
  siRNA target sequence for HLA-DPA1 (NM_033554.2,315-333).
ctatattgaacaacaactt

SEQ ID NO: 245269 - DNA, 19 bp, Homo sapiens
  siRNA target sequence for HLA-DPA1 (NM_033554.2,444-462).
gccacattgacaagttctt

SEQ ID NO: 245270 - DNA, 19 bp, Homo sapiens
  siRNA target sequence for HLA-DPA1 (NM_033554.2,555-573).
gcttccacaagttccatta

SEQ ID NO: 245271 - DNA, 19 bp, Homo sapiens
  siRNA target sequence for HLA-DPB1 (NM_002121.4,152-170).
cactccagagaattacctt

SEQ ID NO: 245272 - DNA, 19 bp, Homo sapiens
  siRNA target sequence for HLA-DPB1 (NM_002121.4,154-172).
ctccagagaattacctttt

SEQ ID NO: 245273 - DNA, 19 bp, Homo sapiens
  siRNA target sequence for HLA-DPB1 (NM_002121.4,717-735).
gattctgcccggagtaaga

SEQ ID NO: 245274 - DNA, 19 bp, Homo sapiens
  siRNA target sequence for HLA-DPB1 (NM_002121.4,721-739).
ctgcccggagtaagacatt

SEQ ID NO: 245275 - DNA, 19 bp, Homo sapiens
  siRNA target sequence for HLA-DPB1 (NM_002121.4,723-741).
gcccggagtaagacattga

SEQ ID NO: 245276 - DNA, 19 bp, Homo sapiens
  siRNA target sequence for HLA-DQA2 (NM_020056.1,98-116).
cctatggtgtgaacttcta

SEQ ID NO: 245277 - DNA, 19 bp, Homo sapiens
  siRNA target sequence for HLA-DQA2 (NM_020056.1,208-226).
cagttgcctatgtttagca

SEQ ID NO: 245278 - DNA, 19 bp, Homo sapiens
  siRNA target sequence for HLA-DQA2 (NM_020056.1,215-233).
ctatgtttagcaaatttat

SEQ ID NO: 245279 - DNA, 19 bp, Homo sapiens
  siRNA target sequence for HLA-DQA2 (NM_020056.1,245-263).
cgcagagtgcactgagaaa

SEQ ID NO: 245280 - DNA, 19 bp, Homo sapiens
  siRNA target sequence for HLA-DQA2 (NM_020056.1,246-264).
gcagagtgcactgagaaat

SEQ ID NO: 245281 - DNA, 19 bp, Homo sapiens
  siRNA target sequence for HLA-DQA2 (NM_020056.1,247-265).
cagagtgcactgagaaata

SEQ ID NO: 245282 - DNA, 19 bp, Homo sapiens
  siRNA target sequence for HLA-DQB1 (NM_002123.2,166-184).
gatttcgtgtaccagttta

SEQ ID NO: 245283 - DNA, 19 bp, Homo sapiens
  siRNA target sequence for HLA-DQB1 (NM_002123.2,229-247).
gtgagcagaagcatctata

SEQ ID NO: 245284 - DNA, 19 bp, Homo sapiens
  siRNA target sequence for HLA-DQB1 (NM_002123.2,787-805).
ctcgggctgggccttatca

SEQ ID NO: 245285 - DNA, 19 bp, Homo sapiens
  siRNA target sequence for HLA-DQB2 (NM_182549.1,183-201).
gtggccagatacatctata

SEQ ID NO: 245286 - DNA, 19 bp, Homo sapiens
  siRNA target sequence for HLA-DQB2 (NM_182549.1,275-293).
cgaggactggaacaactat

SEQ ID NO: 245287 - DNA, 19 bp, Homo sapiens
  siRNA target sequence for HLA-DQB2 (NM_182549.1,276-294).
gaggactggaacaactata

SEQ ID NO: 245288 - DNA, 19 bp, Homo sapiens
  siRNA target sequence for HLA-DRA (NM_019111.2,78-96).
gagtccctgtgctaggatt

SEQ ID NO: 245289 - DNA, 19 bp, Homo sapiens
  siRNA target sequence for HLA-DRA (NM_019111.2,80-98).
gtccctgtgctaggatttt

SEQ ID NO: 245290 - DNA, 19 bp, Homo sapiens
  siRNA target sequence for HLA-DRA (NM_019111.2,83-101).
cctgtgctaggatttttca

SEQ ID NO: 245291 - DNA, 19 bp, Homo sapiens
  siRNA target sequence for HLA-DRA (NM_019111.2,86-104).
gtgctaggatttttcatca

SEQ ID NO: 245292 - DNA, 19 bp, Homo sapiens
  siRNA target sequence for HLA-DRA (NM_019111.2,127-145).
ggaatcatgggctatcaaa

SEQ ID NO: 245293 - DNA, 19 bp, Homo sapiens
  siRNA target sequence for HLA-DRA (NM_019111.2,132-150).
catgggctatcaaagaaga

SEQ ID NO: 245294 - DNA, 19 bp, Homo sapiens
  siRNA target sequence for HLA-DRA (NM_019111.2,164-182).
caggccgagttctatctga

SEQ ID NO: 245295 - DNA, 19 bp, Homo sapiens
  siRNA target sequence for HLA-DRA (NM_019111.2,188-206).
gaccaatcaggcgagttta

SEQ ID NO: 245296 - DNA, 19 bp, Homo sapiens
  siRNA target sequence for HLA-DRA (NM_019111.2,191-209).
caatcaggcgagtttatgt

SEQ ID NO: 245297 - DNA, 19 bp, Homo sapiens
  siRNA target sequence for HLA-DRB3 (NM_022555.3,148-166).
cttggagctgcgtaagtct

SEQ ID NO: 245298 - DNA, 19 bp, Homo sapiens
  siRNA target sequence for TNFRSF1A (NM_001065.2,350-368).
cccctcaggggttattgga

SEQ ID NO: 245299 - DNA, 19 bp, Homo sapiens
  siRNA target sequence for TNFRSF1A (NM_001065.2,432-450).
caccctcaaaataattcga

SEQ ID NO: 245300 - DNA, 19 bp, Homo sapiens
  siRNA target sequence for TNFRSF1A (NM_001065.2,434-452).
ccctcaaaataattcgatt

SEQ ID NO: 245301 - DNA, 19 bp, Homo sapiens
  siRNA target sequence for TNFRSF1A (NM_001065.2,435-453).
cctcaaaataattcgattt

SEQ ID NO: 245302 - DNA, 19 bp, Homo sapiens
  siRNA target sequence for TNFRSF1A (NM_001065.2,668-686).
gaaccagtaccggcattat

SEQ ID NO: 245303 - DNA, 19 bp, Homo sapiens
  siRNA target sequence for TNFRSF1A (NM_001065.2,672-690).
cagtaccggcattattgga

SEQ ID NO: 245304 - DNA, 19 bp, Homo sapiens
  siRNA target sequence for TNFRSF1A (NM_001065.2,678-696).
cggcattattggagtgaaa

SEQ ID NO: 245305 - DNA, 19 bp, Homo sapiens
  siRNA target sequence for TNFRSF1A (NM_001065.2,786-804).
catgcaggtttctttctaa

SEQ ID NO: 245306 - DNA, 19 bp, Homo sapiens
  siRNA target sequence for TNFRSF1A (NM_001065.2,819-837).
gtctcctgtagtaactgta

SEQ ID NO: 245307 - DNA, 19 bp, Homo sapiens
  siRNA target sequence for TNFRSF1A (NM_001065.2,865-883).
gcctaccccagattgagaa

SEQ ID NO: 245308 - DNA, 19 bp, Homo sapiens
  siRNA target sequence for TNFRSF1A (NM_001065.2,866-884).
cctaccccagattgagaat

SEQ ID NO: 245309 - DNA, 19 bp, Homo sapiens
  siRNA target sequence for TNFRSF1A (NM_001065.2,870-888).
ccccagattgagaatgtta

SEQ ID NO: 245310 - DNA, 19 bp, Homo sapiens
  siRNA target sequence for TNFRSF1A (NM_001065.2,871-889).
cccagattgagaatgttaa

SEQ ID NO: 245311 - DNA, 19 bp, Homo sapiens
  siRNA target sequence for TNFRSF1A (NM_001065.2,959-977).
cctcctcttcattggttta

SEQ ID NO: 245312 - DNA, 19 bp, Homo sapiens
  siRNA target sequence for TNFRSF1A (NM_001065.2,965-983).
cttcattggtttaatgtat

SEQ ID NO: 245313 - DNA, 19 bp, Homo sapiens
  siRNA target sequence for TNFRSF1A (NM_001065.2,1007-1025).
gctctactccattgtttgt

SEQ ID NO: 245314 - DNA, 19 bp, Homo sapiens
  siRNA target sequence for TNFRSF1A (NM_001065.2,1027-1045).
ggaaatcgacacctgaaaa

SEQ ID NO: 245315 - DNA, 19 bp, Homo sapiens
  siRNA target sequence for TNFRSF1A (NM_001065.2,1028-1046).
gaaatcgacacctgaaaaa

SEQ ID NO: 245316 - DNA, 19 bp, Homo sapiens
  siRNA target sequence for TNFRSF1A (NM_001065.2,1052-1070).
ggagcttgaaggaactact

SEQ ID NO: 245317 - DNA, 19 bp, Homo sapiens
  siRNA target sequence for TNFRSF1A (NM_001065.2,1053-1071).
gagcttgaaggaactacta

SEQ ID NO: 245318 - DNA, 19 bp, Homo sapiens
  siRNA target sequence for TNFRSF1A (NM_001065.2,1056-1074).
cttgaaggaactactacta

SEQ ID NO: 245319 - DNA, 19 bp, Homo sapiens
  siRNA target sequence for TNFRSF1A (NM_001065.2,1184-1202).
cggtgactgtcccaacttt

SEQ ID NO: 245320 - DNA, 19 bp, Homo sapiens
  siRNA target sequence for TNFRSF1A (NM_001065.2,1383-1401).
ccgttgcgctggaaggaat

SEQ ID NO: 245321 - DNA, 19 bp, Homo sapiens
  siRNA target sequence for TNFRSF1A (NM_001065.2,1384-1402).
cgttgcgctggaaggaatt

SEQ ID NO: 245322 - DNA, 19 bp, Homo sapiens
  siRNA target sequence for TNFRSF1A (NM_001065.2,1467-1485).
ctgcgcgaggcgcaataca

SEQ ID NO: 245323 - DNA, 19 bp, Homo sapiens
  siRNA target sequence for TNFRSF19 (NM_018647.2,83-101).
ctagaacaagagaaaacgt

SEQ ID NO: 245324 - DNA, 19 bp, Homo sapiens
  siRNA target sequence for TNFRSF19 (NM_018647.2,99-117).
cgtttttcactcttttagt

SEQ ID NO: 245325 - DNA, 19 bp, Homo sapiens
  siRNA target sequence for TNFRSF19 (NM_018647.2,126-144).
gctatttgtcatgtaaagt

SEQ ID NO: 245326 - DNA, 19 bp, Homo sapiens
  siRNA target sequence for TNFRSF19 (NM_018647.2,184-202).
ggatcggtctggaaactgt

SEQ ID NO: 245327 - DNA, 19 bp, Homo sapiens
  siRNA target sequence for TNFRSF19 (NM_018647.2,225-243).
caggcatggagttgtctaa

SEQ ID NO: 245328 - DNA, 19 bp, Homo sapiens
  siRNA target sequence for TNFRSF19 (NM_018647.2,362-380).
cgctttcagaaggcaaatt

SEQ ID NO: 245329 - DNA, 19 bp, Homo sapiens
  siRNA target sequence for TNFRSF19 (NM_018647.2,410-428).
gactgcttgccaggatttt

SEQ ID NO: 245330 - DNA, 19 bp, Homo sapiens
  siRNA target sequence for TNFRSF19 (NM_018647.2,439-457).
gaaacttgtcggctttcaa

SEQ ID NO: 245331 - DNA, 19 bp, Homo sapiens
  siRNA target sequence for TNFRSF19 (NM_018647.2,625-643).
cctctgtgtcatctattgt

SEQ ID NO: 245332 - DNA, 19 bp, Homo sapiens
  siRNA target sequence for TNFRSF19 (NM_018647.2,626-644).
ctctgtgtcatctattgta

SEQ ID NO: 245333 - DNA, 19 bp, Homo sapiens
  siRNA target sequence for TNFRSF19 (NM_018647.2,684-702).
ggtcacaggacattcagta

SEQ ID NO: 245334 - DNA, 19 bp, Homo sapiens
  siRNA target sequence for TNFRSF19 (NM_018647.2,713-731).
gagctgtcgtgttttgaca

SEQ ID NO: 245335 - DNA, 19 bp, Homo sapiens
  siRNA target sequence for TNFRSF19 (NM_018647.2,732-750).
gacctcagctccacgaata

SEQ ID NO: 245336 - DNA, 19 bp, Homo sapiens
  siRNA target sequence for TNFRSF19 (NM_018647.2,888-906).
ccagtcttcaggcaagaaa

SEQ ID NO: 245337 - DNA, 19 bp, Homo sapiens
  siRNA target sequence for TNFRSF19 (NM_018647.2,923-941).
gagatggtgccgactttct

SEQ ID NO: 245338 - DNA, 19 bp, Homo sapiens
  siRNA target sequence for TNFRSF19 (NM_018647.2,961-979).
catctgtggcgagttttca

SEQ ID NO: 245339 - DNA, 19 bp, Homo sapiens
  siRNA target sequence for TNFRSF19 (NM_018647.2,964-982).
ctgtggcgagttttcagat

SEQ ID NO: 245340 - DNA, 19 bp, Homo sapiens
  siRNA target sequence for TNFRSF19 (NM_018647.2,1011-1029).
gtggtgacaacatctcttt

SEQ ID NO: 245341 - DNA, 19 bp, Homo sapiens
  siRNA target sequence for TNFRSF19 (NM_018647.2,1024-1042).
ctctttttgtgactcttat

SEQ ID NO: 245342 - DNA, 19 bp, Homo sapiens
  siRNA target sequence for TNFRSF19 (NM_018647.2,1168-1186).
ctttacagcagctactgat

SEQ ID NO: 245343 - DNA, 19 bp, Homo sapiens
  siRNA target sequence for TNFRSF19 (NM_018647.2,1175-1193).
gcagctactgatttatcta

SEQ ID NO: 245344 - DNA, 19 bp, Homo sapiens
  siRNA target sequence for TNFRSF19 (NM_018647.2,1179-1197).
ctactgatttatctagata

SEQ ID NO: 245345 - DNA, 19 bp, Homo sapiens
  siRNA target sequence for TNFRSF19 (NM_018647.2,1210-1228).
ggtagaatcagcatcaact

SEQ ID NO: 245346 - DNA, 19 bp, Homo sapiens
  siRNA target sequence for TNFRSF19 (NM_018647.2,1227-1245).
ctcaggatgcactaactat

SEQ ID NO: 245347 - DNA, 19 bp, Homo sapiens
  siRNA target sequence for TNFRSF19 (NM_018647.2,1232-1250).
gatgcactaactatgagaa

SEQ ID NO: 245348 - DNA, 19 bp, Homo sapiens
  siRNA target sequence for TNFRSF1B (NM_001066.2,208-226).
gccggctcagagaatacta

SEQ ID NO: 245349 - DNA, 19 bp, Homo sapiens
  siRNA target sequence for TNFRSF1B (NM_001066.2,211-229).
ggctcagagaatactatga

SEQ ID NO: 245350 - DNA, 19 bp, Homo sapiens
  siRNA target sequence for TNFRSF1B (NM_001066.2,267-285).
ggccaacatgcaaaagtct

SEQ ID NO: 245351 - DNA, 19 bp, Homo sapiens
  siRNA target sequence for TNFRSF1B (NM_001066.2,394-412).
ctgaccaggtggaaactca

SEQ ID NO: 245352 - DNA, 19 bp, Homo sapiens
  siRNA target sequence for TNFRSF1B (NM_001066.2,605-623).
gacttcatccacggatatt

SEQ ID NO: 245353 - DNA, 19 bp, Homo sapiens
  siRNA target sequence for TNFRSF1B (NM_001066.2,628-646).
ggccccaccagatctgtaa

SEQ ID NO: 245354 - DNA, 19 bp, Homo sapiens
  siRNA target sequence for TNFRSF1B (NM_001066.2,654-672).
gccatccctgggaatgcaa

SEQ ID NO: 245355 - DNA, 19 bp, Homo sapiens
  siRNA target sequence for TNFRSF1B (NM_001066.2,719-737).
cccaggggcagtacactta

SEQ ID NO: 245356 - DNA, 19 bp, Homo sapiens
  siRNA target sequence for TNFRSF1B (NM_001066.2,893-911).
gacagccttgggtctacta

SEQ ID NO: 245357 - DNA, 19 bp, Homo sapiens
  siRNA target sequence for TNFRSF1B (NM_001066.2,895-913).
cagccttgggtctactaat

SEQ ID NO: 245358 - DNA, 19 bp, Homo sapiens
  siRNA target sequence for TNFRSF1B (NM_001066.2,897-915).
gccttgggtctactaataa

SEQ ID NO: 245359 - DNA, 19 bp, Homo sapiens
  siRNA target sequence for TNFRSF1B (NM_001066.2,902-920).
gggtctactaataatagga

SEQ ID NO: 245360 - DNA, 19 bp, Homo sapiens
  siRNA target sequence for TNFRSF1B (NM_001066.2,1181-1199).
caccgggagctcagattct

SEQ ID NO: 245361 - DNA, 19 bp, Homo sapiens
  siRNA target sequence for XEDAR (NM_021783.2,84-102).
caggagctatccaaggatt

SEQ ID NO: 245362 - DNA, 19 bp, Homo sapiens
  siRNA target sequence for XEDAR (NM_021783.2,143-161).
ccctcctcgcaggtacaaa

SEQ ID NO: 245363 - DNA, 19 bp, Homo sapiens
  siRNA target sequence for XEDAR (NM_021783.2,144-162).
cctcctcgcaggtacaaaa

SEQ ID NO: 245364 - DNA, 19 bp, Homo sapiens
  siRNA target sequence for XEDAR (NM_021783.2,147-165).
cctcgcaggtacaaaagca

SEQ ID NO: 245365 - DNA, 19 bp, Homo sapiens
  siRNA target sequence for XEDAR (NM_021783.2,197-215).
cacctgtgctgtcatcaat

SEQ ID NO: 245366 - DNA, 19 bp, Homo sapiens
  siRNA target sequence for XEDAR (NM_021783.2,233-251).
ctgcacagctacctctaat

SEQ ID NO: 245367 - DNA, 19 bp, Homo sapiens
  siRNA target sequence for XEDAR (NM_021783.2,275-293).
caggttctaccgaaagaca

SEQ ID NO: 245368 - DNA, 19 bp, Homo sapiens
  siRNA target sequence for XEDAR (NM_021783.2,539-557).
gcagtttgaggctgataaa

SEQ ID NO: 245369 - DNA, 19 bp, Homo sapiens
  siRNA target sequence for XEDAR (NM_021783.2,542-560).
gtttgaggctgataaaaca

SEQ ID NO: 245370 - DNA, 19 bp, Homo sapiens
  siRNA target sequence for XEDAR (NM_021783.2,696-714).
cccacacaggagtccttta

SEQ ID NO: 245371 - DNA, 19 bp, Homo sapiens
  siRNA target sequence for XEDAR (NM_021783.2,753-771).
gtccacagccccatcgaat

SEQ ID NO: 245372 - DNA, 19 bp, Homo sapiens
  siRNA target sequence for TNFRSF14 (NM_003820.2,464-482).
caagtgcagtccaggttat

SEQ ID NO: 245373 - DNA, 19 bp, Homo sapiens
  siRNA target sequence for TNFRSF14 (NM_003820.2,467-485).
gtgcagtccaggttatcgt

SEQ ID NO: 245374 - DNA, 19 bp, Homo sapiens
  siRNA target sequence for TNFRSF14 (NM_003820.2,949-967).
ccacagttggcctaatcat

SEQ ID NO: 245375 - DNA, 19 bp, Homo sapiens
  siRNA target sequence for TNFRSF14 (NM_003820.2,950-968).
cacagttggcctaatcata

SEQ ID NO: 245376 - DNA, 19 bp, Homo sapiens
  siRNA target sequence for TNFRSF14 (NM_003820.2,988-1006).
caaggggtgatgtagtcaa

SEQ ID NO: 245377 - DNA, 19 bp, Homo sapiens
  siRNA target sequence for TNFRSF14 (NM_003820.2,1018-1036).
ccgtccagcggaaaagaca

SEQ ID NO: 245378 - DNA, 19 bp, Homo sapiens
  siRNA target sequence for TNFRSF25 (NM_003790.2,195-213).
ccggtgacttccacaagaa

SEQ ID NO: 245379 - DNA, 19 bp, Homo sapiens
  siRNA target sequence for TNFRSF25 (NM_003790.2,211-229).
gaagattggtctgttttgt

SEQ ID NO: 245380 - DNA, 19 bp, Homo sapiens
  siRNA target sequence for TNFRSF25 (NM_003790.2,328-346).
ctgggagaaccaccataat

SEQ ID NO: 245381 - DNA, 19 bp, Homo sapiens
  siRNA target sequence for TNFRSF25 (NM_003790.2,331-349).
ggagaaccaccataattct

SEQ ID NO: 245382 - DNA, 19 bp, Homo sapiens
  siRNA target sequence for TNFRSF25 (NM_003790.2,334-352).
gaaccaccataattctgaa

SEQ ID NO: 245383 - DNA, 19 bp, Homo sapiens
  siRNA target sequence for TNFRSF25 (NM_003790.2,462-480).
gccaggtcagccaatgtgt

SEQ ID NO: 245384 - DNA, 19 bp, Homo sapiens
  siRNA target sequence for TNFRSF25 (NM_003790.2,548-566).
ctctgttcccgcagagata

SEQ ID NO: 245385 - DNA, 19 bp, Homo sapiens
  siRNA target sequence for TNFRSF25 (NM_003790.2,550-568).
ctgttcccgcagagatact

SEQ ID NO: 245386 - DNA, 19 bp, Homo sapiens
  siRNA target sequence for TNFRSF25 (NM_003790.2,552-570).
gttcccgcagagatactga

SEQ ID NO: 245387 - DNA, 19 bp, Homo sapiens
  siRNA target sequence for TNFRSF25 (NM_003790.2,741-759).
ccaccctgacctacacata

SEQ ID NO: 245388 - DNA, 19 bp, Homo sapiens
  siRNA target sequence for FLJ30296 (NM_173495.1,229-247).
cacaccgacctgatcttaa

SEQ ID NO: 245389 - DNA, 19 bp, Homo sapiens
  siRNA target sequence for FLJ30296 (NM_173495.1,233-251).
ccgacctgatcttaaagtt

SEQ ID NO: 245390 - DNA, 19 bp, Homo sapiens
  siRNA target sequence for FLJ30296 (NM_173495.1,280-298).
ccaaggcctggttttaatt

SEQ ID NO: 245391 - DNA, 19 bp, Homo sapiens
  siRNA target sequence for FLJ30296 (NM_173495.1,300-318).
cacgtttgcccatatatgt

SEQ ID NO: 245392 - DNA, 19 bp, Homo sapiens
  siRNA target sequence for FLJ30296 (NM_173495.1,391-409).
gccaccaatcggaccaatt

SEQ ID NO: 245393 - DNA, 19 bp, Homo sapiens
  siRNA target sequence for FLJ30296 (NM_173495.1,392-410).
ccaccaatcggaccaattt

SEQ ID NO: 245394 - DNA, 19 bp, Homo sapiens
  siRNA target sequence for FLJ30296 (NM_173495.1,393-411).
caccaatcggaccaatttt

SEQ ID NO: 245395 - DNA, 19 bp, Homo sapiens
  siRNA target sequence for FLJ30296 (NM_173495.1,396-414).
caatcggaccaattttgct

SEQ ID NO: 245396 - DNA, 19 bp, Homo sapiens
  siRNA target sequence for FLJ30296 (NM_173495.1,402-420).
gaccaattttgctatcaca

SEQ ID NO: 245397 - DNA, 19 bp, Homo sapiens
  siRNA target sequence for FLJ30296 (NM_173495.1,495-513).
caaagaccgggtgaaatct

SEQ ID NO: 245398 - DNA, 19 bp, Homo sapiens
  siRNA target sequence for FLJ30296 (NM_173495.1,600-618).
cgacactgtcagactgttt

SEQ ID NO: 245399 - DNA, 19 bp, Homo sapiens
  siRNA target sequence for FLJ30296 (NM_173495.1,607-625).
gtcagactgtttcagaaat

SEQ ID NO: 245400 - DNA, 19 bp, Homo sapiens
  siRNA target sequence for FLJ30296 (NM_173495.1,687-705).
gaccagccgcgtatcagaa

SEQ ID NO: 245401 - DNA, 19 bp, Homo sapiens
  siRNA target sequence for FLJ30296 (NM_173495.1,692-710).
gccgcgtatcagaacgtta

SEQ ID NO: 245402 - DNA, 19 bp, Homo sapiens
  siRNA target sequence for FLJ30296 (NM_173495.1,802-820).
ctcggattggtgaccataa

SEQ ID NO: 245403 - DNA, 19 bp, Homo sapiens
  siRNA target sequence for FLJ30296 (NM_173495.1,839-857).
cagccgggatcatcaatct

SEQ ID NO: 245404 - DNA, 19 bp, Homo sapiens
  siRNA target sequence for FLJ30296 (NM_173495.1,841-859).
gccgggatcatcaatctta

SEQ ID NO: 245405 - DNA, 19 bp, Homo sapiens
  siRNA target sequence for FLJ30296 (NM_173495.1,843-861).
cgggatcatcaatcttact

SEQ ID NO: 245406 - DNA, 19 bp, Homo sapiens
  siRNA target sequence for FLJ30296 (NM_173495.1,856-874).
cttactggtgggaaatata

SEQ ID NO: 245407 - DNA, 19 bp, Homo sapiens
  siRNA target sequence for FLJ30296 (NM_173495.1,906-924).
gctaggtcatggattatat

SEQ ID NO: 245408 - DNA, 19 bp, Homo sapiens
  siRNA target sequence for FLJ30296 (NM_173495.1,945-963).
ctcctggaggaaaactaga

SEQ ID NO: 245409 - DNA, 19 bp, Homo sapiens
  siRNA target sequence for FLJ30296 (NM_173495.1,959-977).
ctagagaagaccaacatgt

SEQ ID NO: 245410 - DNA, 19 bp, Homo sapiens
  siRNA target sequence for FLJ30296 (NM_173495.1,1109-1127).
gcaattcctgtattgcaat

SEQ ID NO: 245411 - DNA, 19 bp, Homo sapiens
  siRNA target sequence for FLJ30296 (NM_173495.1,1141-1159).
ctctatgtactctcgtttt

SEQ ID NO: 245412 - DNA, 19 bp, Homo sapiens
  siRNA target sequence for FLJ30296 (NM_173495.1,1143-1161).
ctatgtactctcgttttat

SEQ ID NO: 245413 - DNA, 19 bp, Homo sapiens
  siRNA target sequence for FLJ30296 (NM_173495.1,1147-1165).
gtactctcgttttatggtt

SEQ ID NO: 245414 - DNA, 19 bp, Homo sapiens
  siRNA target sequence for FLJ30296 (NM_173495.1,1211-1229).
gtatcttctgtagaaaagt

SEQ ID NO: 245415 - DNA, 19 bp, Homo sapiens
  siRNA target sequence for FLJ30296 (NM_173495.1,1278-1296).
cctgacggccagattcagt

SEQ ID NO: 245416 - DNA, 19 bp, Homo sapiens
  siRNA target sequence for FLJ30296 (NM_173495.1,1312-1330).
ggcgaggaagcgaacactt

SEQ ID NO: 245417 - DNA, 19 bp, Homo sapiens
  siRNA target sequence for FLJ30296 (NM_173495.1,1313-1331).
gcgaggaagcgaacactta

SEQ ID NO: 245418 - DNA, 19 bp, Homo sapiens
  siRNA target sequence for FLJ30296 (NM_173495.1,1328-1346).
cttacgagagtcacctatt

SEQ ID NO: 245419 - DNA, 19 bp, Homo sapiens
  siRNA target sequence for FLJ30296 (NM_173495.1,1332-1350).
cgagagtcacctattggta

SEQ ID NO: 245420 - DNA, 19 bp, Homo sapiens
  siRNA target sequence for FLJ30296 (NM_173495.1,1352-1370).
gtttcctcaaacgctatta

SEQ ID NO: 245421 - DNA, 19 bp, Homo sapiens
  siRNA target sequence for FLJ30296 (NM_173495.1,1356-1374).
cctcaaacgctattactgt

SEQ ID NO: 245422 - DNA, 19 bp, Homo sapiens
  siRNA target sequence for FLJ30296 (NM_173495.1,1392-1410).
ctatgtcaagccttttgta

SEQ ID NO: 245423 - DNA, 19 bp, Homo sapiens
  siRNA target sequence for FLJ30296 (NM_173495.1,1472-1490).
ggtcagaccttagtaacat

SEQ ID NO: 245424 - DNA, 19 bp, Homo sapiens
  siRNA target sequence for FLJ30296 (NM_173495.1,1492-1510).
gtagcaaccgcgacacaaa

SEQ ID NO: 245425 - DNA, 19 bp, Homo sapiens
  siRNA target sequence for FLJ30296 (NM_173495.1,1496-1514).
caaccgcgacacaaaccat

SEQ ID NO: 245426 - DNA, 19 bp, Homo sapiens
  siRNA target sequence for FLJ30296 (NM_173495.1,1501-1519).
gcgacacaaaccattgagt

SEQ ID NO: 245427 - DNA, 19 bp, Homo sapiens
  siRNA target sequence for FLJ30296 (NM_173495.1,1502-1520).
cgacacaaaccattgagta

SEQ ID NO: 245428 - DNA, 19 bp, Homo sapiens
  siRNA target sequence for FLJ30296 (NM_173495.1,1507-1525).
caaaccattgagtacacta

SEQ ID NO: 245429 - DNA, 19 bp, Homo sapiens
  siRNA target sequence for FLJ30296 (NM_173495.1,1558-1576).
cctgtgattgggttttaca

SEQ ID NO: 245430 - DNA, 19 bp, Homo sapiens
  siRNA target sequence for FLJ30296 (NM_173495.1,1559-1577).
ctgtgattgggttttacat

SEQ ID NO: 245431 - DNA, 19 bp, Homo sapiens
  siRNA target sequence for FLJ30296 (NM_173495.1,1659-1677).
gtttgagagctatttaaat

SEQ ID NO: 245432 - DNA, 19 bp, Homo sapiens
  siRNA target sequence for FLJ30296 (NM_173495.1,1665-1683).
gagctatttaaattacctt

SEQ ID NO: 245433 - DNA, 19 bp, Homo sapiens
  siRNA target sequence for FLJ30296 (NM_173495.1,1700-1718).
ccactggcttgcctaagaa

SEQ ID NO: 245434 - DNA, 19 bp, Homo sapiens
  siRNA target sequence for FLJ30296 (NM_173495.1,1705-1723).
ggcttgcctaagaaaaatt

SEQ ID NO: 245435 - DNA, 19 bp, Homo sapiens
  siRNA target sequence for FLJ30296 (NM_173495.1,1710-1728).
gcctaagaaaaatttcaca

SEQ ID NO: 245436 - DNA, 19 bp, Homo sapiens
  siRNA target sequence for FLJ30296 (NM_173495.1,1729-1747).
gacatgttgaggaattcct

SEQ ID NO: 245437 - DNA, 19 bp, Homo sapiens
  siRNA target sequence for FLJ30296 (NM_173495.1,1822-1840).
gtagtggcctccagaatgt

SEQ ID NO: 245438 - DNA, 19 bp, Homo sapiens
  siRNA target sequence for FLJ30296 (NM_173495.1,1865-1883).
caaacagagaagaactcta

SEQ ID NO: 245439 - DNA, 19 bp, Homo sapiens
  siRNA target sequence for FLJ30296 (NM_173495.1,1871-1889).
gagaagaactctatgatct

SEQ ID NO: 245440 - DNA, 19 bp, Homo sapiens
  siRNA target sequence for FLJ30296 (NM_173495.1,1879-1897).
ctctatgatctcttggaaa

SEQ ID NO: 245441 - DNA, 19 bp, Homo sapiens
  siRNA target sequence for FLJ30296 (NM_173495.1,1929-1947).
gaagttcatcgtcttcaat

SEQ ID NO: 245442 - DNA, 19 bp, Homo sapiens
  siRNA target sequence for FLJ30296 (NM_173495.1,1941-1959).
cttcaatccgtcctttgta

SEQ ID NO: 245443 - DNA, 19 bp, Homo sapiens
  siRNA target sequence for FLJ30296 (NM_173495.1,2054-2072).
cagattcactgattaacgt

SEQ ID NO: 245444 - DNA, 19 bp, Homo sapiens
  siRNA target sequence for FLJ30296 (NM_173495.1,2101-2119).
gagtttggagtgataggtt

SEQ ID NO: 245445 - DNA, 19 bp, Homo sapiens
  siRNA target sequence for FLJ30296 (NM_173495.1,2110-2128).
gtgataggtttcatgacat

SEQ ID NO: 245446 - DNA, 19 bp, Homo sapiens
  siRNA target sequence for FLJ30296 (NM_173495.1,2112-2130).
gataggtttcatgacatta

SEQ ID NO: 245447 - DNA, 19 bp, Homo sapiens
  siRNA target sequence for FLJ30296 (NM_173495.1,2116-2134).
ggtttcatgacattatgga

SEQ ID NO: 245448 - DNA, 19 bp, Homo sapiens
  siRNA target sequence for FLJ30296 (NM_173495.1,2124-2142).
gacattatggaaagtagaa

SEQ ID NO: 245449 - DNA, 19 bp, Homo sapiens
  siRNA target sequence for FLJ30296 (NM_173495.1,2126-2144).
cattatggaaagtagaact

SEQ ID NO: 245450 - DNA, 19 bp, Homo sapiens
  siRNA target sequence for FLJ30296 (NM_173495.1,2137-2155).
gtagaactggactgcattt

SEQ ID NO: 245451 - DNA, 19 bp, Homo sapiens
  siRNA target sequence for FLJ30296 (NM_173495.1,2156-2174).
ctgtgctatgcttaattta

SEQ ID NO: 245452 - DNA, 19 bp, Homo sapiens
  siRNA target sequence for FLJ30296 (NM_173495.1,2161-2179).
ctatgcttaatttatggaa

SEQ ID NO: 245453 - DNA, 19 bp, Homo sapiens
  siRNA target sequence for FLJ30296 (NM_173495.1,2196-2214).
caattgtgctccaatgtta

SEQ ID NO: 245454 - DNA, 19 bp, Homo sapiens
  siRNA target sequence for FLJ30296 (NM_173495.1,2224-2242).
gttctgggcaaggatttca

SEQ ID NO: 245455 - DNA, 19 bp, Homo sapiens
  siRNA target sequence for FLJ30296 (NM_173495.1,2232-2250).
caaggatttcacaagaact

SEQ ID NO: 245456 - DNA, 19 bp, Homo sapiens
  siRNA target sequence for FLJ30296 (NM_173495.1,2236-2254).
gatttcacaagaactaaat

SEQ ID NO: 245457 - DNA, 19 bp, Homo sapiens
  siRNA target sequence for FLJ30296 (NM_173495.1,2275-2293).
gtgcatggggtagctattt

SEQ ID NO: 245458 - DNA, 19 bp, Homo sapiens
  siRNA target sequence for FLJ30296 (NM_173495.1,2277-2295).
gcatggggtagctatttta

SEQ ID NO: 245459 - DNA, 19 bp, Homo sapiens
  siRNA target sequence for FLJ30296 (NM_173495.1,2298-2316).
gagttacctctgctatatt

SEQ ID NO: 245460 - DNA, 19 bp, Homo sapiens
  siRNA target sequence for FLJ30296 (NM_173495.1,2300-2318).
gttacctctgctatattgt

SEQ ID NO: 245461 - DNA, 19 bp, Homo sapiens
  siRNA target sequence for FLJ30296 (NM_173495.1,2336-2354).
cagctgtgccttcaaatct

SEQ ID NO: 245462 - DNA, 19 bp, Homo sapiens
  siRNA target sequence for FLJ30296 (NM_173495.1,2442-2460).
cctgccaccctctaagaaa

SEQ ID NO: 245463 - DNA, 19 bp, Homo sapiens
  siRNA target sequence for FLJ30296 (NM_173495.1,2443-2461).
ctgccaccctctaagaaaa

SEQ ID NO: 245464 - DNA, 19 bp, Homo sapiens
  siRNA target sequence for NPC1 (NM_000271.1,173-191).
cagcgcaggtgttttcaca

SEQ ID NO: 245465 - DNA, 19 bp, Homo sapiens
  siRNA target sequence for NPC1 (NM_000271.1,229-247).
ggggacaagaggtacaatt

SEQ ID NO: 245466 - DNA, 19 bp, Homo sapiens
  siRNA target sequence for NPC1 (NM_000271.1,272-290).
cattgccaaaggatggata

SEQ ID NO: 245467 - DNA, 19 bp, Homo sapiens
  siRNA target sequence for NPC1 (NM_000271.1,336-354).
cagtctctgttgtgatgtt

SEQ ID NO: 245468 - DNA, 19 bp, Homo sapiens
  siRNA target sequence for NPC1 (NM_000271.1,355-373).
cggcagcttcagacactaa

SEQ ID NO: 245469 - DNA, 19 bp, Homo sapiens
  siRNA target sequence for NPC1 (NM_000271.1,357-375).
gcagcttcagacactaaaa

SEQ ID NO: 245470 - DNA, 19 bp, Homo sapiens
  siRNA target sequence for NPC1 (NM_000271.1,408-426).
cagatgtccatcctgtttt

SEQ ID NO: 245471 - DNA, 19 bp, Homo sapiens
  siRNA target sequence for NPC1 (NM_000271.1,432-450).
cctactgaacctgttttgt

SEQ ID NO: 245472 - DNA, 19 bp, Homo sapiens
  siRNA target sequence for NPC1 (NM_000271.1,466-484).
cctcgacagagtcagtttt

SEQ ID NO: 245473 - DNA, 19 bp, Homo sapiens
  siRNA target sequence for NPC1 (NM_000271.1,469-487).
cgacagagtcagtttttga

SEQ ID NO: 245474 - DNA, 19 bp, Homo sapiens
  siRNA target sequence for NPC1 (NM_000271.1,575-593).
gttttgccaatgcaatgta

SEQ ID NO: 245475 - DNA, 19 bp, Homo sapiens
  siRNA target sequence for NPC1 (NM_000271.1,679-697).
gccaccaactggattgaat

SEQ ID NO: 245476 - DNA, 19 bp, Homo sapiens
  siRNA target sequence for NPC1 (NM_000271.1,680-698).
ccaccaactggattgaata

SEQ ID NO: 245477 - DNA, 19 bp, Homo sapiens
  siRNA target sequence for NPC1 (NM_000271.1,683-701).
ccaactggattgaatacat

SEQ ID NO: 245478 - DNA, 19 bp, Homo sapiens
  siRNA target sequence for NPC1 (NM_000271.1,769-787).
gggatggagcccatgaaca

SEQ ID NO: 245479 - DNA, 19 bp, Homo sapiens
  siRNA target sequence for NPC1 (NM_000271.1,770-788).
ggatggagcccatgaacaa

SEQ ID NO: 245480 - DNA, 19 bp, Homo sapiens
  siRNA target sequence for NPC1 (NM_000271.1,771-789).
gatggagcccatgaacaat

SEQ ID NO: 245481 - DNA, 19 bp, Homo sapiens
  siRNA target sequence for NPC1 (NM_000271.1,842-860).
gccaagactgctctattgt

SEQ ID NO: 245482 - DNA, 19 bp, Homo sapiens
  siRNA target sequence for NPC1 (NM_000271.1,914-932).
gcttggacgccatgtatgt

SEQ ID NO: 245483 - DNA, 19 bp, Homo sapiens
  siRNA target sequence for NPC1 (NM_000271.1,947-965).
cctacatggcgtttttgct

SEQ ID NO: 245484 - DNA, 19 bp, Homo sapiens
  siRNA target sequence for NPC1 (NM_000271.1,1024-1042).
gagtacactcccatcgata

SEQ ID NO: 245485 - DNA, 19 bp, Homo sapiens
  siRNA target sequence for NPC1 (NM_000271.1,1029-1047).
cactcccatcgatagcaat

SEQ ID NO: 245486 - DNA, 19 bp, Homo sapiens
  siRNA target sequence for NPC1 (NM_000271.1,1031-1049).
ctcccatcgatagcaatat

SEQ ID NO: 245487 - DNA, 19 bp, Homo sapiens
  siRNA target sequence for NPC1 (NM_000271.1,1035-1053).
catcgatagcaatatagct

SEQ ID NO: 245488 - DNA, 19 bp, Homo sapiens
  siRNA target sequence for NPC1 (NM_000271.1,1038-1056).
cgatagcaatatagctttt

SEQ ID NO: 245489 - DNA, 19 bp, Homo sapiens
  siRNA target sequence for NPC1 (NM_000271.1,1191-1209).
ctcgctggtcttcattact

SEQ ID NO: 245490 - DNA, 19 bp, Homo sapiens
  siRNA target sequence for NPC1 (NM_000271.1,1217-1235).
cgtcaggcctggtgtttgt

SEQ ID NO: 245491 - DNA, 19 bp, Homo sapiens
  siRNA target sequence for NPC1 (NM_000271.1,1285-1303).
gctcgcctggaaaaagagt

SEQ ID NO: 245492 - DNA, 19 bp, Homo sapiens
  siRNA target sequence for NPC1 (NM_000271.1,1286-1304).
ctcgcctggaaaaagagta

SEQ ID NO: 245493 - DNA, 19 bp, Homo sapiens
  siRNA target sequence for NPC1 (NM_000271.1,1418-1436).
gacctccgcttgacataca

SEQ ID NO: 245494 - DNA, 19 bp, Homo sapiens
  siRNA target sequence for NPC1 (NM_000271.1,1424-1442).
cgcttgacatacagatact

SEQ ID NO: 245495 - DNA, 19 bp, Homo sapiens
  siRNA target sequence for NPC1 (NM_000271.1,1443-1461).
gcaccaggttcttgactta

SEQ ID NO: 245496 - DNA, 19 bp, Homo sapiens
  siRNA target sequence for NPC1 (NM_000271.1,1449-1467).
ggttcttgacttacaaata

SEQ ID NO: 245497 - DNA, 19 bp, Homo sapiens
  siRNA target sequence for NPC1 (NM_000271.1,1505-1523).
ctgtgacacttcaagacat

SEQ ID NO: 245498 - DNA, 19 bp, Homo sapiens
  siRNA target sequence for NPC1 (NM_000271.1,1524-1542).
ctgcttggcccctctttca

SEQ ID NO: 245499 - DNA, 19 bp, Homo sapiens
  siRNA target sequence for NPC1 (NM_000271.1,1532-1550).
cccctctttcaccgtataa

SEQ ID NO: 245500 - DNA, 19 bp, Homo sapiens
  siRNA target sequence for NPC1 (NM_000271.1,1534-1552).
cctctttcaccgtataaca

SEQ ID NO: 245501 - DNA, 19 bp, Homo sapiens
  siRNA target sequence for NPC1 (NM_000271.1,1554-1572).
gaactgcaccattttgagt

SEQ ID NO: 245502 - DNA, 19 bp, Homo sapiens
  siRNA target sequence for NPC1 (NM_000271.1,1617-1635).
gaaaggggacgacttcttt

SEQ ID NO: 245503 - DNA, 19 bp, Homo sapiens
  siRNA target sequence for NPC1 (NM_000271.1,1622-1640).
gggacgacttctttgtgta

SEQ ID NO: 245504 - DNA, 19 bp, Homo sapiens
  siRNA target sequence for NPC1 (NM_000271.1,1623-1641).
ggacgacttctttgtgtat

SEQ ID NO: 245505 - DNA, 19 bp, Homo sapiens
  siRNA target sequence for NPC1 (NM_000271.1,1681-1699).
cctgcctctctgaatgata

SEQ ID NO: 245506 - DNA, 19 bp, Homo sapiens
  siRNA target sequence for NPC1 (NM_000271.1,1684-1702).
gcctctctgaatgatacaa

SEQ ID NO: 245507 - DNA, 19 bp, Homo sapiens
  siRNA target sequence for NPC1 (NM_000271.1,1686-1704).
ctctctgaatgatacaagt

SEQ ID NO: 245508 - DNA, 19 bp, Homo sapiens
  siRNA target sequence for NPC1 (NM_000271.1,1716-1734).
cccttgtctgggtacgttt

SEQ ID NO: 245509 - DNA, 19 bp, Homo sapiens
  siRNA target sequence for NPC1 (NM_000271.1,1794-1812).
cgccactgcccttgtgatt

SEQ ID NO: 245510 - DNA, 19 bp, Homo sapiens
  siRNA target sequence for NPC1 (NM_000271.1,1795-1813).
gccactgcccttgtgatta

SEQ ID NO: 245511 - DNA, 19 bp, Homo sapiens
  siRNA target sequence for NPC1 (NM_000271.1,1818-1836).
ccctgtcaataattactat

SEQ ID NO: 245512 - DNA, 19 bp, Homo sapiens
  siRNA target sequence for NPC1 (NM_000271.1,1819-1837).
cctgtcaataattactata

SEQ ID NO: 245513 - DNA, 19 bp, Homo sapiens
  siRNA target sequence for NPC1 (NM_000271.1,1820-1838).
ctgtcaataattactataa

SEQ ID NO: 245514 - DNA, 19 bp, Homo sapiens
  siRNA target sequence for NPC1 (NM_000271.1,1934-1952).
ctgctgaacgaagtattga

SEQ ID NO: 245515 - DNA, 19 bp, Homo sapiens
  siRNA target sequence for NPC1 (NM_000271.1,1981-1999).
gatgtcttcaccgttgtaa

SEQ ID NO: 245516 - DNA, 19 bp, Homo sapiens
  siRNA target sequence for NPC1 (NM_000271.1,1984-2002).
gtcttcaccgttgtaatta

SEQ ID NO: 245517 - DNA, 19 bp, Homo sapiens
  siRNA target sequence for NPC1 (NM_000271.1,1989-2007).
caccgttgtaattagctat

SEQ ID NO: 245518 - DNA, 19 bp, Homo sapiens
  siRNA target sequence for NPC1 (NM_000271.1,2063-2081).
ggcttctggtggattcgaa

SEQ ID NO: 245519 - DNA, 19 bp, Homo sapiens
  siRNA target sequence for NPC1 (NM_000271.1,2165-2183).
ccttgaccctcattgtgat

SEQ ID NO: 245520 - DNA, 19 bp, Homo sapiens
  siRNA target sequence for NPC1 (NM_000271.1,2169-2187).
gaccctcattgtgattgaa

SEQ ID NO: 245521 - DNA, 19 bp, Homo sapiens
  siRNA target sequence for NPC1 (NM_000271.1,2171-2189).
ccctcattgtgattgaagt

SEQ ID NO: 245522 - DNA, 19 bp, Homo sapiens
  siRNA target sequence for NPC1 (NM_000271.1,2210-2228).
ctgttggagtggacaacat

SEQ ID NO: 245523 - DNA, 19 bp, Homo sapiens
  siRNA target sequence for NPC1 (NM_000271.1,2212-2230).
gttggagtggacaacatct

SEQ ID NO: 245524 - DNA, 19 bp, Homo sapiens
  siRNA target sequence for NPC1 (NM_000271.1,2244-2262).
ggcctaccagagagatgaa

SEQ ID NO: 245525 - DNA, 19 bp, Homo sapiens
  siRNA target sequence for NPC1 (NM_000271.1,2311-2329).
gaagtggctcccagtatgt

SEQ ID NO: 245526 - DNA, 19 bp, Homo sapiens
  siRNA target sequence for NPC1 (NM_000271.1,2414-2432).
cgggattggcagtcttcat

SEQ ID NO: 245527 - DNA, 19 bp, Homo sapiens
  siRNA target sequence for NPC1 (NM_000271.1,2417-2435).
gattggcagtcttcattga

SEQ ID NO: 245528 - DNA, 19 bp, Homo sapiens
  siRNA target sequence for NPC1 (NM_000271.1,2465-2483).
gtctcttggggttagacat

SEQ ID NO: 245529 - DNA, 19 bp, Homo sapiens
  siRNA target sequence for NPC1 (NM_000271.1,2467-2485).
ctcttggggttagacatta

SEQ ID NO: 245530 - DNA, 19 bp, Homo sapiens
  siRNA target sequence for NPC1 (NM_000271.1,2472-2490).
ggggttagacattaaacgt

SEQ ID NO: 245531 - DNA, 19 bp, Homo sapiens
  siRNA target sequence for NPC1 (NM_000271.1,2503-2521).
cggctagacatcttttgct

SEQ ID NO: 245532 - DNA, 19 bp, Homo sapiens
  siRNA target sequence for NPC1 (NM_000271.1,2557-2575).
gcctcagagagctgtttgt

SEQ ID NO: 245533 - DNA, 19 bp, Homo sapiens
  siRNA target sequence for NPC1 (NM_000271.1,2570-2588).
gtttgtttcgcttcttcaa

SEQ ID NO: 245534 - DNA, 19 bp, Homo sapiens
  siRNA target sequence for NPC1 (NM_000271.1,2600-2618).
ctccacttctgctaaagga

SEQ ID NO: 245535 - DNA, 19 bp, Homo sapiens
  siRNA target sequence for NPC1 (NM_000271.1,2616-2634).
ggactggatgagaccaatt

SEQ ID NO: 245536 - DNA, 19 bp, Homo sapiens
  siRNA target sequence for NPC1 (NM_000271.1,2621-2639).
ggatgagaccaattgtgat

SEQ ID NO: 245537 - DNA, 19 bp, Homo sapiens
  siRNA target sequence for NPC1 (NM_000271.1,2622-2640).
gatgagaccaattgtgata

SEQ ID NO: 245538 - DNA, 19 bp, Homo sapiens
  siRNA target sequence for NPC1 (NM_000271.1,2627-2645).
gaccaattgtgatagcaat

SEQ ID NO: 245539 - DNA, 19 bp, Homo sapiens
  siRNA target sequence for NPC1 (NM_000271.1,2629-2647).
ccaattgtgatagcaatat

SEQ ID NO: 245540 - DNA, 19 bp, Homo sapiens
  siRNA target sequence for NPC1 (NM_000271.1,2650-2668).
gtgggtgttctgtcattca

SEQ ID NO: 245541 - DNA, 19 bp, Homo sapiens
  siRNA target sequence for NPC1 (NM_000271.1,2673-2691).
cgcagtcctgaacaaagta

SEQ ID NO: 245542 - DNA, 19 bp, Homo sapiens
  siRNA target sequence for NPC1 (NM_000271.1,2675-2693).
cagtcctgaacaaagtaga

SEQ ID NO: 245543 - DNA, 19 bp, Homo sapiens
  siRNA target sequence for NPC1 (NM_000271.1,2778-2796).
gggtccgcctgtgtacttt

SEQ ID NO: 245544 - DNA, 19 bp, Homo sapiens
  siRNA target sequence for NPC1 (NM_000271.1,2806-2824).
gaagggcacgactacactt

SEQ ID NO: 245545 - DNA, 19 bp, Homo sapiens
  siRNA target sequence for NPC1 (NM_000271.1,2809-2827).
gggcacgactacacttctt

SEQ ID NO: 245546 - DNA, 19 bp, Homo sapiens
  siRNA target sequence for NPC1 (NM_000271.1,2853-2871).
cggcatgggctgcaacaat

SEQ ID NO: 245547 - DNA, 19 bp, Homo sapiens
  siRNA target sequence for NPC1 (NM_000271.1,2856-2874).
catgggctgcaacaatgat

SEQ ID NO: 245548 - DNA, 19 bp, Homo sapiens
  siRNA target sequence for NPC1 (NM_000271.1,2902-2920).
gcgcagctggacaactata

SEQ ID NO: 245549 - DNA, 19 bp, Homo sapiens
  siRNA target sequence for NPC1 (NM_000271.1,2942-2960).
cgtcctggatcgacgatta

SEQ ID NO: 245550 - DNA, 19 bp, Homo sapiens
  siRNA target sequence for NPC1 (NM_000271.1,2943-2961).
gtcctggatcgacgattat

SEQ ID NO: 245551 - DNA, 19 bp, Homo sapiens
  siRNA target sequence for NPC1 (NM_000271.1,2945-2963).
cctggatcgacgattattt

SEQ ID NO: 245552 - DNA, 19 bp, Homo sapiens
  siRNA target sequence for NPC1 (NM_000271.1,2948-2966).
ggatcgacgattatttcga

SEQ ID NO: 245553 - DNA, 19 bp, Homo sapiens
  siRNA target sequence for NPC1 (NM_000271.1,2990-3008).
gctgtcgagtggacaatat

SEQ ID NO: 245554 - DNA, 19 bp, Homo sapiens
  siRNA target sequence for NPC1 (NM_000271.1,3098-3116).
ggggagacttcatgagatt

SEQ ID NO: 245555 - DNA, 19 bp, Homo sapiens
  siRNA target sequence for NPC1 (NM_000271.1,3165-3183).
gggacatgctgcctatagt

SEQ ID NO: 245556 - DNA, 19 bp, Homo sapiens
  siRNA target sequence for NPC1 (NM_000271.1,3166-3184).
ggacatgctgcctatagtt

SEQ ID NO: 245557 - DNA, 19 bp, Homo sapiens
  siRNA target sequence for NPC1 (NM_000271.1,3176-3194).
cctatagttctgcagttaa

SEQ ID NO: 245558 - DNA, 19 bp, Homo sapiens
  siRNA target sequence for NPC1 (NM_000271.1,3223-3241).
ggagccacgtacttcatga

SEQ ID NO: 245559 - DNA, 19 bp, Homo sapiens
  siRNA target sequence for NPC1 (NM_000271.1,3259-3277).
cagacctctgctgacttta

SEQ ID NO: 245560 - DNA, 19 bp, Homo sapiens
  siRNA target sequence for NPC1 (NM_000271.1,3261-3279).
gacctctgctgactttatt

SEQ ID NO: 245561 - DNA, 19 bp, Homo sapiens
  siRNA target sequence for NPC1 (NM_000271.1,3288-3306).
gaagaaagcccgacttata

SEQ ID NO: 245562 - DNA, 19 bp, Homo sapiens
  siRNA target sequence for NPC1 (NM_000271.1,3297-3315).
ccgacttatagccagtaat

SEQ ID NO: 245563 - DNA, 19 bp, Homo sapiens
  siRNA target sequence for NPC1 (NM_000271.1,3299-3317).
gacttatagccagtaatgt

SEQ ID NO: 245564 - DNA, 19 bp, Homo sapiens
  siRNA target sequence for NPC1 (NM_000271.1,3301-3319).
cttatagccagtaatgtca

SEQ ID NO: 245565 - DNA, 19 bp, Homo sapiens
  siRNA target sequence for NPC1 (NM_000271.1,3320-3338).
ccgaaaccatgggcattaa

SEQ ID NO: 245566 - DNA, 19 bp, Homo sapiens
  siRNA target sequence for NPC1 (NM_000271.1,3342-3360).
cagtgcctaccgagtattt

SEQ ID NO: 245567 - DNA, 19 bp, Homo sapiens
  siRNA target sequence for NPC1 (NM_000271.1,3347-3365).
cctaccgagtatttcctta

SEQ ID NO: 245568 - DNA, 19 bp, Homo sapiens
  siRNA target sequence for NPC1 (NM_000271.1,3351-3369).
ccgagtatttccttacagt

SEQ ID NO: 245569 - DNA, 19 bp, Homo sapiens
  siRNA target sequence for NPC1 (NM_000271.1,3401-3419).
ccatcattgacgacactat

SEQ ID NO: 245570 - DNA, 19 bp, Homo sapiens
  siRNA target sequence for NPC1 (NM_000271.1,3566-3584).
gtctgaacgctgtatcctt

SEQ ID NO: 245571 - DNA, 19 bp, Homo sapiens
  siRNA target sequence for NPC1 (NM_000271.1,3645-3663).
gttcacggtgagcatgaaa

SEQ ID NO: 245572 - DNA, 19 bp, Homo sapiens
  siRNA target sequence for NPC1 (NM_000271.1,3714-3732).
cgtgttcagtggaatcaca

SEQ ID NO: 245573 - DNA, 19 bp, Homo sapiens
  siRNA target sequence for NPC1 (NM_000271.1,3720-3738).
cagtggaatcacacttaca

SEQ ID NO: 245574 - DNA, 19 bp, Homo sapiens
  siRNA target sequence for NPC1 (NM_000271.1,3729-3747).
cacacttacaaaatttgga

SEQ ID NO: 245575 - DNA, 19 bp, Homo sapiens
  siRNA target sequence for NPC1 (NM_000271.1,3759-3777).
gttggcttttgccaaatct

SEQ ID NO: 245576 - DNA, 19 bp, Homo sapiens
  siRNA target sequence for NPC1 (NM_000271.1,3829-3847).
ggagccactcacggattaa

SEQ ID NO: 245577 - DNA, 19 bp, Homo sapiens
  siRNA target sequence for NPC1 (NM_000271.1,3830-3848).
gagccactcacggattaat

SEQ ID NO: 245578 - DNA, 19 bp, Homo sapiens
  siRNA target sequence for NPC1 (NM_000271.1,3832-3850).
gccactcacggattaatat

SEQ ID NO: 245579 - DNA, 19 bp, Homo sapiens
  siRNA target sequence for NPC1 (NM_000271.1,3873-3891).
catagggccatcagtaaat

SEQ ID NO: 245580 - DNA, 19 bp, Homo sapiens
  siRNA target sequence for NPC1 (NM_000271.1,3908-3926).
ccactgaagagcgatacaa

SEQ ID NO: 245581 - DNA, 19 bp, Homo sapiens
  siRNA target sequence for NPC1 (NM_000271.1,3909-3927).
cactgaagagcgatacaaa

SEQ ID NO: 245582 - DNA, 19 bp, Homo sapiens
  siRNA target sequence for NPC1 (NM_000271.1,3934-3952).
gagcgcgaacggcttctaa

SEQ ID NO: 245583 - DNA, 19 bp, Homo sapiens
  siRNA target sequence for NPC1 (NM_000271.1,3936-3954).
gcgcgaacggcttctaaat

SEQ ID NO: 245584 - DNA, 19 bp, Homo sapiens
  siRNA target sequence for NPC1 (NM_000271.1,3937-3955).
cgcgaacggcttctaaatt

SEQ ID NO: 245585 - DNA, 19 bp, Homo sapiens
  siRNA target sequence for NPC1 (NM_000271.1,3938-3956).
gcgaacggcttctaaattt

SEQ ID NO: 245586 - DNA, 19 bp, Homo sapiens
  siRNA target sequence for NPC1 (NM_000271.1,3940-3958).
gaacggcttctaaatttct

SEQ ID NO: 245587 - DNA, 19 bp, Homo sapiens
  siRNA target sequence for NPC1L1 (NM_013389.1,114-132).
cagagtgagccttacacaa

SEQ ID NO: 245588 - DNA, 19 bp, Homo sapiens
  siRNA target sequence for NPC1L1 (NM_013389.1,148-166).
gctactgcgccttctatga

SEQ ID NO: 245589 - DNA, 19 bp, Homo sapiens
  siRNA target sequence for NPC1L1 (NM_013389.1,258-276).
ggtgatcacctgatcctat

SEQ ID NO: 245590 - DNA, 19 bp, Homo sapiens
  siRNA target sequence for NPC1L1 (NM_013389.1,259-277).
gtgatcacctgatcctatt

SEQ ID NO: 245591 - DNA, 19 bp, Homo sapiens
  siRNA target sequence for NPC1L1 (NM_013389.1,264-282).
cacctgatcctattacaga

SEQ ID NO: 245592 - DNA, 19 bp, Homo sapiens
  siRNA target sequence for NPC1L1 (NM_013389.1,395-413).
cccagcctgctctgacaat

SEQ ID NO: 245593 - DNA, 19 bp, Homo sapiens
  siRNA target sequence for NPC1L1 (NM_013389.1,396-414).
ccagcctgctctgacaatt

SEQ ID NO: 245594 - DNA, 19 bp, Homo sapiens
  siRNA target sequence for NPC1L1 (NM_013389.1,397-415).
cagcctgctctgacaattt

SEQ ID NO: 245595 - DNA, 19 bp, Homo sapiens
  siRNA target sequence for NPC1L1 (NM_013389.1,448-466).
ccaatcagagcctcttcat

SEQ ID NO: 245596 - DNA, 19 bp, Homo sapiens
  siRNA target sequence for NPC1L1 (NM_013389.1,774-792).
gttgcacgttgcaatgagt

SEQ ID NO: 245597 - DNA, 19 bp, Homo sapiens
  siRNA target sequence for NPC1L1 (NM_013389.1,1224-1242).
gcccggagtgagaaagctt

SEQ ID NO: 245598 - DNA, 19 bp, Homo sapiens
  siRNA target sequence for NPC1L1 (NM_013389.1,1225-1243).
cccggagtgagaaagcttt

SEQ ID NO: 245599 - DNA, 19 bp, Homo sapiens
  siRNA target sequence for NPC1L1 (NM_013389.1,1476-1494).
cccctcaatccggacaata

SEQ ID NO: 245600 - DNA, 19 bp, Homo sapiens
  siRNA target sequence for NPC1L1 (NM_013389.1,1479-1497).
ctcaatccggacaatacca

SEQ ID NO: 245601 - DNA, 19 bp, Homo sapiens
  siRNA target sequence for NPC1L1 (NM_013389.1,1772-1790).
gacgttctccctcaacaat

SEQ ID NO: 245602 - DNA, 19 bp, Homo sapiens
  siRNA target sequence for NPC1L1 (NM_013389.1,1774-1792).
cgttctccctcaacaatta

SEQ ID NO: 245603 - DNA, 19 bp, Homo sapiens
  siRNA target sequence for NPC1L1 (NM_013389.1,1972-1990).
gctacattgtcatattcct

SEQ ID NO: 245604 - DNA, 19 bp, Homo sapiens
  siRNA target sequence for NPC1L1 (NM_013389.1,2179-2197).
ccgtgggggctgataacat

SEQ ID NO: 245605 - DNA, 19 bp, Homo sapiens
  siRNA target sequence for NPC1L1 (NM_013389.1,2181-2199).
gtgggggctgataacatct

SEQ ID NO: 245606 - DNA, 19 bp, Homo sapiens
  siRNA target sequence for NPC1L1 (NM_013389.1,2185-2203).
gggctgataacatcttcat

SEQ ID NO: 245607 - DNA, 19 bp, Homo sapiens
  siRNA target sequence for NPC1L1 (NM_013389.1,2188-2206).
ctgataacatcttcatctt

SEQ ID NO: 245608 - DNA, 19 bp, Homo sapiens
  siRNA target sequence for NPC1L1 (NM_013389.1,2698-2716).
cgtacctgcttgactattt

SEQ ID NO: 245609 - DNA, 19 bp, Homo sapiens
  siRNA target sequence for NPC1L1 (NM_013389.1,2709-2727).
gactatttcctctttctga

SEQ ID NO: 245610 - DNA, 19 bp, Homo sapiens
  siRNA target sequence for NPC1L1 (NM_013389.1,2789-2807).
cagcgaggctgggatgaat

SEQ ID NO: 245611 - DNA, 19 bp, Homo sapiens
  siRNA target sequence for NPC1L1 (NM_013389.1,2823-2841).
gcaggctgcaacaacttct

SEQ ID NO: 245612 - DNA, 19 bp, Homo sapiens
  siRNA target sequence for NPC1L1 (NM_013389.1,2911-2929).
cctgggtggatgacttcat

SEQ ID NO: 245613 - DNA, 19 bp, Homo sapiens
  siRNA target sequence for NPC1L1 (NM_013389.1,2954-2972).
ctgccgcctttatatatct

SEQ ID NO: 245614 - DNA, 19 bp, Homo sapiens
  siRNA target sequence for NPC1L1 (NM_013389.1,2976-2994).
cccaataaggacaagttct

SEQ ID NO: 245615 - DNA, 19 bp, Homo sapiens
  siRNA target sequence for NPC1L1 (NM_013389.1,3074-3092).
gcagttccataagtatctt

SEQ ID NO: 245616 - DNA, 19 bp, Homo sapiens
  siRNA target sequence for NPC1L1 (NM_013389.1,3280-3298).
ggttcatggcctatcacaa

SEQ ID NO: 245617 - DNA, 19 bp, Homo sapiens
  siRNA target sequence for NPC1L1 (NM_013389.1,3391-3409).
gaacagacccggcttttga

SEQ ID NO: 245618 - DNA, 19 bp, Homo sapiens
  siRNA target sequence for NPC1L1 (NM_013389.1,3422-3440).
cacgatcaccaatgtgttt

SEQ ID NO: 245619 - DNA, 19 bp, Homo sapiens
  siRNA target sequence for NPC1L1 (NM_013389.1,3609-3627).
ctgtggggcatcagttaca

SEQ ID NO: 245620 - DNA, 19 bp, Homo sapiens
  siRNA target sequence for NPC1L1 (NM_013389.1,3611-3629).
gtggggcatcagttacaat

SEQ ID NO: 245621 - DNA, 19 bp, Homo sapiens
  siRNA target sequence for NPC1L1 (NM_013389.1,3675-3693).
gagtttgtgtcccacatta

SEQ ID NO: 245622 - DNA, 19 bp, Homo sapiens
  siRNA target sequence for NPC1L1 (NM_013389.1,4039-4057).
cagctgacaacatctatgt

SEQ ID NO: 245623 - DNA, 19 bp, Homo sapiens
  siRNA target sequence for NPC1L1 (NM_013389.1,4066-4084).
gctttgaaggttctatcaa

SEQ ID NO: 245624 - DNA, 19 bp, Homo sapiens
  siRNA target sequence for NPC1L1 (NM_013389.1,4067-4085).
ctttgaaggttctatcaaa

SEQ ID NO: 245625 - DNA, 19 bp, Homo sapiens
  siRNA target sequence for PTCH (NM_000264.2,419-437).
gtggctgagagcgaagttt

SEQ ID NO: 245626 - DNA, 19 bp, Homo sapiens
  siRNA target sequence for PTCH (NM_000264.2,458-476).
gggttgttacattcaaaaa

SEQ ID NO: 245627 - DNA, 19 bp, Homo sapiens
  siRNA target sequence for PTCH (NM_000264.2,495-513).
gttgtgggcctcctcatat

SEQ ID NO: 245628 - DNA, 19 bp, Homo sapiens
  siRNA target sequence for PTCH (NM_000264.2,519-537).
gccttcgcggtgggattaa

SEQ ID NO: 245629 - DNA, 19 bp, Homo sapiens
  siRNA target sequence for PTCH (NM_000264.2,520-538).
ccttcgcggtgggattaaa

SEQ ID NO: 245630 - DNA, 19 bp, Homo sapiens
  siRNA target sequence for PTCH (NM_000264.2,521-539).
cttcgcggtgggattaaaa

SEQ ID NO: 245631 - DNA, 19 bp, Homo sapiens
  siRNA target sequence for PTCH (NM_000264.2,524-542).
cgcggtgggattaaaagca

SEQ ID NO: 245632 - DNA, 19 bp, Homo sapiens
  siRNA target sequence for PTCH (NM_000264.2,589-607).
gacgagtaagtcgtgaatt

SEQ ID NO: 245633 - DNA, 19 bp, Homo sapiens
  siRNA target sequence for PTCH (NM_000264.2,591-609).
cgagtaagtcgtgaattaa

SEQ ID NO: 245634 - DNA, 19 bp, Homo sapiens
  siRNA target sequence for PTCH (NM_000264.2,651-669).
cctcaactcatgatacaga

SEQ ID NO: 245635 - DNA, 19 bp, Homo sapiens
  siRNA target sequence for PTCH (NM_000264.2,662-680).
gatacagacccctaaagaa

SEQ ID NO: 245636 - DNA, 19 bp, Homo sapiens
  siRNA target sequence for PTCH (NM_000264.2,741-759).
gccagccgtgtccatgtat

SEQ ID NO: 245637 - DNA, 19 bp, Homo sapiens
  siRNA target sequence for PTCH (NM_000264.2,742-760).
ccagccgtgtccatgtata

SEQ ID NO: 245638 - DNA, 19 bp, Homo sapiens
  siRNA target sequence for PTCH (NM_000264.2,745-763).
gccgtgtccatgtatacat

SEQ ID NO: 245639 - DNA, 19 bp, Homo sapiens
  siRNA target sequence for PTCH (NM_000264.2,747-765).
cgtgtccatgtatacatgt

SEQ ID NO: 245640 - DNA, 19 bp, Homo sapiens
  siRNA target sequence for PTCH (NM_000264.2,922-940).
cagcatacctcctaggtaa

SEQ ID NO: 245641 - DNA, 19 bp, Homo sapiens
  siRNA target sequence for PTCH (NM_000264.2,946-964).
ctttgcggtggacaaactt

SEQ ID NO: 245642 - DNA, 19 bp, Homo sapiens
  siRNA target sequence for PTCH (NM_000264.2,987-1005).
gagttaaagaaaataaact

SEQ ID NO: 245643 - DNA, 19 bp, Homo sapiens
  siRNA target sequence for PTCH (NM_000264.2,1042-1060).
ctgaggttggtcatggtta

SEQ ID NO: 245644 - DNA, 19 bp, Homo sapiens
  siRNA target sequence for PTCH (NM_000264.2,1137-1155).
cttgatatggcccttgttt

SEQ ID NO: 245645 - DNA, 19 bp, Homo sapiens
  siRNA target sequence for PTCH (NM_000264.2,1170-1188).
catggcttatccagaaagt

SEQ ID NO: 245646 - DNA, 19 bp, Homo sapiens
  siRNA target sequence for PTCH (NM_000264.2,1173-1191).
ggcttatccagaaagtata

SEQ ID NO: 245647 - DNA, 19 bp, Homo sapiens
  siRNA target sequence for PTCH (NM_000264.2,1174-1192).
gcttatccagaaagtatat

SEQ ID NO: 245648 - DNA, 19 bp, Homo sapiens
  siRNA target sequence for PTCH (NM_000264.2,1274-1292).
catgttccagttaatgact

SEQ ID NO: 245649 - DNA, 19 bp, Homo sapiens
  siRNA target sequence for PTCH (NM_000264.2,1381-1399).
cctggcagaggacatatgt

SEQ ID NO: 245650 - DNA, 19 bp, Homo sapiens
  siRNA target sequence for PTCH (NM_000264.2,1511-1529).
cgtggccagcggctactta

SEQ ID NO: 245651 - DNA, 19 bp, Homo sapiens
  siRNA target sequence for PTCH (NM_000264.2,1654-1672).
cattgatcggaatttcctt

SEQ ID NO: 245652 - DNA, 19 bp, Homo sapiens
  siRNA target sequence for PTCH (NM_000264.2,1670-1688).
ctttaacgctgcaacaact

SEQ ID NO: 245653 - DNA, 19 bp, Homo sapiens
  siRNA target sequence for PTCH (NM_000264.2,1743-1761).
gcccacgccttcagtgaaa

SEQ ID NO: 245654 - DNA, 19 bp, Homo sapiens
  siRNA target sequence for PTCH (NM_000264.2,1745-1763).
ccacgccttcagtgaaaca

SEQ ID NO: 245655 - DNA, 19 bp, Homo sapiens
  siRNA target sequence for PTCH (NM_000264.2,2139-2157).
gcccatgaaacgcagatta

SEQ ID NO: 245656 - DNA, 19 bp, Homo sapiens
  siRNA target sequence for PTCH (NM_000264.2,2142-2160).
catgaaacgcagattacca

SEQ ID NO: 245657 - DNA, 19 bp, Homo sapiens
  siRNA target sequence for PTCH (NM_000264.2,2197-2215).
cccacacgcacgtgtacta

SEQ ID NO: 245658 - DNA, 19 bp, Homo sapiens
  siRNA target sequence for PTCH (NM_000264.2,2199-2217).
cacacgcacgtgtactaca

SEQ ID NO: 245659 - DNA, 19 bp, Homo sapiens
  siRNA target sequence for PTCH (NM_000264.2,2375-2393).
gtggacactctcatctttt

SEQ ID NO: 245660 - DNA, 19 bp, Homo sapiens
  siRNA target sequence for PTCH (NM_000264.2,2439-2457).
gtagtggtgatcttccttt

SEQ ID NO: 245661 - DNA, 19 bp, Homo sapiens
  siRNA target sequence for PTCH (NM_000264.2,2468-2486).
gctgggggtcagcctttat

SEQ ID NO: 245662 - DNA, 19 bp, Homo sapiens
  siRNA target sequence for PTCH (NM_000264.2,2513-2531).
ggaccttacggacattgta

SEQ ID NO: 245663 - DNA, 19 bp, Homo sapiens
  siRNA target sequence for PTCH (NM_000264.2,2533-2551).
ctcgggaaaccagagaata

SEQ ID NO: 245664 - DNA, 19 bp, Homo sapiens
  siRNA target sequence for PTCH (NM_000264.2,2565-2583).
gcacaattcaaatactttt

SEQ ID NO: 245665 - DNA, 19 bp, Homo sapiens
  siRNA target sequence for PTCH (NM_000264.2,2584-2602).
ctttctacaacatgtatat

SEQ ID NO: 245666 - DNA, 19 bp, Homo sapiens
  siRNA target sequence for PTCH (NM_000264.2,2617-2635).
cagactacccgaatatcca

SEQ ID NO: 245667 - DNA, 19 bp, Homo sapiens
  siRNA target sequence for PTCH (NM_000264.2,2649-2667).
gacctacacaggagtttca

SEQ ID NO: 245668 - DNA, 19 bp, Homo sapiens
  siRNA target sequence for PTCH (NM_000264.2,2651-2669).
cctacacaggagtttcagt

SEQ ID NO: 245669 - DNA, 19 bp, Homo sapiens
  siRNA target sequence for PTCH (NM_000264.2,2662-2680).
gtttcagtaacgtgaagta

SEQ ID NO: 245670 - DNA, 19 bp, Homo sapiens
  siRNA target sequence for PTCH (NM_000264.2,2668-2686).
gtaacgtgaagtatgtcat

SEQ ID NO: 245671 - DNA, 19 bp, Homo sapiens
  siRNA target sequence for PTCH (NM_000264.2,2682-2700).
gtcatgttggaagaaaaca

SEQ ID NO: 245672 - DNA, 19 bp, Homo sapiens
  siRNA target sequence for PTCH (NM_000264.2,2795-2813).
gccaaacaattacaagaat

SEQ ID NO: 245673 - DNA, 19 bp, Homo sapiens
  siRNA target sequence for PTCH (NM_000264.2,2827-2845).
gagtccttgcctacaaact

SEQ ID NO: 245674 - DNA, 19 bp, Homo sapiens
  siRNA target sequence for PTCH (NM_000264.2,2882-2900).
catcagccagttgactaaa

SEQ ID NO: 245675 - DNA, 19 bp, Homo sapiens
  siRNA target sequence for PTCH (NM_000264.2,2934-2952).
cccagcgctttctacatct

SEQ ID NO: 245676 - DNA, 19 bp, Homo sapiens
  siRNA target sequence for PTCH2 (NM_003738.2,159-177).
cgggatccagagacattgt

SEQ ID NO: 245677 - DNA, 19 bp, Homo sapiens
  siRNA target sequence for PTCH2 (NM_003738.2,227-245).
gtctccgcatggccattat

SEQ ID NO: 245678 - DNA, 19 bp, Homo sapiens
  siRNA target sequence for PTCH2 (NM_003738.2,239-257).
ccattattgagacaaactt

SEQ ID NO: 245679 - DNA, 19 bp, Homo sapiens
  siRNA target sequence for PTCH2 (NM_003738.2,344-362).
cctctcagatgctgataca

SEQ ID NO: 245680 - DNA, 19 bp, Homo sapiens
  siRNA target sequence for PTCH2 (NM_003738.2,428-446).
ccctcactgccagtaaagt

SEQ ID NO: 245681 - DNA, 19 bp, Homo sapiens
  siRNA target sequence for PTCH2 (NM_003738.2,436-454).
gccagtaaagtccaagtat

SEQ ID NO: 245682 - DNA, 19 bp, Homo sapiens
  siRNA target sequence for PTCH2 (NM_003738.2,438-456).
cagtaaagtccaagtatca

SEQ ID NO: 245683 - DNA, 19 bp, Homo sapiens
  siRNA target sequence for PTCH2 (NM_003738.2,440-458).
gtaaagtccaagtatcact

SEQ ID NO: 245684 - DNA, 19 bp, Homo sapiens
  siRNA target sequence for PTCH2 (NM_003738.2,468-486).
gtcctgggatttgaacaaa

SEQ ID NO: 245685 - DNA, 19 bp, Homo sapiens
  siRNA target sequence for PTCH2 (NM_003738.2,498-516).
gtcaggagttccccttatt

SEQ ID NO: 245686 - DNA, 19 bp, Homo sapiens
  siRNA target sequence for PTCH2 (NM_003738.2,500-518).
caggagttccccttattga

SEQ ID NO: 245687 - DNA, 19 bp, Homo sapiens
  siRNA target sequence for PTCH2 (NM_003738.2,502-520).
ggagttccccttattgaaa

SEQ ID NO: 245688 - DNA, 19 bp, Homo sapiens
  siRNA target sequence for PTCH2 (NM_003738.2,503-521).
gagttccccttattgaaaa

SEQ ID NO: 245689 - DNA, 19 bp, Homo sapiens
  siRNA target sequence for PTCH2 (NM_003738.2,866-884).
gcttctcccacaaattcat

SEQ ID NO: 245690 - DNA, 19 bp, Homo sapiens
  siRNA target sequence for PTCH2 (NM_003738.2,989-1007).
gccagctgtacgagcattt

SEQ ID NO: 245691 - DNA, 19 bp, Homo sapiens
  siRNA target sequence for PTCH2 (NM_003738.2,1350-1368).
gctcggcatcaccttcaat

SEQ ID NO: 245692 - DNA, 19 bp, Homo sapiens
  siRNA target sequence for PTCH2 (NM_003738.2,1412-1430).
gcgtggatgacgtattcct

SEQ ID NO: 245693 - DNA, 19 bp, Homo sapiens
  siRNA target sequence for PTCH2 (NM_003738.2,1998-2016).
ctgtgcccgctggaatctt

SEQ ID NO: 245694 - DNA, 19 bp, Homo sapiens
  siRNA target sequence for PTCH2 (NM_003738.2,2347-2365).
cgcacctggctgcactatt

SEQ ID NO: 245695 - DNA, 19 bp, Homo sapiens
  siRNA target sequence for PTCH2 (NM_003738.2,2566-2584).
ccacccgagctcttctaca

SEQ ID NO: 245696 - DNA, 19 bp, Homo sapiens
  siRNA target sequence for PTCH2 (NM_003738.2,2567-2585).
cacccgagctcttctacat

SEQ ID NO: 245697 - DNA, 19 bp, Homo sapiens
  siRNA target sequence for PTCH2 (NM_003738.2,2630-2648).
cctcacaggccaacttcta

SEQ ID NO: 245698 - DNA, 19 bp, Homo sapiens
  siRNA target sequence for PTCH2 (NM_003738.2,2662-2680).
gaatggctgcacgacaaat

SEQ ID NO: 245699 - DNA, 19 bp, Homo sapiens
  siRNA target sequence for PTCH2 (NM_003738.2,2972-2990).
ggacggctggcctcatagt

SEQ ID NO: 245700 - DNA, 19 bp, Homo sapiens
  siRNA target sequence for PTCH2 (NM_003738.2,3006-3024).
gatgacagtggaactcttt

SEQ ID NO: 245701 - DNA, 19 bp, Homo sapiens
  siRNA target sequence for PTCH2 (NM_003738.2,3011-3029).
cagtggaactctttggtat

SEQ ID NO: 245702 - DNA, 19 bp, Homo sapiens
  siRNA target sequence for PTCH2 (NM_003738.2,3248-3266).
cccactttgacttcattgt

SEQ ID NO: 245703 - DNA, 19 bp, Homo sapiens
  siRNA target sequence for XPO7 (NM_015024.2,121-139).
gcctggcccaactagagaa

SEQ ID NO: 245704 - DNA, 19 bp, Homo sapiens
  siRNA target sequence for XPO7 (NM_015024.2,122-140).
cctggcccaactagagaat

SEQ ID NO: 245705 - DNA, 19 bp, Homo sapiens
  siRNA target sequence for XPO7 (NM_015024.2,126-144).
gcccaactagagaatctgt

SEQ ID NO: 245706 - DNA, 19 bp, Homo sapiens
  siRNA target sequence for XPO7 (NM_015024.2,198-216).
gccttggttgaatttacca

SEQ ID NO: 245707 - DNA, 19 bp, Homo sapiens
  siRNA target sequence for XPO7 (NM_015024.2,299-317).
ccttaccaagcttgtatca

SEQ ID NO: 245708 - DNA, 19 bp, Homo sapiens
  siRNA target sequence for XPO7 (NM_015024.2,309-327).
cttgtatcacgcacaaaca

SEQ ID NO: 245709 - DNA, 19 bp, Homo sapiens
  siRNA target sequence for XPO7 (NM_015024.2,322-340).
caaacaaccccctaccatt

SEQ ID NO: 245710 - DNA, 19 bp, Homo sapiens
  siRNA target sequence for XPO7 (NM_015024.2,326-344).
caaccccctaccattggaa

SEQ ID NO: 245711 - DNA, 19 bp, Homo sapiens
  siRNA target sequence for XPO7 (NM_015024.2,337-355).
cattggaacagcgaataga

SEQ ID NO: 245712 - DNA, 19 bp, Homo sapiens
  siRNA target sequence for XPO7 (NM_015024.2,361-379).
ggaactatgtgctcaacta

SEQ ID NO: 245713 - DNA, 19 bp, Homo sapiens
  siRNA target sequence for XPO7 (NM_015024.2,391-409).
ggccgaagttggctacttt

SEQ ID NO: 245714 - DNA, 19 bp, Homo sapiens
  siRNA target sequence for XPO7 (NM_015024.2,477-495).
gatgactatgtcttcagaa

SEQ ID NO: 245715 - DNA, 19 bp, Homo sapiens
  siRNA target sequence for XPO7 (NM_015024.2,517-535).
ggtttttacaggatagtgt

SEQ ID NO: 245716 - DNA, 19 bp, Homo sapiens
  siRNA target sequence for XPO7 (NM_015024.2,518-536).
gtttttacaggatagtgtt

SEQ ID NO: 245717 - DNA, 19 bp, Homo sapiens
  siRNA target sequence for XPO7 (NM_015024.2,525-543).
caggatagtgttgaatact

SEQ ID NO: 245718 - DNA, 19 bp, Homo sapiens
  siRNA target sequence for XPO7 (NM_015024.2,544-562).
gcatcattggtgtcacaat

SEQ ID NO: 245719 - DNA, 19 bp, Homo sapiens
  siRNA target sequence for XPO7 (NM_015024.2,545-563).
catcattggtgtcacaatt

SEQ ID NO: 245720 - DNA, 19 bp, Homo sapiens
  siRNA target sequence for XPO7 (NM_015024.2,553-571).
gtgtcacaattttatctca

SEQ ID NO: 245721 - DNA, 19 bp, Homo sapiens
  siRNA target sequence for XPO7 (NM_015024.2,595-613).
cagacaccacccatccttt

SEQ ID NO: 245722 - DNA, 19 bp, Homo sapiens
  siRNA target sequence for XPO7 (NM_015024.2,646-664).
gcgattcatcattatttga

SEQ ID NO: 245723 - DNA, 19 bp, Homo sapiens
  siRNA target sequence for XPO7 (NM_015024.2,647-665).
cgattcatcattatttgat

SEQ ID NO: 245724 - DNA, 19 bp, Homo sapiens
  siRNA target sequence for XPO7 (NM_015024.2,671-689).
cacactttcctgcaattta

SEQ ID NO: 245725 - DNA, 19 bp, Homo sapiens
  siRNA target sequence for XPO7 (NM_015024.2,856-874).
ggagatcagccttcttaga

SEQ ID NO: 245726 - DNA, 19 bp, Homo sapiens
  siRNA target sequence for XPO7 (NM_015024.2,973-991).
gaagatccctgtttaacaa

SEQ ID NO: 245727 - DNA, 19 bp, Homo sapiens
  siRNA target sequence for XPO7 (NM_015024.2,1066-1084).
cagacccaaacaattacca

SEQ ID NO: 245728 - DNA, 19 bp, Homo sapiens
  siRNA target sequence for XPO7 (NM_015024.2,1096-1114).
gactactggcccgattgaa

SEQ ID NO: 245729 - DNA, 19 bp, Homo sapiens
  siRNA target sequence for XPO7 (NM_015024.2,1098-1116).
ctactggcccgattgaaga

SEQ ID NO: 245730 - DNA, 19 bp, Homo sapiens
  siRNA target sequence for XPO7 (NM_015024.2,1105-1123).
cccgattgaagagtaacta

SEQ ID NO: 245731 - DNA, 19 bp, Homo sapiens
  siRNA target sequence for XPO7 (NM_015024.2,1106-1124).
ccgattgaagagtaactat

SEQ ID NO: 245732 - DNA, 19 bp, Homo sapiens
  siRNA target sequence for XPO7 (NM_015024.2,1159-1177).
ctgaggtcatccgattgat

SEQ ID NO: 245733 - DNA, 19 bp, Homo sapiens
  siRNA target sequence for XPO7 (NM_015024.2,1170-1188).
cgattgatagccaacttca

SEQ ID NO: 245734 - DNA, 19 bp, Homo sapiens
  siRNA target sequence for XPO7 (NM_015024.2,1266-1284).
gcctctgtgccgtatgtca

SEQ ID NO: 245735 - DNA, 19 bp, Homo sapiens
  siRNA target sequence for XPO7 (NM_015024.2,1267-1285).
cctctgtgccgtatgtcaa

SEQ ID NO: 245736 - DNA, 19 bp, Homo sapiens
  siRNA target sequence for XPO7 (NM_015024.2,1268-1286).
ctctgtgccgtatgtcaaa

SEQ ID NO: 245737 - DNA, 19 bp, Homo sapiens
  siRNA target sequence for XPO7 (NM_015024.2,1345-1363).
catcccggttggaatctgt

SEQ ID NO: 245738 - DNA, 19 bp, Homo sapiens
  siRNA target sequence for XPO7 (NM_015024.2,1355-1373).
ggaatctgtgcacatcata

SEQ ID NO: 245739 - DNA, 19 bp, Homo sapiens
  siRNA target sequence for XPO7 (NM_015024.2,1444-1462).
ccattgggcgttgtgaata

SEQ ID NO: 245740 - DNA, 19 bp, Homo sapiens
  siRNA target sequence for XPO7 (NM_015024.2,1449-1467).
gggcgttgtgaatatgaga

SEQ ID NO: 245741 - DNA, 19 bp, Homo sapiens
  siRNA target sequence for XPO7 (NM_015024.2,1450-1468).
ggcgttgtgaatatgagaa

SEQ ID NO: 245742 - DNA, 19 bp, Homo sapiens
  siRNA target sequence for XPO7 (NM_015024.2,1477-1495).
cactcctcgtgcagttgtt

SEQ ID NO: 245743 - DNA, 19 bp, Homo sapiens
  siRNA target sequence for XPO7 (NM_015024.2,1576-1594).
ggctgacatggctggttta

SEQ ID NO: 245744 - DNA, 19 bp, Homo sapiens
  siRNA target sequence for XPO7 (NM_015024.2,1582-1600).
catggctggtttacattat

SEQ ID NO: 245745 - DNA, 19 bp, Homo sapiens
  siRNA target sequence for XPO7 (NM_015024.2,1586-1604).
gctggtttacattattgga

SEQ ID NO: 245746 - DNA, 19 bp, Homo sapiens
  siRNA target sequence for XPO7 (NM_015024.2,1683-1701).
ctccagctgatgaacctaa

SEQ ID NO: 245747 - DNA, 19 bp, Homo sapiens
  siRNA target sequence for XPO7 (NM_015024.2,1691-1709).
gatgaacctaacagattct

SEQ ID NO: 245748 - DNA, 19 bp, Homo sapiens
  siRNA target sequence for XPO7 (NM_015024.2,1716-1734).
gcccaggcgggtaatgaga

SEQ ID NO: 245749 - DNA, 19 bp, Homo sapiens
  siRNA target sequence for XPO7 (NM_015024.2,1726-1744).
gtaatgagaagctagagtt

SEQ ID NO: 245750 - DNA, 19 bp, Homo sapiens
  siRNA target sequence for XPO7 (NM_015024.2,1754-1772).
gagcttttttgaacagttt

SEQ ID NO: 245751 - DNA, 19 bp, Homo sapiens
  siRNA target sequence for XPO7 (NM_015024.2,1767-1785).
cagtttcgtaagatctaca

SEQ ID NO: 245752 - DNA, 19 bp, Homo sapiens
  siRNA target sequence for XPO7 (NM_015024.2,1862-1880).
ggtcctaagcgtcttcata

SEQ ID NO: 245753 - DNA, 19 bp, Homo sapiens
  siRNA target sequence for XPO7 (NM_015024.2,1866-1884).
ctaagcgtcttcataggaa

SEQ ID NO: 245754 - DNA, 19 bp, Homo sapiens
  siRNA target sequence for XPO7 (NM_015024.2,1969-1987).
ggtacagtagcgtaaggaa

SEQ ID NO: 245755 - DNA, 19 bp, Homo sapiens
  siRNA target sequence for XPO7 (NM_015024.2,1978-1996).
gcgtaaggaagctagtgaa

SEQ ID NO: 245756 - DNA, 19 bp, Homo sapiens
  siRNA target sequence for XPO7 (NM_015024.2,2028-2046).
cacacgagcgagcactttt

SEQ ID NO: 245757 - DNA, 19 bp, Homo sapiens
  siRNA target sequence for XPO7 (NM_015024.2,2030-2048).
cacgagcgagcacttttca

SEQ ID NO: 245758 - DNA, 19 bp, Homo sapiens
  siRNA target sequence for XPO7 (NM_015024.2,2032-2050).
cgagcgagcacttttcatt

SEQ ID NO: 245759 - DNA, 19 bp, Homo sapiens
  siRNA target sequence for XPO7 (NM_015024.2,2035-2053).
gcgagcacttttcattttt

SEQ ID NO: 245760 - DNA, 19 bp, Homo sapiens
  siRNA target sequence for XPO7 (NM_015024.2,2177-2195).
gccactcacagcagcattt

SEQ ID NO: 245761 - DNA, 19 bp, Homo sapiens
  siRNA target sequence for XPO7 (NM_015024.2,2179-2197).
cactcacagcagcatttga

SEQ ID NO: 245762 - DNA, 19 bp, Homo sapiens
  siRNA target sequence for XPO7 (NM_015024.2,2202-2220).
gtggcccagatgtttagca

SEQ ID NO: 245763 - DNA, 19 bp, Homo sapiens
  siRNA target sequence for XPO7 (NM_015024.2,2208-2226).
cagatgtttagcaccaata

SEQ ID NO: 245764 - DNA, 19 bp, Homo sapiens
  siRNA target sequence for XPO7 (NM_015024.2,2210-2228).
gatgtttagcaccaatagt

SEQ ID NO: 245765 - DNA, 19 bp, Homo sapiens
  siRNA target sequence for XPO7 (NM_015024.2,2243-2261).
ggcaaagcgaactctagtt

SEQ ID NO: 245766 - DNA, 19 bp, Homo sapiens
  siRNA target sequence for XPO7 (NM_015024.2,2285-2303).
gatcgctttcgctttcaat

SEQ ID NO: 245767 - DNA, 19 bp, Homo sapiens
  siRNA target sequence for XPO7 (NM_015024.2,2388-2406).
catgatccagcctgtacta

SEQ ID NO: 245768 - DNA, 19 bp, Homo sapiens
  siRNA target sequence for XPO7 (NM_015024.2,2401-2419).
gtactacacctgtactcaa

SEQ ID NO: 245769 - DNA, 19 bp, Homo sapiens
  siRNA target sequence for XPO7 (NM_015024.2,2426-2444).
ggctgaattggttcataat

SEQ ID NO: 245770 - DNA, 19 bp, Homo sapiens
  siRNA target sequence for XPO7 (NM_015024.2,2430-2448).
gaattggttcataataggt

SEQ ID NO: 245771 - DNA, 19 bp, Homo sapiens
  siRNA target sequence for XPO7 (NM_015024.2,2449-2467).
cccagcgactccagtttga

SEQ ID NO: 245772 - DNA, 19 bp, Homo sapiens
  siRNA target sequence for XPO7 (NM_015024.2,2479-2497).
ccaatggcatcttactctt

SEQ ID NO: 245773 - DNA, 19 bp, Homo sapiens
  siRNA target sequence for XPO7 (NM_015024.2,2506-2524).
ccagcaagatgataacaat

SEQ ID NO: 245774 - DNA, 19 bp, Homo sapiens
  siRNA target sequence for XPO7 (NM_015024.2,2510-2528).
caagatgataacaatgtat

SEQ ID NO: 245775 - DNA, 19 bp, Homo sapiens
  siRNA target sequence for XPO7 (NM_015024.2,2632-2650).
gtgggagttacgtcaattt

SEQ ID NO: 245776 - DNA, 19 bp, Homo sapiens
  siRNA target sequence for XPO7 (NM_015024.2,2642-2660).
cgtcaatttcggagtcttt

SEQ ID NO: 245777 - DNA, 19 bp, Homo sapiens
  siRNA target sequence for XPO7 (NM_015024.2,2651-2669).
cggagtctttcgtctctat

SEQ ID NO: 245778 - DNA, 19 bp, Homo sapiens
  siRNA target sequence for XPO7 (NM_015024.2,2798-2816).
ggaccatatgaactttatt

SEQ ID NO: 245779 - DNA, 19 bp, Homo sapiens
  siRNA target sequence for XPO7 (NM_015024.2,2801-2819).
ccatatgaactttattgca

SEQ ID NO: 245780 - DNA, 19 bp, Homo sapiens
  siRNA target sequence for XPO7 (NM_015024.2,2802-2820).
catatgaactttattgcaa

SEQ ID NO: 245781 - DNA, 19 bp, Homo sapiens
  siRNA target sequence for XPO7 (NM_015024.2,2829-2847).
cctcacgtcatcatgtata

SEQ ID NO: 245782 - DNA, 19 bp, Homo sapiens
  siRNA target sequence for XPO7 (NM_015024.2,2830-2848).
ctcacgtcatcatgtatat

SEQ ID NO: 245783 - DNA, 19 bp, Homo sapiens
  siRNA target sequence for XPO7 (NM_015024.2,3111-3129).
ccactacttggcttgatat

SEQ ID NO: 245784 - DNA, 19 bp, Homo sapiens
  siRNA target sequence for XPO7 (NM_015024.2,3117-3135).
cttggcttgatattgctta

SEQ ID NO: 245785 - DNA, 19 bp, Homo sapiens
  siRNA target sequence for XPO7 (NM_015024.2,3121-3139).
gcttgatattgcttaatga

SEQ ID NO: 245786 - DNA, 19 bp, Homo sapiens
  siRNA target sequence for XPO7 (NM_015024.2,3122-3140).
cttgatattgcttaatgaa

SEQ ID NO: 245787 - DNA, 19 bp, Homo sapiens
  siRNA target sequence for XPO7 (NM_015024.2,3156-3174).
ctaagaaacagtattgtga

SEQ ID NO: 245788 - DNA, 19 bp, Homo sapiens
  siRNA target sequence for XPO7 (NM_015024.2,3235-3253).
gcatcgagcgaaatcttct

SEQ ID NO: 245789 - DNA, 19 bp, Homo sapiens
  siRNA target sequence for XPO7 (NM_015024.2,3236-3254).
catcgagcgaaatcttctt

SEQ ID NO: 245790 - DNA, 19 bp, Homo sapiens
  siRNA target sequence for XPO7 (NM_015024.2,3242-3260).
gcgaaatcttcttacgaaa

SEQ ID NO: 245791 - DNA, 19 bp, Homo sapiens
  siRNA target sequence for XPO7 (NM_015024.2,3243-3261).
cgaaatcttcttacgaaaa

SEQ ID NO: 245792 - DNA, 19 bp, Homo sapiens
  siRNA target sequence for XPO7 (NM_015024.2,3244-3262).
gaaatcttcttacgaaaaa

SEQ ID NO: 245793 - DNA, 19 bp, Homo sapiens
  siRNA target sequence for XPO7 (NM_015024.2,3301-3319).
gagaagtcaacgactcaat

SEQ ID NO: 245794 - DNA, 19 bp, Homo sapiens
  siRNA target sequence for XPO7 (NM_015024.2,3303-3321).
gaagtcaacgactcaatga

SEQ ID NO: 245795 - DNA, 19 bp, Homo sapiens
  siRNA target sequence for XPO7 (NM_015024.2,3331-3349).
cttatggcgtgaatagcaa

SEQ ID NO: 245796 - DNA, 19 bp, Homo sapiens
  siRNA target sequence for XPO7 (NM_015024.2,3336-3354).
ggcgtgaatagcaatgaca

SEQ ID NO: 245797 - DNA, 19 bp, Homo sapiens
  siRNA target sequence for CD14 (NM_000591.1,484-502).
cgctcgaggacctaaagat

SEQ ID NO: 245798 - DNA, 19 bp, Homo sapiens
  siRNA target sequence for CD14 (NM_000591.1,485-503).
gctcgaggacctaaagata

SEQ ID NO: 245799 - DNA, 19 bp, Homo sapiens
  siRNA target sequence for CD14 (NM_000591.1,486-504).
ctcgaggacctaaagataa

SEQ ID NO: 245800 - DNA, 19 bp, Homo sapiens
  siRNA target sequence for CD14 (NM_000591.1,1135-1153).
cccacgagggctcaatgaa

SEQ ID NO: 245801 - DNA, 19 bp, Homo sapiens
  siRNA target sequence for CD14 (NM_000591.1,1137-1155).
cacgagggctcaatgaact

SEQ ID NO: 245802 - DNA, 19 bp, Homo sapiens
  siRNA target sequence for UNC5C (NM_003728.2,192-210).
gactgggactgggatactt

SEQ ID NO: 245803 - DNA, 19 bp, Homo sapiens
  siRNA target sequence for UNC5C (NM_003728.2,274-292).
ccaagatgatgactttttt

SEQ ID NO: 245804 - DNA, 19 bp, Homo sapiens
  siRNA target sequence for UNC5C (NM_003728.2,357-375).
ctgaagaagcttatattgt

SEQ ID NO: 245805 - DNA, 19 bp, Homo sapiens
  siRNA target sequence for UNC5C (NM_003728.2,391-409).
gaacctgtactgtaaagca

SEQ ID NO: 245806 - DNA, 19 bp, Homo sapiens
  siRNA target sequence for UNC5C (NM_003728.2,411-429).
gccctgccacccagatcta

SEQ ID NO: 245807 - DNA, 19 bp, Homo sapiens
  siRNA target sequence for UNC5C (NM_003728.2,412-430).
ccctgccacccagatctat

SEQ ID NO: 245808 - DNA, 19 bp, Homo sapiens
  siRNA target sequence for UNC5C (NM_003728.2,460-478).
gaaggaccacatagtagat

SEQ ID NO: 245809 - DNA, 19 bp, Homo sapiens
  siRNA target sequence for UNC5C (NM_003728.2,463-481).
ggaccacatagtagatgaa

SEQ ID NO: 245810 - DNA, 19 bp, Homo sapiens
  siRNA target sequence for UNC5C (NM_003728.2,464-482).
gaccacatagtagatgaaa

SEQ ID NO: 245811 - DNA, 19 bp, Homo sapiens
  siRNA target sequence for UNC5C (NM_003728.2,466-484).
ccacatagtagatgaaaga

SEQ ID NO: 245812 - DNA, 19 bp, Homo sapiens
  siRNA target sequence for UNC5C (NM_003728.2,512-530).
cgggaagtgagcattgaga

SEQ ID NO: 245813 - DNA, 19 bp, Homo sapiens
  siRNA target sequence for UNC5C (NM_003728.2,514-532).
ggaagtgagcattgagatt

SEQ ID NO: 245814 - DNA, 19 bp, Homo sapiens
  siRNA target sequence for UNC5C (NM_003728.2,515-533).
gaagtgagcattgagattt

SEQ ID NO: 245815 - DNA, 19 bp, Homo sapiens
  siRNA target sequence for UNC5C (NM_003728.2,627-645).
cgtatgtgcgcattgcata

SEQ ID NO: 245816 - DNA, 19 bp, Homo sapiens
  siRNA target sequence for UNC5C (NM_003728.2,642-660).
catatctacggaagacatt

SEQ ID NO: 245817 - DNA, 19 bp, Homo sapiens
  siRNA target sequence for UNC5C (NM_003728.2,690-708).
ctttggaacaggaagtctt

SEQ ID NO: 245818 - DNA, 19 bp, Homo sapiens
  siRNA target sequence for UNC5C (NM_003728.2,783-801).
ccgttgaagatcggaattt

SEQ ID NO: 245819 - DNA, 19 bp, Homo sapiens
  siRNA target sequence for UNC5C (NM_003728.2,784-802).
cgttgaagatcggaatttt

SEQ ID NO: 245820 - DNA, 19 bp, Homo sapiens
  siRNA target sequence for UNC5C (NM_003728.2,788-806).
gaagatcggaatttttata

SEQ ID NO: 245821 - DNA, 19 bp, Homo sapiens
  siRNA target sequence for UNC5C (NM_003728.2,794-812).
cggaatttttatattacta

SEQ ID NO: 245822 - DNA, 19 bp, Homo sapiens
  siRNA target sequence for UNC5C (NM_003728.2,838-856).
ggcccgactctctgatact

SEQ ID NO: 245823 - DNA, 19 bp, Homo sapiens
  siRNA target sequence for UNC5C (NM_003728.2,845-863).
ctctctgatactgcaaatt

SEQ ID NO: 245824 - DNA, 19 bp, Homo sapiens
  siRNA target sequence for UNC5C (NM_003728.2,870-888).
gtgttgccaaaaacattgt

SEQ ID NO: 245825 - DNA, 19 bp, Homo sapiens
  siRNA target sequence for UNC5C (NM_003728.2,906-924).
caactgccactgtcatagt

SEQ ID NO: 245826 - DNA, 19 bp, Homo sapiens
  siRNA target sequence for UNC5C (NM_003728.2,912-930).
ccactgtcatagtctatgt

SEQ ID NO: 245827 - DNA, 19 bp, Homo sapiens
  siRNA target sequence for UNC5C (NM_003728.2,915-933).
ctgtcatagtctatgtcaa

SEQ ID NO: 245828 - DNA, 19 bp, Homo sapiens
  siRNA target sequence for UNC5C (NM_003728.2,986-1004).
cgagggtatcagaaacgta

SEQ ID NO: 245829 - DNA, 19 bp, Homo sapiens
  siRNA target sequence for UNC5C (NM_003728.2,1018-1036).
caacccggcaccactcaat

SEQ ID NO: 245830 - DNA, 19 bp, Homo sapiens
  siRNA target sequence for UNC5C (NM_003728.2,1057-1075).
gcagagtgtgcagaaaata

SEQ ID NO: 245831 - DNA, 19 bp, Homo sapiens
  siRNA target sequence for UNC5C (NM_003728.2,1120-1138).
gagcaagtggtctacttgt

SEQ ID NO: 245832 - DNA, 19 bp, Homo sapiens
  siRNA target sequence for UNC5C (NM_003728.2,1211-1229).
gacggcctcgtcttgcaat

SEQ ID NO: 245833 - DNA, 19 bp, Homo sapiens
  siRNA target sequence for UNC5C (NM_003728.2,1215-1233).
gcctcgtcttgcaatccaa

SEQ ID NO: 245834 - DNA, 19 bp, Homo sapiens
  siRNA target sequence for UNC5C (NM_003728.2,1220-1238).
gtcttgcaatccaagaact

SEQ ID NO: 245835 - DNA, 19 bp, Homo sapiens
  siRNA target sequence for UNC5C (NM_003728.2,1258-1276).
gcagactgctcctgattca

SEQ ID NO: 245836 - DNA, 19 bp, Homo sapiens
  siRNA target sequence for UNC5C (NM_003728.2,1304-1322).
gtgatagcagtgatcgttt

SEQ ID NO: 245837 - DNA, 19 bp, Homo sapiens
  siRNA target sequence for UNC5C (NM_003728.2,1324-1342).
cctggcgatctctgtagtt

SEQ ID NO: 245838 - DNA, 19 bp, Homo sapiens
  siRNA target sequence for UNC5C (NM_003728.2,1435-1453).
catcaaggcagcaagacaa

SEQ ID NO: 245839 - DNA, 19 bp, Homo sapiens
  siRNA target sequence for UNC5C (NM_003728.2,1572-1590).
cactgcccaacctgaaaat

SEQ ID NO: 245840 - DNA, 19 bp, Homo sapiens
  siRNA target sequence for UNC5C (NM_003728.2,1840-1858).
gagagtctacgaaatgtat

SEQ ID NO: 245841 - DNA, 19 bp, Homo sapiens
  siRNA target sequence for UNC5C (NM_003728.2,1842-1860).
gagtctacgaaatgtatgt

SEQ ID NO: 245842 - DNA, 19 bp, Homo sapiens
  siRNA target sequence for UNC5C (NM_003728.2,2004-2022).
ccgaggactggaaaatact

SEQ ID NO: 245843 - DNA, 19 bp, Homo sapiens
  siRNA target sequence for UNC5C (NM_003728.2,2340-2358).
ctaaggctcttcattttaa

SEQ ID NO: 245844 - DNA, 19 bp, Homo sapiens
  siRNA target sequence for UNC5C (NM_003728.2,2371-2389).
caacctgcgcctgtcaatt

SEQ ID NO: 245845 - DNA, 19 bp, Homo sapiens
  siRNA target sequence for UNC5C (NM_003728.2,2379-2397).
gcctgtcaattcacgatat

SEQ ID NO: 245846 - DNA, 19 bp, Homo sapiens
  siRNA target sequence for UNC5C (NM_003728.2,2419-2437).
caaattgctggctaaatat

SEQ ID NO: 245847 - DNA, 19 bp, Homo sapiens
  siRNA target sequence for UNC5C (NM_003728.2,2528-2546).
gagctggtttgcaaactct

SEQ ID NO: 245848 - DNA, 19 bp, Homo sapiens
  siRNA target sequence for UNC5C (NM_003728.2,2606-2624).
gaacctactggcatcgatt

SEQ ID NO: 245849 - DNA, 19 bp, Homo sapiens
  siRNA target sequence for UNC5C (NM_003728.2,2754-2772).
ggatgctggcccataagct

SEQ ID NO: 245850 - DNA, 19 bp, Homo sapiens
  siRNA target sequence for ROBO1 (NM_002941.2,128-146).
caatccccacctctgataa

SEQ ID NO: 245851 - DNA, 19 bp, Homo sapiens
  siRNA target sequence for ROBO1 (NM_002941.2,132-150).
ccccacctctgataacgat

SEQ ID NO: 245852 - DNA, 19 bp, Homo sapiens
  siRNA target sequence for ROBO1 (NM_002941.2,137-155).
cctctgataacgatgacaa

SEQ ID NO: 245853 - DNA, 19 bp, Homo sapiens
  siRNA target sequence for ROBO1 (NM_002941.2,138-156).
ctctgataacgatgacaat

SEQ ID NO: 245854 - DNA, 19 bp, Homo sapiens
  siRNA target sequence for ROBO1 (NM_002941.2,153-171).
caattcgctgggctataca

SEQ ID NO: 245855 - DNA, 19 bp, Homo sapiens
  siRNA target sequence for ROBO1 (NM_002941.2,178-196).
cgtcttcgtcaggaagatt

SEQ ID NO: 245856 - DNA, 19 bp, Homo sapiens
  siRNA target sequence for ROBO1 (NM_002941.2,179-197).
gtcttcgtcaggaagattt

SEQ ID NO: 245857 - DNA, 19 bp, Homo sapiens
  siRNA target sequence for ROBO1 (NM_002941.2,200-218).
cacctcgcattgttgaaca

SEQ ID NO: 245858 - DNA, 19 bp, Homo sapiens
  siRNA target sequence for ROBO1 (NM_002941.2,287-305).
cacccactattgaatggta

SEQ ID NO: 245859 - DNA, 19 bp, Homo sapiens
  siRNA target sequence for ROBO1 (NM_002941.2,344-362).
ctcgctcacaccgaatgtt

SEQ ID NO: 245860 - DNA, 19 bp, Homo sapiens
  siRNA target sequence for ROBO1 (NM_002941.2,363-381).
gctgccgagtggatcttta

SEQ ID NO: 245861 - DNA, 19 bp, Homo sapiens
  siRNA target sequence for ROBO1 (NM_002941.2,364-382).
ctgccgagtggatctttat

SEQ ID NO: 245862 - DNA, 19 bp, Homo sapiens
  siRNA target sequence for ROBO1 (NM_002941.2,366-384).
gccgagtggatctttattt

SEQ ID NO: 245863 - DNA, 19 bp, Homo sapiens
  siRNA target sequence for ROBO1 (NM_002941.2,367-385).
ccgagtggatctttatttt

SEQ ID NO: 245864 - DNA, 19 bp, Homo sapiens
  siRNA target sequence for ROBO1 (NM_002941.2,397-415).
gtacatggacggaaaagta

SEQ ID NO: 245865 - DNA, 19 bp, Homo sapiens
  siRNA target sequence for ROBO1 (NM_002941.2,419-437).
ctgatgaaggagtctatgt

SEQ ID NO: 245866 - DNA, 19 bp, Homo sapiens
  siRNA target sequence for ROBO1 (NM_002941.2,440-458).
gtgtagcaaggaattacct

SEQ ID NO: 245867 - DNA, 19 bp, Homo sapiens
  siRNA target sequence for ROBO1 (NM_002941.2,486-504).
gctggaagtagccatactt

SEQ ID NO: 245868 - DNA, 19 bp, Homo sapiens
  siRNA target sequence for ROBO1 (NM_002941.2,622-640).
ggctctccactggatgata

SEQ ID NO: 245869 - DNA, 19 bp, Homo sapiens
  siRNA target sequence for ROBO1 (NM_002941.2,664-682).
ggaggaaagctcatgatca

SEQ ID NO: 245870 - DNA, 19 bp, Homo sapiens
  siRNA target sequence for ROBO1 (NM_002941.2,667-685).
ggaaagctcatgatcactt

SEQ ID NO: 245871 - DNA, 19 bp, Homo sapiens
  siRNA target sequence for ROBO1 (NM_002941.2,668-686).
gaaagctcatgatcactta

SEQ ID NO: 245872 - DNA, 19 bp, Homo sapiens
  siRNA target sequence for ROBO1 (NM_002941.2,681-699).
cacttacacccgtaaaagt

SEQ ID NO: 245873 - DNA, 19 bp, Homo sapiens
  siRNA target sequence for ROBO1 (NM_002941.2,683-701).
cttacacccgtaaaagtga

SEQ ID NO: 245874 - DNA, 19 bp, Homo sapiens
  siRNA target sequence for ROBO1 (NM_002941.2,763-781).
gagctgactgtcttagaga

SEQ ID NO: 245875 - DNA, 19 bp, Homo sapiens
  siRNA target sequence for ROBO1 (NM_002941.2,804-822).
cagtaacttggcagtaact

SEQ ID NO: 245876 - DNA, 19 bp, Homo sapiens
  siRNA target sequence for ROBO1 (NM_002941.2,806-824).
gtaacttggcagtaactgt

SEQ ID NO: 245877 - DNA, 19 bp, Homo sapiens
  siRNA target sequence for ROBO1 (NM_002941.2,898-916).
ggagagctgcccaaatcca

SEQ ID NO: 245878 - DNA, 19 bp, Homo sapiens
  siRNA target sequence for ROBO1 (NM_002941.2,903-921).
gctgcccaaatccagatat

SEQ ID NO: 245879 - DNA, 19 bp, Homo sapiens
  siRNA target sequence for ROBO1 (NM_002941.2,906-924).
gcccaaatccagatatgaa

SEQ ID NO: 245880 - DNA, 19 bp, Homo sapiens
  siRNA target sequence for ROBO1 (NM_002941.2,922-940).
gaaatccgagatgatcata

SEQ ID NO: 245881 - DNA, 19 bp, Homo sapiens
  siRNA target sequence for ROBO1 (NM_002941.2,931-949).
gatgatcataccttgaaaa

SEQ ID NO: 245882 - DNA, 19 bp, Homo sapiens
  siRNA target sequence for ROBO1 (NM_002941.2,934-952).
gatcataccttgaaaatta

SEQ ID NO: 245883 - DNA, 19 bp, Homo sapiens
  siRNA target sequence for ROBO1 (NM_002941.2,975-993).
gggttcatacacttgtgtt

SEQ ID NO: 245884 - DNA, 19 bp, Homo sapiens
  siRNA target sequence for ROBO1 (NM_002941.2,1028-1046).
ctactctgactgttcaaga

SEQ ID NO: 245885 - DNA, 19 bp, Homo sapiens
  siRNA target sequence for ROBO1 (NM_002941.2,1073-1091).
gtgaccaggttgttgcttt

SEQ ID NO: 245886 - DNA, 19 bp, Homo sapiens
  siRNA target sequence for ROBO1 (NM_002941.2,1087-1105).
gctttgggacggactgtaa

SEQ ID NO: 245887 - DNA, 19 bp, Homo sapiens
  siRNA target sequence for ROBO1 (NM_002941.2,1092-1110).
gggacggactgtaactttt

SEQ ID NO: 245888 - DNA, 19 bp, Homo sapiens
  siRNA target sequence for ROBO1 (NM_002941.2,1094-1112).
gacggactgtaacttttca

SEQ ID NO: 245889 - DNA, 19 bp, Homo sapiens
  siRNA target sequence for ROBO1 (NM_002941.2,1096-1114).
cggactgtaacttttcagt

SEQ ID NO: 245890 - DNA, 19 bp, Homo sapiens
  siRNA target sequence for ROBO1 (NM_002941.2,1163-1181).
ggagtcagaatctactttt

SEQ ID NO: 245891 - DNA, 19 bp, Homo sapiens
  siRNA target sequence for ROBO1 (NM_002941.2,1202-1220).
catccagccgattttcagt

SEQ ID NO: 245892 - DNA, 19 bp, Homo sapiens
  siRNA target sequence for ROBO1 (NM_002941.2,1227-1245).
gactggcgacctcacaatt

SEQ ID NO: 245893 - DNA, 19 bp, Homo sapiens
  siRNA target sequence for ROBO1 (NM_002941.2,1231-1249).
ggcgacctcacaattacta

SEQ ID NO: 245894 - DNA, 19 bp, Homo sapiens
  siRNA target sequence for ROBO1 (NM_002941.2,1232-1250).
gcgacctcacaattactaa

SEQ ID NO: 245895 - DNA, 19 bp, Homo sapiens
  siRNA target sequence for ROBO1 (NM_002941.2,1233-1251).
cgacctcacaattactaat

SEQ ID NO: 245896 - DNA, 19 bp, Homo sapiens
  siRNA target sequence for ROBO1 (NM_002941.2,1257-1275).
gcgatctgatgttggttat

SEQ ID NO: 245897 - DNA, 19 bp, Homo sapiens
  siRNA target sequence for ROBO1 (NM_002941.2,1258-1276).
cgatctgatgttggttatt

SEQ ID NO: 245898 - DNA, 19 bp, Homo sapiens
  siRNA target sequence for ROBO1 (NM_002941.2,1297-1315).
gttgctggaagcatcatca

SEQ ID NO: 245899 - DNA, 19 bp, Homo sapiens
  siRNA target sequence for ROBO1 (NM_002941.2,1490-1508).
cccaagactctcgaatcaa

SEQ ID NO: 245900 - DNA, 19 bp, Homo sapiens
  siRNA target sequence for ROBO1 (NM_002941.2,1491-1509).
ccaagactctcgaatcaaa

SEQ ID NO: 245901 - DNA, 19 bp, Homo sapiens
  siRNA target sequence for ROBO1 (NM_002941.2,1495-1513).
gactctcgaatcaaacagt

SEQ ID NO: 245902 - DNA, 19 bp, Homo sapiens
  siRNA target sequence for ROBO1 (NM_002941.2,1528-1546).
ctgcagatccgatatgcta

SEQ ID NO: 245903 - DNA, 19 bp, Homo sapiens
  siRNA target sequence for ROBO1 (NM_002941.2,1604-1622).
catggagtgcttacattga

SEQ ID NO: 245904 - DNA, 19 bp, Homo sapiens
  siRNA target sequence for ROBO1 (NM_002941.2,1607-1625).
ggagtgcttacattgaagt

SEQ ID NO: 245905 - DNA, 19 bp, Homo sapiens
  siRNA target sequence for ROBO1 (NM_002941.2,1608-1626).
gagtgcttacattgaagtt

SEQ ID NO: 245906 - DNA, 19 bp, Homo sapiens
  siRNA target sequence for ROBO1 (NM_002941.2,1610-1628).
gtgcttacattgaagttca

SEQ ID NO: 245907 - DNA, 19 bp, Homo sapiens
  siRNA target sequence for ROBO1 (NM_002941.2,1613-1631).
cttacattgaagttcaaga

SEQ ID NO: 245908 - DNA, 19 bp, Homo sapiens
  siRNA target sequence for ROBO1 (NM_002941.2,1658-1676).
gacctactgacccaaattt

SEQ ID NO: 245909 - DNA, 19 bp, Homo sapiens
  siRNA target sequence for ROBO1 (NM_002941.2,1660-1678).
cctactgacccaaatttaa

SEQ ID NO: 245910 - DNA, 19 bp, Homo sapiens
  siRNA target sequence for ROBO1 (NM_002941.2,1743-1761).
gcaaccaaatttgaattca

SEQ ID NO: 245911 - DNA, 19 bp, Homo sapiens
  siRNA target sequence for ROBO1 (NM_002941.2,1821-1839).
gcagaccgtagcagagaat

SEQ ID NO: 245912 - DNA, 19 bp, Homo sapiens
  siRNA target sequence for ROBO1 (NM_002941.2,1870-1888).
ctcaaacctaatgcaattt

SEQ ID NO: 245913 - DNA, 19 bp, Homo sapiens
  siRNA target sequence for ROBO1 (NM_002941.2,1876-1894).
cctaatgcaatttaccttt

SEQ ID NO: 245914 - DNA, 19 bp, Homo sapiens
  siRNA target sequence for ROBO1 (NM_002941.2,1877-1895).
ctaatgcaatttacctttt

SEQ ID NO: 245915 - DNA, 19 bp, Homo sapiens
  siRNA target sequence for ROBO1 (NM_002941.2,1896-1914).
ccttgtgagggcagctaat

SEQ ID NO: 245916 - DNA, 19 bp, Homo sapiens
  siRNA target sequence for ROBO1 (NM_002941.2,1900-1918).
gtgagggcagctaatgcat

SEQ ID NO: 245917 - DNA, 19 bp, Homo sapiens
  siRNA target sequence for ROBO1 (NM_002941.2,1902-1920).
gagggcagctaatgcatat

SEQ ID NO: 245918 - DNA, 19 bp, Homo sapiens
  siRNA target sequence for ROBO1 (NM_002941.2,2079-2097).
gcactggacagtagatcaa

SEQ ID NO: 245919 - DNA, 19 bp, Homo sapiens
  siRNA target sequence for ROBO1 (NM_002941.2,2102-2120).
ctcagtatatacaaggata

SEQ ID NO: 245920 - DNA, 19 bp, Homo sapiens
  siRNA target sequence for ROBO1 (NM_002941.2,2104-2122).
cagtatatacaaggatata

SEQ ID NO: 245921 - DNA, 19 bp, Homo sapiens
  siRNA target sequence for ROBO1 (NM_002941.2,2147-2165).
ccaaccacggagaatcaga

SEQ ID NO: 245922 - DNA, 19 bp, Homo sapiens
  siRNA target sequence for ROBO1 (NM_002941.2,2158-2176).
gaatcagactggttagttt

SEQ ID NO: 245923 - DNA, 19 bp, Homo sapiens
  siRNA target sequence for ROBO1 (NM_002941.2,2187-2205).
gacgccagccaaaaacagt

SEQ ID NO: 245924 - DNA, 19 bp, Homo sapiens
  siRNA target sequence for ROBO1 (NM_002941.2,2250-2268).
ggctcgccctttttttaat

SEQ ID NO: 245925 - DNA, 19 bp, Homo sapiens
  siRNA target sequence for ROBO1 (NM_002941.2,2254-2272).
cgccctttttttaatgaat

SEQ ID NO: 245926 - DNA, 19 bp, Homo sapiens
  siRNA target sequence for ROBO1 (NM_002941.2,2331-2349).
cccaccccaaggtgtaact

SEQ ID NO: 245927 - DNA, 19 bp, Homo sapiens
  siRNA target sequence for ROBO1 (NM_002941.2,2335-2353).
ccccaaggtgtaactgtat

SEQ ID NO: 245928 - DNA, 19 bp, Homo sapiens
  siRNA target sequence for ROBO1 (NM_002941.2,2366-2384).
gaaacggaactgcaattct

SEQ ID NO: 245929 - DNA, 19 bp, Homo sapiens
  siRNA target sequence for ROBO1 (NM_002941.2,2370-2388).
cggaactgcaattctagtt

SEQ ID NO: 245930 - DNA, 19 bp, Homo sapiens
  siRNA target sequence for ROBO1 (NM_002941.2,2422-2440).
ggaatggtccaagagtata

SEQ ID NO: 245931 - DNA, 19 bp, Homo sapiens
  siRNA target sequence for ROBO1 (NM_002941.2,2423-2441).
gaatggtccaagagtataa

SEQ ID NO: 245932 - DNA, 19 bp, Homo sapiens
  siRNA target sequence for ROBO1 (NM_002941.2,2427-2445).
ggtccaagagtataaggtt

SEQ ID NO: 245933 - DNA, 19 bp, Homo sapiens
  siRNA target sequence for ROBO1 (NM_002941.2,2428-2446).
gtccaagagtataaggttt

SEQ ID NO: 245934 - DNA, 19 bp, Homo sapiens
  siRNA target sequence for ROBO1 (NM_002941.2,2465-2483).
ctcgataccacatcaacaa

SEQ ID NO: 245935 - DNA, 19 bp, Homo sapiens
  siRNA target sequence for ROBO1 (NM_002941.2,2508-2526).
cgtggtcattccctttctt

SEQ ID NO: 245936 - DNA, 19 bp, Homo sapiens
  siRNA target sequence for ROBO1 (NM_002941.2,2511-2529).
ggtcattccctttcttgtt

SEQ ID NO: 245937 - DNA, 19 bp, Homo sapiens
  siRNA target sequence for ROBO1 (NM_002941.2,2655-2673).
cctcgctcagcagatttca

SEQ ID NO: 245938 - DNA, 19 bp, Homo sapiens
  siRNA target sequence for ROBO1 (NM_002941.2,2691-2709).
ggccttcatagcaggtatt

SEQ ID NO: 245939 - DNA, 19 bp, Homo sapiens
  siRNA target sequence for ROBO1 (NM_002941.2,2772-2790).
gagaaacggacttactagt

SEQ ID NO: 245940 - DNA, 19 bp, Homo sapiens
  siRNA target sequence for ROBO1 (NM_002941.2,2792-2810).
cctacgcgggtatcagaaa

SEQ ID NO: 245941 - DNA, 19 bp, Homo sapiens
  siRNA target sequence for ROBO1 (NM_002941.2,2793-2811).
ctacgcgggtatcagaaaa

SEQ ID NO: 245942 - DNA, 19 bp, Homo sapiens
  siRNA target sequence for ROBO1 (NM_002941.2,2826-2844).
cttcacaccaacagtaact

SEQ ID NO: 245943 - DNA, 19 bp, Homo sapiens
  siRNA target sequence for ROBO1 (NM_002941.2,2929-2947).
gcagacacgtggcctaata

SEQ ID NO: 245944 - DNA, 19 bp, Homo sapiens
  siRNA target sequence for ROBO1 (NM_002941.2,3027-3045).
cagtcgcccagctgattgt

SEQ ID NO: 245945 - DNA, 19 bp, Homo sapiens
  siRNA target sequence for ROBO1 (NM_002941.2,3033-3051).
cccagctgattgtatagca

SEQ ID NO: 245946 - DNA, 19 bp, Homo sapiens
  siRNA target sequence for ROBO1 (NM_002941.2,3034-3052).
ccagctgattgtatagcaa

SEQ ID NO: 245947 - DNA, 19 bp, Homo sapiens
  siRNA target sequence for ROBO1 (NM_002941.2,3035-3053).
cagctgattgtatagcaaa

SEQ ID NO: 245948 - DNA, 19 bp, Homo sapiens
  siRNA target sequence for ROBO1 (NM_002941.2,3037-3055).
gctgattgtatagcaaatt

SEQ ID NO: 245949 - DNA, 19 bp, Homo sapiens
  siRNA target sequence for ROBO1 (NM_002941.2,3060-3078).
caaccaactggataacaaa

SEQ ID NO: 245950 - DNA, 19 bp, Homo sapiens
  siRNA target sequence for ROBO1 (NM_002941.2,3064-3082).
caactggataacaaacaaa

SEQ ID NO: 245951 - DNA, 19 bp, Homo sapiens
  siRNA target sequence for ROBO1 (NM_002941.2,3094-3112).
ctccctgagtcaactgttt

SEQ ID NO: 245952 - DNA, 19 bp, Homo sapiens
  siRNA target sequence for ROBO1 (NM_002941.2,3096-3114).
ccctgagtcaactgtttat

SEQ ID NO: 245953 - DNA, 19 bp, Homo sapiens
  siRNA target sequence for ROBO1 (NM_002941.2,3115-3133).
ggtgatgtggaccttagta

SEQ ID NO: 245954 - DNA, 19 bp, Homo sapiens
  siRNA target sequence for ROBO1 (NM_002941.2,3116-3134).
gtgatgtggaccttagtaa

SEQ ID NO: 245955 - DNA, 19 bp, Homo sapiens
  siRNA target sequence for ROBO1 (NM_002941.2,3155-3173).
ccttcaatagcccaaatct

SEQ ID NO: 245956 - DNA, 19 bp, Homo sapiens
  siRNA target sequence for ROBO1 (NM_002941.2,3177-3195).
ggatgggcgttttgtcaat

SEQ ID NO: 245957 - DNA, 19 bp, Homo sapiens
  siRNA target sequence for ROBO1 (NM_002941.2,3181-3199).
gggcgttttgtcaatccat

SEQ ID NO: 245958 - DNA, 19 bp, Homo sapiens
  siRNA target sequence for ROBO1 (NM_002941.2,3227-3245).
ctcagctcatccagtcaaa

SEQ ID NO: 245959 - DNA, 19 bp, Homo sapiens
  siRNA target sequence for ROBO1 (NM_002941.2,3363-3381).
gctgaacaaagattatcga

SEQ ID NO: 245960 - DNA, 19 bp, Homo sapiens
  siRNA target sequence for ROBO1 (NM_002941.2,3398-3416).
ctccaactatcccatacaa

SEQ ID NO: 245961 - DNA, 19 bp, Homo sapiens
  siRNA target sequence for ROBO1 (NM_002941.2,3509-3527).
gaacacccaaggtaccaaa

SEQ ID NO: 245962 - DNA, 19 bp, Homo sapiens
  siRNA target sequence for ROBO1 (NM_002941.2,3590-3608).
gcaatagcgaagagtacaa

SEQ ID NO: 245963 - DNA, 19 bp, Homo sapiens
  siRNA target sequence for ROBO1 (NM_002941.2,3654-3672).
gccaccagcaaggatgtat

SEQ ID NO: 245964 - DNA, 19 bp, Homo sapiens
  siRNA target sequence for ROBO1 (NM_002941.2,3659-3677).
cagcaaggatgtatttgca

SEQ ID NO: 245965 - DNA, 19 bp, Homo sapiens
  siRNA target sequence for ROBO1 (NM_002941.2,3665-3683).
ggatgtatttgcaacaaga

SEQ ID NO: 245966 - DNA, 19 bp, Homo sapiens
  siRNA target sequence for ROBO1 (NM_002941.2,3748-3766).
ccagctgccgtgtcctata

SEQ ID NO: 245967 - DNA, 19 bp, Homo sapiens
  siRNA target sequence for ROBO1 (NM_002941.2,3915-3933).
ctcccctccacatacctat

SEQ ID NO: 245968 - DNA, 19 bp, Homo sapiens
  siRNA target sequence for ROBO1 (NM_002941.2,3947-3965).
gacccctggtctcagatat

SEQ ID NO: 245969 - DNA, 19 bp, Homo sapiens
  siRNA target sequence for ROBO1 (NM_002941.2,3952-3970).
ctggtctcagatatggata

SEQ ID NO: 245970 - DNA, 19 bp, Homo sapiens
  siRNA target sequence for ROBO1 (NM_002941.2,4024-4042).
caaaccagaaggcttttgt

SEQ ID NO: 245971 - DNA, 19 bp, Homo sapiens
  siRNA target sequence for ROBO1 (NM_002941.2,4096-4114).
gtcacggggtccatgatca

SEQ ID NO: 245972 - DNA, 19 bp, Homo sapiens
  siRNA target sequence for ROBO1 (NM_002941.2,4135-4153).
gaggaggacaacatttcca

SEQ ID NO: 245973 - DNA, 19 bp, Homo sapiens
  siRNA target sequence for ROBO1 (NM_002941.2,4155-4173).
cggacgctccagtgttagt

SEQ ID NO: 245974 - DNA, 19 bp, Homo sapiens
  siRNA target sequence for ROBO1 (NM_002941.2,4156-4174).
ggacgctccagtgttagtt

SEQ ID NO: 245975 - DNA, 19 bp, Homo sapiens
  siRNA target sequence for ROBO1 (NM_002941.2,4159-4177).
cgctccagtgttagttctt

SEQ ID NO: 245976 - DNA, 19 bp, Homo sapiens
  siRNA target sequence for ROBO1 (NM_002941.2,4175-4193).
cttcggacggctccttttt

SEQ ID NO: 245977 - DNA, 19 bp, Homo sapiens
  siRNA target sequence for ROBO1 (NM_002941.2,4179-4197).
ggacggctcctttttcact

SEQ ID NO: 245978 - DNA, 19 bp, Homo sapiens
  siRNA target sequence for ROBO1 (NM_002941.2,4221-4239).
cgcagcagcggcagagtat

SEQ ID NO: 245979 - DNA, 19 bp, Homo sapiens
  siRNA target sequence for ROBO1 (NM_002941.2,4236-4254).
gtatgctggtctgaaagta

SEQ ID NO: 245980 - DNA, 19 bp, Homo sapiens
  siRNA target sequence for ROBO1 (NM_002941.2,4277-4295).
ctgctggccgtcgacattt

SEQ ID NO: 245981 - DNA, 19 bp, Homo sapiens
  siRNA target sequence for ROBO1 (NM_002941.2,4373-4391).
ccagaccagccaagaaact

SEQ ID NO: 245982 - DNA, 19 bp, Homo sapiens
  siRNA target sequence for ROBO1 (NM_002941.2,4514-4532).
ctgtagtggtgccaaaact

SEQ ID NO: 245983 - DNA, 19 bp, Homo sapiens
  siRNA target sequence for ROBO1 (NM_002941.2,4737-4755).
catccaagaggatattcta

SEQ ID NO: 245984 - DNA, 19 bp, Homo sapiens
  siRNA target sequence for ROBO1 (NM_002941.2,4746-4764).
ggatattctaccttattgt

SEQ ID NO: 245985 - DNA, 19 bp, Homo sapiens
  siRNA target sequence for ROBO1 (NM_002941.2,4747-4765).
gatattctaccttattgta

SEQ ID NO: 245986 - DNA, 19 bp, Homo sapiens
  siRNA target sequence for ROBO1 (NM_002941.2,4893-4911).
ggtacttggaggatatgaa

SEQ ID NO: 245987 - DNA, 19 bp, Homo sapiens
  siRNA target sequence for ROBO1 (NM_002941.2,4894-4912).
gtacttggaggatatgaaa

SEQ ID NO: 245988 - DNA, 19 bp, Homo sapiens
  siRNA target sequence for ROBO1 (NM_133631.1,970-988).
gcggagcccgctcactttt

SEQ ID NO: 245989 - DNA, 19 bp, Homo sapiens
  siRNA target sequence for ROBO1 (NM_133631.1,971-989).
cggagcccgctcactttta

SEQ ID NO: 245990 - DNA, 19 bp, Homo sapiens
  siRNA target sequence for ROBO1 (NM_133631.1,982-1000).
cacttttacctgtttggat

SEQ ID NO: 245991 - DNA, 19 bp, Homo sapiens
  siRNA target sequence for RRBP1 (NM_004587.1,74-92).
gatatttacgacactcaaa

SEQ ID NO: 245992 - DNA, 19 bp, Homo sapiens
  siRNA target sequence for RRBP1 (NM_004587.1,527-545).
gtcagctctgtagtgaatt

SEQ ID NO: 245993 - DNA, 19 bp, Homo sapiens
  siRNA target sequence for RRBP1 (NM_004587.1,848-866).
gaccctgtggcgattctga

SEQ ID NO: 245994 - DNA, 19 bp, Homo sapiens
  siRNA target sequence for RRBP1 (NM_004587.1,850-868).
ccctgtggcgattctgaaa

SEQ ID NO: 245995 - DNA, 19 bp, Homo sapiens
  siRNA target sequence for RRBP1 (NM_004587.1,1550-1568).
gcggaggtgcgcagcaaat

SEQ ID NO: 245996 - DNA, 19 bp, Homo sapiens
  siRNA target sequence for RRBP1 (NM_004587.1,1797-1815).
ccgtcgagcagcagaaagt

SEQ ID NO: 245997 - DNA, 19 bp, Homo sapiens
  siRNA target sequence for RRBP1 (NM_004587.1,1799-1817).
gtcgagcagcagaaagtga

SEQ ID NO: 245998 - DNA, 19 bp, Homo sapiens
  siRNA target sequence for RRBP1 (NM_004587.1,1930-1948).
gaagcagctctgtctgatt

SEQ ID NO: 245999 - DNA, 19 bp, Homo sapiens
  siRNA target sequence for RRBP1 (NM_004587.1,2025-2043).
ggctgcaggatctcaaaga

SEQ ID NO: 246000 - DNA, 19 bp, Homo sapiens
  siRNA target sequence for RRBP1 (NM_004587.1,2293-2311).
gaagcatctcgaagagatt

SEQ ID NO: 246001 - DNA, 19 bp, Homo sapiens
  siRNA target sequence for RRBP1 (NM_004587.1,2296-2314).
gcatctcgaagagattgta

SEQ ID NO: 246002 - DNA, 19 bp, Homo sapiens
  siRNA target sequence for RRBP1 (NM_004587.1,2409-2427).
gcgccgagtgccagaacta

SEQ ID NO: 246003 - DNA, 19 bp, Homo sapiens
  siRNA target sequence for RRBP1 (NM_004587.1,2452-2470).
gcaacttctcctagaatct

SEQ ID NO: 246004 - DNA, 19 bp, Homo sapiens
  siRNA target sequence for RRBP1 (NM_004587.1,2537-2555).
cagcagttgagtgaaatga

SEQ ID NO: 246005 - DNA, 19 bp, Homo sapiens
  siRNA target sequence for RRBP1 (NM_004587.1,2731-2749).
ctcggcatgtcggttacaa

SEQ ID NO: 246006 - DNA, 19 bp, Homo sapiens
  siRNA target sequence for RRBP1 (NM_004587.1,2733-2751).
cggcatgtcggttacaaga

SEQ ID NO: 246007 - DNA, 19 bp, Homo sapiens
  siRNA target sequence for RRBP1 (NM_004587.1,2734-2752).
ggcatgtcggttacaagaa

SEQ ID NO: 246008 - DNA, 19 bp, Homo sapiens
  siRNA target sequence for RRBP1 (NM_004587.1,2736-2754).
catgtcggttacaagaaga

SEQ ID NO: 246009 - DNA, 19 bp, Homo sapiens
  siRNA target sequence for RRBP1 (NM_004587.1,2739-2757).
gtcggttacaagaagaatt

SEQ ID NO: 246010 - DNA, 19 bp, Homo sapiens
  siRNA target sequence for AGER (NM_001136.3,316-334).
cggtgccaggcaatgaaca

SEQ ID NO: 246011 - DNA, 19 bp, Homo sapiens
  siRNA target sequence for AGER (NM_001136.3,511-529).
cccctggtgcctaatgaga

SEQ ID NO: 246012 - DNA, 19 bp, Homo sapiens
  siRNA target sequence for AGER (NM_001136.3,512-530).
ccctggtgcctaatgagaa

SEQ ID NO: 246013 - DNA, 19 bp, Homo sapiens
  siRNA target sequence for AGER (NM_001136.3,584-602).
cactgcagtcggagctaat

SEQ ID NO: 246014 - DNA, 19 bp, Homo sapiens
  siRNA target sequence for AGER (NM_001136.3,725-743).
ctctggaggaggtccaatt

SEQ ID NO: 246015 - DNA, 19 bp, Homo sapiens
  siRNA target sequence for AGER (NM_001136.3,879-897).
gctgatcctccctgagata

SEQ ID NO: 246016 - DNA, 19 bp, Homo sapiens
  siRNA target sequence for AGER (NM_001136.3,1177-1195).
cgtgcagaactgaatcagt

SEQ ID NO: 246017 - DNA, 19 bp, Homo sapiens
  siRNA target sequence for AGER (NM_001136.3,1207-1225).
gaggcaggcgagagtagta

SEQ ID NO: 246018 - DNA, 19 bp, Homo sapiens
  siRNA target sequence for AGER (NM_001136.3,1209-1227).
ggcaggcgagagtagtact

SEQ ID NO: 246019 - DNA, 19 bp, Homo sapiens
  siRNA target sequence for CD3D (NM_000732.1,4-22).
gaacatagcacgtttctct

SEQ ID NO: 246020 - DNA, 19 bp, Homo sapiens
  siRNA target sequence for CD3D (NM_000732.1,59-77).
gccccttcaagatacctat

SEQ ID NO: 246021 - DNA, 19 bp, Homo sapiens
  siRNA target sequence for CD3D (NM_000732.1,60-78).
ccccttcaagatacctata

SEQ ID NO: 246022 - DNA, 19 bp, Homo sapiens
  siRNA target sequence for CD3D (NM_000732.1,88-106).
gaggacagagtgtttgtga

SEQ ID NO: 246023 - DNA, 19 bp, Homo sapiens
  siRNA target sequence for CD3D (NM_000732.1,95-113).
gagtgtttgtgaattgcaa

SEQ ID NO: 246024 - DNA, 19 bp, Homo sapiens
  siRNA target sequence for CD3D (NM_000732.1,97-115).
gtgtttgtgaattgcaata

SEQ ID NO: 246025 - DNA, 19 bp, Homo sapiens
  siRNA target sequence for CD3D (NM_000732.1,151-169).
ctgctctcagacattacaa

SEQ ID NO: 246026 - DNA, 19 bp, Homo sapiens
  siRNA target sequence for CD3D (NM_000732.1,192-210).
cctggacccacgaggaata

SEQ ID NO: 246027 - DNA, 19 bp, Homo sapiens
  siRNA target sequence for CD3D (NM_000732.1,193-211).
ctggacccacgaggaatat

SEQ ID NO: 246028 - DNA, 19 bp, Homo sapiens
  siRNA target sequence for CD3D (NM_000732.1,195-213).
ggacccacgaggaatatat

SEQ ID NO: 246029 - DNA, 19 bp, Homo sapiens
  siRNA target sequence for CD3D (NM_000732.1,196-214).
gacccacgaggaatatata

SEQ ID NO: 246030 - DNA, 19 bp, Homo sapiens
  siRNA target sequence for CD3D (NM_000732.1,251-269).
ctaccgtgcaagttcatta

SEQ ID NO: 246031 - DNA, 19 bp, Homo sapiens
  siRNA target sequence for CD3D (NM_000732.1,255-273).
cgtgcaagttcattatcga

SEQ ID NO: 246032 - DNA, 19 bp, Homo sapiens
  siRNA target sequence for CD3D (NM_000732.1,256-274).
gtgcaagttcattatcgaa

SEQ ID NO: 246033 - DNA, 19 bp, Homo sapiens
  siRNA target sequence for CD3D (NM_000732.1,308-326).
ccgtggctggcatcattgt

SEQ ID NO: 246034 - DNA, 19 bp, Homo sapiens
  siRNA target sequence for CD3D (NM_000732.1,431-449).
ggaatgaccaggtctatca

SEQ ID NO: 246035 - DNA, 19 bp, Homo sapiens
  siRNA target sequence for CD3E (NM_000733.1,87-105).
cctctgcctcttatcagtt

SEQ ID NO: 246036 - DNA, 19 bp, Homo sapiens
  siRNA target sequence for CD3E (NM_000733.1,113-131).
gggggcaagatggtaatga

SEQ ID NO: 246037 - DNA, 19 bp, Homo sapiens
  siRNA target sequence for CD3E (NM_000733.1,114-132).
ggggcaagatggtaatgaa

SEQ ID NO: 246038 - DNA, 19 bp, Homo sapiens
  siRNA target sequence for CD3E (NM_000733.1,151-169).
cagacaccatataaagtct

SEQ ID NO: 246039 - DNA, 19 bp, Homo sapiens
  siRNA target sequence for CD3E (NM_000733.1,178-196).
ggaaccacagtaatattga

SEQ ID NO: 246040 - DNA, 19 bp, Homo sapiens
  siRNA target sequence for CD3E (NM_000733.1,207-225).
gtatcctggatctgaaata

SEQ ID NO: 246041 - DNA, 19 bp, Homo sapiens
  siRNA target sequence for CD3E (NM_000733.1,226-244).
ctatggcaacacaatgata

SEQ ID NO: 246042 - DNA, 19 bp, Homo sapiens
  siRNA target sequence for CD3E (NM_000733.1,230-248).
ggcaacacaatgataaaaa

SEQ ID NO: 246043 - DNA, 19 bp, Homo sapiens
  siRNA target sequence for CD3E (NM_000733.1,295-313).
cacctgtcactgaaggaat

SEQ ID NO: 246044 - DNA, 19 bp, Homo sapiens
  siRNA target sequence for CD3E (NM_000733.1,324-342).
ggagcaaagtggttattat

SEQ ID NO: 246045 - DNA, 19 bp, Homo sapiens
  siRNA target sequence for CD3E (NM_000733.1,368-386).
cagaagatgcgaactttta

SEQ ID NO: 246046 - DNA, 19 bp, Homo sapiens
  siRNA target sequence for CD3E (NM_000733.1,373-391).
gatgcgaacttttatctct

SEQ ID NO: 246047 - DNA, 19 bp, Homo sapiens
  siRNA target sequence for CD3E (NM_000733.1,435-453).
gatgtcggtggccacaatt

SEQ ID NO: 246048 - DNA, 19 bp, Homo sapiens
  siRNA target sequence for CD3E (NM_000733.1,440-458).
cggtggccacaattgtcat

SEQ ID NO: 246049 - DNA, 19 bp, Homo sapiens
  siRNA target sequence for CD3E (NM_000733.1,441-459).
ggtggccacaattgtcata

SEQ ID NO: 246050 - DNA, 19 bp, Homo sapiens
  siRNA target sequence for CD3E (NM_000733.1,634-652).
ggccagcgggacctgtatt

SEQ ID NO: 246051 - DNA, 19 bp, Homo sapiens
  siRNA target sequence for CD3E (NM_000733.1,636-654).
ccagcgggacctgtattct

SEQ ID NO: 246052 - DNA, 19 bp, Homo sapiens
  siRNA target sequence for CD3G (NM_000073.1,67-85).
catcctggctatcattctt

SEQ ID NO: 246053 - DNA, 19 bp, Homo sapiens
  siRNA target sequence for CD3G (NM_000073.1,70-88).
cctggctatcattcttctt

SEQ ID NO: 246054 - DNA, 19 bp, Homo sapiens
  siRNA target sequence for CD3G (NM_000073.1,96-114).
ctttggcccagtcaatcaa

SEQ ID NO: 246055 - DNA, 19 bp, Homo sapiens
  siRNA target sequence for CD3G (NM_000073.1,133-151).
ggtgtatgactatcaagaa

SEQ ID NO: 246056 - DNA, 19 bp, Homo sapiens
  siRNA target sequence for CD3G (NM_000073.1,220-238).
gatcggcttcctaactgaa

SEQ ID NO: 246057 - DNA, 19 bp, Homo sapiens
  siRNA target sequence for CD3G (NM_000073.1,223-241).
cggcttcctaactgaagat

SEQ ID NO: 246058 - DNA, 19 bp, Homo sapiens
  siRNA target sequence for CD3G (NM_000073.1,274-292).
ggaccctcgagggatgtat

SEQ ID NO: 246059 - DNA, 19 bp, Homo sapiens
  siRNA target sequence for CD3G (NM_000073.1,278-296).
cctcgagggatgtatcagt

SEQ ID NO: 246060 - DNA, 19 bp, Homo sapiens
  siRNA target sequence for CD3G (NM_000073.1,286-304).
gatgtatcagtgtaaagga

SEQ ID NO: 246061 - DNA, 19 bp, Homo sapiens
  siRNA target sequence for CD3G (NM_000073.1,323-341).
ccactccaagtgtattaca

SEQ ID NO: 246062 - DNA, 19 bp, Homo sapiens
  siRNA target sequence for CD3G (NM_000073.1,326-344).
ctccaagtgtattacagaa

SEQ ID NO: 246063 - DNA, 19 bp, Homo sapiens
  siRNA target sequence for CD3G (NM_000073.1,346-364).
gtgtcagaactgcattgaa

SEQ ID NO: 246064 - DNA, 19 bp, Homo sapiens
  siRNA target sequence for CD3G (NM_000073.1,355-373).
ctgcattgaactaaatgca

SEQ ID NO: 246065 - DNA, 19 bp, Homo sapiens
  siRNA target sequence for CD3G (NM_000073.1,398-416).
gctgaaatcgtcagcattt

SEQ ID NO: 246066 - DNA, 19 bp, Homo sapiens
  siRNA target sequence for CD3G (NM_000073.1,425-443).
gctgttggggtctacttca

SEQ ID NO: 246067 - DNA, 19 bp, Homo sapiens
  siRNA target sequence for CD3G (NM_000073.1,523-541).
cctcaaggatcgagaagat

SEQ ID NO: 246068 - DNA, 19 bp, Homo sapiens
  siRNA target sequence for CD79A (NM_001783.1,193-211).
caatgcccgcacaatagca

SEQ ID NO: 246069 - DNA, 19 bp, Homo sapiens
  siRNA target sequence for CD79A (NM_001783.1,286-304).
ggcgaggaccccaatggta

SEQ ID NO: 246070 - DNA, 19 bp, Homo sapiens
  siRNA target sequence for CD79A (NM_001783.1,296-314).
ccaatggtacgctgatcat

SEQ ID NO: 246071 - DNA, 19 bp, Homo sapiens
  siRNA target sequence for CD79A (NM_001783.1,332-350).
gccatgggggcatatacgt

SEQ ID NO: 246072 - DNA, 19 bp, Homo sapiens
  siRNA target sequence for CD79B (NM_000626.1,235-253).
gcagagcccacgtttcata

SEQ ID NO: 246073 - DNA, 19 bp, Homo sapiens
  siRNA target sequence for CD79B (NM_000626.1,263-281).
cggggcttcacggtgaaaa

SEQ ID NO: 246074 - DNA, 19 bp, Homo sapiens
  siRNA target sequence for CD79B (NM_000626.1,267-285).
gcttcacggtgaaaatgca

SEQ ID NO: 246075 - DNA, 19 bp, Homo sapiens
  siRNA target sequence for CD79B (NM_000626.1,383-401).
gaagagtcccagaacgaat

SEQ ID NO: 246076 - DNA, 19 bp, Homo sapiens
  siRNA target sequence for CD79B (NM_000626.1,461-479).
cagcagaagtgcaacaaca

SEQ ID NO: 246077 - DNA, 19 bp, Homo sapiens
  siRNA target sequence for CD79B (NM_000626.1,561-579).
cgctgaaggatggtatcat

SEQ ID NO: 246078 - DNA, 19 bp, Homo sapiens
  siRNA target sequence for CD79B (NM_000626.1,563-581).
ctgaaggatggtatcatca

SEQ ID NO: 246079 - DNA, 19 bp, Homo sapiens
  siRNA target sequence for CLDN3 (NM_001306.2,607-625).
ggtcggccaacaccattat

SEQ ID NO: 246080 - DNA, 19 bp, Homo sapiens
  siRNA target sequence for CLDN3 (NM_001306.2,748-766).
gtcccccacgcgagaagaa

SEQ ID NO: 246081 - DNA, 19 bp, Homo sapiens
  siRNA target sequence for CLDN3 (NM_001306.2,750-768).
cccccacgcgagaagaagt

SEQ ID NO: 246082 - DNA, 19 bp, Homo sapiens
  siRNA target sequence for CLDN3 (NM_001306.2,751-769).
ccccacgcgagaagaagta

SEQ ID NO: 246083 - DNA, 19 bp, Homo sapiens
  siRNA target sequence for CLDN3 (NM_001306.2,753-771).
ccacgcgagaagaagtaca

SEQ ID NO: 246084 - DNA, 19 bp, Homo sapiens
  siRNA target sequence for CLDN4 (NM_001305.3,347-365).
ccatggggctacaggtaat

SEQ ID NO: 246085 - DNA, 19 bp, Homo sapiens
  siRNA target sequence for CLDN4 (NM_001305.3,749-767).
cctggacggcccacaacat

SEQ ID NO: 246086 - DNA, 19 bp, Homo sapiens
  siRNA target sequence for CLDN4 (NM_001305.3,752-770).
ggacggcccacaacatcat

SEQ ID NO: 246087 - DNA, 19 bp, Homo sapiens
  siRNA target sequence for CLDN4 (NM_001305.3,912-930).
gccttactccgccaagtat

SEQ ID NO: 246088 - DNA, 19 bp, Homo sapiens
  siRNA target sequence for CLDN4 (NM_001305.3,913-931).
ccttactccgccaagtatt

SEQ ID NO: 246089 - DNA, 19 bp, Homo sapiens
  siRNA target sequence for CR2 (NM_001877.1,141-159).
ctctcctccgcctatccta

SEQ ID NO: 246090 - DNA, 19 bp, Homo sapiens
  siRNA target sequence for CR2 (NM_001877.1,156-174).
cctaaatggccggattagt

SEQ ID NO: 246091 - DNA, 19 bp, Homo sapiens
  siRNA target sequence for CR2 (NM_001877.1,157-175).
ctaaatggccggattagtt

SEQ ID NO: 246092 - DNA, 19 bp, Homo sapiens
  siRNA target sequence for CR2 (NM_001877.1,163-181).
ggccggattagttattatt

SEQ ID NO: 246093 - DNA, 19 bp, Homo sapiens
  siRNA target sequence for CR2 (NM_001877.1,166-184).
cggattagttattattcta

SEQ ID NO: 246094 - DNA, 19 bp, Homo sapiens
  siRNA target sequence for CR2 (NM_001877.1,193-211).
gctgttggtaccgtgataa

SEQ ID NO: 246095 - DNA, 19 bp, Homo sapiens
  siRNA target sequence for CR2 (NM_001877.1,196-214).
gttggtaccgtgataaggt

SEQ ID NO: 246096 - DNA, 19 bp, Homo sapiens
  siRNA target sequence for CR2 (NM_001877.1,207-225).
gataaggtacagttgttca

SEQ ID NO: 246097 - DNA, 19 bp, Homo sapiens
  siRNA target sequence for CR2 (NM_001877.1,234-252).
ccgcctcattggagaaaaa

SEQ ID NO: 246098 - DNA, 19 bp, Homo sapiens
  siRNA target sequence for CR2 (NM_001877.1,235-253).
cgcctcattggagaaaaaa

SEQ ID NO: 246099 - DNA, 19 bp, Homo sapiens
  siRNA target sequence for CR2 (NM_001877.1,254-272).
gtctattatgcataactaa

SEQ ID NO: 246100 - DNA, 19 bp, Homo sapiens
  siRNA target sequence for CR2 (NM_001877.1,282-300).
ggatggaacctgggataaa

SEQ ID NO: 246101 - DNA, 19 bp, Homo sapiens
  siRNA target sequence for CR2 (NM_001877.1,301-319).
cctgctcctaaatgtgaat

SEQ ID NO: 246102 - DNA, 19 bp, Homo sapiens
  siRNA target sequence for CR2 (NM_001877.1,302-320).
ctgctcctaaatgtgaata

SEQ ID NO: 246103 - DNA, 19 bp, Homo sapiens
  siRNA target sequence for CR2 (NM_001877.1,355-373).
gtaccaggaggatacaaaa

SEQ ID NO: 246104 - DNA, 19 bp, Homo sapiens
  siRNA target sequence for CR2 (NM_001877.1,390-408).
ctacagacatggtgattct

SEQ ID NO: 246105 - DNA, 19 bp, Homo sapiens
  siRNA target sequence for CR2 (NM_001877.1,413-431).
catttgcctgtaaaaccaa

SEQ ID NO: 246106 - DNA, 19 bp, Homo sapiens
  siRNA target sequence for CR2 (NM_001877.1,455-473).
ctgtttggtgtcaagcaaa

SEQ ID NO: 246107 - DNA, 19 bp, Homo sapiens
  siRNA target sequence for CR2 (NM_001877.1,461-479).
ggtgtcaagcaaataatat

SEQ ID NO: 246108 - DNA, 19 bp, Homo sapiens
  siRNA target sequence for CR2 (NM_001877.1,593-611).
caggattgtctgtgactta

SEQ ID NO: 246109 - DNA, 19 bp, Homo sapiens
  siRNA target sequence for CR2 (NM_001877.1,595-613).
ggattgtctgtgacttaca

SEQ ID NO: 246110 - DNA, 19 bp, Homo sapiens
  siRNA target sequence for CR2 (NM_001877.1,604-622).
gtgacttacagctgtgaat

SEQ ID NO: 246111 - DNA, 19 bp, Homo sapiens
  siRNA target sequence for CR2 (NM_001877.1,614-632).
gctgtgaatctggttactt

SEQ ID NO: 246112 - DNA, 19 bp, Homo sapiens
  siRNA target sequence for CR2 (NM_001877.1,643-661).
gaaaagatcattaactgtt

SEQ ID NO: 246113 - DNA, 19 bp, Homo sapiens
  siRNA target sequence for CR2 (NM_001877.1,700-718).
gaagaggcacgctgtaaat

SEQ ID NO: 246114 - DNA, 19 bp, Homo sapiens
  siRNA target sequence for CR2 (NM_001877.1,705-723).
ggcacgctgtaaatctcta

SEQ ID NO: 246115 - DNA, 19 bp, Homo sapiens
  siRNA target sequence for CR2 (NM_001877.1,744-762).
ggtaaaggagcctccaatt

SEQ ID NO: 246116 - DNA, 19 bp, Homo sapiens
  siRNA target sequence for CR2 (NM_001877.1,813-831).
gcaaggcccaccttctagt

SEQ ID NO: 246117 - DNA, 19 bp, Homo sapiens
  siRNA target sequence for CR2 (NM_001877.1,823-841).
ccttctagtcggtgtgtaa

SEQ ID NO: 246118 - DNA, 19 bp, Homo sapiens
  siRNA target sequence for CR2 (NM_001877.1,824-842).
cttctagtcggtgtgtaat

SEQ ID NO: 246119 - DNA, 19 bp, Homo sapiens
  siRNA target sequence for CR2 (NM_001877.1,899-917).
catcacctccccctattct

SEQ ID NO: 246120 - DNA, 19 bp, Homo sapiens
  siRNA target sequence for CR2 (NM_001877.1,902-920).
cacctccccctattctcaa

SEQ ID NO: 246121 - DNA, 19 bp, Homo sapiens
  siRNA target sequence for CR2 (NM_001877.1,907-925).
ccccctattctcaatggaa

SEQ ID NO: 246122 - DNA, 19 bp, Homo sapiens
  siRNA target sequence for CR2 (NM_001877.1,935-953).
gcaactcactagcaaatgt

SEQ ID NO: 246123 - DNA, 19 bp, Homo sapiens
  siRNA target sequence for CR2 (NM_001877.1,946-964).
gcaaatgtctcatatggaa

SEQ ID NO: 246124 - DNA, 19 bp, Homo sapiens
  siRNA target sequence for CR2 (NM_001877.1,961-979).
ggaagcatagtcacttaca

SEQ ID NO: 246125 - DNA, 19 bp, Homo sapiens
  siRNA target sequence for CR2 (NM_001877.1,1003-1021).
ggagtgaacttcatcctta

SEQ ID NO: 246126 - DNA, 19 bp, Homo sapiens
  siRNA target sequence for CR2 (NM_001877.1,1008-1026).
gaacttcatccttattgga

SEQ ID NO: 246127 - DNA, 19 bp, Homo sapiens
  siRNA target sequence for CR2 (NM_001877.1,1036-1054).
ctccgttgtacagttgata

SEQ ID NO: 246128 - DNA, 19 bp, Homo sapiens
  siRNA target sequence for CR2 (NM_001877.1,1038-1056).
ccgttgtacagttgatagt

SEQ ID NO: 246129 - DNA, 19 bp, Homo sapiens
  siRNA target sequence for CR2 (NM_001877.1,1137-1155).
cctaagaggccgaatggta

SEQ ID NO: 246130 - DNA, 19 bp, Homo sapiens
  siRNA target sequence for CR2 (NM_001877.1,1138-1156).
ctaagaggccgaatggtat

SEQ ID NO: 246131 - DNA, 19 bp, Homo sapiens
  siRNA target sequence for CR2 (NM_001877.1,1159-1177).
gggcagaaagatcgatata

SEQ ID NO: 246132 - DNA, 19 bp, Homo sapiens
  siRNA target sequence for CR2 (NM_001877.1,1162-1180).
cagaaagatcgatatacct

SEQ ID NO: 246133 - DNA, 19 bp, Homo sapiens
  siRNA target sequence for CR2 (NM_001877.1,1164-1182).
gaaagatcgatatacctat

SEQ ID NO: 246134 - DNA, 19 bp, Homo sapiens
  siRNA target sequence for CR2 (NM_001877.1,1185-1203).
cgacactgtgatatttgct

SEQ ID NO: 246135 - DNA, 19 bp, Homo sapiens
  siRNA target sequence for CR2 (NM_001877.1,1274-1292).
ctgcaccagtctgtgaaaa

SEQ ID NO: 246136 - DNA, 19 bp, Homo sapiens
  siRNA target sequence for CR2 (NM_001877.1,1279-1297).
ccagtctgtgaaaaggaat

SEQ ID NO: 246137 - DNA, 19 bp, Homo sapiens
  siRNA target sequence for CR2 (NM_001877.1,1298-1316).
gccaggcccctcctaacat

SEQ ID NO: 246138 - DNA, 19 bp, Homo sapiens
  siRNA target sequence for CR2 (NM_001877.1,1357-1375).
gaccctggaacatctataa

SEQ ID NO: 246139 - DNA, 19 bp, Homo sapiens
  siRNA target sequence for CR2 (NM_001877.1,1404-1422).
ggtgggagaagaatccata

SEQ ID NO: 246140 - DNA, 19 bp, Homo sapiens
  siRNA target sequence for CR2 (NM_001877.1,1452-1470).
ccctgtaccccaatgcaaa

SEQ ID NO: 246141 - DNA, 19 bp, Homo sapiens
  siRNA target sequence for CR2 (NM_001877.1,1487-1505).
ctacaggaaggcaactctt

SEQ ID NO: 246142 - DNA, 19 bp, Homo sapiens
  siRNA target sequence for CR2 (NM_001877.1,1515-1533).
ccagcaccaatttgttaga

SEQ ID NO: 246143 - DNA, 19 bp, Homo sapiens
  siRNA target sequence for CR2 (NM_001877.1,1590-1608).
ggagtgtcaaggcacaatt

SEQ ID NO: 246144 - DNA, 19 bp, Homo sapiens
  siRNA target sequence for CR2 (NM_001877.1,1600-1618).
ggcacaattccttggttta

SEQ ID NO: 246145 - DNA, 19 bp, Homo sapiens
  siRNA target sequence for CR2 (NM_001877.1,1601-1619).
gcacaattccttggtttat

SEQ ID NO: 246146 - DNA, 19 bp, Homo sapiens
  siRNA target sequence for CR2 (NM_001877.1,1604-1622).
caattccttggtttatgga

SEQ ID NO: 246147 - DNA, 19 bp, Homo sapiens
  siRNA target sequence for CR2 (NM_001877.1,1654-1672).
ccaccccctgttatctaca

SEQ ID NO: 246148 - DNA, 19 bp, Homo sapiens
  siRNA target sequence for CR2 (NM_001877.1,1683-1701).
caccgggagttccttagaa

SEQ ID NO: 246149 - DNA, 19 bp, Homo sapiens
  siRNA target sequence for CR2 (NM_001877.1,1685-1703).
ccgggagttccttagaaga

SEQ ID NO: 246150 - DNA, 19 bp, Homo sapiens
  siRNA target sequence for CR2 (NM_001877.1,1686-1704).
cgggagttccttagaagat

SEQ ID NO: 246151 - DNA, 19 bp, Homo sapiens
  siRNA target sequence for CR2 (NM_001877.1,1687-1705).
gggagttccttagaagatt

SEQ ID NO: 246152 - DNA, 19 bp, Homo sapiens
  siRNA target sequence for CR2 (NM_001877.1,1689-1707).
gagttccttagaagatttt

SEQ ID NO: 246153 - DNA, 19 bp, Homo sapiens
  siRNA target sequence for CR2 (NM_001877.1,1788-1806).
catccgttgtacaagcaat

SEQ ID NO: 246154 - DNA, 19 bp, Homo sapiens
  siRNA target sequence for CR2 (NM_001877.1,1791-1809).
ccgttgtacaagcaatgat

SEQ ID NO: 246155 - DNA, 19 bp, Homo sapiens
  siRNA target sequence for CR2 (NM_001877.1,1793-1811).
gttgtacaagcaatgatca

SEQ ID NO: 246156 - DNA, 19 bp, Homo sapiens
  siRNA target sequence for CR2 (NM_001877.1,1882-1900).
gtccatattgcaaatggat

SEQ ID NO: 246157 - DNA, 19 bp, Homo sapiens
  siRNA target sequence for CR2 (NM_001877.1,1912-1930).
ggcaaggaagccccatatt

SEQ ID NO: 246158 - DNA, 19 bp, Homo sapiens
  siRNA target sequence for CR2 (NM_001877.1,1913-1931).
gcaaggaagccccatattt

SEQ ID NO: 246159 - DNA, 19 bp, Homo sapiens
  siRNA target sequence for CR2 (NM_001877.1,1922-1940).
ccccatatttctacaatga

SEQ ID NO: 246160 - DNA, 19 bp, Homo sapiens
  siRNA target sequence for CR2 (NM_001877.1,1939-1957).
gacactgtgacattcaagt

SEQ ID NO: 246161 - DNA, 19 bp, Homo sapiens
  siRNA target sequence for CR2 (NM_001877.1,1945-1963).
gtgacattcaagtgttata

SEQ ID NO: 246162 - DNA, 19 bp, Homo sapiens
  siRNA target sequence for CR2 (NM_001877.1,1947-1965).
gacattcaagtgttatagt

SEQ ID NO: 246163 - DNA, 19 bp, Homo sapiens
  siRNA target sequence for CR2 (NM_001877.1,1953-1971).
caagtgttatagtggattt

SEQ ID NO: 246164 - DNA, 19 bp, Homo sapiens
  siRNA target sequence for CR2 (NM_001877.1,1956-1974).
gtgttatagtggatttact

SEQ ID NO: 246165 - DNA, 19 bp, Homo sapiens
  siRNA target sequence for CR2 (NM_001877.1,1977-1995).
gaagggcagtagtcagatt

SEQ ID NO: 246166 - DNA, 19 bp, Homo sapiens
  siRNA target sequence for CR2 (NM_001877.1,1981-1999).
ggcagtagtcagattcgtt

SEQ ID NO: 246167 - DNA, 19 bp, Homo sapiens
  siRNA target sequence for CR2 (NM_001877.1,2024-2042).
ctgaaataccagtttgtga

SEQ ID NO: 246168 - DNA, 19 bp, Homo sapiens
  siRNA target sequence for CR2 (NM_001877.1,2096-2114).
cacgtgtggagctagttaa

SEQ ID NO: 246169 - DNA, 19 bp, Homo sapiens
  siRNA target sequence for CR2 (NM_001877.1,2098-2116).
cgtgtggagctagttaata

SEQ ID NO: 246170 - DNA, 19 bp, Homo sapiens
  siRNA target sequence for CR2 (NM_001877.1,2101-2119).
gtggagctagttaatacgt

SEQ ID NO: 246171 - DNA, 19 bp, Homo sapiens
  siRNA target sequence for CR2 (NM_001877.1,2139-2157).
gttgactggacatgcttat

SEQ ID NO: 246172 - DNA, 19 bp, Homo sapiens
  siRNA target sequence for CR2 (NM_001877.1,2312-2330).
gtgaccaaggattctatct

SEQ ID NO: 246173 - DNA, 19 bp, Homo sapiens
  siRNA target sequence for CR2 (NM_001877.1,2349-2367).
gcagtgcagaagtgattct

SEQ ID NO: 246174 - DNA, 19 bp, Homo sapiens
  siRNA target sequence for CR2 (NM_001877.1,2424-2442).
gactcgctgccctaatcca

SEQ ID NO: 246175 - DNA, 19 bp, Homo sapiens
  siRNA target sequence for CR2 (NM_001877.1,2435-2453).
ctaatccagaagtcaaaca

SEQ ID NO: 246176 - DNA, 19 bp, Homo sapiens
  siRNA target sequence for CR2 (NM_001877.1,2463-2481).
gctcaataaaacacattct

SEQ ID NO: 246177 - DNA, 19 bp, Homo sapiens
  siRNA target sequence for CR2 (NM_001877.1,2480-2498).
ctgcatattcccacaatga

SEQ ID NO: 246178 - DNA, 19 bp, Homo sapiens
  siRNA target sequence for CR2 (NM_001877.1,2483-2501).
catattcccacaatgacat

SEQ ID NO: 246179 - DNA, 19 bp, Homo sapiens
  siRNA target sequence for CR2 (NM_001877.1,2489-2507).
cccacaatgacatagtgta

SEQ ID NO: 246180 - DNA, 19 bp, Homo sapiens
  siRNA target sequence for CR2 (NM_001877.1,2490-2508).
ccacaatgacatagtgtat

SEQ ID NO: 246181 - DNA, 19 bp, Homo sapiens
  siRNA target sequence for CR2 (NM_001877.1,2539-2557).
ggtagtcgcgtgattaggt

SEQ ID NO: 246182 - DNA, 19 bp, Homo sapiens
  siRNA target sequence for CR2 (NM_001877.1,2545-2563).
cgcgtgattaggtgtcata

SEQ ID NO: 246183 - DNA, 19 bp, Homo sapiens
  siRNA target sequence for CR2 (NM_001877.1,2547-2565).
cgtgattaggtgtcatact

SEQ ID NO: 246184 - DNA, 19 bp, Homo sapiens
  siRNA target sequence for CR2 (NM_001877.1,2550-2568).
gattaggtgtcatactgat

SEQ ID NO: 246185 - DNA, 19 bp, Homo sapiens
  siRNA target sequence for CR2 (NM_001877.1,2556-2574).
gtgtcatactgataacaca

SEQ ID NO: 246186 - DNA, 19 bp, Homo sapiens
  siRNA target sequence for CR2 (NM_001877.1,2581-2599).
ccaggtgtgccaacttgta

SEQ ID NO: 246187 - DNA, 19 bp, Homo sapiens
  siRNA target sequence for CR2 (NM_001877.1,2731-2749).
ggagaggcactccttcttt

SEQ ID NO: 246188 - DNA, 19 bp, Homo sapiens
  siRNA target sequence for CR2 (NM_001877.1,2783-2801).
ctcattgtaaagaggtaaa

SEQ ID NO: 246189 - DNA, 19 bp, Homo sapiens
  siRNA target sequence for CR2 (NM_001877.1,2804-2822).
gtagctcaccagcagatat

SEQ ID NO: 246190 - DNA, 19 bp, Homo sapiens
  siRNA target sequence for CR2 (NM_001877.1,2865-2883).
gtatggagctgttgtaact

SEQ ID NO: 246191 - DNA, 19 bp, Homo sapiens
  siRNA target sequence for CR2 (NM_001877.1,3013-3031).
gcaggtttgatacttctta

SEQ ID NO: 246192 - DNA, 19 bp, Homo sapiens
  siRNA target sequence for CR2 (NM_001877.1,3050-3068).
ccttatacgtgatatcaaa

SEQ ID NO: 246193 - DNA, 19 bp, Homo sapiens
  siRNA target sequence for CR2 (NM_001877.1,3051-3069).
cttatacgtgatatcaaaa

SEQ ID NO: 246194 - DNA, 19 bp, Homo sapiens
  siRNA target sequence for CR2 (NM_001877.1,3124-3142).
gaagcacgagaagtatatt

SEQ ID NO: 246195 - DNA, 19 bp, Homo sapiens
  siRNA target sequence for DCC (NM_005215.1,3-21).
ggagaatagtcttagatgt

SEQ ID NO: 246196 - DNA, 19 bp, Homo sapiens
  siRNA target sequence for DCC (NM_005215.1,6-24).
gaatagtcttagatgtgtt

SEQ ID NO: 246197 - DNA, 19 bp, Homo sapiens
  siRNA target sequence for DCC (NM_005215.1,69-87).
cagcgcgcatcttcaagta

SEQ ID NO: 246198 - DNA, 19 bp, Homo sapiens
  siRNA target sequence for DCC (NM_005215.1,82-100).
caagtaaccggttttcaaa

SEQ ID NO: 246199 - DNA, 19 bp, Homo sapiens
  siRNA target sequence for DCC (NM_005215.1,90-108).
cggttttcaaattaaagct

SEQ ID NO: 246200 - DNA, 19 bp, Homo sapiens
  siRNA target sequence for DCC (NM_005215.1,137-155).
cttctgatgccgtcacaat

SEQ ID NO: 246201 - DNA, 19 bp, Homo sapiens
  siRNA target sequence for DCC (NM_005215.1,259-277).
gaaaggaagcagcaacttt

SEQ ID NO: 246202 - DNA, 19 bp, Homo sapiens
  siRNA target sequence for DCC (NM_005215.1,283-301).
gggtctctgctgatacaaa

SEQ ID NO: 246203 - DNA, 19 bp, Homo sapiens
  siRNA target sequence for DCC (NM_005215.1,284-302).
ggtctctgctgatacaaaa

SEQ ID NO: 246204 - DNA, 19 bp, Homo sapiens
  siRNA target sequence for DCC (NM_005215.1,345-363).
ccaatgtgaggcatcttta

SEQ ID NO: 246205 - DNA, 19 bp, Homo sapiens
  siRNA target sequence for DCC (NM_005215.1,367-385).
gattctggctcaattatta

SEQ ID NO: 246206 - DNA, 19 bp, Homo sapiens
  siRNA target sequence for DCC (NM_005215.1,412-430).
ggaccactgaggttccttt

SEQ ID NO: 246207 - DNA, 19 bp, Homo sapiens
  siRNA target sequence for DCC (NM_005215.1,416-434).
cactgaggttcctttcaca

SEQ ID NO: 246208 - DNA, 19 bp, Homo sapiens
  siRNA target sequence for DCC (NM_005215.1,494-512).
gggagcccatgccaacaat

SEQ ID NO: 246209 - DNA, 19 bp, Homo sapiens
  siRNA target sequence for DCC (NM_005215.1,630-648).
ccgatgctcagctcgaaat

SEQ ID NO: 246210 - DNA, 19 bp, Homo sapiens
  siRNA target sequence for DCC (NM_005215.1,654-672).
cagctcaagaacaggaaat

SEQ ID NO: 246211 - DNA, 19 bp, Homo sapiens
  siRNA target sequence for DCC (NM_005215.1,706-724).
ctgcatagacagctgtatt

SEQ ID NO: 246212 - DNA, 19 bp, Homo sapiens
  siRNA target sequence for DCC (NM_005215.1,729-747).
gcaaagaccatccaatgta

SEQ ID NO: 246213 - DNA, 19 bp, Homo sapiens
  siRNA target sequence for DCC (NM_005215.1,772-790).
gtcctggaatgttgtgttt

SEQ ID NO: 246214 - DNA, 19 bp, Homo sapiens
  siRNA target sequence for DCC (NM_005215.1,837-855).
catccaactcaggtctaaa

SEQ ID NO: 246215 - DNA, 19 bp, Homo sapiens
  siRNA target sequence for DCC (NM_005215.1,891-909).
ctccaatgtgacagatgat

SEQ ID NO: 246216 - DNA, 19 bp, Homo sapiens
  siRNA target sequence for DCC (NM_005215.1,934-952).
gtcacatataaaaatgaga

SEQ ID NO: 246217 - DNA, 19 bp, Homo sapiens
  siRNA target sequence for DCC (NM_005215.1,981-999).
cttggttccgccatggttt

SEQ ID NO: 246218 - DNA, 19 bp, Homo sapiens
  siRNA target sequence for DCC (NM_005215.1,984-1002).
ggttccgccatggttttta

SEQ ID NO: 246219 - DNA, 19 bp, Homo sapiens
  siRNA target sequence for DCC (NM_005215.1,985-1003).
gttccgccatggtttttaa

SEQ ID NO: 246220 - DNA, 19 bp, Homo sapiens
  siRNA target sequence for DCC (NM_005215.1,1024-1042).
gcctatgaaagcatggata

SEQ ID NO: 246221 - DNA, 19 bp, Homo sapiens
  siRNA target sequence for DCC (NM_005215.1,1110-1128).
ggtcattcctagtgattat

SEQ ID NO: 246222 - DNA, 19 bp, Homo sapiens
  siRNA target sequence for DCC (NM_005215.1,1416-1434).
cagggaacgagcattgaat

SEQ ID NO: 246223 - DNA, 19 bp, Homo sapiens
  siRNA target sequence for DCC (NM_005215.1,1420-1438).
gaacgagcattgaatacaa

SEQ ID NO: 246224 - DNA, 19 bp, Homo sapiens
  siRNA target sequence for DCC (NM_005215.1,1583-1601).
cagggccagtagaaaacct

SEQ ID NO: 246225 - DNA, 19 bp, Homo sapiens
  siRNA target sequence for DCC (NM_005215.1,1645-1663).
gaaccccctgcctatgcaa

SEQ ID NO: 246226 - DNA, 19 bp, Homo sapiens
  siRNA target sequence for DCC (NM_005215.1,1670-1688).
cagtccaaggttacagatt

SEQ ID NO: 246227 - DNA, 19 bp, Homo sapiens
  siRNA target sequence for DCC (NM_005215.1,1672-1690).
gtccaaggttacagattgt

SEQ ID NO: 246228 - DNA, 19 bp, Homo sapiens
  siRNA target sequence for DCC (NM_005215.1,1731-1749).
ggttgatggactatcttat

SEQ ID NO: 246229 - DNA, 19 bp, Homo sapiens
  siRNA target sequence for DCC (NM_005215.1,1732-1750).
gttgatggactatcttata

SEQ ID NO: 246230 - DNA, 19 bp, Homo sapiens
  siRNA target sequence for DCC (NM_005215.1,1775-1793).
ccgaatatagtcttcgatt

SEQ ID NO: 246231 - DNA, 19 bp, Homo sapiens
  siRNA target sequence for DCC (NM_005215.1,1786-1804).
cttcgattcttagcttata

SEQ ID NO: 246232 - DNA, 19 bp, Homo sapiens
  siRNA target sequence for DCC (NM_005215.1,1819-1837).
ggcgtctctactgatgata

SEQ ID NO: 246233 - DNA, 19 bp, Homo sapiens
  siRNA target sequence for DCC (NM_005215.1,1820-1838).
gcgtctctactgatgatat

SEQ ID NO: 246234 - DNA, 19 bp, Homo sapiens
  siRNA target sequence for DCC (NM_005215.1,1824-1842).
ctctactgatgatataaca

SEQ ID NO: 246235 - DNA, 19 bp, Homo sapiens
  siRNA target sequence for DCC (NM_005215.1,1900-1918).
gtcaattcaagaagtatca

SEQ ID NO: 246236 - DNA, 19 bp, Homo sapiens
  siRNA target sequence for DCC (NM_005215.1,1936-1954).
cctccatcaggaacacaaa

SEQ ID NO: 246237 - DNA, 19 bp, Homo sapiens
  siRNA target sequence for DCC (NM_005215.1,1958-1976).
gatttattaccggctataa

SEQ ID NO: 246238 - DNA, 19 bp, Homo sapiens
  siRNA target sequence for DCC (NM_005215.1,2088-2106).
gtcagccatgacagtcaat

SEQ ID NO: 246239 - DNA, 19 bp, Homo sapiens
  siRNA target sequence for DCC (NM_005215.1,2092-2110).
gccatgacagtcaatggta

SEQ ID NO: 246240 - DNA, 19 bp, Homo sapiens
  siRNA target sequence for DCC (NM_005215.1,2116-2134).
ccaccttccaactggtata

SEQ ID NO: 246241 - DNA, 19 bp, Homo sapiens
  siRNA target sequence for DCC (NM_005215.1,2151-2169).
gaatgatctagatgaatct

SEQ ID NO: 246242 - DNA, 19 bp, Homo sapiens
  siRNA target sequence for DCC (NM_005215.1,2256-2274).
catcgtggtgcgaggttat

SEQ ID NO: 246243 - DNA, 19 bp, Homo sapiens
  siRNA target sequence for DCC (NM_005215.1,2259-2277).
cgtggtgcgaggttatatt

SEQ ID NO: 246244 - DNA, 19 bp, Homo sapiens
  siRNA target sequence for DCC (NM_005215.1,2260-2278).
gtggtgcgaggttatatta

SEQ ID NO: 246245 - DNA, 19 bp, Homo sapiens
  siRNA target sequence for DCC (NM_005215.1,2323-2341).
gacagcaagcagcgatatt

SEQ ID NO: 246246 - DNA, 19 bp, Homo sapiens
  siRNA target sequence for DCC (NM_005215.1,2325-2343).
cagcaagcagcgatattat

SEQ ID NO: 246247 - DNA, 19 bp, Homo sapiens
  siRNA target sequence for DCC (NM_005215.1,2331-2349).
gcagcgatattattccatt

SEQ ID NO: 246248 - DNA, 19 bp, Homo sapiens
  siRNA target sequence for DCC (NM_005215.1,2335-2353).
cgatattattccattgaga

SEQ ID NO: 246249 - DNA, 19 bp, Homo sapiens
  siRNA target sequence for DCC (NM_005215.1,2377-2395).
gtaatctccctaaaagctt

SEQ ID NO: 246250 - DNA, 19 bp, Homo sapiens
  siRNA target sequence for DCC (NM_005215.1,2434-2452).
gccaccaccaggtctataa

SEQ ID NO: 246251 - DNA, 19 bp, Homo sapiens
  siRNA target sequence for DCC (NM_005215.1,2458-2476).
cccactgacccagttgatt

SEQ ID NO: 246252 - DNA, 19 bp, Homo sapiens
  siRNA target sequence for DCC (NM_005215.1,2460-2478).
cactgacccagttgattat

SEQ ID NO: 246253 - DNA, 19 bp, Homo sapiens
  siRNA target sequence for DCC (NM_005215.1,2462-2480).
ctgacccagttgattatta

SEQ ID NO: 246254 - DNA, 19 bp, Homo sapiens
  siRNA target sequence for DCC (NM_005215.1,2624-2642).
cgtctgaggtgcgacttta

SEQ ID NO: 246255 - DNA, 19 bp, Homo sapiens
  siRNA target sequence for DCC (NM_005215.1,2688-2706).
gtcagaagacacaacatct

SEQ ID NO: 246256 - DNA, 19 bp, Homo sapiens
  siRNA target sequence for DCC (NM_005215.1,2695-2713).
gacacaacatctctaagtt

SEQ ID NO: 246257 - DNA, 19 bp, Homo sapiens
  siRNA target sequence for DCC (NM_005215.1,2719-2737).
gcaacaggcctcaaaccaa

SEQ ID NO: 246258 - DNA, 19 bp, Homo sapiens
  siRNA target sequence for DCC (NM_005215.1,2720-2738).
caacaggcctcaaaccaaa

SEQ ID NO: 246259 - DNA, 19 bp, Homo sapiens
  siRNA target sequence for DCC (NM_005215.1,2735-2753).
caaacacaatgtatgaatt

SEQ ID NO: 246260 - DNA, 19 bp, Homo sapiens
  siRNA target sequence for DCC (NM_005215.1,2749-2767).
gaattctcggtcatggtaa

SEQ ID NO: 246261 - DNA, 19 bp, Homo sapiens
  siRNA target sequence for DCC (NM_005215.1,2754-2772).
ctcggtcatggtaacaaaa

SEQ ID NO: 246262 - DNA, 19 bp, Homo sapiens
  siRNA target sequence for DCC (NM_005215.1,2756-2774).
cggtcatggtaacaaaaaa

SEQ ID NO: 246263 - DNA, 19 bp, Homo sapiens
  siRNA target sequence for DCC (NM_005215.1,2758-2776).
gtcatggtaacaaaaaaca

SEQ ID NO: 246264 - DNA, 19 bp, Homo sapiens
  siRNA target sequence for DCC (NM_005215.1,2878-2896).
cctcgtgccgtcattgtga

SEQ ID NO: 246265 - DNA, 19 bp, Homo sapiens
  siRNA target sequence for DCC (NM_005215.1,2924-2942).
ggaaaattactgcttacat

SEQ ID NO: 246266 - DNA, 19 bp, Homo sapiens
  siRNA target sequence for DCC (NM_005215.1,2972-2990).
caattgatgactggattat

SEQ ID NO: 246267 - DNA, 19 bp, Homo sapiens
  siRNA target sequence for DCC (NM_005215.1,3002-3020).
gtggtgataggcttactca

SEQ ID NO: 246268 - DNA, 19 bp, Homo sapiens
  siRNA target sequence for DCC (NM_005215.1,3030-3048).
ggatctcaaccttgatact

SEQ ID NO: 246269 - DNA, 19 bp, Homo sapiens
  siRNA target sequence for DCC (NM_005215.1,3031-3049).
gatctcaaccttgatacta

SEQ ID NO: 246270 - DNA, 19 bp, Homo sapiens
  siRNA target sequence for DCC (NM_005215.1,3051-3069).
gtattactttcgaattcaa

SEQ ID NO: 246271 - DNA, 19 bp, Homo sapiens
  siRNA target sequence for DCC (NM_005215.1,3061-3079).
cgaattcaagcacgaaatt

SEQ ID NO: 246272 - DNA, 19 bp, Homo sapiens
  siRNA target sequence for DCC (NM_005215.1,3233-3251).
cgccaattggacaaatgca

SEQ ID NO: 246273 - DNA, 19 bp, Homo sapiens
  siRNA target sequence for DCC (NM_005215.1,3406-3424).
cacagtgctggcaaaagga

SEQ ID NO: 246274 - DNA, 19 bp, Homo sapiens
  siRNA target sequence for DCC (NM_005215.1,3441-3459).
cctccgaccccctgatctt

SEQ ID NO: 246275 - DNA, 19 bp, Homo sapiens
  siRNA target sequence for DCC (NM_005215.1,3529-3547).
gactctcccatccaaagtt

SEQ ID NO: 246276 - DNA, 19 bp, Homo sapiens
  siRNA target sequence for DCC (NM_005215.1,3714-3732).
ggatgcccagtccaacaat

SEQ ID NO: 246277 - DNA, 19 bp, Homo sapiens
  siRNA target sequence for DCC (NM_005215.1,3754-3772).
ccggtgccaacgctagaaa

SEQ ID NO: 246278 - DNA, 19 bp, Homo sapiens
  siRNA target sequence for DCC (NM_005215.1,3756-3774).
ggtgccaacgctagaaagt

SEQ ID NO: 246279 - DNA, 19 bp, Homo sapiens
  siRNA target sequence for DCC (NM_005215.1,4022-4040).
cactccgcagctttgctaa

SEQ ID NO: 246280 - DNA, 19 bp, Homo sapiens
  siRNA target sequence for DCC (NM_005215.1,4027-4045).
cgcagctttgctaatcctt

SEQ ID NO: 246281 - DNA, 19 bp, Homo sapiens
  siRNA target sequence for DCC (NM_005215.1,4032-4050).
ctttgctaatcctttgcta

SEQ ID NO: 246282 - DNA, 19 bp, Homo sapiens
  siRNA target sequence for DCC (NM_005215.1,4047-4065).
gctacctccaccaatgagt

SEQ ID NO: 246283 - DNA, 19 bp, Homo sapiens
  siRNA target sequence for DCC (NM_005215.1,4084-4102).
ccttacacaccacttttgt

SEQ ID NO: 246284 - DNA, 19 bp, Homo sapiens
  siRNA target sequence for DCC (NM_005215.1,4240-4258).
gaggattcagccaatgtgt

SEQ ID NO: 246285 - DNA, 19 bp, Homo sapiens
  siRNA target sequence for DCC (NM_005215.1,4266-4284).
ggatgatctgagtgaacaa

SEQ ID NO: 246286 - DNA, 19 bp, Homo sapiens
  siRNA target sequence for DCC (NM_005215.1,4267-4285).
gatgatctgagtgaacaaa

SEQ ID NO: 246287 - DNA, 19 bp, Homo sapiens
  siRNA target sequence for DCC (NM_005215.1,4277-4295).
gtgaacaaatggcaagttt

SEQ ID NO: 246288 - DNA, 19 bp, Homo sapiens
  siRNA target sequence for EDAR (NM_022336.1,502-520).
gcccgagcggaatactcaa

SEQ ID NO: 246289 - DNA, 19 bp, Homo sapiens
  siRNA target sequence for EDAR (NM_022336.1,505-523).
cgagcggaatactcaaact

SEQ ID NO: 246290 - DNA, 19 bp, Homo sapiens
  siRNA target sequence for EDAR (NM_022336.1,524-542).
gcggtgagaacgagtacta

SEQ ID NO: 246291 - DNA, 19 bp, Homo sapiens
  siRNA target sequence for EDAR (NM_022336.1,526-544).
ggtgagaacgagtactaca

SEQ ID NO: 246292 - DNA, 19 bp, Homo sapiens
  siRNA target sequence for EDAR (NM_022336.1,687-705).
gatatgcaggcgtcacaaa

SEQ ID NO: 246293 - DNA, 19 bp, Homo sapiens
  siRNA target sequence for EDAR (NM_022336.1,945-963).
ccagcacgcccacaaagaa

SEQ ID NO: 246294 - DNA, 19 bp, Homo sapiens
  siRNA target sequence for EDAR (NM_022336.1,989-1007).
ctgccctgatcattgcaat

SEQ ID NO: 246295 - DNA, 19 bp, Homo sapiens
  siRNA target sequence for EDAR (NM_022336.1,1003-1021).
gcaatgtccaccatcttca

SEQ ID NO: 246296 - DNA, 19 bp, Homo sapiens
  siRNA target sequence for EDAR (NM_022336.1,1160-1178).
cagacaacgtggtgatgtt

SEQ ID NO: 246297 - DNA, 19 bp, Homo sapiens
  siRNA target sequence for EDAR (NM_022336.1,1162-1180).
gacaacgtggtgatgttct

SEQ ID NO: 246298 - DNA, 19 bp, Homo sapiens
  siRNA target sequence for EDAR (NM_022336.1,1383-1401).
caagtcagccgggattcaa

SEQ ID NO: 246299 - DNA, 19 bp, Homo sapiens
  siRNA target sequence for EDAR (NM_022336.1,1483-1501).
gattgcctcgagaagacta

SEQ ID NO: 246300 - DNA, 19 bp, Homo sapiens
  siRNA target sequence for EDAR (NM_022336.1,1607-1625).
cagacggcatgcaactctt

SEQ ID NO: 246301 - DNA, 19 bp, Homo sapiens
  siRNA target sequence for EDAR (NM_022336.1,1656-1674).
ccctgagctactcacaaaa

SEQ ID NO: 246302 - DNA, 19 bp, Homo sapiens
  siRNA target sequence for EDAR (NM_022336.1,1658-1676).
ctgagctactcacaaaact

SEQ ID NO: 246303 - DNA, 19 bp, Homo sapiens
  siRNA target sequence for EDAR (NM_022336.1,1670-1688).
caaaactggtgcagattga

SEQ ID NO: 246304 - DNA, 19 bp, Homo sapiens
  siRNA target sequence for EDAR (NM_022336.1,1707-1725).
gtccttgtgtgcagacata

SEQ ID NO: 246305 - DNA, 19 bp, Homo sapiens
  siRNA target sequence for EVI2A (NM_014210.1,230-248).
caggacattacctacatct

SEQ ID NO: 246306 - DNA, 19 bp, Homo sapiens
  siRNA target sequence for EVI2A (NM_014210.1,279-297).
gtctcctggaacaaaagca

SEQ ID NO: 246307 - DNA, 19 bp, Homo sapiens
  siRNA target sequence for EVI2A (NM_014210.1,306-324).
ccgtctgtgggctaacagt

SEQ ID NO: 246308 - DNA, 19 bp, Homo sapiens
  siRNA target sequence for EVI2A (NM_014210.1,307-325).
cgtctgtgggctaacagta

SEQ ID NO: 246309 - DNA, 19 bp, Homo sapiens
  siRNA target sequence for EVI2A (NM_014210.1,310-328).
ctgtgggctaacagtactt

SEQ ID NO: 246310 - DNA, 19 bp, Homo sapiens
  siRNA target sequence for EVI2A (NM_014210.1,393-411).
ccctataactcctgaagta

SEQ ID NO: 246311 - DNA, 19 bp, Homo sapiens
  siRNA target sequence for EVI2A (NM_014210.1,406-424).
gaagtagattataaaggta

SEQ ID NO: 246312 - DNA, 19 bp, Homo sapiens
  siRNA target sequence for EVI2A (NM_014210.1,409-427).
gtagattataaaggtaatt

SEQ ID NO: 246313 - DNA, 19 bp, Homo sapiens
  siRNA target sequence for EVI2A (NM_014210.1,412-430).
gattataaaggtaattcta

SEQ ID NO: 246314 - DNA, 19 bp, Homo sapiens
  siRNA target sequence for EVI2A (NM_014210.1,446-464).
catctcacatcgtagcttt

SEQ ID NO: 246315 - DNA, 19 bp, Homo sapiens
  siRNA target sequence for EVI2A (NM_014210.1,451-469).
cacatcgtagctttaactt

SEQ ID NO: 246316 - DNA, 19 bp, Homo sapiens
  siRNA target sequence for EVI2A (NM_014210.1,476-494).
ctgaacaggagctttatat

SEQ ID NO: 246317 - DNA, 19 bp, Homo sapiens
  siRNA target sequence for EVI2A (NM_014210.1,481-499).
caggagctttatatacctt

SEQ ID NO: 246318 - DNA, 19 bp, Homo sapiens
  siRNA target sequence for EVI2A (NM_014210.1,524-542).
cagtacagagcattgaaaa

SEQ ID NO: 246319 - DNA, 19 bp, Homo sapiens
  siRNA target sequence for EVI2A (NM_014210.1,580-598).
gtctgtgcggaaaacaaca

SEQ ID NO: 246320 - DNA, 19 bp, Homo sapiens
  siRNA target sequence for EVI2A (NM_014210.1,597-615).
caacaacatggctatgcta

SEQ ID NO: 246321 - DNA, 19 bp, Homo sapiens
  siRNA target sequence for EVI2A (NM_014210.1,612-630).
gctaatttgcttaattata

SEQ ID NO: 246322 - DNA, 19 bp, Homo sapiens
  siRNA target sequence for EVI2A (NM_014210.1,705-723).
cagacgatcaaaacaagta

SEQ ID NO: 246323 - DNA, 19 bp, Homo sapiens
  siRNA target sequence for EVI2A (NM_014210.1,729-747).
gcgtcagcctagaagcaat

SEQ ID NO: 246324 - DNA, 19 bp, Homo sapiens
  siRNA target sequence for EVI2A (NM_014210.1,820-838).
cccaacctagtgatgcaat

SEQ ID NO: 246325 - DNA, 19 bp, Homo sapiens
  siRNA target sequence for EVI2A (NM_014210.1,825-843).
cctagtgatgcaatctact

SEQ ID NO: 246326 - DNA, 19 bp, Homo sapiens
  siRNA target sequence for GPC1 (NM_002081.1,658-676).
cagagctgcgcctgtacta

SEQ ID NO: 246327 - DNA, 19 bp, Homo sapiens
  siRNA target sequence for GPC1 (NM_002081.1,958-976).
gctcgagagctgtcatgaa

SEQ ID NO: 246328 - DNA, 19 bp, Homo sapiens
  siRNA target sequence for GPC1 (NM_002081.1,1116-1134).
ctcatcaccgacaagttct

SEQ ID NO: 246329 - DNA, 19 bp, Homo sapiens
  siRNA target sequence for GPC1 (NM_002081.1,1859-1877).
cttcctggcccttacagta

SEQ ID NO: 246330 - DNA, 19 bp, Homo sapiens
  siRNA target sequence for GPC4 (NM_001448.2,279-297).
gccgagctcaagtcgaaaa

SEQ ID NO: 246331 - DNA, 19 bp, Homo sapiens
  siRNA target sequence for GPC4 (NM_001448.2,281-299).
cgagctcaagtcgaaaagt

SEQ ID NO: 246332 - DNA, 19 bp, Homo sapiens
  siRNA target sequence for GPC4 (NM_001448.2,304-322).
cggaagtgcgacgtcttta

SEQ ID NO: 246333 - DNA, 19 bp, Homo sapiens
  siRNA target sequence for GPC4 (NM_001448.2,324-342).
gtgtccaaaggcttcaaca

SEQ ID NO: 246334 - DNA, 19 bp, Homo sapiens
  siRNA target sequence for GPC4 (NM_001448.2,372-390).
ggtgatcatttgaagatct

SEQ ID NO: 246335 - DNA, 19 bp, Homo sapiens
  siRNA target sequence for GPC4 (NM_001448.2,473-491).
cagcgaacagtgcaatcat

SEQ ID NO: 246336 - DNA, 19 bp, Homo sapiens
  siRNA target sequence for GPC4 (NM_001448.2,475-493).
gcgaacagtgcaatcattt

SEQ ID NO: 246337 - DNA, 19 bp, Homo sapiens
  siRNA target sequence for GPC4 (NM_001448.2,507-525).
gcttcacgttacaagaagt

SEQ ID NO: 246338 - DNA, 19 bp, Homo sapiens
  siRNA target sequence for GPC4 (NM_001448.2,576-594).
gatatgtttgtgaagacat

SEQ ID NO: 246339 - DNA, 19 bp, Homo sapiens
  siRNA target sequence for GPC4 (NM_001448.2,597-615).
ggccatttatacatgcaaa

SEQ ID NO: 246340 - DNA, 19 bp, Homo sapiens
  siRNA target sequence for GPC4 (NM_001448.2,599-617).
ccatttatacatgcaaaat

SEQ ID NO: 246341 - DNA, 19 bp, Homo sapiens
  siRNA target sequence for GPC4 (NM_001448.2,611-629).
gcaaaattctgagctattt

SEQ ID NO: 246342 - DNA, 19 bp, Homo sapiens
  siRNA target sequence for GPC4 (NM_001448.2,677-695).
gaacctggaagaaatgcta

SEQ ID NO: 246343 - DNA, 19 bp, Homo sapiens
  siRNA target sequence for GPC4 (NM_001448.2,743-761).
ctcccagtaccactttaca

SEQ ID NO: 246344 - DNA, 19 bp, Homo sapiens
  siRNA target sequence for GPC4 (NM_001448.2,814-832).
gagatgtccctcgcaaatt

SEQ ID NO: 246345 - DNA, 19 bp, Homo sapiens
  siRNA target sequence for GPC4 (NM_001448.2,816-834).
gatgtccctcgcaaattga

SEQ ID NO: 246346 - DNA, 19 bp, Homo sapiens
  siRNA target sequence for GPC4 (NM_001448.2,839-857).
ccaggttactcgtgctttt

SEQ ID NO: 246347 - DNA, 19 bp, Homo sapiens
  siRNA target sequence for GPC4 (NM_001448.2,842-860).
ggttactcgtgcttttgta

SEQ ID NO: 246348 - DNA, 19 bp, Homo sapiens
  siRNA target sequence for GPC4 (NM_001448.2,910-928).
gcaaggtctccgtggtaaa

SEQ ID NO: 246349 - DNA, 19 bp, Homo sapiens
  siRNA target sequence for GPC4 (NM_001448.2,951-969).
gccctgttgaagatgatct

SEQ ID NO: 246350 - DNA, 19 bp, Homo sapiens
  siRNA target sequence for GPC4 (NM_001448.2,952-970).
ccctgttgaagatgatcta

SEQ ID NO: 246351 - DNA, 19 bp, Homo sapiens
  siRNA target sequence for GPC4 (NM_001448.2,997-1015).
ctgtgaagccatgttacaa

SEQ ID NO: 246352 - DNA, 19 bp, Homo sapiens
  siRNA target sequence for GPC4 (NM_001448.2,1052-1070).
ccaaggggatctcgatttt

SEQ ID NO: 246353 - DNA, 19 bp, Homo sapiens
  siRNA target sequence for GPC4 (NM_001448.2,1056-1074).
ggggatctcgattttgaat

SEQ ID NO: 246354 - DNA, 19 bp, Homo sapiens
  siRNA target sequence for GPC4 (NM_001448.2,1064-1082).
cgattttgaatggaacaat

SEQ ID NO: 246355 - DNA, 19 bp, Homo sapiens
  siRNA target sequence for GPC4 (NM_001448.2,1114-1132).
ggctagagggtcctttcaa

SEQ ID NO: 246356 - DNA, 19 bp, Homo sapiens
  siRNA target sequence for GPC4 (NM_001448.2,1122-1140).
ggtcctttcaacattgaat

SEQ ID NO: 246357 - DNA, 19 bp, Homo sapiens
  siRNA target sequence for GPC4 (NM_001448.2,1152-1170).
cccatcgatgtgaagattt

SEQ ID NO: 246358 - DNA, 19 bp, Homo sapiens
  siRNA target sequence for GPC4 (NM_001448.2,1157-1175).
cgatgtgaagatttctgat

SEQ ID NO: 246359 - DNA, 19 bp, Homo sapiens
  siRNA target sequence for GPC4 (NM_001448.2,1184-1202).
gaacatgcaggataatagt

SEQ ID NO: 246360 - DNA, 19 bp, Homo sapiens
  siRNA target sequence for GPC4 (NM_001448.2,1253-1271).
cccagctggacgaatttct

SEQ ID NO: 246361 - DNA, 19 bp, Homo sapiens
  siRNA target sequence for GPC4 (NM_001448.2,1339-1357).
cagcagctggcactagttt

SEQ ID NO: 246362 - DNA, 19 bp, Homo sapiens
  siRNA target sequence for GPC4 (NM_001448.2,1358-1376).
ggaccgactggttactgat

SEQ ID NO: 246363 - DNA, 19 bp, Homo sapiens
  siRNA target sequence for GPC4 (NM_001448.2,1573-1591).
ccagcaaaccagacatact

SEQ ID NO: 246364 - DNA, 19 bp, Homo sapiens
  siRNA target sequence for GPC4 (NM_001448.2,1576-1594).
gcaaaccagacatactgat

SEQ ID NO: 246365 - DNA, 19 bp, Homo sapiens
  siRNA target sequence for GPC4 (NM_001448.2,1590-1608).
ctgatccttcgtcaaatca

SEQ ID NO: 246366 - DNA, 19 bp, Homo sapiens
  siRNA target sequence for GPC4 (NM_001448.2,1655-1673).
gaacgacgtggacttcttt

SEQ ID NO: 246367 - DNA, 19 bp, Homo sapiens
  siRNA target sequence for GPC4 (NM_001448.2,1658-1676).
cgacgtggacttctttgat

SEQ ID NO: 246368 - DNA, 19 bp, Homo sapiens
  siRNA target sequence for GPC4 (NM_001448.2,1670-1688).
ctttgatatcagtgatgaa

SEQ ID NO: 246369 - DNA, 19 bp, Homo sapiens
  siRNA target sequence for GPC4 (NM_001448.2,1708-1726).
gaagtggctgtgagtatca

SEQ ID NO: 246370 - DNA, 19 bp, Homo sapiens
  siRNA target sequence for GPC4 (NM_001448.2,1732-1750).
gcccttcagagtttgacta

SEQ ID NO: 246371 - DNA, 19 bp, Homo sapiens
  siRNA target sequence for GPC4 (NM_001448.2,1837-1855).
ctgtcttctgcatcttgtt

SEQ ID NO: 246372 - DNA, 19 bp, Homo sapiens
  siRNA target sequence for GPC5 (NM_004466.3,471-489).
gcagacctgcgaagaagtt

SEQ ID NO: 246373 - DNA, 19 bp, Homo sapiens
  siRNA target sequence for GPC5 (NM_004466.3,559-577).
gatcttcaggtttgcatat

SEQ ID NO: 246374 - DNA, 19 bp, Homo sapiens
  siRNA target sequence for GPC5 (NM_004466.3,562-580).
cttcaggtttgcatatcca

SEQ ID NO: 246375 - DNA, 19 bp, Homo sapiens
  siRNA target sequence for GPC5 (NM_004466.3,609-627).
ggaggagagatatcagatt

SEQ ID NO: 246376 - DNA, 19 bp, Homo sapiens
  siRNA target sequence for GPC5 (NM_004466.3,629-647).
cggctcgccaggatatgca

SEQ ID NO: 246377 - DNA, 19 bp, Homo sapiens
  siRNA target sequence for GPC5 (NM_004466.3,662-680).
cgtccagctctacattaaa

SEQ ID NO: 246378 - DNA, 19 bp, Homo sapiens
  siRNA target sequence for GPC5 (NM_004466.3,665-683).
ccagctctacattaaagtt

SEQ ID NO: 246379 - DNA, 19 bp, Homo sapiens
  siRNA target sequence for GPC5 (NM_004466.3,681-699).
gtttctaatatctcgaaat

SEQ ID NO: 246380 - DNA, 19 bp, Homo sapiens
  siRNA target sequence for GPC5 (NM_004466.3,719-737).
cccttgaaactctcatcaa

SEQ ID NO: 246381 - DNA, 19 bp, Homo sapiens
  siRNA target sequence for GPC5 (NM_004466.3,877-895).
gtaaacagattttttgaca

SEQ ID NO: 246382 - DNA, 19 bp, Homo sapiens
  siRNA target sequence for GPC5 (NM_004466.3,910-928).
gtctacaaccacctcatta

SEQ ID NO: 246383 - DNA, 19 bp, Homo sapiens
  siRNA target sequence for GPC5 (NM_004466.3,987-1005).
ggatgtgagtccatttggt

SEQ ID NO: 246384 - DNA, 19 bp, Homo sapiens
  siRNA target sequence for GPC5 (NM_004466.3,1004-1022).
gtaatattccccaaagagt

SEQ ID NO: 246385 - DNA, 19 bp, Homo sapiens
  siRNA target sequence for GPC5 (NM_004466.3,1142-1160).
ccctcctgaagatgcaata

SEQ ID NO: 246386 - DNA, 19 bp, Homo sapiens
  siRNA target sequence for GPC5 (NM_004466.3,1184-1202).
cgctcactaagccttgtat

SEQ ID NO: 246387 - DNA, 19 bp, Homo sapiens
  siRNA target sequence for GPC5 (NM_004466.3,1204-1222).
ggatactgcctcaatgtca

SEQ ID NO: 246388 - DNA, 19 bp, Homo sapiens
  siRNA target sequence for GPC5 (NM_004466.3,1205-1223).
gatactgcctcaatgtcat

SEQ ID NO: 246389 - DNA, 19 bp, Homo sapiens
  siRNA target sequence for GPC5 (NM_004466.3,1238-1256).
cgcacatggcggagcttaa

SEQ ID NO: 246390 - DNA, 19 bp, Homo sapiens
  siRNA target sequence for GPC5 (NM_004466.3,1239-1257).
gcacatggcggagcttaat

SEQ ID NO: 246391 - DNA, 19 bp, Homo sapiens
  siRNA target sequence for GPC5 (NM_004466.3,1242-1260).
catggcggagcttaatcca

SEQ ID NO: 246392 - DNA, 19 bp, Homo sapiens
  siRNA target sequence for GPC5 (NM_004466.3,1258-1276).
ccacactggcatgcatata

SEQ ID NO: 246393 - DNA, 19 bp, Homo sapiens
  siRNA target sequence for GPC5 (NM_004466.3,1384-1402).
ctcaatggacaaaaattat

SEQ ID NO: 246394 - DNA, 19 bp, Homo sapiens
  siRNA target sequence for GPC5 (NM_004466.3,1457-1475).
cccgttgttcttttgatca

SEQ ID NO: 246395 - DNA, 19 bp, Homo sapiens
  siRNA target sequence for GPC5 (NM_004466.3,1522-1540).
gagacgcttgccaacagaa

SEQ ID NO: 246396 - DNA, 19 bp, Homo sapiens
  siRNA target sequence for GPC5 (NM_004466.3,1564-1582).
cgactgtacaggtcattct

SEQ ID NO: 246397 - DNA, 19 bp, Homo sapiens
  siRNA target sequence for GPC5 (NM_004466.3,1602-1620).
gctttgtgctaatgaatta

SEQ ID NO: 246398 - DNA, 19 bp, Homo sapiens
  siRNA target sequence for GPC5 (NM_004466.3,1647-1665).
gaatggagaagatatagta

SEQ ID NO: 246399 - DNA, 19 bp, Homo sapiens
  siRNA target sequence for GPC5 (NM_004466.3,1791-1809).
gttgttacagggtagatca

SEQ ID NO: 246400 - DNA, 19 bp, Homo sapiens
  siRNA target sequence for GPC5 (NM_004466.3,1853-1871).
gaggcatggttgaacaagt

SEQ ID NO: 246401 - DNA, 19 bp, Homo sapiens
  siRNA target sequence for GPC5 (NM_004466.3,1948-1966).
gactggatgccagatgata

SEQ ID NO: 246402 - DNA, 19 bp, Homo sapiens
  siRNA target sequence for GPC5 (NM_004466.3,1981-1999).
gtaaagcaaatccatcaaa

SEQ ID NO: 246403 - DNA, 19 bp, Homo sapiens
  siRNA target sequence for GPC5 (NM_004466.3,2042-2060).
cagtggcgactgaatctat

SEQ ID NO: 246404 - DNA, 19 bp, Homo sapiens
  siRNA target sequence for GPC5 (NM_004466.3,2044-2062).
gtggcgactgaatctatga

SEQ ID NO: 246405 - DNA, 19 bp, Homo sapiens
  siRNA target sequence for GPC5 (NM_004466.3,2046-2064).
ggcgactgaatctatgaca

SEQ ID NO: 246406 - DNA, 19 bp, Homo sapiens
  siRNA target sequence for GPC5 (NM_004466.3,2047-2065).
gcgactgaatctatgacat

SEQ ID NO: 246407 - DNA, 19 bp, Homo sapiens
  siRNA target sequence for GPC5 (NM_004466.3,2063-2081).
cattcactctgataagtgt

SEQ ID NO: 246408 - DNA, 19 bp, Homo sapiens
  siRNA target sequence for GPC6 (NM_005708.2,768-786).
gatcgcaggggaacactta

SEQ ID NO: 246409 - DNA, 19 bp, Homo sapiens
  siRNA target sequence for GPC6 (NM_005708.2,771-789).
cgcaggggaacacttaaga

SEQ ID NO: 246410 - DNA, 19 bp, Homo sapiens
  siRNA target sequence for GPC6 (NM_005708.2,772-790).
gcaggggaacacttaagaa

SEQ ID NO: 246411 - DNA, 19 bp, Homo sapiens
  siRNA target sequence for GPC6 (NM_005708.2,792-810).
ctgtcctcaggaatataca

SEQ ID NO: 246412 - DNA, 19 bp, Homo sapiens
  siRNA target sequence for GPC6 (NM_005708.2,809-827).
catgctgcaccacagaaat

SEQ ID NO: 246413 - DNA, 19 bp, Homo sapiens
  siRNA target sequence for GPC6 (NM_005708.2,895-913).
gtgcgcaccacttttgtgt

SEQ ID NO: 246414 - DNA, 19 bp, Homo sapiens
  siRNA target sequence for GPC6 (NM_005708.2,1067-1085).
ctgggggtaatgtgaatct

SEQ ID NO: 246415 - DNA, 19 bp, Homo sapiens
  siRNA target sequence for GPC6 (NM_005708.2,1116-1134).
gctcctggaacggatgttt

SEQ ID NO: 246416 - DNA, 19 bp, Homo sapiens
  siRNA target sequence for GPC6 (NM_005708.2,1126-1144).
cggatgtttcagctgataa

SEQ ID NO: 246417 - DNA, 19 bp, Homo sapiens
  siRNA target sequence for GPC6 (NM_005708.2,1200-1218).
ccagctcaagccatttgga

SEQ ID NO: 246418 - DNA, 19 bp, Homo sapiens
  siRNA target sequence for GPC6 (NM_005708.2,1346-1364).
gtatccgtgccctcatgaa

SEQ ID NO: 246419 - DNA, 19 bp, Homo sapiens
  siRNA target sequence for GPC6 (NM_005708.2,1402-1420).
gtgaggccctgcaacaact

SEQ ID NO: 246420 - DNA, 19 bp, Homo sapiens
  siRNA target sequence for GPC6 (NM_005708.2,1517-1535).
gactggaggggccattcaa

SEQ ID NO: 246421 - DNA, 19 bp, Homo sapiens
  siRNA target sequence for GPC6 (NM_005708.2,1554-1572).
cccgatagatgtcaagatt

SEQ ID NO: 246422 - DNA, 19 bp, Homo sapiens
  siRNA target sequence for GPC6 (NM_005708.2,1555-1573).
ccgatagatgtcaagattt

SEQ ID NO: 246423 - DNA, 19 bp, Homo sapiens
  siRNA target sequence for GPC6 (NM_005708.2,1557-1575).
gatagatgtcaagatttct

SEQ ID NO: 246424 - DNA, 19 bp, Homo sapiens
  siRNA target sequence for GPC6 (NM_005708.2,1761-1779).
ccggctggtcacagacata

SEQ ID NO: 246425 - DNA, 19 bp, Homo sapiens
  siRNA target sequence for GPC6 (NM_005708.2,1816-1834).
gcattaccctacactatct

SEQ ID NO: 246426 - DNA, 19 bp, Homo sapiens
  siRNA target sequence for GPC6 (NM_005708.2,1911-1929).
gcctgagatcatgaatgat

SEQ ID NO: 246427 - DNA, 19 bp, Homo sapiens
  siRNA target sequence for GPC6 (NM_005708.2,1978-1996).
cggcctgacactttcatca

SEQ ID NO: 246428 - DNA, 19 bp, Homo sapiens
  siRNA target sequence for GPC6 (NM_005708.2,2020-2038).
gtgatgaccaacaaactaa

SEQ ID NO: 246429 - DNA, 19 bp, Homo sapiens
  siRNA target sequence for GPC6 (NM_005708.2,2135-2153).
ccacggagtttgagtttgt

SEQ ID NO: 246430 - DNA, 19 bp, Homo sapiens
  siRNA target sequence for ICAM1 (NM_000201.1,238-256).
gagaccccgttgcctaaaa

SEQ ID NO: 246431 - DNA, 19 bp, Homo sapiens
  siRNA target sequence for ICAM1 (NM_000201.1,279-297).
caaccggaaggtgtatgaa

SEQ ID NO: 246432 - DNA, 19 bp, Homo sapiens
  siRNA target sequence for ICAM1 (NM_000201.1,355-373).
cagtcaacagctaaaacct

SEQ ID NO: 246433 - DNA, 19 bp, Homo sapiens
  siRNA target sequence for ICAM1 (NM_000201.1,1193-1211).
gccagcttatacacaagaa

SEQ ID NO: 246434 - DNA, 19 bp, Homo sapiens
  siRNA target sequence for ICAM1 (NM_000201.1,1337-1355).
ccgagctcaagtgtctaaa

SEQ ID NO: 246435 - DNA, 19 bp, Homo sapiens
  siRNA target sequence for ICAM1 (NM_000201.1,1392-1410).
gactgtcactcgagatctt

SEQ ID NO: 246436 - DNA, 19 bp, Homo sapiens
  siRNA target sequence for ICAM1 (NM_000201.1,1490-1508).
ggtatgagattgtcatcat

SEQ ID NO: 246437 - DNA, 19 bp, Homo sapiens
  siRNA target sequence for ICAM1 (NM_000201.1,1515-1533).
ggtagcagccgcagtcata

SEQ ID NO: 246438 - DNA, 19 bp, Homo sapiens
  siRNA target sequence for ICAM1 (NM_000201.1,1549-1567).
ctcagcacgtacctctata

SEQ ID NO: 246439 - DNA, 19 bp, Homo sapiens
  siRNA target sequence for ICAM1 (NM_000201.1,1584-1602).
caagaaatacagactacaa

SEQ ID NO: 246440 - DNA, 19 bp, Homo sapiens
  siRNA target sequence for IGSF6 (NM_005849.1,83-101).
gcaaaccaatctcattcta

SEQ ID NO: 246441 - DNA, 19 bp, Homo sapiens
  siRNA target sequence for IGSF6 (NM_005849.1,177-195).
gaggccgtcaccataaagt

SEQ ID NO: 246442 - DNA, 19 bp, Homo sapiens
  siRNA target sequence for IGSF6 (NM_005849.1,179-197).
ggccgtcaccataaagtgt

SEQ ID NO: 246443 - DNA, 19 bp, Homo sapiens
  siRNA target sequence for IGSF6 (NM_005849.1,180-198).
gccgtcaccataaagtgta

SEQ ID NO: 246444 - DNA, 19 bp, Homo sapiens
  siRNA target sequence for IGSF6 (NM_005849.1,281-299).
cttggacgggtgcaaaagt

SEQ ID NO: 246445 - DNA, 19 bp, Homo sapiens
  siRNA target sequence for IGSF6 (NM_005849.1,342-360).
caagtttccctcactgtaa

SEQ ID NO: 246446 - DNA, 19 bp, Homo sapiens
  siRNA target sequence for IGSF6 (NM_005849.1,357-375).
gtaaacagagtgacttcaa

SEQ ID NO: 246447 - DNA, 19 bp, Homo sapiens
  siRNA target sequence for IGSF6 (NM_005849.1,454-472).
ccacactggtggtaagaga

SEQ ID NO: 246448 - DNA, 19 bp, Homo sapiens
  siRNA target sequence for IGSF6 (NM_005849.1,506-524).
cctgacagctcttgtatca

SEQ ID NO: 246449 - DNA, 19 bp, Homo sapiens
  siRNA target sequence for IGSF6 (NM_005849.1,563-581).
catactcctctccaaatca

SEQ ID NO: 246450 - DNA, 19 bp, Homo sapiens
  siRNA target sequence for IGSF6 (NM_005849.1,635-653).
gagtgctcggcgtattttt

SEQ ID NO: 246451 - DNA, 19 bp, Homo sapiens
  siRNA target sequence for IGSF6 (NM_005849.1,637-655).
gtgctcggcgtatttttca

SEQ ID NO: 246452 - DNA, 19 bp, Homo sapiens
  siRNA target sequence for IGSF6 (NM_005849.1,643-661).
ggcgtatttttcaggaaat

SEQ ID NO: 246453 - DNA, 19 bp, Homo sapiens
  siRNA target sequence for IGSF6 (NM_005849.1,644-662).
gcgtatttttcaggaaatt

SEQ ID NO: 246454 - DNA, 19 bp, Homo sapiens
  siRNA target sequence for IGSF6 (NM_005849.1,664-682).
ctcaagaactataccataa

SEQ ID NO: 246455 - DNA, 19 bp, Homo sapiens
  siRNA target sequence for IGSF6 (NM_005849.1,742-760).
gagtactttccaactatga

SEQ ID NO: 246456 - DNA, 19 bp, Homo sapiens
  siRNA target sequence for IL17RD (NM_017563.1,532-550).
caacctttcctgaatatga

SEQ ID NO: 246457 - DNA, 19 bp, Homo sapiens
  siRNA target sequence for IL17RD (NM_017563.1,556-574).
gaaacggattatttcgtaa

SEQ ID NO: 246458 - DNA, 19 bp, Homo sapiens
  siRNA target sequence for IL17RD (NM_017563.1,608-626).
gcaattaccaccctttctt

SEQ ID NO: 246459 - DNA, 19 bp, Homo sapiens
  siRNA target sequence for IL17RD (NM_017563.1,641-659).
cctgtgacctgttgttaca

SEQ ID NO: 246460 - DNA, 19 bp, Homo sapiens
  siRNA target sequence for IL17RD (NM_017563.1,654-672).
gttacagccggacaatcta

SEQ ID NO: 246461 - DNA, 19 bp, Homo sapiens
  siRNA target sequence for IL17RD (NM_017563.1,662-680).
cggacaatctagcttgtaa

SEQ ID NO: 246462 - DNA, 19 bp, Homo sapiens
  siRNA target sequence for IL17RD (NM_017563.1,663-681).
ggacaatctagcttgtaaa

SEQ ID NO: 246463 - DNA, 19 bp, Homo sapiens
  siRNA target sequence for IL17RD (NM_017563.1,694-712).
cctcggaacctgaacatca

SEQ ID NO: 246464 - DNA, 19 bp, Homo sapiens
  siRNA target sequence for IL17RD (NM_017563.1,773-791).
gtttcttctatcttcacta

SEQ ID NO: 246465 - DNA, 19 bp, Homo sapiens
  siRNA target sequence for IL17RD (NM_017563.1,881-899).
ctccaggggattatataat

SEQ ID NO: 246466 - DNA, 19 bp, Homo sapiens
  siRNA target sequence for IL17RD (NM_017563.1,884-902).
caggggattatataattga

SEQ ID NO: 246467 - DNA, 19 bp, Homo sapiens
  siRNA target sequence for IL17RD (NM_017563.1,906-924).
ggtggatgacactaacaca

SEQ ID NO: 246468 - DNA, 19 bp, Homo sapiens
  siRNA target sequence for IL17RD (NM_017563.1,907-925).
gtggatgacactaacacaa

SEQ ID NO: 246469 - DNA, 19 bp, Homo sapiens
  siRNA target sequence for IL17RD (NM_017563.1,910-928).
gatgacactaacacaacaa

SEQ ID NO: 246470 - DNA, 19 bp, Homo sapiens
  siRNA target sequence for IL17RD (NM_017563.1,1001-1019).
cagtgccactggtagtcat

SEQ ID NO: 246471 - DNA, 19 bp, Homo sapiens
  siRNA target sequence for IL17RD (NM_017563.1,1003-1021).
gtgccactggtagtcatat

SEQ ID NO: 246472 - DNA, 19 bp, Homo sapiens
  siRNA target sequence for IL17RD (NM_017563.1,1052-1070).
gccgcaagaagcaacaaga

SEQ ID NO: 246473 - DNA, 19 bp, Homo sapiens
  siRNA target sequence for IL17RD (NM_017563.1,1054-1072).
cgcaagaagcaacaagaaa

SEQ ID NO: 246474 - DNA, 19 bp, Homo sapiens
  siRNA target sequence for IL17RD (NM_017563.1,1170-1188).
ctgctattccagtaaagat

SEQ ID NO: 246475 - DNA, 19 bp, Homo sapiens
  siRNA target sequence for IL17RD (NM_017563.1,1327-1345).
cacgagtcccagttcatca

SEQ ID NO: 246476 - DNA, 19 bp, Homo sapiens
  siRNA target sequence for IL17RD (NM_017563.1,1329-1347).
cgagtcccagttcatcatt

SEQ ID NO: 246477 - DNA, 19 bp, Homo sapiens
  siRNA target sequence for IL17RD (NM_017563.1,1344-1362).
cattgtggtttgttccaaa

SEQ ID NO: 246478 - DNA, 19 bp, Homo sapiens
  siRNA target sequence for IL17RD (NM_017563.1,1355-1373).
gttccaaaggtatgaagta

SEQ ID NO: 246479 - DNA, 19 bp, Homo sapiens
  siRNA target sequence for IL17RD (NM_017563.1,1358-1376).
ccaaaggtatgaagtactt

SEQ ID NO: 246480 - DNA, 19 bp, Homo sapiens
  siRNA target sequence for IL17RD (NM_017563.1,1454-1472).
cagccattgccgaaaagct

SEQ ID NO: 246481 - DNA, 19 bp, Homo sapiens
  siRNA target sequence for IL17RD (NM_017563.1,1518-1536).
cgccgtctactttgattat

SEQ ID NO: 246482 - DNA, 19 bp, Homo sapiens
  siRNA target sequence for IL17RD (NM_017563.1,1519-1537).
gccgtctactttgattatt

SEQ ID NO: 246483 - DNA, 19 bp, Homo sapiens
  siRNA target sequence for IL17RD (NM_017563.1,1703-1721).
caggccggtccctatacgt

SEQ ID NO: 246484 - DNA, 19 bp, Homo sapiens
  siRNA target sequence for IL17RD (NM_017563.1,1714-1732).
ctatacgtcgccatttgca

SEQ ID NO: 246485 - DNA, 19 bp, Homo sapiens
  siRNA target sequence for IL17RD (NM_017563.1,1730-1748).
gcaacatgcaccagtttat

SEQ ID NO: 246486 - DNA, 19 bp, Homo sapiens
  siRNA target sequence for IL17RD (NM_017563.1,1731-1749).
caacatgcaccagtttatt

SEQ ID NO: 246487 - DNA, 19 bp, Homo sapiens
  siRNA target sequence for IL17RD (NM_017563.1,1760-1778).
ccgactggttcgaaaagca

SEQ ID NO: 246488 - DNA, 19 bp, Homo sapiens
  siRNA target sequence for IL17RD (NM_017563.1,1837-1855).
gattcgggcttggttttaa

SEQ ID NO: 246489 - DNA, 19 bp, Homo sapiens
  siRNA target sequence for IL17RD (NM_017563.1,1902-1920).
ggtagaggcggctgttctt

SEQ ID NO: 246490 - DNA, 19 bp, Homo sapiens
  siRNA target sequence for IL17RD (NM_017563.1,2235-2253).
ctcttctgggtcatgcaaa

SEQ ID NO: 246491 - DNA, 19 bp, Homo sapiens
  siRNA target sequence for IL17RD (NM_017563.1,2270-2288).
gcagctacactgatgaact

SEQ ID NO: 246492 - DNA, 19 bp, Homo sapiens
  siRNA target sequence for KLRA1 (NM_006611.1,265-283).
cttcttctgatgatagtca

SEQ ID NO: 246493 - DNA, 19 bp, Homo sapiens
  siRNA target sequence for KLRA1 (NM_006611.1,288-306).
gttggtgacaaatatcttt

SEQ ID NO: 246494 - DNA, 19 bp, Homo sapiens
  siRNA target sequence for KLRA1 (NM_006611.1,331-349).
cggcaggaaattctaagaa

SEQ ID NO: 246495 - DNA, 19 bp, Homo sapiens
  siRNA target sequence for KLRA1 (NM_006611.1,343-361).
ctaagaaactgtagtgaaa

SEQ ID NO: 246496 - DNA, 19 bp, Homo sapiens
  siRNA target sequence for KLRA1 (NM_006611.1,347-365).
gaaactgtagtgaaaagta

SEQ ID NO: 246497 - DNA, 19 bp, Homo sapiens
  siRNA target sequence for KLRA1 (NM_006611.1,353-371).
gtagtgaaaagtacatcat

SEQ ID NO: 246498 - DNA, 19 bp, Homo sapiens
  siRNA target sequence for KLRA1 (NM_006611.1,427-445).
gacgttctcaaaaatagct

SEQ ID NO: 246499 - DNA, 19 bp, Homo sapiens
  siRNA target sequence for KLRA1 (NM_006611.1,429-447).
cgttctcaaaaatagcttt

SEQ ID NO: 246500 - DNA, 19 bp, Homo sapiens
  siRNA target sequence for KLRA1 (NM_006611.1,465-483).
ggattcacgccttatacaa

SEQ ID NO: 246501 - DNA, 19 bp, Homo sapiens
  siRNA target sequence for KLRA1 (NM_006611.1,466-484).
gattcacgccttatacaaa

SEQ ID NO: 246502 - DNA, 19 bp, Homo sapiens
  siRNA target sequence for KLRA1 (NM_006611.1,486-504).
gaacagatgtcatagagaa

SEQ ID NO: 246503 - DNA, 19 bp, Homo sapiens
  siRNA target sequence for KLRA1 (NM_006611.1,560-578).
ggtcctgttgtggagtaaa

SEQ ID NO: 246504 - DNA, 19 bp, Homo sapiens
  siRNA target sequence for KLRA1 (NM_006611.1,564-582).
ctgttgtggagtaaactgt

SEQ ID NO: 246505 - DNA, 19 bp, Homo sapiens
  siRNA target sequence for KLRA1 (NM_006611.1,571-589).
ggagtaaactgttattatt

SEQ ID NO: 246506 - DNA, 19 bp, Homo sapiens
  siRNA target sequence for KLRA1 (NM_006611.1,641-659).
gtagatcatcccttttgaa

SEQ ID NO: 246507 - DNA, 19 bp, Homo sapiens
  siRNA target sequence for KLRA1 (NM_006611.1,644-662).
gatcatcccttttgaagat

SEQ ID NO: 246508 - DNA, 19 bp, Homo sapiens
  siRNA target sequence for KLRA1 (NM_006611.1,669-687).
caaagatgaactcgtattt

SEQ ID NO: 246509 - DNA, 19 bp, Homo sapiens
  siRNA target sequence for KLRA1 (NM_006611.1,673-691).
gatgaactcgtattttaca

SEQ ID NO: 246510 - DNA, 19 bp, Homo sapiens
  siRNA target sequence for KLRA1 (NM_006611.1,722-740).
caatgttggacctaagata

SEQ ID NO: 246511 - DNA, 19 bp, Homo sapiens
  siRNA target sequence for LRRC21 (NM_015613.1,83-101).
ggcttctgcccctctcaat

SEQ ID NO: 246512 - DNA, 19 bp, Homo sapiens
  siRNA target sequence for LRRC21 (NM_015613.1,105-123).
gctgcagcctccatatcat

SEQ ID NO: 246513 - DNA, 19 bp, Homo sapiens
  siRNA target sequence for LRRC21 (NM_015613.1,636-654).
gtgactgccgactctatga

SEQ ID NO: 246514 - DNA, 19 bp, Homo sapiens
  siRNA target sequence for LRRC21 (NM_015613.1,682-700).
cccaaacttggccttcatt

SEQ ID NO: 246515 - DNA, 19 bp, Homo sapiens
  siRNA target sequence for LRRC21 (NM_015613.1,747-765).
ccttcagccagcttgaact

SEQ ID NO: 246516 - DNA, 19 bp, Homo sapiens
  siRNA target sequence for LRRC21 (NM_015613.1,986-1004).
gactccggagactacatct

SEQ ID NO: 246517 - DNA, 19 bp, Homo sapiens
  siRNA target sequence for LRRC21 (NM_015613.1,1028-1046).
gcctctgaaactgttatct

SEQ ID NO: 246518 - DNA, 19 bp, Homo sapiens
  siRNA target sequence for LRRC21 (NM_015613.1,1040-1058).
gttatctccttgattgtca

SEQ ID NO: 246519 - DNA, 19 bp, Homo sapiens
  siRNA target sequence for LRRC21 (NM_015613.1,1370-1388).
gcaccccaggctaagaaca

SEQ ID NO: 246520 - DNA, 19 bp, Homo sapiens
  siRNA target sequence for LRRC21 (NM_015613.1,1373-1391).
ccccaggctaagaacacaa

SEQ ID NO: 246521 - DNA, 19 bp, Homo sapiens
  siRNA target sequence for LRRC21 (NM_015613.1,1486-1504).
gttgcccaagaccaagtat

SEQ ID NO: 246522 - DNA, 19 bp, Homo sapiens
  siRNA target sequence for LRRC21 (NM_015613.1,1540-1558).
gaaggagcagtgtgttatt

SEQ ID NO: 246523 - DNA, 19 bp, Homo sapiens
  siRNA target sequence for LRRC21 (NM_015613.1,1689-1707).
gccgaaagtgcttcaacaa

SEQ ID NO: 246524 - DNA, 19 bp, Homo sapiens
  siRNA target sequence for LRRC21 (NM_015613.1,1827-1845).
gttccagtgtggactttca

SEQ ID NO: 246525 - DNA, 19 bp, Homo sapiens
  siRNA target sequence for LRRC21 (NM_015613.1,1869-1887).
ggagaatcaatgagtactt

SEQ ID NO: 246526 - DNA, 19 bp, Homo sapiens
  siRNA target sequence for LTBR (NM_002342.1,258-276).
ccaggcggtgcctccatat

SEQ ID NO: 246527 - DNA, 19 bp, Homo sapiens
  siRNA target sequence for LTBR (NM_002342.1,390-408).
catccgggacacagtttgt

SEQ ID NO: 246528 - DNA, 19 bp, Homo sapiens
  siRNA target sequence for LTBR (NM_002342.1,409-427).
gccacatgtgccgagaatt

SEQ ID NO: 246529 - DNA, 19 bp, Homo sapiens
  siRNA target sequence for LTBR (NM_002342.1,413-431).
catgtgccgagaattccta

SEQ ID NO: 246530 - DNA, 19 bp, Homo sapiens
  siRNA target sequence for LTBR (NM_002342.1,542-560).
gctgccagccgggaatgtt

SEQ ID NO: 246531 - DNA, 19 bp, Homo sapiens
  siRNA target sequence for LTBR (NM_002342.1,785-803).
ccgacacaacctgcaaaaa

SEQ ID NO: 246532 - DNA, 19 bp, Homo sapiens
  siRNA target sequence for LTBR (NM_002342.1,786-804).
cgacacaacctgcaaaaat

SEQ ID NO: 246533 - DNA, 19 bp, Homo sapiens
  siRNA target sequence for LTBR (NM_002342.1,789-807).
cacaacctgcaaaaatcca

SEQ ID NO: 246534 - DNA, 19 bp, Homo sapiens
  siRNA target sequence for LTBR (NM_002342.1,794-812).
cctgcaaaaatccattaga

SEQ ID NO: 246535 - DNA, 19 bp, Homo sapiens
  siRNA target sequence for LTBR (NM_002342.1,1007-1025).
ctccgaaggcccatccata

SEQ ID NO: 246536 - DNA, 19 bp, Homo sapiens
  siRNA target sequence for LTBR (NM_002342.1,1010-1028).
cgaaggcccatccatactt

SEQ ID NO: 246537 - DNA, 19 bp, Homo sapiens
  siRNA target sequence for LTBR (NM_002342.1,1094-1112).
ccgcagccccagttttgga

SEQ ID NO: 246538 - DNA, 19 bp, Homo sapiens
  siRNA target sequence for LTBR (NM_002342.1,1188-1206).
ggtggcccacggtaccaat

SEQ ID NO: 246539 - DNA, 19 bp, Homo sapiens
  siRNA target sequence for LTBR (NM_002342.1,1197-1215).
cggtaccaatggcattcat

SEQ ID NO: 246540 - DNA, 19 bp, Homo sapiens
  siRNA target sequence for LTBR (NM_002342.1,1199-1217).
gtaccaatggcattcatgt

SEQ ID NO: 246541 - DNA, 19 bp, Homo sapiens
  siRNA target sequence for LTBR (NM_002342.1,1224-1242).
cgggtctatgactatcact

SEQ ID NO: 246542 - DNA, 19 bp, Homo sapiens
  siRNA target sequence for LTBR (NM_002342.1,1235-1253).
ctatcactggcaacatcta

SEQ ID NO: 246543 - DNA, 19 bp, Homo sapiens
  siRNA target sequence for LTBR (NM_002342.1,1243-1261).
ggcaacatctacatctaca

SEQ ID NO: 246544 - DNA, 19 bp, Homo sapiens
  siRNA target sequence for LTBR (NM_002342.1,1445-1463).
gcccaaggaaccaatttat

SEQ ID NO: 246545 - DNA, 19 bp, Homo sapiens
  siRNA target sequence for LU (NM_005581.2,131-149).
ggtgatgcgaggaaagtct

SEQ ID NO: 246546 - DNA, 19 bp, Homo sapiens
  siRNA target sequence for LU (NM_005581.2,137-155).
gcgaggaaagtctgtcatt

SEQ ID NO: 246547 - DNA, 19 bp, Homo sapiens
  siRNA target sequence for LU (NM_005581.2,172-190).
cgggaacccacgaccatta

SEQ ID NO: 246548 - DNA, 19 bp, Homo sapiens
  siRNA target sequence for LU (NM_005581.2,173-191).
gggaacccacgaccattat

SEQ ID NO: 246549 - DNA, 19 bp, Homo sapiens
  siRNA target sequence for LU (NM_005581.2,174-192).
ggaacccacgaccattata

SEQ ID NO: 246550 - DNA, 19 bp, Homo sapiens
  siRNA target sequence for LU (NM_005581.2,175-193).
gaacccacgaccattatat

SEQ ID NO: 246551 - DNA, 19 bp, Homo sapiens
  siRNA target sequence for LU (NM_005581.2,178-196).
cccacgaccattatatgct

SEQ ID NO: 246552 - DNA, 19 bp, Homo sapiens
  siRNA target sequence for LU (NM_005581.2,1243-1261).
ctatcaccttcgattccaa

SEQ ID NO: 246553 - DNA, 19 bp, Homo sapiens
  siRNA target sequence for LU (NM_005581.2,1343-1361).
ctcgccagagctaaagaca

SEQ ID NO: 246554 - DNA, 19 bp, Homo sapiens
  siRNA target sequence for LU (NM_005581.2,1519-1537).
gctctctgaccctgaaagt

SEQ ID NO: 246555 - DNA, 19 bp, Homo sapiens
  siRNA target sequence for LU (NM_005581.2,1591-1609).
ggaacaagcgccatgtctt

SEQ ID NO: 246556 - DNA, 19 bp, Homo sapiens
  siRNA target sequence for M6PR (NM_002355.2,197-215).
gactggactgctactacta

SEQ ID NO: 246557 - DNA, 19 bp, Homo sapiens
  siRNA target sequence for M6PR (NM_002355.2,199-217).
ctggactgctactactact

SEQ ID NO: 246558 - DNA, 19 bp, Homo sapiens
  siRNA target sequence for M6PR (NM_002355.2,369-387).
ggttcagacacatacatct

SEQ ID NO: 246559 - DNA, 19 bp, Homo sapiens
  siRNA target sequence for M6PR (NM_002355.2,500-518).
catcttcaacggaagtaat

SEQ ID NO: 246560 - DNA, 19 bp, Homo sapiens
  siRNA target sequence for M6PR (NM_002355.2,533-551).
ctataaagggggtgatgaa

SEQ ID NO: 246561 - DNA, 19 bp, Homo sapiens
  siRNA target sequence for M6PR (NM_002355.2,541-559).
ggggtgatgaatatgacaa

SEQ ID NO: 246562 - DNA, 19 bp, Homo sapiens
  siRNA target sequence for M6PR (NM_002355.2,582-600).
cgtgcagtggtgatgatct

SEQ ID NO: 246563 - DNA, 19 bp, Homo sapiens
  siRNA target sequence for M6PR (NM_002355.2,612-630).
cacaccctagcggacaatt

SEQ ID NO: 246564 - DNA, 19 bp, Homo sapiens
  siRNA target sequence for M6PR (NM_002355.2,614-632).
caccctagcggacaatttt

SEQ ID NO: 246565 - DNA, 19 bp, Homo sapiens
  siRNA target sequence for M6PR (NM_002355.2,654-672).
ggcaaagtccaagattgtt

SEQ ID NO: 246566 - DNA, 19 bp, Homo sapiens
  siRNA target sequence for M6PR (NM_002355.2,655-673).
gcaaagtccaagattgttt

SEQ ID NO: 246567 - DNA, 19 bp, Homo sapiens
  siRNA target sequence for M6PR (NM_002355.2,728-746).
cagtgtgggttccatctta

SEQ ID NO: 246568 - DNA, 19 bp, Homo sapiens
  siRNA target sequence for M6PR (NM_002355.2,730-748).
gtgtgggttccatcttact

SEQ ID NO: 246569 - DNA, 19 bp, Homo sapiens
  siRNA target sequence for M6PR (NM_002355.2,780-798).
gttgttggggggttcctat

SEQ ID NO: 246570 - DNA, 19 bp, Homo sapiens
  siRNA target sequence for M6PR (NM_002355.2,882-900).
gatggctgtgactttgtct

SEQ ID NO: 246571 - DNA, 19 bp, Homo sapiens
  siRNA target sequence for M6PR (NM_002355.2,902-920).
ccgttctaaacctcgaaat

SEQ ID NO: 246572 - DNA, 19 bp, Homo sapiens
  siRNA target sequence for M6PR (NM_002355.2,904-922).
gttctaaacctcgaaatgt

SEQ ID NO: 246573 - DNA, 19 bp, Homo sapiens
  siRNA target sequence for M6PR (NM_002355.2,981-999).
gatgaccatttattaccaa

SEQ ID NO: 246574 - DNA, 19 bp, Homo sapiens
  siRNA target sequence for MFRP (NM_031433.1,923-941).
gctgtgcccatgatgagtt

SEQ ID NO: 246575 - DNA, 19 bp, Homo sapiens
  siRNA target sequence for MFRP (NM_031433.1,975-993).
ctcagtgtgtgatggtttt

SEQ ID NO: 246576 - DNA, 19 bp, Homo sapiens
  siRNA target sequence for MFRP (NM_031433.1,1069-1087).
ctccagggcactttctcta

SEQ ID NO: 246577 - DNA, 19 bp, Homo sapiens
  siRNA target sequence for MFRP (NM_031433.1,1151-1169).
ccggacacagcatagaact

SEQ ID NO: 246578 - DNA, 19 bp, Homo sapiens
  siRNA target sequence for MFRP (NM_031433.1,1152-1170).
cggacacagcatagaacta

SEQ ID NO: 246579 - DNA, 19 bp, Homo sapiens
  siRNA target sequence for MFRP (NM_031433.1,1201-1219).
gacgagtgcaagtttgact

SEQ ID NO: 246580 - DNA, 19 bp, Homo sapiens
  siRNA target sequence for MFRP (NM_031433.1,1321-1339).
ctggctgtgctgtttagga

SEQ ID NO: 246581 - DNA, 19 bp, Homo sapiens
  siRNA target sequence for MFRP (NM_031433.1,1329-1347).
gctgtttaggacagatcat

SEQ ID NO: 246582 - DNA, 19 bp, Homo sapiens
  siRNA target sequence for MFRP (NM_031433.1,1645-1663).
gtcctcagcggttacaaga

SEQ ID NO: 246583 - DNA, 19 bp, Homo sapiens
  siRNA target sequence for NCR2 (NM_004828.2,272-290).
gtgtgcatcaggttagtca

SEQ ID NO: 246584 - DNA, 19 bp, Homo sapiens
  siRNA target sequence for NCR2 (NM_004828.2,401-419).
ggacattactggtgtagaa

SEQ ID NO: 246585 - DNA, 19 bp, Homo sapiens
  siRNA target sequence for NCR2 (NM_004828.2,402-420).
gacattactggtgtagaat

SEQ ID NO: 246586 - DNA, 19 bp, Homo sapiens
  siRNA target sequence for NCR2 (NM_004828.2,725-743).
gtctggtggggggacatat

SEQ ID NO: 246587 - DNA, 19 bp, Homo sapiens
  siRNA target sequence for NCR2 (NM_004828.2,769-787).
gagcctggatacccaaaaa

SEQ ID NO: 246588 - DNA, 19 bp, Homo sapiens
  siRNA target sequence for NCR2 (NM_004828.2,870-888).
ctgttgcaaggactaagat

SEQ ID NO: 246589 - DNA, 19 bp, Homo sapiens
  siRNA target sequence for NCR2 (NM_004828.2,882-900).
ctaagataagcgatgatga

SEQ ID NO: 246590 - DNA, 19 bp, Homo sapiens
  siRNA target sequence for NGFR (NM_002507.1,683-701).
gatccctggccgttggatt

SEQ ID NO: 246591 - DNA, 19 bp, Homo sapiens
  siRNA target sequence for NGFR (NM_002507.1,905-923).
gggccttgtggcctacata

SEQ ID NO: 246592 - DNA, 19 bp, Homo sapiens
  siRNA target sequence for NGFR (NM_002507.1,915-933).
gcctacatagccttcaaga

SEQ ID NO: 246593 - DNA, 19 bp, Homo sapiens
  siRNA target sequence for NGFR (NM_002507.1,1218-1236).
cagcccgagcacatagact

SEQ ID NO: 246594 - DNA, 19 bp, Homo sapiens
  siRNA target sequence for NGFR (NM_002507.1,1224-1242).
gagcacatagactccttta

SEQ ID NO: 246595 - DNA, 19 bp, Homo sapiens
  siRNA target sequence for PLXN3 (NM_017514.1,328-346).
cgcagtgaaccgagtcttt

SEQ ID NO: 246596 - DNA, 19 bp, Homo sapiens
  siRNA target sequence for PLXN3 (NM_017514.1,329-347).
gcagtgaaccgagtcttta

SEQ ID NO: 246597 - DNA, 19 bp, Homo sapiens
  siRNA target sequence for PLXN3 (NM_017514.1,633-651).
ccatggctggtgtcattgt

SEQ ID NO: 246598 - DNA, 19 bp, Homo sapiens
  siRNA target sequence for PLXN3 (NM_017514.1,755-773).
gacagcgcggacatgttca

SEQ ID NO: 246599 - DNA, 19 bp, Homo sapiens
  siRNA target sequence for PLXN3 (NM_017514.1,879-897).
gcgcctccttcgtgtactt

SEQ ID NO: 246600 - DNA, 19 bp, Homo sapiens
  siRNA target sequence for PLXN3 (NM_017514.1,984-1002).
cgggagactcagagttcta

SEQ ID NO: 246601 - DNA, 19 bp, Homo sapiens
  siRNA target sequence for PLXN3 (NM_017514.1,1298-1316).
gagctgccctgcatcaaca

SEQ ID NO: 246602 - DNA, 19 bp, Homo sapiens
  siRNA target sequence for PLXN3 (NM_017514.1,1594-1612).
ggaccaccggcacatctat

SEQ ID NO: 246603 - DNA, 19 bp, Homo sapiens
  siRNA target sequence for PLXN3 (NM_017514.1,2069-2087).
gccggtgctgactttgtct

SEQ ID NO: 246604 - DNA, 19 bp, Homo sapiens
  siRNA target sequence for PLXN3 (NM_017514.1,2070-2088).
ccggtgctgactttgtctt

SEQ ID NO: 246605 - DNA, 19 bp, Homo sapiens
  siRNA target sequence for PLXN3 (NM_017514.1,2323-2341).
gtcgggccagaagaactat

SEQ ID NO: 246606 - DNA, 19 bp, Homo sapiens
  siRNA target sequence for PLXN3 (NM_017514.1,2327-2345).
ggccagaagaactatgagt

SEQ ID NO: 246607 - DNA, 19 bp, Homo sapiens
  siRNA target sequence for PLXN3 (NM_017514.1,2422-2440).
cgcctcgtactcctatgaa

SEQ ID NO: 246608 - DNA, 19 bp, Homo sapiens
  siRNA target sequence for PLXN3 (NM_017514.1,2579-2597).
gctgatccccgcttcaact

SEQ ID NO: 246609 - DNA, 19 bp, Homo sapiens
  siRNA target sequence for PLXN3 (NM_017514.1,3195-3213).
ccattgaccgggctaacat

SEQ ID NO: 246610 - DNA, 19 bp, Homo sapiens
  siRNA target sequence for PLXN3 (NM_017514.1,3370-3388).
cattgagaccaccaataca

SEQ ID NO: 246611 - DNA, 19 bp, Homo sapiens
  siRNA target sequence for PLXN3 (NM_017514.1,3381-3399).
ccaatacatgccaagtgat

SEQ ID NO: 246612 - DNA, 19 bp, Homo sapiens
  siRNA target sequence for PLXN3 (NM_017514.1,3468-3486).
gcgagcaccctgatgagtt

SEQ ID NO: 246613 - DNA, 19 bp, Homo sapiens
  siRNA target sequence for PLXN3 (NM_017514.1,3469-3487).
cgagcaccctgatgagttt

SEQ ID NO: 246614 - DNA, 19 bp, Homo sapiens
  siRNA target sequence for PLXN3 (NM_017514.1,3524-3542).
ctcaaccgctcctccttta

SEQ ID NO: 246615 - DNA, 19 bp, Homo sapiens
  siRNA target sequence for PLXN3 (NM_017514.1,4446-4464).
cgttcctgctgcataagtt

SEQ ID NO: 246616 - DNA, 19 bp, Homo sapiens
  siRNA target sequence for PLXN3 (NM_017514.1,4447-4465).
gttcctgctgcataagttt

SEQ ID NO: 246617 - DNA, 19 bp, Homo sapiens
  siRNA target sequence for PLXN3 (NM_017514.1,5020-5038).
ctcacgggcacccatgatt

SEQ ID NO: 246618 - DNA, 19 bp, Homo sapiens
  siRNA target sequence for PLXN3 (NM_017514.1,5545-5563).
ggtggagaggtattatcga

SEQ ID NO: 246619 - DNA, 19 bp, Homo sapiens
  siRNA target sequence for PLXN3 (NM_017514.1,5551-5569).
gaggtattatcgagacatt

SEQ ID NO: 246620 - DNA, 19 bp, Homo sapiens
  siRNA target sequence for PLXN3 (NM_017514.1,5661-5679).
cgctcaacgagctgtattt

SEQ ID NO: 246621 - DNA, 19 bp, Homo sapiens
  siRNA target sequence for PLXN3 (NM_017514.1,5669-5687).
gagctgtatttctatgtca

SEQ ID NO: 246622 - DNA, 19 bp, Homo sapiens
  siRNA target sequence for PLXN3 (NM_017514.1,5729-5747).
gcctcttgtcggaagcata

SEQ ID NO: 246623 - DNA, 19 bp, Homo sapiens
  siRNA target sequence for PLXN3 (NM_017514.1,5730-5748).
cctcttgtcggaagcataa

SEQ ID NO: 246624 - DNA, 19 bp, Homo sapiens
  siRNA target sequence for PLXN3 (NM_017514.1,5733-5751).
cttgtcggaagcataagtt

SEQ ID NO: 246625 - DNA, 19 bp, Homo sapiens
  siRNA target sequence for SARM1 (NM_015077.1,548-566).
ctggacgcggtgctgtatt

SEQ ID NO: 246626 - DNA, 19 bp, Homo sapiens
  siRNA target sequence for SARM1 (NM_015077.1,551-569).
gacgcggtgctgtattggt

SEQ ID NO: 246627 - DNA, 19 bp, Homo sapiens
  siRNA target sequence for SARM1 (NM_015077.1,749-767).
gcggtgttggcgactaaca

SEQ ID NO: 246628 - DNA, 19 bp, Homo sapiens
  siRNA target sequence for SARM1 (NM_015077.1,1052-1070).
cgcctggtttcctactcta

SEQ ID NO: 246629 - DNA, 19 bp, Homo sapiens
  siRNA target sequence for SARM1 (NM_015077.1,1057-1075).
ggtttcctactctaccaat

SEQ ID NO: 246630 - DNA, 19 bp, Homo sapiens
  siRNA target sequence for SARM1 (NM_015077.1,1309-1327).
cacccgcaagaggttcttt

SEQ ID NO: 246631 - DNA, 19 bp, Homo sapiens
  siRNA target sequence for SARM1 (NM_015077.1,1348-1366).
gaccttcgccaactattct

SEQ ID NO: 246632 - DNA, 19 bp, Homo sapiens
  siRNA target sequence for SARM1 (NM_015077.1,1602-1620).
gggacactccagatgtctt

SEQ ID NO: 246633 - DNA, 19 bp, Homo sapiens
  siRNA target sequence for SARM1 (NM_015077.1,1728-1746).
gcaagttcgaggacaaact

SEQ ID NO: 246634 - DNA, 19 bp, Homo sapiens
  siRNA target sequence for SARM1 (NM_015077.1,1759-1777).
catgggtgcccgcaacttt

SEQ ID NO: 246635 - DNA, 19 bp, Homo sapiens
  siRNA target sequence for SARM1 (NM_015077.1,1763-1781).
ggtgcccgcaactttgtgt

SEQ ID NO: 246636 - DNA, 19 bp, Homo sapiens
  siRNA target sequence for SARM1 (NM_015077.1,1764-1782).
gtgcccgcaactttgtgtt

SEQ ID NO: 246637 - DNA, 19 bp, Homo sapiens
  siRNA target sequence for SARM1 (NM_015077.1,1830-1848).
gcaaggattgggtgcataa

SEQ ID NO: 246638 - DNA, 19 bp, Homo sapiens
  siRNA target sequence for SARM1 (NM_015077.1,1943-1961).
caggctgtgcttactttca

SEQ ID NO: 246639 - DNA, 19 bp, Homo sapiens
  siRNA target sequence for SFRP1 (NM_003012.2,752-770).
gcccgagatgcttaagtgt

SEQ ID NO: 246640 - DNA, 19 bp, Homo sapiens
  siRNA target sequence for SFRP1 (NM_003012.2,954-972).
gaaaatggcgacaagaaga

SEQ ID NO: 246641 - DNA, 19 bp, Homo sapiens
  siRNA target sequence for SFRP4 (NM_003014.2,337-355).
cacatgccctggaacatca

SEQ ID NO: 246642 - DNA, 19 bp, Homo sapiens
  siRNA target sequence for SFRP4 (NM_003014.2,560-578).
gcgagcccctcatgaagat

SEQ ID NO: 246643 - DNA, 19 bp, Homo sapiens
  siRNA target sequence for SFRP4 (NM_003014.2,562-580).
gagcccctcatgaagatgt

SEQ ID NO: 246644 - DNA, 19 bp, Homo sapiens
  siRNA target sequence for SFRP4 (NM_003014.2,612-630).
cgacgagctgcctgtctat

SEQ ID NO: 246645 - DNA, 19 bp, Homo sapiens
  siRNA target sequence for SFRP4 (NM_003014.2,673-691).
ctcccggaggatgttaagt

SEQ ID NO: 246646 - DNA, 19 bp, Homo sapiens
  siRNA target sequence for SFRP4 (NM_003014.2,731-749).
ctcttgatgttgactgtaa

SEQ ID NO: 246647 - DNA, 19 bp, Homo sapiens
  siRNA target sequence for SFRP4 (NM_003014.2,760-778).
cccgatcggtgcaagtgta

SEQ ID NO: 246648 - DNA, 19 bp, Homo sapiens
  siRNA target sequence for SFRP4 (NM_003014.2,761-779).
ccgatcggtgcaagtgtaa

SEQ ID NO: 246649 - DNA, 19 bp, Homo sapiens
  siRNA target sequence for SFRP4 (NM_003014.2,762-780).
cgatcggtgcaagtgtaaa

SEQ ID NO: 246650 - DNA, 19 bp, Homo sapiens
  siRNA target sequence for SFRP4 (NM_003014.2,763-781).
gatcggtgcaagtgtaaaa

SEQ ID NO: 246651 - DNA, 19 bp, Homo sapiens
  siRNA target sequence for SFRP4 (NM_003014.2,767-785).
ggtgcaagtgtaaaaaggt

SEQ ID NO: 246652 - DNA, 19 bp, Homo sapiens
  siRNA target sequence for SFRP4 (NM_003014.2,789-807).
gccaactttggcaacgtat

SEQ ID NO: 246653 - DNA, 19 bp, Homo sapiens
  siRNA target sequence for SFRP4 (NM_003014.2,799-817).
gcaacgtatctcagcaaaa

SEQ ID NO: 246654 - DNA, 19 bp, Homo sapiens
  siRNA target sequence for SFRP4 (NM_003014.2,819-837).
ctacagctatgttattcat

SEQ ID NO: 246655 - DNA, 19 bp, Homo sapiens
  siRNA target sequence for SFRP4 (NM_003014.2,881-899).
caacggtggtggatgtaaa

SEQ ID NO: 246656 - DNA, 19 bp, Homo sapiens
  siRNA target sequence for SFRP4 (NM_003014.2,884-902).
cggtggtggatgtaaaaga

SEQ ID NO: 246657 - DNA, 19 bp, Homo sapiens
  siRNA target sequence for SFRP4 (NM_003014.2,937-955).
caagtcccgctcattacaa

SEQ ID NO: 246658 - DNA, 19 bp, Homo sapiens
  siRNA target sequence for SFRP4 (NM_003014.2,942-960).
cccgctcattacaaattct

SEQ ID NO: 246659 - DNA, 19 bp, Homo sapiens
  siRNA target sequence for SFRP4 (NM_003014.2,943-961).
ccgctcattacaaattctt

SEQ ID NO: 246660 - DNA, 19 bp, Homo sapiens
  siRNA target sequence for SFRP4 (NM_003014.2,986-1004).
cccatcaagatgttctcat

SEQ ID NO: 246661 - DNA, 19 bp, Homo sapiens
  siRNA target sequence for SFRP4 (NM_003014.2,1064-1082).
ggagagatcagcttagtaa

SEQ ID NO: 246662 - DNA, 19 bp, Homo sapiens
  siRNA target sequence for SFRP4 (NM_003014.2,1069-1087).
gatcagcttagtaaaagat

SEQ ID NO: 246663 - DNA, 19 bp, Homo sapiens
  siRNA target sequence for SFRP4 (NM_003014.2,1074-1092).
gcttagtaaaagatccata

SEQ ID NO: 246664 - DNA, 19 bp, Homo sapiens
  siRNA target sequence for SFRP4 (NM_003014.2,1155-1173).
gcgcaccagtcgtagtaat

SEQ ID NO: 246665 - DNA, 19 bp, Homo sapiens
  siRNA target sequence for SFRP4 (NM_003014.2,1217-1235).
gtcccaagaagaacattaa

SEQ ID NO: 246666 - DNA, 19 bp, Homo sapiens
  siRNA target sequence for SFRP5 (NM_003015.2,704-722).
cctccagtgaccaagatct

SEQ ID NO: 246667 - DNA, 19 bp, Homo sapiens
  siRNA target sequence for SFRP5 (NM_003015.2,1027-1045).
ccgctgggacaagaagaat

SEQ ID NO: 246668 - DNA, 19 bp, Homo sapiens
  siRNA target sequence for SFRP5 (NM_003015.2,1061-1079).
gcagtcaaattcatgttct

SEQ ID NO: 246669 - DNA, 19 bp, Homo sapiens
  siRNA target sequence for SORL1 (NM_003105.3,151-169).
cgcgactcccgttcctatt

SEQ ID NO: 246670 - DNA, 19 bp, Homo sapiens
  siRNA target sequence for SORL1 (NM_003105.3,153-171).
cgactcccgttcctattca

SEQ ID NO: 246671 - DNA, 19 bp, Homo sapiens
  siRNA target sequence for SORL1 (NM_003105.3,401-419).
cggacaggttagtctgaat

SEQ ID NO: 246672 - DNA, 19 bp, Homo sapiens
  siRNA target sequence for SORL1 (NM_003105.3,403-421).
gacaggttagtctgaatga

SEQ ID NO: 246673 - DNA, 19 bp, Homo sapiens
  siRNA target sequence for SORL1 (NM_003105.3,531-549).
gtgtcttacgactatggaa

SEQ ID NO: 246674 - DNA, 19 bp, Homo sapiens
  siRNA target sequence for SORL1 (NM_003105.3,533-551).
gtcttacgactatggaaaa

SEQ ID NO: 246675 - DNA, 19 bp, Homo sapiens
  siRNA target sequence for SORL1 (NM_003105.3,639-657).
gacaacaagcggtacatct

SEQ ID NO: 246676 - DNA, 19 bp, Homo sapiens
  siRNA target sequence for SORL1 (NM_003105.3,641-659).
caacaagcggtacatcttt

SEQ ID NO: 246677 - DNA, 19 bp, Homo sapiens
  siRNA target sequence for SORL1 (NM_003105.3,681-699).
ctctggatcacgtttgact

SEQ ID NO: 246678 - DNA, 19 bp, Homo sapiens
  siRNA target sequence for SORL1 (NM_003105.3,698-716).
cttctgcaacactcttcaa

SEQ ID NO: 246679 - DNA, 19 bp, Homo sapiens
  siRNA target sequence for SORL1 (NM_003105.3,774-792).
cttctcttgggctttgaca

SEQ ID NO: 246680 - DNA, 19 bp, Homo sapiens
  siRNA target sequence for SORL1 (NM_003105.3,882-900).
ggaattgatccctatgaca

SEQ ID NO: 246681 - DNA, 19 bp, Homo sapiens
  siRNA target sequence for SORL1 (NM_003105.3,891-909).
ccctatgacaaaccaaata

SEQ ID NO: 246682 - DNA, 19 bp, Homo sapiens
  siRNA target sequence for SORL1 (NM_003105.3,904-922).
caaataccatctacattga

SEQ ID NO: 246683 - DNA, 19 bp, Homo sapiens
  siRNA target sequence for SORL1 (NM_003105.3,951-969).
gtcttccgaagtacagatt

SEQ ID NO: 246684 - DNA, 19 bp, Homo sapiens
  siRNA target sequence for SORL1 (NM_003105.3,1023-1041).
cagcttcgggacaagtaca

SEQ ID NO: 246685 - DNA, 19 bp, Homo sapiens
  siRNA target sequence for SORL1 (NM_003105.3,1026-1044).
cttcgggacaagtacatgt

SEQ ID NO: 246686 - DNA, 19 bp, Homo sapiens
  siRNA target sequence for SORL1 (NM_003105.3,1136-1154).
ccagtttgtcacaagacat

SEQ ID NO: 246687 - DNA, 19 bp, Homo sapiens
  siRNA target sequence for SORL1 (NM_003105.3,1143-1161).
gtcacaagacatcctatta

SEQ ID NO: 246688 - DNA, 19 bp, Homo sapiens
  siRNA target sequence for SORL1 (NM_003105.3,1281-1299).
gagaacgtgctctattaca

SEQ ID NO: 246689 - DNA, 19 bp, Homo sapiens
  siRNA target sequence for SORL1 (NM_003105.3,1320-1338).
gacaccttggtgaggtatt

SEQ ID NO: 246690 - DNA, 19 bp, Homo sapiens
  siRNA target sequence for SORL1 (NM_003105.3,1322-1340).
caccttggtgaggtatttt

SEQ ID NO: 246691 - DNA, 19 bp, Homo sapiens
  siRNA target sequence for SORL1 (NM_003105.3,1367-1385).
ccgagtggaaggattgcaa

SEQ ID NO: 246692 - DNA, 19 bp, Homo sapiens
  siRNA target sequence for SORL1 (NM_003105.3,1383-1401).
caaggagtctacattgcta

SEQ ID NO: 246693 - DNA, 19 bp, Homo sapiens
  siRNA target sequence for SORL1 (NM_003105.3,1398-1416).
gctactctgattaatggtt

SEQ ID NO: 246694 - DNA, 19 bp, Homo sapiens
  siRNA target sequence for SORL1 (NM_003105.3,1402-1420).
ctctgattaatggttctat

SEQ ID NO: 246695 - DNA, 19 bp, Homo sapiens
  siRNA target sequence for SORL1 (NM_003105.3,1406-1424).
gattaatggttctatgaat

SEQ ID NO: 246696 - DNA, 19 bp, Homo sapiens
  siRNA target sequence for SORL1 (NM_003105.3,1441-1459).
cggtcatcacctttgacaa

SEQ ID NO: 246697 - DNA, 19 bp, Homo sapiens
  siRNA target sequence for SORL1 (NM_003105.3,1669-1687).
gcaagacaaacgtgtacat

SEQ ID NO: 246698 - DNA, 19 bp, Homo sapiens
  siRNA target sequence for SORL1 (NM_003105.3,1725-1743).
cctggacctcactactaca

SEQ ID NO: 246699 - DNA, 19 bp, Homo sapiens
  siRNA target sequence for SORL1 (NM_003105.3,1750-1768).
gagaccacggcggaatcat

SEQ ID NO: 246700 - DNA, 19 bp, Homo sapiens
  siRNA target sequence for SORL1 (NM_003105.3,1752-1770).
gaccacggcggaatcatca

SEQ ID NO: 246701 - DNA, 19 bp, Homo sapiens
  siRNA target sequence for SORL1 (NM_003105.3,1780-1798).
cccagggcatggaaaccaa

SEQ ID NO: 246702 - DNA, 19 bp, Homo sapiens
  siRNA target sequence for SORL1 (NM_003105.3,1790-1808).
ggaaaccaacgagctaaaa

SEQ ID NO: 246703 - DNA, 19 bp, Homo sapiens
  siRNA target sequence for SORL1 (NM_003105.3,1796-1814).
caacgagctaaaatacagt

SEQ ID NO: 246704 - DNA, 19 bp, Homo sapiens
  siRNA target sequence for SORL1 (NM_003105.3,1802-1820).
gctaaaatacagtaccaat

SEQ ID NO: 246705 - DNA, 19 bp, Homo sapiens
  siRNA target sequence for SORL1 (NM_003105.3,1916-1934).
catctttggctcgaacaaa

SEQ ID NO: 246706 - DNA, 19 bp, Homo sapiens
  siRNA target sequence for SORL1 (NM_003105.3,1924-1942).
gctcgaacaaagagaatgt

SEQ ID NO: 246707 - DNA, 19 bp, Homo sapiens
  siRNA target sequence for SORL1 (NM_003105.3,1996-2014).
gcacagagaatgactacaa

SEQ ID NO: 246708 - DNA, 19 bp, Homo sapiens
  siRNA target sequence for SORL1 (NM_003105.3,2055-2073).
ctgggacacaagactgttt

SEQ ID NO: 246709 - DNA, 19 bp, Homo sapiens
  siRNA target sequence for SORL1 (NM_003105.3,2175-2193).
gacttcggtttcaagatga

SEQ ID NO: 246710 - DNA, 19 bp, Homo sapiens
  siRNA target sequence for SORL1 (NM_003105.3,2329-2347).
gtagcggaggagatgttga

SEQ ID NO: 246711 - DNA, 19 bp, Homo sapiens
  siRNA target sequence for SORL1 (NM_003105.3,2386-2404).
cagaagagaacgagttcat

SEQ ID NO: 246712 - DNA, 19 bp, Homo sapiens
  siRNA target sequence for SORL1 (NM_003105.3,2393-2411).
gaacgagttcattctgtat

SEQ ID NO: 246713 - DNA, 19 bp, Homo sapiens
  siRNA target sequence for SORL1 (NM_003105.3,2495-2513).
ggccctggactttgactat

SEQ ID NO: 246714 - DNA, 19 bp, Homo sapiens
  siRNA target sequence for SORL1 (NM_003105.3,2514-2532).
gagcacaactgtttgtatt

SEQ ID NO: 246715 - DNA, 19 bp, Homo sapiens
  siRNA target sequence for SORL1 (NM_003105.3,2562-2580).
cgcctctgtttgaatggaa

SEQ ID NO: 246716 - DNA, 19 bp, Homo sapiens
  siRNA target sequence for SORL1 (NM_003105.3,2588-2606).
gcaagaggtgatcatcaat

SEQ ID NO: 246717 - DNA, 19 bp, Homo sapiens
  siRNA target sequence for SORL1 (NM_003105.3,2666-2684).
ggtagatgcaggcttcaaa

SEQ ID NO: 246718 - DNA, 19 bp, Homo sapiens
  siRNA target sequence for SORL1 (NM_003105.3,2667-2685).
gtagatgcaggcttcaaaa

SEQ ID NO: 246719 - DNA, 19 bp, Homo sapiens
  siRNA target sequence for SORL1 (NM_003105.3,2710-2728).
gcgacttccgactcacaat

SEQ ID NO: 246720 - DNA, 19 bp, Homo sapiens
  siRNA target sequence for SORL1 (NM_003105.3,2718-2736).
cgactcacaatcgtcaatt

SEQ ID NO: 246721 - DNA, 19 bp, Homo sapiens
  siRNA target sequence for SORL1 (NM_003105.3,2721-2739).
ctcacaatcgtcaattcct

SEQ ID NO: 246722 - DNA, 19 bp, Homo sapiens
  siRNA target sequence for SORL1 (NM_003105.3,2776-2794).
cccaagagggggtgatgtt

SEQ ID NO: 246723 - DNA, 19 bp, Homo sapiens
  siRNA target sequence for SORL1 (NM_003105.3,2823-2841).
gggatttatcggagcaata

SEQ ID NO: 246724 - DNA, 19 bp, Homo sapiens
  siRNA target sequence for SORL1 (NM_003105.3,2824-2842).
ggatttatcggagcaatat

SEQ ID NO: 246725 - DNA, 19 bp, Homo sapiens
  siRNA target sequence for SORL1 (NM_003105.3,2904-2922).
gtggacgaccagtggattt

SEQ ID NO: 246726 - DNA, 19 bp, Homo sapiens
  siRNA target sequence for SORL1 (NM_003105.3,2907-2925).
gacgaccagtggatttact

SEQ ID NO: 246727 - DNA, 19 bp, Homo sapiens
  siRNA target sequence for SORL1 (NM_003105.3,2972-2990).
ccagcagcgctctgtcatt

SEQ ID NO: 246728 - DNA, 19 bp, Homo sapiens
  siRNA target sequence for SORL1 (NM_003105.3,3024-3042).
gtctttaagaatgaaatct

SEQ ID NO: 246729 - DNA, 19 bp, Homo sapiens
  siRNA target sequence for SORL1 (NM_003105.3,3068-3086).
catattccgagcttccaaa

SEQ ID NO: 246730 - DNA, 19 bp, Homo sapiens
  siRNA target sequence for SORL1 (NM_003105.3,3074-3092).
ccgagcttccaaatacagt

SEQ ID NO: 246731 - DNA, 19 bp, Homo sapiens
  siRNA target sequence for SORL1 (NM_003105.3,3094-3112).
ggtcccagatggagattct

SEQ ID NO: 246732 - DNA, 19 bp, Homo sapiens
  siRNA target sequence for SORL1 (NM_003105.3,3309-3327).
ggctatcagctcaagaaca

SEQ ID NO: 246733 - DNA, 19 bp, Homo sapiens
  siRNA target sequence for SORL1 (NM_003105.3,3310-3328).
gctatcagctcaagaacaa

SEQ ID NO: 246734 - DNA, 19 bp, Homo sapiens
  siRNA target sequence for SORL1 (NM_003105.3,3311-3329).
ctatcagctcaagaacaat

SEQ ID NO: 246735 - DNA, 19 bp, Homo sapiens
  siRNA target sequence for SORL1 (NM_003105.3,3323-3341).
gaacaatacctgtgtcaaa

SEQ ID NO: 246736 - DNA, 19 bp, Homo sapiens
  siRNA target sequence for SORL1 (NM_003105.3,3376-3394).
gcagcaacgggaactgtat

SEQ ID NO: 246737 - DNA, 19 bp, Homo sapiens
  siRNA target sequence for SORL1 (NM_003105.3,3401-3419).
catttggtggtgtgacttt

SEQ ID NO: 246738 - DNA, 19 bp, Homo sapiens
  siRNA target sequence for SORL1 (NM_003105.3,3477-3495).
ctggacacccagtttcgtt

SEQ ID NO: 246739 - DNA, 19 bp, Homo sapiens
  siRNA target sequence for SORL1 (NM_003105.3,3498-3516).
caggagtctgggacttgta

SEQ ID NO: 246740 - DNA, 19 bp, Homo sapiens
  siRNA target sequence for SORL1 (NM_003105.3,3514-3532).
gtatcccactgtcctataa

SEQ ID NO: 246741 - DNA, 19 bp, Homo sapiens
  siRNA target sequence for SORL1 (NM_003105.3,3518-3536).
cccactgtcctataaatgt

SEQ ID NO: 246742 - DNA, 19 bp, Homo sapiens
  siRNA target sequence for SORL1 (NM_003105.3,3595-3613).
gccggagtgacgagtacaa

SEQ ID NO: 246743 - DNA, 19 bp, Homo sapiens
  siRNA target sequence for SORL1 (NM_003105.3,3597-3615).
cggagtgacgagtacaact

SEQ ID NO: 246744 - DNA, 19 bp, Homo sapiens
  siRNA target sequence for SORL1 (NM_003105.3,3692-3710).
caactgtaccgccatctat

SEQ ID NO: 246745 - DNA, 19 bp, Homo sapiens
  siRNA target sequence for SORL1 (NM_003105.3,3828-3846).
gagaagaagtgcaatggat

SEQ ID NO: 246746 - DNA, 19 bp, Homo sapiens
  siRNA target sequence for SORL1 (NM_003105.3,3910-3928).
ctgatggctccgatgaaca

SEQ ID NO: 246747 - DNA, 19 bp, Homo sapiens
  siRNA target sequence for SORL1 (NM_003105.3,3940-3958).
ccctctgtacgcacttcat

SEQ ID NO: 246748 - DNA, 19 bp, Homo sapiens
  siRNA target sequence for SORL1 (NM_003105.3,4082-4100).
gttccacaaggtatgtgat

SEQ ID NO: 246749 - DNA, 19 bp, Homo sapiens
  siRNA target sequence for SORL1 (NM_003105.3,4106-4124).
cggtttccagtgtcagaat

SEQ ID NO: 246750 - DNA, 19 bp, Homo sapiens
  siRNA target sequence for SORL1 (NM_003105.3,4125-4143).
ggagtgtgcatcagtttga

SEQ ID NO: 246751 - DNA, 19 bp, Homo sapiens
  siRNA target sequence for SORL1 (NM_003105.3,4128-4146).
gtgtgcatcagtttgattt

SEQ ID NO: 246752 - DNA, 19 bp, Homo sapiens
  siRNA target sequence for SORL1 (NM_003105.3,4163-4181).
ggatgattgcggcgattat

SEQ ID NO: 246753 - DNA, 19 bp, Homo sapiens
  siRNA target sequence for SORL1 (NM_003105.3,4164-4182).
gatgattgcggcgattatt

SEQ ID NO: 246754 - DNA, 19 bp, Homo sapiens
  siRNA target sequence for SORL1 (NM_003105.3,4172-4190).
cggcgattattctgatgaa

SEQ ID NO: 246755 - DNA, 19 bp, Homo sapiens
  siRNA target sequence for SORL1 (NM_003105.3,4270-4288).
ccaacagatggaaatgtga

SEQ ID NO: 246756 - DNA, 19 bp, Homo sapiens
  siRNA target sequence for SORL1 (NM_003105.3,4372-4390).
ccacgtgtctgcccaatta

SEQ ID NO: 246757 - DNA, 19 bp, Homo sapiens
  siRNA target sequence for SORL1 (NM_003105.3,4375-4393).
cgtgtctgcccaattacta

SEQ ID NO: 246758 - DNA, 19 bp, Homo sapiens
  siRNA target sequence for SORL1 (NM_003105.3,4436-4454).
cgacgggtaccgagattgt

SEQ ID NO: 246759 - DNA, 19 bp, Homo sapiens
  siRNA target sequence for SORL1 (NM_003105.3,4528-4546).
ggcgatgtgaccgatttga

SEQ ID NO: 246760 - DNA, 19 bp, Homo sapiens
  siRNA target sequence for SORL1 (NM_003105.3,4531-4549).
gatgtgaccgatttgagtt

SEQ ID NO: 246761 - DNA, 19 bp, Homo sapiens
  siRNA target sequence for SORL1 (NM_003105.3,4536-4554).
gaccgatttgagttcgaat

SEQ ID NO: 246762 - DNA, 19 bp, Homo sapiens
  siRNA target sequence for SORL1 (NM_003105.3,4559-4577).
ccaaccgaagacgtgtatt

SEQ ID NO: 246763 - DNA, 19 bp, Homo sapiens
  siRNA target sequence for SORL1 (NM_003105.3,4744-4762).
cggacgagagcgatgaaaa

SEQ ID NO: 246764 - DNA, 19 bp, Homo sapiens
  siRNA target sequence for SORL1 (NM_003105.3,4846-4864).
ggatgaggcccaaaaaaat

SEQ ID NO: 246765 - DNA, 19 bp, Homo sapiens
  siRNA target sequence for SORL1 (NM_003105.3,4865-4883).
gccctctgcttcttgtgta

SEQ ID NO: 246766 - DNA, 19 bp, Homo sapiens
  siRNA target sequence for SORL1 (NM_003105.3,4870-4888).
ctgcttcttgtgtatataa

SEQ ID NO: 246767 - DNA, 19 bp, Homo sapiens
  siRNA target sequence for SORL1 (NM_003105.3,4873-4891).
cttcttgtgtatataatgt

SEQ ID NO: 246768 - DNA, 19 bp, Homo sapiens
  siRNA target sequence for SORL1 (NM_003105.3,4905-4923).
gttggagagagcatatgga

SEQ ID NO: 246769 - DNA, 19 bp, Homo sapiens
  siRNA target sequence for SORL1 (NM_003105.3,4934-4952).
gacccacagcaataagaca

SEQ ID NO: 246770 - DNA, 19 bp, Homo sapiens
  siRNA target sequence for SORL1 (NM_003105.3,4940-4958).
cagcaataagacaaacact

SEQ ID NO: 246771 - DNA, 19 bp, Homo sapiens
  siRNA target sequence for SORL1 (NM_003105.3,4985-5003).
cacgtatcaggttaaagta

SEQ ID NO: 246772 - DNA, 19 bp, Homo sapiens
  siRNA target sequence for SORL1 (NM_003105.3,4987-5005).
cgtatcaggttaaagtaca

SEQ ID NO: 246773 - DNA, 19 bp, Homo sapiens
  siRNA target sequence for SORL1 (NM_003105.3,5074-5092).
cagatgcccctcgaaatct

SEQ ID NO: 246774 - DNA, 19 bp, Homo sapiens
  siRNA target sequence for SORL1 (NM_003105.3,5164-5182).
gcctcatccgtgagtacat

SEQ ID NO: 246775 - DNA, 19 bp, Homo sapiens
  siRNA target sequence for SORL1 (NM_003105.3,5165-5183).
cctcatccgtgagtacatt

SEQ ID NO: 246776 - DNA, 19 bp, Homo sapiens
  siRNA target sequence for SORL1 (NM_003105.3,5168-5186).
catccgtgagtacattgta

SEQ ID NO: 246777 - DNA, 19 bp, Homo sapiens
  siRNA target sequence for SORL1 (NM_003105.3,5171-5189).
ccgtgagtacattgtagaa

SEQ ID NO: 246778 - DNA, 19 bp, Homo sapiens
  siRNA target sequence for SORL1 (NM_003105.3,5172-5190).
cgtgagtacattgtagaat

SEQ ID NO: 246779 - DNA, 19 bp, Homo sapiens
  siRNA target sequence for SORL1 (NM_003105.3,5221-5239).
cccagagggctgctagtaa

SEQ ID NO: 246780 - DNA, 19 bp, Homo sapiens
  siRNA target sequence for SORL1 (NM_003105.3,5223-5241).
cagagggctgctagtaact

SEQ ID NO: 246781 - DNA, 19 bp, Homo sapiens
  siRNA target sequence for SORL1 (NM_003105.3,5225-5243).
gagggctgctagtaacttt

SEQ ID NO: 246782 - DNA, 19 bp, Homo sapiens
  siRNA target sequence for SORL1 (NM_003105.3,5228-5246).
ggctgctagtaactttaca

SEQ ID NO: 246783 - DNA, 19 bp, Homo sapiens
  siRNA target sequence for SORL1 (NM_003105.3,5297-5315).
ggtgactagtcgtggaata

SEQ ID NO: 246784 - DNA, 19 bp, Homo sapiens
  siRNA target sequence for SORL1 (NM_003105.3,5300-5318).
gactagtcgtggaatagga

SEQ ID NO: 246785 - DNA, 19 bp, Homo sapiens
  siRNA target sequence for SORL1 (NM_003105.3,5302-5320).
ctagtcgtggaataggaaa

SEQ ID NO: 246786 - DNA, 19 bp, Homo sapiens
  siRNA target sequence for SORL1 (NM_003105.3,5316-5334).
ggaaactggagcgattcta

SEQ ID NO: 246787 - DNA, 19 bp, Homo sapiens
  siRNA target sequence for SORL1 (NM_003105.3,5317-5335).
gaaactggagcgattctaa

SEQ ID NO: 246788 - DNA, 19 bp, Homo sapiens
  siRNA target sequence for SORL1 (NM_003105.3,5390-5408).
cagctatggtgaaaattat

SEQ ID NO: 246789 - DNA, 19 bp, Homo sapiens
  siRNA target sequence for SORL1 (NM_003105.3,5425-5443).
ccatggagagtgatatcaa

SEQ ID NO: 246790 - DNA, 19 bp, Homo sapiens
  siRNA target sequence for SORL1 (NM_003105.3,5451-5469).
ggctatgtggtgaaccttt

SEQ ID NO: 246791 - DNA, 19 bp, Homo sapiens
  siRNA target sequence for SORL1 (NM_003105.3,5452-5470).
gctatgtggtgaacctttt

SEQ ID NO: 246792 - DNA, 19 bp, Homo sapiens
  siRNA target sequence for SORL1 (NM_003105.3,5510-5528).
gaacttccgaggaagcata

SEQ ID NO: 246793 - DNA, 19 bp, Homo sapiens
  siRNA target sequence for SORL1 (NM_003105.3,5516-5534).
ccgaggaagcatattgtca

SEQ ID NO: 246794 - DNA, 19 bp, Homo sapiens
  siRNA target sequence for SORL1 (NM_003105.3,5524-5542).
gcatattgtcacacaaagt

SEQ ID NO: 246795 - DNA, 19 bp, Homo sapiens
  siRNA target sequence for SORL1 (NM_003105.3,5535-5553).
cacaaagttggcaatctga

SEQ ID NO: 246796 - DNA, 19 bp, Homo sapiens
  siRNA target sequence for SORL1 (NM_003105.3,5546-5564).
caatctgacagctcataca

SEQ ID NO: 246797 - DNA, 19 bp, Homo sapiens
  siRNA target sequence for SORL1 (NM_003105.3,5552-5570).
gacagctcatacatcctat

SEQ ID NO: 246798 - DNA, 19 bp, Homo sapiens
  siRNA target sequence for SORL1 (NM_003105.3,5556-5574).
gctcatacatcctatgaga

SEQ ID NO: 246799 - DNA, 19 bp, Homo sapiens
  siRNA target sequence for SORL1 (NM_003105.3,5557-5575).
ctcatacatcctatgagat

SEQ ID NO: 246800 - DNA, 19 bp, Homo sapiens
  siRNA target sequence for SORL1 (NM_003105.3,5559-5577).
catacatcctatgagattt

SEQ ID NO: 246801 - DNA, 19 bp, Homo sapiens
  siRNA target sequence for SORL1 (NM_003105.3,5613-5631).
ctggcatttgagcatgtta

SEQ ID NO: 246802 - DNA, 19 bp, Homo sapiens
  siRNA target sequence for SORL1 (NM_003105.3,5775-5793).
ccgaagagcttgactactt

SEQ ID NO: 246803 - DNA, 19 bp, Homo sapiens
  siRNA target sequence for SORL1 (NM_003105.3,5943-5961).
gttcatacgggcaaaacct

SEQ ID NO: 246804 - DNA, 19 bp, Homo sapiens
  siRNA target sequence for SORL1 (NM_003105.3,6024-6042).
gcagtcaaagatctcataa

SEQ ID NO: 246805 - DNA, 19 bp, Homo sapiens
  siRNA target sequence for SORL1 (NM_003105.3,6118-6136).
gcgggaaataccacatcat

SEQ ID NO: 246806 - DNA, 19 bp, Homo sapiens
  siRNA target sequence for SORL1 (NM_003105.3,6121-6139).
ggaaataccacatcattgt

SEQ ID NO: 246807 - DNA, 19 bp, Homo sapiens
  siRNA target sequence for SORL1 (NM_003105.3,6157-6175).
gcaaagattccagcataaa

SEQ ID NO: 246808 - DNA, 19 bp, Homo sapiens
  siRNA target sequence for SORL1 (NM_003105.3,6158-6176).
caaagattccagcataaaa

SEQ ID NO: 246809 - DNA, 19 bp, Homo sapiens
  siRNA target sequence for SORL1 (NM_003105.3,6196-6214).
cagcacctgatgccttaaa

SEQ ID NO: 246810 - DNA, 19 bp, Homo sapiens
  siRNA target sequence for SORL1 (NM_003105.3,6208-6226).
ccttaaaaatcataacaga

SEQ ID NO: 246811 - DNA, 19 bp, Homo sapiens
  siRNA target sequence for SORL1 (NM_003105.3,6326-6344).
gaatatcacagcttacctt

SEQ ID NO: 246812 - DNA, 19 bp, Homo sapiens
  siRNA target sequence for SORL1 (NM_003105.3,6345-6363).
gggaatactactgacaatt

SEQ ID NO: 246813 - DNA, 19 bp, Homo sapiens
  siRNA target sequence for SORL1 (NM_003105.3,6355-6373).
ctgacaatttctttaaaat

SEQ ID NO: 246814 - DNA, 19 bp, Homo sapiens
  siRNA target sequence for SORL1 (NM_003105.3,6381-6399).
ctgaagatgggtcataatt

SEQ ID NO: 246815 - DNA, 19 bp, Homo sapiens
  siRNA target sequence for SORL1 (NM_003105.3,6661-6679).
ggctggggtccgcaatctt

SEQ ID NO: 246816 - DNA, 19 bp, Homo sapiens
  siRNA target sequence for TIRAP (NM_052887.2,995-1013).
cacctgagctccgattcat

SEQ ID NO: 246817 - DNA, 19 bp, Homo sapiens
  siRNA target sequence for TIRAP (NM_052887.2,997-1015).
cctgagctccgattcatgt

SEQ ID NO: 246818 - DNA, 19 bp, Homo sapiens
  siRNA target sequence for TIRAP (NM_052887.2,998-1016).
ctgagctccgattcatgta

SEQ ID NO: 246819 - DNA, 19 bp, Homo sapiens
  siRNA target sequence for TIRAP (NM_052887.2,1000-1018).
gagctccgattcatgtact

SEQ ID NO: 246820 - DNA, 19 bp, Homo sapiens
  siRNA target sequence for TIRAP (NM_052887.2,1043-1061).
gtggctttcgtcaagtcaa

SEQ ID NO: 246821 - DNA, 19 bp, Homo sapiens
  siRNA target sequence for TIRAP (NM_052887.2,1046-1064).
gctttcgtcaagtcaaaga

SEQ ID NO: 246822 - DNA, 19 bp, Homo sapiens
  siRNA target sequence for TIRAP (NM_052887.2,1047-1065).
ctttcgtcaagtcaaagaa

SEQ ID NO: 246823 - DNA, 19 bp, Homo sapiens
  siRNA target sequence for TIRAP (NM_148910.1,1108-1126).
cgggattcagctacagtat

SEQ ID NO: 246824 - DNA, 19 bp, Homo sapiens
  siRNA target sequence for TLR5 (NM_003268.3,680-698).
catggccggtcctgtgttt

SEQ ID NO: 246825 - DNA, 19 bp, Homo sapiens
  siRNA target sequence for TLR5 (NM_003268.3,684-702).
gccggtcctgtgtttggaa

SEQ ID NO: 246826 - DNA, 19 bp, Homo sapiens
  siRNA target sequence for TLR5 (NM_003268.3,685-703).
ccggtcctgtgtttggaat

SEQ ID NO: 246827 - DNA, 19 bp, Homo sapiens
  siRNA target sequence for TLR5 (NM_003268.3,686-704).
cggtcctgtgtttggaatt

SEQ ID NO: 246828 - DNA, 19 bp, Homo sapiens
  siRNA target sequence for TLR5 (NM_003268.3,725-743).
ccgaatagccttttatcgt

SEQ ID NO: 246829 - DNA, 19 bp, Homo sapiens
  siRNA target sequence for TLR5 (NM_003268.3,726-744).
cgaatagccttttatcgtt

SEQ ID NO: 246830 - DNA, 19 bp, Homo sapiens
  siRNA target sequence for TLR5 (NM_003268.3,795-813).
ctgctgagcttcaactata

SEQ ID NO: 246831 - DNA, 19 bp, Homo sapiens
  siRNA target sequence for TLR5 (NM_003268.3,798-816).
ctgagcttcaactatatca

SEQ ID NO: 246832 - DNA, 19 bp, Homo sapiens
  siRNA target sequence for TLR5 (NM_003268.3,867-885).
gagctcgggagccagtata

SEQ ID NO: 246833 - DNA, 19 bp, Homo sapiens
  siRNA target sequence for TLR5 (NM_003268.3,879-897).
cagtatacccccttgacta

SEQ ID NO: 246834 - DNA, 19 bp, Homo sapiens
  siRNA target sequence for TLR5 (NM_003268.3,881-899).
gtatacccccttgactatt

SEQ ID NO: 246835 - DNA, 19 bp, Homo sapiens
  siRNA target sequence for TLR5 (NM_003268.3,886-904).
cccccttgactattgacaa

SEQ ID NO: 246836 - DNA, 19 bp, Homo sapiens
  siRNA target sequence for TLR5 (NM_003268.3,942-960).
gacctgggaagtagtaaga

SEQ ID NO: 246837 - DNA, 19 bp, Homo sapiens
  siRNA target sequence for TLR5 (NM_003268.3,968-986).
cttgcatccagatgctttt

SEQ ID NO: 246838 - DNA, 19 bp, Homo sapiens
  siRNA target sequence for TLR5 (NM_003268.3,1004-1022).
gtttgaacttagactgtat

SEQ ID NO: 246839 - DNA, 19 bp, Homo sapiens
  siRNA target sequence for TLR5 (NM_003268.3,1032-1050).
ctctctgatgctgtattga

SEQ ID NO: 246840 - DNA, 19 bp, Homo sapiens
  siRNA target sequence for TLR5 (NM_003268.3,1084-1102).
ctcgcttggatctatccaa

SEQ ID NO: 246841 - DNA, 19 bp, Homo sapiens
  siRNA target sequence for TLR5 (NM_003268.3,1086-1104).
cgcttggatctatccaaaa

SEQ ID NO: 246842 - DNA, 19 bp, Homo sapiens
  siRNA target sequence for TLR5 (NM_003268.3,1088-1106).
cttggatctatccaaaaat

SEQ ID NO: 246843 - DNA, 19 bp, Homo sapiens
  siRNA target sequence for TLR5 (NM_003268.3,1109-1127).
gattcgtagcctttacctt

SEQ ID NO: 246844 - DNA, 19 bp, Homo sapiens
  siRNA target sequence for TLR5 (NM_003268.3,1132-1150).
cttcatttgggaagttgaa

SEQ ID NO: 246845 - DNA, 19 bp, Homo sapiens
  siRNA target sequence for TLR5 (NM_003268.3,1246-1264).
gcctcgcagctaatagctt

SEQ ID NO: 246846 - DNA, 19 bp, Homo sapiens
  siRNA target sequence for TLR5 (NM_003268.3,1250-1268).
cgcagctaatagcttgtat

SEQ ID NO: 246847 - DNA, 19 bp, Homo sapiens
  siRNA target sequence for TLR5 (NM_003268.3,1251-1269).
gcagctaatagcttgtata

SEQ ID NO: 246848 - DNA, 19 bp, Homo sapiens
  siRNA target sequence for TLR5 (NM_003268.3,1399-1417).
gccaggccttctctttgat

SEQ ID NO: 246849 - DNA, 19 bp, Homo sapiens
  siRNA target sequence for TLR5 (NM_003268.3,1441-1459).
ccgggtttggcttccataa

SEQ ID NO: 246850 - DNA, 19 bp, Homo sapiens
  siRNA target sequence for TLR5 (NM_003268.3,1547-1565).
cctgaactcacgagtcttt

SEQ ID NO: 246851 - DNA, 19 bp, Homo sapiens
  siRNA target sequence for TLR5 (NM_003268.3,1633-1651).
cattttacggacttgacaa

SEQ ID NO: 246852 - DNA, 19 bp, Homo sapiens
  siRNA target sequence for TLR5 (NM_003268.3,1653-1671).
ctccaagttctcaatttgt

SEQ ID NO: 246853 - DNA, 19 bp, Homo sapiens
  siRNA target sequence for TLR5 (NM_003268.3,1655-1673).
ccaagttctcaatttgtca

SEQ ID NO: 246854 - DNA, 19 bp, Homo sapiens
  siRNA target sequence for TLR5 (NM_003268.3,1688-1706).
ggaactttacagttcgaat

SEQ ID NO: 246855 - DNA, 19 bp, Homo sapiens
  siRNA target sequence for TLR5 (NM_003268.3,1709-1727).
ctatggactacctaaggta

SEQ ID NO: 246856 - DNA, 19 bp, Homo sapiens
  siRNA target sequence for TLR5 (NM_003268.3,1720-1738).
ctaaggtagcctacattga

SEQ ID NO: 246857 - DNA, 19 bp, Homo sapiens
  siRNA target sequence for TLR5 (NM_003268.3,1805-1823).
cttggatctccgagacaat

SEQ ID NO: 246858 - DNA, 19 bp, Homo sapiens
  siRNA target sequence for TLR5 (NM_003268.3,1814-1832).
ccgagacaatgctcttaca

SEQ ID NO: 246859 - DNA, 19 bp, Homo sapiens
  siRNA target sequence for TLR5 (NM_003268.3,1815-1833).
cgagacaatgctcttacaa

SEQ ID NO: 246860 - DNA, 19 bp, Homo sapiens
  siRNA target sequence for TLR5 (NM_003268.3,1820-1838).
caatgctcttacaaccatt

SEQ ID NO: 246861 - DNA, 19 bp, Homo sapiens
  siRNA target sequence for TLR5 (NM_003268.3,1824-1842).
gctcttacaaccattcatt

SEQ ID NO: 246862 - DNA, 19 bp, Homo sapiens
  siRNA target sequence for TLR5 (NM_003268.3,1848-1866).
ccaagcatacccgatatct

SEQ ID NO: 246863 - DNA, 19 bp, Homo sapiens
  siRNA target sequence for TLR5 (NM_003268.3,1849-1867).
caagcatacccgatatctt

SEQ ID NO: 246864 - DNA, 19 bp, Homo sapiens
  siRNA target sequence for TLR5 (NM_003268.3,1852-1870).
gcatacccgatatcttctt

SEQ ID NO: 246865 - DNA, 19 bp, Homo sapiens
  siRNA target sequence for TLR5 (NM_003268.3,1914-1932).
gcgaacctcatccacttat

SEQ ID NO: 246866 - DNA, 19 bp, Homo sapiens
  siRNA target sequence for TLR5 (NM_003268.3,1916-1934).
gaacctcatccacttatca

SEQ ID NO: 246867 - DNA, 19 bp, Homo sapiens
  siRNA target sequence for TLR5 (NM_003268.3,1940-1958).
caggctagaaaatctagat

SEQ ID NO: 246868 - DNA, 19 bp, Homo sapiens
  siRNA target sequence for TLR5 (NM_003268.3,2024-2042).
ctcctgtagtggagatcaa

SEQ ID NO: 246869 - DNA, 19 bp, Homo sapiens
  siRNA target sequence for TLR5 (NM_003268.3,2190-2208).
cttccaccaggagtattta

SEQ ID NO: 246870 - DNA, 19 bp, Homo sapiens
  siRNA target sequence for TLR5 (NM_003268.3,2315-2333).
ccagctcctagctcctaat

SEQ ID NO: 246871 - DNA, 19 bp, Homo sapiens
  siRNA target sequence for TLR5 (NM_003268.3,2352-2370).
cttagtgtcttggatataa

SEQ ID NO: 246872 - DNA, 19 bp, Homo sapiens
  siRNA target sequence for TLR5 (NM_003268.3,2356-2374).
gtgtcttggatataactca

SEQ ID NO: 246873 - DNA, 19 bp, Homo sapiens
  siRNA target sequence for TLR5 (NM_003268.3,2358-2376).
gtcttggatataactcata

SEQ ID NO: 246874 - DNA, 19 bp, Homo sapiens
  siRNA target sequence for TLR5 (NM_003268.3,2400-2418).
cttagcacttttatcaatt

SEQ ID NO: 246875 - DNA, 19 bp, Homo sapiens
  siRNA target sequence for TLR5 (NM_003268.3,2421-2439).
cttaatcacaccaatgtca

SEQ ID NO: 246876 - DNA, 19 bp, Homo sapiens
  siRNA target sequence for TLR5 (NM_003268.3,2429-2447).
caccaatgtcactatagct

SEQ ID NO: 246877 - DNA, 19 bp, Homo sapiens
  siRNA target sequence for TLR5 (NM_003268.3,2541-2559).
gtcttaaagtccctaaagt

SEQ ID NO: 246878 - DNA, 19 bp, Homo sapiens
  siRNA target sequence for TLR5 (NM_003268.3,2558-2576).
gttctcccttttcattgta

SEQ ID NO: 246879 - DNA, 19 bp, Homo sapiens
  siRNA target sequence for TLR5 (NM_003268.3,2698-2716).
cagaacctgatatgtacaa

SEQ ID NO: 246880 - DNA, 19 bp, Homo sapiens
  siRNA target sequence for TLR5 (NM_003268.3,2700-2718).
gaacctgatatgtacaaat

SEQ ID NO: 246881 - DNA, 19 bp, Homo sapiens
  siRNA target sequence for TLR5 (NM_003268.3,2783-2801).
cctggacactcaatacagt

SEQ ID NO: 246882 - DNA, 19 bp, Homo sapiens
  siRNA target sequence for TLR5 (NM_003268.3,2791-2809).
ctcaatacagtgaccaaaa

SEQ ID NO: 246883 - DNA, 19 bp, Homo sapiens
  siRNA target sequence for TLR5 (NM_003268.3,2893-2911).
gtagaaagatcgtttgtct

SEQ ID NO: 246884 - DNA, 19 bp, Homo sapiens
  siRNA target sequence for TLR5 (NM_003268.3,2913-2931).
gtgagcagacacttcctta

SEQ ID NO: 246885 - DNA, 19 bp, Homo sapiens
  siRNA target sequence for TLR5 (NM_003268.3,2944-2962).
gccttgaagccttcagtta

SEQ ID NO: 246886 - DNA, 19 bp, Homo sapiens
  siRNA target sequence for TLR5 (NM_003268.3,3032-3050).
gtaccagttgatgaaacat

SEQ ID NO: 246887 - DNA, 19 bp, Homo sapiens
  siRNA target sequence for TLR5 (NM_003268.3,3055-3073).
ccatcagaggctttgtaca

SEQ ID NO: 246888 - DNA, 19 bp, Homo sapiens
  siRNA target sequence for TLR5 (NM_003268.3,3185-3203).
cattccgttgcaaactgta

SEQ ID NO: 246889 - DNA, 19 bp, Homo sapiens
  siRNA target sequence for TLR7 (NM_016562.2,211-229).
ggggctagatggtttccta

SEQ ID NO: 246890 - DNA, 19 bp, Homo sapiens
  siRNA target sequence for TLR7 (NM_016562.2,403-421).
catctggtagagatcgatt

SEQ ID NO: 246891 - DNA, 19 bp, Homo sapiens
  siRNA target sequence for TLR7 (NM_016562.2,406-424).
ctggtagagatcgatttca

SEQ ID NO: 246892 - DNA, 19 bp, Homo sapiens
  siRNA target sequence for TLR7 (NM_016562.2,408-426).
ggtagagatcgatttcaga

SEQ ID NO: 246893 - DNA, 19 bp, Homo sapiens
  siRNA target sequence for TLR7 (NM_016562.2,409-427).
gtagagatcgatttcagat

SEQ ID NO: 246894 - DNA, 19 bp, Homo sapiens
  siRNA target sequence for TLR7 (NM_016562.2,429-447).
caactgtgtacctattcca

SEQ ID NO: 246895 - DNA, 19 bp, Homo sapiens
  siRNA target sequence for TLR7 (NM_016562.2,451-469).
gggtcaaaaaacaacatgt

SEQ ID NO: 246896 - DNA, 19 bp, Homo sapiens
  siRNA target sequence for TLR7 (NM_016562.2,500-518).
gctttagtggactcactta

SEQ ID NO: 246897 - DNA, 19 bp, Homo sapiens
  siRNA target sequence for TLR7 (NM_016562.2,542-560).
gaaaccagctactagagat

SEQ ID NO: 246898 - DNA, 19 bp, Homo sapiens
  siRNA target sequence for TLR7 (NM_016562.2,596-614).
gccttgaggccaacaacat

SEQ ID NO: 246899 - DNA, 19 bp, Homo sapiens
  siRNA target sequence for TLR7 (NM_016562.2,666-684).
ctacctgggccaaaactgt

SEQ ID NO: 246900 - DNA, 19 bp, Homo sapiens
  siRNA target sequence for TLR7 (NM_016562.2,669-687).
cctgggccaaaactgttat

SEQ ID NO: 246901 - DNA, 19 bp, Homo sapiens
  siRNA target sequence for TLR7 (NM_016562.2,672-690).
gggccaaaactgttattat

SEQ ID NO: 246902 - DNA, 19 bp, Homo sapiens
  siRNA target sequence for TLR7 (NM_016562.2,675-693).
ccaaaactgttattatcga

SEQ ID NO: 246903 - DNA, 19 bp, Homo sapiens
  siRNA target sequence for TLR7 (NM_016562.2,681-699).
ctgttattatcgaaatcct

SEQ ID NO: 246904 - DNA, 19 bp, Homo sapiens
  siRNA target sequence for TLR7 (NM_016562.2,701-719).
gttatgtttcatattcaat

SEQ ID NO: 246905 - DNA, 19 bp, Homo sapiens
  siRNA target sequence for TLR7 (NM_016562.2,785-803).
cagccgtccctactgtttt

SEQ ID NO: 246906 - DNA, 19 bp, Homo sapiens
  siRNA target sequence for TLR7 (NM_016562.2,809-827).
ctactttaacagaactata

SEQ ID NO: 246907 - DNA, 19 bp, Homo sapiens
  siRNA target sequence for TLR7 (NM_016562.2,940-958).
ccttgtgcgccgtgtaaaa

SEQ ID NO: 246908 - DNA, 19 bp, Homo sapiens
  siRNA target sequence for TLR7 (NM_016562.2,941-959).
cttgtgcgccgtgtaaaaa

SEQ ID NO: 246909 - DNA, 19 bp, Homo sapiens
  siRNA target sequence for TLR7 (NM_016562.2,944-962).
gtgcgccgtgtaaaaataa

SEQ ID NO: 246910 - DNA, 19 bp, Homo sapiens
  siRNA target sequence for TLR7 (NM_016562.2,946-964).
gcgccgtgtaaaaataatt

SEQ ID NO: 246911 - DNA, 19 bp, Homo sapiens
  siRNA target sequence for TLR7 (NM_016562.2,948-966).
gccgtgtaaaaataattct

SEQ ID NO: 246912 - DNA, 19 bp, Homo sapiens
  siRNA target sequence for TLR7 (NM_016562.2,968-986).
ccctacagatccctgtaaa

SEQ ID NO: 246913 - DNA, 19 bp, Homo sapiens
  siRNA target sequence for TLR7 (NM_016562.2,994-1012).
gatgcgctgacagaattaa

SEQ ID NO: 246914 - DNA, 19 bp, Homo sapiens
  siRNA target sequence for TLR7 (NM_016562.2,998-1016).
cgctgacagaattaaaagt

SEQ ID NO: 246915 - DNA, 19 bp, Homo sapiens
  siRNA target sequence for TLR7 (NM_016562.2,1048-1066).
gtgcccccaagatggttta

SEQ ID NO: 246916 - DNA, 19 bp, Homo sapiens
  siRNA target sequence for TLR7 (NM_016562.2,1051-1069).
cccccaagatggtttaaga

SEQ ID NO: 246917 - DNA, 19 bp, Homo sapiens
  siRNA target sequence for TLR7 (NM_016562.2,1052-1070).
ccccaagatggtttaagaa

SEQ ID NO: 246918 - DNA, 19 bp, Homo sapiens
  siRNA target sequence for TLR7 (NM_016562.2,1055-1073).
caagatggtttaagaacat

SEQ ID NO: 246919 - DNA, 19 bp, Homo sapiens
  siRNA target sequence for TLR7 (NM_016562.2,1090-1108).
ctggatctgtcccaaaact

SEQ ID NO: 246920 - DNA, 19 bp, Homo sapiens
  siRNA target sequence for TLR7 (NM_016562.2,1120-1138).
gaaattggggatgctaaat

SEQ ID NO: 246921 - DNA, 19 bp, Homo sapiens
  siRNA target sequence for TLR7 (NM_016562.2,1198-1216).
gtctatcgtgcatctatga

SEQ ID NO: 246922 - DNA, 19 bp, Homo sapiens
  siRNA target sequence for TLR7 (NM_016562.2,1200-1218).
ctatcgtgcatctatgaat

SEQ ID NO: 246923 - DNA, 19 bp, Homo sapiens
  siRNA target sequence for TLR7 (NM_016562.2,1208-1226).
catctatgaatctatcaca

SEQ ID NO: 246924 - DNA, 19 bp, Homo sapiens
  siRNA target sequence for TLR7 (NM_016562.2,1262-1280).
ggatcagaggatatgtctt

SEQ ID NO: 246925 - DNA, 19 bp, Homo sapiens
  siRNA target sequence for TLR7 (NM_016562.2,1270-1288).
ggatatgtctttaaagagt

SEQ ID NO: 246926 - DNA, 19 bp, Homo sapiens
  siRNA target sequence for TLR7 (NM_016562.2,1271-1289).
gatatgtctttaaagagtt

SEQ ID NO: 246927 - DNA, 19 bp, Homo sapiens
  siRNA target sequence for TLR7 (NM_016562.2,1302-1320).
cctctcgccattacataat

SEQ ID NO: 246928 - DNA, 19 bp, Homo sapiens
  siRNA target sequence for TLR7 (NM_016562.2,1305-1323).
ctcgccattacataatctt

SEQ ID NO: 246929 - DNA, 19 bp, Homo sapiens
  siRNA target sequence for TLR7 (NM_016562.2,1339-1357).
cttgatcttggcactaact

SEQ ID NO: 246930 - DNA, 19 bp, Homo sapiens
  siRNA target sequence for TLR7 (NM_016562.2,1345-1363).
cttggcactaactttataa

SEQ ID NO: 246931 - DNA, 19 bp, Homo sapiens
  siRNA target sequence for TLR7 (NM_016562.2,1348-1366).
ggcactaactttataaaaa

SEQ ID NO: 246932 - DNA, 19 bp, Homo sapiens
  siRNA target sequence for TLR7 (NM_016562.2,1374-1392).
cctcagcatgtttaaacaa

SEQ ID NO: 246933 - DNA, 19 bp, Homo sapiens
  siRNA target sequence for TLR7 (NM_016562.2,1375-1393).
ctcagcatgtttaaacaat

SEQ ID NO: 246934 - DNA, 19 bp, Homo sapiens
  siRNA target sequence for TLR7 (NM_016562.2,1377-1395).
cagcatgtttaaacaattt

SEQ ID NO: 246935 - DNA, 19 bp, Homo sapiens
  siRNA target sequence for TLR7 (NM_016562.2,1400-1418).
gactgaaagtcatagatct

SEQ ID NO: 246936 - DNA, 19 bp, Homo sapiens
  siRNA target sequence for TLR7 (NM_016562.2,1479-1497).
cagaacttctgtagaaagt

SEQ ID NO: 246937 - DNA, 19 bp, Homo sapiens
  siRNA target sequence for TLR7 (NM_016562.2,1484-1502).
cttctgtagaaagttatga

SEQ ID NO: 246938 - DNA, 19 bp, Homo sapiens
  siRNA target sequence for TLR7 (NM_016562.2,1550-1568).
caaggagttgcagattcaa

SEQ ID NO: 246939 - DNA, 19 bp, Homo sapiens
  siRNA target sequence for TLR7 (NM_016562.2,1620-1638).
gcagaccttggatctaagt

SEQ ID NO: 246940 - DNA, 19 bp, Homo sapiens
  siRNA target sequence for TLR7 (NM_016562.2,1623-1641).
gaccttggatctaagtaaa

SEQ ID NO: 246941 - DNA, 19 bp, Homo sapiens
  siRNA target sequence for TLR7 (NM_016562.2,1625-1643).
ccttggatctaagtaaaaa

SEQ ID NO: 246942 - DNA, 19 bp, Homo sapiens
  siRNA target sequence for TLR7 (NM_016562.2,1717-1735).
ctcattagccaaactctta

SEQ ID NO: 246943 - DNA, 19 bp, Homo sapiens
  siRNA target sequence for TLR7 (NM_016562.2,1730-1748).
ctcttaatggcagtgaatt

SEQ ID NO: 246944 - DNA, 19 bp, Homo sapiens
  siRNA target sequence for TLR7 (NM_016562.2,1739-1757).
gcagtgaattccaaccttt

SEQ ID NO: 246945 - DNA, 19 bp, Homo sapiens
  siRNA target sequence for TLR7 (NM_016562.2,1740-1758).
cagtgaattccaaccttta

SEQ ID NO: 246946 - DNA, 19 bp, Homo sapiens
  siRNA target sequence for TLR7 (NM_016562.2,1760-1778).
cagagctgagatatttgga

SEQ ID NO: 246947 - DNA, 19 bp, Homo sapiens
  siRNA target sequence for TLR7 (NM_016562.2,1785-1803).
caacaaccggcttgattta

SEQ ID NO: 246948 - DNA, 19 bp, Homo sapiens
  siRNA target sequence for TLR7 (NM_016562.2,1840-1858).
gaagttctggatataagca

SEQ ID NO: 246949 - DNA, 19 bp, Homo sapiens
  siRNA target sequence for TLR7 (NM_016562.2,1846-1864).
ctggatataagcagtaata

SEQ ID NO: 246950 - DNA, 19 bp, Homo sapiens
  siRNA target sequence for TLR7 (NM_016562.2,1856-1874).
gcagtaatagccattattt

SEQ ID NO: 246951 - DNA, 19 bp, Homo sapiens
  siRNA target sequence for TLR7 (NM_016562.2,1859-1877).
gtaatagccattattttca

SEQ ID NO: 246952 - DNA, 19 bp, Homo sapiens
  siRNA target sequence for TLR7 (NM_016562.2,1894-1912).
catatgctaaactttacca

SEQ ID NO: 246953 - DNA, 19 bp, Homo sapiens
  siRNA target sequence for TLR7 (NM_016562.2,1986-2004).
gagtgagtctcttagaact

SEQ ID NO: 246954 - DNA, 19 bp, Homo sapiens
  siRNA target sequence for TLR7 (NM_016562.2,2094-2112).
ggaattagacatctctaaa

SEQ ID NO: 246955 - DNA, 19 bp, Homo sapiens
  siRNA target sequence for TLR7 (NM_016562.2,2149-2167).
ggtatgcctccaaatctaa

SEQ ID NO: 246956 - DNA, 19 bp, Homo sapiens
  siRNA target sequence for TLR7 (NM_016562.2,2182-2200).
gccaaaaatgggctcaaat

SEQ ID NO: 246957 - DNA, 19 bp, Homo sapiens
  siRNA target sequence for TLR7 (NM_016562.2,2271-2289).
cactgtccctgagagatta

SEQ ID NO: 246958 - DNA, 19 bp, Homo sapiens
  siRNA target sequence for TLR7 (NM_016562.2,2306-2324).
gcctcaagaatctgattct

SEQ ID NO: 246959 - DNA, 19 bp, Homo sapiens
  siRNA target sequence for TLR7 (NM_016562.2,2340-2358).
caggagtctgacgaagtat

SEQ ID NO: 246960 - DNA, 19 bp, Homo sapiens
  siRNA target sequence for TLR7 (NM_016562.2,2342-2360).
ggagtctgacgaagtattt

SEQ ID NO: 246961 - DNA, 19 bp, Homo sapiens
  siRNA target sequence for TLR7 (NM_016562.2,2343-2361).
gagtctgacgaagtatttt

SEQ ID NO: 246962 - DNA, 19 bp, Homo sapiens
  siRNA target sequence for TLR7 (NM_016562.2,2345-2363).
gtctgacgaagtattttct

SEQ ID NO: 246963 - DNA, 19 bp, Homo sapiens
  siRNA target sequence for TLR7 (NM_016562.2,2349-2367).
gacgaagtattttctacaa

SEQ ID NO: 246964 - DNA, 19 bp, Homo sapiens
  siRNA target sequence for TLR7 (NM_016562.2,2391-2409).
ggatctcagctcaaataaa

SEQ ID NO: 246965 - DNA, 19 bp, Homo sapiens
  siRNA target sequence for TLR7 (NM_016562.2,2476-2494).
catcataatcggtttctgt

SEQ ID NO: 246966 - DNA, 19 bp, Homo sapiens
  siRNA target sequence for TLR7 (NM_016562.2,2518-2536).
gtctggtgggttaaccata

SEQ ID NO: 246967 - DNA, 19 bp, Homo sapiens
  siRNA target sequence for TLR7 (NM_016562.2,2532-2550).
ccatacggaggtgactatt

SEQ ID NO: 246968 - DNA, 19 bp, Homo sapiens
  siRNA target sequence for TLR7 (NM_016562.2,2537-2555).
cggaggtgactattcctta

SEQ ID NO: 246969 - DNA, 19 bp, Homo sapiens
  siRNA target sequence for TLR7 (NM_016562.2,2625-2643).
gtacacctgtgagttagat

SEQ ID NO: 246970 - DNA, 19 bp, Homo sapiens
  siRNA target sequence for TLR7 (NM_016562.2,2633-2651).
gtgagttagatctgactaa

SEQ ID NO: 246971 - DNA, 19 bp, Homo sapiens
  siRNA target sequence for TLR7 (NM_016562.2,2710-2728).
gcaagtcacctctatttct

SEQ ID NO: 246972 - DNA, 19 bp, Homo sapiens
  siRNA target sequence for TLR7 (NM_016562.2,2734-2752).
gtgtggtatatttaccatt

SEQ ID NO: 246973 - DNA, 19 bp, Homo sapiens
  siRNA target sequence for TLR7 (NM_016562.2,2772-2790).
ggggtatcagcgtctaata

SEQ ID NO: 246974 - DNA, 19 bp, Homo sapiens
  siRNA target sequence for TLR7 (NM_016562.2,2773-2791).
gggtatcagcgtctaatat

SEQ ID NO: 246975 - DNA, 19 bp, Homo sapiens
  siRNA target sequence for TLR7 (NM_016562.2,2775-2793).
gtatcagcgtctaatatca

SEQ ID NO: 246976 - DNA, 19 bp, Homo sapiens
  siRNA target sequence for TLR7 (NM_016562.2,2970-2988).
gagcatacagcttagcaaa

SEQ ID NO: 246977 - DNA, 19 bp, Homo sapiens
  siRNA target sequence for TLR7 (NM_016562.2,3085-3103).
gatgtgattatcttgatat

SEQ ID NO: 246978 - DNA, 19 bp, Homo sapiens
  siRNA target sequence for TLR7 (NM_016562.2,3191-3209).
cgcaagctcacccatactt

SEQ ID NO: 246979 - DNA, 19 bp, Homo sapiens
  siRNA target sequence for TLR7 (NM_016562.2,3243-3261).
caatcatgtggcctatagt

SEQ ID NO: 246980 - DNA, 19 bp, Homo sapiens
  siRNA target sequence for TLR9 (NM_017442.2,812-830).
gcaccccgtggcaatgtca

SEQ ID NO: 246981 - DNA, 19 bp, Homo sapiens
  siRNA target sequence for TLR9 (NM_017442.2,1137-1155).
ccctgcgcttcctattcat

SEQ ID NO: 246982 - DNA, 19 bp, Homo sapiens
  siRNA target sequence for TLR9 (NM_017442.2,1157-1175).
gacggcaactgttattaca

SEQ ID NO: 246983 - DNA, 19 bp, Homo sapiens
  siRNA target sequence for TLR9 (NM_017442.2,1160-1178).
ggcaactgttattacaaga

SEQ ID NO: 246984 - DNA, 19 bp, Homo sapiens
  siRNA target sequence for TLR9 (NM_017442.2,1239-1257).
cccacctgtcactcaagta

SEQ ID NO: 246985 - DNA, 19 bp, Homo sapiens
  siRNA target sequence for TLR9 (NM_017442.2,1241-1259).
cacctgtcactcaagtaca

SEQ ID NO: 246986 - DNA, 19 bp, Homo sapiens
  siRNA target sequence for TLR9 (NM_017442.2,1379-1397).
ctcgatgtgggcggaaatt

SEQ ID NO: 246987 - DNA, 19 bp, Homo sapiens
  siRNA target sequence for TLR9 (NM_017442.2,1477-1495).
ccacctgagccgtcttgaa

SEQ ID NO: 246988 - DNA, 19 bp, Homo sapiens
  siRNA target sequence for TLR9 (NM_017442.2,1635-1653).
cacagctgcgcaagcttaa

SEQ ID NO: 246989 - DNA, 19 bp, Homo sapiens
  siRNA target sequence for TLR9 (NM_017442.2,1654-1672).
cctgtccttcaattaccaa

SEQ ID NO: 246990 - DNA, 19 bp, Homo sapiens
  siRNA target sequence for TLR9 (NM_017442.2,1655-1673).
ctgtccttcaattaccaaa

SEQ ID NO: 246991 - DNA, 19 bp, Homo sapiens
  siRNA target sequence for TLR9 (NM_017442.2,1742-1760).
gacatgcacggcatcttct

SEQ ID NO: 246992 - DNA, 19 bp, Homo sapiens
  siRNA target sequence for TLR9 (NM_017442.2,2092-2110).
cgtgcagccggagatgttt

SEQ ID NO: 246993 - DNA, 19 bp, Homo sapiens
  siRNA target sequence for TLR9 (NM_017442.2,2155-2173).
catctcgcaggcagtcaat

SEQ ID NO: 246994 - DNA, 19 bp, Homo sapiens
  siRNA target sequence for TLR9 (NM_017442.2,2605-2623).
gctgcgtctccgtgacaat

SEQ ID NO: 246995 - DNA, 19 bp, Homo sapiens
  siRNA target sequence for TLR9 (NM_017442.2,2606-2624).
ctgcgtctccgtgacaatt

SEQ ID NO: 246996 - DNA, 19 bp, Homo sapiens
  siRNA target sequence for TLR9 (NM_017442.2,2610-2628).
gtctccgtgacaattacct

SEQ ID NO: 246997 - DNA, 19 bp, Homo sapiens
  siRNA target sequence for TLR9 (NM_017442.2,2813-2831).
ctgcgagagctcaacctta

SEQ ID NO: 246998 - DNA, 19 bp, Homo sapiens
  siRNA target sequence for TLR9 (NM_017442.2,2878-2896).
ggcgagtgccctgcaaata

SEQ ID NO: 246999 - DNA, 19 bp, Homo sapiens
  siRNA target sequence for TLR9 (NM_017442.2,2880-2898).
cgagtgccctgcaaatact

SEQ ID NO: 247000 - DNA, 19 bp, Homo sapiens
  siRNA target sequence for TLR9 (NM_017442.2,2886-2904).
ccctgcaaatactagatgt

SEQ ID NO: 247001 - DNA, 19 bp, Homo sapiens
  siRNA target sequence for TLR9 (NM_017442.2,2887-2905).
cctgcaaatactagatgta

SEQ ID NO: 247002 - DNA, 19 bp, Homo sapiens
  siRNA target sequence for TLR9 (NM_017442.2,2888-2906).
ctgcaaatactagatgtaa

SEQ ID NO: 247003 - DNA, 19 bp, Homo sapiens
  siRNA target sequence for TLR9 (NM_017442.2,3380-3398).
ggcaaaaccctctttgaga

SEQ ID NO: 247004 - DNA, 19 bp, Homo sapiens
  siRNA target sequence for TLR9 (NM_017442.2,3423-3441).
gccgcaagacgctgtttgt

SEQ ID NO: 247005 - DNA, 19 bp, Homo sapiens
  siRNA target sequence for TNFRSF10C (NM_003841.2,258-276).
gccagtcctagcttactct

SEQ ID NO: 247006 - DNA, 19 bp, Homo sapiens
  siRNA target sequence for TNFRSF10C (NM_003841.2,429-447).
caacgcttccaacaatgaa

SEQ ID NO: 247007 - DNA, 19 bp, Homo sapiens
  siRNA target sequence for TNFRSF10C (NM_003841.2,541-559).
ggcaccttccggaatgaaa

SEQ ID NO: 247008 - DNA, 19 bp, Homo sapiens
  siRNA target sequence for TNFRSF10C (NM_003841.2,602-620).
gggaagtccaagtcagtaa

SEQ ID NO: 247009 - DNA, 19 bp, Homo sapiens
  siRNA target sequence for TNFRSF10C (NM_003841.2,623-641).
gtacgtcctgggatgatat

SEQ ID NO: 247010 - DNA, 19 bp, Homo sapiens
  siRNA target sequence for TNFRSF10C (NM_003841.2,626-644).
cgtcctgggatgatatcca

SEQ ID NO: 247011 - DNA, 19 bp, Homo sapiens
  siRNA target sequence for TNFRSF10C (NM_003841.2,930-948).
caccatcgtagggatcata

SEQ ID NO: 247012 - DNA, 19 bp, Homo sapiens
  siRNA target sequence for TNFRSF10C (NM_003841.2,933-951).
catcgtagggatcatagtt

SEQ ID NO: 247013 - DNA, 19 bp, Homo sapiens
  siRNA target sequence for TNFRSF10C (NM_003841.2,936-954).
cgtagggatcatagttcta

SEQ ID NO: 247014 - DNA, 19 bp, Homo sapiens
  siRNA target sequence for TNFRSF10C (NM_003841.2,937-955).
gtagggatcatagttctaa

SEQ ID NO: 247015 - DNA, 19 bp, Homo sapiens
  siRNA target sequence for TNFRSF5 (NM_001250.3,262-280).
gcggtgaaagcgaattcct

SEQ ID NO: 247016 - DNA, 19 bp, Homo sapiens
  siRNA target sequence for TNFRSF5 (NM_001250.3,263-281).
cggtgaaagcgaattccta

SEQ ID NO: 247017 - DNA, 19 bp, Homo sapiens
  siRNA target sequence for TNFRSF5 (NM_001250.3,465-483).
ggggtcaagcagattgcta

SEQ ID NO: 247018 - DNA, 19 bp, Homo sapiens
  siRNA target sequence for TNFRSF5 (NM_001250.3,537-555).
gtgtcatctgctttcgaaa

SEQ ID NO: 247019 - DNA, 19 bp, Homo sapiens
  siRNA target sequence for TNFRSF5 (NM_001250.3,539-557).
gtcatctgctttcgaaaaa

SEQ ID NO: 247020 - DNA, 19 bp, Homo sapiens
  siRNA target sequence for TNFRSF5 (NM_001250.3,544-562).
ctgctttcgaaaaatgtca

SEQ ID NO: 247021 - DNA, 19 bp, Homo sapiens
  siRNA target sequence for TNFRSF5 (NM_001250.3,600-618).
caacaggcaggcacaaaca

SEQ ID NO: 247022 - DNA, 19 bp, Homo sapiens
  siRNA target sequence for TNFRSF5 (NM_001250.3,613-631).
caaacaagactgatgttgt

SEQ ID NO: 247023 - DNA, 19 bp, Homo sapiens
  siRNA target sequence for TNFRSF5 (NM_001250.3,702-720).
ctcttggtgctggtcttta

SEQ ID NO: 247024 - DNA, 19 bp, Homo sapiens
  siRNA target sequence for TNFRSF5 (NM_001250.3,707-725).
ggtgctggtctttatcaaa

SEQ ID NO: 247025 - DNA, 19 bp, Homo sapiens
  siRNA target sequence for TNFRSF6 (NM_000043.3,392-410).
gctagattatcgtccaaaa

SEQ ID NO: 247026 - DNA, 19 bp, Homo sapiens
  siRNA target sequence for TNFRSF6 (NM_000043.3,396-414).
gattatcgtccaaaagtgt

SEQ ID NO: 247027 - DNA, 19 bp, Homo sapiens
  siRNA target sequence for TNFRSF6 (NM_000043.3,452-470).
gaattgaggaagactgtta

SEQ ID NO: 247028 - DNA, 19 bp, Homo sapiens
  siRNA target sequence for TNFRSF6 (NM_000043.3,503-521).
catcatgatggccaattct

SEQ ID NO: 247029 - DNA, 19 bp, Homo sapiens
  siRNA target sequence for TNFRSF6 (NM_000043.3,643-661).
caaatgcagaagatgtaga

SEQ ID NO: 247030 - DNA, 19 bp, Homo sapiens
  siRNA target sequence for TNFRSF6 (NM_000043.3,649-667).
cagaagatgtagattgtgt

SEQ ID NO: 247031 - DNA, 19 bp, Homo sapiens
  siRNA target sequence for TNFRSF6 (NM_000043.3,705-723).
cccggacccagaataccaa

SEQ ID NO: 247032 - DNA, 19 bp, Homo sapiens
  siRNA target sequence for TNFRSF6 (NM_000043.3,726-744).
gcagatgtaaaccaaactt

SEQ ID NO: 247033 - DNA, 19 bp, Homo sapiens
  siRNA target sequence for TNFRSF6 (NM_000043.3,750-768).
gtaactctactgtatgtga

SEQ ID NO: 247034 - DNA, 19 bp, Homo sapiens
  siRNA target sequence for TNFRSF6 (NM_000043.3,848-866).
gaaggatccagatctaact

SEQ ID NO: 247035 - DNA, 19 bp, Homo sapiens
  siRNA target sequence for TNFRSF6 (NM_000043.3,893-911).
ccaattccactaattgttt

SEQ ID NO: 247036 - DNA, 19 bp, Homo sapiens
  siRNA target sequence for TNFRSF6 (NM_000043.3,964-982).
ccaaggttctcatgaatct

SEQ ID NO: 247037 - DNA, 19 bp, Homo sapiens
  siRNA target sequence for TNFRSF6 (NM_000043.3,1055-1073).
gctggagtcatgacactaa

SEQ ID NO: 247038 - DNA, 19 bp, Homo sapiens
  siRNA target sequence for TNFRSF6 (NM_000043.3,1059-1077).
gagtcatgacactaagtca

SEQ ID NO: 247039 - DNA, 19 bp, Homo sapiens
  siRNA target sequence for TNFRSF6 (NM_000043.3,1066-1084).
gacactaagtcaagttaaa

SEQ ID NO: 247040 - DNA, 19 bp, Homo sapiens
  siRNA target sequence for TNFRSF6 (NM_000043.3,1169-1187).
gttcaactgcttcgtaatt

SEQ ID NO: 247041 - DNA, 19 bp, Homo sapiens
  siRNA target sequence for TNFRSF6 (NM_000043.3,1182-1200).
gtaattggcatcaacttca

SEQ ID NO: 247042 - DNA, 19 bp, Homo sapiens
  siRNA target sequence for TNFRSF6 (NM_000043.3,1211-1229).
gaagcgtatgacacattga

SEQ ID NO: 247043 - DNA, 19 bp, Homo sapiens
  siRNA target sequence for TNFRSF6 (NM_000043.3,1214-1232).
gcgtatgacacattgatta

SEQ ID NO: 247044 - DNA, 19 bp, Homo sapiens
  siRNA target sequence for TNFRSF6 (NM_000043.3,1238-1256).
ctcaaaaaagccaatcttt

SEQ ID NO: 247045 - DNA, 19 bp, Homo sapiens
  siRNA target sequence for TNFRSF6 (NM_000043.3,1240-1258).
caaaaaagccaatctttgt

SEQ ID NO: 247046 - DNA, 19 bp, Homo sapiens
  siRNA target sequence for TNFRSF6 (NM_152876.1,531-549).
cctgtcctccagatgtgaa

SEQ ID NO: 247047 - DNA, 19 bp, Homo sapiens
  siRNA target sequence for TNFRSF7 (NM_001242.3,351-369).
gactgtgaccagcatagaa

SEQ ID NO: 247048 - DNA, 19 bp, Homo sapiens
  siRNA target sequence for TNFRSF7 (NM_001242.3,446-464).
ctgtcggcactgtaactct

SEQ ID NO: 247049 - DNA, 19 bp, Homo sapiens
  siRNA target sequence for TNFRSF7 (NM_001242.3,620-638).
gcccacccacttaccttat

SEQ ID NO: 247050 - DNA, 19 bp, Homo sapiens
  siRNA target sequence for TNFRSF7 (NM_001242.3,622-640).
ccacccacttaccttatgt

SEQ ID NO: 247051 - DNA, 19 bp, Homo sapiens
  siRNA target sequence for TNFRSF7 (NM_001242.3,747-765).
ctgtgcagctccgatttta

SEQ ID NO: 247052 - DNA, 19 bp, Homo sapiens
  siRNA target sequence for TNFRSF7 (NM_001242.3,749-767).
gtgcagctccgattttatt

SEQ ID NO: 247053 - DNA, 19 bp, Homo sapiens
  siRNA target sequence for TNFRSF7 (NM_001242.3,828-846).
ctccatcaacgaaggaaat

SEQ ID NO: 247054 - DNA, 19 bp, Homo sapiens
  siRNA target sequence for TNFRSF7 (NM_001242.3,830-848).
ccatcaacgaaggaaatat

SEQ ID NO: 247055 - DNA, 19 bp, Homo sapiens
  siRNA target sequence for TNFRSF7 (NM_001242.3,831-849).
catcaacgaaggaaatata

SEQ ID NO: 247056 - DNA, 19 bp, Homo sapiens
  siRNA target sequence for TNFRSF7 (NM_001242.3,837-855).
cgaaggaaatatagatcaa

SEQ ID NO: 247057 - DNA, 19 bp, Homo sapiens
  siRNA target sequence for TNFRSF8 (NM_001243.2,589-607).
gcccgctgcttcttccatt

SEQ ID NO: 247058 - DNA, 19 bp, Homo sapiens
  siRNA target sequence for TNFRSF8 (NM_001243.2,612-630).
ctgtccggcagggatgatt

SEQ ID NO: 247059 - DNA, 19 bp, Homo sapiens
  siRNA target sequence for TNFRSF8 (NM_001243.2,643-661).
ggcacggcgcagaagaaca

SEQ ID NO: 247060 - DNA, 19 bp, Homo sapiens
  siRNA target sequence for TNFRSF8 (NM_001243.2,829-847).
gaagctgcttctaaactga

SEQ ID NO: 247061 - DNA, 19 bp, Homo sapiens
  siRNA target sequence for TNFRSF8 (NM_001243.2,1595-1613).
cggaagagcgagggttaat

SEQ ID NO: 247062 - DNA, 19 bp, Homo sapiens
  siRNA target sequence for TNFRSF8 (NM_001243.2,1597-1615).
gaagagcgagggttaatga

SEQ ID NO: 247063 - DNA, 19 bp, Homo sapiens
  siRNA target sequence for TNFRSF8 (NM_001243.2,1742-1760).
cggagcacaccaataacaa

SEQ ID NO: 247064 - DNA, 19 bp, Homo sapiens
  siRNA target sequence for WSX1 (NM_004843.2,557-575).
gacccttgggcgacttgaa

SEQ ID NO: 247065 - DNA, 19 bp, Homo sapiens
  siRNA target sequence for WSX1 (NM_004843.2,559-577).
cccttgggcgacttgaact

SEQ ID NO: 247066 - DNA, 19 bp, Homo sapiens
  siRNA target sequence for WSX1 (NM_004843.2,775-793).
gtcttcgtgaacctagaaa

SEQ ID NO: 247067 - DNA, 19 bp, Homo sapiens
  siRNA target sequence for WSX1 (NM_004843.2,884-902).
ctacatggccatctcataa

SEQ ID NO: 247068 - DNA, 19 bp, Homo sapiens
  siRNA target sequence for WSX1 (NM_004843.2,918-936).
gttccactaccgaagatgt

SEQ ID NO: 247069 - DNA, 19 bp, Homo sapiens
  siRNA target sequence for WSX1 (NM_004843.2,983-1001).
ccctgacccctgttgagat

SEQ ID NO: 247070 - DNA, 19 bp, Homo sapiens
  siRNA target sequence for WSX1 (NM_004843.2,1014-1032).
gctagccactggctacaaa

SEQ ID NO: 247071 - DNA, 19 bp, Homo sapiens
  siRNA target sequence for WSX1 (NM_004843.2,1078-1096).
gagtggagccccattttgt

SEQ ID NO: 247072 - DNA, 19 bp, Homo sapiens
  siRNA target sequence for WSX1 (NM_004843.2,1251-1269).
gctgagtccagaaggaatt

SEQ ID NO: 247073 - DNA, 19 bp, Homo sapiens
  siRNA target sequence for WSX1 (NM_004843.2,1272-1290).
ctgctgctgctccctaatt

SEQ ID NO: 247074 - DNA, 19 bp, Homo sapiens
  siRNA target sequence for WSX1 (NM_004843.2,1542-1560).
gaacctcagtgctctgtta

SEQ ID NO: 247075 - DNA, 19 bp, Homo sapiens
  siRNA target sequence for WSX1 (NM_004843.2,1555-1573).
ctgttaccagggaatttca

SEQ ID NO: 247076 - DNA, 19 bp, Homo sapiens
  siRNA target sequence for WSX1 (NM_004843.2,1557-1575).
gttaccagggaatttcact

SEQ ID NO: 247077 - DNA, 19 bp, Homo sapiens
  siRNA target sequence for WSX1 (NM_004843.2,1576-1594).
gtcggggtcccctatcgaa

SEQ ID NO: 247078 - DNA, 19 bp, Homo sapiens
  siRNA target sequence for WSX1 (NM_004843.2,1581-1599).
ggtcccctatcgaatcact

SEQ ID NO: 247079 - DNA, 19 bp, Homo sapiens
  siRNA target sequence for WSX1 (NM_004843.2,1650-1668).
gttcagggaggaattagca

SEQ ID NO: 247080 - DNA, 19 bp, Homo sapiens
  siRNA target sequence for WSX1 (NM_004843.2,1806-1824).
cccctccgtctgcatgaat

SEQ ID NO: 247081 - DNA, 19 bp, Homo sapiens
  siRNA target sequence for WSX1 (NM_004843.2,1928-1946).
ccatcctccggcttcatct

SEQ ID NO: 247082 - DNA, 19 bp, Homo sapiens
  siRNA target sequence for WSX1 (NM_004843.2,1929-1947).
catcctccggcttcatcta

SEQ ID NO: 247083 - DNA, 19 bp, Homo sapiens
  siRNA target sequence for LOC51036 (NM_015854.1,134-152).
gcaaacgagtgcagtcaat

SEQ ID NO: 247084 - DNA, 19 bp, Homo sapiens
  siRNA target sequence for LOC51036 (NM_015854.1,135-153).
caaacgagtgcagtcaatt

SEQ ID NO: 247085 - DNA, 19 bp, Homo sapiens
  siRNA target sequence for LOC51036 (NM_015854.1,226-244).
caaggggtagccattctct

SEQ ID NO: 247086 - DNA, 19 bp, Homo sapiens
  siRNA target sequence for LOC51036 (NM_015854.1,324-342).
ggcgcacagaggaatttaa

SEQ ID NO: 247087 - DNA, 19 bp, Homo sapiens
  siRNA target sequence for LOC51036 (NM_015854.1,325-343).
gcgcacagaggaatttaaa

SEQ ID NO: 247088 - DNA, 19 bp, Homo sapiens
  siRNA target sequence for LOC51036 (NM_015854.1,327-345).
gcacagaggaatttaaagt

SEQ ID NO: 247089 - DNA, 19 bp, Homo sapiens
  siRNA target sequence for LOC51036 (NM_015854.1,390-408).
ggcggaacaccgttttcca

SEQ ID NO: 247090 - DNA, 19 bp, Homo sapiens
  siRNA target sequence for LY96 (NM_015364.2,166-184).
ctcatccgatgcaagtatt

SEQ ID NO: 247091 - DNA, 19 bp, Homo sapiens
  siRNA target sequence for LY96 (NM_015364.2,186-204).
catacacctactgtgataa

SEQ ID NO: 247092 - DNA, 19 bp, Homo sapiens
  siRNA target sequence for LY96 (NM_015364.2,209-227).
caatacccaatttcaatta

SEQ ID NO: 247093 - DNA, 19 bp, Homo sapiens
  siRNA target sequence for LY96 (NM_015364.2,216-234).
caatttcaattaatgttaa

SEQ ID NO: 247094 - DNA, 19 bp, Homo sapiens
  siRNA target sequence for LY96 (NM_015364.2,235-253).
cccctgtatagaattgaaa

SEQ ID NO: 247095 - DNA, 19 bp, Homo sapiens
  siRNA target sequence for LY96 (NM_015364.2,255-273).
gatccaaaggattattgca

SEQ ID NO: 247096 - DNA, 19 bp, Homo sapiens
  siRNA target sequence for LY96 (NM_015364.2,350-368).
ccaaagcgcaaagaagtta

SEQ ID NO: 247097 - DNA, 19 bp, Homo sapiens
  siRNA target sequence for LY96 (NM_015364.2,381-399).
ctgatgacgattactcttt

SEQ ID NO: 247098 - DNA, 19 bp, Homo sapiens
  siRNA target sequence for LY96 (NM_015364.2,386-404).
gacgattactctttttgca

SEQ ID NO: 247099 - DNA, 19 bp, Homo sapiens
  siRNA target sequence for LY96 (NM_015364.2,419-437).
gagactgtgaatacaacaa

SEQ ID NO: 247100 - DNA, 19 bp, Homo sapiens
  siRNA target sequence for LY96 (NM_015364.2,425-443).
gtgaatacaacaatatcat

SEQ ID NO: 247101 - DNA, 19 bp, Homo sapiens
  siRNA target sequence for LY96 (NM_015364.2,547-565).
cctacaccaacctaattca

SEQ ID NO: 247102 - DNA, 19 bp, Homo sapiens
  siRNA target sequence for LY96 (NM_015364.2,548-566).
ctacaccaacctaattcaa

SEQ ID NO: 247103 - DNA, 19 bp, Homo sapiens
  siRNA target sequence for LY96 (NM_015364.2,551-569).
caccaacctaattcaaatt

SEQ ID NO: 247104 - DNA, 19 bp, Homo sapiens
  siRNA target sequence for PVRL1 (NM_002855.2,93-111).
ggtgaacgactccatgtat

SEQ ID NO: 247105 - DNA, 19 bp, Homo sapiens
  siRNA target sequence for PVRL1 (NM_002855.2,272-290).
gcgagcgtgtggaattcct

SEQ ID NO: 247106 - DNA, 19 bp, Homo sapiens
  siRNA target sequence for PVRL1 (NM_002855.2,423-441).
caaacccaccaattggata

SEQ ID NO: 247107 - DNA, 19 bp, Homo sapiens
  siRNA target sequence for PVRL1 (NM_002855.2,542-560).
cctgggaaactcggttaaa

SEQ ID NO: 247108 - DNA, 19 bp, Homo sapiens
  siRNA target sequence for PVRL1 (NM_002855.2,546-564).
ggaaactcggttaaaaggt

SEQ ID NO: 247109 - DNA, 19 bp, Homo sapiens
  siRNA target sequence for PVRL1 (NM_002855.2,710-728).
ctctcaacgtgcagtatga

SEQ ID NO: 247110 - DNA, 19 bp, Homo sapiens
  siRNA target sequence for PVRL1 (NM_002855.2,831-849).
ccactggaccacgctaaat

SEQ ID NO: 247111 - DNA, 19 bp, Homo sapiens
  siRNA target sequence for PVRL1 (NM_002855.2,970-988).
ggccaggtggaggtcaata

SEQ ID NO: 247112 - DNA, 19 bp, Homo sapiens
  siRNA target sequence for PVRL1 (NM_002855.2,975-993).
ggtggaggtcaatatcaca

SEQ ID NO: 247113 - DNA, 19 bp, Homo sapiens
  siRNA target sequence for PVRL1 (NM_002855.2,1501-1519).
cagaacgacgggtctttca

SEQ ID NO: 247114 - DNA, 19 bp, Homo sapiens
  siRNA target sequence for PVRL1 (NM_002855.2,1507-1525).
gacgggtctttcatttcca

SEQ ID NO: 247115 - DNA, 19 bp, Homo sapiens
  siRNA target sequence for PVRL2 (NM_002856.1,376-394).
ctgcgaaccaccagaatgt

SEQ ID NO: 247116 - DNA, 19 bp, Homo sapiens
  siRNA target sequence for PVRL2 (NM_002856.1,1017-1035).
gagcccacgggctatgact

SEQ ID NO: 247117 - DNA, 19 bp, Homo sapiens
  siRNA target sequence for PVRL2 (NM_002856.1,1104-1122).
gtggacagtctgttcaata

SEQ ID NO: 247118 - DNA, 19 bp, Homo sapiens
  siRNA target sequence for PVRL2 (NM_002856.1,1107-1125).
gacagtctgttcaatacca

SEQ ID NO: 247119 - DNA, 19 bp, Homo sapiens
  siRNA target sequence for PVRL2 (NM_002856.1,1165-1183).
gcgctgagcaggtcatctt

SEQ ID NO: 247120 - DNA, 19 bp, Homo sapiens
  siRNA target sequence for PVRL2 (NM_002856.1,1166-1184).
cgctgagcaggtcatcttt

SEQ ID NO: 247121 - DNA, 19 bp, Homo sapiens
  siRNA target sequence for PVRL2 (NM_002856.1,1168-1186).
ctgagcaggtcatctttgt

SEQ ID NO: 247122 - DNA, 19 bp, Homo sapiens
  siRNA target sequence for ZP2 (NM_003460.1,63-81).
cacctacaggtcgatttct

SEQ ID NO: 247123 - DNA, 19 bp, Homo sapiens
  siRNA target sequence for ZP2 (NM_003460.1,104-122).
cagggaactccatagatgt

SEQ ID NO: 247124 - DNA, 19 bp, Homo sapiens
  siRNA target sequence for ZP2 (NM_003460.1,108-126).
gaactccatagatgtttct

SEQ ID NO: 247125 - DNA, 19 bp, Homo sapiens
  siRNA target sequence for ZP2 (NM_003460.1,291-309).
caccctgagggctacctat

SEQ ID NO: 247126 - DNA, 19 bp, Homo sapiens
  siRNA target sequence for ZP2 (NM_003460.1,300-318).
ggctacctatgataactgt

SEQ ID NO: 247127 - DNA, 19 bp, Homo sapiens
  siRNA target sequence for ZP2 (NM_003460.1,366-384).
caacagtgctgccttaaga

SEQ ID NO: 247128 - DNA, 19 bp, Homo sapiens
  siRNA target sequence for ZP2 (NM_003460.1,383-401).
gacacggagctgtcatgta

SEQ ID NO: 247129 - DNA, 19 bp, Homo sapiens
  siRNA target sequence for ZP2 (NM_003460.1,388-406).
ggagctgtcatgtatcagt

SEQ ID NO: 247130 - DNA, 19 bp, Homo sapiens
  siRNA target sequence for ZP2 (NM_003460.1,392-410).
ctgtcatgtatcagttctt

SEQ ID NO: 247131 - DNA, 19 bp, Homo sapiens
  siRNA target sequence for ZP2 (NM_003460.1,408-426).
cttctgtccagctatgcaa

SEQ ID NO: 247132 - DNA, 19 bp, Homo sapiens
  siRNA target sequence for ZP2 (NM_003460.1,509-527).
gcttggctgacgacagtaa

SEQ ID NO: 247133 - DNA, 19 bp, Homo sapiens
  siRNA target sequence for ZP2 (NM_003460.1,522-540).
cagtaaggggaccaaagtt

SEQ ID NO: 247134 - DNA, 19 bp, Homo sapiens
  siRNA target sequence for ZP2 (NM_003460.1,524-542).
gtaaggggaccaaagttca

SEQ ID NO: 247135 - DNA, 19 bp, Homo sapiens
  siRNA target sequence for ZP2 (NM_003460.1,672-690).
cactggagtgactcactat

SEQ ID NO: 247136 - DNA, 19 bp, Homo sapiens
  siRNA target sequence for ZP2 (NM_003460.1,674-692).
ctggagtgactcactatgt

SEQ ID NO: 247137 - DNA, 19 bp, Homo sapiens
  siRNA target sequence for ZP2 (NM_003460.1,683-701).
ctcactatgtgcaaggtaa

SEQ ID NO: 247138 - DNA, 19 bp, Homo sapiens
  siRNA target sequence for ZP2 (NM_003460.1,687-705).
ctatgtgcaaggtaacagt

SEQ ID NO: 247139 - DNA, 19 bp, Homo sapiens
  siRNA target sequence for ZP2 (NM_003460.1,720-738).
gtctctgaagcttacattt

SEQ ID NO: 247140 - DNA, 19 bp, Homo sapiens
  siRNA target sequence for ZP2 (NM_003460.1,724-742).
ctgaagcttacatttatat

SEQ ID NO: 247141 - DNA, 19 bp, Homo sapiens
  siRNA target sequence for ZP2 (NM_003460.1,756-774).
ggtgatcttctcttcacaa

SEQ ID NO: 247142 - DNA, 19 bp, Homo sapiens
  siRNA target sequence for ZP2 (NM_003460.1,894-912).
gctgcatgacaatggaatt

SEQ ID NO: 247143 - DNA, 19 bp, Homo sapiens
  siRNA target sequence for ZP2 (NM_003460.1,923-941).
caacaaatggcatgaaatt

SEQ ID NO: 247144 - DNA, 19 bp, Homo sapiens
  siRNA target sequence for ZP2 (NM_003460.1,986-1004).
gcctactccatcagttcta

SEQ ID NO: 247145 - DNA, 19 bp, Homo sapiens
  siRNA target sequence for ZP2 (NM_003460.1,1083-1101).
gtcacccgtttctatagtt

SEQ ID NO: 247146 - DNA, 19 bp, Homo sapiens
  siRNA target sequence for ZP2 (NM_003460.1,1115-1133).
gcacccaggatgggtttat

SEQ ID NO: 247147 - DNA, 19 bp, Homo sapiens
  siRNA target sequence for ZP2 (NM_003460.1,1252-1270).
cacatacccctgaatggat

SEQ ID NO: 247148 - DNA, 19 bp, Homo sapiens
  siRNA target sequence for ZP2 (NM_003460.1,1267-1285).
ggatgtggaacgagatata

SEQ ID NO: 247149 - DNA, 19 bp, Homo sapiens
  siRNA target sequence for ZP2 (NM_003460.1,1271-1289).
gtggaacgagatataagtt

SEQ ID NO: 247150 - DNA, 19 bp, Homo sapiens
  siRNA target sequence for ZP2 (NM_003460.1,1280-1298).
gatataagttcgaagatga

SEQ ID NO: 247151 - DNA, 19 bp, Homo sapiens
  siRNA target sequence for ZP2 (NM_003460.1,1303-1321).
gtcgtctatgaaaacgaaa

SEQ ID NO: 247152 - DNA, 19 bp, Homo sapiens
  siRNA target sequence for ZP2 (NM_003460.1,1305-1323).
cgtctatgaaaacgaaata

SEQ ID NO: 247153 - DNA, 19 bp, Homo sapiens
  siRNA target sequence for ZP2 (NM_003460.1,1345-1363).
cctccaagcaaaatatcta

SEQ ID NO: 247154 - DNA, 19 bp, Homo sapiens
  siRNA target sequence for ZP2 (NM_003460.1,1366-1384).
gacagtgagttcagaatga

SEQ ID NO: 247155 - DNA, 19 bp, Homo sapiens
  siRNA target sequence for ZP2 (NM_003460.1,1387-1405).
gtgaagtgttcttatagca

SEQ ID NO: 247156 - DNA, 19 bp, Homo sapiens
  siRNA target sequence for ZP2 (NM_003460.1,1406-1424).
ggaatgacatgctactaaa

SEQ ID NO: 247157 - DNA, 19 bp, Homo sapiens
  siRNA target sequence for ZP2 (NM_003460.1,1420-1438).
ctaaacatcaacgttgaaa

SEQ ID NO: 247158 - DNA, 19 bp, Homo sapiens
  siRNA target sequence for ZP2 (NM_003460.1,1496-1514).
gctacccagataattccta

SEQ ID NO: 247159 - DNA, 19 bp, Homo sapiens
  siRNA target sequence for ZP2 (NM_003460.1,1553-1571).
gattcctccgccaaccaat

SEQ ID NO: 247160 - DNA, 19 bp, Homo sapiens
  siRNA target sequence for ZP2 (NM_003460.1,1558-1576).
ctccgccaaccaatttaca

SEQ ID NO: 247161 - DNA, 19 bp, Homo sapiens
  siRNA target sequence for ZP2 (NM_003460.1,1611-1629).
catcaagctggtcttagat

SEQ ID NO: 247162 - DNA, 19 bp, Homo sapiens
  siRNA target sequence for ZP2 (NM_003460.1,1649-1667).
ccatggatccagactcttt

SEQ ID NO: 247163 - DNA, 19 bp, Homo sapiens
  siRNA target sequence for ZP2 (NM_003460.1,1686-1704).
cgtggatggctgtgcatat

SEQ ID NO: 247164 - DNA, 19 bp, Homo sapiens
  siRNA target sequence for ZP2 (NM_003460.1,1700-1718).
catatgacctggacaacta

SEQ ID NO: 247165 - DNA, 19 bp, Homo sapiens
  siRNA target sequence for ZP2 (NM_003460.1,1752-1770).
gacccatcctgatcactat

SEQ ID NO: 247166 - DNA, 19 bp, Homo sapiens
  siRNA target sequence for ZP2 (NM_003460.1,1756-1774).
catcctgatcactatcaga

SEQ ID NO: 247167 - DNA, 19 bp, Homo sapiens
  siRNA target sequence for ZP2 (NM_003460.1,1765-1783).
cactatcagaggtttgaca

SEQ ID NO: 247168 - DNA, 19 bp, Homo sapiens
  siRNA target sequence for ZP2 (NM_003460.1,1785-1803).
gaaggcttttgcctttgta

SEQ ID NO: 247169 - DNA, 19 bp, Homo sapiens
  siRNA target sequence for ZP2 (NM_003460.1,1840-1858).
cactgcagtgccttaatct

SEQ ID NO: 247170 - DNA, 19 bp, Homo sapiens
  siRNA target sequence for ZP2 (NM_003460.1,1845-1863).
cagtgccttaatctgtaat

SEQ ID NO: 247171 - DNA, 19 bp, Homo sapiens
  siRNA target sequence for ZP2 (NM_003460.1,2014-2032).
gtcggctcatctgatctaa

SEQ ID NO: 247172 - DNA, 19 bp, Homo sapiens
  siRNA target sequence for ZP2 (NM_003460.1,2016-2034).
cggctcatctgatctaaaa

SEQ ID NO: 247173 - DNA, 19 bp, Homo sapiens
  siRNA target sequence for ZP2 (NM_003460.1,2183-2201).
caactctaggcttcatcta

SEQ ID NO: 247174 - DNA, 19 bp, Homo sapiens
  siRNA target sequence for ZP2 (NM_003460.1,2214-2232).
gaaaaggactgtgtcaaat

SEQ ID NO: 247175 - DNA, 19 bp, Homo sapiens
  siRNA target sequence for CR1 (NM_000573.2,225-243).
ggcctggggtcaatgcaat

SEQ ID NO: 247176 - DNA, 19 bp, Homo sapiens
  siRNA target sequence for CR1 (NM_000573.2,546-564).
catcatctcaggtgatact

SEQ ID NO: 247177 - DNA, 19 bp, Homo sapiens
  siRNA target sequence for CR1 (NM_000573.2,552-570).
ctcaggtgatactgtcatt

SEQ ID NO: 247178 - DNA, 19 bp, Homo sapiens
  siRNA target sequence for CR1 (NM_000573.2,3990-4008).
gggcagttccgttagtcat

SEQ ID NO: 247179 - DNA, 19 bp, Homo sapiens
  siRNA target sequence for CR1 (NM_000573.2,3991-4009).
ggcagttccgttagtcatt

SEQ ID NO: 247180 - DNA, 19 bp, Homo sapiens
  siRNA target sequence for CR1 (NM_000573.2,3993-4011).
cagttccgttagtcattgt

SEQ ID NO: 247181 - DNA, 19 bp, Homo sapiens
  siRNA target sequence for CR1 (NM_000573.2,3995-4013).
gttccgttagtcattgtgt

SEQ ID NO: 247182 - DNA, 19 bp, Homo sapiens
  siRNA target sequence for CR1 (NM_000573.2,4328-4346).
gtcctacgatcccaattaa

SEQ ID NO: 247183 - DNA, 19 bp, Homo sapiens
  siRNA target sequence for CR1 (NM_000573.2,4331-4349).
ctacgatcccaattaatga

SEQ ID NO: 247184 - DNA, 19 bp, Homo sapiens
  siRNA target sequence for CR1 (NM_000573.2,4334-4352).
cgatcccaattaatgactt

SEQ ID NO: 247185 - DNA, 19 bp, Homo sapiens
  siRNA target sequence for CR1 (NM_000573.2,4335-4353).
gatcccaattaatgacttt

SEQ ID NO: 247186 - DNA, 19 bp, Homo sapiens
  siRNA target sequence for CR1 (NM_000573.2,4339-4357).
ccaattaatgactttgagt

SEQ ID NO: 247187 - DNA, 19 bp, Homo sapiens
  siRNA target sequence for CR1 (NM_000573.2,4363-4381).
gtcgggacatctttgaatt

SEQ ID NO: 247188 - DNA, 19 bp, Homo sapiens
  siRNA target sequence for CR1 (NM_000573.2,4367-4385).
ggacatctttgaattatga

SEQ ID NO: 247189 - DNA, 19 bp, Homo sapiens
  siRNA target sequence for CR1 (NM_000573.2,4437-4455).
cttggtctggtcaagtgtt

SEQ ID NO: 247190 - DNA, 19 bp, Homo sapiens
  siRNA target sequence for CR1 (NM_000573.2,4440-4458).
ggtctggtcaagtgttgaa

SEQ ID NO: 247191 - DNA, 19 bp, Homo sapiens
  siRNA target sequence for CR1 (NM_000573.2,4461-4479).
caactgtagacgaaaatca

SEQ ID NO: 247192 - DNA, 19 bp, Homo sapiens
  siRNA target sequence for CR1 (NM_000573.2,4503-4521).
caatggaatggtgcatata

SEQ ID NO: 247193 - DNA, 19 bp, Homo sapiens
  siRNA target sequence for CR1 (NM_000573.2,4534-4552).
cagtttggatcaacagtta

SEQ ID NO: 247194 - DNA, 19 bp, Homo sapiens
  siRNA target sequence for CR1 (NM_000573.2,4581-4599).
cattggttccccatctact

SEQ ID NO: 247195 - DNA, 19 bp, Homo sapiens
  siRNA target sequence for CR1 (NM_000573.2,4632-4650).
ggataagaaggcacctatt

SEQ ID NO: 247196 - DNA, 19 bp, Homo sapiens
  siRNA target sequence for CR1 (NM_000573.2,4633-4651).
gataagaaggcacctattt

SEQ ID NO: 247197 - DNA, 19 bp, Homo sapiens
  siRNA target sequence for CR1 (NM_000573.2,4643-4661).
cacctatttgtgagatcat

SEQ ID NO: 247198 - DNA, 19 bp, Homo sapiens
  siRNA target sequence for CR1 (NM_000573.2,4645-4663).
cctatttgtgagatcatat

SEQ ID NO: 247199 - DNA, 19 bp, Homo sapiens
  siRNA target sequence for CR1 (NM_000573.2,4701-4719).
ctacagcaacaatagaaca

SEQ ID NO: 247200 - DNA, 19 bp, Homo sapiens
  siRNA target sequence for CR1 (NM_000573.2,4704-4722).
cagcaacaatagaacatct

SEQ ID NO: 247201 - DNA, 19 bp, Homo sapiens
  siRNA target sequence for CR1 (NM_000573.2,4706-4724).
gcaacaatagaacatcttt

SEQ ID NO: 247202 - DNA, 19 bp, Homo sapiens
  siRNA target sequence for CR1 (NM_000573.2,4707-4725).
caacaatagaacatctttt

SEQ ID NO: 247203 - DNA, 19 bp, Homo sapiens
  siRNA target sequence for CR1 (NM_000573.2,4792-4810).
gtgggagaacggtcaatat

SEQ ID NO: 247204 - DNA, 19 bp, Homo sapiens
  siRNA target sequence for CR1 (NM_000573.2,4794-4812).
gggagaacggtcaatatat

SEQ ID NO: 247205 - DNA, 19 bp, Homo sapiens
  siRNA target sequence for CR1 (NM_000573.2,4795-4813).
ggagaacggtcaatatatt

SEQ ID NO: 247206 - DNA, 19 bp, Homo sapiens
  siRNA target sequence for CR1 (NM_000573.2,4798-4816).
gaacggtcaatatattgca

SEQ ID NO: 247207 - DNA, 19 bp, Homo sapiens
  siRNA target sequence for CR1 (NM_000573.2,4852-4870).
cctccccctcggtgtattt

SEQ ID NO: 247208 - DNA, 19 bp, Homo sapiens
  siRNA target sequence for CR1 (NM_000573.2,4855-4873).
ccccctcggtgtatttcta

SEQ ID NO: 247209 - DNA, 19 bp, Homo sapiens
  siRNA target sequence for CR1 (NM_000573.2,4857-4875).
ccctcggtgtatttctact

SEQ ID NO: 247210 - DNA, 19 bp, Homo sapiens
  siRNA target sequence for CR1 (NM_000573.2,4858-4876).
cctcggtgtatttctacta

SEQ ID NO: 247211 - DNA, 19 bp, Homo sapiens
  siRNA target sequence for CR1 (NM_000573.2,4944-4962).
cactgagatcatcagattt

SEQ ID NO: 247212 - DNA, 19 bp, Homo sapiens
  siRNA target sequence for CR1 (NM_000573.2,4948-4966).
gagatcatcagatttagat

SEQ ID NO: 247213 - DNA, 19 bp, Homo sapiens
  siRNA target sequence for CR1 (NM_000573.2,4950-4968).
gatcatcagatttagatgt

SEQ ID NO: 247214 - DNA, 19 bp, Homo sapiens
  siRNA target sequence for CR1 (NM_000573.2,5673-5691).
ccaaaacgggcattacatt

SEQ ID NO: 247215 - DNA, 19 bp, Homo sapiens
  siRNA target sequence for CR1 (NM_000573.2,5692-5710).
ggaggacacgtatctctat

SEQ ID NO: 247216 - DNA, 19 bp, Homo sapiens
  siRNA target sequence for CR1 (NM_000573.2,5693-5711).
gaggacacgtatctctata

SEQ ID NO: 247217 - DNA, 19 bp, Homo sapiens
  siRNA target sequence for CR1 (NM_000573.2,5696-5714).
gacacgtatctctatatct

SEQ ID NO: 247218 - DNA, 19 bp, Homo sapiens
  siRNA target sequence for CR1 (NM_000573.2,5801-5819).
ggagccaattggatcatta

SEQ ID NO: 247219 - DNA, 19 bp, Homo sapiens
  siRNA target sequence for CR1 (NM_000573.2,5802-5820).
gagccaattggatcattat

SEQ ID NO: 247220 - DNA, 19 bp, Homo sapiens
  siRNA target sequence for CR1 (NM_000573.2,5837-5855).
gtagcttcccactgtttat

SEQ ID NO: 247221 - DNA, 19 bp, Homo sapiens
  siRNA target sequence for CR1 (NM_000573.2,5840-5858).
gcttcccactgtttatgaa

SEQ ID NO: 247222 - DNA, 19 bp, Homo sapiens
  siRNA target sequence for CR1 (NM_000573.2,5861-5879).
gaatctcgaaggagttaga

SEQ ID NO: 247223 - DNA, 19 bp, Homo sapiens
  siRNA target sequence for CR1 (NM_000573.2,5896-5914).
cactatggagattatgtga

SEQ ID NO: 247224 - DNA, 19 bp, Homo sapiens
  siRNA target sequence for CR1 (NM_000573.2,6081-6099).
cctctcttggataattcta

SEQ ID NO: 247225 - DNA, 19 bp, Homo sapiens
  siRNA target sequence for CR1 (NM_000573.2,6082-6100).
ctctcttggataattctaa

SEQ ID NO: 247226 - DNA, 19 bp, Homo sapiens
  siRNA target sequence for CR1 (NM_000573.2,6102-6120).
gcacagaaaaggcaataat

SEQ ID NO: 247227 - DNA, 19 bp, Homo sapiens
  siRNA target sequence for CR1 (NM_000573.2,6112-6130).
ggcaataatgcacatgaaa

SEQ ID NO: 247228 - DNA, 19 bp, Homo sapiens
  siRNA target sequence for CR1 (NM_000651.3,7071-7089).
gatgacaatcagctacatt

SEQ ID NO: 247229 - DNA, 19 bp, Homo sapiens
  siRNA target sequence for ITPR1 (NM_002222.1,271-289).
gtctagcttcctacatatt

SEQ ID NO: 247230 - DNA, 19 bp, Homo sapiens
  siRNA target sequence for ITPR1 (NM_002222.1,310-328).
cgcggagggatcgacaaat

SEQ ID NO: 247231 - DNA, 19 bp, Homo sapiens
  siRNA target sequence for ITPR1 (NM_002222.1,313-331).
ggagggatcgacaaatgga

SEQ ID NO: 247232 - DNA, 19 bp, Homo sapiens
  siRNA target sequence for ITPR1 (NM_002222.1,314-332).
gagggatcgacaaatggat

SEQ ID NO: 247233 - DNA, 19 bp, Homo sapiens
  siRNA target sequence for ITPR1 (NM_002222.1,317-335).
ggatcgacaaatggattta

SEQ ID NO: 247234 - DNA, 19 bp, Homo sapiens
  siRNA target sequence for ITPR1 (NM_002222.1,318-336).
gatcgacaaatggatttat

SEQ ID NO: 247235 - DNA, 19 bp, Homo sapiens
  siRNA target sequence for ITPR1 (NM_002222.1,380-398).
gaaaccggggaccttaaca

SEQ ID NO: 247236 - DNA, 19 bp, Homo sapiens
  siRNA target sequence for ITPR1 (NM_002222.1,511-529).
cgcagtgctactcaacaaa

SEQ ID NO: 247237 - DNA, 19 bp, Homo sapiens
  siRNA target sequence for ITPR1 (NM_002222.1,513-531).
cagtgctactcaacaaact

SEQ ID NO: 247238 - DNA, 19 bp, Homo sapiens
  siRNA target sequence for ITPR1 (NM_002222.1,536-554).
cacgctgcagacttggaaa

SEQ ID NO: 247239 - DNA, 19 bp, Homo sapiens
  siRNA target sequence for ITPR1 (NM_002222.1,622-640).
gctcctgcatttgaaaagt

SEQ ID NO: 247240 - DNA, 19 bp, Homo sapiens
  siRNA target sequence for ITPR1 (NM_002222.1,634-652).
gaaaagtaataaataccta

SEQ ID NO: 247241 - DNA, 19 bp, Homo sapiens
  siRNA target sequence for ITPR1 (NM_002222.1,846-864).
gccatcaactggtagataa

SEQ ID NO: 247242 - DNA, 19 bp, Homo sapiens
  siRNA target sequence for ITPR1 (NM_002222.1,928-946).
gaaatggagtgataacaaa

SEQ ID NO: 247243 - DNA, 19 bp, Homo sapiens
  siRNA target sequence for ITPR1 (NM_002222.1,1137-1155).
gcggagcagggtattggaa

SEQ ID NO: 247244 - DNA, 19 bp, Homo sapiens
  siRNA target sequence for ITPR1 (NM_002222.1,1178-1196).
ctggccacggggcattact

SEQ ID NO: 247245 - DNA, 19 bp, Homo sapiens
  siRNA target sequence for ITPR1 (NM_002222.1,1376-1394).
cggctcagacacctatgta

SEQ ID NO: 247246 - DNA, 19 bp, Homo sapiens
  siRNA target sequence for ITPR1 (NM_002222.1,1379-1397).
ctcagacacctatgtacta

SEQ ID NO: 247247 - DNA, 19 bp, Homo sapiens
  siRNA target sequence for ITPR1 (NM_002222.1,1405-1423).
ggttcacagcacaaatatt

SEQ ID NO: 247248 - DNA, 19 bp, Homo sapiens
  siRNA target sequence for ITPR1 (NM_002222.1,1411-1429).
cagcacaaatattcctatt

SEQ ID NO: 247249 - DNA, 19 bp, Homo sapiens
  siRNA target sequence for ITPR1 (NM_002222.1,1416-1434).
caaatattcctattgacaa

SEQ ID NO: 247250 - DNA, 19 bp, Homo sapiens
  siRNA target sequence for ITPR1 (NM_002222.1,1447-1465).
gcccgtgatgctgaaaatt

SEQ ID NO: 247251 - DNA, 19 bp, Homo sapiens
  siRNA target sequence for ITPR1 (NM_002222.1,1492-1510).
ggaagcatttgccatagtt

SEQ ID NO: 247252 - DNA, 19 bp, Homo sapiens
  siRNA target sequence for ITPR1 (NM_002222.1,1636-1654).
gctgctagaagatttggtt

SEQ ID NO: 247253 - DNA, 19 bp, Homo sapiens
  siRNA target sequence for ITPR1 (NM_002222.1,1640-1658).
ctagaagatttggtttact

SEQ ID NO: 247254 - DNA, 19 bp, Homo sapiens
  siRNA target sequence for ITPR1 (NM_002222.1,1660-1678).
cgtcactggtggaactaat

SEQ ID NO: 247255 - DNA, 19 bp, Homo sapiens
  siRNA target sequence for ITPR1 (NM_002222.1,1661-1679).
gtcactggtggaactaatt

SEQ ID NO: 247256 - DNA, 19 bp, Homo sapiens
  siRNA target sequence for ITPR1 (NM_002222.1,1674-1692).
ctaattctggtcaagatgt

SEQ ID NO: 247257 - DNA, 19 bp, Homo sapiens
  siRNA target sequence for ITPR1 (NM_002222.1,1777-1795).
gttacaagccccattcaca

SEQ ID NO: 247258 - DNA, 19 bp, Homo sapiens
  siRNA target sequence for ITPR1 (NM_002222.1,1801-1819).
cggtgatggcccaatgctt

SEQ ID NO: 247259 - DNA, 19 bp, Homo sapiens
  siRNA target sequence for ITPR1 (NM_002222.1,1981-1999).
ggctgaagacactatcact

SEQ ID NO: 247260 - DNA, 19 bp, Homo sapiens
  siRNA target sequence for ITPR1 (NM_002222.1,2046-2064).
cggcagagattgacacatt

SEQ ID NO: 247261 - DNA, 19 bp, Homo sapiens
  siRNA target sequence for ITPR1 (NM_002222.1,2047-2065).
ggcagagattgacacattt

SEQ ID NO: 247262 - DNA, 19 bp, Homo sapiens
  siRNA target sequence for ITPR1 (NM_002222.1,2049-2067).
cagagattgacacatttgt

SEQ ID NO: 247263 - DNA, 19 bp, Homo sapiens
  siRNA target sequence for ITPR1 (NM_002222.1,2051-2069).
gagattgacacatttgtca

SEQ ID NO: 247264 - DNA, 19 bp, Homo sapiens
  siRNA target sequence for ITPR1 (NM_002222.1,2088-2106).
gggagcccagattcttaga

SEQ ID NO: 247265 - DNA, 19 bp, Homo sapiens
  siRNA target sequence for ITPR1 (NM_002222.1,2089-2107).
ggagcccagattcttagat

SEQ ID NO: 247266 - DNA, 19 bp, Homo sapiens
  siRNA target sequence for ITPR1 (NM_002222.1,2090-2108).
gagcccagattcttagatt

SEQ ID NO: 247267 - DNA, 19 bp, Homo sapiens
  siRNA target sequence for ITPR1 (NM_002222.1,2120-2138).
ctctgtgtctccatgaaca

SEQ ID NO: 247268 - DNA, 19 bp, Homo sapiens
  siRNA target sequence for ITPR1 (NM_002222.1,2131-2149).
catgaacaaatcaattcca

SEQ ID NO: 247269 - DNA, 19 bp, Homo sapiens
  siRNA target sequence for ITPR1 (NM_002222.1,2150-2168).
gtgacccaggaactgatat

SEQ ID NO: 247270 - DNA, 19 bp, Homo sapiens
  siRNA target sequence for ITPR1 (NM_002222.1,2154-2172).
cccaggaactgatatgtaa

SEQ ID NO: 247271 - DNA, 19 bp, Homo sapiens
  siRNA target sequence for ITPR1 (NM_002222.1,2155-2173).
ccaggaactgatatgtaaa

SEQ ID NO: 247272 - DNA, 19 bp, Homo sapiens
  siRNA target sequence for ITPR1 (NM_002222.1,2158-2176).
ggaactgatatgtaaagct

SEQ ID NO: 247273 - DNA, 19 bp, Homo sapiens
  siRNA target sequence for ITPR1 (NM_002222.1,2464-2482).
ggccatcaacgaaatctca

SEQ ID NO: 247274 - DNA, 19 bp, Homo sapiens
  siRNA target sequence for ITPR1 (NM_002222.1,2603-2621).
caagtcacccccgtgaaat

SEQ ID NO: 247275 - DNA, 19 bp, Homo sapiens
  siRNA target sequence for ITPR1 (NM_002222.1,2656-2674).
cgccattgacgactatgat

SEQ ID NO: 247276 - DNA, 19 bp, Homo sapiens
  siRNA target sequence for ITPR1 (NM_002222.1,2734-2752).
ggaggagtatttaagagat

SEQ ID NO: 247277 - DNA, 19 bp, Homo sapiens
  siRNA target sequence for ITPR1 (NM_002222.1,2766-2784).
ggttccctttctctgataa

SEQ ID NO: 247278 - DNA, 19 bp, Homo sapiens
  siRNA target sequence for ITPR1 (NM_002222.1,2788-2806).
gaagaataagcttacgttt

SEQ ID NO: 247279 - DNA, 19 bp, Homo sapiens
  siRNA target sequence for ITPR1 (NM_002222.1,2798-2816).
cttacgtttgaggttgtaa

SEQ ID NO: 247280 - DNA, 19 bp, Homo sapiens
  siRNA target sequence for ITPR1 (NM_002222.1,2906-2924).
gtacatgtgacaacaatct

SEQ ID NO: 247281 - DNA, 19 bp, Homo sapiens
  siRNA target sequence for ITPR1 (NM_002222.1,2971-2989).
cgtgatgagatctattcat

SEQ ID NO: 247282 - DNA, 19 bp, Homo sapiens
  siRNA target sequence for ITPR1 (NM_002222.1,3140-3158).
gagatactccagtttattt

SEQ ID NO: 247283 - DNA, 19 bp, Homo sapiens
  siRNA target sequence for ITPR1 (NM_002222.1,3226-3244).
caattcccagacttcagaa

SEQ ID NO: 247284 - DNA, 19 bp, Homo sapiens
  siRNA target sequence for ITPR1 (NM_002222.1,3288-3306).
caggtgctcttgactttga

SEQ ID NO: 247285 - DNA, 19 bp, Homo sapiens
  siRNA target sequence for ITPR1 (NM_002222.1,3678-3696).
cggaggagggaaataacaa

SEQ ID NO: 247286 - DNA, 19 bp, Homo sapiens
  siRNA target sequence for ITPR1 (NM_002222.1,3733-3751).
cagagtggtcaaagagatt

SEQ ID NO: 247287 - DNA, 19 bp, Homo sapiens
  siRNA target sequence for ITPR1 (NM_002222.1,3918-3936).
ggttggctcatgaattttt

SEQ ID NO: 247288 - DNA, 19 bp, Homo sapiens
  siRNA target sequence for ITPR1 (NM_002222.1,3926-3944).
catgaatttttgcagaatt

SEQ ID NO: 247289 - DNA, 19 bp, Homo sapiens
  siRNA target sequence for ITPR1 (NM_002222.1,4072-4090).
gatcaacgagagagttgtt

SEQ ID NO: 247290 - DNA, 19 bp, Homo sapiens
  siRNA target sequence for ITPR1 (NM_002222.1,4121-4139).
ggtcggaatgtccagtata

SEQ ID NO: 247291 - DNA, 19 bp, Homo sapiens
  siRNA target sequence for ITPR1 (NM_002222.1,4122-4140).
gtcggaatgtccagtatat

SEQ ID NO: 247292 - DNA, 19 bp, Homo sapiens
  siRNA target sequence for ITPR1 (NM_002222.1,4124-4142).
cggaatgtccagtatataa

SEQ ID NO: 247293 - DNA, 19 bp, Homo sapiens
  siRNA target sequence for ITPR1 (NM_002222.1,4125-4143).
ggaatgtccagtatataaa

SEQ ID NO: 247294 - DNA, 19 bp, Homo sapiens
  siRNA target sequence for ITPR1 (NM_002222.1,4363-4381).
gtgcacggagggtaagaat

SEQ ID NO: 247295 - DNA, 19 bp, Homo sapiens
  siRNA target sequence for ITPR1 (NM_002222.1,4365-4383).
gcacggagggtaagaatgt

SEQ ID NO: 247296 - DNA, 19 bp, Homo sapiens
  siRNA target sequence for ITPR1 (NM_002222.1,4542-4560).
gcaatcacatgtggaaatt

SEQ ID NO: 247297 - DNA, 19 bp, Homo sapiens
  siRNA target sequence for ITPR1 (NM_002222.1,4603-4621).
cactagtgacaggaaacat

SEQ ID NO: 247298 - DNA, 19 bp, Homo sapiens
  siRNA target sequence for ITPR1 (NM_002222.1,4627-4645).
ctcgattttggagaagtat

SEQ ID NO: 247299 - DNA, 19 bp, Homo sapiens
  siRNA target sequence for ITPR1 (NM_002222.1,4629-4647).
cgattttggagaagtatgt

SEQ ID NO: 247300 - DNA, 19 bp, Homo sapiens
  siRNA target sequence for ITPR1 (NM_002222.1,4650-4668).
ccgaaatcgtcatgagtat

SEQ ID NO: 247301 - DNA, 19 bp, Homo sapiens
  siRNA target sequence for ITPR1 (NM_002222.1,4651-4669).
cgaaatcgtcatgagtatt

SEQ ID NO: 247302 - DNA, 19 bp, Homo sapiens
  siRNA target sequence for ITPR1 (NM_002222.1,4657-4675).
cgtcatgagtattgttact

SEQ ID NO: 247303 - DNA, 19 bp, Homo sapiens
  siRNA target sequence for ITPR1 (NM_002222.1,4660-4678).
catgagtattgttactact

SEQ ID NO: 247304 - DNA, 19 bp, Homo sapiens
  siRNA target sequence for ITPR1 (NM_002222.1,4755-4773).
gcgtgttcagggtttacca

SEQ ID NO: 247305 - DNA, 19 bp, Homo sapiens
  siRNA target sequence for ITPR1 (NM_002222.1,4995-5013).
gagactaccggaatatcat

SEQ ID NO: 247306 - DNA, 19 bp, Homo sapiens
  siRNA target sequence for ITPR1 (NM_002222.1,5063-5081).
ctggtgcaggcagagttat

SEQ ID NO: 247307 - DNA, 19 bp, Homo sapiens
  siRNA target sequence for ITPR1 (NM_002222.1,5082-5100).
ctgtgctcgtggatgttct

SEQ ID NO: 247308 - DNA, 19 bp, Homo sapiens
  siRNA target sequence for ITPR1 (NM_002222.1,5151-5169).
gtgaaagtggcggtttcat

SEQ ID NO: 247309 - DNA, 19 bp, Homo sapiens
  siRNA target sequence for ITPR1 (NM_002222.1,5161-5179).
cggtttcatttgcaagtta

SEQ ID NO: 247310 - DNA, 19 bp, Homo sapiens
  siRNA target sequence for ITPR1 (NM_002222.1,5251-5269).
ggaaatgatgaccaaagat

SEQ ID NO: 247311 - DNA, 19 bp, Homo sapiens
  siRNA target sequence for ITPR1 (NM_002222.1,5312-5330).
gtcaaccgttactatggaa

SEQ ID NO: 247312 - DNA, 19 bp, Homo sapiens
  siRNA target sequence for ITPR1 (NM_002222.1,5502-5520).
cttccaatctagttatcga

SEQ ID NO: 247313 - DNA, 19 bp, Homo sapiens
  siRNA target sequence for ITPR1 (NM_002222.1,5513-5531).
gttatcgacctcatcatga

SEQ ID NO: 247314 - DNA, 19 bp, Homo sapiens
  siRNA target sequence for ITPR1 (NM_002222.1,5623-5641).
ctgtcgcttgacagaagat

SEQ ID NO: 247315 - DNA, 19 bp, Homo sapiens
  siRNA target sequence for ITPR1 (NM_002222.1,5687-5705).
gtggcccagcaagaaatca

SEQ ID NO: 247316 - DNA, 19 bp, Homo sapiens
  siRNA target sequence for ITPR1 (NM_002222.1,5800-5818).
gcccacaacacagataaca

SEQ ID NO: 247317 - DNA, 19 bp, Homo sapiens
  siRNA target sequence for ITPR1 (NM_002222.1,5802-5820).
ccacaacacagataacaga

SEQ ID NO: 247318 - DNA, 19 bp, Homo sapiens
  siRNA target sequence for ITPR1 (NM_002222.1,6056-6074).
cgttgccaaaataacaaga

SEQ ID NO: 247319 - DNA, 19 bp, Homo sapiens
  siRNA target sequence for ITPR1 (NM_002222.1,6146-6164).
ggtcttctgggcttgtata

SEQ ID NO: 247320 - DNA, 19 bp, Homo sapiens
  siRNA target sequence for ITPR1 (NM_002222.1,6147-6165).
gtcttctgggcttgtatat

SEQ ID NO: 247321 - DNA, 19 bp, Homo sapiens
  siRNA target sequence for ITPR1 (NM_002222.1,6154-6172).
gggcttgtatataaatgaa

SEQ ID NO: 247322 - DNA, 19 bp, Homo sapiens
  siRNA target sequence for ITPR1 (NM_002222.1,6179-6197).
gtagcgcttatcaaccaaa

SEQ ID NO: 247323 - DNA, 19 bp, Homo sapiens
  siRNA target sequence for ITPR1 (NM_002222.1,6302-6320).
ctcaatgatatcaatcctt

SEQ ID NO: 247324 - DNA, 19 bp, Homo sapiens
  siRNA target sequence for ITPR1 (NM_002222.1,6331-6349).
gaggatggaccttgtgtta

SEQ ID NO: 247325 - DNA, 19 bp, Homo sapiens
  siRNA target sequence for ITPR1 (NM_002222.1,6334-6352).
gatggaccttgtgttagaa

SEQ ID NO: 247326 - DNA, 19 bp, Homo sapiens
  siRNA target sequence for ITPR1 (NM_002222.1,6344-6362).
gtgttagaactgaagaaca

SEQ ID NO: 247327 - DNA, 19 bp, Homo sapiens
  siRNA target sequence for ITPR1 (NM_002222.1,6346-6364).
gttagaactgaagaacaat

SEQ ID NO: 247328 - DNA, 19 bp, Homo sapiens
  siRNA target sequence for ITPR1 (NM_002222.1,6415-6433).
cgcagagaggatactttat

SEQ ID NO: 247329 - DNA, 19 bp, Homo sapiens
  siRNA target sequence for ITPR1 (NM_002222.1,6417-6435).
cagagaggatactttataa

SEQ ID NO: 247330 - DNA, 19 bp, Homo sapiens
  siRNA target sequence for ITPR1 (NM_002222.1,6419-6437).
gagaggatactttataaca

SEQ ID NO: 247331 - DNA, 19 bp, Homo sapiens
  siRNA target sequence for ITPR1 (NM_002222.1,6545-6563).
gtggggcacaacatctaca

SEQ ID NO: 247332 - DNA, 19 bp, Homo sapiens
  siRNA target sequence for ITPR1 (NM_002222.1,6548-6566).
gggcacaacatctacatat

SEQ ID NO: 247333 - DNA, 19 bp, Homo sapiens
  siRNA target sequence for ITPR1 (NM_002222.1,6575-6593).
cagttggctcggcataaca

SEQ ID NO: 247334 - DNA, 19 bp, Homo sapiens
  siRNA target sequence for ITPR1 (NM_002222.1,6580-6598).
ggctcggcataacaaagaa

SEQ ID NO: 247335 - DNA, 19 bp, Homo sapiens
  siRNA target sequence for ITPR1 (NM_002222.1,6582-6600).
ctcggcataacaaagaact

SEQ ID NO: 247336 - DNA, 19 bp, Homo sapiens
  siRNA target sequence for ITPR1 (NM_002222.1,6665-6683).
cacacggcgcagatagaga

SEQ ID NO: 247337 - DNA, 19 bp, Homo sapiens
  siRNA target sequence for ITPR1 (NM_002222.1,6667-6685).
cacggcgcagatagagatt

SEQ ID NO: 247338 - DNA, 19 bp, Homo sapiens
  siRNA target sequence for ITPR1 (NM_002222.1,6669-6687).
cggcgcagatagagattgt

SEQ ID NO: 247339 - DNA, 19 bp, Homo sapiens
  siRNA target sequence for ITPR1 (NM_002222.1,6671-6689).
gcgcagatagagattgtca

SEQ ID NO: 247340 - DNA, 19 bp, Homo sapiens
  siRNA target sequence for ITPR1 (NM_002222.1,6676-6694).
gatagagattgtcagatta

SEQ ID NO: 247341 - DNA, 19 bp, Homo sapiens
  siRNA target sequence for ITPR1 (NM_002222.1,6697-6715).
ccgaacaatggaacagata

SEQ ID NO: 247342 - DNA, 19 bp, Homo sapiens
  siRNA target sequence for ITPR1 (NM_002222.1,6702-6720).
caatggaacagatagtctt

SEQ ID NO: 247343 - DNA, 19 bp, Homo sapiens
  siRNA target sequence for ITPR1 (NM_002222.1,6729-6747).
ccagcatatgtgaattcct

SEQ ID NO: 247344 - DNA, 19 bp, Homo sapiens
  siRNA target sequence for ITPR1 (NM_002222.1,6755-6773).
gagtcaaaactacgaattt

SEQ ID NO: 247345 - DNA, 19 bp, Homo sapiens
  siRNA target sequence for ITPR1 (NM_002222.1,6764-6782).
ctacgaatttactatacta

SEQ ID NO: 247346 - DNA, 19 bp, Homo sapiens
  siRNA target sequence for ITPR1 (NM_002222.1,6800-6818).
ggcagcaaaatcaatgatt

SEQ ID NO: 247347 - DNA, 19 bp, Homo sapiens
  siRNA target sequence for ITPR1 (NM_002222.1,6897-6915).
gtgcccgcaacatgtcttt

SEQ ID NO: 247348 - DNA, 19 bp, Homo sapiens
  siRNA target sequence for ITPR1 (NM_002222.1,6899-6917).
gcccgcaacatgtctttct

SEQ ID NO: 247349 - DNA, 19 bp, Homo sapiens
  siRNA target sequence for ITPR1 (NM_002222.1,6916-6934).
ctggagcagcatttcgttt

SEQ ID NO: 247350 - DNA, 19 bp, Homo sapiens
  siRNA target sequence for ITPR1 (NM_002222.1,6921-6939).
gcagcatttcgtttaacct

SEQ ID NO: 247351 - DNA, 19 bp, Homo sapiens
  siRNA target sequence for ITPR1 (NM_002222.1,7108-7126).
cacaattctacgactgata

SEQ ID NO: 247352 - DNA, 19 bp, Homo sapiens
  siRNA target sequence for ITPR1 (NM_002222.1,7110-7128).
caattctacgactgatatt

SEQ ID NO: 247353 - DNA, 19 bp, Homo sapiens
  siRNA target sequence for ITPR1 (NM_002222.1,7138-7156).
gttacaacccacgttgttt

SEQ ID NO: 247354 - DNA, 19 bp, Homo sapiens
  siRNA target sequence for ITPR1 (NM_002222.1,7259-7277).
gttgagttcctctatcatt

SEQ ID NO: 247355 - DNA, 19 bp, Homo sapiens
  siRNA target sequence for ITPR1 (NM_002222.1,7442-7460).
ctcgtttacctgttctcaa

SEQ ID NO: 247356 - DNA, 19 bp, Homo sapiens
  siRNA target sequence for ITPR1 (NM_002222.1,7444-7462).
cgtttacctgttctcaata

SEQ ID NO: 247357 - DNA, 19 bp, Homo sapiens
  siRNA target sequence for ITPR1 (NM_002222.1,7456-7474).
ctcaatagtgggctatctt

SEQ ID NO: 247358 - DNA, 19 bp, Homo sapiens
  siRNA target sequence for ITPR1 (NM_002222.1,7505-7523).
gataggctgcccaatgaaa

SEQ ID NO: 247359 - DNA, 19 bp, Homo sapiens
  siRNA target sequence for ITPR1 (NM_002222.1,7533-7551).
cagaaaccggcgagagttt

SEQ ID NO: 247360 - DNA, 19 bp, Homo sapiens
  siRNA target sequence for ITPR1 (NM_002222.1,7729-7747).
gggtggagtaggagatgta

SEQ ID NO: 247361 - DNA, 19 bp, Homo sapiens
  siRNA target sequence for ITPR1 (NM_002222.1,8044-8062).
ggactccaccgaatatact

SEQ ID NO: 247362 - DNA, 19 bp, Homo sapiens
  siRNA target sequence for ITPR1 (NM_002222.1,8232-8250).
gccagctgtcggaattaaa

SEQ ID NO: 247363 - DNA, 19 bp, Homo sapiens
  siRNA target sequence for ITPR1 (NM_002222.1,8236-8254).
gctgtcggaattaaaggat

SEQ ID NO: 247364 - DNA, 19 bp, Homo sapiens
  siRNA target sequence for ITPR1 (NM_002222.1,8241-8259).
cggaattaaaggatcagat

SEQ ID NO: 247365 - DNA, 19 bp, Homo sapiens
  siRNA target sequence for ITPR1 (NM_002222.1,8301-8319).
gacatcctcctcacatgaa

SEQ ID NO: 247366 - DNA, 19 bp, Homo sapiens
  siRNA target sequence for ITPR1 (NM_002222.1,8317-8335).
gaatgtcaacccacaacaa

SEQ ID NO: 247367 - DNA, 19 bp, Homo sapiens
  siRNA target sequence for ITPR2 (NM_002223.1,433-451).
gtccagcttcctctacata

SEQ ID NO: 247368 - DNA, 19 bp, Homo sapiens
  siRNA target sequence for ITPR2 (NM_002223.1,601-619).
ccctatgaacagatattct

SEQ ID NO: 247369 - DNA, 19 bp, Homo sapiens
  siRNA target sequence for ITPR2 (NM_002223.1,675-693).
cagccttgctgaagaaact

SEQ ID NO: 247370 - DNA, 19 bp, Homo sapiens
  siRNA target sequence for ITPR2 (NM_002223.1,678-696).
ccttgctgaagaaactaca

SEQ ID NO: 247371 - DNA, 19 bp, Homo sapiens
  siRNA target sequence for ITPR2 (NM_002223.1,722-740).
caaaatgaatcggagaata

SEQ ID NO: 247372 - DNA, 19 bp, Homo sapiens
  siRNA target sequence for ITPR2 (NM_002223.1,769-787).
cagtaatgttatacaacta

SEQ ID NO: 247373 - DNA, 19 bp, Homo sapiens
  siRNA target sequence for ITPR2 (NM_002223.1,771-789).
gtaatgttatacaactact

SEQ ID NO: 247374 - DNA, 19 bp, Homo sapiens
  siRNA target sequence for ITPR2 (NM_002223.1,823-841).
caagagattacctgcttta

SEQ ID NO: 247375 - DNA, 19 bp, Homo sapiens
  siRNA target sequence for ITPR2 (NM_002223.1,927-945).
gaagcgagggtgacaatat

SEQ ID NO: 247376 - DNA, 19 bp, Homo sapiens
  siRNA target sequence for ITPR2 (NM_002223.1,930-948).
gcgagggtgacaatattgt

SEQ ID NO: 247377 - DNA, 19 bp, Homo sapiens
  siRNA target sequence for ITPR2 (NM_002223.1,934-952).
gggtgacaatattgttgta

SEQ ID NO: 247378 - DNA, 19 bp, Homo sapiens
  siRNA target sequence for ITPR2 (NM_002223.1,950-968).
gtaggagataaagttgttt

SEQ ID NO: 247379 - DNA, 19 bp, Homo sapiens
  siRNA target sequence for ITPR2 (NM_002223.1,1006-1024).
caacatagagcttcttgat

SEQ ID NO: 247380 - DNA, 19 bp, Homo sapiens
  siRNA target sequence for ITPR2 (NM_002223.1,1040-1058).
gaggtgaatgctgtcaatt

SEQ ID NO: 247381 - DNA, 19 bp, Homo sapiens
  siRNA target sequence for ITPR2 (NM_002223.1,1063-1081).
caccagctggaaaatcact

SEQ ID NO: 247382 - DNA, 19 bp, Homo sapiens
  siRNA target sequence for ITPR2 (NM_002223.1,1065-1083).
ccagctggaaaatcacttt

SEQ ID NO: 247383 - DNA, 19 bp, Homo sapiens
  siRNA target sequence for ITPR2 (NM_002223.1,1068-1086).
gctggaaaatcactttatt

SEQ ID NO: 247384 - DNA, 19 bp, Homo sapiens
  siRNA target sequence for ITPR2 (NM_002223.1,1102-1120).
ctatcgagaggatgtatta

SEQ ID NO: 247385 - DNA, 19 bp, Homo sapiens
  siRNA target sequence for ITPR2 (NM_002223.1,1124-1142).
ggaggggacgttgttagat

SEQ ID NO: 247386 - DNA, 19 bp, Homo sapiens
  siRNA target sequence for ITPR2 (NM_002223.1,1125-1143).
gaggggacgttgttagatt

SEQ ID NO: 247387 - DNA, 19 bp, Homo sapiens
  siRNA target sequence for ITPR2 (NM_002223.1,1127-1145).
ggggacgttgttagattat

SEQ ID NO: 247388 - DNA, 19 bp, Homo sapiens
  siRNA target sequence for ITPR2 (NM_002223.1,1128-1146).
gggacgttgttagattatt

SEQ ID NO: 247389 - DNA, 19 bp, Homo sapiens
  siRNA target sequence for ITPR2 (NM_002223.1,1129-1147).
ggacgttgttagattattt

SEQ ID NO: 247390 - DNA, 19 bp, Homo sapiens
  siRNA target sequence for ITPR2 (NM_002223.1,1151-1169).
gcggaacaagagaagtttt

SEQ ID NO: 247391 - DNA, 19 bp, Homo sapiens
  siRNA target sequence for ITPR2 (NM_002223.1,1152-1170).
cggaacaagagaagttttt

SEQ ID NO: 247392 - DNA, 19 bp, Homo sapiens
  siRNA target sequence for ITPR2 (NM_002223.1,1232-1250).
gctacttctgctactagtt

SEQ ID NO: 247393 - DNA, 19 bp, Homo sapiens
  siRNA target sequence for ITPR2 (NM_002223.1,1340-1358).
cttgcaactggaaactatt

SEQ ID NO: 247394 - DNA, 19 bp, Homo sapiens
  siRNA target sequence for ITPR2 (NM_002223.1,1365-1383).
cagagcttaatcctgatta

SEQ ID NO: 247395 - DNA, 19 bp, Homo sapiens
  siRNA target sequence for ITPR2 (NM_002223.1,1369-1387).
gcttaatcctgattatcga

SEQ ID NO: 247396 - DNA, 19 bp, Homo sapiens
  siRNA target sequence for ITPR2 (NM_002223.1,1421-1439).
ggagtccctccaacttcaa

SEQ ID NO: 247397 - DNA, 19 bp, Homo sapiens
  siRNA target sequence for ITPR2 (NM_002223.1,1422-1440).
gagtccctccaacttcaaa

SEQ ID NO: 247398 - DNA, 19 bp, Homo sapiens
  siRNA target sequence for ITPR2 (NM_002223.1,1577-1595).
gttcggttaaggcatttat

SEQ ID NO: 247399 - DNA, 19 bp, Homo sapiens
  siRNA target sequence for ITPR2 (NM_002223.1,1580-1598).
cggttaaggcatttatgca

SEQ ID NO: 247400 - DNA, 19 bp, Homo sapiens
  siRNA target sequence for ITPR2 (NM_002223.1,1608-1626).
gggtaaccagtactagtat

SEQ ID NO: 247401 - DNA, 19 bp, Homo sapiens
  siRNA target sequence for ITPR2 (NM_002223.1,1643-1661).
gaagagaggcctgttatgt

SEQ ID NO: 247402 - DNA, 19 bp, Homo sapiens
  siRNA target sequence for ITPR2 (NM_002223.1,1650-1668).
ggcctgttatgttaaagat

SEQ ID NO: 247403 - DNA, 19 bp, Homo sapiens
  siRNA target sequence for ITPR2 (NM_002223.1,1651-1669).
gcctgttatgttaaagatt

SEQ ID NO: 247404 - DNA, 19 bp, Homo sapiens
  siRNA target sequence for ITPR2 (NM_002223.1,1655-1673).
gttatgttaaagattggaa

SEQ ID NO: 247405 - DNA, 19 bp, Homo sapiens
  siRNA target sequence for ITPR2 (NM_002223.1,1675-1693).
ctgccaaaccaaagaagat

SEQ ID NO: 247406 - DNA, 19 bp, Homo sapiens
  siRNA target sequence for ITPR2 (NM_002223.1,1728-1746).
ctgaagttcgagacttaga

SEQ ID NO: 247407 - DNA, 19 bp, Homo sapiens
  siRNA target sequence for ITPR2 (NM_002223.1,1730-1748).
gaagttcgagacttagact

SEQ ID NO: 247408 - DNA, 19 bp, Homo sapiens
  siRNA target sequence for ITPR2 (NM_002223.1,1752-1770).
ccaatgatgccaataaagt

SEQ ID NO: 247409 - DNA, 19 bp, Homo sapiens
  siRNA target sequence for ITPR2 (NM_002223.1,1769-1787).
gtactagcgaccacagtta

SEQ ID NO: 247410 - DNA, 19 bp, Homo sapiens
  siRNA target sequence for ITPR2 (NM_002223.1,1772-1790).
ctagcgaccacagttaaaa

SEQ ID NO: 247411 - DNA, 19 bp, Homo sapiens
  siRNA target sequence for ITPR2 (NM_002223.1,1776-1794).
cgaccacagttaaaaagct

SEQ ID NO: 247412 - DNA, 19 bp, Homo sapiens
  siRNA target sequence for ITPR2 (NM_002223.1,1792-1810).
gctagaaaacggcacaata

SEQ ID NO: 247413 - DNA, 19 bp, Homo sapiens
  siRNA target sequence for ITPR2 (NM_002223.1,1803-1821).
gcacaataactcagaatga

SEQ ID NO: 247414 - DNA, 19 bp, Homo sapiens
  siRNA target sequence for ITPR2 (NM_002223.1,1898-1916).
ctggatgtggttatcacta

SEQ ID NO: 247415 - DNA, 19 bp, Homo sapiens
  siRNA target sequence for ITPR2 (NM_002223.1,1920-1938).
caaaccgagagcgtcaaaa

SEQ ID NO: 247416 - DNA, 19 bp, Homo sapiens
  siRNA target sequence for ITPR2 (NM_002223.1,1925-1943).
cgagagcgtcaaaaattga

SEQ ID NO: 247417 - DNA, 19 bp, Homo sapiens
  siRNA target sequence for ITPR2 (NM_002223.1,1926-1944).
gagagcgtcaaaaattgat

SEQ ID NO: 247418 - DNA, 19 bp, Homo sapiens
  siRNA target sequence for ITPR2 (NM_002223.1,1928-1946).
gagcgtcaaaaattgatga

SEQ ID NO: 247419 - DNA, 19 bp, Homo sapiens
  siRNA target sequence for ITPR2 (NM_002223.1,1957-1975).
catactggcacaggtattt

SEQ ID NO: 247420 - DNA, 19 bp, Homo sapiens
  siRNA target sequence for ITPR2 (NM_002223.1,2017-2035).
ctcgatgctgagacttgaa

SEQ ID NO: 247421 - DNA, 19 bp, Homo sapiens
  siRNA target sequence for ITPR2 (NM_002223.1,2036-2054).
gatctgggggatcaaagat

SEQ ID NO: 247422 - DNA, 19 bp, Homo sapiens
  siRNA target sequence for ITPR2 (NM_002223.1,2041-2059).
gggggatcaaagatatgca

SEQ ID NO: 247423 - DNA, 19 bp, Homo sapiens
  siRNA target sequence for ITPR2 (NM_002223.1,2052-2070).
gatatgcaccctacaagta

SEQ ID NO: 247424 - DNA, 19 bp, Homo sapiens
  siRNA target sequence for ITPR2 (NM_002223.1,2120-2138).
cggaaaaatcaggaatata

SEQ ID NO: 247425 - DNA, 19 bp, Homo sapiens
  siRNA target sequence for ITPR2 (NM_002223.1,2188-2206).
ggcagaagatactatcaca

SEQ ID NO: 247426 - DNA, 19 bp, Homo sapiens
  siRNA target sequence for ITPR2 (NM_002223.1,2322-2340).
cagatctgtgtgtgtctaa

SEQ ID NO: 247427 - DNA, 19 bp, Homo sapiens
  siRNA target sequence for ITPR2 (NM_002223.1,2327-2345).
ctgtgtgtgtctaatacca

SEQ ID NO: 247428 - DNA, 19 bp, Homo sapiens
  siRNA target sequence for ITPR2 (NM_002223.1,2361-2379).
ctcaagaactcatctgtaa

SEQ ID NO: 247429 - DNA, 19 bp, Homo sapiens
  siRNA target sequence for ITPR2 (NM_002223.1,2574-2592).
gcaccaaagctgacttaga

SEQ ID NO: 247430 - DNA, 19 bp, Homo sapiens
  siRNA target sequence for ITPR2 (NM_002223.1,2587-2605).
cttagaagttcttacctat

SEQ ID NO: 247431 - DNA, 19 bp, Homo sapiens
  siRNA target sequence for ITPR2 (NM_002223.1,2640-2658).
gcttggatcgccagtatct

SEQ ID NO: 247432 - DNA, 19 bp, Homo sapiens
  siRNA target sequence for ITPR2 (NM_002223.1,2649-2667).
gccagtatctggccataaa

SEQ ID NO: 247433 - DNA, 19 bp, Homo sapiens
  siRNA target sequence for ITPR2 (NM_002223.1,2659-2677).
ggccataaaccagatttct

SEQ ID NO: 247434 - DNA, 19 bp, Homo sapiens
  siRNA target sequence for ITPR2 (NM_002223.1,2832-2850).
cagaaatccccacaaagat

SEQ ID NO: 247435 - DNA, 19 bp, Homo sapiens
  siRNA target sequence for ITPR2 (NM_002223.1,2842-2860).
cacaaagatcacaattcat

SEQ ID NO: 247436 - DNA, 19 bp, Homo sapiens
  siRNA target sequence for ITPR2 (NM_002223.1,2844-2862).
caaagatcacaattcatga

SEQ ID NO: 247437 - DNA, 19 bp, Homo sapiens
  siRNA target sequence for ITPR2 (NM_002223.1,2851-2869).
cacaattcatgaatatgat

SEQ ID NO: 247438 - DNA, 19 bp, Homo sapiens
  siRNA target sequence for ITPR2 (NM_002223.1,2913-2931).
ccctgacaatggaatttgt

SEQ ID NO: 247439 - DNA, 19 bp, Homo sapiens
  siRNA target sequence for ITPR2 (NM_002223.1,3014-3032).
cacttggctcggaatctta

SEQ ID NO: 247440 - DNA, 19 bp, Homo sapiens
  siRNA target sequence for ITPR2 (NM_002223.1,3016-3034).
cttggctcggaatcttata

SEQ ID NO: 247441 - DNA, 19 bp, Homo sapiens
  siRNA target sequence for ITPR2 (NM_002223.1,3059-3077).
gagttattaaggctaacaa

SEQ ID NO: 247442 - DNA, 19 bp, Homo sapiens
  siRNA target sequence for ITPR2 (NM_002223.1,3083-3101).
cttctggctattttagaca

SEQ ID NO: 247443 - DNA, 19 bp, Homo sapiens
  siRNA target sequence for ITPR2 (NM_002223.1,3088-3106).
ggctattttagacattgta

SEQ ID NO: 247444 - DNA, 19 bp, Homo sapiens
  siRNA target sequence for ITPR2 (NM_002223.1,3115-3133).
catgtcatcatactttgaa

SEQ ID NO: 247445 - DNA, 19 bp, Homo sapiens
  siRNA target sequence for ITPR2 (NM_002223.1,3163-3181).
caatgtgatgagaaccatt

SEQ ID NO: 247446 - DNA, 19 bp, Homo sapiens
  siRNA target sequence for ITPR2 (NM_002223.1,3365-3383).
gtcagactggattatagga

SEQ ID NO: 247447 - DNA, 19 bp, Homo sapiens
  siRNA target sequence for ITPR2 (NM_002223.1,3373-3391).
ggattataggatctcatat

SEQ ID NO: 247448 - DNA, 19 bp, Homo sapiens
  siRNA target sequence for ITPR2 (NM_002223.1,3385-3403).
ctcatatatgctgtcaata

SEQ ID NO: 247449 - DNA, 19 bp, Homo sapiens
  siRNA target sequence for ITPR2 (NM_002223.1,3453-3471).
gtggatctccagacacttt

SEQ ID NO: 247450 - DNA, 19 bp, Homo sapiens
  siRNA target sequence for ITPR2 (NM_002223.1,3480-3498).
cagctattgttcctgatat

SEQ ID NO: 247451 - DNA, 19 bp, Homo sapiens
  siRNA target sequence for ITPR2 (NM_002223.1,3513-3531).
ctcaggcagaaactatgtt

SEQ ID NO: 247452 - DNA, 19 bp, Homo sapiens
  siRNA target sequence for ITPR2 (NM_002223.1,3525-3543).
ctatgtttgcgggaagaaa

SEQ ID NO: 247453 - DNA, 19 bp, Homo sapiens
  siRNA target sequence for ITPR2 (NM_002223.1,3683-3701).
gaggttttacaggcattta

SEQ ID NO: 247454 - DNA, 19 bp, Homo sapiens
  siRNA target sequence for ITPR2 (NM_002223.1,3696-3714).
catttaagcaggtgcaatt

SEQ ID NO: 247455 - DNA, 19 bp, Homo sapiens
  siRNA target sequence for ITPR2 (NM_002223.1,3709-3727).
gcaattactggtgtctaat

SEQ ID NO: 247456 - DNA, 19 bp, Homo sapiens
  siRNA target sequence for ITPR2 (NM_002223.1,3723-3741).
ctaatcaagacgtagataa

SEQ ID NO: 247457 - DNA, 19 bp, Homo sapiens
  siRNA target sequence for ITPR2 (NM_002223.1,3728-3746).
caagacgtagataactaca

SEQ ID NO: 247458 - DNA, 19 bp, Homo sapiens
  siRNA target sequence for ITPR2 (NM_002223.1,3734-3752).
gtagataactacaagcaaa

SEQ ID NO: 247459 - DNA, 19 bp, Homo sapiens
  siRNA target sequence for ITPR2 (NM_002223.1,3737-3755).
gataactacaagcaaatca

SEQ ID NO: 247460 - DNA, 19 bp, Homo sapiens
  siRNA target sequence for ITPR2 (NM_002223.1,3748-3766).
gcaaatcaaggcagatcta

SEQ ID NO: 247461 - DNA, 19 bp, Homo sapiens
  siRNA target sequence for ITPR2 (NM_002223.1,3772-3790).
gcttcgactgacagtagaa

SEQ ID NO: 247462 - DNA, 19 bp, Homo sapiens
  siRNA target sequence for ITPR2 (NM_002223.1,3776-3794).
cgactgacagtagaaaagt

SEQ ID NO: 247463 - DNA, 19 bp, Homo sapiens
  siRNA target sequence for ITPR2 (NM_002223.1,3814-3832).
gagcagcaactatgagaat

SEQ ID NO: 247464 - DNA, 19 bp, Homo sapiens
  siRNA target sequence for ITPR2 (NM_002223.1,3869-3887).
gagccaattgaggaatcaa

SEQ ID NO: 247465 - DNA, 19 bp, Homo sapiens
  siRNA target sequence for ITPR2 (NM_002223.1,3902-3920).
gtgcaggatggaacaaaga

SEQ ID NO: 247466 - DNA, 19 bp, Homo sapiens
  siRNA target sequence for ITPR2 (NM_002223.1,3956-3974).
cggattgtaaaggagattt

SEQ ID NO: 247467 - DNA, 19 bp, Homo sapiens
  siRNA target sequence for ITPR2 (NM_002223.1,3957-3975).
ggattgtaaaggagatttt

SEQ ID NO: 247468 - DNA, 19 bp, Homo sapiens
  siRNA target sequence for ITPR2 (NM_002223.1,3962-3980).
gtaaaggagattttgatca

SEQ ID NO: 247469 - DNA, 19 bp, Homo sapiens
  siRNA target sequence for ITPR2 (NM_002223.1,4012-4030).
gtgtcggaatcaacatcaa

SEQ ID NO: 247470 - DNA, 19 bp, Homo sapiens
  siRNA target sequence for ITPR2 (NM_002223.1,4017-4035).
ggaatcaacatcaacgatt

SEQ ID NO: 247471 - DNA, 19 bp, Homo sapiens
  siRNA target sequence for ITPR2 (NM_002223.1,4022-4040).
caacatcaacgattactga

SEQ ID NO: 247472 - DNA, 19 bp, Homo sapiens
  siRNA target sequence for ITPR2 (NM_002223.1,4025-4043).
catcaacgattactgaaaa

SEQ ID NO: 247473 - DNA, 19 bp, Homo sapiens
  siRNA target sequence for ITPR2 (NM_002223.1,4081-4099).
gataccctatgaaaagaat

SEQ ID NO: 247474 - DNA, 19 bp, Homo sapiens
  siRNA target sequence for ITPR2 (NM_002223.1,4133-4151).
catacatttctgcagaatt

SEQ ID NO: 247475 - DNA, 19 bp, Homo sapiens
  siRNA target sequence for ITPR2 (NM_002223.1,4147-4165).
gaatttctgtcgaggaaat

SEQ ID NO: 247476 - DNA, 19 bp, Homo sapiens
  siRNA target sequence for ITPR2 (NM_002223.1,4264-4282).
ccatctgtgcaacgaaatt

SEQ ID NO: 247477 - DNA, 19 bp, Homo sapiens
  siRNA target sequence for ITPR2 (NM_002223.1,4290-4308).
gagttgtacaacactttgt

SEQ ID NO: 247478 - DNA, 19 bp, Homo sapiens
  siRNA target sequence for ITPR2 (NM_002223.1,4342-4360).
gtacctgaggtttttgcaa

SEQ ID NO: 247479 - DNA, 19 bp, Homo sapiens
  siRNA target sequence for ITPR2 (NM_002223.1,4348-4366).
gaggtttttgcaaacaatt

SEQ ID NO: 247480 - DNA, 19 bp, Homo sapiens
  siRNA target sequence for ITPR2 (NM_002223.1,4399-4417).
ccaggatatggtaatgaca

SEQ ID NO: 247481 - DNA, 19 bp, Homo sapiens
  siRNA target sequence for ITPR2 (NM_002223.1,4433-4451).
ggtgaagacgtgctgatat

SEQ ID NO: 247482 - DNA, 19 bp, Homo sapiens
  siRNA target sequence for ITPR2 (NM_002223.1,4434-4452).
gtgaagacgtgctgatatt

SEQ ID NO: 247483 - DNA, 19 bp, Homo sapiens
  siRNA target sequence for ITPR2 (NM_002223.1,4475-4493).
ccaatccttctccatatga

SEQ ID NO: 247484 - DNA, 19 bp, Homo sapiens
  siRNA target sequence for ITPR2 (NM_002223.1,4481-4499).
cttctccatatgatgtgtt

SEQ ID NO: 247485 - DNA, 19 bp, Homo sapiens
  siRNA target sequence for ITPR2 (NM_002223.1,4622-4640).
ccgctggacgacatagtga

SEQ ID NO: 247486 - DNA, 19 bp, Homo sapiens
  siRNA target sequence for ITPR2 (NM_002223.1,4749-4767).
gtaaccacatttggaaatt

SEQ ID NO: 247487 - DNA, 19 bp, Homo sapiens
  siRNA target sequence for ITPR2 (NM_002223.1,4798-4816).
ggtttgcaacacaactaca

SEQ ID NO: 247488 - DNA, 19 bp, Homo sapiens
  siRNA target sequence for ITPR2 (NM_002223.1,4857-4875).
ctgagtcaataatgaatat

SEQ ID NO: 247489 - DNA, 19 bp, Homo sapiens
  siRNA target sequence for ITPR2 (NM_002223.1,4879-4897).
gagcggcttctttaattct

SEQ ID NO: 247490 - DNA, 19 bp, Homo sapiens
  siRNA target sequence for ITPR2 (NM_002223.1,5047-5065).
ggcaaaaaatcgtggaatt

SEQ ID NO: 247491 - DNA, 19 bp, Homo sapiens
  siRNA target sequence for ITPR2 (NM_002223.1,5078-5096).
gatttggacagccaagtta

SEQ ID NO: 247492 - DNA, 19 bp, Homo sapiens
  siRNA target sequence for ITPR2 (NM_002223.1,5083-5101).
ggacagccaagttaatact

SEQ ID NO: 247493 - DNA, 19 bp, Homo sapiens
  siRNA target sequence for ITPR2 (NM_002223.1,5086-5104).
cagccaagttaatactctt

SEQ ID NO: 247494 - DNA, 19 bp, Homo sapiens
  siRNA target sequence for ITPR2 (NM_002223.1,5088-5106).
gccaagttaatactctttt

SEQ ID NO: 247495 - DNA, 19 bp, Homo sapiens
  siRNA target sequence for ITPR2 (NM_002223.1,5090-5108).
caagttaatactcttttca

SEQ ID NO: 247496 - DNA, 19 bp, Homo sapiens
  siRNA target sequence for ITPR2 (NM_002223.1,5141-5159).
gcaatgggttggagactat

SEQ ID NO: 247497 - DNA, 19 bp, Homo sapiens
  siRNA target sequence for ITPR2 (NM_002223.1,5166-5184).
gctctgggccacgctttaa

SEQ ID NO: 247498 - DNA, 19 bp, Homo sapiens
  siRNA target sequence for ITPR2 (NM_002223.1,5169-5187).
ctgggccacgctttaagga

SEQ ID NO: 247499 - DNA, 19 bp, Homo sapiens
  siRNA target sequence for ITPR2 (NM_002223.1,5274-5292).
caatgatgcaggctgaatt

SEQ ID NO: 247500 - DNA, 19 bp, Homo sapiens
  siRNA target sequence for ITPR2 (NM_002223.1,5295-5313).
cagtgttggttgatgtatt

SEQ ID NO: 247501 - DNA, 19 bp, Homo sapiens
  siRNA target sequence for ITPR2 (NM_002223.1,5347-5365).
cgatgcaagaataagatgt

SEQ ID NO: 247502 - DNA, 19 bp, Homo sapiens
  siRNA target sequence for ITPR2 (NM_002223.1,5369-5387).
gctttcatgtcgaagttga

SEQ ID NO: 247503 - DNA, 19 bp, Homo sapiens
  siRNA target sequence for ITPR2 (NM_002223.1,5370-5388).
ctttcatgtcgaagttgat

SEQ ID NO: 247504 - DNA, 19 bp, Homo sapiens
  siRNA target sequence for ITPR2 (NM_002223.1,5377-5395).
gtcgaagttgattaatcat

SEQ ID NO: 247505 - DNA, 19 bp, Homo sapiens
  siRNA target sequence for ITPR2 (NM_002223.1,5380-5398).
gaagttgattaatcataca

SEQ ID NO: 247506 - DNA, 19 bp, Homo sapiens
  siRNA target sequence for ITPR2 (NM_002223.1,5448-5466).
cattacgagaaatgttaga

SEQ ID NO: 247507 - DNA, 19 bp, Homo sapiens
  siRNA target sequence for ITPR2 (NM_002223.1,5489-5507).
gagggtaacacattaagaa

SEQ ID NO: 247508 - DNA, 19 bp, Homo sapiens
  siRNA target sequence for ITPR2 (NM_002223.1,5513-5531).
cttctgaatcgatacttta

SEQ ID NO: 247509 - DNA, 19 bp, Homo sapiens
  siRNA target sequence for ITPR2 (NM_002223.1,5605-5623).
cttttctggacaagattca

SEQ ID NO: 247510 - DNA, 19 bp, Homo sapiens
  siRNA target sequence for ITPR2 (NM_002223.1,5612-5630).
ggacaagattcagataaga

SEQ ID NO: 247511 - DNA, 19 bp, Homo sapiens
  siRNA target sequence for ITPR2 (NM_002223.1,5613-5631).
gacaagattcagataagat

SEQ ID NO: 247512 - DNA, 19 bp, Homo sapiens
  siRNA target sequence for ITPR2 (NM_002223.1,5624-5642).
gataagatggggatatcaa

SEQ ID NO: 247513 - DNA, 19 bp, Homo sapiens
  siRNA target sequence for ITPR2 (NM_002223.1,5635-5653).
gatatcaatgtcagacatt

SEQ ID NO: 247514 - DNA, 19 bp, Homo sapiens
  siRNA target sequence for ITPR2 (NM_002223.1,5676-5694).
gtgcatcagaacttgtcat

SEQ ID NO: 247515 - DNA, 19 bp, Homo sapiens
  siRNA target sequence for ITPR2 (NM_002223.1,5684-5702).
gaacttgtcatcgatgtta

SEQ ID NO: 247516 - DNA, 19 bp, Homo sapiens
  siRNA target sequence for ITPR2 (NM_002223.1,5690-5708).
gtcatcgatgttatagtga

SEQ ID NO: 247517 - DNA, 19 bp, Homo sapiens
  siRNA target sequence for ITPR2 (NM_002223.1,5893-5911).
gacagttaataccatagat

SEQ ID NO: 247518 - DNA, 19 bp, Homo sapiens
  siRNA target sequence for ITPR2 (NM_002223.1,5904-5922).
ccatagatttaggtaacaa

SEQ ID NO: 247519 - DNA, 19 bp, Homo sapiens
  siRNA target sequence for ITPR2 (NM_002223.1,5905-5923).
catagatttaggtaacaaa

SEQ ID NO: 247520 - DNA, 19 bp, Homo sapiens
  siRNA target sequence for ITPR2 (NM_002223.1,5928-5946).
gggacgatgacaatgaatt

SEQ ID NO: 247521 - DNA, 19 bp, Homo sapiens
  siRNA target sequence for ITPR2 (NM_002223.1,5957-5975).
ggtccacgaatgagagtaa

SEQ ID NO: 247522 - DNA, 19 bp, Homo sapiens
  siRNA target sequence for ITPR2 (NM_002223.1,5963-5981).
cgaatgagagtaagagatt

SEQ ID NO: 247523 - DNA, 19 bp, Homo sapiens
  siRNA target sequence for ITPR2 (NM_002223.1,6042-6060).
ccaaagcatattgtgtata

SEQ ID NO: 247524 - DNA, 19 bp, Homo sapiens
  siRNA target sequence for ITPR2 (NM_002223.1,6047-6065).
gcatattgtgtatacagaa

SEQ ID NO: 247525 - DNA, 19 bp, Homo sapiens
  siRNA target sequence for ITPR2 (NM_002223.1,6132-6150).
ccgcagaggaagtaacaat

SEQ ID NO: 247526 - DNA, 19 bp, Homo sapiens
  siRNA target sequence for ITPR2 (NM_002223.1,6218-6236).
cgggaattgcagaacttct

SEQ ID NO: 247527 - DNA, 19 bp, Homo sapiens
  siRNA target sequence for ITPR2 (NM_002223.1,6330-6348).
gcctgttgggtctctacat

SEQ ID NO: 247528 - DNA, 19 bp, Homo sapiens
  siRNA target sequence for ITPR2 (NM_002223.1,6430-6448).
gacctgtatcgctacacat

SEQ ID NO: 247529 - DNA, 19 bp, Homo sapiens
  siRNA target sequence for ITPR2 (NM_002223.1,6493-6511).
cataaaccctcttggtaaa

SEQ ID NO: 247530 - DNA, 19 bp, Homo sapiens
  siRNA target sequence for ITPR2 (NM_002223.1,6541-6559).
gaacaatgcatctaaactt

SEQ ID NO: 247531 - DNA, 19 bp, Homo sapiens
  siRNA target sequence for ITPR2 (NM_002223.1,6630-6648).
gagaactggtggatgtgat

SEQ ID NO: 247532 - DNA, 19 bp, Homo sapiens
  siRNA target sequence for ITPR2 (NM_002223.1,6725-6743).
gatgttggacacaatatct

SEQ ID NO: 247533 - DNA, 19 bp, Homo sapiens
  siRNA target sequence for ITPR2 (NM_002223.1,6728-6746).
gttggacacaatatctata

SEQ ID NO: 247534 - DNA, 19 bp, Homo sapiens
  siRNA target sequence for ITPR2 (NM_002223.1,6732-6750).
gacacaatatctatattct

SEQ ID NO: 247535 - DNA, 19 bp, Homo sapiens
  siRNA target sequence for ITPR2 (NM_002223.1,6866-6884).
gagattgtccggcatgata

SEQ ID NO: 247536 - DNA, 19 bp, Homo sapiens
  siRNA target sequence for ITPR2 (NM_002223.1,6911-6929).
gtccccaatatatgtgaat

SEQ ID NO: 247537 - DNA, 19 bp, Homo sapiens
  siRNA target sequence for ITPR2 (NM_002223.1,6946-6964).
caagtgccgtgtgttcaat

SEQ ID NO: 247538 - DNA, 19 bp, Homo sapiens
  siRNA target sequence for ITPR2 (NM_002223.1,6949-6967).
gtgccgtgtgttcaataca

SEQ ID NO: 247539 - DNA, 19 bp, Homo sapiens
  siRNA target sequence for ITPR2 (NM_002223.1,6952-6970).
ccgtgtgttcaatacaact

SEQ ID NO: 247540 - DNA, 19 bp, Homo sapiens
  siRNA target sequence for ITPR2 (NM_002223.1,6956-6974).
gtgttcaatacaactgaaa

SEQ ID NO: 247541 - DNA, 19 bp, Homo sapiens
  siRNA target sequence for ITPR2 (NM_002223.1,7124-7142).
ctggctgtgttcatcaatt

SEQ ID NO: 247542 - DNA, 19 bp, Homo sapiens
  siRNA target sequence for ITPR2 (NM_002223.1,7126-7144).
ggctgtgttcatcaattta

SEQ ID NO: 247543 - DNA, 19 bp, Homo sapiens
  siRNA target sequence for ITPR2 (NM_002223.1,7178-7196).
ggagatgaaggtacacttt

SEQ ID NO: 247544 - DNA, 19 bp, Homo sapiens
  siRNA target sequence for ITPR2 (NM_002223.1,7188-7206).
gtacactttctccattgtt

SEQ ID NO: 247545 - DNA, 19 bp, Homo sapiens
  siRNA target sequence for ITPR2 (NM_002223.1,7200-7218).
cattgttctcggttcttct

SEQ ID NO: 247546 - DNA, 19 bp, Homo sapiens
  siRNA target sequence for ITPR2 (NM_002223.1,7273-7291).
gggtattcggccgtttctt

SEQ ID NO: 247547 - DNA, 19 bp, Homo sapiens
  siRNA target sequence for ITPR2 (NM_002223.1,7275-7293).
gtattcggccgtttcttgt

SEQ ID NO: 247548 - DNA, 19 bp, Homo sapiens
  siRNA target sequence for ITPR2 (NM_002223.1,7280-7298).
cggccgtttcttgtatcaa

SEQ ID NO: 247549 - DNA, 19 bp, Homo sapiens
  siRNA target sequence for ITPR2 (NM_002223.1,7281-7299).
ggccgtttcttgtatcaat

SEQ ID NO: 247550 - DNA, 19 bp, Homo sapiens
  siRNA target sequence for ITPR2 (NM_002223.1,7282-7300).
gccgtttcttgtatcaata

SEQ ID NO: 247551 - DNA, 19 bp, Homo sapiens
  siRNA target sequence for ITPR2 (NM_002223.1,7296-7314).
caataatgctcagatcaat

SEQ ID NO: 247552 - DNA, 19 bp, Homo sapiens
  siRNA target sequence for ITPR2 (NM_002223.1,7303-7321).
gctcagatcaatatataca

SEQ ID NO: 247553 - DNA, 19 bp, Homo sapiens
  siRNA target sequence for ITPR2 (NM_002223.1,7304-7322).
ctcagatcaatatatacaa

SEQ ID NO: 247554 - DNA, 19 bp, Homo sapiens
  siRNA target sequence for ITPR2 (NM_002223.1,7325-7343).
ggtcttgggcctacattaa

SEQ ID NO: 247555 - DNA, 19 bp, Homo sapiens
  siRNA target sequence for ITPR2 (NM_002223.1,7470-7488).
cgtatgtcctggtttgcat

SEQ ID NO: 247556 - DNA, 19 bp, Homo sapiens
  siRNA target sequence for ITPR2 (NM_002223.1,7586-7604).
cgaaatggccgctctatta

SEQ ID NO: 247557 - DNA, 19 bp, Homo sapiens
  siRNA target sequence for ITPR2 (NM_002223.1,7592-7610).
ggccgctctattattctaa

SEQ ID NO: 247558 - DNA, 19 bp, Homo sapiens
  siRNA target sequence for ITPR2 (NM_002223.1,7594-7612).
ccgctctattattctaact

SEQ ID NO: 247559 - DNA, 19 bp, Homo sapiens
  siRNA target sequence for ITPR2 (NM_002223.1,7631-7649).
ctcgtctacctgttttcca

SEQ ID NO: 247560 - DNA, 19 bp, Homo sapiens
  siRNA target sequence for ITPR2 (NM_002223.1,7633-7651).
cgtctacctgttttccatt

SEQ ID NO: 247561 - DNA, 19 bp, Homo sapiens
  siRNA target sequence for ITPR2 (NM_002223.1,7634-7652).
gtctacctgttttccatta

SEQ ID NO: 247562 - DNA, 19 bp, Homo sapiens
  siRNA target sequence for ITPR2 (NM_002223.1,7672-7690).
ggatgacttcactatggaa

SEQ ID NO: 247563 - DNA, 19 bp, Homo sapiens
  siRNA target sequence for ITPR2 (NM_002223.1,7688-7706).
gaagttgataggctgaaaa

SEQ ID NO: 247564 - DNA, 19 bp, Homo sapiens
  siRNA target sequence for ITPR2 (NM_002223.1,7728-7746).
gtcatcaagtgcctactat

SEQ ID NO: 247565 - DNA, 19 bp, Homo sapiens
  siRNA target sequence for ITPR2 (NM_002223.1,7730-7748).
catcaagtgcctactatga

SEQ ID NO: 247566 - DNA, 19 bp, Homo sapiens
  siRNA target sequence for ITPR2 (NM_002223.1,7733-7751).
caagtgcctactatgactt

SEQ ID NO: 247567 - DNA, 19 bp, Homo sapiens
  siRNA target sequence for ITPR2 (NM_002223.1,7738-7756).
gcctactatgactttaact

SEQ ID NO: 247568 - DNA, 19 bp, Homo sapiens
  siRNA target sequence for ITPR2 (NM_002223.1,7739-7757).
cctactatgactttaacta

SEQ ID NO: 247569 - DNA, 19 bp, Homo sapiens
  siRNA target sequence for ITPR2 (NM_002223.1,7851-7869).
cgtgtgacactctccttat

SEQ ID NO: 247570 - DNA, 19 bp, Homo sapiens
  siRNA target sequence for ITPR2 (NM_002223.1,7916-7934).
gtgggggatgtgctaagaa

SEQ ID NO: 247571 - DNA, 19 bp, Homo sapiens
  siRNA target sequence for ITPR2 (NM_002223.1,7932-7950).
gaaggccatcgaaagatga

SEQ ID NO: 247572 - DNA, 19 bp, Homo sapiens
  siRNA target sequence for ITPR2 (NM_002223.1,8030-8048).
ggtgttatcatcgatactt

SEQ ID NO: 247573 - DNA, 19 bp, Homo sapiens
  siRNA target sequence for ITPR2 (NM_002223.1,8031-8049).
gtgttatcatcgatacttt

SEQ ID NO: 247574 - DNA, 19 bp, Homo sapiens
  siRNA target sequence for ITPR2 (NM_002223.1,8219-8237).
gttaaagacccaacagaat

SEQ ID NO: 247575 - DNA, 19 bp, Homo sapiens
  siRNA target sequence for ITPR2 (NM_002223.1,8239-8257).
cactggacctgaaagttat

SEQ ID NO: 247576 - DNA, 19 bp, Homo sapiens
  siRNA target sequence for ITPR2 (NM_002223.1,8314-8332).
gtccctcgttagcaatgaa

SEQ ID NO: 247577 - DNA, 19 bp, Homo sapiens
  siRNA target sequence for ITPR2 (NM_002223.1,8385-8403).
ccatgagtctggtcaaaca

SEQ ID NO: 247578 - DNA, 19 bp, Homo sapiens
  siRNA target sequence for ITPR2 (NM_002223.1,8473-8491).
cttcctcggatcaaacaca

SEQ ID NO: 247579 - DNA, 19 bp, Homo sapiens
  siRNA target sequence for ITPR2 (NM_002223.1,8484-8502).
caaacacaccccatgtgaa

SEQ ID NO: 247580 - DNA, 19 bp, Homo sapiens
  siRNA target sequence for ITPR2 (NM_002223.1,8488-8506).
cacaccccatgtgaatcat

SEQ ID NO: 247581 - DNA, 19 bp, Homo sapiens
  siRNA target sequence for ITPR2 (NM_002223.1,8490-8508).
caccccatgtgaatcatca

SEQ ID NO: 247582 - DNA, 19 bp, Homo sapiens
  siRNA target sequence for PLAUR (NM_002659.1,496-514).
cggtgcatgcagtgtaaga

SEQ ID NO: 247583 - DNA, 19 bp, Homo sapiens
  siRNA target sequence for PLAUR (NM_002659.1,664-682).
cggactggcttgaagatca

SEQ ID NO: 247584 - DNA, 19 bp, Homo sapiens
  siRNA target sequence for PLAUR (NM_002659.1,761-779).
gccgttacctcgaatgcat

SEQ ID NO: 247585 - DNA, 19 bp, Homo sapiens
  siRNA target sequence for PLAUR (NM_002659.1,762-780).
ccgttacctcgaatgcatt

SEQ ID NO: 247586 - DNA, 19 bp, Homo sapiens
  siRNA target sequence for PLAUR (NM_002659.1,763-781).
cgttacctcgaatgcattt

SEQ ID NO: 247587 - DNA, 19 bp, Homo sapiens
  siRNA target sequence for PLAUR (NM_002659.1,1134-1152).
ctgccgaggccccatgaat

SEQ ID NO: 247588 - DNA, 19 bp, Homo sapiens
  siRNA target sequence for PLAUR (NM_002659.1,1136-1154).
gccgaggccccatgaatca

SEQ ID NO: 247589 - DNA, 19 bp, Homo sapiens
  siRNA target sequence for PLAUR (NM_002659.1,1138-1156).
cgaggccccatgaatcaat

SEQ ID NO: 247590 - DNA, 19 bp, Homo sapiens
  siRNA target sequence for PLAUR (NM_002659.1,1142-1160).
gccccatgaatcaatgtct

SEQ ID NO: 247591 - DNA, 19 bp, Homo sapiens
  siRNA target sequence for PLAUR (NM_002659.1,1172-1190).
gcactcacgaaccgaaaaa

SEQ ID NO: 247592 - DNA, 19 bp, Homo sapiens
  siRNA target sequence for PLAUR (NM_002659.1,1175-1193).
ctcacgaaccgaaaaacca

SEQ ID NO: 247593 - DNA, 19 bp, Homo sapiens
  siRNA target sequence for PLAUR (NM_002659.1,1183-1201).
ccgaaaaaccaaagctata

SEQ ID NO: 247594 - DNA, 19 bp, Homo sapiens
  siRNA target sequence for PLAUR (NM_002659.1,1184-1202).
cgaaaaaccaaagctatat

SEQ ID NO: 247595 - DNA, 19 bp, Homo sapiens
  siRNA target sequence for PLAUR (NM_002659.1,1262-1280).
gcatgaaccacattgatgt

SEQ ID NO: 247596 - DNA, 19 bp, Homo sapiens
  siRNA target sequence for AHSA2 (NM_152392.1,1613-1631).
ggcaacccaggaattgact

SEQ ID NO: 247597 - DNA, 19 bp, Homo sapiens
  siRNA target sequence for AHSA2 (NM_152392.1,1619-1637).
ccaggaattgactgtcaaa

SEQ ID NO: 247598 - DNA, 19 bp, Homo sapiens
  siRNA target sequence for AHSA2 (NM_152392.1,1685-1703).
ggcactgggtgtaaggatt

SEQ ID NO: 247599 - DNA, 19 bp, Homo sapiens
  siRNA target sequence for AHSA2 (NM_152392.1,1705-1723).
ccactgtggctcttcacat

SEQ ID NO: 247600 - DNA, 19 bp, Homo sapiens
  siRNA target sequence for AHSA2 (NM_152392.1,1762-1780).
gcatcttcactgtaaagga

SEQ ID NO: 247601 - DNA, 19 bp, Homo sapiens
  siRNA target sequence for AHSA2 (NM_152392.1,1769-1787).
cactgtaaaggagttaaca

SEQ ID NO: 247602 - DNA, 19 bp, Homo sapiens
  siRNA target sequence for AHSA2 (NM_152392.1,1823-1841).
ctggccagaagaacactat

SEQ ID NO: 247603 - DNA, 19 bp, Homo sapiens
  siRNA target sequence for AHSA2 (NM_152392.1,1875-1893).
gggcaaacagaattacaat

SEQ ID NO: 247604 - DNA, 19 bp, Homo sapiens
  siRNA target sequence for AHSA2 (NM_152392.1,1876-1894).
ggcaaacagaattacaatt

SEQ ID NO: 247605 - DNA, 19 bp, Homo sapiens
  siRNA target sequence for AHSA2 (NM_152392.1,1878-1896).
caaacagaattacaattga

SEQ ID NO: 247606 - DNA, 19 bp, Homo sapiens
  siRNA target sequence for AHSA2 (NM_152392.1,1890-1908).
caattgaaggagttcctat

SEQ ID NO: 247607 - DNA, 19 bp, Homo sapiens
  siRNA target sequence for AHSA2 (NM_152392.1,1898-1916).
ggagttcctatctatctgt

SEQ ID NO: 247608 - DNA, 19 bp, Homo sapiens
  siRNA target sequence for AHSA2 (NM_152392.1,1942-1960).
ggcagaagcagcattttga

SEQ ID NO: 247609 - DNA, 19 bp, Homo sapiens
  siRNA target sequence for AHSA2 (NM_152392.1,1982-2000).
gctgacccccctaaatggt

SEQ ID NO: 247610 - DNA, 19 bp, Homo sapiens
  siRNA target sequence for AIPL1 (NM_014336.2,49-67).
cgtggaaggggtcaagaaa

SEQ ID NO: 247611 - DNA, 19 bp, Homo sapiens
  siRNA target sequence for AIPL1 (NM_014336.2,87-105).
cgggcgagctcccaaactt

SEQ ID NO: 247612 - DNA, 19 bp, Homo sapiens
  siRNA target sequence for AIPL1 (NM_014336.2,89-107).
ggcgagctcccaaacttca

SEQ ID NO: 247613 - DNA, 19 bp, Homo sapiens
  siRNA target sequence for AIPL1 (NM_014336.2,111-129).
ccggatcccgagtgatctt

SEQ ID NO: 247614 - DNA, 19 bp, Homo sapiens
  siRNA target sequence for AIPL1 (NM_014336.2,112-130).
cggatcccgagtgatcttt

SEQ ID NO: 247615 - DNA, 19 bp, Homo sapiens
  siRNA target sequence for AIPL1 (NM_014336.2,114-132).
gatcccgagtgatctttca

SEQ ID NO: 247616 - DNA, 19 bp, Homo sapiens
  siRNA target sequence for AIPL1 (NM_014336.2,136-154).
ccgcaccatgaaatgtgat

SEQ ID NO: 247617 - DNA, 19 bp, Homo sapiens
  siRNA target sequence for AIPL1 (NM_014336.2,308-326).
ggggtctaccccatcctat

SEQ ID NO: 247618 - DNA, 19 bp, Homo sapiens
  siRNA target sequence for AIPL1 (NM_014336.2,491-509).
gttgatgccccgagtgatt

SEQ ID NO: 247619 - DNA, 19 bp, Homo sapiens
  siRNA target sequence for AIPL1 (NM_014336.2,773-791).
ctggagcacaccagtgata

SEQ ID NO: 247620 - DNA, 19 bp, Homo sapiens
  siRNA target sequence for ANTXR1 (NM_018153.2,308-326).
gctgcaccactggaatgaa

SEQ ID NO: 247621 - DNA, 19 bp, Homo sapiens
  siRNA target sequence for ANTXR1 (NM_018153.2,341-359).
ggaacagttggctcacaaa

SEQ ID NO: 247622 - DNA, 19 bp, Homo sapiens
  siRNA target sequence for ANTXR1 (NM_018153.2,345-363).
cagttggctcacaaattca

SEQ ID NO: 247623 - DNA, 19 bp, Homo sapiens
  siRNA target sequence for ANTXR1 (NM_018153.2,401-419).
cacccgaggaacaacctta

SEQ ID NO: 247624 - DNA, 19 bp, Homo sapiens
  siRNA target sequence for ANTXR1 (NM_018153.2,449-467).
ccgtcaaggcctagaagaa

SEQ ID NO: 247625 - DNA, 19 bp, Homo sapiens
  siRNA target sequence for ANTXR1 (NM_018153.2,451-469).
gtcaaggcctagaagaact

SEQ ID NO: 247626 - DNA, 19 bp, Homo sapiens
  siRNA target sequence for ANTXR1 (NM_018153.2,496-514).
cttacatgcatgaaggatt

SEQ ID NO: 247627 - DNA, 19 bp, Homo sapiens
  siRNA target sequence for ANTXR1 (NM_018153.2,520-538).
gggccagtgagcagattta

SEQ ID NO: 247628 - DNA, 19 bp, Homo sapiens
  siRNA target sequence for ANTXR1 (NM_018153.2,521-539).
ggccagtgagcagatttat

SEQ ID NO: 247629 - DNA, 19 bp, Homo sapiens
  siRNA target sequence for ANTXR1 (NM_018153.2,572-590).
cgtcatcattgctttgact

SEQ ID NO: 247630 - DNA, 19 bp, Homo sapiens
  siRNA target sequence for ANTXR1 (NM_018153.2,651-669).
gatcttggtgcaattgttt

SEQ ID NO: 247631 - DNA, 19 bp, Homo sapiens
  siRNA target sequence for ANTXR1 (NM_018153.2,675-693).
gttggtgtgaaagatttca

SEQ ID NO: 247632 - DNA, 19 bp, Homo sapiens
  siRNA target sequence for ANTXR1 (NM_018153.2,713-731).
gattgcggacagtaaggat

SEQ ID NO: 247633 - DNA, 19 bp, Homo sapiens
  siRNA target sequence for ANTXR1 (NM_018153.2,772-790).
gcatcatccactcaatttt

SEQ ID NO: 247634 - DNA, 19 bp, Homo sapiens
  siRNA target sequence for ANTXR1 (NM_018153.2,794-812).
gaagtcctgcatcgaaatt

SEQ ID NO: 247635 - DNA, 19 bp, Homo sapiens
  siRNA target sequence for ANTXR1 (NM_018153.2,797-815).
gtcctgcatcgaaattcta

SEQ ID NO: 247636 - DNA, 19 bp, Homo sapiens
  siRNA target sequence for ANTXR1 (NM_018153.2,819-837).
gctgaaccatccaccatat

SEQ ID NO: 247637 - DNA, 19 bp, Homo sapiens
  siRNA target sequence for ANTXR1 (NM_018153.2,841-859).
caggagagtcatttcaagt

SEQ ID NO: 247638 - DNA, 19 bp, Homo sapiens
  siRNA target sequence for ANTXR1 (NM_018153.2,844-862).
gagagtcatttcaagttgt

SEQ ID NO: 247639 - DNA, 19 bp, Homo sapiens
  siRNA target sequence for ANTXR1 (NM_018153.2,913-931).
gcagcttcaagatcaatga

SEQ ID NO: 247640 - DNA, 19 bp, Homo sapiens
  siRNA target sequence for ANTXR1 (NM_018153.2,956-974).
cttttctgtggaagatact

SEQ ID NO: 247641 - DNA, 19 bp, Homo sapiens
  siRNA target sequence for ANTXR1 (NM_018153.2,961-979).
ctgtggaagatacttattt

SEQ ID NO: 247642 - DNA, 19 bp, Homo sapiens
  siRNA target sequence for ANTXR1 (NM_018153.2,983-1001).
gtgtccagcgcctatctta

SEQ ID NO: 247643 - DNA, 19 bp, Homo sapiens
  siRNA target sequence for ANTXR1 (NM_018153.2,985-1003).
gtccagcgcctatcttaaa

SEQ ID NO: 247644 - DNA, 19 bp, Homo sapiens
  siRNA target sequence for ANTXR1 (NM_018153.2,988-1006).
cagcgcctatcttaaaaga

SEQ ID NO: 247645 - DNA, 19 bp, Homo sapiens
  siRNA target sequence for ANTXR1 (NM_018153.2,1089-1107).
cactgtagcctccacaaaa

SEQ ID NO: 247646 - DNA, 19 bp, Homo sapiens
  siRNA target sequence for ANTXR1 (NM_032208.1,1248-1266).
ggtctgcctaagaaaaagt

SEQ ID NO: 247647 - DNA, 19 bp, Homo sapiens
  siRNA target sequence for ANTXR1 (NM_032208.1,1273-1291).
cggtagacgcctcttatta

SEQ ID NO: 247648 - DNA, 19 bp, Homo sapiens
  siRNA target sequence for ANTXR1 (NM_032208.1,1274-1292).
ggtagacgcctcttattat

SEQ ID NO: 247649 - DNA, 19 bp, Homo sapiens
  siRNA target sequence for ANTXR1 (NM_032208.1,1400-1418).
gatgccggagcaggaatat

SEQ ID NO: 247650 - DNA, 19 bp, Homo sapiens
  siRNA target sequence for ANTXR1 (NM_032208.1,1432-1450).
cgcgaaatctcaacaacaa

SEQ ID NO: 247651 - DNA, 19 bp, Homo sapiens
  siRNA target sequence for ANTXR1 (NM_032208.1,1433-1451).
gcgaaatctcaacaacaat

SEQ ID NO: 247652 - DNA, 19 bp, Homo sapiens
  siRNA target sequence for ANTXR1 (NM_032208.1,1434-1452).
cgaaatctcaacaacaata

SEQ ID NO: 247653 - DNA, 19 bp, Homo sapiens
  siRNA target sequence for ANTXR1 (NM_032208.1,1435-1453).
gaaatctcaacaacaatat

SEQ ID NO: 247654 - DNA, 19 bp, Homo sapiens
  siRNA target sequence for ANTXR1 (NM_032208.1,1621-1639).
ccaagtacccactcaacaa

SEQ ID NO: 247655 - DNA, 19 bp, Homo sapiens
  siRNA target sequence for BTN1A1 (NM_001732.1,430-448).
ggggagtacacgtgctttt

SEQ ID NO: 247656 - DNA, 19 bp, Homo sapiens
  siRNA target sequence for BTN1A1 (NM_001732.1,433-451).
gagtacacgtgctttttca

SEQ ID NO: 247657 - DNA, 19 bp, Homo sapiens
  siRNA target sequence for BTN1A1 (NM_001732.1,524-542).
gtatgcaagttcaagagaa

SEQ ID NO: 247658 - DNA, 19 bp, Homo sapiens
  siRNA target sequence for BTN1A1 (NM_001732.1,645-663).
caggaatcctgatgaagaa

SEQ ID NO: 247659 - DNA, 19 bp, Homo sapiens
  siRNA target sequence for BTN1A1 (NM_001732.1,653-671).
ctgatgaagaaggtttgtt

SEQ ID NO: 247660 - DNA, 19 bp, Homo sapiens
  siRNA target sequence for BTN1A1 (NM_001732.1,722-740).
cctgctacatccagaatct

SEQ ID NO: 247661 - DNA, 19 bp, Homo sapiens
  siRNA target sequence for BTN1A1 (NM_001732.1,850-868).
ctcaccattgggtccatat

SEQ ID NO: 247662 - DNA, 19 bp, Homo sapiens
  siRNA target sequence for BTN1A1 (NM_001732.1,1190-1208).
gcgtgtgtagggagaatgt

SEQ ID NO: 247663 - DNA, 19 bp, Homo sapiens
  siRNA target sequence for BTN1A1 (NM_001732.1,1247-1265).
ggttctgggctgtagagtt

SEQ ID NO: 247664 - DNA, 19 bp, Homo sapiens
  siRNA target sequence for BTN1A1 (NM_001732.1,1251-1269).
ctgggctgtagagttgtat

SEQ ID NO: 247665 - DNA, 19 bp, Homo sapiens
  siRNA target sequence for BTN1A1 (NM_001732.1,1393-1411).
ggatctgatatctatactt

SEQ ID NO: 247666 - DNA, 19 bp, Homo sapiens
  siRNA target sequence for BTN1A1 (NM_001732.1,1409-1427).
ctttctccaatgtcacttt

SEQ ID NO: 247667 - DNA, 19 bp, Homo sapiens
  siRNA target sequence for BTN1A1 (NM_001732.1,1456-1474).
ctatggtctagcggtaaaa

SEQ ID NO: 247668 - DNA, 19 bp, Homo sapiens
  siRNA target sequence for BTN1A1 (NM_001732.1,1604-1622).
ctctccattctaagctaat

SEQ ID NO: 247669 - DNA, 19 bp, Homo sapiens
  siRNA target sequence for BTN3A2 (NM_007047.2,1227-1245).
gtcttcgtccgataccaat

SEQ ID NO: 247670 - DNA, 19 bp, Homo sapiens
  siRNA target sequence for BTN3A2 (NM_007047.2,1229-1247).
cttcgtccgataccaataa

SEQ ID NO: 247671 - DNA, 19 bp, Homo sapiens
  siRNA target sequence for BTN3A2 (NM_007047.2,1233-1251).
gtccgataccaataagtca

SEQ ID NO: 247672 - DNA, 19 bp, Homo sapiens
  siRNA target sequence for BTNL3 (NM_006707.2,133-151).
cttttgtgctcattttggt

SEQ ID NO: 247673 - DNA, 19 bp, Homo sapiens
  siRNA target sequence for BTNL3 (NM_006707.2,193-211).
ctggaccgggcaagtttgt

SEQ ID NO: 247674 - DNA, 19 bp, Homo sapiens
  siRNA target sequence for BTNL3 (NM_006707.2,417-435).
gtctctctaaggctaaaaa

SEQ ID NO: 247675 - DNA, 19 bp, Homo sapiens
  siRNA target sequence for BTNL3 (NM_006707.2,423-441).
ctaaggctaaaaaacatca

SEQ ID NO: 247676 - DNA, 19 bp, Homo sapiens
  siRNA target sequence for BTNL3 (NM_006707.2,476-494).
cagttcccagatttacgat

SEQ ID NO: 247677 - DNA, 19 bp, Homo sapiens
  siRNA target sequence for BTNL3 (NM_006707.2,570-588).
ggaggtatccagttactct

SEQ ID NO: 247678 - DNA, 19 bp, Homo sapiens
  siRNA target sequence for BTNL3 (NM_006707.2,613-631).
cttggcgcctggcttctat

SEQ ID NO: 247679 - DNA, 19 bp, Homo sapiens
  siRNA target sequence for BTNL3 (NM_006707.2,666-684).
gttgtcatggggatgataa

SEQ ID NO: 247680 - DNA, 19 bp, Homo sapiens
  siRNA target sequence for BTNL3 (NM_006707.2,671-689).
catggggatgataattgtt

SEQ ID NO: 247681 - DNA, 19 bp, Homo sapiens
  siRNA target sequence for BTNL3 (NM_006707.2,716-734).
ggcggaactgggtatgtgt

SEQ ID NO: 247682 - DNA, 19 bp, Homo sapiens
  siRNA target sequence for BTNL3 (NM_006707.2,1058-1076).
ggtggacgtgggacaaaat

SEQ ID NO: 247683 - DNA, 19 bp, Homo sapiens
  siRNA target sequence for BTNL3 (NM_006707.2,1061-1079).
ggacgtgggacaaaatgta

SEQ ID NO: 247684 - DNA, 19 bp, Homo sapiens
  siRNA target sequence for BTNL3 (NM_006707.2,1170-1188).
ctgacaacagaacatttgt

SEQ ID NO: 247685 - DNA, 19 bp, Homo sapiens
  siRNA target sequence for BTNL3 (NM_006707.2,1172-1190).
gacaacagaacatttgtat

SEQ ID NO: 247686 - DNA, 19 bp, Homo sapiens
  siRNA target sequence for BTNL3 (NM_006707.2,1319-1337).
cctgctgacatgtcagttt

SEQ ID NO: 247687 - DNA, 19 bp, Homo sapiens
  siRNA target sequence for BTNL3 (NM_006707.2,1388-1406).
ggggactcccatattcata

SEQ ID NO: 247688 - DNA, 19 bp, Homo sapiens
  siRNA target sequence for BTNL3 (NM_197975.1,682-700).
ggtacagcctgtatgatgt

SEQ ID NO: 247689 - DNA, 19 bp, Homo sapiens
  siRNA target sequence for BTNL3 (NM_197975.1,696-714).
gatgtggagatctccatta

SEQ ID NO: 247690 - DNA, 19 bp, Homo sapiens
  siRNA target sequence for BTNL3 (NM_197975.1,729-747).
gctgggagcatattgtgtt

SEQ ID NO: 247691 - DNA, 19 bp, Homo sapiens
  siRNA target sequence for BTNL3 (NM_197975.1,777-795).
gtggaatccaaggtattga

SEQ ID NO: 247692 - DNA, 19 bp, Homo sapiens
  siRNA target sequence for BTNL3 (NM_197975.1,779-797).
ggaatccaaggtattgata

SEQ ID NO: 247693 - DNA, 19 bp, Homo sapiens
  siRNA target sequence for C6orf33 (NM_133367.1,342-360).
cacgagtggcgctactact

SEQ ID NO: 247694 - DNA, 19 bp, Homo sapiens
  siRNA target sequence for C6orf33 (NM_133367.1,345-363).
gagtggcgctactacttct

SEQ ID NO: 247695 - DNA, 19 bp, Homo sapiens
  siRNA target sequence for C6orf33 (NM_133367.1,509-527).
catcctgtcgtcaatcact

SEQ ID NO: 247696 - DNA, 19 bp, Homo sapiens
  siRNA target sequence for C6orf33 (NM_133367.1,612-630).
ggcgtgagcgtttaccaat

SEQ ID NO: 247697 - DNA, 19 bp, Homo sapiens
  siRNA target sequence for C6orf33 (NM_133367.1,613-631).
gcgtgagcgtttaccaata

SEQ ID NO: 247698 - DNA, 19 bp, Homo sapiens
  siRNA target sequence for C6orf33 (NM_133367.1,614-632).
cgtgagcgtttaccaatat

SEQ ID NO: 247699 - DNA, 19 bp, Homo sapiens
  siRNA target sequence for C6orf33 (NM_133367.1,640-658).
ctttggctcatttcttcta

SEQ ID NO: 247700 - DNA, 19 bp, Homo sapiens
  siRNA target sequence for C6orf33 (NM_133367.1,684-702).
cggttctggcttttcttct

SEQ ID NO: 247701 - DNA, 19 bp, Homo sapiens
  siRNA target sequence for C6orf33 (NM_133367.1,716-734).
cttctgtggctggttatct

SEQ ID NO: 247702 - DNA, 19 bp, Homo sapiens
  siRNA target sequence for C6orf33 (NM_133367.1,748-766).
gctatgccaaatatcgtta

SEQ ID NO: 247703 - DNA, 19 bp, Homo sapiens
  siRNA target sequence for C6orf33 (NM_133367.1,811-829).
cagcaggtctggcttttat

SEQ ID NO: 247704 - DNA, 19 bp, Homo sapiens
  siRNA target sequence for C6orf33 (NM_133367.1,933-951).
gttagcgcttatttcttct

SEQ ID NO: 247705 - DNA, 19 bp, Homo sapiens
  siRNA target sequence for C6orf33 (NM_133367.1,958-976).
ccgtgcctgagaagtactt

SEQ ID NO: 247706 - DNA, 19 bp, Homo sapiens
  siRNA target sequence for C6orf33 (NM_133367.1,1105-1123).
gccatggacccctatctgt

SEQ ID NO: 247707 - DNA, 19 bp, Homo sapiens
  siRNA target sequence for C6orf80 (NM_015439.2,240-258).
cgtcacttccgtaaacaaa

SEQ ID NO: 247708 - DNA, 19 bp, Homo sapiens
  siRNA target sequence for C6orf80 (NM_015439.2,362-380).
ccccaatacccttcttctt

SEQ ID NO: 247709 - DNA, 19 bp, Homo sapiens
  siRNA target sequence for C6orf80 (NM_015439.2,364-382).
ccaatacccttcttcttca

SEQ ID NO: 247710 - DNA, 19 bp, Homo sapiens
  siRNA target sequence for C6orf80 (NM_015439.2,394-412).
gctggccgtggtgcaataa

SEQ ID NO: 247711 - DNA, 19 bp, Homo sapiens
  siRNA target sequence for C6orf80 (NM_015439.2,397-415).
ggccgtggtgcaataagga

SEQ ID NO: 247712 - DNA, 19 bp, Homo sapiens
  siRNA target sequence for C6orf80 (NM_015439.2,398-416).
gccgtggtgcaataaggaa

SEQ ID NO: 247713 - DNA, 19 bp, Homo sapiens
  siRNA target sequence for C6orf80 (NM_015439.2,449-467).
gaggagtcctaagtctttt

SEQ ID NO: 247714 - DNA, 19 bp, Homo sapiens
  siRNA target sequence for C6orf80 (NM_015439.2,559-577).
cttcacagcgaccaaagtt

SEQ ID NO: 247715 - DNA, 19 bp, Homo sapiens
  siRNA target sequence for C6orf80 (NM_015439.2,562-580).
cacagcgaccaaagttaaa

SEQ ID NO: 247716 - DNA, 19 bp, Homo sapiens
  siRNA target sequence for C6orf80 (NM_015439.2,694-712).
gagggctgctcagtctttt

SEQ ID NO: 247717 - DNA, 19 bp, Homo sapiens
  siRNA target sequence for C6orf80 (NM_015439.2,706-724).
gtcttttgaatgatttcca

SEQ ID NO: 247718 - DNA, 19 bp, Homo sapiens
  siRNA target sequence for C6orf80 (NM_015439.2,741-759).
gcatttggaaatgaatgtt

SEQ ID NO: 247719 - DNA, 19 bp, Homo sapiens
  siRNA target sequence for CD160 (NM_007053.1,253-271).
ccatcctgctggcaattgt

SEQ ID NO: 247720 - DNA, 19 bp, Homo sapiens
  siRNA target sequence for CD160 (NM_007053.1,285-303).
ggtggatgcattaacatca

SEQ ID NO: 247721 - DNA, 19 bp, Homo sapiens
  siRNA target sequence for CD160 (NM_007053.1,321-339).
gaaggaacgcgactaaact

SEQ ID NO: 247722 - DNA, 19 bp, Homo sapiens
  siRNA target sequence for CD160 (NM_007053.1,324-342).
ggaacgcgactaaacttaa

SEQ ID NO: 247723 - DNA, 19 bp, Homo sapiens
  siRNA target sequence for CD160 (NM_007053.1,325-343).
gaacgcgactaaacttaat

SEQ ID NO: 247724 - DNA, 19 bp, Homo sapiens
  siRNA target sequence for CD160 (NM_007053.1,329-347).
gcgactaaacttaatctgt

SEQ ID NO: 247725 - DNA, 19 bp, Homo sapiens
  siRNA target sequence for CD160 (NM_007053.1,474-492).
ggtgttggtgaaatatcat

SEQ ID NO: 247726 - DNA, 19 bp, Homo sapiens
  siRNA target sequence for CD160 (NM_007053.1,495-513).
cagttgatgttcaccataa

SEQ ID NO: 247727 - DNA, 19 bp, Homo sapiens
  siRNA target sequence for CD160 (NM_007053.1,578-596).
ccgccttcagggccatttt

SEQ ID NO: 247728 - DNA, 19 bp, Homo sapiens
  siRNA target sequence for CD160 (NM_007053.1,579-597).
cgccttcagggccattttt

SEQ ID NO: 247729 - DNA, 19 bp, Homo sapiens
  siRNA target sequence for CD160 (NM_007053.1,629-647).
cacagtgacgggattgaaa

SEQ ID NO: 247730 - DNA, 19 bp, Homo sapiens
  siRNA target sequence for CD160 (NM_007053.1,631-649).
cagtgacgggattgaaaca

SEQ ID NO: 247731 - DNA, 19 bp, Homo sapiens
  siRNA target sequence for CD160 (NM_007053.1,691-709).
gttcaggcttcctacaaga

SEQ ID NO: 247732 - DNA, 19 bp, Homo sapiens
  siRNA target sequence for CD200R (NM_138806.2,78-96).
ctaacctagggctactgtt

SEQ ID NO: 247733 - DNA, 19 bp, Homo sapiens
  siRNA target sequence for CD200R (NM_138806.2,83-101).
ctagggctactgttgattt

SEQ ID NO: 247734 - DNA, 19 bp, Homo sapiens
  siRNA target sequence for CD200R (NM_138806.2,89-107).
ctactgttgattttgacta

SEQ ID NO: 247735 - DNA, 19 bp, Homo sapiens
  siRNA target sequence for CD200R (NM_138806.2,97-115).
gattttgactatcttctta

SEQ ID NO: 247736 - DNA, 19 bp, Homo sapiens
  siRNA target sequence for CD200R (NM_138806.2,132-150).
gtgctgctcaaccaaacaa

SEQ ID NO: 247737 - DNA, 19 bp, Homo sapiens
  siRNA target sequence for CD200R (NM_138806.2,134-152).
gctgctcaaccaaacaact

SEQ ID NO: 247738 - DNA, 19 bp, Homo sapiens
  siRNA target sequence for CD200R (NM_138806.2,175-193).
ggagaatcatgctttagct

SEQ ID NO: 247739 - DNA, 19 bp, Homo sapiens
  siRNA target sequence for CD200R (NM_138806.2,221-239).
cagattacacagaactact

SEQ ID NO: 247740 - DNA, 19 bp, Homo sapiens
  siRNA target sequence for CD200R (NM_138806.2,241-259).
gaaagtactcgcagaagtt

SEQ ID NO: 247741 - DNA, 19 bp, Homo sapiens
  siRNA target sequence for CD200R (NM_138806.2,245-263).
gtactcgcagaagttaaca

SEQ ID NO: 247742 - DNA, 19 bp, Homo sapiens
  siRNA target sequence for CD200R (NM_138806.2,251-269).
gcagaagttaacacttcat

SEQ ID NO: 247743 - DNA, 19 bp, Homo sapiens
  siRNA target sequence for CD200R (NM_138806.2,307-325).
ccctcctatcgcattaaga

SEQ ID NO: 247744 - DNA, 19 bp, Homo sapiens
  siRNA target sequence for CD200R (NM_138806.2,308-326).
cctcctatcgcattaagaa

SEQ ID NO: 247745 - DNA, 19 bp, Homo sapiens
  siRNA target sequence for CD200R (NM_138806.2,309-327).
ctcctatcgcattaagaaa

SEQ ID NO: 247746 - DNA, 19 bp, Homo sapiens
  siRNA target sequence for CD200R (NM_138806.2,311-329).
cctatcgcattaagaaatt

SEQ ID NO: 247747 - DNA, 19 bp, Homo sapiens
  siRNA target sequence for CD200R (NM_138806.2,312-330).
ctatcgcattaagaaattt

SEQ ID NO: 247748 - DNA, 19 bp, Homo sapiens
  siRNA target sequence for CD200R (NM_138806.2,317-335).
gcattaagaaatttgatca

SEQ ID NO: 247749 - DNA, 19 bp, Homo sapiens
  siRNA target sequence for CD200R (NM_138806.2,334-352).
cataataacatgggaaata

SEQ ID NO: 247750 - DNA, 19 bp, Homo sapiens
  siRNA target sequence for CD200R (NM_138806.2,375-393).
gcacaaaagcctacaagaa

SEQ ID NO: 247751 - DNA, 19 bp, Homo sapiens
  siRNA target sequence for CD200R (NM_138806.2,463-481).
gaattcggaccttcagatt

SEQ ID NO: 247752 - DNA, 19 bp, Homo sapiens
  siRNA target sequence for CD200R (NM_138806.2,500-518).
catgacgggtattacagat

SEQ ID NO: 247753 - DNA, 19 bp, Homo sapiens
  siRNA target sequence for CD200R (NM_138806.2,541-559).
gaatttccatcgtggatat

SEQ ID NO: 247754 - DNA, 19 bp, Homo sapiens
  siRNA target sequence for CD200R (NM_138806.2,555-573).
gatatcacctccaagtgtt

SEQ ID NO: 247755 - DNA, 19 bp, Homo sapiens
  siRNA target sequence for CD200R (NM_138806.2,562-580).
cctccaagtgttagttaca

SEQ ID NO: 247756 - DNA, 19 bp, Homo sapiens
  siRNA target sequence for CD200R (NM_138806.2,676-694).
cgattgtgccactaagcaa

SEQ ID NO: 247757 - DNA, 19 bp, Homo sapiens
  siRNA target sequence for CD200R (NM_138806.2,681-699).
gtgccactaagcaagaata

SEQ ID NO: 247758 - DNA, 19 bp, Homo sapiens
  siRNA target sequence for CD200R (NM_138806.2,710-728).
ggcacagtgactgttaaga

SEQ ID NO: 247759 - DNA, 19 bp, Homo sapiens
  siRNA target sequence for CD200R (NM_138806.2,712-730).
cacagtgactgttaagagt

SEQ ID NO: 247760 - DNA, 19 bp, Homo sapiens
  siRNA target sequence for CD200R (NM_138806.2,782-800).
catttgactggcaacaaga

SEQ ID NO: 247761 - DNA, 19 bp, Homo sapiens
  siRNA target sequence for CD200R (NM_138806.2,824-842).
gttccaggtgccaaaaaat

SEQ ID NO: 247762 - DNA, 19 bp, Homo sapiens
  siRNA target sequence for CD200R (NM_138806.2,889-907).
gaccatcgtgggattcatt

SEQ ID NO: 247763 - DNA, 19 bp, Homo sapiens
  siRNA target sequence for CD200R (NM_138806.2,968-986).
gttgttgaggaggatgaaa

SEQ ID NO: 247764 - DNA, 19 bp, Homo sapiens
  siRNA target sequence for CD200R (NM_138806.2,1015-1033).
gaacaatcctctctatgat

SEQ ID NO: 247765 - DNA, 19 bp, Homo sapiens
  siRNA target sequence for CD200R (NM_138806.2,1018-1036).
caatcctctctatgatact

SEQ ID NO: 247766 - DNA, 19 bp, Homo sapiens
  siRNA target sequence for CD200R (NM_138806.2,1022-1040).
cctctctatgatactacaa

SEQ ID NO: 247767 - DNA, 19 bp, Homo sapiens
  siRNA target sequence for CD200R (NM_138806.2,1051-1069).
ggcatctgaggcattacaa

SEQ ID NO: 247768 - DNA, 19 bp, Homo sapiens
  siRNA target sequence for CD200R (NM_138806.2,1079-1097).
gacacagacctccatactt

SEQ ID NO: 247769 - DNA, 19 bp, Homo sapiens
  siRNA target sequence for CD200R (NM_138806.2,1081-1099).
cacagacctccatacttta

SEQ ID NO: 247770 - DNA, 19 bp, Homo sapiens
  siRNA target sequence for CD200R (NM_138939.1,575-593).
ggtaaggagcatcatatat

SEQ ID NO: 247771 - DNA, 19 bp, Homo sapiens
  siRNA target sequence for CD36 (NM_000072.1,215-233).
cagttggagacctgcttat

SEQ ID NO: 247772 - DNA, 19 bp, Homo sapiens
  siRNA target sequence for CD36 (NM_000072.1,228-246).
gcttatccagaagacaatt

SEQ ID NO: 247773 - DNA, 19 bp, Homo sapiens
  siRNA target sequence for CD36 (NM_000072.1,261-279).
cctcgaagaaggtacaatt

SEQ ID NO: 247774 - DNA, 19 bp, Homo sapiens
  siRNA target sequence for CD36 (NM_000072.1,264-282).
cgaagaaggtacaattgct

SEQ ID NO: 247775 - DNA, 19 bp, Homo sapiens
  siRNA target sequence for CD36 (NM_000072.1,310-328).
gaagtttacagacagtttt

SEQ ID NO: 247776 - DNA, 19 bp, Homo sapiens
  siRNA target sequence for CD36 (NM_000072.1,313-331).
gtttacagacagttttgga

SEQ ID NO: 247777 - DNA, 19 bp, Homo sapiens
  siRNA target sequence for CD36 (NM_000072.1,329-347).
ggatctttgatgtgcaaaa

SEQ ID NO: 247778 - DNA, 19 bp, Homo sapiens
  siRNA target sequence for CD36 (NM_000072.1,349-367).
ccacaggaagtgatgatga

SEQ ID NO: 247779 - DNA, 19 bp, Homo sapiens
  siRNA target sequence for CD36 (NM_000072.1,374-392).
gcaacattcaagttaagca

SEQ ID NO: 247780 - DNA, 19 bp, Homo sapiens
  siRNA target sequence for CD36 (NM_000072.1,391-409).
caaagaggtccttatacgt

SEQ ID NO: 247781 - DNA, 19 bp, Homo sapiens
  siRNA target sequence for CD36 (NM_000072.1,407-425).
cgtacagagttcgttttct

SEQ ID NO: 247782 - DNA, 19 bp, Homo sapiens
  siRNA target sequence for CD36 (NM_000072.1,408-426).
gtacagagttcgttttcta

SEQ ID NO: 247783 - DNA, 19 bp, Homo sapiens
  siRNA target sequence for CD36 (NM_000072.1,498-516).
cgaaccttcactatcagtt

SEQ ID NO: 247784 - DNA, 19 bp, Homo sapiens
  siRNA target sequence for CD36 (NM_000072.1,559-577).
gcagctgcatcccatatct

SEQ ID NO: 247785 - DNA, 19 bp, Homo sapiens
  siRNA target sequence for CD36 (NM_000072.1,563-581).
ctgcatcccatatctatca

SEQ ID NO: 247786 - DNA, 19 bp, Homo sapiens
  siRNA target sequence for CD36 (NM_000072.1,565-583).
gcatcccatatctatcaaa

SEQ ID NO: 247787 - DNA, 19 bp, Homo sapiens
  siRNA target sequence for CD36 (NM_000072.1,592-610).
gttcaaatgatcctcaatt

SEQ ID NO: 247788 - DNA, 19 bp, Homo sapiens
  siRNA target sequence for CD36 (NM_000072.1,650-668).
gaactttgagagaactgtt

SEQ ID NO: 247789 - DNA, 19 bp, Homo sapiens
  siRNA target sequence for CD36 (NM_000072.1,672-690).
gggctatagggatccattt

SEQ ID NO: 247790 - DNA, 19 bp, Homo sapiens
  siRNA target sequence for CD36 (NM_000072.1,673-691).
ggctatagggatccatttt

SEQ ID NO: 247791 - DNA, 19 bp, Homo sapiens
  siRNA target sequence for CD36 (NM_000072.1,674-692).
gctatagggatccattttt

SEQ ID NO: 247792 - DNA, 19 bp, Homo sapiens
  siRNA target sequence for CD36 (NM_000072.1,699-717).
ggttccgtaccctgttact

SEQ ID NO: 247793 - DNA, 19 bp, Homo sapiens
  siRNA target sequence for CD36 (NM_000072.1,700-718).
gttccgtaccctgttacta

SEQ ID NO: 247794 - DNA, 19 bp, Homo sapiens
  siRNA target sequence for CD36 (NM_000072.1,728-746).
gtctgttttatccttacaa

SEQ ID NO: 247795 - DNA, 19 bp, Homo sapiens
  siRNA target sequence for CD36 (NM_000072.1,761-779).
gagtttataaagttttcaa

SEQ ID NO: 247796 - DNA, 19 bp, Homo sapiens
  siRNA target sequence for CD36 (NM_000072.1,797-815).
gtaaagttgccataatcga

SEQ ID NO: 247797 - DNA, 19 bp, Homo sapiens
  siRNA target sequence for CD36 (NM_000072.1,805-823).
gccataatcgacacatata

SEQ ID NO: 247798 - DNA, 19 bp, Homo sapiens
  siRNA target sequence for CD36 (NM_000072.1,807-825).
cataatcgacacatataaa

SEQ ID NO: 247799 - DNA, 19 bp, Homo sapiens
  siRNA target sequence for CD36 (NM_000072.1,813-831).
cgacacatataaaggtaaa

SEQ ID NO: 247800 - DNA, 19 bp, Homo sapiens
  siRNA target sequence for CD36 (NM_000072.1,858-876).
ctgcgacatgattaatggt

SEQ ID NO: 247801 - DNA, 19 bp, Homo sapiens
  siRNA target sequence for CD36 (NM_000072.1,890-908).
catttccaccttttgttga

SEQ ID NO: 247802 - DNA, 19 bp, Homo sapiens
  siRNA target sequence for CD36 (NM_000072.1,940-958).
gatatttgcaggtcaatct

SEQ ID NO: 247803 - DNA, 19 bp, Homo sapiens
  siRNA target sequence for CD36 (NM_000072.1,976-994).
gacgttaatctgaaaggaa

SEQ ID NO: 247804 - DNA, 19 bp, Homo sapiens
  siRNA target sequence for CD36 (NM_000072.1,991-1009).
ggaatccctgtgtatagat

SEQ ID NO: 247805 - DNA, 19 bp, Homo sapiens
  siRNA target sequence for CD36 (NM_000072.1,992-1010).
gaatccctgtgtatagatt

SEQ ID NO: 247806 - DNA, 19 bp, Homo sapiens
  siRNA target sequence for CD36 (NM_000072.1,1103-1121).
catatggtgtgctagacat

SEQ ID NO: 247807 - DNA, 19 bp, Homo sapiens
  siRNA target sequence for CD36 (NM_000072.1,1140-1158).
gagacctgtgtacatttca

SEQ ID NO: 247808 - DNA, 19 bp, Homo sapiens
  siRNA target sequence for CD36 (NM_000072.1,1142-1160).
gacctgtgtacatttcact

SEQ ID NO: 247809 - DNA, 19 bp, Homo sapiens
  siRNA target sequence for CD36 (NM_000072.1,1195-1213).
gaacctattgatggattaa

SEQ ID NO: 247810 - DNA, 19 bp, Homo sapiens
  siRNA target sequence for CD36 (NM_000072.1,1231-1249).
cataggacatacttggata

SEQ ID NO: 247811 - DNA, 19 bp, Homo sapiens
  siRNA target sequence for CD36 (NM_000072.1,1262-1280).
ctggattcactttacaatt

SEQ ID NO: 247812 - DNA, 19 bp, Homo sapiens
  siRNA target sequence for CD36 (NM_000072.1,1288-1306).
cggctgcaggtcaacctat

SEQ ID NO: 247813 - DNA, 19 bp, Homo sapiens
  siRNA target sequence for CD36 (NM_000072.1,1289-1307).
ggctgcaggtcaacctatt

SEQ ID NO: 247814 - DNA, 19 bp, Homo sapiens
  siRNA target sequence for CD36 (NM_000072.1,1365-1383).
gcctattctttggcttaat

SEQ ID NO: 247815 - DNA, 19 bp, Homo sapiens
  siRNA target sequence for CD36 (NM_000072.1,1367-1385).
ctattctttggcttaatga

SEQ ID NO: 247816 - DNA, 19 bp, Homo sapiens
  siRNA target sequence for CD36 (NM_000072.1,1391-1409).
ggaccattggtgatgagaa

SEQ ID NO: 247817 - DNA, 19 bp, Homo sapiens
  siRNA target sequence for CD36 (NM_000072.1,1450-1468).
ctccttggcctgatagaaa

SEQ ID NO: 247818 - DNA, 19 bp, Homo sapiens
  siRNA target sequence for CD36 (NM_000072.1,1453-1471).
cttggcctgatagaaatga

SEQ ID NO: 247819 - DNA, 19 bp, Homo sapiens
  siRNA target sequence for CD36 (NM_000072.1,1525-1543).
gcatgcagatcgaaaacaa

SEQ ID NO: 247820 - DNA, 19 bp, Homo sapiens
  siRNA target sequence for CD36 (NM_000072.1,1526-1544).
catgcagatcgaaaacaat

SEQ ID NO: 247821 - DNA, 19 bp, Homo sapiens
  siRNA target sequence for CD36 (NM_000072.1,1529-1547).
gcagatcgaaaacaataaa

SEQ ID NO: 247822 - DNA, 19 bp, Homo sapiens
  siRNA target sequence for CD7 (NM_006137.5,202-220).
ggagcctccgtcaacatca

SEQ ID NO: 247823 - DNA, 19 bp, Homo sapiens
  siRNA target sequence for CD7 (NM_006137.5,274-292).
cagccccaagacatcattt

SEQ ID NO: 247824 - DNA, 19 bp, Homo sapiens
  siRNA target sequence for CD7 (NM_006137.5,277-295).
ccccaagacatcatttact

SEQ ID NO: 247825 - DNA, 19 bp, Homo sapiens
  siRNA target sequence for CD7 (NM_006137.5,678-696).
gctggcgaggacacagata

SEQ ID NO: 247826 - DNA, 19 bp, Homo sapiens
  siRNA target sequence for CD7 (NM_006137.5,707-725).
gctcgtggcgggataagaa

SEQ ID NO: 247827 - DNA, 19 bp, Homo sapiens
  siRNA target sequence for CD7 (NM_006137.5,708-726).
ctcgtggcgggataagaat

SEQ ID NO: 247828 - DNA, 19 bp, Homo sapiens
  siRNA target sequence for CD86 (NM_006889.2,151-169).
ggactgagtaacattctct

SEQ ID NO: 247829 - DNA, 19 bp, Homo sapiens
  siRNA target sequence for CD86 (NM_006889.2,205-223).
ctgaagattcaagcttatt

SEQ ID NO: 247830 - DNA, 19 bp, Homo sapiens
  siRNA target sequence for CD86 (NM_006889.2,210-228).
gattcaagcttatttcaat

SEQ ID NO: 247831 - DNA, 19 bp, Homo sapiens
  siRNA target sequence for CD86 (NM_006889.2,214-232).
caagcttatttcaatgaga

SEQ ID NO: 247832 - DNA, 19 bp, Homo sapiens
  siRNA target sequence for CD86 (NM_006889.2,275-293).
gcctgagtgagctagtagt

SEQ ID NO: 247833 - DNA, 19 bp, Homo sapiens
  siRNA target sequence for CD86 (NM_006889.2,276-294).
cctgagtgagctagtagta

SEQ ID NO: 247834 - DNA, 19 bp, Homo sapiens
  siRNA target sequence for CD86 (NM_006889.2,277-295).
ctgagtgagctagtagtat

SEQ ID NO: 247835 - DNA, 19 bp, Homo sapiens
  siRNA target sequence for CD86 (NM_006889.2,279-297).
gagtgagctagtagtattt

SEQ ID NO: 247836 - DNA, 19 bp, Homo sapiens
  siRNA target sequence for CD86 (NM_006889.2,299-317).
ggcaggaccaggaaaactt

SEQ ID NO: 247837 - DNA, 19 bp, Homo sapiens
  siRNA target sequence for CD86 (NM_006889.2,319-337).
gttctgaatgaggtatact

SEQ ID NO: 247838 - DNA, 19 bp, Homo sapiens
  siRNA target sequence for CD86 (NM_006889.2,331-349).
gtatacttaggcaaagaga

SEQ ID NO: 247839 - DNA, 19 bp, Homo sapiens
  siRNA target sequence for CD86 (NM_006889.2,407-425).
ggaccctgagacttcacaa

SEQ ID NO: 247840 - DNA, 19 bp, Homo sapiens
  siRNA target sequence for CD86 (NM_006889.2,416-434).
gacttcacaatcttcagat

SEQ ID NO: 247841 - DNA, 19 bp, Homo sapiens
  siRNA target sequence for CD86 (NM_006889.2,435-453).
caaggacaagggcttgtat

SEQ ID NO: 247842 - DNA, 19 bp, Homo sapiens
  siRNA target sequence for CD86 (NM_006889.2,439-457).
gacaagggcttgtatcaat

SEQ ID NO: 247843 - DNA, 19 bp, Homo sapiens
  siRNA target sequence for CD86 (NM_006889.2,445-463).
ggcttgtatcaatgtatca

SEQ ID NO: 247844 - DNA, 19 bp, Homo sapiens
  siRNA target sequence for CD86 (NM_006889.2,458-476).
gtatcatccatcacaaaaa

SEQ ID NO: 247845 - DNA, 19 bp, Homo sapiens
  siRNA target sequence for CD86 (NM_006889.2,493-511).
cgcatccaccagatgaatt

SEQ ID NO: 247846 - DNA, 19 bp, Homo sapiens
  siRNA target sequence for CD86 (NM_006889.2,534-552).
cttcagtcaacctgaaata

SEQ ID NO: 247847 - DNA, 19 bp, Homo sapiens
  siRNA target sequence for CD86 (NM_006889.2,544-562).
cctgaaatagtaccaattt

SEQ ID NO: 247848 - DNA, 19 bp, Homo sapiens
  siRNA target sequence for CD86 (NM_006889.2,553-571).
gtaccaatttctaatataa

SEQ ID NO: 247849 - DNA, 19 bp, Homo sapiens
  siRNA target sequence for CD86 (NM_006889.2,557-575).
caatttctaatataacaga

SEQ ID NO: 247850 - DNA, 19 bp, Homo sapiens
  siRNA target sequence for CD86 (NM_006889.2,742-760).
gtttcattccctgatgtta

SEQ ID NO: 247851 - DNA, 19 bp, Homo sapiens
  siRNA target sequence for CD86 (NM_006889.2,751-769).
cctgatgttacgagcaata

SEQ ID NO: 247852 - DNA, 19 bp, Homo sapiens
  siRNA target sequence for CD86 (NM_006889.2,752-770).
ctgatgttacgagcaatat

SEQ ID NO: 247853 - DNA, 19 bp, Homo sapiens
  siRNA target sequence for CD86 (NM_006889.2,754-772).
gatgttacgagcaatatga

SEQ ID NO: 247854 - DNA, 19 bp, Homo sapiens
  siRNA target sequence for CD86 (NM_006889.2,798-816).
caagacgcggcttttatct

SEQ ID NO: 247855 - DNA, 19 bp, Homo sapiens
  siRNA target sequence for CD86 (NM_006889.2,801-819).
gacgcggcttttatcttca

SEQ ID NO: 247856 - DNA, 19 bp, Homo sapiens
  siRNA target sequence for CD86 (NM_006889.2,859-877).
gaccacattccttggatta

SEQ ID NO: 247857 - DNA, 19 bp, Homo sapiens
  siRNA target sequence for CD86 (NM_006889.2,883-901).
gtacttccaacagttatta

SEQ ID NO: 247858 - DNA, 19 bp, Homo sapiens
  siRNA target sequence for CD86 (NM_006889.2,886-904).
cttccaacagttattatat

SEQ ID NO: 247859 - DNA, 19 bp, Homo sapiens
  siRNA target sequence for CD86 (NM_006889.2,922-940).
ctaattctatggaaatgga

SEQ ID NO: 247860 - DNA, 19 bp, Homo sapiens
  siRNA target sequence for CD86 (NM_006889.2,951-969).
gcggcctcgcaactcttat

SEQ ID NO: 247861 - DNA, 19 bp, Homo sapiens
  siRNA target sequence for CD86 (NM_006889.2,952-970).
cggcctcgcaactcttata

SEQ ID NO: 247862 - DNA, 19 bp, Homo sapiens
  siRNA target sequence for CD86 (NM_006889.2,953-971).
ggcctcgcaactcttataa

SEQ ID NO: 247863 - DNA, 19 bp, Homo sapiens
  siRNA target sequence for CD86 (NM_006889.2,955-973).
cctcgcaactcttataaat

SEQ ID NO: 247864 - DNA, 19 bp, Homo sapiens
  siRNA target sequence for CD86 (NM_006889.2,1054-1072).
gaagcccagcgtgttttta

SEQ ID NO: 247865 - DNA, 19 bp, Homo sapiens
  siRNA target sequence for CD86 (NM_006889.2,1088-1106).
cttcatgcgacaaaagtga

SEQ ID NO: 247866 - DNA, 19 bp, Homo sapiens
  siRNA target sequence for CD86 (NM_006889.2,1095-1113).
cgacaaaagtgatacatgt

SEQ ID NO: 247867 - DNA, 19 bp, Homo sapiens
  siRNA target sequence for CD86 (NM_175862.2,133-151).
ctatgggactgagtaacat

SEQ ID NO: 247868 - DNA, 19 bp, Homo sapiens
  siRNA target sequence for CNGB1 (NM_001297.1,302-320).
gcccttacttccaccatat

SEQ ID NO: 247869 - DNA, 19 bp, Homo sapiens
  siRNA target sequence for CNGB1 (NM_001297.1,329-347).
gcccagggcgctgagattt

SEQ ID NO: 247870 - DNA, 19 bp, Homo sapiens
  siRNA target sequence for CNGB1 (NM_001297.1,334-352).
gggcgctgagatttctgaa

SEQ ID NO: 247871 - DNA, 19 bp, Homo sapiens
  siRNA target sequence for CNGB1 (NM_001297.1,335-353).
ggcgctgagatttctgaaa

SEQ ID NO: 247872 - DNA, 19 bp, Homo sapiens
  siRNA target sequence for CNGB1 (NM_001297.1,1036-1054).
ggtggttccagcttatgaa

SEQ ID NO: 247873 - DNA, 19 bp, Homo sapiens
  siRNA target sequence for CNGB1 (NM_001297.1,1486-1504).
cctcatggcagaagagaat

SEQ ID NO: 247874 - DNA, 19 bp, Homo sapiens
  siRNA target sequence for CNGB1 (NM_001297.1,1714-1732).
ctccacggccagcacaaat

SEQ ID NO: 247875 - DNA, 19 bp, Homo sapiens
  siRNA target sequence for CNGB1 (NM_001297.1,1728-1746).
caaatagcgccatcatcaa

SEQ ID NO: 247876 - DNA, 19 bp, Homo sapiens
  siRNA target sequence for CNGB1 (NM_001297.1,1913-1931).
gtggaagaggagcactatt

SEQ ID NO: 247877 - DNA, 19 bp, Homo sapiens
  siRNA target sequence for CNGB1 (NM_001297.1,2001-2019).
cgctgaccaacctgatgta

SEQ ID NO: 247878 - DNA, 19 bp, Homo sapiens
  siRNA target sequence for CNGB1 (NM_001297.1,2210-2228).
gacatcattacggacaaaa

SEQ ID NO: 247879 - DNA, 19 bp, Homo sapiens
  siRNA target sequence for CNGB1 (NM_001297.1,2449-2467).
ctacagcctgcatttgaat

SEQ ID NO: 247880 - DNA, 19 bp, Homo sapiens
  siRNA target sequence for CNGB1 (NM_001297.1,2527-2545).
cgatggcgtgggaaacagt

SEQ ID NO: 247881 - DNA, 19 bp, Homo sapiens
  siRNA target sequence for CNGB1 (NM_001297.1,2531-2549).
ggcgtgggaaacagttata

SEQ ID NO: 247882 - DNA, 19 bp, Homo sapiens
  siRNA target sequence for CNGB1 (NM_001297.1,2532-2550).
gcgtgggaaacagttatat

SEQ ID NO: 247883 - DNA, 19 bp, Homo sapiens
  siRNA target sequence for CNGB1 (NM_001297.1,2533-2551).
cgtgggaaacagttatatt

SEQ ID NO: 247884 - DNA, 19 bp, Homo sapiens
  siRNA target sequence for CNGB1 (NM_001297.1,2744-2762).
gacagcacggtgaagtaca

SEQ ID NO: 247885 - DNA, 19 bp, Homo sapiens
  siRNA target sequence for CNGB1 (NM_001297.1,2897-2915).
gccatcgacgtgaactaca

SEQ ID NO: 247886 - DNA, 19 bp, Homo sapiens
  siRNA target sequence for CNGB1 (NM_001297.1,2946-2964).
gctgtgaccggcagatgat

SEQ ID NO: 247887 - DNA, 19 bp, Homo sapiens
  siRNA target sequence for CNGB1 (NM_001297.1,2949-2967).
gtgaccggcagatgatctt

SEQ ID NO: 247888 - DNA, 19 bp, Homo sapiens
  siRNA target sequence for CNGB1 (NM_001297.1,2955-2973).
ggcagatgatctttgacat

SEQ ID NO: 247889 - DNA, 19 bp, Homo sapiens
  siRNA target sequence for CNGB1 (NM_001297.1,3002-3020).
ctgcccaacgactatgtgt

SEQ ID NO: 247890 - DNA, 19 bp, Homo sapiens
  siRNA target sequence for CNGB1 (NM_001297.1,3201-3219).
ggtttaccaacctcttcat

SEQ ID NO: 247891 - DNA, 19 bp, Homo sapiens
  siRNA target sequence for CNGB1 (NM_001297.1,3382-3400).
cgctgccctcgctatgaca

SEQ ID NO: 247892 - DNA, 19 bp, Homo sapiens
  siRNA target sequence for CNGB1 (NM_001297.1,3421-3439).
ggcaaaaggcggcaaactt

SEQ ID NO: 247893 - DNA, 19 bp, Homo sapiens
  siRNA target sequence for CNGB3 (NM_019098.2,49-67).
gtttaaatcgctgacaaaa

SEQ ID NO: 247894 - DNA, 19 bp, Homo sapiens
  siRNA target sequence for CNGB3 (NM_019098.2,73-91).
caaggtgaagcctatagga

SEQ ID NO: 247895 - DNA, 19 bp, Homo sapiens
  siRNA target sequence for CNGB3 (NM_019098.2,114-132).
gttctcgtcggaatgaaga

SEQ ID NO: 247896 - DNA, 19 bp, Homo sapiens
  siRNA target sequence for CNGB3 (NM_019098.2,135-153).
gctctcacccaagtaatca

SEQ ID NO: 247897 - DNA, 19 bp, Homo sapiens
  siRNA target sequence for CNGB3 (NM_019098.2,238-256).
gccacacaccaacatacaa

SEQ ID NO: 247898 - DNA, 19 bp, Homo sapiens
  siRNA target sequence for CNGB3 (NM_019098.2,240-258).
cacacaccaacatacaaga

SEQ ID NO: 247899 - DNA, 19 bp, Homo sapiens
  siRNA target sequence for CNGB3 (NM_019098.2,402-420).
ctgcagctcctgttataaa

SEQ ID NO: 247900 - DNA, 19 bp, Homo sapiens
  siRNA target sequence for CNGB3 (NM_019098.2,405-423).
cagctcctgttataaatga

SEQ ID NO: 247901 - DNA, 19 bp, Homo sapiens
  siRNA target sequence for CNGB3 (NM_019098.2,471-489).
gaacagccctctacaagaa

SEQ ID NO: 247902 - DNA, 19 bp, Homo sapiens
  siRNA target sequence for CNGB3 (NM_019098.2,474-492).
cagccctctacaagaaaaa

SEQ ID NO: 247903 - DNA, 19 bp, Homo sapiens
  siRNA target sequence for CNGB3 (NM_019098.2,520-538).
cgaagccagcccacaaact

SEQ ID NO: 247904 - DNA, 19 bp, Homo sapiens
  siRNA target sequence for CNGB3 (NM_019098.2,550-568).
ggctgtaccaccagtaaaa

SEQ ID NO: 247905 - DNA, 19 bp, Homo sapiens
  siRNA target sequence for CNGB3 (NM_019098.2,552-570).
ctgtaccaccagtaaaaga

SEQ ID NO: 247906 - DNA, 19 bp, Homo sapiens
  siRNA target sequence for CNGB3 (NM_019098.2,554-572).
gtaccaccagtaaaagaaa

SEQ ID NO: 247907 - DNA, 19 bp, Homo sapiens
  siRNA target sequence for CNGB3 (NM_019098.2,584-602).
ccaacagaacattactaca

SEQ ID NO: 247908 - DNA, 19 bp, Homo sapiens
  siRNA target sequence for CNGB3 (NM_019098.2,601-619).
caggctgttgtggttcaaa

SEQ ID NO: 247909 - DNA, 19 bp, Homo sapiens
  siRNA target sequence for CNGB3 (NM_019098.2,620-638).
gtcaaaaagatgcctttaa

SEQ ID NO: 247910 - DNA, 19 bp, Homo sapiens
  siRNA target sequence for CNGB3 (NM_019098.2,631-649).
gcctttaacagagtactta

SEQ ID NO: 247911 - DNA, 19 bp, Homo sapiens
  siRNA target sequence for CNGB3 (NM_019098.2,632-650).
cctttaacagagtacttaa

SEQ ID NO: 247912 - DNA, 19 bp, Homo sapiens
  siRNA target sequence for CNGB3 (NM_019098.2,641-659).
gagtacttaaagcgaatta

SEQ ID NO: 247913 - DNA, 19 bp, Homo sapiens
  siRNA target sequence for CNGB3 (NM_019098.2,646-664).
cttaaagcgaattaaactt

SEQ ID NO: 247914 - DNA, 19 bp, Homo sapiens
  siRNA target sequence for CNGB3 (NM_019098.2,665-683).
ccaaacagcatagattcat

SEQ ID NO: 247915 - DNA, 19 bp, Homo sapiens
  siRNA target sequence for CNGB3 (NM_019098.2,666-684).
caaacagcatagattcata

SEQ ID NO: 247916 - DNA, 19 bp, Homo sapiens
  siRNA target sequence for CNGB3 (NM_019098.2,670-688).
cagcatagattcatacaca

SEQ ID NO: 247917 - DNA, 19 bp, Homo sapiens
  siRNA target sequence for CNGB3 (NM_019098.2,719-737).
gtcactcttgcctataact

SEQ ID NO: 247918 - DNA, 19 bp, Homo sapiens
  siRNA target sequence for CNGB3 (NM_019098.2,762-780).
gcctcgtcttcccatatca

SEQ ID NO: 247919 - DNA, 19 bp, Homo sapiens
  siRNA target sequence for CNGB3 (NM_019098.2,763-781).
cctcgtcttcccatatcaa

SEQ ID NO: 247920 - DNA, 19 bp, Homo sapiens
  siRNA target sequence for CNGB3 (NM_019098.2,783-801).
ccgcagacaacatacacta

SEQ ID NO: 247921 - DNA, 19 bp, Homo sapiens
  siRNA target sequence for CNGB3 (NM_019098.2,793-811).
catacactactggcttatt

SEQ ID NO: 247922 - DNA, 19 bp, Homo sapiens
  siRNA target sequence for CNGB3 (NM_019098.2,805-823).
gcttattgcggacatcata

SEQ ID NO: 247923 - DNA, 19 bp, Homo sapiens
  siRNA target sequence for CNGB3 (NM_019098.2,806-824).
cttattgcggacatcatat

SEQ ID NO: 247924 - DNA, 19 bp, Homo sapiens
  siRNA target sequence for CNGB3 (NM_019098.2,812-830).
gcggacatcatatgtgata

SEQ ID NO: 247925 - DNA, 19 bp, Homo sapiens
  siRNA target sequence for CNGB3 (NM_019098.2,835-853).
ctacctttatgatatgcta

SEQ ID NO: 247926 - DNA, 19 bp, Homo sapiens
  siRNA target sequence for CNGB3 (NM_019098.2,839-857).
ctttatgatatgctattta

SEQ ID NO: 247927 - DNA, 19 bp, Homo sapiens
  siRNA target sequence for CNGB3 (NM_019098.2,890-908).
gacataatagtggattcaa

SEQ ID NO: 247928 - DNA, 19 bp, Homo sapiens
  siRNA target sequence for CNGB3 (NM_019098.2,923-941).
cactacaggacttctacaa

SEQ ID NO: 247929 - DNA, 19 bp, Homo sapiens
  siRNA target sequence for CNGB3 (NM_019098.2,949-967).
gttggatgtcgcatcaata

SEQ ID NO: 247930 - DNA, 19 bp, Homo sapiens
  siRNA target sequence for CNGB3 (NM_019098.2,952-970).
ggatgtcgcatcaataata

SEQ ID NO: 247931 - DNA, 19 bp, Homo sapiens
  siRNA target sequence for CNGB3 (NM_019098.2,956-974).
gtcgcatcaataataccat

SEQ ID NO: 247932 - DNA, 19 bp, Homo sapiens
  siRNA target sequence for CNGB3 (NM_019098.2,958-976).
cgcatcaataataccattt

SEQ ID NO: 247933 - DNA, 19 bp, Homo sapiens
  siRNA target sequence for CNGB3 (NM_019098.2,960-978).
catcaataataccatttga

SEQ ID NO: 247934 - DNA, 19 bp, Homo sapiens
  siRNA target sequence for CNGB3 (NM_019098.2,963-981).
caataataccatttgatat

SEQ ID NO: 247935 - DNA, 19 bp, Homo sapiens
  siRNA target sequence for CNGB3 (NM_019098.2,1000-1018).
gtttaatccaatgtttaga

SEQ ID NO: 247936 - DNA, 19 bp, Homo sapiens
  siRNA target sequence for CNGB3 (NM_019098.2,1017-1035).
gagcaaataggatgttaaa

SEQ ID NO: 247937 - DNA, 19 bp, Homo sapiens
  siRNA target sequence for CNGB3 (NM_019098.2,1036-1054).
gtacacttcattttttgaa

SEQ ID NO: 247938 - DNA, 19 bp, Homo sapiens
  siRNA target sequence for CNGB3 (NM_019098.2,1082-1100).
gacaaagcatatatctaca

SEQ ID NO: 247939 - DNA, 19 bp, Homo sapiens
  siRNA target sequence for CNGB3 (NM_019098.2,1099-1117).
cagagttattcgaacaact

SEQ ID NO: 247940 - DNA, 19 bp, Homo sapiens
  siRNA target sequence for CNGB3 (NM_019098.2,1178-1196).
gaaggaattggcactacta

SEQ ID NO: 247941 - DNA, 19 bp, Homo sapiens
  siRNA target sequence for CNGB3 (NM_019098.2,1191-1209).
ctactagatgggtgtatga

SEQ ID NO: 247942 - DNA, 19 bp, Homo sapiens
  siRNA target sequence for CNGB3 (NM_019098.2,1212-1230).
gggaaggaaacgagtatct

SEQ ID NO: 247943 - DNA, 19 bp, Homo sapiens
  siRNA target sequence for CNGB3 (NM_019098.2,1214-1232).
gaaggaaacgagtatctga

SEQ ID NO: 247944 - DNA, 19 bp, Homo sapiens
  siRNA target sequence for CNGB3 (NM_019098.2,1245-1263).
gggcagttcgaactttaat

SEQ ID NO: 247945 - DNA, 19 bp, Homo sapiens
  siRNA target sequence for CNGB3 (NM_019098.2,1246-1264).
ggcagttcgaactttaatt

SEQ ID NO: 247946 - DNA, 19 bp, Homo sapiens
  siRNA target sequence for CNGB3 (NM_019098.2,1247-1265).
gcagttcgaactttaatta

SEQ ID NO: 247947 - DNA, 19 bp, Homo sapiens
  siRNA target sequence for CNGB3 (NM_019098.2,1389-1407).
ctacagccaatcagaacta

SEQ ID NO: 247948 - DNA, 19 bp, Homo sapiens
  siRNA target sequence for CNGB3 (NM_019098.2,1431-1449).
ccattgcctacatgaacaa

SEQ ID NO: 247949 - DNA, 19 bp, Homo sapiens
  siRNA target sequence for CNGB3 (NM_019098.2,1432-1450).
cattgcctacatgaacaat

SEQ ID NO: 247950 - DNA, 19 bp, Homo sapiens
  siRNA target sequence for CNGB3 (NM_019098.2,1477-1495).
gcgagttcggacttggtat

SEQ ID NO: 247951 - DNA, 19 bp, Homo sapiens
  siRNA target sequence for CNGB3 (NM_019098.2,1481-1499).
gttcggacttggtatgaat

SEQ ID NO: 247952 - DNA, 19 bp, Homo sapiens
  siRNA target sequence for CNGB3 (NM_019098.2,1567-1585).
gttagccctcgccattgat

SEQ ID NO: 247953 - DNA, 19 bp, Homo sapiens
  siRNA target sequence for CNGB3 (NM_019098.2,1577-1595).
gccattgatgtgaacttca

SEQ ID NO: 247954 - DNA, 19 bp, Homo sapiens
  siRNA target sequence for CNGB3 (NM_019098.2,1605-1623).
gcaaagtcgacttgttcaa

SEQ ID NO: 247955 - DNA, 19 bp, Homo sapiens
  siRNA target sequence for CNGB3 (NM_019098.2,1626-1644).
gttgtgatacacagatgat

SEQ ID NO: 247956 - DNA, 19 bp, Homo sapiens
  siRNA target sequence for CNGB3 (NM_019098.2,1649-1667).
gacatgttgctaagattga

SEQ ID NO: 247957 - DNA, 19 bp, Homo sapiens
  siRNA target sequence for CNGB3 (NM_019098.2,1651-1669).
catgttgctaagattgaaa

SEQ ID NO: 247958 - DNA, 19 bp, Homo sapiens
  siRNA target sequence for CNGB3 (NM_019098.2,1764-1782).
gaggccctgatggtactaa

SEQ ID NO: 247959 - DNA, 19 bp, Homo sapiens
  siRNA target sequence for CNGB3 (NM_019098.2,1767-1785).
gccctgatggtactaaagt

SEQ ID NO: 247960 - DNA, 19 bp, Homo sapiens
  siRNA target sequence for CNGB3 (NM_019098.2,1876-1894).
ccacgggtttgccaatctt

SEQ ID NO: 247961 - DNA, 19 bp, Homo sapiens
  siRNA target sequence for CNGB3 (NM_019098.2,1880-1898).
gggtttgccaatcttttaa

SEQ ID NO: 247962 - DNA, 19 bp, Homo sapiens
  siRNA target sequence for CNGB3 (NM_019098.2,1892-1910).
cttttaactctagacaaaa

SEQ ID NO: 247963 - DNA, 19 bp, Homo sapiens
  siRNA target sequence for CNGB3 (NM_019098.2,1912-1930).
gaccctccaagaaattcta

SEQ ID NO: 247964 - DNA, 19 bp, Homo sapiens
  siRNA target sequence for CNGB3 (NM_019098.2,2013-2031).
cccctccaagaaaagatct

SEQ ID NO: 247965 - DNA, 19 bp, Homo sapiens
  siRNA target sequence for CNGB3 (NM_019098.2,2014-2032).
ccctccaagaaaagatctt

SEQ ID NO: 247966 - DNA, 19 bp, Homo sapiens
  siRNA target sequence for CNGB3 (NM_019098.2,2038-2056).
cctcttcccaccgaaagaa

SEQ ID NO: 247967 - DNA, 19 bp, Homo sapiens
  siRNA target sequence for CNGB3 (NM_019098.2,2059-2077).
gacacccaaactgtttaaa

SEQ ID NO: 247968 - DNA, 19 bp, Homo sapiens
  siRNA target sequence for CNGB3 (NM_019098.2,2106-2124).
gtcttgcaagactactcaa

SEQ ID NO: 247969 - DNA, 19 bp, Homo sapiens
  siRNA target sequence for CNGB3 (NM_019098.2,2108-2126).
cttgcaagactactcaaat

SEQ ID NO: 247970 - DNA, 19 bp, Homo sapiens
  siRNA target sequence for CNGB3 (NM_019098.2,2111-2129).
gcaagactactcaaattga

SEQ ID NO: 247971 - DNA, 19 bp, Homo sapiens
  siRNA target sequence for CNGB3 (NM_019098.2,2112-2130).
caagactactcaaattgaa

SEQ ID NO: 247972 - DNA, 19 bp, Homo sapiens
  siRNA target sequence for CNGB3 (NM_019098.2,2339-2357).
gaagaaccccactcagtta

SEQ ID NO: 247973 - DNA, 19 bp, Homo sapiens
  siRNA target sequence for CNGB3 (NM_019098.2,2379-2397).
ggacttctcgtcaatcact

SEQ ID NO: 247974 - DNA, 19 bp, Homo sapiens
  siRNA target sequence for CNGB3 (NM_019098.2,2385-2403).
ctcgtcaatcactcattat

SEQ ID NO: 247975 - DNA, 19 bp, Homo sapiens
  siRNA target sequence for CNGB3 (NM_019098.2,2387-2405).
cgtcaatcactcattatca

SEQ ID NO: 247976 - DNA, 19 bp, Homo sapiens
  siRNA target sequence for CNGB3 (NM_019098.2,2426-2444).
ggcggagaagaggttctta

SEQ ID NO: 247977 - DNA, 19 bp, Homo sapiens
  siRNA target sequence for CNTNAP1 (NM_003632.1,426-444).
cctggctccagatagactt

SEQ ID NO: 247978 - DNA, 19 bp, Homo sapiens
  siRNA target sequence for CNTNAP1 (NM_003632.1,427-445).
ctggctccagatagactta

SEQ ID NO: 247979 - DNA, 19 bp, Homo sapiens
  siRNA target sequence for CNTNAP1 (NM_003632.1,429-447).
ggctccagatagacttaat

SEQ ID NO: 247980 - DNA, 19 bp, Homo sapiens
  siRNA target sequence for CNTNAP1 (NM_003632.1,723-741).
catacaaggccgacatact

SEQ ID NO: 247981 - DNA, 19 bp, Homo sapiens
  siRNA target sequence for CNTNAP1 (NM_003632.1,727-745).
caaggccgacatactctat

SEQ ID NO: 247982 - DNA, 19 bp, Homo sapiens
  siRNA target sequence for CNTNAP1 (NM_003632.1,732-750).
ccgacatactctatttcga

SEQ ID NO: 247983 - DNA, 19 bp, Homo sapiens
  siRNA target sequence for CNTNAP1 (NM_003632.1,1059-1077).
gctatgtgcagcgctttat

SEQ ID NO: 247984 - DNA, 19 bp, Homo sapiens
  siRNA target sequence for CNTNAP1 (NM_003632.1,1064-1082).
gtgcagcgctttattctca

SEQ ID NO: 247985 - DNA, 19 bp, Homo sapiens
  siRNA target sequence for CNTNAP1 (NM_003632.1,1066-1084).
gcagcgctttattctcaat

SEQ ID NO: 247986 - DNA, 19 bp, Homo sapiens
  siRNA target sequence for CNTNAP1 (NM_003632.1,1157-1175).
ctggcctatcggcataact

SEQ ID NO: 247987 - DNA, 19 bp, Homo sapiens
  siRNA target sequence for CNTNAP1 (NM_003632.1,1180-1198).
cggctgcatagaaaacgta

SEQ ID NO: 247988 - DNA, 19 bp, Homo sapiens
  siRNA target sequence for CNTNAP1 (NM_003632.1,1181-1199).
ggctgcatagaaaacgtaa

SEQ ID NO: 247989 - DNA, 19 bp, Homo sapiens
  siRNA target sequence for CNTNAP1 (NM_003632.1,1182-1200).
gctgcatagaaaacgtaat

SEQ ID NO: 247990 - DNA, 19 bp, Homo sapiens
  siRNA target sequence for CNTNAP1 (NM_003632.1,1185-1203).
gcatagaaaacgtaatctt

SEQ ID NO: 247991 - DNA, 19 bp, Homo sapiens
  siRNA target sequence for CNTNAP1 (NM_003632.1,1261-1279).
gggtaaggtggcttttcgt

SEQ ID NO: 247992 - DNA, 19 bp, Homo sapiens
  siRNA target sequence for CNTNAP1 (NM_003632.1,1290-1308).
cggtaccgcaccctatcaa

SEQ ID NO: 247993 - DNA, 19 bp, Homo sapiens
  siRNA target sequence for CNTNAP1 (NM_003632.1,1292-1310).
gtaccgcaccctatcaact

SEQ ID NO: 247994 - DNA, 19 bp, Homo sapiens
  siRNA target sequence for CNTNAP1 (NM_003632.1,1497-1515).
gccgaaagaagcttcagtt

SEQ ID NO: 247995 - DNA, 19 bp, Homo sapiens
  siRNA target sequence for CNTNAP1 (NM_003632.1,1521-1539).
ctgggtaccgactgaatga

SEQ ID NO: 247996 - DNA, 19 bp, Homo sapiens
  siRNA target sequence for CNTNAP1 (NM_003632.1,1614-1632).
cagaggtcagggtctcata

SEQ ID NO: 247997 - DNA, 19 bp, Homo sapiens
  siRNA target sequence for CNTNAP1 (NM_003632.1,1645-1663).
ccggacagggacctcatat

SEQ ID NO: 247998 - DNA, 19 bp, Homo sapiens
  siRNA target sequence for CNTNAP1 (NM_003632.1,1711-1729).
caaccagacggcattccat

SEQ ID NO: 247999 - DNA, 19 bp, Homo sapiens
  siRNA target sequence for CNTNAP1 (NM_003632.1,1813-1831).
ggtcctctttgatacatgt

SEQ ID NO: 248000 - DNA, 19 bp, Homo sapiens
  siRNA target sequence for CNTNAP1 (NM_003632.1,1893-1911).
gggatgacttcatttgcta

SEQ ID NO: 248001 - DNA, 19 bp, Homo sapiens
  siRNA target sequence for CNTNAP1 (NM_003632.1,1941-1959).
cctgccacacacctttgta

SEQ ID NO: 248002 - DNA, 19 bp, Homo sapiens
  siRNA target sequence for CNTNAP1 (NM_003632.1,1942-1960).
ctgccacacacctttgtat

SEQ ID NO: 248003 - DNA, 19 bp, Homo sapiens
  siRNA target sequence for CNTNAP1 (NM_003632.1,1948-1966).
cacacctttgtataaggaa

SEQ ID NO: 248004 - DNA, 19 bp, Homo sapiens
  siRNA target sequence for CNTNAP1 (NM_003632.1,1984-2002).
gctcagtgggaaaacttct

SEQ ID NO: 248005 - DNA, 19 bp, Homo sapiens
  siRNA target sequence for CNTNAP1 (NM_003632.1,2547-2565).
gctgctatggcgatcgaaa

SEQ ID NO: 248006 - DNA, 19 bp, Homo sapiens
  siRNA target sequence for CNTNAP1 (NM_003632.1,2673-2691).
cgggggtcttcctagagaa

SEQ ID NO: 248007 - DNA, 19 bp, Homo sapiens
  siRNA target sequence for CNTNAP1 (NM_003632.1,2675-2693).
ggggtcttcctagagaata

SEQ ID NO: 248008 - DNA, 19 bp, Homo sapiens
  siRNA target sequence for CNTNAP1 (NM_003632.1,2732-2750).
cgggtggaactcaacacat

SEQ ID NO: 248009 - DNA, 19 bp, Homo sapiens
  siRNA target sequence for CNTNAP1 (NM_003632.1,2807-2825).
cactcagacgactttgagt

SEQ ID NO: 248010 - DNA, 19 bp, Homo sapiens
  siRNA target sequence for CNTNAP1 (NM_003632.1,2815-2833).
cgactttgagttcaatgat

SEQ ID NO: 248011 - DNA, 19 bp, Homo sapiens
  siRNA target sequence for CNTNAP1 (NM_003632.1,2969-2987).
ggatctgcagagcttaaga

SEQ ID NO: 248012 - DNA, 19 bp, Homo sapiens
  siRNA target sequence for CNTNAP1 (NM_003632.1,3138-3156).
gcgtggagcgctatagcta

SEQ ID NO: 248013 - DNA, 19 bp, Homo sapiens
  siRNA target sequence for CNTNAP1 (NM_003632.1,3143-3161).
gagcgctatagctactaca

SEQ ID NO: 248014 - DNA, 19 bp, Homo sapiens
  siRNA target sequence for CNTNAP1 (NM_003632.1,3171-3189).
gtgacctcacggcttttga

SEQ ID NO: 248015 - DNA, 19 bp, Homo sapiens
  siRNA target sequence for CNTNAP1 (NM_003632.1,3195-3213).
catactgcaaccacgatat

SEQ ID NO: 248016 - DNA, 19 bp, Homo sapiens
  siRNA target sequence for CNTNAP1 (NM_003632.1,3199-3217).
ctgcaaccacgatattggt

SEQ ID NO: 248017 - DNA, 19 bp, Homo sapiens
  siRNA target sequence for CNTNAP1 (NM_003632.1,3208-3226).
cgatattggtggtttcttt

SEQ ID NO: 248018 - DNA, 19 bp, Homo sapiens
  siRNA target sequence for CNTNAP1 (NM_003632.1,3234-3252).
gcacctggatgcgctataa

SEQ ID NO: 248019 - DNA, 19 bp, Homo sapiens
  siRNA target sequence for CNTNAP1 (NM_003632.1,3237-3255).
cctggatgcgctataacct

SEQ ID NO: 248020 - DNA, 19 bp, Homo sapiens
  siRNA target sequence for CNTNAP1 (NM_003632.1,3238-3256).
ctggatgcgctataaccta

SEQ ID NO: 248021 - DNA, 19 bp, Homo sapiens
  siRNA target sequence for CNTNAP1 (NM_003632.1,3437-3455).
gggcctgtctacaacgtta

SEQ ID NO: 248022 - DNA, 19 bp, Homo sapiens
  siRNA target sequence for CNTNAP1 (NM_003632.1,3508-3526).
gctctacgtcagttccttt

SEQ ID NO: 248023 - DNA, 19 bp, Homo sapiens
  siRNA target sequence for CNTNAP1 (NM_003632.1,3522-3540).
cctttgttcgtgactacat

SEQ ID NO: 248024 - DNA, 19 bp, Homo sapiens
  siRNA target sequence for CNTNAP1 (NM_003632.1,3567-3585).
cccttcagctgcgatatca

SEQ ID NO: 248025 - DNA, 19 bp, Homo sapiens
  siRNA target sequence for CNTNAP1 (NM_003632.1,3640-3658).
ccagccccatagcatcaat

SEQ ID NO: 248026 - DNA, 19 bp, Homo sapiens
  siRNA target sequence for CNTNAP1 (NM_003632.1,3641-3659).
cagccccatagcatcaata

SEQ ID NO: 248027 - DNA, 19 bp, Homo sapiens
  siRNA target sequence for CNTNAP1 (NM_003632.1,3644-3662).
ccccatagcatcaatatca

SEQ ID NO: 248028 - DNA, 19 bp, Homo sapiens
  siRNA target sequence for CNTNAP1 (NM_003632.1,3751-3769).
ctcacccaaggccttgtat

SEQ ID NO: 248029 - DNA, 19 bp, Homo sapiens
  siRNA target sequence for CNTNAP1 (NM_003632.1,3753-3771).
cacccaaggccttgtattt

SEQ ID NO: 248030 - DNA, 19 bp, Homo sapiens
  siRNA target sequence for CNTNAP1 (NM_003632.1,3781-3799).
gatggagacaggagtcatt

SEQ ID NO: 248031 - DNA, 19 bp, Homo sapiens
  siRNA target sequence for CNTNAP1 (NM_003632.1,3849-3867).
ctggtgttcgattcaacaa

SEQ ID NO: 248032 - DNA, 19 bp, Homo sapiens
  siRNA target sequence for CNTNAP1 (NM_003632.1,3947-3965).
gaactgtccgaatctaatt

SEQ ID NO: 248033 - DNA, 19 bp, Homo sapiens
  siRNA target sequence for CNTNAP1 (NM_003632.1,4036-4054).
cccctactaccatgatgaa

SEQ ID NO: 248034 - DNA, 19 bp, Homo sapiens
  siRNA target sequence for CNTNAP1 (NM_003632.1,4055-4073).
ggatgggttgccatacttt

SEQ ID NO: 248035 - DNA, 19 bp, Homo sapiens
  siRNA target sequence for CNTNAP1 (NM_003632.1,4056-4074).
gatgggttgccatactttt

SEQ ID NO: 248036 - DNA, 19 bp, Homo sapiens
  siRNA target sequence for CNTNAP1 (NM_003632.1,4065-4083).
ccatacttttaggcttttt

SEQ ID NO: 248037 - DNA, 19 bp, Homo sapiens
  siRNA target sequence for CRL3 (NM_139017.3,205-223).
gtgtctactactataggaa

SEQ ID NO: 248038 - DNA, 19 bp, Homo sapiens
  siRNA target sequence for CRL3 (NM_139017.3,207-225).
gtctactactataggaaaa

SEQ ID NO: 248039 - DNA, 19 bp, Homo sapiens
  siRNA target sequence for CRL3 (NM_139017.3,269-287).
ccagtacacagttaagaga

SEQ ID NO: 248040 - DNA, 19 bp, Homo sapiens
  siRNA target sequence for CRL3 (NM_139017.3,284-302).
gagaacttacgcttttgga

SEQ ID NO: 248041 - DNA, 19 bp, Homo sapiens
  siRNA target sequence for CRL3 (NM_139017.3,376-394).
gaataacgatcccagataa

SEQ ID NO: 248042 - DNA, 19 bp, Homo sapiens
  siRNA target sequence for CRL3 (NM_139017.3,386-404).
cccagataattataccatt

SEQ ID NO: 248043 - DNA, 19 bp, Homo sapiens
  siRNA target sequence for CRL3 (NM_139017.3,432-450).
gtaattaaatctcatatga

SEQ ID NO: 248044 - DNA, 19 bp, Homo sapiens
  siRNA target sequence for CRL3 (NM_139017.3,455-473).
ctggagattagagaacata

SEQ ID NO: 248045 - DNA, 19 bp, Homo sapiens
  siRNA target sequence for CRL3 (NM_139017.3,520-538).
gcatcaaacgaatgattca

SEQ ID NO: 248046 - DNA, 19 bp, Homo sapiens
  siRNA target sequence for CRL3 (NM_139017.3,521-539).
catcaaacgaatgattcaa

SEQ ID NO: 248047 - DNA, 19 bp, Homo sapiens
  siRNA target sequence for CRL3 (NM_139017.3,524-542).
caaacgaatgattcaaatt

SEQ ID NO: 248048 - DNA, 19 bp, Homo sapiens
  siRNA target sequence for CRL3 (NM_139017.3,528-546).
cgaatgattcaaattgaat

SEQ ID NO: 248049 - DNA, 19 bp, Homo sapiens
  siRNA target sequence for CRL3 (NM_139017.3,563-581).
ggcgcctgtttcatctgat

SEQ ID NO: 248050 - DNA, 19 bp, Homo sapiens
  siRNA target sequence for CRL3 (NM_139017.3,564-582).
gcgcctgtttcatctgatt

SEQ ID NO: 248051 - DNA, 19 bp, Homo sapiens
  siRNA target sequence for CRL3 (NM_139017.3,565-583).
cgcctgtttcatctgattt

SEQ ID NO: 248052 - DNA, 19 bp, Homo sapiens
  siRNA target sequence for CRL3 (NM_139017.3,641-659).
cgctaagaaccgtaaggat

SEQ ID NO: 248053 - DNA, 19 bp, Homo sapiens
  siRNA target sequence for CRL3 (NM_139017.3,642-660).
gctaagaaccgtaaggata

SEQ ID NO: 248054 - DNA, 19 bp, Homo sapiens
  siRNA target sequence for CRL3 (NM_139017.3,643-661).
ctaagaaccgtaaggataa

SEQ ID NO: 248055 - DNA, 19 bp, Homo sapiens
  siRNA target sequence for CRL3 (NM_139017.3,727-745).
cggtcaaggagtcaaagtt

SEQ ID NO: 248056 - DNA, 19 bp, Homo sapiens
  siRNA target sequence for CRL3 (NM_139017.3,887-905).
cccagtcctagagaaaaca

SEQ ID NO: 248057 - DNA, 19 bp, Homo sapiens
  siRNA target sequence for CRL3 (NM_139017.3,922-940).
ggtactatccagaaagcaa

SEQ ID NO: 248058 - DNA, 19 bp, Homo sapiens
  siRNA target sequence for CRL3 (NM_139017.3,941-959).
cactaacctcacagaaaca

SEQ ID NO: 248059 - DNA, 19 bp, Homo sapiens
  siRNA target sequence for CRL3 (NM_139017.3,948-966).
ctcacagaaacaatgaaca

SEQ ID NO: 248060 - DNA, 19 bp, Homo sapiens
  siRNA target sequence for CRL3 (NM_139017.3,954-972).
gaaacaatgaacactacta

SEQ ID NO: 248061 - DNA, 19 bp, Homo sapiens
  siRNA target sequence for CRL3 (NM_139017.3,1007-1025).
cttttgggtgtctatgatt

SEQ ID NO: 248062 - DNA, 19 bp, Homo sapiens
  siRNA target sequence for CRL3 (NM_139017.3,1014-1032).
gtgtctatgatttcttata

SEQ ID NO: 248063 - DNA, 19 bp, Homo sapiens
  siRNA target sequence for CRL3 (NM_139017.3,1064-1082).
gaggattccagctattcaa

SEQ ID NO: 248064 - DNA, 19 bp, Homo sapiens
  siRNA target sequence for CRL3 (NM_139017.3,1066-1084).
ggattccagctattcaaga

SEQ ID NO: 248065 - DNA, 19 bp, Homo sapiens
  siRNA target sequence for CRL3 (NM_139017.3,1161-1179).
gctctagacgtgaacactt

SEQ ID NO: 248066 - DNA, 19 bp, Homo sapiens
  siRNA target sequence for CRL3 (NM_139017.3,1169-1187).
cgtgaacacttggatgatt

SEQ ID NO: 248067 - DNA, 19 bp, Homo sapiens
  siRNA target sequence for CRL3 (NM_139017.3,1177-1195).
cttggatgattgaatggtt

SEQ ID NO: 248068 - DNA, 19 bp, Homo sapiens
  siRNA target sequence for CRL3 (NM_139017.3,1258-1276).
ggacgatccagcaagataa

SEQ ID NO: 248069 - DNA, 19 bp, Homo sapiens
  siRNA target sequence for CRL3 (NM_139017.3,1259-1277).
gacgatccagcaagataaa

SEQ ID NO: 248070 - DNA, 19 bp, Homo sapiens
  siRNA target sequence for CRL3 (NM_139017.3,1261-1279).
cgatccagcaagataaatt

SEQ ID NO: 248071 - DNA, 19 bp, Homo sapiens
  siRNA target sequence for CRL3 (NM_139017.3,1262-1280).
gatccagcaagataaatta

SEQ ID NO: 248072 - DNA, 19 bp, Homo sapiens
  siRNA target sequence for CRL3 (NM_139017.3,1295-1313).
ctataacatctctgtgtat

SEQ ID NO: 248073 - DNA, 19 bp, Homo sapiens
  siRNA target sequence for CRL3 (NM_139017.3,1332-1350).
gttggcgagccatattcca

SEQ ID NO: 248074 - DNA, 19 bp, Homo sapiens
  siRNA target sequence for CRL3 (NM_139017.3,1424-1442).
ggtcacgatcacatggaaa

SEQ ID NO: 248075 - DNA, 19 bp, Homo sapiens
  siRNA target sequence for CRL3 (NM_139017.3,1429-1447).
cgatcacatggaaagagat

SEQ ID NO: 248076 - DNA, 19 bp, Homo sapiens
  siRNA target sequence for CRL3 (NM_139017.3,1475-1493).
ctgcaactacaccatcttt

SEQ ID NO: 248077 - DNA, 19 bp, Homo sapiens
  siRNA target sequence for CRL3 (NM_139017.3,1477-1495).
gcaactacaccatctttta

SEQ ID NO: 248078 - DNA, 19 bp, Homo sapiens
  siRNA target sequence for CRL3 (NM_139017.3,1624-1642).
ccaacgggaccagcataaa

SEQ ID NO: 248079 - DNA, 19 bp, Homo sapiens
  siRNA target sequence for CRL3 (NM_139017.3,1625-1643).
caacgggaccagcataaat

SEQ ID NO: 248080 - DNA, 19 bp, Homo sapiens
  siRNA target sequence for CRL3 (NM_139017.3,1629-1647).
gggaccagcataaatttca

SEQ ID NO: 248081 - DNA, 19 bp, Homo sapiens
  siRNA target sequence for CRL3 (NM_139017.3,1630-1648).
ggaccagcataaatttcaa

SEQ ID NO: 248082 - DNA, 19 bp, Homo sapiens
  siRNA target sequence for CRL3 (NM_139017.3,1671-1689).
gagattatcctcataactt

SEQ ID NO: 248083 - DNA, 19 bp, Homo sapiens
  siRNA target sequence for CRL3 (NM_139017.3,1699-1717).
gtggaggccttcttattct

SEQ ID NO: 248084 - DNA, 19 bp, Homo sapiens
  siRNA target sequence for CRL3 (NM_139017.3,1701-1719).
ggaggccttcttattctca

SEQ ID NO: 248085 - DNA, 19 bp, Homo sapiens
  siRNA target sequence for CRL3 (NM_139017.3,1724-1742).
cctgacagtggcatatggt

SEQ ID NO: 248086 - DNA, 19 bp, Homo sapiens
  siRNA target sequence for CRL3 (NM_139017.3,1731-1749).
gtggcatatggtctcaaaa

SEQ ID NO: 248087 - DNA, 19 bp, Homo sapiens
  siRNA target sequence for CRL3 (NM_139017.3,1814-1832).
cacatggcatggagatgat

SEQ ID NO: 248088 - DNA, 19 bp, Homo sapiens
  siRNA target sequence for CRL3 (NM_139017.3,1879-1897).
cagaagacaggatcttaaa

SEQ ID NO: 248089 - DNA, 19 bp, Homo sapiens
  siRNA target sequence for CRL3 (NM_139017.3,1987-2005).
ccagaacgggtcaggaaaa

SEQ ID NO: 248090 - DNA, 19 bp, Homo sapiens
  siRNA target sequence for CRL3 (NM_139017.3,1990-2008).
gaacgggtcaggaaaacaa

SEQ ID NO: 248091 - DNA, 19 bp, Homo sapiens
  siRNA target sequence for CRL3 (NM_139017.3,1993-2011).
cgggtcaggaaaacaattt

SEQ ID NO: 248092 - DNA, 19 bp, Homo sapiens
  siRNA target sequence for CRL3 (NM_139017.3,2180-2198).
cttttctggtcaaagttta

SEQ ID NO: 248093 - DNA, 19 bp, Homo sapiens
  siRNA target sequence for CRL3 (NM_139017.3,2194-2212).
gtttagtaccagatcatct

SEQ ID NO: 248094 - DNA, 19 bp, Homo sapiens
  siRNA target sequence for CRL3 (NM_139017.3,2220-2238).
gaaggagccccaaatccat

SEQ ID NO: 248095 - DNA, 19 bp, Homo sapiens
  siRNA target sequence for CRL3 (NM_139017.3,2223-2241).
ggagccccaaatccatatt

SEQ ID NO: 248096 - DNA, 19 bp, Homo sapiens
  siRNA target sequence for CRLF1 (NM_004750.2,1154-1172).
catctatggctccaagaaa

SEQ ID NO: 248097 - DNA, 19 bp, Homo sapiens
  siRNA target sequence for CRLF3 (NM_015986.2,168-186).
cacagacaagggatgttct

SEQ ID NO: 248098 - DNA, 19 bp, Homo sapiens
  siRNA target sequence for CRLF3 (NM_015986.2,174-192).
caagggatgttctcaaaca

SEQ ID NO: 248099 - DNA, 19 bp, Homo sapiens
  siRNA target sequence for CRLF3 (NM_015986.2,182-200).
gttctcaaacagcatttta

SEQ ID NO: 248100 - DNA, 19 bp, Homo sapiens
  siRNA target sequence for CRLF3 (NM_015986.2,306-324).
gccagaagctcatagaaca

SEQ ID NO: 248101 - DNA, 19 bp, Homo sapiens
  siRNA target sequence for CRLF3 (NM_015986.2,470-488).
gttgatgtgccttgtttat

SEQ ID NO: 248102 - DNA, 19 bp, Homo sapiens
  siRNA target sequence for CRLF3 (NM_015986.2,500-518).
gatgactcaattcttaaca

SEQ ID NO: 248103 - DNA, 19 bp, Homo sapiens
  siRNA target sequence for CRLF3 (NM_015986.2,562-580).
cccaccagtacagatagaa

SEQ ID NO: 248104 - DNA, 19 bp, Homo sapiens
  siRNA target sequence for CRLF3 (NM_015986.2,567-585).
cagtacagatagaagaact

SEQ ID NO: 248105 - DNA, 19 bp, Homo sapiens
  siRNA target sequence for CRLF3 (NM_015986.2,569-587).
gtacagatagaagaactaa

SEQ ID NO: 248106 - DNA, 19 bp, Homo sapiens
  siRNA target sequence for CRLF3 (NM_015986.2,618-636).
ggtgtaaggtggatgatga

SEQ ID NO: 248107 - DNA, 19 bp, Homo sapiens
  siRNA target sequence for CRLF3 (NM_015986.2,655-673).
caggctccagtttcgtaaa

SEQ ID NO: 248108 - DNA, 19 bp, Homo sapiens
  siRNA target sequence for CRLF3 (NM_015986.2,658-676).
gctccagtttcgtaaatgt

SEQ ID NO: 248109 - DNA, 19 bp, Homo sapiens
  siRNA target sequence for CRLF3 (NM_015986.2,659-677).
ctccagtttcgtaaatgta

SEQ ID NO: 248110 - DNA, 19 bp, Homo sapiens
  siRNA target sequence for CRLF3 (NM_015986.2,664-682).
gtttcgtaaatgtacttca

SEQ ID NO: 248111 - DNA, 19 bp, Homo sapiens
  siRNA target sequence for CRLF3 (NM_015986.2,698-716).
gtatatgtaggttctgaaa

SEQ ID NO: 248112 - DNA, 19 bp, Homo sapiens
  siRNA target sequence for CRLF3 (NM_015986.2,711-729).
ctgaaactgaattcatagt

SEQ ID NO: 248113 - DNA, 19 bp, Homo sapiens
  siRNA target sequence for CRLF3 (NM_015986.2,878-896).
ctgagcagtcgaagaaata

SEQ ID NO: 248114 - DNA, 19 bp, Homo sapiens
  siRNA target sequence for CRLF3 (NM_015986.2,883-901).
cagtcgaagaaatatagca

SEQ ID NO: 248115 - DNA, 19 bp, Homo sapiens
  siRNA target sequence for CRLF3 (NM_015986.2,902-920).
cttcggaacgattctgaat

SEQ ID NO: 248116 - DNA, 19 bp, Homo sapiens
  siRNA target sequence for CRLF3 (NM_015986.2,905-923).
cggaacgattctgaatcat

SEQ ID NO: 248117 - DNA, 19 bp, Homo sapiens
  siRNA target sequence for CRLF3 (NM_015986.2,939-957).
ccagagctccgacttattt

SEQ ID NO: 248118 - DNA, 19 bp, Homo sapiens
  siRNA target sequence for CRLF3 (NM_015986.2,1073-1091).
gctgtgtgcattagtacaa

SEQ ID NO: 248119 - DNA, 19 bp, Homo sapiens
  siRNA target sequence for CRLF3 (NM_015986.2,1074-1092).
ctgtgtgcattagtacaaa

SEQ ID NO: 248120 - DNA, 19 bp, Homo sapiens
  siRNA target sequence for CRLF3 (NM_015986.2,1130-1148).
cagttacccgcagttactt

SEQ ID NO: 248121 - DNA, 19 bp, Homo sapiens
  siRNA target sequence for CRLF3 (NM_015986.2,1132-1150).
gttacccgcagttacttct

SEQ ID NO: 248122 - DNA, 19 bp, Homo sapiens
  siRNA target sequence for CRLF3 (NM_015986.2,1155-1173).
ccactgtcacgtttgacat

SEQ ID NO: 248123 - DNA, 19 bp, Homo sapiens
  siRNA target sequence for CRLF3 (NM_015986.2,1156-1174).
cactgtcacgtttgacatt

SEQ ID NO: 248124 - DNA, 19 bp, Homo sapiens
  siRNA target sequence for CRLF3 (NM_015986.2,1219-1237).
cttcaagcttcgagtaact

SEQ ID NO: 248125 - DNA, 19 bp, Homo sapiens
  siRNA target sequence for CRLF3 (NM_015986.2,1222-1240).
caagcttcgagtaactata

SEQ ID NO: 248126 - DNA, 19 bp, Homo sapiens
  siRNA target sequence for CRLF3 (NM_015986.2,1225-1243).
gcttcgagtaactataagt

SEQ ID NO: 248127 - DNA, 19 bp, Homo sapiens
  siRNA target sequence for CRLF3 (NM_015986.2,1226-1244).
cttcgagtaactataagtt

SEQ ID NO: 248128 - DNA, 19 bp, Homo sapiens
  siRNA target sequence for CRLF3 (NM_015986.2,1229-1247).
cgagtaactataagttcaa

SEQ ID NO: 248129 - DNA, 19 bp, Homo sapiens
  siRNA target sequence for CRLF3 (NM_015986.2,1261-1279).
ggtttttgactggttactt

SEQ ID NO: 248130 - DNA, 19 bp, Homo sapiens
  siRNA target sequence for CRSP3 (NM_004830.2,354-372).
ccagtggattgttaagttt

SEQ ID NO: 248131 - DNA, 19 bp, Homo sapiens
  siRNA target sequence for CRSP3 (NM_004830.2,355-373).
cagtggattgttaagttta

SEQ ID NO: 248132 - DNA, 19 bp, Homo sapiens
  siRNA target sequence for CRSP3 (NM_004830.2,357-375).
gtggattgttaagtttatt

SEQ ID NO: 248133 - DNA, 19 bp, Homo sapiens
  siRNA target sequence for CRSP3 (NM_004830.2,463-481).
gtttgtgaatccctgataa

SEQ ID NO: 248134 - DNA, 19 bp, Homo sapiens
  siRNA target sequence for CRSP3 (NM_004830.2,511-529).
cagctttgggccttaacat

SEQ ID NO: 248135 - DNA, 19 bp, Homo sapiens
  siRNA target sequence for CRSP3 (NM_004830.2,570-588).
gggtgttcgagatctctta

SEQ ID NO: 248136 - DNA, 19 bp, Homo sapiens
  siRNA target sequence for CRSP3 (NM_004830.2,571-589).
ggtgttcgagatctcttaa

SEQ ID NO: 248137 - DNA, 19 bp, Homo sapiens
  siRNA target sequence for CRSP3 (NM_004830.2,572-590).
gtgttcgagatctcttaaa

SEQ ID NO: 248138 - DNA, 19 bp, Homo sapiens
  siRNA target sequence for CRSP3 (NM_004830.2,577-595).
cgagatctcttaaaagtga

SEQ ID NO: 248139 - DNA, 19 bp, Homo sapiens
  siRNA target sequence for CRSP3 (NM_004830.2,578-596).
gagatctcttaaaagtgat

SEQ ID NO: 248140 - DNA, 19 bp, Homo sapiens
  siRNA target sequence for CRSP3 (NM_004830.2,661-679).
gcaagagaggttatagcat

SEQ ID NO: 248141 - DNA, 19 bp, Homo sapiens
  siRNA target sequence for CRSP3 (NM_004830.2,662-680).
caagagaggttatagcata

SEQ ID NO: 248142 - DNA, 19 bp, Homo sapiens
  siRNA target sequence for CRSP3 (NM_004830.2,667-685).
gaggttatagcatatatct

SEQ ID NO: 248143 - DNA, 19 bp, Homo sapiens
  siRNA target sequence for CRSP3 (NM_004830.2,701-719).
gcttattaccagcctattt

SEQ ID NO: 248144 - DNA, 19 bp, Homo sapiens
  siRNA target sequence for CRSP3 (NM_004830.2,934-952).
ggccttttgccatatgata

SEQ ID NO: 248145 - DNA, 19 bp, Homo sapiens
  siRNA target sequence for CRSP3 (NM_004830.2,991-1009).
gtattggagcagccttatt

SEQ ID NO: 248146 - DNA, 19 bp, Homo sapiens
  siRNA target sequence for CRSP3 (NM_004830.2,1004-1022).
cttattccagggatatggt

SEQ ID NO: 248147 - DNA, 19 bp, Homo sapiens
  siRNA target sequence for CRSP3 (NM_004830.2,1013-1031).
gggatatggtctgcaatat

SEQ ID NO: 248148 - DNA, 19 bp, Homo sapiens
  siRNA target sequence for CRSP3 (NM_004830.2,1023-1041).
ctgcaatatgctaggttta

SEQ ID NO: 248149 - DNA, 19 bp, Homo sapiens
  siRNA target sequence for CRSP3 (NM_004830.2,1025-1043).
gcaatatgctaggtttaaa

SEQ ID NO: 248150 - DNA, 19 bp, Homo sapiens
  siRNA target sequence for CRSP3 (NM_004830.2,1026-1044).
caatatgctaggtttaaat

SEQ ID NO: 248151 - DNA, 19 bp, Homo sapiens
  siRNA target sequence for CRSP3 (NM_004830.2,1214-1232).
caagttttccacatatggt

SEQ ID NO: 248152 - DNA, 19 bp, Homo sapiens
  siRNA target sequence for CRSP3 (NM_004830.2,1255-1273).
gcagggcgaggactgatta

SEQ ID NO: 248153 - DNA, 19 bp, Homo sapiens
  siRNA target sequence for CRSP3 (NM_004830.2,1256-1274).
cagggcgaggactgattaa

SEQ ID NO: 248154 - DNA, 19 bp, Homo sapiens
  siRNA target sequence for CRSP3 (NM_004830.2,1295-1313).
gggttctcctgcaattcat

SEQ ID NO: 248155 - DNA, 19 bp, Homo sapiens
  siRNA target sequence for CRSP3 (NM_004830.2,1449-1467).
gacctgtatttggattcat

SEQ ID NO: 248156 - DNA, 19 bp, Homo sapiens
  siRNA target sequence for CRSP3 (NM_004830.2,1460-1478).
ggattcatctcaatagaaa

SEQ ID NO: 248157 - DNA, 19 bp, Homo sapiens
  siRNA target sequence for CRSP3 (NM_004830.2,1491-1509).
caactccaagctacagatt

SEQ ID NO: 248158 - DNA, 19 bp, Homo sapiens
  siRNA target sequence for CRSP3 (NM_004830.2,1548-1566).
gcagcagagtctaagaaat

SEQ ID NO: 248159 - DNA, 19 bp, Homo sapiens
  siRNA target sequence for CRSP3 (NM_004830.2,1578-1596).
gatgaatgactataagatt

SEQ ID NO: 248160 - DNA, 19 bp, Homo sapiens
  siRNA target sequence for CRSP3 (NM_004830.2,1607-1625).
gtaatgcatactctacaaa

SEQ ID NO: 248161 - DNA, 19 bp, Homo sapiens
  siRNA target sequence for CRSP3 (NM_004830.2,1613-1631).
catactctacaaattcaga

SEQ ID NO: 248162 - DNA, 19 bp, Homo sapiens
  siRNA target sequence for CRSP3 (NM_004830.2,1617-1635).
ctctacaaattcagaatgt

SEQ ID NO: 248163 - DNA, 19 bp, Homo sapiens
  siRNA target sequence for CRSP3 (NM_004830.2,1654-1672).
gctctggtagaaactattt

SEQ ID NO: 248164 - DNA, 19 bp, Homo sapiens
  siRNA target sequence for CRSP3 (NM_004830.2,1659-1677).
ggtagaaactatttatgga

SEQ ID NO: 248165 - DNA, 19 bp, Homo sapiens
  siRNA target sequence for CRSP3 (NM_004830.2,1699-1717).
ctccctggaacaaactgta

SEQ ID NO: 248166 - DNA, 19 bp, Homo sapiens
  siRNA target sequence for CRSP3 (NM_004830.2,1715-1733).
gtatggcttcaggatctat

SEQ ID NO: 248167 - DNA, 19 bp, Homo sapiens
  siRNA target sequence for CRSP3 (NM_004830.2,1730-1748).
ctattacccccttacctat

SEQ ID NO: 248168 - DNA, 19 bp, Homo sapiens
  siRNA target sequence for CRSP3 (NM_004830.2,1805-1823).
caaccagggtgataaaact

SEQ ID NO: 248169 - DNA, 19 bp, Homo sapiens
  siRNA target sequence for CRSP3 (NM_004830.2,1856-1874).
cagccctagtggaaactta

SEQ ID NO: 248170 - DNA, 19 bp, Homo sapiens
  siRNA target sequence for CRSP3 (NM_004830.2,1858-1876).
gccctagtggaaacttaca

SEQ ID NO: 248171 - DNA, 19 bp, Homo sapiens
  siRNA target sequence for CRSP3 (NM_004830.2,1860-1878).
cctagtggaaacttacagt

SEQ ID NO: 248172 - DNA, 19 bp, Homo sapiens
  siRNA target sequence for CRSP3 (NM_004830.2,1871-1889).
cttacagtcgtttattggt

SEQ ID NO: 248173 - DNA, 19 bp, Homo sapiens
  siRNA target sequence for CRSP3 (NM_004830.2,1877-1895).
gtcgtttattggtctatat

SEQ ID NO: 248174 - DNA, 19 bp, Homo sapiens
  siRNA target sequence for CRSP3 (NM_004830.2,1963-1981).
gcatgggggatcttacaca

SEQ ID NO: 248175 - DNA, 19 bp, Homo sapiens
  siRNA target sequence for CRSP3 (NM_004830.2,1980-1998).
cacactccttgagatgttt

SEQ ID NO: 248176 - DNA, 19 bp, Homo sapiens
  siRNA target sequence for CRSP3 (NM_004830.2,2000-2018).
gctaccggatgcatcatat

SEQ ID NO: 248177 - DNA, 19 bp, Homo sapiens
  siRNA target sequence for CRSP3 (NM_004830.2,2001-2019).
ctaccggatgcatcatatt

SEQ ID NO: 248178 - DNA, 19 bp, Homo sapiens
  siRNA target sequence for CRSP3 (NM_004830.2,2041-2059).
ctcctgagtcatcttcata

SEQ ID NO: 248179 - DNA, 19 bp, Homo sapiens
  siRNA target sequence for CRSP3 (NM_004830.2,2065-2083).
gctgcagttgcacaaacaa

SEQ ID NO: 248180 - DNA, 19 bp, Homo sapiens
  siRNA target sequence for CRSP3 (NM_004830.2,2066-2084).
ctgcagttgcacaaacaaa

SEQ ID NO: 248181 - DNA, 19 bp, Homo sapiens
  siRNA target sequence for CRSP3 (NM_004830.2,2115-2133).
cactgctctcaggcttata

SEQ ID NO: 248182 - DNA, 19 bp, Homo sapiens
  siRNA target sequence for CRSP3 (NM_004830.2,2124-2142).
caggcttataacagcatta

SEQ ID NO: 248183 - DNA, 19 bp, Homo sapiens
  siRNA target sequence for CRSP3 (NM_004830.2,2127-2145).
gcttataacagcattaggt

SEQ ID NO: 248184 - DNA, 19 bp, Homo sapiens
  siRNA target sequence for CRSP3 (NM_004830.2,2128-2146).
cttataacagcattaggta

SEQ ID NO: 248185 - DNA, 19 bp, Homo sapiens
  siRNA target sequence for CRSP3 (NM_004830.2,2154-2172).
ggtacaaccgcagtttaca

SEQ ID NO: 248186 - DNA, 19 bp, Homo sapiens
  siRNA target sequence for CRSP3 (NM_004830.2,2164-2182).
cagtttacacgcttcctta

SEQ ID NO: 248187 - DNA, 19 bp, Homo sapiens
  siRNA target sequence for CRSP3 (NM_004830.2,2199-2217).
gctctcagcagaatctgaa

SEQ ID NO: 248188 - DNA, 19 bp, Homo sapiens
  siRNA target sequence for CRSP3 (NM_004830.2,2221-2239).
ctgaaccgagccttgatat

SEQ ID NO: 248189 - DNA, 19 bp, Homo sapiens
  siRNA target sequence for CRSP3 (NM_004830.2,2248-2266).
gctagagcaactcatgtaa

SEQ ID NO: 248190 - DNA, 19 bp, Homo sapiens
  siRNA target sequence for CRSP3 (NM_004830.2,2254-2272).
gcaactcatgtaacagatt

SEQ ID NO: 248191 - DNA, 19 bp, Homo sapiens
  siRNA target sequence for CRSP3 (NM_004830.2,2255-2273).
caactcatgtaacagattt

SEQ ID NO: 248192 - DNA, 19 bp, Homo sapiens
  siRNA target sequence for CRSP3 (NM_004830.2,2279-2297).
caggctctgattcaattca

SEQ ID NO: 248193 - DNA, 19 bp, Homo sapiens
  siRNA target sequence for CRSP3 (NM_004830.2,2303-2321).
cttggtgtaaagacatact

SEQ ID NO: 248194 - DNA, 19 bp, Homo sapiens
  siRNA target sequence for CRSP3 (NM_004830.2,2425-2443).
gaaagccgttttaatctga

SEQ ID NO: 248195 - DNA, 19 bp, Homo sapiens
  siRNA target sequence for CRSP3 (NM_004830.2,2429-2447).
gccgttttaatctgaaaaa

SEQ ID NO: 248196 - DNA, 19 bp, Homo sapiens
  siRNA target sequence for CRSP3 (NM_004830.2,2486-2504).
gcaacgaaaacgacattat

SEQ ID NO: 248197 - DNA, 19 bp, Homo sapiens
  siRNA target sequence for CRSP3 (NM_004830.2,2487-2505).
caacgaaaacgacattatt

SEQ ID NO: 248198 - DNA, 19 bp, Homo sapiens
  siRNA target sequence for CRSP3 (NM_004830.2,2546-2564).
gtcttctctggaaaatgct

SEQ ID NO: 248199 - DNA, 19 bp, Homo sapiens
  siRNA target sequence for CRSP3 (NM_004830.2,2573-2591).
cagatcatattaatcagat

SEQ ID NO: 248200 - DNA, 19 bp, Homo sapiens
  siRNA target sequence for CRSP3 (NM_004830.2,2587-2605).
cagattggctatagagtat

SEQ ID NO: 248201 - DNA, 19 bp, Homo sapiens
  siRNA target sequence for CRSP3 (NM_004830.2,2589-2607).
gattggctatagagtatta

SEQ ID NO: 248202 - DNA, 19 bp, Homo sapiens
  siRNA target sequence for CRSP3 (NM_004830.2,2593-2611).
ggctatagagtattagaga

SEQ ID NO: 248203 - DNA, 19 bp, Homo sapiens
  siRNA target sequence for CRSP3 (NM_004830.2,2656-2674).
gatttcctggtatatgagt

SEQ ID NO: 248204 - DNA, 19 bp, Homo sapiens
  siRNA target sequence for CRSP3 (NM_004830.2,2662-2680).
ctggtatatgagttttcta

SEQ ID NO: 248205 - DNA, 19 bp, Homo sapiens
  siRNA target sequence for CRSP3 (NM_004830.2,2664-2682).
ggtatatgagttttctaca

SEQ ID NO: 248206 - DNA, 19 bp, Homo sapiens
  siRNA target sequence for CRSP3 (NM_004830.2,2665-2683).
gtatatgagttttctacat

SEQ ID NO: 248207 - DNA, 19 bp, Homo sapiens
  siRNA target sequence for CRSP3 (NM_004830.2,2689-2707).
gggggtcagcaactcaata

SEQ ID NO: 248208 - DNA, 19 bp, Homo sapiens
  siRNA target sequence for CRSP3 (NM_004830.2,2690-2708).
ggggtcagcaactcaataa

SEQ ID NO: 248209 - DNA, 19 bp, Homo sapiens
  siRNA target sequence for CRSP3 (NM_004830.2,2752-2770).
gttacactggacagattaa

SEQ ID NO: 248210 - DNA, 19 bp, Homo sapiens
  siRNA target sequence for CRSP3 (NM_004830.2,2756-2774).
cactggacagattaattct

SEQ ID NO: 248211 - DNA, 19 bp, Homo sapiens
  siRNA target sequence for CRSP3 (NM_004830.2,2787-2805).
gcgtagtcacgaaggaaat

SEQ ID NO: 248212 - DNA, 19 bp, Homo sapiens
  siRNA target sequence for CRSP3 (NM_004830.2,2811-2829).
ccaggtttgttatttcata

SEQ ID NO: 248213 - DNA, 19 bp, Homo sapiens
  siRNA target sequence for CRSP3 (NM_004830.2,2845-2863).
ctcaaaccaaacgatttta

SEQ ID NO: 248214 - DNA, 19 bp, Homo sapiens
  siRNA target sequence for CRSP3 (NM_004830.2,2869-2887).
cgagtaagtgactttgtga

SEQ ID NO: 248215 - DNA, 19 bp, Homo sapiens
  siRNA target sequence for CRSP3 (NM_004830.2,2924-2942).
ggcacaccaagcacatgaa

SEQ ID NO: 248216 - DNA, 19 bp, Homo sapiens
  siRNA target sequence for CRSP3 (NM_004830.2,2930-2948).
ccaagcacatgaattatca

SEQ ID NO: 248217 - DNA, 19 bp, Homo sapiens
  siRNA target sequence for CRSP3 (NM_004830.2,3059-3077).
gattccttccagtatttga

SEQ ID NO: 248218 - DNA, 19 bp, Homo sapiens
  siRNA target sequence for CRSP3 (NM_004830.2,3102-3120).
gttgcttccggtatccaaa

SEQ ID NO: 248219 - DNA, 19 bp, Homo sapiens
  siRNA target sequence for CRSP3 (NM_004830.2,3105-3123).
gcttccggtatccaaatca

SEQ ID NO: 248220 - DNA, 19 bp, Homo sapiens
  siRNA target sequence for CRSP3 (NM_004830.2,3129-3147).
gactctactggatcatcta

SEQ ID NO: 248221 - DNA, 19 bp, Homo sapiens
  siRNA target sequence for CRSP3 (NM_004830.2,3142-3160).
catctaggaggcttatata

SEQ ID NO: 248222 - DNA, 19 bp, Homo sapiens
  siRNA target sequence for CRSP3 (NM_004830.2,3145-3163).
ctaggaggcttatataaat

SEQ ID NO: 248223 - DNA, 19 bp, Homo sapiens
  siRNA target sequence for CRSP3 (NM_004830.2,3149-3167).
gaggcttatataaatttca

SEQ ID NO: 248224 - DNA, 19 bp, Homo sapiens
  siRNA target sequence for CRSP3 (NM_004830.2,3180-3198).
gacttatctgtataacact

SEQ ID NO: 248225 - DNA, 19 bp, Homo sapiens
  siRNA target sequence for CRSP3 (NM_004830.2,3195-3213).
cactctgcactattatgaa

SEQ ID NO: 248226 - DNA, 19 bp, Homo sapiens
  siRNA target sequence for CRSP3 (NM_004830.2,3224-3242).
gagaccgcgcatttctcaa

SEQ ID NO: 248227 - DNA, 19 bp, Homo sapiens
  siRNA target sequence for CRSP3 (NM_004830.2,3231-3249).
cgcatttctcaaacgaaaa

SEQ ID NO: 248228 - DNA, 19 bp, Homo sapiens
  siRNA target sequence for CRSP3 (NM_004830.2,3270-3288).
ctctctgaaggataatcga

SEQ ID NO: 248229 - DNA, 19 bp, Homo sapiens
  siRNA target sequence for CRSP3 (NM_004830.2,3289-3307).
ccgcagggctggtgtctaa

SEQ ID NO: 248230 - DNA, 19 bp, Homo sapiens
  siRNA target sequence for CRSP3 (NM_004830.2,3291-3309).
gcagggctggtgtctaagt

SEQ ID NO: 248231 - DNA, 19 bp, Homo sapiens
  siRNA target sequence for CRSP3 (NM_004830.2,3318-3336).
cctgaaatgcgctatgaat

SEQ ID NO: 248232 - DNA, 19 bp, Homo sapiens
  siRNA target sequence for CRSP3 (NM_004830.2,3333-3351).
gaatgcacgagaggaaaat

SEQ ID NO: 248233 - DNA, 19 bp, Homo sapiens
  siRNA target sequence for CRSP3 (NM_004830.2,3392-3410).
gcagactagtcgatacgat

SEQ ID NO: 248234 - DNA, 19 bp, Homo sapiens
  siRNA target sequence for CRSP3 (NM_004830.2,3441-3459).
ctgtgactggagattcaat

SEQ ID NO: 248235 - DNA, 19 bp, Homo sapiens
  siRNA target sequence for CRSP3 (NM_004830.2,3445-3463).
gactggagattcaatgagt

SEQ ID NO: 248236 - DNA, 19 bp, Homo sapiens
  siRNA target sequence for CRSP3 (NM_004830.2,3478-3496).
gcccatgctctccatgtta

SEQ ID NO: 248237 - DNA, 19 bp, Homo sapiens
  siRNA target sequence for CRSP3 (NM_004830.2,3480-3498).
ccatgctctccatgttact

SEQ ID NO: 248238 - DNA, 19 bp, Homo sapiens
  siRNA target sequence for CRSP3 (NM_004830.2,3481-3499).
catgctctccatgttactt

SEQ ID NO: 248239 - DNA, 19 bp, Homo sapiens
  siRNA target sequence for CRSP3 (NM_004830.2,3538-3556).
gttgggaatgcccttctaa

SEQ ID NO: 248240 - DNA, 19 bp, Homo sapiens
  siRNA target sequence for CRSP3 (NM_004830.2,3585-3603).
gccaagagagaacattaca

SEQ ID NO: 248241 - DNA, 19 bp, Homo sapiens
  siRNA target sequence for CRSP3 (NM_004830.2,3616-3634).
gcaattggtttgatcatca

SEQ ID NO: 248242 - DNA, 19 bp, Homo sapiens
  siRNA target sequence for CRSP3 (NM_004830.2,3637-3655).
gccctaccagagccatatt

SEQ ID NO: 248243 - DNA, 19 bp, Homo sapiens
  siRNA target sequence for CRSP3 (NM_004830.2,3640-3658).
ctaccagagccatattgga

SEQ ID NO: 248244 - DNA, 19 bp, Homo sapiens
  siRNA target sequence for CRSP3 (NM_004830.2,3664-3682).
cttcatgatcgaattgtga

SEQ ID NO: 248245 - DNA, 19 bp, Homo sapiens
  siRNA target sequence for CRSP3 (NM_004830.2,3697-3715).
cccagcttgacgtctgaaa

SEQ ID NO: 248246 - DNA, 19 bp, Homo sapiens
  siRNA target sequence for CRSP3 (NM_004830.2,3701-3719).
gcttgacgtctgaaacaga

SEQ ID NO: 248247 - DNA, 19 bp, Homo sapiens
  siRNA target sequence for CRSP3 (NM_004830.2,3733-3751).
ccattccgcctctttgatt

SEQ ID NO: 248248 - DNA, 19 bp, Homo sapiens
  siRNA target sequence for CRSP3 (NM_004830.2,3778-3796).
gagatgagttgtagctata

SEQ ID NO: 248249 - DNA, 19 bp, Homo sapiens
  siRNA target sequence for CRSP3 (NM_004830.2,3783-3801).
gagttgtagctatacgtta

SEQ ID NO: 248250 - DNA, 19 bp, Homo sapiens
  siRNA target sequence for CRSP3 (NM_004830.2,3814-3832).
gctgtgtggcaccattcta

SEQ ID NO: 248251 - DNA, 19 bp, Homo sapiens
  siRNA target sequence for CRSP3 (NM_004830.2,3833-3851).
gcatcggacaactttctct

SEQ ID NO: 248252 - DNA, 19 bp, Homo sapiens
  siRNA target sequence for CRSP3 (NM_004830.2,3837-3855).
cggacaactttctctcatt

SEQ ID NO: 248253 - DNA, 19 bp, Homo sapiens
  siRNA target sequence for CRSP3 (NM_004830.2,3850-3868).
ctcattccaaagtttctta

SEQ ID NO: 248254 - DNA, 19 bp, Homo sapiens
  siRNA target sequence for CRSP3 (NM_004830.2,3874-3892).
gtacttcttcctatagtga

SEQ ID NO: 248255 - DNA, 19 bp, Homo sapiens
  siRNA target sequence for CRSP3 (NM_004830.2,3896-3914).
ccgaattccagttgcttta

SEQ ID NO: 248256 - DNA, 19 bp, Homo sapiens
  siRNA target sequence for CRSP3 (NM_004830.2,3897-3915).
cgaattccagttgctttat

SEQ ID NO: 248257 - DNA, 19 bp, Homo sapiens
  siRNA target sequence for CRSP3 (NM_004830.2,3922-3940).
catcttgttggaccatttt

SEQ ID NO: 248258 - DNA, 19 bp, Homo sapiens
  siRNA target sequence for CRSP3 (NM_004830.2,3962-3980).
gaactcgttgtatgataga

SEQ ID NO: 248259 - DNA, 19 bp, Homo sapiens
  siRNA target sequence for CRSP3 (NM_004830.2,3981-3999).
gattggtgtggcgttttat

SEQ ID NO: 248260 - DNA, 19 bp, Homo sapiens
  siRNA target sequence for CRSP3 (NM_004830.2,3985-4003).
ggtgtggcgttttatgaca

SEQ ID NO: 248261 - DNA, 19 bp, Homo sapiens
  siRNA target sequence for CRSP3 (NM_004830.2,3986-4004).
gtgtggcgttttatgacat

SEQ ID NO: 248262 - DNA, 19 bp, Homo sapiens
  siRNA target sequence for CRSP3 (NM_004830.2,4020-4038).
ccagtgtagcacccattta

SEQ ID NO: 248263 - DNA, 19 bp, Homo sapiens
  siRNA target sequence for CRSP3 (NM_004830.2,4100-4118).
gcgtgaaagagcaagtaga

SEQ ID NO: 248264 - DNA, 19 bp, Homo sapiens
  siRNA target sequence for CRSP3 (NM_004830.2,4119-4137).
gaagattatctgtaactta

SEQ ID NO: 248265 - DNA, 19 bp, Homo sapiens
  siRNA target sequence for CRSP3 (NM_004830.2,4153-4171).
cttcgtcttcgattcatca

SEQ ID NO: 248266 - DNA, 19 bp, Homo sapiens
  siRNA target sequence for CRSP3 (NM_004830.2,4162-4180).
cgattcatcacacacatta

SEQ ID NO: 248267 - DNA, 19 bp, Homo sapiens
  siRNA target sequence for CRSP3 (NM_004830.2,4204-4222).
cctccacaagccatgaaca

SEQ ID NO: 248268 - DNA, 19 bp, Homo sapiens
  siRNA target sequence for CRSP3 (NM_004830.2,4251-4269).
ggtgcccgtgtctttacca

SEQ ID NO: 248269 - DNA, 19 bp, Homo sapiens
  siRNA target sequence for CRSP3 (NM_004830.2,4257-4275).
cgtgtctttaccagtaact

SEQ ID NO: 248270 - DNA, 19 bp, Homo sapiens
  siRNA target sequence for CRSP6 (NM_004268.3,251-269).
gtgcggatcagcatcgaat

SEQ ID NO: 248271 - DNA, 19 bp, Homo sapiens
  siRNA target sequence for CRSP6 (NM_004268.3,517-535).
ggactcagtgaggaacaat

SEQ ID NO: 248272 - DNA, 19 bp, Homo sapiens
  siRNA target sequence for CRSP6 (NM_004268.3,518-536).
gactcagtgaggaacaatt

SEQ ID NO: 248273 - DNA, 19 bp, Homo sapiens
  siRNA target sequence for CRSP6 (NM_004268.3,556-574).
gatgtgtgttctctatgat

SEQ ID NO: 248274 - DNA, 19 bp, Homo sapiens
  siRNA target sequence for CRSP6 (NM_004268.3,559-577).
gtgtgttctctatgatgtt

SEQ ID NO: 248275 - DNA, 19 bp, Homo sapiens
  siRNA target sequence for CRSP6 (NM_004268.3,561-579).
gtgttctctatgatgttct

SEQ ID NO: 248276 - DNA, 19 bp, Homo sapiens
  siRNA target sequence for CRSP6 (NM_004268.3,580-598).
cagtattgttagggataaa

SEQ ID NO: 248277 - DNA, 19 bp, Homo sapiens
  siRNA target sequence for CRSP6 (NM_004268.3,653-671).
cctcagacgttgcaattga

SEQ ID NO: 248278 - DNA, 19 bp, Homo sapiens
  siRNA target sequence for CRSP6 (NM_004268.3,654-672).
ctcagacgttgcaattgat

SEQ ID NO: 248279 - DNA, 19 bp, Homo sapiens
  siRNA target sequence for CRSP6 (NM_004268.3,656-674).
cagacgttgcaattgatat

SEQ ID NO: 248280 - DNA, 19 bp, Homo sapiens
  siRNA target sequence for CRSP6 (NM_004268.3,658-676).
gacgttgcaattgatatct

SEQ ID NO: 248281 - DNA, 19 bp, Homo sapiens
  siRNA target sequence for CRSP6 (NM_004268.3,660-678).
cgttgcaattgatatctaa

SEQ ID NO: 248282 - DNA, 19 bp, Homo sapiens
  siRNA target sequence for CRSP6 (NM_004268.3,698-716).
gcagcacaaatcttattga

SEQ ID NO: 248283 - DNA, 19 bp, Homo sapiens
  siRNA target sequence for CRSP6 (NM_004268.3,699-717).
cagcacaaatcttattgaa

SEQ ID NO: 248284 - DNA, 19 bp, Homo sapiens
  siRNA target sequence for CRSP6 (NM_004268.3,915-933).
cagatctcgatctggataa

SEQ ID NO: 248285 - DNA, 19 bp, Homo sapiens
  siRNA target sequence for CRSP6 (NM_004268.3,965-983).
gtccaaattcctagtgatt

SEQ ID NO: 248286 - DNA, 19 bp, Homo sapiens
  siRNA target sequence for CRSP6 (NM_004268.3,986-1004).
gaggggtctgcatatatca

SEQ ID NO: 248287 - DNA, 19 bp, Homo sapiens
  siRNA target sequence for CRSP6 (NM_004268.3,1037-1055).
ggtgacctcggcacagtta

SEQ ID NO: 248288 - DNA, 19 bp, Homo sapiens
  siRNA target sequence for CRSP6 (NM_004268.3,1038-1056).
gtgacctcggcacagttaa

SEQ ID NO: 248289 - DNA, 19 bp, Homo sapiens
  siRNA target sequence for CRSP6 (NM_004268.3,1095-1113).
ccccacattggcagacaaa

SEQ ID NO: 248290 - DNA, 19 bp, Homo sapiens
  siRNA target sequence for CRSP6 (NM_004268.3,1097-1115).
ccacattggcagacaaaat

SEQ ID NO: 248291 - DNA, 19 bp, Homo sapiens
  siRNA target sequence for CRSP6 (NM_004268.3,1098-1116).
cacattggcagacaaaatt

SEQ ID NO: 248292 - DNA, 19 bp, Homo sapiens
  siRNA target sequence for CRSP6 (NM_004268.3,1123-1141).
ggcacagaatgttctctta

SEQ ID NO: 248293 - DNA, 19 bp, Homo sapiens
  siRNA target sequence for CRSP6 (NM_004268.3,1191-1209).
cacaagtccctcacattgt

SEQ ID NO: 248294 - DNA, 19 bp, Homo sapiens
  siRNA target sequence for CRSP6 (NM_004268.3,1199-1217).
cctcacattgtggtgaaaa

SEQ ID NO: 248295 - DNA, 19 bp, Homo sapiens
  siRNA target sequence for CRSP6 (NM_004268.3,1241-1259).
ccgagcttgcagttatcta

SEQ ID NO: 248296 - DNA, 19 bp, Homo sapiens
  siRNA target sequence for CRSP6 (NM_004268.3,1243-1261).
gagcttgcagttatctatt

SEQ ID NO: 248297 - DNA, 19 bp, Homo sapiens
  siRNA target sequence for CRSP6 (NM_004268.3,1323-1341).
cggaggaccacctttatgt

SEQ ID NO: 248298 - DNA, 19 bp, Homo sapiens
  siRNA target sequence for CRSP6 (NM_004268.3,1364-1382).
ctgattagagagtttcata

SEQ ID NO: 248299 - DNA, 19 bp, Homo sapiens
  siRNA target sequence for CRSP6 (NM_004268.3,1458-1476).
gtcctcaagcttttgataa

SEQ ID NO: 248300 - DNA, 19 bp, Homo sapiens
  siRNA target sequence for CRSP6 (NM_004268.3,1460-1478).
cctcaagcttttgataaaa

SEQ ID NO: 248301 - DNA, 19 bp, Homo sapiens
  siRNA target sequence for CRSP6 (NM_004268.3,1509-1527).
ggcttctggaaaaaataat

SEQ ID NO: 248302 - DNA, 19 bp, Homo sapiens
  siRNA target sequence for CRSP6 (NM_004268.3,1581-1599).
gcttagcaagccgaattga

SEQ ID NO: 248303 - DNA, 19 bp, Homo sapiens
  siRNA target sequence for CRSP6 (NM_004268.3,1613-1631).
caggctcattggtcaaata

SEQ ID NO: 248304 - DNA, 19 bp, Homo sapiens
  siRNA target sequence for CRSP6 (NM_004268.3,1616-1634).
gctcattggtcaaatatca

SEQ ID NO: 248305 - DNA, 19 bp, Homo sapiens
  siRNA target sequence for CRSP6 (NM_004268.3,1617-1635).
ctcattggtcaaatatcaa

SEQ ID NO: 248306 - DNA, 19 bp, Homo sapiens
  siRNA target sequence for CRSP6 (NM_004268.3,1646-1664).
gaatctagtgtgaaagttt

SEQ ID NO: 248307 - DNA, 19 bp, Homo sapiens
  siRNA target sequence for CRSP6 (NM_004268.3,1680-1698).
gctatgaacaaatatgcaa

SEQ ID NO: 248308 - DNA, 19 bp, Homo sapiens
  siRNA target sequence for CRSP6 (NM_004268.3,1732-1750).
gcagattcgagttgtacat

SEQ ID NO: 248309 - DNA, 19 bp, Homo sapiens
  siRNA target sequence for CRSP6 (NM_004268.3,1735-1753).
gattcgagttgtacataga

SEQ ID NO: 248310 - DNA, 19 bp, Homo sapiens
  siRNA target sequence for CRSP6 (NM_004268.3,1844-1862).
cagcaactcgccaaggtta

SEQ ID NO: 248311 - DNA, 19 bp, Homo sapiens
  siRNA target sequence for CRSP6 (NM_004268.3,1871-1889).
caagtactgagcttcagta

SEQ ID NO: 248312 - DNA, 19 bp, Homo sapiens
  siRNA target sequence for CRSP6 (NM_004268.3,1907-1925).
cctatagagagcattggta

SEQ ID NO: 248313 - DNA, 19 bp, Homo sapiens
  siRNA target sequence for CRSP6 (NM_004268.3,1952-1970).
ccaagtggtgactatgcta

SEQ ID NO: 248314 - DNA, 19 bp, Homo sapiens
  siRNA target sequence for CRSP6 (NM_004268.3,1991-2009).
gaaagtggcagcaagatta

SEQ ID NO: 248315 - DNA, 19 bp, Homo sapiens
  siRNA target sequence for CRSP6 (NM_004268.3,2022-2040).
ctcgtaaccaatgtaaaga

SEQ ID NO: 248316 - DNA, 19 bp, Homo sapiens
  siRNA target sequence for CRSP6 (NM_004268.3,2052-2070).
gtgatgttttacaagataa

SEQ ID NO: 248317 - DNA, 19 bp, Homo sapiens
  siRNA target sequence for CRSP6 (NM_004268.3,2122-2140).
ggaaggtcgaaattttgtt

SEQ ID NO: 248318 - DNA, 19 bp, Homo sapiens
  siRNA target sequence for CRSP6 (NM_004268.3,2168-2186).
cttagcccttgtctactat

SEQ ID NO: 248319 - DNA, 19 bp, Homo sapiens
  siRNA target sequence for DKFZP434N1817 (NM_032137.2,835-853).
gccatggtggagtctatgt

SEQ ID NO: 248320 - DNA, 19 bp, Homo sapiens
  siRNA target sequence for DKFZP434N1817 (NM_032137.2,997-1015).
gagtccctcgcaaacatgt

SEQ ID NO: 248321 - DNA, 19 bp, Homo sapiens
  siRNA target sequence for DKFZP434N1817 (NM_032137.2,1034-1052).
cgccttaccagctgatcta

SEQ ID NO: 248322 - DNA, 19 bp, Homo sapiens
  siRNA target sequence for DKFZP434N1817 (NM_032137.2,1236-1254).
gttgtgtcgccacatagaa

SEQ ID NO: 248323 - DNA, 19 bp, Homo sapiens
  siRNA target sequence for DKFZP434N1817 (NM_032137.2,1287-1305).
ctcctaccccatgatctta

SEQ ID NO: 248324 - DNA, 19 bp, Homo sapiens
  siRNA target sequence for DKFZP434N1817 (NM_032137.2,1295-1313).
ccatgatcttacgaaacta

SEQ ID NO: 248325 - DNA, 19 bp, Homo sapiens
  siRNA target sequence for DKFZP434N1817 (NM_032137.2,1307-1325).
gaaactacaaggcaaagat

SEQ ID NO: 248326 - DNA, 19 bp, Homo sapiens
  siRNA target sequence for DKFZP434N1817 (NM_032137.2,1494-1512).
gtttcattacaccttctat

SEQ ID NO: 248327 - DNA, 19 bp, Homo sapiens
  siRNA target sequence for DKFZP434N1817 (NM_032137.2,1518-1536).
ctcctccttcgtttactat

SEQ ID NO: 248328 - DNA, 19 bp, Homo sapiens
  siRNA target sequence for DKFZP434N1817 (NM_032137.2,1544-1562).
gaaacgtcgctgtatgtca

SEQ ID NO: 248329 - DNA, 19 bp, Homo sapiens
  siRNA target sequence for DKFZP434N1817 (NM_032137.2,1625-1643).
ccttgctggccctattcaa

SEQ ID NO: 248330 - DNA, 19 bp, Homo sapiens
  siRNA target sequence for DKFZP434N1817 (NM_032137.2,1626-1644).
cttgctggccctattcaat

SEQ ID NO: 248331 - DNA, 19 bp, Homo sapiens
  siRNA target sequence for DKFZP434N1817 (NM_032137.2,1652-1670).
gccagggctgtgttcacta

SEQ ID NO: 248332 - DNA, 19 bp, Homo sapiens
  siRNA target sequence for DKFZP434N1817 (NM_032137.2,1661-1679).
gtgttcactacaacctaaa

SEQ ID NO: 248333 - DNA, 19 bp, Homo sapiens
  siRNA target sequence for DKFZP434N1817 (NM_032137.2,1682-1700).
ccagttgcccatatgtctt

SEQ ID NO: 248334 - DNA, 19 bp, Homo sapiens
  siRNA target sequence for DKFZP434N1817 (NM_032137.2,1685-1703).
gttgcccatatgtcttaat

SEQ ID NO: 248335 - DNA, 19 bp, Homo sapiens
  siRNA target sequence for DKFZP434N1817 (NM_032137.2,1890-1908).
cactgtgtcggccaacaat

SEQ ID NO: 248336 - DNA, 19 bp, Homo sapiens
  siRNA target sequence for DKFZP434N1817 (NM_032137.2,1915-1933).
catggaatggcatatgaca

SEQ ID NO: 248337 - DNA, 19 bp, Homo sapiens
  siRNA target sequence for DKFZP434N1817 (NM_032137.2,1936-1954).
cggctgaaccgcagaatca

SEQ ID NO: 248338 - DNA, 19 bp, Homo sapiens
  siRNA target sequence for DKFZP434N1817 (NM_032137.2,1963-1981).
gacgacaaggtgtataaga

SEQ ID NO: 248339 - DNA, 19 bp, Homo sapiens
  siRNA target sequence for DKFZP434N1817 (NM_032137.2,2032-2050).
cagttcattaattctatct

SEQ ID NO: 248340 - DNA, 19 bp, Homo sapiens
  siRNA target sequence for DKFZP434N1817 (NM_032137.2,2052-2070).
gctggccgcaggtctgttt

SEQ ID NO: 248341 - DNA, 19 bp, Homo sapiens
  siRNA target sequence for DKFZP434N1817 (NM_032137.2,2053-2071).
ctggccgcaggtctgttta

SEQ ID NO: 248342 - DNA, 19 bp, Homo sapiens
  siRNA target sequence for DKFZP434N1817 (NM_032137.2,2057-2075).
ccgcaggtctgtttaccat

SEQ ID NO: 248343 - DNA, 19 bp, Homo sapiens
  siRNA target sequence for DKFZP434N1817 (NM_032137.2,2062-2080).
ggtctgtttaccattgaat

SEQ ID NO: 248344 - DNA, 19 bp, Homo sapiens
  siRNA target sequence for DKFZP434N1817 (NM_032137.2,2063-2081).
gtctgtttaccattgaata

SEQ ID NO: 248345 - DNA, 19 bp, Homo sapiens
  siRNA target sequence for DKFZP434N1817 (NM_032137.2,2104-2122).
gaatttgttcggttcaaga

SEQ ID NO: 248346 - DNA, 19 bp, Homo sapiens
  siRNA target sequence for DKFZP434N1817 (NM_032137.2,2143-2161).
gagcggctccccaagctaa

SEQ ID NO: 248347 - DNA, 19 bp, Homo sapiens
  siRNA target sequence for DKFZP434N1817 (NM_032137.2,2147-2165).
ggctccccaagctaagttt

SEQ ID NO: 248348 - DNA, 19 bp, Homo sapiens
  siRNA target sequence for DKFZP434N1817 (NM_032137.2,2148-2166).
gctccccaagctaagttta

SEQ ID NO: 248349 - DNA, 19 bp, Homo sapiens
  siRNA target sequence for DKFZP434N1817 (NM_032137.2,2149-2167).
ctccccaagctaagtttat

SEQ ID NO: 248350 - DNA, 19 bp, Homo sapiens
  siRNA target sequence for DKFZP434N1817 (NM_032137.2,2169-2187).
ctcaggagaaagtctttta

SEQ ID NO: 248351 - DNA, 19 bp, Homo sapiens
  siRNA target sequence for DKFZP434N1817 (NM_032137.2,2173-2191).
ggagaaagtcttttacgat

SEQ ID NO: 248352 - DNA, 19 bp, Homo sapiens
  siRNA target sequence for DKFZP434N1817 (NM_032137.2,2202-2220).
ccacctggaatcctcaatt

SEQ ID NO: 248353 - DNA, 19 bp, Homo sapiens
  siRNA target sequence for DKFZP434N1817 (NM_032137.2,2266-2284).
gttcggaagaccaccaaaa

SEQ ID NO: 248354 - DNA, 19 bp, Homo sapiens
  siRNA target sequence for DKFZP434N1817 (NM_032137.2,2506-2524).
gtgtttgggatcatctcaa

SEQ ID NO: 248355 - DNA, 19 bp, Homo sapiens
  siRNA target sequence for DKFZP434N1817 (NM_032137.2,2678-2696).
ctcccctgatggtgaagaa

SEQ ID NO: 248356 - DNA, 19 bp, Homo sapiens
  siRNA target sequence for DKFZP434N1817 (NM_032137.2,2756-2774).
gccgtgttttgaatggata

SEQ ID NO: 248357 - DNA, 19 bp, Homo sapiens
  siRNA target sequence for DKFZP434N1817 (NM_032137.2,2757-2775).
ccgtgttttgaatggatat

SEQ ID NO: 248358 - DNA, 19 bp, Homo sapiens
  siRNA target sequence for DKFZP434N1817 (NM_032137.2,2848-2866).
ccggatgactacaaattca

SEQ ID NO: 248359 - DNA, 19 bp, Homo sapiens
  siRNA target sequence for DKFZP434N1817 (NM_032137.2,2850-2868).
ggatgactacaaattcagt

SEQ ID NO: 248360 - DNA, 19 bp, Homo sapiens
  siRNA target sequence for DKFZP434N1817 (NM_032137.2,2918-2936).
ccgagtcagaagatatcca

SEQ ID NO: 248361 - DNA, 19 bp, Homo sapiens
  siRNA target sequence for DKFZP434N1817 (NM_032137.2,2919-2937).
cgagtcagaagatatccaa

SEQ ID NO: 248362 - DNA, 19 bp, Homo sapiens
  siRNA target sequence for DKFZP434N1817 (NM_032137.2,2951-2969).
cattggccctggaagacta

SEQ ID NO: 248363 - DNA, 19 bp, Homo sapiens
  siRNA target sequence for DKFZP434N1817 (NM_032137.2,3042-3060).
ggacagcaagataactagt

SEQ ID NO: 248364 - DNA, 19 bp, Homo sapiens
  siRNA target sequence for DKFZP434N1817 (NM_032137.2,3043-3061).
gacagcaagataactagtt

SEQ ID NO: 248365 - DNA, 19 bp, Homo sapiens
  siRNA target sequence for DNAJ (NM_032364.4,139-157).
cggagaaagagggttgtat

SEQ ID NO: 248366 - DNA, 19 bp, Homo sapiens
  siRNA target sequence for DNAJ (NM_032364.4,202-220).
ctccgtggaccctgaaata

SEQ ID NO: 248367 - DNA, 19 bp, Homo sapiens
  siRNA target sequence for DNAJ (NM_032364.4,205-223).
cgtggaccctgaaatacct

SEQ ID NO: 248368 - DNA, 19 bp, Homo sapiens
  siRNA target sequence for DNAJ (NM_032364.4,206-224).
gtggaccctgaaatacctt

SEQ ID NO: 248369 - DNA, 19 bp, Homo sapiens
  siRNA target sequence for DNAJ (NM_032364.4,403-421).
gacgtcttcagaagaagaa

SEQ ID NO: 248370 - DNA, 19 bp, Homo sapiens
  siRNA target sequence for DNAJ (NM_032364.4,469-487).
gaaggatgggaactctttt

SEQ ID NO: 248371 - DNA, 19 bp, Homo sapiens
  siRNA target sequence for DNAJ (NM_032364.4,477-495).
ggaactcttttctttccat

SEQ ID NO: 248372 - DNA, 19 bp, Homo sapiens
  siRNA target sequence for DNAJ (NM_032364.4,554-572).
ggaggaaatggttcttcta

SEQ ID NO: 248373 - DNA, 19 bp, Homo sapiens
  siRNA target sequence for DNAJ (NM_032364.4,563-581).
ggttcttctagcaactttt

SEQ ID NO: 248374 - DNA, 19 bp, Homo sapiens
  siRNA target sequence for DNAJ (NM_032364.4,710-728).
cagcggcaccgctttccaa

SEQ ID NO: 248375 - DNA, 19 bp, Homo sapiens
  siRNA target sequence for DNAJ (NM_032364.4,785-803).
cggctgggtcggaaacgaa

SEQ ID NO: 248376 - DNA, 19 bp, Homo sapiens
  siRNA target sequence for DNAJ (NM_032364.4,838-856).
gggagccgaggaactatgt

SEQ ID NO: 248377 - DNA, 19 bp, Homo sapiens
  siRNA target sequence for DNAJ (NM_032364.4,840-858).
gagccgaggaactatgtca

SEQ ID NO: 248378 - DNA, 19 bp, Homo sapiens
  siRNA target sequence for DNAJ (NM_032364.4,863-881).
ggacaggcaggcttttggt

SEQ ID NO: 248379 - DNA, 19 bp, Homo sapiens
  siRNA target sequence for DNAJ (NM_032364.4,905-923).
gtgggagagtacgtagaaa

SEQ ID NO: 248380 - DNA, 19 bp, Homo sapiens
  siRNA target sequence for DNAJ (NM_032364.4,907-925).
gggagagtacgtagaaact

SEQ ID NO: 248381 - DNA, 19 bp, Homo sapiens
  siRNA target sequence for DNAJ (NM_032364.4,908-926).
ggagagtacgtagaaactt

SEQ ID NO: 248382 - DNA, 19 bp, Homo sapiens
  siRNA target sequence for DNAJ (NM_032364.4,1021-1039).
ctgggcccaggtcatgttt

SEQ ID NO: 248383 - DNA, 19 bp, Homo sapiens
  siRNA target sequence for DNAJ (NM_032364.4,1063-1081).
ctgtggagtaggactgttt

SEQ ID NO: 248384 - DNA, 19 bp, Homo sapiens
  siRNA target sequence for DNAJ (NM_032364.4,1074-1092).
gactgtttactcgttttct

SEQ ID NO: 248385 - DNA, 19 bp, Homo sapiens
  siRNA target sequence for DNAJ (NM_032364.4,1282-1300).
gcagcggctggtaagaata

SEQ ID NO: 248386 - DNA, 19 bp, Homo sapiens
  siRNA target sequence for DNAJ (NM_032364.4,1285-1303).
gcggctggtaagaatagtt

SEQ ID NO: 248387 - DNA, 19 bp, Homo sapiens
  siRNA target sequence for DNAJ (NM_032364.4,1287-1305).
ggctggtaagaatagttca

SEQ ID NO: 248388 - DNA, 19 bp, Homo sapiens
  siRNA target sequence for DNAJ (NM_032364.4,1326-1344).
cttgggtcaagcagaatat

SEQ ID NO: 248389 - DNA, 19 bp, Homo sapiens
  siRNA target sequence for DNAJ (NM_032364.4,1331-1349).
gtcaagcagaatattaata

SEQ ID NO: 248390 - DNA, 19 bp, Homo sapiens
  siRNA target sequence for DNAJ (NM_032364.4,1586-1604).
gcagcttgggacattgtca

SEQ ID NO: 248391 - DNA, 19 bp, Homo sapiens
  siRNA target sequence for DNAJ (NM_032364.4,1636-1654).
gaaacgaatggcagagaat

SEQ ID NO: 248392 - DNA, 19 bp, Homo sapiens
  siRNA target sequence for DNAJ (NM_032364.4,1657-1675).
gctgagccggtcagtaaat

SEQ ID NO: 248393 - DNA, 19 bp, Homo sapiens
  siRNA target sequence for DNAJ (NM_032364.4,1662-1680).
gccggtcagtaaatgagtt

SEQ ID NO: 248394 - DNA, 19 bp, Homo sapiens
  siRNA target sequence for DNAJ (NM_032364.4,1663-1681).
ccggtcagtaaatgagttt

SEQ ID NO: 248395 - DNA, 19 bp, Homo sapiens
  siRNA target sequence for DNAJ (NM_032364.4,1665-1683).
ggtcagtaaatgagtttct

SEQ ID NO: 248396 - DNA, 19 bp, Homo sapiens
  siRNA target sequence for DNAJ (NM_032364.4,1709-1727).
gaggcaatgaatactatga

SEQ ID NO: 248397 - DNA, 19 bp, Homo sapiens
  siRNA target sequence for DNAJ (NM_032364.4,1712-1730).
gcaatgaatactatgatgt

SEQ ID NO: 248398 - DNA, 19 bp, Homo sapiens
  siRNA target sequence for DNAJ (NM_032364.4,1735-1753).
ccgatgccaaggaaagcat

SEQ ID NO: 248399 - DNA, 19 bp, Homo sapiens
  siRNA target sequence for DNAJ (NM_032364.4,1854-1872).
gcatgttgggcctcaagat

SEQ ID NO: 248400 - DNA, 19 bp, Homo sapiens
  siRNA target sequence for DNAJ (NM_032364.4,1926-1944).
gatgccagcgtgtaggtat

SEQ ID NO: 248401 - DNA, 19 bp, Homo sapiens
  siRNA target sequence for DNAJ (NM_032364.4,1964-1982).
gtcccctatcacatctcat

SEQ ID NO: 248402 - DNA, 19 bp, Homo sapiens
  siRNA target sequence for DNAJ (NM_032364.4,2059-2077).
cttgagtcggatctttcaa

SEQ ID NO: 248403 - DNA, 19 bp, Homo sapiens
  siRNA target sequence for DNAJ (NM_032364.4,2062-2080).
gagtcggatctttcaagta

SEQ ID NO: 248404 - DNA, 19 bp, Homo sapiens
  siRNA target sequence for EBAG9 (NM_004215.3,407-425).
cccagtttcggttatttaa

SEQ ID NO: 248405 - DNA, 19 bp, Homo sapiens
  siRNA target sequence for EBAG9 (NM_004215.3,438-456).
cctagcaacagtattctca

SEQ ID NO: 248406 - DNA, 19 bp, Homo sapiens
  siRNA target sequence for EBAG9 (NM_004215.3,439-457).
ctagcaacagtattctcat

SEQ ID NO: 248407 - DNA, 19 bp, Homo sapiens
  siRNA target sequence for EBAG9 (NM_004215.3,453-471).
ctcattcctaaagagatta

SEQ ID NO: 248408 - DNA, 19 bp, Homo sapiens
  siRNA target sequence for EBAG9 (NM_004215.3,484-502).
ggcagaggacggaaattaa

SEQ ID NO: 248409 - DNA, 19 bp, Homo sapiens
  siRNA target sequence for EBAG9 (NM_004215.3,503-521).
gtggagaccaaataacttt

SEQ ID NO: 248410 - DNA, 19 bp, Homo sapiens
  siRNA target sequence for EBAG9 (NM_004215.3,522-540).
gccaactacagttgattat

SEQ ID NO: 248411 - DNA, 19 bp, Homo sapiens
  siRNA target sequence for EBAG9 (NM_004215.3,637-655).
gcaacacaacaaaattctt

SEQ ID NO: 248412 - DNA, 19 bp, Homo sapiens
  siRNA target sequence for EBAG9 (NM_004215.3,661-679).
caactggaacctgactatt

SEQ ID NO: 248413 - DNA, 19 bp, Homo sapiens
  siRNA target sequence for EBAG9 (NM_004215.3,664-682).
ctggaacctgactatttta

SEQ ID NO: 248414 - DNA, 19 bp, Homo sapiens
  siRNA target sequence for EBAG9 (NM_004215.3,684-702).
ggacatgacaccaactatt

SEQ ID NO: 248415 - DNA, 19 bp, Homo sapiens
  siRNA target sequence for EBAG9 (NM_004215.3,685-703).
gacatgacaccaactatta

SEQ ID NO: 248416 - DNA, 19 bp, Homo sapiens
  siRNA target sequence for EBAG9 (NM_004215.3,763-781).
gggagcacaggtttctcta

SEQ ID NO: 248417 - DNA, 19 bp, Homo sapiens
  siRNA target sequence for EBAG9 (NM_004215.3,768-786).
cacaggtttctctagtaga

SEQ ID NO: 248418 - DNA, 19 bp, Homo sapiens
  siRNA target sequence for EBAG9 (NM_004215.3,770-788).
caggtttctctagtagatt

SEQ ID NO: 248419 - DNA, 19 bp, Homo sapiens
  siRNA target sequence for EBAG9 (NM_004215.3,829-847).
gaattaggtgacttagata

SEQ ID NO: 248420 - DNA, 19 bp, Homo sapiens
  siRNA target sequence for EBAG9 (NM_004215.3,848-866).
cctggcaggaaaataccaa

SEQ ID NO: 248421 - DNA, 19 bp, Homo sapiens
  siRNA target sequence for EBAG9 (NM_004215.3,849-867).
ctggcaggaaaataccaat

SEQ ID NO: 248422 - DNA, 19 bp, Homo sapiens
  siRNA target sequence for EBAG9 (NM_004215.3,950-968).
cagccgaacaacaaaggaa

SEQ ID NO: 248423 - DNA, 19 bp, Homo sapiens
  siRNA target sequence for EBAG9 (NM_004215.3,982-1000).
gaagcacaacggctaatga

SEQ ID NO: 248424 - DNA, 19 bp, Homo sapiens
  siRNA target sequence for EBAG9 (NM_004215.3,985-1003).
gcacaacggctaatgaaga

SEQ ID NO: 248425 - DNA, 19 bp, Homo sapiens
  siRNA target sequence for EBAG9 (NM_004215.3,986-1004).
cacaacggctaatgaagaa

SEQ ID NO: 248426 - DNA, 19 bp, Homo sapiens
  siRNA target sequence for EPS8 (NM_004447.3,291-309).
gtacccatctcagatgaat

SEQ ID NO: 248427 - DNA, 19 bp, Homo sapiens
  siRNA target sequence for EPS8 (NM_004447.3,306-324).
gaatggctacggatcatca

SEQ ID NO: 248428 - DNA, 19 bp, Homo sapiens
  siRNA target sequence for EPS8 (NM_004447.3,315-333).
cggatcatcacctaccttt

SEQ ID NO: 248429 - DNA, 19 bp, Homo sapiens
  siRNA target sequence for EPS8 (NM_004447.3,316-334).
ggatcatcacctacctttt

SEQ ID NO: 248430 - DNA, 19 bp, Homo sapiens
  siRNA target sequence for EPS8 (NM_004447.3,336-354).
ccagacggacagagaacat

SEQ ID NO: 248431 - DNA, 19 bp, Homo sapiens
  siRNA target sequence for EPS8 (NM_004447.3,377-395).
ccctttatgaacaaaggaa

SEQ ID NO: 248432 - DNA, 19 bp, Homo sapiens
  siRNA target sequence for EPS8 (NM_004447.3,424-442).
gtgtcagatatatctcaat

SEQ ID NO: 248433 - DNA, 19 bp, Homo sapiens
  siRNA target sequence for EPS8 (NM_004447.3,437-455).
ctcaataccgtgttgaaca

SEQ ID NO: 248434 - DNA, 19 bp, Homo sapiens
  siRNA target sequence for EPS8 (NM_004447.3,445-463).
cgtgttgaacacttgacta

SEQ ID NO: 248435 - DNA, 19 bp, Homo sapiens
  siRNA target sequence for EPS8 (NM_004447.3,478-496).
cggaaagatgctatgatca

SEQ ID NO: 248436 - DNA, 19 bp, Homo sapiens
  siRNA target sequence for EPS8 (NM_004447.3,532-550).
gatgccaagggcaaagtgt

SEQ ID NO: 248437 - DNA, 19 bp, Homo sapiens
  siRNA target sequence for EPS8 (NM_004447.3,547-565).
gtgtggactcaagatatga

SEQ ID NO: 248438 - DNA, 19 bp, Homo sapiens
  siRNA target sequence for EPS8 (NM_004447.3,551-569).
ggactcaagatatgattct

SEQ ID NO: 248439 - DNA, 19 bp, Homo sapiens
  siRNA target sequence for EPS8 (NM_004447.3,584-602).
gagctgtgagcctgattga

SEQ ID NO: 248440 - DNA, 19 bp, Homo sapiens
  siRNA target sequence for EPS8 (NM_004447.3,669-687).
gcattcatgcagctatgat

SEQ ID NO: 248441 - DNA, 19 bp, Homo sapiens
  siRNA target sequence for EPS8 (NM_004447.3,720-738).
ccagaacaagccagatctt

SEQ ID NO: 248442 - DNA, 19 bp, Homo sapiens
  siRNA target sequence for EPS8 (NM_004447.3,723-741).
gaacaagccagatcttcat

SEQ ID NO: 248443 - DNA, 19 bp, Homo sapiens
  siRNA target sequence for EPS8 (NM_004447.3,759-777).
ggttaaggcaaacctaatt

SEQ ID NO: 248444 - DNA, 19 bp, Homo sapiens
  siRNA target sequence for EPS8 (NM_004447.3,760-778).
gttaaggcaaacctaatta

SEQ ID NO: 248445 - DNA, 19 bp, Homo sapiens
  siRNA target sequence for EPS8 (NM_004447.3,837-855).
cgacgccctgaggatgatt

SEQ ID NO: 248446 - DNA, 19 bp, Homo sapiens
  siRNA target sequence for EPS8 (NM_004447.3,838-856).
gacgccctgaggatgattt

SEQ ID NO: 248447 - DNA, 19 bp, Homo sapiens
  siRNA target sequence for EPS8 (NM_004447.3,843-861).
cctgaggatgatttccaat

SEQ ID NO: 248448 - DNA, 19 bp, Homo sapiens
  siRNA target sequence for EPS8 (NM_004447.3,1180-1198).
ccaggagagggtgttttaa

SEQ ID NO: 248449 - DNA, 19 bp, Homo sapiens
  siRNA target sequence for EPS8 (NM_004447.3,1277-1295).
ccaaactgaagtctcatat

SEQ ID NO: 248450 - DNA, 19 bp, Homo sapiens
  siRNA target sequence for EPS8 (NM_004447.3,1320-1338).
ggttcactttttgtttact

SEQ ID NO: 248451 - DNA, 19 bp, Homo sapiens
  siRNA target sequence for EPS8 (NM_004447.3,1390-1408).
gtacttagtcccctattga

SEQ ID NO: 248452 - DNA, 19 bp, Homo sapiens
  siRNA target sequence for EPS8 (NM_004447.3,1397-1415).
gtcccctattgaataagga

SEQ ID NO: 248453 - DNA, 19 bp, Homo sapiens
  siRNA target sequence for EPS8 (NM_004447.3,1407-1425).
gaataaggacacaattgat

SEQ ID NO: 248454 - DNA, 19 bp, Homo sapiens
  siRNA target sequence for EPS8 (NM_004447.3,1563-1581).
gcccccaatgctgaacttt

SEQ ID NO: 248455 - DNA, 19 bp, Homo sapiens
  siRNA target sequence for EPS8 (NM_004447.3,1589-1607).
ccacaatggaacaagatct

SEQ ID NO: 248456 - DNA, 19 bp, Homo sapiens
  siRNA target sequence for EPS8 (NM_004447.3,1688-1706).
ccagtgtatcagagtatca

SEQ ID NO: 248457 - DNA, 19 bp, Homo sapiens
  siRNA target sequence for EPS8 (NM_004447.3,1689-1707).
cagtgtatcagagtatcat

SEQ ID NO: 248458 - DNA, 19 bp, Homo sapiens
  siRNA target sequence for EPS8 (NM_004447.3,1714-1732).
gatggctatgcgttcagta

SEQ ID NO: 248459 - DNA, 19 bp, Homo sapiens
  siRNA target sequence for EPS8 (NM_004447.3,1723-1741).
gcgttcagtagcaacattt

SEQ ID NO: 248460 - DNA, 19 bp, Homo sapiens
  siRNA target sequence for EPS8 (NM_004447.3,1783-1801).
gcttttaagccaacttcta

SEQ ID NO: 248461 - DNA, 19 bp, Homo sapiens
  siRNA target sequence for EPS8 (NM_004447.3,1784-1802).
cttttaagccaacttctaa

SEQ ID NO: 248462 - DNA, 19 bp, Homo sapiens
  siRNA target sequence for EPS8 (NM_004447.3,1796-1814).
cttctaatcgccatataga

SEQ ID NO: 248463 - DNA, 19 bp, Homo sapiens
  siRNA target sequence for EPS8 (NM_004447.3,1804-1822).
cgccatatagatagaaatt

SEQ ID NO: 248464 - DNA, 19 bp, Homo sapiens
  siRNA target sequence for EPS8 (NM_004447.3,1805-1823).
gccatatagatagaaatta

SEQ ID NO: 248465 - DNA, 19 bp, Homo sapiens
  siRNA target sequence for EPS8 (NM_004447.3,1806-1824).
ccatatagatagaaattat

SEQ ID NO: 248466 - DNA, 19 bp, Homo sapiens
  siRNA target sequence for EPS8 (NM_004447.3,1892-1910).
gtgagctctcggttctaaa

SEQ ID NO: 248467 - DNA, 19 bp, Homo sapiens
  siRNA target sequence for EPS8 (NM_004447.3,1896-1914).
gctctcggttctaaaggat

SEQ ID NO: 248468 - DNA, 19 bp, Homo sapiens
  siRNA target sequence for EPS8 (NM_004447.3,1911-1929).
ggatgatattttagagata

SEQ ID NO: 248469 - DNA, 19 bp, Homo sapiens
  siRNA target sequence for EPS8 (NM_004447.3,1930-1948).
cttgatgatcggaagcaat

SEQ ID NO: 248470 - DNA, 19 bp, Homo sapiens
  siRNA target sequence for EPS8 (NM_004447.3,1941-1959).
gaagcaatggtggaaagtt

SEQ ID NO: 248471 - DNA, 19 bp, Homo sapiens
  siRNA target sequence for EPS8 (NM_004447.3,1950-1968).
gtggaaagttcgaaatgca

SEQ ID NO: 248472 - DNA, 19 bp, Homo sapiens
  siRNA target sequence for EPS8 (NM_004447.3,1981-1999).
ggatttgtgccaaataaca

SEQ ID NO: 248473 - DNA, 19 bp, Homo sapiens
  siRNA target sequence for EPS8 (NM_004447.3,1989-2007).
gccaaataacattttggat

SEQ ID NO: 248474 - DNA, 19 bp, Homo sapiens
  siRNA target sequence for EPS8 (NM_004447.3,2037-2055).
gcgtgctgatccaccttat

SEQ ID NO: 248475 - DNA, 19 bp, Homo sapiens
  siRNA target sequence for EPS8 (NM_004447.3,2038-2056).
cgtgctgatccaccttata

SEQ ID NO: 248476 - DNA, 19 bp, Homo sapiens
  siRNA target sequence for EPS8 (NM_004447.3,2042-2060).
ctgatccaccttatactca

SEQ ID NO: 248477 - DNA, 19 bp, Homo sapiens
  siRNA target sequence for EPS8 (NM_004447.3,2044-2062).
gatccaccttatactcata

SEQ ID NO: 248478 - DNA, 19 bp, Homo sapiens
  siRNA target sequence for EPS8 (NM_004447.3,2047-2065).
ccaccttatactcatacta

SEQ ID NO: 248479 - DNA, 19 bp, Homo sapiens
  siRNA target sequence for EPS8 (NM_004447.3,2048-2066).
caccttatactcatactat

SEQ ID NO: 248480 - DNA, 19 bp, Homo sapiens
  siRNA target sequence for EPS8 (NM_004447.3,2051-2069).
cttatactcatactataca

SEQ ID NO: 248481 - DNA, 19 bp, Homo sapiens
  siRNA target sequence for EPS8 (NM_004447.3,2057-2075).
ctcatactatacagaaaca

SEQ ID NO: 248482 - DNA, 19 bp, Homo sapiens
  siRNA target sequence for EPS8 (NM_004447.3,2091-2109).
cccaagaccagctgatact

SEQ ID NO: 248483 - DNA, 19 bp, Homo sapiens
  siRNA target sequence for EPS8 (NM_004447.3,2177-2195).
cacctgttcctgtgtcaaa

SEQ ID NO: 248484 - DNA, 19 bp, Homo sapiens
  siRNA target sequence for EPS8 (NM_004447.3,2196-2214).
ggtcccagcaaatataaca

SEQ ID NO: 248485 - DNA, 19 bp, Homo sapiens
  siRNA target sequence for EPS8 (NM_004447.3,2204-2222).
caaatataacacgtcaaaa

SEQ ID NO: 248486 - DNA, 19 bp, Homo sapiens
  siRNA target sequence for EPS8 (NM_004447.3,2264-2282).
gccagagacacaaacaact

SEQ ID NO: 248487 - DNA, 19 bp, Homo sapiens
  siRNA target sequence for EPS8 (NM_004447.3,2265-2283).
ccagagacacaaacaactt

SEQ ID NO: 248488 - DNA, 19 bp, Homo sapiens
  siRNA target sequence for EPS8 (NM_004447.3,2361-2379).
cgctcagaagaaattccat

SEQ ID NO: 248489 - DNA, 19 bp, Homo sapiens
  siRNA target sequence for EPS8 (NM_004447.3,2395-2413).
gtgccagttatcaatatca

SEQ ID NO: 248490 - DNA, 19 bp, Homo sapiens
  siRNA target sequence for EPS8 (NM_004447.3,2397-2415).
gccagttatcaatatcact

SEQ ID NO: 248491 - DNA, 19 bp, Homo sapiens
  siRNA target sequence for EPS8 (NM_004447.3,2399-2417).
cagttatcaatatcactta

SEQ ID NO: 248492 - DNA, 19 bp, Homo sapiens
  siRNA target sequence for EPS8 (NM_004447.3,2437-2455).
gtgaagacgtggttacagt

SEQ ID NO: 248493 - DNA, 19 bp, Homo sapiens
  siRNA target sequence for EPS8 (NM_004447.3,2471-2489).
ctgtgactgtcaatagtct

SEQ ID NO: 248494 - DNA, 19 bp, Homo sapiens
  siRNA target sequence for EPS8 (NM_004447.3,2481-2499).
caatagtcttggagtatta

SEQ ID NO: 248495 - DNA, 19 bp, Homo sapiens
  siRNA target sequence for EPS8 (NM_004447.3,2519-2537).
ctctcaataaggatgaact

SEQ ID NO: 248496 - DNA, 19 bp, Homo sapiens
  siRNA target sequence for EPS8 (NM_004447.3,2554-2572).
gaaggggcgagagtctata

SEQ ID NO: 248497 - DNA, 19 bp, Homo sapiens
  siRNA target sequence for EPS8 (NM_004447.3,2573-2591).
gccaaatcactgtacaaaa

SEQ ID NO: 248498 - DNA, 19 bp, Homo sapiens
  siRNA target sequence for EPS8 (NM_004447.3,2612-2630).
gtggcagctccgagttaca

SEQ ID NO: 248499 - DNA, 19 bp, Homo sapiens
  siRNA target sequence for EPS8 (NM_004447.3,2616-2634).
cagctccgagttacaagaa

SEQ ID NO: 248500 - DNA, 19 bp, Homo sapiens
  siRNA target sequence for EPS8 (NM_004447.3,2618-2636).
gctccgagttacaagaaat

SEQ ID NO: 248501 - DNA, 19 bp, Homo sapiens
  siRNA target sequence for EPS8 (NM_004447.3,2621-2639).
ccgagttacaagaaattat

SEQ ID NO: 248502 - DNA, 19 bp, Homo sapiens
  siRNA target sequence for EPS8L1 (NM_017729.2,519-537).
cgacgtagagagctttgta

SEQ ID NO: 248503 - DNA, 19 bp, Homo sapiens
  siRNA target sequence for EPS8L1 (NM_017729.2,965-983).
catacagacccgagttctt

SEQ ID NO: 248504 - DNA, 19 bp, Homo sapiens
  siRNA target sequence for EPS8L1 (NM_017729.2,1166-1184).
gggtcctgtgtaattatga

SEQ ID NO: 248505 - DNA, 19 bp, Homo sapiens
  siRNA target sequence for EPS8L1 (NM_017729.2,1294-1312).
ggatatgtgccctacaaca

SEQ ID NO: 248506 - DNA, 19 bp, Homo sapiens
  siRNA target sequence for EPS8L1 (NM_017729.2,1295-1313).
gatatgtgccctacaacat

SEQ ID NO: 248507 - DNA, 19 bp, Homo sapiens
  siRNA target sequence for EPS8L1 (NM_017729.2,1651-1669).
caggccaagggctttagct

SEQ ID NO: 248508 - DNA, 19 bp, Homo sapiens
  siRNA target sequence for EPS8L1 (NM_133180.1,80-98).
ccaagcgccaagtctatct

SEQ ID NO: 248509 - DNA, 19 bp, Homo sapiens
  siRNA target sequence for EPS8L1 (NM_133180.1,81-99).
caagcgccaagtctatcta

SEQ ID NO: 248510 - DNA, 19 bp, Homo sapiens
  siRNA target sequence for EPS8L1 (NM_133180.1,84-102).
gcgccaagtctatctatga

SEQ ID NO: 248511 - DNA, 19 bp, Homo sapiens
  siRNA target sequence for EPS8L1 (NM_133180.1,112-130).
gcgttactccacagttgtt

SEQ ID NO: 248512 - DNA, 19 bp, Homo sapiens
  siRNA target sequence for EPS8L1 (NM_133180.1,113-131).
cgttactccacagttgtta

SEQ ID NO: 248513 - DNA, 19 bp, Homo sapiens
  siRNA target sequence for EPS8L1 (NM_133180.1,114-132).
gttactccacagttgttat

SEQ ID NO: 248514 - DNA, 19 bp, Homo sapiens
  siRNA target sequence for EPS8L1 (NM_133180.1,125-143).
gttgttatggctgatgtat

SEQ ID NO: 248515 - DNA, 19 bp, Homo sapiens
  siRNA target sequence for EPS8L1 (NM_133180.1,144-162).
cccagtacccagtcaatca

SEQ ID NO: 248516 - DNA, 19 bp, Homo sapiens
  siRNA target sequence for EPS8L2 (NM_022772.2,1010-1028).
cgtgctggctcagaagata

SEQ ID NO: 248517 - DNA, 19 bp, Homo sapiens
  siRNA target sequence for EPS8L2 (NM_022772.2,1625-1643).
gagccgacagtccataaga

SEQ ID NO: 248518 - DNA, 19 bp, Homo sapiens
  siRNA target sequence for EPS8L2 (NM_022772.2,1629-1647).
cgacagtccataagaaact

SEQ ID NO: 248519 - DNA, 19 bp, Homo sapiens
  siRNA target sequence for EPS8L2 (NM_022772.2,1950-1968).
caggccggtcagaagtact

SEQ ID NO: 248520 - DNA, 19 bp, Homo sapiens
  siRNA target sequence for EPS8L3 (NM_024526.2,446-464).
gtggcgctcaacacatgtt

SEQ ID NO: 248521 - DNA, 19 bp, Homo sapiens
  siRNA target sequence for EPS8L3 (NM_024526.2,885-903).
gggacattgagctgttcat

SEQ ID NO: 248522 - DNA, 19 bp, Homo sapiens
  siRNA target sequence for EPS8L3 (NM_024526.2,984-1002).
cccaggcacagtacattga

SEQ ID NO: 248523 - DNA, 19 bp, Homo sapiens
  siRNA target sequence for EPS8L3 (NM_024526.2,986-1004).
caggcacagtacattgact

SEQ ID NO: 248524 - DNA, 19 bp, Homo sapiens
  siRNA target sequence for EPS8L3 (NM_024526.2,1074-1092).
cccctgagctcgtacacat

SEQ ID NO: 248525 - DNA, 19 bp, Homo sapiens
  siRNA target sequence for EPS8L3 (NM_024526.2,1085-1103).
gtacacatcctcttcaagt

SEQ ID NO: 248526 - DNA, 19 bp, Homo sapiens
  siRNA target sequence for EPS8L3 (NM_024526.2,1140-1158).
gcctagcagcccaagtgat

SEQ ID NO: 248527 - DNA, 19 bp, Homo sapiens
  siRNA target sequence for EPS8L3 (NM_024526.2,1210-1228).
cccacctgagagtaacctt

SEQ ID NO: 248528 - DNA, 19 bp, Homo sapiens
  siRNA target sequence for EPS8L3 (NM_024526.2,1211-1229).
ccacctgagagtaaccttt

SEQ ID NO: 248529 - DNA, 19 bp, Homo sapiens
  siRNA target sequence for EPS8L3 (NM_024526.2,1294-1312).
ctaccaacccacattctca

SEQ ID NO: 248530 - DNA, 19 bp, Homo sapiens
  siRNA target sequence for EPS8L3 (NM_024526.2,1341-1359).
gccaagcacccttaggata

SEQ ID NO: 248531 - DNA, 19 bp, Homo sapiens
  siRNA target sequence for EPS8L3 (NM_024526.2,1534-1552).
gggacggagcggctacatt

SEQ ID NO: 248532 - DNA, 19 bp, Homo sapiens
  siRNA target sequence for EPS8L3 (NM_024526.2,1608-1626).
caccctctcgggttccaat

SEQ ID NO: 248533 - DNA, 19 bp, Homo sapiens
  siRNA target sequence for EPS8L3 (NM_024526.2,1612-1630).
ctctcgggttccaatgctt

SEQ ID NO: 248534 - DNA, 19 bp, Homo sapiens
  siRNA target sequence for EPS8L3 (NM_024526.2,1726-1744).
ccagctacttcgcataaga

SEQ ID NO: 248535 - DNA, 19 bp, Homo sapiens
  siRNA target sequence for FCRH1 (NM_052938.3,72-90).
cgaggctgttgctgttgat

SEQ ID NO: 248536 - DNA, 19 bp, Homo sapiens
  siRNA target sequence for FCRH1 (NM_052938.3,175-193).
gtgtaagatgccctttcta

SEQ ID NO: 248537 - DNA, 19 bp, Homo sapiens
  siRNA target sequence for FCRH1 (NM_052938.3,333-351).
caatggcgtccaaagtctt

SEQ ID NO: 248538 - DNA, 19 bp, Homo sapiens
  siRNA target sequence for FCRH1 (NM_052938.3,508-526).
caaaggggctgtaggttta

SEQ ID NO: 248539 - DNA, 19 bp, Homo sapiens
  siRNA target sequence for FCRH1 (NM_052938.3,513-531).
gggctgtaggtttaaacct

SEQ ID NO: 248540 - DNA, 19 bp, Homo sapiens
  siRNA target sequence for FCRH1 (NM_052938.3,514-532).
ggctgtaggtttaaacctt

SEQ ID NO: 248541 - DNA, 19 bp, Homo sapiens
  siRNA target sequence for FCRH1 (NM_052938.3,552-570).
cactgacagcagagtatga

SEQ ID NO: 248542 - DNA, 19 bp, Homo sapiens
  siRNA target sequence for FCRH1 (NM_052938.3,560-578).
gcagagtatgagattcctt

SEQ ID NO: 248543 - DNA, 19 bp, Homo sapiens
  siRNA target sequence for FCRH1 (NM_052938.3,589-607).
gagtgatgctgagcaatat

SEQ ID NO: 248544 - DNA, 19 bp, Homo sapiens
  siRNA target sequence for FCRH1 (NM_052938.3,960-978).
gggccagaagcaatcatct

SEQ ID NO: 248545 - DNA, 19 bp, Homo sapiens
  siRNA target sequence for FCRH1 (NM_052938.3,1020-1038).
cagccaccgtggccttatt

SEQ ID NO: 248546 - DNA, 19 bp, Homo sapiens
  siRNA target sequence for FCRH1 (NM_052938.3,1022-1040).
gccaccgtggccttattat

SEQ ID NO: 248547 - DNA, 19 bp, Homo sapiens
  siRNA target sequence for FCRH1 (NM_052938.3,1023-1041).
ccaccgtggccttattatt

SEQ ID NO: 248548 - DNA, 19 bp, Homo sapiens
  siRNA target sequence for FCRH1 (NM_052938.3,1151-1169).
gggcagctacagcctatat

SEQ ID NO: 248549 - DNA, 19 bp, Homo sapiens
  siRNA target sequence for FCRH1 (NM_052938.3,1156-1174).
gctacagcctatatatgaa

SEQ ID NO: 248550 - DNA, 19 bp, Homo sapiens
  siRNA target sequence for FCRH1 (NM_052938.3,1157-1175).
ctacagcctatatatgaaa

SEQ ID NO: 248551 - DNA, 19 bp, Homo sapiens
  siRNA target sequence for FCRH1 (NM_052938.3,1194-1212).
gggatgaggtttattcact

SEQ ID NO: 248552 - DNA, 19 bp, Homo sapiens
  siRNA target sequence for FCRH1 (NM_052938.3,1209-1227).
cactggcgtactataacca

SEQ ID NO: 248553 - DNA, 19 bp, Homo sapiens
  siRNA target sequence for FCRH1 (NM_052938.3,1228-1246).
gccggagcaggaatcagta

SEQ ID NO: 248554 - DNA, 19 bp, Homo sapiens
  siRNA target sequence for FCRH1 (NM_052938.3,1257-1275).
ccctggggacacatatgga

SEQ ID NO: 248555 - DNA, 19 bp, Homo sapiens
  siRNA target sequence for FCRH1 (NM_052938.3,1277-1295).
gacaaggtttccttagaca

SEQ ID NO: 248556 - DNA, 19 bp, Homo sapiens
  siRNA target sequence for FCRH1 (NM_052938.3,1282-1300).
ggtttccttagacatctat

SEQ ID NO: 248557 - DNA, 19 bp, Homo sapiens
  siRNA target sequence for FEM1B (NM_015322.2,631-649).
ggcctggctggctatgtat

SEQ ID NO: 248558 - DNA, 19 bp, Homo sapiens
  siRNA target sequence for FEM1B (NM_015322.2,694-712).
cttctcaaccggtctgaaa

SEQ ID NO: 248559 - DNA, 19 bp, Homo sapiens
  siRNA target sequence for FEM1B (NM_015322.2,761-779).
gctccacgcccctcatcat

SEQ ID NO: 248560 - DNA, 19 bp, Homo sapiens
  siRNA target sequence for FEM1B (NM_015322.2,807-825).
ggtacgcttgctcttagaa

SEQ ID NO: 248561 - DNA, 19 bp, Homo sapiens
  siRNA target sequence for FEM1B (NM_015322.2,811-829).
cgcttgctcttagaacatt

SEQ ID NO: 248562 - DNA, 19 bp, Homo sapiens
  siRNA target sequence for FEM1B (NM_015322.2,864-882).
cttcgacgggtatgtcatt

SEQ ID NO: 248563 - DNA, 19 bp, Homo sapiens
  siRNA target sequence for FEM1B (NM_015322.2,867-885).
cgacgggtatgtcattgat

SEQ ID NO: 248564 - DNA, 19 bp, Homo sapiens
  siRNA target sequence for FEM1B (NM_015322.2,955-973).
ggagccaacgtgaaccata

SEQ ID NO: 248565 - DNA, 19 bp, Homo sapiens
  siRNA target sequence for FEM1B (NM_015322.2,964-982).
gtgaaccataccacagtaa

SEQ ID NO: 248566 - DNA, 19 bp, Homo sapiens
  siRNA target sequence for FEM1B (NM_015322.2,996-1014).
cctgcgggcagcatgcttt

SEQ ID NO: 248567 - DNA, 19 bp, Homo sapiens
  siRNA target sequence for FEM1B (NM_015322.2,1018-1036).
ggcagactggacattgtga

SEQ ID NO: 248568 - DNA, 19 bp, Homo sapiens
  siRNA target sequence for FEM1B (NM_015322.2,1096-1114).
ctaatgattgcggcatata

SEQ ID NO: 248569 - DNA, 19 bp, Homo sapiens
  siRNA target sequence for FEM1B (NM_015322.2,1214-1232).
ctgggcacatagatattgt

SEQ ID NO: 248570 - DNA, 19 bp, Homo sapiens
  siRNA target sequence for FEM1B (NM_015322.2,1250-1268).
ggcgtgctgctatagtagt

SEQ ID NO: 248571 - DNA, 19 bp, Homo sapiens
  siRNA target sequence for FEM1B (NM_015322.2,1253-1271).
gtgctgctatagtagtgaa

SEQ ID NO: 248572 - DNA, 19 bp, Homo sapiens
  siRNA target sequence for FEM1B (NM_015322.2,1280-1298).
ggatgacgccattgaaagt

SEQ ID NO: 248573 - DNA, 19 bp, Homo sapiens
  siRNA target sequence for FEM1B (NM_015322.2,1281-1299).
gatgacgccattgaaagta

SEQ ID NO: 248574 - DNA, 19 bp, Homo sapiens
  siRNA target sequence for FEM1B (NM_015322.2,1319-1337).
ctgatgtcgtagaactgtt

SEQ ID NO: 248575 - DNA, 19 bp, Homo sapiens
  siRNA target sequence for FEM1B (NM_015322.2,1324-1342).
gtcgtagaactgttactct

SEQ ID NO: 248576 - DNA, 19 bp, Homo sapiens
  siRNA target sequence for FEM1B (NM_015322.2,1359-1377).
ccgaagaagtcggattgaa

SEQ ID NO: 248577 - DNA, 19 bp, Homo sapiens
  siRNA target sequence for FEM1B (NM_015322.2,1364-1382).
gaagtcggattgaagcttt

SEQ ID NO: 248578 - DNA, 19 bp, Homo sapiens
  siRNA target sequence for FEM1B (NM_015322.2,1392-1410).
gggtgcctcctttgcaaat

SEQ ID NO: 248579 - DNA, 19 bp, Homo sapiens
  siRNA target sequence for FEM1B (NM_015322.2,1406-1424).
caaatgaccgtgagaacta

SEQ ID NO: 248580 - DNA, 19 bp, Homo sapiens
  siRNA target sequence for FEM1B (NM_015322.2,1411-1429).
gaccgtgagaactatgaca

SEQ ID NO: 248581 - DNA, 19 bp, Homo sapiens
  siRNA target sequence for FEM1B (NM_015322.2,1422-1440).
ctatgacatcataaagaca

SEQ ID NO: 248582 - DNA, 19 bp, Homo sapiens
  siRNA target sequence for FEM1B (NM_015322.2,1437-1455).
gacataccactatctatat

SEQ ID NO: 248583 - DNA, 19 bp, Homo sapiens
  siRNA target sequence for FEM1B (NM_015322.2,1476-1494).
ccaagatggtgataacatt

SEQ ID NO: 248584 - DNA, 19 bp, Homo sapiens
  siRNA target sequence for FEM1B (NM_015322.2,1764-1782).
cacccacaaggatcttctt

SEQ ID NO: 248585 - DNA, 19 bp, Homo sapiens
  siRNA target sequence for FEM1B (NM_015322.2,1770-1788).
caaggatcttcttcgattt

SEQ ID NO: 248586 - DNA, 19 bp, Homo sapiens
  siRNA target sequence for FEM1B (NM_015322.2,1780-1798).
cttcgatttgctcaagttt

SEQ ID NO: 248587 - DNA, 19 bp, Homo sapiens
  siRNA target sequence for FEM1B (NM_015322.2,1783-1801).
cgatttgctcaagttttct

SEQ ID NO: 248588 - DNA, 19 bp, Homo sapiens
  siRNA target sequence for FEM1B (NM_015322.2,1802-1820).
cacaaatgatacatttgaa

SEQ ID NO: 248589 - DNA, 19 bp, Homo sapiens
  siRNA target sequence for FEM1B (NM_015322.2,1842-1860).
catagaatgtgttttgaga

SEQ ID NO: 248590 - DNA, 19 bp, Homo sapiens
  siRNA target sequence for FEM1B (NM_015322.2,1924-1942).
cacaatgctatggacaatt

SEQ ID NO: 248591 - DNA, 19 bp, Homo sapiens
  siRNA target sequence for FEM1B (NM_015322.2,1926-1944).
caatgctatggacaattat

SEQ ID NO: 248592 - DNA, 19 bp, Homo sapiens
  siRNA target sequence for FEM1B (NM_015322.2,1930-1948).
gctatggacaattatgaat

SEQ ID NO: 248593 - DNA, 19 bp, Homo sapiens
  siRNA target sequence for FEM1B (NM_015322.2,2218-2236).
ggaaacagtgcccttcata

SEQ ID NO: 248594 - DNA, 19 bp, Homo sapiens
  siRNA target sequence for FEM1B (NM_015322.2,2225-2243).
gtgcccttcatattatcgt

SEQ ID NO: 248595 - DNA, 19 bp, Homo sapiens
  siRNA target sequence for FEM1B (NM_015322.2,2289-2307).
catcattagcctagttgaa

SEQ ID NO: 248596 - DNA, 19 bp, Homo sapiens
  siRNA target sequence for FEM1B (NM_015322.2,2319-2337).
cactgacatgacgaataaa

SEQ ID NO: 248597 - DNA, 19 bp, Homo sapiens
  siRNA target sequence for FEM1B (NM_015322.2,2321-2339).
ctgacatgacgaataaaca

SEQ ID NO: 248598 - DNA, 19 bp, Homo sapiens
  siRNA target sequence for FEM1B (NM_015322.2,2325-2343).
catgacgaataaacagaat

SEQ ID NO: 248599 - DNA, 19 bp, Homo sapiens
  siRNA target sequence for FEM1B (NM_015322.2,2346-2364).
gactccgctagacaaaagt

SEQ ID NO: 248600 - DNA, 19 bp, Homo sapiens
  siRNA target sequence for FEM1B (NM_015322.2,2350-2368).
ccgctagacaaaagtacaa

SEQ ID NO: 248601 - DNA, 19 bp, Homo sapiens
  siRNA target sequence for FEM1B (NM_015322.2,2352-2370).
gctagacaaaagtacaact

SEQ ID NO: 248602 - DNA, 19 bp, Homo sapiens
  siRNA target sequence for FEM1B (NM_015322.2,2432-2450).
gagcagttcgggctaatga

SEQ ID NO: 248603 - DNA, 19 bp, Homo sapiens
  siRNA target sequence for FEM1B (NM_015322.2,2434-2452).
gcagttcgggctaatgaca

SEQ ID NO: 248604 - DNA, 19 bp, Homo sapiens
  siRNA target sequence for FEM1B (NM_015322.2,2435-2453).
cagttcgggctaatgacat

SEQ ID NO: 248605 - DNA, 19 bp, Homo sapiens
  siRNA target sequence for FEM1B (NM_015322.2,2441-2459).
gggctaatgacattaacta

SEQ ID NO: 248606 - DNA, 19 bp, Homo sapiens
  siRNA target sequence for FEM1B (NM_015322.2,2475-2493).
cagaactcttgaagagttt

SEQ ID NO: 248607 - DNA, 19 bp, Homo sapiens
  siRNA target sequence for FKSG87 (NM_032029.1,417-435).
gtccaccaaccagtatact

SEQ ID NO: 248608 - DNA, 19 bp, Homo sapiens
  siRNA target sequence for FKSG87 (NM_032029.1,540-558).
ctgcggcattggaagtgaa

SEQ ID NO: 248609 - DNA, 19 bp, Homo sapiens
  siRNA target sequence for FKSG87 (NM_032029.1,544-562).
ggcattggaagtgaaaaca

SEQ ID NO: 248610 - DNA, 19 bp, Homo sapiens
  siRNA target sequence for FKSG87 (NM_032029.1,545-563).
gcattggaagtgaaaacaa

SEQ ID NO: 248611 - DNA, 19 bp, Homo sapiens
  siRNA target sequence for FKSG87 (NM_032029.1,645-663).
gctcaccatgagatcctat

SEQ ID NO: 248612 - DNA, 19 bp, Homo sapiens
  siRNA target sequence for FKSG87 (NM_032029.1,840-858).
ggcagagggttctgtcaaa

SEQ ID NO: 248613 - DNA, 19 bp, Homo sapiens
  siRNA target sequence for FKSG87 (NM_032029.1,1010-1028).
ggccaagggaggacataga

SEQ ID NO: 248614 - DNA, 19 bp, Homo sapiens
  siRNA target sequence for FKSG87 (NM_032029.1,1032-1050).
ggtcaggatagctcttgat

SEQ ID NO: 248615 - DNA, 19 bp, Homo sapiens
  siRNA target sequence for FKSG87 (NM_032029.1,1126-1144).
caagcaacgccagtttcta

SEQ ID NO: 248616 - DNA, 19 bp, Homo sapiens
  siRNA target sequence for FKSG87 (NM_032029.1,1159-1177).
ggttccattggagaaacaa

SEQ ID NO: 248617 - DNA, 19 bp, Homo sapiens
  siRNA target sequence for FKSG87 (NM_032029.1,1386-1404).
cccaggtttaagtactctt

SEQ ID NO: 248618 - DNA, 19 bp, Homo sapiens
  siRNA target sequence for FKSG87 (NM_032029.1,1391-1409).
gtttaagtactcttaaaga

SEQ ID NO: 248619 - DNA, 19 bp, Homo sapiens
  siRNA target sequence for FKSG87 (NM_032029.1,1397-1415).
gtactcttaaagaaatcaa

SEQ ID NO: 248620 - DNA, 19 bp, Homo sapiens
  siRNA target sequence for FKSG87 (NM_032029.1,1484-1502).
gggtcaccttaattcagat

SEQ ID NO: 248621 - DNA, 19 bp, Homo sapiens
  siRNA target sequence for FKSG87 (NM_032029.1,1599-1617).
gactgccccagagagaaat

SEQ ID NO: 248622 - DNA, 19 bp, Homo sapiens
  siRNA target sequence for FLJ10587 (NM_018149.2,32-50).
gcttgcgagaccttctaat

SEQ ID NO: 248623 - DNA, 19 bp, Homo sapiens
  siRNA target sequence for FLJ10587 (NM_018149.2,443-461).
gtcaggaaagcaaagttct

SEQ ID NO: 248624 - DNA, 19 bp, Homo sapiens
  siRNA target sequence for FLJ10587 (NM_018149.2,479-497).
ccatctgtgacaattcaca

SEQ ID NO: 248625 - DNA, 19 bp, Homo sapiens
  siRNA target sequence for FLJ10587 (NM_018149.2,607-625).
ctcagtctcctttacctat

SEQ ID NO: 248626 - DNA, 19 bp, Homo sapiens
  siRNA target sequence for FLJ10587 (NM_018149.2,649-667).
ctggtccatcccacttgtt

SEQ ID NO: 248627 - DNA, 19 bp, Homo sapiens
  siRNA target sequence for FLJ10587 (NM_018149.2,654-672).
ccatcccacttgttccttt

SEQ ID NO: 248628 - DNA, 19 bp, Homo sapiens
  siRNA target sequence for FLJ10587 (NM_018149.2,724-742).
gtcctgccgctccttaaaa

SEQ ID NO: 248629 - DNA, 19 bp, Homo sapiens
  siRNA target sequence for FLJ10587 (NM_018149.2,726-744).
cctgccgctccttaaaaca

SEQ ID NO: 248630 - DNA, 19 bp, Homo sapiens
  siRNA target sequence for FLJ10587 (NM_018149.2,797-815).
gcccacctagactcctttt

SEQ ID NO: 248631 - DNA, 19 bp, Homo sapiens
  siRNA target sequence for FLJ10587 (NM_018149.2,925-943).
ctggaggaccagatctata

SEQ ID NO: 248632 - DNA, 19 bp, Homo sapiens
  siRNA target sequence for FLJ10587 (NM_018149.2,928-946).
gaggaccagatctatagaa

SEQ ID NO: 248633 - DNA, 19 bp, Homo sapiens
  siRNA target sequence for FLJ10587 (NM_018149.2,931-949).
gaccagatctatagaatct

SEQ ID NO: 248634 - DNA, 19 bp, Homo sapiens
  siRNA target sequence for FLJ10587 (NM_018149.2,957-975).
gagtcgtgtcttgactaat

SEQ ID NO: 248635 - DNA, 19 bp, Homo sapiens
  siRNA target sequence for FLJ10587 (NM_018149.2,959-977).
gtcgtgtcttgactaatca

SEQ ID NO: 248636 - DNA, 19 bp, Homo sapiens
  siRNA target sequence for FLJ10587 (NM_018149.2,1072-1090).
gaccaacttaggagtcatt

SEQ ID NO: 248637 - DNA, 19 bp, Homo sapiens
  siRNA target sequence for FLJ10587 (NM_018149.2,1075-1093).
caacttaggagtcattgta

SEQ ID NO: 248638 - DNA, 19 bp, Homo sapiens
  siRNA target sequence for FLJ10587 (NM_018149.2,1096-1114).
gtgaaggacccggaatctt

SEQ ID NO: 248639 - DNA, 19 bp, Homo sapiens
  siRNA target sequence for FLJ10587 (NM_018149.2,1167-1185).
gcacagccgacaacaactt

SEQ ID NO: 248640 - DNA, 19 bp, Homo sapiens
  siRNA target sequence for FLJ10587 (NM_018149.2,1168-1186).
cacagccgacaacaacttt

SEQ ID NO: 248641 - DNA, 19 bp, Homo sapiens
  siRNA target sequence for FLJ10587 (NM_018149.2,1172-1190).
gccgacaacaactttcctt

SEQ ID NO: 248642 - DNA, 19 bp, Homo sapiens
  siRNA target sequence for FLJ10587 (NM_018149.2,1173-1191).
ccgacaacaactttccttt

SEQ ID NO: 248643 - DNA, 19 bp, Homo sapiens
  siRNA target sequence for FLJ10587 (NM_018149.2,1222-1240).
ggccagctagtggatttca

SEQ ID NO: 248644 - DNA, 19 bp, Homo sapiens
  siRNA target sequence for FLJ10587 (NM_018149.2,1224-1242).
ccagctagtggatttcact

SEQ ID NO: 248645 - DNA, 19 bp, Homo sapiens
  siRNA target sequence for FLJ10587 (NM_018149.2,1272-1290).
gctagttctaagcaagaaa

SEQ ID NO: 248646 - DNA, 19 bp, Homo sapiens
  siRNA target sequence for FLJ10587 (NM_018149.2,1423-1441).
cccactggagagctaacat

SEQ ID NO: 248647 - DNA, 19 bp, Homo sapiens
  siRNA target sequence for FLJ10587 (NM_018149.2,1425-1443).
cactggagagctaacatct

SEQ ID NO: 248648 - DNA, 19 bp, Homo sapiens
  siRNA target sequence for FLJ10587 (NM_018149.2,1430-1448).
gagagctaacatctaagat

SEQ ID NO: 248649 - DNA, 19 bp, Homo sapiens
  siRNA target sequence for FLJ10587 (NM_018149.2,1432-1450).
gagctaacatctaagattt

SEQ ID NO: 248650 - DNA, 19 bp, Homo sapiens
  siRNA target sequence for FLJ10587 (NM_018149.2,1539-1557).
cagtgcctaccagtcaaat

SEQ ID NO: 248651 - DNA, 19 bp, Homo sapiens
  siRNA target sequence for FLJ10587 (NM_018149.2,1541-1559).
gtgcctaccagtcaaattt

SEQ ID NO: 248652 - DNA, 19 bp, Homo sapiens
  siRNA target sequence for FLJ10587 (NM_018149.2,1574-1592).
caatgactgtccataagaa

SEQ ID NO: 248653 - DNA, 19 bp, Homo sapiens
  siRNA target sequence for FLJ10587 (NM_018149.2,1636-1654).
ggtccagcatttcacaaat

SEQ ID NO: 248654 - DNA, 19 bp, Homo sapiens
  siRNA target sequence for FLJ10587 (NM_018149.2,1637-1655).
gtccagcatttcacaaata

SEQ ID NO: 248655 - DNA, 19 bp, Homo sapiens
  siRNA target sequence for FLJ10587 (NM_018149.2,1719-1737).
gaggagtttaactgatcaa

SEQ ID NO: 248656 - DNA, 19 bp, Homo sapiens
  siRNA target sequence for FLJ10587 (NM_018149.2,1721-1739).
ggagtttaactgatcaaca

SEQ ID NO: 248657 - DNA, 19 bp, Homo sapiens
  siRNA target sequence for FLJ10587 (NM_018149.2,1746-1764).
gcacaaatttcactcatta

SEQ ID NO: 248658 - DNA, 19 bp, Homo sapiens
  siRNA target sequence for FLJ10587 (NM_018149.2,1801-1819).
ccgcctgtgctatatcaca

SEQ ID NO: 248659 - DNA, 19 bp, Homo sapiens
  siRNA target sequence for FLJ10587 (NM_018149.2,1873-1891).
cgagatgatccctttgata

SEQ ID NO: 248660 - DNA, 19 bp, Homo sapiens
  siRNA target sequence for FLJ10587 (NM_018149.2,1874-1892).
gagatgatccctttgatat

SEQ ID NO: 248661 - DNA, 19 bp, Homo sapiens
  siRNA target sequence for FLJ10587 (NM_018149.2,1940-1958).
gtggaaaattggatcatat

SEQ ID NO: 248662 - DNA, 19 bp, Homo sapiens
  siRNA target sequence for FLJ10587 (NM_018149.2,1990-2008).
gatcctgctcctgctaaaa

SEQ ID NO: 248663 - DNA, 19 bp, Homo sapiens
  siRNA target sequence for FLJ10587 (NM_018149.2,2030-2048).
cagattcggatgctgataa

SEQ ID NO: 248664 - DNA, 19 bp, Homo sapiens
  siRNA target sequence for FLJ10587 (NM_018149.2,2082-2100).
gagcacgagcctgagttta

SEQ ID NO: 248665 - DNA, 19 bp, Homo sapiens
  siRNA target sequence for FLJ10587 (NM_018149.2,2085-2103).
cacgagcctgagtttagct

SEQ ID NO: 248666 - DNA, 19 bp, Homo sapiens
  siRNA target sequence for FLJ10587 (NM_018149.2,2114-2132).
gccaatccacagatagctt

SEQ ID NO: 248667 - DNA, 19 bp, Homo sapiens
  siRNA target sequence for FLJ10587 (NM_018149.2,2115-2133).
ccaatccacagatagctta

SEQ ID NO: 248668 - DNA, 19 bp, Homo sapiens
  siRNA target sequence for FLJ10587 (NM_018149.2,2237-2255).
catccacagttgagtatct

SEQ ID NO: 248669 - DNA, 19 bp, Homo sapiens
  siRNA target sequence for FLJ10587 (NM_018149.2,2254-2272).
ctcccaggcatgctacatt

SEQ ID NO: 248670 - DNA, 19 bp, Homo sapiens
  siRNA target sequence for FLJ10587 (NM_018149.2,2258-2276).
caggcatgctacattcaaa

SEQ ID NO: 248671 - DNA, 19 bp, Homo sapiens
  siRNA target sequence for FLJ10587 (NM_018149.2,2306-2324).
ccagctggtctttggttaa

SEQ ID NO: 248672 - DNA, 19 bp, Homo sapiens
  siRNA target sequence for FLJ10587 (NM_018149.2,2307-2325).
cagctggtctttggttaaa

SEQ ID NO: 248673 - DNA, 19 bp, Homo sapiens
  siRNA target sequence for FLJ10587 (NM_018149.2,2309-2327).
gctggtctttggttaaact

SEQ ID NO: 248674 - DNA, 19 bp, Homo sapiens
  siRNA target sequence for FLJ10587 (NM_018149.2,2310-2328).
ctggtctttggttaaacta

SEQ ID NO: 248675 - DNA, 19 bp, Homo sapiens
  siRNA target sequence for FLJ10587 (NM_018149.2,2326-2344).
ctaggccctgctaagtctt

SEQ ID NO: 248676 - DNA, 19 bp, Homo sapiens
  siRNA target sequence for FLJ10587 (NM_018149.2,2329-2347).
ggccctgctaagtcttata

SEQ ID NO: 248677 - DNA, 19 bp, Homo sapiens
  siRNA target sequence for FLJ10587 (NM_018149.2,2332-2350).
cctgctaagtcttataact

SEQ ID NO: 248678 - DNA, 19 bp, Homo sapiens
  siRNA target sequence for FLJ10587 (NM_018149.2,2333-2351).
ctgctaagtcttataactt

SEQ ID NO: 248679 - DNA, 19 bp, Homo sapiens
  siRNA target sequence for FLJ10587 (NM_018149.2,2336-2354).
ctaagtcttataactttca

SEQ ID NO: 248680 - DNA, 19 bp, Homo sapiens
  siRNA target sequence for FLJ10587 (NM_018149.2,2340-2358).
gtcttataactttcataca

SEQ ID NO: 248681 - DNA, 19 bp, Homo sapiens
  siRNA target sequence for FLJ10587 (NM_018149.2,2364-2382).
ggaccaacagggctttatt

SEQ ID NO: 248682 - DNA, 19 bp, Homo sapiens
  siRNA target sequence for FLJ10587 (NM_018149.2,2467-2485).
cctgctccaaataaagcta

SEQ ID NO: 248683 - DNA, 19 bp, Homo sapiens
  siRNA target sequence for FLJ10587 (NM_018149.2,2522-2540).
gaagacggcgagatgacat

SEQ ID NO: 248684 - DNA, 19 bp, Homo sapiens
  siRNA target sequence for FLJ10587 (NM_018149.2,2578-2596).
cgaggtcggagattcatgt

SEQ ID NO: 248685 - DNA, 19 bp, Homo sapiens
  siRNA target sequence for FLJ10587 (NM_018149.2,2595-2613).
gtgctctgggcctgacaaa

SEQ ID NO: 248686 - DNA, 19 bp, Homo sapiens
  siRNA target sequence for FLJ10587 (NM_018149.2,2597-2615).
gctctgggcctgacaaagt

SEQ ID NO: 248687 - DNA, 19 bp, Homo sapiens
  siRNA target sequence for FLJ10587 (NM_018149.2,2600-2618).
ctgggcctgacaaagtaat

SEQ ID NO: 248688 - DNA, 19 bp, Homo sapiens
  siRNA target sequence for FLJ10587 (NM_018149.2,2602-2620).
gggcctgacaaagtaatga

SEQ ID NO: 248689 - DNA, 19 bp, Homo sapiens
  siRNA target sequence for FLJ10587 (NM_018149.2,2603-2621).
ggcctgacaaagtaatgaa

SEQ ID NO: 248690 - DNA, 19 bp, Homo sapiens
  siRNA target sequence for FLJ10587 (NM_018149.2,2708-2726).
gagggctgaaacctcatta

SEQ ID NO: 248691 - DNA, 19 bp, Homo sapiens
  siRNA target sequence for FLJ10587 (NM_018149.2,2719-2737).
cctcattatgctcaactta

SEQ ID NO: 248692 - DNA, 19 bp, Homo sapiens
  siRNA target sequence for FLJ10587 (NM_018149.2,2722-2740).
cattatgctcaacttatga

SEQ ID NO: 248693 - DNA, 19 bp, Homo sapiens
  siRNA target sequence for FLJ10587 (NM_018149.2,2761-2779).
gatgctcctttgcagataa

SEQ ID NO: 248694 - DNA, 19 bp, Homo sapiens
  siRNA target sequence for FLJ10587 (NM_018149.2,2810-2828).
caccatgtccggtattcta

SEQ ID NO: 248695 - DNA, 19 bp, Homo sapiens
  siRNA target sequence for FLJ10587 (NM_018149.2,2819-2837).
cggtattctacccagaaaa

SEQ ID NO: 248696 - DNA, 19 bp, Homo sapiens
  siRNA target sequence for FLJ10587 (NM_018149.2,2956-2974).
gtgctccgtggggttctta

SEQ ID NO: 248697 - DNA, 19 bp, Homo sapiens
  siRNA target sequence for FLJ10587 (NM_018149.2,2967-2985).
ggttcttaaggcagtaaca

SEQ ID NO: 248698 - DNA, 19 bp, Homo sapiens
  siRNA target sequence for FLVCR (NM_014053.1,244-262).
cacccgctcgcgaaaggat

SEQ ID NO: 248699 - DNA, 19 bp, Homo sapiens
  siRNA target sequence for FLVCR (NM_014053.1,553-571).
ctggtcaacgcctttcagt

SEQ ID NO: 248700 - DNA, 19 bp, Homo sapiens
  siRNA target sequence for FLVCR (NM_014053.1,573-591).
gatccagtacagcatcatt

SEQ ID NO: 248701 - DNA, 19 bp, Homo sapiens
  siRNA target sequence for FLVCR (NM_014053.1,944-962).
ctgcagttggctttttgct

SEQ ID NO: 248702 - DNA, 19 bp, Homo sapiens
  siRNA target sequence for FLVCR (NM_014053.1,984-1002).
cacacagaatgacacaaat

SEQ ID NO: 248703 - DNA, 19 bp, Homo sapiens
  siRNA target sequence for FLVCR (NM_014053.1,986-1004).
cacagaatgacacaaatct

SEQ ID NO: 248704 - DNA, 19 bp, Homo sapiens
  siRNA target sequence for FLVCR (NM_014053.1,1020-1038).
cagcaccatgttttatgga

SEQ ID NO: 248705 - DNA, 19 bp, Homo sapiens
  siRNA target sequence for FLVCR (NM_014053.1,1144-1162).
cctgaagagtactcctata

SEQ ID NO: 248706 - DNA, 19 bp, Homo sapiens
  siRNA target sequence for FLVCR (NM_014053.1,1145-1163).
ctgaagagtactcctataa

SEQ ID NO: 248707 - DNA, 19 bp, Homo sapiens
  siRNA target sequence for FLVCR (NM_014053.1,1155-1173).
ctcctataagaaatcaata

SEQ ID NO: 248708 - DNA, 19 bp, Homo sapiens
  siRNA target sequence for FLVCR (NM_014053.1,1203-1221).
ccttctgttgatcacttat

SEQ ID NO: 248709 - DNA, 19 bp, Homo sapiens
  siRNA target sequence for FLVCR (NM_014053.1,1207-1225).
ctgttgatcacttatggta

SEQ ID NO: 248710 - DNA, 19 bp, Homo sapiens
  siRNA target sequence for FLVCR (NM_014053.1,1247-1265).
cagtctcaacgttattaaa

SEQ ID NO: 248711 - DNA, 19 bp, Homo sapiens
  siRNA target sequence for FLVCR (NM_014053.1,1251-1269).
ctcaacgttattaaatcaa

SEQ ID NO: 248712 - DNA, 19 bp, Homo sapiens
  siRNA target sequence for FLVCR (NM_014053.1,1344-1362).
ggtgggctctattctttgt

SEQ ID NO: 248713 - DNA, 19 bp, Homo sapiens
  siRNA target sequence for FLVCR (NM_014053.1,1363-1381).
ggcttatggctggattata

SEQ ID NO: 248714 - DNA, 19 bp, Homo sapiens
  siRNA target sequence for FLVCR (NM_014053.1,1365-1383).
cttatggctggattatact

SEQ ID NO: 248715 - DNA, 19 bp, Homo sapiens
  siRNA target sequence for FLVCR (NM_014053.1,1375-1393).
gattatactaaaacataca

SEQ ID NO: 248716 - DNA, 19 bp, Homo sapiens
  siRNA target sequence for FLVCR (NM_014053.1,1438-1456).
gttatctttactttcacat

SEQ ID NO: 248717 - DNA, 19 bp, Homo sapiens
  siRNA target sequence for FLVCR (NM_014053.1,1609-1627).
cagatatttggaattttgt

SEQ ID NO: 248718 - DNA, 19 bp, Homo sapiens
  siRNA target sequence for FLVCR (NM_014053.1,1710-1728).
catcatattaacagcatta

SEQ ID NO: 248719 - DNA, 19 bp, Homo sapiens
  siRNA target sequence for FLVCR (NM_014053.1,1744-1762).
cgaagacacaacataaata

SEQ ID NO: 248720 - DNA, 19 bp, Homo sapiens
  siRNA target sequence for FLVCR (NM_014053.1,1822-1840).
ccaaaaacggttatgttgt

SEQ ID NO: 248721 - DNA, 19 bp, Homo sapiens
  siRNA target sequence for FLVCR (NM_014053.1,1845-1863).
gcagtcagaatcagcaatt

SEQ ID NO: 248722 - DNA, 19 bp, Homo sapiens
  siRNA target sequence for FRAG1 (NM_014489.1,472-490).
gtggggtgcccaattacct

SEQ ID NO: 248723 - DNA, 19 bp, Homo sapiens
  siRNA target sequence for FRAG1 (NM_014489.1,688-706).
cgttgctagtgctcactta

SEQ ID NO: 248724 - DNA, 19 bp, Homo sapiens
  siRNA target sequence for FRAG1 (NM_014489.1,689-707).
gttgctagtgctcacttat

SEQ ID NO: 248725 - DNA, 19 bp, Homo sapiens
  siRNA target sequence for FRAG1 (NM_014489.1,725-743).
cttcaccatccacgaaaat

SEQ ID NO: 248726 - DNA, 19 bp, Homo sapiens
  siRNA target sequence for FRAG1 (NM_014489.1,734-752).
ccacgaaaatgctttcatt

SEQ ID NO: 248727 - DNA, 19 bp, Homo sapiens
  siRNA target sequence for FRAG1 (NM_014489.1,898-916).
cggcgctggctgtctactt

SEQ ID NO: 248728 - DNA, 19 bp, Homo sapiens
  siRNA target sequence for FRAG1 (NM_014489.1,899-917).
ggcgctggctgtctacttt

SEQ ID NO: 248729 - DNA, 19 bp, Homo sapiens
  siRNA target sequence for FRAG1 (NM_014489.1,914-932).
ctttcggcacaacatgtat

SEQ ID NO: 248730 - DNA, 19 bp, Homo sapiens
  siRNA target sequence for FRAG1 (NM_014489.1,919-937).
ggcacaacatgtattgtga

SEQ ID NO: 248731 - DNA, 19 bp, Homo sapiens
  siRNA target sequence for FRAG1 (NM_014489.1,968-986).
ggagtacactgttgtctta

SEQ ID NO: 248732 - DNA, 19 bp, Homo sapiens
  siRNA target sequence for FREB (NM_032738.2,289-307).
caggtcaaggcctacactt

SEQ ID NO: 248733 - DNA, 19 bp, Homo sapiens
  siRNA target sequence for FREB (NM_032738.2,292-310).
gtcaaggcctacactttca

SEQ ID NO: 248734 - DNA, 19 bp, Homo sapiens
  siRNA target sequence for FREB (NM_032738.2,325-343).
ctgattgtgtcctatgact

SEQ ID NO: 248735 - DNA, 19 bp, Homo sapiens
  siRNA target sequence for FREB (NM_032738.2,362-380).
cagccaagccagtttttga

SEQ ID NO: 248736 - DNA, 19 bp, Homo sapiens
  siRNA target sequence for FREB (NM_032738.2,593-611).
ctatcacagtccaagaact

SEQ ID NO: 248737 - DNA, 19 bp, Homo sapiens
  siRNA target sequence for FREB (NM_032738.2,597-615).
cacagtccaagaactgttt

SEQ ID NO: 248738 - DNA, 19 bp, Homo sapiens
  siRNA target sequence for FREB (NM_032738.2,764-782).
gggggctctcctcagaatt

SEQ ID NO: 248739 - DNA, 19 bp, Homo sapiens
  siRNA target sequence for FREB (NM_032738.2,805-823).
gatcactccgggtcatact

SEQ ID NO: 248740 - DNA, 19 bp, Homo sapiens
  siRNA target sequence for FREB (NM_032738.2,843-861).
ggacaaccaagtttggaaa

SEQ ID NO: 248741 - DNA, 19 bp, Homo sapiens
  siRNA target sequence for FREB (NM_032738.2,907-925).
gctgcacctcccacattga

SEQ ID NO: 248742 - DNA, 19 bp, Homo sapiens
  siRNA target sequence for FREB (NM_032738.2,1125-1143).
catggagttgagggaatta

SEQ ID NO: 248743 - DNA, 19 bp, Homo sapiens
  siRNA target sequence for FREB (NM_032738.2,1128-1146).
ggagttgagggaattatct

SEQ ID NO: 248744 - DNA, 19 bp, Homo sapiens
  siRNA target sequence for GABARAPL1 (NM_031412.1,434-452).
gccctctgaccttactgtt

SEQ ID NO: 248745 - DNA, 19 bp, Homo sapiens
  siRNA target sequence for GAC1 (NM_006338.1,810-828).
ccagcctacaggaactcta

SEQ ID NO: 248746 - DNA, 19 bp, Homo sapiens
  siRNA target sequence for GAC1 (NM_006338.1,811-829).
cagcctacaggaactctat

SEQ ID NO: 248747 - DNA, 19 bp, Homo sapiens
  siRNA target sequence for GAC1 (NM_006338.1,813-831).
gcctacaggaactctatct

SEQ ID NO: 248748 - DNA, 19 bp, Homo sapiens
  siRNA target sequence for GAC1 (NM_006338.1,815-833).
ctacaggaactctatctca

SEQ ID NO: 248749 - DNA, 19 bp, Homo sapiens
  siRNA target sequence for GAC1 (NM_006338.1,933-951).
gccgctggtttgaaatgct

SEQ ID NO: 248750 - DNA, 19 bp, Homo sapiens
  siRNA target sequence for GAC1 (NM_006338.1,1105-1123).
ggagagcctctccttctat

SEQ ID NO: 248751 - DNA, 19 bp, Homo sapiens
  siRNA target sequence for GAC1 (NM_006338.1,1233-1251).
ccaacatgctgcaccttaa

SEQ ID NO: 248752 - DNA, 19 bp, Homo sapiens
  siRNA target sequence for GAC1 (NM_006338.1,1282-1300).
ggtctccatcgacaagttt

SEQ ID NO: 248753 - DNA, 19 bp, Homo sapiens
  siRNA target sequence for GAC1 (NM_006338.1,1739-1757).
cccgaacccgagatctact

SEQ ID NO: 248754 - DNA, 19 bp, Homo sapiens
  siRNA target sequence for GAC1 (NM_006338.1,1856-1874).
gaagaggcagggctataca

SEQ ID NO: 248755 - DNA, 19 bp, Homo sapiens
  siRNA target sequence for GAC1 (NM_006338.1,1991-2009).
gagacccacccctatcaca

SEQ ID NO: 248756 - DNA, 19 bp, Homo sapiens
  siRNA target sequence for GAC1 (NM_006338.1,2121-2139).
gaacccacagctacaacat

SEQ ID NO: 248757 - DNA, 19 bp, Homo sapiens
  siRNA target sequence for GAC1 (NM_006338.1,2203-2221).
cacccagttggcttgtgta

SEQ ID NO: 248758 - DNA, 19 bp, Homo sapiens
  siRNA target sequence for GAC1 (NM_006338.1,2506-2524).
gccaccattgtctcaaaat

SEQ ID NO: 248759 - DNA, 19 bp, Homo sapiens
  siRNA target sequence for GFRA1 (NM_005264.2,790-808).
cagaagtcgctctacaact

SEQ ID NO: 248760 - DNA, 19 bp, Homo sapiens
  siRNA target sequence for GFRA1 (NM_005264.2,916-934).
ccagttaacagcagattgt

SEQ ID NO: 248761 - DNA, 19 bp, Homo sapiens
  siRNA target sequence for GFRA1 (NM_005264.2,945-963).
ccgggtggtcccattcata

SEQ ID NO: 248762 - DNA, 19 bp, Homo sapiens
  siRNA target sequence for GFRA1 (NM_005264.2,1133-1151).
ccctccggcagttctttga

SEQ ID NO: 248763 - DNA, 19 bp, Homo sapiens
  siRNA target sequence for GFRA1 (NM_005264.2,1135-1153).
ctccggcagttctttgaca

SEQ ID NO: 248764 - DNA, 19 bp, Homo sapiens
  siRNA target sequence for GFRA1 (NM_005264.2,1239-1257).
gcctgtgtgctcctatgaa

SEQ ID NO: 248765 - DNA, 19 bp, Homo sapiens
  siRNA target sequence for GFRA1 (NM_005264.2,1262-1280).
gggagaagcccaactgttt

SEQ ID NO: 248766 - DNA, 19 bp, Homo sapiens
  siRNA target sequence for GFRA1 (NM_005264.2,1291-1309).
gactcctgcaagacgaatt

SEQ ID NO: 248767 - DNA, 19 bp, Homo sapiens
  siRNA target sequence for GFRA1 (NM_005264.2,1295-1313).
cctgcaagacgaattacat

SEQ ID NO: 248768 - DNA, 19 bp, Homo sapiens
  siRNA target sequence for GFRA1 (NM_005264.2,1322-1340).
ctcgccttgcggatttttt

SEQ ID NO: 248769 - DNA, 19 bp, Homo sapiens
  siRNA target sequence for GFRA1 (NM_005264.2,1376-1394).
gctgtctaaaggaaaacta

SEQ ID NO: 248770 - DNA, 19 bp, Homo sapiens
  siRNA target sequence for GFRA1 (NM_005264.2,1410-1428).
cgcctactcggggcttatt

SEQ ID NO: 248771 - DNA, 19 bp, Homo sapiens
  siRNA target sequence for GFRA1 (NM_005264.2,1435-1453).
gtcatgacccccaactaca

SEQ ID NO: 248772 - DNA, 19 bp, Homo sapiens
  siRNA target sequence for GFRA1 (NM_005264.2,1519-1537).
gagtgcttgaaatttttga

SEQ ID NO: 248773 - DNA, 19 bp, Homo sapiens
  siRNA target sequence for GFRA1 (NM_005264.2,1545-1563).
caaggacaatacatgtctt

SEQ ID NO: 248774 - DNA, 19 bp, Homo sapiens
  siRNA target sequence for GFRA1 (NM_005264.2,1705-1723).
gaaattcccactcatgttt

SEQ ID NO: 248775 - DNA, 19 bp, Homo sapiens
  siRNA target sequence for GFRA1 (NM_005264.2,1727-1745).
caccgtgtgcaaatttaca

SEQ ID NO: 248776 - DNA, 19 bp, Homo sapiens
  siRNA target sequence for GFRA1 (NM_005264.2,1764-1782).
caatgtgtcgggcaataca

SEQ ID NO: 248777 - DNA, 19 bp, Homo sapiens
  siRNA target sequence for GFRA1 (NM_005264.2,1775-1793).
gcaatacacacctctgtat

SEQ ID NO: 248778 - DNA, 19 bp, Homo sapiens
  siRNA target sequence for GFRA1 (NM_005264.2,1786-1804).
ctctgtatttccaatggta

SEQ ID NO: 248779 - DNA, 19 bp, Homo sapiens
  siRNA target sequence for GFRA1 (NM_005264.2,1836-1854).
ccacataaccacaaaatca

SEQ ID NO: 248780 - DNA, 19 bp, Homo sapiens
  siRNA target sequence for GFRA1 (NM_005264.2,1917-1935).
caccctattatctttaaca

SEQ ID NO: 248781 - DNA, 19 bp, Homo sapiens
  siRNA target sequence for GFRA1 (NM_005264.2,1919-1937).
ccctattatctttaacaga

SEQ ID NO: 248782 - DNA, 19 bp, Homo sapiens
  siRNA target sequence for GFRA4 (NM_022139.2,122-140).
gtttgcgctccgagtatgt

SEQ ID NO: 248783 - DNA, 19 bp, Homo sapiens
  siRNA target sequence for GFRA4 (NM_022139.2,506-524).
ccgccgtcacccctaacta

SEQ ID NO: 248784 - DNA, 19 bp, Homo sapiens
  siRNA target sequence for GOSR1 (NM_004871.1,94-112).
gtttccttcagcaaactat

SEQ ID NO: 248785 - DNA, 19 bp, Homo sapiens
  siRNA target sequence for GOSR1 (NM_004871.1,99-117).
cttcagcaaactatgtaca

SEQ ID NO: 248786 - DNA, 19 bp, Homo sapiens
  siRNA target sequence for GOSR1 (NM_004871.1,104-122).
gcaaactatgtacaagtta

SEQ ID NO: 248787 - DNA, 19 bp, Homo sapiens
  siRNA target sequence for GOSR1 (NM_004871.1,145-163).
ggaagacgcgacaggtata

SEQ ID NO: 248788 - DNA, 19 bp, Homo sapiens
  siRNA target sequence for GOSR1 (NM_004871.1,153-171).
cgacaggtatagttctgat

SEQ ID NO: 248789 - DNA, 19 bp, Homo sapiens
  siRNA target sequence for GOSR1 (NM_004871.1,154-172).
gacaggtatagttctgata

SEQ ID NO: 248790 - DNA, 19 bp, Homo sapiens
  siRNA target sequence for GOSR1 (NM_004871.1,156-174).
caggtatagttctgataca

SEQ ID NO: 248791 - DNA, 19 bp, Homo sapiens
  siRNA target sequence for GOSR1 (NM_004871.1,159-177).
gtatagttctgatacaaca

SEQ ID NO: 248792 - DNA, 19 bp, Homo sapiens
  siRNA target sequence for GOSR1 (NM_004871.1,169-187).
gatacaacaccccttttaa

SEQ ID NO: 248793 - DNA, 19 bp, Homo sapiens
  siRNA target sequence for GOSR1 (NM_004871.1,214-232).
gagacaatggcgattgaga

SEQ ID NO: 248794 - DNA, 19 bp, Homo sapiens
  siRNA target sequence for GOSR1 (NM_004871.1,216-234).
gacaatggcgattgagatt

SEQ ID NO: 248795 - DNA, 19 bp, Homo sapiens
  siRNA target sequence for GOSR1 (NM_004871.1,218-236).
caatggcgattgagattga

SEQ ID NO: 248796 - DNA, 19 bp, Homo sapiens
  siRNA target sequence for GOSR1 (NM_004871.1,251-269).
ggcttacaggggtaaatga

SEQ ID NO: 248797 - DNA, 19 bp, Homo sapiens
  siRNA target sequence for GOSR1 (NM_004871.1,252-270).
gcttacaggggtaaatgat

SEQ ID NO: 248798 - DNA, 19 bp, Homo sapiens
  siRNA target sequence for GOSR1 (NM_004871.1,257-275).
caggggtaaatgataaaat

SEQ ID NO: 248799 - DNA, 19 bp, Homo sapiens
  siRNA target sequence for GOSR1 (NM_004871.1,337-355).
cagcggcatagagacatat

SEQ ID NO: 248800 - DNA, 19 bp, Homo sapiens
  siRNA target sequence for GOSR1 (NM_004871.1,341-359).
ggcatagagacatattgca

SEQ ID NO: 248801 - DNA, 19 bp, Homo sapiens
  siRNA target sequence for GOSR1 (NM_004871.1,347-365).
gagacatattgcaggatta

SEQ ID NO: 248802 - DNA, 19 bp, Homo sapiens
  siRNA target sequence for GOSR1 (NM_004871.1,351-369).
catattgcaggattataca

SEQ ID NO: 248803 - DNA, 19 bp, Homo sapiens
  siRNA target sequence for GOSR1 (NM_004871.1,370-388).
catgaattccataaaacca

SEQ ID NO: 248804 - DNA, 19 bp, Homo sapiens
  siRNA target sequence for GOSR1 (NM_004871.1,410-428).
gggaaagggagaatcttat

SEQ ID NO: 248805 - DNA, 19 bp, Homo sapiens
  siRNA target sequence for GOSR1 (NM_004871.1,420-438).
gaatcttatgggatcagta

SEQ ID NO: 248806 - DNA, 19 bp, Homo sapiens
  siRNA target sequence for GOSR1 (NM_004871.1,429-447).
gggatcagtacgaaaagat

SEQ ID NO: 248807 - DNA, 19 bp, Homo sapiens
  siRNA target sequence for GOSR1 (NM_004871.1,430-448).
ggatcagtacgaaaagata

SEQ ID NO: 248808 - DNA, 19 bp, Homo sapiens
  siRNA target sequence for GOSR1 (NM_004871.1,436-454).
gtacgaaaagatattgagt

SEQ ID NO: 248809 - DNA, 19 bp, Homo sapiens
  siRNA target sequence for GOSR1 (NM_004871.1,445-463).
gatattgagtcatataaaa

SEQ ID NO: 248810 - DNA, 19 bp, Homo sapiens
  siRNA target sequence for GOSR1 (NM_004871.1,464-482).
gtgggtctggagtaaacaa

SEQ ID NO: 248811 - DNA, 19 bp, Homo sapiens
  siRNA target sequence for GOSR1 (NM_004871.1,643-661).
cgttttcctgctgtaaaca

SEQ ID NO: 248812 - DNA, 19 bp, Homo sapiens
  siRNA target sequence for GOSR1 (NM_004871.1,705-723).
catcctagggggtgttatt

SEQ ID NO: 248813 - DNA, 19 bp, Homo sapiens
  siRNA target sequence for GOSR1 (NM_004871.1,745-763).
ctgctgtatgcgttccatt

SEQ ID NO: 248814 - DNA, 19 bp, Homo sapiens
  siRNA target sequence for GPA33 (NM_005814.1,493-511).
ccagtcgagagggacttat

SEQ ID NO: 248815 - DNA, 19 bp, Homo sapiens
  siRNA target sequence for GPA33 (NM_005814.1,494-512).
cagtcgagagggacttatt

SEQ ID NO: 248816 - DNA, 19 bp, Homo sapiens
  siRNA target sequence for GPA33 (NM_005814.1,496-514).
gtcgagagggacttattca

SEQ ID NO: 248817 - DNA, 19 bp, Homo sapiens
  siRNA target sequence for GPA33 (NM_005814.1,498-516).
cgagagggacttattcaat

SEQ ID NO: 248818 - DNA, 19 bp, Homo sapiens
  siRNA target sequence for GPA33 (NM_005814.1,551-569).
ggtcatctggccgttttca

SEQ ID NO: 248819 - DNA, 19 bp, Homo sapiens
  siRNA target sequence for GPA33 (NM_005814.1,552-570).
gtcatctggccgttttcaa

SEQ ID NO: 248820 - DNA, 19 bp, Homo sapiens
  siRNA target sequence for GPA33 (NM_005814.1,608-626).
cgtcagcatatccaacaat

SEQ ID NO: 248821 - DNA, 19 bp, Homo sapiens
  siRNA target sequence for GPA33 (NM_005814.1,788-806).
cgagggagagaccataatt

SEQ ID NO: 248822 - DNA, 19 bp, Homo sapiens
  siRNA target sequence for GPA33 (NM_005814.1,799-817).
ccataattgggaacaacat

SEQ ID NO: 248823 - DNA, 19 bp, Homo sapiens
  siRNA target sequence for GPA33 (NM_005814.1,927-945).
cctgtctccctgaagaata

SEQ ID NO: 248824 - DNA, 19 bp, Homo sapiens
  siRNA target sequence for GPA33 (NM_005814.1,952-970).
cagacacatcgggttacta

SEQ ID NO: 248825 - DNA, 19 bp, Homo sapiens
  siRNA target sequence for GPA33 (NM_005814.1,954-972).
gacacatcgggttactaca

SEQ ID NO: 248826 - DNA, 19 bp, Homo sapiens
  siRNA target sequence for GYPB (NM_002100.2,228-246).
ccagctcctgtagtgataa

SEQ ID NO: 248827 - DNA, 19 bp, Homo sapiens
  siRNA target sequence for GYPB (NM_002100.2,260-278).
gtgtgtgatggctggtatt

SEQ ID NO: 248828 - DNA, 19 bp, Homo sapiens
  siRNA target sequence for HAVCR1 (NM_012206.1,192-210).
gaatagaggctcatgttct

SEQ ID NO: 248829 - DNA, 19 bp, Homo sapiens
  siRNA target sequence for HAVCR1 (NM_012206.1,197-215).
gaggctcatgttctctatt

SEQ ID NO: 248830 - DNA, 19 bp, Homo sapiens
  siRNA target sequence for HAVCR1 (NM_012206.1,266-284).
ggaaggacacacgctataa

SEQ ID NO: 248831 - DNA, 19 bp, Homo sapiens
  siRNA target sequence for HAVCR1 (NM_012206.1,270-288).
ggacacacgctataagcta

SEQ ID NO: 248832 - DNA, 19 bp, Homo sapiens
  siRNA target sequence for HAVCR1 (NM_012206.1,271-289).
gacacacgctataagctat

SEQ ID NO: 248833 - DNA, 19 bp, Homo sapiens
  siRNA target sequence for HAVCR1 (NM_012206.1,286-304).
ctattgggggacctttcaa

SEQ ID NO: 248834 - DNA, 19 bp, Homo sapiens
  siRNA target sequence for HAVCR1 (NM_012206.1,313-331).
gtctctttgaccatagaaa

SEQ ID NO: 248835 - DNA, 19 bp, Homo sapiens
  siRNA target sequence for HAVCR1 (NM_012206.1,346-364).
gacagtggcgtatattgtt

SEQ ID NO: 248836 - DNA, 19 bp, Homo sapiens
  siRNA target sequence for HAVCR1 (NM_012206.1,375-393).
gcaccgtgggtggttcaat

SEQ ID NO: 248837 - DNA, 19 bp, Homo sapiens
  siRNA target sequence for HAVCR1 (NM_012206.1,379-397).
cgtgggtggttcaatgaca

SEQ ID NO: 248838 - DNA, 19 bp, Homo sapiens
  siRNA target sequence for HAVCR1 (NM_012206.1,384-402).
gtggttcaatgacatgaaa

SEQ ID NO: 248839 - DNA, 19 bp, Homo sapiens
  siRNA target sequence for HAVCR1 (NM_012206.1,407-425).
ccgtatcattggagattgt

SEQ ID NO: 248840 - DNA, 19 bp, Homo sapiens
  siRNA target sequence for HAVCR1 (NM_012206.1,435-453).
ggtcacgactactccaatt

SEQ ID NO: 248841 - DNA, 19 bp, Homo sapiens
  siRNA target sequence for HAVCR1 (NM_012206.1,796-814).
ccattgtactcttacacaa

SEQ ID NO: 248842 - DNA, 19 bp, Homo sapiens
  siRNA target sequence for HAVCR1 (NM_012206.1,831-849).
cgtgacagagtcttcagat

SEQ ID NO: 248843 - DNA, 19 bp, Homo sapiens
  siRNA target sequence for HAVCR1 (NM_012206.1,895-913).
ctactgacggccaatacca

SEQ ID NO: 248844 - DNA, 19 bp, Homo sapiens
  siRNA target sequence for HAVCR1 (NM_012206.1,900-918).
gacggccaataccactaaa

SEQ ID NO: 248845 - DNA, 19 bp, Homo sapiens
  siRNA target sequence for HAVCR1 (NM_012206.1,903-921).
ggccaataccactaaagga

SEQ ID NO: 248846 - DNA, 19 bp, Homo sapiens
  siRNA target sequence for HAVCR1 (NM_012206.1,905-923).
ccaataccactaaaggaat

SEQ ID NO: 248847 - DNA, 19 bp, Homo sapiens
  siRNA target sequence for HAVCR1 (NM_012206.1,924-942).
ctatgctggagtctgtatt

SEQ ID NO: 248848 - DNA, 19 bp, Homo sapiens
  siRNA target sequence for HAVCR1 (NM_012206.1,1005-1023).
ggaggttcaacaactaagt

SEQ ID NO: 248849 - DNA, 19 bp, Homo sapiens
  siRNA target sequence for HAVCR1 (NM_012206.1,1008-1026).
ggttcaacaactaagtgtt

SEQ ID NO: 248850 - DNA, 19 bp, Homo sapiens
  siRNA target sequence for HAVCR1 (NM_012206.1,1009-1027).
gttcaacaactaagtgttt

SEQ ID NO: 248851 - DNA, 19 bp, Homo sapiens
  siRNA target sequence for HAVCR1 (NM_012206.1,1012-1030).
caacaactaagtgtttcat

SEQ ID NO: 248852 - DNA, 19 bp, Homo sapiens
  siRNA target sequence for HAVCR1 (NM_012206.1,1098-1116).
ctacattgagaatagtctt

SEQ ID NO: 248853 - DNA, 19 bp, Homo sapiens
  siRNA target sequence for HAVCR2 (NM_032782.2,185-203).
ggtcctcagaagtggaata

SEQ ID NO: 248854 - DNA, 19 bp, Homo sapiens
  siRNA target sequence for HAVCR2 (NM_032782.2,324-342).
ggtgctcaggactgatgaa

SEQ ID NO: 248855 - DNA, 19 bp, Homo sapiens
  siRNA target sequence for HAVCR2 (NM_032782.2,325-343).
gtgctcaggactgatgaaa

SEQ ID NO: 248856 - DNA, 19 bp, Homo sapiens
  siRNA target sequence for HAVCR2 (NM_032782.2,403-421).
gtgtccctgaccatagaga

SEQ ID NO: 248857 - DNA, 19 bp, Homo sapiens
  siRNA target sequence for HAVCR2 (NM_032782.2,405-423).
gtccctgaccatagagaat

SEQ ID NO: 248858 - DNA, 19 bp, Homo sapiens
  siRNA target sequence for HAVCR2 (NM_032782.2,468-486).
cccaggcataatgaatgat

SEQ ID NO: 248859 - DNA, 19 bp, Homo sapiens
  siRNA target sequence for HAVCR2 (NM_032782.2,621-639).
ggggagcctccctgatata

SEQ ID NO: 248860 - DNA, 19 bp, Homo sapiens
  siRNA target sequence for HAVCR2 (NM_032782.2,622-640).
gggagcctccctgatataa

SEQ ID NO: 248861 - DNA, 19 bp, Homo sapiens
  siRNA target sequence for HAVCR2 (NM_032782.2,623-641).
ggagcctccctgatataaa

SEQ ID NO: 248862 - DNA, 19 bp, Homo sapiens
  siRNA target sequence for HAVCR2 (NM_032782.2,626-644).
gcctccctgatataaatct

SEQ ID NO: 248863 - DNA, 19 bp, Homo sapiens
  siRNA target sequence for HAVCR2 (NM_032782.2,627-645).
cctccctgatataaatcta

SEQ ID NO: 248864 - DNA, 19 bp, Homo sapiens
  siRNA target sequence for HAVCR2 (NM_032782.2,628-646).
ctccctgatataaatctaa

SEQ ID NO: 248865 - DNA, 19 bp, Homo sapiens
  siRNA target sequence for HAVCR2 (NM_032782.2,656-674).
ccacattggccaatgagtt

SEQ ID NO: 248866 - DNA, 19 bp, Homo sapiens
  siRNA target sequence for HAVCR2 (NM_032782.2,657-675).
cacattggccaatgagtta

SEQ ID NO: 248867 - DNA, 19 bp, Homo sapiens
  siRNA target sequence for HAVCR2 (NM_032782.2,670-688).
gagttacgggactctagat

SEQ ID NO: 248868 - DNA, 19 bp, Homo sapiens
  siRNA target sequence for HAVCR2 (NM_032782.2,683-701).
ctagattggccaatgactt

SEQ ID NO: 248869 - DNA, 19 bp, Homo sapiens
  siRNA target sequence for HAVCR2 (NM_032782.2,761-779).
ggctggctctggctcttat

SEQ ID NO: 248870 - DNA, 19 bp, Homo sapiens
  siRNA target sequence for HAVCR2 (NM_032782.2,783-801).
cggcgctttaattttcaaa

SEQ ID NO: 248871 - DNA, 19 bp, Homo sapiens
  siRNA target sequence for HAVCR2 (NM_032782.2,924-942).
cattgaagagaacgtatat

SEQ ID NO: 248872 - DNA, 19 bp, Homo sapiens
  siRNA target sequence for IL23R (NM_144701.2,113-131).
gcagtaatagccctttaca

SEQ ID NO: 248873 - DNA, 19 bp, Homo sapiens
  siRNA target sequence for IL23R (NM_144701.2,114-132).
cagtaatagccctttacat

SEQ ID NO: 248874 - DNA, 19 bp, Homo sapiens
  siRNA target sequence for IL23R (NM_144701.2,142-160).
ctggtgtcatggaggaatt

SEQ ID NO: 248875 - DNA, 19 bp, Homo sapiens
  siRNA target sequence for IL23R (NM_144701.2,217-235).
gggtatgaatatctctata

SEQ ID NO: 248876 - DNA, 19 bp, Homo sapiens
  siRNA target sequence for IL23R (NM_144701.2,218-236).
ggtatgaatatctctatat

SEQ ID NO: 248877 - DNA, 19 bp, Homo sapiens
  siRNA target sequence for IL23R (NM_144701.2,242-260).
caagcagcaattaagaact

SEQ ID NO: 248878 - DNA, 19 bp, Homo sapiens
  siRNA target sequence for IL23R (NM_144701.2,261-279).
gccaaccaaggaaacttca

SEQ ID NO: 248879 - DNA, 19 bp, Homo sapiens
  siRNA target sequence for IL23R (NM_144701.2,263-281).
caaccaaggaaacttcatt

SEQ ID NO: 248880 - DNA, 19 bp, Homo sapiens
  siRNA target sequence for IL23R (NM_144701.2,316-334).
cacaaggattaataaaaca

SEQ ID NO: 248881 - DNA, 19 bp, Homo sapiens
  siRNA target sequence for IL23R (NM_144701.2,333-351).
caacagctcggctttggta

SEQ ID NO: 248882 - DNA, 19 bp, Homo sapiens
  siRNA target sequence for IL23R (NM_144701.2,336-354).
cagctcggctttggtataa

SEQ ID NO: 248883 - DNA, 19 bp, Homo sapiens
  siRNA target sequence for IL23R (NM_144701.2,338-356).
gctcggctttggtataaaa

SEQ ID NO: 248884 - DNA, 19 bp, Homo sapiens
  siRNA target sequence for IL23R (NM_144701.2,339-357).
ctcggctttggtataaaaa

SEQ ID NO: 248885 - DNA, 19 bp, Homo sapiens
  siRNA target sequence for IL23R (NM_144701.2,341-359).
cggctttggtataaaaact

SEQ ID NO: 248886 - DNA, 19 bp, Homo sapiens
  siRNA target sequence for IL23R (NM_144701.2,392-410).
gctgaatgtcccaaacatt

SEQ ID NO: 248887 - DNA, 19 bp, Homo sapiens
  siRNA target sequence for IL23R (NM_144701.2,422-440).
ctgatatgtggaaaagaca

SEQ ID NO: 248888 - DNA, 19 bp, Homo sapiens
  siRNA target sequence for IL23R (NM_144701.2,480-498).
cctgtgtcatttatgaata

SEQ ID NO: 248889 - DNA, 19 bp, Homo sapiens
  siRNA target sequence for IL23R (NM_144701.2,494-512).
gaatattcaggcaacatga

SEQ ID NO: 248890 - DNA, 19 bp, Homo sapiens
  siRNA target sequence for IL23R (NM_144701.2,531-549).
ggaagctcacctacataga

SEQ ID NO: 248891 - DNA, 19 bp, Homo sapiens
  siRNA target sequence for IL23R (NM_144701.2,552-570).
caaaatacgtggtacatgt

SEQ ID NO: 248892 - DNA, 19 bp, Homo sapiens
  siRNA target sequence for IL23R (NM_144701.2,560-578).
gtggtacatgtgaagagtt

SEQ ID NO: 248893 - DNA, 19 bp, Homo sapiens
  siRNA target sequence for IL23R (NM_144701.2,601-619).
gtatctcacctcaagctat

SEQ ID NO: 248894 - DNA, 19 bp, Homo sapiens
  siRNA target sequence for IL23R (NM_144701.2,625-643).
catctccactgattcatta

SEQ ID NO: 248895 - DNA, 19 bp, Homo sapiens
  siRNA target sequence for IL23R (NM_144701.2,716-734).
caaattcacctggatgata

SEQ ID NO: 248896 - DNA, 19 bp, Homo sapiens
  siRNA target sequence for IL23R (NM_144701.2,728-746).
gatgatatagtgatacctt

SEQ ID NO: 248897 - DNA, 19 bp, Homo sapiens
  siRNA target sequence for IL23R (NM_144701.2,743-761).
ccttctgcagccgtcattt

SEQ ID NO: 248898 - DNA, 19 bp, Homo sapiens
  siRNA target sequence for IL23R (NM_144701.2,762-780).
ccagggctgagactataaa

SEQ ID NO: 248899 - DNA, 19 bp, Homo sapiens
  siRNA target sequence for IL23R (NM_144701.2,763-781).
cagggctgagactataaat

SEQ ID NO: 248900 - DNA, 19 bp, Homo sapiens
  siRNA target sequence for IL23R (NM_144701.2,767-785).
gctgagactataaatgcta

SEQ ID NO: 248901 - DNA, 19 bp, Homo sapiens
  siRNA target sequence for IL23R (NM_144701.2,788-806).
gtgcccaagaccataattt

SEQ ID NO: 248902 - DNA, 19 bp, Homo sapiens
  siRNA target sequence for IL23R (NM_144701.2,810-828).
gggatagtcaaacaacaat

SEQ ID NO: 248903 - DNA, 19 bp, Homo sapiens
  siRNA target sequence for IL23R (NM_144701.2,816-834).
gtcaaacaacaattgaaaa

SEQ ID NO: 248904 - DNA, 19 bp, Homo sapiens
  siRNA target sequence for IL23R (NM_144701.2,850-868).
gagatacaaggctacaaca

SEQ ID NO: 248905 - DNA, 19 bp, Homo sapiens
  siRNA target sequence for IL23R (NM_144701.2,974-992).
caagaaacaggcaaaaggt

SEQ ID NO: 248906 - DNA, 19 bp, Homo sapiens
  siRNA target sequence for IL23R (NM_144701.2,1005-1023).
ggagttcactgttttttca

SEQ ID NO: 248907 - DNA, 19 bp, Homo sapiens
  siRNA target sequence for IL23R (NM_144701.2,1040-1058).
gttccccaggtcacatcaa

SEQ ID NO: 248908 - DNA, 19 bp, Homo sapiens
  siRNA target sequence for IL23R (NM_144701.2,1045-1063).
ccaggtcacatcaaaagca

SEQ ID NO: 248909 - DNA, 19 bp, Homo sapiens
  siRNA target sequence for IL23R (NM_144701.2,1201-1219).
gattgggatatttaacaga

SEQ ID NO: 248910 - DNA, 19 bp, Homo sapiens
  siRNA target sequence for IL23R (NM_144701.2,1221-1239).
cattccgaactgggattaa

SEQ ID NO: 248911 - DNA, 19 bp, Homo sapiens
  siRNA target sequence for IL23R (NM_144701.2,1225-1243).
ccgaactgggattaaaaga

SEQ ID NO: 248912 - DNA, 19 bp, Homo sapiens
  siRNA target sequence for IL23R (NM_144701.2,1226-1244).
cgaactgggattaaaagaa

SEQ ID NO: 248913 - DNA, 19 bp, Homo sapiens
  siRNA target sequence for IL23R (NM_144701.2,1246-1264).
gatcttattgttaatacca

SEQ ID NO: 248914 - DNA, 19 bp, Homo sapiens
  siRNA target sequence for IL23R (NM_144701.2,1277-1295).
gaagatattcctaatatga

SEQ ID NO: 248915 - DNA, 19 bp, Homo sapiens
  siRNA target sequence for IL23R (NM_144701.2,1354-1372).
cagtgagcaggtcctatat

SEQ ID NO: 248916 - DNA, 19 bp, Homo sapiens
  siRNA target sequence for IL23R (NM_144701.2,1380-1398).
ccatgattacagagataaa

SEQ ID NO: 248917 - DNA, 19 bp, Homo sapiens
  siRNA target sequence for IL23R (NM_144701.2,1381-1399).
catgattacagagataaaa

SEQ ID NO: 248918 - DNA, 19 bp, Homo sapiens
  siRNA target sequence for IL23R (NM_144701.2,1476-1494).
cgcaaaactcgctattcga

SEQ ID NO: 248919 - DNA, 19 bp, Homo sapiens
  siRNA target sequence for IL23R (NM_144701.2,1483-1501).
ctcgctattcgacaatact

SEQ ID NO: 248920 - DNA, 19 bp, Homo sapiens
  siRNA target sequence for IL23R (NM_144701.2,1486-1504).
gctattcgacaatactaca

SEQ ID NO: 248921 - DNA, 19 bp, Homo sapiens
  siRNA target sequence for IL23R (NM_144701.2,1492-1510).
cgacaatactacagttgta

SEQ ID NO: 248922 - DNA, 19 bp, Homo sapiens
  siRNA target sequence for IL23R (NM_144701.2,1493-1511).
gacaatactacagttgtat

SEQ ID NO: 248923 - DNA, 19 bp, Homo sapiens
  siRNA target sequence for IL23R (NM_144701.2,1495-1513).
caatactacagttgtatat

SEQ ID NO: 248924 - DNA, 19 bp, Homo sapiens
  siRNA target sequence for IL23R (NM_144701.2,1619-1637).
ccagttgattccttagact

SEQ ID NO: 248925 - DNA, 19 bp, Homo sapiens
  siRNA target sequence for IL23R (NM_144701.2,1629-1647).
ccttagactcaggaaataa

SEQ ID NO: 248926 - DNA, 19 bp, Homo sapiens
  siRNA target sequence for IL23R (NM_144701.2,1725-1743).
gagaattaagcctcatatt

SEQ ID NO: 248927 - DNA, 19 bp, Homo sapiens
  siRNA target sequence for IL23R (NM_144701.2,1727-1745).
gaattaagcctcatattaa

SEQ ID NO: 248928 - DNA, 19 bp, Homo sapiens
  siRNA target sequence for IL23R (NM_144701.2,1817-1835).
gattcacccagtgaaacta

SEQ ID NO: 248929 - DNA, 19 bp, Homo sapiens
  siRNA target sequence for IL23R (NM_144701.2,1875-1893).
gtttggggatcgtgaatga

SEQ ID NO: 248930 - DNA, 19 bp, Homo sapiens
  siRNA target sequence for IL23R (NM_144701.2,1937-1955).
gaaagccacttcaatagga

SEQ ID NO: 248931 - DNA, 19 bp, Homo sapiens
  siRNA target sequence for IMPG1 (NM_001563.2,182-200).
gttcaaggaaccaaagata

SEQ ID NO: 248932 - DNA, 19 bp, Homo sapiens
  siRNA target sequence for IMPG1 (NM_001563.2,202-220).
ctccattaacatataccat

SEQ ID NO: 248933 - DNA, 19 bp, Homo sapiens
  siRNA target sequence for IMPG1 (NM_001563.2,294-312).
caactatgagacgaatatt

SEQ ID NO: 248934 - DNA, 19 bp, Homo sapiens
  siRNA target sequence for IMPG1 (NM_001563.2,297-315).
ctatgagacgaatattcga

SEQ ID NO: 248935 - DNA, 19 bp, Homo sapiens
  siRNA target sequence for IMPG1 (NM_001563.2,353-371).
ccaacgggggttaaagtct

SEQ ID NO: 248936 - DNA, 19 bp, Homo sapiens
  siRNA target sequence for IMPG1 (NM_001563.2,401-419).
gacagtcttcaagcttatt

SEQ ID NO: 248937 - DNA, 19 bp, Homo sapiens
  siRNA target sequence for IMPG1 (NM_001563.2,403-421).
cagtcttcaagcttattat

SEQ ID NO: 248938 - DNA, 19 bp, Homo sapiens
  siRNA target sequence for IMPG1 (NM_001563.2,407-425).
cttcaagcttattatagat

SEQ ID NO: 248939 - DNA, 19 bp, Homo sapiens
  siRNA target sequence for IMPG1 (NM_001563.2,451-469).
ggaagcatatcggatcttt

SEQ ID NO: 248940 - DNA, 19 bp, Homo sapiens
  siRNA target sequence for IMPG1 (NM_001563.2,483-501).
ctgacacaggggaatatca

SEQ ID NO: 248941 - DNA, 19 bp, Homo sapiens
  siRNA target sequence for IMPG1 (NM_001563.2,537-555).
gcctctttgacattggaaa

SEQ ID NO: 248942 - DNA, 19 bp, Homo sapiens
  siRNA target sequence for IMPG1 (NM_001563.2,538-556).
cctctttgacattggaaaa

SEQ ID NO: 248943 - DNA, 19 bp, Homo sapiens
  siRNA target sequence for IMPG1 (NM_001563.2,665-683).
cctggtgaaaccattgtca

SEQ ID NO: 248944 - DNA, 19 bp, Homo sapiens
  siRNA target sequence for IMPG1 (NM_001563.2,668-686).
ggtgaaaccattgtcattt

SEQ ID NO: 248945 - DNA, 19 bp, Homo sapiens
  siRNA target sequence for IMPG1 (NM_001563.2,748-766).
caatgaaattctcgataat

SEQ ID NO: 248946 - DNA, 19 bp, Homo sapiens
  siRNA target sequence for IMPG1 (NM_001563.2,846-864).
gcgtctctctggtaaacca

SEQ ID NO: 248947 - DNA, 19 bp, Homo sapiens
  siRNA target sequence for IMPG1 (NM_001563.2,990-1008).
gatttagaccaaagaaaga

SEQ ID NO: 248948 - DNA, 19 bp, Homo sapiens
  siRNA target sequence for IMPG1 (NM_001563.2,1036-1054).
gcaacttacggccatcttt

SEQ ID NO: 248949 - DNA, 19 bp, Homo sapiens
  siRNA target sequence for IMPG1 (NM_001563.2,1037-1055).
caacttacggccatcttta

SEQ ID NO: 248950 - DNA, 19 bp, Homo sapiens
  siRNA target sequence for IMPG1 (NM_001563.2,1059-1077).
gacacagtgcagaagcaaa

SEQ ID NO: 248951 - DNA, 19 bp, Homo sapiens
  siRNA target sequence for IMPG1 (NM_001563.2,1089-1107).
gtgacctcctgtcttttga

SEQ ID NO: 248952 - DNA, 19 bp, Homo sapiens
  siRNA target sequence for IMPG1 (NM_001563.2,1217-1235).
ctagaggaagaacaatctt

SEQ ID NO: 248953 - DNA, 19 bp, Homo sapiens
  siRNA target sequence for IMPG1 (NM_001563.2,1317-1335).
ccacatcttttgctgttat

SEQ ID NO: 248954 - DNA, 19 bp, Homo sapiens
  siRNA target sequence for IMPG1 (NM_001563.2,1318-1336).
cacatcttttgctgttata

SEQ ID NO: 248955 - DNA, 19 bp, Homo sapiens
  siRNA target sequence for IMPG1 (NM_001563.2,1323-1341).
cttttgctgttataacaga

SEQ ID NO: 248956 - DNA, 19 bp, Homo sapiens
  siRNA target sequence for IMPG1 (NM_001563.2,1466-1484).
gaagctccacctttcttta

SEQ ID NO: 248957 - DNA, 19 bp, Homo sapiens
  siRNA target sequence for IMPG1 (NM_001563.2,1511-1529).
gatcaaggcaccacagata

SEQ ID NO: 248958 - DNA, 19 bp, Homo sapiens
  siRNA target sequence for IMPG1 (NM_001563.2,1537-1555).
cactgaccagacaatgcta

SEQ ID NO: 248959 - DNA, 19 bp, Homo sapiens
  siRNA target sequence for IMPG1 (NM_001563.2,1570-1588).
catccccaccagtgattat

SEQ ID NO: 248960 - DNA, 19 bp, Homo sapiens
  siRNA target sequence for IMPG1 (NM_001563.2,1573-1591).
ccccaccagtgattattct

SEQ ID NO: 248961 - DNA, 19 bp, Homo sapiens
  siRNA target sequence for IMPG1 (NM_001563.2,1656-1674).
gtgcaggtggcgaagatat

SEQ ID NO: 248962 - DNA, 19 bp, Homo sapiens
  siRNA target sequence for IMPG1 (NM_001563.2,1659-1677).
caggtggcgaagatatggt

SEQ ID NO: 248963 - DNA, 19 bp, Homo sapiens
  siRNA target sequence for IMPG1 (NM_001563.2,1799-1817).
cagtatatcaccactagtt

SEQ ID NO: 248964 - DNA, 19 bp, Homo sapiens
  siRNA target sequence for IMPG1 (NM_001563.2,1801-1819).
gtatatcaccactagttct

SEQ ID NO: 248965 - DNA, 19 bp, Homo sapiens
  siRNA target sequence for IMPG1 (NM_001563.2,1839-1857).
gccgagagctggtagtgtt

SEQ ID NO: 248966 - DNA, 19 bp, Homo sapiens
  siRNA target sequence for IMPG1 (NM_001563.2,1844-1862).
gagctggtagtgttcttca

SEQ ID NO: 248967 - DNA, 19 bp, Homo sapiens
  siRNA target sequence for IMPG1 (NM_001563.2,1863-1881).
gtctgcgtgttgctaacat

SEQ ID NO: 248968 - DNA, 19 bp, Homo sapiens
  siRNA target sequence for IMPG1 (NM_001563.2,1928-1946).
gctctggagcaacaattca

SEQ ID NO: 248969 - DNA, 19 bp, Homo sapiens
  siRNA target sequence for IMPG1 (NM_001563.2,1947-1965).
cacagctgctggttccata

SEQ ID NO: 248970 - DNA, 19 bp, Homo sapiens
  siRNA target sequence for IMPG1 (NM_001563.2,1974-1992).
ccaatcttacaggatttaa

SEQ ID NO: 248971 - DNA, 19 bp, Homo sapiens
  siRNA target sequence for IMPG1 (NM_001563.2,1997-2015).
cttgaaatacttaacttca

SEQ ID NO: 248972 - DNA, 19 bp, Homo sapiens
  siRNA target sequence for IMPG1 (NM_001563.2,2016-2034).
gaaacgggagtgtgattgt

SEQ ID NO: 248973 - DNA, 19 bp, Homo sapiens
  siRNA target sequence for IMPG1 (NM_001563.2,2020-2038).
cgggagtgtgattgtgaat

SEQ ID NO: 248974 - DNA, 19 bp, Homo sapiens
  siRNA target sequence for IMPG1 (NM_001563.2,2021-2039).
gggagtgtgattgtgaata

SEQ ID NO: 248975 - DNA, 19 bp, Homo sapiens
  siRNA target sequence for IMPG1 (NM_001563.2,2092-2110).
cggggtcttggaggatttt

SEQ ID NO: 248976 - DNA, 19 bp, Homo sapiens
  siRNA target sequence for IMPG1 (NM_001563.2,2095-2113).
ggtcttggaggattttcgt

SEQ ID NO: 248977 - DNA, 19 bp, Homo sapiens
  siRNA target sequence for IMPG1 (NM_001563.2,2149-2167).
cagctactctctcaacatt

SEQ ID NO: 248978 - DNA, 19 bp, Homo sapiens
  siRNA target sequence for IMPG1 (NM_001563.2,2151-2169).
gctactctctcaacattga

SEQ ID NO: 248979 - DNA, 19 bp, Homo sapiens
  siRNA target sequence for IMPG1 (NM_001563.2,2164-2182).
cattgaaccagctgatcaa

SEQ ID NO: 248980 - DNA, 19 bp, Homo sapiens
  siRNA target sequence for IMPG1 (NM_001563.2,2200-2218).
cctggcctgcggcgaattt

SEQ ID NO: 248981 - DNA, 19 bp, Homo sapiens
  siRNA target sequence for IMPG1 (NM_001563.2,2212-2230).
cgaatttgcccaatgtgta

SEQ ID NO: 248982 - DNA, 19 bp, Homo sapiens
  siRNA target sequence for IMPG1 (NM_001563.2,2399-2417).
gcatacaaaactagtgtta

SEQ ID NO: 248983 - DNA, 19 bp, Homo sapiens
  siRNA target sequence for IMPG1 (NM_001563.2,2468-2486).
gaattactgaccgtagaat

SEQ ID NO: 248984 - DNA, 19 bp, Homo sapiens
  siRNA target sequence for IMPG1 (NM_001563.2,2478-2496).
ccgtagaatatgaagaatt

SEQ ID NO: 248985 - DNA, 19 bp, Homo sapiens
  siRNA target sequence for IMPG1 (NM_001563.2,2479-2497).
cgtagaatatgaagaattt

SEQ ID NO: 248986 - DNA, 19 bp, Homo sapiens
  siRNA target sequence for ITGA2B (NM_000419.2,343-361).
gtgatgagacccgaaatgt

SEQ ID NO: 248987 - DNA, 19 bp, Homo sapiens
  siRNA target sequence for ITGA2B (NM_000419.2,421-439).
gctggagcgacgtcattgt

SEQ ID NO: 248988 - DNA, 19 bp, Homo sapiens
  siRNA target sequence for ITGA2B (NM_000419.2,459-477).
cactggaacgtcctagaaa

SEQ ID NO: 248989 - DNA, 19 bp, Homo sapiens
  siRNA target sequence for ITGA2B (NM_000419.2,464-482).
gaacgtcctagaaaagact

SEQ ID NO: 248990 - DNA, 19 bp, Homo sapiens
  siRNA target sequence for ITGA2B (NM_000419.2,501-519).
cccgtaggtagctgctttt

SEQ ID NO: 248991 - DNA, 19 bp, Homo sapiens
  siRNA target sequence for ITGA2B (NM_000419.2,502-520).
ccgtaggtagctgcttttt

SEQ ID NO: 248992 - DNA, 19 bp, Homo sapiens
  siRNA target sequence for ITGA2B (NM_000419.2,574-592).
ccctgagccgcatttacgt

SEQ ID NO: 248993 - DNA, 19 bp, Homo sapiens
  siRNA target sequence for ITGA2B (NM_000419.2,580-598).
gccgcatttacgtggaaaa

SEQ ID NO: 248994 - DNA, 19 bp, Homo sapiens
  siRNA target sequence for ITGA2B (NM_000419.2,581-599).
ccgcatttacgtggaaaat

SEQ ID NO: 248995 - DNA, 19 bp, Homo sapiens
  siRNA target sequence for ITGA2B (NM_000419.2,583-601).
gcatttacgtggaaaatga

SEQ ID NO: 248996 - DNA, 19 bp, Homo sapiens
  siRNA target sequence for ITGA2B (NM_000419.2,676-694).
gggctcctggcggctatta

SEQ ID NO: 248997 - DNA, 19 bp, Homo sapiens
  siRNA target sequence for ITGA2B (NM_000419.2,677-695).
ggctcctggcggctattat

SEQ ID NO: 248998 - DNA, 19 bp, Homo sapiens
  siRNA target sequence for ITGA2B (NM_000419.2,679-697).
ctcctggcggctattattt

SEQ ID NO: 248999 - DNA, 19 bp, Homo sapiens
  siRNA target sequence for ITGA2B (NM_000419.2,681-699).
cctggcggctattatttct

SEQ ID NO: 249000 - DNA, 19 bp, Homo sapiens
  siRNA target sequence for ITGA2B (NM_000419.2,716-734).
ggctccagttgcggatatt

SEQ ID NO: 249001 - DNA, 19 bp, Homo sapiens
  siRNA target sequence for ITGA2B (NM_000419.2,717-735).
gctccagttgcggatattt

SEQ ID NO: 249002 - DNA, 19 bp, Homo sapiens
  siRNA target sequence for ITGA2B (NM_000419.2,747-765).
cgcccaggcatccttttgt

SEQ ID NO: 249003 - DNA, 19 bp, Homo sapiens
  siRNA target sequence for ITGA2B (NM_000419.2,799-817).
ccagcaacccagagtactt

SEQ ID NO: 249004 - DNA, 19 bp, Homo sapiens
  siRNA target sequence for ITGA2B (NM_000419.2,858-876).
gacggggatctcaacacta

SEQ ID NO: 249005 - DNA, 19 bp, Homo sapiens
  siRNA target sequence for ITGA2B (NM_000419.2,863-881).
ggatctcaacactacagaa

SEQ ID NO: 249006 - DNA, 19 bp, Homo sapiens
  siRNA target sequence for ITGA2B (NM_000419.2,914-932).
cctgggagcggtggaaatt

SEQ ID NO: 249007 - DNA, 19 bp, Homo sapiens
  siRNA target sequence for ITGA2B (NM_000419.2,985-1003).
cgtattttgggcattcagt

SEQ ID NO: 249008 - DNA, 19 bp, Homo sapiens
  siRNA target sequence for ITGA2B (NM_000419.2,1046-1064).
ggtgggcgctccactgtat

SEQ ID NO: 249009 - DNA, 19 bp, Homo sapiens
  siRNA target sequence for ITGA2B (NM_000419.2,1047-1065).
gtgggcgctccactgtata

SEQ ID NO: 249010 - DNA, 19 bp, Homo sapiens
  siRNA target sequence for ITGA2B (NM_000419.2,1051-1069).
gcgctccactgtatatgga

SEQ ID NO: 249011 - DNA, 19 bp, Homo sapiens
  siRNA target sequence for ITGA2B (NM_000419.2,1094-1112).
cgaagtggggcgtgtgtat

SEQ ID NO: 249012 - DNA, 19 bp, Homo sapiens
  siRNA target sequence for ITGA2B (NM_000419.2,1095-1113).
gaagtggggcgtgtgtatt

SEQ ID NO: 249013 - DNA, 19 bp, Homo sapiens
  siRNA target sequence for ITGA2B (NM_000419.2,1227-1245).
cgggatggctacaatgaca

SEQ ID NO: 249014 - DNA, 19 bp, Homo sapiens
  siRNA target sequence for ITGA2B (NM_000419.2,1396-1414).
ccgtagacatcgatgacaa

SEQ ID NO: 249015 - DNA, 19 bp, Homo sapiens
  siRNA target sequence for ITGA2B (NM_000419.2,1502-1520).
gctactggtgcaagattca

SEQ ID NO: 249016 - DNA, 19 bp, Homo sapiens
  siRNA target sequence for ITGA2B (NM_000419.2,1508-1526).
ggtgcaagattcactgaat

SEQ ID NO: 249017 - DNA, 19 bp, Homo sapiens
  siRNA target sequence for ITGA2B (NM_000419.2,1600-1618).
gagccactgggcacaacat

SEQ ID NO: 249018 - DNA, 19 bp, Homo sapiens
  siRNA target sequence for ITGA2B (NM_000419.2,2474-2492).
ctatgagctccacaacaat

SEQ ID NO: 249019 - DNA, 19 bp, Homo sapiens
  siRNA target sequence for ITGA2B (NM_000419.2,2692-2710).
gggatcgcagacagatctt

SEQ ID NO: 249020 - DNA, 19 bp, Homo sapiens
  siRNA target sequence for ITGA2B (NM_000419.2,3003-3021).
gaggagagggccattccaa

SEQ ID NO: 249021 - DNA, 19 bp, Homo sapiens
  siRNA target sequence for ITGA3 (NM_002204.1,377-395).
gactgtgagcggatgaaca

SEQ ID NO: 249022 - DNA, 19 bp, Homo sapiens
  siRNA target sequence for ITGA3 (NM_002204.1,410-428).
gaccctggccatcacatta

SEQ ID NO: 249023 - DNA, 19 bp, Homo sapiens
  siRNA target sequence for ITGA3 (NM_002204.1,412-430).
ccctggccatcacattatt

SEQ ID NO: 249024 - DNA, 19 bp, Homo sapiens
  siRNA target sequence for ITGA3 (NM_002204.1,758-776).
cgcaaggagtgggacttat

SEQ ID NO: 249025 - DNA, 19 bp, Homo sapiens
  siRNA target sequence for ITGA3 (NM_002204.1,760-778).
caaggagtgggacttatct

SEQ ID NO: 249026 - DNA, 19 bp, Homo sapiens
  siRNA target sequence for ITGA3 (NM_002204.1,769-787).
ggacttatctgagtatagt

SEQ ID NO: 249027 - DNA, 19 bp, Homo sapiens
  siRNA target sequence for ITGA3 (NM_002204.1,888-906).
ccccacggcaccgacatat

SEQ ID NO: 249028 - DNA, 19 bp, Homo sapiens
  siRNA target sequence for ITGA3 (NM_002204.1,1092-1110).
gtgccatctatgtcttcat

SEQ ID NO: 249029 - DNA, 19 bp, Homo sapiens
  siRNA target sequence for ITGA3 (NM_002204.1,1263-1281).
gcaaagtgtacatctatca

SEQ ID NO: 249030 - DNA, 19 bp, Homo sapiens
  siRNA target sequence for ITGA3 (NM_002204.1,1309-1327).
gccccagcaggtaatccat

SEQ ID NO: 249031 - DNA, 19 bp, Homo sapiens
  siRNA target sequence for ITGA3 (NM_002204.1,1428-1446).
gcctgtcagaccacattgt

SEQ ID NO: 249032 - DNA, 19 bp, Homo sapiens
  siRNA target sequence for ITGA3 (NM_002204.1,1580-1598).
gccgggaaccccaactaca

SEQ ID NO: 249033 - DNA, 19 bp, Homo sapiens
  siRNA target sequence for ITGA3 (NM_002204.1,2010-2028).
gagacgtccggaaattgct

SEQ ID NO: 249034 - DNA, 19 bp, Homo sapiens
  siRNA target sequence for ITGA3 (NM_002204.1,2150-2168).
gcctgccaagctaatgaga

SEQ ID NO: 249035 - DNA, 19 bp, Homo sapiens
  siRNA target sequence for ITGA3 (NM_002204.1,2359-2377).
ctcgcttagcatggtaaat

SEQ ID NO: 249036 - DNA, 19 bp, Homo sapiens
  siRNA target sequence for ITGA3 (NM_002204.1,2361-2379).
cgcttagcatggtaaatca

SEQ ID NO: 249037 - DNA, 19 bp, Homo sapiens
  siRNA target sequence for ITGA3 (NM_002204.1,2380-2398).
ccggctacaaagcttcttt

SEQ ID NO: 249038 - DNA, 19 bp, Homo sapiens
  siRNA target sequence for ITGA3 (NM_002204.1,2448-2466).
gaagccccctcaagtatga

SEQ ID NO: 249039 - DNA, 19 bp, Homo sapiens
  siRNA target sequence for ITGA3 (NM_002204.1,2451-2469).
gccccctcaagtatgaatt

SEQ ID NO: 249040 - DNA, 19 bp, Homo sapiens
  siRNA target sequence for ITGA3 (NM_002204.1,2615-2633).
ccacctggagaccttatca

SEQ ID NO: 249041 - DNA, 19 bp, Homo sapiens
  siRNA target sequence for ITGA3 (NM_002204.1,2928-2946).
gctgggctaccctattcct

SEQ ID NO: 249042 - DNA, 19 bp, Homo sapiens
  siRNA target sequence for ITGA3 (NM_005501.1,3134-3152).
cggacccgctattatcaga

SEQ ID NO: 249043 - DNA, 19 bp, Homo sapiens
  siRNA target sequence for ITGA3 (NM_005501.1,3135-3153).
ggacccgctattatcagat

SEQ ID NO: 249044 - DNA, 19 bp, Homo sapiens
  siRNA target sequence for ITGA3 (NM_005501.1,3138-3156).
cccgctattatcagatcat

SEQ ID NO: 249045 - DNA, 19 bp, Homo sapiens
  siRNA target sequence for ITGA3 (NM_005501.1,3249-3267).
ggcagactcgggaccaata

SEQ ID NO: 249046 - DNA, 19 bp, Homo sapiens
  siRNA target sequence for ITGA3 (NM_005501.1,3251-3269).
cagactcgggaccaatact

SEQ ID NO: 249047 - DNA, 19 bp, Homo sapiens
  siRNA target sequence for ITGA4 (NM_000885.2,1282-1300).
ctgagagcgcgctgcttta

SEQ ID NO: 249048 - DNA, 19 bp, Homo sapiens
  siRNA target sequence for ITGA4 (NM_000885.2,1438-1456).
gatgcaggatcggaaagaa

SEQ ID NO: 249049 - DNA, 19 bp, Homo sapiens
  siRNA target sequence for ITGA4 (NM_000885.2,1484-1502).
gctgggtagccctaatgga

SEQ ID NO: 249050 - DNA, 19 bp, Homo sapiens
  siRNA target sequence for ITGA4 (NM_000885.2,1506-1524).
ccttgtggaaagacttgtt

SEQ ID NO: 249051 - DNA, 19 bp, Homo sapiens
  siRNA target sequence for ITGA4 (NM_000885.2,1649-1667).
ccccactggtggttgctat

SEQ ID NO: 249052 - DNA, 19 bp, Homo sapiens
  siRNA target sequence for ITGA4 (NM_000885.2,1671-1689).
gtgccccctgatttacgaa

SEQ ID NO: 249053 - DNA, 19 bp, Homo sapiens
  siRNA target sequence for ITGA4 (NM_000885.2,1676-1694).
ccctgatttacgaacagaa

SEQ ID NO: 249054 - DNA, 19 bp, Homo sapiens
  siRNA target sequence for ITGA4 (NM_000885.2,1686-1704).
cgaacagaactgagtaaaa

SEQ ID NO: 249055 - DNA, 19 bp, Homo sapiens
  siRNA target sequence for ITGA4 (NM_000885.2,1705-1723).
gaatagctccgtgttatca

SEQ ID NO: 249056 - DNA, 19 bp, Homo sapiens
  siRNA target sequence for ITGA4 (NM_000885.2,1711-1729).
ctccgtgttatcaagatta

SEQ ID NO: 249057 - DNA, 19 bp, Homo sapiens
  siRNA target sequence for ITGA4 (NM_000885.2,1837-1855).
gctctctttttgtctacaa

SEQ ID NO: 249058 - DNA, 19 bp, Homo sapiens
  siRNA target sequence for ITGA4 (NM_000885.2,1838-1856).
ctctctttttgtctacaat

SEQ ID NO: 249059 - DNA, 19 bp, Homo sapiens
  siRNA target sequence for ITGA4 (NM_000885.2,1842-1860).
ctttttgtctacaatataa

SEQ ID NO: 249060 - DNA, 19 bp, Homo sapiens
  siRNA target sequence for ITGA4 (NM_000885.2,1930-1948).
cagtcggagctggtcattt

SEQ ID NO: 249061 - DNA, 19 bp, Homo sapiens
  siRNA target sequence for ITGA4 (NM_000885.2,1989-2007).
caacatgagcagattggta

SEQ ID NO: 249062 - DNA, 19 bp, Homo sapiens
  siRNA target sequence for ITGA4 (NM_000885.2,1998-2016).
cagattggtaaggcatata

SEQ ID NO: 249063 - DNA, 19 bp, Homo sapiens
  siRNA target sequence for ITGA4 (NM_000885.2,2000-2018).
gattggtaaggcatatata

SEQ ID NO: 249064 - DNA, 19 bp, Homo sapiens
  siRNA target sequence for ITGA4 (NM_000885.2,2004-2022).
ggtaaggcatatatattca

SEQ ID NO: 249065 - DNA, 19 bp, Homo sapiens
  siRNA target sequence for ITGA4 (NM_000885.2,2182-2200).
gagtgtttgtgtacatcaa

SEQ ID NO: 249066 - DNA, 19 bp, Homo sapiens
  siRNA target sequence for ITGA4 (NM_000885.2,2206-2224).
gctcgggagcagtaatgaa

SEQ ID NO: 249067 - DNA, 19 bp, Homo sapiens
  siRNA target sequence for ITGA4 (NM_000885.2,2207-2225).
ctcgggagcagtaatgaat

SEQ ID NO: 249068 - DNA, 19 bp, Homo sapiens
  siRNA target sequence for ITGA4 (NM_000885.2,2241-2259).
ctcgttggaagtgacaaat

SEQ ID NO: 249069 - DNA, 19 bp, Homo sapiens
  siRNA target sequence for ITGA4 (NM_000885.2,2265-2283).
gcaagatttggggaatcta

SEQ ID NO: 249070 - DNA, 19 bp, Homo sapiens
  siRNA target sequence for ITGA4 (NM_000885.2,2266-2284).
caagatttggggaatctat

SEQ ID NO: 249071 - DNA, 19 bp, Homo sapiens
  siRNA target sequence for ITGA4 (NM_000885.2,2275-2293).
gggaatctatagttaatct

SEQ ID NO: 249072 - DNA, 19 bp, Homo sapiens
  siRNA target sequence for ITGA4 (NM_000885.2,2276-2294).
ggaatctatagttaatctt

SEQ ID NO: 249073 - DNA, 19 bp, Homo sapiens
  siRNA target sequence for ITGA4 (NM_000885.2,2352-2370).
gacttgcaaggtgctattt

SEQ ID NO: 249074 - DNA, 19 bp, Homo sapiens
  siRNA target sequence for ITGA4 (NM_000885.2,2354-2372).
cttgcaaggtgctatttat

SEQ ID NO: 249075 - DNA, 19 bp, Homo sapiens
  siRNA target sequence for ITGA4 (NM_000885.2,2407-2425).
ccttctcacagagaattga

SEQ ID NO: 249076 - DNA, 19 bp, Homo sapiens
  siRNA target sequence for ITGA4 (NM_000885.2,2433-2451).
cagatcagcaaatcgttaa

SEQ ID NO: 249077 - DNA, 19 bp, Homo sapiens
  siRNA target sequence for ITGA4 (NM_000885.2,2435-2453).
gatcagcaaatcgttaagt

SEQ ID NO: 249078 - DNA, 19 bp, Homo sapiens
  siRNA target sequence for ITGA4 (NM_000885.2,2441-2459).
caaatcgttaagtatgttt

SEQ ID NO: 249079 - DNA, 19 bp, Homo sapiens
  siRNA target sequence for ITGA4 (NM_000885.2,2452-2470).
gtatgtttggacagtctat

SEQ ID NO: 249080 - DNA, 19 bp, Homo sapiens
  siRNA target sequence for ITGA4 (NM_000885.2,2465-2483).
gtctatatcaggacaaatt

SEQ ID NO: 249081 - DNA, 19 bp, Homo sapiens
  siRNA target sequence for ITGA4 (NM_000885.2,2555-2573).
gacaagacctgtagtaatt

SEQ ID NO: 249082 - DNA, 19 bp, Homo sapiens
  siRNA target sequence for ITGA4 (NM_000885.2,2557-2575).
caagacctgtagtaattgt

SEQ ID NO: 249083 - DNA, 19 bp, Homo sapiens
  siRNA target sequence for ITGA4 (NM_000885.2,2560-2578).
gacctgtagtaattgttga

SEQ ID NO: 249084 - DNA, 19 bp, Homo sapiens
  siRNA target sequence for ITGA4 (NM_000885.2,2590-2608).
gccaccctgagtcagtaaa

SEQ ID NO: 249085 - DNA, 19 bp, Homo sapiens
  siRNA target sequence for ITGA4 (NM_000885.2,2591-2609).
ccaccctgagtcagtaaat

SEQ ID NO: 249086 - DNA, 19 bp, Homo sapiens
  siRNA target sequence for ITGA4 (NM_000885.2,2592-2610).
caccctgagtcagtaaata

SEQ ID NO: 249087 - DNA, 19 bp, Homo sapiens
  siRNA target sequence for ITGA4 (NM_000885.2,2595-2613).
cctgagtcagtaaatagaa

SEQ ID NO: 249088 - DNA, 19 bp, Homo sapiens
  siRNA target sequence for ITGA4 (NM_000885.2,2600-2618).
gtcagtaaatagaacgaaa

SEQ ID NO: 249089 - DNA, 19 bp, Homo sapiens
  siRNA target sequence for ITGA4 (NM_000885.2,2615-2633).
gaaatttgactgtgttgaa

SEQ ID NO: 249090 - DNA, 19 bp, Homo sapiens
  siRNA target sequence for ITGA4 (NM_000885.2,2642-2660).
gccttctgtgtgcatagat

SEQ ID NO: 249091 - DNA, 19 bp, Homo sapiens
  siRNA target sequence for ITGA4 (NM_000885.2,2651-2669).
gtgcatagatctaacactt

SEQ ID NO: 249092 - DNA, 19 bp, Homo sapiens
  siRNA target sequence for ITGA4 (NM_000885.2,2654-2672).
catagatctaacactttgt

SEQ ID NO: 249093 - DNA, 19 bp, Homo sapiens
  siRNA target sequence for ITGA4 (NM_000885.2,2661-2679).
ctaacactttgtttctcat

SEQ ID NO: 249094 - DNA, 19 bp, Homo sapiens
  siRNA target sequence for ITGA4 (NM_000885.2,2728-2746).
gtttggatgtgaacagaaa

SEQ ID NO: 249095 - DNA, 19 bp, Homo sapiens
  siRNA target sequence for ITGA4 (NM_000885.2,2749-2767).
cagagtctccaccaagatt

SEQ ID NO: 249096 - DNA, 19 bp, Homo sapiens
  siRNA target sequence for ITGA4 (NM_000885.2,2768-2786).
ctatttctcttctaatgga

SEQ ID NO: 249097 - DNA, 19 bp, Homo sapiens
  siRNA target sequence for ITGA4 (NM_000885.2,2774-2792).
ctcttctaatggaacttct

SEQ ID NO: 249098 - DNA, 19 bp, Homo sapiens
  siRNA target sequence for ITGA4 (NM_000885.2,2784-2802).
ggaacttctgacgtgatta

SEQ ID NO: 249099 - DNA, 19 bp, Homo sapiens
  siRNA target sequence for ITGA4 (NM_000885.2,2795-2813).
cgtgattacaggaagcata

SEQ ID NO: 249100 - DNA, 19 bp, Homo sapiens
  siRNA target sequence for ITGA4 (NM_000885.2,2839-2857).
gtagaacacatcaagcatt

SEQ ID NO: 249101 - DNA, 19 bp, Homo sapiens
  siRNA target sequence for ITGA4 (NM_000885.2,2882-2900).
cctcaccccaattcagatt

SEQ ID NO: 249102 - DNA, 19 bp, Homo sapiens
  siRNA target sequence for ITGA4 (NM_000885.2,2885-2903).
caccccaattcagattgaa

SEQ ID NO: 249103 - DNA, 19 bp, Homo sapiens
  siRNA target sequence for ITGA4 (NM_000885.2,2919-2937).
ggtcctcatgtcatcagta

SEQ ID NO: 249104 - DNA, 19 bp, Homo sapiens
  siRNA target sequence for ITGA4 (NM_000885.2,2920-2938).
gtcctcatgtcatcagtaa

SEQ ID NO: 249105 - DNA, 19 bp, Homo sapiens
  siRNA target sequence for ITGA4 (NM_000885.2,3092-3110).
gccccatgaaaataaaaca

SEQ ID NO: 249106 - DNA, 19 bp, Homo sapiens
  siRNA target sequence for ITGA4 (NM_000885.2,3114-3132).
cttgctgttgggagtatga

SEQ ID NO: 249107 - DNA, 19 bp, Homo sapiens
  siRNA target sequence for ITGA4 (NM_000885.2,3123-3141).
gggagtatgaagacattga

SEQ ID NO: 249108 - DNA, 19 bp, Homo sapiens
  siRNA target sequence for ITGA4 (NM_000885.2,3127-3145).
gtatgaagacattgatgtt

SEQ ID NO: 249109 - DNA, 19 bp, Homo sapiens
  siRNA target sequence for ITGA4 (NM_000885.2,3187-3205).
cgactctacatgtcaaact

SEQ ID NO: 249110 - DNA, 19 bp, Homo sapiens
  siRNA target sequence for ITGA4 (NM_000885.2,3188-3206).
gactctacatgtcaaacta

SEQ ID NO: 249111 - DNA, 19 bp, Homo sapiens
  siRNA target sequence for ITGA4 (NM_000885.2,3207-3225).
cccgtgggtctttatttca

SEQ ID NO: 249112 - DNA, 19 bp, Homo sapiens
  siRNA target sequence for ITGA4 (NM_000885.2,3299-3317).
ctgcagtattggctatata

SEQ ID NO: 249113 - DNA, 19 bp, Homo sapiens
  siRNA target sequence for ITGA4 (NM_000885.2,3302-3320).
cagtattggctatatatat

SEQ ID NO: 249114 - DNA, 19 bp, Homo sapiens
  siRNA target sequence for ITGA4 (NM_000885.2,3311-3329).
ctatatatatgtagatcat

SEQ ID NO: 249115 - DNA, 19 bp, Homo sapiens
  siRNA target sequence for ITGA4 (NM_000885.2,3327-3345).
catctctcaaggatagata

SEQ ID NO: 249116 - DNA, 19 bp, Homo sapiens
  siRNA target sequence for ITGA4 (NM_000885.2,3382-3400).
cggaagaggacctcagtat

SEQ ID NO: 249117 - DNA, 19 bp, Homo sapiens
  siRNA target sequence for ITGA4 (NM_000885.2,3429-3447).
gaggaaatggacaatctaa

SEQ ID NO: 249118 - DNA, 19 bp, Homo sapiens
  siRNA target sequence for ITGA4 (NM_000885.2,3454-3472).
gcagagtgactgtagcaat

SEQ ID NO: 249119 - DNA, 19 bp, Homo sapiens
  siRNA target sequence for ITGA4 (NM_000885.2,3455-3473).
cagagtgactgtagcaata

SEQ ID NO: 249120 - DNA, 19 bp, Homo sapiens
  siRNA target sequence for ITGA4 (NM_000885.2,3459-3477).
gtgactgtagcaatacctt

SEQ ID NO: 249121 - DNA, 19 bp, Homo sapiens
  siRNA target sequence for ITGA4 (NM_000885.2,3488-3506).
ggttaagctgactgttcat

SEQ ID NO: 249122 - DNA, 19 bp, Homo sapiens
  siRNA target sequence for ITGA4 (NM_000885.2,3497-3515).
gactgttcatgggtttgta

SEQ ID NO: 249123 - DNA, 19 bp, Homo sapiens
  siRNA target sequence for ITGA4 (NM_000885.2,3499-3517).
ctgttcatgggtttgtaaa

SEQ ID NO: 249124 - DNA, 19 bp, Homo sapiens
  siRNA target sequence for ITGA4 (NM_000885.2,3509-3527).
gtttgtaaacccaacttca

SEQ ID NO: 249125 - DNA, 19 bp, Homo sapiens
  siRNA target sequence for ITGA4 (NM_000885.2,3628-3646).
ccaatgttagtgtggaaat

SEQ ID NO: 249126 - DNA, 19 bp, Homo sapiens
  siRNA target sequence for ITGA4 (NM_000885.2,3629-3647).
caatgttagtgtggaaata

SEQ ID NO: 249127 - DNA, 19 bp, Homo sapiens
  siRNA target sequence for ITGA4 (NM_000885.2,3641-3659).
ggaaataatggtaccaaat

SEQ ID NO: 249128 - DNA, 19 bp, Homo sapiens
  siRNA target sequence for ITGA4 (NM_000885.2,3642-3660).
gaaataatggtaccaaatt

SEQ ID NO: 249129 - DNA, 19 bp, Homo sapiens
  siRNA target sequence for ITGA4 (NM_000885.2,3667-3685).
gcccccaaactgataagct

SEQ ID NO: 249130 - DNA, 19 bp, Homo sapiens
  siRNA target sequence for ITGA4 (NM_000885.2,3751-3769).
gtgcattagagcagcaaaa

SEQ ID NO: 249131 - DNA, 19 bp, Homo sapiens
  siRNA target sequence for ITGA4 (NM_000885.2,3753-3771).
gcattagagcagcaaaaga

SEQ ID NO: 249132 - DNA, 19 bp, Homo sapiens
  siRNA target sequence for ITGA4 (NM_000885.2,3792-3810).
ggcatagtccggttcttgt

SEQ ID NO: 249133 - DNA, 19 bp, Homo sapiens
  siRNA target sequence for ITGA4 (NM_000885.2,3819-3837).
gataagaggctattgtact

SEQ ID NO: 249134 - DNA, 19 bp, Homo sapiens
  siRNA target sequence for ITGA4 (NM_000885.2,3826-3844).
ggctattgtactgcataaa

SEQ ID NO: 249135 - DNA, 19 bp, Homo sapiens
  siRNA target sequence for ITGA4 (NM_000885.2,3827-3845).
gctattgtactgcataaaa

SEQ ID NO: 249136 - DNA, 19 bp, Homo sapiens
  siRNA target sequence for ITGA4 (NM_000885.2,4040-4058).
gaatgttgcgcatgttcta

SEQ ID NO: 249137 - DNA, 19 bp, Homo sapiens
  siRNA target sequence for ITGA4 (NM_000885.2,4089-4107).
cgttatttcaccatagtga

SEQ ID NO: 249138 - DNA, 19 bp, Homo sapiens
  siRNA target sequence for ITGA4 (NM_000885.2,4168-4186).
ggaaggctggcttctttaa

SEQ ID NO: 249139 - DNA, 19 bp, Homo sapiens
  siRNA target sequence for ITGA4 (NM_000885.2,4196-4214).
caaatctatcctacaagaa

SEQ ID NO: 249140 - DNA, 19 bp, Homo sapiens
  siRNA target sequence for ITGA4 (NM_000885.2,4201-4219).
ctatcctacaagaagaaaa

SEQ ID NO: 249141 - DNA, 19 bp, Homo sapiens
  siRNA target sequence for ITGA4 (NM_000885.2,4225-4243).
gagacagttggagttatat

SEQ ID NO: 249142 - DNA, 19 bp, Homo sapiens
  siRNA target sequence for ITGA5 (NM_002205.1,258-276).
ggagcacccaaggctaata

SEQ ID NO: 249143 - DNA, 19 bp, Homo sapiens
  siRNA target sequence for ITGA5 (NM_002205.1,261-279).
gcacccaaggctaatacca

SEQ ID NO: 249144 - DNA, 19 bp, Homo sapiens
  siRNA target sequence for ITGA5 (NM_002205.1,342-360).
cagtgcacccccattgaat

SEQ ID NO: 249145 - DNA, 19 bp, Homo sapiens
  siRNA target sequence for ITGA5 (NM_002205.1,443-461).
gtggttcggggcaacagtt

SEQ ID NO: 249146 - DNA, 19 bp, Homo sapiens
  siRNA target sequence for ITGA5 (NM_002205.1,550-568).
gctacctctccacagataa

SEQ ID NO: 249147 - DNA, 19 bp, Homo sapiens
  siRNA target sequence for ITGA5 (NM_002205.1,591-609).
gcaccctgccgctcagatt

SEQ ID NO: 249148 - DNA, 19 bp, Homo sapiens
  siRNA target sequence for ITGA5 (NM_002205.1,668-686).
gactggccgtgtggtttta

SEQ ID NO: 249149 - DNA, 19 bp, Homo sapiens
  siRNA target sequence for ITGA5 (NM_002205.1,830-848).
cagctacctaggatactct

SEQ ID NO: 249150 - DNA, 19 bp, Homo sapiens
  siRNA target sequence for ITGA5 (NM_002205.1,849-867).
gtggctgttggtgaattca

SEQ ID NO: 249151 - DNA, 19 bp, Homo sapiens
  siRNA target sequence for ITGA5 (NM_002205.1,851-869).
ggctgttggtgaattcagt

SEQ ID NO: 249152 - DNA, 19 bp, Homo sapiens
  siRNA target sequence for ITGA5 (NM_002205.1,938-956).
ccttaatggctcagacatt

SEQ ID NO: 249153 - DNA, 19 bp, Homo sapiens
  siRNA target sequence for ITGA5 (NM_002205.1,957-975).
cgatccctctacaacttct

SEQ ID NO: 249154 - DNA, 19 bp, Homo sapiens
  siRNA target sequence for ITGA5 (NM_002205.1,1168-1186).
ccctcactggccatgatga

SEQ ID NO: 249155 - DNA, 19 bp, Homo sapiens
  siRNA target sequence for ITGA5 (NM_002205.1,1172-1190).
cactggccatgatgagttt

SEQ ID NO: 249156 - DNA, 19 bp, Homo sapiens
  siRNA target sequence for ITGA5 (NM_002205.1,1283-1301).
ccagcagggagtagtgttt

SEQ ID NO: 249157 - DNA, 19 bp, Homo sapiens
  siRNA target sequence for ITGA5 (NM_002205.1,1286-1304).
gcagggagtagtgtttgta

SEQ ID NO: 249158 - DNA, 19 bp, Homo sapiens
  siRNA target sequence for ITGA5 (NM_002205.1,1372-1390).
gccacaccccagacttctt

SEQ ID NO: 249159 - DNA, 19 bp, Homo sapiens
  siRNA target sequence for ITGA5 (NM_002205.1,1585-1603).
cctgcatcaaccttagctt

SEQ ID NO: 249160 - DNA, 19 bp, Homo sapiens
  siRNA target sequence for ITGA5 (NM_002205.1,1645-1663).
gtttcacagtggaacttca

SEQ ID NO: 249161 - DNA, 19 bp, Homo sapiens
  siRNA target sequence for ITGA5 (NM_002205.1,1794-1812).
ctcaggaacgagtcagaat

SEQ ID NO: 249162 - DNA, 19 bp, Homo sapiens
  siRNA target sequence for ITGA5 (NM_002205.1,1796-1814).
caggaacgagtcagaattt

SEQ ID NO: 249163 - DNA, 19 bp, Homo sapiens
  siRNA target sequence for ITGA5 (NM_002205.1,1799-1817).
gaacgagtcagaatttcga

SEQ ID NO: 249164 - DNA, 19 bp, Homo sapiens
  siRNA target sequence for ITGA5 (NM_002205.1,1892-1910).
caggccagccctacattat

SEQ ID NO: 249165 - DNA, 19 bp, Homo sapiens
  siRNA target sequence for ITGA5 (NM_002205.1,2005-2023).
gggagcagaaccatgtgta

SEQ ID NO: 249166 - DNA, 19 bp, Homo sapiens
  siRNA target sequence for ITGA5 (NM_002205.1,2021-2039).
gtacctgggtgacaagaat

SEQ ID NO: 249167 - DNA, 19 bp, Homo sapiens
  siRNA target sequence for ITGA5 (NM_002205.1,2278-2296).
ctcatctccgggacactaa

SEQ ID NO: 249168 - DNA, 19 bp, Homo sapiens
  siRNA target sequence for ITGA5 (NM_002205.1,2280-2298).
catctccgggacactaaga

SEQ ID NO: 249169 - DNA, 19 bp, Homo sapiens
  siRNA target sequence for ITGA5 (NM_002205.1,2598-2616).
ctatatgtgaccagagtta

SEQ ID NO: 249170 - DNA, 19 bp, Homo sapiens
  siRNA target sequence for ITGA5 (NM_002205.1,2632-2650).
ccaccaatcaccccattaa

SEQ ID NO: 249171 - DNA, 19 bp, Homo sapiens
  siRNA target sequence for ITGA5 (NM_002205.1,2755-2773).
gcccggaggctgagtgttt

SEQ ID NO: 249172 - DNA, 19 bp, Homo sapiens
  siRNA target sequence for ITGA5 (NM_002205.1,2757-2775).
ccggaggctgagtgtttca

SEQ ID NO: 249173 - DNA, 19 bp, Homo sapiens
  siRNA target sequence for ITGA5 (NM_002205.1,2838-2856).
cgagtctgggccaagactt

SEQ ID NO: 249174 - DNA, 19 bp, Homo sapiens
  siRNA target sequence for ITGA5 (NM_002205.1,2891-2909).
gtgtgaggctgtgtacaaa

SEQ ID NO: 249175 - DNA, 19 bp, Homo sapiens
  siRNA target sequence for ITGA5 (NM_002205.1,3122-3140).
caccgccatggaaaaagct

SEQ ID NO: 249176 - DNA, 19 bp, Homo sapiens
  siRNA target sequence for ITGA6 (NM_000210.1,204-222).
ctcggcgcagccttcaact

SEQ ID NO: 249177 - DNA, 19 bp, Homo sapiens
  siRNA target sequence for ITGA6 (NM_000210.1,239-257).
caacgtgatccggaaatat

SEQ ID NO: 249178 - DNA, 19 bp, Homo sapiens
  siRNA target sequence for ITGA6 (NM_000210.1,242-260).
cgtgatccggaaatatgga

SEQ ID NO: 249179 - DNA, 19 bp, Homo sapiens
  siRNA target sequence for ITGA6 (NM_000210.1,427-445).
gcacgcggatcgagtttga

SEQ ID NO: 249180 - DNA, 19 bp, Homo sapiens
  siRNA target sequence for ITGA6 (NM_000210.1,428-446).
cacgcggatcgagtttgat

SEQ ID NO: 249181 - DNA, 19 bp, Homo sapiens
  siRNA target sequence for ITGA6 (NM_000210.1,430-448).
cgcggatcgagtttgataa

SEQ ID NO: 249182 - DNA, 19 bp, Homo sapiens
  siRNA target sequence for ITGA6 (NM_000210.1,433-451).
ggatcgagtttgataacga

SEQ ID NO: 249183 - DNA, 19 bp, Homo sapiens
  siRNA target sequence for ITGA6 (NM_000210.1,434-452).
gatcgagtttgataacgat

SEQ ID NO: 249184 - DNA, 19 bp, Homo sapiens
  siRNA target sequence for ITGA6 (NM_000210.1,540-558).
gctcaccgatatgaaaaaa

SEQ ID NO: 249185 - DNA, 19 bp, Homo sapiens
  siRNA target sequence for ITGA6 (NM_000210.1,559-577).
ggcagcatgttaatacgaa

SEQ ID NO: 249186 - DNA, 19 bp, Homo sapiens
  siRNA target sequence for ITGA6 (NM_000210.1,581-599).
ggaatcccgagacatcttt

SEQ ID NO: 249187 - DNA, 19 bp, Homo sapiens
  siRNA target sequence for ITGA6 (NM_000210.1,593-611).
catctttgggcggtgttat

SEQ ID NO: 249188 - DNA, 19 bp, Homo sapiens
  siRNA target sequence for ITGA6 (NM_000210.1,631-649).
ggattgaagacgatatgga

SEQ ID NO: 249189 - DNA, 19 bp, Homo sapiens
  siRNA target sequence for ITGA6 (NM_000210.1,632-650).
gattgaagacgatatggat

SEQ ID NO: 249190 - DNA, 19 bp, Homo sapiens
  siRNA target sequence for ITGA6 (NM_000210.1,653-671).
gggagattggagcttttgt

SEQ ID NO: 249191 - DNA, 19 bp, Homo sapiens
  siRNA target sequence for ITGA6 (NM_000210.1,717-735).
ggtgtagcagctactttta

SEQ ID NO: 249192 - DNA, 19 bp, Homo sapiens
  siRNA target sequence for ITGA6 (NM_000210.1,726-744).
gctacttttactaaagact

SEQ ID NO: 249193 - DNA, 19 bp, Homo sapiens
  siRNA target sequence for ITGA6 (NM_000210.1,872-890).
gactgagcatgatgaaagt

SEQ ID NO: 249194 - DNA, 19 bp, Homo sapiens
  siRNA target sequence for ITGA6 (NM_000210.1,898-916).
ctgttcctgctaacagtta

SEQ ID NO: 249195 - DNA, 19 bp, Homo sapiens
  siRNA target sequence for ITGA6 (NM_000210.1,906-924).
gctaacagttacttaggtt

SEQ ID NO: 249196 - DNA, 19 bp, Homo sapiens
  siRNA target sequence for ITGA6 (NM_000210.1,907-925).
ctaacagttacttaggttt

SEQ ID NO: 249197 - DNA, 19 bp, Homo sapiens
  siRNA target sequence for ITGA6 (NM_000210.1,1052-1070).
ccctgagcacatattcgat

SEQ ID NO: 249198 - DNA, 19 bp, Homo sapiens
  siRNA target sequence for ITGA6 (NM_000210.1,1108-1126).
cggtggtggacctcaacaa

SEQ ID NO: 249199 - DNA, 19 bp, Homo sapiens
  siRNA target sequence for ITGA6 (NM_000210.1,1127-1145).
ggatgggtggcaagatata

SEQ ID NO: 249200 - DNA, 19 bp, Homo sapiens
  siRNA target sequence for ITGA6 (NM_000210.1,1131-1149).
gggtggcaagatatagtta

SEQ ID NO: 249201 - DNA, 19 bp, Homo sapiens
  siRNA target sequence for ITGA6 (NM_000210.1,1188-1206).
ggaggtgcagtgtatgtct

SEQ ID NO: 249202 - DNA, 19 bp, Homo sapiens
  siRNA target sequence for ITGA6 (NM_000210.1,1194-1212).
gcagtgtatgtctacatga

SEQ ID NO: 249203 - DNA, 19 bp, Homo sapiens
  siRNA target sequence for ITGA6 (NM_000210.1,1214-1232).
ccagcaaggcagatggaat

SEQ ID NO: 249204 - DNA, 19 bp, Homo sapiens
  siRNA target sequence for ITGA6 (NM_000210.1,1241-1259).
gccaattcgtcttaatgga

SEQ ID NO: 249205 - DNA, 19 bp, Homo sapiens
  siRNA target sequence for ITGA6 (NM_000210.1,1242-1260).
ccaattcgtcttaatggaa

SEQ ID NO: 249206 - DNA, 19 bp, Homo sapiens
  siRNA target sequence for ITGA6 (NM_000210.1,1339-1357).
gagctccgtatgatgactt

SEQ ID NO: 249207 - DNA, 19 bp, Homo sapiens
  siRNA target sequence for ITGA6 (NM_000210.1,1415-1433).
ggttctcaagggtatatca

SEQ ID NO: 249208 - DNA, 19 bp, Homo sapiens
  siRNA target sequence for ITGA6 (NM_000210.1,1424-1442).
gggtatatcaccttatttt

SEQ ID NO: 249209 - DNA, 19 bp, Homo sapiens
  siRNA target sequence for ITGA6 (NM_000210.1,1434-1452).
ccttattttggatattcaa

SEQ ID NO: 249210 - DNA, 19 bp, Homo sapiens
  siRNA target sequence for ITGA6 (NM_000210.1,1508-1526).
cctctcagattcagtaact

SEQ ID NO: 249211 - DNA, 19 bp, Homo sapiens
  siRNA target sequence for ITGA6 (NM_000210.1,1509-1527).
ctctcagattcagtaacta

SEQ ID NO: 249212 - DNA, 19 bp, Homo sapiens
  siRNA target sequence for ITGA6 (NM_000210.1,1542-1560).
cctgtgattaatattcaga

SEQ ID NO: 249213 - DNA, 19 bp, Homo sapiens
  siRNA target sequence for ITGA6 (NM_000210.1,1568-1586).
cacagtaactcctaacaga

SEQ ID NO: 249214 - DNA, 19 bp, Homo sapiens
  siRNA target sequence for ITGA6 (NM_000210.1,1570-1588).
cagtaactcctaacagaat

SEQ ID NO: 249215 - DNA, 19 bp, Homo sapiens
  siRNA target sequence for ITGA6 (NM_000210.1,1671-1689).
cccgctggttataatcctt

SEQ ID NO: 249216 - DNA, 19 bp, Homo sapiens
  siRNA target sequence for ITGA6 (NM_000210.1,1675-1693).
ctggttataatccttcaat

SEQ ID NO: 249217 - DNA, 19 bp, Homo sapiens
  siRNA target sequence for ITGA6 (NM_000210.1,1781-1799).
gcccaaatatactcaagaa

SEQ ID NO: 249218 - DNA, 19 bp, Homo sapiens
  siRNA target sequence for ITGA6 (NM_000210.1,1783-1801).
ccaaatatactcaagaact

SEQ ID NO: 249219 - DNA, 19 bp, Homo sapiens
  siRNA target sequence for ITGA6 (NM_000210.1,1784-1802).
caaatatactcaagaacta

SEQ ID NO: 249220 - DNA, 19 bp, Homo sapiens
  siRNA target sequence for ITGA6 (NM_000210.1,1843-1861).
ccctgtggctacaggataa

SEQ ID NO: 249221 - DNA, 19 bp, Homo sapiens
  siRNA target sequence for ITGA6 (NM_000210.1,1844-1862).
cctgtggctacaggataat

SEQ ID NO: 249222 - DNA, 19 bp, Homo sapiens
  siRNA target sequence for ITGA6 (NM_000210.1,1845-1863).
ctgtggctacaggataata

SEQ ID NO: 249223 - DNA, 19 bp, Homo sapiens
  siRNA target sequence for ITGA6 (NM_000210.1,1850-1868).
gctacaggataatatcaga

SEQ ID NO: 249224 - DNA, 19 bp, Homo sapiens
  siRNA target sequence for ITGA6 (NM_000210.1,1854-1872).
caggataatatcagagata

SEQ ID NO: 249225 - DNA, 19 bp, Homo sapiens
  siRNA target sequence for ITGA6 (NM_000210.1,1877-1895).
gcgtcccattcccataact

SEQ ID NO: 249226 - DNA, 19 bp, Homo sapiens
  siRNA target sequence for ITGA6 (NM_000210.1,1922-1940).
ctctcgtaggcgagtgaat

SEQ ID NO: 249227 - DNA, 19 bp, Homo sapiens
  siRNA target sequence for ITGA6 (NM_000210.1,1927-1945).
gtaggcgagtgaattcact

SEQ ID NO: 249228 - DNA, 19 bp, Homo sapiens
  siRNA target sequence for ITGA6 (NM_000210.1,1981-1999).
ccaagacagctcatattga

SEQ ID NO: 249229 - DNA, 19 bp, Homo sapiens
  siRNA target sequence for ITGA6 (NM_000210.1,1987-2005).
cagctcatattgatgttca

SEQ ID NO: 249230 - DNA, 19 bp, Homo sapiens
  siRNA target sequence for ITGA6 (NM_000210.1,1990-2008).
ctcatattgatgttcactt

SEQ ID NO: 249231 - DNA, 19 bp, Homo sapiens
  siRNA target sequence for ITGA6 (NM_000210.1,2025-2043).
ggagacgacaatgtatgta

SEQ ID NO: 249232 - DNA, 19 bp, Homo sapiens
  siRNA target sequence for ITGA6 (NM_000210.1,2026-2044).
gagacgacaatgtatgtaa

SEQ ID NO: 249233 - DNA, 19 bp, Homo sapiens
  siRNA target sequence for ITGA6 (NM_000210.1,2041-2059).
gtaacagcaaccttaaact

SEQ ID NO: 249234 - DNA, 19 bp, Homo sapiens
  siRNA target sequence for ITGA6 (NM_000210.1,2074-2092).
gcacccgagaaggaaatca

SEQ ID NO: 249235 - DNA, 19 bp, Homo sapiens
  siRNA target sequence for ITGA6 (NM_000210.1,2125-2143).
gtgtaccagaactagttct

SEQ ID NO: 249236 - DNA, 19 bp, Homo sapiens
  siRNA target sequence for ITGA6 (NM_000210.1,2153-2171).
gaaggatattgctttagaa

SEQ ID NO: 249237 - DNA, 19 bp, Homo sapiens
  siRNA target sequence for ITGA6 (NM_000210.1,2230-2248).
cccatgaggctaaactgat

SEQ ID NO: 249238 - DNA, 19 bp, Homo sapiens
  siRNA target sequence for ITGA6 (NM_000210.1,2231-2249).
ccatgaggctaaactgatt

SEQ ID NO: 249239 - DNA, 19 bp, Homo sapiens
  siRNA target sequence for ITGA6 (NM_000210.1,2251-2269).
caacgtttccagacacttt

SEQ ID NO: 249240 - DNA, 19 bp, Homo sapiens
  siRNA target sequence for ITGA6 (NM_000210.1,2273-2291).
ctattctgcatatagagaa

SEQ ID NO: 249241 - DNA, 19 bp, Homo sapiens
  siRNA target sequence for ITGA6 (NM_000210.1,2358-2376).
gagctcggaaatcctttta

SEQ ID NO: 249242 - DNA, 19 bp, Homo sapiens
  siRNA target sequence for ITGA6 (NM_000210.1,2363-2381).
cggaaatccttttaaaaga

SEQ ID NO: 249243 - DNA, 19 bp, Homo sapiens
  siRNA target sequence for ITGA6 (NM_000210.1,2391-2409).
gtcactttttatttggttt

SEQ ID NO: 249244 - DNA, 19 bp, Homo sapiens
  siRNA target sequence for ITGA6 (NM_000210.1,2447-2465).
ggatattaatctgaagtta

SEQ ID NO: 249245 - DNA, 19 bp, Homo sapiens
  siRNA target sequence for ITGA6 (NM_000210.1,2470-2488).
caacaagcaatcaagataa

SEQ ID NO: 249246 - DNA, 19 bp, Homo sapiens
  siRNA target sequence for ITGA6 (NM_000210.1,2484-2502).
gataatttggctccaatta

SEQ ID NO: 249247 - DNA, 19 bp, Homo sapiens
  siRNA target sequence for ITGA6 (NM_000210.1,2539-2557).
cggtctcgggagttgctaa

SEQ ID NO: 249248 - DNA, 19 bp, Homo sapiens
  siRNA target sequence for ITGA6 (NM_000210.1,2540-2558).
ggtctcgggagttgctaaa

SEQ ID NO: 249249 - DNA, 19 bp, Homo sapiens
  siRNA target sequence for ITGA6 (NM_000210.1,2543-2561).
ctcgggagttgctaaacct

SEQ ID NO: 249250 - DNA, 19 bp, Homo sapiens
  siRNA target sequence for ITGA6 (NM_000210.1,2592-2610).
ggcgagcaagctatgaaat

SEQ ID NO: 249251 - DNA, 19 bp, Homo sapiens
  siRNA target sequence for ITGA6 (NM_000210.1,2622-2640).
gtgggaagtttaatagagt

SEQ ID NO: 249252 - DNA, 19 bp, Homo sapiens
  siRNA target sequence for ITGA6 (NM_000210.1,2624-2642).
gggaagtttaatagagtat

SEQ ID NO: 249253 - DNA, 19 bp, Homo sapiens
  siRNA target sequence for ITGA6 (NM_000210.1,2639-2657).
gtatgaattcagggtaata

SEQ ID NO: 249254 - DNA, 19 bp, Homo sapiens
  siRNA target sequence for ITGA6 (NM_000210.1,2650-2668).
gggtaataaacttaggtaa

SEQ ID NO: 249255 - DNA, 19 bp, Homo sapiens
  siRNA target sequence for ITGA6 (NM_000210.1,2651-2669).
ggtaataaacttaggtaaa

SEQ ID NO: 249256 - DNA, 19 bp, Homo sapiens
  siRNA target sequence for ITGA6 (NM_000210.1,2660-2678).
cttaggtaaacctcttaca

SEQ ID NO: 249257 - DNA, 19 bp, Homo sapiens
  siRNA target sequence for ITGA6 (NM_000210.1,2685-2703).
ggcacagcaaccttgaaca

SEQ ID NO: 249258 - DNA, 19 bp, Homo sapiens
  siRNA target sequence for ITGA6 (NM_000210.1,2860-2878).
ctgaaaaacagatagatga

SEQ ID NO: 249259 - DNA, 19 bp, Homo sapiens
  siRNA target sequence for ITGA6 (NM_000210.1,2877-2895).
gataacagaaaattttctt

SEQ ID NO: 249260 - DNA, 19 bp, Homo sapiens
  siRNA target sequence for ITGA6 (NM_000210.1,2979-2997).
gacagcaaggcgtctctta

SEQ ID NO: 249261 - DNA, 19 bp, Homo sapiens
  siRNA target sequence for ITGA6 (NM_000210.1,2981-2999).
cagcaaggcgtctcttatt

SEQ ID NO: 249262 - DNA, 19 bp, Homo sapiens
  siRNA target sequence for ITGA6 (NM_000210.1,2983-3001).
gcaaggcgtctcttatttt

SEQ ID NO: 249263 - DNA, 19 bp, Homo sapiens
  siRNA target sequence for ITGA6 (NM_000210.1,3093-3111).
gctgctgccgaaaatatca

SEQ ID NO: 249264 - DNA, 19 bp, Homo sapiens
  siRNA target sequence for ITGA6 (NM_000210.1,3220-3238).
ggatcttgatgcttgcttt

SEQ ID NO: 249265 - DNA, 19 bp, Homo sapiens
  siRNA target sequence for ITGA6 (NM_000210.1,3277-3295).
gaaataagaaagatcatta

SEQ ID NO: 249266 - DNA, 19 bp, Homo sapiens
  siRNA target sequence for ITGA6 (NM_000210.1,3323-3341).
ccatgctcagccatctgat

SEQ ID NO: 249267 - DNA, 19 bp, Homo sapiens
  siRNA target sequence for ITGA6 (NM_000210.1,3324-3342).
catgctcagccatctgata

SEQ ID NO: 249268 - DNA, 19 bp, Homo sapiens
  siRNA target sequence for ITGA7 (NM_002206.1,199-217).
ccgggatttgctacctttt

SEQ ID NO: 249269 - DNA, 19 bp, Homo sapiens
  siRNA target sequence for ITGA7 (NM_002206.1,250-268).
gggctgtcgccttcaatct

SEQ ID NO: 249270 - DNA, 19 bp, Homo sapiens
  siRNA target sequence for ITGA7 (NM_002206.1,493-511).
gagctgatatgcaaaagga

SEQ ID NO: 249271 - DNA, 19 bp, Homo sapiens
  siRNA target sequence for ITGA7 (NM_002206.1,556-574).
ggcctgggggcaagattgt

SEQ ID NO: 249272 - DNA, 19 bp, Homo sapiens
  siRNA target sequence for ITGA7 (NM_002206.1,557-575).
gcctgggggcaagattgtt

SEQ ID NO: 249273 - DNA, 19 bp, Homo sapiens
  siRNA target sequence for ITGA7 (NM_002206.1,621-639).
ctggagacgcgggatatga

SEQ ID NO: 249274 - DNA, 19 bp, Homo sapiens
  siRNA target sequence for ITGA7 (NM_002206.1,623-641).
ggagacgcgggatatgatt

SEQ ID NO: 249275 - DNA, 19 bp, Homo sapiens
  siRNA target sequence for ITGA7 (NM_002206.1,810-828).
ccaggaacctataattgga

SEQ ID NO: 249276 - DNA, 19 bp, Homo sapiens
  siRNA target sequence for ITGA7 (NM_002206.1,869-887).
cgaccagctggtgtataaa

SEQ ID NO: 249277 - DNA, 19 bp, Homo sapiens
  siRNA target sequence for ITGA7 (NM_002206.1,872-890).
ccagctggtgtataaaact

SEQ ID NO: 249278 - DNA, 19 bp, Homo sapiens
  siRNA target sequence for ITGA7 (NM_002206.1,873-891).
cagctggtgtataaaactt

SEQ ID NO: 249279 - DNA, 19 bp, Homo sapiens
  siRNA target sequence for ITGA7 (NM_002206.1,932-950).
ggccctcaatagctactta

SEQ ID NO: 249280 - DNA, 19 bp, Homo sapiens
  siRNA target sequence for ITGA7 (NM_002206.1,944-962).
ctacttaggcttctctatt

SEQ ID NO: 249281 - DNA, 19 bp, Homo sapiens
  siRNA target sequence for ITGA7 (NM_002206.1,1178-1196).
gggtgccccctacttcttt

SEQ ID NO: 249282 - DNA, 19 bp, Homo sapiens
  siRNA target sequence for ITGA7 (NM_002206.1,1180-1198).
gtgccccctacttctttga

SEQ ID NO: 249283 - DNA, 19 bp, Homo sapiens
  siRNA target sequence for ITGA7 (NM_002206.1,1221-1239).
gctgtgtatgtgtacttga

SEQ ID NO: 249284 - DNA, 19 bp, Homo sapiens
  siRNA target sequence for ITGA7 (NM_002206.1,1222-1240).
ctgtgtatgtgtacttgaa

SEQ ID NO: 249285 - DNA, 19 bp, Homo sapiens
  siRNA target sequence for ITGA7 (NM_002206.1,1488-1506).
ctgtcaggcagcttggata

SEQ ID NO: 249286 - DNA, 19 bp, Homo sapiens
  siRNA target sequence for ITGA7 (NM_002206.1,1592-1610).
ctcccatgaggtctctatt

SEQ ID NO: 249287 - DNA, 19 bp, Homo sapiens
  siRNA target sequence for ITGA7 (NM_002206.1,1595-1613).
ccatgaggtctctattgct

SEQ ID NO: 249288 - DNA, 19 bp, Homo sapiens
  siRNA target sequence for ITGA7 (NM_002206.1,1671-1689).
gacctaagggtctgtttca

SEQ ID NO: 249289 - DNA, 19 bp, Homo sapiens
  siRNA target sequence for ITGA7 (NM_002206.1,1727-1745).
ggccctggactatgtgtta

SEQ ID NO: 249290 - DNA, 19 bp, Homo sapiens
  siRNA target sequence for ITGA7 (NM_002206.1,1892-1910).
gctccaggaaaatgtcaaa

SEQ ID NO: 249291 - DNA, 19 bp, Homo sapiens
  siRNA target sequence for ITGA7 (NM_002206.1,1913-1931).
caagcttcgggccattgta

SEQ ID NO: 249292 - DNA, 19 bp, Homo sapiens
  siRNA target sequence for ITGA7 (NM_002206.1,2135-2153).
cagcgacacggaattccaa

SEQ ID NO: 249293 - DNA, 19 bp, Homo sapiens
  siRNA target sequence for ITGA7 (NM_002206.1,2198-2216).
gagtgggcagccagtcatt

SEQ ID NO: 249294 - DNA, 19 bp, Homo sapiens
  siRNA target sequence for ITGA7 (NM_002206.1,2551-2569).
cacgagcccgtgtcttcat

SEQ ID NO: 249295 - DNA, 19 bp, Homo sapiens
  siRNA target sequence for ITGA7 (NM_002206.1,3134-3152).
gaagtccctggaagtgatt

SEQ ID NO: 249296 - DNA, 19 bp, Homo sapiens
  siRNA target sequence for ITGA7 (NM_002206.1,3216-3234).
gtgatcccagtgatggtat

SEQ ID NO: 249297 - DNA, 19 bp, Homo sapiens
  siRNA target sequence for ITGA7 (NM_002206.1,3392-3410).
gtaccatgcggtgaagatt

SEQ ID NO: 249298 - DNA, 19 bp, Homo sapiens
  siRNA target sequence for ITGA9 (NM_002207.1,254-272).
caaaggcagattccaaata

SEQ ID NO: 249299 - DNA, 19 bp, Homo sapiens
  siRNA target sequence for ITGA9 (NM_002207.1,484-502).
cgctggaagaacatctact

SEQ ID NO: 249300 - DNA, 19 bp, Homo sapiens
  siRNA target sequence for ITGA9 (NM_002207.1,485-503).
gctggaagaacatctacta

SEQ ID NO: 249301 - DNA, 19 bp, Homo sapiens
  siRNA target sequence for ITGA9 (NM_002207.1,582-600).
cccttgctatgaagagtat

SEQ ID NO: 249302 - DNA, 19 bp, Homo sapiens
  siRNA target sequence for ITGA9 (NM_002207.1,583-601).
ccttgctatgaagagtata

SEQ ID NO: 249303 - DNA, 19 bp, Homo sapiens
  siRNA target sequence for ITGA9 (NM_002207.1,640-658).
gggatagcgggcttcttca

SEQ ID NO: 249304 - DNA, 19 bp, Homo sapiens
  siRNA target sequence for ITGA9 (NM_002207.1,679-697).
ggtgctccagggtcatttt

SEQ ID NO: 249305 - DNA, 19 bp, Homo sapiens
  siRNA target sequence for ITGA9 (NM_002207.1,680-698).
gtgctccagggtcatttta

SEQ ID NO: 249306 - DNA, 19 bp, Homo sapiens
  siRNA target sequence for ITGA9 (NM_002207.1,682-700).
gctccagggtcattttatt

SEQ ID NO: 249307 - DNA, 19 bp, Homo sapiens
  siRNA target sequence for ITGA9 (NM_002207.1,701-719).
gggctggaaccatcaaagt

SEQ ID NO: 249308 - DNA, 19 bp, Homo sapiens
  siRNA target sequence for ITGA9 (NM_002207.1,757-775).
gacgaagtgatcatgaaca

SEQ ID NO: 249309 - DNA, 19 bp, Homo sapiens
  siRNA target sequence for ITGA9 (NM_002207.1,868-886).
ggcatcggcaaggtttata

SEQ ID NO: 249310 - DNA, 19 bp, Homo sapiens
  siRNA target sequence for ITGA9 (NM_002207.1,869-887).
gcatcggcaaggtttatat

SEQ ID NO: 249311 - DNA, 19 bp, Homo sapiens
  siRNA target sequence for ITGA9 (NM_002207.1,870-888).
catcggcaaggtttatatt

SEQ ID NO: 249312 - DNA, 19 bp, Homo sapiens
  siRNA target sequence for ITGA9 (NM_002207.1,874-892).
ggcaaggtttatattttca

SEQ ID NO: 249313 - DNA, 19 bp, Homo sapiens
  siRNA target sequence for ITGA9 (NM_002207.1,891-909).
cagagctgaccgaagatca

SEQ ID NO: 249314 - DNA, 19 bp, Homo sapiens
  siRNA target sequence for ITGA9 (NM_002207.1,901-919).
cgaagatcaggcaccttaa

SEQ ID NO: 249315 - DNA, 19 bp, Homo sapiens
  siRNA target sequence for ITGA9 (NM_002207.1,902-920).
gaagatcaggcaccttaat

SEQ ID NO: 249316 - DNA, 19 bp, Homo sapiens
  siRNA target sequence for ITGA9 (NM_002207.1,910-928).
ggcaccttaattaagatct

SEQ ID NO: 249317 - DNA, 19 bp, Homo sapiens
  siRNA target sequence for ITGA9 (NM_002207.1,911-929).
gcaccttaattaagatctt

SEQ ID NO: 249318 - DNA, 19 bp, Homo sapiens
  siRNA target sequence for ITGA9 (NM_002207.1,912-930).
caccttaattaagatcttt

SEQ ID NO: 249319 - DNA, 19 bp, Homo sapiens
  siRNA target sequence for ITGA9 (NM_002207.1,1055-1073).
gacaggtcactgtctacat

SEQ ID NO: 249320 - DNA, 19 bp, Homo sapiens
  siRNA target sequence for ITGA9 (NM_002207.1,1208-1226).
cacccaaggaggatgactt

SEQ ID NO: 249321 - DNA, 19 bp, Homo sapiens
  siRNA target sequence for ITGA9 (NM_002207.1,1272-1290).
ccctcagtactcaatgaaa

SEQ ID NO: 249322 - DNA, 19 bp, Homo sapiens
  siRNA target sequence for ITGA9 (NM_002207.1,1274-1292).
ctcagtactcaatgaaact

SEQ ID NO: 249323 - DNA, 19 bp, Homo sapiens
  siRNA target sequence for ITGA9 (NM_002207.1,1291-1309).
ctgtctgggcagaagataa

SEQ ID NO: 249324 - DNA, 19 bp, Homo sapiens
  siRNA target sequence for ITGA9 (NM_002207.1,1403-1421).
ccgacagcgtggttcttct

SEQ ID NO: 249325 - DNA, 19 bp, Homo sapiens
  siRNA target sequence for ITGA9 (NM_002207.1,1575-1593).
gattggcctgaattatgtt

SEQ ID NO: 249326 - DNA, 19 bp, Homo sapiens
  siRNA target sequence for ITGA9 (NM_002207.1,1761-1779).
cagcccgatcgtgtttgaa

SEQ ID NO: 249327 - DNA, 19 bp, Homo sapiens
  siRNA target sequence for ITGA9 (NM_002207.1,1843-1861).
ccagttctccgctggaaaa

SEQ ID NO: 249328 - DNA, 19 bp, Homo sapiens
  siRNA target sequence for ITGA9 (NM_002207.1,2149-2167).
gaatcggacttcctcaaat

SEQ ID NO: 249329 - DNA, 19 bp, Homo sapiens
  siRNA target sequence for ITGA9 (NM_002207.1,2168-2186).
gcagcgtgggatttccttt

SEQ ID NO: 249330 - DNA, 19 bp, Homo sapiens
  siRNA target sequence for ITGA9 (NM_002207.1,2171-2189).
gcgtgggatttcctttcat

SEQ ID NO: 249331 - DNA, 19 bp, Homo sapiens
  siRNA target sequence for ITGA9 (NM_002207.1,2363-2381).
cgtccatcaccggaatcat

SEQ ID NO: 249332 - DNA, 19 bp, Homo sapiens
  siRNA target sequence for ITGA9 (NM_002207.1,2384-2402).
ctccaacctcctttgtata

SEQ ID NO: 249333 - DNA, 19 bp, Homo sapiens
  siRNA target sequence for ITGA9 (NM_002207.1,2529-2547).
catctctttccctaatcga

SEQ ID NO: 249334 - DNA, 19 bp, Homo sapiens
  siRNA target sequence for ITGA9 (NM_002207.1,2558-2576).
gtggtgcagagatgtttca

SEQ ID NO: 249335 - DNA, 19 bp, Homo sapiens
  siRNA target sequence for ITGA9 (NM_002207.1,2744-2762).
gcctaacagcacactgtaa

SEQ ID NO: 249336 - DNA, 19 bp, Homo sapiens
  siRNA target sequence for ITGA9 (NM_002207.1,2785-2803).
gaaagtcgtactatagaca

SEQ ID NO: 249337 - DNA, 19 bp, Homo sapiens
  siRNA target sequence for ITGA9 (NM_002207.1,2789-2807).
gtcgtactatagacattta

SEQ ID NO: 249338 - DNA, 19 bp, Homo sapiens
  siRNA target sequence for ITGA9 (NM_002207.1,2791-2809).
cgtactatagacatttaca

SEQ ID NO: 249339 - DNA, 19 bp, Homo sapiens
  siRNA target sequence for ITGA9 (NM_002207.1,2894-2912).
ccctaagggtggtggaaat

SEQ ID NO: 249340 - DNA, 19 bp, Homo sapiens
  siRNA target sequence for ITGA9 (NM_002207.1,2993-3011).
ggatcatcgccatcagttt

SEQ ID NO: 249341 - DNA, 19 bp, Homo sapiens
  siRNA target sequence for ITGA9 (NM_002207.1,3069-3087).
ctttcgccgaaggtacaaa

SEQ ID NO: 249342 - DNA, 19 bp, Homo sapiens
  siRNA target sequence for ITGA9 (NM_002207.1,3073-3091).
cgccgaaggtacaaagaaa

SEQ ID NO: 249343 - DNA, 19 bp, Homo sapiens
  siRNA target sequence for ITGA9 (NM_002207.1,3074-3092).
gccgaaggtacaaagaaat

SEQ ID NO: 249344 - DNA, 19 bp, Homo sapiens
  siRNA target sequence for ITGA9 (NM_002207.1,3080-3098).
ggtacaaagaaattatcga

SEQ ID NO: 249345 - DNA, 19 bp, Homo sapiens
  siRNA target sequence for ITGA9 (NM_002207.1,3134-3152).
gggactgggtccagaaaaa

SEQ ID NO: 249346 - DNA, 19 bp, Homo sapiens
  siRNA target sequence for ITGB2 (NM_000211.1,447-465).
ccccatcgacctgtactat

SEQ ID NO: 249347 - DNA, 19 bp, Homo sapiens
  siRNA target sequence for ITGB2 (NM_000211.1,449-467).
ccatcgacctgtactatct

SEQ ID NO: 249348 - DNA, 19 bp, Homo sapiens
  siRNA target sequence for ITGB2 (NM_000211.1,733-751).
gtcgggaagcagctgattt

SEQ ID NO: 249349 - DNA, 19 bp, Homo sapiens
  siRNA target sequence for ITGB2 (NM_000211.1,860-878).
ctgatgacggcttccattt

SEQ ID NO: 249350 - DNA, 19 bp, Homo sapiens
  siRNA target sequence for ITGB2 (NM_000211.1,1271-1289).
gtgatggcgtgcagatcaa

SEQ ID NO: 249351 - DNA, 19 bp, Homo sapiens
  siRNA target sequence for ITGB2 (NM_000211.1,1336-1354).
caggagcagtcgtttgtca

SEQ ID NO: 249352 - DNA, 19 bp, Homo sapiens
  siRNA target sequence for ITGB2 (NM_000211.1,1366-1384).
ggcttcacggacatagtga

SEQ ID NO: 249353 - DNA, 19 bp, Homo sapiens
  siRNA target sequence for ITGB2 (NM_000211.1,1493-1511).
ctggctacattgggaaaaa

SEQ ID NO: 249354 - DNA, 19 bp, Homo sapiens
  siRNA target sequence for ITGB2 (NM_000211.1,1855-1873).
cggtgccgctgcaacgtat

SEQ ID NO: 249355 - DNA, 19 bp, Homo sapiens
  siRNA target sequence for ITGB2 (NM_000211.1,1931-1949).
caccctgtggcaagtacat

SEQ ID NO: 249356 - DNA, 19 bp, Homo sapiens
  siRNA target sequence for ITGB2 (NM_000211.1,1933-1951).
ccctgtggcaagtacatct

SEQ ID NO: 249357 - DNA, 19 bp, Homo sapiens
  siRNA target sequence for ITGB2 (NM_000211.1,1955-1973).
gcgccgagtgcctgaagtt

SEQ ID NO: 249358 - DNA, 19 bp, Homo sapiens
  siRNA target sequence for ITGB2 (NM_000211.1,2301-2319).
caagtcccagtggaacaat

SEQ ID NO: 249359 - DNA, 19 bp, Homo sapiens
  siRNA target sequence for ITGB2 (NM_000211.1,2342-2360).
ccaccacgacggtcatgaa

SEQ ID NO: 249360 - DNA, 19 bp, Homo sapiens
  siRNA target sequence for ITGB3 (NM_000212.1,89-107).
gtaggagggcccaacatct

SEQ ID NO: 249361 - DNA, 19 bp, Homo sapiens
  siRNA target sequence for ITGB3 (NM_000212.1,92-110).
ggagggcccaacatctgta

SEQ ID NO: 249362 - DNA, 19 bp, Homo sapiens
  siRNA target sequence for ITGB3 (NM_000212.1,270-288).
gtgaggcccgagtactaga

SEQ ID NO: 249363 - DNA, 19 bp, Homo sapiens
  siRNA target sequence for ITGB3 (NM_000212.1,364-382).
ccggctccggccagatgat

SEQ ID NO: 249364 - DNA, 19 bp, Homo sapiens
  siRNA target sequence for ITGB3 (NM_000212.1,373-391).
gccagatgattcgaagaat

SEQ ID NO: 249365 - DNA, 19 bp, Homo sapiens
  siRNA target sequence for ITGB3 (NM_000212.1,374-392).
ccagatgattcgaagaatt

SEQ ID NO: 249366 - DNA, 19 bp, Homo sapiens
  siRNA target sequence for ITGB3 (NM_000212.1,375-393).
cagatgattcgaagaattt

SEQ ID NO: 249367 - DNA, 19 bp, Homo sapiens
  siRNA target sequence for ITGB3 (NM_000212.1,377-395).
gatgattcgaagaatttct

SEQ ID NO: 249368 - DNA, 19 bp, Homo sapiens
  siRNA target sequence for ITGB3 (NM_000212.1,428-446).
gtggacatctactacttga

SEQ ID NO: 249369 - DNA, 19 bp, Homo sapiens
  siRNA target sequence for ITGB3 (NM_000212.1,572-590).
cctgtgtcaccatacatgt

SEQ ID NO: 249370 - DNA, 19 bp, Homo sapiens
  siRNA target sequence for ITGB3 (NM_000212.1,613-631).
cgaaaacccctgctatgat

SEQ ID NO: 249371 - DNA, 19 bp, Homo sapiens
  siRNA target sequence for ITGB3 (NM_000212.1,620-638).
ccctgctatgatatgaaga

SEQ ID NO: 249372 - DNA, 19 bp, Homo sapiens
  siRNA target sequence for ITGB3 (NM_000212.1,640-658).
cacctgcttgcccatgttt

SEQ ID NO: 249373 - DNA, 19 bp, Homo sapiens
  siRNA target sequence for ITGB3 (NM_000212.1,649-667).
gcccatgtttggctacaaa

SEQ ID NO: 249374 - DNA, 19 bp, Homo sapiens
  siRNA target sequence for ITGB3 (NM_000212.1,779-797).
gctacagtctgtgatgaaa

SEQ ID NO: 249375 - DNA, 19 bp, Homo sapiens
  siRNA target sequence for ITGB3 (NM_000212.1,783-801).
cagtctgtgatgaaaagat

SEQ ID NO: 249376 - DNA, 19 bp, Homo sapiens
  siRNA target sequence for ITGB3 (NM_000212.1,843-861).
ctgatgccaagactcatat

SEQ ID NO: 249377 - DNA, 19 bp, Homo sapiens
  siRNA target sequence for ITGB3 (NM_000212.1,848-866).
gccaagactcatatagcat

SEQ ID NO: 249378 - DNA, 19 bp, Homo sapiens
  siRNA target sequence for ITGB3 (NM_000212.1,849-867).
ccaagactcatatagcatt

SEQ ID NO: 249379 - DNA, 19 bp, Homo sapiens
  siRNA target sequence for ITGB3 (NM_000212.1,885-903).
gcattgtccagcctaatga

SEQ ID NO: 249380 - DNA, 19 bp, Homo sapiens
  siRNA target sequence for ITGB3 (NM_000212.1,920-938).
ggtagtgacaatcattact

SEQ ID NO: 249381 - DNA, 19 bp, Homo sapiens
  siRNA target sequence for ITGB3 (NM_000212.1,943-961).
ctccactaccatggattat

SEQ ID NO: 249382 - DNA, 19 bp, Homo sapiens
  siRNA target sequence for ITGB3 (NM_000212.1,1034-1052).
gtagtcaatctctatcaga

SEQ ID NO: 249383 - DNA, 19 bp, Homo sapiens
  siRNA target sequence for ITGB3 (NM_000212.1,1120-1138).
gctcattgttgatgcttat

SEQ ID NO: 249384 - DNA, 19 bp, Homo sapiens
  siRNA target sequence for ITGB3 (NM_000212.1,1141-1159).
gaaaatccgttctaaagta

SEQ ID NO: 249385 - DNA, 19 bp, Homo sapiens
  siRNA target sequence for ITGB3 (NM_000212.1,1189-1207).
gttgtctctatccttcaat

SEQ ID NO: 249386 - DNA, 19 bp, Homo sapiens
  siRNA target sequence for ITGB3 (NM_000212.1,1248-1266).
cttgtatgggactcaagat

SEQ ID NO: 249387 - DNA, 19 bp, Homo sapiens
  siRNA target sequence for ITGB3 (NM_000212.1,1914-1932).
cctgcacctttaagaaaga

SEQ ID NO: 249388 - DNA, 19 bp, Homo sapiens
  siRNA target sequence for ITGB3 (NM_000212.1,2051-2069).
gtgaattgtacctataaga

SEQ ID NO: 249389 - DNA, 19 bp, Homo sapiens
  siRNA target sequence for ITGB3 (NM_000212.1,2086-2104).
cgtcagattccagtactat

SEQ ID NO: 249390 - DNA, 19 bp, Homo sapiens
  siRNA target sequence for ITGB3 (NM_000212.1,2089-2107).
cagattccagtactatgaa

SEQ ID NO: 249391 - DNA, 19 bp, Homo sapiens
  siRNA target sequence for ITGB3 (NM_000212.1,2318-2336).
gccaacaacccactgtata

SEQ ID NO: 249392 - DNA, 19 bp, Homo sapiens
  siRNA target sequence for ITGB3 (NM_000212.1,2346-2364).
cgtctaccttcaccaatat

SEQ ID NO: 249393 - DNA, 19 bp, Homo sapiens
  siRNA target sequence for ITGB4 (NM_000213.2,523-541).
cggtgaggagcggcatttt

SEQ ID NO: 249394 - DNA, 19 bp, Homo sapiens
  siRNA target sequence for ITGB4 (NM_000213.2,525-543).
gtgaggagcggcattttga

SEQ ID NO: 249395 - DNA, 19 bp, Homo sapiens
  siRNA target sequence for ITGB4 (NM_000213.2,676-694).
caccagcgactacactatt

SEQ ID NO: 249396 - DNA, 19 bp, Homo sapiens
  siRNA target sequence for ITGB4 (NM_000213.2,681-699).
gcgactacactattggatt

SEQ ID NO: 249397 - DNA, 19 bp, Homo sapiens
  siRNA target sequence for ITGB4 (NM_000213.2,1552-1570).
cacctgcgagctgcaaaaa

SEQ ID NO: 249398 - DNA, 19 bp, Homo sapiens
  siRNA target sequence for ITGB4 (NM_000213.2,1554-1572).
cctgcgagctgcaaaaaga

SEQ ID NO: 249399 - DNA, 19 bp, Homo sapiens
  siRNA target sequence for ITGB4 (NM_000213.2,1669-1687).
cggctctctgagtgacatt

SEQ ID NO: 249400 - DNA, 19 bp, Homo sapiens
  siRNA target sequence for ITGB4 (NM_000213.2,1671-1689).
gctctctgagtgacattca

SEQ ID NO: 249401 - DNA, 19 bp, Homo sapiens
  siRNA target sequence for ITGB4 (NM_000213.2,1785-1803).
gtcagttctgcgagtatga

SEQ ID NO: 249402 - DNA, 19 bp, Homo sapiens
  siRNA target sequence for ITGB4 (NM_000213.2,1942-1960).
caatgggggcatctgtaat

SEQ ID NO: 249403 - DNA, 19 bp, Homo sapiens
  siRNA target sequence for ITGB4 (NM_000213.2,2124-2142).
gcacgtgtgaggaatgcaa

SEQ ID NO: 249404 - DNA, 19 bp, Homo sapiens
  siRNA target sequence for ITGB4 (NM_000213.2,2158-2176).
ggtggacgagcttaagaga

SEQ ID NO: 249405 - DNA, 19 bp, Homo sapiens
  siRNA target sequence for ITGB4 (NM_000213.2,2442-2460).
gtcacatggtgggctttaa

SEQ ID NO: 249406 - DNA, 19 bp, Homo sapiens
  siRNA target sequence for ITGB4 (NM_000213.2,3519-3537).
gcttcacgagtcagatgtt

SEQ ID NO: 249407 - DNA, 19 bp, Homo sapiens
  siRNA target sequence for ITGB4 (NM_000213.2,3575-3593).
ccgcagaaccccaatgcta

SEQ ID NO: 249408 - DNA, 19 bp, Homo sapiens
  siRNA target sequence for ITGB4 (NM_000213.2,3576-3594).
cgcagaaccccaatgctaa

SEQ ID NO: 249409 - DNA, 19 bp, Homo sapiens
  siRNA target sequence for ITGB4 (NM_000213.2,3602-3620).
gggtccaggaagatccatt

SEQ ID NO: 249410 - DNA, 19 bp, Homo sapiens
  siRNA target sequence for ITGB4 (NM_000213.2,3603-3621).
ggtccaggaagatccattt

SEQ ID NO: 249411 - DNA, 19 bp, Homo sapiens
  siRNA target sequence for ITGB4 (NM_000213.2,3606-3624).
ccaggaagatccatttcaa

SEQ ID NO: 249412 - DNA, 19 bp, Homo sapiens
  siRNA target sequence for ITGB4 (NM_000213.2,3749-3767).
ccgtattgcgactatgaga

SEQ ID NO: 249413 - DNA, 19 bp, Homo sapiens
  siRNA target sequence for ITGB4 (NM_000213.2,3750-3768).
cgtattgcgactatgagat

SEQ ID NO: 249414 - DNA, 19 bp, Homo sapiens
  siRNA target sequence for ITGB4 (NM_000213.2,3858-3876).
ggcgtctggccttcaatgt

SEQ ID NO: 249415 - DNA, 19 bp, Homo sapiens
  siRNA target sequence for ITGB4 (NM_000213.2,3970-3988).
cgatgacaaccgacctatt

SEQ ID NO: 249416 - DNA, 19 bp, Homo sapiens
  siRNA target sequence for ITGB4 (NM_000213.2,3983-4001).
cctattgggcccatgaaga

SEQ ID NO: 249417 - DNA, 19 bp, Homo sapiens
  siRNA target sequence for ITGB4 (NM_000213.2,3984-4002).
ctattgggcccatgaagaa

SEQ ID NO: 249418 - DNA, 19 bp, Homo sapiens
  siRNA target sequence for ITGB4 (NM_000213.2,4024-4042).
gaaccggatgctgcttatt

SEQ ID NO: 249419 - DNA, 19 bp, Homo sapiens
  siRNA target sequence for ITGB4 (NM_000213.2,4028-4046).
cggatgctgcttattgaga

SEQ ID NO: 249420 - DNA, 19 bp, Homo sapiens
  siRNA target sequence for ITGB4 (NM_000213.2,4211-4229).
gactacgacagcttcctta

SEQ ID NO: 249421 - DNA, 19 bp, Homo sapiens
  siRNA target sequence for ITGB4 (NM_000213.2,4649-4667).
ctcacacgggactacaact

SEQ ID NO: 249422 - DNA, 19 bp, Homo sapiens
  siRNA target sequence for ITGB4 (NM_000213.2,5027-5045).
ggtgtcatcaccattgaat

SEQ ID NO: 249423 - DNA, 19 bp, Homo sapiens
  siRNA target sequence for ITGB4 (NM_000213.2,5184-5202).
ggcccaatggggatatcgt

SEQ ID NO: 249424 - DNA, 19 bp, Homo sapiens
  siRNA target sequence for ITGB4 (NM_000213.2,5309-5327).
gagaacgtgccctacaagt

SEQ ID NO: 249425 - DNA, 19 bp, Homo sapiens
  siRNA target sequence for ITGB5 (NM_002213.3,360-378).
gctcgcaggtctcaacata

SEQ ID NO: 249426 - DNA, 19 bp, Homo sapiens
  siRNA target sequence for ITGB5 (NM_002213.3,361-379).
ctcgcaggtctcaacatat

SEQ ID NO: 249427 - DNA, 19 bp, Homo sapiens
  siRNA target sequence for ITGB5 (NM_002213.3,364-382).
gcaggtctcaacatatgca

SEQ ID NO: 249428 - DNA, 19 bp, Homo sapiens
  siRNA target sequence for ITGB5 (NM_002213.3,404-422).
gtgaagaatgtctgctaat

SEQ ID NO: 249429 - DNA, 19 bp, Homo sapiens
  siRNA target sequence for ITGB5 (NM_002213.3,415-433).
ctgctaatccacccaaaat

SEQ ID NO: 249430 - DNA, 19 bp, Homo sapiens
  siRNA target sequence for ITGB5 (NM_002213.3,417-435).
gctaatccacccaaaatgt

SEQ ID NO: 249431 - DNA, 19 bp, Homo sapiens
  siRNA target sequence for ITGB5 (NM_002213.3,495-513).
gagggcaaaccttgtcaaa

SEQ ID NO: 249432 - DNA, 19 bp, Homo sapiens
  siRNA target sequence for ITGB5 (NM_002213.3,604-622).
ggctgggacgtcattcaga

SEQ ID NO: 249433 - DNA, 19 bp, Homo sapiens
  siRNA target sequence for ITGB5 (NM_002213.3,605-623).
gctgggacgtcattcagat

SEQ ID NO: 249434 - DNA, 19 bp, Homo sapiens
  siRNA target sequence for ITGB5 (NM_002213.3,893-911).
ccaatccgtgcattggtta

SEQ ID NO: 249435 - DNA, 19 bp, Homo sapiens
  siRNA target sequence for ITGB5 (NM_002213.3,898-916).
ccgtgcattggttacaagt

SEQ ID NO: 249436 - DNA, 19 bp, Homo sapiens
  siRNA target sequence for ITGB5 (NM_002213.3,899-917).
cgtgcattggttacaagtt

SEQ ID NO: 249437 - DNA, 19 bp, Homo sapiens
  siRNA target sequence for ITGB5 (NM_002213.3,972-990).
cagagtggacagcttcaat

SEQ ID NO: 249438 - DNA, 19 bp, Homo sapiens
  siRNA target sequence for ITGB5 (NM_002213.3,1083-1101).
gattggctggcgaaaggat

SEQ ID NO: 249439 - DNA, 19 bp, Homo sapiens
  siRNA target sequence for ITGB5 (NM_002213.3,1113-1131).
gctggtgttcacaacagat

SEQ ID NO: 249440 - DNA, 19 bp, Homo sapiens
  siRNA target sequence for ITGB5 (NM_002213.3,1116-1134).
ggtgttcacaacagatgat

SEQ ID NO: 249441 - DNA, 19 bp, Homo sapiens
  siRNA target sequence for ITGB5 (NM_002213.3,1137-1155).
gccccacatcgcattggat

SEQ ID NO: 249442 - DNA, 19 bp, Homo sapiens
  siRNA target sequence for ITGB5 (NM_002213.3,1143-1161).
catcgcattggatggaaaa

SEQ ID NO: 249443 - DNA, 19 bp, Homo sapiens
  siRNA target sequence for ITGB5 (NM_002213.3,1255-1273).
gccttgcttggagagaaat

SEQ ID NO: 249444 - DNA, 19 bp, Homo sapiens
  siRNA target sequence for ITGB5 (NM_002213.3,1303-1321).
gcagtgacaaaaaaccatt

SEQ ID NO: 249445 - DNA, 19 bp, Homo sapiens
  siRNA target sequence for ITGB5 (NM_002213.3,1304-1322).
cagtgacaaaaaaccatta

SEQ ID NO: 249446 - DNA, 19 bp, Homo sapiens
  siRNA target sequence for ITGB5 (NM_002213.3,1306-1324).
gtgacaaaaaaccattata

SEQ ID NO: 249447 - DNA, 19 bp, Homo sapiens
  siRNA target sequence for ITGB5 (NM_002213.3,1326-1344).
gctgtacaagaattttaca

SEQ ID NO: 249448 - DNA, 19 bp, Homo sapiens
  siRNA target sequence for ITGB5 (NM_002213.3,1357-1375).
ggaacaacggtggagattt

SEQ ID NO: 249449 - DNA, 19 bp, Homo sapiens
  siRNA target sequence for ITGB5 (NM_002213.3,1358-1376).
gaacaacggtggagatttt

SEQ ID NO: 249450 - DNA, 19 bp, Homo sapiens
  siRNA target sequence for ITGB5 (NM_002213.3,1382-1400).
gagactccaaaaatattat

SEQ ID NO: 249451 - DNA, 19 bp, Homo sapiens
  siRNA target sequence for ITGB5 (NM_002213.3,1422-1440).
caatagtatccggtctaaa

SEQ ID NO: 249452 - DNA, 19 bp, Homo sapiens
  siRNA target sequence for ITGB5 (NM_002213.3,1465-1483).
cctgaggatcttaatctct

SEQ ID NO: 249453 - DNA, 19 bp, Homo sapiens
  siRNA target sequence for ITGB5 (NM_002213.3,1466-1484).
ctgaggatcttaatctctt

SEQ ID NO: 249454 - DNA, 19 bp, Homo sapiens
  siRNA target sequence for ITGB5 (NM_002213.3,1470-1488).
ggatcttaatctcttcttt

SEQ ID NO: 249455 - DNA, 19 bp, Homo sapiens
  siRNA target sequence for ITGB5 (NM_002213.3,1500-1518).
ccaagatggggtatcctat

SEQ ID NO: 249456 - DNA, 19 bp, Homo sapiens
  siRNA target sequence for ITGB5 (NM_002213.3,1533-1551).
gtgtgagggtctgaagatt

SEQ ID NO: 249457 - DNA, 19 bp, Homo sapiens
  siRNA target sequence for ITGB5 (NM_002213.3,1553-1571).
gggacacggcatcttttga

SEQ ID NO: 249458 - DNA, 19 bp, Homo sapiens
  siRNA target sequence for ITGB5 (NM_002213.3,1557-1575).
cacggcatcttttgaagta

SEQ ID NO: 249459 - DNA, 19 bp, Homo sapiens
  siRNA target sequence for ITGB5 (NM_002213.3,1604-1622).
gacacacggagcatgtgtt

SEQ ID NO: 249460 - DNA, 19 bp, Homo sapiens
  siRNA target sequence for ITGB5 (NM_002213.3,1660-1678).
gtgggggtcacctacaact

SEQ ID NO: 249461 - DNA, 19 bp, Homo sapiens
  siRNA target sequence for ITGB5 (NM_002213.3,2333-2351).
ctgtgctatgtttctacaa

SEQ ID NO: 249462 - DNA, 19 bp, Homo sapiens
  siRNA target sequence for ITGB5 (NM_002213.3,2357-2375).
ccaaggactgcgtcatgat

SEQ ID NO: 249463 - DNA, 19 bp, Homo sapiens
  siRNA target sequence for ITGB5 (NM_002213.3,2545-2563).
gaccggagggagtttgcaa

SEQ ID NO: 249464 - DNA, 19 bp, Homo sapiens
  siRNA target sequence for ITGB5 (NM_002213.3,2552-2570).
gggagtttgcaaagtttca

SEQ ID NO: 249465 - DNA, 19 bp, Homo sapiens
  siRNA target sequence for ITGB6 (NM_000888.3,108-126).
gtgaagactgcctgcttat

SEQ ID NO: 249466 - DNA, 19 bp, Homo sapiens
  siRNA target sequence for ITGB6 (NM_000888.3,179-197).
gttggcgaaaggtgtgata

SEQ ID NO: 249467 - DNA, 19 bp, Homo sapiens
  siRNA target sequence for ITGB6 (NM_000888.3,201-219).
cagcaaaccttttagctaa

SEQ ID NO: 249468 - DNA, 19 bp, Homo sapiens
  siRNA target sequence for ITGB6 (NM_000888.3,216-234).
ctaaaggatgtcaattaaa

SEQ ID NO: 249469 - DNA, 19 bp, Homo sapiens
  siRNA target sequence for ITGB6 (NM_000888.3,227-245).
caattaaacttcatcgaaa

SEQ ID NO: 249470 - DNA, 19 bp, Homo sapiens
  siRNA target sequence for ITGB6 (NM_000888.3,293-311).
ggcagacagaaaaatagtt

SEQ ID NO: 249471 - DNA, 19 bp, Homo sapiens
  siRNA target sequence for ITGB6 (NM_000888.3,332-350).
cctcaaagcttgatcctta

SEQ ID NO: 249472 - DNA, 19 bp, Homo sapiens
  siRNA target sequence for ITGB6 (NM_000888.3,333-351).
ctcaaagcttgatccttaa

SEQ ID NO: 249473 - DNA, 19 bp, Homo sapiens
  siRNA target sequence for ITGB6 (NM_000888.3,411-429).
cggtggatttgtattacct

SEQ ID NO: 249474 - DNA, 19 bp, Homo sapiens
  siRNA target sequence for ITGB6 (NM_000888.3,455-473).
gacgacctcaacacaataa

SEQ ID NO: 249475 - DNA, 19 bp, Homo sapiens
  siRNA target sequence for ITGB6 (NM_000888.3,500-518).
gagatgtctaaattaacca

SEQ ID NO: 249476 - DNA, 19 bp, Homo sapiens
  siRNA target sequence for ITGB6 (NM_000888.3,596-614).
gccaacccttgcagtagta

SEQ ID NO: 249477 - DNA, 19 bp, Homo sapiens
  siRNA target sequence for ITGB6 (NM_000888.3,597-615).
ccaacccttgcagtagtat

SEQ ID NO: 249478 - DNA, 19 bp, Homo sapiens
  siRNA target sequence for ITGB6 (NM_000888.3,598-616).
caacccttgcagtagtatt

SEQ ID NO: 249479 - DNA, 19 bp, Homo sapiens
  siRNA target sequence for ITGB6 (NM_000888.3,601-619).
cccttgcagtagtattcca

SEQ ID NO: 249480 - DNA, 19 bp, Homo sapiens
  siRNA target sequence for ITGB6 (NM_000888.3,602-620).
ccttgcagtagtattccat

SEQ ID NO: 249481 - DNA, 19 bp, Homo sapiens
  siRNA target sequence for ITGB6 (NM_000888.3,603-621).
cttgcagtagtattccata

SEQ ID NO: 249482 - DNA, 19 bp, Homo sapiens
  siRNA target sequence for ITGB6 (NM_000888.3,606-624).
gcagtagtattccatactt

SEQ ID NO: 249483 - DNA, 19 bp, Homo sapiens
  siRNA target sequence for ITGB6 (NM_000888.3,612-630).
gtattccatacttctgttt

SEQ ID NO: 249484 - DNA, 19 bp, Homo sapiens
  siRNA target sequence for ITGB6 (NM_000888.3,625-643).
ctgtttacctacatttgga

SEQ ID NO: 249485 - DNA, 19 bp, Homo sapiens
  siRNA target sequence for ITGB6 (NM_000888.3,652-670).
cattttgccattgacaaat

SEQ ID NO: 249486 - DNA, 19 bp, Homo sapiens
  siRNA target sequence for ITGB6 (NM_000888.3,727-745).
cacacccgaaggtggattt

SEQ ID NO: 249487 - DNA, 19 bp, Homo sapiens
  siRNA target sequence for ITGB6 (NM_000888.3,741-759).
gatttgatgcaattatgca

SEQ ID NO: 249488 - DNA, 19 bp, Homo sapiens
  siRNA target sequence for ITGB6 (NM_000888.3,830-848).
gctgattctcattttggaa

SEQ ID NO: 249489 - DNA, 19 bp, Homo sapiens
  siRNA target sequence for ITGB6 (NM_000888.3,831-849).
ctgattctcattttggaat

SEQ ID NO: 249490 - DNA, 19 bp, Homo sapiens
  siRNA target sequence for ITGB6 (NM_000888.3,867-885).
gcatcgtcattcctaatga

SEQ ID NO: 249491 - DNA, 19 bp, Homo sapiens
  siRNA target sequence for ITGB6 (NM_000888.3,945-963).
caacaattggacaactcat

SEQ ID NO: 249492 - DNA, 19 bp, Homo sapiens
  siRNA target sequence for ITGB6 (NM_000888.3,954-972).
gacaactcattgataaact

SEQ ID NO: 249493 - DNA, 19 bp, Homo sapiens
  siRNA target sequence for ITGB6 (NM_000888.3,974-992).
gtacaaaacaacgtgttat

SEQ ID NO: 249494 - DNA, 19 bp, Homo sapiens
  siRNA target sequence for ITGB6 (NM_000888.3,1031-1049).
gagaattacgcaaaactta

SEQ ID NO: 249495 - DNA, 19 bp, Homo sapiens
  siRNA target sequence for ITGB6 (NM_000888.3,1033-1051).
gaattacgcaaaacttatt

SEQ ID NO: 249496 - DNA, 19 bp, Homo sapiens
  siRNA target sequence for ITGB6 (NM_000888.3,1059-1077).
ctacagtaggtctacttca

SEQ ID NO: 249497 - DNA, 19 bp, Homo sapiens
  siRNA target sequence for ITGB6 (NM_000888.3,1078-1096).
gaaggactccggaaacatt

SEQ ID NO: 249498 - DNA, 19 bp, Homo sapiens
  siRNA target sequence for ITGB6 (NM_000888.3,1105-1123).
gatcatctcagcttatgaa

SEQ ID NO: 249499 - DNA, 19 bp, Homo sapiens
  siRNA target sequence for ITGB6 (NM_000888.3,1108-1126).
catctcagcttatgaagaa

SEQ ID NO: 249500 - DNA, 19 bp, Homo sapiens
  siRNA target sequence for ITGB6 (NM_000888.3,1166-1184).
gaaggactcaacttgtcat

SEQ ID NO: 249501 - DNA, 19 bp, Homo sapiens
  siRNA target sequence for ITGB6 (NM_000888.3,1228-1246).
gaaatgctctcacatgaaa

SEQ ID NO: 249502 - DNA, 19 bp, Homo sapiens
  siRNA target sequence for ITGB6 (NM_000888.3,1264-1282).
cttcagcgtgactgtgaat

SEQ ID NO: 249503 - DNA, 19 bp, Homo sapiens
  siRNA target sequence for ITGB6 (NM_000888.3,1286-1304).
ccacactgcgagagaagaa

SEQ ID NO: 249504 - DNA, 19 bp, Homo sapiens
  siRNA target sequence for ITGB6 (NM_000888.3,1372-1390).
caactgcgactgtcagaaa

SEQ ID NO: 249505 - DNA, 19 bp, Homo sapiens
  siRNA target sequence for ITGB6 (NM_000888.3,1522-1540).
caaggaggccccagatcat

SEQ ID NO: 249506 - DNA, 19 bp, Homo sapiens
  siRNA target sequence for ITGB6 (NM_000888.3,1566-1584).
gctactgtgggcagtgtat

SEQ ID NO: 249507 - DNA, 19 bp, Homo sapiens
  siRNA target sequence for ITGB6 (NM_000888.3,1589-1607).
cacttgtctccctatggaa

SEQ ID NO: 249508 - DNA, 19 bp, Homo sapiens
  siRNA target sequence for ITGB6 (NM_000888.3,1877-1895).
ggtgacccctgtaactcta

SEQ ID NO: 249509 - DNA, 19 bp, Homo sapiens
  siRNA target sequence for ITGB6 (NM_000888.3,2084-2102).
gggaaaaccatcattcaca

SEQ ID NO: 249510 - DNA, 19 bp, Homo sapiens
  siRNA target sequence for ITGB6 (NM_000888.3,2121-2139).
gtccgaagcctccaaacat

SEQ ID NO: 249511 - DNA, 19 bp, Homo sapiens
  siRNA target sequence for ITGB6 (NM_000888.3,2132-2150).
ccaaacattcccatgatca

SEQ ID NO: 249512 - DNA, 19 bp, Homo sapiens
  siRNA target sequence for ITGB6 (NM_000888.3,2137-2155).
cattcccatgatcatgtta

SEQ ID NO: 249513 - DNA, 19 bp, Homo sapiens
  siRNA target sequence for ITGB6 (NM_000888.3,2158-2176).
ggtttccctggctattctt

SEQ ID NO: 249514 - DNA, 19 bp, Homo sapiens
  siRNA target sequence for ITGB6 (NM_000888.3,2218-2236).
gtcatttcatgatcgtaaa

SEQ ID NO: 249515 - DNA, 19 bp, Homo sapiens
  siRNA target sequence for ITGB6 (NM_000888.3,2220-2238).
catttcatgatcgtaaaga

SEQ ID NO: 249516 - DNA, 19 bp, Homo sapiens
  siRNA target sequence for ITGB6 (NM_000888.3,2232-2250).
gtaaagaagttgccaaatt

SEQ ID NO: 249517 - DNA, 19 bp, Homo sapiens
  siRNA target sequence for ITGB6 (NM_000888.3,2275-2293).
gtggcaaacgggaaccaat

SEQ ID NO: 249518 - DNA, 19 bp, Homo sapiens
  siRNA target sequence for ITGB6 (NM_000888.3,2306-2324).
ggatccacaagtactttta

SEQ ID NO: 249519 - DNA, 19 bp, Homo sapiens
  siRNA target sequence for ITGB6 (NM_000888.3,2310-2328).
ccacaagtacttttaaaaa

SEQ ID NO: 249520 - DNA, 19 bp, Homo sapiens
  siRNA target sequence for ITGB6 (NM_000888.3,2360-2378).
gtagacctttccacagatt

SEQ ID NO: 249521 - DNA, 19 bp, Homo sapiens
  siRNA target sequence for ITGB7 (NM_000889.1,339-357).
ggtgcaagcaactgaactt

SEQ ID NO: 249522 - DNA, 19 bp, Homo sapiens
  siRNA target sequence for ITGB7 (NM_000889.1,710-728).
cattctgtgcgcattggtt

SEQ ID NO: 249523 - DNA, 19 bp, Homo sapiens
  siRNA target sequence for ITGB7 (NM_000889.1,716-734).
gtgcgcattggttttggtt

SEQ ID NO: 249524 - DNA, 19 bp, Homo sapiens
  siRNA target sequence for ITGB7 (NM_000889.1,995-1013).
cggctgctggtgttcactt

SEQ ID NO: 249525 - DNA, 19 bp, Homo sapiens
  siRNA target sequence for ITGB7 (NM_000889.1,1108-1126).
cagtcgcagcacagagttt

SEQ ID NO: 249526 - DNA, 19 bp, Homo sapiens
  siRNA target sequence for ITGB7 (NM_000889.1,1110-1128).
gtcgcagcacagagtttga

SEQ ID NO: 249527 - DNA, 19 bp, Homo sapiens
  siRNA target sequence for ITGB7 (NM_000889.1,1112-1130).
cgcagcacagagtttgact

SEQ ID NO: 249528 - DNA, 19 bp, Homo sapiens
  siRNA target sequence for ITGB7 (NM_000889.1,1113-1131).
gcagcacagagtttgacta

SEQ ID NO: 249529 - DNA, 19 bp, Homo sapiens
  siRNA target sequence for ITGB7 (NM_000889.1,1226-1244).
ctgagtaaactgattccta

SEQ ID NO: 249530 - DNA, 19 bp, Homo sapiens
  siRNA target sequence for ITGB7 (NM_000889.1,1291-1309).
gctcatcatggatgcttat

SEQ ID NO: 249531 - DNA, 19 bp, Homo sapiens
  siRNA target sequence for ITGB7 (NM_000889.1,1294-1312).
catcatggatgcttataat

SEQ ID NO: 249532 - DNA, 19 bp, Homo sapiens
  siRNA target sequence for ITGB7 (NM_000889.1,1360-1378).
ggtccacatttcttacgaa

SEQ ID NO: 249533 - DNA, 19 bp, Homo sapiens
  siRNA target sequence for ITGB7 (NM_000889.1,1361-1379).
gtccacatttcttacgaat

SEQ ID NO: 249534 - DNA, 19 bp, Homo sapiens
  siRNA target sequence for ITGB7 (NM_000889.1,1434-1452).
gcaaccacgtccgaatcaa

SEQ ID NO: 249535 - DNA, 19 bp, Homo sapiens
  siRNA target sequence for ITGB7 (NM_000889.1,1564-1582).
cacgctgtgtgactgtaat

SEQ ID NO: 249536 - DNA, 19 bp, Homo sapiens
  siRNA target sequence for ITGB7 (NM_000889.1,1624-1642).
ccagggacacctacaatgt

SEQ ID NO: 249537 - DNA, 19 bp, Homo sapiens
  siRNA target sequence for ITGB7 (NM_000889.1,1888-1906).
ctgccaatgtggagtatgt

SEQ ID NO: 249538 - DNA, 19 bp, Homo sapiens
  siRNA target sequence for ITGB7 (NM_000889.1,1890-1908).
gccaatgtggagtatgtca

SEQ ID NO: 249539 - DNA, 19 bp, Homo sapiens
  siRNA target sequence for ITGB7 (NM_000889.1,1994-2012).
gggcatggacgctgcaaat

SEQ ID NO: 249540 - DNA, 19 bp, Homo sapiens
  siRNA target sequence for ITGB7 (NM_000889.1,2390-2408).
cggctctcggtggaaatct

SEQ ID NO: 249541 - DNA, 19 bp, Homo sapiens
  siRNA target sequence for ITGB7 (NM_000889.1,2391-2409).
ggctctcggtggaaatcta

SEQ ID NO: 249542 - DNA, 19 bp, Homo sapiens
  siRNA target sequence for ITGB7 (NM_000889.1,2506-2524).
catcaatcctcgctttcaa

SEQ ID NO: 249543 - DNA, 19 bp, Homo sapiens
  siRNA target sequence for ITGB8 (NM_002214.1,688-706).
gctcggccctggctttttt

SEQ ID NO: 249544 - DNA, 19 bp, Homo sapiens
  siRNA target sequence for ITGB8 (NM_002214.1,764-782).
ggcagcctgggtgttttca

SEQ ID NO: 249545 - DNA, 19 bp, Homo sapiens
  siRNA target sequence for ITGB8 (NM_002214.1,770-788).
ctgggtgttttcacttgtt

SEQ ID NO: 249546 - DNA, 19 bp, Homo sapiens
  siRNA target sequence for ITGB8 (NM_002214.1,812-830).
caatagatgtgcatcttca

SEQ ID NO: 249547 - DNA, 19 bp, Homo sapiens
  siRNA target sequence for ITGB8 (NM_002214.1,880-898).
ggtgtgttcaagaggattt

SEQ ID NO: 249548 - DNA, 19 bp, Homo sapiens
  siRNA target sequence for ITGB8 (NM_002214.1,883-901).
gtgttcaagaggatttcat

SEQ ID NO: 249549 - DNA, 19 bp, Homo sapiens
  siRNA target sequence for ITGB8 (NM_002214.1,885-903).
gttcaagaggatttcattt

SEQ ID NO: 249550 - DNA, 19 bp, Homo sapiens
  siRNA target sequence for ITGB8 (NM_002214.1,921-939).
gaacgttgtgatattgttt

SEQ ID NO: 249551 - DNA, 19 bp, Homo sapiens
  siRNA target sequence for ITGB8 (NM_002214.1,928-946).
gtgatattgtttccaattt

SEQ ID NO: 249552 - DNA, 19 bp, Homo sapiens
  siRNA target sequence for ITGB8 (NM_002214.1,964-982).
cagttgattcaatagaata

SEQ ID NO: 249553 - DNA, 19 bp, Homo sapiens
  siRNA target sequence for ITGB8 (NM_002214.1,996-1014).
gttataatacccactgaaa

SEQ ID NO: 249554 - DNA, 19 bp, Homo sapiens
  siRNA target sequence for ITGB8 (NM_002214.1,1063-1081).
gtccaggagccgaagctaa

SEQ ID NO: 249555 - DNA, 19 bp, Homo sapiens
  siRNA target sequence for ITGB8 (NM_002214.1,1065-1083).
ccaggagccgaagctaatt

SEQ ID NO: 249556 - DNA, 19 bp, Homo sapiens
  siRNA target sequence for ITGB8 (NM_002214.1,1068-1086).
ggagccgaagctaatttta

SEQ ID NO: 249557 - DNA, 19 bp, Homo sapiens
  siRNA target sequence for ITGB8 (NM_002214.1,1069-1087).
gagccgaagctaattttat

SEQ ID NO: 249558 - DNA, 19 bp, Homo sapiens
  siRNA target sequence for ITGB8 (NM_002214.1,1072-1090).
ccgaagctaattttatgct

SEQ ID NO: 249559 - DNA, 19 bp, Homo sapiens
  siRNA target sequence for ITGB8 (NM_002214.1,1117-1135).
ctgtggatctttattatct

SEQ ID NO: 249560 - DNA, 19 bp, Homo sapiens
  siRNA target sequence for ITGB8 (NM_002214.1,1121-1139).
ggatctttattatcttgtt

SEQ ID NO: 249561 - DNA, 19 bp, Homo sapiens
  siRNA target sequence for ITGB8 (NM_002214.1,1149-1167).
gcatcaatgcacaataata

SEQ ID NO: 249562 - DNA, 19 bp, Homo sapiens
  siRNA target sequence for ITGB8 (NM_002214.1,1184-1202).
cgttggaaacgatttatct

SEQ ID NO: 249563 - DNA, 19 bp, Homo sapiens
  siRNA target sequence for ITGB8 (NM_002214.1,1185-1203).
gttggaaacgatttatcta

SEQ ID NO: 249564 - DNA, 19 bp, Homo sapiens
  siRNA target sequence for ITGB8 (NM_002214.1,1188-1206).
ggaaacgatttatctagaa

SEQ ID NO: 249565 - DNA, 19 bp, Homo sapiens
  siRNA target sequence for ITGB8 (NM_002214.1,1189-1207).
gaaacgatttatctagaaa

SEQ ID NO: 249566 - DNA, 19 bp, Homo sapiens
  siRNA target sequence for ITGB8 (NM_002214.1,1225-1243).
gtgactttcgtcttggatt

SEQ ID NO: 249567 - DNA, 19 bp, Homo sapiens
  siRNA target sequence for ITGB8 (NM_002214.1,1245-1263).
ggctcatacgttgataaaa

SEQ ID NO: 249568 - DNA, 19 bp, Homo sapiens
  siRNA target sequence for ITGB8 (NM_002214.1,1249-1267).
catacgttgataaaacagt

SEQ ID NO: 249569 - DNA, 19 bp, Homo sapiens
  siRNA target sequence for ITGB8 (NM_002214.1,1266-1284).
gtttcaccatacattagca

SEQ ID NO: 249570 - DNA, 19 bp, Homo sapiens
  siRNA target sequence for ITGB8 (NM_002214.1,1282-1300).
gcatccaccccgaaaggat

SEQ ID NO: 249571 - DNA, 19 bp, Homo sapiens
  siRNA target sequence for ITGB8 (NM_002214.1,1283-1301).
catccaccccgaaaggatt

SEQ ID NO: 249572 - DNA, 19 bp, Homo sapiens
  siRNA target sequence for ITGB8 (NM_002214.1,1286-1304).
ccaccccgaaaggattcat

SEQ ID NO: 249573 - DNA, 19 bp, Homo sapiens
  siRNA target sequence for ITGB8 (NM_002214.1,1287-1305).
caccccgaaaggattcata

SEQ ID NO: 249574 - DNA, 19 bp, Homo sapiens
  siRNA target sequence for ITGB8 (NM_002214.1,1289-1307).
ccccgaaaggattcataat

SEQ ID NO: 249575 - DNA, 19 bp, Homo sapiens
  siRNA target sequence for ITGB8 (NM_002214.1,1292-1310).
cgaaaggattcataatcaa

SEQ ID NO: 249576 - DNA, 19 bp, Homo sapiens
  siRNA target sequence for ITGB8 (NM_002214.1,1496-1514).
gcgaaaagaggctaaaaga

SEQ ID NO: 249577 - DNA, 19 bp, Homo sapiens
  siRNA target sequence for ITGB8 (NM_002214.1,1497-1515).
cgaaaagaggctaaaagat

SEQ ID NO: 249578 - DNA, 19 bp, Homo sapiens
  siRNA target sequence for ITGB8 (NM_002214.1,1541-1559).
gtctcatctcgctcttgat

SEQ ID NO: 249579 - DNA, 19 bp, Homo sapiens
  siRNA target sequence for ITGB8 (NM_002214.1,1548-1566).
ctcgctcttgatagcaaat

SEQ ID NO: 249580 - DNA, 19 bp, Homo sapiens
  siRNA target sequence for ITGB8 (NM_002214.1,1592-1610).
cggaaactgtcatctgaaa

SEQ ID NO: 249581 - DNA, 19 bp, Homo sapiens
  siRNA target sequence for ITGB8 (NM_002214.1,1657-1675).
gccaactttcagagaaatt

SEQ ID NO: 249582 - DNA, 19 bp, Homo sapiens
  siRNA target sequence for ITGB8 (NM_002214.1,1658-1676).
ccaactttcagagaaatta

SEQ ID NO: 249583 - DNA, 19 bp, Homo sapiens
  siRNA target sequence for ITGB8 (NM_002214.1,1759-1777).
gcaccattgctggtgaaat

SEQ ID NO: 249584 - DNA, 19 bp, Homo sapiens
  siRNA target sequence for ITGB8 (NM_002214.1,1768-1786).
ctggtgaaatagaatcaaa

SEQ ID NO: 249585 - DNA, 19 bp, Homo sapiens
  siRNA target sequence for ITGB8 (NM_002214.1,1787-1805).
ggctgcaaacctcaataat

SEQ ID NO: 249586 - DNA, 19 bp, Homo sapiens
  siRNA target sequence for ITGB8 (NM_002214.1,1792-1810).
caaacctcaataatttggt

SEQ ID NO: 249587 - DNA, 19 bp, Homo sapiens
  siRNA target sequence for ITGB8 (NM_002214.1,1862-1880).
ccaggtacaaggcatctat

SEQ ID NO: 249588 - DNA, 19 bp, Homo sapiens
  siRNA target sequence for ITGB8 (NM_002214.1,1863-1881).
caggtacaaggcatctatt

SEQ ID NO: 249589 - DNA, 19 bp, Homo sapiens
  siRNA target sequence for ITGB8 (NM_002214.1,1865-1883).
ggtacaaggcatctatttt

SEQ ID NO: 249590 - DNA, 19 bp, Homo sapiens
  siRNA target sequence for ITGB8 (NM_002214.1,1866-1884).
gtacaaggcatctatttta

SEQ ID NO: 249591 - DNA, 19 bp, Homo sapiens
  siRNA target sequence for ITGB8 (NM_002214.1,1943-1961).
cgtgacgagcaatgatgaa

SEQ ID NO: 249592 - DNA, 19 bp, Homo sapiens
  siRNA target sequence for ITGB8 (NM_002214.1,1946-1964).
gacgagcaatgatgaagtt

SEQ ID NO: 249593 - DNA, 19 bp, Homo sapiens
  siRNA target sequence for ITGB8 (NM_002214.1,1948-1966).
cgagcaatgatgaagttct

SEQ ID NO: 249594 - DNA, 19 bp, Homo sapiens
  siRNA target sequence for ITGB8 (NM_002214.1,2030-2048).
caaacctattggttttaat

SEQ ID NO: 249595 - DNA, 19 bp, Homo sapiens
  siRNA target sequence for ITGB8 (NM_002214.1,2053-2071).
ccgctaaaattcatataca

SEQ ID NO: 249596 - DNA, 19 bp, Homo sapiens
  siRNA target sequence for ITGB8 (NM_002214.1,2055-2073).
gctaaaattcatatacaca

SEQ ID NO: 249597 - DNA, 19 bp, Homo sapiens
  siRNA target sequence for ITGB8 (NM_002214.1,2096-2114).
ggacaacagaggacctaaa

SEQ ID NO: 249598 - DNA, 19 bp, Homo sapiens
  siRNA target sequence for ITGB8 (NM_002214.1,2115-2133).
ggaaagtgtgtagatgaaa

SEQ ID NO: 249599 - DNA, 19 bp, Homo sapiens
  siRNA target sequence for ITGB8 (NM_002214.1,2122-2140).
gtgtagatgaaacttttct

SEQ ID NO: 249600 - DNA, 19 bp, Homo sapiens
  siRNA target sequence for ITGB8 (NM_002214.1,2161-2179).
gtgatgagaataaatgtca

SEQ ID NO: 249601 - DNA, 19 bp, Homo sapiens
  siRNA target sequence for ITGB8 (NM_002214.1,2240-2258).
cagtggtcgaggagtttgt

SEQ ID NO: 249602 - DNA, 19 bp, Homo sapiens
  siRNA target sequence for ITGB8 (NM_002214.1,2338-2356).
gtccatatcaccatggaaa

SEQ ID NO: 249603 - DNA, 19 bp, Homo sapiens
  siRNA target sequence for ITGB8 (NM_002214.1,2341-2359).
catatcaccatggaaatct

SEQ ID NO: 249604 - DNA, 19 bp, Homo sapiens
  siRNA target sequence for ITGB8 (NM_002214.1,2386-2404).
caggcagatgccaatgctt

SEQ ID NO: 249605 - DNA, 19 bp, Homo sapiens
  siRNA target sequence for ITGB8 (NM_002214.1,2448-2466).
gcccagcactgtgtcaatt

SEQ ID NO: 249606 - DNA, 19 bp, Homo sapiens
  siRNA target sequence for ITGB8 (NM_002214.1,2450-2468).
ccagcactgtgtcaattca

SEQ ID NO: 249607 - DNA, 19 bp, Homo sapiens
  siRNA target sequence for ITGB8 (NM_002214.1,2556-2574).
cactgccccacctgttata

SEQ ID NO: 249608 - DNA, 19 bp, Homo sapiens
  siRNA target sequence for ITGB8 (NM_002214.1,2558-2576).
ctgccccacctgttataca

SEQ ID NO: 249609 - DNA, 19 bp, Homo sapiens
  siRNA target sequence for ITGB8 (NM_002214.1,2608-2626).
gccttcaccctcacaattt

SEQ ID NO: 249610 - DNA, 19 bp, Homo sapiens
  siRNA target sequence for ITGB8 (NM_002214.1,2629-2647).
ctcaggctatacttgatca

SEQ ID NO: 249611 - DNA, 19 bp, Homo sapiens
  siRNA target sequence for ITGB8 (NM_002214.1,2640-2658).
cttgatcagtgcaaaacct

SEQ ID NO: 249612 - DNA, 19 bp, Homo sapiens
  siRNA target sequence for ITGB8 (NM_002214.1,2662-2680).
gtgctctcatggaacaaca

SEQ ID NO: 249613 - DNA, 19 bp, Homo sapiens
  siRNA target sequence for ITGB8 (NM_002214.1,2682-2700).
cattatgtcgaccaaactt

SEQ ID NO: 249614 - DNA, 19 bp, Homo sapiens
  siRNA target sequence for ITGB8 (NM_002214.1,2688-2706).
gtcgaccaaacttcagaat

SEQ ID NO: 249615 - DNA, 19 bp, Homo sapiens
  siRNA target sequence for ITGB8 (NM_002214.1,2716-2734).
gcccaagctacttgagaat

SEQ ID NO: 249616 - DNA, 19 bp, Homo sapiens
  siRNA target sequence for ITGB8 (NM_002214.1,2719-2737).
caagctacttgagaatatt

SEQ ID NO: 249617 - DNA, 19 bp, Homo sapiens
  siRNA target sequence for ITGB8 (NM_002214.1,2741-2759).
catcattttcatagttaca

SEQ ID NO: 249618 - DNA, 19 bp, Homo sapiens
  siRNA target sequence for ITGB8 (NM_002214.1,2774-2792).
gcttaaagtcctgatcatt

SEQ ID NO: 249619 - DNA, 19 bp, Homo sapiens
  siRNA target sequence for ITGB8 (NM_002214.1,2798-2816).
ggtgatactacaatggaat

SEQ ID NO: 249620 - DNA, 19 bp, Homo sapiens
  siRNA target sequence for ITGB8 (NM_002214.1,2799-2817).
gtgatactacaatggaata

SEQ ID NO: 249621 - DNA, 19 bp, Homo sapiens
  siRNA target sequence for ITGB8 (NM_002214.1,2801-2819).
gatactacaatggaatagt

SEQ ID NO: 249622 - DNA, 19 bp, Homo sapiens
  siRNA target sequence for ITGB8 (NM_002214.1,2805-2823).
ctacaatggaatagtaata

SEQ ID NO: 249623 - DNA, 19 bp, Homo sapiens
  siRNA target sequence for ITGB8 (NM_002214.1,2831-2849).
gtcctcatcagattacaga

SEQ ID NO: 249624 - DNA, 19 bp, Homo sapiens
  siRNA target sequence for ITGB8 (NM_002214.1,2873-2891).
gttgattctgcaaagtgtt

SEQ ID NO: 249625 - DNA, 19 bp, Homo sapiens
  siRNA target sequence for ITPR3 (NM_002224.1,172-190).
gacaacccccctaagaagt

SEQ ID NO: 249626 - DNA, 19 bp, Homo sapiens
  siRNA target sequence for ITPR3 (NM_002224.1,585-603).
gatcctgaatcctgtcaat

SEQ ID NO: 249627 - DNA, 19 bp, Homo sapiens
  siRNA target sequence for ITPR3 (NM_002224.1,613-631).
cctctgcatgccagcaatt

SEQ ID NO: 249628 - DNA, 19 bp, Homo sapiens
  siRNA target sequence for ITPR3 (NM_002224.1,614-632).
ctctgcatgccagcaatta

SEQ ID NO: 249629 - DNA, 19 bp, Homo sapiens
  siRNA target sequence for ITPR3 (NM_002224.1,988-1006).
gaggagaaccccagttaca

SEQ ID NO: 249630 - DNA, 19 bp, Homo sapiens
  siRNA target sequence for ITPR3 (NM_002224.1,990-1008).
ggagaaccccagttacaaa

SEQ ID NO: 249631 - DNA, 19 bp, Homo sapiens
  siRNA target sequence for ITPR3 (NM_002224.1,1147-1165).
cccaccaccttgcagaaaa

SEQ ID NO: 249632 - DNA, 19 bp, Homo sapiens
  siRNA target sequence for ITPR3 (NM_002224.1,1485-1503).
cagcgatgtccccaacaat

SEQ ID NO: 249633 - DNA, 19 bp, Homo sapiens
  siRNA target sequence for ITPR3 (NM_002224.1,2118-2136).
cacgtggactgacaagaat

SEQ ID NO: 249634 - DNA, 19 bp, Homo sapiens
  siRNA target sequence for ITPR3 (NM_002224.1,2120-2138).
cgtggactgacaagaataa

SEQ ID NO: 249635 - DNA, 19 bp, Homo sapiens
  siRNA target sequence for ITPR3 (NM_002224.1,2123-2141).
ggactgacaagaataacga

SEQ ID NO: 249636 - DNA, 19 bp, Homo sapiens
  siRNA target sequence for ITPR3 (NM_002224.1,2255-2273).
gcttggaccgccagtactt

SEQ ID NO: 249637 - DNA, 19 bp, Homo sapiens
  siRNA target sequence for ITPR3 (NM_002224.1,2299-2317).
ctgggcgtggacctgattt

SEQ ID NO: 249638 - DNA, 19 bp, Homo sapiens
  siRNA target sequence for ITPR3 (NM_002224.1,2303-2321).
gcgtggacctgattttcct

SEQ ID NO: 249639 - DNA, 19 bp, Homo sapiens
  siRNA target sequence for ITPR3 (NM_002224.1,2415-2433).
ggtcacgccggtcaagttt

SEQ ID NO: 249640 - DNA, 19 bp, Homo sapiens
  siRNA target sequence for ITPR3 (NM_002224.1,2498-2516).
cgtcccgagatgacaagaa

SEQ ID NO: 249641 - DNA, 19 bp, Homo sapiens
  siRNA target sequence for ITPR3 (NM_002224.1,2550-2568).
ggactacctcaacaatgta

SEQ ID NO: 249642 - DNA, 19 bp, Homo sapiens
  siRNA target sequence for ITPR3 (NM_002224.1,2630-2648).
gcctggcgcacaatctcat

SEQ ID NO: 249643 - DNA, 19 bp, Homo sapiens
  siRNA target sequence for ITPR3 (NM_002224.1,2635-2653).
gcgcacaatctcatctact

SEQ ID NO: 249644 - DNA, 19 bp, Homo sapiens
  siRNA target sequence for ITPR3 (NM_002224.1,2636-2654).
cgcacaatctcatctactt

SEQ ID NO: 249645 - DNA, 19 bp, Homo sapiens
  siRNA target sequence for ITPR3 (NM_002224.1,2754-2772).
ggaccccggtggcaagaat

SEQ ID NO: 249646 - DNA, 19 bp, Homo sapiens
  siRNA target sequence for ITPR3 (NM_002224.1,2943-2961).
gaagatcctggaaatcctt

SEQ ID NO: 249647 - DNA, 19 bp, Homo sapiens
  siRNA target sequence for ITPR3 (NM_002224.1,3338-3356).
cgcaggacgtggagaacta

SEQ ID NO: 249648 - DNA, 19 bp, Homo sapiens
  siRNA target sequence for ITPR3 (NM_002224.1,3584-3602).
gcggggttggggagcaaat

SEQ ID NO: 249649 - DNA, 19 bp, Homo sapiens
  siRNA target sequence for ITPR3 (NM_002224.1,4032-4050).
ggtcgtgttctacaatgat

SEQ ID NO: 249650 - DNA, 19 bp, Homo sapiens
  siRNA target sequence for ITPR3 (NM_002224.1,4033-4051).
gtcgtgttctacaatgata

SEQ ID NO: 249651 - DNA, 19 bp, Homo sapiens
  siRNA target sequence for ITPR3 (NM_002224.1,4117-4135).
cccctcatgtaccacattt

SEQ ID NO: 249652 - DNA, 19 bp, Homo sapiens
  siRNA target sequence for ITPR3 (NM_002224.1,4160-4178).
gtgccgagggcaaaaacgt

SEQ ID NO: 249653 - DNA, 19 bp, Homo sapiens
  siRNA target sequence for ITPR3 (NM_002224.1,5441-5459).
ccacggtggcagtcaacat

SEQ ID NO: 249654 - DNA, 19 bp, Homo sapiens
  siRNA target sequence for ITPR3 (NM_002224.1,5710-5728).
ctgcgctgtcagaacaaca

SEQ ID NO: 249655 - DNA, 19 bp, Homo sapiens
  siRNA target sequence for ITPR3 (NM_002224.1,6054-6072).
ccggcatgacagtgaaaat

SEQ ID NO: 249656 - DNA, 19 bp, Homo sapiens
  siRNA target sequence for ITPR3 (NM_002224.1,6175-6193).
cgtgaagtgggccataaca

SEQ ID NO: 249657 - DNA, 19 bp, Homo sapiens
  siRNA target sequence for ITPR3 (NM_002224.1,6176-6194).
gtgaagtgggccataacat

SEQ ID NO: 249658 - DNA, 19 bp, Homo sapiens
  siRNA target sequence for ITPR3 (NM_002224.1,6185-6203).
gccataacatctatatcct

SEQ ID NO: 249659 - DNA, 19 bp, Homo sapiens
  siRNA target sequence for ITPR3 (NM_002224.1,6254-6272).
cggtgaagcgcattcaaga

SEQ ID NO: 249660 - DNA, 19 bp, Homo sapiens
  siRNA target sequence for ITPR3 (NM_002224.1,6277-6295).
gaggccgagggtatctctt

SEQ ID NO: 249661 - DNA, 19 bp, Homo sapiens
  siRNA target sequence for ITPR3 (NM_002224.1,6398-6416).
cgtcccagatcgagattgt

SEQ ID NO: 249662 - DNA, 19 bp, Homo sapiens
  siRNA target sequence for ITPR3 (NM_002224.1,6533-6551).
gcaaagtgagcgacttctt

SEQ ID NO: 249663 - DNA, 19 bp, Homo sapiens
  siRNA target sequence for ITPR3 (NM_002224.1,6602-6620).
gcagcatgccgctgatcta

SEQ ID NO: 249664 - DNA, 19 bp, Homo sapiens
  siRNA target sequence for ITPR3 (NM_002224.1,6739-6757).
gactcccctctcatctcat

SEQ ID NO: 249665 - DNA, 19 bp, Homo sapiens
  siRNA target sequence for ITPR3 (NM_002224.1,6889-6907).
ctgggtgccctcaatctga

SEQ ID NO: 249666 - DNA, 19 bp, Homo sapiens
  siRNA target sequence for ITPR3 (NM_002224.1,7042-7060).
gctcatgagctgttctaca

SEQ ID NO: 249667 - DNA, 19 bp, Homo sapiens
  siRNA target sequence for ITPR3 (NM_002224.1,7088-7106).
gcgaggagacgctgttcaa

SEQ ID NO: 249668 - DNA, 19 bp, Homo sapiens
  siRNA target sequence for ITPR3 (NM_002224.1,7307-7325).
cctgcagtggggacaagat

SEQ ID NO: 249669 - DNA, 19 bp, Homo sapiens
  siRNA target sequence for ITPR3 (NM_002224.1,7397-7415).
cctgtgacactctgttgat

SEQ ID NO: 249670 - DNA, 19 bp, Homo sapiens
  siRNA target sequence for ITPR3 (NM_002224.1,7457-7475).
gtggcgtgggcgacattct

SEQ ID NO: 249671 - DNA, 19 bp, Homo sapiens
  siRNA target sequence for ITPR3 (NM_002224.1,7478-7496).
gcaagccctccaaagatga

SEQ ID NO: 249672 - DNA, 19 bp, Homo sapiens
  siRNA target sequence for ITPR3 (NM_002224.1,7723-7741).
cacaacatgtggaactact

SEQ ID NO: 249673 - DNA, 19 bp, Homo sapiens
  siRNA target sequence for ITPR3 (NM_002224.1,8026-8044).
gatgtccagaactgcatta

SEQ ID NO: 249674 - DNA, 19 bp, Homo sapiens
  siRNA target sequence for KDELR3 (NM_006855.2,358-376).
ctcctctgtgcctatgtta

SEQ ID NO: 249675 - DNA, 19 bp, Homo sapiens
  siRNA target sequence for KDELR3 (NM_006855.2,394-412).
gggaaattccgtaaaactt

SEQ ID NO: 249676 - DNA, 19 bp, Homo sapiens
  siRNA target sequence for KDELR3 (NM_006855.2,395-413).
ggaaattccgtaaaacttt

SEQ ID NO: 249677 - DNA, 19 bp, Homo sapiens
  siRNA target sequence for KDELR3 (NM_006855.2,553-571).
ccccagctcttcatgatca

SEQ ID NO: 249678 - DNA, 19 bp, Homo sapiens
  siRNA target sequence for KDELR3 (NM_006855.2,583-601).
gaggctgagaccataacta

SEQ ID NO: 249679 - DNA, 19 bp, Homo sapiens
  siRNA target sequence for KDELR3 (NM_006855.2,660-678).
gcggtaccagactgagaat

SEQ ID NO: 249680 - DNA, 19 bp, Homo sapiens
  siRNA target sequence for KDELR3 (NM_006855.2,666-684).
ccagactgagaatttctat

SEQ ID NO: 249681 - DNA, 19 bp, Homo sapiens
  siRNA target sequence for KDELR3 (NM_006855.2,699-717).
cgtgtctggagtagtacaa

SEQ ID NO: 249682 - DNA, 19 bp, Homo sapiens
  siRNA target sequence for KDELR3 (NM_006855.2,700-718).
gtgtctggagtagtacaaa

SEQ ID NO: 249683 - DNA, 19 bp, Homo sapiens
  siRNA target sequence for KDELR3 (NM_006855.2,712-730).
gtacaaaccatcttctact

SEQ ID NO: 249684 - DNA, 19 bp, Homo sapiens
  siRNA target sequence for KDELR3 (NM_006855.2,762-780).
ccttaagggaaagaagtta

SEQ ID NO: 249685 - DNA, 19 bp, Homo sapiens
  siRNA target sequence for KDELR3 (NM_016657.1,793-811).
ggcctaaggagttactcat

SEQ ID NO: 249686 - DNA, 19 bp, Homo sapiens
  siRNA target sequence for KIAA1985 (NM_024577.2,182-200).
ctgtatcgagtgagtgtat

SEQ ID NO: 249687 - DNA, 19 bp, Homo sapiens
  siRNA target sequence for KIAA1985 (NM_024577.2,195-213).
gtgtatagcctcatctgaa

SEQ ID NO: 249688 - DNA, 19 bp, Homo sapiens
  siRNA target sequence for KIAA1985 (NM_024577.2,197-215).
gtatagcctcatctgaata

SEQ ID NO: 249689 - DNA, 19 bp, Homo sapiens
  siRNA target sequence for KIAA1985 (NM_024577.2,283-301).
cgctccaggaggtgtgtaa

SEQ ID NO: 249690 - DNA, 19 bp, Homo sapiens
  siRNA target sequence for KIAA1985 (NM_024577.2,285-303).
ctccaggaggtgtgtaaat

SEQ ID NO: 249691 - DNA, 19 bp, Homo sapiens
  siRNA target sequence for KIAA1985 (NM_024577.2,361-379).
gaggtgcgcatgctgttta

SEQ ID NO: 249692 - DNA, 19 bp, Homo sapiens
  siRNA target sequence for KIAA1985 (NM_024577.2,413-431).
ctcagagggcccagtttct

SEQ ID NO: 249693 - DNA, 19 bp, Homo sapiens
  siRNA target sequence for KIAA1985 (NM_024577.2,465-483).
gttctccacctaccttaat

SEQ ID NO: 249694 - DNA, 19 bp, Homo sapiens
  siRNA target sequence for KIAA1985 (NM_024577.2,492-510).
cgtatccatgtgtctagaa

SEQ ID NO: 249695 - DNA, 19 bp, Homo sapiens
  siRNA target sequence for KIAA1985 (NM_024577.2,497-515).
ccatgtgtctagaacatct

SEQ ID NO: 249696 - DNA, 19 bp, Homo sapiens
  siRNA target sequence for KIAA1985 (NM_024577.2,570-588).
ccaagtgtctgtagatgat

SEQ ID NO: 249697 - DNA, 19 bp, Homo sapiens
  siRNA target sequence for KIAA1985 (NM_024577.2,571-589).
caagtgtctgtagatgata

SEQ ID NO: 249698 - DNA, 19 bp, Homo sapiens
  siRNA target sequence for KIAA1985 (NM_024577.2,990-1008).
gatcatcggctttgtcata

SEQ ID NO: 249699 - DNA, 19 bp, Homo sapiens
  siRNA target sequence for KIAA1985 (NM_024577.2,1204-1222).
gctcgcactgacatcacat

SEQ ID NO: 249700 - DNA, 19 bp, Homo sapiens
  siRNA target sequence for KIAA1985 (NM_024577.2,1230-1248).
ccggctcagtgggtttgaa

SEQ ID NO: 249701 - DNA, 19 bp, Homo sapiens
  siRNA target sequence for KIAA1985 (NM_024577.2,1231-1249).
cggctcagtgggtttgaat

SEQ ID NO: 249702 - DNA, 19 bp, Homo sapiens
  siRNA target sequence for KIAA1985 (NM_024577.2,1280-1298).
catcccagcctgaaggttt

SEQ ID NO: 249703 - DNA, 19 bp, Homo sapiens
  siRNA target sequence for KIAA1985 (NM_024577.2,1534-1552).
ggttatgctgaccacttta

SEQ ID NO: 249704 - DNA, 19 bp, Homo sapiens
  siRNA target sequence for KIAA1985 (NM_024577.2,1629-1647).
ctacctggaggcatcaaga

SEQ ID NO: 249705 - DNA, 19 bp, Homo sapiens
  siRNA target sequence for KIAA1985 (NM_024577.2,1784-1802).
catttgaggacctatcctt

SEQ ID NO: 249706 - DNA, 19 bp, Homo sapiens
  siRNA target sequence for KIAA1985 (NM_024577.2,1804-1822).
gtggccactctgtacatca

SEQ ID NO: 249707 - DNA, 19 bp, Homo sapiens
  siRNA target sequence for KIAA1985 (NM_024577.2,1806-1824).
ggccactctgtacatcaat

SEQ ID NO: 249708 - DNA, 19 bp, Homo sapiens
  siRNA target sequence for KIAA1985 (NM_024577.2,1807-1825).
gccactctgtacatcaatt

SEQ ID NO: 249709 - DNA, 19 bp, Homo sapiens
  siRNA target sequence for KIAA1985 (NM_024577.2,1829-1847).
ctgccatctacctgaaaca

SEQ ID NO: 249710 - DNA, 19 bp, Homo sapiens
  siRNA target sequence for KIAA1985 (NM_024577.2,2113-2131).
gctgtggccagtgttttga

SEQ ID NO: 249711 - DNA, 19 bp, Homo sapiens
  siRNA target sequence for KIAA1985 (NM_024577.2,2177-2195).
ctgtccagcaacatggtat

SEQ ID NO: 249712 - DNA, 19 bp, Homo sapiens
  siRNA target sequence for KIAA1985 (NM_024577.2,2209-2227).
gggatgtctcttcctattt

SEQ ID NO: 249713 - DNA, 19 bp, Homo sapiens
  siRNA target sequence for KIAA1985 (NM_024577.2,2600-2618).
ctcaaaggggagtcatcta

SEQ ID NO: 249714 - DNA, 19 bp, Homo sapiens
  siRNA target sequence for KIAA1985 (NM_024577.2,2606-2624).
ggggagtcatctataacct

SEQ ID NO: 249715 - DNA, 19 bp, Homo sapiens
  siRNA target sequence for KIAA1985 (NM_024577.2,2749-2767).
ggccacctgagccttaagt

SEQ ID NO: 249716 - DNA, 19 bp, Homo sapiens
  siRNA target sequence for KIAA1985 (NM_024577.2,2802-2820).
gcaggctgtacgactctat

SEQ ID NO: 249717 - DNA, 19 bp, Homo sapiens
  siRNA target sequence for KIAA1985 (NM_024577.2,2803-2821).
caggctgtacgactctatt

SEQ ID NO: 249718 - DNA, 19 bp, Homo sapiens
  siRNA target sequence for KIAA1985 (NM_024577.2,2805-2823).
ggctgtacgactctattgt

SEQ ID NO: 249719 - DNA, 19 bp, Homo sapiens
  siRNA target sequence for KIAA1985 (NM_024577.2,2807-2825).
ctgtacgactctattgtga

SEQ ID NO: 249720 - DNA, 19 bp, Homo sapiens
  siRNA target sequence for KIAA1985 (NM_024577.2,2908-2926).
ctgacccatggccttcttt

SEQ ID NO: 249721 - DNA, 19 bp, Homo sapiens
  siRNA target sequence for KIAA1985 (NM_024577.2,2912-2930).
cccatggccttctttgtta

SEQ ID NO: 249722 - DNA, 19 bp, Homo sapiens
  siRNA target sequence for KIAA1985 (NM_024577.2,2917-2935).
ggccttctttgttatgaaa

SEQ ID NO: 249723 - DNA, 19 bp, Homo sapiens
  siRNA target sequence for KIAA1985 (NM_024577.2,2952-2970).
cttaaggcatcgacatcta

SEQ ID NO: 249724 - DNA, 19 bp, Homo sapiens
  siRNA target sequence for KIAA1985 (NM_024577.2,2958-2976).
gcatcgacatctaaagagt

SEQ ID NO: 249725 - DNA, 19 bp, Homo sapiens
  siRNA target sequence for KIAA1985 (NM_024577.2,3117-3135).
gtccctggggcagctttat

SEQ ID NO: 249726 - DNA, 19 bp, Homo sapiens
  siRNA target sequence for KIAA1985 (NM_024577.2,3127-3145).
cagctttatcggaacctaa

SEQ ID NO: 249727 - DNA, 19 bp, Homo sapiens
  siRNA target sequence for KIAA1985 (NM_024577.2,3129-3147).
gctttatcggaacctaaat

SEQ ID NO: 249728 - DNA, 19 bp, Homo sapiens
  siRNA target sequence for KIAA1985 (NM_024577.2,3130-3148).
ctttatcggaacctaaata

SEQ ID NO: 249729 - DNA, 19 bp, Homo sapiens
  siRNA target sequence for KIAA1985 (NM_024577.2,3371-3389).
caggtgatgtgttcttcaa

SEQ ID NO: 249730 - DNA, 19 bp, Homo sapiens
  siRNA target sequence for KIAA1985 (NM_024577.2,3470-3488).
gaactgagctccggatttt

SEQ ID NO: 249731 - DNA, 19 bp, Homo sapiens
  siRNA target sequence for KIAA1985 (NM_024577.2,3473-3491).
ctgagctccggattttcaa

SEQ ID NO: 249732 - DNA, 19 bp, Homo sapiens
  siRNA target sequence for KIAA1985 (NM_024577.2,3475-3493).
gagctccggattttcaata

SEQ ID NO: 249733 - DNA, 19 bp, Homo sapiens
  siRNA target sequence for KIR2DL5 (NM_020535.1,207-225).
ctcgtcttgggtttaccat

SEQ ID NO: 249734 - DNA, 19 bp, Homo sapiens
  siRNA target sequence for KIR2DL5 (NM_020535.1,353-371).
ccacgctcccccattgagt

SEQ ID NO: 249735 - DNA, 19 bp, Homo sapiens
  siRNA target sequence for KIR2DS4 (NM_178228.1,441-459).
gtcctgcagctccatctat

SEQ ID NO: 249736 - DNA, 19 bp, Homo sapiens
  siRNA target sequence for LILRB2 (NM_005874.1,466-484).
cgatatggctgtcagtatt

SEQ ID NO: 249737 - DNA, 19 bp, Homo sapiens
  siRNA target sequence for LIMR (NM_018113.1,381-399).
gcaactgctggatgaatgt

SEQ ID NO: 249738 - DNA, 19 bp, Homo sapiens
  siRNA target sequence for LIMR (NM_018113.1,521-539).
ctcgagctgtgcaccttta

SEQ ID NO: 249739 - DNA, 19 bp, Homo sapiens
  siRNA target sequence for LIMR (NM_018113.1,609-627).
ccctgcctcggaactacta

SEQ ID NO: 249740 - DNA, 19 bp, Homo sapiens
  siRNA target sequence for LIMR (NM_018113.1,707-725).
ctcatgccctttgcatatt

SEQ ID NO: 249741 - DNA, 19 bp, Homo sapiens
  siRNA target sequence for LIMR (NM_018113.1,871-889).
caacagagagtcactctat

SEQ ID NO: 249742 - DNA, 19 bp, Homo sapiens
  siRNA target sequence for LIMR (NM_018113.1,876-894).
gagagtcactctatgactt

SEQ ID NO: 249743 - DNA, 19 bp, Homo sapiens
  siRNA target sequence for LIMR (NM_018113.1,878-896).
gagtcactctatgactttt

SEQ ID NO: 249744 - DNA, 19 bp, Homo sapiens
  siRNA target sequence for LIMR (NM_018113.1,1081-1099).
gacccgcaggatctgtaat

SEQ ID NO: 249745 - DNA, 19 bp, Homo sapiens
  siRNA target sequence for LIMR (NM_018113.1,1084-1102).
ccgcaggatctgtaatcct

SEQ ID NO: 249746 - DNA, 19 bp, Homo sapiens
  siRNA target sequence for LIMR (NM_018113.1,1085-1103).
cgcaggatctgtaatccta

SEQ ID NO: 249747 - DNA, 19 bp, Homo sapiens
  siRNA target sequence for LIMR (NM_018113.1,1260-1278).
gcctgtctgtgctcattgt

SEQ ID NO: 249748 - DNA, 19 bp, Homo sapiens
  siRNA target sequence for LIMR (NM_018113.1,1377-1395).
cctttggtgccgtcattca

SEQ ID NO: 249749 - DNA, 19 bp, Homo sapiens
  siRNA target sequence for LIMR (NM_018113.1,1394-1412).
caggttgtactcatctttt

SEQ ID NO: 249750 - DNA, 19 bp, Homo sapiens
  siRNA target sequence for LIMR (NM_018113.1,1400-1418).
gtactcatcttttacctaa

SEQ ID NO: 249751 - DNA, 19 bp, Homo sapiens
  siRNA target sequence for LIMR (NM_018113.1,1595-1613).
gactttggacgcttcaact

SEQ ID NO: 249752 - DNA, 19 bp, Homo sapiens
  siRNA target sequence for LOC143458 (NM_174902.2,230-248).
cccaaggctaagtcgaaat

SEQ ID NO: 249753 - DNA, 19 bp, Homo sapiens
  siRNA target sequence for LOC143458 (NM_174902.2,232-250).
caaggctaagtcgaaatgt

SEQ ID NO: 249754 - DNA, 19 bp, Homo sapiens
  siRNA target sequence for LOC143458 (NM_174902.2,273-291).
ccagcggcatccattgcat

SEQ ID NO: 249755 - DNA, 19 bp, Homo sapiens
  siRNA target sequence for LOC143458 (NM_174902.2,433-451).
cgatggacagaataactgt

SEQ ID NO: 249756 - DNA, 19 bp, Homo sapiens
  siRNA target sequence for LOC143458 (NM_174902.2,524-542).
gagaaccaacttgtgtatt

SEQ ID NO: 249757 - DNA, 19 bp, Homo sapiens
  siRNA target sequence for LOC143458 (NM_174902.2,568-586).
cggcagctccgtcattttt

SEQ ID NO: 249758 - DNA, 19 bp, Homo sapiens
  siRNA target sequence for LOC143458 (NM_174902.2,730-748).
cacctacaacgtcaataat

SEQ ID NO: 249759 - DNA, 19 bp, Homo sapiens
  siRNA target sequence for LOC143458 (NM_174902.2,873-891).
cttctgacacggaatctct

SEQ ID NO: 249760 - DNA, 19 bp, Homo sapiens
  siRNA target sequence for LOC143458 (NM_174902.2,1054-1072).
ccagggcactgaagaagta

SEQ ID NO: 249761 - DNA, 19 bp, Homo sapiens
  siRNA target sequence for LOC158435 (NM_138497.1,599-617).
gaaggtggacccacaaact

SEQ ID NO: 249762 - DNA, 19 bp, Homo sapiens
  siRNA target sequence for LOC158435 (NM_138497.1,612-630).
caaactcgtctcctaatga

SEQ ID NO: 249763 - DNA, 19 bp, Homo sapiens
  siRNA target sequence for LOC158435 (NM_138497.1,618-636).
cgtctcctaatgaagctaa

SEQ ID NO: 249764 - DNA, 19 bp, Homo sapiens
  siRNA target sequence for LRP3 (NM_002333.1,383-401).
cggcgtggggtcatctaca

SEQ ID NO: 249765 - DNA, 19 bp, Homo sapiens
  siRNA target sequence for LRP3 (NM_002333.1,459-477).
gcgaccgtggtgacatgat

SEQ ID NO: 249766 - DNA, 19 bp, Homo sapiens
  siRNA target sequence for LRP3 (NM_002333.1,460-478).
cgaccgtggtgacatgatt

SEQ ID NO: 249767 - DNA, 19 bp, Homo sapiens
  siRNA target sequence for LRP3 (NM_002333.1,465-483).
gtggtgacatgattaccat

SEQ ID NO: 249768 - DNA, 19 bp, Homo sapiens
  siRNA target sequence for LRP3 (NM_002333.1,677-695).
ggcttccgtctgtcttaca

SEQ ID NO: 249769 - DNA, 19 bp, Homo sapiens
  siRNA target sequence for LRP3 (NM_002333.1,678-696).
gcttccgtctgtcttacat

SEQ ID NO: 249770 - DNA, 19 bp, Homo sapiens
  siRNA target sequence for LRP3 (NM_002333.1,1532-1550).
cgctgcaacaaccagaaaa

SEQ ID NO: 249771 - DNA, 19 bp, Homo sapiens
  siRNA target sequence for LRP3 (NM_002333.1,1797-1815).
cactgcgcacgcaggaata

SEQ ID NO: 249772 - DNA, 19 bp, Homo sapiens
  siRNA target sequence for LRP3 (NM_002333.1,1799-1817).
ctgcgcacgcaggaataca

SEQ ID NO: 249773 - DNA, 19 bp, Homo sapiens
  siRNA target sequence for LRP3 (NM_002333.1,1867-1885).
ggaggcacccccatcctat

SEQ ID NO: 249774 - DNA, 19 bp, Homo sapiens
  siRNA target sequence for LRP3 (NM_002333.1,1954-1972).
ctctgtgctgcagaatctt

SEQ ID NO: 249775 - DNA, 19 bp, Homo sapiens
  siRNA target sequence for LRP5 (NM_002335.1,526-544).
cccgctcacgggtacatgt

SEQ ID NO: 249776 - DNA, 19 bp, Homo sapiens
  siRNA target sequence for LRP5 (NM_002335.1,527-545).
ccgctcacgggtacatgta

SEQ ID NO: 249777 - DNA, 19 bp, Homo sapiens
  siRNA target sequence for LRP5 (NM_002335.1,529-547).
gctcacgggtacatgtact

SEQ ID NO: 249778 - DNA, 19 bp, Homo sapiens
  siRNA target sequence for LRP5 (NM_002335.1,988-1006).
ccaagcgagcctttctaca

SEQ ID NO: 249779 - DNA, 19 bp, Homo sapiens
  siRNA target sequence for LRP5 (NM_002335.1,1192-1210).
ccgctagagggctatgtct

SEQ ID NO: 249780 - DNA, 19 bp, Homo sapiens
  siRNA target sequence for LRP5 (NM_002335.1,1193-1211).
cgctagagggctatgtcta

SEQ ID NO: 249781 - DNA, 19 bp, Homo sapiens
  siRNA target sequence for LRP5 (NM_002335.1,1629-1647).
cgaggtgatcaatgttgat

SEQ ID NO: 249782 - DNA, 19 bp, Homo sapiens
  siRNA target sequence for LRP5 (NM_002335.1,2254-2272).
gacactgggaccaacagaa

SEQ ID NO: 249783 - DNA, 19 bp, Homo sapiens
  siRNA target sequence for LRP5 (NM_002335.1,2357-2375).
ccaccaagggctacatcta

SEQ ID NO: 249784 - DNA, 19 bp, Homo sapiens
  siRNA target sequence for LRP5 (NM_002335.1,2603-2621).
cgcagtacagcgattatat

SEQ ID NO: 249785 - DNA, 19 bp, Homo sapiens
  siRNA target sequence for LRP5 (NM_002335.1,2605-2623).
cagtacagcgattatatct

SEQ ID NO: 249786 - DNA, 19 bp, Homo sapiens
  siRNA target sequence for LRP5 (NM_002335.1,2892-2910).
gctgttcagccagaaatct

SEQ ID NO: 249787 - DNA, 19 bp, Homo sapiens
  siRNA target sequence for LRP5 (NM_002335.1,3005-3023).
cactggacaagttcatcta

SEQ ID NO: 249788 - DNA, 19 bp, Homo sapiens
  siRNA target sequence for LRP5 (NM_002335.1,3066-3084).
cgggacccagccctttgtt

SEQ ID NO: 249789 - DNA, 19 bp, Homo sapiens
  siRNA target sequence for LRP5 (NM_002335.1,3067-3085).
gggacccagccctttgttt

SEQ ID NO: 249790 - DNA, 19 bp, Homo sapiens
  siRNA target sequence for LRP5 (NM_002335.1,3068-3086).
ggacccagccctttgtttt

SEQ ID NO: 249791 - DNA, 19 bp, Homo sapiens
  siRNA target sequence for LRP5 (NM_002335.1,3133-3151).
ctcagcatcgacatctaca

SEQ ID NO: 249792 - DNA, 19 bp, Homo sapiens
  siRNA target sequence for LRP5 (NM_002335.1,3280-3298).
cgagggtacctgtacttca

SEQ ID NO: 249793 - DNA, 19 bp, Homo sapiens
  siRNA target sequence for LRP5 (NM_002335.1,3442-3460).
gacctgaagcgcattgaga

SEQ ID NO: 249794 - DNA, 19 bp, Homo sapiens
  siRNA target sequence for LRP5 (NM_002335.1,3693-3711).
cccatgtgcccgtgacaat

SEQ ID NO: 249795 - DNA, 19 bp, Homo sapiens
  siRNA target sequence for LRP5 (NM_002335.1,3851-3869).
caggggagatcgactgtat

SEQ ID NO: 249796 - DNA, 19 bp, Homo sapiens
  siRNA target sequence for LRP5 (NM_002335.1,4242-4260).
cgtcatgggtggtgtctat

SEQ ID NO: 249797 - DNA, 19 bp, Homo sapiens
  siRNA target sequence for LRP5 (NM_002335.1,4243-4261).
gtcatgggtggtgtctatt

SEQ ID NO: 249798 - DNA, 19 bp, Homo sapiens
  siRNA target sequence for LRP5 (NM_002335.1,4310-4328).
ccttcccgcacgagtatgt

SEQ ID NO: 249799 - DNA, 19 bp, Homo sapiens
  siRNA target sequence for LRP5 (NM_002335.1,4339-4357).
ccgcacgtgcccctcaatt

SEQ ID NO: 249800 - DNA, 19 bp, Homo sapiens
  siRNA target sequence for LRP5 (NM_002335.1,4340-4358).
cgcacgtgcccctcaattt

SEQ ID NO: 249801 - DNA, 19 bp, Homo sapiens
  siRNA target sequence for LRP5 (NM_002335.1,4342-4360).
cacgtgcccctcaatttca

SEQ ID NO: 249802 - DNA, 19 bp, Homo sapiens
  siRNA target sequence for LRP5 (NM_002335.1,4344-4362).
cgtgcccctcaatttcata

SEQ ID NO: 249803 - DNA, 19 bp, Homo sapiens
  siRNA target sequence for LRP5 (NM_002335.1,4565-4583).
cggacccctccctgtacaa

SEQ ID NO: 249804 - DNA, 19 bp, Homo sapiens
  siRNA target sequence for LRP5 (NM_002335.1,4593-4611).
gttctactcttcaaacatt

SEQ ID NO: 249805 - DNA, 19 bp, Homo sapiens
  siRNA target sequence for LRP5 (NM_002335.1,4627-4645).
ccgtacaggccctacatca

SEQ ID NO: 249806 - DNA, 19 bp, Homo sapiens
  siRNA target sequence for LRP5 (NM_002335.1,4628-4646).
cgtacaggccctacatcat

SEQ ID NO: 249807 - DNA, 19 bp, Homo sapiens
  siRNA target sequence for LRP5 (NM_002335.1,4629-4647).
gtacaggccctacatcatt

SEQ ID NO: 249808 - DNA, 19 bp, Homo sapiens
  siRNA target sequence for MAML2 (NM_032427.1,1443-1461).
gctgtgaaggacgatatga

SEQ ID NO: 249809 - DNA, 19 bp, Homo sapiens
  siRNA target sequence for MAML2 (NM_032427.1,1699-1717).
gctgaacagtagcaataat

SEQ ID NO: 249810 - DNA, 19 bp, Homo sapiens
  siRNA target sequence for MAML2 (NM_032427.1,1719-1737).
gtggcagtggtgggataaa

SEQ ID NO: 249811 - DNA, 19 bp, Homo sapiens
  siRNA target sequence for MAML2 (NM_032427.1,1818-1836).
gaaaacaggtagttaacct

SEQ ID NO: 249812 - DNA, 19 bp, Homo sapiens
  siRNA target sequence for MAML2 (NM_032427.1,1879-1897).
ctcatttcttgatatcaaa

SEQ ID NO: 249813 - DNA, 19 bp, Homo sapiens
  siRNA target sequence for MAML2 (NM_032427.1,1904-1922).
cgtgttggggagaatctct

SEQ ID NO: 249814 - DNA, 19 bp, Homo sapiens
  siRNA target sequence for MAML2 (NM_032427.1,1931-1949).
caaggtggcctccaaataa

SEQ ID NO: 249815 - DNA, 19 bp, Homo sapiens
  siRNA target sequence for MAML2 (NM_032427.1,1934-1952).
ggtggcctccaaataaaca

SEQ ID NO: 249816 - DNA, 19 bp, Homo sapiens
  siRNA target sequence for MAML2 (NM_032427.1,1955-1973).
ggacaaagtcagattatgt

SEQ ID NO: 249817 - DNA, 19 bp, Homo sapiens
  siRNA target sequence for MAML2 (NM_032427.1,1998-2016).
cacccctgcgaaagactaa

SEQ ID NO: 249818 - DNA, 19 bp, Homo sapiens
  siRNA target sequence for MAML2 (NM_032427.1,2000-2018).
cccctgcgaaagactaaca

SEQ ID NO: 249819 - DNA, 19 bp, Homo sapiens
  siRNA target sequence for MAML2 (NM_032427.1,2019-2037).
ctctgccatcccatacaca

SEQ ID NO: 249820 - DNA, 19 bp, Homo sapiens
  siRNA target sequence for MAML2 (NM_032427.1,2046-2064).
gcaatggcctgtttaacat

SEQ ID NO: 249821 - DNA, 19 bp, Homo sapiens
  siRNA target sequence for MAML2 (NM_032427.1,2066-2084).
ggcttaaaggaggtaaaga

SEQ ID NO: 249822 - DNA, 19 bp, Homo sapiens
  siRNA target sequence for MAML2 (NM_032427.1,2128-2146).
ccaaatgacccaagagaat

SEQ ID NO: 249823 - DNA, 19 bp, Homo sapiens
  siRNA target sequence for MAML2 (NM_032427.1,2291-2309).
caggatgacccatttaaca

SEQ ID NO: 249824 - DNA, 19 bp, Homo sapiens
  siRNA target sequence for MAML2 (NM_032427.1,2372-2390).
gtgatcaaaagtgaatact

SEQ ID NO: 249825 - DNA, 19 bp, Homo sapiens
  siRNA target sequence for MAML2 (NM_032427.1,2794-2812).
cagcggccagtcgaaagta

SEQ ID NO: 249826 - DNA, 19 bp, Homo sapiens
  siRNA target sequence for MAML2 (NM_032427.1,2796-2814).
gcggccagtcgaaagtaat

SEQ ID NO: 249827 - DNA, 19 bp, Homo sapiens
  siRNA target sequence for MAML2 (NM_032427.1,2891-2909).
gatctcagtcgaagtttta

SEQ ID NO: 249828 - DNA, 19 bp, Homo sapiens
  siRNA target sequence for MAML2 (NM_032427.1,2894-2912).
ctcagtcgaagttttatta

SEQ ID NO: 249829 - DNA, 19 bp, Homo sapiens
  siRNA target sequence for MAML2 (NM_032427.1,3619-3637).
ggctgacgcggagaaaatt

SEQ ID NO: 249830 - DNA, 19 bp, Homo sapiens
  siRNA target sequence for MAML2 (NM_032427.1,3631-3649).
gaaaattgctccacaagat

SEQ ID NO: 249831 - DNA, 19 bp, Homo sapiens
  siRNA target sequence for MAML2 (NM_032427.1,3652-3670).
gataaaccgacatttgtca

SEQ ID NO: 249832 - DNA, 19 bp, Homo sapiens
  siRNA target sequence for MAML2 (NM_032427.1,3669-3687).
caaggccacctccagatta

SEQ ID NO: 249833 - DNA, 19 bp, Homo sapiens
  siRNA target sequence for MAML2 (NM_032427.1,3672-3690).
ggccacctccagattataa

SEQ ID NO: 249834 - DNA, 19 bp, Homo sapiens
  siRNA target sequence for MAML2 (NM_032427.1,3719-3737).
caaccaactgctcagtatt

SEQ ID NO: 249835 - DNA, 19 bp, Homo sapiens
  siRNA target sequence for MAML2 (NM_032427.1,3740-3758).
ggtggctcatccacaataa

SEQ ID NO: 249836 - DNA, 19 bp, Homo sapiens
  siRNA target sequence for MAML2 (NM_032427.1,3743-3761).
ggctcatccacaataagct

SEQ ID NO: 249837 - DNA, 19 bp, Homo sapiens
  siRNA target sequence for MAML2 (NM_032427.1,3745-3763).
ctcatccacaataagctta

SEQ ID NO: 249838 - DNA, 19 bp, Homo sapiens
  siRNA target sequence for MAML2 (NM_032427.1,3751-3769).
cacaataagcttaaactct

SEQ ID NO: 249839 - DNA, 19 bp, Homo sapiens
  siRNA target sequence for MAML2 (NM_032427.1,3781-3799).
ggcaaacccagtttcaaca

SEQ ID NO: 249840 - DNA, 19 bp, Homo sapiens
  siRNA target sequence for MAML2 (NM_032427.1,3837-3855).
cttctcacgggacaagaat

SEQ ID NO: 249841 - DNA, 19 bp, Homo sapiens
  siRNA target sequence for MAML2 (NM_032427.1,3846-3864).
ggacaagaatgccatcatt

SEQ ID NO: 249842 - DNA, 19 bp, Homo sapiens
  siRNA target sequence for MAML2 (NM_032427.1,3909-3927).
gtaatcaacctaacacata

SEQ ID NO: 249843 - DNA, 19 bp, Homo sapiens
  siRNA target sequence for MAML2 (NM_032427.1,3977-3995).
caattgttagcaaatcaaa

SEQ ID NO: 249844 - DNA, 19 bp, Homo sapiens
  siRNA target sequence for MAML2 (NM_032427.1,4009-4027).
gccacggccacctacctta

SEQ ID NO: 249845 - DNA, 19 bp, Homo sapiens
  siRNA target sequence for MAML2 (NM_032427.1,4020-4038).
ctaccttagggccaagtaa

SEQ ID NO: 249846 - DNA, 19 bp, Homo sapiens
  siRNA target sequence for MAML2 (NM_032427.1,4023-4041).
ccttagggccaagtaataa

SEQ ID NO: 249847 - DNA, 19 bp, Homo sapiens
  siRNA target sequence for MAML2 (NM_032427.1,4068-4086).
gatctgttggtaattcaca

SEQ ID NO: 249848 - DNA, 19 bp, Homo sapiens
  siRNA target sequence for MAML2 (NM_032427.1,4073-4091).
gttggtaattcacaacaat

SEQ ID NO: 249849 - DNA, 19 bp, Homo sapiens
  siRNA target sequence for MAML2 (NM_032427.1,4076-4094).
ggtaattcacaacaattga

SEQ ID NO: 249850 - DNA, 19 bp, Homo sapiens
  siRNA target sequence for MAML2 (NM_032427.1,4085-4103).
caacaattgagaccaaatt

SEQ ID NO: 249851 - DNA, 19 bp, Homo sapiens
  siRNA target sequence for MAML2 (NM_032427.1,4088-4106).
caattgagaccaaatttaa

SEQ ID NO: 249852 - DNA, 19 bp, Homo sapiens
  siRNA target sequence for MAML2 (NM_032427.1,4098-4116).
caaatttaacccatagtat

SEQ ID NO: 249853 - DNA, 19 bp, Homo sapiens
  siRNA target sequence for MAML2 (NM_032427.1,4137-4155).
gaacatcaaacgtaatgat

SEQ ID NO: 249854 - DNA, 19 bp, Homo sapiens
  siRNA target sequence for MAML2 (NM_032427.1,4262-4280).
gcctataccccaaatcagt

SEQ ID NO: 249855 - DNA, 19 bp, Homo sapiens
  siRNA target sequence for MAML2 (NM_032427.1,4293-4311).
cagtaggtagccagcaatt

SEQ ID NO: 249856 - DNA, 19 bp, Homo sapiens
  siRNA target sequence for MAML2 (NM_032427.1,4295-4313).
gtaggtagccagcaatttt

SEQ ID NO: 249857 - DNA, 19 bp, Homo sapiens
  siRNA target sequence for MAML2 (NM_032427.1,4328-4346).
gctcctcctaaccagttaa

SEQ ID NO: 249858 - DNA, 19 bp, Homo sapiens
  siRNA target sequence for MAML2 (NM_032427.1,4375-4393).
ccaaatgagccaaacacta

SEQ ID NO: 249859 - DNA, 19 bp, Homo sapiens
  siRNA target sequence for MAML2 (NM_032427.1,4413-4431).
ccctcaggggtctgaatct

SEQ ID NO: 249860 - DNA, 19 bp, Homo sapiens
  siRNA target sequence for MAML2 (NM_032427.1,4479-4497).
caggaacagggttgaatca

SEQ ID NO: 249861 - DNA, 19 bp, Homo sapiens
  siRNA target sequence for MAML2 (NM_032427.1,4481-4499).
ggaacagggttgaatcagt

SEQ ID NO: 249862 - DNA, 19 bp, Homo sapiens
  siRNA target sequence for MAML2 (NM_032427.1,4528-4546).
cctgacgcccagcaatttt

SEQ ID NO: 249863 - DNA, 19 bp, Homo sapiens
  siRNA target sequence for MAML2 (NM_032427.1,4591-4609).
cagcagtgacttagctttt

SEQ ID NO: 249864 - DNA, 19 bp, Homo sapiens
  siRNA target sequence for MAML2 (NM_032427.1,4593-4611).
gcagtgacttagcttttga

SEQ ID NO: 249865 - DNA, 19 bp, Homo sapiens
  siRNA target sequence for MAML2 (NM_032427.1,4684-4702).
gaagacagagcctggtaat

SEQ ID NO: 249866 - DNA, 19 bp, Homo sapiens
  siRNA target sequence for MAML2 (NM_032427.1,4687-4705).
gacagagcctggtaatgat

SEQ ID NO: 249867 - DNA, 19 bp, Homo sapiens
  siRNA target sequence for MAML2 (NM_032427.1,4718-4736).
gacatcaatcttgatgaaa

SEQ ID NO: 249868 - DNA, 19 bp, Homo sapiens
  siRNA target sequence for MCC (NM_002387.1,308-326).
ggagatatagtggaactta

SEQ ID NO: 249869 - DNA, 19 bp, Homo sapiens
  siRNA target sequence for MCC (NM_002387.1,550-568).
ctcagaactgcgatcagaa

SEQ ID NO: 249870 - DNA, 19 bp, Homo sapiens
  siRNA target sequence for MCC (NM_002387.1,821-839).
cactgtgacctggctatta

SEQ ID NO: 249871 - DNA, 19 bp, Homo sapiens
  siRNA target sequence for MCC (NM_002387.1,1180-1198).
cattcccatcgccaagatt

SEQ ID NO: 249872 - DNA, 19 bp, Homo sapiens
  siRNA target sequence for MCC (NM_002387.1,1199-1217).
gctgagagggtgaagctat

SEQ ID NO: 249873 - DNA, 19 bp, Homo sapiens
  siRNA target sequence for MCC (NM_002387.1,1208-1226).
gtgaagctatcaaagacaa

SEQ ID NO: 249874 - DNA, 19 bp, Homo sapiens
  siRNA target sequence for MCC (NM_002387.1,1228-1246).
gtccgaatcgtcatcatct

SEQ ID NO: 249875 - DNA, 19 bp, Homo sapiens
  siRNA target sequence for MCC (NM_002387.1,1231-1249).
cgaatcgtcatcatctgat

SEQ ID NO: 249876 - DNA, 19 bp, Homo sapiens
  siRNA target sequence for MCC (NM_002387.1,1254-1272).
cagtcctgggctcagaaat

SEQ ID NO: 249877 - DNA, 19 bp, Homo sapiens
  siRNA target sequence for MCC (NM_002387.1,1327-1345).
ggactgctccaatatccaa

SEQ ID NO: 249878 - DNA, 19 bp, Homo sapiens
  siRNA target sequence for MCC (NM_002387.1,1384-1402).
ctcagaaagcaagattaga

SEQ ID NO: 249879 - DNA, 19 bp, Homo sapiens
  siRNA target sequence for MCC (NM_002387.1,1682-1700).
gaccagtcgggggatgaaa

SEQ ID NO: 249880 - DNA, 19 bp, Homo sapiens
  siRNA target sequence for MCC (NM_002387.1,1685-1703).
cagtcgggggatgaaaaca

SEQ ID NO: 249881 - DNA, 19 bp, Homo sapiens
  siRNA target sequence for MCC (NM_002387.1,1890-1908).
gcgacaccgagttcactaa

SEQ ID NO: 249882 - DNA, 19 bp, Homo sapiens
  siRNA target sequence for MCC (NM_002387.1,1891-1909).
cgacaccgagttcactaaa

SEQ ID NO: 249883 - DNA, 19 bp, Homo sapiens
  siRNA target sequence for MCC (NM_002387.1,1923-1941).
ggctgaaggattatatcca

SEQ ID NO: 249884 - DNA, 19 bp, Homo sapiens
  siRNA target sequence for MCC (NM_002387.1,2355-2373).
caacgtgcagcgagaatga

SEQ ID NO: 249885 - DNA, 19 bp, Homo sapiens
  siRNA target sequence for MCC (NM_002387.1,2396-2414).
gccattcgtcgagaaaaga

SEQ ID NO: 249886 - DNA, 19 bp, Homo sapiens
  siRNA target sequence for MCC (NM_002387.1,2397-2415).
ccattcgtcgagaaaagaa

SEQ ID NO: 249887 - DNA, 19 bp, Homo sapiens
  siRNA target sequence for MCC (NM_002387.1,2496-2514).
cagagttcgtgaatgatct

SEQ ID NO: 249888 - DNA, 19 bp, Homo sapiens
  siRNA target sequence for MCC (NM_002387.1,2498-2516).
gagttcgtgaatgatctaa

SEQ ID NO: 249889 - DNA, 19 bp, Homo sapiens
  siRNA target sequence for MCC (NM_002387.1,2637-2655).
ggatgctcaagcaaagaat

SEQ ID NO: 249890 - DNA, 19 bp, Homo sapiens
  siRNA target sequence for MCC (NM_002387.1,2638-2656).
gatgctcaagcaaagaata

SEQ ID NO: 249891 - DNA, 19 bp, Homo sapiens
  siRNA target sequence for MCC (NM_002387.1,2641-2659).
gctcaagcaaagaatagct

SEQ ID NO: 249892 - DNA, 19 bp, Homo sapiens
  siRNA target sequence for MCP (NM_002389.3,260-278).
gtgaggagccaccaacatt

SEQ ID NO: 249893 - DNA, 19 bp, Homo sapiens
  siRNA target sequence for MCP (NM_002389.3,269-287).
caccaacatttgaagctat

SEQ ID NO: 249894 - DNA, 19 bp, Homo sapiens
  siRNA target sequence for MCP (NM_002389.3,283-301).
gctatggagctcattggta

SEQ ID NO: 249895 - DNA, 19 bp, Homo sapiens
  siRNA target sequence for MCP (NM_002389.3,304-322).
ccaaaaccctactatgaga

SEQ ID NO: 249896 - DNA, 19 bp, Homo sapiens
  siRNA target sequence for MCP (NM_002389.3,321-339).
gattggtgaacgagtagat

SEQ ID NO: 249897 - DNA, 19 bp, Homo sapiens
  siRNA target sequence for MCP (NM_002389.3,325-343).
ggtgaacgagtagattata

SEQ ID NO: 249898 - DNA, 19 bp, Homo sapiens
  siRNA target sequence for MCP (NM_002389.3,326-344).
gtgaacgagtagattataa

SEQ ID NO: 249899 - DNA, 19 bp, Homo sapiens
  siRNA target sequence for MCP (NM_002389.3,328-346).
gaacgagtagattataagt

SEQ ID NO: 249900 - DNA, 19 bp, Homo sapiens
  siRNA target sequence for MCP (NM_002389.3,331-349).
cgagtagattataagtgta

SEQ ID NO: 249901 - DNA, 19 bp, Homo sapiens
  siRNA target sequence for MCP (NM_002389.3,373-391).
cctcttgccacccatacta

SEQ ID NO: 249902 - DNA, 19 bp, Homo sapiens
  siRNA target sequence for MCP (NM_002389.3,374-392).
ctcttgccacccatactat

SEQ ID NO: 249903 - DNA, 19 bp, Homo sapiens
  siRNA target sequence for MCP (NM_002389.3,376-394).
cttgccacccatactattt

SEQ ID NO: 249904 - DNA, 19 bp, Homo sapiens
  siRNA target sequence for MCP (NM_002389.3,423-441).
ctcagatgacgcctgttat

SEQ ID NO: 249905 - DNA, 19 bp, Homo sapiens
  siRNA target sequence for MCP (NM_002389.3,455-473).
catatatacgggatccttt

SEQ ID NO: 249906 - DNA, 19 bp, Homo sapiens
  siRNA target sequence for MCP (NM_002389.3,499-517).
gggacttacgagtttggtt

SEQ ID NO: 249907 - DNA, 19 bp, Homo sapiens
  siRNA target sequence for MCP (NM_002389.3,500-518).
ggacttacgagtttggtta

SEQ ID NO: 249908 - DNA, 19 bp, Homo sapiens
  siRNA target sequence for MCP (NM_002389.3,501-519).
gacttacgagtttggttat

SEQ ID NO: 249909 - DNA, 19 bp, Homo sapiens
  siRNA target sequence for MCP (NM_002389.3,514-532).
ggttatcagatgcacttta

SEQ ID NO: 249910 - DNA, 19 bp, Homo sapiens
  siRNA target sequence for MCP (NM_002389.3,515-533).
gttatcagatgcactttat

SEQ ID NO: 249911 - DNA, 19 bp, Homo sapiens
  siRNA target sequence for MCP (NM_002389.3,536-554).
gtaatgagggttattactt

SEQ ID NO: 249912 - DNA, 19 bp, Homo sapiens
  siRNA target sequence for MCP (NM_002389.3,609-627).
cggtaagcccccaatatgt

SEQ ID NO: 249913 - DNA, 19 bp, Homo sapiens
  siRNA target sequence for MCP (NM_002389.3,611-629).
gtaagcccccaatatgtga

SEQ ID NO: 249914 - DNA, 19 bp, Homo sapiens
  siRNA target sequence for MCP (NM_002389.3,639-657).
gtgtacaccacctccaaaa

SEQ ID NO: 249915 - DNA, 19 bp, Homo sapiens
  siRNA target sequence for MCP (NM_002389.3,668-686).
gaaaacacacctttagtga

SEQ ID NO: 249916 - DNA, 19 bp, Homo sapiens
  siRNA target sequence for MCP (NM_002389.3,675-693).
cacctttagtgaagtagaa

SEQ ID NO: 249917 - DNA, 19 bp, Homo sapiens
  siRNA target sequence for MCP (NM_002389.3,677-695).
cctttagtgaagtagaagt

SEQ ID NO: 249918 - DNA, 19 bp, Homo sapiens
  siRNA target sequence for MCP (NM_002389.3,709-727).
gatgcagtaacttatagtt

SEQ ID NO: 249919 - DNA, 19 bp, Homo sapiens
  siRNA target sequence for MCP (NM_002389.3,743-761).
gaccagatccattttcact

SEQ ID NO: 249920 - DNA, 19 bp, Homo sapiens
  siRNA target sequence for MCP (NM_002389.3,766-784).
ggagagagcacgatttatt

SEQ ID NO: 249921 - DNA, 19 bp, Homo sapiens
  siRNA target sequence for MCP (NM_002389.3,777-795).
gatttattgtggtgacaat

SEQ ID NO: 249922 - DNA, 19 bp, Homo sapiens
  siRNA target sequence for MCP (NM_002389.3,809-827).
gtgctgctccagagtgtaa

SEQ ID NO: 249923 - DNA, 19 bp, Homo sapiens
  siRNA target sequence for MCP (NM_002389.3,831-849).
ggtcaaatgtcgatttcca

SEQ ID NO: 249924 - DNA, 19 bp, Homo sapiens
  siRNA target sequence for MCP (NM_002389.3,923-941).
gcgataagggtttttacct

SEQ ID NO: 249925 - DNA, 19 bp, Homo sapiens
  siRNA target sequence for MCP (NM_002389.3,942-960).
cgatggcagcgacacaatt

SEQ ID NO: 249926 - DNA, 19 bp, Homo sapiens
  siRNA target sequence for MCP (NM_002389.3,946-964).
ggcagcgacacaattgtct

SEQ ID NO: 249927 - DNA, 19 bp, Homo sapiens
  siRNA target sequence for MCP (NM_002389.3,961-979).
gtctgtgacagtaacagta

SEQ ID NO: 249928 - DNA, 19 bp, Homo sapiens
  siRNA target sequence for MCP (NM_002389.3,1012-1030).
gtgctgcctccatctagta

SEQ ID NO: 249929 - DNA, 19 bp, Homo sapiens
  siRNA target sequence for MCP (NM_002389.3,1051-1069).
cattcagtgtcgacttctt

SEQ ID NO: 249930 - DNA, 19 bp, Homo sapiens
  siRNA target sequence for MCP (NM_002389.3,1171-1189).
cttgacagtttggatgttt

SEQ ID NO: 249931 - DNA, 19 bp, Homo sapiens
  siRNA target sequence for MCP (NM_002389.3,1222-1240).
gttggagttgcagtaattt

SEQ ID NO: 249932 - DNA, 19 bp, Homo sapiens
  siRNA target sequence for MCP (NM_002389.3,1241-1259).
gtgttgtcccgtacagata

SEQ ID NO: 249933 - DNA, 19 bp, Homo sapiens
  siRNA target sequence for MCP (NM_002389.3,1248-1266).
cccgtacagatatcttcaa

SEQ ID NO: 249934 - DNA, 19 bp, Homo sapiens
  siRNA target sequence for MCP (NM_153826.2,1006-1024).
cttaaagtgtcgacttctt

SEQ ID NO: 249935 - DNA, 19 bp, Homo sapiens
  siRNA target sequence for MCP (NM_153826.2,1264-1282).
gccacttaccagactaaat

SEQ ID NO: 249936 - DNA, 19 bp, Homo sapiens
  siRNA target sequence for MCP (NM_172354.1,1094-1112).
gtgcctcaggatatcctaa

SEQ ID NO: 249937 - DNA, 19 bp, Homo sapiens
  siRNA target sequence for MCP (NM_172357.1,1002-1020).
gtgtcttaaaggatatcct

SEQ ID NO: 249938 - DNA, 19 bp, Homo sapiens
  siRNA target sequence for MCP (NM_172357.1,1004-1022).
gtcttaaaggatatcctaa

SEQ ID NO: 249939 - DNA, 19 bp, Homo sapiens
  siRNA target sequence for MCP (NM_172358.1,1162-1180).
gttattgccatagatatct

SEQ ID NO: 249940 - DNA, 19 bp, Homo sapiens
  siRNA target sequence for MED6 (NM_005466.1,59-77).
ggtggatatccgagacaat

SEQ ID NO: 249941 - DNA, 19 bp, Homo sapiens
  siRNA target sequence for MED6 (NM_005466.1,103-121).
gctcttggatccctatttt

SEQ ID NO: 249942 - DNA, 19 bp, Homo sapiens
  siRNA target sequence for MED6 (NM_005466.1,129-147).
ggtagtgtcctggattact

SEQ ID NO: 249943 - DNA, 19 bp, Homo sapiens
  siRNA target sequence for MED6 (NM_005466.1,130-148).
gtagtgtcctggattactt

SEQ ID NO: 249944 - DNA, 19 bp, Homo sapiens
  siRNA target sequence for MED6 (NM_005466.1,176-194).
cagaacatgtaataatgaa

SEQ ID NO: 249945 - DNA, 19 bp, Homo sapiens
  siRNA target sequence for MED6 (NM_005466.1,206-224).
gcagaggctaacattagaa

SEQ ID NO: 249946 - DNA, 19 bp, Homo sapiens
  siRNA target sequence for MED6 (NM_005466.1,211-229).
ggctaacattagaacactt

SEQ ID NO: 249947 - DNA, 19 bp, Homo sapiens
  siRNA target sequence for MED6 (NM_005466.1,248-266).
cgagtacatccttttgcat

SEQ ID NO: 249948 - DNA, 19 bp, Homo sapiens
  siRNA target sequence for MED6 (NM_005466.1,270-288).
caagagcccattcttttca

SEQ ID NO: 249949 - DNA, 19 bp, Homo sapiens
  siRNA target sequence for MED6 (NM_005466.1,329-347).
cccactagctgattactat

SEQ ID NO: 249950 - DNA, 19 bp, Homo sapiens
  siRNA target sequence for MED6 (NM_005466.1,331-349).
cactagctgattactatat

SEQ ID NO: 249951 - DNA, 19 bp, Homo sapiens
  siRNA target sequence for MED6 (NM_005466.1,333-351).
ctagctgattactatatca

SEQ ID NO: 249952 - DNA, 19 bp, Homo sapiens
  siRNA target sequence for MED6 (NM_005466.1,350-368).
cattgctggagtgatctat

SEQ ID NO: 249953 - DNA, 19 bp, Homo sapiens
  siRNA target sequence for MED6 (NM_005466.1,378-396).
gacttgggatcagttataa

SEQ ID NO: 249954 - DNA, 19 bp, Homo sapiens
  siRNA target sequence for MED6 (NM_005466.1,383-401).
gggatcagttataaactct

SEQ ID NO: 249955 - DNA, 19 bp, Homo sapiens
  siRNA target sequence for MED6 (NM_005466.1,424-442).
gtattcagtcagcttttga

SEQ ID NO: 249956 - DNA, 19 bp, Homo sapiens
  siRNA target sequence for MED6 (NM_005466.1,452-470).
gtcatactgtcgatatcat

SEQ ID NO: 249957 - DNA, 19 bp, Homo sapiens
  siRNA target sequence for MED6 (NM_005466.1,487-505).
ggtggcacttcaaagatca

SEQ ID NO: 249958 - DNA, 19 bp, Homo sapiens
  siRNA target sequence for MED6 (NM_005466.1,488-506).
gtggcacttcaaagatcat

SEQ ID NO: 249959 - DNA, 19 bp, Homo sapiens
  siRNA target sequence for MGC33974 (NM_153350.2,826-844).
caggcctcgaggttatgct

SEQ ID NO: 249960 - DNA, 19 bp, Homo sapiens
  siRNA target sequence for MGC33974 (NM_153350.2,1423-1441).
gctgccaggtgcaagactt

SEQ ID NO: 249961 - DNA, 19 bp, Homo sapiens
  siRNA target sequence for MGC33974 (NM_153350.2,1585-1603).
cccccgagctcttcaagta

SEQ ID NO: 249962 - DNA, 19 bp, Homo sapiens
  siRNA target sequence for MGC33974 (NM_153350.2,1588-1606).
ccgagctcttcaagtattt

SEQ ID NO: 249963 - DNA, 19 bp, Homo sapiens
  siRNA target sequence for MGC33974 (NM_153350.2,1623-1641).
cgctgcctcgtcattgagt

SEQ ID NO: 249964 - DNA, 19 bp, Homo sapiens
  siRNA target sequence for MGC4766 (NM_031451.3,622-640).
cccctcgtatccagcattt

SEQ ID NO: 249965 - DNA, 19 bp, Homo sapiens
  siRNA target sequence for MGC4766 (NM_031451.3,625-643).
ctcgtatccagcatttgct

SEQ ID NO: 249966 - DNA, 19 bp, Homo sapiens
  siRNA target sequence for MGC4766 (NM_031451.3,682-700).
gcctagagctgtattgtca

SEQ ID NO: 249967 - DNA, 19 bp, Homo sapiens
  siRNA target sequence for MGC4766 (NM_031451.3,683-701).
cctagagctgtattgtcaa

SEQ ID NO: 249968 - DNA, 19 bp, Homo sapiens
  siRNA target sequence for MGC4766 (NM_031451.3,684-702).
ctagagctgtattgtcaaa

SEQ ID NO: 249969 - DNA, 19 bp, Homo sapiens
  siRNA target sequence for MGC4766 (NM_031451.3,726-744).
gcagatccagccaatatgt

SEQ ID NO: 249970 - DNA, 19 bp, Homo sapiens
  siRNA target sequence for MGC4766 (NM_031451.3,727-745).
cagatccagccaatatgtt

SEQ ID NO: 249971 - DNA, 19 bp, Homo sapiens
  siRNA target sequence for MGC4766 (NM_031451.3,729-747).
gatccagccaatatgttta

SEQ ID NO: 249972 - DNA, 19 bp, Homo sapiens
  siRNA target sequence for MGC4766 (NM_031451.3,793-811).
gccaggaaaccatactaat

SEQ ID NO: 249973 - DNA, 19 bp, Homo sapiens
  siRNA target sequence for MGC4766 (NM_031451.3,794-812).
ccaggaaaccatactaata

SEQ ID NO: 249974 - DNA, 19 bp, Homo sapiens
  siRNA target sequence for MGC4766 (NM_031451.3,795-813).
caggaaaccatactaataa

SEQ ID NO: 249975 - DNA, 19 bp, Homo sapiens
  siRNA target sequence for MGC4766 (NM_031451.3,869-887).
ggaggaggccataacaatt

SEQ ID NO: 249976 - DNA, 19 bp, Homo sapiens
  siRNA target sequence for MGC4766 (NM_031451.3,918-936).
gtgacctcctacagtaact

SEQ ID NO: 249977 - DNA, 19 bp, Homo sapiens
  siRNA target sequence for MGC4766 (NM_031451.3,1005-1023).
gcttccactgtgtcaacaa

SEQ ID NO: 249978 - DNA, 19 bp, Homo sapiens
  siRNA target sequence for MGC4766 (NM_031451.3,1099-1117).
ctcgatgctatcaaggaaa

SEQ ID NO: 249979 - DNA, 19 bp, Homo sapiens
  siRNA target sequence for MGC4766 (NM_031451.3,1210-1228).
cagtaggacccatgtttgt

SEQ ID NO: 249980 - DNA, 19 bp, Homo sapiens
  siRNA target sequence for MIP-T3 (NM_015650.2,332-350).
catcacggaggtgattaga

SEQ ID NO: 249981 - DNA, 19 bp, Homo sapiens
  siRNA target sequence for MIP-T3 (NM_015650.2,384-402).
gccgagatgaagtctgata

SEQ ID NO: 249982 - DNA, 19 bp, Homo sapiens
  siRNA target sequence for MIP-T3 (NM_015650.2,385-403).
ccgagatgaagtctgataa

SEQ ID NO: 249983 - DNA, 19 bp, Homo sapiens
  siRNA target sequence for MIP-T3 (NM_015650.2,386-404).
cgagatgaagtctgataat

SEQ ID NO: 249984 - DNA, 19 bp, Homo sapiens
  siRNA target sequence for MIP-T3 (NM_015650.2,444-462).
gccatagacgtggttgtaa

SEQ ID NO: 249985 - DNA, 19 bp, Homo sapiens
  siRNA target sequence for MIP-T3 (NM_015650.2,512-530).
gcatgagcctgaaagaaca

SEQ ID NO: 249986 - DNA, 19 bp, Homo sapiens
  siRNA target sequence for MIP-T3 (NM_015650.2,533-551).
cgagctgctccagataatt

SEQ ID NO: 249987 - DNA, 19 bp, Homo sapiens
  siRNA target sequence for MIP-T3 (NM_015650.2,536-554).
gctgctccagataattgga

SEQ ID NO: 249988 - DNA, 19 bp, Homo sapiens
  siRNA target sequence for MIP-T3 (NM_015650.2,543-561).
cagataattggaaaatgct

SEQ ID NO: 249989 - DNA, 19 bp, Homo sapiens
  siRNA target sequence for MIP-T3 (NM_015650.2,590-608).
ggtgcggagggttttagct

SEQ ID NO: 249990 - DNA, 19 bp, Homo sapiens
  siRNA target sequence for MIP-T3 (NM_015650.2,657-675).
caggaattggataataaga

SEQ ID NO: 249991 - DNA, 19 bp, Homo sapiens
  siRNA target sequence for MIP-T3 (NM_015650.2,748-766).
gtacaagcagagatcgaaa

SEQ ID NO: 249992 - DNA, 19 bp, Homo sapiens
  siRNA target sequence for MIP-T3 (NM_015650.2,751-769).
caagcagagatcgaaaaca

SEQ ID NO: 249993 - DNA, 19 bp, Homo sapiens
  siRNA target sequence for MIP-T3 (NM_015650.2,1141-1159).
gctcaggggagatgtctaa

SEQ ID NO: 249994 - DNA, 19 bp, Homo sapiens
  siRNA target sequence for MIP-T3 (NM_015650.2,1142-1160).
ctcaggggagatgtctaaa

SEQ ID NO: 249995 - DNA, 19 bp, Homo sapiens
  siRNA target sequence for MIP-T3 (NM_015650.2,1146-1164).
ggggagatgtctaaaaagt

SEQ ID NO: 249996 - DNA, 19 bp, Homo sapiens
  siRNA target sequence for MIP-T3 (NM_015650.2,1147-1165).
gggagatgtctaaaaagtt

SEQ ID NO: 249997 - DNA, 19 bp, Homo sapiens
  siRNA target sequence for MIP-T3 (NM_015650.2,1252-1270).
caaaacggcgatccaaaaa

SEQ ID NO: 249998 - DNA, 19 bp, Homo sapiens
  siRNA target sequence for MIP-T3 (NM_015650.2,1258-1276).
ggcgatccaaaaattcagt

SEQ ID NO: 249999 - DNA, 19 bp, Homo sapiens
  siRNA target sequence for MIP-T3 (NM_015650.2,1322-1340).
catagtgtctggaataaat

SEQ ID NO: 250000 - DNA, 19 bp, Homo sapiens
  siRNA target sequence for MIP-T3 (NM_015650.2,1432-1450).
gtctgcggtgtgagaatat

SEQ ID NO: 250001 - DNA, 19 bp, Homo sapiens
  siRNA target sequence for MIP-T3 (NM_015650.2,1515-1533).
cctgctggccaagataagt

SEQ ID NO: 250002 - DNA, 19 bp, Homo sapiens
  siRNA target sequence for MIP-T3 (NM_015650.2,1566-1584).
gagctttcatccaacatca

SEQ ID NO: 250003 - DNA, 19 bp, Homo sapiens
  siRNA target sequence for MIP-T3 (NM_015650.2,1577-1595).
caacatcagaagaattcct

SEQ ID NO: 250004 - DNA, 19 bp, Homo sapiens
  siRNA target sequence for MIP-T3 (NM_015650.2,1645-1663).
gcatggaggcgctacaaat

SEQ ID NO: 250005 - DNA, 19 bp, Homo sapiens
  siRNA target sequence for MIP-T3 (NM_015650.2,1649-1667).
ggaggcgctacaaatggat

SEQ ID NO: 250006 - DNA, 19 bp, Homo sapiens
  siRNA target sequence for MIP-T3 (NM_015650.2,1650-1668).
gaggcgctacaaatggata

SEQ ID NO: 250007 - DNA, 19 bp, Homo sapiens
  siRNA target sequence for MIP-T3 (NM_015650.2,1678-1696).
gtggtaaaaccgtttcaaa

SEQ ID NO: 250008 - DNA, 19 bp, Homo sapiens
  siRNA target sequence for MIP-T3 (NM_015650.2,1681-1699).
gtaaaaccgtttcaaatgt

SEQ ID NO: 250009 - DNA, 19 bp, Homo sapiens
  siRNA target sequence for MIP-T3 (NM_015650.2,1700-1718).
gattacagagtcacacaat

SEQ ID NO: 250010 - DNA, 19 bp, Homo sapiens
  siRNA target sequence for MIP-T3 (NM_015650.2,1759-1777).
cccctcagctctctgaaat

SEQ ID NO: 250011 - DNA, 19 bp, Homo sapiens
  siRNA target sequence for MIP-T3 (NM_015650.2,2140-2158).
gtgccgtggagcccttaaa

SEQ ID NO: 250012 - DNA, 19 bp, Homo sapiens
  siRNA target sequence for MIP-T3 (NM_015650.2,2252-2270).
ccagaaaatggtatatagt

SEQ ID NO: 250013 - DNA, 19 bp, Homo sapiens
  siRNA target sequence for MIP-T3 (NM_015650.2,2262-2280).
gtatatagtatcaatttga

SEQ ID NO: 250014 - DNA, 19 bp, Homo sapiens
  siRNA target sequence for MMD (NM_012329.1,97-115).
cgattccagcggttcatga

SEQ ID NO: 250015 - DNA, 19 bp, Homo sapiens
  siRNA target sequence for MMD (NM_012329.1,98-116).
gattccagcggttcatgaa

SEQ ID NO: 250016 - DNA, 19 bp, Homo sapiens
  siRNA target sequence for MMD (NM_012329.1,141-159).
ctacaagccaacttgctat

SEQ ID NO: 250017 - DNA, 19 bp, Homo sapiens
  siRNA target sequence for MMD (NM_012329.1,144-162).
caagccaacttgctatgaa

SEQ ID NO: 250018 - DNA, 19 bp, Homo sapiens
  siRNA target sequence for MMD (NM_012329.1,147-165).
gccaacttgctatgaacat

SEQ ID NO: 250019 - DNA, 19 bp, Homo sapiens
  siRNA target sequence for MMD (NM_012329.1,160-178).
gaacatgctgctaactgtt

SEQ ID NO: 250020 - DNA, 19 bp, Homo sapiens
  siRNA target sequence for MMD (NM_012329.1,182-200).
cacacgcattcctcattgt

SEQ ID NO: 250021 - DNA, 19 bp, Homo sapiens
  siRNA target sequence for MMD (NM_012329.1,377-395).
gtgatagaatggttatcta

SEQ ID NO: 250022 - DNA, 19 bp, Homo sapiens
  siRNA target sequence for MMD (NM_012329.1,379-397).
gatagaatggttatctatt

SEQ ID NO: 250023 - DNA, 19 bp, Homo sapiens
  siRNA target sequence for MMD (NM_012329.1,413-431).
cttatgctccatggttaaa

SEQ ID NO: 250024 - DNA, 19 bp, Homo sapiens
  siRNA target sequence for MMD (NM_012329.1,426-444).
gttaaatcttcgtgaactt

SEQ ID NO: 250025 - DNA, 19 bp, Homo sapiens
  siRNA target sequence for MMD (NM_012329.1,445-463).
ggacccctggcatctcata

SEQ ID NO: 250026 - DNA, 19 bp, Homo sapiens
  siRNA target sequence for MMD (NM_012329.1,458-476).
ctcatatgcgttggtttat

SEQ ID NO: 250027 - DNA, 19 bp, Homo sapiens
  siRNA target sequence for MMD (NM_012329.1,491-509).
ctggaggaaccatttatgt

SEQ ID NO: 250028 - DNA, 19 bp, Homo sapiens
  siRNA target sequence for MMD (NM_012329.1,493-511).
ggaggaaccatttatgtat

SEQ ID NO: 250029 - DNA, 19 bp, Homo sapiens
  siRNA target sequence for MMD (NM_012329.1,625-643).
gcctgtgggggcttaattt

SEQ ID NO: 250030 - DNA, 19 bp, Homo sapiens
  siRNA target sequence for MMD (NM_012329.1,626-644).
cctgtgggggcttaattta

SEQ ID NO: 250031 - DNA, 19 bp, Homo sapiens
  siRNA target sequence for MMD (NM_012329.1,627-645).
ctgtgggggcttaatttat

SEQ ID NO: 250032 - DNA, 19 bp, Homo sapiens
  siRNA target sequence for MMD (NM_012329.1,631-649).
gggggcttaatttattgct

SEQ ID NO: 250033 - DNA, 19 bp, Homo sapiens
  siRNA target sequence for MMD (NM_012329.1,666-684).
caagagtgatggcatcatt

SEQ ID NO: 250034 - DNA, 19 bp, Homo sapiens
  siRNA target sequence for MMD (NM_012329.1,671-689).
gtgatggcatcattccatt

SEQ ID NO: 250035 - DNA, 19 bp, Homo sapiens
  siRNA target sequence for MMD (NM_012329.1,724-742).
gcagctgcagtgcattact

SEQ ID NO: 250036 - DNA, 19 bp, Homo sapiens
  siRNA target sequence for MMD (NM_012329.1,725-743).
cagctgcagtgcattacta

SEQ ID NO: 250037 - DNA, 19 bp, Homo sapiens
  siRNA target sequence for MMD (NM_012329.1,766-784).
cgaagtcctacggacttta

SEQ ID NO: 250038 - DNA, 19 bp, Homo sapiens
  siRNA target sequence for MPRA (NM_178422.2,497-515).
ggcattacagcttcttctt

SEQ ID NO: 250039 - DNA, 19 bp, Homo sapiens
  siRNA target sequence for MPRA (NM_178422.2,554-572).
gtgccttggcacacttcta

SEQ ID NO: 250040 - DNA, 19 bp, Homo sapiens
  siRNA target sequence for MPRA (NM_178422.2,557-575).
ccttggcacacttctacta

SEQ ID NO: 250041 - DNA, 19 bp, Homo sapiens
  siRNA target sequence for MPRA (NM_178422.2,558-576).
cttggcacacttctactat

SEQ ID NO: 250042 - DNA, 19 bp, Homo sapiens
  siRNA target sequence for MPRA (NM_178422.2,562-580).
gcacacttctactatgcta

SEQ ID NO: 250043 - DNA, 19 bp, Homo sapiens
  siRNA target sequence for MPRA (NM_178422.2,563-581).
cacacttctactatgctat

SEQ ID NO: 250044 - DNA, 19 bp, Homo sapiens
  siRNA target sequence for MPRA (NM_178422.2,600-618).
ccaggtgcaggctgttttt

SEQ ID NO: 250045 - DNA, 19 bp, Homo sapiens
  siRNA target sequence for MPRA (NM_178422.2,653-671).
gcattggctcctgctataa

SEQ ID NO: 250046 - DNA, 19 bp, Homo sapiens
  siRNA target sequence for MPRA (NM_178422.2,658-676).
ggctcctgctataacaagt

SEQ ID NO: 250047 - DNA, 19 bp, Homo sapiens
  siRNA target sequence for MPRA (NM_178422.2,659-677).
gctcctgctataacaagta

SEQ ID NO: 250048 - DNA, 19 bp, Homo sapiens
  siRNA target sequence for MPRA (NM_178422.2,752-770).
gtcctgtggtgcatcgtat

SEQ ID NO: 250049 - DNA, 19 bp, Homo sapiens
  siRNA target sequence for MPRA (NM_178422.2,755-773).
ctgtggtgcatcgtatctt

SEQ ID NO: 250050 - DNA, 19 bp, Homo sapiens
  siRNA target sequence for MPRA (NM_178422.2,990-1008).
ggcccgacggcccatctat

SEQ ID NO: 250051 - DNA, 19 bp, Homo sapiens
  siRNA target sequence for MPRA (NM_178422.2,1022-1040).
cgcactggcctcacaactt

SEQ ID NO: 250052 - DNA, 19 bp, Homo sapiens
  siRNA target sequence for MPRA (NM_178422.2,1024-1042).
cactggcctcacaactttt

SEQ ID NO: 250053 - DNA, 19 bp, Homo sapiens
  siRNA target sequence for MPRA (NM_178422.2,1026-1044).
ctggcctcacaacttttct

SEQ ID NO: 250054 - DNA, 19 bp, Homo sapiens
  siRNA target sequence for MPRA (NM_178422.2,1104-1122).
ggtacagcgcaaacttgat

SEQ ID NO: 250055 - DNA, 19 bp, Homo sapiens
  siRNA target sequence for MS4A4A (NM_024021.2,215-233).
ggctgtcatacattcacat

SEQ ID NO: 250056 - DNA, 19 bp, Homo sapiens
  siRNA target sequence for MS4A4A (NM_024021.2,352-370).
ctaatacttatggaagtaa

SEQ ID NO: 250057 - DNA, 19 bp, Homo sapiens
  siRNA target sequence for MS4A4A (NM_024021.2,381-399).
gtgtatatcgggtacacaa

SEQ ID NO: 250058 - DNA, 19 bp, Homo sapiens
  siRNA target sequence for MS4A4A (NM_024021.2,383-401).
gtatatcgggtacacaatt

SEQ ID NO: 250059 - DNA, 19 bp, Homo sapiens
  siRNA target sequence for MS4A4A (NM_024021.2,405-423).
gggtcagtaatgtttatta

SEQ ID NO: 250060 - DNA, 19 bp, Homo sapiens
  siRNA target sequence for MS4A4A (NM_024021.2,406-424).
ggtcagtaatgtttattat

SEQ ID NO: 250061 - DNA, 19 bp, Homo sapiens
  siRNA target sequence for MS4A4A (NM_024021.2,525-543).
gggatcttaatcaacacat

SEQ ID NO: 250062 - DNA, 19 bp, Homo sapiens
  siRNA target sequence for MS4A4A (NM_024021.2,526-544).
ggatcttaatcaacacatt

SEQ ID NO: 250063 - DNA, 19 bp, Homo sapiens
  siRNA target sequence for MS4A4A (NM_024021.2,567-585).
catcacccttactgtaact

SEQ ID NO: 250064 - DNA, 19 bp, Homo sapiens
  siRNA target sequence for MS4A4A (NM_024021.2,584-602).
ctactatggcaactcaaat

SEQ ID NO: 250065 - DNA, 19 bp, Homo sapiens
  siRNA target sequence for MS4A4A (NM_024021.2,587-605).
ctatggcaactcaaataat

SEQ ID NO: 250066 - DNA, 19 bp, Homo sapiens
  siRNA target sequence for MS4A4A (NM_024021.2,612-630).
gggactatgtccatcttaa

SEQ ID NO: 250067 - DNA, 19 bp, Homo sapiens
  siRNA target sequence for MS4A4A (NM_024021.2,725-743).
ccctggtggggttgtgtta

SEQ ID NO: 250068 - DNA, 19 bp, Homo sapiens
  siRNA target sequence for MS4A4A (NM_024021.2,726-744).
cctggtggggttgtgttaa

SEQ ID NO: 250069 - DNA, 19 bp, Homo sapiens
  siRNA target sequence for MS4A4A (NM_024021.2,727-745).
ctggtggggttgtgttaat

SEQ ID NO: 250070 - DNA, 19 bp, Homo sapiens
  siRNA target sequence for MS4A4A (NM_024021.2,730-748).
gtggggttgtgttaattct

SEQ ID NO: 250071 - DNA, 19 bp, Homo sapiens
  siRNA target sequence for MS4A4A (NM_024021.2,778-796).
catctcccacaccacttaa

SEQ ID NO: 250072 - DNA, 19 bp, Homo sapiens
  siRNA target sequence for MS4A5 (NM_023945.2,103-121).
cacacagtccggtgtttct

SEQ ID NO: 250073 - DNA, 19 bp, Homo sapiens
  siRNA target sequence for MS4A5 (NM_023945.2,109-127).
gtccggtgtttctggtatt

SEQ ID NO: 250074 - DNA, 19 bp, Homo sapiens
  siRNA target sequence for MS4A5 (NM_023945.2,176-194).
cacgaccttttcaactcaa

SEQ ID NO: 250075 - DNA, 19 bp, Homo sapiens
  siRNA target sequence for MS4A5 (NM_023945.2,196-214).
gccccttgcaaaaattatt

SEQ ID NO: 250076 - DNA, 19 bp, Homo sapiens
  siRNA target sequence for MS4A5 (NM_023945.2,296-314).
caccttgttaaaaccatat

SEQ ID NO: 250077 - DNA, 19 bp, Homo sapiens
  siRNA target sequence for MS4A5 (NM_023945.2,299-317).
cttgttaaaaccatatcca

SEQ ID NO: 250078 - DNA, 19 bp, Homo sapiens
  siRNA target sequence for MS4A5 (NM_023945.2,417-435).
gaaactctgataatattga

SEQ ID NO: 250079 - DNA, 19 bp, Homo sapiens
  siRNA target sequence for MS4A5 (NM_023945.2,434-452).
gagccgaataatgaatttt

SEQ ID NO: 250080 - DNA, 19 bp, Homo sapiens
  siRNA target sequence for MS4A5 (NM_023945.2,507-525).
ctagatcaaaactacattt

SEQ ID NO: 250081 - DNA, 19 bp, Homo sapiens
  siRNA target sequence for MS4A5 (NM_023945.2,526-544).
gtggttattctcaccaaaa

SEQ ID NO: 250082 - DNA, 19 bp, Homo sapiens
  siRNA target sequence for MS4A5 (NM_023945.2,567-585).
gtcctgttcttgggaattt

SEQ ID NO: 250083 - DNA, 19 bp, Homo sapiens
  siRNA target sequence for MS4A5 (NM_023945.2,652-670).
gccactcagaggattgtga

SEQ ID NO: 250084 - DNA, 19 bp, Homo sapiens
  siRNA target sequence for MS4A5 (NM_023945.2,653-671).
ccactcagaggattgtgat

SEQ ID NO: 250085 - DNA, 19 bp, Homo sapiens
  siRNA target sequence for MS4A6A (NM_022349.2,356-374).
catctacacgcagaaatca

SEQ ID NO: 250086 - DNA, 19 bp, Homo sapiens
  siRNA target sequence for MS4A6A (NM_022349.2,490-508).
ctctgcttacccattcata

SEQ ID NO: 250087 - DNA, 19 bp, Homo sapiens
  siRNA target sequence for MS4A6A (NM_022349.2,526-544).
catctctggctctctatca

SEQ ID NO: 250088 - DNA, 19 bp, Homo sapiens
  siRNA target sequence for MS4A6A (NM_022349.2,647-665).
gtcaaacaggccaccttaa

SEQ ID NO: 250089 - DNA, 19 bp, Homo sapiens
  siRNA target sequence for MS4A6A (NM_022349.2,686-704).
gagttggacaaaaataata

SEQ ID NO: 250090 - DNA, 19 bp, Homo sapiens
  siRNA target sequence for MS4A6A (NM_022349.2,859-877).
gtggaaacaggcttactct

SEQ ID NO: 250091 - DNA, 19 bp, Homo sapiens
  siRNA target sequence for MS4A6A (NM_152852.1,905-923).
cctcacagttacattggta

SEQ ID NO: 250092 - DNA, 19 bp, Homo sapiens
  siRNA target sequence for MS4A6E (NM_139249.2,140-158).
ggcaaaagtcaaagttatt

SEQ ID NO: 250093 - DNA, 19 bp, Homo sapiens
  siRNA target sequence for MS4A6E (NM_139249.2,233-251).
caacccggctgcattaaat

SEQ ID NO: 250094 - DNA, 19 bp, Homo sapiens
  siRNA target sequence for MS4A6E (NM_139249.2,268-286).
gtaagttggacgaaaagga

SEQ ID NO: 250095 - DNA, 19 bp, Homo sapiens
  siRNA target sequence for MS4A6E (NM_139249.2,272-290).
gttggacgaaaaggatata

SEQ ID NO: 250096 - DNA, 19 bp, Homo sapiens
  siRNA target sequence for MS4A6E (NM_139249.2,276-294).
gacgaaaaggatataccaa

SEQ ID NO: 250097 - DNA, 19 bp, Homo sapiens
  siRNA target sequence for MS4A6E (NM_139249.2,295-313).
ccagacttcttctttctta

SEQ ID NO: 250098 - DNA, 19 bp, Homo sapiens
  siRNA target sequence for MS4A7 (NM_021201.3,171-189).
ggggtttctcacagcttta

SEQ ID NO: 250099 - DNA, 19 bp, Homo sapiens
  siRNA target sequence for MS4A7 (NM_021201.3,225-243).
cctggacacatgtaccaaa

SEQ ID NO: 250100 - DNA, 19 bp, Homo sapiens
  siRNA target sequence for MS4A7 (NM_021201.3,260-278).
gaacgggctgccaacagaa

SEQ ID NO: 250101 - DNA, 19 bp, Homo sapiens
  siRNA target sequence for MS4A7 (NM_021201.3,308-326).
gtgttgcctgttgatttca

SEQ ID NO: 250102 - DNA, 19 bp, Homo sapiens
  siRNA target sequence for MS4A7 (NM_021201.3,335-353).
ggccatcttggtttttgct

SEQ ID NO: 250103 - DNA, 19 bp, Homo sapiens
  siRNA target sequence for MS4A7 (NM_021201.3,356-374).
ctacccctcccacttcaat

SEQ ID NO: 250104 - DNA, 19 bp, Homo sapiens
  siRNA target sequence for MS4A7 (NM_021201.3,378-396).
gcaatttccaccactttga

SEQ ID NO: 250105 - DNA, 19 bp, Homo sapiens
  siRNA target sequence for MS4A7 (NM_021201.3,398-416).
gtctgggtacccattttta

SEQ ID NO: 250106 - DNA, 19 bp, Homo sapiens
  siRNA target sequence for MS4A7 (NM_021201.3,572-590).
gaggactgcctctcaacat

SEQ ID NO: 250107 - DNA, 19 bp, Homo sapiens
  siRNA target sequence for MS4A7 (NM_021201.3,575-593).
gactgcctctcaacattgt

SEQ ID NO: 250108 - DNA, 19 bp, Homo sapiens
  siRNA target sequence for MS4A7 (NM_021201.3,592-610).
gtggctcagaaatggatta

SEQ ID NO: 250109 - DNA, 19 bp, Homo sapiens
  siRNA target sequence for MS4A7 (NM_021201.3,625-643).
cttattcggagtactatta

SEQ ID NO: 250110 - DNA, 19 bp, Homo sapiens
  siRNA target sequence for MS4A7 (NM_021201.3,631-649).
cggagtactattatccaat

SEQ ID NO: 250111 - DNA, 19 bp, Homo sapiens
  siRNA target sequence for MS4A7 (NM_021201.3,638-656).
ctattatccaatatatgaa

SEQ ID NO: 250112 - DNA, 19 bp, Homo sapiens
  siRNA target sequence for MS4A7 (NM_021201.3,721-739).
ctgtgctggagctcttatt

SEQ ID NO: 250113 - DNA, 19 bp, Homo sapiens
  siRNA target sequence for MS4A7 (NM_021201.3,825-843).
catatccaacaggtcaaaa

SEQ ID NO: 250114 - DNA, 19 bp, Homo sapiens
  siRNA target sequence for MS4A7 (NM_021201.3,830-848).
ccaacaggtcaaaaagagt

SEQ ID NO: 250115 - DNA, 19 bp, Homo sapiens
  siRNA target sequence for MS4A7 (NM_021201.3,831-849).
caacaggtcaaaaagagtt

SEQ ID NO: 250116 - DNA, 19 bp, Homo sapiens
  siRNA target sequence for MS4A8B (NM_031457.1,252-270).
gtggcaccccacaatggtt

SEQ ID NO: 250117 - DNA, 19 bp, Homo sapiens
  siRNA target sequence for MS4A8B (NM_031457.1,254-272).
ggcaccccacaatggttat

SEQ ID NO: 250118 - DNA, 19 bp, Homo sapiens
  siRNA target sequence for MS4A8B (NM_031457.1,273-291).
cctgtgaccccaggaatta

SEQ ID NO: 250119 - DNA, 19 bp, Homo sapiens
  siRNA target sequence for MS4A8B (NM_031457.1,276-294).
gtgaccccaggaattatgt

SEQ ID NO: 250120 - DNA, 19 bp, Homo sapiens
  siRNA target sequence for MS4A8B (NM_031457.1,278-296).
gaccccaggaattatgtct

SEQ ID NO: 250121 - DNA, 19 bp, Homo sapiens
  siRNA target sequence for MS4A8B (NM_031457.1,297-315).
cacgtgcccctgtatccaa

SEQ ID NO: 250122 - DNA, 19 bp, Homo sapiens
  siRNA target sequence for MS4A8B (NM_031457.1,491-509).
ggaatacctgtctatttca

SEQ ID NO: 250123 - DNA, 19 bp, Homo sapiens
  siRNA target sequence for MS4A8B (NM_031457.1,576-594).
gcagaaaatcagccatatt

SEQ ID NO: 250124 - DNA, 19 bp, Homo sapiens
  siRNA target sequence for MS4A8B (NM_031457.1,612-630).
ggcagtttgggcttgaaca

SEQ ID NO: 250125 - DNA, 19 bp, Homo sapiens
  siRNA target sequence for MS4A8B (NM_031457.1,613-631).
gcagtttgggcttgaacat

SEQ ID NO: 250126 - DNA, 19 bp, Homo sapiens
  siRNA target sequence for MS4A8B (NM_031457.1,647-665).
ctctgcagttggagtcata

SEQ ID NO: 250127 - DNA, 19 bp, Homo sapiens
  siRNA target sequence for MS4A8B (NM_031457.1,649-667).
ctgcagttggagtcatact

SEQ ID NO: 250128 - DNA, 19 bp, Homo sapiens
  siRNA target sequence for MS4A8B (NM_031457.1,651-669).
gcagttggagtcatactct

SEQ ID NO: 250129 - DNA, 19 bp, Homo sapiens
  siRNA target sequence for MS4A8B (NM_031457.1,652-670).
cagttggagtcatactctt

SEQ ID NO: 250130 - DNA, 19 bp, Homo sapiens
  siRNA target sequence for MS4A8B (NM_031457.1,657-675).
ggagtcatactcttcatca

SEQ ID NO: 250131 - DNA, 19 bp, Homo sapiens
  siRNA target sequence for MS4A8B (NM_031457.1,671-689).
catcacagatctaagtatt

SEQ ID NO: 250132 - DNA, 19 bp, Homo sapiens
  siRNA target sequence for MS4A8B (NM_031457.1,704-722).
ctaccccgactattatcct

SEQ ID NO: 250133 - DNA, 19 bp, Homo sapiens
  siRNA target sequence for MS4A8B (NM_031457.1,833-851).
ctgctgtcaatcaagcaat

SEQ ID NO: 250134 - DNA, 19 bp, Homo sapiens
  siRNA target sequence for MS4A8B (NM_031457.1,858-876).
gtcatctatccaaacatct

SEQ ID NO: 250135 - DNA, 19 bp, Homo sapiens
  siRNA target sequence for MS4A8B (NM_031457.1,911-929).
gacctcaccaccaagttat

SEQ ID NO: 250136 - DNA, 19 bp, Homo sapiens
  siRNA target sequence for MS4A8B (NM_031457.1,931-949).
ccagtgagatccaagcaaa

SEQ ID NO: 250137 - DNA, 19 bp, Homo sapiens
  siRNA target sequence for MTVR1 (NM_152832.1,641-659).
gtcaatccaggactacaaa

SEQ ID NO: 250138 - DNA, 19 bp, Homo sapiens
  siRNA target sequence for NCR1 (NM_004829.3,115-133).
ctcccaaaaccgttcatct

SEQ ID NO: 250139 - DNA, 19 bp, Homo sapiens
  siRNA target sequence for NCR1 (NM_004829.3,260-278).
cccctgagcggattaacaa

SEQ ID NO: 250140 - DNA, 19 bp, Homo sapiens
  siRNA target sequence for NCR1 (NM_004829.3,261-279).
ccctgagcggattaacaaa

SEQ ID NO: 250141 - DNA, 19 bp, Homo sapiens
  siRNA target sequence for NCR1 (NM_004829.3,263-281).
ctgagcggattaacaaagt

SEQ ID NO: 250142 - DNA, 19 bp, Homo sapiens
  siRNA target sequence for NCR1 (NM_004829.3,321-339).
gcaatacagctgcatctat

SEQ ID NO: 250143 - DNA, 19 bp, Homo sapiens
  siRNA target sequence for NCR1 (NM_004829.3,379-397).
gatctggtggtaacagaaa

SEQ ID NO: 250144 - DNA, 19 bp, Homo sapiens
  siRNA target sequence for NCR1 (NM_004829.3,384-402).
ggtggtaacagaaatgtat

SEQ ID NO: 250145 - DNA, 19 bp, Homo sapiens
  siRNA target sequence for NCR1 (NM_004829.3,604-622).
cgatgttttggctcctata

SEQ ID NO: 250146 - DNA, 19 bp, Homo sapiens
  siRNA target sequence for NCR1 (NM_004829.3,667-685).
gtcacaggcgacattgaga

SEQ ID NO: 250147 - DNA, 19 bp, Homo sapiens
  siRNA target sequence for NCR1 (NM_004829.3,728-746).
cttggggcacctacctttt

SEQ ID NO: 250148 - DNA, 19 bp, Homo sapiens
  siRNA target sequence for NCR1 (NM_004829.3,733-751).
ggcacctaccttttaacca

SEQ ID NO: 250149 - DNA, 19 bp, Homo sapiens
  siRNA target sequence for NCR1 (NM_004829.3,813-831).
gatgggcctggcctttcta

SEQ ID NO: 250150 - DNA, 19 bp, Homo sapiens
  siRNA target sequence for NCR3 (NM_147130.1,277-295).
ctgttgctcatcttgatca

SEQ ID NO: 250151 - DNA, 19 bp, Homo sapiens
  siRNA target sequence for NCR3 (NM_147130.1,730-748).
gtgggcagcaccgtctatt

SEQ ID NO: 250152 - DNA, 19 bp, Homo sapiens
  siRNA target sequence for NCR3 (NM_147130.1,734-752).
gcagcaccgtctattacca

SEQ ID NO: 250153 - DNA, 19 bp, Homo sapiens
  siRNA target sequence for NECL1 (NM_021189.2,467-485).
gcccttcgagataatcgaa

SEQ ID NO: 250154 - DNA, 19 bp, Homo sapiens
  siRNA target sequence for NECL1 (NM_021189.2,468-486).
cccttcgagataatcgaat

SEQ ID NO: 250155 - DNA, 19 bp, Homo sapiens
  siRNA target sequence for NECL1 (NM_021189.2,469-487).
ccttcgagataatcgaatt

SEQ ID NO: 250156 - DNA, 19 bp, Homo sapiens
  siRNA target sequence for NECL1 (NM_021189.2,557-575).
gagtacacctgctcaatct

SEQ ID NO: 250157 - DNA, 19 bp, Homo sapiens
  siRNA target sequence for NECL1 (NM_021189.2,645-663).
ctggttataaatcttcatt

SEQ ID NO: 250158 - DNA, 19 bp, Homo sapiens
  siRNA target sequence for NECL1 (NM_021189.2,865-883).
ctctgtgaaccatgaatct

SEQ ID NO: 250159 - DNA, 19 bp, Homo sapiens
  siRNA target sequence for NECL1 (NM_021189.2,904-922).
cacctctcaacgcattgaa

SEQ ID NO: 250160 - DNA, 19 bp, Homo sapiens
  siRNA target sequence for NECL1 (NM_021189.2,906-924).
cctctcaacgcattgaagt

SEQ ID NO: 250161 - DNA, 19 bp, Homo sapiens
  siRNA target sequence for NECL1 (NM_021189.2,911-929).
caacgcattgaagttttat

SEQ ID NO: 250162 - DNA, 19 bp, Homo sapiens
  siRNA target sequence for NECL1 (NM_021189.2,931-949).
cacaccaactgcgatgatt

SEQ ID NO: 250163 - DNA, 19 bp, Homo sapiens
  siRNA target sequence for NECL1 (NM_021189.2,1168-1186).
ctactacaccctcaatgtt

SEQ ID NO: 250164 - DNA, 19 bp, Homo sapiens
  siRNA target sequence for NECL1 (NM_021189.2,1242-1260).
ggatcgtggctttcattgt

SEQ ID NO: 250165 - DNA, 19 bp, Homo sapiens
  siRNA target sequence for NECL1 (NM_021189.2,1365-1383).
cggacacggccatcatcaa

SEQ ID NO: 250166 - DNA, 19 bp, Homo sapiens
  siRNA target sequence for NECL1 (NM_021189.2,1366-1384).
ggacacggccatcatcaat

SEQ ID NO: 250167 - DNA, 19 bp, Homo sapiens
  siRNA target sequence for NGRH1 (NM_178570.1,689-707).
ccatcctctacctgttcaa

SEQ ID NO: 250168 - DNA, 19 bp, Homo sapiens
  siRNA target sequence for NGRH2 (NM_178568.1,117-135).
ctgccaggcgcacaacttt

SEQ ID NO: 250169 - DNA, 19 bp, Homo sapiens
  siRNA target sequence for NGRH2 (NM_178568.1,245-263).
ggatctactcgaacaacat

SEQ ID NO: 250170 - DNA, 19 bp, Homo sapiens
  siRNA target sequence for NGRH2 (NM_178568.1,923-941).
cgtccccgcaccagatcaa

SEQ ID NO: 250171 - DNA, 19 bp, Homo sapiens
  siRNA target sequence for NGRH2 (NM_178568.1,1075-1093).
cccaggaaccgcaatcaga

SEQ ID NO: 250172 - DNA, 19 bp, Homo sapiens
  siRNA target sequence for NGRH2 (NM_178568.1,1076-1094).
ccaggaaccgcaatcagat

SEQ ID NO: 250173 - DNA, 19 bp, Homo sapiens
  siRNA target sequence for NGRH2 (NM_178568.1,1145-1163).
cagactaccagcacaagtt

SEQ ID NO: 250174 - DNA, 19 bp, Homo sapiens
  siRNA target sequence for NISCH (NM_007184.1,99-117).
gagcttgtggacacttata

SEQ ID NO: 250175 - DNA, 19 bp, Homo sapiens
  siRNA target sequence for NISCH (NM_007184.1,108-126).
gacacttatacggtttaca

SEQ ID NO: 250176 - DNA, 19 bp, Homo sapiens
  siRNA target sequence for NISCH (NM_007184.1,112-130).
cttatacggtttacatcat

SEQ ID NO: 250177 - DNA, 19 bp, Homo sapiens
  siRNA target sequence for NISCH (NM_007184.1,251-269).
gataattgggaaaaactca

SEQ ID NO: 250178 - DNA, 19 bp, Homo sapiens
  siRNA target sequence for NISCH (NM_007184.1,352-370).
gagtactggcccacttctt

SEQ ID NO: 250179 - DNA, 19 bp, Homo sapiens
  siRNA target sequence for NISCH (NM_007184.1,357-375).
ctggcccacttcttgcatt

SEQ ID NO: 250180 - DNA, 19 bp, Homo sapiens
  siRNA target sequence for NISCH (NM_007184.1,580-598).
gtcgccttaagtaccttaa

SEQ ID NO: 250181 - DNA, 19 bp, Homo sapiens
  siRNA target sequence for NISCH (NM_007184.1,583-601).
gccttaagtaccttaaggt

SEQ ID NO: 250182 - DNA, 19 bp, Homo sapiens
  siRNA target sequence for NISCH (NM_007184.1,585-603).
cttaagtaccttaaggttt

SEQ ID NO: 250183 - DNA, 19 bp, Homo sapiens
  siRNA target sequence for NISCH (NM_007184.1,651-669).
ctgccgttcgacctatcaa

SEQ ID NO: 250184 - DNA, 19 bp, Homo sapiens
  siRNA target sequence for NISCH (NM_007184.1,653-671).
gccgttcgacctatcaata

SEQ ID NO: 250185 - DNA, 19 bp, Homo sapiens
  siRNA target sequence for NISCH (NM_007184.1,654-672).
ccgttcgacctatcaatat

SEQ ID NO: 250186 - DNA, 19 bp, Homo sapiens
  siRNA target sequence for NISCH (NM_007184.1,655-673).
cgttcgacctatcaatatt

SEQ ID NO: 250187 - DNA, 19 bp, Homo sapiens
  siRNA target sequence for NISCH (NM_007184.1,660-678).
gacctatcaatattcaagt

SEQ ID NO: 250188 - DNA, 19 bp, Homo sapiens
  siRNA target sequence for NISCH (NM_007184.1,681-699).
ctgcatcaggtggagataa

SEQ ID NO: 250189 - DNA, 19 bp, Homo sapiens
  siRNA target sequence for NISCH (NM_007184.1,683-701).
gcatcaggtggagataagt

SEQ ID NO: 250190 - DNA, 19 bp, Homo sapiens
  siRNA target sequence for NISCH (NM_007184.1,929-947).
gatcgacgagtctgtgaaa

SEQ ID NO: 250191 - DNA, 19 bp, Homo sapiens
  siRNA target sequence for NISCH (NM_007184.1,933-951).
gacgagtctgtgaaactga

SEQ ID NO: 250192 - DNA, 19 bp, Homo sapiens
  siRNA target sequence for NISCH (NM_007184.1,1010-1028).
gcagcacctgtataacctt

SEQ ID NO: 250193 - DNA, 19 bp, Homo sapiens
  siRNA target sequence for NISCH (NM_007184.1,1380-1398).
gtgctgaaagcaattcaga

SEQ ID NO: 250194 - DNA, 19 bp, Homo sapiens
  siRNA target sequence for NISCH (NM_007184.1,1407-1425).
gaggtcaagtccaaactga

SEQ ID NO: 250195 - DNA, 19 bp, Homo sapiens
  siRNA target sequence for NISCH (NM_007184.1,1535-1553).
gcccatcctctctaaccaa

SEQ ID NO: 250196 - DNA, 19 bp, Homo sapiens
  siRNA target sequence for NISCH (NM_007184.1,1677-1695).
caggcagcttccgatgatt

SEQ ID NO: 250197 - DNA, 19 bp, Homo sapiens
  siRNA target sequence for NISCH (NM_007184.1,1679-1697).
ggcagcttccgatgattta

SEQ ID NO: 250198 - DNA, 19 bp, Homo sapiens
  siRNA target sequence for NISCH (NM_007184.1,1680-1698).
gcagcttccgatgatttaa

SEQ ID NO: 250199 - DNA, 19 bp, Homo sapiens
  siRNA target sequence for NISCH (NM_007184.1,1768-1786).
ggtctggccagatcatctt

SEQ ID NO: 250200 - DNA, 19 bp, Homo sapiens
  siRNA target sequence for NISCH (NM_007184.1,1973-1991).
ggctgagaaccgctacttt

SEQ ID NO: 250201 - DNA, 19 bp, Homo sapiens
  siRNA target sequence for NISCH (NM_007184.1,2290-2308).
cctccctgcgctttgtctt

SEQ ID NO: 250202 - DNA, 19 bp, Homo sapiens
  siRNA target sequence for NISCH (NM_007184.1,2291-2309).
ctccctgcgctttgtcttt

SEQ ID NO: 250203 - DNA, 19 bp, Homo sapiens
  siRNA target sequence for NISCH (NM_007184.1,2441-2459).
ggacctgcgctcatgcttt

SEQ ID NO: 250204 - DNA, 19 bp, Homo sapiens
  siRNA target sequence for NISCH (NM_007184.1,2952-2970).
gtggggtaccgctttgtca

SEQ ID NO: 250205 - DNA, 19 bp, Homo sapiens
  siRNA target sequence for NISCH (NM_007184.1,3514-3532).
ggtcctcggtggtgttcta

SEQ ID NO: 250206 - DNA, 19 bp, Homo sapiens
  siRNA target sequence for NISCH (NM_007184.1,3574-3592).
ccaccaaggctgtgtactt

SEQ ID NO: 250207 - DNA, 19 bp, Homo sapiens
  siRNA target sequence for NISCH (NM_007184.1,3577-3595).
ccaaggctgtgtactttgt

SEQ ID NO: 250208 - DNA, 19 bp, Homo sapiens
  siRNA target sequence for NISCH (NM_007184.1,3695-3713).
gtgcttcgtgctaaagctt

SEQ ID NO: 250209 - DNA, 19 bp, Homo sapiens
  siRNA target sequence for NISCH (NM_007184.1,3739-3757).
ggcttttcgaccagcattt

SEQ ID NO: 250210 - DNA, 19 bp, Homo sapiens
  siRNA target sequence for NISCH (NM_007184.1,3877-3895).
cgccggagcctgttgacaa

SEQ ID NO: 250211 - DNA, 19 bp, Homo sapiens
  siRNA target sequence for NISCH (NM_007184.1,3886-3904).
ctgttgacaaggacttcta

SEQ ID NO: 250212 - DNA, 19 bp, Homo sapiens
  siRNA target sequence for NISCH (NM_007184.1,3959-3977).
ctctagtcgcgtcaagttt

SEQ ID NO: 250213 - DNA, 19 bp, Homo sapiens
  siRNA target sequence for NISCH (NM_007184.1,3964-3982).
gtcgcgtcaagtttaccta

SEQ ID NO: 250214 - DNA, 19 bp, Homo sapiens
  siRNA target sequence for NKIR (NM_139018.2,214-232).
cgtgcagtgtgtttacaga

SEQ ID NO: 250215 - DNA, 19 bp, Homo sapiens
  siRNA target sequence for NKIR (NM_139018.2,421-439).
ctggtgtggaattgagaaa

SEQ ID NO: 250216 - DNA, 19 bp, Homo sapiens
  siRNA target sequence for NKIR (NM_139018.2,582-600).
ccctcatcttcaccatatt

SEQ ID NO: 250217 - DNA, 19 bp, Homo sapiens
  siRNA target sequence for NKIR (NM_139018.2,793-811).
ccaggtggaagtggaatat

SEQ ID NO: 250218 - DNA, 19 bp, Homo sapiens
  siRNA target sequence for NKIR (NM_139018.2,830-848).
ccgaaggaggacatttcct

SEQ ID NO: 250219 - DNA, 19 bp, Homo sapiens
  siRNA target sequence for NKIR (NM_139018.2,831-849).
cgaaggaggacatttccta

SEQ ID NO: 250220 - DNA, 19 bp, Homo sapiens
  siRNA target sequence for NPTXR (NM_014293.2,1023-1041).
ctccagatgccttcaagat

SEQ ID NO: 250221 - DNA, 19 bp, Homo sapiens
  siRNA target sequence for NPTXR (NM_014293.2,1049-1067).
cccatccgtaacaactaca

SEQ ID NO: 250222 - DNA, 19 bp, Homo sapiens
  siRNA target sequence for NPTXR (NM_014293.2,1438-1456).
cctgggtggccggtttgat

SEQ ID NO: 250223 - DNA, 19 bp, Homo sapiens
  siRNA target sequence for NPTXR (NM_014293.2,1599-1617).
cctttgggggtgcaacaaa

SEQ ID NO: 250224 - DNA, 19 bp, Homo sapiens
  siRNA target sequence for OGFRL1 (NM_024576.2,413-431).
gctgccagggatttgtaca

SEQ ID NO: 250225 - DNA, 19 bp, Homo sapiens
  siRNA target sequence for OGFRL1 (NM_024576.2,414-432).
ctgccagggatttgtacaa

SEQ ID NO: 250226 - DNA, 19 bp, Homo sapiens
  siRNA target sequence for OGFRL1 (NM_024576.2,417-435).
ccagggatttgtacaagta

SEQ ID NO: 250227 - DNA, 19 bp, Homo sapiens
  siRNA target sequence for OGFRL1 (NM_024576.2,438-456).
gacaccagtacccaaactt

SEQ ID NO: 250228 - DNA, 19 bp, Homo sapiens
  siRNA target sequence for OGFRL1 (NM_024576.2,442-460).
ccagtacccaaacttcaaa

SEQ ID NO: 250229 - DNA, 19 bp, Homo sapiens
  siRNA target sequence for OGFRL1 (NM_024576.2,445-463).
gtacccaaacttcaaagat

SEQ ID NO: 250230 - DNA, 19 bp, Homo sapiens
  siRNA target sequence for OGFRL1 (NM_024576.2,457-475).
caaagatatccgatatcaa

SEQ ID NO: 250231 - DNA, 19 bp, Homo sapiens
  siRNA target sequence for OGFRL1 (NM_024576.2,484-502).
gagcaatcttcgtttttat

SEQ ID NO: 250232 - DNA, 19 bp, Homo sapiens
  siRNA target sequence for OGFRL1 (NM_024576.2,486-504).
gcaatcttcgtttttataa

SEQ ID NO: 250233 - DNA, 19 bp, Homo sapiens
  siRNA target sequence for OGFRL1 (NM_024576.2,586-604).
gcacaaccacacttacatt

SEQ ID NO: 250234 - DNA, 19 bp, Homo sapiens
  siRNA target sequence for OGFRL1 (NM_024576.2,589-607).
caaccacacttacattcaa

SEQ ID NO: 250235 - DNA, 19 bp, Homo sapiens
  siRNA target sequence for OGFRL1 (NM_024576.2,776-794).
gttgctcgggctgttaact

SEQ ID NO: 250236 - DNA, 19 bp, Homo sapiens
  siRNA target sequence for OGFRL1 (NM_024576.2,804-822).
gatttcagcatctgaatga

SEQ ID NO: 250237 - DNA, 19 bp, Homo sapiens
  siRNA target sequence for OGFRL1 (NM_024576.2,823-841).
gtcccagcacaactattta

SEQ ID NO: 250238 - DNA, 19 bp, Homo sapiens
  siRNA target sequence for OGFRL1 (NM_024576.2,926-944).
gctcttgtggagaatacta

SEQ ID NO: 250239 - DNA, 19 bp, Homo sapiens
  siRNA target sequence for OGFRL1 (NM_024576.2,927-945).
ctcttgtggagaatactat

SEQ ID NO: 250240 - DNA, 19 bp, Homo sapiens
  siRNA target sequence for OGFRL1 (NM_024576.2,961-979).
gagtgctctagagtatttt

SEQ ID NO: 250241 - DNA, 19 bp, Homo sapiens
  siRNA target sequence for OGFRL1 (NM_024576.2,963-981).
gtgctctagagtattttgt

SEQ ID NO: 250242 - DNA, 19 bp, Homo sapiens
  siRNA target sequence for OGFRL1 (NM_024576.2,965-983).
gctctagagtattttgttt

SEQ ID NO: 250243 - DNA, 19 bp, Homo sapiens
  siRNA target sequence for OGFRL1 (NM_024576.2,966-984).
ctctagagtattttgttta

SEQ ID NO: 250244 - DNA, 19 bp, Homo sapiens
  siRNA target sequence for OGFRL1 (NM_024576.2,1022-1040).
cggttcgcccagaaacact

SEQ ID NO: 250245 - DNA, 19 bp, Homo sapiens
  siRNA target sequence for OGFRL1 (NM_024576.2,1023-1041).
ggttcgcccagaaacacta

SEQ ID NO: 250246 - DNA, 19 bp, Homo sapiens
  siRNA target sequence for OGFRL1 (NM_024576.2,1042-1060).
cacgccttcagagaacttt

SEQ ID NO: 250247 - DNA, 19 bp, Homo sapiens
  siRNA target sequence for OGFRL1 (NM_024576.2,1063-1081).
ctggggaccgcctcgaaaa

SEQ ID NO: 250248 - DNA, 19 bp, Homo sapiens
  siRNA target sequence for OGFRL1 (NM_024576.2,1065-1083).
ggggaccgcctcgaaaaga

SEQ ID NO: 250249 - DNA, 19 bp, Homo sapiens
  siRNA target sequence for OGFRL1 (NM_024576.2,1066-1084).
gggaccgcctcgaaaagaa

SEQ ID NO: 250250 - DNA, 19 bp, Homo sapiens
  siRNA target sequence for OGFRL1 (NM_024576.2,1068-1086).
gaccgcctcgaaaagaaca

SEQ ID NO: 250251 - DNA, 19 bp, Homo sapiens
  siRNA target sequence for OGFRL1 (NM_024576.2,1121-1139).
cctctcgcctccagtcata

SEQ ID NO: 250252 - DNA, 19 bp, Homo sapiens
  siRNA target sequence for OGFRL1 (NM_024576.2,1122-1140).
ctctcgcctccagtcataa

SEQ ID NO: 250253 - DNA, 19 bp, Homo sapiens
  siRNA target sequence for OGFRL1 (NM_024576.2,1126-1144).
cgcctccagtcataacagt

SEQ ID NO: 250254 - DNA, 19 bp, Homo sapiens
  siRNA target sequence for OGFRL1 (NM_024576.2,1166-1184).
gccaaggactccaaaaatt

SEQ ID NO: 250255 - DNA, 19 bp, Homo sapiens
  siRNA target sequence for OGFRL1 (NM_024576.2,1341-1359).
ctcaacctgagaaaacagt

SEQ ID NO: 250256 - DNA, 19 bp, Homo sapiens
  siRNA target sequence for OGFRL1 (NM_024576.2,1384-1402).
gagtgtatctcctgagaat

SEQ ID NO: 250257 - DNA, 19 bp, Homo sapiens
  siRNA target sequence for OGFRL1 (NM_024576.2,1386-1404).
gtgtatctcctgagaataa

SEQ ID NO: 250258 - DNA, 19 bp, Homo sapiens
  siRNA target sequence for OGFRL1 (NM_024576.2,1452-1470).
caaattgccatgatgttgt

SEQ ID NO: 250259 - DNA, 19 bp, Homo sapiens
  siRNA target sequence for OGFRL1 (NM_024576.2,1459-1477).
ccatgatgttgtactagta

SEQ ID NO: 250260 - DNA, 19 bp, Homo sapiens
  siRNA target sequence for OSCAR (NM_130771.1,345-363).
gtcaacgtgaccttgagat

SEQ ID NO: 250261 - DNA, 19 bp, Homo sapiens
  siRNA target sequence for OSCAR (NM_130771.1,480-498).
ccagcccaagggggaattt

SEQ ID NO: 250262 - DNA, 19 bp, Homo sapiens
  siRNA target sequence for OSCAR (NM_130771.1,481-499).
cagcccaagggggaattta

SEQ ID NO: 250263 - DNA, 19 bp, Homo sapiens
  siRNA target sequence for OSCAR (NM_130771.1,939-957).
gcgctggtcacttttgact

SEQ ID NO: 250264 - DNA, 19 bp, Homo sapiens
  siRNA target sequence for PILRA (NM_013439.2,400-418).
cagctcccgacgtgagaat

SEQ ID NO: 250265 - DNA, 19 bp, Homo sapiens
  siRNA target sequence for PILRA (NM_013439.2,826-844).
ctgtgctcggaatcatgat

SEQ ID NO: 250266 - DNA, 19 bp, Homo sapiens
  siRNA target sequence for PILRA (NM_013439.2,915-933).
gccagggaacccttccaaa

SEQ ID NO: 250267 - DNA, 19 bp, Homo sapiens
  siRNA target sequence for PILRA (NM_013439.2,937-955).
cagaggagccatatgagaa

SEQ ID NO: 250268 - DNA, 19 bp, Homo sapiens
  siRNA target sequence for PILRA (NM_013439.2,942-960).
gagccatatgagaatatca

SEQ ID NO: 250269 - DNA, 19 bp, Homo sapiens
  siRNA target sequence for PILRA (NM_013439.2,1005-1023).
gacggcatcgtctatgctt

SEQ ID NO: 250270 - DNA, 19 bp, Homo sapiens
  siRNA target sequence for PILRB (NM_013440.3,3079-3097).
gctgtcgctgtgctcaaaa

SEQ ID NO: 250271 - DNA, 19 bp, Homo sapiens
  siRNA target sequence for PKHD1 (NM_138694.2,296-314).
ctctgatgagtattgaagt

SEQ ID NO: 250272 - DNA, 19 bp, Homo sapiens
  siRNA target sequence for PKHD1 (NM_138694.2,300-318).
gatgagtattgaagtacta

SEQ ID NO: 250273 - DNA, 19 bp, Homo sapiens
  siRNA target sequence for PKHD1 (NM_138694.2,326-344).
cagtacgtcacctgagttt

SEQ ID NO: 250274 - DNA, 19 bp, Homo sapiens
  siRNA target sequence for PKHD1 (NM_138694.2,331-349).
cgtcacctgagtttacata

SEQ ID NO: 250275 - DNA, 19 bp, Homo sapiens
  siRNA target sequence for PKHD1 (NM_138694.2,332-350).
gtcacctgagtttacatat

SEQ ID NO: 250276 - DNA, 19 bp, Homo sapiens
  siRNA target sequence for PKHD1 (NM_138694.2,386-404).
ggatcacagtcatttttga

SEQ ID NO: 250277 - DNA, 19 bp, Homo sapiens
  siRNA target sequence for PKHD1 (NM_138694.2,392-410).
cagtcatttttgatggttt

SEQ ID NO: 250278 - DNA, 19 bp, Homo sapiens
  siRNA target sequence for PKHD1 (NM_138694.2,440-458).
gctctcaattggagataca

SEQ ID NO: 250279 - DNA, 19 bp, Homo sapiens
  siRNA target sequence for PKHD1 (NM_138694.2,506-524).
gtgacgtctttcctgtttt

SEQ ID NO: 250280 - DNA, 19 bp, Homo sapiens
  siRNA target sequence for PKHD1 (NM_138694.2,621-639).
ggtaagcagtccaaatcca

SEQ ID NO: 250281 - DNA, 19 bp, Homo sapiens
  siRNA target sequence for PKHD1 (NM_138694.2,643-661).
ccacgagatagctgtactt

SEQ ID NO: 250282 - DNA, 19 bp, Homo sapiens
  siRNA target sequence for PKHD1 (NM_138694.2,644-662).
cacgagatagctgtacttt

SEQ ID NO: 250283 - DNA, 19 bp, Homo sapiens
  siRNA target sequence for PKHD1 (NM_138694.2,646-664).
cgagatagctgtactttca

SEQ ID NO: 250284 - DNA, 19 bp, Homo sapiens
  siRNA target sequence for PKHD1 (NM_138694.2,686-704).
ccatcgttcaccaagttta

SEQ ID NO: 250285 - DNA, 19 bp, Homo sapiens
  siRNA target sequence for PKHD1 (NM_138694.2,687-705).
catcgttcaccaagtttat

SEQ ID NO: 250286 - DNA, 19 bp, Homo sapiens
  siRNA target sequence for PKHD1 (NM_138694.2,690-708).
cgttcaccaagtttatcca

SEQ ID NO: 250287 - DNA, 19 bp, Homo sapiens
  siRNA target sequence for PKHD1 (NM_138694.2,739-757).
gtatatggctggattatca

SEQ ID NO: 250288 - DNA, 19 bp, Homo sapiens
  siRNA target sequence for PKHD1 (NM_138694.2,864-882).
gcagatgggaagctgttat

SEQ ID NO: 250289 - DNA, 19 bp, Homo sapiens
  siRNA target sequence for PKHD1 (NM_138694.2,867-885).
gatgggaagctgttatcct

SEQ ID NO: 250290 - DNA, 19 bp, Homo sapiens
  siRNA target sequence for PKHD1 (NM_138694.2,1007-1025).
ggctgatcagtgctaaaca

SEQ ID NO: 250291 - DNA, 19 bp, Homo sapiens
  siRNA target sequence for PKHD1 (NM_138694.2,1156-1174).
ggcattccatgtgatatta

SEQ ID NO: 250292 - DNA, 19 bp, Homo sapiens
  siRNA target sequence for PKHD1 (NM_138694.2,1158-1176).
cattccatgtgatattaga

SEQ ID NO: 250293 - DNA, 19 bp, Homo sapiens
  siRNA target sequence for PKHD1 (NM_138694.2,1208-1226).
ctcgggctccaggaaaaga

SEQ ID NO: 250294 - DNA, 19 bp, Homo sapiens
  siRNA target sequence for PKHD1 (NM_138694.2,1252-1270).
ggcaatcgagggcttcttt

SEQ ID NO: 250295 - DNA, 19 bp, Homo sapiens
  siRNA target sequence for PKHD1 (NM_138694.2,1253-1271).
gcaatcgagggcttctttt

SEQ ID NO: 250296 - DNA, 19 bp, Homo sapiens
  siRNA target sequence for PKHD1 (NM_138694.2,1417-1435).
gtggctccagagacaaata

SEQ ID NO: 250297 - DNA, 19 bp, Homo sapiens
  siRNA target sequence for PKHD1 (NM_138694.2,1468-1486).
gcttccttgcatttcagtt

SEQ ID NO: 250298 - DNA, 19 bp, Homo sapiens
  siRNA target sequence for PKHD1 (NM_138694.2,1679-1697).
ggattggtgtccagattca

SEQ ID NO: 250299 - DNA, 19 bp, Homo sapiens
  siRNA target sequence for PKHD1 (NM_138694.2,1865-1883).
ccacagcccatctgattca

SEQ ID NO: 250300 - DNA, 19 bp, Homo sapiens
  siRNA target sequence for PKHD1 (NM_138694.2,1924-1942).
gaacccctttggtctaaca

SEQ ID NO: 250301 - DNA, 19 bp, Homo sapiens
  siRNA target sequence for PKHD1 (NM_138694.2,2087-2105).
gctatcggctagatcagta

SEQ ID NO: 250302 - DNA, 19 bp, Homo sapiens
  siRNA target sequence for PKHD1 (NM_138694.2,2088-2106).
ctatcggctagatcagtat

SEQ ID NO: 250303 - DNA, 19 bp, Homo sapiens
  siRNA target sequence for PKHD1 (NM_138694.2,2112-2130).
cctgtgtcttgcatacaaa

SEQ ID NO: 250304 - DNA, 19 bp, Homo sapiens
  siRNA target sequence for PKHD1 (NM_138694.2,2176-2194).
ggctttcaaaacatggtaa

SEQ ID NO: 250305 - DNA, 19 bp, Homo sapiens
  siRNA target sequence for PKHD1 (NM_138694.2,2236-2254).
gagagctggcagttcgatt

SEQ ID NO: 250306 - DNA, 19 bp, Homo sapiens
  siRNA target sequence for PKHD1 (NM_138694.2,2371-2389).
ctgttctatgtggatgaaa

SEQ ID NO: 250307 - DNA, 19 bp, Homo sapiens
  siRNA target sequence for PKHD1 (NM_138694.2,2399-2417).
cagacacaaacgtaacagt

SEQ ID NO: 250308 - DNA, 19 bp, Homo sapiens
  siRNA target sequence for PKHD1 (NM_138694.2,2403-2421).
cacaaacgtaacagtttct

SEQ ID NO: 250309 - DNA, 19 bp, Homo sapiens
  siRNA target sequence for PKHD1 (NM_138694.2,2453-2471).
gcaatctggtggaatcagt

SEQ ID NO: 250310 - DNA, 19 bp, Homo sapiens
  siRNA target sequence for PKHD1 (NM_138694.2,2780-2798).
ctgtgaaggaggatctata

SEQ ID NO: 250311 - DNA, 19 bp, Homo sapiens
  siRNA target sequence for PKHD1 (NM_138694.2,2782-2800).
gtgaaggaggatctataca

SEQ ID NO: 250312 - DNA, 19 bp, Homo sapiens
  siRNA target sequence for PKHD1 (NM_138694.2,2784-2802).
gaaggaggatctatacact

SEQ ID NO: 250313 - DNA, 19 bp, Homo sapiens
  siRNA target sequence for PKHD1 (NM_138694.2,2906-2924).
cagccacgcgtgtggtata

SEQ ID NO: 250314 - DNA, 19 bp, Homo sapiens
  siRNA target sequence for PKHD1 (NM_138694.2,2909-2927).
ccacgcgtgtggtatatga

SEQ ID NO: 250315 - DNA, 19 bp, Homo sapiens
  siRNA target sequence for PKHD1 (NM_138694.2,2910-2928).
cacgcgtgtggtatatgat

SEQ ID NO: 250316 - DNA, 19 bp, Homo sapiens
  siRNA target sequence for PKHD1 (NM_138694.2,2972-2990).
ctgccaaccagcatactca

SEQ ID NO: 250317 - DNA, 19 bp, Homo sapiens
  siRNA target sequence for PKHD1 (NM_138694.2,2994-3012).
ggttgtgcgagtgaatgat

SEQ ID NO: 250318 - DNA, 19 bp, Homo sapiens
  siRNA target sequence for PKHD1 (NM_138694.2,3101-3119).
gtgacatcaacctaatgat

SEQ ID NO: 250319 - DNA, 19 bp, Homo sapiens
  siRNA target sequence for PKHD1 (NM_138694.2,3177-3195).
caaaacgagttgcaaagtt

SEQ ID NO: 250320 - DNA, 19 bp, Homo sapiens
  siRNA target sequence for PKHD1 (NM_138694.2,3203-3221).
caaaccagaccaatgtagt

SEQ ID NO: 250321 - DNA, 19 bp, Homo sapiens
  siRNA target sequence for PKHD1 (NM_138694.2,3217-3235).
gtagtctgtcagacagatt

SEQ ID NO: 250322 - DNA, 19 bp, Homo sapiens
  siRNA target sequence for PKHD1 (NM_138694.2,3237-3255).
gctacctgttggaatgcat

SEQ ID NO: 250323 - DNA, 19 bp, Homo sapiens
  siRNA target sequence for PKHD1 (NM_138694.2,3247-3265).
ggaatgcatcggatcttga

SEQ ID NO: 250324 - DNA, 19 bp, Homo sapiens
  siRNA target sequence for PKHD1 (NM_138694.2,3248-3266).
gaatgcatcggatcttgat

SEQ ID NO: 250325 - DNA, 19 bp, Homo sapiens
  siRNA target sequence for PKHD1 (NM_138694.2,3310-3328).
gacctcttcctaaatgtga

SEQ ID NO: 250326 - DNA, 19 bp, Homo sapiens
  siRNA target sequence for PKHD1 (NM_138694.2,3312-3330).
cctcttcctaaatgtgaaa

SEQ ID NO: 250327 - DNA, 19 bp, Homo sapiens
  siRNA target sequence for PKHD1 (NM_138694.2,3389-3407).
ccatccgaggctctagttt

SEQ ID NO: 250328 - DNA, 19 bp, Homo sapiens
  siRNA target sequence for PKHD1 (NM_138694.2,3393-3411).
ccgaggctctagtttggaa

SEQ ID NO: 250329 - DNA, 19 bp, Homo sapiens
  siRNA target sequence for PKHD1 (NM_138694.2,3409-3427).
gaaggtgttagcctgatat

SEQ ID NO: 250330 - DNA, 19 bp, Homo sapiens
  siRNA target sequence for PKHD1 (NM_138694.2,3453-3471).
caatgtcgctacaagcaat

SEQ ID NO: 250331 - DNA, 19 bp, Homo sapiens
  siRNA target sequence for PKHD1 (NM_138694.2,3457-3475).
gtcgctacaagcaattcaa

SEQ ID NO: 250332 - DNA, 19 bp, Homo sapiens
  siRNA target sequence for PKHD1 (NM_138694.2,3566-3584).
ccagagcatttacatatgt

SEQ ID NO: 250333 - DNA, 19 bp, Homo sapiens
  siRNA target sequence for PKHD1 (NM_138694.2,3587-3605).
cttccttaaatccagttat

SEQ ID NO: 250334 - DNA, 19 bp, Homo sapiens
  siRNA target sequence for PKHD1 (NM_138694.2,3590-3608).
ccttaaatccagttattgt

SEQ ID NO: 250335 - DNA, 19 bp, Homo sapiens
  siRNA target sequence for PKHD1 (NM_138694.2,3613-3631).
ctgagcagaaacataagca

SEQ ID NO: 250336 - DNA, 19 bp, Homo sapiens
  siRNA target sequence for PKHD1 (NM_138694.2,3666-3684).
ggcgaggctgatgaactat

SEQ ID NO: 250337 - DNA, 19 bp, Homo sapiens
  siRNA target sequence for PKHD1 (NM_138694.2,3667-3685).
gcgaggctgatgaactata

SEQ ID NO: 250338 - DNA, 19 bp, Homo sapiens
  siRNA target sequence for PKHD1 (NM_138694.2,3678-3696).
gaactatacggatttggat

SEQ ID NO: 250339 - DNA, 19 bp, Homo sapiens
  siRNA target sequence for PKHD1 (NM_138694.2,3853-3871).
cagtacctcacagaagttt

SEQ ID NO: 250340 - DNA, 19 bp, Homo sapiens
  siRNA target sequence for PKHD1 (NM_138694.2,4194-4212).
gcaaggagaaatcacaaat

SEQ ID NO: 250341 - DNA, 19 bp, Homo sapiens
  siRNA target sequence for PKHD1 (NM_138694.2,4386-4404).
gaagcagatgggatttgct

SEQ ID NO: 250342 - DNA, 19 bp, Homo sapiens
  siRNA target sequence for PKHD1 (NM_138694.2,4389-4407).
gcagatgggatttgctaat

SEQ ID NO: 250343 - DNA, 19 bp, Homo sapiens
  siRNA target sequence for PKHD1 (NM_138694.2,4416-4434).
ggtgctccagcaatttgca

SEQ ID NO: 250344 - DNA, 19 bp, Homo sapiens
  siRNA target sequence for PKHD1 (NM_138694.2,4433-4451).
cagtgatgcctcggataat

SEQ ID NO: 250345 - DNA, 19 bp, Homo sapiens
  siRNA target sequence for PKHD1 (NM_138694.2,4484-4502).
gtgggaccatacttactgt

SEQ ID NO: 250346 - DNA, 19 bp, Homo sapiens
  siRNA target sequence for PKHD1 (NM_138694.2,4506-4524).
ggggttgcttcttaactct

SEQ ID NO: 250347 - DNA, 19 bp, Homo sapiens
  siRNA target sequence for PKHD1 (NM_138694.2,4507-4525).
gggttgcttcttaactcta

SEQ ID NO: 250348 - DNA, 19 bp, Homo sapiens
  siRNA target sequence for PKHD1 (NM_138694.2,4546-4564).
gacctctcgggtcctttta

SEQ ID NO: 250349 - DNA, 19 bp, Homo sapiens
  siRNA target sequence for PKHD1 (NM_138694.2,4548-4566).
cctctcgggtccttttact

SEQ ID NO: 250350 - DNA, 19 bp, Homo sapiens
  siRNA target sequence for PKHD1 (NM_138694.2,4549-4567).
ctctcgggtccttttactt

SEQ ID NO: 250351 - DNA, 19 bp, Homo sapiens
  siRNA target sequence for PKHD1 (NM_138694.2,4551-4569).
ctcgggtccttttacttgt

SEQ ID NO: 250352 - DNA, 19 bp, Homo sapiens
  siRNA target sequence for PKHD1 (NM_138694.2,4687-4705).
gagtgtcaggggaattgca

SEQ ID NO: 250353 - DNA, 19 bp, Homo sapiens
  siRNA target sequence for PKHD1 (NM_138694.2,4698-4716).
gaattgcactcttttcata

SEQ ID NO: 250354 - DNA, 19 bp, Homo sapiens
  siRNA target sequence for PKHD1 (NM_138694.2,4827-4845).
ggtatttgtggatgatcaa

SEQ ID NO: 250355 - DNA, 19 bp, Homo sapiens
  siRNA target sequence for PKHD1 (NM_138694.2,4846-4864).
cttccttgcaatgtaactt

SEQ ID NO: 250356 - DNA, 19 bp, Homo sapiens
  siRNA target sequence for PKHD1 (NM_138694.2,4915-4933).
ccccactacctgtcagttt

SEQ ID NO: 250357 - DNA, 19 bp, Homo sapiens
  siRNA target sequence for PKHD1 (NM_138694.2,4920-4938).
ctacctgtcagttttttat

SEQ ID NO: 250358 - DNA, 19 bp, Homo sapiens
  siRNA target sequence for PKHD1 (NM_138694.2,4950-4968).
gtatgcttgttctggtaat

SEQ ID NO: 250359 - DNA, 19 bp, Homo sapiens
  siRNA target sequence for PKHD1 (NM_138694.2,4973-4991).
ccagacacttctacattat

SEQ ID NO: 250360 - DNA, 19 bp, Homo sapiens
  siRNA target sequence for PKHD1 (NM_138694.2,4986-5004).
cattatgccccaagtgttt

SEQ ID NO: 250361 - DNA, 19 bp, Homo sapiens
  siRNA target sequence for PKHD1 (NM_138694.2,4992-5010).
gccccaagtgtttcattat

SEQ ID NO: 250362 - DNA, 19 bp, Homo sapiens
  siRNA target sequence for PKHD1 (NM_138694.2,5079-5097).
gaacaccacgtcagtctat

SEQ ID NO: 250363 - DNA, 19 bp, Homo sapiens
  siRNA target sequence for PKHD1 (NM_138694.2,5082-5100).
caccacgtcagtctatatt

SEQ ID NO: 250364 - DNA, 19 bp, Homo sapiens
  siRNA target sequence for PKHD1 (NM_138694.2,5084-5102).
ccacgtcagtctatattga

SEQ ID NO: 250365 - DNA, 19 bp, Homo sapiens
  siRNA target sequence for PKHD1 (NM_138694.2,5139-5157).
gctcatccggtgcattgtt

SEQ ID NO: 250366 - DNA, 19 bp, Homo sapiens
  siRNA target sequence for PKHD1 (NM_138694.2,5193-5211).
ggtagatggactttggtat

SEQ ID NO: 250367 - DNA, 19 bp, Homo sapiens
  siRNA target sequence for PKHD1 (NM_138694.2,5197-5215).
gatggactttggtatcaca

SEQ ID NO: 250368 - DNA, 19 bp, Homo sapiens
  siRNA target sequence for PKHD1 (NM_138694.2,5208-5226).
gtatcacataggagtcatt

SEQ ID NO: 250369 - DNA, 19 bp, Homo sapiens
  siRNA target sequence for PKHD1 (NM_138694.2,5212-5230).
cacataggagtcattggtt

SEQ ID NO: 250370 - DNA, 19 bp, Homo sapiens
  siRNA target sequence for PKHD1 (NM_138694.2,5214-5232).
cataggagtcattggttat

SEQ ID NO: 250371 - DNA, 19 bp, Homo sapiens
  siRNA target sequence for PKHD1 (NM_138694.2,5247-5265).
cccagaattgatctctatt

SEQ ID NO: 250372 - DNA, 19 bp, Homo sapiens
  siRNA target sequence for PKHD1 (NM_138694.2,5269-5287).
cagagcgatgacatcttaa

SEQ ID NO: 250373 - DNA, 19 bp, Homo sapiens
  siRNA target sequence for PKHD1 (NM_138694.2,5274-5292).
cgatgacatcttaaccttt

SEQ ID NO: 250374 - DNA, 19 bp, Homo sapiens
  siRNA target sequence for PKHD1 (NM_138694.2,5312-5330).
gagctgcaaacattgacat

SEQ ID NO: 250375 - DNA, 19 bp, Homo sapiens
  siRNA target sequence for PKHD1 (NM_138694.2,5469-5487).
gttcacctcaagagttatt

SEQ ID NO: 250376 - DNA, 19 bp, Homo sapiens
  siRNA target sequence for PKHD1 (NM_138694.2,5541-5559).
gtttggagcgggattttct

SEQ ID NO: 250377 - DNA, 19 bp, Homo sapiens
  siRNA target sequence for PKHD1 (NM_138694.2,5815-5833).
ctctttgtgccagatcatt

SEQ ID NO: 250378 - DNA, 19 bp, Homo sapiens
  siRNA target sequence for PKHD1 (NM_138694.2,5830-5848).
cattgggcagagtcaatgt

SEQ ID NO: 250379 - DNA, 19 bp, Homo sapiens
  siRNA target sequence for PKHD1 (NM_138694.2,5836-5854).
gcagagtcaatgtttccat

SEQ ID NO: 250380 - DNA, 19 bp, Homo sapiens
  siRNA target sequence for PKHD1 (NM_138694.2,5855-5873).
cattctcgggcctctttat

SEQ ID NO: 250381 - DNA, 19 bp, Homo sapiens
  siRNA target sequence for PKHD1 (NM_138694.2,5866-5884).
ctctttatcagccctaaat

SEQ ID NO: 250382 - DNA, 19 bp, Homo sapiens
  siRNA target sequence for PKHD1 (NM_138694.2,5896-5914).
gaagttctcatctataata

SEQ ID NO: 250383 - DNA, 19 bp, Homo sapiens
  siRNA target sequence for PKHD1 (NM_138694.2,5899-5917).
gttctcatctataatagct

SEQ ID NO: 250384 - DNA, 19 bp, Homo sapiens
  siRNA target sequence for PKHD1 (NM_138694.2,5973-5991).
gccaattaccgtcaagatt

SEQ ID NO: 250385 - DNA, 19 bp, Homo sapiens
  siRNA target sequence for PKHD1 (NM_138694.2,5974-5992).
ccaattaccgtcaagatta

SEQ ID NO: 250386 - DNA, 19 bp, Homo sapiens
  siRNA target sequence for PKHD1 (NM_138694.2,5982-6000).
cgtcaagattactgagata

SEQ ID NO: 250387 - DNA, 19 bp, Homo sapiens
  siRNA target sequence for PKHD1 (NM_138694.2,6021-6039).
cactcagggcaacttttct

SEQ ID NO: 250388 - DNA, 19 bp, Homo sapiens
  siRNA target sequence for PKHD1 (NM_138694.2,6120-6138).
ggagaatggccaattgctt

SEQ ID NO: 250389 - DNA, 19 bp, Homo sapiens
  siRNA target sequence for PKHD1 (NM_138694.2,6139-6157).
ctgctggacactaacacaa

SEQ ID NO: 250390 - DNA, 19 bp, Homo sapiens
  siRNA target sequence for PKHD1 (NM_138694.2,6184-6202).
gggggcaagctgattttca

SEQ ID NO: 250391 - DNA, 19 bp, Homo sapiens
  siRNA target sequence for PKHD1 (NM_138694.2,6185-6203).
ggggcaagctgattttcat

SEQ ID NO: 250392 - DNA, 19 bp, Homo sapiens
  siRNA target sequence for PKHD1 (NM_138694.2,6229-6247).
gcacacgccatccttgttt

SEQ ID NO: 250393 - DNA, 19 bp, Homo sapiens
  siRNA target sequence for PKHD1 (NM_138694.2,6256-6274).
ggagagctccggattggat

SEQ ID NO: 250394 - DNA, 19 bp, Homo sapiens
  siRNA target sequence for PKHD1 (NM_138694.2,6396-6414).
cggttcactaccagaagta

SEQ ID NO: 250395 - DNA, 19 bp, Homo sapiens
  siRNA target sequence for PKHD1 (NM_138694.2,6397-6415).
ggttcactaccagaagtaa

SEQ ID NO: 250396 - DNA, 19 bp, Homo sapiens
  siRNA target sequence for PKHD1 (NM_138694.2,6398-6416).
gttcactaccagaagtaat

SEQ ID NO: 250397 - DNA, 19 bp, Homo sapiens
  siRNA target sequence for PKHD1 (NM_138694.2,6401-6419).
cactaccagaagtaattgt

SEQ ID NO: 250398 - DNA, 19 bp, Homo sapiens
  siRNA target sequence for PKHD1 (NM_138694.2,6453-6471).
cacagtgctggctttagaa

SEQ ID NO: 250399 - DNA, 19 bp, Homo sapiens
  siRNA target sequence for PKHD1 (NM_138694.2,6536-6554).
ccaaaccgatggaagagat

SEQ ID NO: 250400 - DNA, 19 bp, Homo sapiens
  siRNA target sequence for PKHD1 (NM_138694.2,6541-6559).
ccgatggaagagattgtca

SEQ ID NO: 250401 - DNA, 19 bp, Homo sapiens
  siRNA target sequence for PKHD1 (NM_138694.2,6576-6594).
ggatacagacctctatctt

SEQ ID NO: 250402 - DNA, 19 bp, Homo sapiens
  siRNA target sequence for PKHD1 (NM_138694.2,6577-6595).
gatacagacctctatctta

SEQ ID NO: 250403 - DNA, 19 bp, Homo sapiens
  siRNA target sequence for PKHD1 (NM_138694.2,6679-6697).
ctcagcaggagtattacca

SEQ ID NO: 250404 - DNA, 19 bp, Homo sapiens
  siRNA target sequence for PKHD1 (NM_138694.2,6684-6702).
caggagtattaccatacaa

SEQ ID NO: 250405 - DNA, 19 bp, Homo sapiens
  siRNA target sequence for PKHD1 (NM_138694.2,6689-6707).
gtattaccatacaaggaaa

SEQ ID NO: 250406 - DNA, 19 bp, Homo sapiens
  siRNA target sequence for PKHD1 (NM_138694.2,6753-6771).
caatgctccagaaggtaat

SEQ ID NO: 250407 - DNA, 19 bp, Homo sapiens
  siRNA target sequence for PKHD1 (NM_138694.2,6879-6897).
gaagggagtgcagtttcaa

SEQ ID NO: 250408 - DNA, 19 bp, Homo sapiens
  siRNA target sequence for PKHD1 (NM_138694.2,6884-6902).
gagtgcagtttcaagtctt

SEQ ID NO: 250409 - DNA, 19 bp, Homo sapiens
  siRNA target sequence for PKHD1 (NM_138694.2,6905-6923).
ggcaagccttccataagca

SEQ ID NO: 250410 - DNA, 19 bp, Homo sapiens
  siRNA target sequence for PKHD1 (NM_138694.2,7032-7050).
gaaggtggacagtaatgta

SEQ ID NO: 250411 - DNA, 19 bp, Homo sapiens
  siRNA target sequence for PKHD1 (NM_138694.2,7091-7109).
gcacggagatgagatatat

SEQ ID NO: 250412 - DNA, 19 bp, Homo sapiens
  siRNA target sequence for PKHD1 (NM_138694.2,7110-7128).
ctcctgggaggcaattcat

SEQ ID NO: 250413 - DNA, 19 bp, Homo sapiens
  siRNA target sequence for PKHD1 (NM_138694.2,7250-7268).
gcagtcccaccaatgttat

SEQ ID NO: 250414 - DNA, 19 bp, Homo sapiens
  siRNA target sequence for PKHD1 (NM_138694.2,7251-7269).
cagtcccaccaatgttata

SEQ ID NO: 250415 - DNA, 19 bp, Homo sapiens
  siRNA target sequence for PKHD1 (NM_138694.2,7253-7271).
gtcccaccaatgttataga

SEQ ID NO: 250416 - DNA, 19 bp, Homo sapiens
  siRNA target sequence for PKHD1 (NM_138694.2,7291-7309).
gctggctatggctactttt

SEQ ID NO: 250417 - DNA, 19 bp, Homo sapiens
  siRNA target sequence for PKHD1 (NM_138694.2,7301-7319).
gctactttttccatctcat

SEQ ID NO: 250418 - DNA, 19 bp, Homo sapiens
  siRNA target sequence for PKHD1 (NM_138694.2,7360-7378).
cagaacattgcacattctt

SEQ ID NO: 250419 - DNA, 19 bp, Homo sapiens
  siRNA target sequence for PKHD1 (NM_138694.2,7383-7401).
caggtatggtctctttgta

SEQ ID NO: 250420 - DNA, 19 bp, Homo sapiens
  siRNA target sequence for PKHD1 (NM_138694.2,7385-7403).
ggtatggtctctttgtata

SEQ ID NO: 250421 - DNA, 19 bp, Homo sapiens
  siRNA target sequence for PKHD1 (NM_138694.2,7393-7411).
ctctttgtataccctaaat

SEQ ID NO: 250422 - DNA, 19 bp, Homo sapiens
  siRNA target sequence for PKHD1 (NM_138694.2,7417-7435).
ccaccttgggataatgtca

SEQ ID NO: 250423 - DNA, 19 bp, Homo sapiens
  siRNA target sequence for PKHD1 (NM_138694.2,7491-7509).
gatttttagaagtagcaat

SEQ ID NO: 250424 - DNA, 19 bp, Homo sapiens
  siRNA target sequence for PKHD1 (NM_138694.2,7505-7523).
gcaatcttcgcctgaaaaa

SEQ ID NO: 250425 - DNA, 19 bp, Homo sapiens
  siRNA target sequence for PKHD1 (NM_138694.2,7531-7549).
gtttattcatgcagagatt

SEQ ID NO: 250426 - DNA, 19 bp, Homo sapiens
  siRNA target sequence for PKHD1 (NM_138694.2,7612-7630).
cattttgcccacaaggtaa

SEQ ID NO: 250427 - DNA, 19 bp, Homo sapiens
  siRNA target sequence for PKHD1 (NM_138694.2,7637-7655).
gtatgtcatctgggattaa

SEQ ID NO: 250428 - DNA, 19 bp, Homo sapiens
  siRNA target sequence for PKHD1 (NM_138694.2,7641-7659).
gtcatctgggattaaaact

SEQ ID NO: 250429 - DNA, 19 bp, Homo sapiens
  siRNA target sequence for PKHD1 (NM_138694.2,7680-7698).
ggtgtctaacacaaccttt

SEQ ID NO: 250430 - DNA, 19 bp, Homo sapiens
  siRNA target sequence for PKHD1 (NM_138694.2,7685-7703).
ctaacacaacctttgttaa

SEQ ID NO: 250431 - DNA, 19 bp, Homo sapiens
  siRNA target sequence for PKHD1 (NM_138694.2,7689-7707).
cacaacctttgttaatttt

SEQ ID NO: 250432 - DNA, 19 bp, Homo sapiens
  siRNA target sequence for PKHD1 (NM_138694.2,7694-7712).
cctttgttaattttgatct

SEQ ID NO: 250433 - DNA, 19 bp, Homo sapiens
  siRNA target sequence for PKHD1 (NM_138694.2,7716-7734).
caactgtgtggccattaga

SEQ ID NO: 250434 - DNA, 19 bp, Homo sapiens
  siRNA target sequence for PKHD1 (NM_138694.2,7757-7775).
gacaaggtggatttactgt

SEQ ID NO: 250435 - DNA, 19 bp, Homo sapiens
  siRNA target sequence for PKHD1 (NM_138694.2,7779-7797).
gaccagccagttgaagttt

SEQ ID NO: 250436 - DNA, 19 bp, Homo sapiens
  siRNA target sequence for PKHD1 (NM_138694.2,7788-7806).
gttgaagtttacaaactct

SEQ ID NO: 250437 - DNA, 19 bp, Homo sapiens
  siRNA target sequence for PKHD1 (NM_138694.2,7799-7817).
caaactcttcaaacttagt

SEQ ID NO: 250438 - DNA, 19 bp, Homo sapiens
  siRNA target sequence for PKHD1 (NM_138694.2,7832-7850).
ctcatgcagcaattttgga

SEQ ID NO: 250439 - DNA, 19 bp, Homo sapiens
  siRNA target sequence for PKHD1 (NM_138694.2,7862-7880).
ggtctctgtctgggaaaaa

SEQ ID NO: 250440 - DNA, 19 bp, Homo sapiens
  siRNA target sequence for PKHD1 (NM_138694.2,7970-7988).
gtggaggaggtgttctttt

SEQ ID NO: 250441 - DNA, 19 bp, Homo sapiens
  siRNA target sequence for PKHD1 (NM_138694.2,8011-8029).
gcgaatactcctgaagttt

SEQ ID NO: 250442 - DNA, 19 bp, Homo sapiens
  siRNA target sequence for PKHD1 (NM_138694.2,8018-8036).
ctcctgaagtttcttatga

SEQ ID NO: 250443 - DNA, 19 bp, Homo sapiens
  siRNA target sequence for PKHD1 (NM_138694.2,8083-8101).
gtacgtgatacattgtcta

SEQ ID NO: 250444 - DNA, 19 bp, Homo sapiens
  siRNA target sequence for PKHD1 (NM_138694.2,8131-8149).
gaccaagagacctactcat

SEQ ID NO: 250445 - DNA, 19 bp, Homo sapiens
  siRNA target sequence for PKHD1 (NM_138694.2,8184-8202).
gcagtactcagcaaccttt

SEQ ID NO: 250446 - DNA, 19 bp, Homo sapiens
  siRNA target sequence for PKHD1 (NM_138694.2,8205-8223).
caactttgctcctggtaat

SEQ ID NO: 250447 - DNA, 19 bp, Homo sapiens
  siRNA target sequence for PKHD1 (NM_138694.2,8260-8278).
cctgacatcctcctaagat

SEQ ID NO: 250448 - DNA, 19 bp, Homo sapiens
  siRNA target sequence for PKHD1 (NM_138694.2,8428-8446).
ggtatgcccccaactattt

SEQ ID NO: 250449 - DNA, 19 bp, Homo sapiens
  siRNA target sequence for PKHD1 (NM_138694.2,8462-8480).
cccctgaatcagctttaaa

SEQ ID NO: 250450 - DNA, 19 bp, Homo sapiens
  siRNA target sequence for PKHD1 (NM_138694.2,8463-8481).
ccctgaatcagctttaaaa

SEQ ID NO: 250451 - DNA, 19 bp, Homo sapiens
  siRNA target sequence for PKHD1 (NM_138694.2,8467-8485).
gaatcagctttaaaatggt

SEQ ID NO: 250452 - DNA, 19 bp, Homo sapiens
  siRNA target sequence for PKHD1 (NM_138694.2,8524-8542).
ggaggatacaacaatacca

SEQ ID NO: 250453 - DNA, 19 bp, Homo sapiens
  siRNA target sequence for PKHD1 (NM_138694.2,8525-8543).
gaggatacaacaataccat

SEQ ID NO: 250454 - DNA, 19 bp, Homo sapiens
  siRNA target sequence for PKHD1 (NM_138694.2,8554-8572).
ggggatgacgttctcattt

SEQ ID NO: 250455 - DNA, 19 bp, Homo sapiens
  siRNA target sequence for PKHD1 (NM_138694.2,8556-8574).
ggatgacgttctcatttta

SEQ ID NO: 250456 - DNA, 19 bp, Homo sapiens
  siRNA target sequence for PKHD1 (NM_138694.2,8772-8790).
ctcagagggagtcttttgt

SEQ ID NO: 250457 - DNA, 19 bp, Homo sapiens
  siRNA target sequence for PKHD1 (NM_138694.2,8784-8802).
cttttgtgaccgtatgaat

SEQ ID NO: 250458 - DNA, 19 bp, Homo sapiens
  siRNA target sequence for PKHD1 (NM_138694.2,8794-8812).
cgtatgaatggaattcata

SEQ ID NO: 250459 - DNA, 19 bp, Homo sapiens
  siRNA target sequence for PKHD1 (NM_138694.2,8839-8857).
gggaaagttcatctttaca

SEQ ID NO: 250460 - DNA, 19 bp, Homo sapiens
  siRNA target sequence for PKHD1 (NM_138694.2,8851-8869).
ctttacagtgcttatccta

SEQ ID NO: 250461 - DNA, 19 bp, Homo sapiens
  siRNA target sequence for PKHD1 (NM_138694.2,8882-8900).
cacatcttggagctgatat

SEQ ID NO: 250462 - DNA, 19 bp, Homo sapiens
  siRNA target sequence for PKHD1 (NM_138694.2,8916-8934).
gagaattatagtagaagat

SEQ ID NO: 250463 - DNA, 19 bp, Homo sapiens
  siRNA target sequence for PKHD1 (NM_138694.2,9054-9072).
gctcaaacaccggcatatt

SEQ ID NO: 250464 - DNA, 19 bp, Homo sapiens
  siRNA target sequence for PKHD1 (NM_138694.2,9057-9075).
caaacaccggcatattgga

SEQ ID NO: 250465 - DNA, 19 bp, Homo sapiens
  siRNA target sequence for PKHD1 (NM_138694.2,9063-9081).
ccggcatattggaagtgta

SEQ ID NO: 250466 - DNA, 19 bp, Homo sapiens
  siRNA target sequence for PKHD1 (NM_138694.2,9090-9108).
ggaggatggccgacacatt

SEQ ID NO: 250467 - DNA, 19 bp, Homo sapiens
  siRNA target sequence for PKHD1 (NM_138694.2,9094-9112).
gatggccgacacattcgtt

SEQ ID NO: 250468 - DNA, 19 bp, Homo sapiens
  siRNA target sequence for PKHD1 (NM_138694.2,9132-9150).
gttgacccgaaatatacaa

SEQ ID NO: 250469 - DNA, 19 bp, Homo sapiens
  siRNA target sequence for PKHD1 (NM_138694.2,9135-9153).
gacccgaaatatacaaatt

SEQ ID NO: 250470 - DNA, 19 bp, Homo sapiens
  siRNA target sequence for PKHD1 (NM_138694.2,9154-9172).
cagcctgacgtatcatgta

SEQ ID NO: 250471 - DNA, 19 bp, Homo sapiens
  siRNA target sequence for PKHD1 (NM_138694.2,9170-9188).
gtagggggagactgtttgt

SEQ ID NO: 250472 - DNA, 19 bp, Homo sapiens
  siRNA target sequence for PKHD1 (NM_138694.2,9227-9245).
gtgtccttcaacttcttaa

SEQ ID NO: 250473 - DNA, 19 bp, Homo sapiens
  siRNA target sequence for PKHD1 (NM_138694.2,9265-9283).
gggtcaccattgtactcat

SEQ ID NO: 250474 - DNA, 19 bp, Homo sapiens
  siRNA target sequence for PKHD1 (NM_138694.2,9315-9333).
ctggatcatatcatctact

SEQ ID NO: 250475 - DNA, 19 bp, Homo sapiens
  siRNA target sequence for PKHD1 (NM_138694.2,9371-9389).
ccagtcatggagtactttt

SEQ ID NO: 250476 - DNA, 19 bp, Homo sapiens
  siRNA target sequence for PKHD1 (NM_138694.2,9372-9390).
cagtcatggagtactttta

SEQ ID NO: 250477 - DNA, 19 bp, Homo sapiens
  siRNA target sequence for PKHD1 (NM_138694.2,9374-9392).
gtcatggagtacttttaaa

SEQ ID NO: 250478 - DNA, 19 bp, Homo sapiens
  siRNA target sequence for PKHD1 (NM_138694.2,9444-9462).
ggcctatactgtcactaat

SEQ ID NO: 250479 - DNA, 19 bp, Homo sapiens
  siRNA target sequence for PKHD1 (NM_138694.2,9445-9463).
gcctatactgtcactaata

SEQ ID NO: 250480 - DNA, 19 bp, Homo sapiens
  siRNA target sequence for PKHD1 (NM_138694.2,9446-9464).
cctatactgtcactaataa

SEQ ID NO: 250481 - DNA, 19 bp, Homo sapiens
  siRNA target sequence for PKHD1 (NM_138694.2,9506-9524).
gggtggcgggaatcaaagt

SEQ ID NO: 250482 - DNA, 19 bp, Homo sapiens
  siRNA target sequence for PKHD1 (NM_138694.2,9508-9526).
gtggcgggaatcaaagtga

SEQ ID NO: 250483 - DNA, 19 bp, Homo sapiens
  siRNA target sequence for PKHD1 (NM_138694.2,9636-9654).
caatgtggcgcattcaagt

SEQ ID NO: 250484 - DNA, 19 bp, Homo sapiens
  siRNA target sequence for PKHD1 (NM_138694.2,9642-9660).
ggcgcattcaagtcttcat

SEQ ID NO: 250485 - DNA, 19 bp, Homo sapiens
  siRNA target sequence for PKHD1 (NM_138694.2,9768-9786).
cgtggagatagagaacatt

SEQ ID NO: 250486 - DNA, 19 bp, Homo sapiens
  siRNA target sequence for PKHD1 (NM_138694.2,9771-9789).
ggagatagagaacattact

SEQ ID NO: 250487 - DNA, 19 bp, Homo sapiens
  siRNA target sequence for PKHD1 (NM_138694.2,9841-9859).
ccacaaaattccgtcaaaa

SEQ ID NO: 250488 - DNA, 19 bp, Homo sapiens
  siRNA target sequence for PKHD1 (NM_138694.2,9867-9885).
gattgtgcttaggaattca

SEQ ID NO: 250489 - DNA, 19 bp, Homo sapiens
  siRNA target sequence for PKHD1 (NM_138694.2,9940-9958).
cactcagccaacttgacat

SEQ ID NO: 250490 - DNA, 19 bp, Homo sapiens
  siRNA target sequence for PKHD1 (NM_138694.2,9951-9969).
cttgacatcaacagataga

SEQ ID NO: 250491 - DNA, 19 bp, Homo sapiens
  siRNA target sequence for PKHD1 (NM_138694.2,9989-10007).
gaggtcgaattggtattct

SEQ ID NO: 250492 - DNA, 19 bp, Homo sapiens
  siRNA target sequence for PKHD1 (NM_138694.2,9991-10009).
ggtcgaattggtattctgt

SEQ ID NO: 250493 - DNA, 19 bp, Homo sapiens
  siRNA target sequence for PKHD1 (NM_138694.2,10068-10086).
gaatgatcattcaatttca

SEQ ID NO: 250494 - DNA, 19 bp, Homo sapiens
  siRNA target sequence for PKHD1 (NM_138694.2,10085-10103).
caggaatcatgaaacttca

SEQ ID NO: 250495 - DNA, 19 bp, Homo sapiens
  siRNA target sequence for PKHD1 (NM_138694.2,10102-10120).
caagatgttaccttttcta

SEQ ID NO: 250496 - DNA, 19 bp, Homo sapiens
  siRNA target sequence for PKHD1 (NM_138694.2,10105-10123).
gatgttaccttttctagtt

SEQ ID NO: 250497 - DNA, 19 bp, Homo sapiens
  siRNA target sequence for PKHD1 (NM_138694.2,10149-10167).
cctggatgtctgcattcta

SEQ ID NO: 250498 - DNA, 19 bp, Homo sapiens
  siRNA target sequence for PKHD1 (NM_138694.2,10186-10204).
ggaattatgcacccaataa

SEQ ID NO: 250499 - DNA, 19 bp, Homo sapiens
  siRNA target sequence for PKHD1 (NM_138694.2,10369-10387).
cctccaccagtttctgtat

SEQ ID NO: 250500 - DNA, 19 bp, Homo sapiens
  siRNA target sequence for PKHD1 (NM_138694.2,10409-10427).
ggactgcatccttcttcaa

SEQ ID NO: 250501 - DNA, 19 bp, Homo sapiens
  siRNA target sequence for PKHD1 (NM_138694.2,10425-10443).
caacgcaggtacatttaga

SEQ ID NO: 250502 - DNA, 19 bp, Homo sapiens
  siRNA target sequence for PKHD1 (NM_138694.2,10450-10468).
cagaaatgtacataccaat

SEQ ID NO: 250503 - DNA, 19 bp, Homo sapiens
  siRNA target sequence for PKHD1 (NM_138694.2,10471-10489).
ctgatgcaaggattcatct

SEQ ID NO: 250504 - DNA, 19 bp, Homo sapiens
  siRNA target sequence for PKHD1 (NM_138694.2,10499-10517).
ctgaccaagtggtcctaat

SEQ ID NO: 250505 - DNA, 19 bp, Homo sapiens
  siRNA target sequence for PKHD1 (NM_138694.2,10535-10553).
ccatttgggcaattcagaa

SEQ ID NO: 250506 - DNA, 19 bp, Homo sapiens
  siRNA target sequence for PKHD1 (NM_138694.2,10542-10560).
ggcaattcagaagttatat

SEQ ID NO: 250507 - DNA, 19 bp, Homo sapiens
  siRNA target sequence for PKHD1 (NM_138694.2,10575-10593).
gactagtggttttgttgat

SEQ ID NO: 250508 - DNA, 19 bp, Homo sapiens
  siRNA target sequence for PKHD1 (NM_138694.2,10591-10609).
gatgtctttagcagtgtaa

SEQ ID NO: 250509 - DNA, 19 bp, Homo sapiens
  siRNA target sequence for PKHD1 (NM_138694.2,10601-10619).
gcagtgtaaatgccaatat

SEQ ID NO: 250510 - DNA, 19 bp, Homo sapiens
  siRNA target sequence for PKHD1 (NM_138694.2,10602-10620).
cagtgtaaatgccaatatt

SEQ ID NO: 250511 - DNA, 19 bp, Homo sapiens
  siRNA target sequence for PKHD1 (NM_138694.2,10698-10716).
ggatcaaactcctcaagtt

SEQ ID NO: 250512 - DNA, 19 bp, Homo sapiens
  siRNA target sequence for PKHD1 (NM_138694.2,10729-10747).
ctattggggaacaaaagta

SEQ ID NO: 250513 - DNA, 19 bp, Homo sapiens
  siRNA target sequence for PKHD1 (NM_138694.2,10833-10851).
ggttcagtcagcttcctta

SEQ ID NO: 250514 - DNA, 19 bp, Homo sapiens
  siRNA target sequence for PKHD1 (NM_138694.2,10870-10888).
ggtgccaactatttcaaca

SEQ ID NO: 250515 - DNA, 19 bp, Homo sapiens
  siRNA target sequence for PKHD1 (NM_138694.2,10873-10891).
gccaactatttcaacatca

SEQ ID NO: 250516 - DNA, 19 bp, Homo sapiens
  siRNA target sequence for PKHD1 (NM_138694.2,11000-11018).
gctgggaaatagtaatact

SEQ ID NO: 250517 - DNA, 19 bp, Homo sapiens
  siRNA target sequence for PKHD1 (NM_138694.2,11011-11029).
gtaatactcgaaagactaa

SEQ ID NO: 250518 - DNA, 19 bp, Homo sapiens
  siRNA target sequence for PKHD1 (NM_138694.2,11020-11038).
gaaagactaactaacttct

SEQ ID NO: 250519 - DNA, 19 bp, Homo sapiens
  siRNA target sequence for PKHD1 (NM_138694.2,11024-11042).
gactaactaacttcttaca

SEQ ID NO: 250520 - DNA, 19 bp, Homo sapiens
  siRNA target sequence for PKHD1 (NM_138694.2,11026-11044).
ctaactaacttcttacaga

SEQ ID NO: 250521 - DNA, 19 bp, Homo sapiens
  siRNA target sequence for PKHD1 (NM_138694.2,11149-11167).
gtgacttgcactagtcatt

SEQ ID NO: 250522 - DNA, 19 bp, Homo sapiens
  siRNA target sequence for PKHD1 (NM_138694.2,11151-11169).
gacttgcactagtcattat

SEQ ID NO: 250523 - DNA, 19 bp, Homo sapiens
  siRNA target sequence for PKHD1 (NM_138694.2,11235-11253).
gactgtggaaactatctca

SEQ ID NO: 250524 - DNA, 19 bp, Homo sapiens
  siRNA target sequence for PKHD1 (NM_138694.2,11250-11268).
ctcaaaagtgattgtcatt

SEQ ID NO: 250525 - DNA, 19 bp, Homo sapiens
  siRNA target sequence for PKHD1 (NM_138694.2,11252-11270).
caaaagtgattgtcattga

SEQ ID NO: 250526 - DNA, 19 bp, Homo sapiens
  siRNA target sequence for PKHD1 (NM_138694.2,11275-11293).
ggtgattcgccaacagtaa

SEQ ID NO: 250527 - DNA, 19 bp, Homo sapiens
  siRNA target sequence for PKHD1 (NM_138694.2,11307-11325).
gatttcatccttatcaagt

SEQ ID NO: 250528 - DNA, 19 bp, Homo sapiens
  siRNA target sequence for PKHD1 (NM_138694.2,11312-11330).
catccttatcaagtaacaa

SEQ ID NO: 250529 - DNA, 19 bp, Homo sapiens
  siRNA target sequence for PKHD1 (NM_138694.2,11372-11390).
ctggggtactagagaatgt

SEQ ID NO: 250530 - DNA, 19 bp, Homo sapiens
  siRNA target sequence for PKHD1 (NM_138694.2,11375-11393).
gggtactagagaatgttct

SEQ ID NO: 250531 - DNA, 19 bp, Homo sapiens
  siRNA target sequence for PKHD1 (NM_138694.2,11434-11452).
ggagtcattggctatggaa

SEQ ID NO: 250532 - DNA, 19 bp, Homo sapiens
  siRNA target sequence for PKHD1 (NM_138694.2,11552-11570).
cagtgcagccacaattggt

SEQ ID NO: 250533 - DNA, 19 bp, Homo sapiens
  siRNA target sequence for PKHD1 (NM_138694.2,11554-11572).
gtgcagccacaattggtat

SEQ ID NO: 250534 - DNA, 19 bp, Homo sapiens
  siRNA target sequence for PKHD1 (NM_138694.2,11561-11579).
cacaattggtatttttgga

SEQ ID NO: 250535 - DNA, 19 bp, Homo sapiens
  siRNA target sequence for PKHD1 (NM_138694.2,11676-11694).
gtgcacccaggcagaaact

SEQ ID NO: 250536 - DNA, 19 bp, Homo sapiens
  siRNA target sequence for PKHD1 (NM_138694.2,11740-11758).
gggtcaaactggcacttta

SEQ ID NO: 250537 - DNA, 19 bp, Homo sapiens
  siRNA target sequence for PKHD1 (NM_138694.2,11741-11759).
ggtcaaactggcactttat

SEQ ID NO: 250538 - DNA, 19 bp, Homo sapiens
  siRNA target sequence for PKHD1 (NM_138694.2,11742-11760).
gtcaaactggcactttatt

SEQ ID NO: 250539 - DNA, 19 bp, Homo sapiens
  siRNA target sequence for PKHD1 (NM_138694.2,11962-11980).
cctgaatcccagactaata

SEQ ID NO: 250540 - DNA, 19 bp, Homo sapiens
  siRNA target sequence for PKHD1 (NM_138694.2,11963-11981).
ctgaatcccagactaataa

SEQ ID NO: 250541 - DNA, 19 bp, Homo sapiens
  siRNA target sequence for PKHD1 (NM_138694.2,12101-12119).
gcccccaccagttgatgaa

SEQ ID NO: 250542 - DNA, 19 bp, Homo sapiens
  siRNA target sequence for PKHD1 (NM_138694.2,12187-12205).
ggtactactggcatcacat

SEQ ID NO: 250543 - DNA, 19 bp, Homo sapiens
  siRNA target sequence for PKHD1 (NM_138694.2,12303-12321).
ccagctggcaggccaaaat

SEQ ID NO: 250544 - DNA, 19 bp, Homo sapiens
  siRNA target sequence for PKHD1 (NM_138694.2,12374-12392).
ggcaaagtcggctgagtaa

SEQ ID NO: 250545 - DNA, 19 bp, Homo sapiens
  siRNA target sequence for PLXDC1 (NM_020405.3,305-323).
gacacgctgccagataaca

SEQ ID NO: 250546 - DNA, 19 bp, Homo sapiens
  siRNA target sequence for PLXDC1 (NM_020405.3,340-358).
ggacaaccacagctattat

SEQ ID NO: 250547 - DNA, 19 bp, Homo sapiens
  siRNA target sequence for PLXDC1 (NM_020405.3,485-503).
gtggtcttgtcctttgatt

SEQ ID NO: 250548 - DNA, 19 bp, Homo sapiens
  siRNA target sequence for PLXDC1 (NM_020405.3,527-545).
cggcagatcaccatagcaa

SEQ ID NO: 250549 - DNA, 19 bp, Homo sapiens
  siRNA target sequence for PLXDC1 (NM_020405.3,586-604).
gctcacagctactcagtat

SEQ ID NO: 250550 - DNA, 19 bp, Homo sapiens
  siRNA target sequence for PLXDC1 (NM_020405.3,611-629).
cccctgatggccaacttca

SEQ ID NO: 250551 - DNA, 19 bp, Homo sapiens
  siRNA target sequence for PLXDC1 (NM_020405.3,771-789).
gcattgtctttgcctataa

SEQ ID NO: 250552 - DNA, 19 bp, Homo sapiens
  siRNA target sequence for PLXDC1 (NM_020405.3,823-841).
ctcccagcatcctgtcaaa

SEQ ID NO: 250553 - DNA, 19 bp, Homo sapiens
  siRNA target sequence for PLXDC1 (NM_020405.3,848-866).
ctatcggatgccttcatga

SEQ ID NO: 250554 - DNA, 19 bp, Homo sapiens
  siRNA target sequence for PLXDC1 (NM_020405.3,852-870).
cggatgccttcatgattct

SEQ ID NO: 250555 - DNA, 19 bp, Homo sapiens
  siRNA target sequence for PLXDC1 (NM_020405.3,880-898).
cccggatgtgccagaatct

SEQ ID NO: 250556 - DNA, 19 bp, Homo sapiens
  siRNA target sequence for PLXDC1 (NM_020405.3,1299-1317).
gagacggccttcagaacaa

SEQ ID NO: 250557 - DNA, 19 bp, Homo sapiens
  siRNA target sequence for PLXDC1 (NM_020405.3,1406-1424).
ctggctggaatttacatca

SEQ ID NO: 250558 - DNA, 19 bp, Homo sapiens
  siRNA target sequence for PLXDC1 (NM_020405.3,1408-1426).
ggctggaatttacatcaat

SEQ ID NO: 250559 - DNA, 19 bp, Homo sapiens
  siRNA target sequence for PLXDC1 (NM_020405.3,1478-1496).
cactggccagccatgaagt

SEQ ID NO: 250560 - DNA, 19 bp, Homo sapiens
  siRNA target sequence for PLXDC2 (NM_032812.7,666-684).
ccgctgcaggagttatgtt

SEQ ID NO: 250561 - DNA, 19 bp, Homo sapiens
  siRNA target sequence for PLXDC2 (NM_032812.7,667-685).
cgctgcaggagttatgtta

SEQ ID NO: 250562 - DNA, 19 bp, Homo sapiens
  siRNA target sequence for PLXDC2 (NM_032812.7,753-771).
ggcagtatggagttactca

SEQ ID NO: 250563 - DNA, 19 bp, Homo sapiens
  siRNA target sequence for PLXDC2 (NM_032812.7,932-950).
gatgggcaggacaataaca

SEQ ID NO: 250564 - DNA, 19 bp, Homo sapiens
  siRNA target sequence for PLXDC2 (NM_032812.7,965-983).
gatacagaccacaattact

SEQ ID NO: 250565 - DNA, 19 bp, Homo sapiens
  siRNA target sequence for PLXDC2 (NM_032812.7,969-987).
cagaccacaattactatat

SEQ ID NO: 250566 - DNA, 19 bp, Homo sapiens
  siRNA target sequence for PLXDC2 (NM_032812.7,971-989).
gaccacaattactatatat

SEQ ID NO: 250567 - DNA, 19 bp, Homo sapiens
  siRNA target sequence for PLXDC2 (NM_032812.7,1064-1082).
gtgaagattcatggaatat

SEQ ID NO: 250568 - DNA, 19 bp, Homo sapiens
  siRNA target sequence for PLXDC2 (NM_032812.7,1120-1138).
gtccttcgattttccattt

SEQ ID NO: 250569 - DNA, 19 bp, Homo sapiens
  siRNA target sequence for PLXDC2 (NM_032812.7,1143-1161).
gccacttcctacgtgaaat

SEQ ID NO: 250570 - DNA, 19 bp, Homo sapiens
  siRNA target sequence for PLXDC2 (NM_032812.7,1147-1165).
cttcctacgtgaaatcact

SEQ ID NO: 250571 - DNA, 19 bp, Homo sapiens
  siRNA target sequence for PLXDC2 (NM_032812.7,1194-1212).
gagaagtcgtacatcgaat

SEQ ID NO: 250572 - DNA, 19 bp, Homo sapiens
  siRNA target sequence for PLXDC2 (NM_032812.7,1199-1217).
gtcgtacatcgaatgctaa

SEQ ID NO: 250573 - DNA, 19 bp, Homo sapiens
  siRNA target sequence for PLXDC2 (NM_032812.7,1236-1254).
cacctttaatggcaaattt

SEQ ID NO: 250574 - DNA, 19 bp, Homo sapiens
  siRNA target sequence for PLXDC2 (NM_032812.7,1331-1349).
gtacatctccaggataatt

SEQ ID NO: 250575 - DNA, 19 bp, Homo sapiens
  siRNA target sequence for PLXDC2 (NM_032812.7,1390-1408).
ggatggacgaatcatcttt

SEQ ID NO: 250576 - DNA, 19 bp, Homo sapiens
  siRNA target sequence for PLXDC2 (NM_032812.7,1394-1412).
ggacgaatcatctttggat

SEQ ID NO: 250577 - DNA, 19 bp, Homo sapiens
  siRNA target sequence for PLXDC2 (NM_032812.7,1395-1413).
gacgaatcatctttggata

SEQ ID NO: 250578 - DNA, 19 bp, Homo sapiens
  siRNA target sequence for PLXDC2 (NM_032812.7,1496-1514).
gtccacaggatccaacaaa

SEQ ID NO: 250579 - DNA, 19 bp, Homo sapiens
  siRNA target sequence for PLXDC2 (NM_032812.7,1523-1541).
gttcgaagaagaacaattt

SEQ ID NO: 250580 - DNA, 19 bp, Homo sapiens
  siRNA target sequence for PLXDC2 (NM_032812.7,1550-1568).
caccgagtagagctacaaa

SEQ ID NO: 250581 - DNA, 19 bp, Homo sapiens
  siRNA target sequence for PLXDC2 (NM_032812.7,1553-1571).
cgagtagagctacaaatgt

SEQ ID NO: 250582 - DNA, 19 bp, Homo sapiens
  siRNA target sequence for PLXDC2 (NM_032812.7,1561-1579).
gctacaaatgtcaaaaatt

SEQ ID NO: 250583 - DNA, 19 bp, Homo sapiens
  siRNA target sequence for PLXDC2 (NM_032812.7,1675-1693).
cagttggtgtagtaaactt

SEQ ID NO: 250584 - DNA, 19 bp, Homo sapiens
  siRNA target sequence for PLXDC2 (NM_032812.7,1681-1699).
gtgtagtaaacttcaaaga

SEQ ID NO: 250585 - DNA, 19 bp, Homo sapiens
  siRNA target sequence for PLXDC2 (NM_032812.7,1746-1764).
gatgccctgaagagtcaaa

SEQ ID NO: 250586 - DNA, 19 bp, Homo sapiens
  siRNA target sequence for PLXDC2 (NM_032812.7,1787-1805).
gaaccagtggaaacttctt

SEQ ID NO: 250587 - DNA, 19 bp, Homo sapiens
  siRNA target sequence for PLXDC2 (NM_032812.7,1841-1859).
cagttcagggtcctaacta

SEQ ID NO: 250588 - DNA, 19 bp, Homo sapiens
  siRNA target sequence for PLXDC2 (NM_032812.7,1917-1935).
ccaagatagcactacatct

SEQ ID NO: 250589 - DNA, 19 bp, Homo sapiens
  siRNA target sequence for PLXDC2 (NM_032812.7,1918-1936).
caagatagcactacatcta

SEQ ID NO: 250590 - DNA, 19 bp, Homo sapiens
  siRNA target sequence for PLXDC2 (NM_032812.7,1921-1939).
gatagcactacatctaaaa

SEQ ID NO: 250591 - DNA, 19 bp, Homo sapiens
  siRNA target sequence for PLXDC2 (NM_032812.7,2020-2038).
catcctggtcctcattgta

SEQ ID NO: 250592 - DNA, 19 bp, Homo sapiens
  siRNA target sequence for PLXDC2 (NM_032812.7,2051-2069).
cttgtgacagtctatatgt

SEQ ID NO: 250593 - DNA, 19 bp, Homo sapiens
  siRNA target sequence for PLXDC2 (NM_032812.7,2068-2086).
gtatcaccacccaacatca

SEQ ID NO: 250594 - DNA, 19 bp, Homo sapiens
  siRNA target sequence for PLXDC2 (NM_032812.7,2124-2142).
gatggcctgcgatgaagtt

SEQ ID NO: 250595 - DNA, 19 bp, Homo sapiens
  siRNA target sequence for PLXDC2 (NM_032812.7,2128-2146).
gcctgcgatgaagtttaga

SEQ ID NO: 250596 - DNA, 19 bp, Homo sapiens
  siRNA target sequence for PLXNB3 (NM_005393.1,250-268).
cgcttctccgcacctaata

SEQ ID NO: 250597 - DNA, 19 bp, Homo sapiens
  siRNA target sequence for PLXNB3 (NM_005393.1,299-317).
gccgaggcacactctatgt

SEQ ID NO: 250598 - DNA, 19 bp, Homo sapiens
  siRNA target sequence for PLXNB3 (NM_005393.1,587-605).
ctggtgacgggcagtttgt

SEQ ID NO: 250599 - DNA, 19 bp, Homo sapiens
  siRNA target sequence for PLXNB3 (NM_005393.1,790-808).
gacttctccgactacaaca

SEQ ID NO: 250600 - DNA, 19 bp, Homo sapiens
  siRNA target sequence for PLXNB3 (NM_005393.1,1653-1671).
ccagtggctgtggagttat

SEQ ID NO: 250601 - DNA, 19 bp, Homo sapiens
  siRNA target sequence for PLXNB3 (NM_005393.1,1780-1798).
gcagatgaatacttccatt

SEQ ID NO: 250602 - DNA, 19 bp, Homo sapiens
  siRNA target sequence for PLXNB3 (NM_005393.1,1799-1817).
gtgcgttcggggactatga

SEQ ID NO: 250603 - DNA, 19 bp, Homo sapiens
  siRNA target sequence for PLXNB3 (NM_005393.1,1952-1970).
ccaccaacttctcctttta

SEQ ID NO: 250604 - DNA, 19 bp, Homo sapiens
  siRNA target sequence for PLXNB3 (NM_005393.1,2225-2243).
gcgtgcggaaccttcaaca

SEQ ID NO: 250605 - DNA, 19 bp, Homo sapiens
  siRNA target sequence for PLXNB3 (NM_005393.1,2828-2846).
ccgtccgggtggccattaa

SEQ ID NO: 250606 - DNA, 19 bp, Homo sapiens
  siRNA target sequence for PLXNB3 (NM_005393.1,3350-3368).
cggacccccaggcttgtat

SEQ ID NO: 250607 - DNA, 19 bp, Homo sapiens
  siRNA target sequence for PLXNB3 (NM_005393.1,4523-4541).
ctggtgaaccactgtacat

SEQ ID NO: 250608 - DNA, 19 bp, Homo sapiens
  siRNA target sequence for PLXNB3 (NM_005393.1,4604-4622).
ccaaacggaccctgaatga

SEQ ID NO: 250609 - DNA, 19 bp, Homo sapiens
  siRNA target sequence for PLXNB3 (NM_005393.1,4874-4892).
ccctatcggacgaagactt

SEQ ID NO: 250610 - DNA, 19 bp, Homo sapiens
  siRNA target sequence for PLXNB3 (NM_005393.1,4895-4913).
cctccgtgacccaaaacca

SEQ ID NO: 250611 - DNA, 19 bp, Homo sapiens
  siRNA target sequence for PLXNB3 (NM_005393.1,5495-5513).
gtaccacctcggagcataa

SEQ ID NO: 250612 - DNA, 19 bp, Homo sapiens
  siRNA target sequence for PLXNB3 (NM_005393.1,5498-5516).
ccacctcggagcataaagt

SEQ ID NO: 250613 - DNA, 19 bp, Homo sapiens
  siRNA target sequence for PLXNB3 (NM_005393.1,5523-5541).
ggattccccagtgaacaaa

SEQ ID NO: 250614 - DNA, 19 bp, Homo sapiens
  siRNA target sequence for PLXNB3 (NM_005393.1,5621-5639).
cgagctaccaggagatgaa

SEQ ID NO: 250615 - DNA, 19 bp, Homo sapiens
  siRNA target sequence for PLXNB3 (NM_005393.1,5656-5674).
ctctccgggaactacactt

SEQ ID NO: 250616 - DNA, 19 bp, Homo sapiens
  siRNA target sequence for PLXNB3 (NM_005393.1,5718-5736).
catccacaggtactatgat

SEQ ID NO: 250617 - DNA, 19 bp, Homo sapiens
  siRNA target sequence for PLXNB3 (NM_005393.1,5724-5742).
caggtactatgatcagatt

SEQ ID NO: 250618 - DNA, 19 bp, Homo sapiens
  siRNA target sequence for PLXND1 (NM_015103.1,404-422).
ccgtcaaccgcctctatca

SEQ ID NO: 250619 - DNA, 19 bp, Homo sapiens
  siRNA target sequence for PLXND1 (NM_015103.1,535-553).
cgcctcacggacaactaca

SEQ ID NO: 250620 - DNA, 19 bp, Homo sapiens
  siRNA target sequence for PLXND1 (NM_015103.1,538-556).
ctcacggacaactacaaca

SEQ ID NO: 250621 - DNA, 19 bp, Homo sapiens
  siRNA target sequence for PLXND1 (NM_015103.1,749-767).
ccaccgtggggctagttct

SEQ ID NO: 250622 - DNA, 19 bp, Homo sapiens
  siRNA target sequence for PLXND1 (NM_015103.1,1654-1672).
gggaggcttctcaagatca

SEQ ID NO: 250623 - DNA, 19 bp, Homo sapiens
  siRNA target sequence for PLXND1 (NM_015103.1,2288-2306).
gccgcactgcacaagtgta

SEQ ID NO: 250624 - DNA, 19 bp, Homo sapiens
  siRNA target sequence for PLXND1 (NM_015103.1,2338-2356).
gcacagtggccctgtttct

SEQ ID NO: 250625 - DNA, 19 bp, Homo sapiens
  siRNA target sequence for PLXND1 (NM_015103.1,2647-2665).
ccgctcagcctccaactaa

SEQ ID NO: 250626 - DNA, 19 bp, Homo sapiens
  siRNA target sequence for PLXND1 (NM_015103.1,2648-2666).
cgctcagcctccaactaaa

SEQ ID NO: 250627 - DNA, 19 bp, Homo sapiens
  siRNA target sequence for PLXND1 (NM_015103.1,3463-3481).
cacatggtgcagaatgtgt

SEQ ID NO: 250628 - DNA, 19 bp, Homo sapiens
  siRNA target sequence for PLXND1 (NM_015103.1,3583-3601).
gcgccagtggacttcttca

SEQ ID NO: 250629 - DNA, 19 bp, Homo sapiens
  siRNA target sequence for PLXND1 (NM_015103.1,3584-3602).
cgccagtggacttcttcat

SEQ ID NO: 250630 - DNA, 19 bp, Homo sapiens
  siRNA target sequence for PLXND1 (NM_015103.1,3587-3605).
cagtggacttcttcatcaa

SEQ ID NO: 250631 - DNA, 19 bp, Homo sapiens
  siRNA target sequence for PLXND1 (NM_015103.1,3761-3779).
ctctcaccctcgttatcca

SEQ ID NO: 250632 - DNA, 19 bp, Homo sapiens
  siRNA target sequence for PLXND1 (NM_015103.1,3813-3831).
cgagtaccgggtcaagata

SEQ ID NO: 250633 - DNA, 19 bp, Homo sapiens
  siRNA target sequence for PLXND1 (NM_015103.1,3842-3860).
gctgcgacatccagattgt

SEQ ID NO: 250634 - DNA, 19 bp, Homo sapiens
  siRNA target sequence for PLXND1 (NM_015103.1,4045-4063).
gccctgttcgtcttctgta

SEQ ID NO: 250635 - DNA, 19 bp, Homo sapiens
  siRNA target sequence for PLXND1 (NM_015103.1,5093-5111).
cgctggcccattacaagat

SEQ ID NO: 250636 - DNA, 19 bp, Homo sapiens
  siRNA target sequence for PLXND1 (NM_015103.1,5131-5149).
gccatgagtctcatagaca

SEQ ID NO: 250637 - DNA, 19 bp, Homo sapiens
  siRNA target sequence for PLXND1 (NM_015103.1,5132-5150).
ccatgagtctcatagacaa

SEQ ID NO: 250638 - DNA, 19 bp, Homo sapiens
  siRNA target sequence for PLXND1 (NM_015103.1,5160-5178).
cacactgggccgagtgaaa

SEQ ID NO: 250639 - DNA, 19 bp, Homo sapiens
  siRNA target sequence for PLXND1 (NM_015103.1,5162-5180).
cactgggccgagtgaaaga

SEQ ID NO: 250640 - DNA, 19 bp, Homo sapiens
  siRNA target sequence for PLXND1 (NM_015103.1,5378-5396).
ccccactggctgtcaagta

SEQ ID NO: 250641 - DNA, 19 bp, Homo sapiens
  siRNA target sequence for PLXND1 (NM_015103.1,5720-5738).
cgctcagcgagcaagagat

SEQ ID NO: 250642 - DNA, 19 bp, Homo sapiens
  siRNA target sequence for PLXND1 (NM_015103.1,5752-5770).
gccgaggagtcgaggaaat

SEQ ID NO: 250643 - DNA, 19 bp, Homo sapiens
  siRNA target sequence for PORIMIN (NM_052932.1,314-332).
cggagactctccaacatgt

SEQ ID NO: 250644 - DNA, 19 bp, Homo sapiens
  siRNA target sequence for PORIMIN (NM_052932.1,331-349).
gtgccttctgaccatacaa

SEQ ID NO: 250645 - DNA, 19 bp, Homo sapiens
  siRNA target sequence for PORIMIN (NM_052932.1,372-390).
gaaaccaccaacttcagtt

SEQ ID NO: 250646 - DNA, 19 bp, Homo sapiens
  siRNA target sequence for PORIMIN (NM_052932.1,415-433).
gtcaccaccatgaaaccta

SEQ ID NO: 250647 - DNA, 19 bp, Homo sapiens
  siRNA target sequence for PORIMIN (NM_052932.1,436-454).
gcggcatctaatacaacaa

SEQ ID NO: 250648 - DNA, 19 bp, Homo sapiens
  siRNA target sequence for PORIMIN (NM_052932.1,438-456).
ggcatctaatacaacaaca

SEQ ID NO: 250649 - DNA, 19 bp, Homo sapiens
  siRNA target sequence for PORIMIN (NM_052932.1,457-475).
ccagggatggtctcaacaa

SEQ ID NO: 250650 - DNA, 19 bp, Homo sapiens
  siRNA target sequence for PORIMIN (NM_052932.1,458-476).
cagggatggtctcaacaaa

SEQ ID NO: 250651 - DNA, 19 bp, Homo sapiens
  siRNA target sequence for PORIMIN (NM_052932.1,465-483).
ggtctcaacaaatatgact

SEQ ID NO: 250652 - DNA, 19 bp, Homo sapiens
  siRNA target sequence for PORIMIN (NM_052932.1,558-576).
gaccgtaacccacaatagt

SEQ ID NO: 250653 - DNA, 19 bp, Homo sapiens
  siRNA target sequence for PORIMIN (NM_052932.1,561-579).
cgtaacccacaatagttca

SEQ ID NO: 250654 - DNA, 19 bp, Homo sapiens
  siRNA target sequence for PORIMIN (NM_052932.1,589-607).
gctgcttcatcagtaacaa

SEQ ID NO: 250655 - DNA, 19 bp, Homo sapiens
  siRNA target sequence for PORIMIN (NM_052932.1,590-608).
ctgcttcatcagtaacaat

SEQ ID NO: 250656 - DNA, 19 bp, Homo sapiens
  siRNA target sequence for PORIMIN (NM_052932.1,611-629).
caacaactatgcattctga

SEQ ID NO: 250657 - DNA, 19 bp, Homo sapiens
  siRNA target sequence for PORIMIN (NM_052932.1,636-654).
gaaaggatcaaaatttgat

SEQ ID NO: 250658 - DNA, 19 bp, Homo sapiens
  siRNA target sequence for PORIMIN (NM_052932.1,744-762).
cattcggtatcgaaccata

SEQ ID NO: 250659 - DNA, 19 bp, Homo sapiens
  siRNA target sequence for PORIMIN (NM_052932.1,749-767).
ggtatcgaaccatagatga

SEQ ID NO: 250660 - DNA, 19 bp, Homo sapiens
  siRNA target sequence for PORIMIN (NM_052932.1,750-768).
gtatcgaaccatagatgaa

SEQ ID NO: 250661 - DNA, 19 bp, Homo sapiens
  siRNA target sequence for PPFIA1 (NM_003626.2,319-337).
gtctccatgctagaagaaa

SEQ ID NO: 250662 - DNA, 19 bp, Homo sapiens
  siRNA target sequence for PPFIA1 (NM_003626.2,339-357).
ggaccgccttcttgataca

SEQ ID NO: 250663 - DNA, 19 bp, Homo sapiens
  siRNA target sequence for PPFIA1 (NM_003626.2,403-421).
cacgaggttggtcatgaaa

SEQ ID NO: 250664 - DNA, 19 bp, Homo sapiens
  siRNA target sequence for PPFIA1 (NM_003626.2,405-423).
cgaggttggtcatgaaaga

SEQ ID NO: 250665 - DNA, 19 bp, Homo sapiens
  siRNA target sequence for PPFIA1 (NM_003626.2,462-480).
ggagttcgcagcacttact

SEQ ID NO: 250666 - DNA, 19 bp, Homo sapiens
  siRNA target sequence for PPFIA1 (NM_003626.2,463-481).
gagttcgcagcacttacta

SEQ ID NO: 250667 - DNA, 19 bp, Homo sapiens
  siRNA target sequence for PPFIA1 (NM_003626.2,473-491).
cacttactaaagaactcaa

SEQ ID NO: 250668 - DNA, 19 bp, Homo sapiens
  siRNA target sequence for PPFIA1 (NM_003626.2,745-763).
cgagtagcacttgaaagat

SEQ ID NO: 250669 - DNA, 19 bp, Homo sapiens
  siRNA target sequence for PPFIA1 (NM_003626.2,771-789).
gttagaagaggaattaggt

SEQ ID NO: 250670 - DNA, 19 bp, Homo sapiens
  siRNA target sequence for PPFIA1 (NM_003626.2,794-812).
cacacaaagagctaatgat

SEQ ID NO: 250671 - DNA, 19 bp, Homo sapiens
  siRNA target sequence for PPFIA1 (NM_003626.2,798-816).
caaagagctaatgattctt

SEQ ID NO: 250672 - DNA, 19 bp, Homo sapiens
  siRNA target sequence for PPFIA1 (NM_003626.2,834-852).
gaaaaaaactctaacagat

SEQ ID NO: 250673 - DNA, 19 bp, Homo sapiens
  siRNA target sequence for PPFIA1 (NM_003626.2,897-915).
gagtggaaagagatcttct

SEQ ID NO: 250674 - DNA, 19 bp, Homo sapiens
  siRNA target sequence for PPFIA1 (NM_003626.2,958-976).
gagctccaagaaatcataa

SEQ ID NO: 250675 - DNA, 19 bp, Homo sapiens
  siRNA target sequence for PPFIA1 (NM_003626.2,961-979).
ctccaagaaatcataagta

SEQ ID NO: 250676 - DNA, 19 bp, Homo sapiens
  siRNA target sequence for PPFIA1 (NM_003626.2,1059-1077).
ggacacggctagaaaagat

SEQ ID NO: 250677 - DNA, 19 bp, Homo sapiens
  siRNA target sequence for PPFIA1 (NM_003626.2,1213-1231).
gtgcatgacctcaatgata

SEQ ID NO: 250678 - DNA, 19 bp, Homo sapiens
  siRNA target sequence for PPFIA1 (NM_003626.2,1215-1233).
gcatgacctcaatgataaa

SEQ ID NO: 250679 - DNA, 19 bp, Homo sapiens
  siRNA target sequence for PPFIA1 (NM_003626.2,1267-1285).
catcgacagactgaagata

SEQ ID NO: 250680 - DNA, 19 bp, Homo sapiens
  siRNA target sequence for PPFIA1 (NM_003626.2,1270-1288).
cgacagactgaagataaaa

SEQ ID NO: 250681 - DNA, 19 bp, Homo sapiens
  siRNA target sequence for PPFIA1 (NM_003626.2,1391-1409).
gggtggcagcgctttccaa

SEQ ID NO: 250682 - DNA, 19 bp, Homo sapiens
  siRNA target sequence for PPFIA1 (NM_003626.2,1419-1437).
gagacacggcaacattgaa

SEQ ID NO: 250683 - DNA, 19 bp, Homo sapiens
  siRNA target sequence for PPFIA1 (NM_003626.2,1421-1439).
gacacggcaacattgaaga

SEQ ID NO: 250684 - DNA, 19 bp, Homo sapiens
  siRNA target sequence for PPFIA1 (NM_003626.2,1423-1441).
cacggcaacattgaagaaa

SEQ ID NO: 250685 - DNA, 19 bp, Homo sapiens
  siRNA target sequence for PPFIA1 (NM_003626.2,1428-1446).
caacattgaagaaaggtta

SEQ ID NO: 250686 - DNA, 19 bp, Homo sapiens
  siRNA target sequence for PPFIA1 (NM_003626.2,1492-1510).
cgggcaaggcaaagagaaa

SEQ ID NO: 250687 - DNA, 19 bp, Homo sapiens
  siRNA target sequence for PPFIA1 (NM_003626.2,1518-1536).
cgaagaacataataaacgt

SEQ ID NO: 250688 - DNA, 19 bp, Homo sapiens
  siRNA target sequence for PPFIA1 (NM_003626.2,1552-1570).
gacaagctgctttcagaat

SEQ ID NO: 250689 - DNA, 19 bp, Homo sapiens
  siRNA target sequence for PPFIA1 (NM_003626.2,1571-1589).
ctaatgagaggcttcaact

SEQ ID NO: 250690 - DNA, 19 bp, Homo sapiens
  siRNA target sequence for PPFIA1 (NM_003626.2,1652-1670).
gtgcaaaaaagcagttaga

SEQ ID NO: 250691 - DNA, 19 bp, Homo sapiens
  siRNA target sequence for PPFIA1 (NM_003626.2,1695-1713).
gcttgtcctaaacattgaa

SEQ ID NO: 250692 - DNA, 19 bp, Homo sapiens
  siRNA target sequence for PPFIA1 (NM_003626.2,1783-1801).
ggcagtgtcccagatttca

SEQ ID NO: 250693 - DNA, 19 bp, Homo sapiens
  siRNA target sequence for PPFIA1 (NM_003626.2,1896-1914).
gccttccaaggtacaaact

SEQ ID NO: 250694 - DNA, 19 bp, Homo sapiens
  siRNA target sequence for PPFIA1 (NM_003626.2,1995-2013).
cgtgtctgatggtgaagat

SEQ ID NO: 250695 - DNA, 19 bp, Homo sapiens
  siRNA target sequence for PPFIA1 (NM_003626.2,2118-2136).
caaagagatcaggttgatt

SEQ ID NO: 250696 - DNA, 19 bp, Homo sapiens
  siRNA target sequence for PPFIA1 (NM_003626.2,2192-2210).
gcagtggaagtctagacaa

SEQ ID NO: 250697 - DNA, 19 bp, Homo sapiens
  siRNA target sequence for PPFIA1 (NM_003626.2,2195-2213).
gtggaagtctagacaatct

SEQ ID NO: 250698 - DNA, 19 bp, Homo sapiens
  siRNA target sequence for PPFIA1 (NM_003626.2,2206-2224).
gacaatcttggtcgtttta

SEQ ID NO: 250699 - DNA, 19 bp, Homo sapiens
  siRNA target sequence for PPFIA1 (NM_003626.2,2208-2226).
caatcttggtcgttttaga

SEQ ID NO: 250700 - DNA, 19 bp, Homo sapiens
  siRNA target sequence for PPFIA1 (NM_003626.2,2215-2233).
ggtcgttttagatcaatga

SEQ ID NO: 250701 - DNA, 19 bp, Homo sapiens
  siRNA target sequence for PPFIA1 (NM_003626.2,2383-2401).
gtacgagatgacaagacaa

SEQ ID NO: 250702 - DNA, 19 bp, Homo sapiens
  siRNA target sequence for PPFIA1 (NM_003626.2,2491-2509).
gaggacatcagggacataa

SEQ ID NO: 250703 - DNA, 19 bp, Homo sapiens
  siRNA target sequence for PPFIA1 (NM_003626.2,2494-2512).
gacatcagggacataagga

SEQ ID NO: 250704 - DNA, 19 bp, Homo sapiens
  siRNA target sequence for PPFIA1 (NM_003626.2,2646-2664).
gggccgacctggacaaact

SEQ ID NO: 250705 - DNA, 19 bp, Homo sapiens
  siRNA target sequence for PPFIA1 (NM_003626.2,2745-2763).
gggacaggctgaaaaaaat

SEQ ID NO: 250706 - DNA, 19 bp, Homo sapiens
  siRNA target sequence for PPFIA1 (NM_003626.2,2803-2821).
cggagacaaggtttacctt

SEQ ID NO: 250707 - DNA, 19 bp, Homo sapiens
  siRNA target sequence for PPFIA1 (NM_003626.2,2804-2822).
ggagacaaggtttaccttt

SEQ ID NO: 250708 - DNA, 19 bp, Homo sapiens
  siRNA target sequence for PPFIA1 (NM_003626.2,3180-3198).
ggaccacttgaccaagaaa

SEQ ID NO: 250709 - DNA, 19 bp, Homo sapiens
  siRNA target sequence for PPFIA1 (NM_003626.2,3206-3224).
gagggcagctgaaaatggt

SEQ ID NO: 250710 - DNA, 19 bp, Homo sapiens
  siRNA target sequence for PPFIA1 (NM_003626.2,3216-3234).
gaaaatggtcgacagtttt

SEQ ID NO: 250711 - DNA, 19 bp, Homo sapiens
  siRNA target sequence for PPFIA1 (NM_003626.2,3378-3396).
cctgtcaattggccttaaa

SEQ ID NO: 250712 - DNA, 19 bp, Homo sapiens
  siRNA target sequence for PPFIA1 (NM_003626.2,3381-3399).
gtcaattggccttaaagaa

SEQ ID NO: 250713 - DNA, 19 bp, Homo sapiens
  siRNA target sequence for PPFIA1 (NM_003626.2,3388-3406).
ggccttaaagaatatgcaa

SEQ ID NO: 250714 - DNA, 19 bp, Homo sapiens
  siRNA target sequence for PPFIA1 (NM_003626.2,3553-3571).
gtcatggggactgatagaa

SEQ ID NO: 250715 - DNA, 19 bp, Homo sapiens
  siRNA target sequence for PPFIA1 (NM_003626.2,3561-3579).
gactgatagaaggtttgat

SEQ ID NO: 250716 - DNA, 19 bp, Homo sapiens
  siRNA target sequence for PPFIA1 (NM_003626.2,3611-3629).
cttcatggagaaaaaagtt

SEQ ID NO: 250717 - DNA, 19 bp, Homo sapiens
  siRNA target sequence for PPFIA1 (NM_003626.2,3738-3756).
gcagatggacggcaatgta

SEQ ID NO: 250718 - DNA, 19 bp, Homo sapiens
  siRNA target sequence for PPFIA1 (NM_003626.2,3739-3757).
cagatggacggcaatgtat

SEQ ID NO: 250719 - DNA, 19 bp, Homo sapiens
  siRNA target sequence for PPFIA1 (NM_003626.2,3741-3759).
gatggacggcaatgtatca

SEQ ID NO: 250720 - DNA, 19 bp, Homo sapiens
  siRNA target sequence for PPFIA1 (NM_003626.2,3781-3799).
gctacagtcaggacttact

SEQ ID NO: 250721 - DNA, 19 bp, Homo sapiens
  siRNA target sequence for PROCR (NM_006404.3,217-235).
gtctggctgggccttttgt

SEQ ID NO: 250722 - DNA, 19 bp, Homo sapiens
  siRNA target sequence for PROCR (NM_006404.3,748-766).
gtatgtgcagaaacatatt

SEQ ID NO: 250723 - DNA, 19 bp, Homo sapiens
  siRNA target sequence for PROCR (NM_006404.3,827-845).
gtcctggtgggcagtttca

SEQ ID NO: 250724 - DNA, 19 bp, Homo sapiens
  siRNA target sequence for PRV1 (NM_020406.1,154-172).
ggcaatggacccctaagaa

SEQ ID NO: 250725 - DNA, 19 bp, Homo sapiens
  siRNA target sequence for PRV1 (NM_020406.1,156-174).
caatggacccctaagaaca

SEQ ID NO: 250726 - DNA, 19 bp, Homo sapiens
  siRNA target sequence for PRV1 (NM_020406.1,672-690).
cgggggaccaccattatga

SEQ ID NO: 250727 - DNA, 19 bp, Homo sapiens
  siRNA target sequence for PSK-1 (NM_012410.1,119-137).
cccagctgctgttcctaat

SEQ ID NO: 250728 - DNA, 19 bp, Homo sapiens
  siRNA target sequence for PSK-1 (NM_012410.1,120-138).
ccagctgctgttcctaatt

SEQ ID NO: 250729 - DNA, 19 bp, Homo sapiens
  siRNA target sequence for PSK-1 (NM_012410.1,378-396).
cagcccagttctgtgtaat

SEQ ID NO: 250730 - DNA, 19 bp, Homo sapiens
  siRNA target sequence for PSK-1 (NM_012410.1,380-398).
gcccagttctgtgtaataa

SEQ ID NO: 250731 - DNA, 19 bp, Homo sapiens
  siRNA target sequence for PSK-1 (NM_012410.1,503-521).
ctggctacggcattgagat

SEQ ID NO: 250732 - DNA, 19 bp, Homo sapiens
  siRNA target sequence for PSK-1 (NM_012410.1,601-619).
cgactcctggccaactcat

SEQ ID NO: 250733 - DNA, 19 bp, Homo sapiens
  siRNA target sequence for PSK-1 (NM_012410.1,998-1016).
cctgccgttgggtcattga

SEQ ID NO: 250734 - DNA, 19 bp, Homo sapiens
  siRNA target sequence for PSK-1 (NM_012410.1,999-1017).
ctgccgttgggtcattgaa

SEQ ID NO: 250735 - DNA, 19 bp, Homo sapiens
  siRNA target sequence for PSK-1 (NM_012410.1,1061-1079).
cgctggatgaggacaatga

SEQ ID NO: 250736 - DNA, 19 bp, Homo sapiens
  siRNA target sequence for PSK-1 (NM_012410.1,1110-1128).
cctatcccccgtgatctat

SEQ ID NO: 250737 - DNA, 19 bp, Homo sapiens
  siRNA target sequence for PSK-1 (NM_012410.1,1224-1242).
gctgttaagccttcgattt

SEQ ID NO: 250738 - DNA, 19 bp, Homo sapiens
  siRNA target sequence for PSK-1 (NM_012410.1,1227-1245).
gttaagccttcgatttgaa

SEQ ID NO: 250739 - DNA, 19 bp, Homo sapiens
  siRNA target sequence for PSK-1 (NM_012410.1,1382-1400).
ccaatgccatcgaatgtgt

SEQ ID NO: 250740 - DNA, 19 bp, Homo sapiens
  siRNA target sequence for PSK-1 (NM_012410.1,1565-1583).
gcatcttgctccaagttga

SEQ ID NO: 250741 - DNA, 19 bp, Homo sapiens
  siRNA target sequence for PSK-1 (NM_012410.1,1569-1587).
cttgctccaagttgagata

SEQ ID NO: 250742 - DNA, 19 bp, Homo sapiens
  siRNA target sequence for PSK-1 (NM_012410.1,1573-1591).
ctccaagttgagatattga

SEQ ID NO: 250743 - DNA, 19 bp, Homo sapiens
  siRNA target sequence for PSK-1 (NM_012410.1,1757-1775).
gccagggcttcgtattgca

SEQ ID NO: 250744 - DNA, 19 bp, Homo sapiens
  siRNA target sequence for PSK-1 (NM_012410.1,1763-1781).
gcttcgtattgcacttcaa

SEQ ID NO: 250745 - DNA, 19 bp, Homo sapiens
  siRNA target sequence for PSK-1 (NM_012410.1,1909-1927).
ctaggctccgacattctca

SEQ ID NO: 250746 - DNA, 19 bp, Homo sapiens
  siRNA target sequence for PSK-1 (NM_012410.1,1966-1984).
gcctgccaaaagatcatga

SEQ ID NO: 250747 - DNA, 19 bp, Homo sapiens
  siRNA target sequence for PSK-1 (NM_012410.1,2213-2231).
gctaccagacgctgtacaa

SEQ ID NO: 250748 - DNA, 19 bp, Homo sapiens
  siRNA target sequence for PSK-1 (NM_012410.1,2488-2506).
ctcggcagtggcgtttaca

SEQ ID NO: 250749 - DNA, 19 bp, Homo sapiens
  siRNA target sequence for PSK-1 (NM_012410.1,2491-2509).
ggcagtggcgtttacatct

SEQ ID NO: 250750 - DNA, 19 bp, Homo sapiens
  siRNA target sequence for PSK-1 (NM_012410.1,2495-2513).
gtggcgtttacatctacta

SEQ ID NO: 250751 - DNA, 19 bp, Homo sapiens
  siRNA target sequence for PSK-1 (NM_012410.1,2497-2515).
ggcgtttacatctactaca

SEQ ID NO: 250752 - DNA, 19 bp, Homo sapiens
  siRNA target sequence for PSK-1 (NM_012410.1,2615-2633).
gggatacgcgggagtatga

SEQ ID NO: 250753 - DNA, 19 bp, Homo sapiens
  siRNA target sequence for PSK-1 (NM_012410.1,2616-2634).
ggatacgcgggagtatgaa

SEQ ID NO: 250754 - DNA, 19 bp, Homo sapiens
  siRNA target sequence for PTDSR (NM_015167.1,77-95).
ggacccggcacaactacta

SEQ ID NO: 250755 - DNA, 19 bp, Homo sapiens
  siRNA target sequence for PTDSR (NM_015167.1,185-203).
ggtatgaaagaccttacaa

SEQ ID NO: 250756 - DNA, 19 bp, Homo sapiens
  siRNA target sequence for PTDSR (NM_015167.1,197-215).
cttacaagcccgtggtttt

SEQ ID NO: 250757 - DNA, 19 bp, Homo sapiens
  siRNA target sequence for PTDSR (NM_015167.1,204-222).
gcccgtggttttgttgaat

SEQ ID NO: 250758 - DNA, 19 bp, Homo sapiens
  siRNA target sequence for PTDSR (NM_015167.1,255-273).
gactctggagcgcctaaaa

SEQ ID NO: 250759 - DNA, 19 bp, Homo sapiens
  siRNA target sequence for PTDSR (NM_015167.1,264-282).
gcgcctaaaaaggaaatat

SEQ ID NO: 250760 - DNA, 19 bp, Homo sapiens
  siRNA target sequence for PTDSR (NM_015167.1,283-301).
cggaaccagaagttcaagt

SEQ ID NO: 250761 - DNA, 19 bp, Homo sapiens
  siRNA target sequence for PTDSR (NM_015167.1,300-318).
gtgtggtgaggataacgat

SEQ ID NO: 250762 - DNA, 19 bp, Homo sapiens
  siRNA target sequence for PTDSR (NM_015167.1,363-381).
ggagagcactcgagatgat

SEQ ID NO: 250763 - DNA, 19 bp, Homo sapiens
  siRNA target sequence for PTDSR (NM_015167.1,364-382).
gagagcactcgagatgata

SEQ ID NO: 250764 - DNA, 19 bp, Homo sapiens
  siRNA target sequence for PTDSR (NM_015167.1,376-394).
gatgatagtcccctttaca

SEQ ID NO: 250765 - DNA, 19 bp, Homo sapiens
  siRNA target sequence for PTDSR (NM_015167.1,447-465).
ctacaaggtgccaaagttt

SEQ ID NO: 250766 - DNA, 19 bp, Homo sapiens
  siRNA target sequence for PTDSR (NM_015167.1,511-529).
ccttacaggtggtttgtga

SEQ ID NO: 250767 - DNA, 19 bp, Homo sapiens
  siRNA target sequence for PTDSR (NM_015167.1,512-530).
cttacaggtggtttgtgat

SEQ ID NO: 250768 - DNA, 19 bp, Homo sapiens
  siRNA target sequence for PTDSR (NM_015167.1,545-563).
ccggaactgggattcacat

SEQ ID NO: 250769 - DNA, 19 bp, Homo sapiens
  siRNA target sequence for PTDSR (NM_015167.1,584-602).
cctggaatgccttagttca

SEQ ID NO: 250770 - DNA, 19 bp, Homo sapiens
  siRNA target sequence for PTDSR (NM_015167.1,635-653).
gcactcccagggaactcat

SEQ ID NO: 250771 - DNA, 19 bp, Homo sapiens
  siRNA target sequence for PTDSR (NM_015167.1,638-656).
ctcccagggaactcatcaa

SEQ ID NO: 250772 - DNA, 19 bp, Homo sapiens
  siRNA target sequence for PTDSR (NM_015167.1,685-703).
caagacgaagctattacct

SEQ ID NO: 250773 - DNA, 19 bp, Homo sapiens
  siRNA target sequence for PTDSR (NM_015167.1,691-709).
gaagctattacctggttta

SEQ ID NO: 250774 - DNA, 19 bp, Homo sapiens
  siRNA target sequence for PTDSR (NM_015167.1,695-713).
ctattacctggtttaatgt

SEQ ID NO: 250775 - DNA, 19 bp, Homo sapiens
  siRNA target sequence for PTDSR (NM_015167.1,740-758).
cctggccacctgaattcaa

SEQ ID NO: 250776 - DNA, 19 bp, Homo sapiens
  siRNA target sequence for PTDSR (NM_015167.1,741-759).
ctggccacctgaattcaaa

SEQ ID NO: 250777 - DNA, 19 bp, Homo sapiens
  siRNA target sequence for PTDSR (NM_015167.1,756-774).
caaacccctggaaatctta

SEQ ID NO: 250778 - DNA, 19 bp, Homo sapiens
  siRNA target sequence for PTDSR (NM_015167.1,765-783).
ggaaatcttacaaaaacca

SEQ ID NO: 250779 - DNA, 19 bp, Homo sapiens
  siRNA target sequence for PTDSR (NM_015167.1,815-833).
ggcatgttgtcctcaatct

SEQ ID NO: 250780 - DNA, 19 bp, Homo sapiens
  siRNA target sequence for PTDSR (NM_015167.1,826-844).
ctcaatctcgacactacta

SEQ ID NO: 250781 - DNA, 19 bp, Homo sapiens
  siRNA target sequence for PVR (NM_006505.2,437-455).
ccaaacggctggaattcgt

SEQ ID NO: 250782 - DNA, 19 bp, Homo sapiens
  siRNA target sequence for PVR (NM_006505.2,775-793).
gtcaccagcctctggatat

SEQ ID NO: 250783 - DNA, 19 bp, Homo sapiens
  siRNA target sequence for PVR (NM_006505.2,779-797).
ccagcctctggatattggt

SEQ ID NO: 250784 - DNA, 19 bp, Homo sapiens
  siRNA target sequence for PVR (NM_006505.2,935-953).
ggtaccttggccagaatga

SEQ ID NO: 250785 - DNA, 19 bp, Homo sapiens
  siRNA target sequence for PVR (NM_006505.2,991-1009).
cccacaggctataattgga

SEQ ID NO: 250786 - DNA, 19 bp, Homo sapiens
  siRNA target sequence for PVR (NM_006505.2,1069-1087).
cgtcctgtggacaaaccaa

SEQ ID NO: 250787 - DNA, 19 bp, Homo sapiens
  siRNA target sequence for PVR (NM_006505.2,1070-1088).
gtcctgtggacaaaccaat

SEQ ID NO: 250788 - DNA, 19 bp, Homo sapiens
  siRNA target sequence for PVR (NM_006505.2,1075-1093).
gtggacaaaccaatcaaca

SEQ ID NO: 250789 - DNA, 19 bp, Homo sapiens
  siRNA target sequence for PVR (NM_006505.2,1249-1267).
gggatcgggatttatttct

SEQ ID NO: 250790 - DNA, 19 bp, Homo sapiens
  siRNA target sequence for PVR (NM_006505.2,1250-1268).
ggatcgggatttatttcta

SEQ ID NO: 250791 - DNA, 19 bp, Homo sapiens
  siRNA target sequence for PVR (NM_006505.2,1251-1269).
gatcgggatttatttctat

SEQ ID NO: 250792 - DNA, 19 bp, Homo sapiens
  siRNA target sequence for RAMP1 (NM_005855.1,109-127).
cctgccaggaggctaacta

SEQ ID NO: 250793 - DNA, 19 bp, Homo sapiens
  siRNA target sequence for RAMP2 (NM_005854.1,231-249).
ggggggacggtgaagaact

SEQ ID NO: 250794 - DNA, 19 bp, Homo sapiens
  siRNA target sequence for RAMP2 (NM_005854.1,232-250).
gggggacggtgaagaacta

SEQ ID NO: 250795 - DNA, 19 bp, Homo sapiens
  siRNA target sequence for RAMP2 (NM_005854.1,233-251).
ggggacggtgaagaactat

SEQ ID NO: 250796 - DNA, 19 bp, Homo sapiens
  siRNA target sequence for RAMP2 (NM_005854.1,235-253).
ggacggtgaagaactatga

SEQ ID NO: 250797 - DNA, 19 bp, Homo sapiens
  siRNA target sequence for RAMP2 (NM_005854.1,263-281).
ccaattttgctggaatcat

SEQ ID NO: 250798 - DNA, 19 bp, Homo sapiens
  siRNA target sequence for RAMP2 (NM_005854.1,272-290).
ctggaatcattataaggat

SEQ ID NO: 250799 - DNA, 19 bp, Homo sapiens
  siRNA target sequence for RAMP2 (NM_005854.1,317-335).
gtgcgactgggccatgatt

SEQ ID NO: 250800 - DNA, 19 bp, Homo sapiens
  siRNA target sequence for RAMP2 (NM_005854.1,546-564).
ctcatcactcttgtagtat

SEQ ID NO: 250801 - DNA, 19 bp, Homo sapiens
  siRNA target sequence for RAMP3 (NM_005856.1,208-226).
ccgagttcatcgtgtacta

SEQ ID NO: 250802 - DNA, 19 bp, Homo sapiens
  siRNA target sequence for RAMP3 (NM_005856.1,209-227).
cgagttcatcgtgtactat

SEQ ID NO: 250803 - DNA, 19 bp, Homo sapiens
  siRNA target sequence for RAMP3 (NM_005856.1,219-237).
gtgtactatgagagtttca

SEQ ID NO: 250804 - DNA, 19 bp, Homo sapiens
  siRNA target sequence for RAMP3 (NM_005856.1,370-388).
ccccagacgaggttctcat

SEQ ID NO: 250805 - DNA, 19 bp, Homo sapiens
  siRNA target sequence for RAMP3 (NM_005856.1,384-402).
ctcatcccgctgatcgtta

SEQ ID NO: 250806 - DNA, 19 bp, Homo sapiens
  siRNA target sequence for RAMP3 (NM_005856.1,386-404).
catcccgctgatcgttata

SEQ ID NO: 250807 - DNA, 19 bp, Homo sapiens
  siRNA target sequence for RAP80 (NM_016290.2,213-231).
gacttgaggatgcattcat

SEQ ID NO: 250808 - DNA, 19 bp, Homo sapiens
  siRNA target sequence for RAP80 (NM_016290.2,218-236).
gaggatgcattcattgtga

SEQ ID NO: 250809 - DNA, 19 bp, Homo sapiens
  siRNA target sequence for RAP80 (NM_016290.2,220-238).
ggatgcattcattgtgata

SEQ ID NO: 250810 - DNA, 19 bp, Homo sapiens
  siRNA target sequence for RAP80 (NM_016290.2,221-239).
gatgcattcattgtgatat

SEQ ID NO: 250811 - DNA, 19 bp, Homo sapiens
  siRNA target sequence for RAP80 (NM_016290.2,292-310).
gacaaaacagtcgaataga

SEQ ID NO: 250812 - DNA, 19 bp, Homo sapiens
  siRNA target sequence for RAP80 (NM_016290.2,303-321).
cgaatagagcaaagtgttt

SEQ ID NO: 250813 - DNA, 19 bp, Homo sapiens
  siRNA target sequence for RAP80 (NM_016290.2,365-383).
gctctggctctcaaaatga

SEQ ID NO: 250814 - DNA, 19 bp, Homo sapiens
  siRNA target sequence for RAP80 (NM_016290.2,452-470).
gctgaaagcctgaatagtt

SEQ ID NO: 250815 - DNA, 19 bp, Homo sapiens
  siRNA target sequence for RAP80 (NM_016290.2,586-604).
ggtacctccatcactgttt

SEQ ID NO: 250816 - DNA, 19 bp, Homo sapiens
  siRNA target sequence for RAP80 (NM_016290.2,587-605).
gtacctccatcactgttta

SEQ ID NO: 250817 - DNA, 19 bp, Homo sapiens
  siRNA target sequence for RAP80 (NM_016290.2,718-736).
gtcaagccagccagtgttt

SEQ ID NO: 250818 - DNA, 19 bp, Homo sapiens
  siRNA target sequence for RAP80 (NM_016290.2,1002-1020).
gccagttggaggtttatca

SEQ ID NO: 250819 - DNA, 19 bp, Homo sapiens
  siRNA target sequence for RAP80 (NM_016290.2,1003-1021).
ccagttggaggtttatcaa

SEQ ID NO: 250820 - DNA, 19 bp, Homo sapiens
  siRNA target sequence for RAP80 (NM_016290.2,1044-1062).
ggcagctccttaataaaaa

SEQ ID NO: 250821 - DNA, 19 bp, Homo sapiens
  siRNA target sequence for RAP80 (NM_016290.2,1048-1066).
gctccttaataaaaaaggt

SEQ ID NO: 250822 - DNA, 19 bp, Homo sapiens
  siRNA target sequence for RAP80 (NM_016290.2,1095-1113).
cttctctgatccagaatga

SEQ ID NO: 250823 - DNA, 19 bp, Homo sapiens
  siRNA target sequence for RAP80 (NM_016290.2,1129-1147).
gcaggctagtgagaaaaat

SEQ ID NO: 250824 - DNA, 19 bp, Homo sapiens
  siRNA target sequence for RAP80 (NM_016290.2,1238-1256).
caggaaagctcaattaaaa

SEQ ID NO: 250825 - DNA, 19 bp, Homo sapiens
  siRNA target sequence for RAP80 (NM_016290.2,1241-1259).
gaaagctcaattaaaagct

SEQ ID NO: 250826 - DNA, 19 bp, Homo sapiens
  siRNA target sequence for RAP80 (NM_016290.2,1384-1402).
gaccagtaagagaagctta

SEQ ID NO: 250827 - DNA, 19 bp, Homo sapiens
  siRNA target sequence for RAP80 (NM_016290.2,1457-1475).
ctaagttcctctgaaactt

SEQ ID NO: 250828 - DNA, 19 bp, Homo sapiens
  siRNA target sequence for RAP80 (NM_016290.2,1500-1518).
caggtagcagagatatctt

SEQ ID NO: 250829 - DNA, 19 bp, Homo sapiens
  siRNA target sequence for RAP80 (NM_016290.2,1626-1644).
cgctatgtgaccaatgctt

SEQ ID NO: 250830 - DNA, 19 bp, Homo sapiens
  siRNA target sequence for RAP80 (NM_016290.2,1627-1645).
gctatgtgaccaatgcttt

SEQ ID NO: 250831 - DNA, 19 bp, Homo sapiens
  siRNA target sequence for RAP80 (NM_016290.2,1696-1714).
ggaagatacagtattgact

SEQ ID NO: 250832 - DNA, 19 bp, Homo sapiens
  siRNA target sequence for RAP80 (NM_016290.2,1706-1724).
gtattgactcggagacaaa

SEQ ID NO: 250833 - DNA, 19 bp, Homo sapiens
  siRNA target sequence for RAP80 (NM_016290.2,1762-1780).
ccagacttctctagacatt

SEQ ID NO: 250834 - DNA, 19 bp, Homo sapiens
  siRNA target sequence for RAP80 (NM_016290.2,1816-1834).
ggtcccatttagagagtat

SEQ ID NO: 250835 - DNA, 19 bp, Homo sapiens
  siRNA target sequence for RAP80 (NM_016290.2,1820-1838).
ccatttagagagtatcagt

SEQ ID NO: 250836 - DNA, 19 bp, Homo sapiens
  siRNA target sequence for RAP80 (NM_016290.2,1973-1991).
gaaggccgactccttagtt

SEQ ID NO: 250837 - DNA, 19 bp, Homo sapiens
  siRNA target sequence for RAP80 (NM_016290.2,1976-1994).
ggccgactccttagtttct

SEQ ID NO: 250838 - DNA, 19 bp, Homo sapiens
  siRNA target sequence for RAP80 (NM_016290.2,1977-1995).
gccgactccttagtttctt

SEQ ID NO: 250839 - DNA, 19 bp, Homo sapiens
  siRNA target sequence for RAP80 (NM_016290.2,2116-2134).
cacacgtcgtgacttaaat

SEQ ID NO: 250840 - DNA, 19 bp, Homo sapiens
  siRNA target sequence for RAP80 (NM_016290.2,2118-2136).
cacgtcgtgacttaaatga

SEQ ID NO: 250841 - DNA, 19 bp, Homo sapiens
  siRNA target sequence for RAP80 (NM_016290.2,2120-2138).
cgtcgtgacttaaatgaat

SEQ ID NO: 250842 - DNA, 19 bp, Homo sapiens
  siRNA target sequence for RAP80 (NM_016290.2,2135-2153).
gaatctcccgtcaagtctt

SEQ ID NO: 250843 - DNA, 19 bp, Homo sapiens
  siRNA target sequence for RAPSN (NM_005055.3,664-682).
gcgctatgcccacaacaat

SEQ ID NO: 250844 - DNA, 19 bp, Homo sapiens
  siRNA target sequence for RAPSN (NM_005055.3,666-684).
gctatgcccacaacaatga

SEQ ID NO: 250845 - DNA, 19 bp, Homo sapiens
  siRNA target sequence for RAPSN (NM_005055.3,667-685).
ctatgcccacaacaatgat

SEQ ID NO: 250846 - DNA, 19 bp, Homo sapiens
  siRNA target sequence for RAPSN (NM_005055.3,780-798).
cggcagagcttgtcaacaa

SEQ ID NO: 250847 - DNA, 19 bp, Homo sapiens
  siRNA target sequence for RAPSN (NM_005055.3,782-800).
gcagagcttgtcaacaact

SEQ ID NO: 250848 - DNA, 19 bp, Homo sapiens
  siRNA target sequence for RAPSN (NM_005055.3,1203-1221).
gtctgagcgagagcattta

SEQ ID NO: 250849 - DNA, 19 bp, Homo sapiens
  siRNA target sequence for RHBDF1 (NM_022450.2,273-291).
gagacagcccacatctctt

SEQ ID NO: 250850 - DNA, 19 bp, Homo sapiens
  siRNA target sequence for RHBDF1 (NM_022450.2,560-578).
gggcatgcagaagatcata

SEQ ID NO: 250851 - DNA, 19 bp, Homo sapiens
  siRNA target sequence for RHBDF1 (NM_022450.2,562-580).
gcatgcagaagatcataga

SEQ ID NO: 250852 - DNA, 19 bp, Homo sapiens
  siRNA target sequence for RHBDF1 (NM_022450.2,852-870).
gaggaggacacaactgatt

SEQ ID NO: 250853 - DNA, 19 bp, Homo sapiens
  siRNA target sequence for RHBDF1 (NM_022450.2,931-949).
ccacatacccggatgaagt

SEQ ID NO: 250854 - DNA, 19 bp, Homo sapiens
  siRNA target sequence for RHBDF1 (NM_022450.2,932-950).
cacatacccggatgaagtt

SEQ ID NO: 250855 - DNA, 19 bp, Homo sapiens
  siRNA target sequence for RHBDF1 (NM_022450.2,934-952).
catacccggatgaagtttt

SEQ ID NO: 250856 - DNA, 19 bp, Homo sapiens
  siRNA target sequence for RHBDF1 (NM_022450.2,964-982).
cggaggcagcgctaaagga

SEQ ID NO: 250857 - DNA, 19 bp, Homo sapiens
  siRNA target sequence for RHBDF1 (NM_022450.2,1367-1385).
cctagccgtgtgcatctat

SEQ ID NO: 250858 - DNA, 19 bp, Homo sapiens
  siRNA target sequence for RHBDF1 (NM_022450.2,1830-1848).
ccgatctgcaccaaaaaca

SEQ ID NO: 250859 - DNA, 19 bp, Homo sapiens
  siRNA target sequence for RHBDF1 (NM_022450.2,1947-1965).
gagtactgtgacttcatga

SEQ ID NO: 250860 - DNA, 19 bp, Homo sapiens
  siRNA target sequence for RHBDF1 (NM_022450.2,2397-2415).
ctgctgccgtggattgaca

SEQ ID NO: 250861 - DNA, 19 bp, Homo sapiens
  siRNA target sequence for RHBDF1 (NM_022450.2,2402-2420).
gccgtggattgacaacttt

SEQ ID NO: 250862 - DNA, 19 bp, Homo sapiens
  siRNA target sequence for RHBDF1 (NM_022450.2,2506-2524).
ggaaacgctgccagatcat

SEQ ID NO: 250863 - DNA, 19 bp, Homo sapiens
  siRNA target sequence for RIF1 (NM_018372.2,362-380).
gctcggatggaaaaaatct

SEQ ID NO: 250864 - DNA, 19 bp, Homo sapiens
  siRNA target sequence for RIF1 (NM_018372.2,363-381).
ctcggatggaaaaaatctt

SEQ ID NO: 250865 - DNA, 19 bp, Homo sapiens
  siRNA target sequence for RIF1 (NM_018372.2,365-383).
cggatggaaaaaatcttct

SEQ ID NO: 250866 - DNA, 19 bp, Homo sapiens
  siRNA target sequence for RIF1 (NM_018372.2,385-403).
caattacttccaattccta

SEQ ID NO: 250867 - DNA, 19 bp, Homo sapiens
  siRNA target sequence for RIF1 (NM_018372.2,401-419).
ctaagtcttctggaaatct

SEQ ID NO: 250868 - DNA, 19 bp, Homo sapiens
  siRNA target sequence for RIF1 (NM_018372.2,510-528).
cacaagtgcatcagttcaa

SEQ ID NO: 250869 - DNA, 19 bp, Homo sapiens
  siRNA target sequence for RIF1 (NM_018372.2,512-530).
caagtgcatcagttcaatt

SEQ ID NO: 250870 - DNA, 19 bp, Homo sapiens
  siRNA target sequence for RIF1 (NM_018372.2,545-563).
cagccagttcttcaaacta

SEQ ID NO: 250871 - DNA, 19 bp, Homo sapiens
  siRNA target sequence for RIF1 (NM_018372.2,615-633).
gggaactggaaatttttct

SEQ ID NO: 250872 - DNA, 19 bp, Homo sapiens
  siRNA target sequence for RIF1 (NM_018372.2,632-650).
cttcatcagtttctaaagt

SEQ ID NO: 250873 - DNA, 19 bp, Homo sapiens
  siRNA target sequence for RIF1 (NM_018372.2,706-724).
ccctcaacacaaaaagact

SEQ ID NO: 250874 - DNA, 19 bp, Homo sapiens
  siRNA target sequence for RIF1 (NM_018372.2,830-848).
ctgtaccagcgtcatcatt

SEQ ID NO: 250875 - DNA, 19 bp, Homo sapiens
  siRNA target sequence for RIF1 (NM_018372.2,918-936).
ccaaatgccaaccgttatt

SEQ ID NO: 250876 - DNA, 19 bp, Homo sapiens
  siRNA target sequence for RIF1 (NM_018372.2,924-942).
gccaaccgttatttatgta

SEQ ID NO: 250877 - DNA, 19 bp, Homo sapiens
  siRNA target sequence for RIF1 (NM_018372.2,1003-1021).
cctgttacagaaatagcaa

SEQ ID NO: 250878 - DNA, 19 bp, Homo sapiens
  siRNA target sequence for RIF1 (NM_018372.2,1024-1042).
ccagtaatactaaatacca

SEQ ID NO: 250879 - DNA, 19 bp, Homo sapiens
  siRNA target sequence for RIF1 (NM_018372.2,1274-1292).
gtgggacgcgatccaaaaa

SEQ ID NO: 250880 - DNA, 19 bp, Homo sapiens
  siRNA target sequence for RIF1 (NM_018372.2,1276-1294).
gggacgcgatccaaaaata

SEQ ID NO: 250881 - DNA, 19 bp, Homo sapiens
  siRNA target sequence for RIF1 (NM_018372.2,1277-1295).
ggacgcgatccaaaaatat

SEQ ID NO: 250882 - DNA, 19 bp, Homo sapiens
  siRNA target sequence for RIF1 (NM_018372.2,1323-1341).
gtttaatgggaaagtctat

SEQ ID NO: 250883 - DNA, 19 bp, Homo sapiens
  siRNA target sequence for RIF1 (NM_018372.2,1384-1402).
gaccaacagaattctgttt

SEQ ID NO: 250884 - DNA, 19 bp, Homo sapiens
  siRNA target sequence for RIF1 (NM_018372.2,1405-1423).
cctgatactccagtaagaa

SEQ ID NO: 250885 - DNA, 19 bp, Homo sapiens
  siRNA target sequence for RIF1 (NM_018372.2,1406-1424).
ctgatactccagtaagaaa

SEQ ID NO: 250886 - DNA, 19 bp, Homo sapiens
  siRNA target sequence for RIF1 (NM_018372.2,1564-1582).
ctaagggcagagaagaata

SEQ ID NO: 250887 - DNA, 19 bp, Homo sapiens
  siRNA target sequence for RIF1 (NM_018372.2,1604-1622).
ctaccacaaatccacatat

SEQ ID NO: 250888 - DNA, 19 bp, Homo sapiens
  siRNA target sequence for RIF1 (NM_018372.2,1673-1691).
caatctttccagttggatt

SEQ ID NO: 250889 - DNA, 19 bp, Homo sapiens
  siRNA target sequence for RIF1 (NM_018372.2,1727-1745).
ccgtcatttatgctagaaa

SEQ ID NO: 250890 - DNA, 19 bp, Homo sapiens
  siRNA target sequence for RIF1 (NM_018372.2,1728-1746).
cgtcatttatgctagaaaa

SEQ ID NO: 250891 - DNA, 19 bp, Homo sapiens
  siRNA target sequence for RIF1 (NM_018372.2,1786-1804).
gttgatgcaacaactgtta

SEQ ID NO: 250892 - DNA, 19 bp, Homo sapiens
  siRNA target sequence for RIF1 (NM_018372.2,1907-1925).
ctcaaggaagaagtaataa

SEQ ID NO: 250893 - DNA, 19 bp, Homo sapiens
  siRNA target sequence for RIF1 (NM_018372.2,1916-1934).
gaagtaataaggcattaca

SEQ ID NO: 250894 - DNA, 19 bp, Homo sapiens
  siRNA target sequence for RIF1 (NM_018372.2,1919-1937).
gtaataaggcattacatct

SEQ ID NO: 250895 - DNA, 19 bp, Homo sapiens
  siRNA target sequence for RIF1 (NM_018372.2,1971-1989).
ccttactaaggatttgaga

SEQ ID NO: 250896 - DNA, 19 bp, Homo sapiens
  siRNA target sequence for RIF1 (NM_018372.2,2022-2040).
ctctggagaaggtttcgat

SEQ ID NO: 250897 - DNA, 19 bp, Homo sapiens
  siRNA target sequence for RIF1 (NM_018372.2,2027-2045).
gagaaggtttcgattcctt

SEQ ID NO: 250898 - DNA, 19 bp, Homo sapiens
  siRNA target sequence for RIF1 (NM_018372.2,2029-2047).
gaaggtttcgattccttta

SEQ ID NO: 250899 - DNA, 19 bp, Homo sapiens
  siRNA target sequence for RIF1 (NM_018372.2,2032-2050).
ggtttcgattcctttagca

SEQ ID NO: 250900 - DNA, 19 bp, Homo sapiens
  siRNA target sequence for RIF1 (NM_018372.2,2113-2131).
cagcagaattttgataaga

SEQ ID NO: 250901 - DNA, 19 bp, Homo sapiens
  siRNA target sequence for RIF1 (NM_018372.2,2191-2209).
gcttataacgcaatcataa

SEQ ID NO: 250902 - DNA, 19 bp, Homo sapiens
  siRNA target sequence for RIF1 (NM_018372.2,2205-2223).
cataaatggggaagctaat

SEQ ID NO: 250903 - DNA, 19 bp, Homo sapiens
  siRNA target sequence for RIF1 (NM_018372.2,2264-2282).
cagatgtgtcacaacataa

SEQ ID NO: 250904 - DNA, 19 bp, Homo sapiens
  siRNA target sequence for RIF1 (NM_018372.2,2381-2399).
cagcttatgaacaaagtca

SEQ ID NO: 250905 - DNA, 19 bp, Homo sapiens
  siRNA target sequence for RIF1 (NM_018372.2,2383-2401).
gcttatgaacaaagtcatt

SEQ ID NO: 250906 - DNA, 19 bp, Homo sapiens
  siRNA target sequence for RIF1 (NM_018372.2,2439-2457).
gacaccaccggagttagaa

SEQ ID NO: 250907 - DNA, 19 bp, Homo sapiens
  siRNA target sequence for RIF1 (NM_018372.2,2441-2459).
caccaccggagttagaaga

SEQ ID NO: 250908 - DNA, 19 bp, Homo sapiens
  siRNA target sequence for RIF1 (NM_018372.2,2447-2465).
cggagttagaagaaaccat

SEQ ID NO: 250909 - DNA, 19 bp, Homo sapiens
  siRNA target sequence for RIF1 (NM_018372.2,2458-2476).
gaaaccattcgagatgaaa

SEQ ID NO: 250910 - DNA, 19 bp, Homo sapiens
  siRNA target sequence for RIF1 (NM_018372.2,2463-2481).
cattcgagatgaaaaaata

SEQ ID NO: 250911 - DNA, 19 bp, Homo sapiens
  siRNA target sequence for RIF1 (NM_018372.2,2534-2552).
gtaagaagatgcaccaaaa

SEQ ID NO: 250912 - DNA, 19 bp, Homo sapiens
  siRNA target sequence for RILP (NM_031430.1,1023-1041).
ggagcggaatgaactcaaa

SEQ ID NO: 250913 - DNA, 19 bp, Homo sapiens
  siRNA target sequence for RILP (NM_031430.1,1270-1288).
ccggagtccaaaatacaga

SEQ ID NO: 250914 - DNA, 19 bp, Homo sapiens
  siRNA target sequence for RNF139 (NM_007218.3,492-510).
gcatcgtgctccagatctt

SEQ ID NO: 250915 - DNA, 19 bp, Homo sapiens
  siRNA target sequence for RNF139 (NM_007218.3,534-552).
catccagtattgttctgat

SEQ ID NO: 250916 - DNA, 19 bp, Homo sapiens
  siRNA target sequence for RNF139 (NM_007218.3,537-555).
ccagtattgttctgatctt

SEQ ID NO: 250917 - DNA, 19 bp, Homo sapiens
  siRNA target sequence for RNF139 (NM_007218.3,553-571).
cttgtcacaacgatcactt

SEQ ID NO: 250918 - DNA, 19 bp, Homo sapiens
  siRNA target sequence for RNF139 (NM_007218.3,558-576).
cacaacgatcacttttcaa

SEQ ID NO: 250919 - DNA, 19 bp, Homo sapiens
  siRNA target sequence for RNF139 (NM_007218.3,560-578).
caacgatcacttttcaagt

SEQ ID NO: 250920 - DNA, 19 bp, Homo sapiens
  siRNA target sequence for RNF139 (NM_007218.3,563-581).
cgatcacttttcaagtttt

SEQ ID NO: 250921 - DNA, 19 bp, Homo sapiens
  siRNA target sequence for RNF139 (NM_007218.3,564-582).
gatcacttttcaagtttta

SEQ ID NO: 250922 - DNA, 19 bp, Homo sapiens
  siRNA target sequence for RNF139 (NM_007218.3,642-660).
ctttgcacattgacttcta

SEQ ID NO: 250923 - DNA, 19 bp, Homo sapiens
  siRNA target sequence for RNF139 (NM_007218.3,667-685).
ctacaacacgtcagctttt

SEQ ID NO: 250924 - DNA, 19 bp, Homo sapiens
  siRNA target sequence for RNF139 (NM_007218.3,670-688).
caacacgtcagcttttgga

SEQ ID NO: 250925 - DNA, 19 bp, Homo sapiens
  siRNA target sequence for RNF139 (NM_007218.3,673-691).
cacgtcagcttttggaatt

SEQ ID NO: 250926 - DNA, 19 bp, Homo sapiens
  siRNA target sequence for RNF139 (NM_007218.3,694-712).
gctgcttcctcgaaaaggt

SEQ ID NO: 250927 - DNA, 19 bp, Homo sapiens
  siRNA target sequence for RNF139 (NM_007218.3,717-735).
cgctgtggatggcacttat

SEQ ID NO: 250928 - DNA, 19 bp, Homo sapiens
  siRNA target sequence for RNF139 (NM_007218.3,721-739).
gtggatggcacttatcgtt

SEQ ID NO: 250929 - DNA, 19 bp, Homo sapiens
  siRNA target sequence for RNF139 (NM_007218.3,736-754).
cgttctacagctaacattt

SEQ ID NO: 250930 - DNA, 19 bp, Homo sapiens
  siRNA target sequence for RNF139 (NM_007218.3,740-758).
ctacagctaacatttggaa

SEQ ID NO: 250931 - DNA, 19 bp, Homo sapiens
  siRNA target sequence for RNF139 (NM_007218.3,781-799).
gattcattccatctattca

SEQ ID NO: 250932 - DNA, 19 bp, Homo sapiens
  siRNA target sequence for RNF139 (NM_007218.3,827-845).
cctgtaataggcttaatca

SEQ ID NO: 250933 - DNA, 19 bp, Homo sapiens
  siRNA target sequence for RNF139 (NM_007218.3,954-972).
ccacacgatatgtttatct

SEQ ID NO: 250934 - DNA, 19 bp, Homo sapiens
  siRNA target sequence for RNF139 (NM_007218.3,955-973).
cacacgatatgtttatctt

SEQ ID NO: 250935 - DNA, 19 bp, Homo sapiens
  siRNA target sequence for RNF139 (NM_007218.3,977-995).
gtgaggcacatgtatcgaa

SEQ ID NO: 250936 - DNA, 19 bp, Homo sapiens
  siRNA target sequence for RNF139 (NM_007218.3,979-997).
gaggcacatgtatcgaatt

SEQ ID NO: 250937 - DNA, 19 bp, Homo sapiens
  siRNA target sequence for RNF139 (NM_007218.3,992-1010).
cgaatttacggattacagt

SEQ ID NO: 250938 - DNA, 19 bp, Homo sapiens
  siRNA target sequence for RNF139 (NM_007218.3,993-1011).
gaatttacggattacagtt

SEQ ID NO: 250939 - DNA, 19 bp, Homo sapiens
  siRNA target sequence for RNF139 (NM_007218.3,1036-1054).
gattcgtttcccagacata

SEQ ID NO: 250940 - DNA, 19 bp, Homo sapiens
  siRNA target sequence for RNF139 (NM_007218.3,1049-1067).
gacatactacgagtctttt

SEQ ID NO: 250941 - DNA, 19 bp, Homo sapiens
  siRNA target sequence for RNF139 (NM_007218.3,1058-1076).
cgagtcttttggctaacaa

SEQ ID NO: 250942 - DNA, 19 bp, Homo sapiens
  siRNA target sequence for RNF139 (NM_007218.3,1063-1081).
cttttggctaacaagagtt

SEQ ID NO: 250943 - DNA, 19 bp, Homo sapiens
  siRNA target sequence for RNF139 (NM_007218.3,1085-1103).
gctcaggctacagtgttaa

SEQ ID NO: 250944 - DNA, 19 bp, Homo sapiens
  siRNA target sequence for RNF139 (NM_007218.3,1088-1106).
caggctacagtgttaatgt

SEQ ID NO: 250945 - DNA, 19 bp, Homo sapiens
  siRNA target sequence for RNF139 (NM_007218.3,1193-1211).
gggtgcgattctacactaa

SEQ ID NO: 250946 - DNA, 19 bp, Homo sapiens
  siRNA target sequence for RNF139 (NM_007218.3,1195-1213).
gtgcgattctacactaact

SEQ ID NO: 250947 - DNA, 19 bp, Homo sapiens
  siRNA target sequence for RNF139 (NM_007218.3,1197-1215).
gcgattctacactaactgt

SEQ ID NO: 250948 - DNA, 19 bp, Homo sapiens
  siRNA target sequence for RNF139 (NM_007218.3,1219-1237).
gggcatgagtgctgtaatt

SEQ ID NO: 250949 - DNA, 19 bp, Homo sapiens
  siRNA target sequence for RNF139 (NM_007218.3,1273-1291).
ggcctttattggatcaact

SEQ ID NO: 250950 - DNA, 19 bp, Homo sapiens
  siRNA target sequence for RNF139 (NM_007218.3,1303-1321).
caggcgtcttggctttgtt

SEQ ID NO: 250951 - DNA, 19 bp, Homo sapiens
  siRNA target sequence for RNF139 (NM_007218.3,1384-1402).
gagacttattcgcttaagt

SEQ ID NO: 250952 - DNA, 19 bp, Homo sapiens
  siRNA target sequence for RNF139 (NM_007218.3,1388-1406).
cttattcgcttaagtagaa

SEQ ID NO: 250953 - DNA, 19 bp, Homo sapiens
  siRNA target sequence for RNF139 (NM_007218.3,1425-1443).
ctgcagtcctgcattttat

SEQ ID NO: 250954 - DNA, 19 bp, Homo sapiens
  siRNA target sequence for RNF139 (NM_007218.3,1449-1467).
gaatgacagaccctgtatt

SEQ ID NO: 250955 - DNA, 19 bp, Homo sapiens
  siRNA target sequence for RNF139 (NM_007218.3,1487-1505).
catgtgtcatcttttcgta

SEQ ID NO: 250956 - DNA, 19 bp, Homo sapiens
  siRNA target sequence for RNF139 (NM_007218.3,1492-1510).
gtcatcttttcgtagacat

SEQ ID NO: 250957 - DNA, 19 bp, Homo sapiens
  siRNA target sequence for RNF139 (NM_007218.3,1576-1594).
gcatcactatgcactaaat

SEQ ID NO: 250958 - DNA, 19 bp, Homo sapiens
  siRNA target sequence for RNF139 (NM_007218.3,1577-1595).
catcactatgcactaaata

SEQ ID NO: 250959 - DNA, 19 bp, Homo sapiens
  siRNA target sequence for RNF139 (NM_007218.3,1623-1641).
gtgtggaactgtgcttaaa

SEQ ID NO: 250960 - DNA, 19 bp, Homo sapiens
  siRNA target sequence for RNF139 (NM_007218.3,1627-1645).
ggaactgtgcttaaaagta

SEQ ID NO: 250961 - DNA, 19 bp, Homo sapiens
  siRNA target sequence for RNF139 (NM_007218.3,1653-1671).
ctctcactgtttatacgtt

SEQ ID NO: 250962 - DNA, 19 bp, Homo sapiens
  siRNA target sequence for RNF139 (NM_007218.3,1675-1693).
catgattgatggctactat

SEQ ID NO: 250963 - DNA, 19 bp, Homo sapiens
  siRNA target sequence for RNF139 (NM_007218.3,1678-1696).
gattgatggctactataat

SEQ ID NO: 250964 - DNA, 19 bp, Homo sapiens
  siRNA target sequence for RNF139 (NM_007218.3,1704-1722).
gggaaaagcttgacgatta

SEQ ID NO: 250965 - DNA, 19 bp, Homo sapiens
  siRNA target sequence for RNF139 (NM_007218.3,1705-1723).
ggaaaagcttgacgattat

SEQ ID NO: 250966 - DNA, 19 bp, Homo sapiens
  siRNA target sequence for RNF139 (NM_007218.3,1726-1744).
ctactacgttcgttcaaca

SEQ ID NO: 250967 - DNA, 19 bp, Homo sapiens
  siRNA target sequence for RNF139 (NM_007218.3,1790-1808).
ggggcttacactatgatgt

SEQ ID NO: 250968 - DNA, 19 bp, Homo sapiens
  siRNA target sequence for RNF139 (NM_007218.3,1792-1810).
ggcttacactatgatgttt

SEQ ID NO: 250969 - DNA, 19 bp, Homo sapiens
  siRNA target sequence for RNF139 (NM_007218.3,1794-1812).
cttacactatgatgtttga

SEQ ID NO: 250970 - DNA, 19 bp, Homo sapiens
  siRNA target sequence for RNF139 (NM_007218.3,1807-1825).
gtttgagtcgggaagtaaa

SEQ ID NO: 250971 - DNA, 19 bp, Homo sapiens
  siRNA target sequence for RNF139 (NM_007218.3,1821-1839).
gtaaaattcgggcttttat

SEQ ID NO: 250972 - DNA, 19 bp, Homo sapiens
  siRNA target sequence for RNF139 (NM_007218.3,1867-1885).
ctacttacaagccaaaaat

SEQ ID NO: 250973 - DNA, 19 bp, Homo sapiens
  siRNA target sequence for RNF139 (NM_007218.3,1953-1971).
ggagccgcttacaagaaat

SEQ ID NO: 250974 - DNA, 19 bp, Homo sapiens
  siRNA target sequence for RNF139 (NM_007218.3,1954-1972).
gagccgcttacaagaaata

SEQ ID NO: 250975 - DNA, 19 bp, Homo sapiens
  siRNA target sequence for RNF139 (NM_007218.3,1983-2001).
gtgcaatctgctatcatga

SEQ ID NO: 250976 - DNA, 19 bp, Homo sapiens
  siRNA target sequence for RNF139 (NM_007218.3,1986-2004).
caatctgctatcatgagtt

SEQ ID NO: 250977 - DNA, 19 bp, Homo sapiens
  siRNA target sequence for RNF139 (NM_007218.3,1990-2008).
ctgctatcatgagtttaca

SEQ ID NO: 250978 - DNA, 19 bp, Homo sapiens
  siRNA target sequence for RNF139 (NM_007218.3,2019-2037).
gtattacaccgtgtaatca

SEQ ID NO: 250979 - DNA, 19 bp, Homo sapiens
  siRNA target sequence for RNF139 (NM_007218.3,2068-2086).
gctgtacattcaagatact

SEQ ID NO: 250980 - DNA, 19 bp, Homo sapiens
  siRNA target sequence for RNF139 (NM_007218.3,2069-2087).
ctgtacattcaagatactt

SEQ ID NO: 250981 - DNA, 19 bp, Homo sapiens
  siRNA target sequence for RNF139 (NM_007218.3,2071-2089).
gtacattcaagatacttgt

SEQ ID NO: 250982 - DNA, 19 bp, Homo sapiens
  siRNA target sequence for RNF139 (NM_007218.3,2091-2109).
caatgtgccatcagaaagt

SEQ ID NO: 250983 - DNA, 19 bp, Homo sapiens
  siRNA target sequence for RNF139 (NM_007218.3,2097-2115).
gccatcagaaagtatacat

SEQ ID NO: 250984 - DNA, 19 bp, Homo sapiens
  siRNA target sequence for RNF139 (NM_007218.3,2108-2126).
gtatacatcgaagatgata

SEQ ID NO: 250985 - DNA, 19 bp, Homo sapiens
  siRNA target sequence for RNF139 (NM_007218.3,2123-2141).
gatatcaaggataattcaa

SEQ ID NO: 250986 - DNA, 19 bp, Homo sapiens
  siRNA target sequence for RNF139 (NM_007218.3,2139-2157).
caaatgtatctaacaacaa

SEQ ID NO: 250987 - DNA, 19 bp, Homo sapiens
  siRNA target sequence for RNF139 (NM_007218.3,2144-2162).
gtatctaacaacaatggat

SEQ ID NO: 250988 - DNA, 19 bp, Homo sapiens
  siRNA target sequence for RNF139 (NM_007218.3,2148-2166).
ctaacaacaatggatttat

SEQ ID NO: 250989 - DNA, 19 bp, Homo sapiens
  siRNA target sequence for RNF139 (NM_007218.3,2223-2241).
gggaattgaacgaagatga

SEQ ID NO: 250990 - DNA, 19 bp, Homo sapiens
  siRNA target sequence for RTN4R (NM_023004.4,1193-1211).
gcctcatgacactctatct

SEQ ID NO: 250991 - DNA, 19 bp, Homo sapiens
  siRNA target sequence for RTN4R (NM_023004.4,1195-1213).
ctcatgacactctatctgt

SEQ ID NO: 250992 - DNA, 19 bp, Homo sapiens
  siRNA target sequence for RTN4R (NM_023004.4,1197-1215).
catgacactctatctgttt

SEQ ID NO: 250993 - DNA, 19 bp, Homo sapiens
  siRNA target sequence for RTN4R (NM_023004.4,1206-1224).
ctatctgtttgccaacaat

SEQ ID NO: 250994 - DNA, 19 bp, Homo sapiens
  siRNA target sequence for RTN4R (NM_023004.4,1212-1230).
gtttgccaacaatctatca

SEQ ID NO: 250995 - DNA, 19 bp, Homo sapiens
  siRNA target sequence for RTN4R (NM_023004.4,1637-1655).
gcccacggcacatcaatga

SEQ ID NO: 250996 - DNA, 19 bp, Homo sapiens
  siRNA target sequence for RTN4R (NM_023004.4,1639-1657).
ccacggcacatcaatgact

SEQ ID NO: 250997 - DNA, 19 bp, Homo sapiens
  siRNA target sequence for RYR1 (NM_000540.1,282-300).
ctagcaacgcgcagaatgt

SEQ ID NO: 250998 - DNA, 19 bp, Homo sapiens
  siRNA target sequence for RYR1 (NM_000540.1,464-482).
cacagccgcatgtatctga

SEQ ID NO: 250999 - DNA, 19 bp, Homo sapiens
  siRNA target sequence for RYR1 (NM_000540.1,597-615).
ggtctgaaggagaaaaggt

SEQ ID NO: 251000 - DNA, 19 bp, Homo sapiens
  siRNA target sequence for RYR1 (NM_000540.1,793-811).
ctttcatggacatatggat

SEQ ID NO: 251001 - DNA, 19 bp, Homo sapiens
  siRNA target sequence for RYR1 (NM_000540.1,1232-1250).
ctcggcgtgctcaagaaga

SEQ ID NO: 251002 - DNA, 19 bp, Homo sapiens
  siRNA target sequence for RYR1 (NM_000540.1,1353-1371).
gcctatacaaccagttcat

SEQ ID NO: 251003 - DNA, 19 bp, Homo sapiens
  siRNA target sequence for RYR1 (NM_000540.1,1437-1455).
ccatcgagggcgttatcct

SEQ ID NO: 251004 - DNA, 19 bp, Homo sapiens
  siRNA target sequence for RYR1 (NM_000540.1,1581-1599).
ccatggtcctgaattgcat

SEQ ID NO: 251005 - DNA, 19 bp, Homo sapiens
  siRNA target sequence for RYR1 (NM_000540.1,1662-1680).
ccgagtcctggaaagagat

SEQ ID NO: 251006 - DNA, 19 bp, Homo sapiens
  siRNA target sequence for RYR1 (NM_000540.1,1697-1715).
gaactcctagcttctctaa

SEQ ID NO: 251007 - DNA, 19 bp, Homo sapiens
  siRNA target sequence for RYR1 (NM_000540.1,1712-1730).
ctaatccgtggcaatcgta

SEQ ID NO: 251008 - DNA, 19 bp, Homo sapiens
  siRNA target sequence for RYR1 (NM_000540.1,1839-1857).
gtccagaggttctgaacat

SEQ ID NO: 251009 - DNA, 19 bp, Homo sapiens
  siRNA target sequence for RYR1 (NM_000540.1,1939-1957).
ctccctgtgtgtgtgtaat

SEQ ID NO: 251010 - DNA, 19 bp, Homo sapiens
  siRNA target sequence for RYR1 (NM_000540.1,1972-1990).
ctccaaccaagatcttatt

SEQ ID NO: 251011 - DNA, 19 bp, Homo sapiens
  siRNA target sequence for RYR1 (NM_000540.1,1975-1993).
caaccaagatcttattact

SEQ ID NO: 251012 - DNA, 19 bp, Homo sapiens
  siRNA target sequence for RYR1 (NM_000540.1,2031-2049).
caaacctcatcaactatgt

SEQ ID NO: 251013 - DNA, 19 bp, Homo sapiens
  siRNA target sequence for RYR1 (NM_000540.1,2097-2115).
cgcagtacagcaaatggta

SEQ ID NO: 251014 - DNA, 19 bp, Homo sapiens
  siRNA target sequence for RYR1 (NM_000540.1,2101-2119).
gtacagcaaatggtacttt

SEQ ID NO: 251015 - DNA, 19 bp, Homo sapiens
  siRNA target sequence for RYR1 (NM_000540.1,2131-2149).
ggacgaggtgactccattt

SEQ ID NO: 251016 - DNA, 19 bp, Homo sapiens
  siRNA target sequence for RYR1 (NM_000540.1,2246-2264).
gtcggcgatgacctctatt

SEQ ID NO: 251017 - DNA, 19 bp, Homo sapiens
  siRNA target sequence for RYR1 (NM_000540.1,2249-2267).
ggcgatgacctctattcct

SEQ ID NO: 251018 - DNA, 19 bp, Homo sapiens
  siRNA target sequence for RYR1 (NM_000540.1,2250-2268).
gcgatgacctctattccta

SEQ ID NO: 251019 - DNA, 19 bp, Homo sapiens
  siRNA target sequence for RYR1 (NM_000540.1,2260-2278).
ctattcctacggctttgat

SEQ ID NO: 251020 - DNA, 19 bp, Homo sapiens
  siRNA target sequence for RYR1 (NM_000540.1,2417-2435).
gtgcagggtgtctttgagt

SEQ ID NO: 251021 - DNA, 19 bp, Homo sapiens
  siRNA target sequence for RYR1 (NM_000540.1,3346-3364).
catcttccgggcagagaaa

SEQ ID NO: 251022 - DNA, 19 bp, Homo sapiens
  siRNA target sequence for RYR1 (NM_000540.1,3352-3370).
ccgggcagagaaatcctat

SEQ ID NO: 251023 - DNA, 19 bp, Homo sapiens
  siRNA target sequence for RYR1 (NM_000540.1,3353-3371).
cgggcagagaaatcctata

SEQ ID NO: 251024 - DNA, 19 bp, Homo sapiens
  siRNA target sequence for RYR1 (NM_000540.1,3357-3375).
cagagaaatcctatacagt

SEQ ID NO: 251025 - DNA, 19 bp, Homo sapiens
  siRNA target sequence for RYR1 (NM_000540.1,3566-3584).
gatgtcgttggctgtatga

SEQ ID NO: 251026 - DNA, 19 bp, Homo sapiens
  siRNA target sequence for RYR1 (NM_000540.1,3590-3608).
ctcacagagaacaccatta

SEQ ID NO: 251027 - DNA, 19 bp, Homo sapiens
  siRNA target sequence for RYR1 (NM_000540.1,3657-3675).
cagccttccgggagattga

SEQ ID NO: 251028 - DNA, 19 bp, Homo sapiens
  siRNA target sequence for RYR1 (NM_000540.1,3797-3815).
gagccatttgccatcaaca

SEQ ID NO: 251029 - DNA, 19 bp, Homo sapiens
  siRNA target sequence for RYR1 (NM_000540.1,4109-4127).
cccgaccctgactacgaaa

SEQ ID NO: 251030 - DNA, 19 bp, Homo sapiens
  siRNA target sequence for RYR1 (NM_000540.1,4110-4128).
ccgaccctgactacgaaaa

SEQ ID NO: 251031 - DNA, 19 bp, Homo sapiens
  siRNA target sequence for RYR1 (NM_000540.1,4389-4407).
gcgatgaccccgagatcat

SEQ ID NO: 251032 - DNA, 19 bp, Homo sapiens
  siRNA target sequence for RYR1 (NM_000540.1,4411-4429).
caacaccaccacgtactat

SEQ ID NO: 251033 - DNA, 19 bp, Homo sapiens
  siRNA target sequence for RYR1 (NM_000540.1,4748-4766).
caggtggaacccaacacta

SEQ ID NO: 251034 - DNA, 19 bp, Homo sapiens
  siRNA target sequence for RYR1 (NM_000540.1,4753-4771).
ggaacccaacactaagcta

SEQ ID NO: 251035 - DNA, 19 bp, Homo sapiens
  siRNA target sequence for RYR1 (NM_000540.1,4759-4777).
caacactaagctatttcct

SEQ ID NO: 251036 - DNA, 19 bp, Homo sapiens
  siRNA target sequence for RYR1 (NM_000540.1,5309-5327).
cgctccatgctctctgaat

SEQ ID NO: 251037 - DNA, 19 bp, Homo sapiens
  siRNA target sequence for RYR1 (NM_000540.1,5923-5941).
gccagagtctgtgaagtta

SEQ ID NO: 251038 - DNA, 19 bp, Homo sapiens
  siRNA target sequence for RYR1 (NM_000540.1,5951-5969).
cacctgctggagtatttct

SEQ ID NO: 251039 - DNA, 19 bp, Homo sapiens
  siRNA target sequence for RYR1 (NM_000540.1,6058-6076).
ctatggcctcctcataaaa

SEQ ID NO: 251040 - DNA, 19 bp, Homo sapiens
  siRNA target sequence for RYR1 (NM_000540.1,6145-6163).
gatcaatatgctattgcaa

SEQ ID NO: 251041 - DNA, 19 bp, Homo sapiens
  siRNA target sequence for RYR1 (NM_000540.1,6192-6210).
gtcctctccctgaagagat

SEQ ID NO: 251042 - DNA, 19 bp, Homo sapiens
  siRNA target sequence for RYR1 (NM_000540.1,6208-6226).
gattcgacaggatttgctt

SEQ ID NO: 251043 - DNA, 19 bp, Homo sapiens
  siRNA target sequence for RYR1 (NM_000540.1,6672-6690).
gcatcgggaacatcatgaa

SEQ ID NO: 251044 - DNA, 19 bp, Homo sapiens
  siRNA target sequence for RYR1 (NM_000540.1,6959-6977).
gctgcctccgtcattgaca

SEQ ID NO: 251045 - DNA, 19 bp, Homo sapiens
  siRNA target sequence for RYR1 (NM_000540.1,7075-7093).
caaagggtacccagacatt

SEQ ID NO: 251046 - DNA, 19 bp, Homo sapiens
  siRNA target sequence for RYR1 (NM_000540.1,7440-7458).
caccagagatgcatctaat

SEQ ID NO: 251047 - DNA, 19 bp, Homo sapiens
  siRNA target sequence for RYR1 (NM_000540.1,7581-7599).
ctctggtgcagccaaagat

SEQ ID NO: 251048 - DNA, 19 bp, Homo sapiens
  siRNA target sequence for RYR1 (NM_000540.1,7642-7660).
cttcctggaccgtgtgtat

SEQ ID NO: 251049 - DNA, 19 bp, Homo sapiens
  siRNA target sequence for RYR1 (NM_000540.1,7857-7875).
ccatcatggtggactctat

SEQ ID NO: 251050 - DNA, 19 bp, Homo sapiens
  siRNA target sequence for RYR1 (NM_000540.1,8075-8093).
gagcgctgttggaagtact

SEQ ID NO: 251051 - DNA, 19 bp, Homo sapiens
  siRNA target sequence for RYR1 (NM_000540.1,8078-8096).
cgctgttggaagtactact

SEQ ID NO: 251052 - DNA, 19 bp, Homo sapiens
  siRNA target sequence for RYR1 (NM_000540.1,8147-8165).
cacctcacacggaaactct

SEQ ID NO: 251053 - DNA, 19 bp, Homo sapiens
  siRNA target sequence for RYR1 (NM_000540.1,8182-8200).
ctctctggcccataagaaa

SEQ ID NO: 251054 - DNA, 19 bp, Homo sapiens
  siRNA target sequence for RYR1 (NM_000540.1,8276-8294).
gatgcctcatactcatcta

SEQ ID NO: 251055 - DNA, 19 bp, Homo sapiens
  siRNA target sequence for RYR1 (NM_000540.1,8346-8364).
ctgtggagaccctcaatgt

SEQ ID NO: 251056 - DNA, 19 bp, Homo sapiens
  siRNA target sequence for RYR1 (NM_000540.1,8435-8453).
gacaagatccagaacaact

SEQ ID NO: 251057 - DNA, 19 bp, Homo sapiens
  siRNA target sequence for RYR1 (NM_000540.1,8454-8472).
ggtcctatggagagaacat

SEQ ID NO: 251058 - DNA, 19 bp, Homo sapiens
  siRNA target sequence for RYR1 (NM_000540.1,8586-8604).
gggaatggacgatagagaa

SEQ ID NO: 251059 - DNA, 19 bp, Homo sapiens
  siRNA target sequence for RYR1 (NM_000540.1,8647-8665).
gcggaagatatcacaaagt

SEQ ID NO: 251060 - DNA, 19 bp, Homo sapiens
  siRNA target sequence for RYR1 (NM_000540.1,8743-8761).
gcaggccatggcagaacaa

SEQ ID NO: 251061 - DNA, 19 bp, Homo sapiens
  siRNA target sequence for RYR1 (NM_000540.1,8968-8986).
ggactcgtcttccattgaa

SEQ ID NO: 251062 - DNA, 19 bp, Homo sapiens
  siRNA target sequence for RYR1 (NM_000540.1,8969-8987).
gactcgtcttccattgaaa

SEQ ID NO: 251063 - DNA, 19 bp, Homo sapiens
  siRNA target sequence for RYR1 (NM_000540.1,9020-9038).
ctgcgctggatggacattt

SEQ ID NO: 251064 - DNA, 19 bp, Homo sapiens
  siRNA target sequence for RYR1 (NM_000540.1,9022-9040).
gcgctggatggacatttct

SEQ ID NO: 251065 - DNA, 19 bp, Homo sapiens
  siRNA target sequence for RYR1 (NM_000540.1,9098-9116).
ccacatgaacaggagatta

SEQ ID NO: 251066 - DNA, 19 bp, Homo sapiens
  siRNA target sequence for RYR1 (NM_000540.1,9099-9117).
cacatgaacaggagattaa

SEQ ID NO: 251067 - DNA, 19 bp, Homo sapiens
  siRNA target sequence for RYR1 (NM_000540.1,9629-9647).
cgaacgctgtgcagtatct

SEQ ID NO: 251068 - DNA, 19 bp, Homo sapiens
  siRNA target sequence for RYR1 (NM_000540.1,9630-9648).
gaacgctgtgcagtatcta

SEQ ID NO: 251069 - DNA, 19 bp, Homo sapiens
  siRNA target sequence for RYR1 (NM_000540.1,9871-9889).
gcggctcatggcagacatt

SEQ ID NO: 251070 - DNA, 19 bp, Homo sapiens
  siRNA target sequence for RYR1 (NM_000540.1,10079-10097).
gggaatatcctgagaatca

SEQ ID NO: 251071 - DNA, 19 bp, Homo sapiens
  siRNA target sequence for RYR1 (NM_000540.1,10442-10460).
gtgggcgagatcttcatct

SEQ ID NO: 251072 - DNA, 19 bp, Homo sapiens
  siRNA target sequence for RYR1 (NM_000540.1,10445-10463).
ggcgagatcttcatctact

SEQ ID NO: 251073 - DNA, 19 bp, Homo sapiens
  siRNA target sequence for RYR1 (NM_000540.1,10685-10703).
cccatcggcctgaatatgt

SEQ ID NO: 251074 - DNA, 19 bp, Homo sapiens
  siRNA target sequence for RYR1 (NM_000540.1,10743-10761).
cccgttacgccctgaaaga

SEQ ID NO: 251075 - DNA, 19 bp, Homo sapiens
  siRNA target sequence for RYR1 (NM_000540.1,10745-10763).
cgttacgccctgaaagaca

SEQ ID NO: 251076 - DNA, 19 bp, Homo sapiens
  siRNA target sequence for RYR1 (NM_000540.1,10779-10797).
gggaatttctgcacaacaa

SEQ ID NO: 251077 - DNA, 19 bp, Homo sapiens
  siRNA target sequence for RYR1 (NM_000540.1,10887-10905).
ccgatgaccccgagaaaat

SEQ ID NO: 251078 - DNA, 19 bp, Homo sapiens
  siRNA target sequence for RYR1 (NM_000540.1,10961-10979).
cacccttacaagtctaaga

SEQ ID NO: 251079 - DNA, 19 bp, Homo sapiens
  siRNA target sequence for RYR1 (NM_000540.1,10982-11000).
gccgtgtggcacaagcttt

SEQ ID NO: 251080 - DNA, 19 bp, Homo sapiens
  siRNA target sequence for RYR1 (NM_000540.1,10983-11001).
ccgtgtggcacaagctttt

SEQ ID NO: 251081 - DNA, 19 bp, Homo sapiens
  siRNA target sequence for RYR1 (NM_000540.1,11040-11058).
gtatgacgcccctgtacaa

SEQ ID NO: 251082 - DNA, 19 bp, Homo sapiens
  siRNA target sequence for RYR1 (NM_000540.1,11064-11082).
ccacgcaccgggcatgtaa

SEQ ID NO: 251083 - DNA, 19 bp, Homo sapiens
  siRNA target sequence for RYR1 (NM_000540.1,11067-11085).
cgcaccgggcatgtaacat

SEQ ID NO: 251084 - DNA, 19 bp, Homo sapiens
  siRNA target sequence for RYR1 (NM_000540.1,11069-11087).
caccgggcatgtaacatgt

SEQ ID NO: 251085 - DNA, 19 bp, Homo sapiens
  siRNA target sequence for RYR1 (NM_000540.1,11644-11662).
cagcgtcctggatctcaat

SEQ ID NO: 251086 - DNA, 19 bp, Homo sapiens
  siRNA target sequence for RYR1 (NM_000540.1,11710-11728).
ggatggcactgtcatcaat

SEQ ID NO: 251087 - DNA, 19 bp, Homo sapiens
  siRNA target sequence for RYR1 (NM_000540.1,11746-11764).
ggtcatggcggatgatgaa

SEQ ID NO: 251088 - DNA, 19 bp, Homo sapiens
  siRNA target sequence for RYR1 (NM_000540.1,11747-11765).
gtcatggcggatgatgaat

SEQ ID NO: 251089 - DNA, 19 bp, Homo sapiens
  siRNA target sequence for RYR1 (NM_000540.1,11752-11770).
ggcggatgatgaattcaca

SEQ ID NO: 251090 - DNA, 19 bp, Homo sapiens
  siRNA target sequence for RYR1 (NM_000540.1,11777-11795).
ctgttccgattcctacaat

SEQ ID NO: 251091 - DNA, 19 bp, Homo sapiens
  siRNA target sequence for RYR1 (NM_000540.1,11798-11816).
ctctgtgaggggcacaata

SEQ ID NO: 251092 - DNA, 19 bp, Homo sapiens
  siRNA target sequence for RYR1 (NM_000540.1,11800-11818).
ctgtgaggggcacaataat

SEQ ID NO: 251093 - DNA, 19 bp, Homo sapiens
  siRNA target sequence for RYR1 (NM_000540.1,11804-11822).
gaggggcacaataatgatt

SEQ ID NO: 251094 - DNA, 19 bp, Homo sapiens
  siRNA target sequence for RYR1 (NM_000540.1,11849-11867).
gggaacacgaccactatta

SEQ ID NO: 251095 - DNA, 19 bp, Homo sapiens
  siRNA target sequence for RYR1 (NM_000540.1,11938-11956).
ctcgggcaaggatgtcatt

SEQ ID NO: 251096 - DNA, 19 bp, Homo sapiens
  siRNA target sequence for RYR1 (NM_000540.1,12110-12128).
gtgttcgcccacatgatga

SEQ ID NO: 251097 - DNA, 19 bp, Homo sapiens
  siRNA target sequence for RYR1 (NM_000540.1,12271-12289).
cgtggaatcctcatccaat

SEQ ID NO: 251098 - DNA, 19 bp, Homo sapiens
  siRNA target sequence for RYR1 (NM_000540.1,12353-12371).
gccttccaggactacgtaa

SEQ ID NO: 251099 - DNA, 19 bp, Homo sapiens
  siRNA target sequence for RYR1 (NM_000540.1,12468-12486).
gctccgaagcggatgagaa

SEQ ID NO: 251100 - DNA, 19 bp, Homo sapiens
  siRNA target sequence for RYR1 (NM_000540.1,12473-12491).
gaagcggatgagaacgaaa

SEQ ID NO: 251101 - DNA, 19 bp, Homo sapiens
  siRNA target sequence for RYR1 (NM_000540.1,12627-12645).
ccgagagcatccttgagta

SEQ ID NO: 251102 - DNA, 19 bp, Homo sapiens
  siRNA target sequence for RYR1 (NM_000540.1,12692-12710).
cgcatcgagcgcatctact

SEQ ID NO: 251103 - DNA, 19 bp, Homo sapiens
  siRNA target sequence for RYR1 (NM_000540.1,12765-12783).
ccaagcgccagttcatctt

SEQ ID NO: 251104 - DNA, 19 bp, Homo sapiens
  siRNA target sequence for RYR1 (NM_000540.1,12821-12839).
gagctcttcgtgagtttct

SEQ ID NO: 251105 - DNA, 19 bp, Homo sapiens
  siRNA target sequence for RYR1 (NM_000540.1,13995-14013).
gcgatgaggatgagaacat

SEQ ID NO: 251106 - DNA, 19 bp, Homo sapiens
  siRNA target sequence for RYR1 (NM_000540.1,14101-14119).
ctgcatcattggctataat

SEQ ID NO: 251107 - DNA, 19 bp, Homo sapiens
  siRNA target sequence for RYR1 (NM_000540.1,14129-14147).
gtgcccctggtaatcttta

SEQ ID NO: 251108 - DNA, 19 bp, Homo sapiens
  siRNA target sequence for RYR1 (NM_000540.1,14299-14317).
caaggtcctggacaaacat

SEQ ID NO: 251109 - DNA, 19 bp, Homo sapiens
  siRNA target sequence for RYR1 (NM_000540.1,14466-14484).
ggaagttcggggtcatctt

SEQ ID NO: 251110 - DNA, 19 bp, Homo sapiens
  siRNA target sequence for RYR1 (NM_000540.1,14501-14519).
ctgtacctgggctggtata

SEQ ID NO: 251111 - DNA, 19 bp, Homo sapiens
  siRNA target sequence for RYR1 (NM_000540.1,14529-14547).
ccctcttgggacactacaa

SEQ ID NO: 251112 - DNA, 19 bp, Homo sapiens
  siRNA target sequence for RYR1 (NM_000540.1,14938-14956).
gatcatcgacgcttttggt

SEQ ID NO: 251113 - DNA, 19 bp, Homo sapiens
  siRNA target sequence for RYR1 (NM_000540.1,15018-15036).
gaatcggcagtgactactt

SEQ ID NO: 251114 - DNA, 19 bp, Homo sapiens
  siRNA target sequence for RYR1 (NM_000540.1,15213-15231).
gtttccgtaagcagtatga

SEQ ID NO: 251115 - DNA, 19 bp, Homo sapiens
  siRNA target sequence for SCARB1 (NM_005505.3,215-233).
gtagcctgtccttcaacat

SEQ ID NO: 251116 - DNA, 19 bp, Homo sapiens
  siRNA target sequence for SCARB1 (NM_005505.3,243-261).
gatccctatccccttctat

SEQ ID NO: 251117 - DNA, 19 bp, Homo sapiens
  siRNA target sequence for SCARB1 (NM_005505.3,452-470).
gctcggagagcgactacat

SEQ ID NO: 251118 - DNA, 19 bp, Homo sapiens
  siRNA target sequence for SCARB1 (NM_005505.3,502-520).
gcggtgatgatggagaata

SEQ ID NO: 251119 - DNA, 19 bp, Homo sapiens
  siRNA target sequence for SCARB1 (NM_005505.3,568-586).
ggcgaacgtgccttcatga

SEQ ID NO: 251120 - DNA, 19 bp, Homo sapiens
  siRNA target sequence for SCARB1 (NM_005505.3,569-587).
gcgaacgtgccttcatgaa

SEQ ID NO: 251121 - DNA, 19 bp, Homo sapiens
  siRNA target sequence for SCARB1 (NM_005505.3,590-608).
gcactgtgggtgagatcat

SEQ ID NO: 251122 - DNA, 19 bp, Homo sapiens
  siRNA target sequence for SCARB1 (NM_005505.3,675-693).
ggacaagttcggattattt

SEQ ID NO: 251123 - DNA, 19 bp, Homo sapiens
  siRNA target sequence for SCARB1 (NM_005505.3,678-696).
caagttcggattatttgct

SEQ ID NO: 251124 - DNA, 19 bp, Homo sapiens
  siRNA target sequence for SCARB1 (NM_005505.3,812-830).
ccgatcagtgcaacatgat

SEQ ID NO: 251125 - DNA, 19 bp, Homo sapiens
  siRNA target sequence for SCARB1 (NM_005505.3,825-843).
catgatcaatggaacttct

SEQ ID NO: 251126 - DNA, 19 bp, Homo sapiens
  siRNA target sequence for SCARB1 (NM_005505.3,908-926).
gccgatccatgaagctaat

SEQ ID NO: 251127 - DNA, 19 bp, Homo sapiens
  siRNA target sequence for SCARB1 (NM_005505.3,1239-1257).
gagcctctacatgaaatct

SEQ ID NO: 251128 - DNA, 19 bp, Homo sapiens
  siRNA target sequence for SCARB1 (NM_005505.3,1260-1278).
cgcaggcattggacaaact

SEQ ID NO: 251129 - DNA, 19 bp, Homo sapiens
  siRNA target sequence for SCARB1 (NM_005505.3,1342-1360).
gagactcttcacacattct

SEQ ID NO: 251130 - DNA, 19 bp, Homo sapiens
  siRNA target sequence for SCARB1 (NM_005505.3,1466-1484).
gccaagagaaatgctattt

SEQ ID NO: 251131 - DNA, 19 bp, Homo sapiens
  siRNA target sequence for SCARB1 (NM_005505.3,1467-1485).
ccaagagaaatgctattta

SEQ ID NO: 251132 - DNA, 19 bp, Homo sapiens
  siRNA target sequence for SCARB1 (NM_005505.3,1526-1544).
ccattcaggcctattctga

SEQ ID NO: 251133 - DNA, 19 bp, Homo sapiens
  siRNA target sequence for SCARB1 (NM_005505.3,1527-1545).
cattcaggcctattctgaa

SEQ ID NO: 251134 - DNA, 19 bp, Homo sapiens
  siRNA target sequence for SCARB1 (NM_005505.3,1579-1597).
ctgcaggaagcaaaactgt

SEQ ID NO: 251135 - DNA, 19 bp, Homo sapiens
  siRNA target sequence for SCARB2 (NM_005506.2,343-361).
ggccgatgctgcttctaca

SEQ ID NO: 251136 - DNA, 19 bp, Homo sapiens
  siRNA target sequence for SCARB2 (NM_005506.2,444-462).
gagtatcgagaagaaaatt

SEQ ID NO: 251137 - DNA, 19 bp, Homo sapiens
  siRNA target sequence for SCARB2 (NM_005506.2,475-493).
ggtactgaggcatttgact

SEQ ID NO: 251138 - DNA, 19 bp, Homo sapiens
  siRNA target sequence for SCARB2 (NM_005506.2,505-523).
ccccctctgcctgtgtata

SEQ ID NO: 251139 - DNA, 19 bp, Homo sapiens
  siRNA target sequence for SCARB2 (NM_005506.2,517-535).
gtgtatactcagttctatt

SEQ ID NO: 251140 - DNA, 19 bp, Homo sapiens
  siRNA target sequence for SCARB2 (NM_005506.2,678-696).
caacaaggcctatgttttt

SEQ ID NO: 251141 - DNA, 19 bp, Homo sapiens
  siRNA target sequence for SCARB2 (NM_005506.2,681-699).
caaggcctatgtttttgaa

SEQ ID NO: 251142 - DNA, 19 bp, Homo sapiens
  siRNA target sequence for SCARB2 (NM_005506.2,710-728).
ctgttggagaccctaaaat

SEQ ID NO: 251143 - DNA, 19 bp, Homo sapiens
  siRNA target sequence for SCARB2 (NM_005506.2,721-739).
cctaaaattgacttaatta

SEQ ID NO: 251144 - DNA, 19 bp, Homo sapiens
  siRNA target sequence for SCARB2 (NM_005506.2,730-748).
gacttaattagaacattaa

SEQ ID NO: 251145 - DNA, 19 bp, Homo sapiens
  siRNA target sequence for SCARB2 (NM_005506.2,755-773).
ctgtattgactgtcataga

SEQ ID NO: 251146 - DNA, 19 bp, Homo sapiens
  siRNA target sequence for SCARB2 (NM_005506.2,804-822).
catcgaggccatgttgaaa

SEQ ID NO: 251147 - DNA, 19 bp, Homo sapiens
  siRNA target sequence for SCARB2 (NM_005506.2,875-893).
gctacaaagatgaaatctt

SEQ ID NO: 251148 - DNA, 19 bp, Homo sapiens
  siRNA target sequence for SCARB2 (NM_005506.2,907-925).
gttttcaggcccgatatct

SEQ ID NO: 251149 - DNA, 19 bp, Homo sapiens
  siRNA target sequence for SCARB2 (NM_005506.2,917-935).
ccgatatctctccctattt

SEQ ID NO: 251150 - DNA, 19 bp, Homo sapiens
  siRNA target sequence for SCARB2 (NM_005506.2,918-936).
cgatatctctccctatttt

SEQ ID NO: 251151 - DNA, 19 bp, Homo sapiens
  siRNA target sequence for SCARB2 (NM_005506.2,930-948).
ctattttggcctattctat

SEQ ID NO: 251152 - DNA, 19 bp, Homo sapiens
  siRNA target sequence for SCARB2 (NM_005506.2,937-955).
ggcctattctatgagaaaa

SEQ ID NO: 251153 - DNA, 19 bp, Homo sapiens
  siRNA target sequence for SCARB2 (NM_005506.2,960-978).
gactaatgatggagactat

SEQ ID NO: 251154 - DNA, 19 bp, Homo sapiens
  siRNA target sequence for SCARB2 (NM_005506.2,991-1009).
ggagaagacagttacctta

SEQ ID NO: 251155 - DNA, 19 bp, Homo sapiens
  siRNA target sequence for SCARB2 (NM_005506.2,992-1010).
gagaagacagttaccttaa

SEQ ID NO: 251156 - DNA, 19 bp, Homo sapiens
  siRNA target sequence for SCARB2 (NM_005506.2,994-1012).
gaagacagttaccttaact

SEQ ID NO: 251157 - DNA, 19 bp, Homo sapiens
  siRNA target sequence for SCARB2 (NM_005506.2,997-1015).
gacagttaccttaacttta

SEQ ID NO: 251158 - DNA, 19 bp, Homo sapiens
  siRNA target sequence for SCARB2 (NM_005506.2,1016-1034).
caaaaattgtggaatggaa

SEQ ID NO: 251159 - DNA, 19 bp, Homo sapiens
  siRNA target sequence for SCARB2 (NM_005506.2,1027-1045).
gaatggaatgggaaaacgt

SEQ ID NO: 251160 - DNA, 19 bp, Homo sapiens
  siRNA target sequence for SCARB2 (NM_005506.2,1064-1082).
cagacaagtgcaatatgat

SEQ ID NO: 251161 - DNA, 19 bp, Homo sapiens
  siRNA target sequence for SCARB2 (NM_005506.2,1110-1128).
cccactaataaccaaagat

SEQ ID NO: 251162 - DNA, 19 bp, Homo sapiens
  siRNA target sequence for SCARB2 (NM_005506.2,1121-1139).
ccaaagatgaggtccttta

SEQ ID NO: 251163 - DNA, 19 bp, Homo sapiens
  siRNA target sequence for SCARB2 (NM_005506.2,1163-1181).
ggtcagtgtatattacttt

SEQ ID NO: 251164 - DNA, 19 bp, Homo sapiens
  siRNA target sequence for SCARB2 (NM_005506.2,1209-1227).
gcctgcctttcggtataaa

SEQ ID NO: 251165 - DNA, 19 bp, Homo sapiens
  siRNA target sequence for SCARB2 (NM_005506.2,1211-1229).
ctgcctttcggtataaagt

SEQ ID NO: 251166 - DNA, 19 bp, Homo sapiens
  siRNA target sequence for SCARB2 (NM_005506.2,1237-1255).
gaaatattagccaatacgt

SEQ ID NO: 251167 - DNA, 19 bp, Homo sapiens
  siRNA target sequence for SCARB2 (NM_005506.2,1260-1278).
caatgccggcttctgtata

SEQ ID NO: 251168 - DNA, 19 bp, Homo sapiens
  siRNA target sequence for SCARB2 (NM_005506.2,1329-1347).
gaatggtgcacccatcatt

SEQ ID NO: 251169 - DNA, 19 bp, Homo sapiens
  siRNA target sequence for SCARB2 (NM_005506.2,1333-1351).
ggtgcacccatcattatgt

SEQ ID NO: 251170 - DNA, 19 bp, Homo sapiens
  siRNA target sequence for SCARB2 (NM_005506.2,1336-1354).
gcacccatcattatgtctt

SEQ ID NO: 251171 - DNA, 19 bp, Homo sapiens
  siRNA target sequence for SCARB2 (NM_005506.2,1482-1500).
gaggttccaaatcaacatt

SEQ ID NO: 251172 - DNA, 19 bp, Homo sapiens
  siRNA target sequence for SCARB2 (NM_005506.2,1485-1503).
gttccaaatcaacatttat

SEQ ID NO: 251173 - DNA, 19 bp, Homo sapiens
  siRNA target sequence for SCARB2 (NM_005506.2,1489-1507).
caaatcaacatttatgtca

SEQ ID NO: 251174 - DNA, 19 bp, Homo sapiens
  siRNA target sequence for SCARB2 (NM_005506.2,1525-1543).
gttgaaacgggagacatta

SEQ ID NO: 251175 - DNA, 19 bp, Homo sapiens
  siRNA target sequence for SCARB2 (NM_005506.2,1528-1546).
gaaacgggagacattagaa

SEQ ID NO: 251176 - DNA, 19 bp, Homo sapiens
  siRNA target sequence for SCARB2 (NM_005506.2,1561-1579).
gtgatgtacctcaatgaga

SEQ ID NO: 251177 - DNA, 19 bp, Homo sapiens
  siRNA target sequence for SCARB2 (NM_005506.2,1603-1621).
gcgagtcgactgaagtcta

SEQ ID NO: 251178 - DNA, 19 bp, Homo sapiens
  siRNA target sequence for SCARB2 (NM_005506.2,1604-1622).
cgagtcgactgaagtctat

SEQ ID NO: 251179 - DNA, 19 bp, Homo sapiens
  siRNA target sequence for SCARB2 (NM_005506.2,1607-1625).
gtcgactgaagtctatgat

SEQ ID NO: 251180 - DNA, 19 bp, Homo sapiens
  siRNA target sequence for SCARB2 (NM_005506.2,1609-1627).
cgactgaagtctatgatta

SEQ ID NO: 251181 - DNA, 19 bp, Homo sapiens
  siRNA target sequence for SCARB2 (NM_005506.2,1610-1628).
gactgaagtctatgattaa

SEQ ID NO: 251182 - DNA, 19 bp, Homo sapiens
  siRNA target sequence for SCARB2 (NM_005506.2,1646-1664).
ccaacataccctacatcat

SEQ ID NO: 251183 - DNA, 19 bp, Homo sapiens
  siRNA target sequence for SCARF2 (NM_153334.3,514-532).
gtgacaggccagtgtactt

SEQ ID NO: 251184 - DNA, 19 bp, Homo sapiens
  siRNA target sequence for SCARF2 (NM_153334.3,1113-1131).
cgggcatgcctgtaaccat

SEQ ID NO: 251185 - DNA, 19 bp, Homo sapiens
  siRNA target sequence for SCARF2 (NM_153334.3,1177-1195).
cggtgcgagaccaagtgta

SEQ ID NO: 251186 - DNA, 19 bp, Homo sapiens
  siRNA target sequence for SCARF2 (NM_153334.3,1182-1200).
cgagaccaagtgtagcaat

SEQ ID NO: 251187 - DNA, 19 bp, Homo sapiens
  siRNA target sequence for SCARF2 (NM_153334.3,1628-1646).
cgctccggaggcagaaact

SEQ ID NO: 251188 - DNA, 19 bp, Homo sapiens
  siRNA target sequence for SCARF2 (NM_153334.3,1629-1647).
gctccggaggcagaaacta

SEQ ID NO: 251189 - DNA, 19 bp, Homo sapiens
  siRNA target sequence for SCARF2 (NM_153334.3,1664-1682).
cccaccacgacctggataa

SEQ ID NO: 251190 - DNA, 19 bp, Homo sapiens
  siRNA target sequence for SCARF2 (NM_153334.3,1666-1684).
caccacgacctggataaca

SEQ ID NO: 251191 - DNA, 19 bp, Homo sapiens
  siRNA target sequence for SCARF2 (NM_153334.3,1668-1686).
ccacgacctggataacaca

SEQ ID NO: 251192 - DNA, 19 bp, Homo sapiens
  siRNA target sequence for SCARF2 (NM_153334.3,1767-1785).
gtttgacaccactgatgaa

SEQ ID NO: 251193 - DNA, 19 bp, Homo sapiens
  siRNA target sequence for SCARF2 (NM_153334.3,2215-2233).
cggacgcccagcgacaaat

SEQ ID NO: 251194 - DNA, 19 bp, Homo sapiens
  siRNA target sequence for SDFR1 (NM_012428.1,243-261).
gtcgcccatgtcagaaact

SEQ ID NO: 251195 - DNA, 19 bp, Homo sapiens
  siRNA target sequence for SDFR1 (NM_012428.1,245-263).
cgcccatgtcagaaactaa

SEQ ID NO: 251196 - DNA, 19 bp, Homo sapiens
  siRNA target sequence for SDFR1 (NM_012428.1,391-409).
cgccgtgtcaccgtaaaca

SEQ ID NO: 251197 - DNA, 19 bp, Homo sapiens
  siRNA target sequence for SDFR1 (NM_012428.1,428-446).
gcgtgagtgtgctgagaat

SEQ ID NO: 251198 - DNA, 19 bp, Homo sapiens
  siRNA target sequence for SDFR1 (NM_012428.1,430-448).
gtgagtgtgctgagaataa

SEQ ID NO: 251199 - DNA, 19 bp, Homo sapiens
  siRNA target sequence for SDFR1 (NM_012428.1,528-546).
cccctccataacatggatt

SEQ ID NO: 251200 - DNA, 19 bp, Homo sapiens
  siRNA target sequence for SDFR1 (NM_012428.1,547-565).
cgagcccaggccaccataa

SEQ ID NO: 251201 - DNA, 19 bp, Homo sapiens
  siRNA target sequence for SDFR1 (NM_012428.1,560-578).
ccataagcgtccttcagaa

SEQ ID NO: 251202 - DNA, 19 bp, Homo sapiens
  siRNA target sequence for SDFR1 (NM_012428.1,574-592).
cagaagccaaggattgtca

SEQ ID NO: 251203 - DNA, 19 bp, Homo sapiens
  siRNA target sequence for SDFR1 (NM_012428.1,632-650).
ctgtcaccctgcagtgtaa

SEQ ID NO: 251204 - DNA, 19 bp, Homo sapiens
  siRNA target sequence for SDFR1 (NM_012428.1,662-680).
gctctcacacccttacata

SEQ ID NO: 251205 - DNA, 19 bp, Homo sapiens
  siRNA target sequence for SDFR1 (NM_012428.1,711-729).
gagtgccactcgtaagaat

SEQ ID NO: 251206 - DNA, 19 bp, Homo sapiens
  siRNA target sequence for SDFR1 (NM_012428.1,780-798).
cgaataccactgcgtatat

SEQ ID NO: 251207 - DNA, 19 bp, Homo sapiens
  siRNA target sequence for SDFR1 (NM_012428.1,786-804).
ccactgcgtatatcacttt

SEQ ID NO: 251208 - DNA, 19 bp, Homo sapiens
  siRNA target sequence for SDFR1 (NM_012428.1,805-823).
gtcagcgctcctaaagcaa

SEQ ID NO: 251209 - DNA, 19 bp, Homo sapiens
  siRNA target sequence for SDFR1 (NM_012428.1,825-843).
cgccaccattgaagtgaaa

SEQ ID NO: 251210 - DNA, 19 bp, Homo sapiens
  siRNA target sequence for SDFR1 (NM_012428.1,893-911).
ggcaggatgccactatgta

SEQ ID NO: 251211 - DNA, 19 bp, Homo sapiens
  siRNA target sequence for SDFR1 (NM_012428.1,898-916).
gatgccactatgtattgca

SEQ ID NO: 251212 - DNA, 19 bp, Homo sapiens
  siRNA target sequence for SDFR1 (NM_012428.1,968-986).
ggatgcccatggacattgt

SEQ ID NO: 251213 - DNA, 19 bp, Homo sapiens
  siRNA target sequence for SDFR1 (NM_012428.1,972-990).
gcccatggacattgtcaat

SEQ ID NO: 251214 - DNA, 19 bp, Homo sapiens
  siRNA target sequence for SDFR1 (NM_012428.1,973-991).
cccatggacattgtcaata

SEQ ID NO: 251215 - DNA, 19 bp, Homo sapiens
  siRNA target sequence for SDFR1 (NM_012428.1,995-1013).
ctggccgcttcttcatcat

SEQ ID NO: 251216 - DNA, 19 bp, Homo sapiens
  siRNA target sequence for SDFR1 (NM_012428.1,1066-1084).
gaccctggcgagtatgaat

SEQ ID NO: 251217 - DNA, 19 bp, Homo sapiens
  siRNA target sequence for SDFR1 (NM_012428.1,1068-1086).
ccctggcgagtatgaatgt

SEQ ID NO: 251218 - DNA, 19 bp, Homo sapiens
  siRNA target sequence for SEMA4B (NM_020210.2,454-472).
gccattcctcagattcgaa

SEQ ID NO: 251219 - DNA, 19 bp, Homo sapiens
  siRNA target sequence for SEMA4B (NM_020210.2,465-483).
gattcgaagctgaacacat

SEQ ID NO: 251220 - DNA, 19 bp, Homo sapiens
  siRNA target sequence for SEMA4B (NM_020210.2,476-494).
gaacacatctccaactaca

SEQ ID NO: 251221 - DNA, 19 bp, Homo sapiens
  siRNA target sequence for SEMA4B (NM_020210.2,662-680).
ccacagcgcgactgtcaaa

SEQ ID NO: 251222 - DNA, 19 bp, Homo sapiens
  siRNA target sequence for SEMA4B (NM_020210.2,665-683).
cagcgcgactgtcaaaact

SEQ ID NO: 251223 - DNA, 19 bp, Homo sapiens
  siRNA target sequence for SEMA4B (NM_020210.2,668-686).
cgcgactgtcaaaactaca

SEQ ID NO: 251224 - DNA, 19 bp, Homo sapiens
  siRNA target sequence for SEMA4B (NM_020210.2,669-687).
gcgactgtcaaaactacat

SEQ ID NO: 251225 - DNA, 19 bp, Homo sapiens
  siRNA target sequence for SEMA4B (NM_020210.2,750-768).
ccatgtgtacctacatcaa

SEQ ID NO: 251226 - DNA, 19 bp, Homo sapiens
  siRNA target sequence for SEMA4B (NM_020210.2,840-858).
ccttcgacccgaatttcaa

SEQ ID NO: 251227 - DNA, 19 bp, Homo sapiens
  siRNA target sequence for SEMA4B (NM_020210.2,1038-1056).
gcttgcaaggcgatgatga

SEQ ID NO: 251228 - DNA, 19 bp, Homo sapiens
  siRNA target sequence for SEMA4B (NM_020210.2,1046-1064).
ggcgatgatgacaagatct

SEQ ID NO: 251229 - DNA, 19 bp, Homo sapiens
  siRNA target sequence for SEMA4B (NM_020210.2,1047-1065).
gcgatgatgacaagatcta

SEQ ID NO: 251230 - DNA, 19 bp, Homo sapiens
  siRNA target sequence for SEMA4B (NM_020210.2,1077-1095).
gcgagactggccaggaatt

SEQ ID NO: 251231 - DNA, 19 bp, Homo sapiens
  siRNA target sequence for SEMA4B (NM_020210.2,1288-1306).
gcgtgacacccttttctat

SEQ ID NO: 251232 - DNA, 19 bp, Homo sapiens
  siRNA target sequence for SEMA4B (NM_020210.2,1324-1342).
gtggcacaggggaactaca

SEQ ID NO: 251233 - DNA, 19 bp, Homo sapiens
  siRNA target sequence for SEMA4B (NM_020210.2,1530-1548).
cagaccgcgtgctgaactt

SEQ ID NO: 251234 - DNA, 19 bp, Homo sapiens
  siRNA target sequence for SEMA4B (NM_020210.2,1745-1763).
gagctgcagatcttctcat

SEQ ID NO: 251235 - DNA, 19 bp, Homo sapiens
  siRNA target sequence for SEMA4B (NM_020210.2,1767-1785).
gacagcccgtgcagaatct

SEQ ID NO: 251236 - DNA, 19 bp, Homo sapiens
  siRNA target sequence for SEMA4B (NM_020210.2,2029-2047).
ggttgtgtccccgtctttt

SEQ ID NO: 251237 - DNA, 19 bp, Homo sapiens
  siRNA target sequence for SEMA4B (NM_020210.2,2091-2109).
ccaacacagtgaacacttt

SEQ ID NO: 251238 - DNA, 19 bp, Homo sapiens
  siRNA target sequence for SEMA4B (NM_020210.2,2316-2334).
gggtggcagaccaaacaga

SEQ ID NO: 251239 - DNA, 19 bp, Homo sapiens
  siRNA target sequence for SEMA4B (NM_020210.2,2342-2360).
ggcagtgtacccgtcatta

SEQ ID NO: 251240 - DNA, 19 bp, Homo sapiens
  siRNA target sequence for SEMA4B (NM_020210.2,2343-2361).
gcagtgtacccgtcattat

SEQ ID NO: 251241 - DNA, 19 bp, Homo sapiens
  siRNA target sequence for SEMA4B (NM_020210.2,2467-2485).
cgtgctgctcccagtttta

SEQ ID NO: 251242 - DNA, 19 bp, Homo sapiens
  siRNA target sequence for SEMA4B (NM_020210.2,2504-2522).
cggaacagcatgaaagtct

SEQ ID NO: 251243 - DNA, 19 bp, Homo sapiens
  siRNA target sequence for SEMA4B (NM_020210.2,2505-2523).
ggaacagcatgaaagtctt

SEQ ID NO: 251244 - DNA, 19 bp, Homo sapiens
  siRNA target sequence for SEMA4C (NM_017789.3,211-229).
ccttgtgccgcgtaagaca

SEQ ID NO: 251245 - DNA, 19 bp, Homo sapiens
  siRNA target sequence for SEMA4C (NM_017789.3,690-708).
gcacggaacccattatcct

SEQ ID NO: 251246 - DNA, 19 bp, Homo sapiens
  siRNA target sequence for SEMA4C (NM_017789.3,699-717).
ccattatcctgcgtaacat

SEQ ID NO: 251247 - DNA, 19 bp, Homo sapiens
  siRNA target sequence for SEMA4C (NM_017789.3,760-778).
gctcaacgaacctcacttt

SEQ ID NO: 251248 - DNA, 19 bp, Homo sapiens
  siRNA target sequence for SEMA4C (NM_017789.3,763-781).
caacgaacctcactttgta

SEQ ID NO: 251249 - DNA, 19 bp, Homo sapiens
  siRNA target sequence for SEMA4C (NM_017789.3,1066-1084).
caccttctttggggttttt

SEQ ID NO: 251250 - DNA, 19 bp, Homo sapiens
  siRNA target sequence for SEMA4C (NM_017789.3,1089-1107).
cacagtggggtgacatgta

SEQ ID NO: 251251 - DNA, 19 bp, Homo sapiens
  siRNA target sequence for SEMA4C (NM_017789.3,1230-1248).
ggcctggctcgtgcattaa

SEQ ID NO: 251252 - DNA, 19 bp, Homo sapiens
  siRNA target sequence for SEMA4C (NM_017789.3,1232-1250).
cctggctcgtgcattaaca

SEQ ID NO: 251253 - DNA, 19 bp, Homo sapiens
  siRNA target sequence for SEMA4C (NM_017789.3,1233-1251).
ctggctcgtgcattaacaa

SEQ ID NO: 251254 - DNA, 19 bp, Homo sapiens
  siRNA target sequence for SEMA4C (NM_017789.3,1235-1253).
ggctcgtgcattaacaact

SEQ ID NO: 251255 - DNA, 19 bp, Homo sapiens
  siRNA target sequence for SEMA4C (NM_017789.3,1293-1311).
ccgacaacatcctcaactt

SEQ ID NO: 251256 - DNA, 19 bp, Homo sapiens
  siRNA target sequence for SEMA4C (NM_017789.3,1411-1429).
ccgggttacaggacttgat

SEQ ID NO: 251257 - DNA, 19 bp, Homo sapiens
  siRNA target sequence for SEMA4C (NM_017789.3,1424-1442).
cttgatggagccacctata

SEQ ID NO: 251258 - DNA, 19 bp, Homo sapiens
  siRNA target sequence for SEMA4C (NM_017789.3,1438-1456).
ctatacagtgctgttcatt

SEQ ID NO: 251259 - DNA, 19 bp, Homo sapiens
  siRNA target sequence for SEMA4C (NM_017789.3,1551-1569).
gaagcctggtgctatctca

SEQ ID NO: 251260 - DNA, 19 bp, Homo sapiens
  siRNA target sequence for SEMA4C (NM_017789.3,1624-1642).
ggccgactgcatgaagtat

SEQ ID NO: 251261 - DNA, 19 bp, Homo sapiens
  siRNA target sequence for SEMA4C (NM_017789.3,1809-1827).
ggcccactcccaaaaacat

SEQ ID NO: 251262 - DNA, 19 bp, Homo sapiens
  siRNA target sequence for SEMA4C (NM_017789.3,2614-2632).
ccccgaggagtcatcagta

SEQ ID NO: 251263 - DNA, 19 bp, Homo sapiens
  siRNA target sequence for SEMA4C (NM_017789.3,2615-2633).
cccgaggagtcatcagtat

SEQ ID NO: 251264 - DNA, 19 bp, Homo sapiens
  siRNA target sequence for SEMA4D (NM_006378.2,928-946).
gcgccacttccctttacgt

SEQ ID NO: 251265 - DNA, 19 bp, Homo sapiens
  siRNA target sequence for SEMA4D (NM_006378.2,978-996).
gaccacctgaacttaacat

SEQ ID NO: 251266 - DNA, 19 bp, Homo sapiens
  siRNA target sequence for SEMA4D (NM_006378.2,984-1002).
ctgaacttaacatccttta

SEQ ID NO: 251267 - DNA, 19 bp, Homo sapiens
  siRNA target sequence for SEMA4D (NM_006378.2,1096-1114).
cggggacgtcgtataattt

SEQ ID NO: 251268 - DNA, 19 bp, Homo sapiens
  siRNA target sequence for SEMA4D (NM_006378.2,1119-1137).
ggaagtgaacccatcatct

SEQ ID NO: 251269 - DNA, 19 bp, Homo sapiens
  siRNA target sequence for SEMA4D (NM_006378.2,1128-1146).
cccatcatctcccgaaatt

SEQ ID NO: 251270 - DNA, 19 bp, Homo sapiens
  siRNA target sequence for SEMA4D (NM_006378.2,1130-1148).
catcatctcccgaaattct

SEQ ID NO: 251271 - DNA, 19 bp, Homo sapiens
  siRNA target sequence for SEMA4D (NM_006378.2,1156-1174).
gtcctctgaggacagaata

SEQ ID NO: 251272 - DNA, 19 bp, Homo sapiens
  siRNA target sequence for SEMA4D (NM_006378.2,1186-1204).
ggctgaacgagcctagttt

SEQ ID NO: 251273 - DNA, 19 bp, Homo sapiens
  siRNA target sequence for SEMA4D (NM_006378.2,1212-1230).
gctgacgtgatccgaaaaa

SEQ ID NO: 251274 - DNA, 19 bp, Homo sapiens
  siRNA target sequence for SEMA4D (NM_006378.2,1317-1335).
ctgatcccacggatagcaa

SEQ ID NO: 251275 - DNA, 19 bp, Homo sapiens
  siRNA target sequence for SEMA4D (NM_006378.2,1427-1445).
cagcggcttggtcttcaat

SEQ ID NO: 251276 - DNA, 19 bp, Homo sapiens
  siRNA target sequence for SEMA4D (NM_006378.2,1429-1447).
gcggcttggtcttcaatgt

SEQ ID NO: 251277 - DNA, 19 bp, Homo sapiens
  siRNA target sequence for SEMA4D (NM_006378.2,1739-1757).
gacgctgcagttcgttaaa

SEQ ID NO: 251278 - DNA, 19 bp, Homo sapiens
  siRNA target sequence for SEMA4D (NM_006378.2,1780-1798).
cggtaaccccaatagacaa

SEQ ID NO: 251279 - DNA, 19 bp, Homo sapiens
  siRNA target sequence for SEMA4D (NM_006378.2,1802-1820).
gcccaggttaatcaagaaa

SEQ ID NO: 251280 - DNA, 19 bp, Homo sapiens
  siRNA target sequence for SEMA4D (NM_006378.2,1865-1883).
ggatgggactgtctatgat

SEQ ID NO: 251281 - DNA, 19 bp, Homo sapiens
  siRNA target sequence for SEMA4D (NM_006378.2,1870-1888).
ggactgtctatgatgtcat

SEQ ID NO: 251282 - DNA, 19 bp, Homo sapiens
  siRNA target sequence for SEMA4D (NM_006378.2,2226-2244).
gtgtgcccggataaaagta

SEQ ID NO: 251283 - DNA, 19 bp, Homo sapiens
  siRNA target sequence for SEMA4D (NM_006378.2,2248-2266).
gaagttaccggcagcattt

SEQ ID NO: 251284 - DNA, 19 bp, Homo sapiens
  siRNA target sequence for SEMA4D (NM_006378.2,2251-2269).
gttaccggcagcatttttt

SEQ ID NO: 251285 - DNA, 19 bp, Homo sapiens
  siRNA target sequence for SEMA4D (NM_006378.2,2278-2296).
gtggcacagcggaactgaa

SEQ ID NO: 251286 - DNA, 19 bp, Homo sapiens
  siRNA target sequence for SEMA4D (NM_006378.2,2280-2298).
ggcacagcggaactgaaat

SEQ ID NO: 251287 - DNA, 19 bp, Homo sapiens
  siRNA target sequence for SEMA4D (NM_006378.2,2365-2383).
gccccaagtacggtcttat

SEQ ID NO: 251288 - DNA, 19 bp, Homo sapiens
  siRNA target sequence for SEMA4D (NM_006378.2,2537-2555).
ccccaccttgtcagttgtt

SEQ ID NO: 251289 - DNA, 19 bp, Homo sapiens
  siRNA target sequence for SEMA4D (NM_006378.2,2539-2557).
ccaccttgtcagttgttca

SEQ ID NO: 251290 - DNA, 19 bp, Homo sapiens
  siRNA target sequence for SEMA4D (NM_006378.2,2558-2576).
gacagaaggtagtaggatt

SEQ ID NO: 251291 - DNA, 19 bp, Homo sapiens
  siRNA target sequence for SEMA4D (NM_006378.2,2686-2704).
gcacatcctgcgaaccaaa

SEQ ID NO: 251292 - DNA, 19 bp, Homo sapiens
  siRNA target sequence for SEMA4D (NM_006378.2,2689-2707).
catcctgcgaaccaaagat

SEQ ID NO: 251293 - DNA, 19 bp, Homo sapiens
  siRNA target sequence for SEMA4D (NM_006378.2,2700-2718).
ccaaagatcgtcatcaaca

SEQ ID NO: 251294 - DNA, 19 bp, Homo sapiens
  siRNA target sequence for SEMA4D (NM_006378.2,2873-2891).
ccgctcggccctactaatt

SEQ ID NO: 251295 - DNA, 19 bp, Homo sapiens
  siRNA target sequence for SEMA4D (NM_006378.2,2936-2954).
cctgaaggagacgttagta

SEQ ID NO: 251296 - DNA, 19 bp, Homo sapiens
  siRNA target sequence for SEMA4F (NM_004263.2,233-251).
ccagaacctcgcttccaat

SEQ ID NO: 251297 - DNA, 19 bp, Homo sapiens
  siRNA target sequence for SEMA4F (NM_004263.2,283-301).
gcagtccctcacacataca

SEQ ID NO: 251298 - DNA, 19 bp, Homo sapiens
  siRNA target sequence for SEMA4F (NM_004263.2,286-304).
gtccctcacacatacaatt

SEQ ID NO: 251299 - DNA, 19 bp, Homo sapiens
  siRNA target sequence for SEMA4F (NM_004263.2,530-548).
gtggcaccttcgcttttga

SEQ ID NO: 251300 - DNA, 19 bp, Homo sapiens
  siRNA target sequence for SEMA4F (NM_004263.2,552-570).
gaagtgcggggttattgat

SEQ ID NO: 251301 - DNA, 19 bp, Homo sapiens
  siRNA target sequence for SEMA4F (NM_004263.2,582-600).
ccagcaggttgaaagactt

SEQ ID NO: 251302 - DNA, 19 bp, Homo sapiens
  siRNA target sequence for SEMA4F (NM_004263.2,676-694).
gctgccactgtgaaaaact

SEQ ID NO: 251303 - DNA, 19 bp, Homo sapiens
  siRNA target sequence for SEMA4F (NM_004263.2,742-760).
gactggattcggacagata

SEQ ID NO: 251304 - DNA, 19 bp, Homo sapiens
  siRNA target sequence for SEMA4F (NM_004263.2,746-764).
ggattcggacagatacctt

SEQ ID NO: 251305 - DNA, 19 bp, Homo sapiens
  siRNA target sequence for SEMA4F (NM_004263.2,818-836).
ccgaatggggggatgaaga

SEQ ID NO: 251306 - DNA, 19 bp, Homo sapiens
  siRNA target sequence for SEMA4F (NM_004263.2,819-837).
cgaatggggggatgaagat

SEQ ID NO: 251307 - DNA, 19 bp, Homo sapiens
  siRNA target sequence for SEMA4F (NM_004263.2,835-853).
gatggagacgacgaaatct

SEQ ID NO: 251308 - DNA, 19 bp, Homo sapiens
  siRNA target sequence for SEMA4F (NM_004263.2,838-856).
ggagacgacgaaatctact

SEQ ID NO: 251309 - DNA, 19 bp, Homo sapiens
  siRNA target sequence for SEMA4F (NM_004263.2,839-857).
gagacgacgaaatctactt

SEQ ID NO: 251310 - DNA, 19 bp, Homo sapiens
  siRNA target sequence for SEMA4F (NM_004263.2,888-906).
ctcatacgagcgcattaaa

SEQ ID NO: 251311 - DNA, 19 bp, Homo sapiens
  siRNA target sequence for SEMA4F (NM_004263.2,890-908).
catacgagcgcattaaagt

SEQ ID NO: 251312 - DNA, 19 bp, Homo sapiens
  siRNA target sequence for SEMA4F (NM_004263.2,964-982).
cagagatggacgacgtttt

SEQ ID NO: 251313 - DNA, 19 bp, Homo sapiens
  siRNA target sequence for SEMA4F (NM_004263.2,968-986).
gatggacgacgtttttgaa

SEQ ID NO: 251314 - DNA, 19 bp, Homo sapiens
  siRNA target sequence for SEMA4F (NM_004263.2,1142-1160).
ccttccgaccacaagacat

SEQ ID NO: 251315 - DNA, 19 bp, Homo sapiens
  siRNA target sequence for SEMA4F (NM_004263.2,1143-1161).
cttccgaccacaagacatt

SEQ ID NO: 251316 - DNA, 19 bp, Homo sapiens
  siRNA target sequence for SEMA4F (NM_004263.2,1178-1196).
gtcccttcagagaactaaa

SEQ ID NO: 251317 - DNA, 19 bp, Homo sapiens
  siRNA target sequence for SEMA4F (NM_004263.2,1218-1236).
gcctgtcgtggacaatgat

SEQ ID NO: 251318 - DNA, 19 bp, Homo sapiens
  siRNA target sequence for SEMA4F (NM_004263.2,1262-1280).
gcatcaccaacaacatgaa

SEQ ID NO: 251319 - DNA, 19 bp, Homo sapiens
  siRNA target sequence for SEMA4F (NM_004263.2,1350-1368).
catggacaggccagtgttt

SEQ ID NO: 251320 - DNA, 19 bp, Homo sapiens
  siRNA target sequence for SEMA4F (NM_004263.2,1524-1542).
gctcagcgttcttgaagat

SEQ ID NO: 251321 - DNA, 19 bp, Homo sapiens
  siRNA target sequence for SEMA4F (NM_004263.2,1621-1639).
gaggtgacacaagtgaata

SEQ ID NO: 251322 - DNA, 19 bp, Homo sapiens
  siRNA target sequence for SEMA4F (NM_004263.2,1623-1641).
ggtgacacaagtgaataca

SEQ ID NO: 251323 - DNA, 19 bp, Homo sapiens
  siRNA target sequence for SEMA4F (NM_004263.2,1985-2003).
cttatgcctgtgaatgtca

SEQ ID NO: 251324 - DNA, 19 bp, Homo sapiens
  siRNA target sequence for SEMA4G (NM_017893.2,453-471).
gcggagaccgtctagagaa

SEQ ID NO: 251325 - DNA, 19 bp, Homo sapiens
  siRNA target sequence for SEMA4G (NM_017893.2,458-476).
gaccgtctagagaactaga

SEQ ID NO: 251326 - DNA, 19 bp, Homo sapiens
  siRNA target sequence for SEMA4G (NM_017893.2,538-556).
caagcccagaactactcaa

SEQ ID NO: 251327 - DNA, 19 bp, Homo sapiens
  siRNA target sequence for SEMA4G (NM_017893.2,638-656).
gagatggggctcacaaaga

SEQ ID NO: 251328 - DNA, 19 bp, Homo sapiens
  siRNA target sequence for SEMA4G (NM_017893.2,720-738).
gacggagtgctttaaccat

SEQ ID NO: 251329 - DNA, 19 bp, Homo sapiens
  siRNA target sequence for SEMA4G (NM_017893.2,747-765).
cctgcagcggctcaattct

SEQ ID NO: 251330 - DNA, 19 bp, Homo sapiens
  siRNA target sequence for SEMA4G (NM_017893.2,748-766).
ctgcagcggctcaattcta

SEQ ID NO: 251331 - DNA, 19 bp, Homo sapiens
  siRNA target sequence for SEMA4G (NM_017893.2,861-879).
gaaggagaagtgtccttat

SEQ ID NO: 251332 - DNA, 19 bp, Homo sapiens
  siRNA target sequence for SEMA4G (NM_017893.2,897-915).
cacaggcctcatcattgat

SEQ ID NO: 251333 - DNA, 19 bp, Homo sapiens
  siRNA target sequence for SEMA4G (NM_017893.2,924-942).
ctacacagccactaggtat

SEQ ID NO: 251334 - DNA, 19 bp, Homo sapiens
  siRNA target sequence for SEMA4G (NM_017893.2,929-947).
cagccactaggtatgaatt

SEQ ID NO: 251335 - DNA, 19 bp, Homo sapiens
  siRNA target sequence for SEMA4G (NM_017893.2,1000-1018).
gaggagacaccaatgcatt

SEQ ID NO: 251336 - DNA, 19 bp, Homo sapiens
  siRNA target sequence for SEMA4G (NM_017893.2,1010-1028).
caatgcattggctcaatga

SEQ ID NO: 251337 - DNA, 19 bp, Homo sapiens
  siRNA target sequence for SEMA4G (NM_017893.2,1263-1281).
ctgccacattccactgtat

SEQ ID NO: 251338 - DNA, 19 bp, Homo sapiens
  siRNA target sequence for SEMA4G (NM_017893.2,1322-1340).
caagccgtacacacttcta

SEQ ID NO: 251339 - DNA, 19 bp, Homo sapiens
  siRNA target sequence for SEMA4G (NM_017893.2,1433-1451).
gaccctatatggaatacca

SEQ ID NO: 251340 - DNA, 19 bp, Homo sapiens
  siRNA target sequence for SEMA4G (NM_017893.2,1503-1521).
gcctggctcgtgtatcaca

SEQ ID NO: 251341 - DNA, 19 bp, Homo sapiens
  siRNA target sequence for SEMA4G (NM_017893.2,1507-1525).
ggctcgtgtatcacagatt

SEQ ID NO: 251342 - DNA, 19 bp, Homo sapiens
  siRNA target sequence for SEMA4G (NM_017893.2,1511-1529).
cgtgtatcacagattcatt

SEQ ID NO: 251343 - DNA, 19 bp, Homo sapiens
  siRNA target sequence for SEMA4G (NM_017893.2,1530-1548).
gcgcagccaaggctacaat

SEQ ID NO: 251344 - DNA, 19 bp, Homo sapiens
  siRNA target sequence for SEMA4G (NM_017893.2,1533-1551).
cagccaaggctacaattca

SEQ ID NO: 251345 - DNA, 19 bp, Homo sapiens
  siRNA target sequence for SEMA4G (NM_017893.2,1568-1586).
ccctggtcctggactttgt

SEQ ID NO: 251346 - DNA, 19 bp, Homo sapiens
  siRNA target sequence for SEMA4G (NM_017893.2,1569-1587).
cctggtcctggactttgta

SEQ ID NO: 251347 - DNA, 19 bp, Homo sapiens
  siRNA target sequence for SEMA4G (NM_017893.2,1641-1659).
gctgctcaagcgcaacata

SEQ ID NO: 251348 - DNA, 19 bp, Homo sapiens
  siRNA target sequence for SEMA4G (NM_017893.2,1695-1713).
gcctgctggacctacctat

SEQ ID NO: 251349 - DNA, 19 bp, Homo sapiens
  siRNA target sequence for SEMA4G (NM_017893.2,1769-1787).
gctctgggatgcacattat

SEQ ID NO: 251350 - DNA, 19 bp, Homo sapiens
  siRNA target sequence for SEMA4G (NM_017893.2,2024-2042).
gcaggacagcactgataca

SEQ ID NO: 251351 - DNA, 19 bp, Homo sapiens
  siRNA target sequence for SEMA4G (NM_017893.2,2033-2051).
cactgatacaggacataga

SEQ ID NO: 251352 - DNA, 19 bp, Homo sapiens
  siRNA target sequence for SEMA4G (NM_017893.2,2244-2262).
cgggctgctggttacagat

SEQ ID NO: 251353 - DNA, 19 bp, Homo sapiens
  siRNA target sequence for SEMA4G (NM_017893.2,2291-2309).
gctgctatgccgaggaaaa

SEQ ID NO: 251354 - DNA, 19 bp, Homo sapiens
  siRNA target sequence for SEMA4G (NM_017893.2,2322-2340).
cctgctggcctcctatagt

SEQ ID NO: 251355 - DNA, 19 bp, Homo sapiens
  siRNA target sequence for SEMA4G (NM_017893.2,2757-2775).
ccggctgcggaggatgaat

SEQ ID NO: 251356 - DNA, 19 bp, Homo sapiens
  siRNA target sequence for SEMA4G (NM_017893.2,2768-2786).
ggatgaatggcaatagcta

SEQ ID NO: 251357 - DNA, 19 bp, Homo sapiens
  siRNA target sequence for SEMA4G (NM_017893.2,2769-2787).
gatgaatggcaatagctat

SEQ ID NO: 251358 - DNA, 19 bp, Homo sapiens
  siRNA target sequence for SEMA4G (NM_017893.2,2850-2868).
cagccgcatcctggaaaaa

SEQ ID NO: 251359 - DNA, 19 bp, Homo sapiens
  siRNA target sequence for SEMA5A (NM_003966.1,640-658).
gaagggaacctgtgttata

SEQ ID NO: 251360 - DNA, 19 bp, Homo sapiens
  siRNA target sequence for SEMA5A (NM_003966.1,643-661).
gggaacctgtgttatagca

SEQ ID NO: 251361 - DNA, 19 bp, Homo sapiens
  siRNA target sequence for SEMA5A (NM_003966.1,644-662).
ggaacctgtgttatagcat

SEQ ID NO: 251362 - DNA, 19 bp, Homo sapiens
  siRNA target sequence for SEMA5A (NM_003966.1,744-762).
cagtcatctcctataaaga

SEQ ID NO: 251363 - DNA, 19 bp, Homo sapiens
  siRNA target sequence for SEMA5A (NM_003966.1,781-799).
ggagttcagagcgaagaat

SEQ ID NO: 251364 - DNA, 19 bp, Homo sapiens
  siRNA target sequence for SEMA5A (NM_003966.1,805-823).
ggatttctcgcagttaaca

SEQ ID NO: 251365 - DNA, 19 bp, Homo sapiens
  siRNA target sequence for SEMA5A (NM_003966.1,806-824).
gatttctcgcagttaacat

SEQ ID NO: 251366 - DNA, 19 bp, Homo sapiens
  siRNA target sequence for SEMA5A (NM_003966.1,848-866).
gttgtaggagcaagaaact

SEQ ID NO: 251367 - DNA, 19 bp, Homo sapiens
  siRNA target sequence for SEMA5A (NM_003966.1,1007-1025).
ggtggcgaccggttattca

SEQ ID NO: 251368 - DNA, 19 bp, Homo sapiens
  siRNA target sequence for SEMA5A (NM_003966.1,1203-1221).
gacgtgatcctgccattta

SEQ ID NO: 251369 - DNA, 19 bp, Homo sapiens
  siRNA target sequence for SEMA5A (NM_003966.1,1256-1274).
gcgcagtacaactccaaat

SEQ ID NO: 251370 - DNA, 19 bp, Homo sapiens
  siRNA target sequence for SEMA5A (NM_003966.1,1330-1348).
ctttttccgagaaaatgca

SEQ ID NO: 251371 - DNA, 19 bp, Homo sapiens
  siRNA target sequence for SEMA5A (NM_003966.1,1391-1409).
cgggtgtgcaagaacgata

SEQ ID NO: 251372 - DNA, 19 bp, Homo sapiens
  siRNA target sequence for SEMA5A (NM_003966.1,1392-1410).
gggtgtgcaagaacgatat

SEQ ID NO: 251373 - DNA, 19 bp, Homo sapiens
  siRNA target sequence for SEMA5A (NM_003966.1,1393-1411).
ggtgtgcaagaacgatatt

SEQ ID NO: 251374 - DNA, 19 bp, Homo sapiens
  siRNA target sequence for SEMA5A (NM_003966.1,1396-1414).
gtgcaagaacgatattggt

SEQ ID NO: 251375 - DNA, 19 bp, Homo sapiens
  siRNA target sequence for SEMA5A (NM_003966.1,1479-1497).
ctggggaagtcccctttta

SEQ ID NO: 251376 - DNA, 19 bp, Homo sapiens
  siRNA target sequence for SEMA5A (NM_003966.1,1482-1500).
gggaagtccccttttacta

SEQ ID NO: 251377 - DNA, 19 bp, Homo sapiens
  siRNA target sequence for SEMA5A (NM_003966.1,1490-1508).
cccttttactacaacgaat

SEQ ID NO: 251378 - DNA, 19 bp, Homo sapiens
  siRNA target sequence for SEMA5A (NM_003966.1,1491-1509).
ccttttactacaacgaatt

SEQ ID NO: 251379 - DNA, 19 bp, Homo sapiens
  siRNA target sequence for SEMA5A (NM_003966.1,1880-1898).
gcgctcgtccacatcatct

SEQ ID NO: 251380 - DNA, 19 bp, Homo sapiens
  siRNA target sequence for SEMA5A (NM_003966.1,1881-1899).
cgctcgtccacatcatcta

SEQ ID NO: 251381 - DNA, 19 bp, Homo sapiens
  siRNA target sequence for SEMA5A (NM_003966.1,1882-1900).
gctcgtccacatcatctat

SEQ ID NO: 251382 - DNA, 19 bp, Homo sapiens
  siRNA target sequence for SEMA5A (NM_003966.1,1883-1901).
ctcgtccacatcatctatt

SEQ ID NO: 251383 - DNA, 19 bp, Homo sapiens
  siRNA target sequence for SEMA5A (NM_003966.1,1910-1928).
gattacggaaccattaaga

SEQ ID NO: 251384 - DNA, 19 bp, Homo sapiens
  siRNA target sequence for SEMA5A (NM_003966.1,1934-1952).
cgggtacccctgaatcaga

SEQ ID NO: 251385 - DNA, 19 bp, Homo sapiens
  siRNA target sequence for SEMA5A (NM_003966.1,2154-2172).
gggatgtggtaatgaagaa

SEQ ID NO: 251386 - DNA, 19 bp, Homo sapiens
  siRNA target sequence for SEMA5A (NM_003966.1,2546-2564).
cagaaccgcgaggaaagat

SEQ ID NO: 251387 - DNA, 19 bp, Homo sapiens
  siRNA target sequence for SEMA5A (NM_003966.1,2815-2833).
gcaacgattccgatacaca

SEQ ID NO: 251388 - DNA, 19 bp, Homo sapiens
  siRNA target sequence for SEMA5A (NM_003966.1,2816-2834).
caacgattccgatacacat

SEQ ID NO: 251389 - DNA, 19 bp, Homo sapiens
  siRNA target sequence for SEMA5A (NM_003966.1,2844-2862).
gcctggctgatccgaattt

SEQ ID NO: 251390 - DNA, 19 bp, Homo sapiens
  siRNA target sequence for SEMA5A (NM_003966.1,2888-2906).
gaaatgcggtactgttcta

SEQ ID NO: 251391 - DNA, 19 bp, Homo sapiens
  siRNA target sequence for SEMA5A (NM_003966.1,3178-3196).
gtccccctggacaaaatgt

SEQ ID NO: 251392 - DNA, 19 bp, Homo sapiens
  siRNA target sequence for SEMA5A (NM_003966.1,3453-3471).
cgtgtgtgtttgactctaa

SEQ ID NO: 251393 - DNA, 19 bp, Homo sapiens
  siRNA target sequence for SEMA5A (NM_003966.1,3458-3476).
gtgtttgactctaatttca

SEQ ID NO: 251394 - DNA, 19 bp, Homo sapiens
  siRNA target sequence for SEMA5A (NM_003966.1,3498-3516).
gatccagtagcgtagaaga

SEQ ID NO: 251395 - DNA, 19 bp, Homo sapiens
  siRNA target sequence for SEMA5A (NM_003966.1,3522-3540).
ggtgtggagagttcaacat

SEQ ID NO: 251396 - DNA, 19 bp, Homo sapiens
  siRNA target sequence for SEMA5A (NM_003966.1,3590-3608).
ctcaccctgctcgtctata

SEQ ID NO: 251397 - DNA, 19 bp, Homo sapiens
  siRNA target sequence for SEMA5A (NM_003966.1,3594-3612).
ccctgctcgtctatactta

SEQ ID NO: 251398 - DNA, 19 bp, Homo sapiens
  siRNA target sequence for SEMA5A (NM_003966.1,3596-3614).
ctgctcgtctatacttact

SEQ ID NO: 251399 - DNA, 19 bp, Homo sapiens
  siRNA target sequence for SEMA5A (NM_003966.1,3826-3844).
ctactttacagatctcaat

SEQ ID NO: 251400 - DNA, 19 bp, Homo sapiens
  siRNA target sequence for SEMA5B (NM_018987.1,531-549).
cagccgtgggtctctaact

SEQ ID NO: 251401 - DNA, 19 bp, Homo sapiens
  siRNA target sequence for SEMA5B (NM_018987.1,839-857).
gaacctcagccggactatt

SEQ ID NO: 251402 - DNA, 19 bp, Homo sapiens
  siRNA target sequence for SEMA5B (NM_018987.1,847-865).
gccggactattgagaagat

SEQ ID NO: 251403 - DNA, 19 bp, Homo sapiens
  siRNA target sequence for SEMA5B (NM_018987.1,1010-1028).
gcttcgcactgcccaatat

SEQ ID NO: 251404 - DNA, 19 bp, Homo sapiens
  siRNA target sequence for SEMA5B (NM_018987.1,1011-1029).
cttcgcactgcccaatata

SEQ ID NO: 251405 - DNA, 19 bp, Homo sapiens
  siRNA target sequence for SEMA5B (NM_018987.1,1014-1032).
cgcactgcccaatataact

SEQ ID NO: 251406 - DNA, 19 bp, Homo sapiens
  siRNA target sequence for SEMA5B (NM_018987.1,1058-1076).
cgtggcagcctatgatatt

SEQ ID NO: 251407 - DNA, 19 bp, Homo sapiens
  siRNA target sequence for SEMA5B (NM_018987.1,1295-1313).
ggagcaggacctcatctat

SEQ ID NO: 251408 - DNA, 19 bp, Homo sapiens
  siRNA target sequence for SEMA5B (NM_018987.1,1317-1335).
gttttcacaaccaacgtaa

SEQ ID NO: 251409 - DNA, 19 bp, Homo sapiens
  siRNA target sequence for SEMA5B (NM_018987.1,1629-1647).
ctggtgcaggctaaagaca

SEQ ID NO: 251410 - DNA, 19 bp, Homo sapiens
  siRNA target sequence for SEMA5B (NM_018987.1,1648-1666).
cgctctaccatgtactcta

SEQ ID NO: 251411 - DNA, 19 bp, Homo sapiens
  siRNA target sequence for SEMA5B (NM_018987.1,2100-2118).
cgagctcgatcctgtgatt

SEQ ID NO: 251412 - DNA, 19 bp, Homo sapiens
  siRNA target sequence for SEMA5B (NM_018987.1,2319-2337).
cgggaggaacggttctgta

SEQ ID NO: 251413 - DNA, 19 bp, Homo sapiens
  siRNA target sequence for SEMA5B (NM_018987.1,2320-2338).
gggaggaacggttctgtaa

SEQ ID NO: 251414 - DNA, 19 bp, Homo sapiens
  siRNA target sequence for SEMA5B (NM_018987.1,2321-2339).
ggaggaacggttctgtaat

SEQ ID NO: 251415 - DNA, 19 bp, Homo sapiens
  siRNA target sequence for SEMA5B (NM_018987.1,2325-2343).
gaacggttctgtaatgaga

SEQ ID NO: 251416 - DNA, 19 bp, Homo sapiens
  siRNA target sequence for SEMA5B (NM_018987.1,2969-2987).
ctgtggtgggggtcactat

SEQ ID NO: 251417 - DNA, 19 bp, Homo sapiens
  siRNA target sequence for SEMA5B (NM_018987.1,2971-2989).
gtggtgggggtcactatca

SEQ ID NO: 251418 - DNA, 19 bp, Homo sapiens
  siRNA target sequence for SEMA5B (NM_018987.1,3269-3287).
caccgactgtgcaggtaaa

SEQ ID NO: 251419 - DNA, 19 bp, Homo sapiens
  siRNA target sequence for SEMA5B (NM_018987.1,3272-3290).
cgactgtgcaggtaaaaga

SEQ ID NO: 251420 - DNA, 19 bp, Homo sapiens
  siRNA target sequence for SEMA5B (NM_018987.1,3408-3426).
gagatgggttcaatctcat

SEQ ID NO: 251421 - DNA, 19 bp, Homo sapiens
  siRNA target sequence for SH120 (NM_016334.1,777-795).
caggtttctggggaatgat

SEQ ID NO: 251422 - DNA, 19 bp, Homo sapiens
  siRNA target sequence for SH120 (NM_016334.1,784-802).
ctggggaatgataaaaagt

SEQ ID NO: 251423 - DNA, 19 bp, Homo sapiens
  siRNA target sequence for SLAMF6 (NM_052931.3,128-146).
gcagcttaaccccattgat

SEQ ID NO: 251424 - DNA, 19 bp, Homo sapiens
  siRNA target sequence for SLAMF6 (NM_052931.3,200-218).
gagagaaggtcaacttcat

SEQ ID NO: 251425 - DNA, 19 bp, Homo sapiens
  siRNA target sequence for SLAMF6 (NM_052931.3,225-243).
gcttttcaatgaaacatct

SEQ ID NO: 251426 - DNA, 19 bp, Homo sapiens
  siRNA target sequence for SLAMF6 (NM_052931.3,256-274).
gtaccccatgaaaccaaaa

SEQ ID NO: 251427 - DNA, 19 bp, Homo sapiens
  siRNA target sequence for SLAMF6 (NM_052931.3,269-287).
ccaaaagtccagaaatcca

SEQ ID NO: 251428 - DNA, 19 bp, Homo sapiens
  siRNA target sequence for SLAMF6 (NM_052931.3,278-296).
cagaaatccacgtgactaa

SEQ ID NO: 251429 - DNA, 19 bp, Homo sapiens
  siRNA target sequence for SLAMF6 (NM_052931.3,307-325).
ggaaagcgactgaacttca

SEQ ID NO: 251430 - DNA, 19 bp, Homo sapiens
  siRNA target sequence for SLAMF6 (NM_052931.3,426-444).
cactctgaggatattaaga

SEQ ID NO: 251431 - DNA, 19 bp, Homo sapiens
  siRNA target sequence for SLAMF6 (NM_052931.3,428-446).
ctctgaggatattaagaca

SEQ ID NO: 251432 - DNA, 19 bp, Homo sapiens
  siRNA target sequence for SLAMF6 (NM_052931.3,443-461).
gacaactgaggaacataca

SEQ ID NO: 251433 - DNA, 19 bp, Homo sapiens
  siRNA target sequence for SLAMF6 (NM_052931.3,467-485).
ccaatcacagtcagctatt

SEQ ID NO: 251434 - DNA, 19 bp, Homo sapiens
  siRNA target sequence for SLAMF6 (NM_052931.3,538-556).
gacaatgtctcattcagat

SEQ ID NO: 251435 - DNA, 19 bp, Homo sapiens
  siRNA target sequence for SLAMF6 (NM_052931.3,658-676).
gctgtcagtaatttatcct

SEQ ID NO: 251436 - DNA, 19 bp, Homo sapiens
  siRNA target sequence for SLAMF6 (NM_052931.3,697-715).
ctttgcgaagatgttaaaa

SEQ ID NO: 251437 - DNA, 19 bp, Homo sapiens
  siRNA target sequence for SLAMF6 (NM_052931.3,764-782).
gcatagtcttcggtttcat

SEQ ID NO: 251438 - DNA, 19 bp, Homo sapiens
  siRNA target sequence for SLAMF6 (NM_052931.3,783-801).
catactgctgttacttgtt

SEQ ID NO: 251439 - DNA, 19 bp, Homo sapiens
  siRNA target sequence for SLAMF6 (NM_052931.3,817-835).
gattccctatctttgtcta

SEQ ID NO: 251440 - DNA, 19 bp, Homo sapiens
  siRNA target sequence for SLAMF6 (NM_052931.3,860-878).
ccgcaaggaacctagagta

SEQ ID NO: 251441 - DNA, 19 bp, Homo sapiens
  siRNA target sequence for SLAMF6 (NM_052931.3,861-879).
cgcaaggaacctagagtat

SEQ ID NO: 251442 - DNA, 19 bp, Homo sapiens
  siRNA target sequence for SLAMF6 (NM_052931.3,863-881).
caaggaacctagagtatgt

SEQ ID NO: 251443 - DNA, 19 bp, Homo sapiens
  siRNA target sequence for SLAMF6 (NM_052931.3,886-904).
gtgtctccaacgaacaaca

SEQ ID NO: 251444 - DNA, 19 bp, Homo sapiens
  siRNA target sequence for SLAMF6 (NM_052931.3,948-966).
ctggacacctagagaaaat

SEQ ID NO: 251445 - DNA, 19 bp, Homo sapiens
  siRNA target sequence for SLAMF6 (NM_052931.3,967-985).
gatactatcacaatttact

SEQ ID NO: 251446 - DNA, 19 bp, Homo sapiens
  siRNA target sequence for SLAMF6 (NM_052931.3,975-993).
cacaatttactccacaatt

SEQ ID NO: 251447 - DNA, 19 bp, Homo sapiens
  siRNA target sequence for SLAMF6 (NM_052931.3,1028-1046).
gggcaactgcccttgacaa

SEQ ID NO: 251448 - DNA, 19 bp, Homo sapiens
  siRNA target sequence for SLAMF7 (NM_021181.3,35-53).
gcctcaccctcatctatat

SEQ ID NO: 251449 - DNA, 19 bp, Homo sapiens
  siRNA target sequence for SLAMF7 (NM_021181.3,132-150).
ccccctgaagtccaaagta

SEQ ID NO: 251450 - DNA, 19 bp, Homo sapiens
  siRNA target sequence for SLAMF7 (NM_021181.3,133-151).
cccctgaagtccaaagtaa

SEQ ID NO: 251451 - DNA, 19 bp, Homo sapiens
  siRNA target sequence for SLAMF7 (NM_021181.3,134-152).
ccctgaagtccaaagtaaa

SEQ ID NO: 251452 - DNA, 19 bp, Homo sapiens
  siRNA target sequence for SLAMF7 (NM_021181.3,143-161).
ccaaagtaaagcaagttga

SEQ ID NO: 251453 - DNA, 19 bp, Homo sapiens
  siRNA target sequence for SLAMF7 (NM_021181.3,154-172).
caagttgactctattgtct

SEQ ID NO: 251454 - DNA, 19 bp, Homo sapiens
  siRNA target sequence for SLAMF7 (NM_021181.3,169-187).
gtctggaccttcaacacaa

SEQ ID NO: 251455 - DNA, 19 bp, Homo sapiens
  siRNA target sequence for SLAMF7 (NM_021181.3,209-227).
cagaagggggcactatcat

SEQ ID NO: 251456 - DNA, 19 bp, Homo sapiens
  siRNA target sequence for SLAMF7 (NM_021181.3,214-232).
gggggcactatcatagtga

SEQ ID NO: 251457 - DNA, 19 bp, Homo sapiens
  siRNA target sequence for SLAMF7 (NM_021181.3,225-243).
catagtgacccaaaatcgt

SEQ ID NO: 251458 - DNA, 19 bp, Homo sapiens
  siRNA target sequence for SLAMF7 (NM_021181.3,229-247).
gtgacccaaaatcgtaata

SEQ ID NO: 251459 - DNA, 19 bp, Homo sapiens
  siRNA target sequence for SLAMF7 (NM_021181.3,422-440).
gtctgcagagcaataagaa

SEQ ID NO: 251460 - DNA, 19 bp, Homo sapiens
  siRNA target sequence for SLAMF7 (NM_021181.3,566-584).
ggagatggggagaaagtga

SEQ ID NO: 251461 - DNA, 19 bp, Homo sapiens
  siRNA target sequence for SLAMF7 (NM_021181.3,616-634).
gtcagcagaaacttctcaa

SEQ ID NO: 251462 - DNA, 19 bp, Homo sapiens
  siRNA target sequence for SLAMF7 (NM_021181.3,723-741).
cctgctcagtctctttgta

SEQ ID NO: 251463 - DNA, 19 bp, Homo sapiens
  siRNA target sequence for SLAMF7 (NM_021181.3,744-762).
ggggctatttctttggttt

SEQ ID NO: 251464 - DNA, 19 bp, Homo sapiens
  siRNA target sequence for SLAMF7 (NM_021181.3,818-836).
gtcgggaaactcctaacat

SEQ ID NO: 251465 - DNA, 19 bp, Homo sapiens
  siRNA target sequence for SLAMF7 (NM_021181.3,820-838).
cgggaaactcctaacatat

SEQ ID NO: 251466 - DNA, 19 bp, Homo sapiens
  siRNA target sequence for SLAMF7 (NM_021181.3,876-894).
ccctcacactaatagaaca

SEQ ID NO: 251467 - DNA, 19 bp, Homo sapiens
  siRNA target sequence for SLAMF7 (NM_021181.3,877-895).
cctcacactaatagaacaa

SEQ ID NO: 251468 - DNA, 19 bp, Homo sapiens
  siRNA target sequence for SLAMF7 (NM_021181.3,882-900).
cactaatagaacaatccta

SEQ ID NO: 251469 - DNA, 19 bp, Homo sapiens
  siRNA target sequence for SLAMF7 (NM_021181.3,884-902).
ctaatagaacaatcctaaa

SEQ ID NO: 251470 - DNA, 19 bp, Homo sapiens
  siRNA target sequence for SLAMF7 (NM_021181.3,910-928).
ccagcaaatacggtttact

SEQ ID NO: 251471 - DNA, 19 bp, Homo sapiens
  siRNA target sequence for SLAMF7 (NM_021181.3,995-1013).
ggctatttgcctatgagaa

SEQ ID NO: 251472 - DNA, 19 bp, Homo sapiens
  siRNA target sequence for SLC1A5 (NM_005628.1,882-900).
cgtctgctgcggatgatca

SEQ ID NO: 251473 - DNA, 19 bp, Homo sapiens
  siRNA target sequence for SLC1A5 (NM_005628.1,883-901).
gtctgctgcggatgatcat

SEQ ID NO: 251474 - DNA, 19 bp, Homo sapiens
  siRNA target sequence for SLC1A5 (NM_005628.1,979-997).
gggcgctgctctttttcct

SEQ ID NO: 251475 - DNA, 19 bp, Homo sapiens
  siRNA target sequence for SLC1A5 (NM_005628.1,1143-1161).
ctggatcttgcgagaaata

SEQ ID NO: 251476 - DNA, 19 bp, Homo sapiens
  siRNA target sequence for SLC1A5 (NM_005628.1,1146-1164).
gatcttgcgagaaatatct

SEQ ID NO: 251477 - DNA, 19 bp, Homo sapiens
  siRNA target sequence for SLC1A5 (NM_005628.1,1350-1368).
ctgcttatccgcttcttca

SEQ ID NO: 251478 - DNA, 19 bp, Homo sapiens
  siRNA target sequence for SLC1A5 (NM_005628.1,1654-1672).
ccacgctgccgctgatgat

SEQ ID NO: 251479 - DNA, 19 bp, Homo sapiens
  siRNA target sequence for SLC1A5 (NM_005628.1,1676-1694).
gtgcgtggaggagaataat

SEQ ID NO: 251480 - DNA, 19 bp, Homo sapiens
  siRNA target sequence for SLC1A5 (NM_005628.1,1932-1950).
ctcccggtcgaccatatct

SEQ ID NO: 251481 - DNA, 19 bp, Homo sapiens
  siRNA target sequence for SLC1A5 (NM_005628.1,1987-2005).
cctgtaccgtcctcaatgt

SEQ ID NO: 251482 - DNA, 19 bp, Homo sapiens
  siRNA target sequence for SLC1A5 (NM_005628.1,1988-2006).
ctgtaccgtcctcaatgta

SEQ ID NO: 251483 - DNA, 19 bp, Homo sapiens
  siRNA target sequence for SLC1A5 (NM_005628.1,1990-2008).
gtaccgtcctcaatgtaga

SEQ ID NO: 251484 - DNA, 19 bp, Homo sapiens
  siRNA target sequence for SLC1A5 (NM_005628.1,2024-2042).
ggcaggactcctccaaaat

SEQ ID NO: 251485 - DNA, 19 bp, Homo sapiens
  siRNA target sequence for SLC1A5 (NM_005628.1,2071-2089).
cagagcctgagttgataca

SEQ ID NO: 251486 - DNA, 19 bp, Homo sapiens
  siRNA target sequence for SLC20A1 (NM_005415.3,455-473).
gctgattaccagtactaca

SEQ ID NO: 251487 - DNA, 19 bp, Homo sapiens
  siRNA target sequence for SLC20A1 (NM_005415.3,495-513).
cctttggtggactacctat

SEQ ID NO: 251488 - DNA, 19 bp, Homo sapiens
  siRNA target sequence for SLC20A1 (NM_005415.3,525-543).
ctgggcttcattattgcat

SEQ ID NO: 251489 - DNA, 19 bp, Homo sapiens
  siRNA target sequence for SLC20A1 (NM_005415.3,557-575).
ctccgtgggagccaatgat

SEQ ID NO: 251490 - DNA, 19 bp, Homo sapiens
  siRNA target sequence for SLC20A1 (NM_005415.3,567-585).
gccaatgatgtagcaaatt

SEQ ID NO: 251491 - DNA, 19 bp, Homo sapiens
  siRNA target sequence for SLC20A1 (NM_005415.3,682-700).
ccaaagtgagcgaaaccat

SEQ ID NO: 251492 - DNA, 19 bp, Homo sapiens
  siRNA target sequence for SLC20A1 (NM_005415.3,760-778).
gctcagtcagtgctatgtt

SEQ ID NO: 251493 - DNA, 19 bp, Homo sapiens
  siRNA target sequence for SLC20A1 (NM_005415.3,794-812).
gcaactcgtggcttcgttt

SEQ ID NO: 251494 - DNA, 19 bp, Homo sapiens
  siRNA target sequence for SLC20A1 (NM_005415.3,795-813).
caactcgtggcttcgtttt

SEQ ID NO: 251495 - DNA, 19 bp, Homo sapiens
  siRNA target sequence for SLC20A1 (NM_005415.3,798-816).
ctcgtggcttcgtttttga

SEQ ID NO: 251496 - DNA, 19 bp, Homo sapiens
  siRNA target sequence for SLC20A1 (NM_005415.3,841-859).
gtattgttggtgcaactat

SEQ ID NO: 251497 - DNA, 19 bp, Homo sapiens
  siRNA target sequence for SLC20A1 (NM_005415.3,896-914).
caagtggtctgaactgata

SEQ ID NO: 251498 - DNA, 19 bp, Homo sapiens
  siRNA target sequence for SLC20A1 (NM_005415.3,1032-1050).
cgagctttgccagttttct

SEQ ID NO: 251499 - DNA, 19 bp, Homo sapiens
  siRNA target sequence for SLC20A1 (NM_005415.3,1033-1051).
gagctttgccagttttcta

SEQ ID NO: 251500 - DNA, 19 bp, Homo sapiens
  siRNA target sequence for SLC20A1 (NM_005415.3,1053-1071).
gcctgcacagttggaataa

SEQ ID NO: 251501 - DNA, 19 bp, Homo sapiens
  siRNA target sequence for SLC20A1 (NM_005415.3,1054-1072).
cctgcacagttggaataaa

SEQ ID NO: 251502 - DNA, 19 bp, Homo sapiens
  siRNA target sequence for SLC20A1 (NM_005415.3,1062-1080).
gttggaataaacctctttt

SEQ ID NO: 251503 - DNA, 19 bp, Homo sapiens
  siRNA target sequence for SLC20A1 (NM_005415.3,1101-1119).
ccgttgctgggctttgaca

SEQ ID NO: 251504 - DNA, 19 bp, Homo sapiens
  siRNA target sequence for SLC20A1 (NM_005415.3,1106-1124).
gctgggctttgacaaactt

SEQ ID NO: 251505 - DNA, 19 bp, Homo sapiens
  siRNA target sequence for SLC20A1 (NM_005415.3,1181-1199).
cgtctggttctttgtatgt

SEQ ID NO: 251506 - DNA, 19 bp, Homo sapiens
  siRNA target sequence for SLC20A1 (NM_005415.3,1221-1239).
gaacgagaaataaagtgta

SEQ ID NO: 251507 - DNA, 19 bp, Homo sapiens
  siRNA target sequence for SLC20A1 (NM_005415.3,1248-1266).
gaaagccccttaatggaaa

SEQ ID NO: 251508 - DNA, 19 bp, Homo sapiens
  siRNA target sequence for SLC20A1 (NM_005415.3,1390-1408).
gaacagtctcattcaaact

SEQ ID NO: 251509 - DNA, 19 bp, Homo sapiens
  siRNA target sequence for SLC20A1 (NM_005415.3,1464-1482).
gaggaaaccagcatagata

SEQ ID NO: 251510 - DNA, 19 bp, Homo sapiens
  siRNA target sequence for SLC20A1 (NM_005415.3,1539-1557).
gccgtcagcaaccaaataa

SEQ ID NO: 251511 - DNA, 19 bp, Homo sapiens
  siRNA target sequence for SLC20A1 (NM_005415.3,1581-1599).
cacaccgtgcataaggatt

SEQ ID NO: 251512 - DNA, 19 bp, Homo sapiens
  siRNA target sequence for SLC20A1 (NM_005415.3,1595-1613).
ggattccggcctgtacaaa

SEQ ID NO: 251513 - DNA, 19 bp, Homo sapiens
  siRNA target sequence for SLC20A1 (NM_005415.3,1616-1634).
gctactccataaattacat

SEQ ID NO: 251514 - DNA, 19 bp, Homo sapiens
  siRNA target sequence for SLC20A1 (NM_005415.3,1677-1695).
cccttaaggcgcaataata

SEQ ID NO: 251515 - DNA, 19 bp, Homo sapiens
  siRNA target sequence for SLC20A1 (NM_005415.3,1685-1703).
gcgcaataatagctatact

SEQ ID NO: 251516 - DNA, 19 bp, Homo sapiens
  siRNA target sequence for SLC20A1 (NM_005415.3,1686-1704).
cgcaataatagctatactt

SEQ ID NO: 251517 - DNA, 19 bp, Homo sapiens
  siRNA target sequence for SLC20A1 (NM_005415.3,1725-1743).
ggcatgcctctggattcat

SEQ ID NO: 251518 - DNA, 19 bp, Homo sapiens
  siRNA target sequence for SLC20A1 (NM_005415.3,1808-1826).
ctccaagaagcgaattcga

SEQ ID NO: 251519 - DNA, 19 bp, Homo sapiens
  siRNA target sequence for SLC20A1 (NM_005415.3,1810-1828).
ccaagaagcgaattcgaat

SEQ ID NO: 251520 - DNA, 19 bp, Homo sapiens
  siRNA target sequence for SLC20A1 (NM_005415.3,1830-1848).
gacagttacaccagttact

SEQ ID NO: 251521 - DNA, 19 bp, Homo sapiens
  siRNA target sequence for SLC20A1 (NM_005415.3,1939-1957).
gctctctagaagaatggta

SEQ ID NO: 251522 - DNA, 19 bp, Homo sapiens
  siRNA target sequence for SLC20A1 (NM_005415.3,2066-2084).
gcctctggttgctttatat

SEQ ID NO: 251523 - DNA, 19 bp, Homo sapiens
  siRNA target sequence for SLC20A1 (NM_005415.3,2128-2146).
caatatggcttctactcta

SEQ ID NO: 251524 - DNA, 19 bp, Homo sapiens
  siRNA target sequence for SLC20A1 (NM_005415.3,2233-2251).
cctctagtggcttcagtat

SEQ ID NO: 251525 - DNA, 19 bp, Homo sapiens
  siRNA target sequence for SLC20A1 (NM_005415.3,2234-2252).
ctctagtggcttcagtatt

SEQ ID NO: 251526 - DNA, 19 bp, Homo sapiens
  siRNA target sequence for SLC20A1 (NM_005415.3,2239-2257).
gtggcttcagtattgaact

SEQ ID NO: 251527 - DNA, 19 bp, Homo sapiens
  siRNA target sequence for SLC20A1 (NM_005415.3,2276-2294).
ggtgattgcatcaaatatt

SEQ ID NO: 251528 - DNA, 19 bp, Homo sapiens
  siRNA target sequence for SLC20A1 (NM_005415.3,2301-2319).
cccatcagtacaacacatt

SEQ ID NO: 251529 - DNA, 19 bp, Homo sapiens
  siRNA target sequence for SLC20A1 (NM_005415.3,2421-2439).
cccatttctggagttatca

SEQ ID NO: 251530 - DNA, 19 bp, Homo sapiens
  siRNA target sequence for SLC20A1 (NM_005415.3,2443-2461).
ctgccatcatggcaatctt

SEQ ID NO: 251531 - DNA, 19 bp, Homo sapiens
  siRNA target sequence for SLC20A1 (NM_005415.3,2455-2473).
caatcttcagatatgtcat

SEQ ID NO: 251532 - DNA, 19 bp, Homo sapiens
  siRNA target sequence for SLC20A1 (NM_005415.3,2464-2482).
gatatgtcatcctcagaat

SEQ ID NO: 251533 - DNA, 19 bp, Homo sapiens
  siRNA target sequence for SLC20A2 (NM_006749.3,501-519).
gaggcaggcatgcatttta

SEQ ID NO: 251534 - DNA, 19 bp, Homo sapiens
  siRNA target sequence for SLC20A2 (NM_006749.3,504-522).
gcaggcatgcattttagct

SEQ ID NO: 251535 - DNA, 19 bp, Homo sapiens
  siRNA target sequence for SLC20A2 (NM_006749.3,505-523).
caggcatgcattttagctt

SEQ ID NO: 251536 - DNA, 19 bp, Homo sapiens
  siRNA target sequence for SLC20A2 (NM_006749.3,509-527).
catgcattttagcttcaat

SEQ ID NO: 251537 - DNA, 19 bp, Homo sapiens
  siRNA target sequence for SLC20A2 (NM_006749.3,536-554).
ccaccggctccgtgttact

SEQ ID NO: 251538 - DNA, 19 bp, Homo sapiens
  siRNA target sequence for SLC20A2 (NM_006749.3,537-555).
caccggctccgtgttacta

SEQ ID NO: 251539 - DNA, 19 bp, Homo sapiens
  siRNA target sequence for SLC20A2 (NM_006749.3,549-567).
gttactaggcgccaaagta

SEQ ID NO: 251540 - DNA, 19 bp, Homo sapiens
  siRNA target sequence for SLC20A2 (NM_006749.3,560-578).
ccaaagtaggagaaaccat

SEQ ID NO: 251541 - DNA, 19 bp, Homo sapiens
  siRNA target sequence for SLC20A2 (NM_006749.3,571-589).
gaaaccattcgcaaaggta

SEQ ID NO: 251542 - DNA, 19 bp, Homo sapiens
  siRNA target sequence for SLC20A2 (NM_006749.3,575-593).
ccattcgcaaaggtatcat

SEQ ID NO: 251543 - DNA, 19 bp, Homo sapiens
  siRNA target sequence for SLC20A2 (NM_006749.3,628-646).
ctcatggctggggaagtta

SEQ ID NO: 251544 - DNA, 19 bp, Homo sapiens
  siRNA target sequence for SLC20A2 (NM_006749.3,667-685).
gtgtggcagctgattgctt

SEQ ID NO: 251545 - DNA, 19 bp, Homo sapiens
  siRNA target sequence for SLC20A2 (NM_006749.3,720-738).
cattgtgggttctactata

SEQ ID NO: 251546 - DNA, 19 bp, Homo sapiens
  siRNA target sequence for SLC20A2 (NM_006749.3,750-768).
ggtcgcaatcggtaccaaa

SEQ ID NO: 251547 - DNA, 19 bp, Homo sapiens
  siRNA target sequence for SLC20A2 (NM_006749.3,779-797).
ggatggagcttgtcaagat

SEQ ID NO: 251548 - DNA, 19 bp, Homo sapiens
  siRNA target sequence for SLC20A2 (NM_006749.3,780-798).
gatggagcttgtcaagatt

SEQ ID NO: 251549 - DNA, 19 bp, Homo sapiens
  siRNA target sequence for SLC20A2 (NM_006749.3,799-817).
gttgcttcttggtttatat

SEQ ID NO: 251550 - DNA, 19 bp, Homo sapiens
  siRNA target sequence for SLC20A2 (NM_006749.3,980-998).
cagtgctcggccttgttct

SEQ ID NO: 251551 - DNA, 19 bp, Homo sapiens
  siRNA target sequence for SLC20A2 (NM_006749.3,1037-1055).
ccctcctgttcgctttttt

SEQ ID NO: 251552 - DNA, 19 bp, Homo sapiens
  siRNA target sequence for SLC20A2 (NM_006749.3,1076-1094).
cgtggatgcggaggaaaat

SEQ ID NO: 251553 - DNA, 19 bp, Homo sapiens
  siRNA target sequence for SLC20A2 (NM_006749.3,1077-1095).
gtggatgcggaggaaaata

SEQ ID NO: 251554 - DNA, 19 bp, Homo sapiens
  siRNA target sequence for SLC20A2 (NM_006749.3,1080-1098).
gatgcggaggaaaataaca

SEQ ID NO: 251555 - DNA, 19 bp, Homo sapiens
  siRNA target sequence for SLC20A2 (NM_006749.3,1121-1139).
ctttatcacgagtatctga

SEQ ID NO: 251556 - DNA, 19 bp, Homo sapiens
  siRNA target sequence for SLC20A2 (NM_006749.3,1140-1158).
cgaaagcctcagtaaggtt

SEQ ID NO: 251557 - DNA, 19 bp, Homo sapiens
  siRNA target sequence for SLC20A2 (NM_006749.3,1193-1211).
caggtgccaaggctaatga

SEQ ID NO: 251558 - DNA, 19 bp, Homo sapiens
  siRNA target sequence for SLC20A2 (NM_006749.3,1402-1420).
cacaccgtgcacaaagact

SEQ ID NO: 251559 - DNA, 19 bp, Homo sapiens
  siRNA target sequence for SLC20A2 (NM_006749.3,1419-1437).
ctcggggctctacaaagat

SEQ ID NO: 251560 - DNA, 19 bp, Homo sapiens
  siRNA target sequence for SLC20A2 (NM_006749.3,1502-1520).
ggctgctgcgccgaaacaa

SEQ ID NO: 251561 - DNA, 19 bp, Homo sapiens
  siRNA target sequence for SLC20A2 (NM_006749.3,1510-1528).
cgccgaaacaacagttaca

SEQ ID NO: 251562 - DNA, 19 bp, Homo sapiens
  siRNA target sequence for SLC20A2 (NM_006749.3,1533-1551).
ctacaccgcagccatttgt

SEQ ID NO: 251563 - DNA, 19 bp, Homo sapiens
  siRNA target sequence for SLC20A2 (NM_006749.3,1664-1682).
gctactcgagctactgtaa

SEQ ID NO: 251564 - DNA, 19 bp, Homo sapiens
  siRNA target sequence for SLC20A2 (NM_006749.3,1878-1896).
cggcaatgacgtgagtaat

SEQ ID NO: 251565 - DNA, 19 bp, Homo sapiens
  siRNA target sequence for SLC20A2 (NM_006749.3,1912-1930).
gtagccttgtggctgattt

SEQ ID NO: 251566 - DNA, 19 bp, Homo sapiens
  siRNA target sequence for SLC20A2 (NM_006749.3,1967-1985).
ccgtctggctgctgtttta

SEQ ID NO: 251567 - DNA, 19 bp, Homo sapiens
  siRNA target sequence for SLC20A2 (NM_006749.3,1968-1986).
cgtctggctgctgttttat

SEQ ID NO: 251568 - DNA, 19 bp, Homo sapiens
  siRNA target sequence for SLC20A2 (NM_006749.3,2218-2236).
cgcctctttcggaacatct

SEQ ID NO: 251569 - DNA, 19 bp, Homo sapiens
  siRNA target sequence for SLC20A2 (NM_006749.3,2219-2237).
gcctctttcggaacatctt

SEQ ID NO: 251570 - DNA, 19 bp, Homo sapiens
  siRNA target sequence for SLC20A2 (NM_006749.3,2289-2307).
catggctcttctcatgtat

SEQ ID NO: 251571 - DNA, 19 bp, Homo sapiens
  siRNA target sequence for SPAP1 (NM_030764.2,138-156).
gagacagcatcgttctgaa

SEQ ID NO: 251572 - DNA, 19 bp, Homo sapiens
  siRNA target sequence for SPAP1 (NM_030764.2,194-212).
gcttaccataaggataaca

SEQ ID NO: 251573 - DNA, 19 bp, Homo sapiens
  siRNA target sequence for SPAP1 (NM_030764.2,195-213).
cttaccataaggataacaa

SEQ ID NO: 251574 - DNA, 19 bp, Homo sapiens
  siRNA target sequence for SPAP1 (NM_030764.2,200-218).
cataaggataacaaagagt

SEQ ID NO: 251575 - DNA, 19 bp, Homo sapiens
  siRNA target sequence for SPAP1 (NM_030764.2,270-288).
gtgacagtggtaactattt

SEQ ID NO: 251576 - DNA, 19 bp, Homo sapiens
  siRNA target sequence for SPAP1 (NM_030764.2,283-301).
ctatttctgtagtaccaaa

SEQ ID NO: 251577 - DNA, 19 bp, Homo sapiens
  siRNA target sequence for SPAP1 (NM_030764.2,297-315).
ccaaaggacaactctttct

SEQ ID NO: 251578 - DNA, 19 bp, Homo sapiens
  siRNA target sequence for SPAP1 (NM_030764.2,310-328).
ctttctctgggataaaact

SEQ ID NO: 251579 - DNA, 19 bp, Homo sapiens
  siRNA target sequence for SPAP1 (NM_030764.2,314-332).
ctctgggataaaacttcaa

SEQ ID NO: 251580 - DNA, 19 bp, Homo sapiens
  siRNA target sequence for SPAP1 (NM_030764.2,447-465).
cacagaggttggatgttca

SEQ ID NO: 251581 - DNA, 19 bp, Homo sapiens
  siRNA target sequence for SPAP1 (NM_030764.2,738-756).
gtacaggaaatgtcacatt

SEQ ID NO: 251582 - DNA, 19 bp, Homo sapiens
  siRNA target sequence for SPAP1 (NM_030764.2,847-865).
gagtgatgccggcaaatat

SEQ ID NO: 251583 - DNA, 19 bp, Homo sapiens
  siRNA target sequence for SPAP1 (NM_030764.2,849-867).
gtgatgccggcaaatatta

SEQ ID NO: 251584 - DNA, 19 bp, Homo sapiens
  siRNA target sequence for SPAP1 (NM_030764.2,851-869).
gatgccggcaaatattact

SEQ ID NO: 251585 - DNA, 19 bp, Homo sapiens
  siRNA target sequence for SPAP1 (NM_030764.2,854-872).
gccggcaaatattactgta

SEQ ID NO: 251586 - DNA, 19 bp, Homo sapiens
  siRNA target sequence for SPAP1 (NM_030764.2,1029-1047).
ccccaatcttgtaccaatt

SEQ ID NO: 251587 - DNA, 19 bp, Homo sapiens
  siRNA target sequence for SPAP1 (NM_030764.2,1030-1048).
cccaatcttgtaccaattt

SEQ ID NO: 251588 - DNA, 19 bp, Homo sapiens
  siRNA target sequence for SPAP1 (NM_030764.2,1208-1226).
ggacctgatggctatagaa

SEQ ID NO: 251589 - DNA, 19 bp, Homo sapiens
  siRNA target sequence for SPAP1 (NM_030764.2,1306-1324).
cttgttccacaagatatca

SEQ ID NO: 251590 - DNA, 19 bp, Homo sapiens
  siRNA target sequence for SPAP1 (NM_030764.2,1373-1391).
cctcaagagttcacctatt

SEQ ID NO: 251591 - DNA, 19 bp, Homo sapiens
  siRNA target sequence for SPAP1 (NM_030764.2,1376-1394).
caagagttcacctattcaa

SEQ ID NO: 251592 - DNA, 19 bp, Homo sapiens
  siRNA target sequence for SPAP1 (NM_030764.2,1418-1436).
ctgcagccagtgtatgtca

SEQ ID NO: 251593 - DNA, 19 bp, Homo sapiens
  siRNA target sequence for SPAP1 (NM_030764.2,1435-1453).
caatgtgggctctgtagat

SEQ ID NO: 251594 - DNA, 19 bp, Homo sapiens
  siRNA target sequence for SPAP1 (NM_030764.2,1535-1553).
gactcccaagtcatctact

SEQ ID NO: 251595 - DNA, 19 bp, Homo sapiens
  siRNA target sequence for SPAP1 (NM_138738.1,365-383).
gggagtttgtgaatctatt

SEQ ID NO: 251596 - DNA, 19 bp, Homo sapiens
  siRNA target sequence for SPAP1 (NM_138738.1,367-385).
gagtttgtgaatctattga

SEQ ID NO: 251597 - DNA, 19 bp, Homo sapiens
  siRNA target sequence for TGFBRAP1 (NM_004257.3,128-146).
caaggagcgcgtcaacata

SEQ ID NO: 251598 - DNA, 19 bp, Homo sapiens
  siRNA target sequence for TGFBRAP1 (NM_004257.3,132-150).
gagcgcgtcaacatagagt

SEQ ID NO: 251599 - DNA, 19 bp, Homo sapiens
  siRNA target sequence for TGFBRAP1 (NM_004257.3,461-479).
ccccttctgtgtagaagtt

SEQ ID NO: 251600 - DNA, 19 bp, Homo sapiens
  siRNA target sequence for TGFBRAP1 (NM_004257.3,471-489).
gtagaagtttgcatcatct

SEQ ID NO: 251601 - DNA, 19 bp, Homo sapiens
  siRNA target sequence for TGFBRAP1 (NM_004257.3,800-818).
ctggtcggagaatgtgatt

SEQ ID NO: 251602 - DNA, 19 bp, Homo sapiens
  siRNA target sequence for TGFBRAP1 (NM_004257.3,849-867).
gcgctcgatgacgaattca

SEQ ID NO: 251603 - DNA, 19 bp, Homo sapiens
  siRNA target sequence for TGFBRAP1 (NM_004257.3,850-868).
cgctcgatgacgaattcat

SEQ ID NO: 251604 - DNA, 19 bp, Homo sapiens
  siRNA target sequence for TGFBRAP1 (NM_004257.3,852-870).
ctcgatgacgaattcatca

SEQ ID NO: 251605 - DNA, 19 bp, Homo sapiens
  siRNA target sequence for TGFBRAP1 (NM_004257.3,954-972).
gtgatcgttgccacaagta

SEQ ID NO: 251606 - DNA, 19 bp, Homo sapiens
  siRNA target sequence for TGFBRAP1 (NM_004257.3,956-974).
gatcgttgccacaagtaaa

SEQ ID NO: 251607 - DNA, 19 bp, Homo sapiens
  siRNA target sequence for TGFBRAP1 (NM_004257.3,959-977).
cgttgccacaagtaaagga

SEQ ID NO: 251608 - DNA, 19 bp, Homo sapiens
  siRNA target sequence for TGFBRAP1 (NM_004257.3,983-1001).
catcttggttccattacct

SEQ ID NO: 251609 - DNA, 19 bp, Homo sapiens
  siRNA target sequence for TGFBRAP1 (NM_004257.3,1124-1142).
gcagcaggcgggatttata

SEQ ID NO: 251610 - DNA, 19 bp, Homo sapiens
  siRNA target sequence for TGFBRAP1 (NM_004257.3,1128-1146).
caggcgggatttatacagt

SEQ ID NO: 251611 - DNA, 19 bp, Homo sapiens
  siRNA target sequence for TGFBRAP1 (NM_004257.3,1501-1519).
gtgctgcctggctagagaa

SEQ ID NO: 251612 - DNA, 19 bp, Homo sapiens
  siRNA target sequence for TGFBRAP1 (NM_004257.3,1520-1538).
gcacaaaaagtattttgca

SEQ ID NO: 251613 - DNA, 19 bp, Homo sapiens
  siRNA target sequence for TGFBRAP1 (NM_004257.3,1537-1555).
cacttggactgctctatca

SEQ ID NO: 251614 - DNA, 19 bp, Homo sapiens
  siRNA target sequence for TGFBRAP1 (NM_004257.3,1542-1560).
ggactgctctatcattata

SEQ ID NO: 251615 - DNA, 19 bp, Homo sapiens
  siRNA target sequence for TGFBRAP1 (NM_004257.3,1550-1568).
ctatcattataataaccaa

SEQ ID NO: 251616 - DNA, 19 bp, Homo sapiens
  siRNA target sequence for TGFBRAP1 (NM_004257.3,1627-1645).
cacgctcagacctgtatga

SEQ ID NO: 251617 - DNA, 19 bp, Homo sapiens
  siRNA target sequence for TGFBRAP1 (NM_004257.3,1629-1647).
cgctcagacctgtatgaat

SEQ ID NO: 251618 - DNA, 19 bp, Homo sapiens
  siRNA target sequence for TGFBRAP1 (NM_004257.3,1630-1648).
gctcagacctgtatgaata

SEQ ID NO: 251619 - DNA, 19 bp, Homo sapiens
  siRNA target sequence for TGFBRAP1 (NM_004257.3,1672-1690).
gcttagacgaggaactagt

SEQ ID NO: 251620 - DNA, 19 bp, Homo sapiens
  siRNA target sequence for TGFBRAP1 (NM_004257.3,1708-1726).
gggtcctgcagaaaagtga

SEQ ID NO: 251621 - DNA, 19 bp, Homo sapiens
  siRNA target sequence for TGFBRAP1 (NM_004257.3,1791-1809).
ccagacgacattatcaatt

SEQ ID NO: 251622 - DNA, 19 bp, Homo sapiens
  siRNA target sequence for TGFBRAP1 (NM_004257.3,1825-1843).
ctaaagcccttgtgaagta

SEQ ID NO: 251623 - DNA, 19 bp, Homo sapiens
  siRNA target sequence for TGFBRAP1 (NM_004257.3,2194-2212).
cccaccgccagcaactctt

SEQ ID NO: 251624 - DNA, 19 bp, Homo sapiens
  siRNA target sequence for TGFBRAP1 (NM_004257.3,2199-2217).
cgccagcaactctttcaca

SEQ ID NO: 251625 - DNA, 19 bp, Homo sapiens
  siRNA target sequence for TGFBRAP1 (NM_004257.3,2291-2309).
ccgccacgccaccgaattt

SEQ ID NO: 251626 - DNA, 19 bp, Homo sapiens
  siRNA target sequence for TGFBRAP1 (NM_004257.3,2435-2453).
ggccaggtccgaaaactta

SEQ ID NO: 251627 - DNA, 19 bp, Homo sapiens
  siRNA target sequence for TGFBRAP1 (NM_004257.3,2436-2454).
gccaggtccgaaaacttaa

SEQ ID NO: 251628 - DNA, 19 bp, Homo sapiens
  siRNA target sequence for TGFBRAP1 (NM_004257.3,2437-2455).
ccaggtccgaaaacttaat

SEQ ID NO: 251629 - DNA, 19 bp, Homo sapiens
  siRNA target sequence for TGFBRAP1 (NM_004257.3,2440-2458).
ggtccgaaaacttaatcta

SEQ ID NO: 251630 - DNA, 19 bp, Homo sapiens
  siRNA target sequence for TGFBRAP1 (NM_004257.3,2465-2483).
cgataagatgaagttgaaa

SEQ ID NO: 251631 - DNA, 19 bp, Homo sapiens
  siRNA target sequence for TGFBRAP1 (NM_004257.3,2507-2525).
caaaaagctttgtcagata

SEQ ID NO: 251632 - DNA, 19 bp, Homo sapiens
  siRNA target sequence for TIP47 (NM_005817.2,545-563).
gcggcgtggacaagacaaa

SEQ ID NO: 251633 - DNA, 19 bp, Homo sapiens
  siRNA target sequence for TIP47 (NM_005817.2,1326-1344).
ctttgcccctggaatcact

SEQ ID NO: 251634 - DNA, 19 bp, Homo sapiens
  siRNA target sequence for TNFRSF10D (NM_003840.2,428-446).
ctgctatgtacagtttgta

SEQ ID NO: 251635 - DNA, 19 bp, Homo sapiens
  siRNA target sequence for TNFRSF10D (NM_003840.2,512-530).
ggaagcttccaggataaaa

SEQ ID NO: 251636 - DNA, 19 bp, Homo sapiens
  siRNA target sequence for TNFRSF10D (NM_003840.2,544-562).
gtgccggacgtgtagaaca

SEQ ID NO: 251637 - DNA, 19 bp, Homo sapiens
  siRNA target sequence for TNFRSF10D (NM_003840.2,698-716).
cttgcctctccctatcact

SEQ ID NO: 251638 - DNA, 19 bp, Homo sapiens
  siRNA target sequence for TNFRSF10D (NM_003840.2,705-723).
ctccctatcactaccttat

SEQ ID NO: 251639 - DNA, 19 bp, Homo sapiens
  siRNA target sequence for TNFRSF10D (NM_003840.2,707-725).
ccctatcactaccttatca

SEQ ID NO: 251640 - DNA, 19 bp, Homo sapiens
  siRNA target sequence for TNFRSF10D (NM_003840.2,708-726).
cctatcactaccttatcat

SEQ ID NO: 251641 - DNA, 19 bp, Homo sapiens
  siRNA target sequence for TNFRSF10D (NM_003840.2,757-775).
ggttgtggttggcttttca

SEQ ID NO: 251642 - DNA, 19 bp, Homo sapiens
  siRNA target sequence for TNFRSF10D (NM_003840.2,758-776).
gttgtggttggcttttcat

SEQ ID NO: 251643 - DNA, 19 bp, Homo sapiens
  siRNA target sequence for TNFRSF10D (NM_003840.2,774-792).
catgtcggaagaaattcat

SEQ ID NO: 251644 - DNA, 19 bp, Homo sapiens
  siRNA target sequence for TNFRSF10D (NM_003840.2,779-797).
cggaagaaattcatttctt

SEQ ID NO: 251645 - DNA, 19 bp, Homo sapiens
  siRNA target sequence for TNFRSF10D (NM_003840.2,1184-1202).
ggctccgaaaagctctttt

SEQ ID NO: 251646 - DNA, 19 bp, Homo sapiens
  siRNA target sequence for TNFRSF10D (NM_003840.2,1185-1203).
gctccgaaaagctctttta

SEQ ID NO: 251647 - DNA, 19 bp, Homo sapiens
  siRNA target sequence for TNFRSF10D (NM_003840.2,1186-1204).
ctccgaaaagctcttttat

SEQ ID NO: 251648 - DNA, 19 bp, Homo sapiens
  siRNA target sequence for TNFRSF10D (NM_003840.2,1188-1206).
ccgaaaagctcttttatga

SEQ ID NO: 251649 - DNA, 19 bp, Homo sapiens
  siRNA target sequence for TNFRSF11A (NM_003839.2,139-157).
gtaccagtgagaagcatta

SEQ ID NO: 251650 - DNA, 19 bp, Homo sapiens
  siRNA target sequence for TNFRSF11A (NM_003839.2,168-186).
ggacggtgctgtaacaaat

SEQ ID NO: 251651 - DNA, 19 bp, Homo sapiens
  siRNA target sequence for TNFRSF11A (NM_003839.2,187-205).
gtgaaccaggaaagtacat

SEQ ID NO: 251652 - DNA, 19 bp, Homo sapiens
  siRNA target sequence for TNFRSF11A (NM_003839.2,296-314).
cttgctgcataaagtttgt

SEQ ID NO: 251653 - DNA, 19 bp, Homo sapiens
  siRNA target sequence for TNFRSF11A (NM_003839.2,300-318).
ctgcataaagtttgtgata

SEQ ID NO: 251654 - DNA, 19 bp, Homo sapiens
  siRNA target sequence for TNFRSF11A (NM_003839.2,302-320).
gcataaagtttgtgataca

SEQ ID NO: 251655 - DNA, 19 bp, Homo sapiens
  siRNA target sequence for TNFRSF11A (NM_003839.2,480-498).
gacacagtgtgcaaacctt

SEQ ID NO: 251656 - DNA, 19 bp, Homo sapiens
  siRNA target sequence for TNFRSF11A (NM_003839.2,663-681).
gtttacttgcccggtttaa

SEQ ID NO: 251657 - DNA, 19 bp, Homo sapiens
  siRNA target sequence for TNFRSF11A (NM_003839.2,668-686).
cttgcccggtttaataatt

SEQ ID NO: 251658 - DNA, 19 bp, Homo sapiens
  siRNA target sequence for TNFRSF11A (NM_003839.2,732-750).
ggcgtttgctataggaaaa

SEQ ID NO: 251659 - DNA, 19 bp, Homo sapiens
  siRNA target sequence for TNFRSF11A (NM_003839.2,759-777).
gcactcacagctaatttgt

SEQ ID NO: 251660 - DNA, 19 bp, Homo sapiens
  siRNA target sequence for TNFRSF11A (NM_003839.2,805-823).
gcctaagtggagataagga

SEQ ID NO: 251661 - DNA, 19 bp, Homo sapiens
  siRNA target sequence for TNFRSF11A (NM_003839.2,880-898).
catgtgaaggtgtcttact

SEQ ID NO: 251662 - DNA, 19 bp, Homo sapiens
  siRNA target sequence for TNFRSF11A (NM_003839.2,1104-1122).
cccacagaccagttactgt

SEQ ID NO: 251663 - DNA, 19 bp, Homo sapiens
  siRNA target sequence for TNFRSF11A (NM_003839.2,1178-1196).
gggggagaatgacagttta

SEQ ID NO: 251664 - DNA, 19 bp, Homo sapiens
  siRNA target sequence for TNFRSF11A (NM_003839.2,1179-1197).
ggggagaatgacagtttaa

SEQ ID NO: 251665 - DNA, 19 bp, Homo sapiens
  siRNA target sequence for TNFRSF11A (NM_003839.2,1291-1309).
ctgaaaactacttgcaaaa

SEQ ID NO: 251666 - DNA, 19 bp, Homo sapiens
  siRNA target sequence for TNFRSF11A (NM_003839.2,1418-1436).
cgtgggttccccaaaacgt

SEQ ID NO: 251667 - DNA, 19 bp, Homo sapiens
  siRNA target sequence for TNFRSF11A (NM_003839.2,1645-1663).
gcgggcaggtgatgaactt

SEQ ID NO: 251668 - DNA, 19 bp, Homo sapiens
  siRNA target sequence for TNFRSF11A (NM_003839.2,1647-1665).
gggcaggtgatgaacttca

SEQ ID NO: 251669 - DNA, 19 bp, Homo sapiens
  siRNA target sequence for TNFRSF12A (NM_016639.1,352-370).
cgcaggagagagaagttca

SEQ ID NO: 251670 - DNA, 19 bp, Homo sapiens
  siRNA target sequence for TNFRSF13B (NM_012452.2,91-109).
gacgggggtggctatgaga

SEQ ID NO: 251671 - DNA, 19 bp, Homo sapiens
  siRNA target sequence for TNFRSF13B (NM_012452.2,232-250).
ggagcaaggcaagttctat

SEQ ID NO: 251672 - DNA, 19 bp, Homo sapiens
  siRNA target sequence for TNFRSF13B (NM_012452.2,303-321).
ctaagcaatgtgcatactt

SEQ ID NO: 251673 - DNA, 19 bp, Homo sapiens
  siRNA target sequence for TNFRSF13B (NM_012452.2,376-394).
gcggagtggagaagttgaa

SEQ ID NO: 251674 - DNA, 19 bp, Homo sapiens
  siRNA target sequence for TNFRSF13B (NM_012452.2,377-395).
cggagtggagaagttgaaa

SEQ ID NO: 251675 - DNA, 19 bp, Homo sapiens
  siRNA target sequence for TNFRSF13B (NM_012452.2,411-429).
cgggaaggtaccaaggatt

SEQ ID NO: 251676 - DNA, 19 bp, Homo sapiens
  siRNA target sequence for TNFRSF17 (NM_001192.2,291-309).
caacttcgatgttcttcta

SEQ ID NO: 251677 - DNA, 19 bp, Homo sapiens
  siRNA target sequence for TNFRSF17 (NM_001192.2,321-339).
ctaacatgtcagcgttatt

SEQ ID NO: 251678 - DNA, 19 bp, Homo sapiens
  siRNA target sequence for TNFRSF17 (NM_001192.2,330-348).
cagcgttattgtaatgcaa

SEQ ID NO: 251679 - DNA, 19 bp, Homo sapiens
  siRNA target sequence for TNFRSF17 (NM_001192.2,346-364).
caagtgtgaccaattcagt

SEQ ID NO: 251680 - DNA, 19 bp, Homo sapiens
  siRNA target sequence for TNFRSF17 (NM_001192.2,369-387).
ggaacgaatgcgattctct

SEQ ID NO: 251681 - DNA, 19 bp, Homo sapiens
  siRNA target sequence for TNFRSF17 (NM_001192.2,423-441).
gcagttttcgtgctaatgt

SEQ ID NO: 251682 - DNA, 19 bp, Homo sapiens
  siRNA target sequence for TNFRSF17 (NM_001192.2,426-444).
gttttcgtgctaatgtttt

SEQ ID NO: 251683 - DNA, 19 bp, Homo sapiens
  siRNA target sequence for TNFRSF17 (NM_001192.2,432-450).
gtgctaatgtttttgctaa

SEQ ID NO: 251684 - DNA, 19 bp, Homo sapiens
  siRNA target sequence for TNFRSF17 (NM_001192.2,576-594).
gagtacacggtggaagaat

SEQ ID NO: 251685 - DNA, 19 bp, Homo sapiens
  siRNA target sequence for TNFRSF17 (NM_001192.2,632-650).
cgactctgaccattgcttt

SEQ ID NO: 251686 - DNA, 19 bp, Homo sapiens
  siRNA target sequence for TNFRSF17 (NM_001192.2,665-683).
ggaggaaggcgcaaccatt

SEQ ID NO: 251687 - DNA, 19 bp, Homo sapiens
  siRNA target sequence for TNFRSF17 (NM_001192.2,668-686).
ggaaggcgcaaccattctt

SEQ ID NO: 251688 - DNA, 19 bp, Homo sapiens
  siRNA target sequence for TNFRSF17 (NM_001192.2,684-702).
cttgtcaccacgaaaacga

SEQ ID NO: 251689 - DNA, 19 bp, Homo sapiens
  siRNA target sequence for TNFRSF17 (NM_001192.2,691-709).
ccacgaaaacgaatgacta

SEQ ID NO: 251690 - DNA, 19 bp, Homo sapiens
  siRNA target sequence for TNFRSF17 (NM_001192.2,692-710).
cacgaaaacgaatgactat

SEQ ID NO: 251691 - DNA, 19 bp, Homo sapiens
  siRNA target sequence for TNFRSF19L (NM_032871.3,354-372).
gggcagggcacattatgca

SEQ ID NO: 251692 - DNA, 19 bp, Homo sapiens
  siRNA target sequence for TNFRSF19L (NM_032871.3,1245-1263).
ggcgagatcaccatcttgt

SEQ ID NO: 251693 - DNA, 19 bp, Homo sapiens
  siRNA target sequence for TNFRSF19L (NM_032871.3,1274-1292).
gttccgcgtggctcgaatt

SEQ ID NO: 251694 - DNA, 19 bp, Homo sapiens
  siRNA target sequence for TNFRSF19L (NM_032871.3,1293-1311).
cctgagcagcggacaagtt

SEQ ID NO: 251695 - DNA, 19 bp, Homo sapiens
  siRNA target sequence for TNFRSF19L (NM_032871.3,1296-1314).
gagcagcggacaagttcaa

SEQ ID NO: 251696 - DNA, 19 bp, Homo sapiens
  siRNA target sequence for TNFRSF19L (NM_032871.3,1420-1438).
gtggcggaagccgtacaaa

SEQ ID NO: 251697 - DNA, 19 bp, Homo sapiens
  siRNA target sequence for TNFRSF19L (NM_032871.3,1422-1440).
ggcggaagccgtacaaagt

SEQ ID NO: 251698 - DNA, 19 bp, Homo sapiens
  siRNA target sequence for TNFRSF21 (NM_014452.3,566-584).
cagaaggcctcgaatctca

SEQ ID NO: 251699 - DNA, 19 bp, Homo sapiens
  siRNA target sequence for TNFRSF21 (NM_014452.3,588-606).
gcacataccgccatgttga

SEQ ID NO: 251700 - DNA, 19 bp, Homo sapiens
  siRNA target sequence for TNFRSF21 (NM_014452.3,768-786).
catgcccatggccaatgat

SEQ ID NO: 251701 - DNA, 19 bp, Homo sapiens
  siRNA target sequence for TNFRSF21 (NM_014452.3,1311-1329).
caaaccttcaggtagtcaa

SEQ ID NO: 251702 - DNA, 19 bp, Homo sapiens
  siRNA target sequence for TNFRSF21 (NM_014452.3,1440-1458).
ctagacagaacctacacaa

SEQ ID NO: 251703 - DNA, 19 bp, Homo sapiens
  siRNA target sequence for TNFRSF21 (NM_014452.3,1445-1463).
cagaacctacacaagcatt

SEQ ID NO: 251704 - DNA, 19 bp, Homo sapiens
  siRNA target sequence for TNFRSF21 (NM_014452.3,1488-1506).
ggatgattgtgcttttcct

SEQ ID NO: 251705 - DNA, 19 bp, Homo sapiens
  siRNA target sequence for TNFRSF21 (NM_014452.3,1551-1569).
gctcgaggactctgaaaaa

SEQ ID NO: 251706 - DNA, 19 bp, Homo sapiens
  siRNA target sequence for TNFRSF21 (NM_014452.3,1666-1684).
caatggccatggtatcgat

SEQ ID NO: 251707 - DNA, 19 bp, Homo sapiens
  siRNA target sequence for TNFRSF21 (NM_014452.3,1732-1750).
ctatcagtttctttgcaat

SEQ ID NO: 251708 - DNA, 19 bp, Homo sapiens
  siRNA target sequence for TNFRSF21 (NM_014452.3,1882-1900).
ccagcaccggagaaacgat

SEQ ID NO: 251709 - DNA, 19 bp, Homo sapiens
  siRNA target sequence for TNFRSF21 (NM_014452.3,1897-1915).
cgatgttgtggagaagatt

SEQ ID NO: 251710 - DNA, 19 bp, Homo sapiens
  siRNA target sequence for TNFRSF21 (NM_014452.3,2005-2023).
cagccccaacgcgaaactt

SEQ ID NO: 251711 - DNA, 19 bp, Homo sapiens
  siRNA target sequence for TNFRSF21 (NM_014452.3,2010-2028).
ccaacgcgaaacttgagaa

SEQ ID NO: 251712 - DNA, 19 bp, Homo sapiens
  siRNA target sequence for TNFRSF21 (NM_014452.3,2011-2029).
caacgcgaaacttgagaat

SEQ ID NO: 251713 - DNA, 19 bp, Homo sapiens
  siRNA target sequence for TNFRSF21 (NM_014452.3,2105-2123).
ctccgctgtgactctacat

SEQ ID NO: 251714 - DNA, 19 bp, Homo sapiens
  siRNA target sequence for TNFRSF21 (NM_014452.3,2143-2161).
gagcaggaacggttccttt

SEQ ID NO: 251715 - DNA, 19 bp, Homo sapiens
  siRNA target sequence for TNFRSF21 (NM_014452.3,2145-2163).
gcaggaacggttcctttat

SEQ ID NO: 251716 - DNA, 19 bp, Homo sapiens
  siRNA target sequence for TNFRSF21 (NM_014452.3,2237-2255).
gacatgctccactttctaa

SEQ ID NO: 251717 - DNA, 19 bp, Homo sapiens
  siRNA target sequence for TNFRSF21 (NM_014452.3,2239-2257).
catgctccactttctaaat

SEQ ID NO: 251718 - DNA, 19 bp, Homo sapiens
  siRNA target sequence for TNFRSF21 (NM_014452.3,2269-2287).
gcgggtgattgaagagatt

SEQ ID NO: 251719 - DNA, 19 bp, Homo sapiens
  siRNA target sequence for TNFRSF21 (NM_014452.3,2306-2324).
ctagaccggctattcgaaa

SEQ ID NO: 251720 - DNA, 19 bp, Homo sapiens
  siRNA target sequence for TNFRSF21 (NM_014452.3,2314-2332).
gctattcgaaattattgga

SEQ ID NO: 251721 - DNA, 19 bp, Homo sapiens
  siRNA target sequence for TNFRSF21 (NM_014452.3,2358-2376).
ccctcctggactctgttta

SEQ ID NO: 251722 - DNA, 19 bp, Homo sapiens
  siRNA target sequence for TNFRSF21 (NM_014452.3,2360-2378).
ctcctggactctgtttata

SEQ ID NO: 251723 - DNA, 19 bp, Homo sapiens
  siRNA target sequence for TNFRSF9 (NM_001561.4,133-151).
gaaacagctgttacaacat

SEQ ID NO: 251724 - DNA, 19 bp, Homo sapiens
  siRNA target sequence for TNFRSF9 (NM_001561.4,137-155).
cagctgttacaacatagta

SEQ ID NO: 251725 - DNA, 19 bp, Homo sapiens
  siRNA target sequence for TNFRSF9 (NM_001561.4,164-182).
gttgctggtcctcaacttt

SEQ ID NO: 251726 - DNA, 19 bp, Homo sapiens
  siRNA target sequence for TNFRSF9 (NM_001561.4,201-219).
caggatccttgtagtaact

SEQ ID NO: 251727 - DNA, 19 bp, Homo sapiens
  siRNA target sequence for TNFRSF9 (NM_001561.4,225-243).
gctggtacattctgtgata

SEQ ID NO: 251728 - DNA, 19 bp, Homo sapiens
  siRNA target sequence for TNFRSF9 (NM_001561.4,226-244).
ctggtacattctgtgataa

SEQ ID NO: 251729 - DNA, 19 bp, Homo sapiens
  siRNA target sequence for TNFRSF9 (NM_001561.4,267-285).
ccctgtcctccaaatagtt

SEQ ID NO: 251730 - DNA, 19 bp, Homo sapiens
  siRNA target sequence for TNFRSF9 (NM_001561.4,303-321).
caaaggacctgtgacatat

SEQ ID NO: 251731 - DNA, 19 bp, Homo sapiens
  siRNA target sequence for TNFRSF9 (NM_001561.4,325-343).
ggcagtgtaaaggtgtttt

SEQ ID NO: 251732 - DNA, 19 bp, Homo sapiens
  siRNA target sequence for TNFRSF9 (NM_001561.4,487-505).
gttgctttgggacatttaa

SEQ ID NO: 251733 - DNA, 19 bp, Homo sapiens
  siRNA target sequence for TNFRSF9 (NM_001561.4,490-508).
gctttgggacatttaacga

SEQ ID NO: 251734 - DNA, 19 bp, Homo sapiens
  siRNA target sequence for TNFRSF9 (NM_001561.4,491-509).
ctttgggacatttaacgat

SEQ ID NO: 251735 - DNA, 19 bp, Homo sapiens
  siRNA target sequence for TNFRSF9 (NM_001561.4,496-514).
ggacatttaacgatcagaa

SEQ ID NO: 251736 - DNA, 19 bp, Homo sapiens
  siRNA target sequence for TNFRSF9 (NM_001561.4,497-515).
gacatttaacgatcagaaa

SEQ ID NO: 251737 - DNA, 19 bp, Homo sapiens
  siRNA target sequence for TNFRSF9 (NM_001561.4,536-554).
gacaaactgttctttggat

SEQ ID NO: 251738 - DNA, 19 bp, Homo sapiens
  siRNA target sequence for TNFRSF9 (NM_001561.4,673-691).
gacactctccgcagatcat

SEQ ID NO: 251739 - DNA, 19 bp, Homo sapiens
  siRNA target sequence for TNFRSF9 (NM_001561.4,800-818).
caaacaaccatttatgaga

SEQ ID NO: 251740 - DNA, 19 bp, Homo sapiens
  siRNA target sequence for TNFRSF9 (NM_001561.4,848-866).
ctgtagctgccgatttcca

SEQ ID NO: 251741 - DNA, 19 bp, Homo sapiens
  siRNA target sequence for TNFRSF9 (NM_001561.4,854-872).
ctgccgatttccagaagaa

SEQ ID NO: 251742 - DNA, 19 bp, Homo sapiens
  siRNA target sequence for TNFRSF9 (NM_001561.4,857-875).
ccgatttccagaagaagaa

SEQ ID NO: 251743 - DNA, 19 bp, Homo sapiens
  siRNA target sequence for TNPO3 (NM_012470.1,140-158).
cagaccagttgttacagat

SEQ ID NO: 251744 - DNA, 19 bp, Homo sapiens
  siRNA target sequence for TNPO3 (NM_012470.1,166-184).
gatgtggagtcatgctatt

SEQ ID NO: 251745 - DNA, 19 bp, Homo sapiens
  siRNA target sequence for TNPO3 (NM_012470.1,251-269).
cctctttacgggactcatt

SEQ ID NO: 251746 - DNA, 19 bp, Homo sapiens
  siRNA target sequence for TNPO3 (NM_012470.1,266-284).
cattgctaacccatatcca

SEQ ID NO: 251747 - DNA, 19 bp, Homo sapiens
  siRNA target sequence for TNPO3 (NM_012470.1,275-293).
cccatatccagaacttgaa

SEQ ID NO: 251748 - DNA, 19 bp, Homo sapiens
  siRNA target sequence for TNPO3 (NM_012470.1,276-294).
ccatatccagaacttgaaa

SEQ ID NO: 251749 - DNA, 19 bp, Homo sapiens
  siRNA target sequence for TNPO3 (NM_012470.1,317-335).
cgcagctggctttagcaat

SEQ ID NO: 251750 - DNA, 19 bp, Homo sapiens
  siRNA target sequence for TNPO3 (NM_012470.1,318-336).
gcagctggctttagcaata

SEQ ID NO: 251751 - DNA, 19 bp, Homo sapiens
  siRNA target sequence for TNPO3 (NM_012470.1,321-339).
gctggctttagcaatagca

SEQ ID NO: 251752 - DNA, 19 bp, Homo sapiens
  siRNA target sequence for TNPO3 (NM_012470.1,463-481).
catagtcgttccttacgaa

SEQ ID NO: 251753 - DNA, 19 bp, Homo sapiens
  siRNA target sequence for TNPO3 (NM_012470.1,474-492).
cttacgaattggagctaat

SEQ ID NO: 251754 - DNA, 19 bp, Homo sapiens
  siRNA target sequence for TNPO3 (NM_012470.1,487-505).
gctaatcggcgcacagaaa

SEQ ID NO: 251755 - DNA, 19 bp, Homo sapiens
  siRNA target sequence for TNPO3 (NM_012470.1,494-512).
ggcgcacagaaattataga

SEQ ID NO: 251756 - DNA, 19 bp, Homo sapiens
  siRNA target sequence for TNPO3 (NM_012470.1,495-513).
gcgcacagaaattatagaa

SEQ ID NO: 251757 - DNA, 19 bp, Homo sapiens
  siRNA target sequence for TNPO3 (NM_012470.1,514-532).
gatttggccttctactcta

SEQ ID NO: 251758 - DNA, 19 bp, Homo sapiens
  siRNA target sequence for TNPO3 (NM_012470.1,522-540).
cttctactctagtacagta

SEQ ID NO: 251759 - DNA, 19 bp, Homo sapiens
  siRNA target sequence for TNPO3 (NM_012470.1,525-543).
ctactctagtacagtagta

SEQ ID NO: 251760 - DNA, 19 bp, Homo sapiens
  siRNA target sequence for TNPO3 (NM_012470.1,530-548).
ctagtacagtagtatctct

SEQ ID NO: 251761 - DNA, 19 bp, Homo sapiens
  siRNA target sequence for TNPO3 (NM_012470.1,533-551).
gtacagtagtatctctatt

SEQ ID NO: 251762 - DNA, 19 bp, Homo sapiens
  siRNA target sequence for TNPO3 (NM_012470.1,538-556).
gtagtatctctattgatga

SEQ ID NO: 251763 - DNA, 19 bp, Homo sapiens
  siRNA target sequence for TNPO3 (NM_012470.1,552-570).
gatgacctgtgtagaaaaa

SEQ ID NO: 251764 - DNA, 19 bp, Homo sapiens
  siRNA target sequence for TNPO3 (NM_012470.1,681-699).
cctttttgaggttttgcaa

SEQ ID NO: 251765 - DNA, 19 bp, Homo sapiens
  siRNA target sequence for TNPO3 (NM_012470.1,711-729).
ctcgtctaacctacatgaa

SEQ ID NO: 251766 - DNA, 19 bp, Homo sapiens
  siRNA target sequence for TNPO3 (NM_012470.1,730-748).
gctgcttcggactgtgtat

SEQ ID NO: 251767 - DNA, 19 bp, Homo sapiens
  siRNA target sequence for TNPO3 (NM_012470.1,754-772).
gctctctatgccattgaga

SEQ ID NO: 251768 - DNA, 19 bp, Homo sapiens
  siRNA target sequence for TNPO3 (NM_012470.1,791-809).
cattagccatgcaactttt

SEQ ID NO: 251769 - DNA, 19 bp, Homo sapiens
  siRNA target sequence for TNPO3 (NM_012470.1,846-864).
ggccgtggcacgtgaagat

SEQ ID NO: 251770 - DNA, 19 bp, Homo sapiens
  siRNA target sequence for TNPO3 (NM_012470.1,847-865).
gccgtggcacgtgaagatt

SEQ ID NO: 251771 - DNA, 19 bp, Homo sapiens
  siRNA target sequence for TNPO3 (NM_012470.1,848-866).
ccgtggcacgtgaagattt

SEQ ID NO: 251772 - DNA, 19 bp, Homo sapiens
  siRNA target sequence for TNPO3 (NM_012470.1,853-871).
gcacgtgaagatttagaca

SEQ ID NO: 251773 - DNA, 19 bp, Homo sapiens
  siRNA target sequence for TNPO3 (NM_012470.1,854-872).
cacgtgaagatttagacaa

SEQ ID NO: 251774 - DNA, 19 bp, Homo sapiens
  siRNA target sequence for TNPO3 (NM_012470.1,877-895).
ctgaattactgccgtattt

SEQ ID NO: 251775 - DNA, 19 bp, Homo sapiens
  siRNA target sequence for TNPO3 (NM_012470.1,888-906).
ccgtattttcactgaacta

SEQ ID NO: 251776 - DNA, 19 bp, Homo sapiens
  siRNA target sequence for TNPO3 (NM_012470.1,897-915).
cactgaactatgtgaaact

SEQ ID NO: 251777 - DNA, 19 bp, Homo sapiens
  siRNA target sequence for TNPO3 (NM_012470.1,989-1007).
gtgcaggccatcctcaata

SEQ ID NO: 251778 - DNA, 19 bp, Homo sapiens
  siRNA target sequence for TNPO3 (NM_012470.1,1003-1021).
caatatgaggtagtagaaa

SEQ ID NO: 251779 - DNA, 19 bp, Homo sapiens
  siRNA target sequence for TNPO3 (NM_012470.1,1042-1060).
cgactgggggaacatttgt

SEQ ID NO: 251780 - DNA, 19 bp, Homo sapiens
  siRNA target sequence for TNPO3 (NM_012470.1,1043-1061).
gactgggggaacatttgta

SEQ ID NO: 251781 - DNA, 19 bp, Homo sapiens
  siRNA target sequence for TNPO3 (NM_012470.1,1047-1065).
gggggaacatttgtacaaa

SEQ ID NO: 251782 - DNA, 19 bp, Homo sapiens
  siRNA target sequence for TNPO3 (NM_012470.1,1048-1066).
ggggaacatttgtacaaaa

SEQ ID NO: 251783 - DNA, 19 bp, Homo sapiens
  siRNA target sequence for TNPO3 (NM_012470.1,1062-1080).
caaaactaacgatgaagtt

SEQ ID NO: 251784 - DNA, 19 bp, Homo sapiens
  siRNA target sequence for TNPO3 (NM_012470.1,1067-1085).
ctaacgatgaagttattca

SEQ ID NO: 251785 - DNA, 19 bp, Homo sapiens
  siRNA target sequence for TNPO3 (NM_012470.1,1078-1096).
gttattcatggcatcttca

SEQ ID NO: 251786 - DNA, 19 bp, Homo sapiens
  siRNA target sequence for TNPO3 (NM_012470.1,1205-1223).
gggtatcagacctggtaaa

SEQ ID NO: 251787 - DNA, 19 bp, Homo sapiens
  siRNA target sequence for TNPO3 (NM_012470.1,1245-1263).
gtctatggagtgttttgct

SEQ ID NO: 251788 - DNA, 19 bp, Homo sapiens
  siRNA target sequence for TNPO3 (NM_012470.1,1251-1269).
ggagtgttttgctcagtta

SEQ ID NO: 251789 - DNA, 19 bp, Homo sapiens
  siRNA target sequence for TNPO3 (NM_012470.1,1266-1284).
gttatattctactctgaaa

SEQ ID NO: 251790 - DNA, 19 bp, Homo sapiens
  siRNA target sequence for TNPO3 (NM_012470.1,1308-1326).
gacagaagcggttctcttt

SEQ ID NO: 251791 - DNA, 19 bp, Homo sapiens
  siRNA target sequence for TNPO3 (NM_012470.1,1332-1350).
ggctgctatagcaaagagt

SEQ ID NO: 251792 - DNA, 19 bp, Homo sapiens
  siRNA target sequence for TNPO3 (NM_012470.1,1405-1423).
ctcccggagaccgtacata

SEQ ID NO: 251793 - DNA, 19 bp, Homo sapiens
  siRNA target sequence for TNPO3 (NM_012470.1,1431-1449).
gcgatacaccagcattgaa

SEQ ID NO: 251794 - DNA, 19 bp, Homo sapiens
  siRNA target sequence for TNPO3 (NM_012470.1,1432-1450).
cgatacaccagcattgaat

SEQ ID NO: 251795 - DNA, 19 bp, Homo sapiens
  siRNA target sequence for TNPO3 (NM_012470.1,1433-1451).
gatacaccagcattgaatt

SEQ ID NO: 251796 - DNA, 19 bp, Homo sapiens
  siRNA target sequence for TNPO3 (NM_012470.1,1437-1455).
caccagcattgaattggtt

SEQ ID NO: 251797 - DNA, 19 bp, Homo sapiens
  siRNA target sequence for TNPO3 (NM_012470.1,1501-1519).
cctgtgttgggctatttga

SEQ ID NO: 251798 - DNA, 19 bp, Homo sapiens
  siRNA target sequence for TNPO3 (NM_012470.1,1502-1520).
ctgtgttgggctatttgat

SEQ ID NO: 251799 - DNA, 19 bp, Homo sapiens
  siRNA target sequence for TNPO3 (NM_012470.1,1555-1573).
gcagccaaagccattcata

SEQ ID NO: 251800 - DNA, 19 bp, Homo sapiens
  siRNA target sequence for TNPO3 (NM_012470.1,1556-1574).
cagccaaagccattcataa

SEQ ID NO: 251801 - DNA, 19 bp, Homo sapiens
  siRNA target sequence for TNPO3 (NM_012470.1,1602-1620).
ggctcagcactttaatgga

SEQ ID NO: 251802 - DNA, 19 bp, Homo sapiens
  siRNA target sequence for TNPO3 (NM_012470.1,1702-1720).
gtcctagcccgattacctt

SEQ ID NO: 251803 - DNA, 19 bp, Homo sapiens
  siRNA target sequence for TNPO3 (NM_012470.1,1708-1726).
gcccgattacctttggata

SEQ ID NO: 251804 - DNA, 19 bp, Homo sapiens
  siRNA target sequence for TNPO3 (NM_012470.1,1709-1727).
cccgattacctttggataa

SEQ ID NO: 251805 - DNA, 19 bp, Homo sapiens
  siRNA target sequence for TNPO3 (NM_012470.1,1711-1729).
cgattacctttggataaga

SEQ ID NO: 251806 - DNA, 19 bp, Homo sapiens
  siRNA target sequence for TNPO3 (NM_012470.1,1712-1730).
gattacctttggataagat

SEQ ID NO: 251807 - DNA, 19 bp, Homo sapiens
  siRNA target sequence for TNPO3 (NM_012470.1,1728-1746).
gattaccgaatgtcttagt

SEQ ID NO: 251808 - DNA, 19 bp, Homo sapiens
  siRNA target sequence for TNPO3 (NM_012470.1,1734-1752).
cgaatgtcttagtgaacta

SEQ ID NO: 251809 - DNA, 19 bp, Homo sapiens
  siRNA target sequence for TNPO3 (NM_012470.1,1817-1835).
cagatcccacagtgttctt

SEQ ID NO: 251810 - DNA, 19 bp, Homo sapiens
  siRNA target sequence for TNPO3 (NM_012470.1,1837-1855).
gatcgccttgcagtgatat

SEQ ID NO: 251811 - DNA, 19 bp, Homo sapiens
  siRNA target sequence for TNPO3 (NM_012470.1,1840-1858).
cgccttgcagtgatattta

SEQ ID NO: 251812 - DNA, 19 bp, Homo sapiens
  siRNA target sequence for TNPO3 (NM_012470.1,1890-1908).
gactcatccgtgtcagaaa

SEQ ID NO: 251813 - DNA, 19 bp, Homo sapiens
  siRNA target sequence for TNPO3 (NM_012470.1,1894-1912).
catccgtgtcagaaagtca

SEQ ID NO: 251814 - DNA, 19 bp, Homo sapiens
  siRNA target sequence for TNPO3 (NM_012470.1,1905-1923).
gaaagtcatacaggaaata

SEQ ID NO: 251815 - DNA, 19 bp, Homo sapiens
  siRNA target sequence for TNPO3 (NM_012470.1,1930-1948).
gttttatccgagactctaa

SEQ ID NO: 251816 - DNA, 19 bp, Homo sapiens
  siRNA target sequence for TNPO3 (NM_012470.1,1961-1979).
ctgataatcggattgtaga

SEQ ID NO: 251817 - DNA, 19 bp, Homo sapiens
  siRNA target sequence for TNPO3 (NM_012470.1,2103-2121).
gtaccttggcagtatcctt

SEQ ID NO: 251818 - DNA, 19 bp, Homo sapiens
  siRNA target sequence for TNPO3 (NM_012470.1,2153-2171).
ggcagggactgctagacat

SEQ ID NO: 251819 - DNA, 19 bp, Homo sapiens
  siRNA target sequence for TNPO3 (NM_012470.1,2260-2278).
cggctagccaccaggttta

SEQ ID NO: 251820 - DNA, 19 bp, Homo sapiens
  siRNA target sequence for TNPO3 (NM_012470.1,2261-2279).
ggctagccaccaggtttat

SEQ ID NO: 251821 - DNA, 19 bp, Homo sapiens
  siRNA target sequence for TNPO3 (NM_012470.1,2262-2280).
gctagccaccaggtttatt

SEQ ID NO: 251822 - DNA, 19 bp, Homo sapiens
  siRNA target sequence for TNPO3 (NM_012470.1,2364-2382).
ccgggatgccaattgtagt

SEQ ID NO: 251823 - DNA, 19 bp, Homo sapiens
  siRNA target sequence for TNPO3 (NM_012470.1,2395-2413).
ctacgagacctcattcata

SEQ ID NO: 251824 - DNA, 19 bp, Homo sapiens
  siRNA target sequence for TNPO3 (NM_012470.1,2586-2604).
ggttgacagaccgactttt

SEQ ID NO: 251825 - DNA, 19 bp, Homo sapiens
  siRNA target sequence for TNPO3 (NM_012470.1,2587-2605).
gttgacagaccgacttttt

SEQ ID NO: 251826 - DNA, 19 bp, Homo sapiens
  siRNA target sequence for TNPO3 (NM_012470.1,2598-2616).
gactttttgtcgatggtta

SEQ ID NO: 251827 - DNA, 19 bp, Homo sapiens
  siRNA target sequence for TNPO3 (NM_012470.1,2617-2635).
gaaaattccttaaaaggtt

SEQ ID NO: 251828 - DNA, 19 bp, Homo sapiens
  siRNA target sequence for TNPO3 (NM_012470.1,2672-2690).
cacacaaacaacttacaga

SEQ ID NO: 251829 - DNA, 19 bp, Homo sapiens
  siRNA target sequence for TNPO3 (NM_012470.1,2708-2726).
ctagtgctgaggaatgtaa

SEQ ID NO: 251830 - DNA, 19 bp, Homo sapiens
  siRNA target sequence for TOMM22 (NM_020243.3,43-61).
cccagtccccggacgaatt

SEQ ID NO: 251831 - DNA, 19 bp, Homo sapiens
  siRNA target sequence for TOMM22 (NM_020243.3,194-212).
cggagccacttttgatctt

SEQ ID NO: 251832 - DNA, 19 bp, Homo sapiens
  siRNA target sequence for TRAP240 (NM_005121.1,147-165).
gacttgacaggaattaagt

SEQ ID NO: 251833 - DNA, 19 bp, Homo sapiens
  siRNA target sequence for TRAP240 (NM_005121.1,257-275).
ccttaaggcagatgtactt

SEQ ID NO: 251834 - DNA, 19 bp, Homo sapiens
  siRNA target sequence for TRAP240 (NM_005121.1,355-373).
ccttattcaccatgactta

SEQ ID NO: 251835 - DNA, 19 bp, Homo sapiens
  siRNA target sequence for TRAP240 (NM_005121.1,356-374).
cttattcaccatgacttat

SEQ ID NO: 251836 - DNA, 19 bp, Homo sapiens
  siRNA target sequence for TRAP240 (NM_005121.1,364-382).
ccatgacttatcagaagaa

SEQ ID NO: 251837 - DNA, 19 bp, Homo sapiens
  siRNA target sequence for TRAP240 (NM_005121.1,442-460).
cagttcacaatctattgga

SEQ ID NO: 251838 - DNA, 19 bp, Homo sapiens
  siRNA target sequence for TRAP240 (NM_005121.1,453-471).
ctattggaacggtgtttaa

SEQ ID NO: 251839 - DNA, 19 bp, Homo sapiens
  siRNA target sequence for TRAP240 (NM_005121.1,476-494).
caggaattttgtacgtatt

SEQ ID NO: 251840 - DNA, 19 bp, Homo sapiens
  siRNA target sequence for TRAP240 (NM_005121.1,502-520).
ggtttgtaaagccttatga

SEQ ID NO: 251841 - DNA, 19 bp, Homo sapiens
  siRNA target sequence for TRAP240 (NM_005121.1,503-521).
gtttgtaaagccttatgaa

SEQ ID NO: 251842 - DNA, 19 bp, Homo sapiens
  siRNA target sequence for TRAP240 (NM_005121.1,661-679).
cccttgctcaacagtctaa

SEQ ID NO: 251843 - DNA, 19 bp, Homo sapiens
  siRNA target sequence for TRAP240 (NM_005121.1,663-681).
cttgctcaacagtctaata

SEQ ID NO: 251844 - DNA, 19 bp, Homo sapiens
  siRNA target sequence for TRAP240 (NM_005121.1,674-692).
gtctaatagcccatttcaa

SEQ ID NO: 251845 - DNA, 19 bp, Homo sapiens
  siRNA target sequence for TRAP240 (NM_005121.1,676-694).
ctaatagcccatttcaagt

SEQ ID NO: 251846 - DNA, 19 bp, Homo sapiens
  siRNA target sequence for TRAP240 (NM_005121.1,683-701).
cccatttcaagttatctta

SEQ ID NO: 251847 - DNA, 19 bp, Homo sapiens
  siRNA target sequence for TRAP240 (NM_005121.1,784-802).
ggaaacagttctatcctat

SEQ ID NO: 251848 - DNA, 19 bp, Homo sapiens
  siRNA target sequence for TRAP240 (NM_005121.1,854-872).
ggaagatgattctttagct

SEQ ID NO: 251849 - DNA, 19 bp, Homo sapiens
  siRNA target sequence for TRAP240 (NM_005121.1,865-883).
ctttagctgcagtagaagt

SEQ ID NO: 251850 - DNA, 19 bp, Homo sapiens
  siRNA target sequence for TRAP240 (NM_005121.1,891-909).
gctggtgtccgaatgatct

SEQ ID NO: 251851 - DNA, 19 bp, Homo sapiens
  siRNA target sequence for TRAP240 (NM_005121.1,892-910).
ctggtgtccgaatgatcta

SEQ ID NO: 251852 - DNA, 19 bp, Homo sapiens
  siRNA target sequence for TRAP240 (NM_005121.1,905-923).
gatctacccagcatgcttt

SEQ ID NO: 251853 - DNA, 19 bp, Homo sapiens
  siRNA target sequence for TRAP240 (NM_005121.1,908-926).
ctacccagcatgctttgtt

SEQ ID NO: 251854 - DNA, 19 bp, Homo sapiens
  siRNA target sequence for TRAP240 (NM_005121.1,911-929).
cccagcatgctttgttcta

SEQ ID NO: 251855 - DNA, 19 bp, Homo sapiens
  siRNA target sequence for TRAP240 (NM_005121.1,933-951).
cctcagtcagacattccta

SEQ ID NO: 251856 - DNA, 19 bp, Homo sapiens
  siRNA target sequence for TRAP240 (NM_005121.1,1010-1028).
gcctgcttccacaagagat

SEQ ID NO: 251857 - DNA, 19 bp, Homo sapiens
  siRNA target sequence for TRAP240 (NM_005121.1,1073-1091).
ggaagtccaaacagttgat

SEQ ID NO: 251858 - DNA, 19 bp, Homo sapiens
  siRNA target sequence for TRAP240 (NM_005121.1,1101-1119).
gtccagaagtgggtcaaat

SEQ ID NO: 251859 - DNA, 19 bp, Homo sapiens
  siRNA target sequence for TRAP240 (NM_005121.1,1139-1157).
cttcaactccgatagtact

SEQ ID NO: 251860 - DNA, 19 bp, Homo sapiens
  siRNA target sequence for TRAP240 (NM_005121.1,1309-1327).
catcctgggattttgttga

SEQ ID NO: 251861 - DNA, 19 bp, Homo sapiens
  siRNA target sequence for TRAP240 (NM_005121.1,1354-1372).
gtttgaggcacaaaaatct

SEQ ID NO: 251862 - DNA, 19 bp, Homo sapiens
  siRNA target sequence for TRAP240 (NM_005121.1,1411-1429).
ctttaggtcagcaacaaca

SEQ ID NO: 251863 - DNA, 19 bp, Homo sapiens
  siRNA target sequence for TRAP240 (NM_005121.1,1489-1507).
gccccttgactccttttca

SEQ ID NO: 251864 - DNA, 19 bp, Homo sapiens
  siRNA target sequence for TRAP240 (NM_005121.1,1506-1524).
caccatcgtgtgtctgtta

SEQ ID NO: 251865 - DNA, 19 bp, Homo sapiens
  siRNA target sequence for TRAP240 (NM_005121.1,1586-1604).
cagtcaagtgagattttca

SEQ ID NO: 251866 - DNA, 19 bp, Homo sapiens
  siRNA target sequence for TRAP240 (NM_005121.1,1647-1665).
ggcaccgaaatggcaaatt

SEQ ID NO: 251867 - DNA, 19 bp, Homo sapiens
  siRNA target sequence for TRAP240 (NM_005121.1,1649-1667).
caccgaaatggcaaattca

SEQ ID NO: 251868 - DNA, 19 bp, Homo sapiens
  siRNA target sequence for TRAP240 (NM_005121.1,1696-1714).
cttgtgatgtggttgatga

SEQ ID NO: 251869 - DNA, 19 bp, Homo sapiens
  siRNA target sequence for TRAP240 (NM_005121.1,1721-1739).
gactaaaacaccttcaact

SEQ ID NO: 251870 - DNA, 19 bp, Homo sapiens
  siRNA target sequence for TRAP240 (NM_005121.1,1747-1765).
gtcaacatttttatcaaat

SEQ ID NO: 251871 - DNA, 19 bp, Homo sapiens
  siRNA target sequence for TRAP240 (NM_005121.1,1831-1849).
ctttcccacctcaatatca

SEQ ID NO: 251872 - DNA, 19 bp, Homo sapiens
  siRNA target sequence for TRAP240 (NM_005121.1,1875-1893).
gttggtacagcagtaaact

SEQ ID NO: 251873 - DNA, 19 bp, Homo sapiens
  siRNA target sequence for TRAP240 (NM_005121.1,1910-1928).
caatatagcctggaagtat

SEQ ID NO: 251874 - DNA, 19 bp, Homo sapiens
  siRNA target sequence for TRAP240 (NM_005121.1,1917-1935).
gcctggaagtattacaagt

SEQ ID NO: 251875 - DNA, 19 bp, Homo sapiens
  siRNA target sequence for TRAP240 (NM_005121.1,1918-1936).
cctggaagtattacaagtt

SEQ ID NO: 251876 - DNA, 19 bp, Homo sapiens
  siRNA target sequence for TRAP240 (NM_005121.1,2011-2029).
cttttggacaggaaagtgt

SEQ ID NO: 251877 - DNA, 19 bp, Homo sapiens
  siRNA target sequence for TRAP240 (NM_005121.1,2016-2034).
ggacaggaaagtgtaacat

SEQ ID NO: 251878 - DNA, 19 bp, Homo sapiens
  siRNA target sequence for TRAP240 (NM_005121.1,2026-2044).
gtgtaacatcagttacaga

SEQ ID NO: 251879 - DNA, 19 bp, Homo sapiens
  siRNA target sequence for TRAP240 (NM_005121.1,2035-2053).
cagttacagagttaatggt

SEQ ID NO: 251880 - DNA, 19 bp, Homo sapiens
  siRNA target sequence for TRAP240 (NM_005121.1,2043-2061).
gagttaatggtgcaatgta

SEQ ID NO: 251881 - DNA, 19 bp, Homo sapiens
  siRNA target sequence for TRAP240 (NM_005121.1,2091-2109).
gtgcagcaatatcaaatta

SEQ ID NO: 251882 - DNA, 19 bp, Homo sapiens
  siRNA target sequence for TRAP240 (NM_005121.1,2134-2152).
catctgatgcagaacaaga

SEQ ID NO: 251883 - DNA, 19 bp, Homo sapiens
  siRNA target sequence for TRAP240 (NM_005121.1,2142-2160).
gcagaacaagaacctaaaa

SEQ ID NO: 251884 - DNA, 19 bp, Homo sapiens
  siRNA target sequence for TRAP240 (NM_005121.1,2269-2287).
ggacatctagtgtaacagt

SEQ ID NO: 251885 - DNA, 19 bp, Homo sapiens
  siRNA target sequence for TRAP240 (NM_005121.1,2298-2316).
gaagaagatgctatgtcat

SEQ ID NO: 251886 - DNA, 19 bp, Homo sapiens
  siRNA target sequence for TRAP240 (NM_005121.1,2366-2384).
ccgtcctccatcaacaagt

SEQ ID NO: 251887 - DNA, 19 bp, Homo sapiens
  siRNA target sequence for TRAP240 (NM_005121.1,2367-2385).
cgtcctccatcaacaagtt

SEQ ID NO: 251888 - DNA, 19 bp, Homo sapiens
  siRNA target sequence for TRAP240 (NM_005121.1,2377-2395).
caacaagtttgatttatga

SEQ ID NO: 251889 - DNA, 19 bp, Homo sapiens
  siRNA target sequence for TRAP240 (NM_005121.1,2402-2420).
cctggctgtctcttatact

SEQ ID NO: 251890 - DNA, 19 bp, Homo sapiens
  siRNA target sequence for TRAP240 (NM_005121.1,2424-2442).
cttgataatctcttcaatt

SEQ ID NO: 251891 - DNA, 19 bp, Homo sapiens
  siRNA target sequence for TRAP240 (NM_005121.1,2534-2552).
ggacccgttatcttgcata

SEQ ID NO: 251892 - DNA, 19 bp, Homo sapiens
  siRNA target sequence for TRAP240 (NM_005121.1,2535-2553).
gacccgttatcttgcataa

SEQ ID NO: 251893 - DNA, 19 bp, Homo sapiens
  siRNA target sequence for TRAP240 (NM_005121.1,2538-2556).
ccgttatcttgcataagca

SEQ ID NO: 251894 - DNA, 19 bp, Homo sapiens
  siRNA target sequence for TRAP240 (NM_005121.1,2549-2567).
cataagcactgcagatctt

SEQ ID NO: 251895 - DNA, 19 bp, Homo sapiens
  siRNA target sequence for TRAP240 (NM_005121.1,2589-2607).
ccatcattggaacaacata

SEQ ID NO: 251896 - DNA, 19 bp, Homo sapiens
  siRNA target sequence for TRAP240 (NM_005121.1,2613-2631).
ggattttccccaatgaata

SEQ ID NO: 251897 - DNA, 19 bp, Homo sapiens
  siRNA target sequence for TRAP240 (NM_005121.1,2674-2692).
gaactgttctagaaggaaa

SEQ ID NO: 251898 - DNA, 19 bp, Homo sapiens
  siRNA target sequence for TRAP240 (NM_005121.1,2701-2719).
gtataggagcgcagttcaa

SEQ ID NO: 251899 - DNA, 19 bp, Homo sapiens
  siRNA target sequence for TRAP240 (NM_005121.1,2747-2765).
ccccaaaccttctgaaatt

SEQ ID NO: 251900 - DNA, 19 bp, Homo sapiens
  siRNA target sequence for TRAP240 (NM_005121.1,2748-2766).
cccaaaccttctgaaatta

SEQ ID NO: 251901 - DNA, 19 bp, Homo sapiens
  siRNA target sequence for TRAP240 (NM_005121.1,2783-2801).
ctataagcctgaaaattgt

SEQ ID NO: 251902 - DNA, 19 bp, Homo sapiens
  siRNA target sequence for TRAP240 (NM_005121.1,2906-2924).
gactgttggaaaattggaa

SEQ ID NO: 251903 - DNA, 19 bp, Homo sapiens
  siRNA target sequence for TRAP240 (NM_005121.1,2938-2956).
ggccttcaatgccattcat

SEQ ID NO: 251904 - DNA, 19 bp, Homo sapiens
  siRNA target sequence for TRAP240 (NM_005121.1,2940-2958).
ccttcaatgccattcatca

SEQ ID NO: 251905 - DNA, 19 bp, Homo sapiens
  siRNA target sequence for TRAP240 (NM_005121.1,2941-2959).
cttcaatgccattcatcaa

SEQ ID NO: 251906 - DNA, 19 bp, Homo sapiens
  siRNA target sequence for TRAP240 (NM_005121.1,2961-2979).
gagggtgatggaagtaata

SEQ ID NO: 251907 - DNA, 19 bp, Homo sapiens
  siRNA target sequence for TRAP240 (NM_005121.1,2965-2983).
gtgatggaagtaatatgga

SEQ ID NO: 251908 - DNA, 19 bp, Homo sapiens
  siRNA target sequence for TRAP240 (NM_005121.1,2971-2989).
gaagtaatatggatcaaga

SEQ ID NO: 251909 - DNA, 19 bp, Homo sapiens
  siRNA target sequence for TRAP240 (NM_005121.1,2974-2992).
gtaatatggatcaagaata

SEQ ID NO: 251910 - DNA, 19 bp, Homo sapiens
  siRNA target sequence for TRAP240 (NM_005121.1,3062-3080).
cagcggagcaggaattctt

SEQ ID NO: 251911 - DNA, 19 bp, Homo sapiens
  siRNA target sequence for TRAP240 (NM_005121.1,3165-3183).
gctcaaggttcagtcaaat

SEQ ID NO: 251912 - DNA, 19 bp, Homo sapiens
  siRNA target sequence for TRAP240 (NM_005121.1,3166-3184).
ctcaaggttcagtcaaata

SEQ ID NO: 251913 - DNA, 19 bp, Homo sapiens
  siRNA target sequence for TRAP240 (NM_005121.1,3388-3406).
gtgccgatgttggagttta

SEQ ID NO: 251914 - DNA, 19 bp, Homo sapiens
  siRNA target sequence for TRAP240 (NM_005121.1,3390-3408).
gccgatgttggagtttaca

SEQ ID NO: 251915 - DNA, 19 bp, Homo sapiens
  siRNA target sequence for TRAP240 (NM_005121.1,3391-3409).
ccgatgttggagtttacat

SEQ ID NO: 251916 - DNA, 19 bp, Homo sapiens
  siRNA target sequence for TRAP240 (NM_005121.1,3392-3410).
cgatgttggagtttacatt

SEQ ID NO: 251917 - DNA, 19 bp, Homo sapiens
  siRNA target sequence for TRAP240 (NM_005121.1,3423-3441).
caggaagcacaatataggt

SEQ ID NO: 251918 - DNA, 19 bp, Homo sapiens
  siRNA target sequence for TRAP240 (NM_005121.1,3578-3596).
ggctacctctgctgaacat

SEQ ID NO: 251919 - DNA, 19 bp, Homo sapiens
  siRNA target sequence for TRAP240 (NM_005121.1,3580-3598).
ctacctctgctgaacatgt

SEQ ID NO: 251920 - DNA, 19 bp, Homo sapiens
  siRNA target sequence for TRAP240 (NM_005121.1,3657-3675).
gatcagtgcactaatttat

SEQ ID NO: 251921 - DNA, 19 bp, Homo sapiens
  siRNA target sequence for TRAP240 (NM_005121.1,3696-3714).
gaccaagatccttttccta

SEQ ID NO: 251922 - DNA, 19 bp, Homo sapiens
  siRNA target sequence for TRAP240 (NM_005121.1,3753-3771).
cgtgactgttgcaatgact

SEQ ID NO: 251923 - DNA, 19 bp, Homo sapiens
  siRNA target sequence for TRAP240 (NM_005121.1,3772-3790).
gctaccttgcattagaaca

SEQ ID NO: 251924 - DNA, 19 bp, Homo sapiens
  siRNA target sequence for TRAP240 (NM_005121.1,3792-3810).
gggcgtcagttcatggata

SEQ ID NO: 251925 - DNA, 19 bp, Homo sapiens
  siRNA target sequence for TRAP240 (NM_005121.1,3793-3811).
ggcgtcagttcatggataa

SEQ ID NO: 251926 - DNA, 19 bp, Homo sapiens
  siRNA target sequence for TRAP240 (NM_005121.1,3795-3813).
cgtcagttcatggataaca

SEQ ID NO: 251927 - DNA, 19 bp, Homo sapiens
  siRNA target sequence for TRAP240 (NM_005121.1,3837-3855).
gcacttgtgaaaagttcat

SEQ ID NO: 251928 - DNA, 19 bp, Homo sapiens
  siRNA target sequence for TRAP240 (NM_005121.1,3861-3879).
cacccctggtccaaaagaa

SEQ ID NO: 251929 - DNA, 19 bp, Homo sapiens
  siRNA target sequence for TRAP240 (NM_005121.1,3866-3884).
ctggtccaaaagaaacgat

SEQ ID NO: 251930 - DNA, 19 bp, Homo sapiens
  siRNA target sequence for TRAP240 (NM_005121.1,3896-3914).
gtgctcacaggatatactt

SEQ ID NO: 251931 - DNA, 19 bp, Homo sapiens
  siRNA target sequence for TRAP240 (NM_005121.1,3901-3919).
cacaggatatacttcgaat

SEQ ID NO: 251932 - DNA, 19 bp, Homo sapiens
  siRNA target sequence for TRAP240 (NM_005121.1,3996-4014).
cctctcacttggcaacaat

SEQ ID NO: 251933 - DNA, 19 bp, Homo sapiens
  siRNA target sequence for TRAP240 (NM_005121.1,4025-4043).
ggctggccgaggctcttat

SEQ ID NO: 251934 - DNA, 19 bp, Homo sapiens
  siRNA target sequence for TRAP240 (NM_005121.1,4029-4047).
ggccgaggctcttatggaa

SEQ ID NO: 251935 - DNA, 19 bp, Homo sapiens
  siRNA target sequence for TRAP240 (NM_005121.1,4068-4086).
ctgccaatccccacatttt

SEQ ID NO: 251936 - DNA, 19 bp, Homo sapiens
  siRNA target sequence for TRAP240 (NM_005121.1,4158-4176).
gaaccctatggatctcaaa

SEQ ID NO: 251937 - DNA, 19 bp, Homo sapiens
  siRNA target sequence for TRAP240 (NM_005121.1,4162-4180).
cctatggatctcaaagaga

SEQ ID NO: 251938 - DNA, 19 bp, Homo sapiens
  siRNA target sequence for TRAP240 (NM_005121.1,4238-4256).
cttttttagagatcttact

SEQ ID NO: 251939 - DNA, 19 bp, Homo sapiens
  siRNA target sequence for TRAP240 (NM_005121.1,4246-4264).
gagatcttactgcaatata

SEQ ID NO: 251940 - DNA, 19 bp, Homo sapiens
  siRNA target sequence for TRAP240 (NM_005121.1,4271-4289).
ctgtcgattaggtcaacat

SEQ ID NO: 251941 - DNA, 19 bp, Homo sapiens
  siRNA target sequence for TRAP240 (NM_005121.1,4322-4340).
catgagagttggatctact

SEQ ID NO: 251942 - DNA, 19 bp, Homo sapiens
  siRNA target sequence for TRAP240 (NM_005121.1,4494-4512).
ctactttcccagccaaatt

SEQ ID NO: 251943 - DNA, 19 bp, Homo sapiens
  siRNA target sequence for TRAP240 (NM_005121.1,4519-4537).
cccctacaagtcagtcttt

SEQ ID NO: 251944 - DNA, 19 bp, Homo sapiens
  siRNA target sequence for TRAP240 (NM_005121.1,4521-4539).
cctacaagtcagtctttga

SEQ ID NO: 251945 - DNA, 19 bp, Homo sapiens
  siRNA target sequence for TRAP240 (NM_005121.1,4545-4563).
ccacctcagatgacaaata

SEQ ID NO: 251946 - DNA, 19 bp, Homo sapiens
  siRNA target sequence for TRAP240 (NM_005121.1,4556-4574).
gacaaatactggaaatgct

SEQ ID NO: 251947 - DNA, 19 bp, Homo sapiens
  siRNA target sequence for TRAP240 (NM_005121.1,4602-4620).
gcagcgagcagcactatga

SEQ ID NO: 251948 - DNA, 19 bp, Homo sapiens
  siRNA target sequence for TRAP240 (NM_005121.1,4653-4671).
gttgccacagctaattcaa

SEQ ID NO: 251949 - DNA, 19 bp, Homo sapiens
  siRNA target sequence for TRAP240 (NM_005121.1,4720-4738).
gtggagtatcatcaaataa

SEQ ID NO: 251950 - DNA, 19 bp, Homo sapiens
  siRNA target sequence for TRAP240 (NM_005121.1,4902-4920).
catcctgatgtgtctgaaa

SEQ ID NO: 251951 - DNA, 19 bp, Homo sapiens
  siRNA target sequence for TRAP240 (NM_005121.1,4922-4940).
cacgatggatcgggataaa

SEQ ID NO: 251952 - DNA, 19 bp, Homo sapiens
  siRNA target sequence for TRAP240 (NM_005121.1,4924-4942).
cgatggatcgggataaagt

SEQ ID NO: 251953 - DNA, 19 bp, Homo sapiens
  siRNA target sequence for TRAP240 (NM_005121.1,4949-4967).
ccccacagatggtgattca

SEQ ID NO: 251954 - DNA, 19 bp, Homo sapiens
  siRNA target sequence for TRAP240 (NM_005121.1,4952-4970).
cacagatggtgattcacat

SEQ ID NO: 251955 - DNA, 19 bp, Homo sapiens
  siRNA target sequence for TRAP240 (NM_005121.1,4976-4994).
cacgtatccacctgcaatt

SEQ ID NO: 251956 - DNA, 19 bp, Homo sapiens
  siRNA target sequence for TRAP240 (NM_005121.1,4978-4996).
cgtatccacctgcaattgt

SEQ ID NO: 251957 - DNA, 19 bp, Homo sapiens
  siRNA target sequence for TRAP240 (NM_005121.1,5010-5028).
gatccttttacatacgaaa

SEQ ID NO: 251958 - DNA, 19 bp, Homo sapiens
  siRNA target sequence for TRAP240 (NM_005121.1,5034-5052).
gacgagagcactaactctt

SEQ ID NO: 251959 - DNA, 19 bp, Homo sapiens
  siRNA target sequence for TRAP240 (NM_005121.1,5069-5087).
ggggctacttcgatgcttt

SEQ ID NO: 251960 - DNA, 19 bp, Homo sapiens
  siRNA target sequence for TRAP240 (NM_005121.1,5106-5124).
cttcctcctcatatcaaga

SEQ ID NO: 251961 - DNA, 19 bp, Homo sapiens
  siRNA target sequence for TRAP240 (NM_005121.1,5246-5264).
gaggccacttccaacatca

SEQ ID NO: 251962 - DNA, 19 bp, Homo sapiens
  siRNA target sequence for TRAP240 (NM_005121.1,5295-5313).
ccaggtttagccatggaaa

SEQ ID NO: 251963 - DNA, 19 bp, Homo sapiens
  siRNA target sequence for TRAP240 (NM_005121.1,5318-5336).
ccttagaagtcctgataga

SEQ ID NO: 251964 - DNA, 19 bp, Homo sapiens
  siRNA target sequence for TRAP240 (NM_005121.1,5329-5347).
ctgatagaccagagtgtat

SEQ ID NO: 251965 - DNA, 19 bp, Homo sapiens
  siRNA target sequence for TRAP240 (NM_005121.1,5338-5356).
cagagtgtattcgacttta

SEQ ID NO: 251966 - DNA, 19 bp, Homo sapiens
  siRNA target sequence for TRAP240 (NM_005121.1,5352-5370).
ctttatgcacctcctttta

SEQ ID NO: 251967 - DNA, 19 bp, Homo sapiens
  siRNA target sequence for TRAP240 (NM_005121.1,5491-5509).
catcttgcacagatctata

SEQ ID NO: 251968 - DNA, 19 bp, Homo sapiens
  siRNA target sequence for TRAP240 (NM_005121.1,5502-5520).
gatctatatggagaacttt

SEQ ID NO: 251969 - DNA, 19 bp, Homo sapiens
  siRNA target sequence for TRAP240 (NM_005121.1,5558-5576).
ggctcgtcggaaaaaaagt

SEQ ID NO: 251970 - DNA, 19 bp, Homo sapiens
  siRNA target sequence for TRAP240 (NM_005121.1,5559-5577).
gctcgtcggaaaaaaagtt

SEQ ID NO: 251971 - DNA, 19 bp, Homo sapiens
  siRNA target sequence for TRAP240 (NM_005121.1,5614-5632).
ggtgcttaggacttgtaca

SEQ ID NO: 251972 - DNA, 19 bp, Homo sapiens
  siRNA target sequence for TRAP240 (NM_005121.1,5617-5635).
gcttaggacttgtacaaat

SEQ ID NO: 251973 - DNA, 19 bp, Homo sapiens
  siRNA target sequence for TRAP240 (NM_005121.1,5622-5640).
ggacttgtacaaatgagtt

SEQ ID NO: 251974 - DNA, 19 bp, Homo sapiens
  siRNA target sequence for TRAP240 (NM_005121.1,5625-5643).
cttgtacaaatgagttcat

SEQ ID NO: 251975 - DNA, 19 bp, Homo sapiens
  siRNA target sequence for TRAP240 (NM_005121.1,5677-5695).
ggattggtcatggagaatt

SEQ ID NO: 251976 - DNA, 19 bp, Homo sapiens
  siRNA target sequence for TRAP240 (NM_005121.1,5724-5742).
cgaaacttgcagtctctaa

SEQ ID NO: 251977 - DNA, 19 bp, Homo sapiens
  siRNA target sequence for TRAP240 (NM_005121.1,5828-5846).
ggagccgcaaggctctttt

SEQ ID NO: 251978 - DNA, 19 bp, Homo sapiens
  siRNA target sequence for TRAP240 (NM_005121.1,5831-5849).
gccgcaaggctcttttgtt

SEQ ID NO: 251979 - DNA, 19 bp, Homo sapiens
  siRNA target sequence for TRAP240 (NM_005121.1,5832-5850).
ccgcaaggctcttttgtta

SEQ ID NO: 251980 - DNA, 19 bp, Homo sapiens
  siRNA target sequence for TRAP240 (NM_005121.1,5833-5851).
cgcaaggctcttttgttat

SEQ ID NO: 251981 - DNA, 19 bp, Homo sapiens
  siRNA target sequence for TRAP240 (NM_005121.1,5835-5853).
caaggctcttttgttatta

SEQ ID NO: 251982 - DNA, 19 bp, Homo sapiens
  siRNA target sequence for TRAP240 (NM_005121.1,5865-5883).
gtgtcaactggttctgtat

SEQ ID NO: 251983 - DNA, 19 bp, Homo sapiens
  siRNA target sequence for TRAP240 (NM_005121.1,5867-5885).
gtcaactggttctgtattt

SEQ ID NO: 251984 - DNA, 19 bp, Homo sapiens
  siRNA target sequence for TRAP240 (NM_005121.1,5886-5904).
ggaagaagcacgactctaa

SEQ ID NO: 251985 - DNA, 19 bp, Homo sapiens
  siRNA target sequence for TRAP240 (NM_005121.1,5893-5911).
gcacgactctaaatatgca

SEQ ID NO: 251986 - DNA, 19 bp, Homo sapiens
  siRNA target sequence for TRAP240 (NM_005121.1,5936-5954).
ggatacatcatgtactcat

SEQ ID NO: 251987 - DNA, 19 bp, Homo sapiens
  siRNA target sequence for TRAP240 (NM_005121.1,5937-5955).
gatacatcatgtactcata

SEQ ID NO: 251988 - DNA, 19 bp, Homo sapiens
  siRNA target sequence for TRAP240 (NM_005121.1,5941-5959).
catcatgtactcatatact

SEQ ID NO: 251989 - DNA, 19 bp, Homo sapiens
  siRNA target sequence for TRAP240 (NM_005121.1,5947-5965).
gtactcatatacttgtgtt

SEQ ID NO: 251990 - DNA, 19 bp, Homo sapiens
  siRNA target sequence for TRAP240 (NM_005121.1,5991-6009).
gcttcagctacttatacca

SEQ ID NO: 251991 - DNA, 19 bp, Homo sapiens
  siRNA target sequence for TRAP240 (NM_005121.1,5998-6016).
ctacttataccactgaaaa

SEQ ID NO: 251992 - DNA, 19 bp, Homo sapiens
  siRNA target sequence for TRAP240 (NM_005121.1,6001-6019).
cttataccactgaaaattt

SEQ ID NO: 251993 - DNA, 19 bp, Homo sapiens
  siRNA target sequence for TRAP240 (NM_005121.1,6052-6070).
cagatggaatgggtatctt

SEQ ID NO: 251994 - DNA, 19 bp, Homo sapiens
  siRNA target sequence for TRAP240 (NM_005121.1,6057-6075).
ggaatgggtatctttgatt

SEQ ID NO: 251995 - DNA, 19 bp, Homo sapiens
  siRNA target sequence for TRAP240 (NM_005121.1,6062-6080).
gggtatctttgatttgtta

SEQ ID NO: 251996 - DNA, 19 bp, Homo sapiens
  siRNA target sequence for TRAP240 (NM_005121.1,6077-6095).
gttagacacaggagatgat

SEQ ID NO: 251997 - DNA, 19 bp, Homo sapiens
  siRNA target sequence for TRAP240 (NM_005121.1,6096-6114).
cttgaccctgatatcatta

SEQ ID NO: 251998 - DNA, 19 bp, Homo sapiens
  siRNA target sequence for TRAP240 (NM_005121.1,6229-6247).
ctcatgaggaagtacctaa

SEQ ID NO: 251999 - DNA, 19 bp, Homo sapiens
  siRNA target sequence for TRAP240 (NM_005121.1,6231-6249).
catgaggaagtacctaata

SEQ ID NO: 252000 - DNA, 19 bp, Homo sapiens
  siRNA target sequence for TRAP240 (NM_005121.1,6236-6254).
ggaagtacctaatattctt

SEQ ID NO: 252001 - DNA, 19 bp, Homo sapiens
  siRNA target sequence for TRAP240 (NM_005121.1,6262-6280).
cattggcccttggttactt

SEQ ID NO: 252002 - DNA, 19 bp, Homo sapiens
  siRNA target sequence for TRAP240 (NM_005121.1,6328-6346).
catgtcctcaagcacaata

SEQ ID NO: 252003 - DNA, 19 bp, Homo sapiens
  siRNA target sequence for TRAP240 (NM_005121.1,6333-6351).
cctcaagcacaatatcagt

SEQ ID NO: 252004 - DNA, 19 bp, Homo sapiens
  siRNA target sequence for TRAP240 (NM_005121.1,6407-6425).
cgagctgcttcacagtaaa

SEQ ID NO: 252005 - DNA, 19 bp, Homo sapiens
  siRNA target sequence for TRAP240 (NM_005121.1,6431-6449).
ccacccacttgactcaaat

SEQ ID NO: 252006 - DNA, 19 bp, Homo sapiens
  siRNA target sequence for TRAP240 (NM_005121.1,6564-6582).
ctgaatcagttatataact

SEQ ID NO: 252007 - DNA, 19 bp, Homo sapiens
  siRNA target sequence for TREM1 (NM_018643.2,116-134).
ctccgagctgcaactaaat

SEQ ID NO: 252008 - DNA, 19 bp, Homo sapiens
  siRNA target sequence for TREM1 (NM_018643.2,129-147).
ctaaattaactgaggaaaa

SEQ ID NO: 252009 - DNA, 19 bp, Homo sapiens
  siRNA target sequence for TREM1 (NM_018643.2,169-187).
gaccctggatgtgaaatgt

SEQ ID NO: 252010 - DNA, 19 bp, Homo sapiens
  siRNA target sequence for TREM1 (NM_018643.2,186-204).
gtgactacacgctagagaa

SEQ ID NO: 252011 - DNA, 19 bp, Homo sapiens
  siRNA target sequence for TREM1 (NM_018643.2,220-238).
gaaagcttggcagataata

SEQ ID NO: 252012 - DNA, 19 bp, Homo sapiens
  siRNA target sequence for TREM1 (NM_018643.2,270-288).
gcacagagaggccttcaaa

SEQ ID NO: 252013 - DNA, 19 bp, Homo sapiens
  siRNA target sequence for TREM1 (NM_018643.2,304-322).
ccaagtggggaggatcata

SEQ ID NO: 252014 - DNA, 19 bp, Homo sapiens
  siRNA target sequence for TREM1 (NM_018643.2,310-328).
ggggaggatcatactagaa

SEQ ID NO: 252015 - DNA, 19 bp, Homo sapiens
  siRNA target sequence for TREM1 (NM_018643.2,315-333).
ggatcatactagaagacta

SEQ ID NO: 252016 - DNA, 19 bp, Homo sapiens
  siRNA target sequence for TREM1 (NM_018643.2,331-349).
ctaccatgatcatggttta

SEQ ID NO: 252017 - DNA, 19 bp, Homo sapiens
  siRNA target sequence for TREM1 (NM_018643.2,370-388).
ccttcaagtggaagattct

SEQ ID NO: 252018 - DNA, 19 bp, Homo sapiens
  siRNA target sequence for TREM1 (NM_018643.2,460-478).
ggtgaccaagggtttttca

SEQ ID NO: 252019 - DNA, 19 bp, Homo sapiens
  siRNA target sequence for TREM1 (NM_018643.2,488-506).
ggctccaatgagaattcta

SEQ ID NO: 252020 - DNA, 19 bp, Homo sapiens
  siRNA target sequence for TREM1 (NM_018643.2,544-562).
ggccttgtgcccactctat

SEQ ID NO: 252021 - DNA, 19 bp, Homo sapiens
  siRNA target sequence for TREM1 (NM_018643.2,545-563).
gccttgtgcccactctata

SEQ ID NO: 252022 - DNA, 19 bp, Homo sapiens
  siRNA target sequence for TREM1 (NM_018643.2,663-681).
gggttccggtgttcaacat

SEQ ID NO: 252023 - DNA, 19 bp, Homo sapiens
  siRNA target sequence for TREM1 (NM_018643.2,668-686).
ccggtgttcaacattgtca

SEQ ID NO: 252024 - DNA, 19 bp, Homo sapiens
  siRNA target sequence for TREM2 (NM_018965.1,113-131).
ctcatcttactctttgtca

SEQ ID NO: 252025 - DNA, 19 bp, Homo sapiens
  siRNA target sequence for TREM2 (NM_018965.1,284-302).
gtcagcacgcacaacttgt

SEQ ID NO: 252026 - DNA, 19 bp, Homo sapiens
  siRNA target sequence for TREM2 (NM_018965.1,362-380).
ggtggcactctcaccatta

SEQ ID NO: 252027 - DNA, 19 bp, Homo sapiens
  siRNA target sequence for TREM2 (NM_018965.1,376-394).
cattacgctgcggaatcta

SEQ ID NO: 252028 - DNA, 19 bp, Homo sapiens
  siRNA target sequence for TREM2 (NM_018965.1,637-655).
catctttctcatcaagatt

SEQ ID NO: 252029 - DNA, 19 bp, Homo sapiens
  siRNA target sequence for TREM5 (NM_174892.1,51-69).
gcatctgggatctgcattt

SEQ ID NO: 252030 - DNA, 19 bp, Homo sapiens
  siRNA target sequence for TREM5 (NM_174892.1,204-222).
gggtccctgacggttcaat

SEQ ID NO: 252031 - DNA, 19 bp, Homo sapiens
  siRNA target sequence for TREM5 (NM_174892.1,214-232).
cggttcaatgccactataa

SEQ ID NO: 252032 - DNA, 19 bp, Homo sapiens
  siRNA target sequence for TREM5 (NM_174892.1,237-255).
ggatgggagacctacatta

SEQ ID NO: 252033 - DNA, 19 bp, Homo sapiens
  siRNA target sequence for TREM5 (NM_174892.1,238-256).
gatgggagacctacattaa

SEQ ID NO: 252034 - DNA, 19 bp, Homo sapiens
  siRNA target sequence for TREM5 (NM_174892.1,401-419).
gcgagatgacgcagatgtt

SEQ ID NO: 252035 - DNA, 19 bp, Homo sapiens
  siRNA target sequence for TREM5 (NM_174892.1,422-440).
ctggtgtgggattgaaaga

SEQ ID NO: 252036 - DNA, 19 bp, Homo sapiens
  siRNA target sequence for TREM5 (NM_174892.1,452-470).
ccttgggactcaagtgaaa

SEQ ID NO: 252037 - DNA, 19 bp, Homo sapiens
  siRNA target sequence for TREM5 (NM_174892.1,457-475).
ggactcaagtgaaagtgat

SEQ ID NO: 252038 - DNA, 19 bp, Homo sapiens
  siRNA target sequence for TREM5 (NM_174892.1,526-544).
gcaatatggcagtgttcat

SEQ ID NO: 252039 - DNA, 19 bp, Homo sapiens
  siRNA target sequence for TREM5 (NM_174892.1,566-584).
ctacatgctcctggtattt

SEQ ID NO: 252040 - DNA, 19 bp, Homo sapiens
  siRNA target sequence for TREM5 (NM_174892.1,661-679).
caggggaacagcctatcta

SEQ ID NO: 252041 - DNA, 19 bp, Homo sapiens
  siRNA target sequence for TREM5 (NM_174892.1,664-682).
gggaacagcctatctacat

SEQ ID NO: 252042 - DNA, 19 bp, Homo sapiens
  siRNA target sequence for TREM5 (NM_174892.1,666-684).
gaacagcctatctacatga

SEQ ID NO: 252043 - DNA, 19 bp, Homo sapiens
  siRNA target sequence for TREM5 (NM_174892.1,689-707).
ctccgaacctctgactaaa

SEQ ID NO: 252044 - DNA, 19 bp, Homo sapiens
  siRNA target sequence for TREM5 (NM_174892.1,691-709).
ccgaacctctgactaaaga

SEQ ID NO: 252045 - DNA, 19 bp, Homo sapiens
  siRNA target sequence for TRIP3 (NM_004773.1,175-193).
ctcgtcctgttgagaaaaa

SEQ ID NO: 252046 - DNA, 19 bp, Homo sapiens
  siRNA target sequence for TRIP3 (NM_004773.1,256-274).
ctatagctgattttctcaa

SEQ ID NO: 252047 - DNA, 19 bp, Homo sapiens
  siRNA target sequence for TRIP3 (NM_004773.1,334-352).
caacattaagaagcttatt

SEQ ID NO: 252048 - DNA, 19 bp, Homo sapiens
  siRNA target sequence for TRIP3 (NM_004773.1,337-355).
cattaagaagcttattgct

SEQ ID NO: 252049 - DNA, 19 bp, Homo sapiens
  siRNA target sequence for TRIP3 (NM_004773.1,456-474).
gcagactgctgtttaggaa

SEQ ID NO: 252050 - DNA, 19 bp, Homo sapiens
  siRNA target sequence for TRPC4 (NM_016179.1,235-253).
gctcagttctattacaaaa

SEQ ID NO: 252051 - DNA, 19 bp, Homo sapiens
  siRNA target sequence for TRPC4 (NM_016179.1,279-297).
ccgcatccctctaaggata

SEQ ID NO: 252052 - DNA, 19 bp, Homo sapiens
  siRNA target sequence for TRPC4 (NM_016179.1,384-402).
cctagaggaagctgaaatt

SEQ ID NO: 252053 - DNA, 19 bp, Homo sapiens
  siRNA target sequence for TRPC4 (NM_016179.1,451-469).
ctcctcattgcaattgaaa

SEQ ID NO: 252054 - DNA, 19 bp, Homo sapiens
  siRNA target sequence for TRPC4 (NM_016179.1,453-471).
cctcattgcaattgaaaat

SEQ ID NO: 252055 - DNA, 19 bp, Homo sapiens
  siRNA target sequence for TRPC4 (NM_016179.1,483-501).
gctcatcgaactactctta

SEQ ID NO: 252056 - DNA, 19 bp, Homo sapiens
  siRNA target sequence for TRPC4 (NM_016179.1,484-502).
ctcatcgaactactcttaa

SEQ ID NO: 252057 - DNA, 19 bp, Homo sapiens
  siRNA target sequence for TRPC4 (NM_016179.1,489-507).
cgaactactcttaagcttt

SEQ ID NO: 252058 - DNA, 19 bp, Homo sapiens
  siRNA target sequence for TRPC4 (NM_016179.1,490-508).
gaactactcttaagcttta

SEQ ID NO: 252059 - DNA, 19 bp, Homo sapiens
  siRNA target sequence for TRPC4 (NM_016179.1,496-514).
ctcttaagctttaatgtct

SEQ ID NO: 252060 - DNA, 19 bp, Homo sapiens
  siRNA target sequence for TRPC4 (NM_016179.1,498-516).
cttaagctttaatgtctat

SEQ ID NO: 252061 - DNA, 19 bp, Homo sapiens
  siRNA target sequence for TRPC4 (NM_016179.1,559-577).
ggagctgttgagctgttat

SEQ ID NO: 252062 - DNA, 19 bp, Homo sapiens
  siRNA target sequence for TRPC4 (NM_016179.1,562-580).
gctgttgagctgttattga

SEQ ID NO: 252063 - DNA, 19 bp, Homo sapiens
  siRNA target sequence for TRPC4 (NM_016179.1,573-591).
gttattgaaccacaaaaaa

SEQ ID NO: 252064 - DNA, 19 bp, Homo sapiens
  siRNA target sequence for TRPC4 (NM_016179.1,614-632).
ctcctatactccttgataa

SEQ ID NO: 252065 - DNA, 19 bp, Homo sapiens
  siRNA target sequence for TRPC4 (NM_016179.1,617-635).
ctatactccttgataagca

SEQ ID NO: 252066 - DNA, 19 bp, Homo sapiens
  siRNA target sequence for TRPC4 (NM_016179.1,653-671).
cagacattacaccaatcat

SEQ ID NO: 252067 - DNA, 19 bp, Homo sapiens
  siRNA target sequence for TRPC4 (NM_016179.1,675-693).
ggcagcccatacaaataat

SEQ ID NO: 252068 - DNA, 19 bp, Homo sapiens
  siRNA target sequence for TRPC4 (NM_016179.1,676-694).
gcagcccatacaaataatt

SEQ ID NO: 252069 - DNA, 19 bp, Homo sapiens
  siRNA target sequence for TRPC4 (NM_016179.1,677-695).
cagcccatacaaataatta

SEQ ID NO: 252070 - DNA, 19 bp, Homo sapiens
  siRNA target sequence for TRPC4 (NM_016179.1,745-763).
cacgaggtccgctgtaact

SEQ ID NO: 252071 - DNA, 19 bp, Homo sapiens
  siRNA target sequence for TRPC4 (NM_016179.1,747-765).
cgaggtccgctgtaactgt

SEQ ID NO: 252072 - DNA, 19 bp, Homo sapiens
  siRNA target sequence for TRPC4 (NM_016179.1,809-827).
cacgctccagactcaacat

SEQ ID NO: 252073 - DNA, 19 bp, Homo sapiens
  siRNA target sequence for TRPC4 (NM_016179.1,864-882).
gtcaagcgaagatcctttt

SEQ ID NO: 252074 - DNA, 19 bp, Homo sapiens
  siRNA target sequence for TRPC4 (NM_016179.1,885-903).
cacagcctttcagttaagt

SEQ ID NO: 252075 - DNA, 19 bp, Homo sapiens
  siRNA target sequence for TRPC4 (NM_016179.1,963-981).
gtcacggcagtgcaaacaa

SEQ ID NO: 252076 - DNA, 19 bp, Homo sapiens
  siRNA target sequence for TRPC4 (NM_016179.1,965-983).
cacggcagtgcaaacaatt

SEQ ID NO: 252077 - DNA, 19 bp, Homo sapiens
  siRNA target sequence for TRPC4 (NM_016179.1,1094-1112).
gactaaaattggccattaa

SEQ ID NO: 252078 - DNA, 19 bp, Homo sapiens
  siRNA target sequence for TRPC4 (NM_016179.1,1096-1114).
ctaaaattggccattaagt

SEQ ID NO: 252079 - DNA, 19 bp, Homo sapiens
  siRNA target sequence for TRPC4 (NM_016179.1,1106-1124).
ccattaagtaccgtcaaaa

SEQ ID NO: 252080 - DNA, 19 bp, Homo sapiens
  siRNA target sequence for TRPC4 (NM_016179.1,1113-1131).
gtaccgtcaaaaagagttt

SEQ ID NO: 252081 - DNA, 19 bp, Homo sapiens
  siRNA target sequence for TRPC4 (NM_016179.1,1116-1134).
ccgtcaaaaagagtttgtt

SEQ ID NO: 252082 - DNA, 19 bp, Homo sapiens
  siRNA target sequence for TRPC4 (NM_016179.1,1166-1184).
ctcgctggtacgatgagtt

SEQ ID NO: 252083 - DNA, 19 bp, Homo sapiens
  siRNA target sequence for TRPC4 (NM_016179.1,1202-1220).
gacactgggcagtgaagat

SEQ ID NO: 252084 - DNA, 19 bp, Homo sapiens
  siRNA target sequence for TRPC4 (NM_016179.1,1221-1239).
ggtgacatgtttcataata

SEQ ID NO: 252085 - DNA, 19 bp, Homo sapiens
  siRNA target sequence for TRPC4 (NM_016179.1,1224-1242).
gacatgtttcataatagga

SEQ ID NO: 252086 - DNA, 19 bp, Homo sapiens
  siRNA target sequence for TRPC4 (NM_016179.1,1289-1307).
gcccacttggactgttcat

SEQ ID NO: 252087 - DNA, 19 bp, Homo sapiens
  siRNA target sequence for TRPC4 (NM_016179.1,1342-1360).
gcctcctatttgacttttt

SEQ ID NO: 252088 - DNA, 19 bp, Homo sapiens
  siRNA target sequence for TRPC4 (NM_016179.1,1343-1361).
cctcctatttgactttttt

SEQ ID NO: 252089 - DNA, 19 bp, Homo sapiens
  siRNA target sequence for TRPC4 (NM_016179.1,1431-1449).
catcgtcgagtggatgata

SEQ ID NO: 252090 - DNA, 19 bp, Homo sapiens
  siRNA target sequence for TRPC4 (NM_016179.1,1434-1452).
cgtcgagtggatgatatta

SEQ ID NO: 252091 - DNA, 19 bp, Homo sapiens
  siRNA target sequence for TRPC4 (NM_016179.1,1502-1520).
gcggacttcaggactacat

SEQ ID NO: 252092 - DNA, 19 bp, Homo sapiens
  siRNA target sequence for TRPC4 (NM_016179.1,1510-1528).
caggactacatccatgatt

SEQ ID NO: 252093 - DNA, 19 bp, Homo sapiens
  siRNA target sequence for TRPC4 (NM_016179.1,1521-1539).
ccatgattggtggaatcta

SEQ ID NO: 252094 - DNA, 19 bp, Homo sapiens
  siRNA target sequence for TRPC4 (NM_016179.1,1554-1572).
gaactccttatatttagca

SEQ ID NO: 252095 - DNA, 19 bp, Homo sapiens
  siRNA target sequence for TRPC4 (NM_016179.1,1559-1577).
ccttatatttagcaacaat

SEQ ID NO: 252096 - DNA, 19 bp, Homo sapiens
  siRNA target sequence for TRPC4 (NM_016179.1,1571-1589).
caacaatctccttgaaaat

SEQ ID NO: 252097 - DNA, 19 bp, Homo sapiens
  siRNA target sequence for TRPC4 (NM_016179.1,1605-1623).
gtacagtgcccttaatcca

SEQ ID NO: 252098 - DNA, 19 bp, Homo sapiens
  siRNA target sequence for TRPC4 (NM_016179.1,1614-1632).
ccttaatccacgagaatca

SEQ ID NO: 252099 - DNA, 19 bp, Homo sapiens
  siRNA target sequence for TRPC4 (NM_016179.1,1615-1633).
cttaatccacgagaatcat

SEQ ID NO: 252100 - DNA, 19 bp, Homo sapiens
  siRNA target sequence for TRPC4 (NM_016179.1,1660-1678).
gcagaggctttatttgcta

SEQ ID NO: 252101 - DNA, 19 bp, Homo sapiens
  siRNA target sequence for TRPC4 (NM_016179.1,1661-1679).
cagaggctttatttgctat

SEQ ID NO: 252102 - DNA, 19 bp, Homo sapiens
  siRNA target sequence for TRPC4 (NM_016179.1,1665-1683).
ggctttatttgctattgca

SEQ ID NO: 252103 - DNA, 19 bp, Homo sapiens
  siRNA target sequence for TRPC4 (NM_016179.1,1666-1684).
gctttatttgctattgcaa

SEQ ID NO: 252104 - DNA, 19 bp, Homo sapiens
  siRNA target sequence for TRPC4 (NM_016179.1,1701-1719).
gcgtctgatctcactgttt

SEQ ID NO: 252105 - DNA, 19 bp, Homo sapiens
  siRNA target sequence for TRPC4 (NM_016179.1,1737-1755).
gggacctctgcaaatatct

SEQ ID NO: 252106 - DNA, 19 bp, Homo sapiens
  siRNA target sequence for TRPC4 (NM_016179.1,1802-1820).
gccttgtgttgctagcatt

SEQ ID NO: 252107 - DNA, 19 bp, Homo sapiens
  siRNA target sequence for TRPC4 (NM_016179.1,1803-1821).
ccttgtgttgctagcattt

SEQ ID NO: 252108 - DNA, 19 bp, Homo sapiens
  siRNA target sequence for TRPC4 (NM_016179.1,1822-1840).
gcaaatggcctaaatcaat

SEQ ID NO: 252109 - DNA, 19 bp, Homo sapiens
  siRNA target sequence for TRPC4 (NM_016179.1,1828-1846).
ggcctaaatcaattgtact

SEQ ID NO: 252110 - DNA, 19 bp, Homo sapiens
  siRNA target sequence for TRPC4 (NM_016179.1,1848-1866).
ctattatgaagaaacgaaa

SEQ ID NO: 252111 - DNA, 19 bp, Homo sapiens
  siRNA target sequence for TRPC4 (NM_016179.1,1858-1876).
gaaacgaaagggttaacct

SEQ ID NO: 252112 - DNA, 19 bp, Homo sapiens
  siRNA target sequence for TRPC4 (NM_016179.1,1883-1901).
gcataagatgtgaaaagca

SEQ ID NO: 252113 - DNA, 19 bp, Homo sapiens
  siRNA target sequence for TRPC4 (NM_016179.1,1940-1958).
ccctgttttggtcaatatt

SEQ ID NO: 252114 - DNA, 19 bp, Homo sapiens
  siRNA target sequence for TRPC4 (NM_016179.1,1961-1979).
ggctcatcaatttatatgt

SEQ ID NO: 252115 - DNA, 19 bp, Homo sapiens
  siRNA target sequence for TRPC4 (NM_016179.1,1987-2005).
gtcaaagcacagcatgaat

SEQ ID NO: 252116 - DNA, 19 bp, Homo sapiens
  siRNA target sequence for TRPC4 (NM_016179.1,2088-2106).
gatgaataattcttaccaa

SEQ ID NO: 252117 - DNA, 19 bp, Homo sapiens
  siRNA target sequence for TRPC4 (NM_016179.1,2135-2153).
ggaaatttgcacgaacaaa

SEQ ID NO: 252118 - DNA, 19 bp, Homo sapiens
  siRNA target sequence for TRPC4 (NM_016179.1,2144-2162).
cacgaacaaagctttggat

SEQ ID NO: 252119 - DNA, 19 bp, Homo sapiens
  siRNA target sequence for TRPC4 (NM_016179.1,2192-2210).
ctactcccttcaatgtcat

SEQ ID NO: 252120 - DNA, 19 bp, Homo sapiens
  siRNA target sequence for TRPC4 (NM_016179.1,2314-2332).
cgagctgctgataacttga

SEQ ID NO: 252121 - DNA, 19 bp, Homo sapiens
  siRNA target sequence for TRPC4 (NM_016179.1,2367-2385).
cctggtgaagcgatacgtt

SEQ ID NO: 252122 - DNA, 19 bp, Homo sapiens
  siRNA target sequence for TRPC4 (NM_016179.1,2378-2396).
gatacgttgctgcaatgat

SEQ ID NO: 252123 - DNA, 19 bp, Homo sapiens
  siRNA target sequence for TRPC4 (NM_016179.1,2382-2400).
cgttgctgcaatgattaga

SEQ ID NO: 252124 - DNA, 19 bp, Homo sapiens
  siRNA target sequence for TRPC4 (NM_016179.1,2390-2408).
caatgattagagatgctaa

SEQ ID NO: 252125 - DNA, 19 bp, Homo sapiens
  siRNA target sequence for TRPC4 (NM_016179.1,2426-2444).
ccgaagagaactttaagga

SEQ ID NO: 252126 - DNA, 19 bp, Homo sapiens
  siRNA target sequence for TRPC4 (NM_016179.1,2446-2464).
ctaaagcaagacatttcta

SEQ ID NO: 252127 - DNA, 19 bp, Homo sapiens
  siRNA target sequence for TRPC4 (NM_016179.1,2462-2480).
ctagtttccgctttgaagt

SEQ ID NO: 252128 - DNA, 19 bp, Homo sapiens
  siRNA target sequence for TRPC4 (NM_016179.1,2501-2519).
gcaaactttccacaataca

SEQ ID NO: 252129 - DNA, 19 bp, Homo sapiens
  siRNA target sequence for TRPC4 (NM_016179.1,2530-2548).
gcctcgaaggagtcttcaa

SEQ ID NO: 252130 - DNA, 19 bp, Homo sapiens
  siRNA target sequence for TRPC4 (NM_016179.1,2531-2549).
cctcgaaggagtcttcaaa

SEQ ID NO: 252131 - DNA, 19 bp, Homo sapiens
  siRNA target sequence for TRPC4 (NM_016179.1,2532-2550).
ctcgaaggagtcttcaaat

SEQ ID NO: 252132 - DNA, 19 bp, Homo sapiens
  siRNA target sequence for TRPC4 (NM_016179.1,2571-2589).
gagtgatagcgaaggtaat

SEQ ID NO: 252133 - DNA, 19 bp, Homo sapiens
  siRNA target sequence for TRPC4 (NM_016179.1,2575-2593).
gatagcgaaggtaatagca

SEQ ID NO: 252134 - DNA, 19 bp, Homo sapiens
  siRNA target sequence for TRPC4 (NM_016179.1,2607-2625).
gaatttcagcctttttgat

SEQ ID NO: 252135 - DNA, 19 bp, Homo sapiens
  siRNA target sequence for TRPC4 (NM_016179.1,2657-2675).
caattgcctctgaaagaca

SEQ ID NO: 252136 - DNA, 19 bp, Homo sapiens
  siRNA target sequence for TRPC4 (NM_016179.1,2662-2680).
gcctctgaaagacataaca

SEQ ID NO: 252137 - DNA, 19 bp, Homo sapiens
  siRNA target sequence for TRPC4 (NM_016179.1,2668-2686).
gaaagacataacataagca

SEQ ID NO: 252138 - DNA, 19 bp, Homo sapiens
  siRNA target sequence for TRPC4 (NM_016179.1,2746-2764).
gtgaccgatatcaaaaact

SEQ ID NO: 252139 - DNA, 19 bp, Homo sapiens
  siRNA target sequence for TRPC4 (NM_016179.1,2748-2766).
gaccgatatcaaaaacttt

SEQ ID NO: 252140 - DNA, 19 bp, Homo sapiens
  siRNA target sequence for TRPC4 (NM_016179.1,2763-2781).
ctttgggttatttcataga

SEQ ID NO: 252141 - DNA, 19 bp, Homo sapiens
  siRNA target sequence for TRPC4 (NM_016179.1,2817-2835).
ccaaatcttctctgtttca

SEQ ID NO: 252142 - DNA, 19 bp, Homo sapiens
  siRNA target sequence for TRPC4 (NM_016179.1,2890-2908).
gaatctcgaggattagctt

SEQ ID NO: 252143 - DNA, 19 bp, Homo sapiens
  siRNA target sequence for TRPC4 (NM_016179.1,2929-2947).
cccggtctcagtgaacaat

SEQ ID NO: 252144 - DNA, 19 bp, Homo sapiens
  siRNA target sequence for TRPC4 (NM_016179.1,2931-2949).
cggtctcagtgaacaatgt

SEQ ID NO: 252145 - DNA, 19 bp, Homo sapiens
  siRNA target sequence for TRPC4 (NM_016179.1,2952-2970).
gttagtagaccatagagaa

SEQ ID NO: 252146 - DNA, 19 bp, Homo sapiens
  siRNA target sequence for TRPC4 (NM_016179.1,2959-2977).
gaccatagagaaaggaata

SEQ ID NO: 252147 - DNA, 19 bp, Homo sapiens
  siRNA target sequence for TRPC4 (NM_016179.1,2991-3009).
gttacaggtaggaaagaga

SEQ ID NO: 252148 - DNA, 19 bp, Homo sapiens
  siRNA target sequence for TRPC4 (NM_016179.1,3042-3060).
ggaggacacggttcctata

SEQ ID NO: 252149 - DNA, 19 bp, Homo sapiens
  siRNA target sequence for TRPC4 (NM_016179.1,3043-3061).
gaggacacggttcctataa

SEQ ID NO: 252150 - DNA, 19 bp, Homo sapiens
  siRNA target sequence for TRPC4 (NM_016179.1,3048-3066).
cacggttcctataatacca

SEQ ID NO: 252151 - DNA, 19 bp, Homo sapiens
  siRNA target sequence for TRPC4 (NM_016179.1,3088-3106).
gaggactctagtatagact

SEQ ID NO: 252152 - DNA, 19 bp, Homo sapiens
  siRNA target sequence for TRPC4 (NM_016179.1,3090-3108).
ggactctagtatagactat

SEQ ID NO: 252153 - DNA, 19 bp, Homo sapiens
  siRNA target sequence for TRPC4 (NM_016179.1,3095-3113).
ctagtatagactatgatct

SEQ ID NO: 252154 - DNA, 19 bp, Homo sapiens
  siRNA target sequence for TRPC4 (NM_016179.1,3098-3116).
gtatagactatgatctaaa

SEQ ID NO: 252155 - DNA, 19 bp, Homo sapiens
  siRNA target sequence for TRPC4 (NM_016179.1,3128-3146).
cagtcacccacgaagatta

SEQ ID NO: 252156 - DNA, 19 bp, Homo sapiens
  siRNA target sequence for TRPC4 (NM_016179.1,3142-3160).
gattacgtgaccacaagat

SEQ ID NO: 252157 - DNA, 19 bp, Homo sapiens
  siRNA target sequence for TRPC7 (NM_020389.1,8-26).
ggaacagcaccttcaaaaa

SEQ ID NO: 252158 - DNA, 19 bp, Homo sapiens
  siRNA target sequence for TRPC7 (NM_020389.1,79-97).
cggggtcccgcctacatgt

SEQ ID NO: 252159 - DNA, 19 bp, Homo sapiens
  siRNA target sequence for TRPC7 (NM_020389.1,80-98).
ggggtcccgcctacatgtt

SEQ ID NO: 252160 - DNA, 19 bp, Homo sapiens
  siRNA target sequence for TRPC7 (NM_020389.1,83-101).
gtcccgcctacatgttcaa

SEQ ID NO: 252161 - DNA, 19 bp, Homo sapiens
  siRNA target sequence for TRPC7 (NM_020389.1,193-211).
gagtccaagacccttaact

SEQ ID NO: 252162 - DNA, 19 bp, Homo sapiens
  siRNA target sequence for TRPC7 (NM_020389.1,197-215).
ccaagacccttaacttcaa

SEQ ID NO: 252163 - DNA, 19 bp, Homo sapiens
  siRNA target sequence for TRPC7 (NM_020389.1,438-456).
gcgcgacgacgacttctat

SEQ ID NO: 252164 - DNA, 19 bp, Homo sapiens
  siRNA target sequence for TRPC7 (NM_020389.1,651-669).
gcgcatgaacgcctacaaa

SEQ ID NO: 252165 - DNA, 19 bp, Homo sapiens
  siRNA target sequence for TRPC7 (NM_020389.1,676-694).
gcgagtgctgcctacttgt

SEQ ID NO: 252166 - DNA, 19 bp, Homo sapiens
  siRNA target sequence for TRPC7 (NM_020389.1,783-801).
cgattacaggaagttatct

SEQ ID NO: 252167 - DNA, 19 bp, Homo sapiens
  siRNA target sequence for TRPC7 (NM_020389.1,929-947).
ggatcaaactcgccattaa

SEQ ID NO: 252168 - DNA, 19 bp, Homo sapiens
  siRNA target sequence for TRPC7 (NM_020389.1,930-948).
gatcaaactcgccattaaa

SEQ ID NO: 252169 - DNA, 19 bp, Homo sapiens
  siRNA target sequence for TRPC7 (NM_020389.1,966-984).
cgttgctcatcctaactgt

SEQ ID NO: 252170 - DNA, 19 bp, Homo sapiens
  siRNA target sequence for TRPC7 (NM_020389.1,996-1014).
gcttaccatgtggtatgaa

SEQ ID NO: 252171 - DNA, 19 bp, Homo sapiens
  siRNA target sequence for TRPC7 (NM_020389.1,1025-1043).
gcttacgtcaacagtctat

SEQ ID NO: 252172 - DNA, 19 bp, Homo sapiens
  siRNA target sequence for TRPC7 (NM_020389.1,1036-1054).
cagtctatcgctgtgaaat

SEQ ID NO: 252173 - DNA, 19 bp, Homo sapiens
  siRNA target sequence for TRPC7 (NM_020389.1,1093-1111).
ctcgccatagcctattgga

SEQ ID NO: 252174 - DNA, 19 bp, Homo sapiens
  siRNA target sequence for TRPC7 (NM_020389.1,1187-1205).
caatcttcttgggattatt

SEQ ID NO: 252175 - DNA, 19 bp, Homo sapiens
  siRNA target sequence for TRPC7 (NM_020389.1,1197-1215).
gggattattagttgtgaat

SEQ ID NO: 252176 - DNA, 19 bp, Homo sapiens
  siRNA target sequence for TRPC7 (NM_020389.1,1555-1573).
ccggaagtggcatacttca

SEQ ID NO: 252177 - DNA, 19 bp, Homo sapiens
  siRNA target sequence for TRPC7 (NM_020389.1,1658-1676).
ctcgcattgcatacattct

SEQ ID NO: 252178 - DNA, 19 bp, Homo sapiens
  siRNA target sequence for TRPC7 (NM_020389.1,1717-1735).
gggagaactgtgaaagata

SEQ ID NO: 252179 - DNA, 19 bp, Homo sapiens
  siRNA target sequence for TRPC7 (NM_020389.1,1721-1739).
gaactgtgaaagatatctt

SEQ ID NO: 252180 - DNA, 19 bp, Homo sapiens
  siRNA target sequence for TRPC7 (NM_020389.1,1750-1768).
gtcattttcatcatggtat

SEQ ID NO: 252181 - DNA, 19 bp, Homo sapiens
  siRNA target sequence for TRPC7 (NM_020389.1,1835-1853).
cgtttacaacggttgaaga

SEQ ID NO: 252182 - DNA, 19 bp, Homo sapiens
  siRNA target sequence for TRPC7 (NM_020389.1,1836-1854).
gtttacaacggttgaagaa

SEQ ID NO: 252183 - DNA, 19 bp, Homo sapiens
  siRNA target sequence for TRPC7 (NM_020389.1,1875-1893).
gtccatattcggcttatct

SEQ ID NO: 252184 - DNA, 19 bp, Homo sapiens
  siRNA target sequence for TRPC7 (NM_020389.1,1877-1895).
ccatattcggcttatctga

SEQ ID NO: 252185 - DNA, 19 bp, Homo sapiens
  siRNA target sequence for TRPC7 (NM_020389.1,1950-1968).
cgttctctacggcgtttat

SEQ ID NO: 252186 - DNA, 19 bp, Homo sapiens
  siRNA target sequence for TRPC7 (NM_020389.1,1951-1969).
gttctctacggcgtttata

SEQ ID NO: 252187 - DNA, 19 bp, Homo sapiens
  siRNA target sequence for TRPC7 (NM_020389.1,1989-2007).
gttgctcaacatgctaata

SEQ ID NO: 252188 - DNA, 19 bp, Homo sapiens
  siRNA target sequence for TRPC7 (NM_020389.1,2082-2100).
ctggctgtcttactttgat

SEQ ID NO: 252189 - DNA, 19 bp, Homo sapiens
  siRNA target sequence for TRPC7 (NM_020389.1,2134-2152).
gtgccaagtcctaaatcat

SEQ ID NO: 252190 - DNA, 19 bp, Homo sapiens
  siRNA target sequence for TRPC7 (NM_020389.1,2136-2154).
gccaagtcctaaatcattt

SEQ ID NO: 252191 - DNA, 19 bp, Homo sapiens
  siRNA target sequence for TRPC7 (NM_020389.1,2233-2251).
gaaatgggcatgctgaatt

SEQ ID NO: 252192 - DNA, 19 bp, Homo sapiens
  siRNA target sequence for TRPC7 (NM_020389.1,2238-2256).
gggcatgctgaattccaaa

SEQ ID NO: 252193 - DNA, 19 bp, Homo sapiens
  siRNA target sequence for TRPC7 (NM_020389.1,2240-2258).
gcatgctgaattccaaatt

SEQ ID NO: 252194 - DNA, 19 bp, Homo sapiens
  siRNA target sequence for TRPC7 (NM_020389.1,2245-2263).
ctgaattccaaattcaaga

SEQ ID NO: 252195 - DNA, 19 bp, Homo sapiens
  siRNA target sequence for TRPC7 (NM_020389.1,2277-2295).
ggctggcatgaggaattct

SEQ ID NO: 252196 - DNA, 19 bp, Homo sapiens
  siRNA target sequence for TRPC7 (NM_020389.1,2349-2367).
catgaaacggctcataaaa

SEQ ID NO: 252197 - DNA, 19 bp, Homo sapiens
  siRNA target sequence for TRPC7 (NM_020389.1,2466-2484).
gcttcttgaggaaaaatct

SEQ ID NO: 252198 - DNA, 19 bp, Homo sapiens
  siRNA target sequence for TRPC7 (NM_020389.1,2502-2520).
ggcagacctgattcaacaa

SEQ ID NO: 252199 - DNA, 19 bp, Homo sapiens
  siRNA target sequence for TRPC7 (NM_020389.1,2504-2522).
cagacctgattcaacaact

SEQ ID NO: 252200 - DNA, 19 bp, Homo sapiens
  siRNA target sequence for TRPC7 (NM_020389.1,2521-2539).
ctcagcgagaagtttggaa

SEQ ID NO: 252201 - DNA, 19 bp, Homo sapiens
  siRNA target sequence for TRPM8 (NM_024080.3,129-147).
ggagcacagacttgtctta

SEQ ID NO: 252202 - DNA, 19 bp, Homo sapiens
  siRNA target sequence for TRPM8 (NM_024080.3,152-170).
gaaagcgacttggtgaatt

SEQ ID NO: 252203 - DNA, 19 bp, Homo sapiens
  siRNA target sequence for TRPM8 (NM_024080.3,282-300).
cccagatcaaccaaagtga

SEQ ID NO: 252204 - DNA, 19 bp, Homo sapiens
  siRNA target sequence for TRPM8 (NM_024080.3,286-304).
gatcaaccaaagtgagaaa

SEQ ID NO: 252205 - DNA, 19 bp, Homo sapiens
  siRNA target sequence for TRPM8 (NM_024080.3,316-334).
gaaacacaccaaggaattt

SEQ ID NO: 252206 - DNA, 19 bp, Homo sapiens
  siRNA target sequence for TRPM8 (NM_024080.3,409-427).
cacggacgcggaaatcctt

SEQ ID NO: 252207 - DNA, 19 bp, Homo sapiens
  siRNA target sequence for TRPM8 (NM_024080.3,445-463).
gcactggcacctgaaaaca

SEQ ID NO: 252208 - DNA, 19 bp, Homo sapiens
  siRNA target sequence for TRPM8 (NM_024080.3,518-536).
cgcatgcgcaagatcttca

SEQ ID NO: 252209 - DNA, 19 bp, Homo sapiens
  siRNA target sequence for TRPM8 (NM_024080.3,580-598).
cacgggaggcacccattat

SEQ ID NO: 252210 - DNA, 19 bp, Homo sapiens
  siRNA target sequence for TRPM8 (NM_024080.3,591-609).
cccattatggcctgatgaa

SEQ ID NO: 252211 - DNA, 19 bp, Homo sapiens
  siRNA target sequence for TRPM8 (NM_024080.3,593-611).
cattatggcctgatgaagt

SEQ ID NO: 252212 - DNA, 19 bp, Homo sapiens
  siRNA target sequence for TRPM8 (NM_024080.3,651-669).
gttcagaggagaatattgt

SEQ ID NO: 252213 - DNA, 19 bp, Homo sapiens
  siRNA target sequence for TRPM8 (NM_024080.3,730-748).
cgatgctgagggctatttt

SEQ ID NO: 252214 - DNA, 19 bp, Homo sapiens
  siRNA target sequence for TRPM8 (NM_024080.3,731-749).
gatgctgagggctattttt

SEQ ID NO: 252215 - DNA, 19 bp, Homo sapiens
  siRNA target sequence for TRPM8 (NM_024080.3,761-779).
cttatggatgacttcacaa

SEQ ID NO: 252216 - DNA, 19 bp, Homo sapiens
  siRNA target sequence for TRPM8 (NM_024080.3,777-795).
caagagatccactgtatat

SEQ ID NO: 252217 - DNA, 19 bp, Homo sapiens
  siRNA target sequence for TRPM8 (NM_024080.3,780-798).
gagatccactgtatatcct

SEQ ID NO: 252218 - DNA, 19 bp, Homo sapiens
  siRNA target sequence for TRPM8 (NM_024080.3,800-818).
gacaacaaccacacacatt

SEQ ID NO: 252219 - DNA, 19 bp, Homo sapiens
  siRNA target sequence for TRPM8 (NM_024080.3,878-896).
cagctagagaagtatatct

SEQ ID NO: 252220 - DNA, 19 bp, Homo sapiens
  siRNA target sequence for TRPM8 (NM_024080.3,899-917).
gagcgcactattcaagatt

SEQ ID NO: 252221 - DNA, 19 bp, Homo sapiens
  siRNA target sequence for TRPM8 (NM_024080.3,929-947).
ggcaagatccccattgtgt

SEQ ID NO: 252222 - DNA, 19 bp, Homo sapiens
  siRNA target sequence for TRPM8 (NM_024080.3,1159-1177).
gactgagagttggatcaaa

SEQ ID NO: 252223 - DNA, 19 bp, Homo sapiens
  siRNA target sequence for TRPM8 (NM_024080.3,1195-1213).
cgaatgttctcacctatta

SEQ ID NO: 252224 - DNA, 19 bp, Homo sapiens
  siRNA target sequence for TRPM8 (NM_024080.3,1196-1214).
gaatgttctcacctattaa

SEQ ID NO: 252225 - DNA, 19 bp, Homo sapiens
  siRNA target sequence for TRPM8 (NM_024080.3,1203-1221).
ctcacctattaacagttat

SEQ ID NO: 252226 - DNA, 19 bp, Homo sapiens
  siRNA target sequence for TRPM8 (NM_024080.3,1205-1223).
cacctattaacagttatta

SEQ ID NO: 252227 - DNA, 19 bp, Homo sapiens
  siRNA target sequence for TRPM8 (NM_024080.3,1264-1282).
ctcctacgctctatacaaa

SEQ ID NO: 252228 - DNA, 19 bp, Homo sapiens
  siRNA target sequence for TRPM8 (NM_024080.3,1296-1314).
gtgagcaagacaaggataa

SEQ ID NO: 252229 - DNA, 19 bp, Homo sapiens
  siRNA target sequence for TRPM8 (NM_024080.3,1402-1420).
gtctgctgaccttcaagaa

SEQ ID NO: 252230 - DNA, 19 bp, Homo sapiens
  siRNA target sequence for TRPM8 (NM_024080.3,1423-1441).
catgtttacggctctcata

SEQ ID NO: 252231 - DNA, 19 bp, Homo sapiens
  siRNA target sequence for TRPM8 (NM_024080.3,1483-1501).
cttgaacctacggaagttt

SEQ ID NO: 252232 - DNA, 19 bp, Homo sapiens
  siRNA target sequence for TRPM8 (NM_024080.3,1565-1583).
ctgcagatcgccaagaatt

SEQ ID NO: 252233 - DNA, 19 bp, Homo sapiens
  siRNA target sequence for TRPM8 (NM_024080.3,1568-1586).
cagatcgccaagaattcct

SEQ ID NO: 252234 - DNA, 19 bp, Homo sapiens
  siRNA target sequence for TRPM8 (NM_024080.3,1570-1588).
gatcgccaagaattcctat

SEQ ID NO: 252235 - DNA, 19 bp, Homo sapiens
  siRNA target sequence for TRPM8 (NM_024080.3,1573-1591).
cgccaagaattcctataat

SEQ ID NO: 252236 - DNA, 19 bp, Homo sapiens
  siRNA target sequence for TRPM8 (NM_024080.3,1575-1593).
ccaagaattcctataatga

SEQ ID NO: 252237 - DNA, 19 bp, Homo sapiens
  siRNA target sequence for TRPM8 (NM_024080.3,1668-1686).
gggacgagatggacataga

SEQ ID NO: 252238 - DNA, 19 bp, Homo sapiens
  siRNA target sequence for TRPM8 (NM_024080.3,1690-1708).
ccacgacgtgtctcctatt

SEQ ID NO: 252239 - DNA, 19 bp, Homo sapiens
  siRNA target sequence for TRPM8 (NM_024080.3,1691-1709).
cacgacgtgtctcctatta

SEQ ID NO: 252240 - DNA, 19 bp, Homo sapiens
  siRNA target sequence for TRPM8 (NM_024080.3,1693-1711).
cgacgtgtctcctattact

SEQ ID NO: 252241 - DNA, 19 bp, Homo sapiens
  siRNA target sequence for TRPM8 (NM_024080.3,1719-1737).
ccctgcaagctctcttcat

SEQ ID NO: 252242 - DNA, 19 bp, Homo sapiens
  siRNA target sequence for TRPM8 (NM_024080.3,1732-1750).
cttcatctgggccattctt

SEQ ID NO: 252243 - DNA, 19 bp, Homo sapiens
  siRNA target sequence for TRPM8 (NM_024080.3,1961-1979).
gaacagctgctggtctatt

SEQ ID NO: 252244 - DNA, 19 bp, Homo sapiens
  siRNA target sequence for TRPM8 (NM_024080.3,2055-2073).
ctggggtccagaattttct

SEQ ID NO: 252245 - DNA, 19 bp, Homo sapiens
  siRNA target sequence for TRPM8 (NM_024080.3,2057-2075).
ggggtccagaattttcttt

SEQ ID NO: 252246 - DNA, 19 bp, Homo sapiens
  siRNA target sequence for TRPM8 (NM_024080.3,2162-2180).
ggctttgtatcatttagga

SEQ ID NO: 252247 - DNA, 19 bp, Homo sapiens
  siRNA target sequence for TRPM8 (NM_024080.3,2256-2274).
cctggaatgtggtcttcta

SEQ ID NO: 252248 - DNA, 19 bp, Homo sapiens
  siRNA target sequence for TRPM8 (NM_024080.3,2306-2324).
ctgctcatggatttccatt

SEQ ID NO: 252249 - DNA, 19 bp, Homo sapiens
  siRNA target sequence for TRPM8 (NM_024080.3,2387-2405).
gtgagacagtggtacgtaa

SEQ ID NO: 252250 - DNA, 19 bp, Homo sapiens
  siRNA target sequence for TRPM8 (NM_024080.3,2389-2407).
gagacagtggtacgtaaat

SEQ ID NO: 252251 - DNA, 19 bp, Homo sapiens
  siRNA target sequence for TRPM8 (NM_024080.3,2401-2419).
cgtaaatggggtgaattat

SEQ ID NO: 252252 - DNA, 19 bp, Homo sapiens
  siRNA target sequence for TRPM8 (NM_024080.3,2487-2505).
ggctccactcttctaataa

SEQ ID NO: 252253 - DNA, 19 bp, Homo sapiens
  siRNA target sequence for TRPM8 (NM_024080.3,2596-2614).
cttaggacccaagattata

SEQ ID NO: 252254 - DNA, 19 bp, Homo sapiens
  siRNA target sequence for TRPM8 (NM_024080.3,2601-2619).
gacccaagattataatgct

SEQ ID NO: 252255 - DNA, 19 bp, Homo sapiens
  siRNA target sequence for TRPM8 (NM_024080.3,2625-2643).
ggatgctgatcgatgtgtt

SEQ ID NO: 252256 - DNA, 19 bp, Homo sapiens
  siRNA target sequence for TRPM8 (NM_024080.3,2798-2816).
gatggtaccacgtatgact

SEQ ID NO: 252257 - DNA, 19 bp, Homo sapiens
  siRNA target sequence for TRPM8 (NM_024080.3,2912-2930).
cccctggtgtgcatctaca

SEQ ID NO: 252258 - DNA, 19 bp, Homo sapiens
  siRNA target sequence for TRPM8 (NM_024080.3,2917-2935).
ggtgtgcatctacatgtta

SEQ ID NO: 252259 - DNA, 19 bp, Homo sapiens
  siRNA target sequence for TRPM8 (NM_024080.3,2918-2936).
gtgtgcatctacatgttat

SEQ ID NO: 252260 - DNA, 19 bp, Homo sapiens
  siRNA target sequence for TRPM8 (NM_024080.3,2994-3012).
ccgtccaggagaacaatga

SEQ ID NO: 252261 - DNA, 19 bp, Homo sapiens
  siRNA target sequence for TRPM8 (NM_024080.3,3201-3219).
catgggagggtgtcatgaa

SEQ ID NO: 252262 - DNA, 19 bp, Homo sapiens
  siRNA target sequence for TRPM8 (NM_024080.3,3209-3227).
ggtgtcatgaaggaaaact

SEQ ID NO: 252263 - DNA, 19 bp, Homo sapiens
  siRNA target sequence for TRPM8 (NM_024080.3,3210-3228).
gtgtcatgaaggaaaacta

SEQ ID NO: 252264 - DNA, 19 bp, Homo sapiens
  siRNA target sequence for TRPM8 (NM_024080.3,3268-3286).
ggaaatgaggcatcgattt

SEQ ID NO: 252265 - DNA, 19 bp, Homo sapiens
  siRNA target sequence for TRPM8 (NM_024080.3,3269-3287).
gaaatgaggcatcgattta

SEQ ID NO: 252266 - DNA, 19 bp, Homo sapiens
  siRNA target sequence for TRPM8 (NM_024080.3,3274-3292).
gaggcatcgatttagacaa

SEQ ID NO: 252267 - DNA, 19 bp, Homo sapiens
  siRNA target sequence for TRPV2 (NM_016113.3,511-529).
gaaattcgcccctcagata

SEQ ID NO: 252268 - DNA, 19 bp, Homo sapiens
  siRNA target sequence for TRPV2 (NM_016113.3,564-582).
ccagtcagccggatccaaa

SEQ ID NO: 252269 - DNA, 19 bp, Homo sapiens
  siRNA target sequence for TRPV2 (NM_016113.3,573-591).
cggatccaaaccgatttga

SEQ ID NO: 252270 - DNA, 19 bp, Homo sapiens
  siRNA target sequence for TRPV2 (NM_016113.3,592-610).
ccgagatcggctcttcaat

SEQ ID NO: 252271 - DNA, 19 bp, Homo sapiens
  siRNA target sequence for TRPV2 (NM_016113.3,680-698).
ctcaccgactcggaataca

SEQ ID NO: 252272 - DNA, 19 bp, Homo sapiens
  siRNA target sequence for TRPV2 (NM_016113.3,682-700).
caccgactcggaatacaca

SEQ ID NO: 252273 - DNA, 19 bp, Homo sapiens
  siRNA target sequence for TRPV2 (NM_016113.3,968-986).
ggccaagggacttgctttt

SEQ ID NO: 252274 - DNA, 19 bp, Homo sapiens
  siRNA target sequence for TRPV2 (NM_016113.3,969-987).
gccaagggacttgctttta

SEQ ID NO: 252275 - DNA, 19 bp, Homo sapiens
  siRNA target sequence for TRPV2 (NM_016113.3,970-988).
ccaagggacttgcttttat

SEQ ID NO: 252276 - DNA, 19 bp, Homo sapiens
  siRNA target sequence for TRPV2 (NM_016113.3,993-1011).
gtgagctacccctctcttt

SEQ ID NO: 252277 - DNA, 19 bp, Homo sapiens
  siRNA target sequence for TRPV2 (NM_016113.3,1115-1133).
catgccctagtgatgatct

SEQ ID NO: 252278 - DNA, 19 bp, Homo sapiens
  siRNA target sequence for TRPV2 (NM_016113.3,1162-1180).
ggtgaccagcatgtatgat

SEQ ID NO: 252279 - DNA, 19 bp, Homo sapiens
  siRNA target sequence for TRPV2 (NM_016113.3,1280-1298).
ggcaagatcgagattttca

SEQ ID NO: 252280 - DNA, 19 bp, Homo sapiens
  siRNA target sequence for TRPV2 (NM_016113.3,1332-1350).
gccacctttcccgaaagtt

SEQ ID NO: 252281 - DNA, 19 bp, Homo sapiens
  siRNA target sequence for TRPV2 (NM_016113.3,1432-1450).
ggagatcattgcctttcat

SEQ ID NO: 252282 - DNA, 19 bp, Homo sapiens
  siRNA target sequence for TRPV2 (NM_016113.3,1433-1451).
gagatcattgcctttcatt

SEQ ID NO: 252283 - DNA, 19 bp, Homo sapiens
  siRNA target sequence for TRPV2 (NM_016113.3,1532-1550).
cccaagttcttcttaaact

SEQ ID NO: 252284 - DNA, 19 bp, Homo sapiens
  siRNA target sequence for TRPV2 (NM_016113.3,1712-1730).
ggccagctgtggtacttct

SEQ ID NO: 252285 - DNA, 19 bp, Homo sapiens
  siRNA target sequence for TRPV2 (NM_016113.3,1747-1765).
catctggatctcgttcata

SEQ ID NO: 252286 - DNA, 19 bp, Homo sapiens
  siRNA target sequence for TRPV2 (NM_016113.3,1759-1777).
gttcatagacagctacttt

SEQ ID NO: 252287 - DNA, 19 bp, Homo sapiens
  siRNA target sequence for TRPV2 (NM_016113.3,1884-1902).
gctggctgaacctgcttta

SEQ ID NO: 252288 - DNA, 19 bp, Homo sapiens
  siRNA target sequence for TRPV2 (NM_016113.3,1887-1905).
ggctgaacctgctttacta

SEQ ID NO: 252289 - DNA, 19 bp, Homo sapiens
  siRNA target sequence for TRPV2 (NM_016113.3,1888-1906).
gctgaacctgctttactat

SEQ ID NO: 252290 - DNA, 19 bp, Homo sapiens
  siRNA target sequence for TRPV2 (NM_016113.3,1889-1907).
ctgaacctgctttactata

SEQ ID NO: 252291 - DNA, 19 bp, Homo sapiens
  siRNA target sequence for TRPV2 (NM_016113.3,1891-1909).
gaacctgctttactataca

SEQ ID NO: 252292 - DNA, 19 bp, Homo sapiens
  siRNA target sequence for TRPV2 (NM_016113.3,1976-1994).
cgcttccttctgatctact

SEQ ID NO: 252293 - DNA, 19 bp, Homo sapiens
  siRNA target sequence for TRPV2 (NM_016113.3,1982-2000).
cttctgatctacttagtct

SEQ ID NO: 252294 - DNA, 19 bp, Homo sapiens
  siRNA target sequence for TRPV2 (NM_016113.3,2616-2634).
cctctgaggaaaactatgt

SEQ ID NO: 252295 - DNA, 19 bp, Homo sapiens
  siRNA target sequence for TRPV3 (NM_145068.2,601-619).
gacagagaccccatccaat

SEQ ID NO: 252296 - DNA, 19 bp, Homo sapiens
  siRNA target sequence for TRPV3 (NM_145068.2,1085-1103).
caacacgaaggcttctact

SEQ ID NO: 252297 - DNA, 19 bp, Homo sapiens
  siRNA target sequence for TRPV3 (NM_145068.2,1199-1217).
gactcacgaggcaacaaca

SEQ ID NO: 252298 - DNA, 19 bp, Homo sapiens
  siRNA target sequence for TRPV3 (NM_145068.2,1236-1254).
ccgtggccgaggacttcaa

SEQ ID NO: 252299 - DNA, 19 bp, Homo sapiens
  siRNA target sequence for TRPV3 (NM_145068.2,1252-1270).
caagacgcagaatgacttt

SEQ ID NO: 252300 - DNA, 19 bp, Homo sapiens
  siRNA target sequence for TRPV3 (NM_145068.2,1257-1275).
cgcagaatgactttgtgaa

SEQ ID NO: 252301 - DNA, 19 bp, Homo sapiens
  siRNA target sequence for TRPV3 (NM_145068.2,1382-1400).
gcggagatcctgaagtaca

SEQ ID NO: 252302 - DNA, 19 bp, Homo sapiens
  siRNA target sequence for TRPV3 (NM_145068.2,1880-1898).
gcctggttccactttgtct

SEQ ID NO: 252303 - DNA, 19 bp, Homo sapiens
  siRNA target sequence for TRPV3 (NM_145068.2,1882-1900).
ctggttccactttgtcttt

SEQ ID NO: 252304 - DNA, 19 bp, Homo sapiens
  siRNA target sequence for TRPV3 (NM_145068.2,2000-2018).
gcgaacatgctctactata

SEQ ID NO: 252305 - DNA, 19 bp, Homo sapiens
  siRNA target sequence for TRPV3 (NM_145068.2,2030-2048).
cagtccatgggcatgtaca

SEQ ID NO: 252306 - DNA, 19 bp, Homo sapiens
  siRNA target sequence for TRPV3 (NM_145068.2,2266-2284).
caagtatcccattctcttt

SEQ ID NO: 252307 - DNA, 19 bp, Homo sapiens
  siRNA target sequence for TRPV3 (NM_145068.2,2553-2571).
cgcacgtctccttccttaa

SEQ ID NO: 252308 - DNA, 19 bp, Homo sapiens
  siRNA target sequence for TRPV3 (NM_145068.2,2557-2575).
cgtctccttccttaacgaa

SEQ ID NO: 252309 - DNA, 19 bp, Homo sapiens
  siRNA target sequence for TRPV3 (NM_145068.2,2584-2602).
gcctgtaagacgaacagat

SEQ ID NO: 252310 - DNA, 19 bp, Homo sapiens
  siRNA target sequence for TRPV3 (NM_145068.2,2598-2616).
cagatttcaacaaaatcca

SEQ ID NO: 252311 - DNA, 19 bp, Homo sapiens
  siRNA target sequence for TRPV3 (NM_145068.2,2635-2653).
cagcaaaaccactctcaat

SEQ ID NO: 252312 - DNA, 19 bp, Homo sapiens
  siRNA target sequence for TRPV4 (NM_021625.3,191-209).
ctccctggccaatctgttt

SEQ ID NO: 252313 - DNA, 19 bp, Homo sapiens
  siRNA target sequence for TRPV4 (NM_021625.3,271-289).
gcgatgggcgaccaaatct

SEQ ID NO: 252314 - DNA, 19 bp, Homo sapiens
  siRNA target sequence for TRPV4 (NM_021625.3,282-300).
ccaaatctgcgcatgaagt

SEQ ID NO: 252315 - DNA, 19 bp, Homo sapiens
  siRNA target sequence for TRPV4 (NM_021625.3,283-301).
caaatctgcgcatgaagtt

SEQ ID NO: 252316 - DNA, 19 bp, Homo sapiens
  siRNA target sequence for TRPV4 (NM_021625.3,344-362).
gctggagtccaccctatat

SEQ ID NO: 252317 - DNA, 19 bp, Homo sapiens
  siRNA target sequence for TRPV4 (NM_021625.3,348-366).
gagtccaccctatatgagt

SEQ ID NO: 252318 - DNA, 19 bp, Homo sapiens
  siRNA target sequence for TRPV4 (NM_021625.3,457-475).
ggaggaagaagatcataga

SEQ ID NO: 252319 - DNA, 19 bp, Homo sapiens
  siRNA target sequence for TRPV4 (NM_021625.3,541-559).
ggcctatcctctttgacat

SEQ ID NO: 252320 - DNA, 19 bp, Homo sapiens
  siRNA target sequence for TRPV4 (NM_021625.3,617-635).
caagaaacgcctaactgat

SEQ ID NO: 252321 - DNA, 19 bp, Homo sapiens
  siRNA target sequence for TRPV4 (NM_021625.3,775-793).
cgcccttccgtgacatcta

SEQ ID NO: 252322 - DNA, 19 bp, Homo sapiens
  siRNA target sequence for TRPV4 (NM_021625.3,828-846).
gagcgtcgctgcaaacact

SEQ ID NO: 252323 - DNA, 19 bp, Homo sapiens
  siRNA target sequence for TRPV4 (NM_021625.3,1094-1112).
ccgtgagaacaccaagttt

SEQ ID NO: 252324 - DNA, 19 bp, Homo sapiens
  siRNA target sequence for TRPV4 (NM_021625.3,1669-1687).
ccaacatcaaagacttgtt

SEQ ID NO: 252325 - DNA, 19 bp, Homo sapiens
  siRNA target sequence for TRPV4 (NM_021625.3,1846-1864).
ggatgaatgccctttactt

SEQ ID NO: 252326 - DNA, 19 bp, Homo sapiens
  siRNA target sequence for TRPV4 (NM_021625.3,1881-1899).
ctgacggggacctatagca

SEQ ID NO: 252327 - DNA, 19 bp, Homo sapiens
  siRNA target sequence for TRPV4 (NM_021625.3,1888-1906).
ggacctatagcatcatgat

SEQ ID NO: 252328 - DNA, 19 bp, Homo sapiens
  siRNA target sequence for TRPV5 (NM_019841.3,466-484).
gcagcagaagaggattcta

SEQ ID NO: 252329 - DNA, 19 bp, Homo sapiens
  siRNA target sequence for TRPV5 (NM_019841.3,497-515).
cttcgagcatccaaggaaa

SEQ ID NO: 252330 - DNA, 19 bp, Homo sapiens
  siRNA target sequence for TRPV5 (NM_019841.3,556-574).
ctgtgacgttcgacaaaga

SEQ ID NO: 252331 - DNA, 19 bp, Homo sapiens
  siRNA target sequence for TRPV5 (NM_019841.3,1232-1250).
cttgtggtctcctctgata

SEQ ID NO: 252332 - DNA, 19 bp, Homo sapiens
  siRNA target sequence for TRPV5 (NM_019841.3,1254-1272).
gagaggctcgccaaattct

SEQ ID NO: 252333 - DNA, 19 bp, Homo sapiens
  siRNA target sequence for TRPV5 (NM_019841.3,1361-1379).
ctctacatgatctgcttta

SEQ ID NO: 252334 - DNA, 19 bp, Homo sapiens
  siRNA target sequence for TRPV5 (NM_019841.3,1415-1433).
ggtggcaaccgcactcatt

SEQ ID NO: 252335 - DNA, 19 bp, Homo sapiens
  siRNA target sequence for TRPV5 (NM_019841.3,1477-1495).
ctatgagacacgtgaagat

SEQ ID NO: 252336 - DNA, 19 bp, Homo sapiens
  siRNA target sequence for TRPV5 (NM_019841.3,1583-1601).
gcctctcgctattttggaa

SEQ ID NO: 252337 - DNA, 19 bp, Homo sapiens
  siRNA target sequence for TRPV5 (NM_019841.3,1584-1602).
cctctcgctattttggaaa

SEQ ID NO: 252338 - DNA, 19 bp, Homo sapiens
  siRNA target sequence for TRPV5 (NM_019841.3,1734-1752).
ggtgcagtgtcatgtattt

SEQ ID NO: 252339 - DNA, 19 bp, Homo sapiens
  siRNA target sequence for TRPV5 (NM_019841.3,1738-1756).
cagtgtcatgtatttcact

SEQ ID NO: 252340 - DNA, 19 bp, Homo sapiens
  siRNA target sequence for TRPV5 (NM_019841.3,1862-1880).
gcctccgcgttctatatca

SEQ ID NO: 252341 - DNA, 19 bp, Homo sapiens
  siRNA target sequence for TRPV5 (NM_019841.3,1863-1881).
cctccgcgttctatatcat

SEQ ID NO: 252342 - DNA, 19 bp, Homo sapiens
  siRNA target sequence for TRPV5 (NM_019841.3,1864-1882).
ctccgcgttctatatcatt

SEQ ID NO: 252343 - DNA, 19 bp, Homo sapiens
  siRNA target sequence for TRPV5 (NM_019841.3,1866-1884).
ccgcgttctatatcatttt

SEQ ID NO: 252344 - DNA, 19 bp, Homo sapiens
  siRNA target sequence for TRPV5 (NM_019841.3,1905-1923).
gtctggggcaattctatga

SEQ ID NO: 252345 - DNA, 19 bp, Homo sapiens
  siRNA target sequence for TRPV5 (NM_019841.3,2051-2069).
ctgctcatgctcaacttgt

SEQ ID NO: 252346 - DNA, 19 bp, Homo sapiens
  siRNA target sequence for TRPV5 (NM_019841.3,2054-2072).
ctcatgctcaacttgttca

SEQ ID NO: 252347 - DNA, 19 bp, Homo sapiens
  siRNA target sequence for TRPV5 (NM_019841.3,2244-2262).
gggttgagaaccacaatga

SEQ ID NO: 252348 - DNA, 19 bp, Homo sapiens
  siRNA target sequence for TRPV5 (NM_019841.3,2251-2269).
gaaccacaatgatcagaat

SEQ ID NO: 252349 - DNA, 19 bp, Homo sapiens
  siRNA target sequence for TRPV5 (NM_019841.3,2286-2304).
gctatgtggaagtgttcaa

SEQ ID NO: 252350 - DNA, 19 bp, Homo sapiens
  siRNA target sequence for TRPV5 (NM_019841.3,2453-2471).
gagatccttcgtcaaaaca

SEQ ID NO: 252351 - DNA, 19 bp, Homo sapiens
  siRNA target sequence for TRPV5 (NM_019841.3,2516-2534).
ggagaggaggtctaccatt

SEQ ID NO: 252352 - DNA, 19 bp, Homo sapiens
  siRNA target sequence for TRPV5 (NM_019841.3,2517-2535).
gagaggaggtctaccattt

SEQ ID NO: 252353 - DNA, 19 bp, Homo sapiens
  siRNA target sequence for UNC13B (NM_006377.2,231-249).
gctctgcgtgcgcgttaaa

SEQ ID NO: 252354 - DNA, 19 bp, Homo sapiens
  siRNA target sequence for UNC13B (NM_006377.2,232-250).
ctctgcgtgcgcgttaaaa

SEQ ID NO: 252355 - DNA, 19 bp, Homo sapiens
  siRNA target sequence for UNC13B (NM_006377.2,242-260).
gcgttaaaagggccaaatt

SEQ ID NO: 252356 - DNA, 19 bp, Homo sapiens
  siRNA target sequence for UNC13B (NM_006377.2,265-283).
ggttcaccagataaattta

SEQ ID NO: 252357 - DNA, 19 bp, Homo sapiens
  siRNA target sequence for UNC13B (NM_006377.2,459-477).
gattgcgctgaagactatt

SEQ ID NO: 252358 - DNA, 19 bp, Homo sapiens
  siRNA target sequence for UNC13B (NM_006377.2,503-521).
gggaatggtccacattaga

SEQ ID NO: 252359 - DNA, 19 bp, Homo sapiens
  siRNA target sequence for UNC13B (NM_006377.2,524-542).
cagagacgttaatgaaaga

SEQ ID NO: 252360 - DNA, 19 bp, Homo sapiens
  siRNA target sequence for UNC13B (NM_006377.2,572-590).
ctcctcataaaattttgct

SEQ ID NO: 252361 - DNA, 19 bp, Homo sapiens
  siRNA target sequence for UNC13B (NM_006377.2,636-654).
cagatattggacctacaaa

SEQ ID NO: 252362 - DNA, 19 bp, Homo sapiens
  siRNA target sequence for UNC13B (NM_006377.2,647-665).
cctacaaatgggagcaaat

SEQ ID NO: 252363 - DNA, 19 bp, Homo sapiens
  siRNA target sequence for UNC13B (NM_006377.2,671-689).
ccttgggagctgacaatga

SEQ ID NO: 252364 - DNA, 19 bp, Homo sapiens
  siRNA target sequence for UNC13B (NM_006377.2,675-693).
gggagctgacaatgagtat

SEQ ID NO: 252365 - DNA, 19 bp, Homo sapiens
  siRNA target sequence for UNC13B (NM_006377.2,676-694).
ggagctgacaatgagtatt

SEQ ID NO: 252366 - DNA, 19 bp, Homo sapiens
  siRNA target sequence for UNC13B (NM_006377.2,679-697).
gctgacaatgagtattcta

SEQ ID NO: 252367 - DNA, 19 bp, Homo sapiens
  siRNA target sequence for UNC13B (NM_006377.2,684-702).
caatgagtattctagtcaa

SEQ ID NO: 252368 - DNA, 19 bp, Homo sapiens
  siRNA target sequence for UNC13B (NM_006377.2,771-789).
cgtcgatgaccgagatagt

SEQ ID NO: 252369 - DNA, 19 bp, Homo sapiens
  siRNA target sequence for UNC13B (NM_006377.2,914-932).
gttcccgggactcttgtaa

SEQ ID NO: 252370 - DNA, 19 bp, Homo sapiens
  siRNA target sequence for UNC13B (NM_006377.2,917-935).
cccgggactcttgtaatga

SEQ ID NO: 252371 - DNA, 19 bp, Homo sapiens
  siRNA target sequence for UNC13B (NM_006377.2,919-937).
cgggactcttgtaatgact

SEQ ID NO: 252372 - DNA, 19 bp, Homo sapiens
  siRNA target sequence for UNC13B (NM_006377.2,1002-1020).
gtatggctcctcctgtaat

SEQ ID NO: 252373 - DNA, 19 bp, Homo sapiens
  siRNA target sequence for UNC13B (NM_006377.2,1006-1024).
ggctcctcctgtaatgtga

SEQ ID NO: 252374 - DNA, 19 bp, Homo sapiens
  siRNA target sequence for UNC13B (NM_006377.2,1035-1053).
ctctcagctaagtgaacta

SEQ ID NO: 252375 - DNA, 19 bp, Homo sapiens
  siRNA target sequence for UNC13B (NM_006377.2,1037-1055).
ctcagctaagtgaactaga

SEQ ID NO: 252376 - DNA, 19 bp, Homo sapiens
  siRNA target sequence for UNC13B (NM_006377.2,1046-1064).
gtgaactagaccagtatca

SEQ ID NO: 252377 - DNA, 19 bp, Homo sapiens
  siRNA target sequence for UNC13B (NM_006377.2,1087-1105).
gagacggactcgattcatt

SEQ ID NO: 252378 - DNA, 19 bp, Homo sapiens
  siRNA target sequence for UNC13B (NM_006377.2,1349-1367).
ggatccgagcagttaccaa

SEQ ID NO: 252379 - DNA, 19 bp, Homo sapiens
  siRNA target sequence for UNC13B (NM_006377.2,1472-1490).
cagatttacgcagaaagaa

SEQ ID NO: 252380 - DNA, 19 bp, Homo sapiens
  siRNA target sequence for UNC13B (NM_006377.2,1531-1549).
cggaaggcaggaatcactt

SEQ ID NO: 252381 - DNA, 19 bp, Homo sapiens
  siRNA target sequence for UNC13B (NM_006377.2,1557-1575).
ggctacacgcacttctctt

SEQ ID NO: 252382 - DNA, 19 bp, Homo sapiens
  siRNA target sequence for UNC13B (NM_006377.2,1558-1576).
gctacacgcacttctctta

SEQ ID NO: 252383 - DNA, 19 bp, Homo sapiens
  siRNA target sequence for UNC13B (NM_006377.2,1559-1577).
ctacacgcacttctcttaa

SEQ ID NO: 252384 - DNA, 19 bp, Homo sapiens
  siRNA target sequence for UNC13B (NM_006377.2,1562-1580).
cacgcacttctcttaagga

SEQ ID NO: 252385 - DNA, 19 bp, Homo sapiens
  siRNA target sequence for UNC13B (NM_006377.2,1588-1606).
ctgaaatcccacgtgtata

SEQ ID NO: 252386 - DNA, 19 bp, Homo sapiens
  siRNA target sequence for UNC13B (NM_006377.2,1640-1658).
cgtgcaccactcctcataa

SEQ ID NO: 252387 - DNA, 19 bp, Homo sapiens
  siRNA target sequence for UNC13B (NM_006377.2,1643-1661).
gcaccactcctcataactt
